United States Patent Application Publication US 2022/0175960 A1 - sequence listing, part 3

SEQ ID NO: 72109 - DNA, 26 bp, Homo sapiens
cagttaaagttgatggcatagatgcc

SEQ ID NO: 72110 - DNA, 26 bp, Homo sapiens
agttaaagttgatggcatagatgcct

SEQ ID NO: 72111 - DNA, 26 bp, Homo sapiens
gttaaagttgatggcatagatgcctt

SEQ ID NO: 72112 - DNA, 26 bp, Homo sapiens
ttaaagttgatggcatagatgccttt

SEQ ID NO: 72113 - DNA, 26 bp, Homo sapiens
taaagttgatggcatagatgcctttt

SEQ ID NO: 72114 - DNA, 26 bp, Homo sapiens
aaagttgatggcatagatgcctttta

SEQ ID NO: 72115 - DNA, 26 bp, Homo sapiens
aagttgatggcatagatgccttttag

SEQ ID NO: 72116 - DNA, 26 bp, Homo sapiens
agttgatggcatagatgccttttagc

SEQ ID NO: 72117 - DNA, 26 bp, Homo sapiens
gttgatggcatagatgccttttagca

SEQ ID NO: 72118 - DNA, 26 bp, Homo sapiens
ttgatggcatagatgccttttagcaa

SEQ ID NO: 72119 - DNA, 26 bp, Homo sapiens
tgatggcatagatgccttttagcaac

SEQ ID NO: 72120 - DNA, 26 bp, Homo sapiens
gatggcatagatgccttttagcaact

SEQ ID NO: 72121 - DNA, 26 bp, Homo sapiens
atggcatagatgccttttagcaactt

SEQ ID NO: 72122 - DNA, 26 bp, Homo sapiens
tggcatagatgccttttagcaacttg

SEQ ID NO: 72123 - DNA, 26 bp, Homo sapiens
ggcatagatgccttttagcaacttgc

SEQ ID NO: 72124 - DNA, 26 bp, Homo sapiens
gcatagatgccttttagcaacttgca

SEQ ID NO: 72125 - DNA, 26 bp, Homo sapiens
catagatgccttttagcaacttgcac

SEQ ID NO: 72126 - DNA, 26 bp, Homo sapiens
atagatgccttttagcaacttgcacg

SEQ ID NO: 72127 - DNA, 26 bp, Homo sapiens
tagatgccttttagcaacttgcacgt

SEQ ID NO: 72128 - DNA, 26 bp, Homo sapiens
agatgccttttagcaacttgcacgtg

SEQ ID NO: 72129 - DNA, 26 bp, Homo sapiens
gatgccttttagcaacttgcacgtgg

SEQ ID NO: 72130 - DNA, 26 bp, Homo sapiens
atgccttttagcaacttgcacgtggc

SEQ ID NO: 72131 - DNA, 26 bp, Homo sapiens
tgccttttagcaacttgcacgtggca

SEQ ID NO: 72132 - DNA, 26 bp, Homo sapiens
gccttttagcaacttgcacgtggcat

SEQ ID NO: 72133 - DNA, 26 bp, Homo sapiens
ccttttagcaacttgcacgtggcatt

SEQ ID NO: 72134 - DNA, 26 bp, Homo sapiens
cttttagcaacttgcacgtggcattg

SEQ ID NO: 72135 - DNA, 26 bp, Homo sapiens
ttttagcaacttgcacgtggcattgc

SEQ ID NO: 72136 - DNA, 26 bp, Homo sapiens
tttagcaacttgcacgtggcattgct

SEQ ID NO: 72137 - DNA, 26 bp, Homo sapiens
ttagcaacttgcacgtggcattgctg

SEQ ID NO: 72138 - DNA, 26 bp, Homo sapiens
tagcaacttgcacgtggcattgctga

SEQ ID NO: 72139 - DNA, 26 bp, Homo sapiens
agcaacttgcacgtggcattgctgaa

SEQ ID NO: 72140 - DNA, 26 bp, Homo sapiens
gcaacttgcacgtggcattgctgaaa

SEQ ID NO: 72141 - DNA, 26 bp, Homo sapiens
caacttgcacgtggcattgctgaaaa

SEQ ID NO: 72142 - DNA, 26 bp, Homo sapiens
aacttgcacgtggcattgctgaaaac

SEQ ID NO: 72143 - DNA, 26 bp, Homo sapiens
acttgcacgtggcattgctgaaaacc

SEQ ID NO: 72144 - DNA, 26 bp, Homo sapiens
cttgcacgtggcattgctgaaaaccc

SEQ ID NO: 72145 - DNA, 26 bp, Homo sapiens
ttgcacgtggcattgctgaaaaccca

SEQ ID NO: 72146 - DNA, 26 bp, Homo sapiens
tgcacgtggcattgctgaaaacccac

SEQ ID NO: 72147 - DNA, 26 bp, Homo sapiens
gcacgtggcattgctgaaaacccacg

SEQ ID NO: 72148 - DNA, 26 bp, Homo sapiens
cacgtggcattgctgaaaacccacgc

SEQ ID NO: 72149 - DNA, 26 bp, Homo sapiens
acgtggcattgctgaaaacccacgca

SEQ ID NO: 72150 - DNA, 26 bp, Homo sapiens
cgtggcattgctgaaaacccacgcac

SEQ ID NO: 72151 - DNA, 26 bp, Homo sapiens
gtggcattgctgaaaacccacgcacc

SEQ ID NO: 72152 - DNA, 26 bp, Homo sapiens
tggcattgctgaaaacccacgcaccg

SEQ ID NO: 72153 - DNA, 26 bp, Homo sapiens
ggcattgctgaaaacccacgcaccgg

SEQ ID NO: 72154 - DNA, 26 bp, Homo sapiens
gcattgctgaaaacccacgcaccggt

SEQ ID NO: 72155 - DNA, 26 bp, Homo sapiens
cattgctgaaaacccacgcaccggtg

SEQ ID NO: 72156 - DNA, 26 bp, Homo sapiens
attgctgaaaacccacgcaccggtgg

SEQ ID NO: 72157 - DNA, 26 bp, Homo sapiens
ttgctgaaaacccacgcaccggtggc

SEQ ID NO: 72158 - DNA, 26 bp, Homo sapiens
tgctgaaaacccacgcaccggtggca

SEQ ID NO: 72159 - DNA, 26 bp, Homo sapiens
gctgaaaacccacgcaccggtggcat

SEQ ID NO: 72160 - DNA, 26 bp, Homo sapiens
ctgaaaacccacgcaccggtggcatg

SEQ ID NO: 72161 - DNA, 26 bp, Homo sapiens
tgaaaacccacgcaccggtggcatga

SEQ ID NO: 72162 - DNA, 26 bp, Homo sapiens
gaaaacccacgcaccggtggcatgac

SEQ ID NO: 72163 - DNA, 26 bp, Homo sapiens
aaaacccacgcaccggtggcatgact

SEQ ID NO: 72164 - DNA, 26 bp, Homo sapiens
aaacccacgcaccggtggcatgactc

SEQ ID NO: 72165 - DNA, 26 bp, Homo sapiens
aacccacgcaccggtggcatgactca

SEQ ID NO: 72166 - DNA, 26 bp, Homo sapiens
acccacgcaccggtggcatgactcac

SEQ ID NO: 72167 - DNA, 26 bp, Homo sapiens
cccacgcaccggtggcatgactcact

SEQ ID NO: 72168 - DNA, 26 bp, Homo sapiens
ccacgcaccggtggcatgactcactg

SEQ ID NO: 72169 - DNA, 26 bp, Homo sapiens
cacgcaccggtggcatgactcactgc

SEQ ID NO: 72170 - DNA, 26 bp, Homo sapiens
acgcaccggtggcatgactcactgcc

SEQ ID NO: 72171 - DNA, 26 bp, Homo sapiens
cgcaccggtggcatgactcactgccc

SEQ ID NO: 72172 - DNA, 26 bp, Homo sapiens
gcaccggtggcatgactcactgccca

SEQ ID NO: 72173 - DNA, 26 bp, Homo sapiens
caccggtggcatgactcactgcccag

SEQ ID NO: 72174 - DNA, 26 bp, Homo sapiens
accggtggcatgactcactgcccaga

SEQ ID NO: 72175 - DNA, 26 bp, Homo sapiens
ccggtggcatgactcactgcccagaa

SEQ ID NO: 72176 - DNA, 26 bp, Homo sapiens
cggtggcatgactcactgcccagaat

SEQ ID NO: 72177 - DNA, 26 bp, Homo sapiens
ggtggcatgactcactgcccagaatg

SEQ ID NO: 72178 - DNA, 26 bp, Homo sapiens
gtggcatgactcactgcccagaatgg

SEQ ID NO: 72179 - DNA, 26 bp, Homo sapiens
tggcatgactcactgcccagaatggg

SEQ ID NO: 72180 - DNA, 26 bp, Homo sapiens
ggcatgactcactgcccagaatggga

SEQ ID NO: 72181 - DNA, 26 bp, Homo sapiens
gcatgactcactgcccagaatgggag

SEQ ID NO: 72182 - DNA, 26 bp, Homo sapiens
catgactcactgcccagaatgggaga

SEQ ID NO: 72183 - DNA, 26 bp, Homo sapiens
atgactcactgcccagaatgggagag

SEQ ID NO: 72184 - DNA, 26 bp, Homo sapiens
tgactcactgcccagaatgggagagt

SEQ ID NO: 72185 - DNA, 26 bp, Homo sapiens
gactcactgcccagaatgggagagta

SEQ ID NO: 72186 - DNA, 26 bp, Homo sapiens
actcactgcccagaatgggagagtaa

SEQ ID NO: 72187 - DNA, 26 bp, Homo sapiens
ctcactgcccagaatgggagagtaag

SEQ ID NO: 72188 - DNA, 26 bp, Homo sapiens
tcactgcccagaatgggagagtaaga

SEQ ID NO: 72189 - DNA, 26 bp, Homo sapiens
cactgcccagaatgggagagtaagaa

SEQ ID NO: 72190 - DNA, 26 bp, Homo sapiens
actgcccagaatgggagagtaagaac

SEQ ID NO: 72191 - DNA, 26 bp, Homo sapiens
ctgcccagaatgggagagtaagaaca

SEQ ID NO: 72192 - DNA, 26 bp, Homo sapiens
tgcccagaatgggagagtaagaacaa

SEQ ID NO: 72193 - DNA, 26 bp, Homo sapiens
gcccagaatgggagagtaagaacaaa

SEQ ID NO: 72194 - DNA, 26 bp, Homo sapiens
cccagaatgggagagtaagaacaaag

SEQ ID NO: 72195 - DNA, 26 bp, Homo sapiens
ccagaatgggagagtaagaacaaaga

SEQ ID NO: 72196 - DNA, 26 bp, Homo sapiens
cagaatgggagagtaagaacaaagag

SEQ ID NO: 72197 - DNA, 26 bp, Homo sapiens
agaatgggagagtaagaacaaagagg

SEQ ID NO: 72198 - DNA, 26 bp, Homo sapiens
gaatgggagagtaagaacaaagagga

SEQ ID NO: 72199 - DNA, 26 bp, Homo sapiens
aatgggagagtaagaacaaagaggat

SEQ ID NO: 72200 - DNA, 26 bp, Homo sapiens
atgggagagtaagaacaaagaggatg

SEQ ID NO: 72201 - DNA, 26 bp, Homo sapiens
tgggagagtaagaacaaagaggatgt

SEQ ID NO: 72202 - DNA, 26 bp, Homo sapiens
gggagagtaagaacaaagaggatgtc

SEQ ID NO: 72203 - DNA, 26 bp, Homo sapiens
ggagagtaagaacaaagaggatgtct

SEQ ID NO: 72204 - DNA, 26 bp, Homo sapiens
gagagtaagaacaaagaggatgtctg

SEQ ID NO: 72205 - DNA, 26 bp, Homo sapiens
agagtaagaacaaagaggatgtctgc

SEQ ID NO: 72206 - DNA, 26 bp, Homo sapiens
gagtaagaacaaagaggatgtctgca

SEQ ID NO: 72207 - DNA, 26 bp, Homo sapiens
agtaagaacaaagaggatgtctgcaa

SEQ ID NO: 72208 - DNA, 26 bp, Homo sapiens
gtaagaacaaagaggatgtctgcaat

SEQ ID NO: 72209 - DNA, 26 bp, Homo sapiens
taagaacaaagaggatgtctgcaatg

SEQ ID NO: 72210 - DNA, 26 bp, Homo sapiens
aagaacaaagaggatgtctgcaatgg

SEQ ID NO: 72211 - DNA, 26 bp, Homo sapiens
agaacaaagaggatgtctgcaatggc

SEQ ID NO: 72212 - DNA, 26 bp, Homo sapiens
gaacaaagaggatgtctgcaatggcc

SEQ ID NO: 72213 - DNA, 26 bp, Homo sapiens
aacaaagaggatgtctgcaatggcca

SEQ ID NO: 72214 - DNA, 26 bp, Homo sapiens
acaaagaggatgtctgcaatggccat

SEQ ID NO: 72215 - DNA, 26 bp, Homo sapiens
caaagaggatgtctgcaatggccatg

SEQ ID NO: 72216 - DNA, 26 bp, Homo sapiens
aaagaggatgtctgcaatggccatgt

SEQ ID NO: 72217 - DNA, 26 bp, Homo sapiens
aagaggatgtctgcaatggccatgtt

SEQ ID NO: 72218 - DNA, 26 bp, Homo sapiens
agaggatgtctgcaatggccatgttc

SEQ ID NO: 72219 - DNA, 26 bp, Homo sapiens
gaggatgtctgcaatggccatgttca

SEQ ID NO: 72220 - DNA, 26 bp, Homo sapiens
aggatgtctgcaatggccatgttcaa

SEQ ID NO: 72221 - DNA, 26 bp, Homo sapiens
ggatgtctgcaatggccatgttcaag

SEQ ID NO: 72222 - DNA, 26 bp, Homo sapiens
gatgtctgcaatggccatgttcaaga

SEQ ID NO: 72223 - DNA, 26 bp, Homo sapiens
atgtctgcaatggccatgttcaagag

SEQ ID NO: 72224 - DNA, 26 bp, Homo sapiens
tgtctgcaatggccatgttcaagaga

SEQ ID NO: 72225 - DNA, 26 bp, Homo sapiens
gtctgcaatggccatgttcaagagat

SEQ ID NO: 72226 - DNA, 26 bp, Homo sapiens
tctgcaatggccatgttcaagagata

SEQ ID NO: 72227 - DNA, 26 bp, Homo sapiens
ctgcaatggccatgttcaagagatag

SEQ ID NO: 72228 - DNA, 26 bp, Homo sapiens
tgcaatggccatgttcaagagataga

SEQ ID NO: 72229 - DNA, 26 bp, Homo sapiens
gcaatggccatgttcaagagatagac

SEQ ID NO: 72230 - DNA, 26 bp, Homo sapiens
caatggccatgttcaagagatagacg

SEQ ID NO: 72231 - DNA, 26 bp, Homo sapiens
aatggccatgttcaagagatagacgt

SEQ ID NO: 72232 - DNA, 26 bp, Homo sapiens
atggccatgttcaagagatagacgtc

SEQ ID NO: 72233 - DNA, 26 bp, Homo sapiens
tggccatgttcaagagatagacgtct

SEQ ID NO: 72234 - DNA, 26 bp, Homo sapiens
ggccatgttcaagagatagacgtctg

SEQ ID NO: 72235 - DNA, 26 bp, Homo sapiens
gccatgttcaagagatagacgtctgt

SEQ ID NO: 72236 - DNA, 26 bp, Homo sapiens
ccatgttcaagagatagacgtctgtc

SEQ ID NO: 72237 - DNA, 26 bp, Homo sapiens
catgttcaagagatagacgtctgtca

SEQ ID NO: 72238 - DNA, 26 bp, Homo sapiens
atgttcaagagatagacgtctgtcat

SEQ ID NO: 72239 - DNA, 26 bp, Homo sapiens
tgttcaagagatagacgtctgtcata

SEQ ID NO: 72240 - DNA, 26 bp, Homo sapiens
gttcaagagatagacgtctgtcatag

SEQ ID NO: 72241 - DNA, 26 bp, Homo sapiens
ttcaagagatagacgtctgtcataga

SEQ ID NO: 72242 - DNA, 26 bp, Homo sapiens
tcaagagatagacgtctgtcatagac

SEQ ID NO: 72243 - DNA, 26 bp, Homo sapiens
caagagatagacgtctgtcatagacc

SEQ ID NO: 72244 - DNA, 26 bp, Homo sapiens
aagagatagacgtctgtcatagacct

SEQ ID NO: 72245 - DNA, 26 bp, Homo sapiens
agagatagacgtctgtcatagacctg

SEQ ID NO: 72246 - DNA, 26 bp, Homo sapiens
gagatagacgtctgtcatagacctgg

SEQ ID NO: 72247 - DNA, 26 bp, Homo sapiens
agatagacgtctgtcatagacctggc

SEQ ID NO: 72248 - DNA, 26 bp, Homo sapiens
gatagacgtctgtcatagacctggcc

SEQ ID NO: 72249 - DNA, 26 bp, Homo sapiens
atagacgtctgtcatagacctggcct

SEQ ID NO: 72250 - DNA, 26 bp, Homo sapiens
tagacgtctgtcatagacctggcctt

SEQ ID NO: 72251 - DNA, 26 bp, Homo sapiens
agacgtctgtcatagacctggccttc

SEQ ID NO: 72252 - DNA, 26 bp, Homo sapiens
gacgtctgtcatagacctggccttct

SEQ ID NO: 72253 - DNA, 26 bp, Homo sapiens
acgtctgtcatagacctggccttctt

SEQ ID NO: 72254 - DNA, 26 bp, Homo sapiens
cgtctgtcatagacctggccttctta

SEQ ID NO: 72255 - DNA, 26 bp, Homo sapiens
gtctgtcatagacctggccttcttat

SEQ ID NO: 72256 - DNA, 26 bp, Homo sapiens
tctgtcatagacctggccttcttata

SEQ ID NO: 72257 - DNA, 26 bp, Homo sapiens
ctgtcatagacctggccttcttataa

SEQ ID NO: 72258 - DNA, 26 bp, Homo sapiens
tgtcatagacctggccttcttataaa

SEQ ID NO: 72259 - DNA, 26 bp, Homo sapiens
gtcatagacctggccttcttataaaa

SEQ ID NO: 72260 - DNA, 26 bp, Homo sapiens
tcatagacctggccttcttataaaaa

SEQ ID NO: 72261 - DNA, 26 bp, Homo sapiens
catagacctggccttcttataaaaag

SEQ ID NO: 72262 - DNA, 26 bp, Homo sapiens
atagacctggccttcttataaaaagc

SEQ ID NO: 72263 - DNA, 26 bp, Homo sapiens
tagacctggccttcttataaaaagca

SEQ ID NO: 72264 - DNA, 26 bp, Homo sapiens
agacctggccttcttataaaaagcaa

SEQ ID NO: 72265 - DNA, 26 bp, Homo sapiens
gacctggccttcttataaaaagcaaa

SEQ ID NO: 72266 - DNA, 26 bp, Homo sapiens
acctggccttcttataaaaagcaaag

SEQ ID NO: 72267 - DNA, 26 bp, Homo sapiens
cctggccttcttataaaaagcaaagg

SEQ ID NO: 72268 - DNA, 26 bp, Homo sapiens
ctggccttcttataaaaagcaaaggt

SEQ ID NO: 72269 - DNA, 26 bp, Homo sapiens
tggccttcttataaaaagcaaaggtg

SEQ ID NO: 72270 - DNA, 26 bp, Homo sapiens
ggccttcttataaaaagcaaaggtga

SEQ ID NO: 72271 - DNA, 26 bp, Homo sapiens
gccttcttataaaaagcaaaggtgat

SEQ ID NO: 72272 - DNA, 26 bp, Homo sapiens
ccttcttataaaaagcaaaggtgatc

SEQ ID NO: 72273 - DNA, 26 bp, Homo sapiens
cttcttataaaaagcaaaggtgatca

SEQ ID NO: 72274 - DNA, 26 bp, Homo sapiens
ttcttataaaaagcaaaggtgatcac

SEQ ID NO: 72275 - DNA, 26 bp, Homo sapiens
tcttataaaaagcaaaggtgatcacc

SEQ ID NO: 72276 - DNA, 26 bp, Homo sapiens
cttataaaaagcaaaggtgatcacca

SEQ ID NO: 72277 - DNA, 26 bp, Homo sapiens
ttataaaaagcaaaggtgatcaccac

SEQ ID NO: 72278 - DNA, 26 bp, Homo sapiens
tataaaaagcaaaggtgatcaccacc

SEQ ID NO: 72279 - DNA, 26 bp, Homo sapiens
ataaaaagcaaaggtgatcaccacca

SEQ ID NO: 72280 - DNA, 26 bp, Homo sapiens
taaaaagcaaaggtgatcaccaccag

SEQ ID NO: 72281 - DNA, 26 bp, Homo sapiens
aaaaagcaaaggtgatcaccaccaga

SEQ ID NO: 72282 - DNA, 26 bp, Homo sapiens
aaaagcaaaggtgatcaccaccagaa

SEQ ID NO: 72283 - DNA, 26 bp, Homo sapiens
aaagcaaaggtgatcaccaccagaat

SEQ ID NO: 72284 - DNA, 26 bp, Homo sapiens
aagcaaaggtgatcaccaccagaata

SEQ ID NO: 72285 - DNA, 26 bp, Homo sapiens
agcaaaggtgatcaccaccagaatat

SEQ ID NO: 72286 - DNA, 26 bp, Homo sapiens
gcaaaggtgatcaccaccagaatatt

SEQ ID NO: 72287 - DNA, 26 bp, Homo sapiens
caaaggtgatcaccaccagaatattc

SEQ ID NO: 72288 - DNA, 26 bp, Homo sapiens
aaaggtgatcaccaccagaatattcc

SEQ ID NO: 72289 - DNA, 26 bp, Homo sapiens
aaggtgatcaccaccagaatattccc

SEQ ID NO: 72290 - DNA, 26 bp, Homo sapiens
aggtgatcaccaccagaatattcccc

SEQ ID NO: 72291 - DNA, 26 bp, Homo sapiens
ggtgatcaccaccagaatattcccca

SEQ ID NO: 72292 - DNA, 26 bp, Homo sapiens
gtgatcaccaccagaatattccccag

SEQ ID NO: 72293 - DNA, 26 bp, Homo sapiens
tgatcaccaccagaatattccccagg

SEQ ID NO: 72294 - DNA, 26 bp, Homo sapiens
gatcaccaccagaatattccccagga

SEQ ID NO: 72295 - DNA, 26 bp, Homo sapiens
atcaccaccagaatattccccaggag

SEQ ID NO: 72296 - DNA, 26 bp, Homo sapiens
tcaccaccagaatattccccaggagg

SEQ ID NO: 72297 - DNA, 26 bp, Homo sapiens
caccaccagaatattccccaggaggc

SEQ ID NO: 72298 - DNA, 26 bp, Homo sapiens
accaccagaatattccccaggaggcc

SEQ ID NO: 72299 - DNA, 26 bp, Homo sapiens
ccaccagaatattccccaggaggcca

SEQ ID NO: 72300 - DNA, 26 bp, Homo sapiens
caccagaatattccccaggaggccaa

SEQ ID NO: 72301 - DNA, 26 bp, Homo sapiens
accagaatattccccaggaggccaaa

SEQ ID NO: 72302 - DNA, 26 bp, Homo sapiens
ccagaatattccccaggaggccaaag

SEQ ID NO: 72303 - DNA, 26 bp, Homo sapiens
cagaatattccccaggaggccaaaga

SEQ ID NO: 72304 - DNA, 26 bp, Homo sapiens
agaatattccccaggaggccaaagac

SEQ ID NO: 72305 - DNA, 26 bp, Homo sapiens
gaatattccccaggaggccaaagaca

SEQ ID NO: 72306 - DNA, 26 bp, Homo sapiens
aatattccccaggaggccaaagacac

SEQ ID NO: 72307 - DNA, 26 bp, Homo sapiens
atattccccaggaggccaaagacaca

SEQ ID NO: 72308 - DNA, 26 bp, Homo sapiens
tattccccaggaggccaaagacacag

SEQ ID NO: 72309 - DNA, 26 bp, Homo sapiens
attccccaggaggccaaagacacaga

SEQ ID NO: 72310 - DNA, 26 bp, Homo sapiens
ttccccaggaggccaaagacacagat

SEQ ID NO: 72311 - DNA, 26 bp, Homo sapiens
tccccaggaggccaaagacacagatc

SEQ ID NO: 72312 - DNA, 26 bp, Homo sapiens
ccccaggaggccaaagacacagatca

SEQ ID NO: 72313 - DNA, 26 bp, Homo sapiens
cccaggaggccaaagacacagatcaa

SEQ ID NO: 72314 - DNA, 26 bp, Homo sapiens
ccaggaggccaaagacacagatcaag

SEQ ID NO: 72315 - DNA, 26 bp, Homo sapiens
caggaggccaaagacacagatcaagg

SEQ ID NO: 72316 - DNA, 26 bp, Homo sapiens
aggaggccaaagacacagatcaagga

SEQ ID NO: 72317 - DNA, 26 bp, Homo sapiens
ggaggccaaagacacagatcaaggag

SEQ ID NO: 72318 - DNA, 26 bp, Homo sapiens
gaggccaaagacacagatcaaggagt

SEQ ID NO: 72319 - DNA, 26 bp, Homo sapiens
aggccaaagacacagatcaaggagta

SEQ ID NO: 72320 - DNA, 26 bp, Homo sapiens
ggccaaagacacagatcaaggagtag

SEQ ID NO: 72321 - DNA, 26 bp, Homo sapiens
gccaaagacacagatcaaggagtagg

SEQ ID NO: 72322 - DNA, 26 bp, Homo sapiens
ccaaagacacagatcaaggagtaggc

SEQ ID NO: 72323 - DNA, 26 bp, Homo sapiens
caaagacacagatcaaggagtaggca

SEQ ID NO: 72324 - DNA, 26 bp, Homo sapiens
aaagacacagatcaaggagtaggcaa

SEQ ID NO: 72325 - DNA, 26 bp, Homo sapiens
aagacacagatcaaggagtaggcaat

SEQ ID NO: 72326 - DNA, 26 bp, Homo sapiens
agacacagatcaaggagtaggcaatc

SEQ ID NO: 72327 - DNA, 26 bp, Homo sapiens
gacacagatcaaggagtaggcaatcg

SEQ ID NO: 72328 - DNA, 26 bp, Homo sapiens
acacagatcaaggagtaggcaatcgg

SEQ ID NO: 72329 - DNA, 26 bp, Homo sapiens
cacagatcaaggagtaggcaatcggt

SEQ ID NO: 72330 - DNA, 26 bp, Homo sapiens
acagatcaaggagtaggcaatcggta

SEQ ID NO: 72331 - DNA, 26 bp, Homo sapiens
cagatcaaggagtaggcaatcggtac

SEQ ID NO: 72332 - DNA, 26 bp, Homo sapiens
agatcaaggagtaggcaatcggtaca

SEQ ID NO: 72333 - DNA, 26 bp, Homo sapiens
gatcaaggagtaggcaatcggtacaa

SEQ ID NO: 72334 - DNA, 26 bp, Homo sapiens
atcaaggagtaggcaatcggtacaaa

SEQ ID NO: 72335 - DNA, 26 bp, Homo sapiens
tcaaggagtaggcaatcggtacaaat

SEQ ID NO: 72336 - DNA, 26 bp, Homo sapiens
caaggagtaggcaatcggtacaaata

SEQ ID NO: 72337 - DNA, 26 bp, Homo sapiens
aaggagtaggcaatcggtacaaatag

SEQ ID NO: 72338 - DNA, 26 bp, Homo sapiens
aggagtaggcaatcggtacaaatagc

SEQ ID NO: 72339 - DNA, 26 bp, Homo sapiens
ggagtaggcaatcggtacaaatagcc

SEQ ID NO: 72340 - DNA, 26 bp, Homo sapiens
gagtaggcaatcggtacaaatagcct

SEQ ID NO: 72341 - DNA, 26 bp, Homo sapiens
agtaggcaatcggtacaaatagcctg

SEQ ID NO: 72342 - DNA, 26 bp, Homo sapiens
gtaggcaatcggtacaaatagcctgg

SEQ ID NO: 72343 - DNA, 26 bp, Homo sapiens
taggcaatcggtacaaatagcctgga

SEQ ID NO: 72344 - DNA, 26 bp, Homo sapiens
aggcaatcggtacaaatagcctggag

SEQ ID NO: 72345 - DNA, 26 bp, Homo sapiens
ggcaatcggtacaaatagcctggaga

SEQ ID NO: 72346 - DNA, 26 bp, Homo sapiens
gcaatcggtacaaatagcctggagaa

SEQ ID NO: 72347 - DNA, 26 bp, Homo sapiens
caatcggtacaaatagcctggagaac

SEQ ID NO: 72348 - DNA, 26 bp, Homo sapiens
aatcggtacaaatagcctggagaact

SEQ ID NO: 72349 - DNA, 26 bp, Homo sapiens
atcggtacaaatagcctggagaactg

SEQ ID NO: 72350 - DNA, 26 bp, Homo sapiens
tcggtacaaatagcctggagaactgc

SEQ ID NO: 72351 - DNA, 26 bp, Homo sapiens
cggtacaaatagcctggagaactgcc

SEQ ID NO: 72352 - DNA, 26 bp, Homo sapiens
ggtacaaatagcctggagaactgcct

SEQ ID NO: 72353 - DNA, 26 bp, Homo sapiens
gtacaaatagcctggagaactgcctg

SEQ ID NO: 72354 - DNA, 26 bp, Homo sapiens
tacaaatagcctggagaactgcctga

SEQ ID NO: 72355 - DNA, 26 bp, Homo sapiens
acaaatagcctggagaactgcctgac

SEQ ID NO: 72356 - DNA, 26 bp, Homo sapiens
caaatagcctggagaactgcctgacc

SEQ ID NO: 72357 - DNA, 26 bp, Homo sapiens
aaatagcctggagaactgcctgacct

SEQ ID NO: 72358 - DNA, 26 bp, Homo sapiens
aatagcctggagaactgcctgacctc

SEQ ID NO: 72359 - DNA, 26 bp, Homo sapiens
atagcctggagaactgcctgacctcc

SEQ ID NO: 72360 - DNA, 26 bp, Homo sapiens
tagcctggagaactgcctgacctcct

SEQ ID NO: 72361 - DNA, 26 bp, Homo sapiens
agcctggagaactgcctgacctcctg

SEQ ID NO: 72362 - DNA, 26 bp, Homo sapiens
gcctggagaactgcctgacctcctgc

SEQ ID NO: 72363 - DNA, 26 bp, Homo sapiens
cctggagaactgcctgacctcctgca

SEQ ID NO: 72364 - DNA, 26 bp, Homo sapiens
ctggagaactgcctgacctcctgcaa

SEQ ID NO: 72365 - DNA, 26 bp, Homo sapiens
tggagaactgcctgacctcctgcaag

SEQ ID NO: 72366 - DNA, 26 bp, Homo sapiens
ggagaactgcctgacctcctgcaagg

SEQ ID NO: 72367 - DNA, 26 bp, Homo sapiens
gagaactgcctgacctcctgcaagga

SEQ ID NO: 72368 - DNA, 26 bp, Homo sapiens
agaactgcctgacctcctgcaaggag

SEQ ID NO: 72369 - DNA, 26 bp, Homo sapiens
gaactgcctgacctcctgcaaggagc

SEQ ID NO: 72370 - DNA, 26 bp, Homo sapiens
aactgcctgacctcctgcaaggagca

SEQ ID NO: 72371 - DNA, 26 bp, Homo sapiens
actgcctgacctcctgcaaggagcac

SEQ ID NO: 72372 - DNA, 26 bp, Homo sapiens
ctgcctgacctcctgcaaggagcaca

SEQ ID NO: 72373 - DNA, 26 bp, Homo sapiens
tgcctgacctcctgcaaggagcacag

SEQ ID NO: 72374 - DNA, 26 bp, Homo sapiens
gcctgacctcctgcaaggagcacagt

SEQ ID NO: 72375 - DNA, 26 bp, Homo sapiens
cctgacctcctgcaaggagcacagta

SEQ ID NO: 72376 - DNA, 26 bp, Homo sapiens
ctgacctcctgcaaggagcacagtaa

SEQ ID NO: 72377 - DNA, 26 bp, Homo sapiens
tgacctcctgcaaggagcacagtaac

SEQ ID NO: 72378 - DNA, 26 bp, Homo sapiens
gacctcctgcaaggagcacagtaaca

SEQ ID NO: 72379 - DNA, 26 bp, Homo sapiens
acctcctgcaaggagcacagtaacat

SEQ ID NO: 72380 - DNA, 26 bp, Homo sapiens
cctcctgcaaggagcacagtaacatc

SEQ ID NO: 72381 - DNA, 26 bp, Homo sapiens
ctcctgcaaggagcacagtaacatct

SEQ ID NO: 72382 - DNA, 26 bp, Homo sapiens
tcctgcaaggagcacagtaacatctc

SEQ ID NO: 72383 - DNA, 26 bp, Homo sapiens
cctgcaaggagcacagtaacatctca

SEQ ID NO: 72384 - DNA, 26 bp, Homo sapiens
ctgcaaggagcacagtaacatctcag

SEQ ID NO: 72385 - DNA, 26 bp, Homo sapiens
tgcaaggagcacagtaacatctcaga

SEQ ID NO: 72386 - DNA, 26 bp, Homo sapiens
gcaaggagcacagtaacatctcagaa

SEQ ID NO: 72387 - DNA, 26 bp, Homo sapiens
caaggagcacagtaacatctcagaat

SEQ ID NO: 72388 - DNA, 26 bp, Homo sapiens
aaggagcacagtaacatctcagaatc

SEQ ID NO: 72389 - DNA, 26 bp, Homo sapiens
aggagcacagtaacatctcagaatca

SEQ ID NO: 72390 - DNA, 26 bp, Homo sapiens
ggagcacagtaacatctcagaatcaa

SEQ ID NO: 72391 - DNA, 26 bp, Homo sapiens
gagcacagtaacatctcagaatcaac

SEQ ID NO: 72392 - DNA, 26 bp, Homo sapiens
agcacagtaacatctcagaatcaact

SEQ ID NO: 72393 - DNA, 26 bp, Homo sapiens
gcacagtaacatctcagaatcaactg

SEQ ID NO: 72394 - DNA, 26 bp, Homo sapiens
cacagtaacatctcagaatcaactga

SEQ ID NO: 72395 - DNA, 26 bp, Homo sapiens
acagtaacatctcagaatcaactgag

SEQ ID NO: 72396 - DNA, 26 bp, Homo sapiens
cagtaacatctcagaatcaactgagt

SEQ ID NO: 72397 - DNA, 26 bp, Homo sapiens
agtaacatctcagaatcaactgagta

SEQ ID NO: 72398 - DNA, 26 bp, Homo sapiens
gtaacatctcagaatcaactgagtaa

SEQ ID NO: 72399 - DNA, 26 bp, Homo sapiens
taacatctcagaatcaactgagtaat

SEQ ID NO: 72400 - DNA, 26 bp, Homo sapiens
aacatctcagaatcaactgagtaata

SEQ ID NO: 72401 - DNA, 26 bp, Homo sapiens
acatctcagaatcaactgagtaatat

SEQ ID NO: 72402 - DNA, 26 bp, Homo sapiens
catctcagaatcaactgagtaatatg

SEQ ID NO: 72403 - DNA, 26 bp, Homo sapiens
atctcagaatcaactgagtaatatga

SEQ ID NO: 72404 - DNA, 26 bp, Homo sapiens
tctcagaatcaactgagtaatatgaa

SEQ ID NO: 72405 - DNA, 26 bp, Homo sapiens
ctcagaatcaactgagtaatatgaag

SEQ ID NO: 72406 - DNA, 26 bp, Homo sapiens
tcagaatcaactgagtaatatgaagt

SEQ ID NO: 72407 - DNA, 26 bp, Homo sapiens
cagaatcaactgagtaatatgaagta

SEQ ID NO: 72408 - DNA, 26 bp, Homo sapiens
agaatcaactgagtaatatgaagtat

SEQ ID NO: 72409 - DNA, 26 bp, Homo sapiens
gaatcaactgagtaatatgaagtatt

SEQ ID NO: 72410 - DNA, 26 bp, Homo sapiens
aatcaactgagtaatatgaagtattg

SEQ ID NO: 72411 - DNA, 26 bp, Homo sapiens
atcaactgagtaatatgaagtattga

SEQ ID NO: 72412 - DNA, 26 bp, Homo sapiens
tcaactgagtaatatgaagtattgac

SEQ ID NO: 72413 - DNA, 26 bp, Homo sapiens
caactgagtaatatgaagtattgact

SEQ ID NO: 72414 - DNA, 26 bp, Homo sapiens
aactgagtaatatgaagtattgactg

SEQ ID NO: 72415 - DNA, 26 bp, Homo sapiens
actgagtaatatgaagtattgactga

SEQ ID NO: 72416 - DNA, 26 bp, Homo sapiens
ctgagtaatatgaagtattgactgac

SEQ ID NO: 72417 - DNA, 26 bp, Homo sapiens
tgagtaatatgaagtattgactgaca

SEQ ID NO: 72418 - DNA, 26 bp, Homo sapiens
gagtaatatgaagtattgactgacac

SEQ ID NO: 72419 - DNA, 26 bp, Homo sapiens
agtaatatgaagtattgactgacaca

SEQ ID NO: 72420 - DNA, 26 bp, Homo sapiens
gtaatatgaagtattgactgacacaa

SEQ ID NO: 72421 - DNA, 26 bp, Homo sapiens
taatatgaagtattgactgacacaaa

SEQ ID NO: 72422 - DNA, 26 bp, Homo sapiens
aatatgaagtattgactgacacaaaa

SEQ ID NO: 72423 - DNA, 26 bp, Homo sapiens
atatgaagtattgactgacacaaaat

SEQ ID NO: 72424 - DNA, 26 bp, Homo sapiens
tatgaagtattgactgacacaaaata

SEQ ID NO: 72425 - DNA, 26 bp, Homo sapiens
atgaagtattgactgacacaaaataa

SEQ ID NO: 72426 - DNA, 26 bp, Homo sapiens
tgaagtattgactgacacaaaataat

SEQ ID NO: 72427 - DNA, 26 bp, Homo sapiens
gaagtattgactgacacaaaataatc

SEQ ID NO: 72428 - DNA, 26 bp, Homo sapiens
aagtattgactgacacaaaataatct

SEQ ID NO: 72429 - DNA, 26 bp, Homo sapiens
agtattgactgacacaaaataatctt

SEQ ID NO: 72430 - DNA, 26 bp, Homo sapiens
gtattgactgacacaaaataatcttc

SEQ ID NO: 72431 - DNA, 26 bp, Homo sapiens
tattgactgacacaaaataatcttca

SEQ ID NO: 72432 - DNA, 26 bp, Homo sapiens
attgactgacacaaaataatcttcac

SEQ ID NO: 72433 - DNA, 26 bp, Homo sapiens
ttgactgacacaaaataatcttcact

SEQ ID NO: 72434 - DNA, 26 bp, Homo sapiens
tgactgacacaaaataatcttcactg

SEQ ID NO: 72435 - DNA, 26 bp, Homo sapiens
gactgacacaaaataatcttcactgg

SEQ ID NO: 72436 - DNA, 26 bp, Homo sapiens
actgacacaaaataatcttcactgga

SEQ ID NO: 72437 - DNA, 26 bp, Homo sapiens
ctgacacaaaataatcttcactggag

SEQ ID NO: 72438 - DNA, 26 bp, Homo sapiens
tgacacaaaataatcttcactggagt

SEQ ID NO: 72439 - DNA, 26 bp, Homo sapiens
gacacaaaataatcttcactggagtc

SEQ ID NO: 72440 - DNA, 26 bp, Homo sapiens
acacaaaataatcttcactggagtcg

SEQ ID NO: 72441 - DNA, 26 bp, Homo sapiens
cacaaaataatcttcactggagtcga

SEQ ID NO: 72442 - DNA, 26 bp, Homo sapiens
acaaaataatcttcactggagtcgaa

SEQ ID NO: 72443 - DNA, 26 bp, Homo sapiens
caaaataatcttcactggagtcgaaa

SEQ ID NO: 72444 - DNA, 26 bp, Homo sapiens
aaaataatcttcactggagtcgaaaa

SEQ ID NO: 72445 - DNA, 26 bp, Homo sapiens
aaataatcttcactggagtcgaaaac

SEQ ID NO: 72446 - DNA, 26 bp, Homo sapiens
aataatcttcactggagtcgaaaaca

SEQ ID NO: 72447 - DNA, 26 bp, Homo sapiens
ataatcttcactggagtcgaaaacat

SEQ ID NO: 72448 - DNA, 26 bp, Homo sapiens
taatcttcactggagtcgaaaacatc

SEQ ID NO: 72449 - DNA, 26 bp, Homo sapiens
aatcttcactggagtcgaaaacatcg

SEQ ID NO: 72450 - DNA, 26 bp, Homo sapiens
atcttcactggagtcgaaaacatcgc

SEQ ID NO: 72451 - DNA, 26 bp, Homo sapiens
tcttcactggagtcgaaaacatcgct

SEQ ID NO: 72452 - DNA, 26 bp, Homo sapiens
cttcactggagtcgaaaacatcgctg

SEQ ID NO: 72453 - DNA, 26 bp, Homo sapiens
ttcactggagtcgaaaacatcgctga

SEQ ID NO: 72454 - DNA, 26 bp, Homo sapiens
tcactggagtcgaaaacatcgctgaa

SEQ ID NO: 72455 - DNA, 26 bp, Homo sapiens
cactggagtcgaaaacatcgctgaaa

SEQ ID NO: 72456 - DNA, 26 bp, Homo sapiens
actggagtcgaaaacatcgctgaaat

SEQ ID NO: 72457 - DNA, 26 bp, Homo sapiens
ctggagtcgaaaacatcgctgaaatt

SEQ ID NO: 72458 - DNA, 26 bp, Homo sapiens
tggagtcgaaaacatcgctgaaattc

SEQ ID NO: 72459 - DNA, 26 bp, Homo sapiens
ggagtcgaaaacatcgctgaaattca

SEQ ID NO: 72460 - DNA, 26 bp, Homo sapiens
gagtcgaaaacatcgctgaaattcat

SEQ ID NO: 72461 - DNA, 26 bp, Homo sapiens
agtcgaaaacatcgctgaaattcatt

SEQ ID NO: 72462 - DNA, 26 bp, Homo sapiens
gtcgaaaacatcgctgaaattcattg

SEQ ID NO: 72463 - DNA, 26 bp, Homo sapiens
tcgaaaacatcgctgaaattcattga

SEQ ID NO: 72464 - DNA, 26 bp, Homo sapiens
cgaaaacatcgctgaaattcattgat

SEQ ID NO: 72465 - DNA, 26 bp, Homo sapiens
gaaaacatcgctgaaattcattgatt

SEQ ID NO: 72466 - DNA, 26 bp, Homo sapiens
aaaacatcgctgaaattcattgattc

SEQ ID NO: 72467 - DNA, 26 bp, Homo sapiens
aaacatcgctgaaattcattgattcc

SEQ ID NO: 72468 - DNA, 26 bp, Homo sapiens
aacatcgctgaaattcattgattccc

SEQ ID NO: 72469 - DNA, 26 bp, Homo sapiens
acatcgctgaaattcattgattcccc

SEQ ID NO: 72470 - DNA, 26 bp, Homo sapiens
catcgctgaaattcattgattccccg

SEQ ID NO: 72471 - DNA, 26 bp, Homo sapiens
atcgctgaaattcattgattccccgc

SEQ ID NO: 72472 - DNA, 26 bp, Homo sapiens
tcgctgaaattcattgattccccgct

SEQ ID NO: 72473 - DNA, 26 bp, Homo sapiens
cgctgaaattcattgattccccgctc

SEQ ID NO: 72474 - DNA, 26 bp, Homo sapiens
gctgaaattcattgattccccgctca

SEQ ID NO: 72475 - DNA, 26 bp, Homo sapiens
ctgaaattcattgattccccgctcat

SEQ ID NO: 72476 - DNA, 26 bp, Homo sapiens
tgaaattcattgattccccgctcatt

SEQ ID NO: 72477 - DNA, 26 bp, Homo sapiens
gaaattcattgattccccgctcattg

SEQ ID NO: 72478 - DNA, 26 bp, Homo sapiens
aaattcattgattccccgctcattgt

SEQ ID NO: 72479 - DNA, 26 bp, Homo sapiens
aattcattgattccccgctcattgtg

SEQ ID NO: 72480 - DNA, 26 bp, Homo sapiens
attcattgattccccgctcattgtgg

SEQ ID NO: 72481 - DNA, 26 bp, Homo sapiens
ttcattgattccccgctcattgtggg

SEQ ID NO: 72482 - DNA, 26 bp, Homo sapiens
tcattgattccccgctcattgtgggc

SEQ ID NO: 72483 - DNA, 26 bp, Homo sapiens
cattgattccccgctcattgtgggca

SEQ ID NO: 72484 - DNA, 26 bp, Homo sapiens
attgattccccgctcattgtgggcag

SEQ ID NO: 72485 - DNA, 26 bp, Homo sapiens
ttgattccccgctcattgtgggcaga

SEQ ID NO: 72486 - DNA, 26 bp, Homo sapiens
tgattccccgctcattgtgggcagaa

SEQ ID NO: 72487 - DNA, 26 bp, Homo sapiens
gattccccgctcattgtgggcagaaa

SEQ ID NO: 72488 - DNA, 26 bp, Homo sapiens
attccccgctcattgtgggcagaaaa

SEQ ID NO: 72489 - DNA, 26 bp, Homo sapiens
ttccccgctcattgtgggcagaaaaa

SEQ ID NO: 72490 - DNA, 26 bp, Homo sapiens
tccccgctcattgtgggcagaaaaaa

SEQ ID NO: 72491 - DNA, 26 bp, Homo sapiens
ccccgctcattgtgggcagaaaaaat

SEQ ID NO: 72492 - DNA, 26 bp, Homo sapiens
cccgctcattgtgggcagaaaaaatg

SEQ ID NO: 72493 - DNA, 26 bp, Homo sapiens
ccgctcattgtgggcagaaaaaatgc

SEQ ID NO: 72494 - DNA, 26 bp, Homo sapiens
cgctcattgtgggcagaaaaaatgca

SEQ ID NO: 72495 - DNA, 26 bp, Homo sapiens
gctcattgtgggcagaaaaaatgcaa

SEQ ID NO: 72496 - DNA, 26 bp, Homo sapiens
ctcattgtgggcagaaaaaatgcaag

SEQ ID NO: 72497 - DNA, 26 bp, Homo sapiens
tcattgtgggcagaaaaaatgcaagc

SEQ ID NO: 72498 - DNA, 26 bp, Homo sapiens
cattgtgggcagaaaaaatgcaagct

SEQ ID NO: 72499 - DNA, 26 bp, Homo sapiens
attgtgggcagaaaaaatgcaagctg

SEQ ID NO: 72500 - DNA, 26 bp, Homo sapiens
ttgtgggcagaaaaaatgcaagctgg

SEQ ID NO: 72501 - DNA, 26 bp, Homo sapiens
tgtgggcagaaaaaatgcaagctggt

SEQ ID NO: 72502 - DNA, 26 bp, Homo sapiens
gtgggcagaaaaaatgcaagctggtt

SEQ ID NO: 72503 - DNA, 26 bp, Homo sapiens
tgggcagaaaaaatgcaagctggttg

SEQ ID NO: 72504 - DNA, 26 bp, Homo sapiens
gggcagaaaaaatgcaagctggttgt

SEQ ID NO: 72505 - DNA, 26 bp, Homo sapiens
ggcagaaaaaatgcaagctggttgta

SEQ ID NO: 72506 - DNA, 26 bp, Homo sapiens
gcagaaaaaatgcaagctggttgtag

SEQ ID NO: 72507 - DNA, 26 bp, Homo sapiens
cagaaaaaatgcaagctggttgtaga

SEQ ID NO: 72508 - DNA, 26 bp, Homo sapiens
agaaaaaatgcaagctggttgtagaa

SEQ ID NO: 72509 - DNA, 26 bp, Homo sapiens
gaaaaaatgcaagctggttgtagaaa

SEQ ID NO: 72510 - DNA, 26 bp, Homo sapiens
aaaaaatgcaagctggttgtagaaaa

SEQ ID NO: 72511 - DNA, 26 bp, Homo sapiens
aaaaatgcaagctggttgtagaaaaa

SEQ ID NO: 72512 - DNA, 26 bp, Homo sapiens
aaaatgcaagctggttgtagaaaaag

SEQ ID NO: 72513 - DNA, 26 bp, Homo sapiens
aaatgcaagctggttgtagaaaaagg

SEQ ID NO: 72514 - DNA, 26 bp, Homo sapiens
aatgcaagctggttgtagaaaaagga

SEQ ID NO: 72515 - DNA, 26 bp, Homo sapiens
atgcaagctggttgtagaaaaaggag

SEQ ID NO: 72516 - DNA, 26 bp, Homo sapiens
tgcaagctggttgtagaaaaaggagt

SEQ ID NO: 72517 - DNA, 26 bp, Homo sapiens
gcaagctggttgtagaaaaaggagtg

SEQ ID NO: 72518 - DNA, 26 bp, Homo sapiens
caagctggttgtagaaaaaggagtgt

SEQ ID NO: 72519 - DNA, 26 bp, Homo sapiens
aagctggttgtagaaaaaggagtgta

SEQ ID NO: 72520 - DNA, 26 bp, Homo sapiens
agctggttgtagaaaaaggagtgtat

SEQ ID NO: 72521 - DNA, 26 bp, Homo sapiens
gctggttgtagaaaaaggagtgtatg

SEQ ID NO: 72522 - DNA, 26 bp, Homo sapiens
ctggttgtagaaaaaggagtgtatgg

SEQ ID NO: 72523 - DNA, 26 bp, Homo sapiens
tggttgtagaaaaaggagtgtatggt

SEQ ID NO: 72524 - DNA, 26 bp, Homo sapiens
ggttgtagaaaaaggagtgtatggtt

SEQ ID NO: 72525 - DNA, 26 bp, Homo sapiens
gttgtagaaaaaggagtgtatggttc

SEQ ID NO: 72526 - DNA, 26 bp, Homo sapiens
ttgtagaaaaaggagtgtatggttca

SEQ ID NO: 72527 - DNA, 26 bp, Homo sapiens
tgtagaaaaaggagtgtatggttcag

SEQ ID NO: 72528 - DNA, 26 bp, Homo sapiens
gtagaaaaaggagtgtatggttcagc

SEQ ID NO: 72529 - DNA, 26 bp, Homo sapiens
tagaaaaaggagtgtatggttcagcc

SEQ ID NO: 72530 - DNA, 26 bp, Homo sapiens
agaaaaaggagtgtatggttcagccc

SEQ ID NO: 72531 - DNA, 26 bp, Homo sapiens
gaaaaaggagtgtatggttcagcccc

SEQ ID NO: 72532 - DNA, 26 bp, Homo sapiens
aaaaaggagtgtatggttcagcccct

SEQ ID NO: 72533 - DNA, 26 bp, Homo sapiens
aaaaggagtgtatggttcagcccctt

SEQ ID NO: 72534 - DNA, 26 bp, Homo sapiens
aaaggagtgtatggttcagccccttc

SEQ ID NO: 72535 - DNA, 26 bp, Homo sapiens
aaggagtgtatggttcagccccttca

SEQ ID NO: 72536 - DNA, 26 bp, Homo sapiens
aggagtgtatggttcagccccttcag

SEQ ID NO: 72537 - DNA, 26 bp, Homo sapiens
ggagtgtatggttcagccccttcagc

SEQ ID NO: 72538 - DNA, 26 bp, Homo sapiens
gagtgtatggttcagccccttcagct

SEQ ID NO: 72539 - DNA, 26 bp, Homo sapiens
agtgtatggttcagccccttcagctc

SEQ ID NO: 72540 - DNA, 26 bp, Homo sapiens
gtgtatggttcagccccttcagctca

SEQ ID NO: 72541 - DNA, 26 bp, Homo sapiens
tgtatggttcagccccttcagctcac

SEQ ID NO: 72542 - DNA, 26 bp, Homo sapiens
gtatggttcagccccttcagctcaca

SEQ ID NO: 72543 - DNA, 26 bp, Homo sapiens
tatggttcagccccttcagctcacag

SEQ ID NO: 72544 - DNA, 26 bp, Homo sapiens
atggttcagccccttcagctcacagg

SEQ ID NO: 72545 - DNA, 26 bp, Homo sapiens
tggttcagccccttcagctcacaggc

SEQ ID NO: 72546 - DNA, 26 bp, Homo sapiens
ggttcagccccttcagctcacaggca

SEQ ID NO: 72547 - DNA, 26 bp, Homo sapiens
gttcagccccttcagctcacaggcag

SEQ ID NO: 72548 - DNA, 26 bp, Homo sapiens
ttcagccccttcagctcacaggcagc

SEQ ID NO: 72549 - DNA, 26 bp, Homo sapiens
tcagccccttcagctcacaggcagcg

SEQ ID NO: 72550 - DNA, 26 bp, Homo sapiens
cagccccttcagctcacaggcagcgg

SEQ ID NO: 72551 - DNA, 26 bp, Homo sapiens
agccccttcagctcacaggcagcggt

SEQ ID NO: 72552 - DNA, 26 bp, Homo sapiens
gccccttcagctcacaggcagcggta

SEQ ID NO: 72553 - DNA, 26 bp, Homo sapiens
ccccttcagctcacaggcagcggtag

SEQ ID NO: 72554 - DNA, 26 bp, Homo sapiens
cccttcagctcacaggcagcggtagc

SEQ ID NO: 72555 - DNA, 26 bp, Homo sapiens
ccttcagctcacaggcagcggtagca

SEQ ID NO: 72556 - DNA, 26 bp, Homo sapiens
cttcagctcacaggcagcggtagcag

SEQ ID NO: 72557 - DNA, 26 bp, Homo sapiens
ttcagctcacaggcagcggtagcagg

SEQ ID NO: 72558 - DNA, 26 bp, Homo sapiens
tcagctcacaggcagcggtagcagga

SEQ ID NO: 72559 - DNA, 26 bp, Homo sapiens
cagctcacaggcagcggtagcaggaa

SEQ ID NO: 72560 - DNA, 26 bp, Homo sapiens
agctcacaggcagcggtagcaggaaa

SEQ ID NO: 72561 - DNA, 26 bp, Homo sapiens
gctcacaggcagcggtagcaggaaag

SEQ ID NO: 72562 - DNA, 26 bp, Homo sapiens
ctcacaggcagcggtagcaggaaagt

SEQ ID NO: 72563 - DNA, 26 bp, Homo sapiens
tcacaggcagcggtagcaggaaagta

SEQ ID NO: 72564 - DNA, 26 bp, Homo sapiens
cacaggcagcggtagcaggaaagtag

SEQ ID NO: 72565 - DNA, 26 bp, Homo sapiens
acaggcagcggtagcaggaaagtaga

SEQ ID NO: 72566 - DNA, 26 bp, Homo sapiens
caggcagcggtagcaggaaagtagag

SEQ ID NO: 72567 - DNA, 26 bp, Homo sapiens
aggcagcggtagcaggaaagtagagg

SEQ ID NO: 72568 - DNA, 26 bp, Homo sapiens
ggcagcggtagcaggaaagtagaggt

SEQ ID NO: 72569 - DNA, 26 bp, Homo sapiens
gcagcggtagcaggaaagtagaggtg

SEQ ID NO: 72570 - DNA, 26 bp, Homo sapiens
cagcggtagcaggaaagtagaggtga

SEQ ID NO: 72571 - DNA, 26 bp, Homo sapiens
agcggtagcaggaaagtagaggtgac

SEQ ID NO: 72572 - DNA, 26 bp, Homo sapiens
gcggtagcaggaaagtagaggtgact

SEQ ID NO: 72573 - DNA, 26 bp, Homo sapiens
cggtagcaggaaagtagaggtgactc

SEQ ID NO: 72574 - DNA, 26 bp, Homo sapiens
ggtagcaggaaagtagaggtgactca

SEQ ID NO: 72575 - DNA, 26 bp, Homo sapiens
gtagcaggaaagtagaggtgactcaa

SEQ ID NO: 72576 - DNA, 26 bp, Homo sapiens
tagcaggaaagtagaggtgactcaat

SEQ ID NO: 72577 - DNA, 26 bp, Homo sapiens
agcaggaaagtagaggtgactcaata

SEQ ID NO: 72578 - DNA, 26 bp, Homo sapiens
gcaggaaagtagaggtgactcaataa

SEQ ID NO: 72579 - DNA, 26 bp, Homo sapiens
caggaaagtagaggtgactcaataaa

SEQ ID NO: 72580 - DNA, 26 bp, Homo sapiens
aggaaagtagaggtgactcaataaag

SEQ ID NO: 72581 - DNA, 26 bp, Homo sapiens
ggaaagtagaggtgactcaataaaga

SEQ ID NO: 72582 - DNA, 26 bp, Homo sapiens
gaaagtagaggtgactcaataaagaa

SEQ ID NO: 72583 - DNA, 26 bp, Homo sapiens
aaagtagaggtgactcaataaagaag

SEQ ID NO: 72584 - DNA, 26 bp, Homo sapiens
aagtagaggtgactcaataaagaagg

SEQ ID NO: 72585 - DNA, 26 bp, Homo sapiens
agtagaggtgactcaataaagaagga

SEQ ID NO: 72586 - DNA, 26 bp, Homo sapiens
gtagaggtgactcaataaagaaggag

SEQ ID NO: 72587 - DNA, 26 bp, Homo sapiens
tagaggtgactcaataaagaaggagc

SEQ ID NO: 72588 - DNA, 26 bp, Homo sapiens
agaggtgactcaataaagaaggagct

SEQ ID NO: 72589 - DNA, 26 bp, Homo sapiens
gaggtgactcaataaagaaggagctg

SEQ ID NO: 72590 - DNA, 26 bp, Homo sapiens
aggtgactcaataaagaaggagctgt

SEQ ID NO: 72591 - DNA, 26 bp, Homo sapiens
ggtgactcaataaagaaggagctgtc

SEQ ID NO: 72592 - DNA, 26 bp, Homo sapiens
gtgactcaataaagaaggagctgtct

SEQ ID NO: 72593 - DNA, 26 bp, Homo sapiens
tgactcaataaagaaggagctgtctg

SEQ ID NO: 72594 - DNA, 26 bp, Homo sapiens
gactcaataaagaaggagctgtctgt

SEQ ID NO: 72595 - DNA, 26 bp, Homo sapiens
actcaataaagaaggagctgtctgtt

SEQ ID NO: 72596 - DNA, 26 bp, Homo sapiens
ctcaataaagaaggagctgtctgttc

SEQ ID NO: 72597 - DNA, 26 bp, Homo sapiens
tcaataaagaaggagctgtctgttcc

SEQ ID NO: 72598 - DNA, 26 bp, Homo sapiens
caataaagaaggagctgtctgttcca

SEQ ID NO: 72599 - DNA, 26 bp, Homo sapiens
aataaagaaggagctgtctgttccac

SEQ ID NO: 72600 - DNA, 26 bp, Homo sapiens
ataaagaaggagctgtctgttccaca

SEQ ID NO: 72601 - DNA, 26 bp, Homo sapiens
taaagaaggagctgtctgttccacaa

SEQ ID NO: 72602 - DNA, 26 bp, Homo sapiens
aaagaaggagctgtctgttccacaaa

SEQ ID NO: 72603 - DNA, 26 bp, Homo sapiens
aagaaggagctgtctgttccacaaac

SEQ ID NO: 72604 - DNA, 26 bp, Homo sapiens
agaaggagctgtctgttccacaaacc

SEQ ID NO: 72605 - DNA, 26 bp, Homo sapiens
gaaggagctgtctgttccacaaacca

SEQ ID NO: 72606 - DNA, 26 bp, Homo sapiens
aaggagctgtctgttccacaaaccaa

SEQ ID NO: 72607 - DNA, 26 bp, Homo sapiens
aggagctgtctgttccacaaaccaac

SEQ ID NO: 72608 - DNA, 26 bp, Homo sapiens
ggagctgtctgttccacaaaccaaca

SEQ ID NO: 72609 - DNA, 26 bp, Homo sapiens
gagctgtctgttccacaaaccaacag

SEQ ID NO: 72610 - DNA, 26 bp, Homo sapiens
agctgtctgttccacaaaccaacagc

SEQ ID NO: 72611 - DNA, 26 bp, Homo sapiens
gctgtctgttccacaaaccaacagcc

SEQ ID NO: 72612 - DNA, 26 bp, Homo sapiens
ctgtctgttccacaaaccaacagcca

SEQ ID NO: 72613 - DNA, 26 bp, Homo sapiens
tgtctgttccacaaaccaacagccac

SEQ ID NO: 72614 - DNA, 26 bp, Homo sapiens
gtctgttccacaaaccaacagccaca

SEQ ID NO: 72615 - DNA, 26 bp, Homo sapiens
tctgttccacaaaccaacagccacag

SEQ ID NO: 72616 - DNA, 26 bp, Homo sapiens
ctgttccacaaaccaacagccacagt

SEQ ID NO: 72617 - DNA, 26 bp, Homo sapiens
tgttccacaaaccaacagccacagtt

SEQ ID NO: 72618 - DNA, 26 bp, Homo sapiens
gttccacaaaccaacagccacagttt

SEQ ID NO: 72619 - DNA, 26 bp, Homo sapiens
ttccacaaaccaacagccacagtttt

SEQ ID NO: 72620 - DNA, 26 bp, Homo sapiens
tccacaaaccaacagccacagttttt

SEQ ID NO: 72621 - DNA, 26 bp, Homo sapiens
ccacaaaccaacagccacagtttttt

SEQ ID NO: 72622 - DNA, 26 bp, Homo sapiens
cacaaaccaacagccacagttttttc

SEQ ID NO: 72623 - DNA, 26 bp, Homo sapiens
acaaaccaacagccacagttttttct

SEQ ID NO: 72624 - DNA, 26 bp, Homo sapiens
caaaccaacagccacagttttttctc

SEQ ID NO: 72625 - DNA, 26 bp, Homo sapiens
aaaccaacagccacagttttttctct

SEQ ID NO: 72626 - DNA, 26 bp, Homo sapiens
aaccaacagccacagttttttctctt

SEQ ID NO: 72627 - DNA, 26 bp, Homo sapiens
accaacagccacagttttttctctta

SEQ ID NO: 72628 - DNA, 26 bp, Homo sapiens
ccaacagccacagttttttctcttaa

SEQ ID NO: 72629 - DNA, 26 bp, Homo sapiens
caacagccacagttttttctcttaaa

SEQ ID NO: 72630 - DNA, 26 bp, Homo sapiens
aacagccacagttttttctcttaaat

SEQ ID NO: 72631 - DNA, 26 bp, Homo sapiens
acagccacagttttttctcttaaatg

SEQ ID NO: 72632 - DNA, 26 bp, Homo sapiens
cagccacagttttttctcttaaatgt

SEQ ID NO: 72633 - DNA, 26 bp, Homo sapiens
agccacagttttttctcttaaatgtc

SEQ ID NO: 72634 - DNA, 26 bp, Homo sapiens
gccacagttttttctcttaaatgtca

SEQ ID NO: 72635 - DNA, 26 bp, Homo sapiens
ccacagttttttctcttaaatgtcag

SEQ ID NO: 72636 - DNA, 26 bp, Homo sapiens
cacagttttttctcttaaatgtcaga

SEQ ID NO: 72637 - DNA, 26 bp, Homo sapiens
acagttttttctcttaaatgtcagac

SEQ ID NO: 72638 - DNA, 26 bp, Homo sapiens
cagttttttctcttaaatgtcagact

SEQ ID NO: 72639 - DNA, 26 bp, Homo sapiens
agttttttctcttaaatgtcagactt

SEQ ID NO: 72640 - DNA, 26 bp, Homo sapiens
gttttttctcttaaatgtcagacttt

SEQ ID NO: 72641 - DNA, 26 bp, Homo sapiens
ttttttctcttaaatgtcagactttg

SEQ ID NO: 72642 - DNA, 26 bp, Homo sapiens
tttttctcttaaatgtcagactttga

SEQ ID NO: 72643 - DNA, 26 bp, Homo sapiens
ttttctcttaaatgtcagactttgaa

SEQ ID NO: 72644 - DNA, 26 bp, Homo sapiens
tttctcttaaatgtcagactttgaaa

SEQ ID NO: 72645 - DNA, 26 bp, Homo sapiens
ttctcttaaatgtcagactttgaaaa

SEQ ID NO: 72646 - DNA, 26 bp, Homo sapiens
tctcttaaatgtcagactttgaaaag

SEQ ID NO: 72647 - DNA, 26 bp, Homo sapiens
ctcttaaatgtcagactttgaaaagg

SEQ ID NO: 72648 - DNA, 26 bp, Homo sapiens
tcttaaatgtcagactttgaaaaggt

SEQ ID NO: 72649 - DNA, 26 bp, Homo sapiens
cttaaatgtcagactttgaaaaggtt

SEQ ID NO: 72650 - DNA, 26 bp, Homo sapiens
ttaaatgtcagactttgaaaaggttg

SEQ ID NO: 72651 - DNA, 26 bp, Homo sapiens
taaatgtcagactttgaaaaggttga

SEQ ID NO: 72652 - DNA, 26 bp, Homo sapiens
aaatgtcagactttgaaaaggttgac

SEQ ID NO: 72653 - DNA, 26 bp, Homo sapiens
aatgtcagactttgaaaaggttgaca

SEQ ID NO: 72654 - DNA, 26 bp, Homo sapiens
atgtcagactttgaaaaggttgacat

SEQ ID NO: 72655 - DNA, 26 bp, Homo sapiens
tgtcagactttgaaaaggttgacatt

SEQ ID NO: 72656 - DNA, 26 bp, Homo sapiens
gtcagactttgaaaaggttgacattt

SEQ ID NO: 72657 - DNA, 26 bp, Homo sapiens
tcagactttgaaaaggttgacatttc

SEQ ID NO: 72658 - DNA, 26 bp, Homo sapiens
cagactttgaaaaggttgacatttct

SEQ ID NO: 72659 - DNA, 26 bp, Homo sapiens
agactttgaaaaggttgacatttctg

SEQ ID NO: 72660 - DNA, 26 bp, Homo sapiens
gactttgaaaaggttgacatttctgt

SEQ ID NO: 72661 - DNA, 26 bp, Homo sapiens
actttgaaaaggttgacatttctgtt

SEQ ID NO: 72662 - DNA, 26 bp, Homo sapiens
ctttgaaaaggttgacatttctgttc

SEQ ID NO: 72663 - DNA, 26 bp, Homo sapiens
tttgaaaaggttgacatttctgttca

SEQ ID NO: 72664 - DNA, 26 bp, Homo sapiens
ttgaaaaggttgacatttctgttcac

SEQ ID NO: 72665 - DNA, 26 bp, Homo sapiens
tgaaaaggttgacatttctgttcacc

SEQ ID NO: 72666 - DNA, 26 bp, Homo sapiens
gaaaaggttgacatttctgttcacca

SEQ ID NO: 72667 - DNA, 26 bp, Homo sapiens
aaaaggttgacatttctgttcaccag

SEQ ID NO: 72668 - DNA, 26 bp, Homo sapiens
aaaggttgacatttctgttcaccagc

SEQ ID NO: 72669 - DNA, 26 bp, Homo sapiens
aaggttgacatttctgttcaccagca

SEQ ID NO: 72670 - DNA, 26 bp, Homo sapiens
aggttgacatttctgttcaccagcat

SEQ ID NO: 72671 - DNA, 26 bp, Homo sapiens
ggttgacatttctgttcaccagcata

SEQ ID NO: 72672 - DNA, 26 bp, Homo sapiens
gttgacatttctgttcaccagcatat

SEQ ID NO: 72673 - DNA, 26 bp, Homo sapiens
ttgacatttctgttcaccagcatata

SEQ ID NO: 72674 - DNA, 26 bp, Homo sapiens
tgacatttctgttcaccagcatatac

SEQ ID NO: 72675 - DNA, 26 bp, Homo sapiens
gacatttctgttcaccagcatataca

SEQ ID NO: 72676 - DNA, 26 bp, Homo sapiens
acatttctgttcaccagcatatacac

SEQ ID NO: 72677 - DNA, 26 bp, Homo sapiens
catttctgttcaccagcatatacacg

SEQ ID NO: 72678 - DNA, 26 bp, Homo sapiens
atttctgttcaccagcatatacacgt

SEQ ID NO: 72679 - DNA, 26 bp, Homo sapiens
tttctgttcaccagcatatacacgtg

SEQ ID NO: 72680 - DNA, 26 bp, Homo sapiens
ttctgttcaccagcatatacacgtgg

SEQ ID NO: 72681 - DNA, 26 bp, Homo sapiens
tctgttcaccagcatatacacgtggg

SEQ ID NO: 72682 - DNA, 26 bp, Homo sapiens
ctgttcaccagcatatacacgtgggc

SEQ ID NO: 72683 - DNA, 26 bp, Homo sapiens
tgttcaccagcatatacacgtgggcc

SEQ ID NO: 72684 - DNA, 26 bp, Homo sapiens
gttcaccagcatatacacgtgggccc

SEQ ID NO: 72685 - DNA, 26 bp, Homo sapiens
ttcaccagcatatacacgtgggccct

SEQ ID NO: 72686 - DNA, 26 bp, Homo sapiens
tcaccagcatatacacgtgggccctc

SEQ ID NO: 72687 - DNA, 26 bp, Homo sapiens
caccagcatatacacgtgggccctct

SEQ ID NO: 72688 - DNA, 26 bp, Homo sapiens
accagcatatacacgtgggccctctc

SEQ ID NO: 72689 - DNA, 26 bp, Homo sapiens
ccagcatatacacgtgggccctctct

SEQ ID NO: 72690 - DNA, 26 bp, Homo sapiens
cagcatatacacgtgggccctctctt

SEQ ID NO: 72691 - DNA, 26 bp, Homo sapiens
agcatatacacgtgggccctctctta

SEQ ID NO: 72692 - DNA, 26 bp, Homo sapiens
gcatatacacgtgggccctctcttac

SEQ ID NO: 72693 - DNA, 26 bp, Homo sapiens
catatacacgtgggccctctcttact

SEQ ID NO: 72694 - DNA, 26 bp, Homo sapiens
atatacacgtgggccctctcttactg

SEQ ID NO: 72695 - DNA, 26 bp, Homo sapiens
tatacacgtgggccctctcttactga

SEQ ID NO: 72696 - DNA, 26 bp, Homo sapiens
atacacgtgggccctctcttactgat

SEQ ID NO: 72697 - DNA, 26 bp, Homo sapiens
tacacgtgggccctctcttactgatg

SEQ ID NO: 72698 - DNA, 26 bp, Homo sapiens
acacgtgggccctctcttactgatga

SEQ ID NO: 72699 - DNA, 26 bp, Homo sapiens
cacgtgggccctctcttactgatgac

SEQ ID NO: 72700 - DNA, 26 bp, Homo sapiens
acgtgggccctctcttactgatgacc

SEQ ID NO: 72701 - DNA, 26 bp, Homo sapiens
cgtgggccctctcttactgatgacca

SEQ ID NO: 72702 - DNA, 26 bp, Homo sapiens
gtgggccctctcttactgatgaccac

SEQ ID NO: 72703 - DNA, 26 bp, Homo sapiens
tgggccctctcttactgatgaccaca

SEQ ID NO: 72704 - DNA, 26 bp, Homo sapiens
gggccctctcttactgatgaccacag

SEQ ID NO: 72705 - DNA, 26 bp, Homo sapiens
ggccctctcttactgatgaccacaga

SEQ ID NO: 72706 - DNA, 26 bp, Homo sapiens
gccctctcttactgatgaccacagag

SEQ ID NO: 72707 - DNA, 26 bp, Homo sapiens
ccctctcttactgatgaccacagagt

SEQ ID NO: 72708 - DNA, 26 bp, Homo sapiens
cctctcttactgatgaccacagagtc

SEQ ID NO: 72709 - DNA, 26 bp, Homo sapiens
ctctcttactgatgaccacagagtcc

SEQ ID NO: 72710 - DNA, 26 bp, Homo sapiens
tctcttactgatgaccacagagtcct

SEQ ID NO: 72711 - DNA, 26 bp, Homo sapiens
ctcttactgatgaccacagagtcctg

SEQ ID NO: 72712 - DNA, 26 bp, Homo sapiens
tcttactgatgaccacagagtcctgg

SEQ ID NO: 72713 - DNA, 26 bp, Homo sapiens
cttactgatgaccacagagtcctggg

SEQ ID NO: 72714 - DNA, 26 bp, Homo sapiens
ttactgatgaccacagagtcctgggg

SEQ ID NO: 72715 - DNA, 26 bp, Homo sapiens
tactgatgaccacagagtcctgggga

SEQ ID NO: 72716 - DNA, 26 bp, Homo sapiens
actgatgaccacagagtcctggggac

SEQ ID NO: 72717 - DNA, 26 bp, Homo sapiens
ctgatgaccacagagtcctggggacc

SEQ ID NO: 72718 - DNA, 26 bp, Homo sapiens
tgatgaccacagagtcctggggacct

SEQ ID NO: 72719 - DNA, 26 bp, Homo sapiens
gatgaccacagagtcctggggacctt

SEQ ID NO: 72720 - DNA, 26 bp, Homo sapiens
atgaccacagagtcctggggaccttc

SEQ ID NO: 72721 - DNA, 26 bp, Homo sapiens
tgaccacagagtcctggggaccttcc

SEQ ID NO: 72722 - DNA, 26 bp, Homo sapiens
gaccacagagtcctggggaccttcct

SEQ ID NO: 72723 - DNA, 26 bp, Homo sapiens
accacagagtcctggggaccttcctg

SEQ ID NO: 72724 - DNA, 26 bp, Homo sapiens
ccacagagtcctggggaccttcctgt

SEQ ID NO: 72725 - DNA, 26 bp, Homo sapiens
cacagagtcctggggaccttcctgtg

SEQ ID NO: 72726 - DNA, 26 bp, Homo sapiens
acagagtcctggggaccttcctgtgc

SEQ ID NO: 72727 - DNA, 26 bp, Homo sapiens
cagagtcctggggaccttcctgtgct

SEQ ID NO: 72728 - DNA, 26 bp, Homo sapiens
agagtcctggggaccttcctgtgctc

SEQ ID NO: 72729 - DNA, 26 bp, Homo sapiens
gagtcctggggaccttcctgtgctcc

SEQ ID NO: 72730 - DNA, 26 bp, Homo sapiens
agtcctggggaccttcctgtgctccc

SEQ ID NO: 72731 - DNA, 26 bp, Homo sapiens
gtcctggggaccttcctgtgctccca

SEQ ID NO: 72732 - DNA, 26 bp, Homo sapiens
tcctggggaccttcctgtgctcccag

SEQ ID NO: 72733 - DNA, 26 bp, Homo sapiens
cctggggaccttcctgtgctcccagc

SEQ ID NO: 72734 - DNA, 26 bp, Homo sapiens
ctggggaccttcctgtgctcccagcc

SEQ ID NO: 72735 - DNA, 26 bp, Homo sapiens
tggggaccttcctgtgctcccagccc

SEQ ID NO: 72736 - DNA, 26 bp, Homo sapiens
ggggaccttcctgtgctcccagccca

SEQ ID NO: 72737 - DNA, 26 bp, Homo sapiens
gggaccttcctgtgctcccagcccag

SEQ ID NO: 72738 - DNA, 26 bp, Homo sapiens
ggaccttcctgtgctcccagcccagc

SEQ ID NO: 72739 - DNA, 26 bp, Homo sapiens
gaccttcctgtgctcccagcccagct

SEQ ID NO: 72740 - DNA, 26 bp, Homo sapiens
accttcctgtgctcccagcccagctc

SEQ ID NO: 72741 - DNA, 26 bp, Homo sapiens
ccttcctgtgctcccagcccagctct

SEQ ID NO: 72742 - DNA, 26 bp, Homo sapiens
cttcctgtgctcccagcccagctctc

SEQ ID NO: 72743 - DNA, 26 bp, Homo sapiens
ttcctgtgctcccagcccagctctcc

SEQ ID NO: 72744 - DNA, 26 bp, Homo sapiens
tcctgtgctcccagcccagctctcct

SEQ ID NO: 72745 - DNA, 26 bp, Homo sapiens
cctgtgctcccagcccagctctcctc

SEQ ID NO: 72746 - DNA, 26 bp, Homo sapiens
ctgtgctcccagcccagctctcctct

SEQ ID NO: 72747 - DNA, 26 bp, Homo sapiens
tgtgctcccagcccagctctcctctc

SEQ ID NO: 72748 - DNA, 26 bp, Homo sapiens
gtgctcccagcccagctctcctctcc

SEQ ID NO: 72749 - DNA, 26 bp, Homo sapiens
tgctcccagcccagctctcctctccg

SEQ ID NO: 72750 - DNA, 26 bp, Homo sapiens
gctcccagcccagctctcctctccgg

SEQ ID NO: 72751 - DNA, 26 bp, Homo sapiens
ctcccagcccagctctcctctccggc

SEQ ID NO: 72752 - DNA, 26 bp, Homo sapiens
tcccagcccagctctcctctccggcc

SEQ ID NO: 72753 - DNA, 26 bp, Homo sapiens
cccagcccagctctcctctccggcca

SEQ ID NO: 72754 - DNA, 26 bp, Homo sapiens
ccagcccagctctcctctccggccac

SEQ ID NO: 72755 - DNA, 26 bp, Homo sapiens
cagcccagctctcctctccggccaca

SEQ ID NO: 72756 - DNA, 26 bp, Homo sapiens
agcccagctctcctctccggccacac

SEQ ID NO: 72757 - DNA, 26 bp, Homo sapiens
gcccagctctcctctccggccacact

SEQ ID NO: 72758 - DNA, 26 bp, Homo sapiens
cccagctctcctctccggccacactg

SEQ ID NO: 72759 - DNA, 26 bp, Homo sapiens
ccagctctcctctccggccacactgc

SEQ ID NO: 72760 - DNA, 26 bp, Homo sapiens
cagctctcctctccggccacactgct

SEQ ID NO: 72761 - DNA, 26 bp, Homo sapiens
agctctcctctccggccacactgctg

SEQ ID NO: 72762 - DNA, 26 bp, Homo sapiens
gctctcctctccggccacactgctgc

SEQ ID NO: 72763 - DNA, 26 bp, Homo sapiens
ctctcctctccggccacactgctgcc

SEQ ID NO: 72764 - DNA, 26 bp, Homo sapiens
tctcctctccggccacactgctgcct

SEQ ID NO: 72765 - DNA, 26 bp, Homo sapiens
ctcctctccggccacactgctgcctc

SEQ ID NO: 72766 - DNA, 26 bp, Homo sapiens
tcctctccggccacactgctgcctcc

SEQ ID NO: 72767 - DNA, 26 bp, Homo sapiens
cctctccggccacactgctgcctcct

SEQ ID NO: 72768 - DNA, 26 bp, Homo sapiens
ctctccggccacactgctgcctcctt

SEQ ID NO: 72769 - DNA, 26 bp, Homo sapiens
tctccggccacactgctgcctccttc

SEQ ID NO: 72770 - DNA, 26 bp, Homo sapiens
ctccggccacactgctgcctccttca

SEQ ID NO: 72771 - DNA, 26 bp, Homo sapiens
tccggccacactgctgcctccttcac

SEQ ID NO: 72772 - DNA, 26 bp, Homo sapiens
ccggccacactgctgcctccttcacc

SEQ ID NO: 72773 - DNA, 26 bp, Homo sapiens
cggccacactgctgcctccttcaccc

SEQ ID NO: 72774 - DNA, 26 bp, Homo sapiens
ggccacactgctgcctccttcaccca

SEQ ID NO: 72775 - DNA, 26 bp, Homo sapiens
gccacactgctgcctccttcacccat

SEQ ID NO: 72776 - DNA, 26 bp, Homo sapiens
ccacactgctgcctccttcacccata

SEQ ID NO: 72777 - DNA, 26 bp, Homo sapiens
cacactgctgcctccttcacccatac

SEQ ID NO: 72778 - DNA, 26 bp, Homo sapiens
acactgctgcctccttcacccataca

SEQ ID NO: 72779 - DNA, 26 bp, Homo sapiens
cactgctgcctccttcacccatacac

SEQ ID NO: 72780 - DNA, 26 bp, Homo sapiens
actgctgcctccttcacccatacact

SEQ ID NO: 72781 - DNA, 26 bp, Homo sapiens
ggaaagcagtcaggagttcctgggtg

SEQ ID NO: 72782 - DNA, 26 bp, Homo sapiens
gaaagcagtcaggagttcctgggtgg

SEQ ID NO: 72783 - DNA, 26 bp, Homo sapiens
aaagcagtcaggagttcctgggtggc

SEQ ID NO: 72784 - DNA, 26 bp, Homo sapiens
aagcagtcaggagttcctgggtggcc

SEQ ID NO: 72785 - DNA, 26 bp, Homo sapiens
agcagtcaggagttcctgggtggcca

SEQ ID NO: 72786 - DNA, 26 bp, Homo sapiens
gcagtcaggagttcctgggtggccac

SEQ ID NO: 72787 - DNA, 26 bp, Homo sapiens
cagtcaggagttcctgggtggccacg

SEQ ID NO: 72788 - DNA, 26 bp, Homo sapiens
agtcaggagttcctgggtggccacgg

SEQ ID NO: 72789 - DNA, 26 bp, Homo sapiens
gtcaggagttcctgggtggccacggc

SEQ ID NO: 72790 - DNA, 26 bp, Homo sapiens
tcaggagttcctgggtggccacggct

SEQ ID NO: 72791 - DNA, 26 bp, Homo sapiens
caggagttcctgggtggccacggctc

SEQ ID NO: 72792 - DNA, 26 bp, Homo sapiens
aggagttcctgggtggccacggctct

SEQ ID NO: 72793 - DNA, 26 bp, Homo sapiens
ggagttcctgggtggccacggctctg

SEQ ID NO: 72794 - DNA, 26 bp, Homo sapiens
gagttcctgggtggccacggctctgc

SEQ ID NO: 72795 - DNA, 26 bp, Homo sapiens
agttcctgggtggccacggctctgca

SEQ ID NO: 72796 - DNA, 26 bp, Homo sapiens
gttcctgggtggccacggctctgcaa

SEQ ID NO: 72797 - DNA, 26 bp, Homo sapiens
ttcctgggtggccacggctctgcaat

SEQ ID NO: 72798 - DNA, 26 bp, Homo sapiens
tcctgggtggccacggctctgcaata

SEQ ID NO: 72799 - DNA, 26 bp, Homo sapiens
cctgggtggccacggctctgcaatag

SEQ ID NO: 72800 - DNA, 26 bp, Homo sapiens
ctgggtggccacggctctgcaatagc

SEQ ID NO: 72801 - DNA, 26 bp, Homo sapiens
tgggtggccacggctctgcaatagca

SEQ ID NO: 72802 - DNA, 26 bp, Homo sapiens
gggtggccacggctctgcaatagcac

SEQ ID NO: 72803 - DNA, 26 bp, Homo sapiens
ggtggccacggctctgcaatagcact

SEQ ID NO: 72804 - DNA, 26 bp, Homo sapiens
gtggccacggctctgcaatagcactt

SEQ ID NO: 72805 - DNA, 26 bp, Homo sapiens
tggccacggctctgcaatagcactta

SEQ ID NO: 72806 - DNA, 26 bp, Homo sapiens
ggccacggctctgcaatagcacttat

SEQ ID NO: 72807 - DNA, 26 bp, Homo sapiens
gccacggctctgcaatagcacttatg

SEQ ID NO: 72808 - DNA, 26 bp, Homo sapiens
ccacggctctgcaatagcacttatgt

SEQ ID NO: 72809 - DNA, 26 bp, Homo sapiens
cacggctctgcaatagcacttatgtc

SEQ ID NO: 72810 - DNA, 26 bp, Homo sapiens
acggctctgcaatagcacttatgtca

SEQ ID NO: 72811 - DNA, 26 bp, Homo sapiens
cggctctgcaatagcacttatgtcat

SEQ ID NO: 72812 - DNA, 26 bp, Homo sapiens
ggctctgcaatagcacttatgtcatg

SEQ ID NO: 72813 - DNA, 26 bp, Homo sapiens
gctctgcaatagcacttatgtcatgg

SEQ ID NO: 72814 - DNA, 26 bp, Homo sapiens
ctctgcaatagcacttatgtcatgga

SEQ ID NO: 72815 - DNA, 26 bp, Homo sapiens
tctgcaatagcacttatgtcatggaa

SEQ ID NO: 72816 - DNA, 26 bp, Homo sapiens
ctgcaatagcacttatgtcatggaag

SEQ ID NO: 72817 - DNA, 26 bp, Homo sapiens
tgcaatagcacttatgtcatggaagt

SEQ ID NO: 72818 - DNA, 26 bp, Homo sapiens
gcaatagcacttatgtcatggaagtg

SEQ ID NO: 72819 - DNA, 26 bp, Homo sapiens
caatagcacttatgtcatggaagtga

SEQ ID NO: 72820 - DNA, 26 bp, Homo sapiens
aatagcacttatgtcatggaagtgat

SEQ ID NO: 72821 - DNA, 26 bp, Homo sapiens
atagcacttatgtcatggaagtgata

SEQ ID NO: 72822 - DNA, 26 bp, Homo sapiens
tagcacttatgtcatggaagtgatat

SEQ ID NO: 72823 - DNA, 26 bp, Homo sapiens
agcacttatgtcatggaagtgatatc

SEQ ID NO: 72824 - DNA, 26 bp, Homo sapiens
gcacttatgtcatggaagtgatatcc

SEQ ID NO: 72825 - DNA, 26 bp, Homo sapiens
cacttatgtcatggaagtgatatccc

SEQ ID NO: 72826 - DNA, 26 bp, Homo sapiens
acttatgtcatggaagtgatatccca

SEQ ID NO: 72827 - DNA, 26 bp, Homo sapiens
cttatgtcatggaagtgatatcccac

SEQ ID NO: 72828 - DNA, 26 bp, Homo sapiens
ttatgtcatggaagtgatatcccacc

SEQ ID NO: 72829 - DNA, 26 bp, Homo sapiens
tatgtcatggaagtgatatcccacct

SEQ ID NO: 72830 - DNA, 26 bp, Homo sapiens
atgtcatggaagtgatatcccacctc

SEQ ID NO: 72831 - DNA, 26 bp, Homo sapiens
tgtcatggaagtgatatcccacctcc

SEQ ID NO: 72832 - DNA, 26 bp, Homo sapiens
gtcatggaagtgatatcccacctcct

SEQ ID NO: 72833 - DNA, 26 bp, Homo sapiens
tcatggaagtgatatcccacctccta

SEQ ID NO: 72834 - DNA, 26 bp, Homo sapiens
catggaagtgatatcccacctcctac

SEQ ID NO: 72835 - DNA, 26 bp, Homo sapiens
atggaagtgatatcccacctcctaca

SEQ ID NO: 72836 - DNA, 26 bp, Homo sapiens
tggaagtgatatcccacctcctacat

SEQ ID NO: 72837 - DNA, 26 bp, Homo sapiens
ggaagtgatatcccacctcctacata

SEQ ID NO: 72838 - DNA, 26 bp, Homo sapiens
gaagtgatatcccacctcctacatat

SEQ ID NO: 72839 - DNA, 26 bp, Homo sapiens
aagtgatatcccacctcctacatata

SEQ ID NO: 72840 - DNA, 26 bp, Homo sapiens
agtgatatcccacctcctacatatac

SEQ ID NO: 72841 - DNA, 26 bp, Homo sapiens
gtgatatcccacctcctacatatact

SEQ ID NO: 72842 - DNA, 26 bp, Homo sapiens
tgatatcccacctcctacatatactc

SEQ ID NO: 72843 - DNA, 26 bp, Homo sapiens
gatatcccacctcctacatatactct

SEQ ID NO: 72844 - DNA, 26 bp, Homo sapiens
atatcccacctcctacatatactctt

SEQ ID NO: 72845 - DNA, 26 bp, Homo sapiens
tatcccacctcctacatatactcttt

SEQ ID NO: 72846 - DNA, 26 bp, Homo sapiens
atcccacctcctacatatactctttg

SEQ ID NO: 72847 - DNA, 26 bp, Homo sapiens
tcccacctcctacatatactctttgc

SEQ ID NO: 72848 - DNA, 26 bp, Homo sapiens
cccacctcctacatatactctttgcc

SEQ ID NO: 72849 - DNA, 26 bp, Homo sapiens
ccacctcctacatatactctttgcct

SEQ ID NO: 72850 - DNA, 26 bp, Homo sapiens
cacctcctacatatactctttgccta

SEQ ID NO: 72851 - DNA, 26 bp, Homo sapiens
acctcctacatatactctttgcctag

SEQ ID NO: 72852 - DNA, 26 bp, Homo sapiens
cctcctacatatactctttgcctagg

SEQ ID NO: 72853 - DNA, 26 bp, Homo sapiens
ctcctacatatactctttgcctaggt

SEQ ID NO: 72854 - DNA, 26 bp, Homo sapiens
tcctacatatactctttgcctaggtt

SEQ ID NO: 72855 - DNA, 26 bp, Homo sapiens
cctacatatactctttgcctaggttt

SEQ ID NO: 72856 - DNA, 26 bp, Homo sapiens
ctacatatactctttgcctaggtttt

SEQ ID NO: 72857 - DNA, 26 bp, Homo sapiens
tacatatactctttgcctaggttttt

SEQ ID NO: 72858 - DNA, 26 bp, Homo sapiens
acatatactctttgcctaggtttttg

SEQ ID NO: 72859 - DNA, 26 bp, Homo sapiens
catatactctttgcctaggtttttgg

SEQ ID NO: 72860 - DNA, 26 bp, Homo sapiens
atatactctttgcctaggtttttgga

SEQ ID NO: 72861 - DNA, 26 bp, Homo sapiens
tatactctttgcctaggtttttggaa

SEQ ID NO: 72862 - DNA, 26 bp, Homo sapiens
atactctttgcctaggtttttggaac

SEQ ID NO: 72863 - DNA, 26 bp, Homo sapiens
tactctttgcctaggtttttggaaca

SEQ ID NO: 72864 - DNA, 26 bp, Homo sapiens
actctttgcctaggtttttggaacaa

SEQ ID NO: 72865 - DNA, 26 bp, Homo sapiens
ctctttgcctaggtttttggaacaag

SEQ ID NO: 72866 - DNA, 26 bp, Homo sapiens
tctttgcctaggtttttggaacaagg

SEQ ID NO: 72867 - DNA, 26 bp, Homo sapiens
ctttgcctaggtttttggaacaaggt

SEQ ID NO: 72868 - DNA, 26 bp, Homo sapiens
tttgcctaggtttttggaacaaggtt

SEQ ID NO: 72869 - DNA, 26 bp, Homo sapiens
ttgcctaggtttttggaacaaggtta

SEQ ID NO: 72870 - DNA, 26 bp, Homo sapiens
tgcctaggtttttggaacaaggttat

SEQ ID NO: 72871 - DNA, 26 bp, Homo sapiens
gcctaggtttttggaacaaggttata

SEQ ID NO: 72872 - DNA, 26 bp, Homo sapiens
cctaggtttttggaacaaggttatag

SEQ ID NO: 72873 - DNA, 26 bp, Homo sapiens
ctaggtttttggaacaaggttatagt

SEQ ID NO: 72874 - DNA, 26 bp, Homo sapiens
taggtttttggaacaaggttatagtc

SEQ ID NO: 72875 - DNA, 26 bp, Homo sapiens
aggtttttggaacaaggttatagtca

SEQ ID NO: 72876 - DNA, 26 bp, Homo sapiens
ggtttttggaacaaggttatagtcag

SEQ ID NO: 72877 - DNA, 26 bp, Homo sapiens
gtttttggaacaaggttatagtcaga

SEQ ID NO: 72878 - DNA, 26 bp, Homo sapiens
tttttggaacaaggttatagtcagac

SEQ ID NO: 72879 - DNA, 26 bp, Homo sapiens
ttttggaacaaggttatagtcagaca

SEQ ID NO: 72880 - DNA, 26 bp, Homo sapiens
tttggaacaaggttatagtcagacac

SEQ ID NO: 72881 - DNA, 26 bp, Homo sapiens
ttggaacaaggttatagtcagacact

SEQ ID NO: 72882 - DNA, 26 bp, Homo sapiens
tggaacaaggttatagtcagacactg

SEQ ID NO: 72883 - DNA, 26 bp, Homo sapiens
ggaacaaggttatagtcagacactgt

SEQ ID NO: 72884 - DNA, 26 bp, Homo sapiens
gaacaaggttatagtcagacactgta

SEQ ID NO: 72885 - DNA, 26 bp, Homo sapiens
aacaaggttatagtcagacactgtat

SEQ ID NO: 72886 - DNA, 26 bp, Homo sapiens
acaaggttatagtcagacactgtatc

SEQ ID NO: 72887 - DNA, 26 bp, Homo sapiens
caaggttatagtcagacactgtatct

SEQ ID NO: 72888 - DNA, 26 bp, Homo sapiens
aaggttatagtcagacactgtatctt

SEQ ID NO: 72889 - DNA, 26 bp, Homo sapiens
aggttatagtcagacactgtatcttt

SEQ ID NO: 72890 - DNA, 26 bp, Homo sapiens
ggttatagtcagacactgtatcttta

SEQ ID NO: 72891 - DNA, 26 bp, Homo sapiens
gttatagtcagacactgtatctttag

SEQ ID NO: 72892 - DNA, 26 bp, Homo sapiens
ttatagtcagacactgtatctttaga

SEQ ID NO: 72893 - DNA, 26 bp, Homo sapiens
tatagtcagacactgtatctttagat

SEQ ID NO: 72894 - DNA, 26 bp, Homo sapiens
atagtcagacactgtatctttagatt

SEQ ID NO: 72895 - DNA, 26 bp, Homo sapiens
tagtcagacactgtatctttagattg

SEQ ID NO: 72896 - DNA, 26 bp, Homo sapiens
agtcagacactgtatctttagattga

SEQ ID NO: 72897 - DNA, 26 bp, Homo sapiens
gtcagacactgtatctttagattgat

SEQ ID NO: 72898 - DNA, 26 bp, Homo sapiens
tcagacactgtatctttagattgatg

SEQ ID NO: 72899 - DNA, 26 bp, Homo sapiens
cagacactgtatctttagattgatgt

SEQ ID NO: 72900 - DNA, 26 bp, Homo sapiens
agacactgtatctttagattgatgtc

SEQ ID NO: 72901 - DNA, 26 bp, Homo sapiens
gacactgtatctttagattgatgtcg

SEQ ID NO: 72902 - DNA, 26 bp, Homo sapiens
acactgtatctttagattgatgtcga

SEQ ID NO: 72903 - DNA, 26 bp, Homo sapiens
cactgtatctttagattgatgtcgac

SEQ ID NO: 72904 - DNA, 26 bp, Homo sapiens
actgtatctttagattgatgtcgacc

SEQ ID NO: 72905 - DNA, 26 bp, Homo sapiens
ctgtatctttagattgatgtcgacca

SEQ ID NO: 72906 - DNA, 26 bp, Homo sapiens
tgtatctttagattgatgtcgaccac

SEQ ID NO: 72907 - DNA, 26 bp, Homo sapiens
gtatctttagattgatgtcgaccaca

SEQ ID NO: 72908 - DNA, 26 bp, Homo sapiens
tatctttagattgatgtcgaccacaa

SEQ ID NO: 72909 - DNA, 26 bp, Homo sapiens
atctttagattgatgtcgaccacaaa

SEQ ID NO: 72910 - DNA, 26 bp, Homo sapiens
tctttagattgatgtcgaccacaaag

SEQ ID NO: 72911 - DNA, 26 bp, Homo sapiens
ctttagattgatgtcgaccacaaagt

SEQ ID NO: 72912 - DNA, 26 bp, Homo sapiens
tttagattgatgtcgaccacaaagtt

SEQ ID NO: 72913 - DNA, 26 bp, Homo sapiens
ttagattgatgtcgaccacaaagttc

SEQ ID NO: 72914 - DNA, 26 bp, Homo sapiens
tagattgatgtcgaccacaaagttca

SEQ ID NO: 72915 - DNA, 26 bp, Homo sapiens
agattgatgtcgaccacaaagttcag

SEQ ID NO: 72916 - DNA, 26 bp, Homo sapiens
gattgatgtcgaccacaaagttcagc

SEQ ID NO: 72917 - DNA, 26 bp, Homo sapiens
attgatgtcgaccacaaagttcagcc

SEQ ID NO: 72918 - DNA, 26 bp, Homo sapiens
ttgatgtcgaccacaaagttcagcca

SEQ ID NO: 72919 - DNA, 26 bp, Homo sapiens
tgatgtcgaccacaaagttcagccag

SEQ ID NO: 72920 - DNA, 26 bp, Homo sapiens
gatgtcgaccacaaagttcagccaga

SEQ ID NO: 72921 - DNA, 26 bp, Homo sapiens
atgtcgaccacaaagttcagccagag

SEQ ID NO: 72922 - DNA, 26 bp, Homo sapiens
tgtcgaccacaaagttcagccagagc

SEQ ID NO: 72923 - DNA, 26 bp, Homo sapiens
gtcgaccacaaagttcagccagagct

SEQ ID NO: 72924 - DNA, 26 bp, Homo sapiens
tcgaccacaaagttcagccagagctt

SEQ ID NO: 72925 - DNA, 26 bp, Homo sapiens
cgaccacaaagttcagccagagcttg

SEQ ID NO: 72926 - DNA, 26 bp, Homo sapiens
gaccacaaagttcagccagagcttga

SEQ ID NO: 72927 - DNA, 26 bp, Homo sapiens
accacaaagttcagccagagcttgag

SEQ ID NO: 72928 - DNA, 26 bp, Homo sapiens
ccacaaagttcagccagagcttgagg

SEQ ID NO: 72929 - DNA, 26 bp, Homo sapiens
cacaaagttcagccagagcttgaggc

SEQ ID NO: 72930 - DNA, 26 bp, Homo sapiens
acaaagttcagccagagcttgaggct

SEQ ID NO: 72931 - DNA, 26 bp, Homo sapiens
caaagttcagccagagcttgaggcta

SEQ ID NO: 72932 - DNA, 26 bp, Homo sapiens
aaagttcagccagagcttgaggctag

SEQ ID NO: 72933 - DNA, 26 bp, Homo sapiens
aagttcagccagagcttgaggctaga

SEQ ID NO: 72934 - DNA, 26 bp, Homo sapiens
agttcagccagagcttgaggctagat

SEQ ID NO: 72935 - DNA, 26 bp, Homo sapiens
gttcagccagagcttgaggctagatg

SEQ ID NO: 72936 - DNA, 26 bp, Homo sapiens
ttcagccagagcttgaggctagatgc

SEQ ID NO: 72937 - DNA, 26 bp, Homo sapiens
tcagccagagcttgaggctagatgca

SEQ ID NO: 72938 - DNA, 26 bp, Homo sapiens
cagccagagcttgaggctagatgcac

SEQ ID NO: 72939 - DNA, 26 bp, Homo sapiens
agccagagcttgaggctagatgcaca

SEQ ID NO: 72940 - DNA, 26 bp, Homo sapiens
gccagagcttgaggctagatgcacag

SEQ ID NO: 72941 - DNA, 26 bp, Homo sapiens
ccagagcttgaggctagatgcacagc

SEQ ID NO: 72942 - DNA, 26 bp, Homo sapiens
cagagcttgaggctagatgcacagcc

SEQ ID NO: 72943 - DNA, 26 bp, Homo sapiens
agagcttgaggctagatgcacagcct

SEQ ID NO: 72944 - DNA, 26 bp, Homo sapiens
gagcttgaggctagatgcacagcctt

SEQ ID NO: 72945 - DNA, 26 bp, Homo sapiens
agcttgaggctagatgcacagccttg

SEQ ID NO: 72946 - DNA, 26 bp, Homo sapiens
gcttgaggctagatgcacagccttgc

SEQ ID NO: 72947 - DNA, 26 bp, Homo sapiens
cttgaggctagatgcacagccttgct

SEQ ID NO: 72948 - DNA, 26 bp, Homo sapiens
ttgaggctagatgcacagccttgcta

SEQ ID NO: 72949 - DNA, 26 bp, Homo sapiens
tgaggctagatgcacagccttgctat

SEQ ID NO: 72950 - DNA, 26 bp, Homo sapiens
gaggctagatgcacagccttgctatt

SEQ ID NO: 72951 - DNA, 26 bp, Homo sapiens
aggctagatgcacagccttgctattg

SEQ ID NO: 72952 - DNA, 26 bp, Homo sapiens
ggctagatgcacagccttgctattgg

SEQ ID NO: 72953 - DNA, 26 bp, Homo sapiens
gctagatgcacagccttgctattggg

SEQ ID NO: 72954 - DNA, 26 bp, Homo sapiens
ctagatgcacagccttgctattggga

SEQ ID NO: 72955 - DNA, 26 bp, Homo sapiens
tagatgcacagccttgctattgggaa

SEQ ID NO: 72956 - DNA, 26 bp, Homo sapiens
agatgcacagccttgctattgggaag

SEQ ID NO: 72957 - DNA, 26 bp, Homo sapiens
gatgcacagccttgctattgggaaga

SEQ ID NO: 72958 - DNA, 26 bp, Homo sapiens
atgcacagccttgctattgggaagaa

SEQ ID NO: 72959 - DNA, 26 bp, Homo sapiens
tgcacagccttgctattgggaagaag

SEQ ID NO: 72960 - DNA, 26 bp, Homo sapiens
gcacagccttgctattgggaagaagg

SEQ ID NO: 72961 - DNA, 26 bp, Homo sapiens
cacagccttgctattgggaagaaggc

SEQ ID NO: 72962 - DNA, 26 bp, Homo sapiens
acagccttgctattgggaagaaggcc

SEQ ID NO: 72963 - DNA, 26 bp, Homo sapiens
cagccttgctattgggaagaaggcct

SEQ ID NO: 72964 - DNA, 26 bp, Homo sapiens
agccttgctattgggaagaaggcctt

SEQ ID NO: 72965 - DNA, 26 bp, Homo sapiens
gccttgctattgggaagaaggccttt

SEQ ID NO: 72966 - DNA, 26 bp, Homo sapiens
ccttgctattgggaagaaggcctttt

SEQ ID NO: 72967 - DNA, 26 bp, Homo sapiens
cttgctattgggaagaaggccttttc

SEQ ID NO: 72968 - DNA, 26 bp, Homo sapiens
ttgctattgggaagaaggccttttct

SEQ ID NO: 72969 - DNA, 26 bp, Homo sapiens
tgctattgggaagaaggccttttcta

SEQ ID NO: 72970 - DNA, 26 bp, Homo sapiens
gctattgggaagaaggccttttctag

SEQ ID NO: 72971 - DNA, 26 bp, Homo sapiens
ctattgggaagaaggccttttctagc

SEQ ID NO: 72972 - DNA, 26 bp, Homo sapiens
tattgggaagaaggccttttctagct

SEQ ID NO: 72973 - DNA, 26 bp, Homo sapiens
attgggaagaaggccttttctagctg

SEQ ID NO: 72974 - DNA, 26 bp, Homo sapiens
ttgggaagaaggccttttctagctgt

SEQ ID NO: 72975 - DNA, 26 bp, Homo sapiens
tgggaagaaggccttttctagctgta

SEQ ID NO: 72976 - DNA, 26 bp, Homo sapiens
gggaagaaggccttttctagctgtac

SEQ ID NO: 72977 - DNA, 26 bp, Homo sapiens
ggaagaaggccttttctagctgtaca

SEQ ID NO: 72978 - DNA, 26 bp, Homo sapiens
gaagaaggccttttctagctgtacaa

SEQ ID NO: 72979 - DNA, 26 bp, Homo sapiens
aagaaggccttttctagctgtacaac

SEQ ID NO: 72980 - DNA, 26 bp, Homo sapiens
agaaggccttttctagctgtacaaca

SEQ ID NO: 72981 - DNA, 26 bp, Homo sapiens
gaaggccttttctagctgtacaacac

SEQ ID NO: 72982 - DNA, 26 bp, Homo sapiens
aaggccttttctagctgtacaacaca

SEQ ID NO: 72983 - DNA, 26 bp, Homo sapiens
aggccttttctagctgtacaacacag

SEQ ID NO: 72984 - DNA, 26 bp, Homo sapiens
ggccttttctagctgtacaacacagt

SEQ ID NO: 72985 - DNA, 26 bp, Homo sapiens
gccttttctagctgtacaacacagtc

SEQ ID NO: 72986 - DNA, 26 bp, Homo sapiens
ccttttctagctgtacaacacagtct

SEQ ID NO: 72987 - DNA, 26 bp, Homo sapiens
cttttctagctgtacaacacagtctc

SEQ ID NO: 72988 - DNA, 26 bp, Homo sapiens
ttttctagctgtacaacacagtctca

SEQ ID NO: 72989 - DNA, 26 bp, Homo sapiens
tttctagctgtacaacacagtctcac

SEQ ID NO: 72990 - DNA, 26 bp, Homo sapiens
ttctagctgtacaacacagtctcact

SEQ ID NO: 72991 - DNA, 26 bp, Homo sapiens
tctagctgtacaacacagtctcactg

SEQ ID NO: 72992 - DNA, 26 bp, Homo sapiens
ctagctgtacaacacagtctcactgg

SEQ ID NO: 72993 - DNA, 26 bp, Homo sapiens
tagctgtacaacacagtctcactggg

SEQ ID NO: 72994 - DNA, 26 bp, Homo sapiens
agctgtacaacacagtctcactgggc

SEQ ID NO: 72995 - DNA, 26 bp, Homo sapiens
gctgtacaacacagtctcactgggca

SEQ ID NO: 72996 - DNA, 26 bp, Homo sapiens
ctgtacaacacagtctcactgggcat

SEQ ID NO: 72997 - DNA, 26 bp, Homo sapiens
tgtacaacacagtctcactgggcatt

SEQ ID NO: 72998 - DNA, 26 bp, Homo sapiens
gtacaacacagtctcactgggcattc

SEQ ID NO: 72999 - DNA, 26 bp, Homo sapiens
tacaacacagtctcactgggcattca

SEQ ID NO: 73000 - DNA, 26 bp, Homo sapiens
acaacacagtctcactgggcattcat

SEQ ID NO: 73001 - DNA, 26 bp, Homo sapiens
caacacagtctcactgggcattcatc

SEQ ID NO: 73002 - DNA, 26 bp, Homo sapiens
aacacagtctcactgggcattcatcc

SEQ ID NO: 73003 - DNA, 26 bp, Homo sapiens
acacagtctcactgggcattcatcca

SEQ ID NO: 73004 - DNA, 26 bp, Homo sapiens
cacagtctcactgggcattcatccag

SEQ ID NO: 73005 - DNA, 26 bp, Homo sapiens
acagtctcactgggcattcatccaga

SEQ ID NO: 73006 - DNA, 26 bp, Homo sapiens
cagtctcactgggcattcatccagaa

SEQ ID NO: 73007 - DNA, 26 bp, Homo sapiens
agtctcactgggcattcatccagaaa

SEQ ID NO: 73008 - DNA, 26 bp, Homo sapiens
gtctcactgggcattcatccagaaat

SEQ ID NO: 73009 - DNA, 26 bp, Homo sapiens
tctcactgggcattcatccagaaata

SEQ ID NO: 73010 - DNA, 26 bp, Homo sapiens
ctcactgggcattcatccagaaatag

SEQ ID NO: 73011 - DNA, 26 bp, Homo sapiens
tcactgggcattcatccagaaataga

SEQ ID NO: 73012 - DNA, 26 bp, Homo sapiens
cactgggcattcatccagaaatagag

SEQ ID NO: 73013 - DNA, 26 bp, Homo sapiens
actgggcattcatccagaaatagaga

SEQ ID NO: 73014 - DNA, 26 bp, Homo sapiens
ctgggcattcatccagaaatagagaa

SEQ ID NO: 73015 - DNA, 26 bp, Homo sapiens
tgggcattcatccagaaatagagaag

SEQ ID NO: 73016 - DNA, 26 bp, Homo sapiens
gggcattcatccagaaatagagaaga

SEQ ID NO: 73017 - DNA, 26 bp, Homo sapiens
ggcattcatccagaaatagagaagaa

SEQ ID NO: 73018 - DNA, 26 bp, Homo sapiens
gcattcatccagaaatagagaagaaa

SEQ ID NO: 73019 - DNA, 26 bp, Homo sapiens
cattcatccagaaatagagaagaaag

SEQ ID NO: 73020 - DNA, 26 bp, Homo sapiens
attcatccagaaatagagaagaaagt

SEQ ID NO: 73021 - DNA, 26 bp, Homo sapiens
ttcatccagaaatagagaagaaagtc

SEQ ID NO: 73022 - DNA, 26 bp, Homo sapiens
tcatccagaaatagagaagaaagtct

SEQ ID NO: 73023 - DNA, 26 bp, Homo sapiens
catccagaaatagagaagaaagtctg

SEQ ID NO: 73024 - DNA, 26 bp, Homo sapiens
atccagaaatagagaagaaagtctgc

SEQ ID NO: 73025 - DNA, 26 bp, Homo sapiens
tccagaaatagagaagaaagtctgcc

SEQ ID NO: 73026 - DNA, 26 bp, Homo sapiens
ccagaaatagagaagaaagtctgcca

SEQ ID NO: 73027 - DNA, 26 bp, Homo sapiens
cagaaatagagaagaaagtctgccag

SEQ ID NO: 73028 - DNA, 26 bp, Homo sapiens
agaaatagagaagaaagtctgccaga

SEQ ID NO: 73029 - DNA, 26 bp, Homo sapiens
gaaatagagaagaaagtctgccagac

SEQ ID NO: 73030 - DNA, 26 bp, Homo sapiens
aaatagagaagaaagtctgccagact

SEQ ID NO: 73031 - DNA, 26 bp, Homo sapiens
aatagagaagaaagtctgccagactt

SEQ ID NO: 73032 - DNA, 26 bp, Homo sapiens
atagagaagaaagtctgccagacttg

SEQ ID NO: 73033 - DNA, 26 bp, Homo sapiens
tagagaagaaagtctgccagacttga

SEQ ID NO: 73034 - DNA, 26 bp, Homo sapiens
agagaagaaagtctgccagacttgag

SEQ ID NO: 73035 - DNA, 26 bp, Homo sapiens
gagaagaaagtctgccagacttgagt

SEQ ID NO: 73036 - DNA, 26 bp, Homo sapiens
agaagaaagtctgccagacttgagtt

SEQ ID NO: 73037 - DNA, 26 bp, Homo sapiens
gaagaaagtctgccagacttgagtta

SEQ ID NO: 73038 - DNA, 26 bp, Homo sapiens
aagaaagtctgccagacttgagttat

SEQ ID NO: 73039 - DNA, 26 bp, Homo sapiens
agaaagtctgccagacttgagttatg

SEQ ID NO: 73040 - DNA, 26 bp, Homo sapiens
gaaagtctgccagacttgagttatgt

SEQ ID NO: 73041 - DNA, 26 bp, Homo sapiens
aaagtctgccagacttgagttatgtt

SEQ ID NO: 73042 - DNA, 26 bp, Homo sapiens
aagtctgccagacttgagttatgttg

SEQ ID NO: 73043 - DNA, 26 bp, Homo sapiens
agtctgccagacttgagttatgttgt

SEQ ID NO: 73044 - DNA, 26 bp, Homo sapiens
gtctgccagacttgagttatgttgtc

SEQ ID NO: 73045 - DNA, 26 bp, Homo sapiens
tctgccagacttgagttatgttgtct

SEQ ID NO: 73046 - DNA, 26 bp, Homo sapiens
ctgccagacttgagttatgttgtctt

SEQ ID NO: 73047 - DNA, 26 bp, Homo sapiens
tgccagacttgagttatgttgtcttt

SEQ ID NO: 73048 - DNA, 26 bp, Homo sapiens
gccagacttgagttatgttgtctttt

SEQ ID NO: 73049 - DNA, 26 bp, Homo sapiens
ccagacttgagttatgttgtctttta

SEQ ID NO: 73050 - DNA, 26 bp, Homo sapiens
cagacttgagttatgttgtcttttat

SEQ ID NO: 73051 - DNA, 26 bp, Homo sapiens
agacttgagttatgttgtcttttatt

SEQ ID NO: 73052 - DNA, 26 bp, Homo sapiens
gacttgagttatgttgtcttttatta

SEQ ID NO: 73053 - DNA, 26 bp, Homo sapiens
acttgagttatgttgtcttttattag

SEQ ID NO: 73054 - DNA, 26 bp, Homo sapiens
cttgagttatgttgtcttttattagc

SEQ ID NO: 73055 - DNA, 26 bp, Homo sapiens
ttgagttatgttgtcttttattagca

SEQ ID NO: 73056 - DNA, 26 bp, Homo sapiens
tgagttatgttgtcttttattagcag

SEQ ID NO: 73057 - DNA, 26 bp, Homo sapiens
gagttatgttgtcttttattagcagg

SEQ ID NO: 73058 - DNA, 26 bp, Homo sapiens
agttatgttgtcttttattagcaggg

SEQ ID NO: 73059 - DNA, 26 bp, Homo sapiens
gttatgttgtcttttattagcaggga

SEQ ID NO: 73060 - DNA, 26 bp, Homo sapiens
ttatgttgtcttttattagcagggaa

SEQ ID NO: 73061 - DNA, 26 bp, Homo sapiens
tatgttgtcttttattagcagggaat

SEQ ID NO: 73062 - DNA, 26 bp, Homo sapiens
atgttgtcttttattagcagggaatg

SEQ ID NO: 73063 - DNA, 26 bp, Homo sapiens
tgttgtcttttattagcagggaatgt

SEQ ID NO: 73064 - DNA, 26 bp, Homo sapiens
gttgtcttttattagcagggaatgtc

SEQ ID NO: 73065 - DNA, 26 bp, Homo sapiens
ttgtcttttattagcagggaatgtca

SEQ ID NO: 73066 - DNA, 26 bp, Homo sapiens
tgtcttttattagcagggaatgtcat

SEQ ID NO: 73067 - DNA, 26 bp, Homo sapiens
gtcttttattagcagggaatgtcatc

SEQ ID NO: 73068 - DNA, 26 bp, Homo sapiens
tcttttattagcagggaatgtcatca

SEQ ID NO: 73069 - DNA, 26 bp, Homo sapiens
cttttattagcagggaatgtcatcac

SEQ ID NO: 73070 - DNA, 26 bp, Homo sapiens
ttttattagcagggaatgtcatcaca

SEQ ID NO: 73071 - DNA, 26 bp, Homo sapiens
tttattagcagggaatgtcatcacag

SEQ ID NO: 73072 - DNA, 26 bp, Homo sapiens
ttattagcagggaatgtcatcacaga

SEQ ID NO: 73073 - DNA, 26 bp, Homo sapiens
tattagcagggaatgtcatcacagat

SEQ ID NO: 73074 - DNA, 26 bp, Homo sapiens
attagcagggaatgtcatcacagatt

SEQ ID NO: 73075 - DNA, 26 bp, Homo sapiens
ttagcagggaatgtcatcacagattg

SEQ ID NO: 73076 - DNA, 26 bp, Homo sapiens
tagcagggaatgtcatcacagattgg

SEQ ID NO: 73077 - DNA, 26 bp, Homo sapiens
agcagggaatgtcatcacagattgga

SEQ ID NO: 73078 - DNA, 26 bp, Homo sapiens
gcagggaatgtcatcacagattggat

SEQ ID NO: 73079 - DNA, 26 bp, Homo sapiens
cagggaatgtcatcacagattggata

SEQ ID NO: 73080 - DNA, 26 bp, Homo sapiens
agggaatgtcatcacagattggatag

SEQ ID NO: 73081 - DNA, 26 bp, Homo sapiens
gggaatgtcatcacagattggatagt

SEQ ID NO: 73082 - DNA, 26 bp, Homo sapiens
ggaatgtcatcacagattggatagta

SEQ ID NO: 73083 - DNA, 26 bp, Homo sapiens
gaatgtcatcacagattggatagtac

SEQ ID NO: 73084 - DNA, 26 bp, Homo sapiens
aatgtcatcacagattggatagtaca

SEQ ID NO: 73085 - DNA, 26 bp, Homo sapiens
atgtcatcacagattggatagtacat

SEQ ID NO: 73086 - DNA, 26 bp, Homo sapiens
tgtcatcacagattggatagtacatc

SEQ ID NO: 73087 - DNA, 26 bp, Homo sapiens
gtcatcacagattggatagtacatcc

SEQ ID NO: 73088 - DNA, 26 bp, Homo sapiens
tcatcacagattggatagtacatcca

SEQ ID NO: 73089 - DNA, 26 bp, Homo sapiens
catcacagattggatagtacatccag

SEQ ID NO: 73090 - DNA, 26 bp, Homo sapiens
atcacagattggatagtacatccagg

SEQ ID NO: 73091 - DNA, 26 bp, Homo sapiens
tcacagattggatagtacatccaggt

SEQ ID NO: 73092 - DNA, 26 bp, Homo sapiens
cacagattggatagtacatccaggtg

SEQ ID NO: 73093 - DNA, 26 bp, Homo sapiens
acagattggatagtacatccaggtgc

SEQ ID NO: 73094 - DNA, 26 bp, Homo sapiens
cagattggatagtacatccaggtgca

SEQ ID NO: 73095 - DNA, 26 bp, Homo sapiens
agattggatagtacatccaggtgcaa

SEQ ID NO: 73096 - DNA, 26 bp, Homo sapiens
gattggatagtacatccaggtgcaat

SEQ ID NO: 73097 - DNA, 26 bp, Homo sapiens
attggatagtacatccaggtgcaatg

SEQ ID NO: 73098 - DNA, 26 bp, Homo sapiens
ttggatagtacatccaggtgcaatgt

SEQ ID NO: 73099 - DNA, 26 bp, Homo sapiens
tggatagtacatccaggtgcaatgtc

SEQ ID NO: 73100 - DNA, 26 bp, Homo sapiens
ggatagtacatccaggtgcaatgtca

SEQ ID NO: 73101 - DNA, 26 bp, Homo sapiens
gatagtacatccaggtgcaatgtcac

SEQ ID NO: 73102 - DNA, 26 bp, Homo sapiens
atagtacatccaggtgcaatgtcacc

SEQ ID NO: 73103 - DNA, 26 bp, Homo sapiens
tagtacatccaggtgcaatgtcacca

SEQ ID NO: 73104 - DNA, 26 bp, Homo sapiens
agtacatccaggtgcaatgtcaccat

SEQ ID NO: 73105 - DNA, 26 bp, Homo sapiens
gtacatccaggtgcaatgtcaccatc

SEQ ID NO: 73106 - DNA, 26 bp, Homo sapiens
tacatccaggtgcaatgtcaccatca

SEQ ID NO: 73107 - DNA, 26 bp, Homo sapiens
acatccaggtgcaatgtcaccatcag

SEQ ID NO: 73108 - DNA, 26 bp, Homo sapiens
catccaggtgcaatgtcaccatcagc

SEQ ID NO: 73109 - DNA, 26 bp, Homo sapiens
atccaggtgcaatgtcaccatcagca

SEQ ID NO: 73110 - DNA, 26 bp, Homo sapiens
tccaggtgcaatgtcaccatcagcaa

SEQ ID NO: 73111 - DNA, 26 bp, Homo sapiens
ccaggtgcaatgtcaccatcagcaag

SEQ ID NO: 73112 - DNA, 26 bp, Homo sapiens
caggtgcaatgtcaccatcagcaagg

SEQ ID NO: 73113 - DNA, 26 bp, Homo sapiens
aggtgcaatgtcaccatcagcaaggt

SEQ ID NO: 73114 - DNA, 26 bp, Homo sapiens
ggtgcaatgtcaccatcagcaaggtc

SEQ ID NO: 73115 - DNA, 26 bp, Homo sapiens
gtgcaatgtcaccatcagcaaggtca

SEQ ID NO: 73116 - DNA, 26 bp, Homo sapiens
tgcaatgtcaccatcagcaaggtcag

SEQ ID NO: 73117 - DNA, 26 bp, Homo sapiens
gcaatgtcaccatcagcaaggtcagc

SEQ ID NO: 73118 - DNA, 26 bp, Homo sapiens
caatgtcaccatcagcaaggtcagct

SEQ ID NO: 73119 - DNA, 26 bp, Homo sapiens
aatgtcaccatcagcaaggtcagctt

SEQ ID NO: 73120 - DNA, 26 bp, Homo sapiens
atgtcaccatcagcaaggtcagcttg

SEQ ID NO: 73121 - DNA, 26 bp, Homo sapiens
tgtcaccatcagcaaggtcagcttga

SEQ ID NO: 73122 - DNA, 26 bp, Homo sapiens
gtcaccatcagcaaggtcagcttgac

SEQ ID NO: 73123 - DNA, 26 bp, Homo sapiens
tcaccatcagcaaggtcagcttgaca

SEQ ID NO: 73124 - DNA, 26 bp, Homo sapiens
caccatcagcaaggtcagcttgacac

SEQ ID NO: 73125 - DNA, 26 bp, Homo sapiens
accatcagcaaggtcagcttgacact

SEQ ID NO: 73126 - DNA, 26 bp, Homo sapiens
ccatcagcaaggtcagcttgacactc

SEQ ID NO: 73127 - DNA, 26 bp, Homo sapiens
catcagcaaggtcagcttgacactca

SEQ ID NO: 73128 - DNA, 26 bp, Homo sapiens
atcagcaaggtcagcttgacactcaa

SEQ ID NO: 73129 - DNA, 26 bp, Homo sapiens
tcagcaaggtcagcttgacactcaag

SEQ ID NO: 73130 - DNA, 26 bp, Homo sapiens
cagcaaggtcagcttgacactcaagt

SEQ ID NO: 73131 - DNA, 26 bp, Homo sapiens
agcaaggtcagcttgacactcaagtg

SEQ ID NO: 73132 - DNA, 26 bp, Homo sapiens
gcaaggtcagcttgacactcaagtgg

SEQ ID NO: 73133 - DNA, 26 bp, Homo sapiens
caaggtcagcttgacactcaagtgga

SEQ ID NO: 73134 - DNA, 26 bp, Homo sapiens
aaggtcagcttgacactcaagtggaa

SEQ ID NO: 73135 - DNA, 26 bp, Homo sapiens
aggtcagcttgacactcaagtggaag

SEQ ID NO: 73136 - DNA, 26 bp, Homo sapiens
ggtcagcttgacactcaagtggaaga

SEQ ID NO: 73137 - DNA, 26 bp, Homo sapiens
gtcagcttgacactcaagtggaagat

SEQ ID NO: 73138 - DNA, 26 bp, Homo sapiens
tcagcttgacactcaagtggaagatt

SEQ ID NO: 73139 - DNA, 26 bp, Homo sapiens
cagcttgacactcaagtggaagatta

SEQ ID NO: 73140 - DNA, 26 bp, Homo sapiens
agcttgacactcaagtggaagattag

SEQ ID NO: 73141 - DNA, 26 bp, Homo sapiens
gcttgacactcaagtggaagattagg

SEQ ID NO: 73142 - DNA, 26 bp, Homo sapiens
cttgacactcaagtggaagattaggg

SEQ ID NO: 73143 - DNA, 26 bp, Homo sapiens
ttgacactcaagtggaagattaggga

SEQ ID NO: 73144 - DNA, 26 bp, Homo sapiens
tgacactcaagtggaagattagggaa

SEQ ID NO: 73145 - DNA, 26 bp, Homo sapiens
gacactcaagtggaagattagggaag

SEQ ID NO: 73146 - DNA, 26 bp, Homo sapiens
acactcaagtggaagattagggaaga

SEQ ID NO: 73147 - DNA, 26 bp, Homo sapiens
cactcaagtggaagattagggaagaa

SEQ ID NO: 73148 - DNA, 26 bp, Homo sapiens
actcaagtggaagattagggaagaat

SEQ ID NO: 73149 - DNA, 26 bp, Homo sapiens
ctcaagtggaagattagggaagaatg

SEQ ID NO: 73150 - DNA, 26 bp, Homo sapiens
tcaagtggaagattagggaagaatga

SEQ ID NO: 73151 - DNA, 26 bp, Homo sapiens
caagtggaagattagggaagaatgac

SEQ ID NO: 73152 - DNA, 26 bp, Homo sapiens
aagtggaagattagggaagaatgact

SEQ ID NO: 73153 - DNA, 26 bp, Homo sapiens
agtggaagattagggaagaatgacta

SEQ ID NO: 73154 - DNA, 26 bp, Homo sapiens
gtggaagattagggaagaatgactag

SEQ ID NO: 73155 - DNA, 26 bp, Homo sapiens
tggaagattagggaagaatgactagg

SEQ ID NO: 73156 - DNA, 26 bp, Homo sapiens
ggaagattagggaagaatgactagga

SEQ ID NO: 73157 - DNA, 26 bp, Homo sapiens
gaagattagggaagaatgactaggat

SEQ ID NO: 73158 - DNA, 26 bp, Homo sapiens
aagattagggaagaatgactaggata

SEQ ID NO: 73159 - DNA, 26 bp, Homo sapiens
agattagggaagaatgactaggataa

SEQ ID NO: 73160 - DNA, 26 bp, Homo sapiens
gattagggaagaatgactaggataaa

SEQ ID NO: 73161 - DNA, 26 bp, Homo sapiens
attagggaagaatgactaggataaaa

SEQ ID NO: 73162 - DNA, 26 bp, Homo sapiens
ttagggaagaatgactaggataaaaa

SEQ ID NO: 73163 - DNA, 26 bp, Homo sapiens
tagggaagaatgactaggataaaaaa

SEQ ID NO: 73164 - DNA, 26 bp, Homo sapiens
agggaagaatgactaggataaaaaaa

SEQ ID NO: 73165 - DNA, 26 bp, Homo sapiens
gggaagaatgactaggataaaaaaaa

SEQ ID NO: 73166 - DNA, 26 bp, Homo sapiens
ggaagaatgactaggataaaaaaaaa

SEQ ID NO: 73167 - DNA, 26 bp, Homo sapiens
gaagaatgactaggataaaaaaaaaa

SEQ ID NO: 73168 - DNA, 26 bp, Homo sapiens
aagaatgactaggataaaaaaaaaag

SEQ ID NO: 73169 - DNA, 26 bp, Homo sapiens
agaatgactaggataaaaaaaaaagg

SEQ ID NO: 73170 - DNA, 26 bp, Homo sapiens
gaatgactaggataaaaaaaaaagga

SEQ ID NO: 73171 - DNA, 26 bp, Homo sapiens
aatgactaggataaaaaaaaaaggag

SEQ ID NO: 73172 - DNA, 26 bp, Homo sapiens
atgactaggataaaaaaaaaaggagg

SEQ ID NO: 73173 - DNA, 26 bp, Homo sapiens
tgactaggataaaaaaaaaaggaggg

SEQ ID NO: 73174 - DNA, 26 bp, Homo sapiens
gactaggataaaaaaaaaaggagggc

SEQ ID NO: 73175 - DNA, 26 bp, Homo sapiens
actaggataaaaaaaaaaggagggca

SEQ ID NO: 73176 - DNA, 26 bp, Homo sapiens
ctaggataaaaaaaaaaggagggcac

SEQ ID NO: 73177 - DNA, 26 bp, Homo sapiens
taggataaaaaaaaaaggagggcacc

SEQ ID NO: 73178 - DNA, 26 bp, Homo sapiens
aggataaaaaaaaaaggagggcacca

SEQ ID NO: 73179 - DNA, 26 bp, Homo sapiens
ggataaaaaaaaaaggagggcaccaa

SEQ ID NO: 73180 - DNA, 26 bp, Homo sapiens
gataaaaaaaaaaggagggcaccaag

SEQ ID NO: 73181 - DNA, 26 bp, Homo sapiens
ataaaaaaaaaaggagggcaccaagg

SEQ ID NO: 73182 - DNA, 26 bp, Homo sapiens
taaaaaaaaaaggagggcaccaaggg

SEQ ID NO: 73183 - DNA, 26 bp, Homo sapiens
aaaaaaaaaaggagggcaccaaggga

SEQ ID NO: 73184 - DNA, 26 bp, Homo sapiens
aaaaaaaaaggagggcaccaagggaa

SEQ ID NO: 73185 - DNA, 26 bp, Homo sapiens
aaaaaaaaggagggcaccaagggaaa

SEQ ID NO: 73186 - DNA, 26 bp, Homo sapiens
aaaaaaaggagggcaccaagggaaag

SEQ ID NO: 73187 - DNA, 26 bp, Homo sapiens
aaaaaaggagggcaccaagggaaagg

SEQ ID NO: 73188 - DNA, 26 bp, Homo sapiens
aaaaaggagggcaccaagggaaaggg

SEQ ID NO: 73189 - DNA, 26 bp, Homo sapiens
aaaaggagggcaccaagggaaaggga

SEQ ID NO: 73190 - DNA, 26 bp, Homo sapiens
aaaggagggcaccaagggaaagggat

SEQ ID NO: 73191 - DNA, 26 bp, Homo sapiens
aaggagggcaccaagggaaagggatg

SEQ ID NO: 73192 - DNA, 26 bp, Homo sapiens
aggagggcaccaagggaaagggatga

SEQ ID NO: 73193 - DNA, 26 bp, Homo sapiens
ggagggcaccaagggaaagggatgat

SEQ ID NO: 73194 - DNA, 26 bp, Homo sapiens
gagggcaccaagggaaagggatgatg

SEQ ID NO: 73195 - DNA, 26 bp, Homo sapiens
agggcaccaagggaaagggatgatgg

SEQ ID NO: 73196 - DNA, 26 bp, Homo sapiens
gggcaccaagggaaagggatgatggg

SEQ ID NO: 73197 - DNA, 26 bp, Homo sapiens
ggcaccaagggaaagggatgatgggg

SEQ ID NO: 73198 - DNA, 26 bp, Homo sapiens
gcaccaagggaaagggatgatggggt

SEQ ID NO: 73199 - DNA, 26 bp, Homo sapiens
caccaagggaaagggatgatggggtg

SEQ ID NO: 73200 - DNA, 26 bp, Homo sapiens
accaagggaaagggatgatggggtga

SEQ ID NO: 73201 - DNA, 26 bp, Homo sapiens
ccaagggaaagggatgatggggtgag

SEQ ID NO: 73202 - DNA, 26 bp, Homo sapiens
caagggaaagggatgatggggtgagc

SEQ ID NO: 73203 - DNA, 26 bp, Homo sapiens
aagggaaagggatgatggggtgagct

SEQ ID NO: 73204 - DNA, 26 bp, Homo sapiens
agggaaagggatgatggggtgagctg

SEQ ID NO: 73205 - DNA, 26 bp, Homo sapiens
gggaaagggatgatggggtgagctgg

SEQ ID NO: 73206 - DNA, 26 bp, Homo sapiens
ggaaagggatgatggggtgagctggc

SEQ ID NO: 73207 - DNA, 26 bp, Homo sapiens
gaaagggatgatggggtgagctggcg

SEQ ID NO: 73208 - DNA, 26 bp, Homo sapiens
aaagggatgatggggtgagctggcga

SEQ ID NO: 73209 - DNA, 26 bp, Homo sapiens
aagggatgatggggtgagctggcgag

SEQ ID NO: 73210 - DNA, 26 bp, Homo sapiens
agggatgatggggtgagctggcgagt

SEQ ID NO: 73211 - DNA, 26 bp, Homo sapiens
gggatgatggggtgagctggcgagtg

SEQ ID NO: 73212 - DNA, 26 bp, Homo sapiens
ggatgatggggtgagctggcgagtgt

SEQ ID NO: 73213 - DNA, 26 bp, Homo sapiens
gatgatggggtgagctggcgagtgtg

SEQ ID NO: 73214 - DNA, 26 bp, Homo sapiens
atgatggggtgagctggcgagtgtgg

SEQ ID NO: 73215 - DNA, 26 bp, Homo sapiens
tgatggggtgagctggcgagtgtggg

SEQ ID NO: 73216 - DNA, 26 bp, Homo sapiens
gatggggtgagctggcgagtgtgggt

SEQ ID NO: 73217 - DNA, 26 bp, Homo sapiens
atggggtgagctggcgagtgtgggtg

SEQ ID NO: 73218 - DNA, 26 bp, Homo sapiens
tggggtgagctggcgagtgtgggtgg

SEQ ID NO: 73219 - DNA, 26 bp, Homo sapiens
ggggtgagctggcgagtgtgggtggg

SEQ ID NO: 73220 - DNA, 26 bp, Homo sapiens
gggtgagctggcgagtgtgggtggga

SEQ ID NO: 73221 - DNA, 26 bp, Homo sapiens
ggtgagctggcgagtgtgggtgggaa

SEQ ID NO: 73222 - DNA, 26 bp, Homo sapiens
gtgagctggcgagtgtgggtgggaaa

SEQ ID NO: 73223 - DNA, 26 bp, Homo sapiens
tgagctggcgagtgtgggtgggaaat

SEQ ID NO: 73224 - DNA, 26 bp, Homo sapiens
gagctggcgagtgtgggtgggaaatg

SEQ ID NO: 73225 - DNA, 26 bp, Homo sapiens
agctggcgagtgtgggtgggaaatga

SEQ ID NO: 73226 - DNA, 26 bp, Homo sapiens
gctggcgagtgtgggtgggaaatgaa

SEQ ID NO: 73227 - DNA, 26 bp, Homo sapiens
ctggcgagtgtgggtgggaaatgaaa

SEQ ID NO: 73228 - DNA, 26 bp, Homo sapiens
tggcgagtgtgggtgggaaatgaaat

SEQ ID NO: 73229 - DNA, 26 bp, Homo sapiens
ggcgagtgtgggtgggaaatgaaatg

SEQ ID NO: 73230 - DNA, 26 bp, Homo sapiens
gcgagtgtgggtgggaaatgaaatgt

SEQ ID NO: 73231 - DNA, 26 bp, Homo sapiens
cgagtgtgggtgggaaatgaaatgtt

SEQ ID NO: 73232 - DNA, 26 bp, Homo sapiens
gagtgtgggtgggaaatgaaatgttt

SEQ ID NO: 73233 - DNA, 26 bp, Homo sapiens
agtgtgggtgggaaatgaaatgttta

SEQ ID NO: 73234 - DNA, 26 bp, Homo sapiens
gtgtgggtgggaaatgaaatgtttat

SEQ ID NO: 73235 - DNA, 26 bp, Homo sapiens
tgtgggtgggaaatgaaatgtttatt

SEQ ID NO: 73236 - DNA, 26 bp, Homo sapiens
gtgggtgggaaatgaaatgtttattg

SEQ ID NO: 73237 - DNA, 26 bp, Homo sapiens
tgggtgggaaatgaaatgtttattga

SEQ ID NO: 73238 - DNA, 26 bp, Homo sapiens
gggtgggaaatgaaatgtttattgag

SEQ ID NO: 73239 - DNA, 26 bp, Homo sapiens
ggtgggaaatgaaatgtttattgagg

SEQ ID NO: 73240 - DNA, 26 bp, Homo sapiens
gtgggaaatgaaatgtttattgagga

SEQ ID NO: 73241 - DNA, 26 bp, Homo sapiens
tgggaaatgaaatgtttattgaggat

SEQ ID NO: 73242 - DNA, 26 bp, Homo sapiens
gggaaatgaaatgtttattgaggatc

SEQ ID NO: 73243 - DNA, 26 bp, Homo sapiens
ggaaatgaaatgtttattgaggatct

SEQ ID NO: 73244 - DNA, 26 bp, Homo sapiens
gaaatgaaatgtttattgaggatctg

SEQ ID NO: 73245 - DNA, 26 bp, Homo sapiens
aaatgaaatgtttattgaggatctgc

SEQ ID NO: 73246 - DNA, 26 bp, Homo sapiens
aatgaaatgtttattgaggatctgct

SEQ ID NO: 73247 - DNA, 26 bp, Homo sapiens
atgaaatgtttattgaggatctgctt

SEQ ID NO: 73248 - DNA, 26 bp, Homo sapiens
tgaaatgtttattgaggatctgcttt

SEQ ID NO: 73249 - DNA, 26 bp, Homo sapiens
gaaatgtttattgaggatctgctttg

SEQ ID NO: 73250 - DNA, 26 bp, Homo sapiens
aaatgtttattgaggatctgctttgt

SEQ ID NO: 73251 - DNA, 26 bp, Homo sapiens
aatgtttattgaggatctgctttgtg

SEQ ID NO: 73252 - DNA, 26 bp, Homo sapiens
atgtttattgaggatctgctttgtgc

SEQ ID NO: 73253 - DNA, 26 bp, Homo sapiens
tgtttattgaggatctgctttgtgct

SEQ ID NO: 73254 - DNA, 26 bp, Homo sapiens
gtttattgaggatctgctttgtgctg

SEQ ID NO: 73255 - DNA, 26 bp, Homo sapiens
tttattgaggatctgctttgtgctgg

SEQ ID NO: 73256 - DNA, 26 bp, Homo sapiens
ttattgaggatctgctttgtgctggg

SEQ ID NO: 73257 - DNA, 26 bp, Homo sapiens
tattgaggatctgctttgtgctgggc

SEQ ID NO: 73258 - DNA, 26 bp, Homo sapiens
attgaggatctgctttgtgctgggca

SEQ ID NO: 73259 - DNA, 26 bp, Homo sapiens
ttgaggatctgctttgtgctgggcac

SEQ ID NO: 73260 - DNA, 26 bp, Homo sapiens
tgaggatctgctttgtgctgggcact

SEQ ID NO: 73261 - DNA, 26 bp, Homo sapiens
gaggatctgctttgtgctgggcactt

SEQ ID NO: 73262 - DNA, 26 bp, Homo sapiens
aggatctgctttgtgctgggcacttt

SEQ ID NO: 73263 - DNA, 26 bp, Homo sapiens
ggatctgctttgtgctgggcacttta

SEQ ID NO: 73264 - DNA, 26 bp, Homo sapiens
gatctgctttgtgctgggcactttaa

SEQ ID NO: 73265 - DNA, 26 bp, Homo sapiens
atctgctttgtgctgggcactttaat

SEQ ID NO: 73266 - DNA, 26 bp, Homo sapiens
tctgctttgtgctgggcactttaatc

SEQ ID NO: 73267 - DNA, 26 bp, Homo sapiens
ctgctttgtgctgggcactttaatcc

SEQ ID NO: 73268 - DNA, 26 bp, Homo sapiens
tgctttgtgctgggcactttaatcca

SEQ ID NO: 73269 - DNA, 26 bp, Homo sapiens
gctttgtgctgggcactttaatccac

SEQ ID NO: 73270 - DNA, 26 bp, Homo sapiens
ctttgtgctgggcactttaatccaca

SEQ ID NO: 73271 - DNA, 26 bp, Homo sapiens
tttgtgctgggcactttaatccacat

SEQ ID NO: 73272 - DNA, 26 bp, Homo sapiens
ttgtgctgggcactttaatccacatt

SEQ ID NO: 73273 - DNA, 26 bp, Homo sapiens
tgtgctgggcactttaatccacattt

SEQ ID NO: 73274 - DNA, 26 bp, Homo sapiens
gtgctgggcactttaatccacatttt

SEQ ID NO: 73275 - DNA, 26 bp, Homo sapiens
tgctgggcactttaatccacatttta

SEQ ID NO: 73276 - DNA, 26 bp, Homo sapiens
gctgggcactttaatccacattttat

SEQ ID NO: 73277 - DNA, 26 bp, Homo sapiens
ctgggcactttaatccacattttatc

SEQ ID NO: 73278 - DNA, 26 bp, Homo sapiens
tgggcactttaatccacattttatcg

SEQ ID NO: 73279 - DNA, 26 bp, Homo sapiens
gggcactttaatccacattttatcgt

SEQ ID NO: 73280 - DNA, 26 bp, Homo sapiens
ggcactttaatccacattttatcgtt

SEQ ID NO: 73281 - DNA, 26 bp, Homo sapiens
gcactttaatccacattttatcgttt

SEQ ID NO: 73282 - DNA, 26 bp, Homo sapiens
cactttaatccacattttatcgttta

SEQ ID NO: 73283 - DNA, 26 bp, Homo sapiens
actttaatccacattttatcgtttac

SEQ ID NO: 73284 - DNA, 26 bp, Homo sapiens
ctttaatccacattttatcgtttact

SEQ ID NO: 73285 - DNA, 26 bp, Homo sapiens
tttaatccacattttatcgtttactt

SEQ ID NO: 73286 - DNA, 26 bp, Homo sapiens
ttaatccacattttatcgtttacttt

SEQ ID NO: 73287 - DNA, 26 bp, Homo sapiens
taatccacattttatcgtttactttt

SEQ ID NO: 73288 - DNA, 26 bp, Homo sapiens
aatccacattttatcgtttacttttc

SEQ ID NO: 73289 - DNA, 26 bp, Homo sapiens
atccacattttatcgtttacttttca

SEQ ID NO: 73290 - DNA, 26 bp, Homo sapiens
tccacattttatcgtttacttttcaa

SEQ ID NO: 73291 - DNA, 26 bp, Homo sapiens
ccacattttatcgtttacttttcaaa

SEQ ID NO: 73292 - DNA, 26 bp, Homo sapiens
cacattttatcgtttacttttcaaac

SEQ ID NO: 73293 - DNA, 26 bp, Homo sapiens
acattttatcgtttacttttcaaaca

SEQ ID NO: 73294 - DNA, 26 bp, Homo sapiens
cattttatcgtttacttttcaaacag

SEQ ID NO: 73295 - DNA, 26 bp, Homo sapiens
attttatcgtttacttttcaaacaga

SEQ ID NO: 73296 - DNA, 26 bp, Homo sapiens
ttttatcgtttacttttcaaacagat

SEQ ID NO: 73297 - DNA, 26 bp, Homo sapiens
tttatcgtttacttttcaaacagatg

SEQ ID NO: 73298 - DNA, 26 bp, Homo sapiens
ttatcgtttacttttcaaacagatgc

SEQ ID NO: 73299 - DNA, 26 bp, Homo sapiens
tatcgtttacttttcaaacagatgca

SEQ ID NO: 73300 - DNA, 26 bp, Homo sapiens
atcgtttacttttcaaacagatgcac

SEQ ID NO: 73301 - DNA, 26 bp, Homo sapiens
tcgtttacttttcaaacagatgcacc

SEQ ID NO: 73302 - DNA, 26 bp, Homo sapiens
cgtttacttttcaaacagatgcacct

SEQ ID NO: 73303 - DNA, 26 bp, Homo sapiens
gtttacttttcaaacagatgcacctt

SEQ ID NO: 73304 - DNA, 26 bp, Homo sapiens
tttacttttcaaacagatgcacctta

SEQ ID NO: 73305 - DNA, 26 bp, Homo sapiens
ttacttttcaaacagatgcaccttac

SEQ ID NO: 73306 - DNA, 26 bp, Homo sapiens
tacttttcaaacagatgcaccttacc

SEQ ID NO: 73307 - DNA, 26 bp, Homo sapiens
acttttcaaacagatgcaccttaccc

SEQ ID NO: 73308 - DNA, 26 bp, Homo sapiens
cttttcaaacagatgcaccttacccc

SEQ ID NO: 73309 - DNA, 26 bp, Homo sapiens
ttttcaaacagatgcaccttaccccc

SEQ ID NO: 73310 - DNA, 26 bp, Homo sapiens
tttcaaacagatgcaccttaccccca

SEQ ID NO: 73311 - DNA, 26 bp, Homo sapiens
ttcaaacagatgcaccttacccccac

SEQ ID NO: 73312 - DNA, 26 bp, Homo sapiens
tcaaacagatgcaccttacccccacc

SEQ ID NO: 73313 - DNA, 26 bp, Homo sapiens
caaacagatgcaccttacccccaccc

SEQ ID NO: 73314 - DNA, 26 bp, Homo sapiens
aaacagatgcaccttacccccacccc

SEQ ID NO: 73315 - DNA, 26 bp, Homo sapiens
aacagatgcaccttacccccacccca

SEQ ID NO: 73316 - DNA, 26 bp, Homo sapiens
acagatgcaccttacccccaccccaa

SEQ ID NO: 73317 - DNA, 26 bp, Homo sapiens
cagatgcaccttacccccaccccaat

SEQ ID NO: 73318 - DNA, 26 bp, Homo sapiens
agatgcaccttacccccaccccaatg

SEQ ID NO: 73319 - DNA, 26 bp, Homo sapiens
gatgcaccttacccccaccccaatgc

SEQ ID NO: 73320 - DNA, 26 bp, Homo sapiens
atgcaccttacccccaccccaatgct

SEQ ID NO: 73321 - DNA, 26 bp, Homo sapiens
tgcaccttacccccaccccaatgctc

SEQ ID NO: 73322 - DNA, 26 bp, Homo sapiens
gcaccttacccccaccccaatgctct

SEQ ID NO: 73323 - DNA, 26 bp, Homo sapiens
caccttacccccaccccaatgctctg

SEQ ID NO: 73324 - DNA, 26 bp, Homo sapiens
accttacccccaccccaatgctctgt

SEQ ID NO: 73325 - DNA, 26 bp, Homo sapiens
ccttacccccaccccaatgctctgtc

SEQ ID NO: 73326 - DNA, 26 bp, Homo sapiens
cttacccccaccccaatgctctgtcc

SEQ ID NO: 73327 - DNA, 26 bp, Homo sapiens
ttacccccaccccaatgctctgtccc

SEQ ID NO: 73328 - DNA, 26 bp, Homo sapiens
tacccccaccccaatgctctgtccct

SEQ ID NO: 73329 - DNA, 26 bp, Homo sapiens
acccccaccccaatgctctgtccctg

SEQ ID NO: 73330 - DNA, 26 bp, Homo sapiens
cccccaccccaatgctctgtccctgc

SEQ ID NO: 73331 - DNA, 26 bp, Homo sapiens
ccccaccccaatgctctgtccctgca

SEQ ID NO: 73332 - DNA, 26 bp, Homo sapiens
cccaccccaatgctctgtccctgcag

SEQ ID NO: 73333 - DNA, 26 bp, Homo sapiens
ccaccccaatgctctgtccctgcaga

SEQ ID NO: 73334 - DNA, 26 bp, Homo sapiens
caccccaatgctctgtccctgcagat

SEQ ID NO: 73335 - DNA, 26 bp, Homo sapiens
accccaatgctctgtccctgcagata

SEQ ID NO: 73336 - DNA, 26 bp, Homo sapiens
ccccaatgctctgtccctgcagatat

SEQ ID NO: 73337 - DNA, 26 bp, Homo sapiens
cccaatgctctgtccctgcagatatc

SEQ ID NO: 73338 - DNA, 26 bp, Homo sapiens
ccaatgctctgtccctgcagatatca

SEQ ID NO: 73339 - DNA, 26 bp, Homo sapiens
caatgctctgtccctgcagatatcag

SEQ ID NO: 73340 - DNA, 26 bp, Homo sapiens
aatgctctgtccctgcagatatcaga

SEQ ID NO: 73341 - DNA, 26 bp, Homo sapiens
atgctctgtccctgcagatatcagaa

SEQ ID NO: 73342 - DNA, 26 bp, Homo sapiens
tgctctgtccctgcagatatcagaag

SEQ ID NO: 73343 - DNA, 26 bp, Homo sapiens
gctctgtccctgcagatatcagaaga

SEQ ID NO: 73344 - DNA, 26 bp, Homo sapiens
ctctgtccctgcagatatcagaagac

SEQ ID NO: 73345 - DNA, 26 bp, Homo sapiens
tctgtccctgcagatatcagaagaca

SEQ ID NO: 73346 - DNA, 26 bp, Homo sapiens
ctgtccctgcagatatcagaagacag

SEQ ID NO: 73347 - DNA, 26 bp, Homo sapiens
tgtccctgcagatatcagaagacagt

SEQ ID NO: 73348 - DNA, 26 bp, Homo sapiens
gtccctgcagatatcagaagacagtg

SEQ ID NO: 73349 - DNA, 26 bp, Homo sapiens
tccctgcagatatcagaagacagtgt

SEQ ID NO: 73350 - DNA, 26 bp, Homo sapiens
ccctgcagatatcagaagacagtgtg

SEQ ID NO: 73351 - DNA, 26 bp, Homo sapiens
cctgcagatatcagaagacagtgtga

SEQ ID NO: 73352 - DNA, 26 bp, Homo sapiens
ctgcagatatcagaagacagtgtgat

SEQ ID NO: 73353 - DNA, 26 bp, Homo sapiens
tgcagatatcagaagacagtgtgatt

SEQ ID NO: 73354 - DNA, 26 bp, Homo sapiens
gcagatatcagaagacagtgtgattt

SEQ ID NO: 73355 - DNA, 26 bp, Homo sapiens
cagatatcagaagacagtgtgatttt

SEQ ID NO: 73356 - DNA, 26 bp, Homo sapiens
agatatcagaagacagtgtgattttc

SEQ ID NO: 73357 - DNA, 26 bp, Homo sapiens
gatatcagaagacagtgtgattttca

SEQ ID NO: 73358 - DNA, 26 bp, Homo sapiens
atatcagaagacagtgtgattttcat

SEQ ID NO: 73359 - DNA, 26 bp, Homo sapiens
tatcagaagacagtgtgattttcatg

SEQ ID NO: 73360 - DNA, 26 bp, Homo sapiens
atcagaagacagtgtgattttcatgc

SEQ ID NO: 73361 - DNA, 26 bp, Homo sapiens
tcagaagacagtgtgattttcatgct

SEQ ID NO: 73362 - DNA, 26 bp, Homo sapiens
cagaagacagtgtgattttcatgctc

SEQ ID NO: 73363 - DNA, 26 bp, Homo sapiens
agaagacagtgtgattttcatgctct

SEQ ID NO: 73364 - DNA, 26 bp, Homo sapiens
gaagacagtgtgattttcatgctctg

SEQ ID NO: 73365 - DNA, 26 bp, Homo sapiens
aagacagtgtgattttcatgctctga

SEQ ID NO: 73366 - DNA, 26 bp, Homo sapiens
agacagtgtgattttcatgctctgaa

SEQ ID NO: 73367 - DNA, 26 bp, Homo sapiens
gacagtgtgattttcatgctctgaag

SEQ ID NO: 73368 - DNA, 26 bp, Homo sapiens
acagtgtgattttcatgctctgaagt

SEQ ID NO: 73369 - DNA, 26 bp, Homo sapiens
cagtgtgattttcatgctctgaagtt

SEQ ID NO: 73370 - DNA, 26 bp, Homo sapiens
agtgtgattttcatgctctgaagttc

SEQ ID NO: 73371 - DNA, 26 bp, Homo sapiens
gtgtgattttcatgctctgaagttca

SEQ ID NO: 73372 - DNA, 26 bp, Homo sapiens
tgtgattttcatgctctgaagttcag

SEQ ID NO: 73373 - DNA, 26 bp, Homo sapiens
gtgattttcatgctctgaagttcagt

SEQ ID NO: 73374 - DNA, 26 bp, Homo sapiens
tgattttcatgctctgaagttcagtt

SEQ ID NO: 73375 - DNA, 26 bp, Homo sapiens
gattttcatgctctgaagttcagttt

SEQ ID NO: 73376 - DNA, 26 bp, Homo sapiens
attttcatgctctgaagttcagtttt

SEQ ID NO: 73377 - DNA, 26 bp, Homo sapiens
ttttcatgctctgaagttcagtttta

SEQ ID NO: 73378 - DNA, 26 bp, Homo sapiens
tttcatgctctgaagttcagttttac

SEQ ID NO: 73379 - DNA, 26 bp, Homo sapiens
ttcatgctctgaagttcagttttaca

SEQ ID NO: 73380 - DNA, 26 bp, Homo sapiens
tcatgctctgaagttcagttttacat

SEQ ID NO: 73381 - DNA, 26 bp, Homo sapiens
catgctctgaagttcagttttacatc

SEQ ID NO: 73382 - DNA, 26 bp, Homo sapiens
atgctctgaagttcagttttacatcc

SEQ ID NO: 73383 - DNA, 26 bp, Homo sapiens
tgctctgaagttcagttttacatcca

SEQ ID NO: 73384 - DNA, 26 bp, Homo sapiens
gctctgaagttcagttttacatccaa

SEQ ID NO: 73385 - DNA, 26 bp, Homo sapiens
ctctgaagttcagttttacatccaag

SEQ ID NO: 73386 - DNA, 26 bp, Homo sapiens
tctgaagttcagttttacatccaagc

SEQ ID NO: 73387 - DNA, 26 bp, Homo sapiens
ctgaagttcagttttacatccaagca

SEQ ID NO: 73388 - DNA, 26 bp, Homo sapiens
tgaagttcagttttacatccaagcat

SEQ ID NO: 73389 - DNA, 26 bp, Homo sapiens
gaagttcagttttacatccaagcatc

SEQ ID NO: 73390 - DNA, 26 bp, Homo sapiens
aagttcagttttacatccaagcatcc

SEQ ID NO: 73391 - DNA, 26 bp, Homo sapiens
agttcagttttacatccaagcatccc

SEQ ID NO: 73392 - DNA, 26 bp, Homo sapiens
gttcagttttacatccaagcatccct

SEQ ID NO: 73393 - DNA, 26 bp, Homo sapiens
ttcagttttacatccaagcatccctc

SEQ ID NO: 73394 - DNA, 26 bp, Homo sapiens
tcagttttacatccaagcatccctct

SEQ ID NO: 73395 - DNA, 26 bp, Homo sapiens
cagttttacatccaagcatccctctc

SEQ ID NO: 73396 - DNA, 26 bp, Homo sapiens
agttttacatccaagcatccctctct

SEQ ID NO: 73397 - DNA, 26 bp, Homo sapiens
gttttacatccaagcatccctctctg

SEQ ID NO: 73398 - DNA, 26 bp, Homo sapiens
ttttacatccaagcatccctctctgt

SEQ ID NO: 73399 - DNA, 26 bp, Homo sapiens
tttacatccaagcatccctctctgtt

SEQ ID NO: 73400 - DNA, 26 bp, Homo sapiens
ttacatccaagcatccctctctgttt

SEQ ID NO: 73401 - DNA, 26 bp, Homo sapiens
tacatccaagcatccctctctgtttt

SEQ ID NO: 73402 - DNA, 26 bp, Homo sapiens
acatccaagcatccctctctgttttt

SEQ ID NO: 73403 - DNA, 26 bp, Homo sapiens
catccaagcatccctctctgtttttt

SEQ ID NO: 73404 - DNA, 26 bp, Homo sapiens
atccaagcatccctctctgtttttta

SEQ ID NO: 73405 - DNA, 26 bp, Homo sapiens
tccaagcatccctctctgttttttaa

SEQ ID NO: 73406 - DNA, 26 bp, Homo sapiens
ccaagcatccctctctgttttttaac

SEQ ID NO: 73407 - DNA, 26 bp, Homo sapiens
caagcatccctctctgttttttaaca

SEQ ID NO: 73408 - DNA, 26 bp, Homo sapiens
aagcatccctctctgttttttaacaa

SEQ ID NO: 73409 - DNA, 26 bp, Homo sapiens
agcatccctctctgttttttaacaat

SEQ ID NO: 73410 - DNA, 26 bp, Homo sapiens
gcatccctctctgttttttaacaatc

SEQ ID NO: 73411 - DNA, 26 bp, Homo sapiens
catccctctctgttttttaacaatcc

SEQ ID NO: 73412 - DNA, 26 bp, Homo sapiens
atccctctctgttttttaacaatcca

SEQ ID NO: 73413 - DNA, 26 bp, Homo sapiens
tccctctctgttttttaacaatccaa

SEQ ID NO: 73414 - DNA, 26 bp, Homo sapiens
ccctctctgttttttaacaatccaaa

SEQ ID NO: 73415 - DNA, 26 bp, Homo sapiens
cctctctgttttttaacaatccaaag

SEQ ID NO: 73416 - DNA, 26 bp, Homo sapiens
ctctctgttttttaacaatccaaaga

SEQ ID NO: 73417 - DNA, 26 bp, Homo sapiens
tctctgttttttaacaatccaaagac

SEQ ID NO: 73418 - DNA, 26 bp, Homo sapiens
ctctgttttttaacaatccaaagaca

SEQ ID NO: 73419 - DNA, 26 bp, Homo sapiens
tctgttttttaacaatccaaagacag

SEQ ID NO: 73420 - DNA, 26 bp, Homo sapiens
ctgttttttaacaatccaaagacagg

SEQ ID NO: 73421 - DNA, 26 bp, Homo sapiens
tgttttttaacaatccaaagacaggc

SEQ ID NO: 73422 - DNA, 26 bp, Homo sapiens
gttttttaacaatccaaagacaggcc

SEQ ID NO: 73423 - DNA, 26 bp, Homo sapiens
ttttttaacaatccaaagacaggcca

SEQ ID NO: 73424 - DNA, 26 bp, Homo sapiens
tttttaacaatccaaagacaggccaa

SEQ ID NO: 73425 - DNA, 26 bp, Homo sapiens
ttttaacaatccaaagacaggccaaa

SEQ ID NO: 73426 - DNA, 26 bp, Homo sapiens
tttaacaatccaaagacaggccaaaa

SEQ ID NO: 73427 - DNA, 26 bp, Homo sapiens
ttaacaatccaaagacaggccaaaaa

SEQ ID NO: 73428 - DNA, 26 bp, Homo sapiens
taacaatccaaagacaggccaaaaaa

SEQ ID NO: 73429 - DNA, 26 bp, Homo sapiens
aacaatccaaagacaggccaaaaaaa

SEQ ID NO: 73430 - DNA, 26 bp, Homo sapiens
acaatccaaagacaggccaaaaaaag

SEQ ID NO: 73431 - DNA, 26 bp, Homo sapiens
caatccaaagacaggccaaaaaaagc

SEQ ID NO: 73432 - DNA, 26 bp, Homo sapiens
aatccaaagacaggccaaaaaaagca

SEQ ID NO: 73433 - DNA, 26 bp, Homo sapiens
atccaaagacaggccaaaaaaagcac

SEQ ID NO: 73434 - DNA, 26 bp, Homo sapiens
tccaaagacaggccaaaaaaagcacc

SEQ ID NO: 73435 - DNA, 26 bp, Homo sapiens
ccaaagacaggccaaaaaaagcacca

SEQ ID NO: 73436 - DNA, 26 bp, Homo sapiens
caaagacaggccaaaaaaagcaccac

SEQ ID NO: 73437 - DNA, 26 bp, Homo sapiens
aaagacaggccaaaaaaagcaccaca

SEQ ID NO: 73438 - DNA, 26 bp, Homo sapiens
aagacaggccaaaaaaagcaccacag

SEQ ID NO: 73439 - DNA, 26 bp, Homo sapiens
agacaggccaaaaaaagcaccacagt

SEQ ID NO: 73440 - DNA, 26 bp, Homo sapiens
gacaggccaaaaaaagcaccacagtt

SEQ ID NO: 73441 - DNA, 26 bp, Homo sapiens
acaggccaaaaaaagcaccacagttt

SEQ ID NO: 73442 - DNA, 26 bp, Homo sapiens
caggccaaaaaaagcaccacagttta

SEQ ID NO: 73443 - DNA, 26 bp, Homo sapiens
aggccaaaaaaagcaccacagtttat

SEQ ID NO: 73444 - DNA, 26 bp, Homo sapiens
ggccaaaaaaagcaccacagtttatt

SEQ ID NO: 73445 - DNA, 26 bp, Homo sapiens
gccaaaaaaagcaccacagtttatta

SEQ ID NO: 73446 - DNA, 26 bp, Homo sapiens
ccaaaaaaagcaccacagtttattaa

SEQ ID NO: 73447 - DNA, 26 bp, Homo sapiens
caaaaaaagcaccacagtttattaag

SEQ ID NO: 73448 - DNA, 26 bp, Homo sapiens
aaaaaaagcaccacagtttattaagt

SEQ ID NO: 73449 - DNA, 26 bp, Homo sapiens
aaaaaagcaccacagtttattaagta

SEQ ID NO: 73450 - DNA, 26 bp, Homo sapiens
aaaaagcaccacagtttattaagtac

SEQ ID NO: 73451 - DNA, 26 bp, Homo sapiens
aaaagcaccacagtttattaagtact

SEQ ID NO: 73452 - DNA, 26 bp, Homo sapiens
aaagcaccacagtttattaagtactt

SEQ ID NO: 73453 - DNA, 26 bp, Homo sapiens
aagcaccacagtttattaagtactta

SEQ ID NO: 73454 - DNA, 26 bp, Homo sapiens
agcaccacagtttattaagtacttac

SEQ ID NO: 73455 - DNA, 26 bp, Homo sapiens
gcaccacagtttattaagtacttact

SEQ ID NO: 73456 - DNA, 26 bp, Homo sapiens
caccacagtttattaagtacttacta

SEQ ID NO: 73457 - DNA, 26 bp, Homo sapiens
accacagtttattaagtacttactaa

SEQ ID NO: 73458 - DNA, 26 bp, Homo sapiens
ccacagtttattaagtacttactaag

SEQ ID NO: 73459 - DNA, 26 bp, Homo sapiens
cacagtttattaagtacttactaagc

SEQ ID NO: 73460 - DNA, 26 bp, Homo sapiens
acagtttattaagtacttactaagca

SEQ ID NO: 73461 - DNA, 26 bp, Homo sapiens
cagtttattaagtacttactaagcac

SEQ ID NO: 73462 - DNA, 26 bp, Homo sapiens
agtttattaagtacttactaagcacc

SEQ ID NO: 73463 - DNA, 26 bp, Homo sapiens
gtttattaagtacttactaagcaccc

SEQ ID NO: 73464 - DNA, 26 bp, Homo sapiens
tttattaagtacttactaagcaccca

SEQ ID NO: 73465 - DNA, 26 bp, Homo sapiens
ttattaagtacttactaagcacccat

SEQ ID NO: 73466 - DNA, 26 bp, Homo sapiens
tattaagtacttactaagcacccatc

SEQ ID NO: 73467 - DNA, 26 bp, Homo sapiens
attaagtacttactaagcacccatcc

SEQ ID NO: 73468 - DNA, 26 bp, Homo sapiens
ttaagtacttactaagcacccatcca

SEQ ID NO: 73469 - DNA, 26 bp, Homo sapiens
taagtacttactaagcacccatccac

SEQ ID NO: 73470 - DNA, 26 bp, Homo sapiens
aagtacttactaagcacccatccact

SEQ ID NO: 73471 - DNA, 26 bp, Homo sapiens
agtacttactaagcacccatccactg

SEQ ID NO: 73472 - DNA, 26 bp, Homo sapiens
gtacttactaagcacccatccactgc

SEQ ID NO: 73473 - DNA, 26 bp, Homo sapiens
tacttactaagcacccatccactgcc

SEQ ID NO: 73474 - DNA, 26 bp, Homo sapiens
acttactaagcacccatccactgccc

SEQ ID NO: 73475 - DNA, 26 bp, Homo sapiens
cttactaagcacccatccactgcccc

SEQ ID NO: 73476 - DNA, 26 bp, Homo sapiens
ttactaagcacccatccactgcccca

SEQ ID NO: 73477 - DNA, 26 bp, Homo sapiens
tactaagcacccatccactgccccac

SEQ ID NO: 73478 - DNA, 26 bp, Homo sapiens
actaagcacccatccactgccccaca

SEQ ID NO: 73479 - DNA, 26 bp, Homo sapiens
ctaagcacccatccactgccccacac

SEQ ID NO: 73480 - DNA, 26 bp, Homo sapiens
taagcacccatccactgccccacact

SEQ ID NO: 73481 - DNA, 26 bp, Homo sapiens
aagcacccatccactgccccacactg

SEQ ID NO: 73482 - DNA, 26 bp, Homo sapiens
agcacccatccactgccccacactgt

SEQ ID NO: 73483 - DNA, 26 bp, Homo sapiens
gcacccatccactgccccacactgtg

SEQ ID NO: 73484 - DNA, 26 bp, Homo sapiens
cacccatccactgccccacactgtgg

SEQ ID NO: 73485 - DNA, 26 bp, Homo sapiens
acccatccactgccccacactgtggc

SEQ ID NO: 73486 - DNA, 26 bp, Homo sapiens
cccatccactgccccacactgtggca

SEQ ID NO: 73487 - DNA, 26 bp, Homo sapiens
ccatccactgccccacactgtggcaa

SEQ ID NO: 73488 - DNA, 26 bp, Homo sapiens
catccactgccccacactgtggcaag

SEQ ID NO: 73489 - DNA, 26 bp, Homo sapiens
atccactgccccacactgtggcaagg

SEQ ID NO: 73490 - DNA, 26 bp, Homo sapiens
tccactgccccacactgtggcaagga

SEQ ID NO: 73491 - DNA, 26 bp, Homo sapiens
ccactgccccacactgtggcaaggat

SEQ ID NO: 73492 - DNA, 26 bp, Homo sapiens
cactgccccacactgtggcaaggatt

SEQ ID NO: 73493 - DNA, 26 bp, Homo sapiens
actgccccacactgtggcaaggattg

SEQ ID NO: 73494 - DNA, 26 bp, Homo sapiens
ctgccccacactgtggcaaggattgt

SEQ ID NO: 73495 - DNA, 26 bp, Homo sapiens
tgccccacactgtggcaaggattgtg

SEQ ID NO: 73496 - DNA, 26 bp, Homo sapiens
gccccacactgtggcaaggattgtga

SEQ ID NO: 73497 - DNA, 26 bp, Homo sapiens
ccccacactgtggcaaggattgtgag

SEQ ID NO: 73498 - DNA, 26 bp, Homo sapiens
cccacactgtggcaaggattgtgagg

SEQ ID NO: 73499 - DNA, 26 bp, Homo sapiens
ccacactgtggcaaggattgtgaggg

SEQ ID NO: 73500 - DNA, 26 bp, Homo sapiens
cacactgtggcaaggattgtgagggg

SEQ ID NO: 73501 - DNA, 26 bp, Homo sapiens
acactgtggcaaggattgtgaggggt

SEQ ID NO: 73502 - DNA, 26 bp, Homo sapiens
cactgtggcaaggattgtgaggggta

SEQ ID NO: 73503 - DNA, 26 bp, Homo sapiens
actgtggcaaggattgtgaggggtaa

SEQ ID NO: 73504 - DNA, 26 bp, Homo sapiens
ctgtggcaaggattgtgaggggtaaa

SEQ ID NO: 73505 - DNA, 26 bp, Homo sapiens
tgtggcaaggattgtgaggggtaaag

SEQ ID NO: 73506 - DNA, 26 bp, Homo sapiens
gtggcaaggattgtgaggggtaaaga

SEQ ID NO: 73507 - DNA, 26 bp, Homo sapiens
tggcaaggattgtgaggggtaaagaa

SEQ ID NO: 73508 - DNA, 26 bp, Homo sapiens
ggcaaggattgtgaggggtaaagaag

SEQ ID NO: 73509 - DNA, 26 bp, Homo sapiens
gcaaggattgtgaggggtaaagaagc

SEQ ID NO: 73510 - DNA, 26 bp, Homo sapiens
caaggattgtgaggggtaaagaagca

SEQ ID NO: 73511 - DNA, 26 bp, Homo sapiens
aaggattgtgaggggtaaagaagcat

SEQ ID NO: 73512 - DNA, 26 bp, Homo sapiens
aggattgtgaggggtaaagaagcatg

SEQ ID NO: 73513 - DNA, 26 bp, Homo sapiens
ggattgtgaggggtaaagaagcatgg

SEQ ID NO: 73514 - DNA, 26 bp, Homo sapiens
gattgtgaggggtaaagaagcatggg

SEQ ID NO: 73515 - DNA, 26 bp, Homo sapiens
attgtgaggggtaaagaagcatgggg

SEQ ID NO: 73516 - DNA, 26 bp, Homo sapiens
ttgtgaggggtaaagaagcatggggc

SEQ ID NO: 73517 - DNA, 26 bp, Homo sapiens
tgtgaggggtaaagaagcatggggca

SEQ ID NO: 73518 - DNA, 26 bp, Homo sapiens
gtgaggggtaaagaagcatggggcac

SEQ ID NO: 73519 - DNA, 26 bp, Homo sapiens
tgaggggtaaagaagcatggggcaca

SEQ ID NO: 73520 - DNA, 26 bp, Homo sapiens
gaggggtaaagaagcatggggcacaa

SEQ ID NO: 73521 - DNA, 26 bp, Homo sapiens
aggggtaaagaagcatggggcacaat

SEQ ID NO: 73522 - DNA, 26 bp, Homo sapiens
ggggtaaagaagcatggggcacaata

SEQ ID NO: 73523 - DNA, 26 bp, Homo sapiens
gggtaaagaagcatggggcacaatat

SEQ ID NO: 73524 - DNA, 26 bp, Homo sapiens
ggtaaagaagcatggggcacaatatt

SEQ ID NO: 73525 - DNA, 26 bp, Homo sapiens
gtaaagaagcatggggcacaatattc

SEQ ID NO: 73526 - DNA, 26 bp, Homo sapiens
taaagaagcatggggcacaatattct

SEQ ID NO: 73527 - DNA, 26 bp, Homo sapiens
aaagaagcatggggcacaatattctg

SEQ ID NO: 73528 - DNA, 26 bp, Homo sapiens
aagaagcatggggcacaatattctgc

SEQ ID NO: 73529 - DNA, 26 bp, Homo sapiens
agaagcatggggcacaatattctgct

SEQ ID NO: 73530 - DNA, 26 bp, Homo sapiens
gaagcatggggcacaatattctgctg

SEQ ID NO: 73531 - DNA, 26 bp, Homo sapiens
aagcatggggcacaatattctgctgc

SEQ ID NO: 73532 - DNA, 26 bp, Homo sapiens
agcatggggcacaatattctgctgcc

SEQ ID NO: 73533 - DNA, 26 bp, Homo sapiens
gcatggggcacaatattctgctgcct

SEQ ID NO: 73534 - DNA, 26 bp, Homo sapiens
catggggcacaatattctgctgcctt

SEQ ID NO: 73535 - DNA, 26 bp, Homo sapiens
atggggcacaatattctgctgccttc

SEQ ID NO: 73536 - DNA, 26 bp, Homo sapiens
tggggcacaatattctgctgccttca

SEQ ID NO: 73537 - DNA, 26 bp, Homo sapiens
ggggcacaatattctgctgccttcat

SEQ ID NO: 73538 - DNA, 26 bp, Homo sapiens
gggcacaatattctgctgccttcatg

SEQ ID NO: 73539 - DNA, 26 bp, Homo sapiens
ggcacaatattctgctgccttcatgt

SEQ ID NO: 73540 - DNA, 26 bp, Homo sapiens
gcacaatattctgctgccttcatgta

SEQ ID NO: 73541 - DNA, 26 bp, Homo sapiens
cacaatattctgctgccttcatgtaa

SEQ ID NO: 73542 - DNA, 26 bp, Homo sapiens
acaatattctgctgccttcatgtaac

SEQ ID NO: 73543 - DNA, 26 bp, Homo sapiens
caatattctgctgccttcatgtaact

SEQ ID NO: 73544 - DNA, 26 bp, Homo sapiens
aatattctgctgccttcatgtaactt

SEQ ID NO: 73545 - DNA, 26 bp, Homo sapiens
atattctgctgccttcatgtaactta

SEQ ID NO: 73546 - DNA, 26 bp, Homo sapiens
tattctgctgccttcatgtaacttac

SEQ ID NO: 73547 - DNA, 26 bp, Homo sapiens
attctgctgccttcatgtaacttaca

SEQ ID NO: 73548 - DNA, 26 bp, Homo sapiens
ttctgctgccttcatgtaacttacag

SEQ ID NO: 73549 - DNA, 26 bp, Homo sapiens
tctgctgccttcatgtaacttacagt

SEQ ID NO: 73550 - DNA, 26 bp, Homo sapiens
ctgctgccttcatgtaacttacagtc

SEQ ID NO: 73551 - DNA, 26 bp, Homo sapiens
tgctgccttcatgtaacttacagtct

SEQ ID NO: 73552 - DNA, 26 bp, Homo sapiens
gctgccttcatgtaacttacagtctc

SEQ ID NO: 73553 - DNA, 26 bp, Homo sapiens
ctgccttcatgtaacttacagtctca

SEQ ID NO: 73554 - DNA, 26 bp, Homo sapiens
tgccttcatgtaacttacagtctcac

SEQ ID NO: 73555 - DNA, 26 bp, Homo sapiens
gccttcatgtaacttacagtctcaca

SEQ ID NO: 73556 - DNA, 26 bp, Homo sapiens
ccttcatgtaacttacagtctcacaa

SEQ ID NO: 73557 - DNA, 26 bp, Homo sapiens
cttcatgtaacttacagtctcacaaa

SEQ ID NO: 73558 - DNA, 26 bp, Homo sapiens
ttcatgtaacttacagtctcacaaat

SEQ ID NO: 73559 - DNA, 26 bp, Homo sapiens
tcatgtaacttacagtctcacaaata

SEQ ID NO: 73560 - DNA, 26 bp, Homo sapiens
catgtaacttacagtctcacaaataa

SEQ ID NO: 73561 - DNA, 26 bp, Homo sapiens
atgtaacttacagtctcacaaataaa

SEQ ID NO: 73562 - DNA, 26 bp, Homo sapiens
tgtaacttacagtctcacaaataaat

SEQ ID NO: 73563 - DNA, 26 bp, Homo sapiens
gtaacttacagtctcacaaataaata

SEQ ID NO: 73564 - DNA, 26 bp, Homo sapiens
taacttacagtctcacaaataaatag

SEQ ID NO: 73565 - DNA, 26 bp, Homo sapiens
aacttacagtctcacaaataaataga

SEQ ID NO: 73566 - DNA, 26 bp, Homo sapiens
acttacagtctcacaaataaatagaa

SEQ ID NO: 73567 - DNA, 26 bp, Homo sapiens
cttacagtctcacaaataaatagaac

SEQ ID NO: 73568 - DNA, 26 bp, Homo sapiens
ttacagtctcacaaataaatagaact

SEQ ID NO: 73569 - DNA, 26 bp, Homo sapiens
tacagtctcacaaataaatagaactt

SEQ ID NO: 73570 - DNA, 26 bp, Homo sapiens
acagtctcacaaataaatagaacttc

SEQ ID NO: 73571 - DNA, 26 bp, Homo sapiens
cagtctcacaaataaatagaacttca

SEQ ID NO: 73572 - DNA, 26 bp, Homo sapiens
agtctcacaaataaatagaacttcag

SEQ ID NO: 73573 - DNA, 26 bp, Homo sapiens
gtctcacaaataaatagaacttcagt

SEQ ID NO: 73574 - DNA, 26 bp, Homo sapiens
tctcacaaataaatagaacttcagtt

SEQ ID NO: 73575 - DNA, 26 bp, Homo sapiens
ctcacaaataaatagaacttcagttg

SEQ ID NO: 73576 - DNA, 26 bp, Homo sapiens
tcacaaataaatagaacttcagttga

SEQ ID NO: 73577 - DNA, 26 bp, Homo sapiens
cacaaataaatagaacttcagttgaa

SEQ ID NO: 73578 - DNA, 26 bp, Homo sapiens
acaaataaatagaacttcagttgaaa

SEQ ID NO: 73579 - DNA, 26 bp, Homo sapiens
caaataaatagaacttcagttgaaat

SEQ ID NO: 73580 - DNA, 26 bp, Homo sapiens
aaataaatagaacttcagttgaaata

SEQ ID NO: 73581 - DNA, 26 bp, Homo sapiens
aataaatagaacttcagttgaaatac

SEQ ID NO: 73582 - DNA, 26 bp, Homo sapiens
ataaatagaacttcagttgaaatact

SEQ ID NO: 73583 - DNA, 26 bp, Homo sapiens
taaatagaacttcagttgaaatactg

SEQ ID NO: 73584 - DNA, 26 bp, Homo sapiens
aaatagaacttcagttgaaatactga

SEQ ID NO: 73585 - DNA, 26 bp, Homo sapiens
aatagaacttcagttgaaatactgac

SEQ ID NO: 73586 - DNA, 26 bp, Homo sapiens
atagaacttcagttgaaatactgaca

SEQ ID NO: 73587 - DNA, 26 bp, Homo sapiens
tagaacttcagttgaaatactgacat

SEQ ID NO: 73588 - DNA, 26 bp, Homo sapiens
agaacttcagttgaaatactgacatt

SEQ ID NO: 73589 - DNA, 26 bp, Homo sapiens
gaacttcagttgaaatactgacatta

SEQ ID NO: 73590 - DNA, 26 bp, Homo sapiens
aacttcagttgaaatactgacattaa

SEQ ID NO: 73591 - DNA, 26 bp, Homo sapiens
acttcagttgaaatactgacattaat

SEQ ID NO: 73592 - DNA, 26 bp, Homo sapiens
cttcagttgaaatactgacattaatt

SEQ ID NO: 73593 - DNA, 26 bp, Homo sapiens
ttcagttgaaatactgacattaatta

SEQ ID NO: 73594 - DNA, 26 bp, Homo sapiens
tcagttgaaatactgacattaattaa

SEQ ID NO: 73595 - DNA, 26 bp, Homo sapiens
cagttgaaatactgacattaattaaa

SEQ ID NO: 73596 - DNA, 26 bp, Homo sapiens
agttgaaatactgacattaattaaat

SEQ ID NO: 73597 - DNA, 26 bp, Homo sapiens
gttgaaatactgacattaattaaata

SEQ ID NO: 73598 - DNA, 26 bp, Homo sapiens
ttgaaatactgacattaattaaatag

SEQ ID NO: 73599 - DNA, 26 bp, Homo sapiens
tgaaatactgacattaattaaataga

SEQ ID NO: 73600 - DNA, 26 bp, Homo sapiens
gaaatactgacattaattaaatagag

SEQ ID NO: 73601 - DNA, 26 bp, Homo sapiens
aaatactgacattaattaaatagagt

SEQ ID NO: 73602 - DNA, 26 bp, Homo sapiens
aatactgacattaattaaatagagtt

SEQ ID NO: 73603 - DNA, 26 bp, Homo sapiens
atactgacattaattaaatagagttg

SEQ ID NO: 73604 - DNA, 26 bp, Homo sapiens
tactgacattaattaaatagagttgt

SEQ ID NO: 73605 - DNA, 26 bp, Homo sapiens
actgacattaattaaatagagttgta

SEQ ID NO: 73606 - DNA, 26 bp, Homo sapiens
ctgacattaattaaatagagttgtaa

SEQ ID NO: 73607 - DNA, 26 bp, Homo sapiens
tgacattaattaaatagagttgtaat

SEQ ID NO: 73608 - DNA, 26 bp, Homo sapiens
gacattaattaaatagagttgtaata

SEQ ID NO: 73609 - DNA, 26 bp, Homo sapiens
acattaattaaatagagttgtaataa

SEQ ID NO: 73610 - DNA, 26 bp, Homo sapiens
cattaattaaatagagttgtaataaa

SEQ ID NO: 73611 - DNA, 26 bp, Homo sapiens
attaattaaatagagttgtaataaat

SEQ ID NO: 73612 - DNA, 26 bp, Homo sapiens
ttaattaaatagagttgtaataaata

SEQ ID NO: 73613 - DNA, 26 bp, Homo sapiens
taattaaatagagttgtaataaatac

SEQ ID NO: 73614 - DNA, 26 bp, Homo sapiens
aattaaatagagttgtaataaataca

SEQ ID NO: 73615 - DNA, 26 bp, Homo sapiens
attaaatagagttgtaataaatacaa

SEQ ID NO: 73616 - DNA, 26 bp, Homo sapiens
ttaaatagagttgtaataaatacaag

SEQ ID NO: 73617 - DNA, 26 bp, Homo sapiens
taaatagagttgtaataaatacaaga

SEQ ID NO: 73618 - DNA, 26 bp, Homo sapiens
aaatagagttgtaataaatacaagaa

SEQ ID NO: 73619 - DNA, 26 bp, Homo sapiens
aatagagttgtaataaatacaagaat

SEQ ID NO: 73620 - DNA, 26 bp, Homo sapiens
atagagttgtaataaatacaagaatc

SEQ ID NO: 73621 - DNA, 26 bp, Homo sapiens
tagagttgtaataaatacaagaatct

SEQ ID NO: 73622 - DNA, 26 bp, Homo sapiens
agagttgtaataaatacaagaatctt

SEQ ID NO: 73623 - DNA, 26 bp, Homo sapiens
gagttgtaataaatacaagaatcttc

SEQ ID NO: 73624 - DNA, 26 bp, Homo sapiens
agttgtaataaatacaagaatcttct

SEQ ID NO: 73625 - DNA, 26 bp, Homo sapiens
gttgtaataaatacaagaatcttctc

SEQ ID NO: 73626 - DNA, 26 bp, Homo sapiens
ttgtaataaatacaagaatcttctct

SEQ ID NO: 73627 - DNA, 26 bp, Homo sapiens
tgtaataaatacaagaatcttctctg

SEQ ID NO: 73628 - DNA, 26 bp, Homo sapiens
gtaataaatacaagaatcttctctgt

SEQ ID NO: 73629 - DNA, 26 bp, Homo sapiens
taataaatacaagaatcttctctgta

SEQ ID NO: 73630 - DNA, 26 bp, Homo sapiens
aataaatacaagaatcttctctgtag

SEQ ID NO: 73631 - DNA, 26 bp, Homo sapiens
ataaatacaagaatcttctctgtaga

SEQ ID NO: 73632 - DNA, 26 bp, Homo sapiens
taaatacaagaatcttctctgtagac

SEQ ID NO: 73633 - DNA, 26 bp, Homo sapiens
aaatacaagaatcttctctgtagact

SEQ ID NO: 73634 - DNA, 26 bp, Homo sapiens
aatacaagaatcttctctgtagactc

SEQ ID NO: 73635 - DNA, 26 bp, Homo sapiens
atacaagaatcttctctgtagactct

SEQ ID NO: 73636 - DNA, 26 bp, Homo sapiens
tacaagaatcttctctgtagactctt

SEQ ID NO: 73637 - DNA, 26 bp, Homo sapiens
acaagaatcttctctgtagactcttc

SEQ ID NO: 73638 - DNA, 26 bp, Homo sapiens
caagaatcttctctgtagactcttca

SEQ ID NO: 73639 - DNA, 26 bp, Homo sapiens
aagaatcttctctgtagactcttcac

SEQ ID NO: 73640 - DNA, 26 bp, Homo sapiens
agaatcttctctgtagactcttcaca

SEQ ID NO: 73641 - DNA, 26 bp, Homo sapiens
gaatcttctctgtagactcttcacag

SEQ ID NO: 73642 - DNA, 26 bp, Homo sapiens
aatcttctctgtagactcttcacagc

SEQ ID NO: 73643 - DNA, 26 bp, Homo sapiens
atcttctctgtagactcttcacagca

SEQ ID NO: 73644 - DNA, 26 bp, Homo sapiens
tcttctctgtagactcttcacagcat

SEQ ID NO: 73645 - DNA, 26 bp, Homo sapiens
cttctctgtagactcttcacagcatc

SEQ ID NO: 73646 - DNA, 26 bp, Homo sapiens
ttctctgtagactcttcacagcatcc

SEQ ID NO: 73647 - DNA, 26 bp, Homo sapiens
tctctgtagactcttcacagcatcca

SEQ ID NO: 73648 - DNA, 26 bp, Homo sapiens
ctctgtagactcttcacagcatccag

SEQ ID NO: 73649 - DNA, 26 bp, Homo sapiens
tctgtagactcttcacagcatccaga

SEQ ID NO: 73650 - DNA, 26 bp, Homo sapiens
ctgtagactcttcacagcatccagag

SEQ ID NO: 73651 - DNA, 26 bp, Homo sapiens
tgtagactcttcacagcatccagagg

SEQ ID NO: 73652 - DNA, 26 bp, Homo sapiens
gtagactcttcacagcatccagaggc

SEQ ID NO: 73653 - DNA, 26 bp, Homo sapiens
tagactcttcacagcatccagaggca

SEQ ID NO: 73654 - DNA, 26 bp, Homo sapiens
agactcttcacagcatccagaggcac

SEQ ID NO: 73655 - DNA, 26 bp, Homo sapiens
gactcttcacagcatccagaggcacc

SEQ ID NO: 73656 - DNA, 26 bp, Homo sapiens
actcttcacagcatccagaggcacct

SEQ ID NO: 73657 - DNA, 26 bp, Homo sapiens
ctcttcacagcatccagaggcacctt

SEQ ID NO: 73658 - DNA, 26 bp, Homo sapiens
tcttcacagcatccagaggcaccttc

SEQ ID NO: 73659 - DNA, 26 bp, Homo sapiens
cttcacagcatccagaggcaccttcc

SEQ ID NO: 73660 - DNA, 26 bp, Homo sapiens
ttcacagcatccagaggcaccttccc

SEQ ID NO: 73661 - DNA, 26 bp, Homo sapiens
tcacagcatccagaggcaccttccct

SEQ ID NO: 73662 - DNA, 26 bp, Homo sapiens
cacagcatccagaggcaccttccctg

SEQ ID NO: 73663 - DNA, 26 bp, Homo sapiens
acagcatccagaggcaccttccctga

SEQ ID NO: 73664 - DNA, 26 bp, Homo sapiens
cagcatccagaggcaccttccctgac

SEQ ID NO: 73665 - DNA, 26 bp, Homo sapiens
agcatccagaggcaccttccctgact

SEQ ID NO: 73666 - DNA, 26 bp, Homo sapiens
gcatccagaggcaccttccctgactg

SEQ ID NO: 73667 - DNA, 26 bp, Homo sapiens
catccagaggcaccttccctgactgt

SEQ ID NO: 73668 - DNA, 26 bp, Homo sapiens
atccagaggcaccttccctgactgtc

SEQ ID NO: 73669 - DNA, 26 bp, Homo sapiens
tccagaggcaccttccctgactgtca

SEQ ID NO: 73670 - DNA, 26 bp, Homo sapiens
ccagaggcaccttccctgactgtcac

SEQ ID NO: 73671 - DNA, 26 bp, Homo sapiens
cagaggcaccttccctgactgtcact

SEQ ID NO: 73672 - DNA, 26 bp, Homo sapiens
agaggcaccttccctgactgtcactg

SEQ ID NO: 73673 - DNA, 26 bp, Homo sapiens
gaggcaccttccctgactgtcactgg

SEQ ID NO: 73674 - DNA, 26 bp, Homo sapiens
aggcaccttccctgactgtcactggc

SEQ ID NO: 73675 - DNA, 26 bp, Homo sapiens
ggcaccttccctgactgtcactggcg

SEQ ID NO: 73676 - DNA, 26 bp, Homo sapiens
gcaccttccctgactgtcactggcgc

SEQ ID NO: 73677 - DNA, 26 bp, Homo sapiens
caccttccctgactgtcactggcgct

SEQ ID NO: 73678 - DNA, 26 bp, Homo sapiens
accttccctgactgtcactggcgctg

SEQ ID NO: 73679 - DNA, 26 bp, Homo sapiens
ccttccctgactgtcactggcgctgc

SEQ ID NO: 73680 - DNA, 26 bp, Homo sapiens
cttccctgactgtcactggcgctgct

SEQ ID NO: 73681 - DNA, 26 bp, Homo sapiens
ttccctgactgtcactggcgctgctt

SEQ ID NO: 73682 - DNA, 26 bp, Homo sapiens
tccctgactgtcactggcgctgctta

SEQ ID NO: 73683 - DNA, 26 bp, Homo sapiens
ccctgactgtcactggcgctgcttaa

SEQ ID NO: 73684 - DNA, 26 bp, Homo sapiens
cctgactgtcactggcgctgcttaaa

SEQ ID NO: 73685 - DNA, 26 bp, Homo sapiens
ctgactgtcactggcgctgcttaaag

SEQ ID NO: 73686 - DNA, 26 bp, Homo sapiens
tgactgtcactggcgctgcttaaaga

SEQ ID NO: 73687 - DNA, 26 bp, Homo sapiens
gactgtcactggcgctgcttaaagaa

SEQ ID NO: 73688 - DNA, 26 bp, Homo sapiens
actgtcactggcgctgcttaaagaat

SEQ ID NO: 73689 - DNA, 26 bp, Homo sapiens
ctgtcactggcgctgcttaaagaatg

SEQ ID NO: 73690 - DNA, 26 bp, Homo sapiens
tgtcactggcgctgcttaaagaatga

SEQ ID NO: 73691 - DNA, 26 bp, Homo sapiens
gtcactggcgctgcttaaagaatgac

SEQ ID NO: 73692 - DNA, 26 bp, Homo sapiens
tcactggcgctgcttaaagaatgact

SEQ ID NO: 73693 - DNA, 26 bp, Homo sapiens
cactggcgctgcttaaagaatgactt

SEQ ID NO: 73694 - DNA, 26 bp, Homo sapiens
actggcgctgcttaaagaatgacttc

SEQ ID NO: 73695 - DNA, 26 bp, Homo sapiens
ctggcgctgcttaaagaatgacttct

SEQ ID NO: 73696 - DNA, 26 bp, Homo sapiens
tggcgctgcttaaagaatgacttctt

SEQ ID NO: 73697 - DNA, 26 bp, Homo sapiens
ggcgctgcttaaagaatgacttcttt

SEQ ID NO: 73698 - DNA, 26 bp, Homo sapiens
gcgctgcttaaagaatgacttctttg

SEQ ID NO: 73699 - DNA, 26 bp, Homo sapiens
cgctgcttaaagaatgacttctttga

SEQ ID NO: 73700 - DNA, 26 bp, Homo sapiens
gctgcttaaagaatgacttctttgac

SEQ ID NO: 73701 - DNA, 26 bp, Homo sapiens
ctgcttaaagaatgacttctttgaca

SEQ ID NO: 73702 - DNA, 26 bp, Homo sapiens
tgcttaaagaatgacttctttgacaa

SEQ ID NO: 73703 - DNA, 26 bp, Homo sapiens
gcttaaagaatgacttctttgacaat

SEQ ID NO: 73704 - DNA, 26 bp, Homo sapiens
cttaaagaatgacttctttgacaata

SEQ ID NO: 73705 - DNA, 26 bp, Homo sapiens
ttaaagaatgacttctttgacaataa

SEQ ID NO: 73706 - DNA, 26 bp, Homo sapiens
taaagaatgacttctttgacaataat

SEQ ID NO: 73707 - DNA, 26 bp, Homo sapiens
aaagaatgacttctttgacaataatc

SEQ ID NO: 73708 - DNA, 26 bp, Homo sapiens
aagaatgacttctttgacaataatcc

SEQ ID NO: 73709 - DNA, 26 bp, Homo sapiens
agaatgacttctttgacaataatcct

SEQ ID NO: 73710 - DNA, 26 bp, Homo sapiens
gaatgacttctttgacaataatcctg

SEQ ID NO: 73711 - DNA, 26 bp, Homo sapiens
aatgacttctttgacaataatcctgg

SEQ ID NO: 73712 - DNA, 26 bp, Homo sapiens
atgacttctttgacaataatcctggg

SEQ ID NO: 73713 - DNA, 26 bp, Homo sapiens
tgacttctttgacaataatcctgggc

SEQ ID NO: 73714 - DNA, 26 bp, Homo sapiens
gacttctttgacaataatcctgggcc

SEQ ID NO: 73715 - DNA, 26 bp, Homo sapiens
acttctttgacaataatcctgggcca

SEQ ID NO: 73716 - DNA, 26 bp, Homo sapiens
cttctttgacaataatcctgggccaa

SEQ ID NO: 73717 - DNA, 26 bp, Homo sapiens
ttctttgacaataatcctgggccaag

SEQ ID NO: 73718 - DNA, 26 bp, Homo sapiens
tctttgacaataatcctgggccaaga

SEQ ID NO: 73719 - DNA, 26 bp, Homo sapiens
ctttgacaataatcctgggccaagaa

SEQ ID NO: 73720 - DNA, 26 bp, Homo sapiens
tttgacaataatcctgggccaagaat

SEQ ID NO: 73721 - DNA, 26 bp, Homo sapiens
ttgacaataatcctgggccaagaatg

SEQ ID NO: 73722 - DNA, 26 bp, Homo sapiens
tgacaataatcctgggccaagaatgg

SEQ ID NO: 73723 - DNA, 26 bp, Homo sapiens
gacaataatcctgggccaagaatggg

SEQ ID NO: 73724 - DNA, 26 bp, Homo sapiens
acaataatcctgggccaagaatggga

SEQ ID NO: 73725 - DNA, 26 bp, Homo sapiens
caataatcctgggccaagaatgggac

SEQ ID NO: 73726 - DNA, 26 bp, Homo sapiens
aataatcctgggccaagaatgggacc

SEQ ID NO: 73727 - DNA, 26 bp, Homo sapiens
ataatcctgggccaagaatgggaccc

SEQ ID NO: 73728 - DNA, 26 bp, Homo sapiens
taatcctgggccaagaatgggaccca

SEQ ID NO: 73729 - DNA, 26 bp, Homo sapiens
aatcctgggccaagaatgggacccat

SEQ ID NO: 73730 - DNA, 26 bp, Homo sapiens
atcctgggccaagaatgggacccatg

SEQ ID NO: 73731 - DNA, 26 bp, Homo sapiens
tcctgggccaagaatgggacccatgg

SEQ ID NO: 73732 - DNA, 26 bp, Homo sapiens
cctgggccaagaatgggacccatggc

SEQ ID NO: 73733 - DNA, 26 bp, Homo sapiens
ctgggccaagaatgggacccatggcc

SEQ ID NO: 73734 - DNA, 26 bp, Homo sapiens
tgggccaagaatgggacccatggcca

SEQ ID NO: 73735 - DNA, 26 bp, Homo sapiens
gggccaagaatgggacccatggccaa

SEQ ID NO: 73736 - DNA, 26 bp, Homo sapiens
ggccaagaatgggacccatggccaag

SEQ ID NO: 73737 - DNA, 26 bp, Homo sapiens
gccaagaatgggacccatggccaagg

SEQ ID NO: 73738 - DNA, 26 bp, Homo sapiens
ccaagaatgggacccatggccaaggg

SEQ ID NO: 73739 - DNA, 26 bp, Homo sapiens
caagaatgggacccatggccaagggc

SEQ ID NO: 73740 - DNA, 26 bp, Homo sapiens
aagaatgggacccatggccaagggcg

SEQ ID NO: 73741 - DNA, 26 bp, Homo sapiens
agaatgggacccatggccaagggcgt

SEQ ID NO: 73742 - DNA, 26 bp, Homo sapiens
gaatgggacccatggccaagggcgtg

SEQ ID NO: 73743 - DNA, 26 bp, Homo sapiens
aatgggacccatggccaagggcgtga

SEQ ID NO: 73744 - DNA, 26 bp, Homo sapiens
atgggacccatggccaagggcgtgaa

SEQ ID NO: 73745 - DNA, 26 bp, Homo sapiens
tgggacccatggccaagggcgtgaag

SEQ ID NO: 73746 - DNA, 26 bp, Homo sapiens
gggacccatggccaagggcgtgaagt

SEQ ID NO: 73747 - DNA, 26 bp, Homo sapiens
ggacccatggccaagggcgtgaagtg

SEQ ID NO: 73748 - DNA, 26 bp, Homo sapiens
gacccatggccaagggcgtgaagtgt

SEQ ID NO: 73749 - DNA, 26 bp, Homo sapiens
acccatggccaagggcgtgaagtgtc

SEQ ID NO: 73750 - DNA, 26 bp, Homo sapiens
cccatggccaagggcgtgaagtgtcc

SEQ ID NO: 73751 - DNA, 26 bp, Homo sapiens
ccatggccaagggcgtgaagtgtcca

SEQ ID NO: 73752 - DNA, 26 bp, Homo sapiens
catggccaagggcgtgaagtgtccag

SEQ ID NO: 73753 - DNA, 26 bp, Homo sapiens
atggccaagggcgtgaagtgtccagt

SEQ ID NO: 73754 - DNA, 26 bp, Homo sapiens
tggccaagggcgtgaagtgtccagtg

SEQ ID NO: 73755 - DNA, 26 bp, Homo sapiens
ggccaagggcgtgaagtgtccagtga

SEQ ID NO: 73756 - DNA, 26 bp, Homo sapiens
gccaagggcgtgaagtgtccagtgaa

SEQ ID NO: 73757 - DNA, 26 bp, Homo sapiens
ccaagggcgtgaagtgtccagtgaac

SEQ ID NO: 73758 - DNA, 26 bp, Homo sapiens
caagggcgtgaagtgtccagtgaaca

SEQ ID NO: 73759 - DNA, 26 bp, Homo sapiens
aagggcgtgaagtgtccagtgaacag

SEQ ID NO: 73760 - DNA, 26 bp, Homo sapiens
agggcgtgaagtgtccagtgaacagc

SEQ ID NO: 73761 - DNA, 26 bp, Homo sapiens
gggcgtgaagtgtccagtgaacagca

SEQ ID NO: 73762 - DNA, 26 bp, Homo sapiens
ggcgtgaagtgtccagtgaacagcat

SEQ ID NO: 73763 - DNA, 26 bp, Homo sapiens
gcgtgaagtgtccagtgaacagcata

SEQ ID NO: 73764 - DNA, 26 bp, Homo sapiens
cgtgaagtgtccagtgaacagcatag

SEQ ID NO: 73765 - DNA, 26 bp, Homo sapiens
gtgaagtgtccagtgaacagcatagg

SEQ ID NO: 73766 - DNA, 26 bp, Homo sapiens
tgaagtgtccagtgaacagcatagga

SEQ ID NO: 73767 - DNA, 26 bp, Homo sapiens
gaagtgtccagtgaacagcataggaa

SEQ ID NO: 73768 - DNA, 26 bp, Homo sapiens
aagtgtccagtgaacagcataggaag

SEQ ID NO: 73769 - DNA, 26 bp, Homo sapiens
agtgtccagtgaacagcataggaagg

SEQ ID NO: 73770 - DNA, 26 bp, Homo sapiens
gtgtccagtgaacagcataggaaggg

SEQ ID NO: 73771 - DNA, 26 bp, Homo sapiens
tgtccagtgaacagcataggaaggga

SEQ ID NO: 73772 - DNA, 26 bp, Homo sapiens
gtccagtgaacagcataggaagggag

SEQ ID NO: 73773 - DNA, 26 bp, Homo sapiens
tccagtgaacagcataggaagggaga

SEQ ID NO: 73774 - DNA, 26 bp, Homo sapiens
ccagtgaacagcataggaagggagac

SEQ ID NO: 73775 - DNA, 26 bp, Homo sapiens
cagtgaacagcataggaagggagact

SEQ ID NO: 73776 - DNA, 26 bp, Homo sapiens
agtgaacagcataggaagggagactg

SEQ ID NO: 73777 - DNA, 26 bp, Homo sapiens
gtgaacagcataggaagggagactgt

SEQ ID NO: 73778 - DNA, 26 bp, Homo sapiens
tgaacagcataggaagggagactgtt

SEQ ID NO: 73779 - DNA, 26 bp, Homo sapiens
gaacagcataggaagggagactgttt

SEQ ID NO: 73780 - DNA, 26 bp, Homo sapiens
aacagcataggaagggagactgtttg

SEQ ID NO: 73781 - DNA, 26 bp, Homo sapiens
acagcataggaagggagactgtttga

SEQ ID NO: 73782 - DNA, 26 bp, Homo sapiens
cagcataggaagggagactgtttgaa

SEQ ID NO: 73783 - DNA, 26 bp, Homo sapiens
agcataggaagggagactgtttgaaa

SEQ ID NO: 73784 - DNA, 26 bp, Homo sapiens
gcataggaagggagactgtttgaaat

SEQ ID NO: 73785 - DNA, 26 bp, Homo sapiens
cataggaagggagactgtttgaaatg

SEQ ID NO: 73786 - DNA, 26 bp, Homo sapiens
ataggaagggagactgtttgaaatga

SEQ ID NO: 73787 - DNA, 26 bp, Homo sapiens
taggaagggagactgtttgaaatgac

SEQ ID NO: 73788 - DNA, 26 bp, Homo sapiens
aggaagggagactgtttgaaatgaca

SEQ ID NO: 73789 - DNA, 26 bp, Homo sapiens
ggaagggagactgtttgaaatgacac

SEQ ID NO: 73790 - DNA, 26 bp, Homo sapiens
gaagggagactgtttgaaatgacaca

SEQ ID NO: 73791 - DNA, 26 bp, Homo sapiens
aagggagactgtttgaaatgacacag

SEQ ID NO: 73792 - DNA, 26 bp, Homo sapiens
agggagactgtttgaaatgacacagg

SEQ ID NO: 73793 - DNA, 26 bp, Homo sapiens
gggagactgtttgaaatgacacaggg

SEQ ID NO: 73794 - DNA, 26 bp, Homo sapiens
ggagactgtttgaaatgacacaggga

SEQ ID NO: 73795 - DNA, 26 bp, Homo sapiens
gagactgtttgaaatgacacagggaa

SEQ ID NO: 73796 - DNA, 26 bp, Homo sapiens
agactgtttgaaatgacacagggaac

SEQ ID NO: 73797 - DNA, 26 bp, Homo sapiens
gactgtttgaaatgacacagggaaca

SEQ ID NO: 73798 - DNA, 26 bp, Homo sapiens
actgtttgaaatgacacagggaacaa

SEQ ID NO: 73799 - DNA, 26 bp, Homo sapiens
ctgtttgaaatgacacagggaacaaa

SEQ ID NO: 73800 - DNA, 26 bp, Homo sapiens
tgtttgaaatgacacagggaacaaac

SEQ ID NO: 73801 - DNA, 26 bp, Homo sapiens
gtttgaaatgacacagggaacaaacc

SEQ ID NO: 73802 - DNA, 26 bp, Homo sapiens
tttgaaatgacacagggaacaaacca

SEQ ID NO: 73803 - DNA, 26 bp, Homo sapiens
ttgaaatgacacagggaacaaaccag

SEQ ID NO: 73804 - DNA, 26 bp, Homo sapiens
tgaaatgacacagggaacaaaccagt

SEQ ID NO: 73805 - DNA, 26 bp, Homo sapiens
gaaatgacacagggaacaaaccagtg

SEQ ID NO: 73806 - DNA, 26 bp, Homo sapiens
aaatgacacagggaacaaaccagtgc

SEQ ID NO: 73807 - DNA, 26 bp, Homo sapiens
aatgacacagggaacaaaccagtgcc

SEQ ID NO: 73808 - DNA, 26 bp, Homo sapiens
atgacacagggaacaaaccagtgcca

SEQ ID NO: 73809 - DNA, 26 bp, Homo sapiens
tgacacagggaacaaaccagtgccag

SEQ ID NO: 73810 - DNA, 26 bp, Homo sapiens
gacacagggaacaaaccagtgccagg

SEQ ID NO: 73811 - DNA, 26 bp, Homo sapiens
acacagggaacaaaccagtgccaggg

SEQ ID NO: 73812 - DNA, 26 bp, Homo sapiens
cacagggaacaaaccagtgccagggg

SEQ ID NO: 73813 - DNA, 26 bp, Homo sapiens
acagggaacaaaccagtgccaggggg

SEQ ID NO: 73814 - DNA, 26 bp, Homo sapiens
cagggaacaaaccagtgccaggggga

SEQ ID NO: 73815 - DNA, 26 bp, Homo sapiens
agggaacaaaccagtgccagggggag

SEQ ID NO: 73816 - DNA, 26 bp, Homo sapiens
gggaacaaaccagtgccagggggagg

SEQ ID NO: 73817 - DNA, 26 bp, Homo sapiens
ggaacaaaccagtgccagggggaggg

SEQ ID NO: 73818 - DNA, 26 bp, Homo sapiens
gaacaaaccagtgccagggggaggga

SEQ ID NO: 73819 - DNA, 26 bp, Homo sapiens
aacaaaccagtgccagggggagggag

SEQ ID NO: 73820 - DNA, 26 bp, Homo sapiens
acaaaccagtgccagggggagggagg

SEQ ID NO: 73821 - DNA, 26 bp, Homo sapiens
caaaccagtgccagggggagggaggt

SEQ ID NO: 73822 - DNA, 26 bp, Homo sapiens
aaaccagtgccagggggagggaggtc

SEQ ID NO: 73823 - DNA, 26 bp, Homo sapiens
aaccagtgccagggggagggaggtcc

SEQ ID NO: 73824 - DNA, 26 bp, Homo sapiens
accagtgccagggggagggaggtcct

SEQ ID NO: 73825 - DNA, 26 bp, Homo sapiens
ccagtgccagggggagggaggtcctg

SEQ ID NO: 73826 - DNA, 26 bp, Homo sapiens
cagtgccagggggagggaggtcctgg

SEQ ID NO: 73827 - DNA, 26 bp, Homo sapiens
agtgccagggggagggaggtcctggt

SEQ ID NO: 73828 - DNA, 26 bp, Homo sapiens
gtgccagggggagggaggtcctggtc

SEQ ID NO: 73829 - DNA, 26 bp, Homo sapiens
tgccagggggagggaggtcctggtct

SEQ ID NO: 73830 - DNA, 26 bp, Homo sapiens
gccagggggagggaggtcctggtcta

SEQ ID NO: 73831 - DNA, 26 bp, Homo sapiens
ccagggggagggaggtcctggtctag

SEQ ID NO: 73832 - DNA, 26 bp, Homo sapiens
cagggggagggaggtcctggtctaga

SEQ ID NO: 73833 - DNA, 26 bp, Homo sapiens
agggggagggaggtcctggtctagac

SEQ ID NO: 73834 - DNA, 26 bp, Homo sapiens
gggggagggaggtcctggtctagaca

SEQ ID NO: 73835 - DNA, 26 bp, Homo sapiens
ggggagggaggtcctggtctagacat

SEQ ID NO: 73836 - DNA, 26 bp, Homo sapiens
gggagggaggtcctggtctagacatt

SEQ ID NO: 73837 - DNA, 26 bp, Homo sapiens
ggagggaggtcctggtctagacattc

SEQ ID NO: 73838 - DNA, 26 bp, Homo sapiens
gagggaggtcctggtctagacattca

SEQ ID NO: 73839 - DNA, 26 bp, Homo sapiens
agggaggtcctggtctagacattcag

SEQ ID NO: 73840 - DNA, 26 bp, Homo sapiens
gggaggtcctggtctagacattcaga

SEQ ID NO: 73841 - DNA, 26 bp, Homo sapiens
ggaggtcctggtctagacattcagag

SEQ ID NO: 73842 - DNA, 26 bp, Homo sapiens
gaggtcctggtctagacattcagagc

SEQ ID NO: 73843 - DNA, 26 bp, Homo sapiens
aggtcctggtctagacattcagagct

SEQ ID NO: 73844 - DNA, 26 bp, Homo sapiens
ggtcctggtctagacattcagagctt

SEQ ID NO: 73845 - DNA, 26 bp, Homo sapiens
gtcctggtctagacattcagagcttg

SEQ ID NO: 73846 - DNA, 26 bp, Homo sapiens
tcctggtctagacattcagagcttgt

SEQ ID NO: 73847 - DNA, 26 bp, Homo sapiens
cctggtctagacattcagagcttgta

SEQ ID NO: 73848 - DNA, 26 bp, Homo sapiens
ctggtctagacattcagagcttgtag

SEQ ID NO: 73849 - DNA, 26 bp, Homo sapiens
tggtctagacattcagagcttgtaga

SEQ ID NO: 73850 - DNA, 26 bp, Homo sapiens
ggtctagacattcagagcttgtagaa

SEQ ID NO: 73851 - DNA, 26 bp, Homo sapiens
gtctagacattcagagcttgtagaat

SEQ ID NO: 73852 - DNA, 26 bp, Homo sapiens
tctagacattcagagcttgtagaatt

SEQ ID NO: 73853 - DNA, 26 bp, Homo sapiens
ctagacattcagagcttgtagaattt

SEQ ID NO: 73854 - DNA, 26 bp, Homo sapiens
tagacattcagagcttgtagaatttc

SEQ ID NO: 73855 - DNA, 26 bp, Homo sapiens
agacattcagagcttgtagaatttct

SEQ ID NO: 73856 - DNA, 26 bp, Homo sapiens
gacattcagagcttgtagaatttctg

SEQ ID NO: 73857 - DNA, 26 bp, Homo sapiens
acattcagagcttgtagaatttctgc

SEQ ID NO: 73858 - DNA, 26 bp, Homo sapiens
cattcagagcttgtagaatttctgca

SEQ ID NO: 73859 - DNA, 26 bp, Homo sapiens
attcagagcttgtagaatttctgcat

SEQ ID NO: 73860 - DNA, 26 bp, Homo sapiens
ttcagagcttgtagaatttctgcatc

SEQ ID NO: 73861 - DNA, 26 bp, Homo sapiens
tcagagcttgtagaatttctgcatcc

SEQ ID NO: 73862 - DNA, 26 bp, Homo sapiens
cagagcttgtagaatttctgcatcca

SEQ ID NO: 73863 - DNA, 26 bp, Homo sapiens
agagcttgtagaatttctgcatccag

SEQ ID NO: 73864 - DNA, 26 bp, Homo sapiens
gagcttgtagaatttctgcatccagg

SEQ ID NO: 73865 - DNA, 26 bp, Homo sapiens
agcttgtagaatttctgcatccaggt

SEQ ID NO: 73866 - DNA, 26 bp, Homo sapiens
gcttgtagaatttctgcatccaggtc

SEQ ID NO: 73867 - DNA, 26 bp, Homo sapiens
cttgtagaatttctgcatccaggtca

SEQ ID NO: 73868 - DNA, 26 bp, Homo sapiens
ttgtagaatttctgcatccaggtcag

SEQ ID NO: 73869 - DNA, 26 bp, Homo sapiens
tgtagaatttctgcatccaggtcaga

SEQ ID NO: 73870 - DNA, 26 bp, Homo sapiens
gtagaatttctgcatccaggtcagaa

SEQ ID NO: 73871 - DNA, 26 bp, Homo sapiens
tagaatttctgcatccaggtcagaag

SEQ ID NO: 73872 - DNA, 26 bp, Homo sapiens
agaatttctgcatccaggtcagaaga

SEQ ID NO: 73873 - DNA, 26 bp, Homo sapiens
gaatttctgcatccaggtcagaagaa

SEQ ID NO: 73874 - DNA, 26 bp, Homo sapiens
aatttctgcatccaggtcagaagaat

SEQ ID NO: 73875 - DNA, 26 bp, Homo sapiens
atttctgcatccaggtcagaagaatg

SEQ ID NO: 73876 - DNA, 26 bp, Homo sapiens
tttctgcatccaggtcagaagaatgt

SEQ ID NO: 73877 - DNA, 26 bp, Homo sapiens
ttctgcatccaggtcagaagaatgtc

SEQ ID NO: 73878 - DNA, 26 bp, Homo sapiens
tctgcatccaggtcagaagaatgtcc

SEQ ID NO: 73879 - DNA, 26 bp, Homo sapiens
ctgcatccaggtcagaagaatgtcca

SEQ ID NO: 73880 - DNA, 26 bp, Homo sapiens
tgcatccaggtcagaagaatgtccac

SEQ ID NO: 73881 - DNA, 26 bp, Homo sapiens
gcatccaggtcagaagaatgtccact

SEQ ID NO: 73882 - DNA, 26 bp, Homo sapiens
catccaggtcagaagaatgtccactt

SEQ ID NO: 73883 - DNA, 26 bp, Homo sapiens
atccaggtcagaagaatgtccacttc

SEQ ID NO: 73884 - DNA, 26 bp, Homo sapiens
tccaggtcagaagaatgtccacttcc

SEQ ID NO: 73885 - DNA, 26 bp, Homo sapiens
ccaggtcagaagaatgtccacttccc

SEQ ID NO: 73886 - DNA, 26 bp, Homo sapiens
caggtcagaagaatgtccacttcccc

SEQ ID NO: 73887 - DNA, 26 bp, Homo sapiens
aggtcagaagaatgtccacttcccca

SEQ ID NO: 73888 - DNA, 26 bp, Homo sapiens
ggtcagaagaatgtccacttccccaa

SEQ ID NO: 73889 - DNA, 26 bp, Homo sapiens
gtcagaagaatgtccacttccccaag

SEQ ID NO: 73890 - DNA, 26 bp, Homo sapiens
tcagaagaatgtccacttccccaagg

SEQ ID NO: 73891 - DNA, 26 bp, Homo sapiens
cagaagaatgtccacttccccaaggg

SEQ ID NO: 73892 - DNA, 26 bp, Homo sapiens
agaagaatgtccacttccccaagggc

SEQ ID NO: 73893 - DNA, 26 bp, Homo sapiens
gaagaatgtccacttccccaagggct

SEQ ID NO: 73894 - DNA, 26 bp, Homo sapiens
aagaatgtccacttccccaagggctt

SEQ ID NO: 73895 - DNA, 26 bp, Homo sapiens
agaatgtccacttccccaagggcttt

SEQ ID NO: 73896 - DNA, 26 bp, Homo sapiens
gaatgtccacttccccaagggctttg

SEQ ID NO: 73897 - DNA, 26 bp, Homo sapiens
aatgtccacttccccaagggctttgg

SEQ ID NO: 73898 - DNA, 26 bp, Homo sapiens
atgtccacttccccaagggctttggt

SEQ ID NO: 73899 - DNA, 26 bp, Homo sapiens
tgtccacttccccaagggctttggtc

SEQ ID NO: 73900 - DNA, 26 bp, Homo sapiens
gtccacttccccaagggctttggtca

SEQ ID NO: 73901 - DNA, 26 bp, Homo sapiens
tccacttccccaagggctttggtcag

SEQ ID NO: 73902 - DNA, 26 bp, Homo sapiens
ccacttccccaagggctttggtcaga

SEQ ID NO: 73903 - DNA, 26 bp, Homo sapiens
cacttccccaagggctttggtcagag

SEQ ID NO: 73904 - DNA, 26 bp, Homo sapiens
acttccccaagggctttggtcagagc

SEQ ID NO: 73905 - DNA, 26 bp, Homo sapiens
cttccccaagggctttggtcagagct

SEQ ID NO: 73906 - DNA, 26 bp, Homo sapiens
ttccccaagggctttggtcagagctg

SEQ ID NO: 73907 - DNA, 26 bp, Homo sapiens
tccccaagggctttggtcagagctgc

SEQ ID NO: 73908 - DNA, 26 bp, Homo sapiens
ccccaagggctttggtcagagctgct

SEQ ID NO: 73909 - DNA, 26 bp, Homo sapiens
cccaagggctttggtcagagctgctt

SEQ ID NO: 73910 - DNA, 26 bp, Homo sapiens
ccaagggctttggtcagagctgcttc

SEQ ID NO: 73911 - DNA, 26 bp, Homo sapiens
caagggctttggtcagagctgcttct

SEQ ID NO: 73912 - DNA, 26 bp, Homo sapiens
aagggctttggtcagagctgcttcta

SEQ ID NO: 73913 - DNA, 26 bp, Homo sapiens
agggctttggtcagagctgcttctac

SEQ ID NO: 73914 - DNA, 26 bp, Homo sapiens
gggctttggtcagagctgcttctacg

SEQ ID NO: 73915 - DNA, 26 bp, Homo sapiens
ggctttggtcagagctgcttctacgt

SEQ ID NO: 73916 - DNA, 26 bp, Homo sapiens
gctttggtcagagctgcttctacgtc

SEQ ID NO: 73917 - DNA, 26 bp, Homo sapiens
ctttggtcagagctgcttctacgtcc

SEQ ID NO: 73918 - DNA, 26 bp, Homo sapiens
tttggtcagagctgcttctacgtcca

SEQ ID NO: 73919 - DNA, 26 bp, Homo sapiens
ttggtcagagctgcttctacgtccaa

SEQ ID NO: 73920 - DNA, 26 bp, Homo sapiens
tggtcagagctgcttctacgtccaac

SEQ ID NO: 73921 - DNA, 26 bp, Homo sapiens
ggtcagagctgcttctacgtccaact

SEQ ID NO: 73922 - DNA, 26 bp, Homo sapiens
gtcagagctgcttctacgtccaactg

SEQ ID NO: 73923 - DNA, 26 bp, Homo sapiens
tcagagctgcttctacgtccaactgt

SEQ ID NO: 73924 - DNA, 26 bp, Homo sapiens
cagagctgcttctacgtccaactgtt

SEQ ID NO: 73925 - DNA, 26 bp, Homo sapiens
agagctgcttctacgtccaactgttt

SEQ ID NO: 73926 - DNA, 26 bp, Homo sapiens
gagctgcttctacgtccaactgtttg

SEQ ID NO: 73927 - DNA, 26 bp, Homo sapiens
agctgcttctacgtccaactgtttga

SEQ ID NO: 73928 - DNA, 26 bp, Homo sapiens
gctgcttctacgtccaactgtttgaa

SEQ ID NO: 73929 - DNA, 26 bp, Homo sapiens
ctgcttctacgtccaactgtttgaat

SEQ ID NO: 73930 - DNA, 26 bp, Homo sapiens
tgcttctacgtccaactgtttgaatg

SEQ ID NO: 73931 - DNA, 26 bp, Homo sapiens
gcttctacgtccaactgtttgaatgc

SEQ ID NO: 73932 - DNA, 26 bp, Homo sapiens
cttctacgtccaactgtttgaatgct

SEQ ID NO: 73933 - DNA, 26 bp, Homo sapiens
ttctacgtccaactgtttgaatgctc

SEQ ID NO: 73934 - DNA, 26 bp, Homo sapiens
tctacgtccaactgtttgaatgctct

SEQ ID NO: 73935 - DNA, 26 bp, Homo sapiens
ctacgtccaactgtttgaatgctctc

SEQ ID NO: 73936 - DNA, 26 bp, Homo sapiens
tacgtccaactgtttgaatgctctcc

SEQ ID NO: 73937 - DNA, 26 bp, Homo sapiens
acgtccaactgtttgaatgctctccg

SEQ ID NO: 73938 - DNA, 26 bp, Homo sapiens
cgtccaactgtttgaatgctctccgg

SEQ ID NO: 73939 - DNA, 26 bp, Homo sapiens
gtccaactgtttgaatgctctccgga

SEQ ID NO: 73940 - DNA, 26 bp, Homo sapiens
tccaactgtttgaatgctctccggaa

SEQ ID NO: 73941 - DNA, 26 bp, Homo sapiens
ccaactgtttgaatgctctccggaat

SEQ ID NO: 73942 - DNA, 26 bp, Homo sapiens
caactgtttgaatgctctccggaata

SEQ ID NO: 73943 - DNA, 26 bp, Homo sapiens
aactgtttgaatgctctccggaatag

SEQ ID NO: 73944 - DNA, 26 bp, Homo sapiens
actgtttgaatgctctccggaatagc

SEQ ID NO: 73945 - DNA, 26 bp, Homo sapiens
ctgtttgaatgctctccggaatagca

SEQ ID NO: 73946 - DNA, 26 bp, Homo sapiens
tgtttgaatgctctccggaatagcag

SEQ ID NO: 73947 - DNA, 26 bp, Homo sapiens
gtttgaatgctctccggaatagcaga

SEQ ID NO: 73948 - DNA, 26 bp, Homo sapiens
tttgaatgctctccggaatagcagaa

SEQ ID NO: 73949 - DNA, 26 bp, Homo sapiens
ttgaatgctctccggaatagcagaaa

SEQ ID NO: 73950 - DNA, 26 bp, Homo sapiens
tgaatgctctccggaatagcagaaac

SEQ ID NO: 73951 - DNA, 26 bp, Homo sapiens
gaatgctctccggaatagcagaaacc

SEQ ID NO: 73952 - DNA, 26 bp, Homo sapiens
aatgctctccggaatagcagaaaccg

SEQ ID NO: 73953 - DNA, 26 bp, Homo sapiens
atgctctccggaatagcagaaaccgc

SEQ ID NO: 73954 - DNA, 26 bp, Homo sapiens
tgctctccggaatagcagaaaccgcc

SEQ ID NO: 73955 - DNA, 26 bp, Homo sapiens
gctctccggaatagcagaaaccgcct

SEQ ID NO: 73956 - DNA, 26 bp, Homo sapiens
ctctccggaatagcagaaaccgcctg

SEQ ID NO: 73957 - DNA, 26 bp, Homo sapiens
tctccggaatagcagaaaccgcctgt

SEQ ID NO: 73958 - DNA, 26 bp, Homo sapiens
ctccggaatagcagaaaccgcctgtg

SEQ ID NO: 73959 - DNA, 26 bp, Homo sapiens
tccggaatagcagaaaccgcctgtgt

SEQ ID NO: 73960 - DNA, 26 bp, Homo sapiens
ccggaatagcagaaaccgcctgtgtg

SEQ ID NO: 73961 - DNA, 26 bp, Homo sapiens
cggaatagcagaaaccgcctgtgtgc

SEQ ID NO: 73962 - DNA, 26 bp, Homo sapiens
ggaatagcagaaaccgcctgtgtgca

SEQ ID NO: 73963 - DNA, 26 bp, Homo sapiens
gaatagcagaaaccgcctgtgtgcac

SEQ ID NO: 73964 - DNA, 26 bp, Homo sapiens
aatagcagaaaccgcctgtgtgcact

SEQ ID NO: 73965 - DNA, 26 bp, Homo sapiens
atagcagaaaccgcctgtgtgcactg

SEQ ID NO: 73966 - DNA, 26 bp, Homo sapiens
tagcagaaaccgcctgtgtgcactgt

SEQ ID NO: 73967 - DNA, 26 bp, Homo sapiens
agcagaaaccgcctgtgtgcactgtc

SEQ ID NO: 73968 - DNA, 26 bp, Homo sapiens
gcagaaaccgcctgtgtgcactgtct

SEQ ID NO: 73969 - DNA, 26 bp, Homo sapiens
cagaaaccgcctgtgtgcactgtctc

SEQ ID NO: 73970 - DNA, 26 bp, Homo sapiens
agaaaccgcctgtgtgcactgtctct

SEQ ID NO: 73971 - DNA, 26 bp, Homo sapiens
gaaaccgcctgtgtgcactgtctctg

SEQ ID NO: 73972 - DNA, 26 bp, Homo sapiens
aaaccgcctgtgtgcactgtctctga

SEQ ID NO: 73973 - DNA, 26 bp, Homo sapiens
aaccgcctgtgtgcactgtctctgat

SEQ ID NO: 73974 - DNA, 26 bp, Homo sapiens
accgcctgtgtgcactgtctctgatg

SEQ ID NO: 73975 - DNA, 26 bp, Homo sapiens
ccgcctgtgtgcactgtctctgatgg

SEQ ID NO: 73976 - DNA, 26 bp, Homo sapiens
cgcctgtgtgcactgtctctgatgga

SEQ ID NO: 73977 - DNA, 26 bp, Homo sapiens
gcctgtgtgcactgtctctgatggaa

SEQ ID NO: 73978 - DNA, 26 bp, Homo sapiens
cctgtgtgcactgtctctgatggaaa

SEQ ID NO: 73979 - DNA, 26 bp, Homo sapiens
ctgtgtgcactgtctctgatggaaaa

SEQ ID NO: 73980 - DNA, 26 bp, Homo sapiens
tgtgtgcactgtctctgatggaaaac

SEQ ID NO: 73981 - DNA, 26 bp, Homo sapiens
gtgtgcactgtctctgatggaaaaca

SEQ ID NO: 73982 - DNA, 26 bp, Homo sapiens
tgtgcactgtctctgatggaaaacat

SEQ ID NO: 73983 - DNA, 26 bp, Homo sapiens
gtgcactgtctctgatggaaaacatc

SEQ ID NO: 73984 - DNA, 26 bp, Homo sapiens
tgcactgtctctgatggaaaacatct

SEQ ID NO: 73985 - DNA, 26 bp, Homo sapiens
gcactgtctctgatggaaaacatctc

SEQ ID NO: 73986 - DNA, 26 bp, Homo sapiens
cactgtctctgatggaaaacatctca

SEQ ID NO: 73987 - DNA, 26 bp, Homo sapiens
actgtctctgatggaaaacatctcat

SEQ ID NO: 73988 - DNA, 26 bp, Homo sapiens
ctgtctctgatggaaaacatctcatt

SEQ ID NO: 73989 - DNA, 26 bp, Homo sapiens
tgtctctgatggaaaacatctcattt

SEQ ID NO: 73990 - DNA, 26 bp, Homo sapiens
gtctctgatggaaaacatctcatttt

SEQ ID NO: 73991 - DNA, 26 bp, Homo sapiens
tctctgatggaaaacatctcattttc

SEQ ID NO: 73992 - DNA, 26 bp, Homo sapiens
ctctgatggaaaacatctcattttct

SEQ ID NO: 73993 - DNA, 26 bp, Homo sapiens
tctgatggaaaacatctcattttctt

SEQ ID NO: 73994 - DNA, 26 bp, Homo sapiens
ctgatggaaaacatctcattttcttg

SEQ ID NO: 73995 - DNA, 26 bp, Homo sapiens
tgatggaaaacatctcattttcttga

SEQ ID NO: 73996 - DNA, 26 bp, Homo sapiens
gatggaaaacatctcattttcttgac

SEQ ID NO: 73997 - DNA, 26 bp, Homo sapiens
atggaaaacatctcattttcttgact

SEQ ID NO: 73998 - DNA, 26 bp, Homo sapiens
tggaaaacatctcattttcttgactg

SEQ ID NO: 73999 - DNA, 26 bp, Homo sapiens
ggaaaacatctcattttcttgactgg

SEQ ID NO: 74000 - DNA, 26 bp, Homo sapiens
gaaaacatctcattttcttgactggg

SEQ ID NO: 74001 - DNA, 26 bp, Homo sapiens
aaaacatctcattttcttgactgggt

SEQ ID NO: 74002 - DNA, 26 bp, Homo sapiens
aaacatctcattttcttgactgggtt

SEQ ID NO: 74003 - DNA, 26 bp, Homo sapiens
aacatctcattttcttgactgggttg

SEQ ID NO: 74004 - DNA, 26 bp, Homo sapiens
acatctcattttcttgactgggttgc

SEQ ID NO: 74005 - DNA, 26 bp, Homo sapiens
catctcattttcttgactgggttgca

SEQ ID NO: 74006 - DNA, 26 bp, Homo sapiens
atctcattttcttgactgggttgcag

SEQ ID NO: 74007 - DNA, 26 bp, Homo sapiens
tctcattttcttgactgggttgcagt

SEQ ID NO: 74008 - DNA, 26 bp, Homo sapiens
ctcattttcttgactgggttgcagtt

SEQ ID NO: 74009 - DNA, 26 bp, Homo sapiens
tcattttcttgactgggttgcagttg

SEQ ID NO: 74010 - DNA, 26 bp, Homo sapiens
cattttcttgactgggttgcagttgt

SEQ ID NO: 74011 - DNA, 26 bp, Homo sapiens
attttcttgactgggttgcagttgtg

SEQ ID NO: 74012 - DNA, 26 bp, Homo sapiens
ttttcttgactgggttgcagttgtga

SEQ ID NO: 74013 - DNA, 26 bp, Homo sapiens
tttcttgactgggttgcagttgtgac

SEQ ID NO: 74014 - DNA, 26 bp, Homo sapiens
ttcttgactgggttgcagttgtgaca

SEQ ID NO: 74015 - DNA, 26 bp, Homo sapiens
tcttgactgggttgcagttgtgacac

SEQ ID NO: 74016 - DNA, 26 bp, Homo sapiens
cttgactgggttgcagttgtgacacg

SEQ ID NO: 74017 - DNA, 26 bp, Homo sapiens
ttgactgggttgcagttgtgacacga

SEQ ID NO: 74018 - DNA, 26 bp, Homo sapiens
tgactgggttgcagttgtgacacgat

SEQ ID NO: 74019 - DNA, 26 bp, Homo sapiens
gactgggttgcagttgtgacacgatg

SEQ ID NO: 74020 - DNA, 26 bp, Homo sapiens
actgggttgcagttgtgacacgatga

SEQ ID NO: 74021 - DNA, 26 bp, Homo sapiens
ctgggttgcagttgtgacacgatgag

SEQ ID NO: 74022 - DNA, 26 bp, Homo sapiens
tgggttgcagttgtgacacgatgaga

SEQ ID NO: 74023 - DNA, 26 bp, Homo sapiens
gggttgcagttgtgacacgatgagaa

SEQ ID NO: 74024 - DNA, 26 bp, Homo sapiens
ggttgcagttgtgacacgatgagaac

SEQ ID NO: 74025 - DNA, 26 bp, Homo sapiens
gttgcagttgtgacacgatgagaaca

SEQ ID NO: 74026 - DNA, 26 bp, Homo sapiens
ttgcagttgtgacacgatgagaacaa

SEQ ID NO: 74027 - DNA, 26 bp, Homo sapiens
tgcagttgtgacacgatgagaacaaa

SEQ ID NO: 74028 - DNA, 26 bp, Homo sapiens
gcagttgtgacacgatgagaacaaag

SEQ ID NO: 74029 - DNA, 26 bp, Homo sapiens
cagttgtgacacgatgagaacaaagt

SEQ ID NO: 74030 - DNA, 26 bp, Homo sapiens
agttgtgacacgatgagaacaaagtt

SEQ ID NO: 74031 - DNA, 26 bp, Homo sapiens
gttgtgacacgatgagaacaaagttg

SEQ ID NO: 74032 - DNA, 26 bp, Homo sapiens
ttgtgacacgatgagaacaaagttgt

SEQ ID NO: 74033 - DNA, 26 bp, Homo sapiens
tgtgacacgatgagaacaaagttgtt

SEQ ID NO: 74034 - DNA, 26 bp, Homo sapiens
gtgacacgatgagaacaaagttgttg

SEQ ID NO: 74035 - DNA, 26 bp, Homo sapiens
tgacacgatgagaacaaagttgttgg

SEQ ID NO: 74036 - DNA, 26 bp, Homo sapiens
gacacgatgagaacaaagttgttggc

SEQ ID NO: 74037 - DNA, 26 bp, Homo sapiens
acacgatgagaacaaagttgttggcc

SEQ ID NO: 74038 - DNA, 26 bp, Homo sapiens
cacgatgagaacaaagttgttggcca

SEQ ID NO: 74039 - DNA, 26 bp, Homo sapiens
acgatgagaacaaagttgttggccag

SEQ ID NO: 74040 - DNA, 26 bp, Homo sapiens
cgatgagaacaaagttgttggccaga

SEQ ID NO: 74041 - DNA, 26 bp, Homo sapiens
gatgagaacaaagttgttggccagag

SEQ ID NO: 74042 - DNA, 26 bp, Homo sapiens
atgagaacaaagttgttggccagagt

SEQ ID NO: 74043 - DNA, 26 bp, Homo sapiens
tgagaacaaagttgttggccagagta

SEQ ID NO: 74044 - DNA, 26 bp, Homo sapiens
gagaacaaagttgttggccagagtag

SEQ ID NO: 74045 - DNA, 26 bp, Homo sapiens
agaacaaagttgttggccagagtaga

SEQ ID NO: 74046 - DNA, 26 bp, Homo sapiens
gaacaaagttgttggccagagtagag

SEQ ID NO: 74047 - DNA, 26 bp, Homo sapiens
aacaaagttgttggccagagtagaga

SEQ ID NO: 74048 - DNA, 26 bp, Homo sapiens
acaaagttgttggccagagtagagaa

SEQ ID NO: 74049 - DNA, 26 bp, Homo sapiens
caaagttgttggccagagtagagaat

SEQ ID NO: 74050 - DNA, 26 bp, Homo sapiens
aaagttgttggccagagtagagaatg

SEQ ID NO: 74051 - DNA, 26 bp, Homo sapiens
aagttgttggccagagtagagaatga

SEQ ID NO: 74052 - DNA, 26 bp, Homo sapiens
agttgttggccagagtagagaatgac

SEQ ID NO: 74053 - DNA, 26 bp, Homo sapiens
gttgttggccagagtagagaatgact

SEQ ID NO: 74054 - DNA, 26 bp, Homo sapiens
ttgttggccagagtagagaatgactt

SEQ ID NO: 74055 - DNA, 26 bp, Homo sapiens
tgttggccagagtagagaatgacttc

SEQ ID NO: 74056 - DNA, 26 bp, Homo sapiens
gttggccagagtagagaatgacttca

SEQ ID NO: 74057 - DNA, 26 bp, Homo sapiens
ttggccagagtagagaatgacttcag

SEQ ID NO: 74058 - DNA, 26 bp, Homo sapiens
tggccagagtagagaatgacttcaga

SEQ ID NO: 74059 - DNA, 26 bp, Homo sapiens
ggccagagtagagaatgacttcagag

SEQ ID NO: 74060 - DNA, 26 bp, Homo sapiens
gccagagtagagaatgacttcagagt

SEQ ID NO: 74061 - DNA, 26 bp, Homo sapiens
ccagagtagagaatgacttcagagtc

SEQ ID NO: 74062 - DNA, 26 bp, Homo sapiens
cagagtagagaatgacttcagagtcc

SEQ ID NO: 74063 - DNA, 26 bp, Homo sapiens
agagtagagaatgacttcagagtcct

SEQ ID NO: 74064 - DNA, 26 bp, Homo sapiens
gagtagagaatgacttcagagtcctg

SEQ ID NO: 74065 - DNA, 26 bp, Homo sapiens
agtagagaatgacttcagagtcctga

SEQ ID NO: 74066 - DNA, 26 bp, Homo sapiens
gtagagaatgacttcagagtcctgac

SEQ ID NO: 74067 - DNA, 26 bp, Homo sapiens
tagagaatgacttcagagtcctgact

SEQ ID NO: 74068 - DNA, 26 bp, Homo sapiens
agagaatgacttcagagtcctgactt

SEQ ID NO: 74069 - DNA, 26 bp, Homo sapiens
gagaatgacttcagagtcctgacttc

SEQ ID NO: 74070 - DNA, 26 bp, Homo sapiens
agaatgacttcagagtcctgacttca

SEQ ID NO: 74071 - DNA, 26 bp, Homo sapiens
gaatgacttcagagtcctgacttcaa

SEQ ID NO: 74072 - DNA, 26 bp, Homo sapiens
aatgacttcagagtcctgacttcaac

SEQ ID NO: 74073 - DNA, 26 bp, Homo sapiens
atgacttcagagtcctgacttcaact

SEQ ID NO: 74074 - DNA, 26 bp, Homo sapiens
tgacttcagagtcctgacttcaactg

SEQ ID NO: 74075 - DNA, 26 bp, Homo sapiens
gacttcagagtcctgacttcaactgt

SEQ ID NO: 74076 - DNA, 26 bp, Homo sapiens
acttcagagtcctgacttcaactgtt

SEQ ID NO: 74077 - DNA, 26 bp, Homo sapiens
cttcagagtcctgacttcaactgttc

SEQ ID NO: 74078 - DNA, 26 bp, Homo sapiens
ttcagagtcctgacttcaactgttct

SEQ ID NO: 74079 - DNA, 26 bp, Homo sapiens
tcagagtcctgacttcaactgttcta

SEQ ID NO: 74080 - DNA, 26 bp, Homo sapiens
cagagtcctgacttcaactgttctat

SEQ ID NO: 74081 - DNA, 26 bp, Homo sapiens
agagtcctgacttcaactgttctatt

SEQ ID NO: 74082 - DNA, 26 bp, Homo sapiens
gagtcctgacttcaactgttctattg

SEQ ID NO: 74083 - DNA, 26 bp, Homo sapiens
agtcctgacttcaactgttctattgt

SEQ ID NO: 74084 - DNA, 26 bp, Homo sapiens
gtcctgacttcaactgttctattgtg

SEQ ID NO: 74085 - DNA, 26 bp, Homo sapiens
tcctgacttcaactgttctattgtgg

SEQ ID NO: 74086 - DNA, 26 bp, Homo sapiens
cctgacttcaactgttctattgtggt

SEQ ID NO: 74087 - DNA, 26 bp, Homo sapiens
ctgacttcaactgttctattgtggta

SEQ ID NO: 74088 - DNA, 26 bp, Homo sapiens
tgacttcaactgttctattgtggtag

SEQ ID NO: 74089 - DNA, 26 bp, Homo sapiens
gacttcaactgttctattgtggtagt

SEQ ID NO: 74090 - DNA, 26 bp, Homo sapiens
acttcaactgttctattgtggtagtt

SEQ ID NO: 74091 - DNA, 26 bp, Homo sapiens
cttcaactgttctattgtggtagttt

SEQ ID NO: 74092 - DNA, 26 bp, Homo sapiens
ttcaactgttctattgtggtagtttt

SEQ ID NO: 74093 - DNA, 26 bp, Homo sapiens
tcaactgttctattgtggtagttttt

SEQ ID NO: 74094 - DNA, 26 bp, Homo sapiens
caactgttctattgtggtagtttttg

SEQ ID NO: 74095 - DNA, 26 bp, Homo sapiens
aactgttctattgtggtagtttttga

SEQ ID NO: 74096 - DNA, 26 bp, Homo sapiens
actgttctattgtggtagtttttgaa

SEQ ID NO: 74097 - DNA, 26 bp, Homo sapiens
ctgttctattgtggtagtttttgaaa

SEQ ID NO: 74098 - DNA, 26 bp, Homo sapiens
tgttctattgtggtagtttttgaaaa

SEQ ID NO: 74099 - DNA, 26 bp, Homo sapiens
gttctattgtggtagtttttgaaaac

SEQ ID NO: 74100 - DNA, 26 bp, Homo sapiens
ttctattgtggtagtttttgaaaaca

SEQ ID NO: 74101 - DNA, 26 bp, Homo sapiens
tctattgtggtagtttttgaaaacag

SEQ ID NO: 74102 - DNA, 26 bp, Homo sapiens
ctattgtggtagtttttgaaaacagt

SEQ ID NO: 74103 - DNA, 26 bp, Homo sapiens
tattgtggtagtttttgaaaacagtt

SEQ ID NO: 74104 - DNA, 26 bp, Homo sapiens
attgtggtagtttttgaaaacagttt

SEQ ID NO: 74105 - DNA, 26 bp, Homo sapiens
ttgtggtagtttttgaaaacagtttt

SEQ ID NO: 74106 - DNA, 26 bp, Homo sapiens
tgtggtagtttttgaaaacagttttc

SEQ ID NO: 74107 - DNA, 26 bp, Homo sapiens
gtggtagtttttgaaaacagttttca

SEQ ID NO: 74108 - DNA, 26 bp, Homo sapiens
tggtagtttttgaaaacagttttcaa

SEQ ID NO: 74109 - DNA, 26 bp, Homo sapiens
ggtagtttttgaaaacagttttcaag

SEQ ID NO: 74110 - DNA, 26 bp, Homo sapiens
gtagtttttgaaaacagttttcaagt

SEQ ID NO: 74111 - DNA, 26 bp, Homo sapiens
tagtttttgaaaacagttttcaagta

SEQ ID NO: 74112 - DNA, 26 bp, Homo sapiens
agtttttgaaaacagttttcaagtag

SEQ ID NO: 74113 - DNA, 26 bp, Homo sapiens
gtttttgaaaacagttttcaagtaga

SEQ ID NO: 74114 - DNA, 26 bp, Homo sapiens
tttttgaaaacagttttcaagtagaa

SEQ ID NO: 74115 - DNA, 26 bp, Homo sapiens
ttttgaaaacagttttcaagtagaac

SEQ ID NO: 74116 - DNA, 26 bp, Homo sapiens
tttgaaaacagttttcaagtagaact

SEQ ID NO: 74117 - DNA, 26 bp, Homo sapiens
ttgaaaacagttttcaagtagaactc

SEQ ID NO: 74118 - DNA, 26 bp, Homo sapiens
tgaaaacagttttcaagtagaactcc

SEQ ID NO: 74119 - DNA, 26 bp, Homo sapiens
gaaaacagttttcaagtagaactcca

SEQ ID NO: 74120 - DNA, 26 bp, Homo sapiens
aaaacagttttcaagtagaactccag

SEQ ID NO: 74121 - DNA, 26 bp, Homo sapiens
aaacagttttcaagtagaactccagc

SEQ ID NO: 74122 - DNA, 26 bp, Homo sapiens
aacagttttcaagtagaactccagca

SEQ ID NO: 74123 - DNA, 26 bp, Homo sapiens
acagttttcaagtagaactccagcag

SEQ ID NO: 74124 - DNA, 26 bp, Homo sapiens
cagttttcaagtagaactccagcagg

SEQ ID NO: 74125 - DNA, 26 bp, Homo sapiens
agttttcaagtagaactccagcaggg

SEQ ID NO: 74126 - DNA, 26 bp, Homo sapiens
gttttcaagtagaactccagcagggt

SEQ ID NO: 74127 - DNA, 26 bp, Homo sapiens
ttttcaagtagaactccagcagggtg

SEQ ID NO: 74128 - DNA, 26 bp, Homo sapiens
tttcaagtagaactccagcagggtgt

SEQ ID NO: 74129 - DNA, 26 bp, Homo sapiens
ttcaagtagaactccagcagggtgtg

SEQ ID NO: 74130 - DNA, 26 bp, Homo sapiens
tcaagtagaactccagcagggtgtgg

SEQ ID NO: 74131 - DNA, 26 bp, Homo sapiens
caagtagaactccagcagggtgtgga

SEQ ID NO: 74132 - DNA, 26 bp, Homo sapiens
aagtagaactccagcagggtgtggac

SEQ ID NO: 74133 - DNA, 26 bp, Homo sapiens
agtagaactccagcagggtgtggaca

SEQ ID NO: 74134 - DNA, 26 bp, Homo sapiens
gtagaactccagcagggtgtggacaa

SEQ ID NO: 74135 - DNA, 26 bp, Homo sapiens
tagaactccagcagggtgtggacaag

SEQ ID NO: 74136 - DNA, 26 bp, Homo sapiens
agaactccagcagggtgtggacaagg

SEQ ID NO: 74137 - DNA, 26 bp, Homo sapiens
gaactccagcagggtgtggacaaggt

SEQ ID NO: 74138 - DNA, 26 bp, Homo sapiens
aactccagcagggtgtggacaaggta

SEQ ID NO: 74139 - DNA, 26 bp, Homo sapiens
actccagcagggtgtggacaaggtaa

SEQ ID NO: 74140 - DNA, 26 bp, Homo sapiens
ctccagcagggtgtggacaaggtaac

SEQ ID NO: 74141 - DNA, 26 bp, Homo sapiens
tccagcagggtgtggacaaggtaaca

SEQ ID NO: 74142 - DNA, 26 bp, Homo sapiens
ccagcagggtgtggacaaggtaacag

SEQ ID NO: 74143 - DNA, 26 bp, Homo sapiens
cagcagggtgtggacaaggtaacagc

SEQ ID NO: 74144 - DNA, 26 bp, Homo sapiens
agcagggtgtggacaaggtaacagct

SEQ ID NO: 74145 - DNA, 26 bp, Homo sapiens
gcagggtgtggacaaggtaacagctc

SEQ ID NO: 74146 - DNA, 26 bp, Homo sapiens
cagggtgtggacaaggtaacagctct

SEQ ID NO: 74147 - DNA, 26 bp, Homo sapiens
agggtgtggacaaggtaacagctctc

SEQ ID NO: 74148 - DNA, 26 bp, Homo sapiens
gggtgtggacaaggtaacagctctca

SEQ ID NO: 74149 - DNA, 26 bp, Homo sapiens
ggtgtggacaaggtaacagctctcag

SEQ ID NO: 74150 - DNA, 26 bp, Homo sapiens
gtgtggacaaggtaacagctctcagc

SEQ ID NO: 74151 - DNA, 26 bp, Homo sapiens
tgtggacaaggtaacagctctcagca

SEQ ID NO: 74152 - DNA, 26 bp, Homo sapiens
gtggacaaggtaacagctctcagcat

SEQ ID NO: 74153 - DNA, 26 bp, Homo sapiens
tggacaaggtaacagctctcagcatc

SEQ ID NO: 74154 - DNA, 26 bp, Homo sapiens
ggacaaggtaacagctctcagcatcc

SEQ ID NO: 74155 - DNA, 26 bp, Homo sapiens
gacaaggtaacagctctcagcatccg

SEQ ID NO: 74156 - DNA, 26 bp, Homo sapiens
acaaggtaacagctctcagcatccga

SEQ ID NO: 74157 - DNA, 26 bp, Homo sapiens
caaggtaacagctctcagcatccgag

SEQ ID NO: 74158 - DNA, 26 bp, Homo sapiens
aaggtaacagctctcagcatccgaga

SEQ ID NO: 74159 - DNA, 26 bp, Homo sapiens
aggtaacagctctcagcatccgagac

SEQ ID NO: 74160 - DNA, 26 bp, Homo sapiens
ggtaacagctctcagcatccgagacg

SEQ ID NO: 74161 - DNA, 26 bp, Homo sapiens
gtaacagctctcagcatccgagacgt

SEQ ID NO: 74162 - DNA, 26 bp, Homo sapiens
taacagctctcagcatccgagacgtt

SEQ ID NO: 74163 - DNA, 26 bp, Homo sapiens
aacagctctcagcatccgagacgttc

SEQ ID NO: 74164 - DNA, 26 bp, Homo sapiens
acagctctcagcatccgagacgttct

SEQ ID NO: 74165 - DNA, 26 bp, Homo sapiens
cagctctcagcatccgagacgttctg

SEQ ID NO: 74166 - DNA, 26 bp, Homo sapiens
agctctcagcatccgagacgttctgc

SEQ ID NO: 74167 - DNA, 26 bp, Homo sapiens
gctctcagcatccgagacgttctgca

SEQ ID NO: 74168 - DNA, 26 bp, Homo sapiens
ctctcagcatccgagacgttctgcag

SEQ ID NO: 74169 - DNA, 26 bp, Homo sapiens
tctcagcatccgagacgttctgcaga

SEQ ID NO: 74170 - DNA, 26 bp, Homo sapiens
ctcagcatccgagacgttctgcagaa

SEQ ID NO: 74171 - DNA, 26 bp, Homo sapiens
tcagcatccgagacgttctgcagaac

SEQ ID NO: 74172 - DNA, 26 bp, Homo sapiens
cagcatccgagacgttctgcagaacc

SEQ ID NO: 74173 - DNA, 26 bp, Homo sapiens
agcatccgagacgttctgcagaacct

SEQ ID NO: 74174 - DNA, 26 bp, Homo sapiens
gcatccgagacgttctgcagaacctc

SEQ ID NO: 74175 - DNA, 26 bp, Homo sapiens
catccgagacgttctgcagaacctcc

SEQ ID NO: 74176 - DNA, 26 bp, Homo sapiens
atccgagacgttctgcagaacctcct

SEQ ID NO: 74177 - DNA, 26 bp, Homo sapiens
tccgagacgttctgcagaacctcctg

SEQ ID NO: 74178 - DNA, 26 bp, Homo sapiens
ccgagacgttctgcagaacctcctgc

SEQ ID NO: 74179 - DNA, 26 bp, Homo sapiens
cgagacgttctgcagaacctcctgct

SEQ ID NO: 74180 - DNA, 26 bp, Homo sapiens
gagacgttctgcagaacctcctgctg

SEQ ID NO: 74181 - DNA, 26 bp, Homo sapiens
agacgttctgcagaacctcctgctgc

SEQ ID NO: 74182 - DNA, 26 bp, Homo sapiens
gacgttctgcagaacctcctgctgca

SEQ ID NO: 74183 - DNA, 26 bp, Homo sapiens
acgttctgcagaacctcctgctgcag

SEQ ID NO: 74184 - DNA, 26 bp, Homo sapiens
cgttctgcagaacctcctgctgcagc

SEQ ID NO: 74185 - DNA, 26 bp, Homo sapiens
gttctgcagaacctcctgctgcagca

SEQ ID NO: 74186 - DNA, 26 bp, Homo sapiens
ttctgcagaacctcctgctgcagcag

SEQ ID NO: 74187 - DNA, 26 bp, Homo sapiens
tctgcagaacctcctgctgcagcagc

SEQ ID NO: 74188 - DNA, 26 bp, Homo sapiens
ctgcagaacctcctgctgcagcagcc

SEQ ID NO: 74189 - DNA, 26 bp, Homo sapiens
tgcagaacctcctgctgcagcagccg

SEQ ID NO: 74190 - DNA, 26 bp, Homo sapiens
gcagaacctcctgctgcagcagccgg

SEQ ID NO: 74191 - DNA, 26 bp, Homo sapiens
cagaacctcctgctgcagcagccggg

SEQ ID NO: 74192 - DNA, 26 bp, Homo sapiens
agaacctcctgctgcagcagccgggc

SEQ ID NO: 74193 - DNA, 26 bp, Homo sapiens
gaacctcctgctgcagcagccgggca

SEQ ID NO: 74194 - DNA, 26 bp, Homo sapiens
aacctcctgctgcagcagccgggcac

SEQ ID NO: 74195 - DNA, 26 bp, Homo sapiens
acctcctgctgcagcagccgggcact

SEQ ID NO: 74196 - DNA, 26 bp, Homo sapiens
cctcctgctgcagcagccgggcactc

SEQ ID NO: 74197 - DNA, 26 bp, Homo sapiens
ctcctgctgcagcagccgggcactcg

SEQ ID NO: 74198 - DNA, 26 bp, Homo sapiens
tcctgctgcagcagccgggcactcgt

SEQ ID NO: 74199 - DNA, 26 bp, Homo sapiens
cctgctgcagcagccgggcactcgtg

SEQ ID NO: 74200 - DNA, 26 bp, Homo sapiens
ctgctgcagcagccgggcactcgtga

SEQ ID NO: 74201 - DNA, 26 bp, Homo sapiens
tgctgcagcagccgggcactcgtgat

SEQ ID NO: 74202 - DNA, 26 bp, Homo sapiens
gctgcagcagccgggcactcgtgatg

SEQ ID NO: 74203 - DNA, 26 bp, Homo sapiens
ctgcagcagccgggcactcgtgatgt

SEQ ID NO: 74204 - DNA, 26 bp, Homo sapiens
tgcagcagccgggcactcgtgatgtt

SEQ ID NO: 74205 - DNA, 26 bp, Homo sapiens
gcagcagccgggcactcgtgatgtta

SEQ ID NO: 74206 - DNA, 26 bp, Homo sapiens
cagcagccgggcactcgtgatgttat

SEQ ID NO: 74207 - DNA, 26 bp, Homo sapiens
agcagccgggcactcgtgatgttatc

SEQ ID NO: 74208 - DNA, 26 bp, Homo sapiens
gcagccgggcactcgtgatgttatcc

SEQ ID NO: 74209 - DNA, 26 bp, Homo sapiens
cagccgggcactcgtgatgttatcct

SEQ ID NO: 74210 - DNA, 26 bp, Homo sapiens
agccgggcactcgtgatgttatcctg

SEQ ID NO: 74211 - DNA, 26 bp, Homo sapiens
gccgggcactcgtgatgttatcctga

SEQ ID NO: 74212 - DNA, 26 bp, Homo sapiens
ccgggcactcgtgatgttatcctgag

SEQ ID NO: 74213 - DNA, 26 bp, Homo sapiens
cgggcactcgtgatgttatcctgagc

SEQ ID NO: 74214 - DNA, 26 bp, Homo sapiens
gggcactcgtgatgttatcctgagct

SEQ ID NO: 74215 - DNA, 26 bp, Homo sapiens
ggcactcgtgatgttatcctgagctt

SEQ ID NO: 74216 - DNA, 26 bp, Homo sapiens
gcactcgtgatgttatcctgagcttg

SEQ ID NO: 74217 - DNA, 26 bp, Homo sapiens
cactcgtgatgttatcctgagcttgc

SEQ ID NO: 74218 - DNA, 26 bp, Homo sapiens
actcgtgatgttatcctgagcttgca

SEQ ID NO: 74219 - DNA, 26 bp, Homo sapiens
ctcgtgatgttatcctgagcttgcat

SEQ ID NO: 74220 - DNA, 26 bp, Homo sapiens
tcgtgatgttatcctgagcttgcata

SEQ ID NO: 74221 - DNA, 26 bp, Homo sapiens
cgtgatgttatcctgagcttgcatag

SEQ ID NO: 74222 - DNA, 26 bp, Homo sapiens
gtgatgttatcctgagcttgcatagt

SEQ ID NO: 74223 - DNA, 26 bp, Homo sapiens
tgatgttatcctgagcttgcatagtg

SEQ ID NO: 74224 - DNA, 26 bp, Homo sapiens
gatgttatcctgagcttgcatagtgt

SEQ ID NO: 74225 - DNA, 26 bp, Homo sapiens
atgttatcctgagcttgcatagtgtc

SEQ ID NO: 74226 - DNA, 26 bp, Homo sapiens
tgttatcctgagcttgcatagtgtct

SEQ ID NO: 74227 - DNA, 26 bp, Homo sapiens
gttatcctgagcttgcatagtgtctt

SEQ ID NO: 74228 - DNA, 26 bp, Homo sapiens
ttatcctgagcttgcatagtgtcttt

SEQ ID NO: 74229 - DNA, 26 bp, Homo sapiens
tatcctgagcttgcatagtgtctttc

SEQ ID NO: 74230 - DNA, 26 bp, Homo sapiens
atcctgagcttgcatagtgtctttca

SEQ ID NO: 74231 - DNA, 26 bp, Homo sapiens
tcctgagcttgcatagtgtctttcac

SEQ ID NO: 74232 - DNA, 26 bp, Homo sapiens
cctgagcttgcatagtgtctttcaca

SEQ ID NO: 74233 - DNA, 26 bp, Homo sapiens
ctgagcttgcatagtgtctttcacag

SEQ ID NO: 74234 - DNA, 26 bp, Homo sapiens
tgagcttgcatagtgtctttcacagc

SEQ ID NO: 74235 - DNA, 26 bp, Homo sapiens
gagcttgcatagtgtctttcacagcc

SEQ ID NO: 74236 - DNA, 26 bp, Homo sapiens
agcttgcatagtgtctttcacagccc

SEQ ID NO: 74237 - DNA, 26 bp, Homo sapiens
gcttgcatagtgtctttcacagccca

SEQ ID NO: 74238 - DNA, 26 bp, Homo sapiens
cttgcatagtgtctttcacagcccag

SEQ ID NO: 74239 - DNA, 26 bp, Homo sapiens
ttgcatagtgtctttcacagcccaga

SEQ ID NO: 74240 - DNA, 26 bp, Homo sapiens
tgcatagtgtctttcacagcccagaa

SEQ ID NO: 74241 - DNA, 26 bp, Homo sapiens
gcatagtgtctttcacagcccagaag

SEQ ID NO: 74242 - DNA, 26 bp, Homo sapiens
catagtgtctttcacagcccagaagg

SEQ ID NO: 74243 - DNA, 26 bp, Homo sapiens
atagtgtctttcacagcccagaaggc

SEQ ID NO: 74244 - DNA, 26 bp, Homo sapiens
tagtgtctttcacagcccagaaggct

SEQ ID NO: 74245 - DNA, 26 bp, Homo sapiens
agtgtctttcacagcccagaaggctt

SEQ ID NO: 74246 - DNA, 26 bp, Homo sapiens
gtgtctttcacagcccagaaggcttc

SEQ ID NO: 74247 - DNA, 26 bp, Homo sapiens
tgtctttcacagcccagaaggcttcc

SEQ ID NO: 74248 - DNA, 26 bp, Homo sapiens
gtctttcacagcccagaaggcttccc

SEQ ID NO: 74249 - DNA, 26 bp, Homo sapiens
tctttcacagcccagaaggcttccca

SEQ ID NO: 74250 - DNA, 26 bp, Homo sapiens
ctttcacagcccagaaggcttcccac

SEQ ID NO: 74251 - DNA, 26 bp, Homo sapiens
tttcacagcccagaaggcttcccaca

SEQ ID NO: 74252 - DNA, 26 bp, Homo sapiens
ttcacagcccagaaggcttcccacag

SEQ ID NO: 74253 - DNA, 26 bp, Homo sapiens
tcacagcccagaaggcttcccacagt

SEQ ID NO: 74254 - DNA, 26 bp, Homo sapiens
cacagcccagaaggcttcccacagtt

SEQ ID NO: 74255 - DNA, 26 bp, Homo sapiens
acagcccagaaggcttcccacagttt

SEQ ID NO: 74256 - DNA, 26 bp, Homo sapiens
cagcccagaaggcttcccacagtttc

SEQ ID NO: 74257 - DNA, 26 bp, Homo sapiens
agcccagaaggcttcccacagtttct

SEQ ID NO: 74258 - DNA, 26 bp, Homo sapiens
gcccagaaggcttcccacagtttctg

SEQ ID NO: 74259 - DNA, 26 bp, Homo sapiens
cccagaaggcttcccacagtttctgg

SEQ ID NO: 74260 - DNA, 26 bp, Homo sapiens
ccagaaggcttcccacagtttctggg

SEQ ID NO: 74261 - DNA, 26 bp, Homo sapiens
cagaaggcttcccacagtttctgggg

SEQ ID NO: 74262 - DNA, 26 bp, Homo sapiens
agaaggcttcccacagtttctgggga

SEQ ID NO: 74263 - DNA, 26 bp, Homo sapiens
gaaggcttcccacagtttctggggaa

SEQ ID NO: 74264 - DNA, 26 bp, Homo sapiens
aaggcttcccacagtttctggggaac

SEQ ID NO: 74265 - DNA, 26 bp, Homo sapiens
aggcttcccacagtttctggggaaca

SEQ ID NO: 74266 - DNA, 26 bp, Homo sapiens
ggcttcccacagtttctggggaacaa

SEQ ID NO: 74267 - DNA, 26 bp, Homo sapiens
gcttcccacagtttctggggaacaac

SEQ ID NO: 74268 - DNA, 26 bp, Homo sapiens
cttcccacagtttctggggaacaacc

SEQ ID NO: 74269 - DNA, 26 bp, Homo sapiens
ttcccacagtttctggggaacaaccc

SEQ ID NO: 74270 - DNA, 26 bp, Homo sapiens
tcccacagtttctggggaacaacccc

SEQ ID NO: 74271 - DNA, 26 bp, Homo sapiens
cccacagtttctggggaacaaccccc

SEQ ID NO: 74272 - DNA, 26 bp, Homo sapiens
ccacagtttctggggaacaaccccct

SEQ ID NO: 74273 - DNA, 26 bp, Homo sapiens
cacagtttctggggaacaaccccctt

SEQ ID NO: 74274 - DNA, 26 bp, Homo sapiens
acagtttctggggaacaacccccttc

SEQ ID NO: 74275 - DNA, 26 bp, Homo sapiens
cagtttctggggaacaacccccttca

SEQ ID NO: 74276 - DNA, 26 bp, Homo sapiens
agtttctggggaacaacccccttcac

SEQ ID NO: 74277 - DNA, 26 bp, Homo sapiens
gtttctggggaacaacccccttcact

SEQ ID NO: 74278 - DNA, 26 bp, Homo sapiens
tttctggggaacaacccccttcactt

SEQ ID NO: 74279 - DNA, 26 bp, Homo sapiens
ttctggggaacaacccccttcacttg

SEQ ID NO: 74280 - DNA, 26 bp, Homo sapiens
tctggggaacaacccccttcacttgg

SEQ ID NO: 74281 - DNA, 26 bp, Homo sapiens
ctggggaacaacccccttcacttggc

SEQ ID NO: 74282 - DNA, 26 bp, Homo sapiens
tggggaacaacccccttcacttggca

SEQ ID NO: 74283 - DNA, 26 bp, Homo sapiens
ggggaacaacccccttcacttggcag

SEQ ID NO: 74284 - DNA, 26 bp, Homo sapiens
gggaacaacccccttcacttggcagg

SEQ ID NO: 74285 - DNA, 26 bp, Homo sapiens
ggaacaacccccttcacttggcaggg

SEQ ID NO: 74286 - DNA, 26 bp, Homo sapiens
gaacaacccccttcacttggcagggc

SEQ ID NO: 74287 - DNA, 26 bp, Homo sapiens
aacaacccccttcacttggcagggcc

SEQ ID NO: 74288 - DNA, 26 bp, Homo sapiens
acaacccccttcacttggcagggccc

SEQ ID NO: 74289 - DNA, 26 bp, Homo sapiens
caacccccttcacttggcagggccca

SEQ ID NO: 74290 - DNA, 26 bp, Homo sapiens
aacccccttcacttggcagggcccaa

SEQ ID NO: 74291 - DNA, 26 bp, Homo sapiens
acccccttcacttggcagggcccaaa

SEQ ID NO: 74292 - DNA, 26 bp, Homo sapiens
cccccttcacttggcagggcccaaag

SEQ ID NO: 74293 - DNA, 26 bp, Homo sapiens
ccccttcacttggcagggcccaaagt

SEQ ID NO: 74294 - DNA, 26 bp, Homo sapiens
cccttcacttggcagggcccaaagtg

SEQ ID NO: 74295 - DNA, 26 bp, Homo sapiens
ccttcacttggcagggcccaaagtgg

SEQ ID NO: 74296 - DNA, 26 bp, Homo sapiens
cttcacttggcagggcccaaagtgga

SEQ ID NO: 74297 - DNA, 26 bp, Homo sapiens
ttcacttggcagggcccaaagtggaa

SEQ ID NO: 74298 - DNA, 26 bp, Homo sapiens
tcacttggcagggcccaaagtggaat

SEQ ID NO: 74299 - DNA, 26 bp, Homo sapiens
cacttggcagggcccaaagtggaatt

SEQ ID NO: 74300 - DNA, 26 bp, Homo sapiens
acttggcagggcccaaagtggaattc

SEQ ID NO: 74301 - DNA, 26 bp, Homo sapiens
cttggcagggcccaaagtggaattct

SEQ ID NO: 74302 - DNA, 26 bp, Homo sapiens
ttggcagggcccaaagtggaattctt

SEQ ID NO: 74303 - DNA, 26 bp, Homo sapiens
tggcagggcccaaagtggaattcttg

SEQ ID NO: 74304 - DNA, 26 bp, Homo sapiens
ggcagggcccaaagtggaattcttgg

SEQ ID NO: 74305 - DNA, 26 bp, Homo sapiens
gcagggcccaaagtggaattcttggc

SEQ ID NO: 74306 - DNA, 26 bp, Homo sapiens
cagggcccaaagtggaattcttggcc

SEQ ID NO: 74307 - DNA, 26 bp, Homo sapiens
agggcccaaagtggaattcttggccc

SEQ ID NO: 74308 - DNA, 26 bp, Homo sapiens
gggcccaaagtggaattcttggccct

SEQ ID NO: 74309 - DNA, 26 bp, Homo sapiens
ggcccaaagtggaattcttggccctg

SEQ ID NO: 74310 - DNA, 26 bp, Homo sapiens
gcccaaagtggaattcttggccctgg

SEQ ID NO: 74311 - DNA, 26 bp, Homo sapiens
cccaaagtggaattcttggccctggg

SEQ ID NO: 74312 - DNA, 26 bp, Homo sapiens
ccaaagtggaattcttggccctgggc

SEQ ID NO: 74313 - DNA, 26 bp, Homo sapiens
caaagtggaattcttggccctgggcc

SEQ ID NO: 74314 - DNA, 26 bp, Homo sapiens
aaagtggaattcttggccctgggccc

SEQ ID NO: 74315 - DNA, 26 bp, Homo sapiens
aagtggaattcttggccctgggcccc

SEQ ID NO: 74316 - DNA, 26 bp, Homo sapiens
agtggaattcttggccctgggcccct

SEQ ID NO: 74317 - DNA, 26 bp, Homo sapiens
gtggaattcttggccctgggcccctg

SEQ ID NO: 74318 - DNA, 26 bp, Homo sapiens
tggaattcttggccctgggcccctga

SEQ ID NO: 74319 - DNA, 26 bp, Homo sapiens
ggaattcttggccctgggcccctgat

SEQ ID NO: 74320 - DNA, 26 bp, Homo sapiens
gaattcttggccctgggcccctgata

SEQ ID NO: 74321 - DNA, 26 bp, Homo sapiens
aattcttggccctgggcccctgatac

SEQ ID NO: 74322 - DNA, 26 bp, Homo sapiens
attcttggccctgggcccctgatacc

SEQ ID NO: 74323 - DNA, 26 bp, Homo sapiens
ttcttggccctgggcccctgatacct

SEQ ID NO: 74324 - DNA, 26 bp, Homo sapiens
tcttggccctgggcccctgatacctg

SEQ ID NO: 74325 - DNA, 26 bp, Homo sapiens
cttggccctgggcccctgatacctgg

SEQ ID NO: 74326 - DNA, 26 bp, Homo sapiens
ttggccctgggcccctgatacctggc

SEQ ID NO: 74327 - DNA, 26 bp, Homo sapiens
tggccctgggcccctgatacctggct

SEQ ID NO: 74328 - DNA, 26 bp, Homo sapiens
ggccctgggcccctgatacctggctc

SEQ ID NO: 74329 - DNA, 26 bp, Homo sapiens
gccctgggcccctgatacctggctcc

SEQ ID NO: 74330 - DNA, 26 bp, Homo sapiens
ccctgggcccctgatacctggctcca

SEQ ID NO: 74331 - DNA, 26 bp, Homo sapiens
cctgggcccctgatacctggctccag

SEQ ID NO: 74332 - DNA, 26 bp, Homo sapiens
ctgggcccctgatacctggctccaga

SEQ ID NO: 74333 - DNA, 26 bp, Homo sapiens
tgggcccctgatacctggctccagag

SEQ ID NO: 74334 - DNA, 26 bp, Homo sapiens
gggcccctgatacctggctccagaga

SEQ ID NO: 74335 - DNA, 26 bp, Homo sapiens
ggcccctgatacctggctccagagaa

SEQ ID NO: 74336 - DNA, 26 bp, Homo sapiens
gcccctgatacctggctccagagaag

SEQ ID NO: 74337 - DNA, 26 bp, Homo sapiens
cccctgatacctggctccagagaagc

SEQ ID NO: 74338 - DNA, 26 bp, Homo sapiens
ccctgatacctggctccagagaagca

SEQ ID NO: 74339 - DNA, 26 bp, Homo sapiens
cctgatacctggctccagagaagcag

SEQ ID NO: 74340 - DNA, 26 bp, Homo sapiens
ctgatacctggctccagagaagcagg

SEQ ID NO: 74341 - DNA, 26 bp, Homo sapiens
tgatacctggctccagagaagcaggg

SEQ ID NO: 74342 - DNA, 26 bp, Homo sapiens
gatacctggctccagagaagcagggt

SEQ ID NO: 74343 - DNA, 26 bp, Homo sapiens
atacctggctccagagaagcagggta

SEQ ID NO: 74344 - DNA, 26 bp, Homo sapiens
tacctggctccagagaagcagggtaa

SEQ ID NO: 74345 - DNA, 26 bp, Homo sapiens
acctggctccagagaagcagggtaaa

SEQ ID NO: 74346 - DNA, 26 bp, Homo sapiens
cctggctccagagaagcagggtaaaa

SEQ ID NO: 74347 - DNA, 26 bp, Homo sapiens
ctggctccagagaagcagggtaaaac

SEQ ID NO: 74348 - DNA, 26 bp, Homo sapiens
tggctccagagaagcagggtaaaacc

SEQ ID NO: 74349 - DNA, 26 bp, Homo sapiens
ggctccagagaagcagggtaaaaccc

SEQ ID NO: 74350 - DNA, 26 bp, Homo sapiens
gctccagagaagcagggtaaaaccca

SEQ ID NO: 74351 - DNA, 26 bp, Homo sapiens
ctccagagaagcagggtaaaacccag

SEQ ID NO: 74352 - DNA, 26 bp, Homo sapiens
tccagagaagcagggtaaaacccagg

SEQ ID NO: 74353 - DNA, 26 bp, Homo sapiens
ccagagaagcagggtaaaacccaggc

SEQ ID NO: 74354 - DNA, 26 bp, Homo sapiens
cagagaagcagggtaaaacccaggca

SEQ ID NO: 74355 - DNA, 26 bp, Homo sapiens
agagaagcagggtaaaacccaggcaa

SEQ ID NO: 74356 - DNA, 26 bp, Homo sapiens
gagaagcagggtaaaacccaggcaag

SEQ ID NO: 74357 - DNA, 26 bp, Homo sapiens
agaagcagggtaaaacccaggcaagg

SEQ ID NO: 74358 - DNA, 26 bp, Homo sapiens
gaagcagggtaaaacccaggcaaggg

SEQ ID NO: 74359 - DNA, 26 bp, Homo sapiens
aagcagggtaaaacccaggcaaggga

SEQ ID NO: 74360 - DNA, 26 bp, Homo sapiens
agcagggtaaaacccaggcaagggag

SEQ ID NO: 74361 - DNA, 26 bp, Homo sapiens
gcagggtaaaacccaggcaagggagc

SEQ ID NO: 74362 - DNA, 26 bp, Homo sapiens
cagggtaaaacccaggcaagggagca

SEQ ID NO: 74363 - DNA, 26 bp, Homo sapiens
agggtaaaacccaggcaagggagcac

SEQ ID NO: 74364 - DNA, 26 bp, Homo sapiens
gggtaaaacccaggcaagggagcaca

SEQ ID NO: 74365 - DNA, 26 bp, Homo sapiens
ggtaaaacccaggcaagggagcacaa

SEQ ID NO: 74366 - DNA, 26 bp, Homo sapiens
gtaaaacccaggcaagggagcacaac

SEQ ID NO: 74367 - DNA, 26 bp, Homo sapiens
taaaacccaggcaagggagcacaacc

SEQ ID NO: 74368 - DNA, 26 bp, Homo sapiens
aaaacccaggcaagggagcacaacca

SEQ ID NO: 74369 - DNA, 26 bp, Homo sapiens
aaacccaggcaagggagcacaaccat

SEQ ID NO: 74370 - DNA, 26 bp, Homo sapiens
aacccaggcaagggagcacaaccatc

SEQ ID NO: 74371 - DNA, 26 bp, Homo sapiens
acccaggcaagggagcacaaccatct

SEQ ID NO: 74372 - DNA, 26 bp, Homo sapiens
cccaggcaagggagcacaaccatctg

SEQ ID NO: 74373 - DNA, 26 bp, Homo sapiens
ccaggcaagggagcacaaccatctgc

SEQ ID NO: 74374 - DNA, 26 bp, Homo sapiens
caggcaagggagcacaaccatctgca

SEQ ID NO: 74375 - DNA, 26 bp, Homo sapiens
aggcaagggagcacaaccatctgcat

SEQ ID NO: 74376 - DNA, 26 bp, Homo sapiens
ggcaagggagcacaaccatctgcatt

SEQ ID NO: 74377 - DNA, 26 bp, Homo sapiens
gcaagggagcacaaccatctgcattt

SEQ ID NO: 74378 - DNA, 26 bp, Homo sapiens
caagggagcacaaccatctgcatttg

SEQ ID NO: 74379 - DNA, 26 bp, Homo sapiens
aagggagcacaaccatctgcatttga

SEQ ID NO: 74380 - DNA, 26 bp, Homo sapiens
agggagcacaaccatctgcatttgag

SEQ ID NO: 74381 - DNA, 26 bp, Homo sapiens
gggagcacaaccatctgcatttgaga

SEQ ID NO: 74382 - DNA, 26 bp, Homo sapiens
ggagcacaaccatctgcatttgagag

SEQ ID NO: 74383 - DNA, 26 bp, Homo sapiens
gagcacaaccatctgcatttgagagg

SEQ ID NO: 74384 - DNA, 26 bp, Homo sapiens
agcacaaccatctgcatttgagaggc

SEQ ID NO: 74385 - DNA, 26 bp, Homo sapiens
gcacaaccatctgcatttgagaggct

SEQ ID NO: 74386 - DNA, 26 bp, Homo sapiens
cacaaccatctgcatttgagaggctg

SEQ ID NO: 74387 - DNA, 26 bp, Homo sapiens
acaaccatctgcatttgagaggctgt

SEQ ID NO: 74388 - DNA, 26 bp, Homo sapiens
caaccatctgcatttgagaggctgtc

SEQ ID NO: 74389 - DNA, 26 bp, Homo sapiens
aaccatctgcatttgagaggctgtcg

SEQ ID NO: 74390 - DNA, 26 bp, Homo sapiens
accatctgcatttgagaggctgtcgc

SEQ ID NO: 74391 - DNA, 26 bp, Homo sapiens
ccatctgcatttgagaggctgtcgcc

SEQ ID NO: 74392 - DNA, 26 bp, Homo sapiens
catctgcatttgagaggctgtcgcca

SEQ ID NO: 74393 - DNA, 26 bp, Homo sapiens
atctgcatttgagaggctgtcgccag

SEQ ID NO: 74394 - DNA, 26 bp, Homo sapiens
tctgcatttgagaggctgtcgccagc

SEQ ID NO: 74395 - DNA, 26 bp, Homo sapiens
ctgcatttgagaggctgtcgccagca

SEQ ID NO: 74396 - DNA, 26 bp, Homo sapiens
tgcatttgagaggctgtcgccagcaa

SEQ ID NO: 74397 - DNA, 26 bp, Homo sapiens
gcatttgagaggctgtcgccagcaaa

SEQ ID NO: 74398 - DNA, 26 bp, Homo sapiens
catttgagaggctgtcgccagcaaag

SEQ ID NO: 74399 - DNA, 26 bp, Homo sapiens
atttgagaggctgtcgccagcaaagg

SEQ ID NO: 74400 - DNA, 26 bp, Homo sapiens
tttgagaggctgtcgccagcaaagga

SEQ ID NO: 74401 - DNA, 26 bp, Homo sapiens
ttgagaggctgtcgccagcaaaggag

SEQ ID NO: 74402 - DNA, 26 bp, Homo sapiens
tgagaggctgtcgccagcaaaggagg

SEQ ID NO: 74403 - DNA, 26 bp, Homo sapiens
gagaggctgtcgccagcaaaggaggg

SEQ ID NO: 74404 - DNA, 26 bp, Homo sapiens
agaggctgtcgccagcaaaggagggc

SEQ ID NO: 74405 - DNA, 26 bp, Homo sapiens
gaggctgtcgccagcaaaggagggca

SEQ ID NO: 74406 - DNA, 26 bp, Homo sapiens
aggctgtcgccagcaaaggagggcag

SEQ ID NO: 74407 - DNA, 26 bp, Homo sapiens
ggctgtcgccagcaaaggagggcaga

SEQ ID NO: 74408 - DNA, 26 bp, Homo sapiens
gctgtcgccagcaaaggagggcagaa

SEQ ID NO: 74409 - DNA, 26 bp, Homo sapiens
ctgtcgccagcaaaggagggcagaag

SEQ ID NO: 74410 - DNA, 26 bp, Homo sapiens
tgtcgccagcaaaggagggcagaagg

SEQ ID NO: 74411 - DNA, 26 bp, Homo sapiens
gtcgccagcaaaggagggcagaaggg

SEQ ID NO: 74412 - DNA, 26 bp, Homo sapiens
tcgccagcaaaggagggcagaagggt

SEQ ID NO: 74413 - DNA, 26 bp, Homo sapiens
cgccagcaaaggagggcagaagggtc

SEQ ID NO: 74414 - DNA, 26 bp, Homo sapiens
gccagcaaaggagggcagaagggtct

SEQ ID NO: 74415 - DNA, 26 bp, Homo sapiens
ccagcaaaggagggcagaagggtctg

SEQ ID NO: 74416 - DNA, 26 bp, Homo sapiens
cagcaaaggagggcagaagggtctgg

SEQ ID NO: 74417 - DNA, 26 bp, Homo sapiens
agcaaaggagggcagaagggtctggc

SEQ ID NO: 74418 - DNA, 26 bp, Homo sapiens
gcaaaggagggcagaagggtctggct

SEQ ID NO: 74419 - DNA, 26 bp, Homo sapiens
caaaggagggcagaagggtctggcta

SEQ ID NO: 74420 - DNA, 26 bp, Homo sapiens
aaaggagggcagaagggtctggctaa

SEQ ID NO: 74421 - DNA, 26 bp, Homo sapiens
aaggagggcagaagggtctggctaaa

SEQ ID NO: 74422 - DNA, 26 bp, Homo sapiens
aggagggcagaagggtctggctaaag

SEQ ID NO: 74423 - DNA, 26 bp, Homo sapiens
ggagggcagaagggtctggctaaagt

SEQ ID NO: 74424 - DNA, 26 bp, Homo sapiens
gagggcagaagggtctggctaaagtc

SEQ ID NO: 74425 - DNA, 26 bp, Homo sapiens
agggcagaagggtctggctaaagtcc

SEQ ID NO: 74426 - DNA, 26 bp, Homo sapiens
gggcagaagggtctggctaaagtcca

SEQ ID NO: 74427 - DNA, 26 bp, Homo sapiens
ggcagaagggtctggctaaagtccac

SEQ ID NO: 74428 - DNA, 26 bp, Homo sapiens
gcagaagggtctggctaaagtccaca

SEQ ID NO: 74429 - DNA, 26 bp, Homo sapiens
cagaagggtctggctaaagtccacag

SEQ ID NO: 74430 - DNA, 26 bp, Homo sapiens
agaagggtctggctaaagtccacagg

SEQ ID NO: 74431 - DNA, 26 bp, Homo sapiens
gaagggtctggctaaagtccacaggc

SEQ ID NO: 74432 - DNA, 26 bp, Homo sapiens
aagggtctggctaaagtccacaggct

SEQ ID NO: 74433 - DNA, 26 bp, Homo sapiens
agggtctggctaaagtccacaggctt

SEQ ID NO: 74434 - DNA, 26 bp, Homo sapiens
gggtctggctaaagtccacaggcttt

SEQ ID NO: 74435 - DNA, 26 bp, Homo sapiens
ggtctggctaaagtccacaggctttg

SEQ ID NO: 74436 - DNA, 26 bp, Homo sapiens
gtctggctaaagtccacaggctttgc

SEQ ID NO: 74437 - DNA, 26 bp, Homo sapiens
tctggctaaagtccacaggctttgca

SEQ ID NO: 74438 - DNA, 26 bp, Homo sapiens
ctggctaaagtccacaggctttgcag

SEQ ID NO: 74439 - DNA, 26 bp, Homo sapiens
tggctaaagtccacaggctttgcagc

SEQ ID NO: 74440 - DNA, 26 bp, Homo sapiens
ggctaaagtccacaggctttgcagcc

SEQ ID NO: 74441 - DNA, 26 bp, Homo sapiens
gctaaagtccacaggctttgcagcct

SEQ ID NO: 74442 - DNA, 26 bp, Homo sapiens
ctaaagtccacaggctttgcagcctc

SEQ ID NO: 74443 - DNA, 26 bp, Homo sapiens
taaagtccacaggctttgcagcctct

SEQ ID NO: 74444 - DNA, 26 bp, Homo sapiens
aaagtccacaggctttgcagcctctg

SEQ ID NO: 74445 - DNA, 26 bp, Homo sapiens
aagtccacaggctttgcagcctctgt

SEQ ID NO: 74446 - DNA, 26 bp, Homo sapiens
agtccacaggctttgcagcctctgtt

SEQ ID NO: 74447 - DNA, 26 bp, Homo sapiens
gtccacaggctttgcagcctctgttg

SEQ ID NO: 74448 - DNA, 26 bp, Homo sapiens
tccacaggctttgcagcctctgttga

SEQ ID NO: 74449 - DNA, 26 bp, Homo sapiens
ccacaggctttgcagcctctgttgaa

SEQ ID NO: 74450 - DNA, 26 bp, Homo sapiens
cacaggctttgcagcctctgttgaaa

SEQ ID NO: 74451 - DNA, 26 bp, Homo sapiens
acaggctttgcagcctctgttgaaaa

SEQ ID NO: 74452 - DNA, 26 bp, Homo sapiens
caggctttgcagcctctgttgaaaat

SEQ ID NO: 74453 - DNA, 26 bp, Homo sapiens
aggctttgcagcctctgttgaaaatt

SEQ ID NO: 74454 - DNA, 26 bp, Homo sapiens
ggctttgcagcctctgttgaaaattc

SEQ ID NO: 74455 - DNA, 26 bp, Homo sapiens
gctttgcagcctctgttgaaaattca

SEQ ID NO: 74456 - DNA, 26 bp, Homo sapiens
ctttgcagcctctgttgaaaattcat

SEQ ID NO: 74457 - DNA, 26 bp, Homo sapiens
tttgcagcctctgttgaaaattcatc

SEQ ID NO: 74458 - DNA, 26 bp, Homo sapiens
ttgcagcctctgttgaaaattcatct

SEQ ID NO: 74459 - DNA, 26 bp, Homo sapiens
tgcagcctctgttgaaaattcatctc

SEQ ID NO: 74460 - DNA, 26 bp, Homo sapiens
gcagcctctgttgaaaattcatctct

SEQ ID NO: 74461 - DNA, 26 bp, Homo sapiens
cagcctctgttgaaaattcatctctc

SEQ ID NO: 74462 - DNA, 26 bp, Homo sapiens
agcctctgttgaaaattcatctctca

SEQ ID NO: 74463 - DNA, 26 bp, Homo sapiens
gcctctgttgaaaattcatctctcag

SEQ ID NO: 74464 - DNA, 26 bp, Homo sapiens
cctctgttgaaaattcatctctcagt

SEQ ID NO: 74465 - DNA, 26 bp, Homo sapiens
ctctgttgaaaattcatctctcagtc

SEQ ID NO: 74466 - DNA, 26 bp, Homo sapiens
tctgttgaaaattcatctctcagtct

SEQ ID NO: 74467 - DNA, 26 bp, Homo sapiens
ctgttgaaaattcatctctcagtctc

SEQ ID NO: 74468 - DNA, 26 bp, Homo sapiens
tgttgaaaattcatctctcagtctcg

SEQ ID NO: 74469 - DNA, 26 bp, Homo sapiens
gttgaaaattcatctctcagtctcgt

SEQ ID NO: 74470 - DNA, 26 bp, Homo sapiens
ttgaaaattcatctctcagtctcgtg

SEQ ID NO: 74471 - DNA, 26 bp, Homo sapiens
tgaaaattcatctctcagtctcgtgt

SEQ ID NO: 74472 - DNA, 26 bp, Homo sapiens
gaaaattcatctctcagtctcgtgtt

SEQ ID NO: 74473 - DNA, 26 bp, Homo sapiens
aaaattcatctctcagtctcgtgttc

SEQ ID NO: 74474 - DNA, 26 bp, Homo sapiens
aaattcatctctcagtctcgtgttcc

SEQ ID NO: 74475 - DNA, 26 bp, Homo sapiens
aattcatctctcagtctcgtgttcct

SEQ ID NO: 74476 - DNA, 26 bp, Homo sapiens
attcatctctcagtctcgtgttcctc

SEQ ID NO: 74477 - DNA, 26 bp, Homo sapiens
ttcatctctcagtctcgtgttcctcc

SEQ ID NO: 74478 - DNA, 26 bp, Homo sapiens
tcatctctcagtctcgtgttcctcct

SEQ ID NO: 74479 - DNA, 26 bp, Homo sapiens
catctctcagtctcgtgttcctcctg

SEQ ID NO: 74480 - DNA, 26 bp, Homo sapiens
atctctcagtctcgtgttcctcctgg

SEQ ID NO: 74481 - DNA, 26 bp, Homo sapiens
tctctcagtctcgtgttcctcctggc

SEQ ID NO: 74482 - DNA, 26 bp, Homo sapiens
ctctcagtctcgtgttcctcctggcc

SEQ ID NO: 74483 - DNA, 26 bp, Homo sapiens
tctcagtctcgtgttcctcctggcct

SEQ ID NO: 74484 - DNA, 26 bp, Homo sapiens
ctcagtctcgtgttcctcctggcctt

SEQ ID NO: 74485 - DNA, 26 bp, Homo sapiens
tcagtctcgtgttcctcctggccttc

SEQ ID NO: 74486 - DNA, 26 bp, Homo sapiens
cagtctcgtgttcctcctggccttcc

SEQ ID NO: 74487 - DNA, 26 bp, Homo sapiens
agtctcgtgttcctcctggccttcct

SEQ ID NO: 74488 - DNA, 26 bp, Homo sapiens
gtctcgtgttcctcctggccttcctc

SEQ ID NO: 74489 - DNA, 26 bp, Homo sapiens
tctcgtgttcctcctggccttcctcc

SEQ ID NO: 74490 - DNA, 26 bp, Homo sapiens
ctcgtgttcctcctggccttcctccc

SEQ ID NO: 74491 - DNA, 26 bp, Homo sapiens
tcgtgttcctcctggccttcctccca

SEQ ID NO: 74492 - DNA, 26 bp, Homo sapiens
cgtgttcctcctggccttcctcccaa

SEQ ID NO: 74493 - DNA, 26 bp, Homo sapiens
gtgttcctcctggccttcctcccaag

SEQ ID NO: 74494 - DNA, 26 bp, Homo sapiens
tgttcctcctggccttcctcccaagc

SEQ ID NO: 74495 - DNA, 26 bp, Homo sapiens
gttcctcctggccttcctcccaagca

SEQ ID NO: 74496 - DNA, 26 bp, Homo sapiens
ttcctcctggccttcctcccaagcag

SEQ ID NO: 74497 - DNA, 26 bp, Homo sapiens
tcctcctggccttcctcccaagcagc

SEQ ID NO: 74498 - DNA, 26 bp, Homo sapiens
cctcctggccttcctcccaagcagcc

SEQ ID NO: 74499 - DNA, 26 bp, Homo sapiens
ctcctggccttcctcccaagcagcct

SEQ ID NO: 74500 - DNA, 26 bp, Homo sapiens
tcctggccttcctcccaagcagcctc

SEQ ID NO: 74501 - DNA, 26 bp, Homo sapiens
cctggccttcctcccaagcagcctca

SEQ ID NO: 74502 - DNA, 26 bp, Homo sapiens
ctggccttcctcccaagcagcctcaa

SEQ ID NO: 74503 - DNA, 26 bp, Homo sapiens
tggccttcctcccaagcagcctcaat

SEQ ID NO: 74504 - DNA, 26 bp, Homo sapiens
ggccttcctcccaagcagcctcaatt

SEQ ID NO: 74505 - DNA, 26 bp, Homo sapiens
gccttcctcccaagcagcctcaattc

SEQ ID NO: 74506 - DNA, 26 bp, Homo sapiens
ccttcctcccaagcagcctcaattct

SEQ ID NO: 74507 - DNA, 26 bp, Homo sapiens
cttcctcccaagcagcctcaattctt

SEQ ID NO: 74508 - DNA, 26 bp, Homo sapiens
ttcctcccaagcagcctcaattcttc

SEQ ID NO: 74509 - DNA, 26 bp, Homo sapiens
tcctcccaagcagcctcaattcttct

SEQ ID NO: 74510 - DNA, 26 bp, Homo sapiens
cctcccaagcagcctcaattcttctt

SEQ ID NO: 74511 - DNA, 26 bp, Homo sapiens
ctcccaagcagcctcaattcttcttg

SEQ ID NO: 74512 - DNA, 26 bp, Homo sapiens
tcccaagcagcctcaattcttcttgg

SEQ ID NO: 74513 - DNA, 26 bp, Homo sapiens
cccaagcagcctcaattcttcttggt

SEQ ID NO: 74514 - DNA, 26 bp, Homo sapiens
ccaagcagcctcaattcttcttggtg

SEQ ID NO: 74515 - DNA, 26 bp, Homo sapiens
caagcagcctcaattcttcttggtgt

SEQ ID NO: 74516 - DNA, 26 bp, Homo sapiens
aagcagcctcaattcttcttggtgtt

SEQ ID NO: 74517 - DNA, 26 bp, Homo sapiens
agcagcctcaattcttcttggtgtta

SEQ ID NO: 74518 - DNA, 26 bp, Homo sapiens
gcagcctcaattcttcttggtgttaa

SEQ ID NO: 74519 - DNA, 26 bp, Homo sapiens
cagcctcaattcttcttggtgttaaa

SEQ ID NO: 74520 - DNA, 26 bp, Homo sapiens
agcctcaattcttcttggtgttaaat

SEQ ID NO: 74521 - DNA, 26 bp, Homo sapiens
gcctcaattcttcttggtgttaaatt

SEQ ID NO: 74522 - DNA, 26 bp, Homo sapiens
cctcaattcttcttggtgttaaattg

SEQ ID NO: 74523 - DNA, 26 bp, Homo sapiens
ctcaattcttcttggtgttaaattgg

SEQ ID NO: 74524 - DNA, 26 bp, Homo sapiens
tcaattcttcttggtgttaaattggc

SEQ ID NO: 74525 - DNA, 26 bp, Homo sapiens
caattcttcttggtgttaaattggcg

SEQ ID NO: 74526 - DNA, 26 bp, Homo sapiens
aattcttcttggtgttaaattggcga

SEQ ID NO: 74527 - DNA, 26 bp, Homo sapiens
attcttcttggtgttaaattggcgaa

SEQ ID NO: 74528 - DNA, 26 bp, Homo sapiens
ttcttcttggtgttaaattggcgaaa

SEQ ID NO: 74529 - DNA, 26 bp, Homo sapiens
tcttcttggtgttaaattggcgaaag

SEQ ID NO: 74530 - DNA, 26 bp, Homo sapiens
cttcttggtgttaaattggcgaaagc

SEQ ID NO: 74531 - DNA, 26 bp, Homo sapiens
ttcttggtgttaaattggcgaaagca

SEQ ID NO: 74532 - DNA, 26 bp, Homo sapiens
tcttggtgttaaattggcgaaagcag

SEQ ID NO: 74533 - DNA, 26 bp, Homo sapiens
cttggtgttaaattggcgaaagcagc

SEQ ID NO: 74534 - DNA, 26 bp, Homo sapiens
ttggtgttaaattggcgaaagcagct

SEQ ID NO: 74535 - DNA, 26 bp, Homo sapiens
tggtgttaaattggcgaaagcagctc

SEQ ID NO: 74536 - DNA, 26 bp, Homo sapiens
ggtgttaaattggcgaaagcagctcc

SEQ ID NO: 74537 - DNA, 26 bp, Homo sapiens
gtgttaaattggcgaaagcagctcct

SEQ ID NO: 74538 - DNA, 26 bp, Homo sapiens
tgttaaattggcgaaagcagctcctc

SEQ ID NO: 74539 - DNA, 26 bp, Homo sapiens
gttaaattggcgaaagcagctcctca

SEQ ID NO: 74540 - DNA, 26 bp, Homo sapiens
ttaaattggcgaaagcagctcctcat

SEQ ID NO: 74541 - DNA, 26 bp, Homo sapiens
taaattggcgaaagcagctcctcatc

SEQ ID NO: 74542 - DNA, 26 bp, Homo sapiens
aaattggcgaaagcagctcctcatca

SEQ ID NO: 74543 - DNA, 26 bp, Homo sapiens
aattggcgaaagcagctcctcatcac

SEQ ID NO: 74544 - DNA, 26 bp, Homo sapiens
attggcgaaagcagctcctcatcaca

SEQ ID NO: 74545 - DNA, 26 bp, Homo sapiens
ttggcgaaagcagctcctcatcacag

SEQ ID NO: 74546 - DNA, 26 bp, Homo sapiens
tggcgaaagcagctcctcatcacagt

SEQ ID NO: 74547 - DNA, 26 bp, Homo sapiens
ggcgaaagcagctcctcatcacagtc

SEQ ID NO: 74548 - DNA, 26 bp, Homo sapiens
gcgaaagcagctcctcatcacagtca

SEQ ID NO: 74549 - DNA, 26 bp, Homo sapiens
cgaaagcagctcctcatcacagtcat

SEQ ID NO: 74550 - DNA, 26 bp, Homo sapiens
gaaagcagctcctcatcacagtcatg

SEQ ID NO: 74551 - DNA, 26 bp, Homo sapiens
aaagcagctcctcatcacagtcatgt

SEQ ID NO: 74552 - DNA, 26 bp, Homo sapiens
aagcagctcctcatcacagtcatgtc

SEQ ID NO: 74553 - DNA, 26 bp, Homo sapiens
agcagctcctcatcacagtcatgtct

SEQ ID NO: 74554 - DNA, 26 bp, Homo sapiens
gcagctcctcatcacagtcatgtctt

SEQ ID NO: 74555 - DNA, 26 bp, Homo sapiens
cagctcctcatcacagtcatgtcttg

SEQ ID NO: 74556 - DNA, 26 bp, Homo sapiens
agctcctcatcacagtcatgtcttgt

SEQ ID NO: 74557 - DNA, 26 bp, Homo sapiens
gctcctcatcacagtcatgtcttgtc

SEQ ID NO: 74558 - DNA, 26 bp, Homo sapiens
ctcctcatcacagtcatgtcttgtcc

SEQ ID NO: 74559 - DNA, 26 bp, Homo sapiens
tcctcatcacagtcatgtcttgtccc

SEQ ID NO: 74560 - DNA, 26 bp, Homo sapiens
cctcatcacagtcatgtcttgtccct

SEQ ID NO: 74561 - DNA, 26 bp, Homo sapiens
ctcatcacagtcatgtcttgtccctc

SEQ ID NO: 74562 - DNA, 26 bp, Homo sapiens
tcatcacagtcatgtcttgtccctct

SEQ ID NO: 74563 - DNA, 26 bp, Homo sapiens
catcacagtcatgtcttgtccctctg

SEQ ID NO: 74564 - DNA, 26 bp, Homo sapiens
atcacagtcatgtcttgtccctctgg

SEQ ID NO: 74565 - DNA, 26 bp, Homo sapiens
tcacagtcatgtcttgtccctctggt

SEQ ID NO: 74566 - DNA, 26 bp, Homo sapiens
cacagtcatgtcttgtccctctggtc

SEQ ID NO: 74567 - DNA, 26 bp, Homo sapiens
acagtcatgtcttgtccctctggtcc

SEQ ID NO: 74568 - DNA, 26 bp, Homo sapiens
cagtcatgtcttgtccctctggtcct

SEQ ID NO: 74569 - DNA, 26 bp, Homo sapiens
agtcatgtcttgtccctctggtcctg

SEQ ID NO: 74570 - DNA, 26 bp, Homo sapiens
gtcatgtcttgtccctctggtcctgt

SEQ ID NO: 74571 - DNA, 26 bp, Homo sapiens
tcatgtcttgtccctctggtcctgta

SEQ ID NO: 74572 - DNA, 26 bp, Homo sapiens
catgtcttgtccctctggtcctgtaa

SEQ ID NO: 74573 - DNA, 26 bp, Homo sapiens
atgtcttgtccctctggtcctgtaag

SEQ ID NO: 74574 - DNA, 26 bp, Homo sapiens
tgtcttgtccctctggtcctgtaagt

SEQ ID NO: 74575 - DNA, 26 bp, Homo sapiens
gtcttgtccctctggtcctgtaagtg

SEQ ID NO: 74576 - DNA, 26 bp, Homo sapiens
tcttgtccctctggtcctgtaagtga

SEQ ID NO: 74577 - DNA, 26 bp, Homo sapiens
cttgtccctctggtcctgtaagtgat

SEQ ID NO: 74578 - DNA, 26 bp, Homo sapiens
ttgtccctctggtcctgtaagtgatg

SEQ ID NO: 74579 - DNA, 26 bp, Homo sapiens
tgtccctctggtcctgtaagtgatgc

SEQ ID NO: 74580 - DNA, 26 bp, Homo sapiens
gtccctctggtcctgtaagtgatgct

SEQ ID NO: 74581 - DNA, 26 bp, Homo sapiens
tccctctggtcctgtaagtgatgctt

SEQ ID NO: 74582 - DNA, 26 bp, Homo sapiens
ccctctggtcctgtaagtgatgcttg

SEQ ID NO: 74583 - DNA, 26 bp, Homo sapiens
cctctggtcctgtaagtgatgcttga

SEQ ID NO: 74584 - DNA, 26 bp, Homo sapiens
ctctggtcctgtaagtgatgcttgag

SEQ ID NO: 74585 - DNA, 26 bp, Homo sapiens
tctggtcctgtaagtgatgcttgagg

SEQ ID NO: 74586 - DNA, 26 bp, Homo sapiens
ctggtcctgtaagtgatgcttgaggg

SEQ ID NO: 74587 - DNA, 26 bp, Homo sapiens
tggtcctgtaagtgatgcttgagggc

SEQ ID NO: 74588 - DNA, 26 bp, Homo sapiens
ggtcctgtaagtgatgcttgagggct

SEQ ID NO: 74589 - DNA, 26 bp, Homo sapiens
gtcctgtaagtgatgcttgagggctg

SEQ ID NO: 74590 - DNA, 26 bp, Homo sapiens
tcctgtaagtgatgcttgagggctgg

SEQ ID NO: 74591 - DNA, 26 bp, Homo sapiens
cctgtaagtgatgcttgagggctggc

SEQ ID NO: 74592 - DNA, 26 bp, Homo sapiens
ctgtaagtgatgcttgagggctggct

SEQ ID NO: 74593 - DNA, 26 bp, Homo sapiens
tgtaagtgatgcttgagggctggctg

SEQ ID NO: 74594 - DNA, 26 bp, Homo sapiens
gtaagtgatgcttgagggctggctgc

SEQ ID NO: 74595 - DNA, 26 bp, Homo sapiens
taagtgatgcttgagggctggctgcc

SEQ ID NO: 74596 - DNA, 26 bp, Homo sapiens
aagtgatgcttgagggctggctgcct

SEQ ID NO: 74597 - DNA, 26 bp, Homo sapiens
agtgatgcttgagggctggctgcctg

SEQ ID NO: 74598 - DNA, 26 bp, Homo sapiens
gtgatgcttgagggctggctgcctgg

SEQ ID NO: 74599 - DNA, 26 bp, Homo sapiens
tgatgcttgagggctggctgcctgga

SEQ ID NO: 74600 - DNA, 26 bp, Homo sapiens
gatgcttgagggctggctgcctggag

SEQ ID NO: 74601 - DNA, 26 bp, Homo sapiens
atgcttgagggctggctgcctggagg

SEQ ID NO: 74602 - DNA, 26 bp, Homo sapiens
tgcttgagggctggctgcctggaggc

SEQ ID NO: 74603 - DNA, 26 bp, Homo sapiens
gcttgagggctggctgcctggaggca

SEQ ID NO: 74604 - DNA, 26 bp, Homo sapiens
cttgagggctggctgcctggaggcag

SEQ ID NO: 74605 - DNA, 26 bp, Homo sapiens
ttgagggctggctgcctggaggcagc

SEQ ID NO: 74606 - DNA, 26 bp, Homo sapiens
tgagggctggctgcctggaggcagct

SEQ ID NO: 74607 - DNA, 26 bp, Homo sapiens
gagggctggctgcctggaggcagctg

SEQ ID NO: 74608 - DNA, 26 bp, Homo sapiens
agggctggctgcctggaggcagctgg

SEQ ID NO: 74609 - DNA, 26 bp, Homo sapiens
gggctggctgcctggaggcagctggt

SEQ ID NO: 74610 - DNA, 26 bp, Homo sapiens
ggctggctgcctggaggcagctggtt

SEQ ID NO: 74611 - DNA, 26 bp, Homo sapiens
gctggctgcctggaggcagctggttc

SEQ ID NO: 74612 - DNA, 26 bp, Homo sapiens
ctggctgcctggaggcagctggttct

SEQ ID NO: 74613 - DNA, 26 bp, Homo sapiens
tggctgcctggaggcagctggttctt

SEQ ID NO: 74614 - DNA, 26 bp, Homo sapiens
ggctgcctggaggcagctggttcttt

SEQ ID NO: 74615 - DNA, 26 bp, Homo sapiens
gctgcctggaggcagctggttctttt

SEQ ID NO: 74616 - DNA, 26 bp, Homo sapiens
ctgcctggaggcagctggttcttttt

SEQ ID NO: 74617 - DNA, 26 bp, Homo sapiens
tgcctggaggcagctggttcttttta

SEQ ID NO: 74618 - DNA, 26 bp, Homo sapiens
gcctggaggcagctggttctttttac

SEQ ID NO: 74619 - DNA, 26 bp, Homo sapiens
cctggaggcagctggttctttttaca

SEQ ID NO: 74620 - DNA, 26 bp, Homo sapiens
ctggaggcagctggttctttttacag

SEQ ID NO: 74621 - DNA, 26 bp, Homo sapiens
tggaggcagctggttctttttacaga

SEQ ID NO: 74622 - DNA, 26 bp, Homo sapiens
ggaggcagctggttctttttacagaa

SEQ ID NO: 74623 - DNA, 26 bp, Homo sapiens
gaggcagctggttctttttacagaaa

SEQ ID NO: 74624 - DNA, 26 bp, Homo sapiens
aggcagctggttctttttacagaaaa

SEQ ID NO: 74625 - DNA, 26 bp, Homo sapiens
ggcagctggttctttttacagaaaag

SEQ ID NO: 74626 - DNA, 26 bp, Homo sapiens
gcagctggttctttttacagaaaagt

SEQ ID NO: 74627 - DNA, 26 bp, Homo sapiens
cagctggttctttttacagaaaagtt

SEQ ID NO: 74628 - DNA, 26 bp, Homo sapiens
agctggttctttttacagaaaagtta

SEQ ID NO: 74629 - DNA, 26 bp, Homo sapiens
gctggttctttttacagaaaagttag

SEQ ID NO: 74630 - DNA, 26 bp, Homo sapiens
ctggttctttttacagaaaagttaga

SEQ ID NO: 74631 - DNA, 26 bp, Homo sapiens
tggttctttttacagaaaagttagac

SEQ ID NO: 74632 - DNA, 26 bp, Homo sapiens
ggttctttttacagaaaagttagaca

SEQ ID NO: 74633 - DNA, 26 bp, Homo sapiens
gttctttttacagaaaagttagacag

SEQ ID NO: 74634 - DNA, 26 bp, Homo sapiens
ttctttttacagaaaagttagacagg

SEQ ID NO: 74635 - DNA, 26 bp, Homo sapiens
tctttttacagaaaagttagacaggc

SEQ ID NO: 74636 - DNA, 26 bp, Homo sapiens
ctttttacagaaaagttagacaggca

SEQ ID NO: 74637 - DNA, 26 bp, Homo sapiens
tttttacagaaaagttagacaggcac

SEQ ID NO: 74638 - DNA, 26 bp, Homo sapiens
ttttacagaaaagttagacaggcacc

SEQ ID NO: 74639 - DNA, 26 bp, Homo sapiens
tttacagaaaagttagacaggcacct

SEQ ID NO: 74640 - DNA, 26 bp, Homo sapiens
ttacagaaaagttagacaggcacctt

SEQ ID NO: 74641 - DNA, 26 bp, Homo sapiens
tacagaaaagttagacaggcaccttc

SEQ ID NO: 74642 - DNA, 26 bp, Homo sapiens
acagaaaagttagacaggcaccttca

SEQ ID NO: 74643 - DNA, 26 bp, Homo sapiens
cagaaaagttagacaggcaccttcac

SEQ ID NO: 74644 - DNA, 26 bp, Homo sapiens
agaaaagttagacaggcaccttcacc

SEQ ID NO: 74645 - DNA, 26 bp, Homo sapiens
gaaaagttagacaggcaccttcacca

SEQ ID NO: 74646 - DNA, 26 bp, Homo sapiens
aaaagttagacaggcaccttcaccat

SEQ ID NO: 74647 - DNA, 26 bp, Homo sapiens
aaagttagacaggcaccttcaccatt

SEQ ID NO: 74648 - DNA, 26 bp, Homo sapiens
aagttagacaggcaccttcaccattc

SEQ ID NO: 74649 - DNA, 26 bp, Homo sapiens
agttagacaggcaccttcaccattca

SEQ ID NO: 74650 - DNA, 26 bp, Homo sapiens
gttagacaggcaccttcaccattcac

SEQ ID NO: 74651 - DNA, 26 bp, Homo sapiens
ttagacaggcaccttcaccattcacc

SEQ ID NO: 74652 - DNA, 26 bp, Homo sapiens
tagacaggcaccttcaccattcacca

SEQ ID NO: 74653 - DNA, 26 bp, Homo sapiens
agacaggcaccttcaccattcaccaa

SEQ ID NO: 74654 - DNA, 26 bp, Homo sapiens
gacaggcaccttcaccattcaccaat

SEQ ID NO: 74655 - DNA, 26 bp, Homo sapiens
acaggcaccttcaccattcaccaatc

SEQ ID NO: 74656 - DNA, 26 bp, Homo sapiens
caggcaccttcaccattcaccaatca

SEQ ID NO: 74657 - DNA, 26 bp, Homo sapiens
aggcaccttcaccattcaccaatcag

SEQ ID NO: 74658 - DNA, 26 bp, Homo sapiens
ggcaccttcaccattcaccaatcaga

SEQ ID NO: 74659 - DNA, 26 bp, Homo sapiens
gcaccttcaccattcaccaatcagag

SEQ ID NO: 74660 - DNA, 26 bp, Homo sapiens
caccttcaccattcaccaatcagagg

SEQ ID NO: 74661 - DNA, 26 bp, Homo sapiens
accttcaccattcaccaatcagaggc

SEQ ID NO: 74662 - DNA, 26 bp, Homo sapiens
ccttcaccattcaccaatcagaggca

SEQ ID NO: 74663 - DNA, 26 bp, Homo sapiens
cttcaccattcaccaatcagaggcat

SEQ ID NO: 74664 - DNA, 26 bp, Homo sapiens
ttcaccattcaccaatcagaggcata

SEQ ID NO: 74665 - DNA, 26 bp, Homo sapiens
tcaccattcaccaatcagaggcatag

SEQ ID NO: 74666 - DNA, 26 bp, Homo sapiens
caccattcaccaatcagaggcatagc

SEQ ID NO: 74667 - DNA, 26 bp, Homo sapiens
accattcaccaatcagaggcatagct

SEQ ID NO: 74668 - DNA, 26 bp, Homo sapiens
ccattcaccaatcagaggcatagctg

SEQ ID NO: 74669 - DNA, 26 bp, Homo sapiens
cattcaccaatcagaggcatagctgt

SEQ ID NO: 74670 - DNA, 26 bp, Homo sapiens
attcaccaatcagaggcatagctgtg

SEQ ID NO: 74671 - DNA, 26 bp, Homo sapiens
ttcaccaatcagaggcatagctgtgg

SEQ ID NO: 74672 - DNA, 26 bp, Homo sapiens
tcaccaatcagaggcatagctgtggg

SEQ ID NO: 74673 - DNA, 26 bp, Homo sapiens
caccaatcagaggcatagctgtgggt

SEQ ID NO: 74674 - DNA, 26 bp, Homo sapiens
accaatcagaggcatagctgtgggtg

SEQ ID NO: 74675 - DNA, 26 bp, Homo sapiens
ccaatcagaggcatagctgtgggtgg

SEQ ID NO: 74676 - DNA, 26 bp, Homo sapiens
caatcagaggcatagctgtgggtgga

SEQ ID NO: 74677 - DNA, 26 bp, Homo sapiens
aatcagaggcatagctgtgggtggaa

SEQ ID NO: 74678 - DNA, 26 bp, Homo sapiens
atcagaggcatagctgtgggtggaag

SEQ ID NO: 74679 - DNA, 26 bp, Homo sapiens
tcagaggcatagctgtgggtggaagg

SEQ ID NO: 74680 - DNA, 26 bp, Homo sapiens
cagaggcatagctgtgggtggaaggt

SEQ ID NO: 74681 - DNA, 26 bp, Homo sapiens
agaggcatagctgtgggtggaaggtt

SEQ ID NO: 74682 - DNA, 26 bp, Homo sapiens
gaggcatagctgtgggtggaaggttc

SEQ ID NO: 74683 - DNA, 26 bp, Homo sapiens
aggcatagctgtgggtggaaggttcc

SEQ ID NO: 74684 - DNA, 26 bp, Homo sapiens
ggcatagctgtgggtggaaggttccc

SEQ ID NO: 74685 - DNA, 26 bp, Homo sapiens
gcatagctgtgggtggaaggttcccg

SEQ ID NO: 74686 - DNA, 26 bp, Homo sapiens
catagctgtgggtggaaggttcccgt

SEQ ID NO: 74687 - DNA, 26 bp, Homo sapiens
atagctgtgggtggaaggttcccgtc

SEQ ID NO: 74688 - DNA, 26 bp, Homo sapiens
tagctgtgggtggaaggttcccgtcc

SEQ ID NO: 74689 - DNA, 26 bp, Homo sapiens
agctgtgggtggaaggttcccgtccc

SEQ ID NO: 74690 - DNA, 26 bp, Homo sapiens
gctgtgggtggaaggttcccgtccca

SEQ ID NO: 74691 - DNA, 26 bp, Homo sapiens
ctgtgggtggaaggttcccgtcccag

SEQ ID NO: 74692 - DNA, 26 bp, Homo sapiens
tgtgggtggaaggttcccgtcccagc

SEQ ID NO: 74693 - DNA, 26 bp, Homo sapiens
gtgggtggaaggttcccgtcccagcc

SEQ ID NO: 74694 - DNA, 26 bp, Homo sapiens
tgggtggaaggttcccgtcccagccg

SEQ ID NO: 74695 - DNA, 26 bp, Homo sapiens
gggtggaaggttcccgtcccagccgt

SEQ ID NO: 74696 - DNA, 26 bp, Homo sapiens
ggtggaaggttcccgtcccagccgtg

SEQ ID NO: 74697 - DNA, 26 bp, Homo sapiens
gtggaaggttcccgtcccagccgtgg

SEQ ID NO: 74698 - DNA, 26 bp, Homo sapiens
tggaaggttcccgtcccagccgtgga

SEQ ID NO: 74699 - DNA, 26 bp, Homo sapiens
ggaaggttcccgtcccagccgtggaa

SEQ ID NO: 74700 - DNA, 26 bp, Homo sapiens
gaaggttcccgtcccagccgtggaag

SEQ ID NO: 74701 - DNA, 26 bp, Homo sapiens
aaggttcccgtcccagccgtggaagt

SEQ ID NO: 74702 - DNA, 26 bp, Homo sapiens
aggttcccgtcccagccgtggaagtc

SEQ ID NO: 74703 - DNA, 26 bp, Homo sapiens
ggttcccgtcccagccgtggaagtca

SEQ ID NO: 74704 - DNA, 26 bp, Homo sapiens
gttcccgtcccagccgtggaagtcat

SEQ ID NO: 74705 - DNA, 26 bp, Homo sapiens
ttcccgtcccagccgtggaagtcatt

SEQ ID NO: 74706 - DNA, 26 bp, Homo sapiens
tcccgtcccagccgtggaagtcattt

SEQ ID NO: 74707 - DNA, 26 bp, Homo sapiens
cccgtcccagccgtggaagtcatttc

SEQ ID NO: 74708 - DNA, 26 bp, Homo sapiens
ccgtcccagccgtggaagtcatttca

SEQ ID NO: 74709 - DNA, 26 bp, Homo sapiens
cgtcccagccgtggaagtcatttcag

SEQ ID NO: 74710 - DNA, 26 bp, Homo sapiens
gtcccagccgtggaagtcatttcaga

SEQ ID NO: 74711 - DNA, 26 bp, Homo sapiens
tcccagccgtggaagtcatttcagaa

SEQ ID NO: 74712 - DNA, 26 bp, Homo sapiens
cccagccgtggaagtcatttcagaag

SEQ ID NO: 74713 - DNA, 26 bp, Homo sapiens
ccagccgtggaagtcatttcagaagt

SEQ ID NO: 74714 - DNA, 26 bp, Homo sapiens
cagccgtggaagtcatttcagaagta

SEQ ID NO: 74715 - DNA, 26 bp, Homo sapiens
agccgtggaagtcatttcagaagtaa

SEQ ID NO: 74716 - DNA, 26 bp, Homo sapiens
gccgtggaagtcatttcagaagtaaa

SEQ ID NO: 74717 - DNA, 26 bp, Homo sapiens
ccgtggaagtcatttcagaagtaaag

SEQ ID NO: 74718 - DNA, 26 bp, Homo sapiens
cgtggaagtcatttcagaagtaaagg

SEQ ID NO: 74719 - DNA, 26 bp, Homo sapiens
gtggaagtcatttcagaagtaaaggt

SEQ ID NO: 74720 - DNA, 26 bp, Homo sapiens
tggaagtcatttcagaagtaaaggtt

SEQ ID NO: 74721 - DNA, 26 bp, Homo sapiens
ggaagtcatttcagaagtaaaggttt

SEQ ID NO: 74722 - DNA, 26 bp, Homo sapiens
gaagtcatttcagaagtaaaggtttg

SEQ ID NO: 74723 - DNA, 26 bp, Homo sapiens
aagtcatttcagaagtaaaggtttgc

SEQ ID NO: 74724 - DNA, 26 bp, Homo sapiens
agtcatttcagaagtaaaggtttgca

SEQ ID NO: 74725 - DNA, 26 bp, Homo sapiens
gtcatttcagaagtaaaggtttgcag

SEQ ID NO: 74726 - DNA, 26 bp, Homo sapiens
tcatttcagaagtaaaggtttgcagg

SEQ ID NO: 74727 - DNA, 26 bp, Homo sapiens
catttcagaagtaaaggtttgcaggc

SEQ ID NO: 74728 - DNA, 26 bp, Homo sapiens
atttcagaagtaaaggtttgcaggca

SEQ ID NO: 74729 - DNA, 26 bp, Homo sapiens
tttcagaagtaaaggtttgcaggcaa

SEQ ID NO: 74730 - DNA, 26 bp, Homo sapiens
ttcagaagtaaaggtttgcaggcaag

SEQ ID NO: 74731 - DNA, 26 bp, Homo sapiens
tcagaagtaaaggtttgcaggcaagc

SEQ ID NO: 74732 - DNA, 26 bp, Homo sapiens
tttcatttgtacagtttatggtttta

SEQ ID NO: 74733 - DNA, 26 bp, Homo sapiens
ttcatttgtacagtttatggttttaa

SEQ ID NO: 74734 - DNA, 26 bp, Homo sapiens
tcatttgtacagtttatggttttaaa

SEQ ID NO: 74735 - DNA, 26 bp, Homo sapiens
catttgtacagtttatggttttaaag

SEQ ID NO: 74736 - DNA, 26 bp, Homo sapiens
atttgtacagtttatggttttaaaga

SEQ ID NO: 74737 - DNA, 26 bp, Homo sapiens
tttgtacagtttatggttttaaagaa

SEQ ID NO: 74738 - DNA, 26 bp, Homo sapiens
ttgtacagtttatggttttaaagaaa

SEQ ID NO: 74739 - DNA, 26 bp, Homo sapiens
tgtacagtttatggttttaaagaaac

SEQ ID NO: 74740 - DNA, 26 bp, Homo sapiens
gtacagtttatggttttaaagaaacc

SEQ ID NO: 74741 - DNA, 26 bp, Homo sapiens
tacagtttatggttttaaagaaacca

SEQ ID NO: 74742 - DNA, 26 bp, Homo sapiens
acagtttatggttttaaagaaaccat

SEQ ID NO: 74743 - DNA, 26 bp, Homo sapiens
cagtttatggttttaaagaaaccatc

SEQ ID NO: 74744 - DNA, 26 bp, Homo sapiens
agtttatggttttaaagaaaccatcc

SEQ ID NO: 74745 - DNA, 26 bp, Homo sapiens
gtttatggttttaaagaaaccatcct

SEQ ID NO: 74746 - DNA, 26 bp, Homo sapiens
tttatggttttaaagaaaccatcctg

SEQ ID NO: 74747 - DNA, 26 bp, Homo sapiens
ttatggttttaaagaaaccatcctga

SEQ ID NO: 74748 - DNA, 26 bp, Homo sapiens
tatggttttaaagaaaccatcctgaa

SEQ ID NO: 74749 - DNA, 26 bp, Homo sapiens
atggttttaaagaaaccatcctgaat

SEQ ID NO: 74750 - DNA, 26 bp, Homo sapiens
tggttttaaagaaaccatcctgaata

SEQ ID NO: 74751 - DNA, 26 bp, Homo sapiens
ggttttaaagaaaccatcctgaataa

SEQ ID NO: 74752 - DNA, 26 bp, Homo sapiens
gttttaaagaaaccatcctgaataag

SEQ ID NO: 74753 - DNA, 26 bp, Homo sapiens
ttttaaagaaaccatcctgaataagc

SEQ ID NO: 74754 - DNA, 26 bp, Homo sapiens
tttaaagaaaccatcctgaataagct

SEQ ID NO: 74755 - DNA, 26 bp, Homo sapiens
ttaaagaaaccatcctgaataagctc

SEQ ID NO: 74756 - DNA, 26 bp, Homo sapiens
taaagaaaccatcctgaataagctca

SEQ ID NO: 74757 - DNA, 26 bp, Homo sapiens
aaagaaaccatcctgaataagctcaa

SEQ ID NO: 74758 - DNA, 26 bp, Homo sapiens
aagaaaccatcctgaataagctcaag

SEQ ID NO: 74759 - DNA, 26 bp, Homo sapiens
agaaaccatcctgaataagctcaagt

SEQ ID NO: 74760 - DNA, 26 bp, Homo sapiens
gaaaccatcctgaataagctcaagtt

SEQ ID NO: 74761 - DNA, 26 bp, Homo sapiens
aaaccatcctgaataagctcaagtta

SEQ ID NO: 74762 - DNA, 26 bp, Homo sapiens
aaccatcctgaataagctcaagttat

SEQ ID NO: 74763 - DNA, 26 bp, Homo sapiens
accatcctgaataagctcaagttata

SEQ ID NO: 74764 - DNA, 26 bp, Homo sapiens
ccatcctgaataagctcaagttatag

SEQ ID NO: 74765 - DNA, 26 bp, Homo sapiens
catcctgaataagctcaagttatagc

SEQ ID NO: 74766 - DNA, 26 bp, Homo sapiens
atcctgaataagctcaagttatagct

SEQ ID NO: 74767 - DNA, 26 bp, Homo sapiens
tcctgaataagctcaagttatagcta

SEQ ID NO: 74768 - DNA, 26 bp, Homo sapiens
cctgaataagctcaagttatagctac

SEQ ID NO: 74769 - DNA, 26 bp, Homo sapiens
ctgaataagctcaagttatagctacc

SEQ ID NO: 74770 - DNA, 26 bp, Homo sapiens
tgaataagctcaagttatagctacca

SEQ ID NO: 74771 - DNA, 26 bp, Homo sapiens
gaataagctcaagttatagctaccag

SEQ ID NO: 74772 - DNA, 26 bp, Homo sapiens
aataagctcaagttatagctaccagt

SEQ ID NO: 74773 - DNA, 26 bp, Homo sapiens
ataagctcaagttatagctaccagtt

SEQ ID NO: 74774 - DNA, 26 bp, Homo sapiens
taagctcaagttatagctaccagtta

SEQ ID NO: 74775 - DNA, 26 bp, Homo sapiens
aagctcaagttatagctaccagttat

SEQ ID NO: 74776 - DNA, 26 bp, Homo sapiens
agctcaagttatagctaccagttatg

SEQ ID NO: 74777 - DNA, 26 bp, Homo sapiens
gctcaagttatagctaccagttatga

SEQ ID NO: 74778 - DNA, 26 bp, Homo sapiens
ctcaagttatagctaccagttatgaa

SEQ ID NO: 74779 - DNA, 26 bp, Homo sapiens
tcaagttatagctaccagttatgaat

SEQ ID NO: 74780 - DNA, 26 bp, Homo sapiens
caagttatagctaccagttatgaatt

SEQ ID NO: 74781 - DNA, 26 bp, Homo sapiens
aagttatagctaccagttatgaattt

SEQ ID NO: 74782 - DNA, 26 bp, Homo sapiens
agttatagctaccagttatgaattta

SEQ ID NO: 74783 - DNA, 26 bp, Homo sapiens
gttatagctaccagttatgaatttat

SEQ ID NO: 74784 - DNA, 26 bp, Homo sapiens
ttatagctaccagttatgaatttata

SEQ ID NO: 74785 - DNA, 26 bp, Homo sapiens
tatagctaccagttatgaatttataa

SEQ ID NO: 74786 - DNA, 26 bp, Homo sapiens
atagctaccagttatgaatttataaa

SEQ ID NO: 74787 - DNA, 26 bp, Homo sapiens
tagctaccagttatgaatttataaag

SEQ ID NO: 74788 - DNA, 26 bp, Homo sapiens
agctaccagttatgaatttataaagt

SEQ ID NO: 74789 - DNA, 26 bp, Homo sapiens
gctaccagttatgaatttataaagtt

SEQ ID NO: 74790 - DNA, 26 bp, Homo sapiens
ctaccagttatgaatttataaagttt

SEQ ID NO: 74791 - DNA, 26 bp, Homo sapiens
taccagttatgaatttataaagttta

SEQ ID NO: 74792 - DNA, 26 bp, Homo sapiens
accagttatgaatttataaagtttat

SEQ ID NO: 74793 - DNA, 26 bp, Homo sapiens
ccagttatgaatttataaagtttatg

SEQ ID NO: 74794 - DNA, 26 bp, Homo sapiens
cagttatgaatttataaagtttatgt

SEQ ID NO: 74795 - DNA, 26 bp, Homo sapiens
agttatgaatttataaagtttatgtg

SEQ ID NO: 74796 - DNA, 26 bp, Homo sapiens
gttatgaatttataaagtttatgtga

SEQ ID NO: 74797 - DNA, 26 bp, Homo sapiens
ttatgaatttataaagtttatgtgac

SEQ ID NO: 74798 - DNA, 26 bp, Homo sapiens
tatgaatttataaagtttatgtgacc

SEQ ID NO: 74799 - DNA, 26 bp, Homo sapiens
atgaatttataaagtttatgtgacct

SEQ ID NO: 74800 - DNA, 26 bp, Homo sapiens
tgaatttataaagtttatgtgacctt

SEQ ID NO: 74801 - DNA, 26 bp, Homo sapiens
gaatttataaagtttatgtgaccttt

SEQ ID NO: 74802 - DNA, 26 bp, Homo sapiens
aatttataaagtttatgtgaccttta

SEQ ID NO: 74803 - DNA, 26 bp, Homo sapiens
atttataaagtttatgtgacctttat

SEQ ID NO: 74804 - DNA, 26 bp, Homo sapiens
tttataaagtttatgtgacctttatt

SEQ ID NO: 74805 - DNA, 26 bp, Homo sapiens
ttataaagtttatgtgacctttatta

SEQ ID NO: 74806 - DNA, 26 bp, Homo sapiens
tataaagtttatgtgacctttattat

SEQ ID NO: 74807 - DNA, 26 bp, Homo sapiens
ataaagtttatgtgacctttattata

SEQ ID NO: 74808 - DNA, 26 bp, Homo sapiens
taaagtttatgtgacctttattataa

SEQ ID NO: 74809 - DNA, 26 bp, Homo sapiens
aaagtttatgtgacctttattataat

SEQ ID NO: 74810 - DNA, 26 bp, Homo sapiens
aagtttatgtgacctttattataatt

SEQ ID NO: 74811 - DNA, 26 bp, Homo sapiens
agtttatgtgacctttattataatta

SEQ ID NO: 74812 - DNA, 26 bp, Homo sapiens
gtttatgtgacctttattataattaa

SEQ ID NO: 74813 - DNA, 26 bp, Homo sapiens
tttatgtgacctttattataattaat

SEQ ID NO: 74814 - DNA, 26 bp, Homo sapiens
ttatgtgacctttattataattaata

SEQ ID NO: 74815 - DNA, 26 bp, Homo sapiens
tatgtgacctttattataattaatat

SEQ ID NO: 74816 - DNA, 26 bp, Homo sapiens
atgtgacctttattataattaatatt

SEQ ID NO: 74817 - DNA, 26 bp, Homo sapiens
tgtgacctttattataattaatattg

SEQ ID NO: 74818 - DNA, 26 bp, Homo sapiens
gtgacctttattataattaatattgt

SEQ ID NO: 74819 - DNA, 26 bp, Homo sapiens
tgacctttattataattaatattgta

SEQ ID NO: 74820 - DNA, 26 bp, Homo sapiens
gacctttattataattaatattgtat

SEQ ID NO: 74821 - DNA, 26 bp, Homo sapiens
acctttattataattaatattgtatt

SEQ ID NO: 74822 - DNA, 26 bp, Homo sapiens
cctttattataattaatattgtatta

SEQ ID NO: 74823 - DNA, 26 bp, Homo sapiens
ctttattataattaatattgtattaa

SEQ ID NO: 74824 - DNA, 26 bp, Homo sapiens
tttattataattaatattgtattaat

SEQ ID NO: 74825 - DNA, 26 bp, Homo sapiens
ttattataattaatattgtattaatc

SEQ ID NO: 74826 - DNA, 26 bp, Homo sapiens
tattataattaatattgtattaatca

SEQ ID NO: 74827 - DNA, 26 bp, Homo sapiens
attataattaatattgtattaatcat

SEQ ID NO: 74828 - DNA, 26 bp, Homo sapiens
ttataattaatattgtattaatcatc

SEQ ID NO: 74829 - DNA, 26 bp, Homo sapiens
tataattaatattgtattaatcatca

SEQ ID NO: 74830 - DNA, 26 bp, Homo sapiens
ataattaatattgtattaatcatcac

SEQ ID NO: 74831 - DNA, 26 bp, Homo sapiens
taattaatattgtattaatcatcaca

SEQ ID NO: 74832 - DNA, 26 bp, Homo sapiens
aattaatattgtattaatcatcacat

SEQ ID NO: 74833 - DNA, 26 bp, Homo sapiens
attaatattgtattaatcatcacata

SEQ ID NO: 74834 - DNA, 26 bp, Homo sapiens
ttaatattgtattaatcatcacatat

SEQ ID NO: 74835 - DNA, 26 bp, Homo sapiens
taatattgtattaatcatcacatatt

SEQ ID NO: 74836 - DNA, 26 bp, Homo sapiens
aatattgtattaatcatcacatatta

SEQ ID NO: 74837 - DNA, 26 bp, Homo sapiens
atattgtattaatcatcacatattat

SEQ ID NO: 74838 - DNA, 26 bp, Homo sapiens
tattgtattaatcatcacatattatt

SEQ ID NO: 74839 - DNA, 26 bp, Homo sapiens
attgtattaatcatcacatattatta

SEQ ID NO: 74840 - DNA, 26 bp, Homo sapiens
ttgtattaatcatcacatattattat

SEQ ID NO: 74841 - DNA, 26 bp, Homo sapiens
tgtattaatcatcacatattattata

SEQ ID NO: 74842 - DNA, 26 bp, Homo sapiens
gtattaatcatcacatattattatat

SEQ ID NO: 74843 - DNA, 26 bp, Homo sapiens
tattaatcatcacatattattatata

SEQ ID NO: 74844 - DNA, 26 bp, Homo sapiens
attaatcatcacatattattatatat

SEQ ID NO: 74845 - DNA, 26 bp, Homo sapiens
ttaatcatcacatattattatatata

SEQ ID NO: 74846 - DNA, 26 bp, Homo sapiens
taatcatcacatattattatatataa

SEQ ID NO: 74847 - DNA, 26 bp, Homo sapiens
aatcatcacatattattatatataag

SEQ ID NO: 74848 - DNA, 26 bp, Homo sapiens
atcatcacatattattatatataaga

SEQ ID NO: 74849 - DNA, 26 bp, Homo sapiens
tcatcacatattattatatataagat

SEQ ID NO: 74850 - DNA, 26 bp, Homo sapiens
catcacatattattatatataagata

SEQ ID NO: 74851 - DNA, 26 bp, Homo sapiens
atcacatattattatatataagatat

SEQ ID NO: 74852 - DNA, 26 bp, Homo sapiens
tcacatattattatatataagatata

SEQ ID NO: 74853 - DNA, 26 bp, Homo sapiens
cacatattattatatataagatataa

SEQ ID NO: 74854 - DNA, 26 bp, Homo sapiens
acatattattatatataagatataaa

SEQ ID NO: 74855 - DNA, 26 bp, Homo sapiens
catattattatatataagatataaat

SEQ ID NO: 74856 - DNA, 26 bp, Homo sapiens
atattattatatataagatataaatt

SEQ ID NO: 74857 - DNA, 26 bp, Homo sapiens
tattattatatataagatataaattt

SEQ ID NO: 74858 - DNA, 26 bp, Homo sapiens
attattatatataagatataaattta

SEQ ID NO: 74859 - DNA, 26 bp, Homo sapiens
ttattatatataagatataaatttaa

SEQ ID NO: 74860 - DNA, 26 bp, Homo sapiens
tattatatataagatataaatttaat

SEQ ID NO: 74861 - DNA, 26 bp, Homo sapiens
attatatataagatataaatttaata

SEQ ID NO: 74862 - DNA, 26 bp, Homo sapiens
ttatatataagatataaatttaatat

SEQ ID NO: 74863 - DNA, 26 bp, Homo sapiens
tatatataagatataaatttaatata

SEQ ID NO: 74864 - DNA, 26 bp, Homo sapiens
atatataagatataaatttaatataa

SEQ ID NO: 74865 - DNA, 26 bp, Homo sapiens
tatataagatataaatttaatataac

SEQ ID NO: 74866 - DNA, 26 bp, Homo sapiens
atataagatataaatttaatataact

SEQ ID NO: 74867 - DNA, 26 bp, Homo sapiens
tataagatataaatttaatataacta

SEQ ID NO: 74868 - DNA, 26 bp, Homo sapiens
ataagatataaatttaatataactat

SEQ ID NO: 74869 - DNA, 26 bp, Homo sapiens
taagatataaatttaatataactatc

SEQ ID NO: 74870 - DNA, 26 bp, Homo sapiens
aagatataaatttaatataactatct

SEQ ID NO: 74871 - DNA, 26 bp, Homo sapiens
agatataaatttaatataactatctg

SEQ ID NO: 74872 - DNA, 26 bp, Homo sapiens
gatataaatttaatataactatctgg

SEQ ID NO: 74873 - DNA, 26 bp, Homo sapiens
atataaatttaatataactatctggt

SEQ ID NO: 74874 - DNA, 26 bp, Homo sapiens
tataaatttaatataactatctggta

SEQ ID NO: 74875 - DNA, 26 bp, Homo sapiens
ataaatttaatataactatctggtaa

SEQ ID NO: 74876 - DNA, 26 bp, Homo sapiens
taaatttaatataactatctggtaat

SEQ ID NO: 74877 - DNA, 26 bp, Homo sapiens
aaatttaatataactatctggtaatt

SEQ ID NO: 74878 - DNA, 26 bp, Homo sapiens
aatttaatataactatctggtaatta

SEQ ID NO: 74879 - DNA, 26 bp, Homo sapiens
atttaatataactatctggtaattat

SEQ ID NO: 74880 - DNA, 26 bp, Homo sapiens
tttaatataactatctggtaattata

SEQ ID NO: 74881 - DNA, 26 bp, Homo sapiens
ttaatataactatctggtaattatac

SEQ ID NO: 74882 - DNA, 26 bp, Homo sapiens
taatataactatctggtaattatacc

SEQ ID NO: 74883 - DNA, 26 bp, Homo sapiens
aatataactatctggtaattatacct

SEQ ID NO: 74884 - DNA, 26 bp, Homo sapiens
atataactatctggtaattataccta

SEQ ID NO: 74885 - DNA, 26 bp, Homo sapiens
tataactatctggtaattatacctat

SEQ ID NO: 74886 - DNA, 26 bp, Homo sapiens
ataactatctggtaattatacctatg

SEQ ID NO: 74887 - DNA, 26 bp, Homo sapiens
taactatctggtaattatacctatgt

SEQ ID NO: 74888 - DNA, 26 bp, Homo sapiens
aactatctggtaattatacctatgtt

SEQ ID NO: 74889 - DNA, 26 bp, Homo sapiens
actatctggtaattatacctatgttt

SEQ ID NO: 74890 - DNA, 26 bp, Homo sapiens
ctatctggtaattatacctatgttta

SEQ ID NO: 74891 - DNA, 26 bp, Homo sapiens
tatctggtaattatacctatgtttac

SEQ ID NO: 74892 - DNA, 26 bp, Homo sapiens
atctggtaattatacctatgtttact

SEQ ID NO: 74893 - DNA, 26 bp, Homo sapiens
tctggtaattatacctatgtttacta

SEQ ID NO: 74894 - DNA, 26 bp, Homo sapiens
ctggtaattatacctatgtttactaa

SEQ ID NO: 74895 - DNA, 26 bp, Homo sapiens
tggtaattatacctatgtttactaac

SEQ ID NO: 74896 - DNA, 26 bp, Homo sapiens
ggtaattatacctatgtttactaaca

SEQ ID NO: 74897 - DNA, 26 bp, Homo sapiens
gtaattatacctatgtttactaacaa

SEQ ID NO: 74898 - DNA, 26 bp, Homo sapiens
taattatacctatgtttactaacaat

SEQ ID NO: 74899 - DNA, 26 bp, Homo sapiens
aattatacctatgtttactaacaatt

SEQ ID NO: 74900 - DNA, 26 bp, Homo sapiens
attatacctatgtttactaacaattt

SEQ ID NO: 74901 - DNA, 26 bp, Homo sapiens
ttatacctatgtttactaacaatttt

SEQ ID NO: 74902 - DNA, 26 bp, Homo sapiens
tatacctatgtttactaacaatttta

SEQ ID NO: 74903 - DNA, 26 bp, Homo sapiens
atacctatgtttactaacaattttac

SEQ ID NO: 74904 - DNA, 26 bp, Homo sapiens
tacctatgtttactaacaattttaca

SEQ ID NO: 74905 - DNA, 26 bp, Homo sapiens
acctatgtttactaacaattttacaa

SEQ ID NO: 74906 - DNA, 26 bp, Homo sapiens
cctatgtttactaacaattttacaac

SEQ ID NO: 74907 - DNA, 26 bp, Homo sapiens
ctatgtttactaacaattttacaact

SEQ ID NO: 74908 - DNA, 26 bp, Homo sapiens
tatgtttactaacaattttacaactg

SEQ ID NO: 74909 - DNA, 26 bp, Homo sapiens
atgtttactaacaattttacaactgc

SEQ ID NO: 74910 - DNA, 26 bp, Homo sapiens
tgtttactaacaattttacaactgct

SEQ ID NO: 74911 - DNA, 26 bp, Homo sapiens
gtttactaacaattttacaactgctg

SEQ ID NO: 74912 - DNA, 26 bp, Homo sapiens
tttactaacaattttacaactgctgg

SEQ ID NO: 74913 - DNA, 26 bp, Homo sapiens
ttactaacaattttacaactgctggc

SEQ ID NO: 74914 - DNA, 26 bp, Homo sapiens
tactaacaattttacaactgctggct

SEQ ID NO: 74915 - DNA, 26 bp, Homo sapiens
actaacaattttacaactgctggctg

SEQ ID NO: 74916 - DNA, 26 bp, Homo sapiens
ctaacaattttacaactgctggctgc

SEQ ID NO: 74917 - DNA, 26 bp, Homo sapiens
taacaattttacaactgctggctgca

SEQ ID NO: 74918 - DNA, 26 bp, Homo sapiens
aacaattttacaactgctggctgcag

SEQ ID NO: 74919 - DNA, 26 bp, Homo sapiens
acaattttacaactgctggctgcagc

SEQ ID NO: 74920 - DNA, 26 bp, Homo sapiens
caattttacaactgctggctgcagcg

SEQ ID NO: 74921 - DNA, 26 bp, Homo sapiens
aattttacaactgctggctgcagcgg

SEQ ID NO: 74922 - DNA, 26 bp, Homo sapiens
attttacaactgctggctgcagcggt

SEQ ID NO: 74923 - DNA, 26 bp, Homo sapiens
ttttacaactgctggctgcagcggtg

SEQ ID NO: 74924 - DNA, 26 bp, Homo sapiens
tttacaactgctggctgcagcggtgc

SEQ ID NO: 74925 - DNA, 26 bp, Homo sapiens
ttacaactgctggctgcagcggtgca

SEQ ID NO: 74926 - DNA, 26 bp, Homo sapiens
tacaactgctggctgcagcggtgcat

SEQ ID NO: 74927 - DNA, 26 bp, Homo sapiens
acaactgctggctgcagcggtgcatg

SEQ ID NO: 74928 - DNA, 26 bp, Homo sapiens
caactgctggctgcagcggtgcatga

SEQ ID NO: 74929 - DNA, 26 bp, Homo sapiens
aactgctggctgcagcggtgcatgac

SEQ ID NO: 74930 - DNA, 26 bp, Homo sapiens
actgctggctgcagcggtgcatgaca

SEQ ID NO: 74931 - DNA, 26 bp, Homo sapiens
ctgctggctgcagcggtgcatgacat

SEQ ID NO: 74932 - DNA, 26 bp, Homo sapiens
tgctggctgcagcggtgcatgacatt

SEQ ID NO: 74933 - DNA, 26 bp, Homo sapiens
gctggctgcagcggtgcatgacattc

SEQ ID NO: 74934 - DNA, 26 bp, Homo sapiens
ctggctgcagcggtgcatgacattca

SEQ ID NO: 74935 - DNA, 26 bp, Homo sapiens
tggctgcagcggtgcatgacattcat

SEQ ID NO: 74936 - DNA, 26 bp, Homo sapiens
ggctgcagcggtgcatgacattcatt

SEQ ID NO: 74937 - DNA, 26 bp, Homo sapiens
gctgcagcggtgcatgacattcatta

SEQ ID NO: 74938 - DNA, 26 bp, Homo sapiens
ctgcagcggtgcatgacattcattat

SEQ ID NO: 74939 - DNA, 26 bp, Homo sapiens
tgcagcggtgcatgacattcattatt

SEQ ID NO: 74940 - DNA, 26 bp, Homo sapiens
gcagcggtgcatgacattcattatta

SEQ ID NO: 74941 - DNA, 26 bp, Homo sapiens
cagcggtgcatgacattcattattat

SEQ ID NO: 74942 - DNA, 26 bp, Homo sapiens
agcggtgcatgacattcattattatt

SEQ ID NO: 74943 - DNA, 26 bp, Homo sapiens
gcggtgcatgacattcattattatta

SEQ ID NO: 74944 - DNA, 26 bp, Homo sapiens
cggtgcatgacattcattattattac

SEQ ID NO: 74945 - DNA, 26 bp, Homo sapiens
ggtgcatgacattcattattattaca

SEQ ID NO: 74946 - DNA, 26 bp, Homo sapiens
gtgcatgacattcattattattacat

SEQ ID NO: 74947 - DNA, 26 bp, Homo sapiens
tgcatgacattcattattattacatt

SEQ ID NO: 74948 - DNA, 26 bp, Homo sapiens
gcatgacattcattattattacattt

SEQ ID NO: 74949 - DNA, 26 bp, Homo sapiens
catgacattcattattattacatttc

SEQ ID NO: 74950 - DNA, 26 bp, Homo sapiens
atgacattcattattattacatttcc

SEQ ID NO: 74951 - DNA, 26 bp, Homo sapiens
tgacattcattattattacatttcca

SEQ ID NO: 74952 - DNA, 26 bp, Homo sapiens
gacattcattattattacatttccat

SEQ ID NO: 74953 - DNA, 26 bp, Homo sapiens
acattcattattattacatttccatt

SEQ ID NO: 74954 - DNA, 26 bp, Homo sapiens
cattcattattattacatttccattt

SEQ ID NO: 74955 - DNA, 26 bp, Homo sapiens
attcattattattacatttccatttt

SEQ ID NO: 74956 - DNA, 26 bp, Homo sapiens
ttcattattattacatttccattttg

SEQ ID NO: 74957 - DNA, 26 bp, Homo sapiens
tcattattattacatttccattttgc

SEQ ID NO: 74958 - DNA, 26 bp, Homo sapiens
cattattattacatttccattttgca

SEQ ID NO: 74959 - DNA, 26 bp, Homo sapiens
attattattacatttccattttgcaa

SEQ ID NO: 74960 - DNA, 26 bp, Homo sapiens
ttattattacatttccattttgcaaa

SEQ ID NO: 74961 - DNA, 26 bp, Homo sapiens
tattattacatttccattttgcaaat

SEQ ID NO: 74962 - DNA, 26 bp, Homo sapiens
attattacatttccattttgcaaatg

SEQ ID NO: 74963 - DNA, 26 bp, Homo sapiens
ttattacatttccattttgcaaatgt

SEQ ID NO: 74964 - DNA, 26 bp, Homo sapiens
tattacatttccattttgcaaatgtt

SEQ ID NO: 74965 - DNA, 26 bp, Homo sapiens
attacatttccattttgcaaatgtta

SEQ ID NO: 74966 - DNA, 26 bp, Homo sapiens
ttacatttccattttgcaaatgttag

SEQ ID NO: 74967 - DNA, 26 bp, Homo sapiens
tacatttccattttgcaaatgttaga

SEQ ID NO: 74968 - DNA, 26 bp, Homo sapiens
acatttccattttgcaaatgttagag

SEQ ID NO: 74969 - DNA, 26 bp, Homo sapiens
catttccattttgcaaatgttagagg

SEQ ID NO: 74970 - DNA, 26 bp, Homo sapiens
atttccattttgcaaatgttagagga

SEQ ID NO: 74971 - DNA, 26 bp, Homo sapiens
tttccattttgcaaatgttagaggaa

SEQ ID NO: 74972 - DNA, 26 bp, Homo sapiens
ttccattttgcaaatgttagaggaac

SEQ ID NO: 74973 - DNA, 26 bp, Homo sapiens
tccattttgcaaatgttagaggaact

SEQ ID NO: 74974 - DNA, 26 bp, Homo sapiens
ccattttgcaaatgttagaggaactc

SEQ ID NO: 74975 - DNA, 26 bp, Homo sapiens
cattttgcaaatgttagaggaactcc

SEQ ID NO: 74976 - DNA, 26 bp, Homo sapiens
attttgcaaatgttagaggaactcct

SEQ ID NO: 74977 - DNA, 26 bp, Homo sapiens
ttttgcaaatgttagaggaactcctt

SEQ ID NO: 74978 - DNA, 26 bp, Homo sapiens
tttgcaaatgttagaggaactccttc

SEQ ID NO: 74979 - DNA, 26 bp, Homo sapiens
ttgcaaatgttagaggaactccttcc

SEQ ID NO: 74980 - DNA, 26 bp, Homo sapiens
tgcaaatgttagaggaactccttcca

SEQ ID NO: 74981 - DNA, 26 bp, Homo sapiens
gcaaatgttagaggaactccttccat

SEQ ID NO: 74982 - DNA, 26 bp, Homo sapiens
caaatgttagaggaactccttccatt

SEQ ID NO: 74983 - DNA, 26 bp, Homo sapiens
aaatgttagaggaactccttccattt

SEQ ID NO: 74984 - DNA, 26 bp, Homo sapiens
aatgttagaggaactccttccatttg

SEQ ID NO: 74985 - DNA, 26 bp, Homo sapiens
atgttagaggaactccttccatttgt

SEQ ID NO: 74986 - DNA, 26 bp, Homo sapiens
tgttagaggaactccttccatttgtc

SEQ ID NO: 74987 - DNA, 26 bp, Homo sapiens
gttagaggaactccttccatttgtca

SEQ ID NO: 74988 - DNA, 26 bp, Homo sapiens
ttagaggaactccttccatttgtcag

SEQ ID NO: 74989 - DNA, 26 bp, Homo sapiens
tagaggaactccttccatttgtcagg

SEQ ID NO: 74990 - DNA, 26 bp, Homo sapiens
agaggaactccttccatttgtcaggt

SEQ ID NO: 74991 - DNA, 26 bp, Homo sapiens
gaggaactccttccatttgtcaggtg

SEQ ID NO: 74992 - DNA, 26 bp, Homo sapiens
aggaactccttccatttgtcaggtgt

SEQ ID NO: 74993 - DNA, 26 bp, Homo sapiens
ggaactccttccatttgtcaggtgtg

SEQ ID NO: 74994 - DNA, 26 bp, Homo sapiens
gaactccttccatttgtcaggtgtga

SEQ ID NO: 74995 - DNA, 26 bp, Homo sapiens
aactccttccatttgtcaggtgtgac

SEQ ID NO: 74996 - DNA, 26 bp, Homo sapiens
actccttccatttgtcaggtgtgacc

SEQ ID NO: 74997 - DNA, 26 bp, Homo sapiens
ctccttccatttgtcaggtgtgaccc

SEQ ID NO: 74998 - DNA, 26 bp, Homo sapiens
tccttccatttgtcaggtgtgaccca

SEQ ID NO: 74999 - DNA, 26 bp, Homo sapiens
ccttccatttgtcaggtgtgacccat

SEQ ID NO: 75000 - DNA, 26 bp, Homo sapiens
cttccatttgtcaggtgtgacccatg

SEQ ID NO: 75001 - DNA, 26 bp, Homo sapiens
ttccatttgtcaggtgtgacccatga

SEQ ID NO: 75002 - DNA, 26 bp, Homo sapiens
tccatttgtcaggtgtgacccatgac

SEQ ID NO: 75003 - DNA, 26 bp, Homo sapiens
ccatttgtcaggtgtgacccatgact

SEQ ID NO: 75004 - DNA, 26 bp, Homo sapiens
catttgtcaggtgtgacccatgactt

SEQ ID NO: 75005 - DNA, 26 bp, Homo sapiens
atttgtcaggtgtgacccatgacttg

SEQ ID NO: 75006 - DNA, 26 bp, Homo sapiens
tttgtcaggtgtgacccatgacttgc

SEQ ID NO: 75007 - DNA, 26 bp, Homo sapiens
ttgtcaggtgtgacccatgacttgca

SEQ ID NO: 75008 - DNA, 26 bp, Homo sapiens
tgtcaggtgtgacccatgacttgcat

SEQ ID NO: 75009 - DNA, 26 bp, Homo sapiens
gtcaggtgtgacccatgacttgcatg

SEQ ID NO: 75010 - DNA, 26 bp, Homo sapiens
tcaggtgtgacccatgacttgcatgt

SEQ ID NO: 75011 - DNA, 26 bp, Homo sapiens
caggtgtgacccatgacttgcatgtc

SEQ ID NO: 75012 - DNA, 26 bp, Homo sapiens
aggtgtgacccatgacttgcatgtct

SEQ ID NO: 75013 - DNA, 26 bp, Homo sapiens
ggtgtgacccatgacttgcatgtctc

SEQ ID NO: 75014 - DNA, 26 bp, Homo sapiens
gtgtgacccatgacttgcatgtctct

SEQ ID NO: 75015 - DNA, 26 bp, Homo sapiens
tgtgacccatgacttgcatgtctctg

SEQ ID NO: 75016 - DNA, 26 bp, Homo sapiens
gtgacccatgacttgcatgtctctgg

SEQ ID NO: 75017 - DNA, 26 bp, Homo sapiens
tgacccatgacttgcatgtctctggg

SEQ ID NO: 75018 - DNA, 26 bp, Homo sapiens
gacccatgacttgcatgtctctgggg

SEQ ID NO: 75019 - DNA, 26 bp, Homo sapiens
acccatgacttgcatgtctctgggga

SEQ ID NO: 75020 - DNA, 26 bp, Homo sapiens
cccatgacttgcatgtctctggggac

SEQ ID NO: 75021 - DNA, 26 bp, Homo sapiens
ccatgacttgcatgtctctggggaca

SEQ ID NO: 75022 - DNA, 26 bp, Homo sapiens
catgacttgcatgtctctggggacac

SEQ ID NO: 75023 - DNA, 26 bp, Homo sapiens
atgacttgcatgtctctggggacact

SEQ ID NO: 75024 - DNA, 26 bp, Homo sapiens
tgacttgcatgtctctggggacactc

SEQ ID NO: 75025 - DNA, 26 bp, Homo sapiens
gacttgcatgtctctggggacactct

SEQ ID NO: 75026 - DNA, 26 bp, Homo sapiens
acttgcatgtctctggggacactctg

SEQ ID NO: 75027 - DNA, 26 bp, Homo sapiens
cttgcatgtctctggggacactctgg

SEQ ID NO: 75028 - DNA, 26 bp, Homo sapiens
ttgcatgtctctggggacactctggg

SEQ ID NO: 75029 - DNA, 26 bp, Homo sapiens
tgcatgtctctggggacactctggga

SEQ ID NO: 75030 - DNA, 26 bp, Homo sapiens
gcatgtctctggggacactctgggaa

SEQ ID NO: 75031 - DNA, 26 bp, Homo sapiens
catgtctctggggacactctgggaag

SEQ ID NO: 75032 - DNA, 26 bp, Homo sapiens
atgtctctggggacactctgggaaga

SEQ ID NO: 75033 - DNA, 26 bp, Homo sapiens
tgtctctggggacactctgggaagat

SEQ ID NO: 75034 - DNA, 26 bp, Homo sapiens
gtctctggggacactctgggaagatg

SEQ ID NO: 75035 - DNA, 26 bp, Homo sapiens
tctctggggacactctgggaagatgt

SEQ ID NO: 75036 - DNA, 26 bp, Homo sapiens
ctctggggacactctgggaagatgtc

SEQ ID NO: 75037 - DNA, 26 bp, Homo sapiens
tctggggacactctgggaagatgtct

SEQ ID NO: 75038 - DNA, 26 bp, Homo sapiens
ctggggacactctgggaagatgtctt

SEQ ID NO: 75039 - DNA, 26 bp, Homo sapiens
tggggacactctgggaagatgtcttc

SEQ ID NO: 75040 - DNA, 26 bp, Homo sapiens
ggggacactctgggaagatgtcttca

SEQ ID NO: 75041 - DNA, 26 bp, Homo sapiens
gggacactctgggaagatgtcttcat

SEQ ID NO: 75042 - DNA, 26 bp, Homo sapiens
ggacactctgggaagatgtcttcata

SEQ ID NO: 75043 - DNA, 26 bp, Homo sapiens
gacactctgggaagatgtcttcatag

SEQ ID NO: 75044 - DNA, 26 bp, Homo sapiens
acactctgggaagatgtcttcataga

SEQ ID NO: 75045 - DNA, 26 bp, Homo sapiens
cactctgggaagatgtcttcatagat

SEQ ID NO: 75046 - DNA, 26 bp, Homo sapiens
actctgggaagatgtcttcatagata

SEQ ID NO: 75047 - DNA, 26 bp, Homo sapiens
ctctgggaagatgtcttcatagataa

SEQ ID NO: 75048 - DNA, 26 bp, Homo sapiens
tctgggaagatgtcttcatagataag

SEQ ID NO: 75049 - DNA, 26 bp, Homo sapiens
ctgggaagatgtcttcatagataaga

SEQ ID NO: 75050 - DNA, 26 bp, Homo sapiens
tgggaagatgtcttcatagataagag

SEQ ID NO: 75051 - DNA, 26 bp, Homo sapiens
gggaagatgtcttcatagataagagc

SEQ ID NO: 75052 - DNA, 26 bp, Homo sapiens
ggaagatgtcttcatagataagagct

SEQ ID NO: 75053 - DNA, 26 bp, Homo sapiens
gaagatgtcttcatagataagagctc

SEQ ID NO: 75054 - DNA, 26 bp, Homo sapiens
aagatgtcttcatagataagagctca

SEQ ID NO: 75055 - DNA, 26 bp, Homo sapiens
agatgtcttcatagataagagctcag

SEQ ID NO: 75056 - DNA, 26 bp, Homo sapiens
gatgtcttcatagataagagctcaga

SEQ ID NO: 75057 - DNA, 26 bp, Homo sapiens
atgtcttcatagataagagctcagat

SEQ ID NO: 75058 - DNA, 26 bp, Homo sapiens
tgtcttcatagataagagctcagata

SEQ ID NO: 75059 - DNA, 26 bp, Homo sapiens
gtcttcatagataagagctcagataa

SEQ ID NO: 75060 - DNA, 26 bp, Homo sapiens
tcttcatagataagagctcagataaa

SEQ ID NO: 75061 - DNA, 26 bp, Homo sapiens
cttcatagataagagctcagataaac

SEQ ID NO: 75062 - DNA, 26 bp, Homo sapiens
ttcatagataagagctcagataaaca

SEQ ID NO: 75063 - DNA, 26 bp, Homo sapiens
tcatagataagagctcagataaacat

SEQ ID NO: 75064 - DNA, 26 bp, Homo sapiens
catagataagagctcagataaacatg

SEQ ID NO: 75065 - DNA, 26 bp, Homo sapiens
atagataagagctcagataaacatga

SEQ ID NO: 75066 - DNA, 26 bp, Homo sapiens
tagataagagctcagataaacatgag

SEQ ID NO: 75067 - DNA, 26 bp, Homo sapiens
agataagagctcagataaacatgaga

SEQ ID NO: 75068 - DNA, 26 bp, Homo sapiens
gataagagctcagataaacatgagac

SEQ ID NO: 75069 - DNA, 26 bp, Homo sapiens
ataagagctcagataaacatgagaca

SEQ ID NO: 75070 - DNA, 26 bp, Homo sapiens
taagagctcagataaacatgagacag

SEQ ID NO: 75071 - DNA, 26 bp, Homo sapiens
aagagctcagataaacatgagacaga

SEQ ID NO: 75072 - DNA, 26 bp, Homo sapiens
agagctcagataaacatgagacagaa

SEQ ID NO: 75073 - DNA, 26 bp, Homo sapiens
gagctcagataaacatgagacagaac

SEQ ID NO: 75074 - DNA, 26 bp, Homo sapiens
agctcagataaacatgagacagaaca

SEQ ID NO: 75075 - DNA, 26 bp, Homo sapiens
gctcagataaacatgagacagaacag

SEQ ID NO: 75076 - DNA, 26 bp, Homo sapiens
ctcagataaacatgagacagaacagt

SEQ ID NO: 75077 - DNA, 26 bp, Homo sapiens
tcagataaacatgagacagaacagtc

SEQ ID NO: 75078 - DNA, 26 bp, Homo sapiens
cagataaacatgagacagaacagtcc

SEQ ID NO: 75079 - DNA, 26 bp, Homo sapiens
agataaacatgagacagaacagtccc

SEQ ID NO: 75080 - DNA, 26 bp, Homo sapiens
gataaacatgagacagaacagtccca

SEQ ID NO: 75081 - DNA, 26 bp, Homo sapiens
ataaacatgagacagaacagtcccaa

SEQ ID NO: 75082 - DNA, 26 bp, Homo sapiens
taaacatgagacagaacagtcccaaa

SEQ ID NO: 75083 - DNA, 26 bp, Homo sapiens
aaacatgagacagaacagtcccaaaa

SEQ ID NO: 75084 - DNA, 26 bp, Homo sapiens
aacatgagacagaacagtcccaaaat

SEQ ID NO: 75085 - DNA, 26 bp, Homo sapiens
acatgagacagaacagtcccaaaatc

SEQ ID NO: 75086 - DNA, 26 bp, Homo sapiens
catgagacagaacagtcccaaaatcc

SEQ ID NO: 75087 - DNA, 26 bp, Homo sapiens
atgagacagaacagtcccaaaatccc

SEQ ID NO: 75088 - DNA, 26 bp, Homo sapiens
tgagacagaacagtcccaaaatccct

SEQ ID NO: 75089 - DNA, 26 bp, Homo sapiens
gagacagaacagtcccaaaatccctc

SEQ ID NO: 75090 - DNA, 26 bp, Homo sapiens
agacagaacagtcccaaaatccctca

SEQ ID NO: 75091 - DNA, 26 bp, Homo sapiens
gacagaacagtcccaaaatccctcag

SEQ ID NO: 75092 - DNA, 26 bp, Homo sapiens
acagaacagtcccaaaatccctcagc

SEQ ID NO: 75093 - DNA, 26 bp, Homo sapiens
cagaacagtcccaaaatccctcagca

SEQ ID NO: 75094 - DNA, 26 bp, Homo sapiens
agaacagtcccaaaatccctcagcat

SEQ ID NO: 75095 - DNA, 26 bp, Homo sapiens
gaacagtcccaaaatccctcagcatg

SEQ ID NO: 75096 - DNA, 26 bp, Homo sapiens
aacagtcccaaaatccctcagcatgc

SEQ ID NO: 75097 - DNA, 26 bp, Homo sapiens
acagtcccaaaatccctcagcatgcc

SEQ ID NO: 75098 - DNA, 26 bp, Homo sapiens
cagtcccaaaatccctcagcatgccc

SEQ ID NO: 75099 - DNA, 26 bp, Homo sapiens
agtcccaaaatccctcagcatgccca

SEQ ID NO: 75100 - DNA, 26 bp, Homo sapiens
gtcccaaaatccctcagcatgcccag

SEQ ID NO: 75101 - DNA, 26 bp, Homo sapiens
tcccaaaatccctcagcatgcccagc

SEQ ID NO: 75102 - DNA, 26 bp, Homo sapiens
cccaaaatccctcagcatgcccagcc

SEQ ID NO: 75103 - DNA, 26 bp, Homo sapiens
ccaaaatccctcagcatgcccagccc

SEQ ID NO: 75104 - DNA, 26 bp, Homo sapiens
caaaatccctcagcatgcccagccct

SEQ ID NO: 75105 - DNA, 26 bp, Homo sapiens
aaaatccctcagcatgcccagccctc

SEQ ID NO: 75106 - DNA, 26 bp, Homo sapiens
aaatccctcagcatgcccagccctca

SEQ ID NO: 75107 - DNA, 26 bp, Homo sapiens
aatccctcagcatgcccagccctcag

SEQ ID NO: 75108 - DNA, 26 bp, Homo sapiens
atccctcagcatgcccagccctcagg

SEQ ID NO: 75109 - DNA, 26 bp, Homo sapiens
tccctcagcatgcccagccctcaggg

SEQ ID NO: 75110 - DNA, 26 bp, Homo sapiens
ccctcagcatgcccagccctcaggga

SEQ ID NO: 75111 - DNA, 26 bp, Homo sapiens
cctcagcatgcccagccctcagggag

SEQ ID NO: 75112 - DNA, 26 bp, Homo sapiens
ctcagcatgcccagccctcagggagt

SEQ ID NO: 75113 - DNA, 26 bp, Homo sapiens
tcagcatgcccagccctcagggagtt

SEQ ID NO: 75114 - DNA, 26 bp, Homo sapiens
cagcatgcccagccctcagggagttc

SEQ ID NO: 75115 - DNA, 26 bp, Homo sapiens
agcatgcccagccctcagggagttcc

SEQ ID NO: 75116 - DNA, 26 bp, Homo sapiens
gcatgcccagccctcagggagttcct

SEQ ID NO: 75117 - DNA, 26 bp, Homo sapiens
catgcccagccctcagggagttccta

SEQ ID NO: 75118 - DNA, 26 bp, Homo sapiens
atgcccagccctcagggagttcctac

SEQ ID NO: 75119 - DNA, 26 bp, Homo sapiens
tgcccagccctcagggagttcctact

SEQ ID NO: 75120 - DNA, 26 bp, Homo sapiens
gcccagccctcagggagttcctactt

SEQ ID NO: 75121 - DNA, 26 bp, Homo sapiens
cccagccctcagggagttcctacttg

SEQ ID NO: 75122 - DNA, 26 bp, Homo sapiens
ccagccctcagggagttcctacttgt

SEQ ID NO: 75123 - DNA, 26 bp, Homo sapiens
cagccctcagggagttcctacttgtt

SEQ ID NO: 75124 - DNA, 26 bp, Homo sapiens
agccctcagggagttcctacttgttt

SEQ ID NO: 75125 - DNA, 26 bp, Homo sapiens
gccctcagggagttcctacttgttta

SEQ ID NO: 75126 - DNA, 26 bp, Homo sapiens
ccctcagggagttcctacttgtttat

SEQ ID NO: 75127 - DNA, 26 bp, Homo sapiens
cctcagggagttcctacttgtttatg

SEQ ID NO: 75128 - DNA, 26 bp, Homo sapiens
ctcagggagttcctacttgtttatga

SEQ ID NO: 75129 - DNA, 26 bp, Homo sapiens
tcagggagttcctacttgtttatgaa

SEQ ID NO: 75130 - DNA, 26 bp, Homo sapiens
cagggagttcctacttgtttatgaat

SEQ ID NO: 75131 - DNA, 26 bp, Homo sapiens
agggagttcctacttgtttatgaatc

SEQ ID NO: 75132 - DNA, 26 bp, Homo sapiens
gggagttcctacttgtttatgaatct

SEQ ID NO: 75133 - DNA, 26 bp, Homo sapiens
ggagttcctacttgtttatgaatctg

SEQ ID NO: 75134 - DNA, 26 bp, Homo sapiens
gagttcctacttgtttatgaatctgt

SEQ ID NO: 75135 - DNA, 26 bp, Homo sapiens
agttcctacttgtttatgaatctgtc

SEQ ID NO: 75136 - DNA, 26 bp, Homo sapiens
gttcctacttgtttatgaatctgtcc

SEQ ID NO: 75137 - DNA, 26 bp, Homo sapiens
ttcctacttgtttatgaatctgtcca

SEQ ID NO: 75138 - DNA, 26 bp, Homo sapiens
tcctacttgtttatgaatctgtccat

SEQ ID NO: 75139 - DNA, 26 bp, Homo sapiens
cctacttgtttatgaatctgtccata

SEQ ID NO: 75140 - DNA, 26 bp, Homo sapiens
ctacttgtttatgaatctgtccatat

SEQ ID NO: 75141 - DNA, 26 bp, Homo sapiens
tacttgtttatgaatctgtccatatt

SEQ ID NO: 75142 - DNA, 26 bp, Homo sapiens
acttgtttatgaatctgtccatatta

SEQ ID NO: 75143 - DNA, 26 bp, Homo sapiens
cttgtttatgaatctgtccatattat

SEQ ID NO: 75144 - DNA, 26 bp, Homo sapiens
ttgtttatgaatctgtccatattata

SEQ ID NO: 75145 - DNA, 26 bp, Homo sapiens
tgtttatgaatctgtccatattatag

SEQ ID NO: 75146 - DNA, 26 bp, Homo sapiens
gtttatgaatctgtccatattatagc

SEQ ID NO: 75147 - DNA, 26 bp, Homo sapiens
tttatgaatctgtccatattatagct

SEQ ID NO: 75148 - DNA, 26 bp, Homo sapiens
ttatgaatctgtccatattatagctc

SEQ ID NO: 75149 - DNA, 26 bp, Homo sapiens
tatgaatctgtccatattatagctcg

SEQ ID NO: 75150 - DNA, 26 bp, Homo sapiens
atgaatctgtccatattatagctcgt

SEQ ID NO: 75151 - DNA, 26 bp, Homo sapiens
tgaatctgtccatattatagctcgtt

SEQ ID NO: 75152 - DNA, 26 bp, Homo sapiens
gaatctgtccatattatagctcgttg

SEQ ID NO: 75153 - DNA, 26 bp, Homo sapiens
aatctgtccatattatagctcgttga

SEQ ID NO: 75154 - DNA, 26 bp, Homo sapiens
atctgtccatattatagctcgttgag

SEQ ID NO: 75155 - DNA, 26 bp, Homo sapiens
tctgtccatattatagctcgttgagt

SEQ ID NO: 75156 - DNA, 26 bp, Homo sapiens
ctgtccatattatagctcgttgagta

SEQ ID NO: 75157 - DNA, 26 bp, Homo sapiens
tgtccatattatagctcgttgagtag

SEQ ID NO: 75158 - DNA, 26 bp, Homo sapiens
gtccatattatagctcgttgagtaga

SEQ ID NO: 75159 - DNA, 26 bp, Homo sapiens
tccatattatagctcgttgagtagag

SEQ ID NO: 75160 - DNA, 26 bp, Homo sapiens
ccatattatagctcgttgagtagaga

SEQ ID NO: 75161 - DNA, 26 bp, Homo sapiens
catattatagctcgttgagtagagaa

SEQ ID NO: 75162 - DNA, 26 bp, Homo sapiens
atattatagctcgttgagtagagaaa

SEQ ID NO: 75163 - DNA, 26 bp, Homo sapiens
tattatagctcgttgagtagagaaat

SEQ ID NO: 75164 - DNA, 26 bp, Homo sapiens
attatagctcgttgagtagagaaatt

SEQ ID NO: 75165 - DNA, 26 bp, Homo sapiens
ttatagctcgttgagtagagaaattc

SEQ ID NO: 75166 - DNA, 26 bp, Homo sapiens
tatagctcgttgagtagagaaattcc

SEQ ID NO: 75167 - DNA, 26 bp, Homo sapiens
atagctcgttgagtagagaaattcca

SEQ ID NO: 75168 - DNA, 26 bp, Homo sapiens
tagctcgttgagtagagaaattccag

SEQ ID NO: 75169 - DNA, 26 bp, Homo sapiens
agctcgttgagtagagaaattccagg

SEQ ID NO: 75170 - DNA, 26 bp, Homo sapiens
gctcgttgagtagagaaattccagga

SEQ ID NO: 75171 - DNA, 26 bp, Homo sapiens
ctcgttgagtagagaaattccaggat

SEQ ID NO: 75172 - DNA, 26 bp, Homo sapiens
tcgttgagtagagaaattccaggatc

SEQ ID NO: 75173 - DNA, 26 bp, Homo sapiens
cgttgagtagagaaattccaggatct

SEQ ID NO: 75174 - DNA, 26 bp, Homo sapiens
gttgagtagagaaattccaggatctt

SEQ ID NO: 75175 - DNA, 26 bp, Homo sapiens
ttgagtagagaaattccaggatcttc

SEQ ID NO: 75176 - DNA, 26 bp, Homo sapiens
tgagtagagaaattccaggatcttcc

SEQ ID NO: 75177 - DNA, 26 bp, Homo sapiens
gagtagagaaattccaggatcttcct

SEQ ID NO: 75178 - DNA, 26 bp, Homo sapiens
agtagagaaattccaggatcttcctg

SEQ ID NO: 75179 - DNA, 26 bp, Homo sapiens
gtagagaaattccaggatcttcctgc

SEQ ID NO: 75180 - DNA, 26 bp, Homo sapiens
tagagaaattccaggatcttcctgca

SEQ ID NO: 75181 - DNA, 26 bp, Homo sapiens
agagaaattccaggatcttcctgcat

SEQ ID NO: 75182 - DNA, 26 bp, Homo sapiens
gagaaattccaggatcttcctgcatg

SEQ ID NO: 75183 - DNA, 26 bp, Homo sapiens
agaaattccaggatcttcctgcatgg

SEQ ID NO: 75184 - DNA, 26 bp, Homo sapiens
gaaattccaggatcttcctgcatgga

SEQ ID NO: 75185 - DNA, 26 bp, Homo sapiens
aaattccaggatcttcctgcatggat

SEQ ID NO: 75186 - DNA, 26 bp, Homo sapiens
aattccaggatcttcctgcatggatt

SEQ ID NO: 75187 - DNA, 26 bp, Homo sapiens
attccaggatcttcctgcatggattt

SEQ ID NO: 75188 - DNA, 26 bp, Homo sapiens
ttccaggatcttcctgcatggatttc

SEQ ID NO: 75189 - DNA, 26 bp, Homo sapiens
tccaggatcttcctgcatggatttct

SEQ ID NO: 75190 - DNA, 26 bp, Homo sapiens
ccaggatcttcctgcatggatttctg

SEQ ID NO: 75191 - DNA, 26 bp, Homo sapiens
caggatcttcctgcatggatttctga

SEQ ID NO: 75192 - DNA, 26 bp, Homo sapiens
aggatcttcctgcatggatttctgat

SEQ ID NO: 75193 - DNA, 26 bp, Homo sapiens
ggatcttcctgcatggatttctgatc

SEQ ID NO: 75194 - DNA, 26 bp, Homo sapiens
gatcttcctgcatggatttctgatca

SEQ ID NO: 75195 - DNA, 26 bp, Homo sapiens
atcttcctgcatggatttctgatcag

SEQ ID NO: 75196 - DNA, 26 bp, Homo sapiens
tcttcctgcatggatttctgatcaga

SEQ ID NO: 75197 - DNA, 26 bp, Homo sapiens
cttcctgcatggatttctgatcagaa

SEQ ID NO: 75198 - DNA, 26 bp, Homo sapiens
ttcctgcatggatttctgatcagaag

SEQ ID NO: 75199 - DNA, 26 bp, Homo sapiens
tcctgcatggatttctgatcagaaga

SEQ ID NO: 75200 - DNA, 26 bp, Homo sapiens
cctgcatggatttctgatcagaagag

SEQ ID NO: 75201 - DNA, 26 bp, Homo sapiens
ctgcatggatttctgatcagaagagt

SEQ ID NO: 75202 - DNA, 26 bp, Homo sapiens
tgcatggatttctgatcagaagagtg

SEQ ID NO: 75203 - DNA, 26 bp, Homo sapiens
gcatggatttctgatcagaagagtgg

SEQ ID NO: 75204 - DNA, 26 bp, Homo sapiens
catggatttctgatcagaagagtggt

SEQ ID NO: 75205 - DNA, 26 bp, Homo sapiens
atggatttctgatcagaagagtggtc

SEQ ID NO: 75206 - DNA, 26 bp, Homo sapiens
tggatttctgatcagaagagtggtcc

SEQ ID NO: 75207 - DNA, 26 bp, Homo sapiens
ggatttctgatcagaagagtggtcca

SEQ ID NO: 75208 - DNA, 26 bp, Homo sapiens
gatttctgatcagaagagtggtccag

SEQ ID NO: 75209 - DNA, 26 bp, Homo sapiens
atttctgatcagaagagtggtccaga

SEQ ID NO: 75210 - DNA, 26 bp, Homo sapiens
tttctgatcagaagagtggtccagag

SEQ ID NO: 75211 - DNA, 26 bp, Homo sapiens
ttctgatcagaagagtggtccagagt

SEQ ID NO: 75212 - DNA, 26 bp, Homo sapiens
tctgatcagaagagtggtccagagtg

SEQ ID NO: 75213 - DNA, 26 bp, Homo sapiens
ctgatcagaagagtggtccagagtga

SEQ ID NO: 75214 - DNA, 26 bp, Homo sapiens
tgatcagaagagtggtccagagtgag

SEQ ID NO: 75215 - DNA, 26 bp, Homo sapiens
gatcagaagagtggtccagagtgagc

SEQ ID NO: 75216 - DNA, 26 bp, Homo sapiens
atcagaagagtggtccagagtgagct

SEQ ID NO: 75217 - DNA, 26 bp, Homo sapiens
tcagaagagtggtccagagtgagctg

SEQ ID NO: 75218 - DNA, 26 bp, Homo sapiens
cagaagagtggtccagagtgagctgt

SEQ ID NO: 75219 - DNA, 26 bp, Homo sapiens
agaagagtggtccagagtgagctgtc

SEQ ID NO: 75220 - DNA, 26 bp, Homo sapiens
gaagagtggtccagagtgagctgtca

SEQ ID NO: 75221 - DNA, 26 bp, Homo sapiens
aagagtggtccagagtgagctgtcat

SEQ ID NO: 75222 - DNA, 26 bp, Homo sapiens
agagtggtccagagtgagctgtcata

SEQ ID NO: 75223 - DNA, 26 bp, Homo sapiens
gagtggtccagagtgagctgtcataa

SEQ ID NO: 75224 - DNA, 26 bp, Homo sapiens
agtggtccagagtgagctgtcataat

SEQ ID NO: 75225 - DNA, 26 bp, Homo sapiens
gtggtccagagtgagctgtcataata

SEQ ID NO: 75226 - DNA, 26 bp, Homo sapiens
tggtccagagtgagctgtcataatac

SEQ ID NO: 75227 - DNA, 26 bp, Homo sapiens
ggtccagagtgagctgtcataataca

SEQ ID NO: 75228 - DNA, 26 bp, Homo sapiens
gtccagagtgagctgtcataatacac

SEQ ID NO: 75229 - DNA, 26 bp, Homo sapiens
tccagagtgagctgtcataatacact

SEQ ID NO: 75230 - DNA, 26 bp, Homo sapiens
ccagagtgagctgtcataatacactt

SEQ ID NO: 75231 - DNA, 26 bp, Homo sapiens
cagagtgagctgtcataatacacttc

SEQ ID NO: 75232 - DNA, 26 bp, Homo sapiens
agagtgagctgtcataatacacttct

SEQ ID NO: 75233 - DNA, 26 bp, Homo sapiens
gagtgagctgtcataatacacttctt

SEQ ID NO: 75234 - DNA, 26 bp, Homo sapiens
agtgagctgtcataatacacttcttc

SEQ ID NO: 75235 - DNA, 26 bp, Homo sapiens
gtgagctgtcataatacacttcttct

SEQ ID NO: 75236 - DNA, 26 bp, Homo sapiens
tgagctgtcataatacacttcttctt

SEQ ID NO: 75237 - DNA, 26 bp, Homo sapiens
gagctgtcataatacacttcttcttg

SEQ ID NO: 75238 - DNA, 26 bp, Homo sapiens
agctgtcataatacacttcttcttgg

SEQ ID NO: 75239 - DNA, 26 bp, Homo sapiens
gctgtcataatacacttcttcttggc

SEQ ID NO: 75240 - DNA, 26 bp, Homo sapiens
ctgtcataatacacttcttcttggcg

SEQ ID NO: 75241 - DNA, 26 bp, Homo sapiens
tgtcataatacacttcttcttggcgc

SEQ ID NO: 75242 - DNA, 26 bp, Homo sapiens
gtcataatacacttcttcttggcgca

SEQ ID NO: 75243 - DNA, 26 bp, Homo sapiens
tcataatacacttcttcttggcgcag

SEQ ID NO: 75244 - DNA, 26 bp, Homo sapiens
cataatacacttcttcttggcgcaga

SEQ ID NO: 75245 - DNA, 26 bp, Homo sapiens
ataatacacttcttcttggcgcagag

SEQ ID NO: 75246 - DNA, 26 bp, Homo sapiens
taatacacttcttcttggcgcagagc

SEQ ID NO: 75247 - DNA, 26 bp, Homo sapiens
aatacacttcttcttggcgcagagct

SEQ ID NO: 75248 - DNA, 26 bp, Homo sapiens
atacacttcttcttggcgcagagctc

SEQ ID NO: 75249 - DNA, 26 bp, Homo sapiens
tacacttcttcttggcgcagagctcc

SEQ ID NO: 75250 - DNA, 26 bp, Homo sapiens
acacttcttcttggcgcagagctccc

SEQ ID NO: 75251 - DNA, 26 bp, Homo sapiens
cacttcttcttggcgcagagctcccc

SEQ ID NO: 75252 - DNA, 26 bp, Homo sapiens
acttcttcttggcgcagagctccccc

SEQ ID NO: 75253 - DNA, 26 bp, Homo sapiens
cttcttcttggcgcagagctccccct

SEQ ID NO: 75254 - DNA, 26 bp, Homo sapiens
ttcttcttggcgcagagctccccctt

SEQ ID NO: 75255 - DNA, 26 bp, Homo sapiens
tcttcttggcgcagagctcccccttt

SEQ ID NO: 75256 - DNA, 26 bp, Homo sapiens
cttcttggcgcagagctccccctttg

SEQ ID NO: 75257 - DNA, 26 bp, Homo sapiens
ttcttggcgcagagctccccctttga

SEQ ID NO: 75258 - DNA, 26 bp, Homo sapiens
tcttggcgcagagctccccctttgat

SEQ ID NO: 75259 - DNA, 26 bp, Homo sapiens
cttggcgcagagctccccctttgatg

SEQ ID NO: 75260 - DNA, 26 bp, Homo sapiens
ttggcgcagagctccccctttgatga

SEQ ID NO: 75261 - DNA, 26 bp, Homo sapiens
tggcgcagagctccccctttgatgat

SEQ ID NO: 75262 - DNA, 26 bp, Homo sapiens
ggcgcagagctccccctttgatgatc

SEQ ID NO: 75263 - DNA, 26 bp, Homo sapiens
gcgcagagctccccctttgatgatct

SEQ ID NO: 75264 - DNA, 26 bp, Homo sapiens
cgcagagctccccctttgatgatctc

SEQ ID NO: 75265 - DNA, 26 bp, Homo sapiens
gcagagctccccctttgatgatctcc

SEQ ID NO: 75266 - DNA, 26 bp, Homo sapiens
cagagctccccctttgatgatctcca

SEQ ID NO: 75267 - DNA, 26 bp, Homo sapiens
agagctccccctttgatgatctccag

SEQ ID NO: 75268 - DNA, 26 bp, Homo sapiens
gagctccccctttgatgatctccagg

SEQ ID NO: 75269 - DNA, 26 bp, Homo sapiens
agctccccctttgatgatctccaggg

SEQ ID NO: 75270 - DNA, 26 bp, Homo sapiens
gctccccctttgatgatctccagggc

SEQ ID NO: 75271 - DNA, 26 bp, Homo sapiens
ctccccctttgatgatctccagggca

SEQ ID NO: 75272 - DNA, 26 bp, Homo sapiens
tccccctttgatgatctccagggcac

SEQ ID NO: 75273 - DNA, 26 bp, Homo sapiens
ccccctttgatgatctccagggcaca

SEQ ID NO: 75274 - DNA, 26 bp, Homo sapiens
cccctttgatgatctccagggcacat

SEQ ID NO: 75275 - DNA, 26 bp, Homo sapiens
ccctttgatgatctccagggcacatt

SEQ ID NO: 75276 - DNA, 26 bp, Homo sapiens
cctttgatgatctccagggcacattc

SEQ ID NO: 75277 - DNA, 26 bp, Homo sapiens
ctttgatgatctccagggcacattcc

SEQ ID NO: 75278 - DNA, 26 bp, Homo sapiens
tttgatgatctccagggcacattcct

SEQ ID NO: 75279 - DNA, 26 bp, Homo sapiens
ttgatgatctccagggcacattcctc

SEQ ID NO: 75280 - DNA, 26 bp, Homo sapiens
tgatgatctccagggcacattcctcc

SEQ ID NO: 75281 - DNA, 26 bp, Homo sapiens
gatgatctccagggcacattcctcct

SEQ ID NO: 75282 - DNA, 26 bp, Homo sapiens
atgatctccagggcacattcctcctt

SEQ ID NO: 75283 - DNA, 26 bp, Homo sapiens
tgatctccagggcacattcctccttt

SEQ ID NO: 75284 - DNA, 26 bp, Homo sapiens
gatctccagggcacattcctcctttg

SEQ ID NO: 75285 - DNA, 26 bp, Homo sapiens
atctccagggcacattcctcctttgg

SEQ ID NO: 75286 - DNA, 26 bp, Homo sapiens
tctccagggcacattcctcctttgga

SEQ ID NO: 75287 - DNA, 26 bp, Homo sapiens
ctccagggcacattcctcctttggag

SEQ ID NO: 75288 - DNA, 26 bp, Homo sapiens
tccagggcacattcctcctttggagc

SEQ ID NO: 75289 - DNA, 26 bp, Homo sapiens
ccagggcacattcctcctttggagct

SEQ ID NO: 75290 - DNA, 26 bp, Homo sapiens
cagggcacattcctcctttggagctg

SEQ ID NO: 75291 - DNA, 26 bp, Homo sapiens
agggcacattcctcctttggagctgc

SEQ ID NO: 75292 - DNA, 26 bp, Homo sapiens
gggcacattcctcctttggagctgct

SEQ ID NO: 75293 - DNA, 26 bp, Homo sapiens
ggcacattcctcctttggagctgctt

SEQ ID NO: 75294 - DNA, 26 bp, Homo sapiens
gcacattcctcctttggagctgcttg

SEQ ID NO: 75295 - DNA, 26 bp, Homo sapiens
cacattcctcctttggagctgcttgc

SEQ ID NO: 75296 - DNA, 26 bp, Homo sapiens
acattcctcctttggagctgcttgca

SEQ ID NO: 75297 - DNA, 26 bp, Homo sapiens
cattcctcctttggagctgcttgcat

SEQ ID NO: 75298 - DNA, 26 bp, Homo sapiens
attcctcctttggagctgcttgcata

SEQ ID NO: 75299 - DNA, 26 bp, Homo sapiens
ttcctcctttggagctgcttgcatat

SEQ ID NO: 75300 - DNA, 26 bp, Homo sapiens
tcctcctttggagctgcttgcatatg

SEQ ID NO: 75301 - DNA, 26 bp, Homo sapiens
cctcctttggagctgcttgcatatgg

SEQ ID NO: 75302 - DNA, 26 bp, Homo sapiens
ctcctttggagctgcttgcatatgga

SEQ ID NO: 75303 - DNA, 26 bp, Homo sapiens
tcctttggagctgcttgcatatggac

SEQ ID NO: 75304 - DNA, 26 bp, Homo sapiens
cctttggagctgcttgcatatggact

SEQ ID NO: 75305 - DNA, 26 bp, Homo sapiens
ctttggagctgcttgcatatggacta

SEQ ID NO: 75306 - DNA, 26 bp, Homo sapiens
tttggagctgcttgcatatggactat

SEQ ID NO: 75307 - DNA, 26 bp, Homo sapiens
ttggagctgcttgcatatggactatc

SEQ ID NO: 75308 - DNA, 26 bp, Homo sapiens
tggagctgcttgcatatggactatcc

SEQ ID NO: 75309 - DNA, 26 bp, Homo sapiens
ggagctgcttgcatatggactatccc

SEQ ID NO: 75310 - DNA, 26 bp, Homo sapiens
gagctgcttgcatatggactatccca

SEQ ID NO: 75311 - DNA, 26 bp, Homo sapiens
agctgcttgcatatggactatcccag

SEQ ID NO: 75312 - DNA, 26 bp, Homo sapiens
gctgcttgcatatggactatcccaga

SEQ ID NO: 75313 - DNA, 26 bp, Homo sapiens
ctgcttgcatatggactatcccagaa

SEQ ID NO: 75314 - DNA, 26 bp, Homo sapiens
tgcttgcatatggactatcccagaaa

SEQ ID NO: 75315 - DNA, 26 bp, Homo sapiens
gcttgcatatggactatcccagaaac

SEQ ID NO: 75316 - DNA, 26 bp, Homo sapiens
cttgcatatggactatcccagaaact

SEQ ID NO: 75317 - DNA, 26 bp, Homo sapiens
ttgcatatggactatcccagaaactg

SEQ ID NO: 75318 - DNA, 26 bp, Homo sapiens
tgcatatggactatcccagaaactgc

SEQ ID NO: 75319 - DNA, 26 bp, Homo sapiens
gcatatggactatcccagaaactgcc

SEQ ID NO: 75320 - DNA, 26 bp, Homo sapiens
catatggactatcccagaaactgcct

SEQ ID NO: 75321 - DNA, 26 bp, Homo sapiens
atatggactatcccagaaactgcctt

SEQ ID NO: 75322 - DNA, 26 bp, Homo sapiens
tatggactatcccagaaactgccttc

SEQ ID NO: 75323 - DNA, 26 bp, Homo sapiens
atggactatcccagaaactgccttca

SEQ ID NO: 75324 - DNA, 26 bp, Homo sapiens
tggactatcccagaaactgccttcat

SEQ ID NO: 75325 - DNA, 26 bp, Homo sapiens
ggactatcccagaaactgccttcatg

SEQ ID NO: 75326 - DNA, 26 bp, Homo sapiens
gactatcccagaaactgccttcatgg

SEQ ID NO: 75327 - DNA, 26 bp, Homo sapiens
actatcccagaaactgccttcatggc

SEQ ID NO: 75328 - DNA, 26 bp, Homo sapiens
ctatcccagaaactgccttcatggct

SEQ ID NO: 75329 - DNA, 26 bp, Homo sapiens
tatcccagaaactgccttcatggctg

SEQ ID NO: 75330 - DNA, 26 bp, Homo sapiens
atcccagaaactgccttcatggctgt

SEQ ID NO: 75331 - DNA, 26 bp, Homo sapiens
tcccagaaactgccttcatggctgtt

SEQ ID NO: 75332 - DNA, 26 bp, Homo sapiens
cccagaaactgccttcatggctgttt

SEQ ID NO: 75333 - DNA, 26 bp, Homo sapiens
ccagaaactgccttcatggctgtttc

SEQ ID NO: 75334 - DNA, 26 bp, Homo sapiens
cagaaactgccttcatggctgtttct

SEQ ID NO: 75335 - DNA, 26 bp, Homo sapiens
agaaactgccttcatggctgtttctg

SEQ ID NO: 75336 - DNA, 26 bp, Homo sapiens
gaaactgccttcatggctgtttctgt

SEQ ID NO: 75337 - DNA, 26 bp, Homo sapiens
aaactgccttcatggctgtttctgtg

SEQ ID NO: 75338 - DNA, 26 bp, Homo sapiens
aactgccttcatggctgtttctgtgt

SEQ ID NO: 75339 - DNA, 26 bp, Homo sapiens
actgccttcatggctgtttctgtgtc

SEQ ID NO: 75340 - DNA, 26 bp, Homo sapiens
ctgccttcatggctgtttctgtgtct

SEQ ID NO: 75341 - DNA, 26 bp, Homo sapiens
tgccttcatggctgtttctgtgtcta

SEQ ID NO: 75342 - DNA, 26 bp, Homo sapiens
gccttcatggctgtttctgtgtctat

SEQ ID NO: 75343 - DNA, 26 bp, Homo sapiens
ccttcatggctgtttctgtgtctatg

SEQ ID NO: 75344 - DNA, 26 bp, Homo sapiens
cttcatggctgtttctgtgtctatga

SEQ ID NO: 75345 - DNA, 26 bp, Homo sapiens
ttcatggctgtttctgtgtctatgag

SEQ ID NO: 75346 - DNA, 26 bp, Homo sapiens
tcatggctgtttctgtgtctatgagg

SEQ ID NO: 75347 - DNA, 26 bp, Homo sapiens
catggctgtttctgtgtctatgaggc

SEQ ID NO: 75348 - DNA, 26 bp, Homo sapiens
atggctgtttctgtgtctatgaggcc

SEQ ID NO: 75349 - DNA, 26 bp, Homo sapiens
tggctgtttctgtgtctatgaggcca

SEQ ID NO: 75350 - DNA, 26 bp, Homo sapiens
ggctgtttctgtgtctatgaggccaa

SEQ ID NO: 75351 - DNA, 26 bp, Homo sapiens
gctgtttctgtgtctatgaggccaag

SEQ ID NO: 75352 - DNA, 26 bp, Homo sapiens
ctgtttctgtgtctatgaggccaaga

SEQ ID NO: 75353 - DNA, 26 bp, Homo sapiens
tgtttctgtgtctatgaggccaagaa

SEQ ID NO: 75354 - DNA, 26 bp, Homo sapiens
gtttctgtgtctatgaggccaagaac

SEQ ID NO: 75355 - DNA, 26 bp, Homo sapiens
tttctgtgtctatgaggccaagaaca

SEQ ID NO: 75356 - DNA, 26 bp, Homo sapiens
ttctgtgtctatgaggccaagaacac

SEQ ID NO: 75357 - DNA, 26 bp, Homo sapiens
tctgtgtctatgaggccaagaacaca

SEQ ID NO: 75358 - DNA, 26 bp, Homo sapiens
ctgtgtctatgaggccaagaacacag

SEQ ID NO: 75359 - DNA, 26 bp, Homo sapiens
tgtgtctatgaggccaagaacacaga

SEQ ID NO: 75360 - DNA, 26 bp, Homo sapiens
gtgtctatgaggccaagaacacagag

SEQ ID NO: 75361 - DNA, 26 bp, Homo sapiens
tgtctatgaggccaagaacacagaga

SEQ ID NO: 75362 - DNA, 26 bp, Homo sapiens
gtctatgaggccaagaacacagagag

SEQ ID NO: 75363 - DNA, 26 bp, Homo sapiens
tctatgaggccaagaacacagagagt

SEQ ID NO: 75364 - DNA, 26 bp, Homo sapiens
ctatgaggccaagaacacagagagtg

SEQ ID NO: 75365 - DNA, 26 bp, Homo sapiens
tatgaggccaagaacacagagagtga

SEQ ID NO: 75366 - DNA, 26 bp, Homo sapiens
atgaggccaagaacacagagagtgat

SEQ ID NO: 75367 - DNA, 26 bp, Homo sapiens
tgaggccaagaacacagagagtgatt

SEQ ID NO: 75368 - DNA, 26 bp, Homo sapiens
gaggccaagaacacagagagtgattg

SEQ ID NO: 75369 - DNA, 26 bp, Homo sapiens
aggccaagaacacagagagtgattga

SEQ ID NO: 75370 - DNA, 26 bp, Homo sapiens
ggccaagaacacagagagtgattgat

SEQ ID NO: 75371 - DNA, 26 bp, Homo sapiens
gccaagaacacagagagtgattgata

SEQ ID NO: 75372 - DNA, 26 bp, Homo sapiens
ccaagaacacagagagtgattgatac

SEQ ID NO: 75373 - DNA, 26 bp, Homo sapiens
caagaacacagagagtgattgataca

SEQ ID NO: 75374 - DNA, 26 bp, Homo sapiens
aagaacacagagagtgattgatacat

SEQ ID NO: 75375 - DNA, 26 bp, Homo sapiens
agaacacagagagtgattgatacatt

SEQ ID NO: 75376 - DNA, 26 bp, Homo sapiens
gaacacagagagtgattgatacattg

SEQ ID NO: 75377 - DNA, 26 bp, Homo sapiens
aacacagagagtgattgatacattga

SEQ ID NO: 75378 - DNA, 26 bp, Homo sapiens
acacagagagtgattgatacattgac

SEQ ID NO: 75379 - DNA, 26 bp, Homo sapiens
cacagagagtgattgatacattgacc

SEQ ID NO: 75380 - DNA, 26 bp, Homo sapiens
acagagagtgattgatacattgaccc

SEQ ID NO: 75381 - DNA, 26 bp, Homo sapiens
cagagagtgattgatacattgaccct

SEQ ID NO: 75382 - DNA, 26 bp, Homo sapiens
agagagtgattgatacattgaccctg

SEQ ID NO: 75383 - DNA, 26 bp, Homo sapiens
gagagtgattgatacattgaccctgg

SEQ ID NO: 75384 - DNA, 26 bp, Homo sapiens
agagtgattgatacattgaccctgga

SEQ ID NO: 75385 - DNA, 26 bp, Homo sapiens
gagtgattgatacattgaccctggac

SEQ ID NO: 75386 - DNA, 26 bp, Homo sapiens
agtgattgatacattgaccctggaca

SEQ ID NO: 75387 - DNA, 26 bp, Homo sapiens
gtgattgatacattgaccctggacac

SEQ ID NO: 75388 - DNA, 26 bp, Homo sapiens
tgattgatacattgaccctggacact

SEQ ID NO: 75389 - DNA, 26 bp, Homo sapiens
gattgatacattgaccctggacactg

SEQ ID NO: 75390 - DNA, 26 bp, Homo sapiens
attgatacattgaccctggacactga

SEQ ID NO: 75391 - DNA, 26 bp, Homo sapiens
ttgatacattgaccctggacactgaa

SEQ ID NO: 75392 - DNA, 26 bp, Homo sapiens
tgatacattgaccctggacactgaat

SEQ ID NO: 75393 - DNA, 26 bp, Homo sapiens
gatacattgaccctggacactgaata

SEQ ID NO: 75394 - DNA, 26 bp, Homo sapiens
atacattgaccctggacactgaatat

SEQ ID NO: 75395 - DNA, 26 bp, Homo sapiens
tacattgaccctggacactgaatatt

SEQ ID NO: 75396 - DNA, 26 bp, Homo sapiens
acattgaccctggacactgaatattc

SEQ ID NO: 75397 - DNA, 26 bp, Homo sapiens
cattgaccctggacactgaatattcc

SEQ ID NO: 75398 - DNA, 26 bp, Homo sapiens
attgaccctggacactgaatattcct

SEQ ID NO: 75399 - DNA, 26 bp, Homo sapiens
ttgaccctggacactgaatattcctt

SEQ ID NO: 75400 - DNA, 26 bp, Homo sapiens
tgaccctggacactgaatattccttt

SEQ ID NO: 75401 - DNA, 26 bp, Homo sapiens
gaccctggacactgaatattcctttc

SEQ ID NO: 75402 - DNA, 26 bp, Homo sapiens
accctggacactgaatattcctttct

SEQ ID NO: 75403 - DNA, 26 bp, Homo sapiens
ccctggacactgaatattcctttctg

SEQ ID NO: 75404 - DNA, 26 bp, Homo sapiens
cctggacactgaatattcctttctga

SEQ ID NO: 75405 - DNA, 26 bp, Homo sapiens
ctggacactgaatattcctttctgat

SEQ ID NO: 75406 - DNA, 26 bp, Homo sapiens
tggacactgaatattcctttctgatg

SEQ ID NO: 75407 - DNA, 26 bp, Homo sapiens
ggacactgaatattcctttctgatgg

SEQ ID NO: 75408 - DNA, 26 bp, Homo sapiens
gacactgaatattcctttctgatgga

SEQ ID NO: 75409 - DNA, 26 bp, Homo sapiens
acactgaatattcctttctgatggag

SEQ ID NO: 75410 - DNA, 26 bp, Homo sapiens
cactgaatattcctttctgatggagg

SEQ ID NO: 75411 - DNA, 26 bp, Homo sapiens
actgaatattcctttctgatggagga

SEQ ID NO: 75412 - DNA, 26 bp, Homo sapiens
ctgaatattcctttctgatggaggag

SEQ ID NO: 75413 - DNA, 26 bp, Homo sapiens
tgaatattcctttctgatggaggaga

SEQ ID NO: 75414 - DNA, 26 bp, Homo sapiens
gaatattcctttctgatggaggagaa

SEQ ID NO: 75415 - DNA, 26 bp, Homo sapiens
aatattcctttctgatggaggagaag

SEQ ID NO: 75416 - DNA, 26 bp, Homo sapiens
atattcctttctgatggaggagaaga

SEQ ID NO: 75417 - DNA, 26 bp, Homo sapiens
tattcctttctgatggaggagaagaa

SEQ ID NO: 75418 - DNA, 26 bp, Homo sapiens
attcctttctgatggaggagaagaac

SEQ ID NO: 75419 - DNA, 26 bp, Homo sapiens
ttcctttctgatggaggagaagaacc

SEQ ID NO: 75420 - DNA, 26 bp, Homo sapiens
tcctttctgatggaggagaagaaccc

SEQ ID NO: 75421 - DNA, 26 bp, Homo sapiens
cctttctgatggaggagaagaaccca

SEQ ID NO: 75422 - DNA, 26 bp, Homo sapiens
ctttctgatggaggagaagaacccat

SEQ ID NO: 75423 - DNA, 26 bp, Homo sapiens
tttctgatggaggagaagaacccatc

SEQ ID NO: 75424 - DNA, 26 bp, Homo sapiens
ttctgatggaggagaagaacccatcc

SEQ ID NO: 75425 - DNA, 26 bp, Homo sapiens
tctgatggaggagaagaacccatcca

SEQ ID NO: 75426 - DNA, 26 bp, Homo sapiens
ctgatggaggagaagaacccatccaa

SEQ ID NO: 75427 - DNA, 26 bp, Homo sapiens
tgatggaggagaagaacccatccaaa

SEQ ID NO: 75428 - DNA, 26 bp, Homo sapiens
gatggaggagaagaacccatccaaag

SEQ ID NO: 75429 - DNA, 26 bp, Homo sapiens
atggaggagaagaacccatccaaagc

SEQ ID NO: 75430 - DNA, 26 bp, Homo sapiens
tggaggagaagaacccatccaaagca

SEQ ID NO: 75431 - DNA, 26 bp, Homo sapiens
ggaggagaagaacccatccaaagcaa

SEQ ID NO: 75432 - DNA, 26 bp, Homo sapiens
gaggagaagaacccatccaaagcaaa

SEQ ID NO: 75433 - DNA, 26 bp, Homo sapiens
aggagaagaacccatccaaagcaaac

SEQ ID NO: 75434 - DNA, 26 bp, Homo sapiens
ggagaagaacccatccaaagcaaact

SEQ ID NO: 75435 - DNA, 26 bp, Homo sapiens
gagaagaacccatccaaagcaaactt

SEQ ID NO: 75436 - DNA, 26 bp, Homo sapiens
agaagaacccatccaaagcaaacttg

SEQ ID NO: 75437 - DNA, 26 bp, Homo sapiens
gaagaacccatccaaagcaaacttgc

SEQ ID NO: 75438 - DNA, 26 bp, Homo sapiens
aagaacccatccaaagcaaacttgct

SEQ ID NO: 75439 - DNA, 26 bp, Homo sapiens
agaacccatccaaagcaaacttgctt

SEQ ID NO: 75440 - DNA, 26 bp, Homo sapiens
gaacccatccaaagcaaacttgcttg

SEQ ID NO: 75441 - DNA, 26 bp, Homo sapiens
aacccatccaaagcaaacttgcttgc

SEQ ID NO: 75442 - DNA, 26 bp, Homo sapiens
acccatccaaagcaaacttgcttgca

SEQ ID NO: 75443 - DNA, 26 bp, Homo sapiens
cccatccaaagcaaacttgcttgcag

SEQ ID NO: 75444 - DNA, 26 bp, Homo sapiens
ccatccaaagcaaacttgcttgcaga

SEQ ID NO: 75445 - DNA, 26 bp, Homo sapiens
catccaaagcaaacttgcttgcagaa

SEQ ID NO: 75446 - DNA, 26 bp, Homo sapiens
atccaaagcaaacttgcttgcagaat

SEQ ID NO: 75447 - DNA, 26 bp, Homo sapiens
tccaaagcaaacttgcttgcagaata

SEQ ID NO: 75448 - DNA, 26 bp, Homo sapiens
ccaaagcaaacttgcttgcagaatag

SEQ ID NO: 75449 - DNA, 26 bp, Homo sapiens
caaagcaaacttgcttgcagaatagg

SEQ ID NO: 75450 - DNA, 26 bp, Homo sapiens
aaagcaaacttgcttgcagaataggc

SEQ ID NO: 75451 - DNA, 26 bp, Homo sapiens
aagcaaacttgcttgcagaataggca

SEQ ID NO: 75452 - DNA, 26 bp, Homo sapiens
agcaaacttgcttgcagaataggcag

SEQ ID NO: 75453 - DNA, 26 bp, Homo sapiens
gcaaacttgcttgcagaataggcagc

SEQ ID NO: 75454 - DNA, 26 bp, Homo sapiens
caaacttgcttgcagaataggcagca

SEQ ID NO: 75455 - DNA, 26 bp, Homo sapiens
aaacttgcttgcagaataggcagcaa

SEQ ID NO: 75456 - DNA, 26 bp, Homo sapiens
aacttgcttgcagaataggcagcaac

SEQ ID NO: 75457 - DNA, 26 bp, Homo sapiens
acttgcttgcagaataggcagcaacc

SEQ ID NO: 75458 - DNA, 26 bp, Homo sapiens
cttgcttgcagaataggcagcaacca

SEQ ID NO: 75459 - DNA, 26 bp, Homo sapiens
ttgcttgcagaataggcagcaaccat

SEQ ID NO: 75460 - DNA, 26 bp, Homo sapiens
tgcttgcagaataggcagcaaccatt

SEQ ID NO: 75461 - DNA, 26 bp, Homo sapiens
gcttgcagaataggcagcaaccattg

SEQ ID NO: 75462 - DNA, 26 bp, Homo sapiens
cttgcagaataggcagcaaccattgg

SEQ ID NO: 75463 - DNA, 26 bp, Homo sapiens
ttgcagaataggcagcaaccattgga

SEQ ID NO: 75464 - DNA, 26 bp, Homo sapiens
tgcagaataggcagcaaccattggat

SEQ ID NO: 75465 - DNA, 26 bp, Homo sapiens
gcagaataggcagcaaccattggata

SEQ ID NO: 75466 - DNA, 26 bp, Homo sapiens
cagaataggcagcaaccattggataa

SEQ ID NO: 75467 - DNA, 26 bp, Homo sapiens
agaataggcagcaaccattggataag

SEQ ID NO: 75468 - DNA, 26 bp, Homo sapiens
gaataggcagcaaccattggataagc

SEQ ID NO: 75469 - DNA, 26 bp, Homo sapiens
aataggcagcaaccattggataagcc

SEQ ID NO: 75470 - DNA, 26 bp, Homo sapiens
ataggcagcaaccattggataagcca

SEQ ID NO: 75471 - DNA, 26 bp, Homo sapiens
taggcagcaaccattggataagccac

SEQ ID NO: 75472 - DNA, 26 bp, Homo sapiens
aggcagcaaccattggataagccact

SEQ ID NO: 75473 - DNA, 26 bp, Homo sapiens
ggcagcaaccattggataagccactt

SEQ ID NO: 75474 - DNA, 26 bp, Homo sapiens
gcagcaaccattggataagccacttt

SEQ ID NO: 75475 - DNA, 26 bp, Homo sapiens
cagcaaccattggataagccactttc

SEQ ID NO: 75476 - DNA, 26 bp, Homo sapiens
agcaaccattggataagccactttcc

SEQ ID NO: 75477 - DNA, 26 bp, Homo sapiens
gcaaccattggataagccactttccc

SEQ ID NO: 75478 - DNA, 26 bp, Homo sapiens
caaccattggataagccactttccca

SEQ ID NO: 75479 - DNA, 26 bp, Homo sapiens
aaccattggataagccactttcccag

SEQ ID NO: 75480 - DNA, 26 bp, Homo sapiens
accattggataagccactttcccagc

SEQ ID NO: 75481 - DNA, 26 bp, Homo sapiens
ccattggataagccactttcccagcc

SEQ ID NO: 75482 - DNA, 26 bp, Homo sapiens
cattggataagccactttcccagcca

SEQ ID NO: 75483 - DNA, 26 bp, Homo sapiens
attggataagccactttcccagccag

SEQ ID NO: 75484 - DNA, 26 bp, Homo sapiens
ttggataagccactttcccagccaga

SEQ ID NO: 75485 - DNA, 26 bp, Homo sapiens
tggataagccactttcccagccagag

SEQ ID NO: 75486 - DNA, 26 bp, Homo sapiens
ggataagccactttcccagccagaga

SEQ ID NO: 75487 - DNA, 26 bp, Homo sapiens
gataagccactttcccagccagagag

SEQ ID NO: 75488 - DNA, 26 bp, Homo sapiens
ataagccactttcccagccagagagg

SEQ ID NO: 75489 - DNA, 26 bp, Homo sapiens
taagccactttcccagccagagagga

SEQ ID NO: 75490 - DNA, 26 bp, Homo sapiens
aagccactttcccagccagagaggag

SEQ ID NO: 75491 - DNA, 26 bp, Homo sapiens
agccactttcccagccagagaggaga

SEQ ID NO: 75492 - DNA, 26 bp, Homo sapiens
gccactttcccagccagagaggagac

SEQ ID NO: 75493 - DNA, 26 bp, Homo sapiens
ccactttcccagccagagaggagacg

SEQ ID NO: 75494 - DNA, 26 bp, Homo sapiens
cactttcccagccagagaggagacga

SEQ ID NO: 75495 - DNA, 26 bp, Homo sapiens
actttcccagccagagaggagacgac

SEQ ID NO: 75496 - DNA, 26 bp, Homo sapiens
ctttcccagccagagaggagacgaca

SEQ ID NO: 75497 - DNA, 26 bp, Homo sapiens
tttcccagccagagaggagacgacaa

SEQ ID NO: 75498 - DNA, 26 bp, Homo sapiens
ttcccagccagagaggagacgacaac

SEQ ID NO: 75499 - DNA, 26 bp, Homo sapiens
tcccagccagagaggagacgacaaca

SEQ ID NO: 75500 - DNA, 26 bp, Homo sapiens
cccagccagagaggagacgacaacaa

SEQ ID NO: 75501 - DNA, 26 bp, Homo sapiens
ccagccagagaggagacgacaacaat

SEQ ID NO: 75502 - DNA, 26 bp, Homo sapiens
cagccagagaggagacgacaacaatg

SEQ ID NO: 75503 - DNA, 26 bp, Homo sapiens
agccagagaggagacgacaacaatgc

SEQ ID NO: 75504 - DNA, 26 bp, Homo sapiens
gccagagaggagacgacaacaatgct

SEQ ID NO: 75505 - DNA, 26 bp, Homo sapiens
ccagagaggagacgacaacaatgctt

SEQ ID NO: 75506 - DNA, 26 bp, Homo sapiens
cagagaggagacgacaacaatgcttc

SEQ ID NO: 75507 - DNA, 26 bp, Homo sapiens
agagaggagacgacaacaatgcttcc

SEQ ID NO: 75508 - DNA, 26 bp, Homo sapiens
gagaggagacgacaacaatgcttcca

SEQ ID NO: 75509 - DNA, 26 bp, Homo sapiens
agaggagacgacaacaatgcttccat

SEQ ID NO: 75510 - DNA, 26 bp, Homo sapiens
gaggagacgacaacaatgcttccatt

SEQ ID NO: 75511 - DNA, 26 bp, Homo sapiens
aggagacgacaacaatgcttccattg

SEQ ID NO: 75512 - DNA, 26 bp, Homo sapiens
ggagacgacaacaatgcttccattgc

SEQ ID NO: 75513 - DNA, 26 bp, Homo sapiens
gagacgacaacaatgcttccattgct

SEQ ID NO: 75514 - DNA, 26 bp, Homo sapiens
agacgacaacaatgcttccattgctc

SEQ ID NO: 75515 - DNA, 26 bp, Homo sapiens
gacgacaacaatgcttccattgctct

SEQ ID NO: 75516 - DNA, 26 bp, Homo sapiens
acgacaacaatgcttccattgctctg

SEQ ID NO: 75517 - DNA, 26 bp, Homo sapiens
cgacaacaatgcttccattgctctgc

SEQ ID NO: 75518 - DNA, 26 bp, Homo sapiens
gacaacaatgcttccattgctctgct

SEQ ID NO: 75519 - DNA, 26 bp, Homo sapiens
acaacaatgcttccattgctctgctt

SEQ ID NO: 75520 - DNA, 26 bp, Homo sapiens
caacaatgcttccattgctctgcttc

SEQ ID NO: 75521 - DNA, 26 bp, Homo sapiens
aacaatgcttccattgctctgcttca

SEQ ID NO: 75522 - DNA, 26 bp, Homo sapiens
acaatgcttccattgctctgcttcag

SEQ ID NO: 75523 - DNA, 26 bp, Homo sapiens
caatgcttccattgctctgcttcagc

SEQ ID NO: 75524 - DNA, 26 bp, Homo sapiens
aatgcttccattgctctgcttcagca

SEQ ID NO: 75525 - DNA, 26 bp, Homo sapiens
atgcttccattgctctgcttcagcat

SEQ ID NO: 75526 - DNA, 26 bp, Homo sapiens
tgcttccattgctctgcttcagcatg

SEQ ID NO: 75527 - DNA, 26 bp, Homo sapiens
gcttccattgctctgcttcagcatgg

SEQ ID NO: 75528 - DNA, 26 bp, Homo sapiens
cttccattgctctgcttcagcatggg

SEQ ID NO: 75529 - DNA, 26 bp, Homo sapiens
ttccattgctctgcttcagcatgggc

SEQ ID NO: 75530 - DNA, 26 bp, Homo sapiens
tccattgctctgcttcagcatgggca

SEQ ID NO: 75531 - DNA, 26 bp, Homo sapiens
ccattgctctgcttcagcatgggcaa

SEQ ID NO: 75532 - DNA, 26 bp, Homo sapiens
cattgctctgcttcagcatgggcaag

SEQ ID NO: 75533 - DNA, 26 bp, Homo sapiens
attgctctgcttcagcatgggcaagg

SEQ ID NO: 75534 - DNA, 26 bp, Homo sapiens
ttgctctgcttcagcatgggcaaggc

SEQ ID NO: 75535 - DNA, 26 bp, Homo sapiens
tgctctgcttcagcatgggcaaggca

SEQ ID NO: 75536 - DNA, 26 bp, Homo sapiens
gctctgcttcagcatgggcaaggcag

SEQ ID NO: 75537 - DNA, 26 bp, Homo sapiens
ctctgcttcagcatgggcaaggcagc

SEQ ID NO: 75538 - DNA, 26 bp, Homo sapiens
tctgcttcagcatgggcaaggcagct

SEQ ID NO: 75539 - DNA, 26 bp, Homo sapiens
ctgcttcagcatgggcaaggcagcta

SEQ ID NO: 75540 - DNA, 26 bp, Homo sapiens
tgcttcagcatgggcaaggcagctac

SEQ ID NO: 75541 - DNA, 26 bp, Homo sapiens
gcttcagcatgggcaaggcagctaca

SEQ ID NO: 75542 - DNA, 26 bp, Homo sapiens
cttcagcatgggcaaggcagctacag

SEQ ID NO: 75543 - DNA, 26 bp, Homo sapiens
ttcagcatgggcaaggcagctacagt

SEQ ID NO: 75544 - DNA, 26 bp, Homo sapiens
tcagcatgggcaaggcagctacagtc

SEQ ID NO: 75545 - DNA, 26 bp, Homo sapiens
cagcatgggcaaggcagctacagtca

SEQ ID NO: 75546 - DNA, 26 bp, Homo sapiens
agcatgggcaaggcagctacagtcag

SEQ ID NO: 75547 - DNA, 26 bp, Homo sapiens
gcatgggcaaggcagctacagtcagg

SEQ ID NO: 75548 - DNA, 26 bp, Homo sapiens
catgggcaaggcagctacagtcagga

SEQ ID NO: 75549 - DNA, 26 bp, Homo sapiens
atgggcaaggcagctacagtcaggac

SEQ ID NO: 75550 - DNA, 26 bp, Homo sapiens
tgggcaaggcagctacagtcaggacc

SEQ ID NO: 75551 - DNA, 26 bp, Homo sapiens
gggcaaggcagctacagtcaggacca

SEQ ID NO: 75552 - DNA, 26 bp, Homo sapiens
ggcaaggcagctacagtcaggaccac

SEQ ID NO: 75553 - DNA, 26 bp, Homo sapiens
gcaaggcagctacagtcaggaccacg

SEQ ID NO: 75554 - DNA, 26 bp, Homo sapiens
caaggcagctacagtcaggaccacgt

SEQ ID NO: 75555 - DNA, 26 bp, Homo sapiens
aaggcagctacagtcaggaccacgta

SEQ ID NO: 75556 - DNA, 26 bp, Homo sapiens
aggcagctacagtcaggaccacgtaa

SEQ ID NO: 75557 - DNA, 26 bp, Homo sapiens
ggcagctacagtcaggaccacgtaac

SEQ ID NO: 75558 - DNA, 26 bp, Homo sapiens
gcagctacagtcaggaccacgtaact

SEQ ID NO: 75559 - DNA, 26 bp, Homo sapiens
cagctacagtcaggaccacgtaactg

SEQ ID NO: 75560 - DNA, 26 bp, Homo sapiens
agctacagtcaggaccacgtaactga

SEQ ID NO: 75561 - DNA, 26 bp, Homo sapiens
gctacagtcaggaccacgtaactgag

SEQ ID NO: 75562 - DNA, 26 bp, Homo sapiens
ctacagtcaggaccacgtaactgagg

SEQ ID NO: 75563 - DNA, 26 bp, Homo sapiens
tacagtcaggaccacgtaactgagga

SEQ ID NO: 75564 - DNA, 26 bp, Homo sapiens
acagtcaggaccacgtaactgaggaa

SEQ ID NO: 75565 - DNA, 26 bp, Homo sapiens
cagtcaggaccacgtaactgaggaag

SEQ ID NO: 75566 - DNA, 26 bp, Homo sapiens
agtcaggaccacgtaactgaggaagt

SEQ ID NO: 75567 - DNA, 26 bp, Homo sapiens
gtcaggaccacgtaactgaggaagtt

SEQ ID NO: 75568 - DNA, 26 bp, Homo sapiens
tcaggaccacgtaactgaggaagttg

SEQ ID NO: 75569 - DNA, 26 bp, Homo sapiens
caggaccacgtaactgaggaagttga

SEQ ID NO: 75570 - DNA, 26 bp, Homo sapiens
aggaccacgtaactgaggaagttgac

SEQ ID NO: 75571 - DNA, 26 bp, Homo sapiens
ggaccacgtaactgaggaagttgact

SEQ ID NO: 75572 - DNA, 26 bp, Homo sapiens
gaccacgtaactgaggaagttgactt

SEQ ID NO: 75573 - DNA, 26 bp, Homo sapiens
accacgtaactgaggaagttgacttc

SEQ ID NO: 75574 - DNA, 26 bp, Homo sapiens
ccacgtaactgaggaagttgacttcc

SEQ ID NO: 75575 - DNA, 26 bp, Homo sapiens
cacgtaactgaggaagttgacttcca

SEQ ID NO: 75576 - DNA, 26 bp, Homo sapiens
acgtaactgaggaagttgacttccat

SEQ ID NO: 75577 - DNA, 26 bp, Homo sapiens
cgtaactgaggaagttgacttccatg

SEQ ID NO: 75578 - DNA, 26 bp, Homo sapiens
gtaactgaggaagttgacttccatgc

SEQ ID NO: 75579 - DNA, 26 bp, Homo sapiens
taactgaggaagttgacttccatgct

SEQ ID NO: 75580 - DNA, 26 bp, Homo sapiens
aactgaggaagttgacttccatgctt

SEQ ID NO: 75581 - DNA, 26 bp, Homo sapiens
actgaggaagttgacttccatgcttt

SEQ ID NO: 75582 - DNA, 26 bp, Homo sapiens
ctgaggaagttgacttccatgctttt

SEQ ID NO: 75583 - DNA, 26 bp, Homo sapiens
tgaggaagttgacttccatgcttttg

SEQ ID NO: 75584 - DNA, 26 bp, Homo sapiens
gaggaagttgacttccatgcttttgc

SEQ ID NO: 75585 - DNA, 26 bp, Homo sapiens
aggaagttgacttccatgcttttgcg

SEQ ID NO: 75586 - DNA, 26 bp, Homo sapiens
ggaagttgacttccatgcttttgcgc

SEQ ID NO: 75587 - DNA, 26 bp, Homo sapiens
gaagttgacttccatgcttttgcgca

SEQ ID NO: 75588 - DNA, 26 bp, Homo sapiens
aagttgacttccatgcttttgcgcac

SEQ ID NO: 75589 - DNA, 26 bp, Homo sapiens
agttgacttccatgcttttgcgcaca

SEQ ID NO: 75590 - DNA, 26 bp, Homo sapiens
gttgacttccatgcttttgcgcacat

SEQ ID NO: 75591 - DNA, 26 bp, Homo sapiens
ttgacttccatgcttttgcgcacatg

SEQ ID NO: 75592 - DNA, 26 bp, Homo sapiens
tgacttccatgcttttgcgcacatgg

SEQ ID NO: 75593 - DNA, 26 bp, Homo sapiens
gacttccatgcttttgcgcacatggt

SEQ ID NO: 75594 - DNA, 26 bp, Homo sapiens
acttccatgcttttgcgcacatggtg

SEQ ID NO: 75595 - DNA, 26 bp, Homo sapiens
cttccatgcttttgcgcacatggtga

SEQ ID NO: 75596 - DNA, 26 bp, Homo sapiens
ttccatgcttttgcgcacatggtgaa

SEQ ID NO: 75597 - DNA, 26 bp, Homo sapiens
tccatgcttttgcgcacatggtgaat

SEQ ID NO: 75598 - DNA, 26 bp, Homo sapiens
ccatgcttttgcgcacatggtgaata

SEQ ID NO: 75599 - DNA, 26 bp, Homo sapiens
catgcttttgcgcacatggtgaatat

SEQ ID NO: 75600 - DNA, 26 bp, Homo sapiens
atgcttttgcgcacatggtgaatatc

SEQ ID NO: 75601 - DNA, 26 bp, Homo sapiens
tgcttttgcgcacatggtgaatatca

SEQ ID NO: 75602 - DNA, 26 bp, Homo sapiens
gcttttgcgcacatggtgaatatcat

SEQ ID NO: 75603 - DNA, 26 bp, Homo sapiens
cttttgcgcacatggtgaatatcatc

SEQ ID NO: 75604 - DNA, 26 bp, Homo sapiens
ttttgcgcacatggtgaatatcatca

SEQ ID NO: 75605 - DNA, 26 bp, Homo sapiens
tttgcgcacatggtgaatatcatcat

SEQ ID NO: 75606 - DNA, 26 bp, Homo sapiens
ttgcgcacatggtgaatatcatcatg

SEQ ID NO: 75607 - DNA, 26 bp, Homo sapiens
tgcgcacatggtgaatatcatcatga

SEQ ID NO: 75608 - DNA, 26 bp, Homo sapiens
gcgcacatggtgaatatcatcatgaa

SEQ ID NO: 75609 - DNA, 26 bp, Homo sapiens
cgcacatggtgaatatcatcatgaaa

SEQ ID NO: 75610 - DNA, 26 bp, Homo sapiens
gcacatggtgaatatcatcatgaaaa

SEQ ID NO: 75611 - DNA, 26 bp, Homo sapiens
cacatggtgaatatcatcatgaaaaa

SEQ ID NO: 75612 - DNA, 26 bp, Homo sapiens
acatggtgaatatcatcatgaaaaag

SEQ ID NO: 75613 - DNA, 26 bp, Homo sapiens
catggtgaatatcatcatgaaaaaga

SEQ ID NO: 75614 - DNA, 26 bp, Homo sapiens
atggtgaatatcatcatgaaaaagat

SEQ ID NO: 75615 - DNA, 26 bp, Homo sapiens
tggtgaatatcatcatgaaaaagatt

SEQ ID NO: 75616 - DNA, 26 bp, Homo sapiens
ggtgaatatcatcatgaaaaagattc

SEQ ID NO: 75617 - DNA, 26 bp, Homo sapiens
gtgaatatcatcatgaaaaagattca

SEQ ID NO: 75618 - DNA, 26 bp, Homo sapiens
tgaatatcatcatgaaaaagattcaa

SEQ ID NO: 75619 - DNA, 26 bp, Homo sapiens
gaatatcatcatgaaaaagattcaaa

SEQ ID NO: 75620 - DNA, 26 bp, Homo sapiens
aatatcatcatgaaaaagattcaaag

SEQ ID NO: 75621 - DNA, 26 bp, Homo sapiens
atatcatcatgaaaaagattcaaaga

SEQ ID NO: 75622 - DNA, 26 bp, Homo sapiens
tatcatcatgaaaaagattcaaagaa

SEQ ID NO: 75623 - DNA, 26 bp, Homo sapiens
atcatcatgaaaaagattcaaagaag

SEQ ID NO: 75624 - DNA, 26 bp, Homo sapiens
tcatcatgaaaaagattcaaagaagt

SEQ ID NO: 75625 - DNA, 26 bp, Homo sapiens
catcatgaaaaagattcaaagaagtg

SEQ ID NO: 75626 - DNA, 26 bp, Homo sapiens
atcatgaaaaagattcaaagaagtgt

SEQ ID NO: 75627 - DNA, 26 bp, Homo sapiens
tcatgaaaaagattcaaagaagtgtt

SEQ ID NO: 75628 - DNA, 26 bp, Homo sapiens
catgaaaaagattcaaagaagtgttg

SEQ ID NO: 75629 - DNA, 26 bp, Homo sapiens
atgaaaaagattcaaagaagtgttgg

SEQ ID NO: 75630 - DNA, 26 bp, Homo sapiens
tgaaaaagattcaaagaagtgttggt

SEQ ID NO: 75631 - DNA, 26 bp, Homo sapiens
gaaaaagattcaaagaagtgttggtg

SEQ ID NO: 75632 - DNA, 26 bp, Homo sapiens
aaaaagattcaaagaagtgttggtga

SEQ ID NO: 75633 - DNA, 26 bp, Homo sapiens
aaaagattcaaagaagtgttggtgat

SEQ ID NO: 75634 - DNA, 26 bp, Homo sapiens
aaagattcaaagaagtgttggtgatg

SEQ ID NO: 75635 - DNA, 26 bp, Homo sapiens
aagattcaaagaagtgttggtgatgt

SEQ ID NO: 75636 - DNA, 26 bp, Homo sapiens
agattcaaagaagtgttggtgatgtg

SEQ ID NO: 75637 - DNA, 26 bp, Homo sapiens
gattcaaagaagtgttggtgatgtgg

SEQ ID NO: 75638 - DNA, 26 bp, Homo sapiens
attcaaagaagtgttggtgatgtggt

SEQ ID NO: 75639 - DNA, 26 bp, Homo sapiens
ttcaaagaagtgttggtgatgtggtt

SEQ ID NO: 75640 - DNA, 26 bp, Homo sapiens
tcaaagaagtgttggtgatgtggttg

SEQ ID NO: 75641 - DNA, 26 bp, Homo sapiens
caaagaagtgttggtgatgtggttga

SEQ ID NO: 75642 - DNA, 26 bp, Homo sapiens
aaagaagtgttggtgatgtggttgag

SEQ ID NO: 75643 - DNA, 26 bp, Homo sapiens
aagaagtgttggtgatgtggttgaga

SEQ ID NO: 75644 - DNA, 26 bp, Homo sapiens
agaagtgttggtgatgtggttgagaa

SEQ ID NO: 75645 - DNA, 26 bp, Homo sapiens
gaagtgttggtgatgtggttgagaat

SEQ ID NO: 75646 - DNA, 26 bp, Homo sapiens
aagtgttggtgatgtggttgagaatg

SEQ ID NO: 75647 - DNA, 26 bp, Homo sapiens
agtgttggtgatgtggttgagaatga

SEQ ID NO: 75648 - DNA, 26 bp, Homo sapiens
gtgttggtgatgtggttgagaatgag

SEQ ID NO: 75649 - DNA, 26 bp, Homo sapiens
tgttggtgatgtggttgagaatgagc

SEQ ID NO: 75650 - DNA, 26 bp, Homo sapiens
gttggtgatgtggttgagaatgagca

SEQ ID NO: 75651 - DNA, 26 bp, Homo sapiens
ttggtgatgtggttgagaatgagcat

SEQ ID NO: 75652 - DNA, 26 bp, Homo sapiens
tggtgatgtggttgagaatgagcatg

SEQ ID NO: 75653 - DNA, 26 bp, Homo sapiens
ggtgatgtggttgagaatgagcatgt

SEQ ID NO: 75654 - DNA, 26 bp, Homo sapiens
gtgatgtggttgagaatgagcatgtc

SEQ ID NO: 75655 - DNA, 26 bp, Homo sapiens
tgatgtggttgagaatgagcatgtct

SEQ ID NO: 75656 - DNA, 26 bp, Homo sapiens
gatgtggttgagaatgagcatgtcta

SEQ ID NO: 75657 - DNA, 26 bp, Homo sapiens
atgtggttgagaatgagcatgtctag

SEQ ID NO: 75658 - DNA, 26 bp, Homo sapiens
tgtggttgagaatgagcatgtctagt

SEQ ID NO: 75659 - DNA, 26 bp, Homo sapiens
gtggttgagaatgagcatgtctagtc

SEQ ID NO: 75660 - DNA, 26 bp, Homo sapiens
tggttgagaatgagcatgtctagtcc

SEQ ID NO: 75661 - DNA, 26 bp, Homo sapiens
ggttgagaatgagcatgtctagtcct

SEQ ID NO: 75662 - DNA, 26 bp, Homo sapiens
gttgagaatgagcatgtctagtcctc

SEQ ID NO: 75663 - DNA, 26 bp, Homo sapiens
ttgagaatgagcatgtctagtcctcc

SEQ ID NO: 75664 - DNA, 26 bp, Homo sapiens
tgagaatgagcatgtctagtcctccc

SEQ ID NO: 75665 - DNA, 26 bp, Homo sapiens
gagaatgagcatgtctagtcctccca

SEQ ID NO: 75666 - DNA, 26 bp, Homo sapiens
agaatgagcatgtctagtcctcccat

SEQ ID NO: 75667 - DNA, 26 bp, Homo sapiens
gaatgagcatgtctagtcctcccatg

SEQ ID NO: 75668 - DNA, 26 bp, Homo sapiens
aatgagcatgtctagtcctcccatga

SEQ ID NO: 75669 - DNA, 26 bp, Homo sapiens
atgagcatgtctagtcctcccatgag

SEQ ID NO: 75670 - DNA, 26 bp, Homo sapiens
tgagcatgtctagtcctcccatgagc

SEQ ID NO: 75671 - DNA, 26 bp, Homo sapiens
gagcatgtctagtcctcccatgagct

SEQ ID NO: 75672 - DNA, 26 bp, Homo sapiens
agcatgtctagtcctcccatgagctt

SEQ ID NO: 75673 - DNA, 26 bp, Homo sapiens
gcatgtctagtcctcccatgagcttt

SEQ ID NO: 75674 - DNA, 26 bp, Homo sapiens
catgtctagtcctcccatgagctttc

SEQ ID NO: 75675 - DNA, 26 bp, Homo sapiens
atgtctagtcctcccatgagctttcc

SEQ ID NO: 75676 - DNA, 26 bp, Homo sapiens
tgtctagtcctcccatgagctttcct

SEQ ID NO: 75677 - DNA, 26 bp, Homo sapiens
gtctagtcctcccatgagctttcctg

SEQ ID NO: 75678 - DNA, 26 bp, Homo sapiens
tctagtcctcccatgagctttcctgc

SEQ ID NO: 75679 - DNA, 26 bp, Homo sapiens
ctagtcctcccatgagctttcctgct

SEQ ID NO: 75680 - DNA, 26 bp, Homo sapiens
tagtcctcccatgagctttcctgctt

SEQ ID NO: 75681 - DNA, 26 bp, Homo sapiens
agtcctcccatgagctttcctgcttg

SEQ ID NO: 75682 - DNA, 26 bp, Homo sapiens
gtcctcccatgagctttcctgcttgg

SEQ ID NO: 75683 - DNA, 26 bp, Homo sapiens
tcctcccatgagctttcctgcttggg

SEQ ID NO: 75684 - DNA, 26 bp, Homo sapiens
cctcccatgagctttcctgcttgggc

SEQ ID NO: 75685 - DNA, 26 bp, Homo sapiens
ctcccatgagctttcctgcttgggca

SEQ ID NO: 75686 - DNA, 26 bp, Homo sapiens
tcccatgagctttcctgcttgggcaa

SEQ ID NO: 75687 - DNA, 26 bp, Homo sapiens
cccatgagctttcctgcttgggcaac

SEQ ID NO: 75688 - DNA, 26 bp, Homo sapiens
ccatgagctttcctgcttgggcaaca

SEQ ID NO: 75689 - DNA, 26 bp, Homo sapiens
catgagctttcctgcttgggcaacaa

SEQ ID NO: 75690 - DNA, 26 bp, Homo sapiens
atgagctttcctgcttgggcaacaaa

SEQ ID NO: 75691 - DNA, 26 bp, Homo sapiens
tgagctttcctgcttgggcaacaaat

SEQ ID NO: 75692 - DNA, 26 bp, Homo sapiens
gagctttcctgcttgggcaacaaatt

SEQ ID NO: 75693 - DNA, 26 bp, Homo sapiens
agctttcctgcttgggcaacaaattg

SEQ ID NO: 75694 - DNA, 26 bp, Homo sapiens
gctttcctgcttgggcaacaaattgc

SEQ ID NO: 75695 - DNA, 26 bp, Homo sapiens
ctttcctgcttgggcaacaaattgct

SEQ ID NO: 75696 - DNA, 26 bp, Homo sapiens
tttcctgcttgggcaacaaattgctc

SEQ ID NO: 75697 - DNA, 26 bp, Homo sapiens
ttcctgcttgggcaacaaattgctct

SEQ ID NO: 75698 - DNA, 26 bp, Homo sapiens
tcctgcttgggcaacaaattgctctg

SEQ ID NO: 75699 - DNA, 26 bp, Homo sapiens
cctgcttgggcaacaaattgctctgc

SEQ ID NO: 75700 - DNA, 26 bp, Homo sapiens
ctgcttgggcaacaaattgctctgcg

SEQ ID NO: 75701 - DNA, 26 bp, Homo sapiens
tgcttgggcaacaaattgctctgcga

SEQ ID NO: 75702 - DNA, 26 bp, Homo sapiens
gcttgggcaacaaattgctctgcgaa

SEQ ID NO: 75703 - DNA, 26 bp, Homo sapiens
cttgggcaacaaattgctctgcgaag

SEQ ID NO: 75704 - DNA, 26 bp, Homo sapiens
ttgggcaacaaattgctctgcgaagg

SEQ ID NO: 75705 - DNA, 26 bp, Homo sapiens
tgggcaacaaattgctctgcgaaggt

SEQ ID NO: 75706 - DNA, 26 bp, Homo sapiens
gggcaacaaattgctctgcgaaggtc

SEQ ID NO: 75707 - DNA, 26 bp, Homo sapiens
ggcaacaaattgctctgcgaaggtca

SEQ ID NO: 75708 - DNA, 26 bp, Homo sapiens
gcaacaaattgctctgcgaaggtcat

SEQ ID NO: 75709 - DNA, 26 bp, Homo sapiens
caacaaattgctctgcgaaggtcatg

SEQ ID NO: 75710 - DNA, 26 bp, Homo sapiens
aacaaattgctctgcgaaggtcatgt

SEQ ID NO: 75711 - DNA, 26 bp, Homo sapiens
acaaattgctctgcgaaggtcatgtc

SEQ ID NO: 75712 - DNA, 26 bp, Homo sapiens
caaattgctctgcgaaggtcatgtct

SEQ ID NO: 75713 - DNA, 26 bp, Homo sapiens
aaattgctctgcgaaggtcatgtctt

SEQ ID NO: 75714 - DNA, 26 bp, Homo sapiens
aattgctctgcgaaggtcatgtcttc

SEQ ID NO: 75715 - DNA, 26 bp, Homo sapiens
attgctctgcgaaggtcatgtcttcc

SEQ ID NO: 75716 - DNA, 26 bp, Homo sapiens
ttgctctgcgaaggtcatgtcttcca

SEQ ID NO: 75717 - DNA, 26 bp, Homo sapiens
tgctctgcgaaggtcatgtcttccat

SEQ ID NO: 75718 - DNA, 26 bp, Homo sapiens
gctctgcgaaggtcatgtcttccatg

SEQ ID NO: 75719 - DNA, 26 bp, Homo sapiens
ctctgcgaaggtcatgtcttccatgg

SEQ ID NO: 75720 - DNA, 26 bp, Homo sapiens
tctgcgaaggtcatgtcttccatggt

SEQ ID NO: 75721 - DNA, 26 bp, Homo sapiens
ctgcgaaggtcatgtcttccatggtg

SEQ ID NO: 75722 - DNA, 26 bp, Homo sapiens
tgcgaaggtcatgtcttccatggtgc

SEQ ID NO: 75723 - DNA, 26 bp, Homo sapiens
gcgaaggtcatgtcttccatggtgcc

SEQ ID NO: 75724 - DNA, 26 bp, Homo sapiens
cgaaggtcatgtcttccatggtgcca

SEQ ID NO: 75725 - DNA, 26 bp, Homo sapiens
gaaggtcatgtcttccatggtgccag

SEQ ID NO: 75726 - DNA, 26 bp, Homo sapiens
aaggtcatgtcttccatggtgccagc

SEQ ID NO: 75727 - DNA, 26 bp, Homo sapiens
aggtcatgtcttccatggtgccagca

SEQ ID NO: 75728 - DNA, 26 bp, Homo sapiens
ggtcatgtcttccatggtgccagcaa

SEQ ID NO: 75729 - DNA, 26 bp, Homo sapiens
gtcatgtcttccatggtgccagcaat

SEQ ID NO: 75730 - DNA, 26 bp, Homo sapiens
tcatgtcttccatggtgccagcaatg

SEQ ID NO: 75731 - DNA, 26 bp, Homo sapiens
catgtcttccatggtgccagcaatgt

SEQ ID NO: 75732 - DNA, 26 bp, Homo sapiens
atgtcttccatggtgccagcaatgta

SEQ ID NO: 75733 - DNA, 26 bp, Homo sapiens
tgtcttccatggtgccagcaatgtag

SEQ ID NO: 75734 - DNA, 26 bp, Homo sapiens
gtcttccatggtgccagcaatgtagt

SEQ ID NO: 75735 - DNA, 26 bp, Homo sapiens
tcttccatggtgccagcaatgtagtg

SEQ ID NO: 75736 - DNA, 26 bp, Homo sapiens
cttccatggtgccagcaatgtagtgt

SEQ ID NO: 75737 - DNA, 26 bp, Homo sapiens
ttccatggtgccagcaatgtagtgtg

SEQ ID NO: 75738 - DNA, 26 bp, Homo sapiens
tccatggtgccagcaatgtagtgtgc

SEQ ID NO: 75739 - DNA, 26 bp, Homo sapiens
ccatggtgccagcaatgtagtgtgct

SEQ ID NO: 75740 - DNA, 26 bp, Homo sapiens
catggtgccagcaatgtagtgtgctg

SEQ ID NO: 75741 - DNA, 26 bp, Homo sapiens
atggtgccagcaatgtagtgtgctga

SEQ ID NO: 75742 - DNA, 26 bp, Homo sapiens
tggtgccagcaatgtagtgtgctgag

SEQ ID NO: 75743 - DNA, 26 bp, Homo sapiens
ggtgccagcaatgtagtgtgctgagg

SEQ ID NO: 75744 - DNA, 26 bp, Homo sapiens
gtgccagcaatgtagtgtgctgaggc

SEQ ID NO: 75745 - DNA, 26 bp, Homo sapiens
tgccagcaatgtagtgtgctgaggct

SEQ ID NO: 75746 - DNA, 26 bp, Homo sapiens
gccagcaatgtagtgtgctgaggctg

SEQ ID NO: 75747 - DNA, 26 bp, Homo sapiens
ccagcaatgtagtgtgctgaggctgc

SEQ ID NO: 75748 - DNA, 26 bp, Homo sapiens
cagcaatgtagtgtgctgaggctgct

SEQ ID NO: 75749 - DNA, 26 bp, Homo sapiens
agcaatgtagtgtgctgaggctgctc

SEQ ID NO: 75750 - DNA, 26 bp, Homo sapiens
gcaatgtagtgtgctgaggctgctcc

SEQ ID NO: 75751 - DNA, 26 bp, Homo sapiens
caatgtagtgtgctgaggctgctcca

SEQ ID NO: 75752 - DNA, 26 bp, Homo sapiens
aatgtagtgtgctgaggctgctccaa

SEQ ID NO: 75753 - DNA, 26 bp, Homo sapiens
atgtagtgtgctgaggctgctccaag

SEQ ID NO: 75754 - DNA, 26 bp, Homo sapiens
tgtagtgtgctgaggctgctccaagc

SEQ ID NO: 75755 - DNA, 26 bp, Homo sapiens
gtagtgtgctgaggctgctccaagct

SEQ ID NO: 75756 - DNA, 26 bp, Homo sapiens
tagtgtgctgaggctgctccaagctc

SEQ ID NO: 75757 - DNA, 26 bp, Homo sapiens
agtgtgctgaggctgctccaagctcc

SEQ ID NO: 75758 - DNA, 26 bp, Homo sapiens
gtgtgctgaggctgctccaagctcca

SEQ ID NO: 75759 - DNA, 26 bp, Homo sapiens
tgtgctgaggctgctccaagctccag

SEQ ID NO: 75760 - DNA, 26 bp, Homo sapiens
gtgctgaggctgctccaagctccagg

SEQ ID NO: 75761 - DNA, 26 bp, Homo sapiens
tgctgaggctgctccaagctccaggc

SEQ ID NO: 75762 - DNA, 26 bp, Homo sapiens
gctgaggctgctccaagctccaggca

SEQ ID NO: 75763 - DNA, 26 bp, Homo sapiens
ctgaggctgctccaagctccaggcag

SEQ ID NO: 75764 - DNA, 26 bp, Homo sapiens
tgaggctgctccaagctccaggcagt

SEQ ID NO: 75765 - DNA, 26 bp, Homo sapiens
gaggctgctccaagctccaggcagtg

SEQ ID NO: 75766 - DNA, 26 bp, Homo sapiens
aggctgctccaagctccaggcagtgg

SEQ ID NO: 75767 - DNA, 26 bp, Homo sapiens
ggctgctccaagctccaggcagtggg

SEQ ID NO: 75768 - DNA, 26 bp, Homo sapiens
gctgctccaagctccaggcagtggga

SEQ ID NO: 75769 - DNA, 26 bp, Homo sapiens
ctgctccaagctccaggcagtgggat

SEQ ID NO: 75770 - DNA, 26 bp, Homo sapiens
tgctccaagctccaggcagtgggata

SEQ ID NO: 75771 - DNA, 26 bp, Homo sapiens
gctccaagctccaggcagtgggatac

SEQ ID NO: 75772 - DNA, 26 bp, Homo sapiens
ctccaagctccaggcagtgggatacc

SEQ ID NO: 75773 - DNA, 26 bp, Homo sapiens
tccaagctccaggcagtgggatacca

SEQ ID NO: 75774 - DNA, 26 bp, Homo sapiens
ccaagctccaggcagtgggataccac

SEQ ID NO: 75775 - DNA, 26 bp, Homo sapiens
caagctccaggcagtgggataccacc

SEQ ID NO: 75776 - DNA, 26 bp, Homo sapiens
aagctccaggcagtgggataccacct

SEQ ID NO: 75777 - DNA, 26 bp, Homo sapiens
agctccaggcagtgggataccacctt

SEQ ID NO: 75778 - DNA, 26 bp, Homo sapiens
gctccaggcagtgggataccaccttc

SEQ ID NO: 75779 - DNA, 26 bp, Homo sapiens
ctccaggcagtgggataccaccttct

SEQ ID NO: 75780 - DNA, 26 bp, Homo sapiens
tccaggcagtgggataccaccttctg

SEQ ID NO: 75781 - DNA, 26 bp, Homo sapiens
ccaggcagtgggataccaccttctgt

SEQ ID NO: 75782 - DNA, 26 bp, Homo sapiens
caggcagtgggataccaccttctgta

SEQ ID NO: 75783 - DNA, 26 bp, Homo sapiens
aggcagtgggataccaccttctgtag

SEQ ID NO: 75784 - DNA, 26 bp, Homo sapiens
ggcagtgggataccaccttctgtaga

SEQ ID NO: 75785 - DNA, 26 bp, Homo sapiens
gcagtgggataccaccttctgtagag

SEQ ID NO: 75786 - DNA, 26 bp, Homo sapiens
cagtgggataccaccttctgtagagt

SEQ ID NO: 75787 - DNA, 26 bp, Homo sapiens
agtgggataccaccttctgtagagtt

SEQ ID NO: 75788 - DNA, 26 bp, Homo sapiens
gtgggataccaccttctgtagagttt

SEQ ID NO: 75789 - DNA, 26 bp, Homo sapiens
tgggataccaccttctgtagagtttc

SEQ ID NO: 75790 - DNA, 26 bp, Homo sapiens
gggataccaccttctgtagagtttct

SEQ ID NO: 75791 - DNA, 26 bp, Homo sapiens
ggataccaccttctgtagagtttctt

SEQ ID NO: 75792 - DNA, 26 bp, Homo sapiens
gataccaccttctgtagagtttcttt

SEQ ID NO: 75793 - DNA, 26 bp, Homo sapiens
ataccaccttctgtagagtttctttt

SEQ ID NO: 75794 - DNA, 26 bp, Homo sapiens
taccaccttctgtagagtttcttttg

SEQ ID NO: 75795 - DNA, 26 bp, Homo sapiens
accaccttctgtagagtttcttttga

SEQ ID NO: 75796 - DNA, 26 bp, Homo sapiens
ccaccttctgtagagtttcttttgac

SEQ ID NO: 75797 - DNA, 26 bp, Homo sapiens
caccttctgtagagtttcttttgacc

SEQ ID NO: 75798 - DNA, 26 bp, Homo sapiens
accttctgtagagtttcttttgacct

SEQ ID NO: 75799 - DNA, 26 bp, Homo sapiens
ccttctgtagagtttcttttgacctc

SEQ ID NO: 75800 - DNA, 26 bp, Homo sapiens
cttctgtagagtttcttttgacctcg

SEQ ID NO: 75801 - DNA, 26 bp, Homo sapiens
ttctgtagagtttcttttgacctcgc

SEQ ID NO: 75802 - DNA, 26 bp, Homo sapiens
tctgtagagtttcttttgacctcgct

SEQ ID NO: 75803 - DNA, 26 bp, Homo sapiens
ctgtagagtttcttttgacctcgctg

SEQ ID NO: 75804 - DNA, 26 bp, Homo sapiens
tgtagagtttcttttgacctcgctgt

SEQ ID NO: 75805 - DNA, 26 bp, Homo sapiens
gtagagtttcttttgacctcgctgtc

SEQ ID NO: 75806 - DNA, 26 bp, Homo sapiens
tagagtttcttttgacctcgctgtca

SEQ ID NO: 75807 - DNA, 26 bp, Homo sapiens
agagtttcttttgacctcgctgtcac

SEQ ID NO: 75808 - DNA, 26 bp, Homo sapiens
gagtttcttttgacctcgctgtcacc

SEQ ID NO: 75809 - DNA, 26 bp, Homo sapiens
agtttcttttgacctcgctgtcacca

SEQ ID NO: 75810 - DNA, 26 bp, Homo sapiens
gtttcttttgacctcgctgtcaccac

SEQ ID NO: 75811 - DNA, 26 bp, Homo sapiens
tttcttttgacctcgctgtcaccacc

SEQ ID NO: 75812 - DNA, 26 bp, Homo sapiens
ttcttttgacctcgctgtcaccacca

SEQ ID NO: 75813 - DNA, 26 bp, Homo sapiens
tcttttgacctcgctgtcaccaccac

SEQ ID NO: 75814 - DNA, 26 bp, Homo sapiens
cttttgacctcgctgtcaccaccaca

SEQ ID NO: 75815 - DNA, 26 bp, Homo sapiens
ttttgacctcgctgtcaccaccacat

SEQ ID NO: 75816 - DNA, 26 bp, Homo sapiens
tttgacctcgctgtcaccaccacatg

SEQ ID NO: 75817 - DNA, 26 bp, Homo sapiens
ttgacctcgctgtcaccaccacatgg

SEQ ID NO: 75818 - DNA, 26 bp, Homo sapiens
tgacctcgctgtcaccaccacatggg

SEQ ID NO: 75819 - DNA, 26 bp, Homo sapiens
gacctcgctgtcaccaccacatgggc

SEQ ID NO: 75820 - DNA, 26 bp, Homo sapiens
acctcgctgtcaccaccacatgggct

SEQ ID NO: 75821 - DNA, 26 bp, Homo sapiens
cctcgctgtcaccaccacatgggctc

SEQ ID NO: 75822 - DNA, 26 bp, Homo sapiens
ctcgctgtcaccaccacatgggctcc

SEQ ID NO: 75823 - DNA, 26 bp, Homo sapiens
tcgctgtcaccaccacatgggctccc

SEQ ID NO: 75824 - DNA, 26 bp, Homo sapiens
cgctgtcaccaccacatgggctccca

SEQ ID NO: 75825 - DNA, 26 bp, Homo sapiens
gctgtcaccaccacatgggctcccat

SEQ ID NO: 75826 - DNA, 26 bp, Homo sapiens
ctgtcaccaccacatgggctcccatc

SEQ ID NO: 75827 - DNA, 26 bp, Homo sapiens
tgtcaccaccacatgggctcccatct

SEQ ID NO: 75828 - DNA, 26 bp, Homo sapiens
gtcaccaccacatgggctcccatctt

SEQ ID NO: 75829 - DNA, 26 bp, Homo sapiens
tcaccaccacatgggctcccatcttc

SEQ ID NO: 75830 - DNA, 26 bp, Homo sapiens
caccaccacatgggctcccatcttcg

SEQ ID NO: 75831 - DNA, 26 bp, Homo sapiens
accaccacatgggctcccatcttcgc

SEQ ID NO: 75832 - DNA, 26 bp, Homo sapiens
ccaccacatgggctcccatcttcgcc

SEQ ID NO: 75833 - DNA, 26 bp, Homo sapiens
caccacatgggctcccatcttcgcca

SEQ ID NO: 75834 - DNA, 26 bp, Homo sapiens
accacatgggctcccatcttcgccag

SEQ ID NO: 75835 - DNA, 26 bp, Homo sapiens
ccacatgggctcccatcttcgccaga

SEQ ID NO: 75836 - DNA, 26 bp, Homo sapiens
cacatgggctcccatcttcgccagat

SEQ ID NO: 75837 - DNA, 26 bp, Homo sapiens
acatgggctcccatcttcgccagatg

SEQ ID NO: 75838 - DNA, 26 bp, Homo sapiens
catgggctcccatcttcgccagatga

SEQ ID NO: 75839 - DNA, 26 bp, Homo sapiens
atgggctcccatcttcgccagatgat

SEQ ID NO: 75840 - DNA, 26 bp, Homo sapiens
tgggctcccatcttcgccagatgata

SEQ ID NO: 75841 - DNA, 26 bp, Homo sapiens
gggctcccatcttcgccagatgataa

SEQ ID NO: 75842 - DNA, 26 bp, Homo sapiens
ggctcccatcttcgccagatgataag

SEQ ID NO: 75843 - DNA, 26 bp, Homo sapiens
gctcccatcttcgccagatgataagc

SEQ ID NO: 75844 - DNA, 26 bp, Homo sapiens
ctcccatcttcgccagatgataagcc

SEQ ID NO: 75845 - DNA, 26 bp, Homo sapiens
tcccatcttcgccagatgataagcca

SEQ ID NO: 75846 - DNA, 26 bp, Homo sapiens
cccatcttcgccagatgataagccat

SEQ ID NO: 75847 - DNA, 26 bp, Homo sapiens
ccatcttcgccagatgataagccatc

SEQ ID NO: 75848 - DNA, 26 bp, Homo sapiens
catcttcgccagatgataagccatct

SEQ ID NO: 75849 - DNA, 26 bp, Homo sapiens
atcttcgccagatgataagccatctc

SEQ ID NO: 75850 - DNA, 26 bp, Homo sapiens
tcttcgccagatgataagccatctct

SEQ ID NO: 75851 - DNA, 26 bp, Homo sapiens
cttcgccagatgataagccatctctc

SEQ ID NO: 75852 - DNA, 26 bp, Homo sapiens
ttcgccagatgataagccatctctct

SEQ ID NO: 75853 - DNA, 26 bp, Homo sapiens
tcgccagatgataagccatctctctt

SEQ ID NO: 75854 - DNA, 26 bp, Homo sapiens
cgccagatgataagccatctctcttc

SEQ ID NO: 75855 - DNA, 26 bp, Homo sapiens
gccagatgataagccatctctcttcc

SEQ ID NO: 75856 - DNA, 26 bp, Homo sapiens
ccagatgataagccatctctcttccg

SEQ ID NO: 75857 - DNA, 26 bp, Homo sapiens
cagatgataagccatctctcttccga

SEQ ID NO: 75858 - DNA, 26 bp, Homo sapiens
agatgataagccatctctcttccgat

SEQ ID NO: 75859 - DNA, 26 bp, Homo sapiens
gatgataagccatctctcttccgatc

SEQ ID NO: 75860 - DNA, 26 bp, Homo sapiens
atgataagccatctctcttccgatcc

SEQ ID NO: 75861 - DNA, 26 bp, Homo sapiens
tgataagccatctctcttccgatccc

SEQ ID NO: 75862 - DNA, 26 bp, Homo sapiens
gataagccatctctcttccgatccct

SEQ ID NO: 75863 - DNA, 26 bp, Homo sapiens
ataagccatctctcttccgatccctt

SEQ ID NO: 75864 - DNA, 26 bp, Homo sapiens
taagccatctctcttccgatcccttt

SEQ ID NO: 75865 - DNA, 26 bp, Homo sapiens
aagccatctctcttccgatccctttg

SEQ ID NO: 75866 - DNA, 26 bp, Homo sapiens
agccatctctcttccgatccctttgc

SEQ ID NO: 75867 - DNA, 26 bp, Homo sapiens
gccatctctcttccgatccctttgct

SEQ ID NO: 75868 - DNA, 26 bp, Homo sapiens
ccatctctcttccgatccctttgctg

SEQ ID NO: 75869 - DNA, 26 bp, Homo sapiens
catctctcttccgatccctttgctgg

SEQ ID NO: 75870 - DNA, 26 bp, Homo sapiens
atctctcttccgatccctttgctggc

SEQ ID NO: 75871 - DNA, 26 bp, Homo sapiens
tctctcttccgatccctttgctggcc

SEQ ID NO: 75872 - DNA, 26 bp, Homo sapiens
ctctcttccgatccctttgctggccc

SEQ ID NO: 75873 - DNA, 26 bp, Homo sapiens
tctcttccgatccctttgctggcccc

SEQ ID NO: 75874 - DNA, 26 bp, Homo sapiens
ctcttccgatccctttgctggcccct

SEQ ID NO: 75875 - DNA, 26 bp, Homo sapiens
tcttccgatccctttgctggcccctg

SEQ ID NO: 75876 - DNA, 26 bp, Homo sapiens
cttccgatccctttgctggcccctgt

SEQ ID NO: 75877 - DNA, 26 bp, Homo sapiens
ttccgatccctttgctggcccctgtg

SEQ ID NO: 75878 - DNA, 26 bp, Homo sapiens
tccgatccctttgctggcccctgtga

SEQ ID NO: 75879 - DNA, 26 bp, Homo sapiens
ccgatccctttgctggcccctgtgac

SEQ ID NO: 75880 - DNA, 26 bp, Homo sapiens
cgatccctttgctggcccctgtgaca

SEQ ID NO: 75881 - DNA, 26 bp, Homo sapiens
gatccctttgctggcccctgtgacaa

SEQ ID NO: 75882 - DNA, 26 bp, Homo sapiens
atccctttgctggcccctgtgacaat

SEQ ID NO: 75883 - DNA, 26 bp, Homo sapiens
tccctttgctggcccctgtgacaatc

SEQ ID NO: 75884 - DNA, 26 bp, Homo sapiens
ccctttgctggcccctgtgacaatca

SEQ ID NO: 75885 - DNA, 26 bp, Homo sapiens
cctttgctggcccctgtgacaatcac

SEQ ID NO: 75886 - DNA, 26 bp, Homo sapiens
ctttgctggcccctgtgacaatcact

SEQ ID NO: 75887 - DNA, 26 bp, Homo sapiens
tttgctggcccctgtgacaatcactt

SEQ ID NO: 75888 - DNA, 26 bp, Homo sapiens
ttgctggcccctgtgacaatcacttt

SEQ ID NO: 75889 - DNA, 26 bp, Homo sapiens
tgctggcccctgtgacaatcactttc

SEQ ID NO: 75890 - DNA, 26 bp, Homo sapiens
gctggcccctgtgacaatcactttct

SEQ ID NO: 75891 - DNA, 26 bp, Homo sapiens
ctggcccctgtgacaatcactttctt

SEQ ID NO: 75892 - DNA, 26 bp, Homo sapiens
tggcccctgtgacaatcactttcttt

SEQ ID NO: 75893 - DNA, 26 bp, Homo sapiens
ggcccctgtgacaatcactttctttc

SEQ ID NO: 75894 - DNA, 26 bp, Homo sapiens
gcccctgtgacaatcactttctttcc

SEQ ID NO: 75895 - DNA, 26 bp, Homo sapiens
cccctgtgacaatcactttctttcct

SEQ ID NO: 75896 - DNA, 26 bp, Homo sapiens
ccctgtgacaatcactttctttcctt

SEQ ID NO: 75897 - DNA, 26 bp, Homo sapiens
cctgtgacaatcactttctttccttg

SEQ ID NO: 75898 - DNA, 26 bp, Homo sapiens
ctgtgacaatcactttctttccttgg

SEQ ID NO: 75899 - DNA, 26 bp, Homo sapiens
tgtgacaatcactttctttccttgga

SEQ ID NO: 75900 - DNA, 26 bp, Homo sapiens
gtgacaatcactttctttccttggag

SEQ ID NO: 75901 - DNA, 26 bp, Homo sapiens
tgacaatcactttctttccttggagc

SEQ ID NO: 75902 - DNA, 26 bp, Homo sapiens
gacaatcactttctttccttggagca

SEQ ID NO: 75903 - DNA, 26 bp, Homo sapiens
acaatcactttctttccttggagcat

SEQ ID NO: 75904 - DNA, 26 bp, Homo sapiens
caatcactttctttccttggagcatc

SEQ ID NO: 75905 - DNA, 26 bp, Homo sapiens
aatcactttctttccttggagcatct

SEQ ID NO: 75906 - DNA, 26 bp, Homo sapiens
atcactttctttccttggagcatctc

SEQ ID NO: 75907 - DNA, 26 bp, Homo sapiens
tcactttctttccttggagcatctct

SEQ ID NO: 75908 - DNA, 26 bp, Homo sapiens
cactttctttccttggagcatctctg

SEQ ID NO: 75909 - DNA, 26 bp, Homo sapiens
actttctttccttggagcatctctgg

SEQ ID NO: 75910 - DNA, 26 bp, Homo sapiens
ctttctttccttggagcatctctggt

SEQ ID NO: 75911 - DNA, 26 bp, Homo sapiens
tttctttccttggagcatctctggtc

SEQ ID NO: 75912 - DNA, 26 bp, Homo sapiens
ttctttccttggagcatctctggtct

SEQ ID NO: 75913 - DNA, 26 bp, Homo sapiens
tctttccttggagcatctctggtctg

SEQ ID NO: 75914 - DNA, 26 bp, Homo sapiens
ctttccttggagcatctctggtctga

SEQ ID NO: 75915 - DNA, 26 bp, Homo sapiens
tttccttggagcatctctggtctgaa

SEQ ID NO: 75916 - DNA, 26 bp, Homo sapiens
ttccttggagcatctctggtctgaat

SEQ ID NO: 75917 - DNA, 26 bp, Homo sapiens
tccttggagcatctctggtctgaatt

SEQ ID NO: 75918 - DNA, 26 bp, Homo sapiens
ccttggagcatctctggtctgaattc

SEQ ID NO: 75919 - DNA, 26 bp, Homo sapiens
cttggagcatctctggtctgaattcc

SEQ ID NO: 75920 - DNA, 26 bp, Homo sapiens
ttggagcatctctggtctgaattcct

SEQ ID NO: 75921 - DNA, 26 bp, Homo sapiens
tggagcatctctggtctgaattcctc

SEQ ID NO: 75922 - DNA, 26 bp, Homo sapiens
ggagcatctctggtctgaattcctcg

SEQ ID NO: 75923 - DNA, 26 bp, Homo sapiens
gagcatctctggtctgaattcctcgt

SEQ ID NO: 75924 - DNA, 26 bp, Homo sapiens
agcatctctggtctgaattcctcgtt

SEQ ID NO: 75925 - DNA, 26 bp, Homo sapiens
gcatctctggtctgaattcctcgttt

SEQ ID NO: 75926 - DNA, 26 bp, Homo sapiens
catctctggtctgaattcctcgtttg

SEQ ID NO: 75927 - DNA, 26 bp, Homo sapiens
atctctggtctgaattcctcgtttgc

SEQ ID NO: 75928 - DNA, 26 bp, Homo sapiens
tctctggtctgaattcctcgtttgca

SEQ ID NO: 75929 - DNA, 26 bp, Homo sapiens
ctctggtctgaattcctcgtttgcag

SEQ ID NO: 75930 - DNA, 26 bp, Homo sapiens
tctggtctgaattcctcgtttgcaga

SEQ ID NO: 75931 - DNA, 26 bp, Homo sapiens
ctggtctgaattcctcgtttgcagaa

SEQ ID NO: 75932 - DNA, 26 bp, Homo sapiens
tggtctgaattcctcgtttgcagaat

SEQ ID NO: 75933 - DNA, 26 bp, Homo sapiens
ggtctgaattcctcgtttgcagaata

SEQ ID NO: 75934 - DNA, 26 bp, Homo sapiens
gtctgaattcctcgtttgcagaatag

SEQ ID NO: 75935 - DNA, 26 bp, Homo sapiens
tctgaattcctcgtttgcagaatagt

SEQ ID NO: 75936 - DNA, 26 bp, Homo sapiens
ctgaattcctcgtttgcagaatagta

SEQ ID NO: 75937 - DNA, 26 bp, Homo sapiens
tgaattcctcgtttgcagaatagtag

SEQ ID NO: 75938 - DNA, 26 bp, Homo sapiens
gaattcctcgtttgcagaatagtagt

SEQ ID NO: 75939 - DNA, 26 bp, Homo sapiens
aattcctcgtttgcagaatagtagta

SEQ ID NO: 75940 - DNA, 26 bp, Homo sapiens
attcctcgtttgcagaatagtagtag

SEQ ID NO: 75941 - DNA, 26 bp, Homo sapiens
ttcctcgtttgcagaatagtagtagt

SEQ ID NO: 75942 - DNA, 26 bp, Homo sapiens
tcctcgtttgcagaatagtagtagta

SEQ ID NO: 75943 - DNA, 26 bp, Homo sapiens
cctcgtttgcagaatagtagtagtag

SEQ ID NO: 75944 - DNA, 26 bp, Homo sapiens
ctcgtttgcagaatagtagtagtagg

SEQ ID NO: 75945 - DNA, 26 bp, Homo sapiens
tcgtttgcagaatagtagtagtaggc

SEQ ID NO: 75946 - DNA, 26 bp, Homo sapiens
cgtttgcagaatagtagtagtaggcc

SEQ ID NO: 75947 - DNA, 26 bp, Homo sapiens
gtttgcagaatagtagtagtaggcca

SEQ ID NO: 75948 - DNA, 26 bp, Homo sapiens
tttgcagaatagtagtagtaggccat

SEQ ID NO: 75949 - DNA, 26 bp, Homo sapiens
ttgcagaatagtagtagtaggccatg

SEQ ID NO: 75950 - DNA, 26 bp, Homo sapiens
tgcagaatagtagtagtaggccatga

SEQ ID NO: 75951 - DNA, 26 bp, Homo sapiens
gcagaatagtagtagtaggccatgaa

SEQ ID NO: 75952 - DNA, 26 bp, Homo sapiens
cagaatagtagtagtaggccatgaag

SEQ ID NO: 75953 - DNA, 26 bp, Homo sapiens
agaatagtagtagtaggccatgaaga

SEQ ID NO: 75954 - DNA, 26 bp, Homo sapiens
gaatagtagtagtaggccatgaagag

SEQ ID NO: 75955 - DNA, 26 bp, Homo sapiens
aatagtagtagtaggccatgaagagc

SEQ ID NO: 75956 - DNA, 26 bp, Homo sapiens
atagtagtagtaggccatgaagagcc

SEQ ID NO: 75957 - DNA, 26 bp, Homo sapiens
tagtagtagtaggccatgaagagccc

SEQ ID NO: 75958 - DNA, 26 bp, Homo sapiens
agtagtagtaggccatgaagagcccc

SEQ ID NO: 75959 - DNA, 26 bp, Homo sapiens
gtagtagtaggccatgaagagcccca

SEQ ID NO: 75960 - DNA, 26 bp, Homo sapiens
tagtagtaggccatgaagagccccag

SEQ ID NO: 75961 - DNA, 26 bp, Homo sapiens
agtagtaggccatgaagagccccaga

SEQ ID NO: 75962 - DNA, 26 bp, Homo sapiens
gtagtaggccatgaagagccccagaa

SEQ ID NO: 75963 - DNA, 26 bp, Homo sapiens
tagtaggccatgaagagccccagaat

SEQ ID NO: 75964 - DNA, 26 bp, Homo sapiens
agtaggccatgaagagccccagaatg

SEQ ID NO: 75965 - DNA, 26 bp, Homo sapiens
gtaggccatgaagagccccagaatgg

SEQ ID NO: 75966 - DNA, 26 bp, Homo sapiens
taggccatgaagagccccagaatggg

SEQ ID NO: 75967 - DNA, 26 bp, Homo sapiens
aggccatgaagagccccagaatgggg

SEQ ID NO: 75968 - DNA, 26 bp, Homo sapiens
ggccatgaagagccccagaatgggga

SEQ ID NO: 75969 - DNA, 26 bp, Homo sapiens
gccatgaagagccccagaatggggag

SEQ ID NO: 75970 - DNA, 26 bp, Homo sapiens
ccatgaagagccccagaatggggagg

SEQ ID NO: 75971 - DNA, 26 bp, Homo sapiens
catgaagagccccagaatggggagga

SEQ ID NO: 75972 - DNA, 26 bp, Homo sapiens
atgaagagccccagaatggggaggag

SEQ ID NO: 75973 - DNA, 26 bp, Homo sapiens
tgaagagccccagaatggggaggaga

SEQ ID NO: 75974 - DNA, 26 bp, Homo sapiens
gaagagccccagaatggggaggagat

SEQ ID NO: 75975 - DNA, 26 bp, Homo sapiens
aagagccccagaatggggaggagata

SEQ ID NO: 75976 - DNA, 26 bp, Homo sapiens
agagccccagaatggggaggagatat

SEQ ID NO: 75977 - DNA, 26 bp, Homo sapiens
gagccccagaatggggaggagatatt

SEQ ID NO: 75978 - DNA, 26 bp, Homo sapiens
agccccagaatggggaggagatattt

SEQ ID NO: 75979 - DNA, 26 bp, Homo sapiens
gccccagaatggggaggagatatttt

SEQ ID NO: 75980 - DNA, 26 bp, Homo sapiens
ccccagaatggggaggagatattttt

SEQ ID NO: 75981 - DNA, 26 bp, Homo sapiens
cccagaatggggaggagatatttttt

SEQ ID NO: 75982 - DNA, 26 bp, Homo sapiens
ccagaatggggaggagatattttttc

SEQ ID NO: 75983 - DNA, 26 bp, Homo sapiens
cagaatggggaggagatattttttca

SEQ ID NO: 75984 - DNA, 26 bp, Homo sapiens
agaatggggaggagatattttttcat

SEQ ID NO: 75985 - DNA, 26 bp, Homo sapiens
gaatggggaggagatattttttcata

SEQ ID NO: 75986 - DNA, 26 bp, Homo sapiens
aatggggaggagatattttttcataa

SEQ ID NO: 75987 - DNA, 26 bp, Homo sapiens
atggggaggagatattttttcataaa

SEQ ID NO: 75988 - DNA, 26 bp, Homo sapiens
tggggaggagatattttttcataaaa

SEQ ID NO: 75989 - DNA, 26 bp, Homo sapiens
ggggaggagatattttttcataaaag

SEQ ID NO: 75990 - DNA, 26 bp, Homo sapiens
gggaggagatattttttcataaaagc

SEQ ID NO: 75991 - DNA, 26 bp, Homo sapiens
ggaggagatattttttcataaaagcc

SEQ ID NO: 75992 - DNA, 26 bp, Homo sapiens
gaggagatattttttcataaaagcca

SEQ ID NO: 75993 - DNA, 26 bp, Homo sapiens
aggagatattttttcataaaagccat

SEQ ID NO: 75994 - DNA, 26 bp, Homo sapiens
ggagatattttttcataaaagccatc

SEQ ID NO: 75995 - DNA, 26 bp, Homo sapiens
gagatattttttcataaaagccatcc

SEQ ID NO: 75996 - DNA, 26 bp, Homo sapiens
agatattttttcataaaagccatccg

SEQ ID NO: 75997 - DNA, 26 bp, Homo sapiens
gatattttttcataaaagccatccga

SEQ ID NO: 75998 - DNA, 26 bp, Homo sapiens
atattttttcataaaagccatccgac

SEQ ID NO: 75999 - DNA, 26 bp, Homo sapiens
tattttttcataaaagccatccgaca

SEQ ID NO: 76000 - DNA, 26 bp, Homo sapiens
attttttcataaaagccatccgacag

SEQ ID NO: 76001 - DNA, 26 bp, Homo sapiens
ttttttcataaaagccatccgacagg

SEQ ID NO: 76002 - DNA, 26 bp, Homo sapiens
tttttcataaaagccatccgacaggg

SEQ ID NO: 76003 - DNA, 26 bp, Homo sapiens
ttttcataaaagccatccgacaggga

SEQ ID NO: 76004 - DNA, 26 bp, Homo sapiens
tttcataaaagccatccgacagggag

SEQ ID NO: 76005 - DNA, 26 bp, Homo sapiens
ttcataaaagccatccgacagggagc

SEQ ID NO: 76006 - DNA, 26 bp, Homo sapiens
tcataaaagccatccgacagggagct

SEQ ID NO: 76007 - DNA, 26 bp, Homo sapiens
cataaaagccatccgacagggagctg

SEQ ID NO: 76008 - DNA, 26 bp, Homo sapiens
ataaaagccatccgacagggagctgg

SEQ ID NO: 76009 - DNA, 26 bp, Homo sapiens
taaaagccatccgacagggagctggc

SEQ ID NO: 76010 - DNA, 26 bp, Homo sapiens
aaaagccatccgacagggagctggcc

SEQ ID NO: 76011 - DNA, 26 bp, Homo sapiens
aaagccatccgacagggagctggcct

SEQ ID NO: 76012 - DNA, 26 bp, Homo sapiens
aagccatccgacagggagctggcctg

SEQ ID NO: 76013 - DNA, 26 bp, Homo sapiens
agccatccgacagggagctggcctga

SEQ ID NO: 76014 - DNA, 26 bp, Homo sapiens
gccatccgacagggagctggcctgaa

SEQ ID NO: 76015 - DNA, 26 bp, Homo sapiens
ccatccgacagggagctggcctgaag

SEQ ID NO: 76016 - DNA, 26 bp, Homo sapiens
catccgacagggagctggcctgaaga

SEQ ID NO: 76017 - DNA, 26 bp, Homo sapiens
atccgacagggagctggcctgaagac

SEQ ID NO: 76018 - DNA, 26 bp, Homo sapiens
tccgacagggagctggcctgaagact

SEQ ID NO: 76019 - DNA, 26 bp, Homo sapiens
ccgacagggagctggcctgaagactc

SEQ ID NO: 76020 - DNA, 26 bp, Homo sapiens
cgacagggagctggcctgaagactcc

SEQ ID NO: 76021 - DNA, 26 bp, Homo sapiens
gacagggagctggcctgaagactcct

SEQ ID NO: 76022 - DNA, 26 bp, Homo sapiens
acagggagctggcctgaagactcctg

SEQ ID NO: 76023 - DNA, 26 bp, Homo sapiens
cagggagctggcctgaagactcctgt

SEQ ID NO: 76024 - DNA, 26 bp, Homo sapiens
agggagctggcctgaagactcctgta

SEQ ID NO: 76025 - DNA, 26 bp, Homo sapiens
gggagctggcctgaagactcctgtag

SEQ ID NO: 76026 - DNA, 26 bp, Homo sapiens
ggagctggcctgaagactcctgtagg

SEQ ID NO: 76027 - DNA, 26 bp, Homo sapiens
gagctggcctgaagactcctgtagga

SEQ ID NO: 76028 - DNA, 26 bp, Homo sapiens
agctggcctgaagactcctgtaggac

SEQ ID NO: 76029 - DNA, 26 bp, Homo sapiens
gctggcctgaagactcctgtaggaca

SEQ ID NO: 76030 - DNA, 26 bp, Homo sapiens
ctggcctgaagactcctgtaggacac

SEQ ID NO: 76031 - DNA, 26 bp, Homo sapiens
tggcctgaagactcctgtaggacaca

SEQ ID NO: 76032 - DNA, 26 bp, Homo sapiens
ggcctgaagactcctgtaggacacac

SEQ ID NO: 76033 - DNA, 26 bp, Homo sapiens
gcctgaagactcctgtaggacacaca

SEQ ID NO: 76034 - DNA, 26 bp, Homo sapiens
cctgaagactcctgtaggacacacag

SEQ ID NO: 76035 - DNA, 26 bp, Homo sapiens
ctgaagactcctgtaggacacacaga

SEQ ID NO: 76036 - DNA, 26 bp, Homo sapiens
tgaagactcctgtaggacacacagag

SEQ ID NO: 76037 - DNA, 26 bp, Homo sapiens
gaagactcctgtaggacacacagaga

SEQ ID NO: 76038 - DNA, 26 bp, Homo sapiens
aagactcctgtaggacacacagagag

SEQ ID NO: 76039 - DNA, 26 bp, Homo sapiens
agactcctgtaggacacacagagaga

SEQ ID NO: 76040 - DNA, 26 bp, Homo sapiens
gactcctgtaggacacacagagagaa

SEQ ID NO: 76041 - DNA, 26 bp, Homo sapiens
actcctgtaggacacacagagagaac

SEQ ID NO: 76042 - DNA, 26 bp, Homo sapiens
ctcctgtaggacacacagagagaacc

SEQ ID NO: 76043 - DNA, 26 bp, Homo sapiens
tcctgtaggacacacagagagaacct

SEQ ID NO: 76044 - DNA, 26 bp, Homo sapiens
cctgtaggacacacagagagaaccta

SEQ ID NO: 76045 - DNA, 26 bp, Homo sapiens
ctgtaggacacacagagagaacctac

SEQ ID NO: 76046 - DNA, 26 bp, Homo sapiens
tgtaggacacacagagagaacctaca

SEQ ID NO: 76047 - DNA, 26 bp, Homo sapiens
gtaggacacacagagagaacctacag

SEQ ID NO: 76048 - DNA, 26 bp, Homo sapiens
taggacacacagagagaacctacaga

SEQ ID NO: 76049 - DNA, 26 bp, Homo sapiens
aggacacacagagagaacctacagag

SEQ ID NO: 76050 - DNA, 26 bp, Homo sapiens
ggacacacagagagaacctacagagc

SEQ ID NO: 76051 - DNA, 26 bp, Homo sapiens
gacacacagagagaacctacagagct

SEQ ID NO: 76052 - DNA, 26 bp, Homo sapiens
acacacagagagaacctacagagctt

SEQ ID NO: 76053 - DNA, 26 bp, Homo sapiens
cacacagagagaacctacagagcttt

SEQ ID NO: 76054 - DNA, 26 bp, Homo sapiens
acacagagagaacctacagagctttc

SEQ ID NO: 76055 - DNA, 26 bp, Homo sapiens
cacagagagaacctacagagctttct

SEQ ID NO: 76056 - DNA, 26 bp, Homo sapiens
acagagagaacctacagagctttcta

SEQ ID NO: 76057 - DNA, 26 bp, Homo sapiens
cagagagaacctacagagctttctac

SEQ ID NO: 76058 - DNA, 26 bp, Homo sapiens
agagagaacctacagagctttctaca

SEQ ID NO: 76059 - DNA, 26 bp, Homo sapiens
gagagaacctacagagctttctacaa

SEQ ID NO: 76060 - DNA, 26 bp, Homo sapiens
agagaacctacagagctttctacaac

SEQ ID NO: 76061 - DNA, 26 bp, Homo sapiens
gagaacctacagagctttctacaacc

SEQ ID NO: 76062 - DNA, 26 bp, Homo sapiens
agaacctacagagctttctacaacct

SEQ ID NO: 76063 - DNA, 26 bp, Homo sapiens
gaacctacagagctttctacaacctc

SEQ ID NO: 76064 - DNA, 26 bp, Homo sapiens
aacctacagagctttctacaacctcc

SEQ ID NO: 76065 - DNA, 26 bp, Homo sapiens
acctacagagctttctacaacctcct

SEQ ID NO: 76066 - DNA, 26 bp, Homo sapiens
cctacagagctttctacaacctccta

SEQ ID NO: 76067 - DNA, 26 bp, Homo sapiens
ctacagagctttctacaacctcctaa

SEQ ID NO: 76068 - DNA, 26 bp, Homo sapiens
tacagagctttctacaacctcctaag

SEQ ID NO: 76069 - DNA, 26 bp, Homo sapiens
acagagctttctacaacctcctaagc

SEQ ID NO: 76070 - DNA, 26 bp, Homo sapiens
cagagctttctacaacctcctaagca

SEQ ID NO: 76071 - DNA, 26 bp, Homo sapiens
agagctttctacaacctcctaagcag

SEQ ID NO: 76072 - DNA, 26 bp, Homo sapiens
gagctttctacaacctcctaagcagg

SEQ ID NO: 76073 - DNA, 26 bp, Homo sapiens
agctttctacaacctcctaagcaggc

SEQ ID NO: 76074 - DNA, 26 bp, Homo sapiens
gctttctacaacctcctaagcaggca

SEQ ID NO: 76075 - DNA, 26 bp, Homo sapiens
ctttctacaacctcctaagcaggcag

SEQ ID NO: 76076 - DNA, 26 bp, Homo sapiens
tttctacaacctcctaagcaggcagc

SEQ ID NO: 76077 - DNA, 26 bp, Homo sapiens
ttctacaacctcctaagcaggcagca

SEQ ID NO: 76078 - DNA, 26 bp, Homo sapiens
tctacaacctcctaagcaggcagcag

SEQ ID NO: 76079 - DNA, 26 bp, Homo sapiens
ctacaacctcctaagcaggcagcagc

SEQ ID NO: 76080 - DNA, 26 bp, Homo sapiens
tacaacctcctaagcaggcagcagcc

SEQ ID NO: 76081 - DNA, 26 bp, Homo sapiens
acaacctcctaagcaggcagcagcct

SEQ ID NO: 76082 - DNA, 26 bp, Homo sapiens
caacctcctaagcaggcagcagcctc

SEQ ID NO: 76083 - DNA, 26 bp, Homo sapiens
aacctcctaagcaggcagcagcctct

SEQ ID NO: 76084 - DNA, 26 bp, Homo sapiens
acctcctaagcaggcagcagcctctg

SEQ ID NO: 76085 - DNA, 26 bp, Homo sapiens
cctcctaagcaggcagcagcctctga

SEQ ID NO: 76086 - DNA, 26 bp, Homo sapiens
ctcctaagcaggcagcagcctctgaa

SEQ ID NO: 76087 - DNA, 26 bp, Homo sapiens
tcctaagcaggcagcagcctctgaat

SEQ ID NO: 76088 - DNA, 26 bp, Homo sapiens
cctaagcaggcagcagcctctgaatt

SEQ ID NO: 76089 - DNA, 26 bp, Homo sapiens
ctaagcaggcagcagcctctgaattg

SEQ ID NO: 76090 - DNA, 26 bp, Homo sapiens
taagcaggcagcagcctctgaattgt

SEQ ID NO: 76091 - DNA, 25 bp, Homo sapiens
aagcaggcagcagcctctgaattgt

SEQ ID NO: 76092 - DNA, 24 bp, Homo sapiens
agcaggcagcagcctctgaattgt

SEQ ID NO: 76093 - DNA, 23 bp, Homo sapiens
gcaggcagcagcctctgaattgt

SEQ ID NO: 76094 - DNA, 22 bp, Homo sapiens
caggcagcagcctctgaattgt

SEQ ID NO: 76095 - DNA, 26 bp, Homo sapiens
ttccaattccttgttgtttatttgtg

SEQ ID NO: 76096 - DNA, 26 bp, Homo sapiens
tccaattccttgttgtttatttgtgc

SEQ ID NO: 76097 - DNA, 26 bp, Homo sapiens
ccaattccttgttgtttatttgtgca

SEQ ID NO: 76098 - DNA, 26 bp, Homo sapiens
caattccttgttgtttatttgtgcat

SEQ ID NO: 76099 - DNA, 26 bp, Homo sapiens
aattccttgttgtttatttgtgcata

SEQ ID NO: 76100 - DNA, 26 bp, Homo sapiens
attccttgttgtttatttgtgcataa

SEQ ID NO: 76101 - DNA, 26 bp, Homo sapiens
ttccttgttgtttatttgtgcataat

SEQ ID NO: 76102 - DNA, 26 bp, Homo sapiens
tccttgttgtttatttgtgcataatg

SEQ ID NO: 76103 - DNA, 26 bp, Homo sapiens
ccttgttgtttatttgtgcataatgt

SEQ ID NO: 76104 - DNA, 26 bp, Homo sapiens
cttgttgtttatttgtgcataatgta

SEQ ID NO: 76105 - DNA, 26 bp, Homo sapiens
ttgttgtttatttgtgcataatgtat

SEQ ID NO: 76106 - DNA, 26 bp, Homo sapiens
tgttgtttatttgtgcataatgtata

SEQ ID NO: 76107 - DNA, 26 bp, Homo sapiens
gttgtttatttgtgcataatgtataa

SEQ ID NO: 76108 - DNA, 26 bp, Homo sapiens
ttgtttatttgtgcataatgtataaa

SEQ ID NO: 76109 - DNA, 26 bp, Homo sapiens
tgtttatttgtgcataatgtataaaa

SEQ ID NO: 76110 - DNA, 26 bp, Homo sapiens
gtttatttgtgcataatgtataaaag

SEQ ID NO: 76111 - DNA, 26 bp, Homo sapiens
tttatttgtgcataatgtataaaagt

SEQ ID NO: 76112 - DNA, 26 bp, Homo sapiens
ttatttgtgcataatgtataaaagta

SEQ ID NO: 76113 - DNA, 26 bp, Homo sapiens
tatttgtgcataatgtataaaagtaa

SEQ ID NO: 76114 - DNA, 26 bp, Homo sapiens
atttgtgcataatgtataaaagtaaa

SEQ ID NO: 76115 - DNA, 26 bp, Homo sapiens
tttgtgcataatgtataaaagtaaaa

SEQ ID NO: 76116 - DNA, 26 bp, Homo sapiens
ttgtgcataatgtataaaagtaaaac

SEQ ID NO: 76117 - DNA, 26 bp, Homo sapiens
tgtgcataatgtataaaagtaaaaca

SEQ ID NO: 76118 - DNA, 26 bp, Homo sapiens
gtgcataatgtataaaagtaaaacaa

SEQ ID NO: 76119 - DNA, 26 bp, Homo sapiens
tgcataatgtataaaagtaaaacaat

SEQ ID NO: 76120 - DNA, 26 bp, Homo sapiens
gcataatgtataaaagtaaaacaata

SEQ ID NO: 76121 - DNA, 26 bp, Homo sapiens
cataatgtataaaagtaaaacaataa

SEQ ID NO: 76122 - DNA, 26 bp, Homo sapiens
ataatgtataaaagtaaaacaataaa

SEQ ID NO: 76123 - DNA, 26 bp, Homo sapiens
taatgtataaaagtaaaacaataaac

SEQ ID NO: 76124 - DNA, 26 bp, Homo sapiens
aatgtataaaagtaaaacaataaact

SEQ ID NO: 76125 - DNA, 26 bp, Homo sapiens
atgtataaaagtaaaacaataaactc

SEQ ID NO: 76126 - DNA, 26 bp, Homo sapiens
tgtataaaagtaaaacaataaactca

SEQ ID NO: 76127 - DNA, 26 bp, Homo sapiens
gtataaaagtaaaacaataaactcag

SEQ ID NO: 76128 - DNA, 26 bp, Homo sapiens
tataaaagtaaaacaataaactcagc

SEQ ID NO: 76129 - DNA, 26 bp, Homo sapiens
ataaaagtaaaacaataaactcagcc

SEQ ID NO: 76130 - DNA, 26 bp, Homo sapiens
taaaagtaaaacaataaactcagccc

SEQ ID NO: 76131 - DNA, 26 bp, Homo sapiens
aaaagtaaaacaataaactcagccct

SEQ ID NO: 76132 - DNA, 26 bp, Homo sapiens
aaagtaaaacaataaactcagcccta

SEQ ID NO: 76133 - DNA, 26 bp, Homo sapiens
aagtaaaacaataaactcagccctat

SEQ ID NO: 76134 - DNA, 26 bp, Homo sapiens
agtaaaacaataaactcagccctatg

SEQ ID NO: 76135 - DNA, 26 bp, Homo sapiens
gtaaaacaataaactcagccctatgt

SEQ ID NO: 76136 - DNA, 26 bp, Homo sapiens
taaaacaataaactcagccctatgtc

SEQ ID NO: 76137 - DNA, 26 bp, Homo sapiens
aaaacaataaactcagccctatgtct

SEQ ID NO: 76138 - DNA, 26 bp, Homo sapiens
aaacaataaactcagccctatgtctc

SEQ ID NO: 76139 - DNA, 26 bp, Homo sapiens
aacaataaactcagccctatgtctca

SEQ ID NO: 76140 - DNA, 26 bp, Homo sapiens
acaataaactcagccctatgtctcag

SEQ ID NO: 76141 - DNA, 26 bp, Homo sapiens
caataaactcagccctatgtctcagt

SEQ ID NO: 76142 - DNA, 26 bp, Homo sapiens
aataaactcagccctatgtctcagtc

SEQ ID NO: 76143 - DNA, 26 bp, Homo sapiens
ataaactcagccctatgtctcagtca

SEQ ID NO: 76144 - DNA, 26 bp, Homo sapiens
taaactcagccctatgtctcagtcag

SEQ ID NO: 76145 - DNA, 26 bp, Homo sapiens
aaactcagccctatgtctcagtcagg

SEQ ID NO: 76146 - DNA, 26 bp, Homo sapiens
aactcagccctatgtctcagtcaggg

SEQ ID NO: 76147 - DNA, 26 bp, Homo sapiens
actcagccctatgtctcagtcagggc

SEQ ID NO: 76148 - DNA, 26 bp, Homo sapiens
ctcagccctatgtctcagtcagggct

SEQ ID NO: 76149 - DNA, 26 bp, Homo sapiens
tcagccctatgtctcagtcagggctg

SEQ ID NO: 76150 - DNA, 26 bp, Homo sapiens
cagccctatgtctcagtcagggctgc

SEQ ID NO: 76151 - DNA, 26 bp, Homo sapiens
agccctatgtctcagtcagggctgca

SEQ ID NO: 76152 - DNA, 26 bp, Homo sapiens
gccctatgtctcagtcagggctgcag

SEQ ID NO: 76153 - DNA, 26 bp, Homo sapiens
ccctatgtctcagtcagggctgcagc

SEQ ID NO: 76154 - DNA, 26 bp, Homo sapiens
cctatgtctcagtcagggctgcagct

SEQ ID NO: 76155 - DNA, 26 bp, Homo sapiens
ctatgtctcagtcagggctgcagctt

SEQ ID NO: 76156 - DNA, 26 bp, Homo sapiens
tatgtctcagtcagggctgcagcttc

SEQ ID NO: 76157 - DNA, 26 bp, Homo sapiens
atgtctcagtcagggctgcagcttca

SEQ ID NO: 76158 - DNA, 26 bp, Homo sapiens
tgtctcagtcagggctgcagcttcat

SEQ ID NO: 76159 - DNA, 26 bp, Homo sapiens
gtctcagtcagggctgcagcttcata

SEQ ID NO: 76160 - DNA, 26 bp, Homo sapiens
tctcagtcagggctgcagcttcataa

SEQ ID NO: 76161 - DNA, 26 bp, Homo sapiens
ctcagtcagggctgcagcttcataaa

SEQ ID NO: 76162 - DNA, 26 bp, Homo sapiens
tcagtcagggctgcagcttcataaat

SEQ ID NO: 76163 - DNA, 26 bp, Homo sapiens
cagtcagggctgcagcttcataaata

SEQ ID NO: 76164 - DNA, 26 bp, Homo sapiens
agtcagggctgcagcttcataaataa

SEQ ID NO: 76165 - DNA, 26 bp, Homo sapiens
gtcagggctgcagcttcataaataaa

SEQ ID NO: 76166 - DNA, 26 bp, Homo sapiens
tcagggctgcagcttcataaataaag

SEQ ID NO: 76167 - DNA, 26 bp, Homo sapiens
cagggctgcagcttcataaataaagg

SEQ ID NO: 76168 - DNA, 26 bp, Homo sapiens
agggctgcagcttcataaataaaggg

SEQ ID NO: 76169 - DNA, 26 bp, Homo sapiens
gggctgcagcttcataaataaagggt

SEQ ID NO: 76170 - DNA, 26 bp, Homo sapiens
ggctgcagcttcataaataaagggtg

SEQ ID NO: 76171 - DNA, 26 bp, Homo sapiens
gctgcagcttcataaataaagggtga

SEQ ID NO: 76172 - DNA, 26 bp, Homo sapiens
ctgcagcttcataaataaagggtgag

SEQ ID NO: 76173 - DNA, 26 bp, Homo sapiens
tgcagcttcataaataaagggtgaga

SEQ ID NO: 76174 - DNA, 26 bp, Homo sapiens
gcagcttcataaataaagggtgagag

SEQ ID NO: 76175 - DNA, 26 bp, Homo sapiens
cagcttcataaataaagggtgagagg

SEQ ID NO: 76176 - DNA, 26 bp, Homo sapiens
agcttcataaataaagggtgagagga

SEQ ID NO: 76177 - DNA, 26 bp, Homo sapiens
gcttcataaataaagggtgagaggaa

SEQ ID NO: 76178 - DNA, 26 bp, Homo sapiens
cttcataaataaagggtgagaggaaa

SEQ ID NO: 76179 - DNA, 26 bp, Homo sapiens
ttcataaataaagggtgagaggaaat

SEQ ID NO: 76180 - DNA, 26 bp, Homo sapiens
tcataaataaagggtgagaggaaata

SEQ ID NO: 76181 - DNA, 26 bp, Homo sapiens
cataaataaagggtgagaggaaataa

SEQ ID NO: 76182 - DNA, 26 bp, Homo sapiens
ataaataaagggtgagaggaaataaa

SEQ ID NO: 76183 - DNA, 26 bp, Homo sapiens
taaataaagggtgagaggaaataaat

SEQ ID NO: 76184 - DNA, 26 bp, Homo sapiens
aaataaagggtgagaggaaataaatt

SEQ ID NO: 76185 - DNA, 26 bp, Homo sapiens
aataaagggtgagaggaaataaatta

SEQ ID NO: 76186 - DNA, 26 bp, Homo sapiens
ataaagggtgagaggaaataaattaa

SEQ ID NO: 76187 - DNA, 26 bp, Homo sapiens
taaagggtgagaggaaataaattaag

SEQ ID NO: 76188 - DNA, 26 bp, Homo sapiens
aaagggtgagaggaaataaattaagg

SEQ ID NO: 76189 - DNA, 26 bp, Homo sapiens
aagggtgagaggaaataaattaagga

SEQ ID NO: 76190 - DNA, 26 bp, Homo sapiens
agggtgagaggaaataaattaaggaa

SEQ ID NO: 76191 - DNA, 26 bp, Homo sapiens
gggtgagaggaaataaattaaggaag

SEQ ID NO: 76192 - DNA, 26 bp, Homo sapiens
ggtgagaggaaataaattaaggaagg

SEQ ID NO: 76193 - DNA, 26 bp, Homo sapiens
gtgagaggaaataaattaaggaagga

SEQ ID NO: 76194 - DNA, 26 bp, Homo sapiens
tgagaggaaataaattaaggaaggag

SEQ ID NO: 76195 - DNA, 26 bp, Homo sapiens
gagaggaaataaattaaggaaggagt

SEQ ID NO: 76196 - DNA, 26 bp, Homo sapiens
agaggaaataaattaaggaaggagta

SEQ ID NO: 76197 - DNA, 26 bp, Homo sapiens
gaggaaataaattaaggaaggagtag

SEQ ID NO: 76198 - DNA, 26 bp, Homo sapiens
aggaaataaattaaggaaggagtagg

SEQ ID NO: 76199 - DNA, 26 bp, Homo sapiens
ggaaataaattaaggaaggagtaggg

SEQ ID NO: 76200 - DNA, 26 bp, Homo sapiens
gaaataaattaaggaaggagtagggc

SEQ ID NO: 76201 - DNA, 26 bp, Homo sapiens
aaataaattaaggaaggagtagggct

SEQ ID NO: 76202 - DNA, 26 bp, Homo sapiens
aataaattaaggaaggagtagggctc

SEQ ID NO: 76203 - DNA, 26 bp, Homo sapiens
ataaattaaggaaggagtagggctca

SEQ ID NO: 76204 - DNA, 26 bp, Homo sapiens
taaattaaggaaggagtagggctcag

SEQ ID NO: 76205 - DNA, 26 bp, Homo sapiens
aaattaaggaaggagtagggctcagc

SEQ ID NO: 76206 - DNA, 26 bp, Homo sapiens
aattaaggaaggagtagggctcagcg

SEQ ID NO: 76207 - DNA, 26 bp, Homo sapiens
attaaggaaggagtagggctcagcgc

SEQ ID NO: 76208 - DNA, 26 bp, Homo sapiens
ttaaggaaggagtagggctcagcgca

SEQ ID NO: 76209 - DNA, 26 bp, Homo sapiens
taaggaaggagtagggctcagcgcat

SEQ ID NO: 76210 - DNA, 26 bp, Homo sapiens
aaggaaggagtagggctcagcgcata

SEQ ID NO: 76211 - DNA, 26 bp, Homo sapiens
aggaaggagtagggctcagcgcataa

SEQ ID NO: 76212 - DNA, 26 bp, Homo sapiens
ggaaggagtagggctcagcgcataaa

SEQ ID NO: 76213 - DNA, 26 bp, Homo sapiens
gaaggagtagggctcagcgcataaat

SEQ ID NO: 76214 - DNA, 26 bp, Homo sapiens
aaggagtagggctcagcgcataaata

SEQ ID NO: 76215 - DNA, 26 bp, Homo sapiens
aggagtagggctcagcgcataaataa

SEQ ID NO: 76216 - DNA, 26 bp, Homo sapiens
ggagtagggctcagcgcataaataag

SEQ ID NO: 76217 - DNA, 26 bp, Homo sapiens
gagtagggctcagcgcataaataagg

SEQ ID NO: 76218 - DNA, 26 bp, Homo sapiens
agtagggctcagcgcataaataaggt

SEQ ID NO: 76219 - DNA, 26 bp, Homo sapiens
gtagggctcagcgcataaataaggtg

SEQ ID NO: 76220 - DNA, 26 bp, Homo sapiens
tagggctcagcgcataaataaggtgt

SEQ ID NO: 76221 - DNA, 26 bp, Homo sapiens
agggctcagcgcataaataaggtgtg

SEQ ID NO: 76222 - DNA, 26 bp, Homo sapiens
gggctcagcgcataaataaggtgtgg

SEQ ID NO: 76223 - DNA, 26 bp, Homo sapiens
ggctcagcgcataaataaggtgtggg

SEQ ID NO: 76224 - DNA, 26 bp, Homo sapiens
gctcagcgcataaataaggtgtgggg

SEQ ID NO: 76225 - DNA, 26 bp, Homo sapiens
ctcagcgcataaataaggtgtggggt

SEQ ID NO: 76226 - DNA, 26 bp, Homo sapiens
tcagcgcataaataaggtgtggggtg

SEQ ID NO: 76227 - DNA, 26 bp, Homo sapiens
cagcgcataaataaggtgtggggtgt

SEQ ID NO: 76228 - DNA, 26 bp, Homo sapiens
agcgcataaataaggtgtggggtgtc

SEQ ID NO: 76229 - DNA, 26 bp, Homo sapiens
gcgcataaataaggtgtggggtgtca

SEQ ID NO: 76230 - DNA, 26 bp, Homo sapiens
cgcataaataaggtgtggggtgtcag

SEQ ID NO: 76231 - DNA, 26 bp, Homo sapiens
gcataaataaggtgtggggtgtcagg

SEQ ID NO: 76232 - DNA, 26 bp, Homo sapiens
cataaataaggtgtggggtgtcaggt

SEQ ID NO: 76233 - DNA, 26 bp, Homo sapiens
ataaataaggtgtggggtgtcaggtg

SEQ ID NO: 76234 - DNA, 26 bp, Homo sapiens
taaataaggtgtggggtgtcaggtgg

SEQ ID NO: 76235 - DNA, 26 bp, Homo sapiens
aaataaggtgtggggtgtcaggtgga

SEQ ID NO: 76236 - DNA, 26 bp, Homo sapiens
aataaggtgtggggtgtcaggtggac

SEQ ID NO: 76237 - DNA, 26 bp, Homo sapiens
ataaggtgtggggtgtcaggtggact

SEQ ID NO: 76238 - DNA, 26 bp, Homo sapiens
taaggtgtggggtgtcaggtggactc

SEQ ID NO: 76239 - DNA, 26 bp, Homo sapiens
aaggtgtggggtgtcaggtggactca

SEQ ID NO: 76240 - DNA, 26 bp, Homo sapiens
aggtgtggggtgtcaggtggactcag

SEQ ID NO: 76241 - DNA, 26 bp, Homo sapiens
ggtgtggggtgtcaggtggactcagg

SEQ ID NO: 76242 - DNA, 26 bp, Homo sapiens
gtgtggggtgtcaggtggactcaggg

SEQ ID NO: 76243 - DNA, 26 bp, Homo sapiens
tgtggggtgtcaggtggactcagggt

SEQ ID NO: 76244 - DNA, 26 bp, Homo sapiens
gtggggtgtcaggtggactcagggtg

SEQ ID NO: 76245 - DNA, 26 bp, Homo sapiens
tggggtgtcaggtggactcagggtgg

SEQ ID NO: 76246 - DNA, 26 bp, Homo sapiens
ggggtgtcaggtggactcagggtggg

SEQ ID NO: 76247 - DNA, 26 bp, Homo sapiens
gggtgtcaggtggactcagggtgggt

SEQ ID NO: 76248 - DNA, 26 bp, Homo sapiens
ggtgtcaggtggactcagggtgggtt

SEQ ID NO: 76249 - DNA, 26 bp, Homo sapiens
gtgtcaggtggactcagggtgggttg

SEQ ID NO: 76250 - DNA, 26 bp, Homo sapiens
tgtcaggtggactcagggtgggttga

SEQ ID NO: 76251 - DNA, 26 bp, Homo sapiens
gtcaggtggactcagggtgggttgac

SEQ ID NO: 76252 - DNA, 26 bp, Homo sapiens
tcaggtggactcagggtgggttgacg

SEQ ID NO: 76253 - DNA, 26 bp, Homo sapiens
caggtggactcagggtgggttgacgt

SEQ ID NO: 76254 - DNA, 26 bp, Homo sapiens
aggtggactcagggtgggttgacgtt

SEQ ID NO: 76255 - DNA, 26 bp, Homo sapiens
ggtggactcagggtgggttgacgttc

SEQ ID NO: 76256 - DNA, 26 bp, Homo sapiens
gtggactcagggtgggttgacgttct

SEQ ID NO: 76257 - DNA, 26 bp, Homo sapiens
tggactcagggtgggttgacgttctc

SEQ ID NO: 76258 - DNA, 26 bp, Homo sapiens
ggactcagggtgggttgacgttctca

SEQ ID NO: 76259 - DNA, 26 bp, Homo sapiens
gactcagggtgggttgacgttctcag

SEQ ID NO: 76260 - DNA, 26 bp, Homo sapiens
actcagggtgggttgacgttctcaga

SEQ ID NO: 76261 - DNA, 26 bp, Homo sapiens
ctcagggtgggttgacgttctcagac

SEQ ID NO: 76262 - DNA, 26 bp, Homo sapiens
tcagggtgggttgacgttctcagaca

SEQ ID NO: 76263 - DNA, 26 bp, Homo sapiens
cagggtgggttgacgttctcagacac

SEQ ID NO: 76264 - DNA, 26 bp, Homo sapiens
agggtgggttgacgttctcagacaca

SEQ ID NO: 76265 - DNA, 26 bp, Homo sapiens
gggtgggttgacgttctcagacacag

SEQ ID NO: 76266 - DNA, 26 bp, Homo sapiens
ggtgggttgacgttctcagacacagg

SEQ ID NO: 76267 - DNA, 26 bp, Homo sapiens
gtgggttgacgttctcagacacaggt

SEQ ID NO: 76268 - DNA, 26 bp, Homo sapiens
tgggttgacgttctcagacacaggtt

SEQ ID NO: 76269 - DNA, 26 bp, Homo sapiens
gggttgacgttctcagacacaggttc

SEQ ID NO: 76270 - DNA, 26 bp, Homo sapiens
ggttgacgttctcagacacaggttcc

SEQ ID NO: 76271 - DNA, 26 bp, Homo sapiens
gttgacgttctcagacacaggttccc

SEQ ID NO: 76272 - DNA, 26 bp, Homo sapiens
ttgacgttctcagacacaggttccca

SEQ ID NO: 76273 - DNA, 26 bp, Homo sapiens
tgacgttctcagacacaggttcccat

SEQ ID NO: 76274 - DNA, 26 bp, Homo sapiens
gacgttctcagacacaggttcccatc

SEQ ID NO: 76275 - DNA, 26 bp, Homo sapiens
acgttctcagacacaggttcccatcg

SEQ ID NO: 76276 - DNA, 26 bp, Homo sapiens
cgttctcagacacaggttcccatcgg

SEQ ID NO: 76277 - DNA, 26 bp, Homo sapiens
gttctcagacacaggttcccatcggc

SEQ ID NO: 76278 - DNA, 26 bp, Homo sapiens
ttctcagacacaggttcccatcggcc

SEQ ID NO: 76279 - DNA, 26 bp, Homo sapiens
tctcagacacaggttcccatcggcca

SEQ ID NO: 76280 - DNA, 26 bp, Homo sapiens
ctcagacacaggttcccatcggccac

SEQ ID NO: 76281 - DNA, 26 bp, Homo sapiens
tcagacacaggttcccatcggccaca

SEQ ID NO: 76282 - DNA, 26 bp, Homo sapiens
cagacacaggttcccatcggccacat

SEQ ID NO: 76283 - DNA, 26 bp, Homo sapiens
agacacaggttcccatcggccacata

SEQ ID NO: 76284 - DNA, 26 bp, Homo sapiens
gacacaggttcccatcggccacatat

SEQ ID NO: 76285 - DNA, 26 bp, Homo sapiens
acacaggttcccatcggccacatatt

SEQ ID NO: 76286 - DNA, 26 bp, Homo sapiens
cacaggttcccatcggccacatattt

SEQ ID NO: 76287 - DNA, 26 bp, Homo sapiens
acaggttcccatcggccacatatttg

SEQ ID NO: 76288 - DNA, 26 bp, Homo sapiens
caggttcccatcggccacatatttga

SEQ ID NO: 76289 - DNA, 26 bp, Homo sapiens
aggttcccatcggccacatatttgag

SEQ ID NO: 76290 - DNA, 26 bp, Homo sapiens
ggttcccatcggccacatatttgagg

SEQ ID NO: 76291 - DNA, 26 bp, Homo sapiens
gttcccatcggccacatatttgaggt

SEQ ID NO: 76292 - DNA, 26 bp, Homo sapiens
ttcccatcggccacatatttgaggtc

SEQ ID NO: 76293 - DNA, 26 bp, Homo sapiens
tcccatcggccacatatttgaggtct

SEQ ID NO: 76294 - DNA, 26 bp, Homo sapiens
cccatcggccacatatttgaggtctc

SEQ ID NO: 76295 - DNA, 26 bp, Homo sapiens
ccatcggccacatatttgaggtctcg

SEQ ID NO: 76296 - DNA, 26 bp, Homo sapiens
catcggccacatatttgaggtctcgc

SEQ ID NO: 76297 - DNA, 26 bp, Homo sapiens
atcggccacatatttgaggtctcgcg

SEQ ID NO: 76298 - DNA, 26 bp, Homo sapiens
tcggccacatatttgaggtctcgcgt

SEQ ID NO: 76299 - DNA, 26 bp, Homo sapiens
cggccacatatttgaggtctcgcgtg

SEQ ID NO: 76300 - DNA, 26 bp, Homo sapiens
ggccacatatttgaggtctcgcgtga

SEQ ID NO: 76301 - DNA, 26 bp, Homo sapiens
gccacatatttgaggtctcgcgtgag

SEQ ID NO: 76302 - DNA, 26 bp, Homo sapiens
ccacatatttgaggtctcgcgtgagg

SEQ ID NO: 76303 - DNA, 26 bp, Homo sapiens
cacatatttgaggtctcgcgtgagga

SEQ ID NO: 76304 - DNA, 26 bp, Homo sapiens
acatatttgaggtctcgcgtgaggag

SEQ ID NO: 76305 - DNA, 26 bp, Homo sapiens
catatttgaggtctcgcgtgaggagg

SEQ ID NO: 76306 - DNA, 26 bp, Homo sapiens
atatttgaggtctcgcgtgaggaggc

SEQ ID NO: 76307 - DNA, 26 bp, Homo sapiens
tatttgaggtctcgcgtgaggaggcg

SEQ ID NO: 76308 - DNA, 26 bp, Homo sapiens
atttgaggtctcgcgtgaggaggcgg

SEQ ID NO: 76309 - DNA, 26 bp, Homo sapiens
tttgaggtctcgcgtgaggaggcgga

SEQ ID NO: 76310 - DNA, 26 bp, Homo sapiens
ttgaggtctcgcgtgaggaggcggaa

SEQ ID NO: 76311 - DNA, 26 bp, Homo sapiens
tgaggtctcgcgtgaggaggcggaag

SEQ ID NO: 76312 - DNA, 26 bp, Homo sapiens
gaggtctcgcgtgaggaggcggaaga

SEQ ID NO: 76313 - DNA, 26 bp, Homo sapiens
aggtctcgcgtgaggaggcggaagag

SEQ ID NO: 76314 - DNA, 26 bp, Homo sapiens
ggtctcgcgtgaggaggcggaagagg

SEQ ID NO: 76315 - DNA, 26 bp, Homo sapiens
gtctcgcgtgaggaggcggaagaggt

SEQ ID NO: 76316 - DNA, 26 bp, Homo sapiens
tctcgcgtgaggaggcggaagaggtt

SEQ ID NO: 76317 - DNA, 26 bp, Homo sapiens
ctcgcgtgaggaggcggaagaggttg

SEQ ID NO: 76318 - DNA, 26 bp, Homo sapiens
tcgcgtgaggaggcggaagaggttga

SEQ ID NO: 76319 - DNA, 26 bp, Homo sapiens
cgcgtgaggaggcggaagaggttgaa

SEQ ID NO: 76320 - DNA, 26 bp, Homo sapiens
gcgtgaggaggcggaagaggttgaag

SEQ ID NO: 76321 - DNA, 26 bp, Homo sapiens
cgtgaggaggcggaagaggttgaagg

SEQ ID NO: 76322 - DNA, 26 bp, Homo sapiens
gtgaggaggcggaagaggttgaaggt

SEQ ID NO: 76323 - DNA, 26 bp, Homo sapiens
tgaggaggcggaagaggttgaaggtg

SEQ ID NO: 76324 - DNA, 26 bp, Homo sapiens
gaggaggcggaagaggttgaaggtga

SEQ ID NO: 76325 - DNA, 26 bp, Homo sapiens
aggaggcggaagaggttgaaggtgac

SEQ ID NO: 76326 - DNA, 26 bp, Homo sapiens
ggaggcggaagaggttgaaggtgaca

SEQ ID NO: 76327 - DNA, 26 bp, Homo sapiens
gaggcggaagaggttgaaggtgacag

SEQ ID NO: 76328 - DNA, 26 bp, Homo sapiens
aggcggaagaggttgaaggtgacaga

SEQ ID NO: 76329 - DNA, 26 bp, Homo sapiens
ggcggaagaggttgaaggtgacagat

SEQ ID NO: 76330 - DNA, 26 bp, Homo sapiens
gcggaagaggttgaaggtgacagatg

SEQ ID NO: 76331 - DNA, 26 bp, Homo sapiens
cggaagaggttgaaggtgacagatgc

SEQ ID NO: 76332 - DNA, 26 bp, Homo sapiens
ggaagaggttgaaggtgacagatgcc

SEQ ID NO: 76333 - DNA, 26 bp, Homo sapiens
gaagaggttgaaggtgacagatgcct

SEQ ID NO: 76334 - DNA, 26 bp, Homo sapiens
aagaggttgaaggtgacagatgcctc

SEQ ID NO: 76335 - DNA, 26 bp, Homo sapiens
agaggttgaaggtgacagatgcctcc

SEQ ID NO: 76336 - DNA, 26 bp, Homo sapiens
gaggttgaaggtgacagatgcctcca

SEQ ID NO: 76337 - DNA, 26 bp, Homo sapiens
aggttgaaggtgacagatgcctccag

SEQ ID NO: 76338 - DNA, 26 bp, Homo sapiens
ggttgaaggtgacagatgcctccagg

SEQ ID NO: 76339 - DNA, 26 bp, Homo sapiens
gttgaaggtgacagatgcctccaggc

SEQ ID NO: 76340 - DNA, 26 bp, Homo sapiens
ttgaaggtgacagatgcctccaggca

SEQ ID NO: 76341 - DNA, 26 bp, Homo sapiens
tgaaggtgacagatgcctccaggcag

SEQ ID NO: 76342 - DNA, 26 bp, Homo sapiens
gaaggtgacagatgcctccaggcagc

SEQ ID NO: 76343 - DNA, 26 bp, Homo sapiens
aaggtgacagatgcctccaggcagcc

SEQ ID NO: 76344 - DNA, 26 bp, Homo sapiens
aggtgacagatgcctccaggcagcca

SEQ ID NO: 76345 - DNA, 26 bp, Homo sapiens
ggtgacagatgcctccaggcagccag

SEQ ID NO: 76346 - DNA, 26 bp, Homo sapiens
gtgacagatgcctccaggcagccagc

SEQ ID NO: 76347 - DNA, 26 bp, Homo sapiens
tgacagatgcctccaggcagccagcg

SEQ ID NO: 76348 - DNA, 26 bp, Homo sapiens
gacagatgcctccaggcagccagcgg

SEQ ID NO: 76349 - DNA, 26 bp, Homo sapiens
acagatgcctccaggcagccagcgga

SEQ ID NO: 76350 - DNA, 26 bp, Homo sapiens
cagatgcctccaggcagccagcggac

SEQ ID NO: 76351 - DNA, 26 bp, Homo sapiens
agatgcctccaggcagccagcggact

SEQ ID NO: 76352 - DNA, 26 bp, Homo sapiens
gatgcctccaggcagccagcggactc

SEQ ID NO: 76353 - DNA, 26 bp, Homo sapiens
atgcctccaggcagccagcggactcc

SEQ ID NO: 76354 - DNA, 26 bp, Homo sapiens
tgcctccaggcagccagcggactcct

SEQ ID NO: 76355 - DNA, 26 bp, Homo sapiens
gcctccaggcagccagcggactcctt

SEQ ID NO: 76356 - DNA, 26 bp, Homo sapiens
cctccaggcagccagcggactccttt

SEQ ID NO: 76357 - DNA, 26 bp, Homo sapiens
ctccaggcagccagcggactcctttt

SEQ ID NO: 76358 - DNA, 26 bp, Homo sapiens
tccaggcagccagcggactccttttt

SEQ ID NO: 76359 - DNA, 26 bp, Homo sapiens
ccaggcagccagcggactcctttttg

SEQ ID NO: 76360 - DNA, 26 bp, Homo sapiens
caggcagccagcggactcctttttgg

SEQ ID NO: 76361 - DNA, 26 bp, Homo sapiens
aggcagccagcggactcctttttggg

SEQ ID NO: 76362 - DNA, 26 bp, Homo sapiens
ggcagccagcggactcctttttgggg

SEQ ID NO: 76363 - DNA, 26 bp, Homo sapiens
gcagccagcggactcctttttggggg

SEQ ID NO: 76364 - DNA, 26 bp, Homo sapiens
cagccagcggactcctttttgggggc

SEQ ID NO: 76365 - DNA, 26 bp, Homo sapiens
agccagcggactcctttttgggggcc

SEQ ID NO: 76366 - DNA, 26 bp, Homo sapiens
gccagcggactcctttttgggggcct

SEQ ID NO: 76367 - DNA, 26 bp, Homo sapiens
ccagcggactcctttttgggggcctc

SEQ ID NO: 76368 - DNA, 26 bp, Homo sapiens
cagcggactcctttttgggggcctcc

SEQ ID NO: 76369 - DNA, 26 bp, Homo sapiens
agcggactcctttttgggggcctcct

SEQ ID NO: 76370 - DNA, 26 bp, Homo sapiens
gcggactcctttttgggggcctcctg

SEQ ID NO: 76371 - DNA, 26 bp, Homo sapiens
cggactcctttttgggggcctcctgg

SEQ ID NO: 76372 - DNA, 26 bp, Homo sapiens
ggactcctttttgggggcctcctgga

SEQ ID NO: 76373 - DNA, 26 bp, Homo sapiens
gactcctttttgggggcctcctggag

SEQ ID NO: 76374 - DNA, 26 bp, Homo sapiens
actcctttttgggggcctcctggagc

SEQ ID NO: 76375 - DNA, 26 bp, Homo sapiens
ctcctttttgggggcctcctggagcc

SEQ ID NO: 76376 - DNA, 26 bp, Homo sapiens
tcctttttgggggcctcctggagccg

SEQ ID NO: 76377 - DNA, 26 bp, Homo sapiens
cctttttgggggcctcctggagccgg

SEQ ID NO: 76378 - DNA, 26 bp, Homo sapiens
ctttttgggggcctcctggagccggt

SEQ ID NO: 76379 - DNA, 26 bp, Homo sapiens
tttttgggggcctcctggagccggtg

SEQ ID NO: 76380 - DNA, 26 bp, Homo sapiens
ttttgggggcctcctggagccggtgc

SEQ ID NO: 76381 - DNA, 26 bp, Homo sapiens
tttgggggcctcctggagccggtgca

SEQ ID NO: 76382 - DNA, 26 bp, Homo sapiens
ttgggggcctcctggagccggtgcag

SEQ ID NO: 76383 - DNA, 26 bp, Homo sapiens
tgggggcctcctggagccggtgcagc

SEQ ID NO: 76384 - DNA, 26 bp, Homo sapiens
gggggcctcctggagccggtgcagcc

SEQ ID NO: 76385 - DNA, 26 bp, Homo sapiens
ggggcctcctggagccggtgcagcca

SEQ ID NO: 76386 - DNA, 26 bp, Homo sapiens
gggcctcctggagccggtgcagccag

SEQ ID NO: 76387 - DNA, 26 bp, Homo sapiens
ggcctcctggagccggtgcagccagt

SEQ ID NO: 76388 - DNA, 26 bp, Homo sapiens
gcctcctggagccggtgcagccagtg

SEQ ID NO: 76389 - DNA, 26 bp, Homo sapiens
cctcctggagccggtgcagccagtgg

SEQ ID NO: 76390 - DNA, 26 bp, Homo sapiens
ctcctggagccggtgcagccagtggt

SEQ ID NO: 76391 - DNA, 26 bp, Homo sapiens
tcctggagccggtgcagccagtggtg

SEQ ID NO: 76392 - DNA, 26 bp, Homo sapiens
cctggagccggtgcagccagtggtgg

SEQ ID NO: 76393 - DNA, 26 bp, Homo sapiens
ctggagccggtgcagccagtggtgga

SEQ ID NO: 76394 - DNA, 26 bp, Homo sapiens
tggagccggtgcagccagtggtggag

SEQ ID NO: 76395 - DNA, 26 bp, Homo sapiens
ggagccggtgcagccagtggtggagg

SEQ ID NO: 76396 - DNA, 26 bp, Homo sapiens
gagccggtgcagccagtggtggaggc

SEQ ID NO: 76397 - DNA, 26 bp, Homo sapiens
agccggtgcagccagtggtggaggcg

SEQ ID NO: 76398 - DNA, 26 bp, Homo sapiens
gccggtgcagccagtggtggaggcgg

SEQ ID NO: 76399 - DNA, 26 bp, Homo sapiens
ccggtgcagccagtggtggaggcggc

SEQ ID NO: 76400 - DNA, 26 bp, Homo sapiens
cggtgcagccagtggtggaggcggcc

SEQ ID NO: 76401 - DNA, 26 bp, Homo sapiens
ggtgcagccagtggtggaggcggccc

SEQ ID NO: 76402 - DNA, 26 bp, Homo sapiens
gtgcagccagtggtggaggcggcccc

SEQ ID NO: 76403 - DNA, 26 bp, Homo sapiens
tgcagccagtggtggaggcggccccg

SEQ ID NO: 76404 - DNA, 26 bp, Homo sapiens
gcagccagtggtggaggcggccccgg

SEQ ID NO: 76405 - DNA, 26 bp, Homo sapiens
cagccagtggtggaggcggccccggg

SEQ ID NO: 76406 - DNA, 26 bp, Homo sapiens
agccagtggtggaggcggccccgggg

SEQ ID NO: 76407 - DNA, 26 bp, Homo sapiens
gccagtggtggaggcggccccggggc

SEQ ID NO: 76408 - DNA, 26 bp, Homo sapiens
ccagtggtggaggcggccccggggcc

SEQ ID NO: 76409 - DNA, 26 bp, Homo sapiens
cagtggtggaggcggccccggggcct

SEQ ID NO: 76410 - DNA, 26 bp, Homo sapiens
agtggtggaggcggccccggggcctg

SEQ ID NO: 76411 - DNA, 26 bp, Homo sapiens
gtggtggaggcggccccggggcctgg

SEQ ID NO: 76412 - DNA, 26 bp, Homo sapiens
tggtggaggcggccccggggcctggg

SEQ ID NO: 76413 - DNA, 26 bp, Homo sapiens
ggtggaggcggccccggggcctgggc

SEQ ID NO: 76414 - DNA, 26 bp, Homo sapiens
gtggaggcggccccggggcctgggcc

SEQ ID NO: 76415 - DNA, 26 bp, Homo sapiens
tggaggcggccccggggcctgggccc

SEQ ID NO: 76416 - DNA, 26 bp, Homo sapiens
ggaggcggccccggggcctgggccct

SEQ ID NO: 76417 - DNA, 26 bp, Homo sapiens
gaggcggccccggggcctgggccctg

SEQ ID NO: 76418 - DNA, 26 bp, Homo sapiens
aggcggccccggggcctgggccctgc

SEQ ID NO: 76419 - DNA, 26 bp, Homo sapiens
ggcggccccggggcctgggccctgct

SEQ ID NO: 76420 - DNA, 26 bp, Homo sapiens
gcggccccggggcctgggccctgctg

SEQ ID NO: 76421 - DNA, 26 bp, Homo sapiens
cggccccggggcctgggccctgctgt

SEQ ID NO: 76422 - DNA, 26 bp, Homo sapiens
ggccccggggcctgggccctgctgtg

SEQ ID NO: 76423 - DNA, 26 bp, Homo sapiens
gccccggggcctgggccctgctgtgg

SEQ ID NO: 76424 - DNA, 26 bp, Homo sapiens
ccccggggcctgggccctgctgtggg

SEQ ID NO: 76425 - DNA, 26 bp, Homo sapiens
cccggggcctgggccctgctgtgggc

SEQ ID NO: 76426 - DNA, 26 bp, Homo sapiens
ccggggcctgggccctgctgtgggct

SEQ ID NO: 76427 - DNA, 26 bp, Homo sapiens
cggggcctgggccctgctgtgggctg

SEQ ID NO: 76428 - DNA, 26 bp, Homo sapiens
ggggcctgggccctgctgtgggctga

SEQ ID NO: 76429 - DNA, 26 bp, Homo sapiens
gggcctgggccctgctgtgggctgag

SEQ ID NO: 76430 - DNA, 26 bp, Homo sapiens
ggcctgggccctgctgtgggctgagg

SEQ ID NO: 76431 - DNA, 26 bp, Homo sapiens
gcctgggccctgctgtgggctgaggc

SEQ ID NO: 76432 - DNA, 26 bp, Homo sapiens
cctgggccctgctgtgggctgaggct

SEQ ID NO: 76433 - DNA, 26 bp, Homo sapiens
ctgggccctgctgtgggctgaggctg

SEQ ID NO: 76434 - DNA, 26 bp, Homo sapiens
tgggccctgctgtgggctgaggctgg

SEQ ID NO: 76435 - DNA, 26 bp, Homo sapiens
gggccctgctgtgggctgaggctgga

SEQ ID NO: 76436 - DNA, 26 bp, Homo sapiens
ggccctgctgtgggctgaggctggat

SEQ ID NO: 76437 - DNA, 26 bp, Homo sapiens
gccctgctgtgggctgaggctggata

SEQ ID NO: 76438 - DNA, 26 bp, Homo sapiens
ccctgctgtgggctgaggctggatac

SEQ ID NO: 76439 - DNA, 26 bp, Homo sapiens
cctgctgtgggctgaggctggataca

SEQ ID NO: 76440 - DNA, 26 bp, Homo sapiens
ctgctgtgggctgaggctggatacag

SEQ ID NO: 76441 - DNA, 26 bp, Homo sapiens
tgctgtgggctgaggctggatacagg

SEQ ID NO: 76442 - DNA, 26 bp, Homo sapiens
gctgtgggctgaggctggatacaggc

SEQ ID NO: 76443 - DNA, 26 bp, Homo sapiens
ctgtgggctgaggctggatacaggcc

SEQ ID NO: 76444 - DNA, 26 bp, Homo sapiens
tgtgggctgaggctggatacaggcct

SEQ ID NO: 76445 - DNA, 26 bp, Homo sapiens
gtgggctgaggctggatacaggcctg

SEQ ID NO: 76446 - DNA, 26 bp, Homo sapiens
tgggctgaggctggatacaggcctgg

SEQ ID NO: 76447 - DNA, 26 bp, Homo sapiens
gggctgaggctggatacaggcctgga

SEQ ID NO: 76448 - DNA, 26 bp, Homo sapiens
ggctgaggctggatacaggcctggag

SEQ ID NO: 76449 - DNA, 26 bp, Homo sapiens
gctgaggctggatacaggcctggagc

SEQ ID NO: 76450 - DNA, 26 bp, Homo sapiens
ctgaggctggatacaggcctggagct

SEQ ID NO: 76451 - DNA, 26 bp, Homo sapiens
tgaggctggatacaggcctggagctg

SEQ ID NO: 76452 - DNA, 26 bp, Homo sapiens
gaggctggatacaggcctggagctgg

SEQ ID NO: 76453 - DNA, 26 bp, Homo sapiens
aggctggatacaggcctggagctggg

SEQ ID NO: 76454 - DNA, 26 bp, Homo sapiens
ggctggatacaggcctggagctggga

SEQ ID NO: 76455 - DNA, 26 bp, Homo sapiens
gctggatacaggcctggagctgggag

SEQ ID NO: 76456 - DNA, 26 bp, Homo sapiens
ctggatacaggcctggagctgggaga

SEQ ID NO: 76457 - DNA, 26 bp, Homo sapiens
tggatacaggcctggagctgggagag

SEQ ID NO: 76458 - DNA, 26 bp, Homo sapiens
ggatacaggcctggagctgggagagg

SEQ ID NO: 76459 - DNA, 26 bp, Homo sapiens
gatacaggcctggagctgggagagga

SEQ ID NO: 76460 - DNA, 26 bp, Homo sapiens
atacaggcctggagctgggagaggat

SEQ ID NO: 76461 - DNA, 26 bp, Homo sapiens
tacaggcctggagctgggagaggatg

SEQ ID NO: 76462 - DNA, 26 bp, Homo sapiens
acaggcctggagctgggagaggatgt

SEQ ID NO: 76463 - DNA, 26 bp, Homo sapiens
caggcctggagctgggagaggatgtg

SEQ ID NO: 76464 - DNA, 26 bp, Homo sapiens
aggcctggagctgggagaggatgtgg

SEQ ID NO: 76465 - DNA, 26 bp, Homo sapiens
ggcctggagctgggagaggatgtggt

SEQ ID NO: 76466 - DNA, 26 bp, Homo sapiens
gcctggagctgggagaggatgtggtg

SEQ ID NO: 76467 - DNA, 26 bp, Homo sapiens
cctggagctgggagaggatgtggtgc

SEQ ID NO: 76468 - DNA, 26 bp, Homo sapiens
ctggagctgggagaggatgtggtgca

SEQ ID NO: 76469 - DNA, 26 bp, Homo sapiens
tggagctgggagaggatgtggtgcag

SEQ ID NO: 76470 - DNA, 26 bp, Homo sapiens
ggagctgggagaggatgtggtgcagg

SEQ ID NO: 76471 - DNA, 26 bp, Homo sapiens
gagctgggagaggatgtggtgcaggg

SEQ ID NO: 76472 - DNA, 26 bp, Homo sapiens
agctgggagaggatgtggtgcagggt

SEQ ID NO: 76473 - DNA, 26 bp, Homo sapiens
gctgggagaggatgtggtgcagggtg

SEQ ID NO: 76474 - DNA, 26 bp, Homo sapiens
ctgggagaggatgtggtgcagggtgt

SEQ ID NO: 76475 - DNA, 26 bp, Homo sapiens
tgggagaggatgtggtgcagggtgtg

SEQ ID NO: 76476 - DNA, 26 bp, Homo sapiens
gggagaggatgtggtgcagggtgtga

SEQ ID NO: 76477 - DNA, 26 bp, Homo sapiens
ggagaggatgtggtgcagggtgtgaa

SEQ ID NO: 76478 - DNA, 26 bp, Homo sapiens
gagaggatgtggtgcagggtgtgaag

SEQ ID NO: 76479 - DNA, 26 bp, Homo sapiens
agaggatgtggtgcagggtgtgaagg

SEQ ID NO: 76480 - DNA, 26 bp, Homo sapiens
gaggatgtggtgcagggtgtgaaggg

SEQ ID NO: 76481 - DNA, 26 bp, Homo sapiens
aggatgtggtgcagggtgtgaagggg

SEQ ID NO: 76482 - DNA, 26 bp, Homo sapiens
ggatgtggtgcagggtgtgaaggggc

SEQ ID NO: 76483 - DNA, 26 bp, Homo sapiens
gatgtggtgcagggtgtgaaggggct

SEQ ID NO: 76484 - DNA, 26 bp, Homo sapiens
atgtggtgcagggtgtgaaggggctg

SEQ ID NO: 76485 - DNA, 26 bp, Homo sapiens
tgtggtgcagggtgtgaaggggctgg

SEQ ID NO: 76486 - DNA, 26 bp, Homo sapiens
gtggtgcagggtgtgaaggggctggt

SEQ ID NO: 76487 - DNA, 26 bp, Homo sapiens
tggtgcagggtgtgaaggggctggtc

SEQ ID NO: 76488 - DNA, 26 bp, Homo sapiens
ggtgcagggtgtgaaggggctggtct

SEQ ID NO: 76489 - DNA, 26 bp, Homo sapiens
gtgcagggtgtgaaggggctggtcta

SEQ ID NO: 76490 - DNA, 26 bp, Homo sapiens
tgcagggtgtgaaggggctggtctag

SEQ ID NO: 76491 - DNA, 26 bp, Homo sapiens
gcagggtgtgaaggggctggtctagg

SEQ ID NO: 76492 - DNA, 26 bp, Homo sapiens
cagggtgtgaaggggctggtctagga

SEQ ID NO: 76493 - DNA, 26 bp, Homo sapiens
agggtgtgaaggggctggtctaggac

SEQ ID NO: 76494 - DNA, 26 bp, Homo sapiens
gggtgtgaaggggctggtctaggacg

SEQ ID NO: 76495 - DNA, 26 bp, Homo sapiens
ggtgtgaaggggctggtctaggacgt

SEQ ID NO: 76496 - DNA, 26 bp, Homo sapiens
gtgtgaaggggctggtctaggacgtc

SEQ ID NO: 76497 - DNA, 26 bp, Homo sapiens
tgtgaaggggctggtctaggacgtcc

SEQ ID NO: 76498 - DNA, 26 bp, Homo sapiens
gtgaaggggctggtctaggacgtcct

SEQ ID NO: 76499 - DNA, 26 bp, Homo sapiens
tgaaggggctggtctaggacgtcctc

SEQ ID NO: 76500 - DNA, 26 bp, Homo sapiens
gaaggggctggtctaggacgtcctcc

SEQ ID NO: 76501 - DNA, 26 bp, Homo sapiens
aaggggctggtctaggacgtcctcca

SEQ ID NO: 76502 - DNA, 26 bp, Homo sapiens
aggggctggtctaggacgtcctccag

SEQ ID NO: 76503 - DNA, 26 bp, Homo sapiens
ggggctggtctaggacgtcctccagg

SEQ ID NO: 76504 - DNA, 26 bp, Homo sapiens
gggctggtctaggacgtcctccaggg

SEQ ID NO: 76505 - DNA, 26 bp, Homo sapiens
ggctggtctaggacgtcctccagggc

SEQ ID NO: 76506 - DNA, 26 bp, Homo sapiens
gctggtctaggacgtcctccagggct

SEQ ID NO: 76507 - DNA, 26 bp, Homo sapiens
ctggtctaggacgtcctccagggctg

SEQ ID NO: 76508 - DNA, 26 bp, Homo sapiens
tggtctaggacgtcctccagggctgg

SEQ ID NO: 76509 - DNA, 26 bp, Homo sapiens
ggtctaggacgtcctccagggctggg

SEQ ID NO: 76510 - DNA, 26 bp, Homo sapiens
gtctaggacgtcctccagggctgggc

SEQ ID NO: 76511 - DNA, 26 bp, Homo sapiens
tctaggacgtcctccagggctgggcc

SEQ ID NO: 76512 - DNA, 26 bp, Homo sapiens
ctaggacgtcctccagggctgggcca

SEQ ID NO: 76513 - DNA, 26 bp, Homo sapiens
taggacgtcctccagggctgggccag

SEQ ID NO: 76514 - DNA, 26 bp, Homo sapiens
aggacgtcctccagggctgggccagc

SEQ ID NO: 76515 - DNA, 26 bp, Homo sapiens
ggacgtcctccagggctgggccagca

SEQ ID NO: 76516 - DNA, 26 bp, Homo sapiens
gacgtcctccagggctgggccagcag

SEQ ID NO: 76517 - DNA, 26 bp, Homo sapiens
acgtcctccagggctgggccagcagc

SEQ ID NO: 76518 - DNA, 26 bp, Homo sapiens
cgtcctccagggctgggccagcagcg

SEQ ID NO: 76519 - DNA, 26 bp, Homo sapiens
gtcctccagggctgggccagcagcgg

SEQ ID NO: 76520 - DNA, 26 bp, Homo sapiens
tcctccagggctgggccagcagcggc

SEQ ID NO: 76521 - DNA, 26 bp, Homo sapiens
cctccagggctgggccagcagcggcc

SEQ ID NO: 76522 - DNA, 26 bp, Homo sapiens
ctccagggctgggccagcagcggcct

SEQ ID NO: 76523 - DNA, 26 bp, Homo sapiens
tccagggctgggccagcagcggcctc

SEQ ID NO: 76524 - DNA, 26 bp, Homo sapiens
ccagggctgggccagcagcggcctcc

SEQ ID NO: 76525 - DNA, 26 bp, Homo sapiens
cagggctgggccagcagcggcctcca

SEQ ID NO: 76526 - DNA, 26 bp, Homo sapiens
agggctgggccagcagcggcctccag

SEQ ID NO: 76527 - DNA, 26 bp, Homo sapiens
gggctgggccagcagcggcctccagg

SEQ ID NO: 76528 - DNA, 26 bp, Homo sapiens
ggctgggccagcagcggcctccagga

SEQ ID NO: 76529 - DNA, 26 bp, Homo sapiens
gctgggccagcagcggcctccaggac

SEQ ID NO: 76530 - DNA, 26 bp, Homo sapiens
ctgggccagcagcggcctccaggacc

SEQ ID NO: 76531 - DNA, 26 bp, Homo sapiens
tgggccagcagcggcctccaggacct

SEQ ID NO: 76532 - DNA, 26 bp, Homo sapiens
gggccagcagcggcctccaggacctt

SEQ ID NO: 76533 - DNA, 26 bp, Homo sapiens
ggccagcagcggcctccaggaccttc

SEQ ID NO: 76534 - DNA, 26 bp, Homo sapiens
gccagcagcggcctccaggaccttca

SEQ ID NO: 76535 - DNA, 26 bp, Homo sapiens
ccagcagcggcctccaggaccttcag

SEQ ID NO: 76536 - DNA, 26 bp, Homo sapiens
cagcagcggcctccaggaccttcagc

SEQ ID NO: 76537 - DNA, 26 bp, Homo sapiens
agcagcggcctccaggaccttcagcg

SEQ ID NO: 76538 - DNA, 26 bp, Homo sapiens
gcagcggcctccaggaccttcagcgt

SEQ ID NO: 76539 - DNA, 26 bp, Homo sapiens
cagcggcctccaggaccttcagcgtc

SEQ ID NO: 76540 - DNA, 26 bp, Homo sapiens
agcggcctccaggaccttcagcgtca

SEQ ID NO: 76541 - DNA, 26 bp, Homo sapiens
gcggcctccaggaccttcagcgtcag

SEQ ID NO: 76542 - DNA, 26 bp, Homo sapiens
cggcctccaggaccttcagcgtcagg

SEQ ID NO: 76543 - DNA, 26 bp, Homo sapiens
ggcctccaggaccttcagcgtcaggg

SEQ ID NO: 76544 - DNA, 26 bp, Homo sapiens
gcctccaggaccttcagcgtcagggc

SEQ ID NO: 76545 - DNA, 26 bp, Homo sapiens
cctccaggaccttcagcgtcagggcc

SEQ ID NO: 76546 - DNA, 26 bp, Homo sapiens
ctccaggaccttcagcgtcagggcca

SEQ ID NO: 76547 - DNA, 26 bp, Homo sapiens
tccaggaccttcagcgtcagggccag

SEQ ID NO: 76548 - DNA, 26 bp, Homo sapiens
ccaggaccttcagcgtcagggccagc

SEQ ID NO: 76549 - DNA, 26 bp, Homo sapiens
caggaccttcagcgtcagggccagct

SEQ ID NO: 76550 - DNA, 26 bp, Homo sapiens
aggaccttcagcgtcagggccagctc

SEQ ID NO: 76551 - DNA, 26 bp, Homo sapiens
ggaccttcagcgtcagggccagctca

SEQ ID NO: 76552 - DNA, 26 bp, Homo sapiens
gaccttcagcgtcagggccagctcag

SEQ ID NO: 76553 - DNA, 26 bp, Homo sapiens
accttcagcgtcagggccagctcagc

SEQ ID NO: 76554 - DNA, 26 bp, Homo sapiens
ccttcagcgtcagggccagctcagcc

SEQ ID NO: 76555 - DNA, 26 bp, Homo sapiens
cttcagcgtcagggccagctcagcct

SEQ ID NO: 76556 - DNA, 26 bp, Homo sapiens
ttcagcgtcagggccagctcagcctc

SEQ ID NO: 76557 - DNA, 26 bp, Homo sapiens
tcagcgtcagggccagctcagcctcc

SEQ ID NO: 76558 - DNA, 26 bp, Homo sapiens
cagcgtcagggccagctcagcctcca

SEQ ID NO: 76559 - DNA, 26 bp, Homo sapiens
agcgtcagggccagctcagcctccaa

SEQ ID NO: 76560 - DNA, 26 bp, Homo sapiens
gcgtcagggccagctcagcctccaag

SEQ ID NO: 76561 - DNA, 26 bp, Homo sapiens
cgtcagggccagctcagcctccaagg

SEQ ID NO: 76562 - DNA, 26 bp, Homo sapiens
gtcagggccagctcagcctccaaggc

SEQ ID NO: 76563 - DNA, 26 bp, Homo sapiens
tcagggccagctcagcctccaaggcc

SEQ ID NO: 76564 - DNA, 26 bp, Homo sapiens
cagggccagctcagcctccaaggcca

SEQ ID NO: 76565 - DNA, 26 bp, Homo sapiens
agggccagctcagcctccaaggccac

SEQ ID NO: 76566 - DNA, 26 bp, Homo sapiens
gggccagctcagcctccaaggccaca

SEQ ID NO: 76567 - DNA, 26 bp, Homo sapiens
ggccagctcagcctccaaggccacag

SEQ ID NO: 76568 - DNA, 26 bp, Homo sapiens
gccagctcagcctccaaggccacagg

SEQ ID NO: 76569 - DNA, 26 bp, Homo sapiens
ccagctcagcctccaaggccacaggg

SEQ ID NO: 76570 - DNA, 26 bp, Homo sapiens
cagctcagcctccaaggccacagggc

SEQ ID NO: 76571 - DNA, 26 bp, Homo sapiens
agctcagcctccaaggccacagggcg

SEQ ID NO: 76572 - DNA, 26 bp, Homo sapiens
gctcagcctccaaggccacagggcgc

SEQ ID NO: 76573 - DNA, 26 bp, Homo sapiens
ctcagcctccaaggccacagggcgct

SEQ ID NO: 76574 - DNA, 26 bp, Homo sapiens
tcagcctccaaggccacagggcgctc

SEQ ID NO: 76575 - DNA, 26 bp, Homo sapiens
cagcctccaaggccacagggcgctcc

SEQ ID NO: 76576 - DNA, 26 bp, Homo sapiens
agcctccaaggccacagggcgctccc

SEQ ID NO: 76577 - DNA, 26 bp, Homo sapiens
gcctccaaggccacagggcgctccct

SEQ ID NO: 76578 - DNA, 26 bp, Homo sapiens
cctccaaggccacagggcgctccctc

SEQ ID NO: 76579 - DNA, 26 bp, Homo sapiens
ctccaaggccacagggcgctccctca

SEQ ID NO: 76580 - DNA, 26 bp, Homo sapiens
tccaaggccacagggcgctccctcac

SEQ ID NO: 76581 - DNA, 26 bp, Homo sapiens
ccaaggccacagggcgctccctcacc

SEQ ID NO: 76582 - DNA, 26 bp, Homo sapiens
caaggccacagggcgctccctcacct

SEQ ID NO: 76583 - DNA, 26 bp, Homo sapiens
aaggccacagggcgctccctcacctg

SEQ ID NO: 76584 - DNA, 26 bp, Homo sapiens
aggccacagggcgctccctcacctgg

SEQ ID NO: 76585 - DNA, 26 bp, Homo sapiens
ggccacagggcgctccctcacctgga

SEQ ID NO: 76586 - DNA, 26 bp, Homo sapiens
gccacagggcgctccctcacctggag

SEQ ID NO: 76587 - DNA, 26 bp, Homo sapiens
ccacagggcgctccctcacctggaga

SEQ ID NO: 76588 - DNA, 26 bp, Homo sapiens
cacagggcgctccctcacctggagaa

SEQ ID NO: 76589 - DNA, 26 bp, Homo sapiens
acagggcgctccctcacctggagaag

SEQ ID NO: 76590 - DNA, 26 bp, Homo sapiens
cagggcgctccctcacctggagaagc

SEQ ID NO: 76591 - DNA, 26 bp, Homo sapiens
agggcgctccctcacctggagaagcc

SEQ ID NO: 76592 - DNA, 26 bp, Homo sapiens
gggcgctccctcacctggagaagcct

SEQ ID NO: 76593 - DNA, 26 bp, Homo sapiens
ggcgctccctcacctggagaagcctc

SEQ ID NO: 76594 - DNA, 26 bp, Homo sapiens
gcgctccctcacctggagaagcctca

SEQ ID NO: 76595 - DNA, 26 bp, Homo sapiens
cgctccctcacctggagaagcctcag

SEQ ID NO: 76596 - DNA, 26 bp, Homo sapiens
gctccctcacctggagaagcctcagg

SEQ ID NO: 76597 - DNA, 26 bp, Homo sapiens
ctccctcacctggagaagcctcaggt

SEQ ID NO: 76598 - DNA, 26 bp, Homo sapiens
tccctcacctggagaagcctcaggtc

SEQ ID NO: 76599 - DNA, 26 bp, Homo sapiens
ccctcacctggagaagcctcaggtcc

SEQ ID NO: 76600 - DNA, 26 bp, Homo sapiens
cctcacctggagaagcctcaggtccc

SEQ ID NO: 76601 - DNA, 26 bp, Homo sapiens
ctcacctggagaagcctcaggtccca

SEQ ID NO: 76602 - DNA, 26 bp, Homo sapiens
tcacctggagaagcctcaggtcccaa

SEQ ID NO: 76603 - DNA, 26 bp, Homo sapiens
cacctggagaagcctcaggtcccaat

SEQ ID NO: 76604 - DNA, 26 bp, Homo sapiens
acctggagaagcctcaggtcccaatt

SEQ ID NO: 76605 - DNA, 26 bp, Homo sapiens
cctggagaagcctcaggtcccaattc

SEQ ID NO: 76606 - DNA, 26 bp, Homo sapiens
ctggagaagcctcaggtcccaattcc

SEQ ID NO: 76607 - DNA, 26 bp, Homo sapiens
tggagaagcctcaggtcccaattccc

SEQ ID NO: 76608 - DNA, 26 bp, Homo sapiens
ggagaagcctcaggtcccaattcccg

SEQ ID NO: 76609 - DNA, 26 bp, Homo sapiens
gagaagcctcaggtcccaattcccgg

SEQ ID NO: 76610 - DNA, 26 bp, Homo sapiens
agaagcctcaggtcccaattcccggg

SEQ ID NO: 76611 - DNA, 26 bp, Homo sapiens
gaagcctcaggtcccaattcccgggg

SEQ ID NO: 76612 - DNA, 26 bp, Homo sapiens
aagcctcaggtcccaattcccgggga

SEQ ID NO: 76613 - DNA, 26 bp, Homo sapiens
agcctcaggtcccaattcccggggaa

SEQ ID NO: 76614 - DNA, 26 bp, Homo sapiens
gcctcaggtcccaattcccggggaag

SEQ ID NO: 76615 - DNA, 26 bp, Homo sapiens
cctcaggtcccaattcccggggaaga

SEQ ID NO: 76616 - DNA, 26 bp, Homo sapiens
ctcaggtcccaattcccggggaagac

SEQ ID NO: 76617 - DNA, 26 bp, Homo sapiens
tcaggtcccaattcccggggaagaca

SEQ ID NO: 76618 - DNA, 26 bp, Homo sapiens
caggtcccaattcccggggaagacag

SEQ ID NO: 76619 - DNA, 26 bp, Homo sapiens
aggtcccaattcccggggaagacagg

SEQ ID NO: 76620 - DNA, 26 bp, Homo sapiens
ggtcccaattcccggggaagacagga

SEQ ID NO: 76621 - DNA, 26 bp, Homo sapiens
gtcccaattcccggggaagacaggag

SEQ ID NO: 76622 - DNA, 26 bp, Homo sapiens
tcccaattcccggggaagacaggaga

SEQ ID NO: 76623 - DNA, 26 bp, Homo sapiens
cccaattcccggggaagacaggagag

SEQ ID NO: 76624 - DNA, 26 bp, Homo sapiens
ccaattcccggggaagacaggagagc

SEQ ID NO: 76625 - DNA, 26 bp, Homo sapiens
caattcccggggaagacaggagagct

SEQ ID NO: 76626 - DNA, 26 bp, Homo sapiens
aattcccggggaagacaggagagctg

SEQ ID NO: 76627 - DNA, 26 bp, Homo sapiens
attcccggggaagacaggagagctgc

SEQ ID NO: 76628 - DNA, 26 bp, Homo sapiens
ttcccggggaagacaggagagctgca

SEQ ID NO: 76629 - DNA, 26 bp, Homo sapiens
tcccggggaagacaggagagctgcaa

SEQ ID NO: 76630 - DNA, 26 bp, Homo sapiens
cccggggaagacaggagagctgcaac

SEQ ID NO: 76631 - DNA, 26 bp, Homo sapiens
ccggggaagacaggagagctgcaact

SEQ ID NO: 76632 - DNA, 26 bp, Homo sapiens
cggggaagacaggagagctgcaactc

SEQ ID NO: 76633 - DNA, 26 bp, Homo sapiens
ggggaagacaggagagctgcaactcc

SEQ ID NO: 76634 - DNA, 26 bp, Homo sapiens
gggaagacaggagagctgcaactcca

SEQ ID NO: 76635 - DNA, 26 bp, Homo sapiens
ggaagacaggagagctgcaactccag

SEQ ID NO: 76636 - DNA, 26 bp, Homo sapiens
gaagacaggagagctgcaactccagt

SEQ ID NO: 76637 - DNA, 26 bp, Homo sapiens
aagacaggagagctgcaactccagtt

SEQ ID NO: 76638 - DNA, 26 bp, Homo sapiens
agacaggagagctgcaactccagttt

SEQ ID NO: 76639 - DNA, 26 bp, Homo sapiens
gacaggagagctgcaactccagtttt

SEQ ID NO: 76640 - DNA, 26 bp, Homo sapiens
acaggagagctgcaactccagttttt

SEQ ID NO: 76641 - DNA, 26 bp, Homo sapiens
caggagagctgcaactccagtttttc

SEQ ID NO: 76642 - DNA, 26 bp, Homo sapiens
aggagagctgcaactccagtttttca

SEQ ID NO: 76643 - DNA, 26 bp, Homo sapiens
ggagagctgcaactccagtttttcag

SEQ ID NO: 76644 - DNA, 26 bp, Homo sapiens
gagagctgcaactccagtttttcagc

SEQ ID NO: 76645 - DNA, 26 bp, Homo sapiens
agagctgcaactccagtttttcagct

SEQ ID NO: 76646 - DNA, 26 bp, Homo sapiens
gagctgcaactccagtttttcagctt

SEQ ID NO: 76647 - DNA, 26 bp, Homo sapiens
agctgcaactccagtttttcagcttg

SEQ ID NO: 76648 - DNA, 26 bp, Homo sapiens
gctgcaactccagtttttcagcttga

SEQ ID NO: 76649 - DNA, 26 bp, Homo sapiens
ctgcaactccagtttttcagcttgag

SEQ ID NO: 76650 - DNA, 26 bp, Homo sapiens
tgcaactccagtttttcagcttgagt

SEQ ID NO: 76651 - DNA, 26 bp, Homo sapiens
gcaactccagtttttcagcttgagtg

SEQ ID NO: 76652 - DNA, 26 bp, Homo sapiens
caactccagtttttcagcttgagtga

SEQ ID NO: 76653 - DNA, 26 bp, Homo sapiens
aactccagtttttcagcttgagtgac

SEQ ID NO: 76654 - DNA, 26 bp, Homo sapiens
actccagtttttcagcttgagtgact

SEQ ID NO: 76655 - DNA, 26 bp, Homo sapiens
ctccagtttttcagcttgagtgactc

SEQ ID NO: 76656 - DNA, 26 bp, Homo sapiens
tccagtttttcagcttgagtgactct

SEQ ID NO: 76657 - DNA, 26 bp, Homo sapiens
ccagtttttcagcttgagtgactctt

SEQ ID NO: 76658 - DNA, 26 bp, Homo sapiens
cagtttttcagcttgagtgactcttc

SEQ ID NO: 76659 - DNA, 26 bp, Homo sapiens
agtttttcagcttgagtgactcttcc

SEQ ID NO: 76660 - DNA, 26 bp, Homo sapiens
gtttttcagcttgagtgactcttcca

SEQ ID NO: 76661 - DNA, 26 bp, Homo sapiens
tttttcagcttgagtgactcttccaa

SEQ ID NO: 76662 - DNA, 26 bp, Homo sapiens
ttttcagcttgagtgactcttccaag

SEQ ID NO: 76663 - DNA, 26 bp, Homo sapiens
tttcagcttgagtgactcttccaagg

SEQ ID NO: 76664 - DNA, 26 bp, Homo sapiens
ttcagcttgagtgactcttccaaggc

SEQ ID NO: 76665 - DNA, 26 bp, Homo sapiens
tcagcttgagtgactcttccaaggcg

SEQ ID NO: 76666 - DNA, 26 bp, Homo sapiens
cagcttgagtgactcttccaaggcgt

SEQ ID NO: 76667 - DNA, 26 bp, Homo sapiens
agcttgagtgactcttccaaggcgtc

SEQ ID NO: 76668 - DNA, 26 bp, Homo sapiens
gcttgagtgactcttccaaggcgtcc

SEQ ID NO: 76669 - DNA, 26 bp, Homo sapiens
cttgagtgactcttccaaggcgtccc

SEQ ID NO: 76670 - DNA, 26 bp, Homo sapiens
ttgagtgactcttccaaggcgtccct

SEQ ID NO: 76671 - DNA, 26 bp, Homo sapiens
tgagtgactcttccaaggcgtccctg

SEQ ID NO: 76672 - DNA, 26 bp, Homo sapiens
gagtgactcttccaaggcgtccctgg

SEQ ID NO: 76673 - DNA, 26 bp, Homo sapiens
agtgactcttccaaggcgtccctggc

SEQ ID NO: 76674 - DNA, 26 bp, Homo sapiens
gtgactcttccaaggcgtccctggcc

SEQ ID NO: 76675 - DNA, 26 bp, Homo sapiens
tgactcttccaaggcgtccctggcct

SEQ ID NO: 76676 - DNA, 26 bp, Homo sapiens
gactcttccaaggcgtccctggcctt

SEQ ID NO: 76677 - DNA, 26 bp, Homo sapiens
actcttccaaggcgtccctggccttc

SEQ ID NO: 76678 - DNA, 26 bp, Homo sapiens
ctcttccaaggcgtccctggccttct

SEQ ID NO: 76679 - DNA, 26 bp, Homo sapiens
tcttccaaggcgtccctggccttctt

SEQ ID NO: 76680 - DNA, 26 bp, Homo sapiens
cttccaaggcgtccctggccttcttg

SEQ ID NO: 76681 - DNA, 26 bp, Homo sapiens
ttccaaggcgtccctggccttcttga

SEQ ID NO: 76682 - DNA, 26 bp, Homo sapiens
tccaaggcgtccctggccttcttgaa

SEQ ID NO: 76683 - DNA, 26 bp, Homo sapiens
ccaaggcgtccctggccttcttgaag

SEQ ID NO: 76684 - DNA, 26 bp, Homo sapiens
caaggcgtccctggccttcttgaagc

SEQ ID NO: 76685 - DNA, 26 bp, Homo sapiens
aaggcgtccctggccttcttgaagct

SEQ ID NO: 76686 - DNA, 26 bp, Homo sapiens
aggcgtccctggccttcttgaagctc

SEQ ID NO: 76687 - DNA, 26 bp, Homo sapiens
ggcgtccctggccttcttgaagctcg

SEQ ID NO: 76688 - DNA, 26 bp, Homo sapiens
gcgtccctggccttcttgaagctcgc

SEQ ID NO: 76689 - DNA, 26 bp, Homo sapiens
cgtccctggccttcttgaagctcgct

SEQ ID NO: 76690 - DNA, 26 bp, Homo sapiens
gtccctggccttcttgaagctcgcta

SEQ ID NO: 76691 - DNA, 26 bp, Homo sapiens
tccctggccttcttgaagctcgctag

SEQ ID NO: 76692 - DNA, 26 bp, Homo sapiens
ccctggccttcttgaagctcgctagc

SEQ ID NO: 76693 - DNA, 26 bp, Homo sapiens
cctggccttcttgaagctcgctagct

SEQ ID NO: 76694 - DNA, 26 bp, Homo sapiens
ctggccttcttgaagctcgctagctc

SEQ ID NO: 76695 - DNA, 26 bp, Homo sapiens
tggccttcttgaagctcgctagctcc

SEQ ID NO: 76696 - DNA, 26 bp, Homo sapiens
ggccttcttgaagctcgctagctcct

SEQ ID NO: 76697 - DNA, 26 bp, Homo sapiens
gccttcttgaagctcgctagctcctg

SEQ ID NO: 76698 - DNA, 26 bp, Homo sapiens
ccttcttgaagctcgctagctcctgt

SEQ ID NO: 76699 - DNA, 26 bp, Homo sapiens
cttcttgaagctcgctagctcctgtg

SEQ ID NO: 76700 - DNA, 26 bp, Homo sapiens
ttcttgaagctcgctagctcctgtgg

SEQ ID NO: 76701 - DNA, 26 bp, Homo sapiens
tcttgaagctcgctagctcctgtggt

SEQ ID NO: 76702 - DNA, 26 bp, Homo sapiens
cttgaagctcgctagctcctgtggtg

SEQ ID NO: 76703 - DNA, 26 bp, Homo sapiens
ttgaagctcgctagctcctgtggtga

SEQ ID NO: 76704 - DNA, 26 bp, Homo sapiens
tgaagctcgctagctcctgtggtgac

SEQ ID NO: 76705 - DNA, 26 bp, Homo sapiens
gaagctcgctagctcctgtggtgaca

SEQ ID NO: 76706 - DNA, 26 bp, Homo sapiens
aagctcgctagctcctgtggtgacag

SEQ ID NO: 76707 - DNA, 26 bp, Homo sapiens
agctcgctagctcctgtggtgacaga

SEQ ID NO: 76708 - DNA, 26 bp, Homo sapiens
gctcgctagctcctgtggtgacagag

SEQ ID NO: 76709 - DNA, 26 bp, Homo sapiens
ctcgctagctcctgtggtgacagaga

SEQ ID NO: 76710 - DNA, 26 bp, Homo sapiens
tcgctagctcctgtggtgacagagat

SEQ ID NO: 76711 - DNA, 26 bp, Homo sapiens
cgctagctcctgtggtgacagagatt

SEQ ID NO: 76712 - DNA, 26 bp, Homo sapiens
gctagctcctgtggtgacagagattt

SEQ ID NO: 76713 - DNA, 26 bp, Homo sapiens
ctagctcctgtggtgacagagatttg

SEQ ID NO: 76714 - DNA, 26 bp, Homo sapiens
tagctcctgtggtgacagagatttga

SEQ ID NO: 76715 - DNA, 26 bp, Homo sapiens
agctcctgtggtgacagagatttgaa

SEQ ID NO: 76716 - DNA, 26 bp, Homo sapiens
gctcctgtggtgacagagatttgaac

SEQ ID NO: 76717 - DNA, 26 bp, Homo sapiens
ctcctgtggtgacagagatttgaacc

SEQ ID NO: 76718 - DNA, 26 bp, Homo sapiens
tcctgtggtgacagagatttgaacct

SEQ ID NO: 76719 - DNA, 26 bp, Homo sapiens
cctgtggtgacagagatttgaacctg

SEQ ID NO: 76720 - DNA, 26 bp, Homo sapiens
ctgtggtgacagagatttgaacctgc

SEQ ID NO: 76721 - DNA, 26 bp, Homo sapiens
tgtggtgacagagatttgaacctgcc

SEQ ID NO: 76722 - DNA, 26 bp, Homo sapiens
gtggtgacagagatttgaacctgcca

SEQ ID NO: 76723 - DNA, 26 bp, Homo sapiens
tggtgacagagatttgaacctgccaa

SEQ ID NO: 76724 - DNA, 26 bp, Homo sapiens
ggtgacagagatttgaacctgccaat

SEQ ID NO: 76725 - DNA, 26 bp, Homo sapiens
gtgacagagatttgaacctgccaatg

SEQ ID NO: 76726 - DNA, 26 bp, Homo sapiens
tgacagagatttgaacctgccaatgt

SEQ ID NO: 76727 - DNA, 26 bp, Homo sapiens
gacagagatttgaacctgccaatgtg

SEQ ID NO: 76728 - DNA, 26 bp, Homo sapiens
acagagatttgaacctgccaatgtgg

SEQ ID NO: 76729 - DNA, 26 bp, Homo sapiens
cagagatttgaacctgccaatgtggc

SEQ ID NO: 76730 - DNA, 26 bp, Homo sapiens
agagatttgaacctgccaatgtggca

SEQ ID NO: 76731 - DNA, 26 bp, Homo sapiens
gagatttgaacctgccaatgtggcag

SEQ ID NO: 76732 - DNA, 26 bp, Homo sapiens
agatttgaacctgccaatgtggcagc

SEQ ID NO: 76733 - DNA, 26 bp, Homo sapiens
gatttgaacctgccaatgtggcagcc

SEQ ID NO: 76734 - DNA, 26 bp, Homo sapiens
atttgaacctgccaatgtggcagccc

SEQ ID NO: 76735 - DNA, 26 bp, Homo sapiens
tttgaacctgccaatgtggcagccct

SEQ ID NO: 76736 - DNA, 26 bp, Homo sapiens
ttgaacctgccaatgtggcagccctt

SEQ ID NO: 76737 - DNA, 26 bp, Homo sapiens
tgaacctgccaatgtggcagcccttc

SEQ ID NO: 76738 - DNA, 26 bp, Homo sapiens
gaacctgccaatgtggcagcccttcc

SEQ ID NO: 76739 - DNA, 26 bp, Homo sapiens
aacctgccaatgtggcagcccttccc

SEQ ID NO: 76740 - DNA, 26 bp, Homo sapiens
acctgccaatgtggcagcccttccca

SEQ ID NO: 76741 - DNA, 26 bp, Homo sapiens
cctgccaatgtggcagcccttcccag

SEQ ID NO: 76742 - DNA, 26 bp, Homo sapiens
ctgccaatgtggcagcccttcccagt

SEQ ID NO: 76743 - DNA, 26 bp, Homo sapiens
tgccaatgtggcagcccttcccagtt

SEQ ID NO: 76744 - DNA, 26 bp, Homo sapiens
gccaatgtggcagcccttcccagttg

SEQ ID NO: 76745 - DNA, 26 bp, Homo sapiens
ccaatgtggcagcccttcccagttgt

SEQ ID NO: 76746 - DNA, 26 bp, Homo sapiens
caatgtggcagcccttcccagttgtg

SEQ ID NO: 76747 - DNA, 26 bp, Homo sapiens
aatgtggcagcccttcccagttgtgg

SEQ ID NO: 76748 - DNA, 26 bp, Homo sapiens
atgtggcagcccttcccagttgtggt

SEQ ID NO: 76749 - DNA, 26 bp, Homo sapiens
tgtggcagcccttcccagttgtggtg

SEQ ID NO: 76750 - DNA, 26 bp, Homo sapiens
gtggcagcccttcccagttgtggtgg

SEQ ID NO: 76751 - DNA, 26 bp, Homo sapiens
tggcagcccttcccagttgtggtggg

SEQ ID NO: 76752 - DNA, 26 bp, Homo sapiens
ggcagcccttcccagttgtggtgggc

SEQ ID NO: 76753 - DNA, 26 bp, Homo sapiens
gcagcccttcccagttgtggtgggct

SEQ ID NO: 76754 - DNA, 26 bp, Homo sapiens
cagcccttcccagttgtggtgggctt

SEQ ID NO: 76755 - DNA, 26 bp, Homo sapiens
agcccttcccagttgtggtgggcttg

SEQ ID NO: 76756 - DNA, 26 bp, Homo sapiens
gcccttcccagttgtggtgggcttgg

SEQ ID NO: 76757 - DNA, 26 bp, Homo sapiens
cccttcccagttgtggtgggcttgga

SEQ ID NO: 76758 - DNA, 26 bp, Homo sapiens
ccttcccagttgtggtgggcttggaa

SEQ ID NO: 76759 - DNA, 26 bp, Homo sapiens
cttcccagttgtggtgggcttggaag

SEQ ID NO: 76760 - DNA, 26 bp, Homo sapiens
ttcccagttgtggtgggcttggaagt

SEQ ID NO: 76761 - DNA, 26 bp, Homo sapiens
tcccagttgtggtgggcttggaagtg

SEQ ID NO: 76762 - DNA, 26 bp, Homo sapiens
cccagttgtggtgggcttggaagtgg

SEQ ID NO: 76763 - DNA, 26 bp, Homo sapiens
ccagttgtggtgggcttggaagtggg

SEQ ID NO: 76764 - DNA, 26 bp, Homo sapiens
cagttgtggtgggcttggaagtgggg

SEQ ID NO: 76765 - DNA, 26 bp, Homo sapiens
agttgtggtgggcttggaagtgggga

SEQ ID NO: 76766 - DNA, 26 bp, Homo sapiens
gttgtggtgggcttggaagtggggac

SEQ ID NO: 76767 - DNA, 26 bp, Homo sapiens
ttgtggtgggcttggaagtggggaca

SEQ ID NO: 76768 - DNA, 26 bp, Homo sapiens
tgtggtgggcttggaagtggggacag

SEQ ID NO: 76769 - DNA, 26 bp, Homo sapiens
gtggtgggcttggaagtggggacagg

SEQ ID NO: 76770 - DNA, 26 bp, Homo sapiens
tggtgggcttggaagtggggacaggg

SEQ ID NO: 76771 - DNA, 26 bp, Homo sapiens
ggtgggcttggaagtggggacagggc

SEQ ID NO: 76772 - DNA, 26 bp, Homo sapiens
gtgggcttggaagtggggacagggcc

SEQ ID NO: 76773 - DNA, 26 bp, Homo sapiens
tgggcttggaagtggggacagggcct

SEQ ID NO: 76774 - DNA, 26 bp, Homo sapiens
gggcttggaagtggggacagggcctg

SEQ ID NO: 76775 - DNA, 26 bp, Homo sapiens
ggcttggaagtggggacagggcctgc

SEQ ID NO: 76776 - DNA, 26 bp, Homo sapiens
gcttggaagtggggacagggcctgcc

SEQ ID NO: 76777 - DNA, 26 bp, Homo sapiens
cttggaagtggggacagggcctgcca

SEQ ID NO: 76778 - DNA, 26 bp, Homo sapiens
ttggaagtggggacagggcctgccac

SEQ ID NO: 76779 - DNA, 26 bp, Homo sapiens
tggaagtggggacagggcctgccacg

SEQ ID NO: 76780 - DNA, 26 bp, Homo sapiens
ggaagtggggacagggcctgccacgg

SEQ ID NO: 76781 - DNA, 26 bp, Homo sapiens
gaagtggggacagggcctgccacggc

SEQ ID NO: 76782 - DNA, 26 bp, Homo sapiens
aagtggggacagggcctgccacggcc

SEQ ID NO: 76783 - DNA, 26 bp, Homo sapiens
agtggggacagggcctgccacggcca

SEQ ID NO: 76784 - DNA, 26 bp, Homo sapiens
gtggggacagggcctgccacggccaa

SEQ ID NO: 76785 - DNA, 26 bp, Homo sapiens
tggggacagggcctgccacggccaag

SEQ ID NO: 76786 - DNA, 26 bp, Homo sapiens
ggggacagggcctgccacggccaagc

SEQ ID NO: 76787 - DNA, 26 bp, Homo sapiens
gggacagggcctgccacggccaagcc

SEQ ID NO: 76788 - DNA, 26 bp, Homo sapiens
ggacagggcctgccacggccaagcct

SEQ ID NO: 76789 - DNA, 26 bp, Homo sapiens
gacagggcctgccacggccaagccta

SEQ ID NO: 76790 - DNA, 26 bp, Homo sapiens
acagggcctgccacggccaagcctag

SEQ ID NO: 76791 - DNA, 26 bp, Homo sapiens
cagggcctgccacggccaagcctagc

SEQ ID NO: 76792 - DNA, 26 bp, Homo sapiens
agggcctgccacggccaagcctagca

SEQ ID NO: 76793 - DNA, 26 bp, Homo sapiens
gggcctgccacggccaagcctagcac

SEQ ID NO: 76794 - DNA, 26 bp, Homo sapiens
ggcctgccacggccaagcctagcacc

SEQ ID NO: 76795 - DNA, 26 bp, Homo sapiens
gcctgccacggccaagcctagcacca

SEQ ID NO: 76796 - DNA, 26 bp, Homo sapiens
cctgccacggccaagcctagcaccaa

SEQ ID NO: 76797 - DNA, 26 bp, Homo sapiens
ctgccacggccaagcctagcaccaaa

SEQ ID NO: 76798 - DNA, 26 bp, Homo sapiens
tgccacggccaagcctagcaccaaag

SEQ ID NO: 76799 - DNA, 26 bp, Homo sapiens
gccacggccaagcctagcaccaaagt

SEQ ID NO: 76800 - DNA, 26 bp, Homo sapiens
ccacggccaagcctagcaccaaagtc

SEQ ID NO: 76801 - DNA, 26 bp, Homo sapiens
cacggccaagcctagcaccaaagtca

SEQ ID NO: 76802 - DNA, 26 bp, Homo sapiens
acggccaagcctagcaccaaagtcac

SEQ ID NO: 76803 - DNA, 26 bp, Homo sapiens
cggccaagcctagcaccaaagtcacc

SEQ ID NO: 76804 - DNA, 26 bp, Homo sapiens
ggccaagcctagcaccaaagtcacca

SEQ ID NO: 76805 - DNA, 26 bp, Homo sapiens
gccaagcctagcaccaaagtcaccag

SEQ ID NO: 76806 - DNA, 26 bp, Homo sapiens
ccaagcctagcaccaaagtcaccagc

SEQ ID NO: 76807 - DNA, 26 bp, Homo sapiens
caagcctagcaccaaagtcaccagca

SEQ ID NO: 76808 - DNA, 26 bp, Homo sapiens
aagcctagcaccaaagtcaccagcac

SEQ ID NO: 76809 - DNA, 26 bp, Homo sapiens
agcctagcaccaaagtcaccagcacc

SEQ ID NO: 76810 - DNA, 26 bp, Homo sapiens
gcctagcaccaaagtcaccagcacca

SEQ ID NO: 76811 - DNA, 26 bp, Homo sapiens
cctagcaccaaagtcaccagcaccac

SEQ ID NO: 76812 - DNA, 26 bp, Homo sapiens
ctagcaccaaagtcaccagcaccacg

SEQ ID NO: 76813 - DNA, 26 bp, Homo sapiens
tagcaccaaagtcaccagcaccacgg

SEQ ID NO: 76814 - DNA, 26 bp, Homo sapiens
agcaccaaagtcaccagcaccacggt

SEQ ID NO: 76815 - DNA, 26 bp, Homo sapiens
gcaccaaagtcaccagcaccacggtc

SEQ ID NO: 76816 - DNA, 26 bp, Homo sapiens
caccaaagtcaccagcaccacggtcc

SEQ ID NO: 76817 - DNA, 26 bp, Homo sapiens
accaaagtcaccagcaccacggtcca

SEQ ID NO: 76818 - DNA, 26 bp, Homo sapiens
ccaaagtcaccagcaccacggtccaa

SEQ ID NO: 76819 - DNA, 26 bp, Homo sapiens
caaagtcaccagcaccacggtccaag

SEQ ID NO: 76820 - DNA, 26 bp, Homo sapiens
aaagtcaccagcaccacggtccaagc

SEQ ID NO: 76821 - DNA, 26 bp, Homo sapiens
aagtcaccagcaccacggtccaagct

SEQ ID NO: 76822 - DNA, 26 bp, Homo sapiens
agtcaccagcaccacggtccaagctg

SEQ ID NO: 76823 - DNA, 26 bp, Homo sapiens
gtcaccagcaccacggtccaagctgc

SEQ ID NO: 76824 - DNA, 26 bp, Homo sapiens
tcaccagcaccacggtccaagctgca

SEQ ID NO: 76825 - DNA, 26 bp, Homo sapiens
caccagcaccacggtccaagctgcag

SEQ ID NO: 76826 - DNA, 26 bp, Homo sapiens
accagcaccacggtccaagctgcagc

SEQ ID NO: 76827 - DNA, 26 bp, Homo sapiens
ccagcaccacggtccaagctgcagcc

SEQ ID NO: 76828 - DNA, 26 bp, Homo sapiens
cagcaccacggtccaagctgcagcca

SEQ ID NO: 76829 - DNA, 26 bp, Homo sapiens
agcaccacggtccaagctgcagccat

SEQ ID NO: 76830 - DNA, 26 bp, Homo sapiens
gcaccacggtccaagctgcagccatg

SEQ ID NO: 76831 - DNA, 26 bp, Homo sapiens
caccacggtccaagctgcagccatgg

SEQ ID NO: 76832 - DNA, 26 bp, Homo sapiens
accacggtccaagctgcagccatggc

SEQ ID NO: 76833 - DNA, 26 bp, Homo sapiens
ccacggtccaagctgcagccatggct

SEQ ID NO: 76834 - DNA, 26 bp, Homo sapiens
cacggtccaagctgcagccatggcta

SEQ ID NO: 76835 - DNA, 26 bp, Homo sapiens
acggtccaagctgcagccatggctaa

SEQ ID NO: 76836 - DNA, 26 bp, Homo sapiens
cggtccaagctgcagccatggctaaa

SEQ ID NO: 76837 - DNA, 26 bp, Homo sapiens
ggtccaagctgcagccatggctaaat

SEQ ID NO: 76838 - DNA, 26 bp, Homo sapiens
gtccaagctgcagccatggctaaatc

SEQ ID NO: 76839 - DNA, 26 bp, Homo sapiens
tccaagctgcagccatggctaaatcg

SEQ ID NO: 76840 - DNA, 26 bp, Homo sapiens
ccaagctgcagccatggctaaatcgc

SEQ ID NO: 76841 - DNA, 26 bp, Homo sapiens
caagctgcagccatggctaaatcgca

SEQ ID NO: 76842 - DNA, 26 bp, Homo sapiens
aagctgcagccatggctaaatcgcaa

SEQ ID NO: 76843 - DNA, 26 bp, Homo sapiens
agctgcagccatggctaaatcgcaac

SEQ ID NO: 76844 - DNA, 26 bp, Homo sapiens
gctgcagccatggctaaatcgcaact

SEQ ID NO: 76845 - DNA, 26 bp, Homo sapiens
ttttttttttttttccagacagagtt

SEQ ID NO: 76846 - DNA, 26 bp, Homo sapiens
tttttttttttttccagacagagttt

SEQ ID NO: 76847 - DNA, 26 bp, Homo sapiens
ttttttttttttccagacagagtttt

SEQ ID NO: 76848 - DNA, 26 bp, Homo sapiens
tttttttttttccagacagagttttg

SEQ ID NO: 76849 - DNA, 26 bp, Homo sapiens
ttttttttttccagacagagttttgc

SEQ ID NO: 76850 - DNA, 26 bp, Homo sapiens
tttttttttccagacagagttttgct

SEQ ID NO: 76851 - DNA, 26 bp, Homo sapiens
ttttttttccagacagagttttgctc

SEQ ID NO: 76852 - DNA, 26 bp, Homo sapiens
tttttttccagacagagttttgctct

SEQ ID NO: 76853 - DNA, 26 bp, Homo sapiens
ttttttccagacagagttttgctctt

SEQ ID NO: 76854 - DNA, 26 bp, Homo sapiens
tttttccagacagagttttgctcttg

SEQ ID NO: 76855 - DNA, 26 bp, Homo sapiens
ttttccagacagagttttgctcttgt

SEQ ID NO: 76856 - DNA, 26 bp, Homo sapiens
tttccagacagagttttgctcttgtt

SEQ ID NO: 76857 - DNA, 26 bp, Homo sapiens
ttccagacagagttttgctcttgttg

SEQ ID NO: 76858 - DNA, 26 bp, Homo sapiens
tccagacagagttttgctcttgttgc

SEQ ID NO: 76859 - DNA, 26 bp, Homo sapiens
ccagacagagttttgctcttgttgcc

SEQ ID NO: 76860 - DNA, 26 bp, Homo sapiens
cagacagagttttgctcttgttgccc

SEQ ID NO: 76861 - DNA, 26 bp, Homo sapiens
agacagagttttgctcttgttgccca

SEQ ID NO: 76862 - DNA, 26 bp, Homo sapiens
gacagagttttgctcttgttgcccag

SEQ ID NO: 76863 - DNA, 26 bp, Homo sapiens
acagagttttgctcttgttgcccagg

SEQ ID NO: 76864 - DNA, 26 bp, Homo sapiens
cagagttttgctcttgttgcccaggc

SEQ ID NO: 76865 - DNA, 26 bp, Homo sapiens
agagttttgctcttgttgcccaggct

SEQ ID NO: 76866 - DNA, 26 bp, Homo sapiens
gagttttgctcttgttgcccaggctg

SEQ ID NO: 76867 - DNA, 26 bp, Homo sapiens
agttttgctcttgttgcccaggctgg

SEQ ID NO: 76868 - DNA, 26 bp, Homo sapiens
gttttgctcttgttgcccaggctgga

SEQ ID NO: 76869 - DNA, 26 bp, Homo sapiens
ttttgctcttgttgcccaggctggag

SEQ ID NO: 76870 - DNA, 26 bp, Homo sapiens
tttgctcttgttgcccaggctggagt

SEQ ID NO: 76871 - DNA, 26 bp, Homo sapiens
ttgctcttgttgcccaggctggagtg

SEQ ID NO: 76872 - DNA, 26 bp, Homo sapiens
tgctcttgttgcccaggctggagtgc

SEQ ID NO: 76873 - DNA, 26 bp, Homo sapiens
gctcttgttgcccaggctggagtgca

SEQ ID NO: 76874 - DNA, 26 bp, Homo sapiens
ctcttgttgcccaggctggagtgcag

SEQ ID NO: 76875 - DNA, 26 bp, Homo sapiens
tcttgttgcccaggctggagtgcagt

SEQ ID NO: 76876 - DNA, 26 bp, Homo sapiens
cttgttgcccaggctggagtgcagtg

SEQ ID NO: 76877 - DNA, 26 bp, Homo sapiens
ttgttgcccaggctggagtgcagtgg

SEQ ID NO: 76878 - DNA, 26 bp, Homo sapiens
tgttgcccaggctggagtgcagtggc

SEQ ID NO: 76879 - DNA, 26 bp, Homo sapiens
gttgcccaggctggagtgcagtggca

SEQ ID NO: 76880 - DNA, 26 bp, Homo sapiens
ttgcccaggctggagtgcagtggcac

SEQ ID NO: 76881 - DNA, 26 bp, Homo sapiens
tgcccaggctggagtgcagtggcaca

SEQ ID NO: 76882 - DNA, 26 bp, Homo sapiens
gcccaggctggagtgcagtggcacaa

SEQ ID NO: 76883 - DNA, 26 bp, Homo sapiens
cccaggctggagtgcagtggcacaat

SEQ ID NO: 76884 - DNA, 26 bp, Homo sapiens
ccaggctggagtgcagtggcacaatc

SEQ ID NO: 76885 - DNA, 26 bp, Homo sapiens
caggctggagtgcagtggcacaatct

SEQ ID NO: 76886 - DNA, 26 bp, Homo sapiens
aggctggagtgcagtggcacaatctc

SEQ ID NO: 76887 - DNA, 26 bp, Homo sapiens
ggctggagtgcagtggcacaatctca

SEQ ID NO: 76888 - DNA, 26 bp, Homo sapiens
gctggagtgcagtggcacaatctcag

SEQ ID NO: 76889 - DNA, 26 bp, Homo sapiens
ctggagtgcagtggcacaatctcagc

SEQ ID NO: 76890 - DNA, 26 bp, Homo sapiens
tggagtgcagtggcacaatctcagct

SEQ ID NO: 76891 - DNA, 26 bp, Homo sapiens
ggagtgcagtggcacaatctcagctc

SEQ ID NO: 76892 - DNA, 26 bp, Homo sapiens
gagtgcagtggcacaatctcagctca

SEQ ID NO: 76893 - DNA, 26 bp, Homo sapiens
agtgcagtggcacaatctcagctcag

SEQ ID NO: 76894 - DNA, 26 bp, Homo sapiens
gtgcagtggcacaatctcagctcagt

SEQ ID NO: 76895 - DNA, 26 bp, Homo sapiens
tgcagtggcacaatctcagctcagtg

SEQ ID NO: 76896 - DNA, 26 bp, Homo sapiens
gcagtggcacaatctcagctcagtgc

SEQ ID NO: 76897 - DNA, 26 bp, Homo sapiens
cagtggcacaatctcagctcagtgca

SEQ ID NO: 76898 - DNA, 26 bp, Homo sapiens
agtggcacaatctcagctcagtgcaa

SEQ ID NO: 76899 - DNA, 26 bp, Homo sapiens
gtggcacaatctcagctcagtgcaac

SEQ ID NO: 76900 - DNA, 26 bp, Homo sapiens
tggcacaatctcagctcagtgcaacc

SEQ ID NO: 76901 - DNA, 26 bp, Homo sapiens
ggcacaatctcagctcagtgcaacct

SEQ ID NO: 76902 - DNA, 26 bp, Homo sapiens
gcacaatctcagctcagtgcaacctc

SEQ ID NO: 76903 - DNA, 26 bp, Homo sapiens
cacaatctcagctcagtgcaacctct

SEQ ID NO: 76904 - DNA, 26 bp, Homo sapiens
acaatctcagctcagtgcaacctctg

SEQ ID NO: 76905 - DNA, 26 bp, Homo sapiens
caatctcagctcagtgcaacctctgc

SEQ ID NO: 76906 - DNA, 26 bp, Homo sapiens
aatctcagctcagtgcaacctctgcc

SEQ ID NO: 76907 - DNA, 26 bp, Homo sapiens
atctcagctcagtgcaacctctgcct

SEQ ID NO: 76908 - DNA, 26 bp, Homo sapiens
tctcagctcagtgcaacctctgcctt

SEQ ID NO: 76909 - DNA, 26 bp, Homo sapiens
ctcagctcagtgcaacctctgccttc

SEQ ID NO: 76910 - DNA, 26 bp, Homo sapiens
tcagctcagtgcaacctctgccttcc

SEQ ID NO: 76911 - DNA, 26 bp, Homo sapiens
cagctcagtgcaacctctgccttcct

SEQ ID NO: 76912 - DNA, 26 bp, Homo sapiens
agctcagtgcaacctctgccttcctg

SEQ ID NO: 76913 - DNA, 26 bp, Homo sapiens
gctcagtgcaacctctgccttcctgg

SEQ ID NO: 76914 - DNA, 26 bp, Homo sapiens
ctcagtgcaacctctgccttcctggt

SEQ ID NO: 76915 - DNA, 26 bp, Homo sapiens
tcagtgcaacctctgccttcctggtt

SEQ ID NO: 76916 - DNA, 26 bp, Homo sapiens
cagtgcaacctctgccttcctggttc

SEQ ID NO: 76917 - DNA, 26 bp, Homo sapiens
agtgcaacctctgccttcctggttca

SEQ ID NO: 76918 - DNA, 26 bp, Homo sapiens
gtgcaacctctgccttcctggttcaa

SEQ ID NO: 76919 - DNA, 26 bp, Homo sapiens
tgcaacctctgccttcctggttcaag

SEQ ID NO: 76920 - DNA, 26 bp, Homo sapiens
gcaacctctgccttcctggttcaagt

SEQ ID NO: 76921 - DNA, 26 bp, Homo sapiens
caacctctgccttcctggttcaagtg

SEQ ID NO: 76922 - DNA, 26 bp, Homo sapiens
aacctctgccttcctggttcaagtga

SEQ ID NO: 76923 - DNA, 26 bp, Homo sapiens
acctctgccttcctggttcaagtgat

SEQ ID NO: 76924 - DNA, 26 bp, Homo sapiens
cctctgccttcctggttcaagtgatt

SEQ ID NO: 76925 - DNA, 26 bp, Homo sapiens
ctctgccttcctggttcaagtgattc

SEQ ID NO: 76926 - DNA, 26 bp, Homo sapiens
tctgccttcctggttcaagtgattct

SEQ ID NO: 76927 - DNA, 26 bp, Homo sapiens
ctgccttcctggttcaagtgattctc

SEQ ID NO: 76928 - DNA, 26 bp, Homo sapiens
tgccttcctggttcaagtgattctcc

SEQ ID NO: 76929 - DNA, 26 bp, Homo sapiens
gccttcctggttcaagtgattctcct

SEQ ID NO: 76930 - DNA, 26 bp, Homo sapiens
ccttcctggttcaagtgattctcctg

SEQ ID NO: 76931 - DNA, 26 bp, Homo sapiens
cttcctggttcaagtgattctcctgc

SEQ ID NO: 76932 - DNA, 26 bp, Homo sapiens
ttcctggttcaagtgattctcctgcc

SEQ ID NO: 76933 - DNA, 26 bp, Homo sapiens
tcctggttcaagtgattctcctgcct

SEQ ID NO: 76934 - DNA, 26 bp, Homo sapiens
cctggttcaagtgattctcctgcctc

SEQ ID NO: 76935 - DNA, 26 bp, Homo sapiens
ctggttcaagtgattctcctgcctca

SEQ ID NO: 76936 - DNA, 26 bp, Homo sapiens
tggttcaagtgattctcctgcctcag

SEQ ID NO: 76937 - DNA, 26 bp, Homo sapiens
ggttcaagtgattctcctgcctcagc

SEQ ID NO: 76938 - DNA, 26 bp, Homo sapiens
gttcaagtgattctcctgcctcagcc

SEQ ID NO: 76939 - DNA, 26 bp, Homo sapiens
ttcaagtgattctcctgcctcagcct

SEQ ID NO: 76940 - DNA, 26 bp, Homo sapiens
tcaagtgattctcctgcctcagcctc

SEQ ID NO: 76941 - DNA, 26 bp, Homo sapiens
caagtgattctcctgcctcagcctcc

SEQ ID NO: 76942 - DNA, 26 bp, Homo sapiens
aagtgattctcctgcctcagcctccc

SEQ ID NO: 76943 - DNA, 26 bp, Homo sapiens
agtgattctcctgcctcagcctccca

SEQ ID NO: 76944 - DNA, 26 bp, Homo sapiens
gtgattctcctgcctcagcctcccaa

SEQ ID NO: 76945 - DNA, 26 bp, Homo sapiens
tgattctcctgcctcagcctcccaag

SEQ ID NO: 76946 - DNA, 26 bp, Homo sapiens
gattctcctgcctcagcctcccaagt

SEQ ID NO: 76947 - DNA, 26 bp, Homo sapiens
attctcctgcctcagcctcccaagta

SEQ ID NO: 76948 - DNA, 26 bp, Homo sapiens
ttctcctgcctcagcctcccaagtag

SEQ ID NO: 76949 - DNA, 26 bp, Homo sapiens
tctcctgcctcagcctcccaagtagc

SEQ ID NO: 76950 - DNA, 26 bp, Homo sapiens
ctcctgcctcagcctcccaagtagct

SEQ ID NO: 76951 - DNA, 26 bp, Homo sapiens
tcctgcctcagcctcccaagtagctg

SEQ ID NO: 76952 - DNA, 26 bp, Homo sapiens
cctgcctcagcctcccaagtagctgg

SEQ ID NO: 76953 - DNA, 26 bp, Homo sapiens
ctgcctcagcctcccaagtagctggg

SEQ ID NO: 76954 - DNA, 26 bp, Homo sapiens
tgcctcagcctcccaagtagctggga

SEQ ID NO: 76955 - DNA, 26 bp, Homo sapiens
gcctcagcctcccaagtagctgggat

SEQ ID NO: 76956 - DNA, 26 bp, Homo sapiens
cctcagcctcccaagtagctgggatt

SEQ ID NO: 76957 - DNA, 26 bp, Homo sapiens
ctcagcctcccaagtagctgggatta

SEQ ID NO: 76958 - DNA, 26 bp, Homo sapiens
tcagcctcccaagtagctgggattac

SEQ ID NO: 76959 - DNA, 26 bp, Homo sapiens
cagcctcccaagtagctgggattaca

SEQ ID NO: 76960 - DNA, 26 bp, Homo sapiens
agcctcccaagtagctgggattacaa

SEQ ID NO: 76961 - DNA, 26 bp, Homo sapiens
gcctcccaagtagctgggattacaag

SEQ ID NO: 76962 - DNA, 26 bp, Homo sapiens
cctcccaagtagctgggattacaagc

SEQ ID NO: 76963 - DNA, 26 bp, Homo sapiens
ctcccaagtagctgggattacaagca

SEQ ID NO: 76964 - DNA, 26 bp, Homo sapiens
tcccaagtagctgggattacaagcac

SEQ ID NO: 76965 - DNA, 26 bp, Homo sapiens
cccaagtagctgggattacaagcacc

SEQ ID NO: 76966 - DNA, 26 bp, Homo sapiens
ccaagtagctgggattacaagcacct

SEQ ID NO: 76967 - DNA, 26 bp, Homo sapiens
caagtagctgggattacaagcacctg

SEQ ID NO: 76968 - DNA, 26 bp, Homo sapiens
aagtagctgggattacaagcacctgc

SEQ ID NO: 76969 - DNA, 26 bp, Homo sapiens
agtagctgggattacaagcacctgcc

SEQ ID NO: 76970 - DNA, 26 bp, Homo sapiens
gtagctgggattacaagcacctgcca

SEQ ID NO: 76971 - DNA, 26 bp, Homo sapiens
tagctgggattacaagcacctgccac

SEQ ID NO: 76972 - DNA, 26 bp, Homo sapiens
agctgggattacaagcacctgccacc

SEQ ID NO: 76973 - DNA, 26 bp, Homo sapiens
gctgggattacaagcacctgccacca

SEQ ID NO: 76974 - DNA, 26 bp, Homo sapiens
ctgggattacaagcacctgccaccat

SEQ ID NO: 76975 - DNA, 26 bp, Homo sapiens
tgggattacaagcacctgccaccatg

SEQ ID NO: 76976 - DNA, 26 bp, Homo sapiens
gggattacaagcacctgccaccatgg

SEQ ID NO: 76977 - DNA, 26 bp, Homo sapiens
ggattacaagcacctgccaccatggc

SEQ ID NO: 76978 - DNA, 26 bp, Homo sapiens
gattacaagcacctgccaccatggcc

SEQ ID NO: 76979 - DNA, 26 bp, Homo sapiens
attacaagcacctgccaccatggccg

SEQ ID NO: 76980 - DNA, 26 bp, Homo sapiens
ttacaagcacctgccaccatggccgg

SEQ ID NO: 76981 - DNA, 26 bp, Homo sapiens
tacaagcacctgccaccatggccggc

SEQ ID NO: 76982 - DNA, 26 bp, Homo sapiens
acaagcacctgccaccatggccggct

SEQ ID NO: 76983 - DNA, 26 bp, Homo sapiens
caagcacctgccaccatggccggcta

SEQ ID NO: 76984 - DNA, 26 bp, Homo sapiens
aagcacctgccaccatggccggctaa

SEQ ID NO: 76985 - DNA, 26 bp, Homo sapiens
agcacctgccaccatggccggctaat

SEQ ID NO: 76986 - DNA, 26 bp, Homo sapiens
gcacctgccaccatggccggctaatt

SEQ ID NO: 76987 - DNA, 26 bp, Homo sapiens
cacctgccaccatggccggctaattt

SEQ ID NO: 76988 - DNA, 26 bp, Homo sapiens
acctgccaccatggccggctaatttt

SEQ ID NO: 76989 - DNA, 26 bp, Homo sapiens
cctgccaccatggccggctaattttt

SEQ ID NO: 76990 - DNA, 26 bp, Homo sapiens
ctgccaccatggccggctaatttttg

SEQ ID NO: 76991 - DNA, 26 bp, Homo sapiens
tgccaccatggccggctaatttttgt

SEQ ID NO: 76992 - DNA, 26 bp, Homo sapiens
gccaccatggccggctaatttttgta

SEQ ID NO: 76993 - DNA, 26 bp, Homo sapiens
ccaccatggccggctaatttttgtaa

SEQ ID NO: 76994 - DNA, 26 bp, Homo sapiens
caccatggccggctaatttttgtaat

SEQ ID NO: 76995 - DNA, 26 bp, Homo sapiens
accatggccggctaatttttgtaatt

SEQ ID NO: 76996 - DNA, 26 bp, Homo sapiens
ccatggccggctaatttttgtaattt

SEQ ID NO: 76997 - DNA, 26 bp, Homo sapiens
catggccggctaatttttgtaatttt

SEQ ID NO: 76998 - DNA, 26 bp, Homo sapiens
atggccggctaatttttgtaatttta

SEQ ID NO: 76999 - DNA, 26 bp, Homo sapiens
tggccggctaatttttgtaattttag

SEQ ID NO: 77000 - DNA, 26 bp, Homo sapiens
ggccggctaatttttgtaattttagt

SEQ ID NO: 77001 - DNA, 26 bp, Homo sapiens
gccggctaatttttgtaattttagta

SEQ ID NO: 77002 - DNA, 26 bp, Homo sapiens
ccggctaatttttgtaattttagtag

SEQ ID NO: 77003 - DNA, 26 bp, Homo sapiens
cggctaatttttgtaattttagtaga

SEQ ID NO: 77004 - DNA, 26 bp, Homo sapiens
ggctaatttttgtaattttagtagag

SEQ ID NO: 77005 - DNA, 26 bp, Homo sapiens
gctaatttttgtaattttagtagaga

SEQ ID NO: 77006 - DNA, 26 bp, Homo sapiens
ctaatttttgtaattttagtagagac

SEQ ID NO: 77007 - DNA, 26 bp, Homo sapiens
taatttttgtaattttagtagagaca

SEQ ID NO: 77008 - DNA, 26 bp, Homo sapiens
aatttttgtaattttagtagagacag

SEQ ID NO: 77009 - DNA, 26 bp, Homo sapiens
atttttgtaattttagtagagacagg

SEQ ID NO: 77010 - DNA, 26 bp, Homo sapiens
tttttgtaattttagtagagacaggg

SEQ ID NO: 77011 - DNA, 26 bp, Homo sapiens
ttttgtaattttagtagagacagggt

SEQ ID NO: 77012 - DNA, 26 bp, Homo sapiens
tttgtaattttagtagagacagggtt

SEQ ID NO: 77013 - DNA, 26 bp, Homo sapiens
ttgtaattttagtagagacagggttt

SEQ ID NO: 77014 - DNA, 26 bp, Homo sapiens
tgtaattttagtagagacagggtttc

SEQ ID NO: 77015 - DNA, 26 bp, Homo sapiens
gtaattttagtagagacagggtttca

SEQ ID NO: 77016 - DNA, 26 bp, Homo sapiens
taattttagtagagacagggtttcag

SEQ ID NO: 77017 - DNA, 26 bp, Homo sapiens
aattttagtagagacagggtttcagc

SEQ ID NO: 77018 - DNA, 26 bp, Homo sapiens
attttagtagagacagggtttcagca

SEQ ID NO: 77019 - DNA, 26 bp, Homo sapiens
ttttagtagagacagggtttcagcat

SEQ ID NO: 77020 - DNA, 26 bp, Homo sapiens
tttagtagagacagggtttcagcata

SEQ ID NO: 77021 - DNA, 26 bp, Homo sapiens
ttagtagagacagggtttcagcatat

SEQ ID NO: 77022 - DNA, 26 bp, Homo sapiens
tagtagagacagggtttcagcatatt

SEQ ID NO: 77023 - DNA, 26 bp, Homo sapiens
agtagagacagggtttcagcatattg

SEQ ID NO: 77024 - DNA, 26 bp, Homo sapiens
gtagagacagggtttcagcatattgg

SEQ ID NO: 77025 - DNA, 26 bp, Homo sapiens
tagagacagggtttcagcatattggc

SEQ ID NO: 77026 - DNA, 26 bp, Homo sapiens
agagacagggtttcagcatattggcc

SEQ ID NO: 77027 - DNA, 26 bp, Homo sapiens
gagacagggtttcagcatattggcca

SEQ ID NO: 77028 - DNA, 26 bp, Homo sapiens
agacagggtttcagcatattggccag

SEQ ID NO: 77029 - DNA, 26 bp, Homo sapiens
gacagggtttcagcatattggccagg

SEQ ID NO: 77030 - DNA, 26 bp, Homo sapiens
acagggtttcagcatattggccaggc

SEQ ID NO: 77031 - DNA, 26 bp, Homo sapiens
cagggtttcagcatattggccaggct

SEQ ID NO: 77032 - DNA, 26 bp, Homo sapiens
agggtttcagcatattggccaggctg

SEQ ID NO: 77033 - DNA, 26 bp, Homo sapiens
gggtttcagcatattggccaggctgg

SEQ ID NO: 77034 - DNA, 26 bp, Homo sapiens
ggtttcagcatattggccaggctgga

SEQ ID NO: 77035 - DNA, 26 bp, Homo sapiens
gtttcagcatattggccaggctggac

SEQ ID NO: 77036 - DNA, 26 bp, Homo sapiens
tttcagcatattggccaggctggact

SEQ ID NO: 77037 - DNA, 26 bp, Homo sapiens
ttcagcatattggccaggctggactc

SEQ ID NO: 77038 - DNA, 26 bp, Homo sapiens
tcagcatattggccaggctggactcg

SEQ ID NO: 77039 - DNA, 26 bp, Homo sapiens
cagcatattggccaggctggactcga

SEQ ID NO: 77040 - DNA, 26 bp, Homo sapiens
agcatattggccaggctggactcgaa

SEQ ID NO: 77041 - DNA, 26 bp, Homo sapiens
gcatattggccaggctggactcgaac

SEQ ID NO: 77042 - DNA, 26 bp, Homo sapiens
catattggccaggctggactcgaact

SEQ ID NO: 77043 - DNA, 26 bp, Homo sapiens
atattggccaggctggactcgaactc

SEQ ID NO: 77044 - DNA, 26 bp, Homo sapiens
tattggccaggctggactcgaactcc

SEQ ID NO: 77045 - DNA, 26 bp, Homo sapiens
attggccaggctggactcgaactcct

SEQ ID NO: 77046 - DNA, 26 bp, Homo sapiens
ttggccaggctggactcgaactcctg

SEQ ID NO: 77047 - DNA, 26 bp, Homo sapiens
tggccaggctggactcgaactcctga

SEQ ID NO: 77048 - DNA, 26 bp, Homo sapiens
ggccaggctggactcgaactcctgac

SEQ ID NO: 77049 - DNA, 26 bp, Homo sapiens
gccaggctggactcgaactcctgacc

SEQ ID NO: 77050 - DNA, 26 bp, Homo sapiens
ccaggctggactcgaactcctgacct

SEQ ID NO: 77051 - DNA, 26 bp, Homo sapiens
caggctggactcgaactcctgacctc

SEQ ID NO: 77052 - DNA, 26 bp, Homo sapiens
aggctggactcgaactcctgacctca

SEQ ID NO: 77053 - DNA, 26 bp, Homo sapiens
ggctggactcgaactcctgacctcag

SEQ ID NO: 77054 - DNA, 26 bp, Homo sapiens
gctggactcgaactcctgacctcagg

SEQ ID NO: 77055 - DNA, 26 bp, Homo sapiens
ctggactcgaactcctgacctcaggt

SEQ ID NO: 77056 - DNA, 26 bp, Homo sapiens
tggactcgaactcctgacctcaggtg

SEQ ID NO: 77057 - DNA, 26 bp, Homo sapiens
ggactcgaactcctgacctcaggtga

SEQ ID NO: 77058 - DNA, 26 bp, Homo sapiens
gactcgaactcctgacctcaggtgat

SEQ ID NO: 77059 - DNA, 26 bp, Homo sapiens
actcgaactcctgacctcaggtgatc

SEQ ID NO: 77060 - DNA, 26 bp, Homo sapiens
ctcgaactcctgacctcaggtgatcc

SEQ ID NO: 77061 - DNA, 26 bp, Homo sapiens
tcgaactcctgacctcaggtgatcca

SEQ ID NO: 77062 - DNA, 26 bp, Homo sapiens
cgaactcctgacctcaggtgatccac

SEQ ID NO: 77063 - DNA, 26 bp, Homo sapiens
gaactcctgacctcaggtgatccacc

SEQ ID NO: 77064 - DNA, 26 bp, Homo sapiens
aactcctgacctcaggtgatccacct

SEQ ID NO: 77065 - DNA, 26 bp, Homo sapiens
actcctgacctcaggtgatccaccta

SEQ ID NO: 77066 - DNA, 26 bp, Homo sapiens
ctcctgacctcaggtgatccacctac

SEQ ID NO: 77067 - DNA, 26 bp, Homo sapiens
tcctgacctcaggtgatccacctacc

SEQ ID NO: 77068 - DNA, 26 bp, Homo sapiens
cctgacctcaggtgatccacctacct

SEQ ID NO: 77069 - DNA, 26 bp, Homo sapiens
ctgacctcaggtgatccacctacctc

SEQ ID NO: 77070 - DNA, 26 bp, Homo sapiens
tgacctcaggtgatccacctacctca

SEQ ID NO: 77071 - DNA, 26 bp, Homo sapiens
gacctcaggtgatccacctacctcag

SEQ ID NO: 77072 - DNA, 26 bp, Homo sapiens
acctcaggtgatccacctacctcagc

SEQ ID NO: 77073 - DNA, 26 bp, Homo sapiens
cctcaggtgatccacctacctcagcc

SEQ ID NO: 77074 - DNA, 26 bp, Homo sapiens
ctcaggtgatccacctacctcagcct

SEQ ID NO: 77075 - DNA, 26 bp, Homo sapiens
tcaggtgatccacctacctcagccta

SEQ ID NO: 77076 - DNA, 26 bp, Homo sapiens
caggtgatccacctacctcagcctac

SEQ ID NO: 77077 - DNA, 26 bp, Homo sapiens
aggtgatccacctacctcagcctacc

SEQ ID NO: 77078 - DNA, 26 bp, Homo sapiens
ggtgatccacctacctcagcctacca

SEQ ID NO: 77079 - DNA, 26 bp, Homo sapiens
gtgatccacctacctcagcctaccaa

SEQ ID NO: 77080 - DNA, 26 bp, Homo sapiens
tgatccacctacctcagcctaccaaa

SEQ ID NO: 77081 - DNA, 26 bp, Homo sapiens
gatccacctacctcagcctaccaaag

SEQ ID NO: 77082 - DNA, 26 bp, Homo sapiens
atccacctacctcagcctaccaaagt

SEQ ID NO: 77083 - DNA, 26 bp, Homo sapiens
tccacctacctcagcctaccaaagtg

SEQ ID NO: 77084 - DNA, 26 bp, Homo sapiens
ccacctacctcagcctaccaaagtgc

SEQ ID NO: 77085 - DNA, 26 bp, Homo sapiens
cacctacctcagcctaccaaagtgct

SEQ ID NO: 77086 - DNA, 26 bp, Homo sapiens
acctacctcagcctaccaaagtgctg

SEQ ID NO: 77087 - DNA, 26 bp, Homo sapiens
cctacctcagcctaccaaagtgctgg

SEQ ID NO: 77088 - DNA, 26 bp, Homo sapiens
ctacctcagcctaccaaagtgctggg

SEQ ID NO: 77089 - DNA, 26 bp, Homo sapiens
tacctcagcctaccaaagtgctggga

SEQ ID NO: 77090 - DNA, 26 bp, Homo sapiens
acctcagcctaccaaagtgctgggat

SEQ ID NO: 77091 - DNA, 26 bp, Homo sapiens
cctcagcctaccaaagtgctgggatt

SEQ ID NO: 77092 - DNA, 26 bp, Homo sapiens
ctcagcctaccaaagtgctgggatta

SEQ ID NO: 77093 - DNA, 26 bp, Homo sapiens
tcagcctaccaaagtgctgggattac

SEQ ID NO: 77094 - DNA, 26 bp, Homo sapiens
cagcctaccaaagtgctgggattaca

SEQ ID NO: 77095 - DNA, 26 bp, Homo sapiens
agcctaccaaagtgctgggattacaa

SEQ ID NO: 77096 - DNA, 26 bp, Homo sapiens
gcctaccaaagtgctgggattacaag

SEQ ID NO: 77097 - DNA, 26 bp, Homo sapiens
cctaccaaagtgctgggattacaagc

SEQ ID NO: 77098 - DNA, 26 bp, Homo sapiens
ctaccaaagtgctgggattacaagca

SEQ ID NO: 77099 - DNA, 26 bp, Homo sapiens
taccaaagtgctgggattacaagcat

SEQ ID NO: 77100 - DNA, 26 bp, Homo sapiens
accaaagtgctgggattacaagcatg

SEQ ID NO: 77101 - DNA, 26 bp, Homo sapiens
ccaaagtgctgggattacaagcatga

SEQ ID NO: 77102 - DNA, 26 bp, Homo sapiens
caaagtgctgggattacaagcatgag

SEQ ID NO: 77103 - DNA, 26 bp, Homo sapiens
aaagtgctgggattacaagcatgagc

SEQ ID NO: 77104 - DNA, 26 bp, Homo sapiens
aagtgctgggattacaagcatgagcc

SEQ ID NO: 77105 - DNA, 26 bp, Homo sapiens
agtgctgggattacaagcatgagcca

SEQ ID NO: 77106 - DNA, 26 bp, Homo sapiens
gtgctgggattacaagcatgagccac

SEQ ID NO: 77107 - DNA, 26 bp, Homo sapiens
tgctgggattacaagcatgagccacc

SEQ ID NO: 77108 - DNA, 26 bp, Homo sapiens
gctgggattacaagcatgagccacca

SEQ ID NO: 77109 - DNA, 26 bp, Homo sapiens
ctgggattacaagcatgagccaccac

SEQ ID NO: 77110 - DNA, 26 bp, Homo sapiens
tgggattacaagcatgagccaccacg

SEQ ID NO: 77111 - DNA, 26 bp, Homo sapiens
gggattacaagcatgagccaccacgc

SEQ ID NO: 77112 - DNA, 26 bp, Homo sapiens
ggattacaagcatgagccaccacgcc

SEQ ID NO: 77113 - DNA, 26 bp, Homo sapiens
gattacaagcatgagccaccacgcct

SEQ ID NO: 77114 - DNA, 26 bp, Homo sapiens
attacaagcatgagccaccacgcctg

SEQ ID NO: 77115 - DNA, 26 bp, Homo sapiens
ttacaagcatgagccaccacgcctgg

SEQ ID NO: 77116 - DNA, 26 bp, Homo sapiens
tacaagcatgagccaccacgcctggc

SEQ ID NO: 77117 - DNA, 26 bp, Homo sapiens
acaagcatgagccaccacgcctggcc

SEQ ID NO: 77118 - DNA, 26 bp, Homo sapiens
caagcatgagccaccacgcctggcct

SEQ ID NO: 77119 - DNA, 26 bp, Homo sapiens
aagcatgagccaccacgcctggccta

SEQ ID NO: 77120 - DNA, 26 bp, Homo sapiens
agcatgagccaccacgcctggcctaa

SEQ ID NO: 77121 - DNA, 26 bp, Homo sapiens
gcatgagccaccacgcctggcctaat

SEQ ID NO: 77122 - DNA, 26 bp, Homo sapiens
catgagccaccacgcctggcctaatg

SEQ ID NO: 77123 - DNA, 26 bp, Homo sapiens
atgagccaccacgcctggcctaatga

SEQ ID NO: 77124 - DNA, 26 bp, Homo sapiens
tgagccaccacgcctggcctaatgat

SEQ ID NO: 77125 - DNA, 26 bp, Homo sapiens
gagccaccacgcctggcctaatgatt

SEQ ID NO: 77126 - DNA, 26 bp, Homo sapiens
agccaccacgcctggcctaatgattc

SEQ ID NO: 77127 - DNA, 26 bp, Homo sapiens
gccaccacgcctggcctaatgattct

SEQ ID NO: 77128 - DNA, 26 bp, Homo sapiens
ccaccacgcctggcctaatgattcta

SEQ ID NO: 77129 - DNA, 26 bp, Homo sapiens
caccacgcctggcctaatgattctat

SEQ ID NO: 77130 - DNA, 26 bp, Homo sapiens
accacgcctggcctaatgattctatt

SEQ ID NO: 77131 - DNA, 26 bp, Homo sapiens
ccacgcctggcctaatgattctattt

SEQ ID NO: 77132 - DNA, 26 bp, Homo sapiens
cacgcctggcctaatgattctatttt

SEQ ID NO: 77133 - DNA, 26 bp, Homo sapiens
acgcctggcctaatgattctatttta

SEQ ID NO: 77134 - DNA, 26 bp, Homo sapiens
cgcctggcctaatgattctattttaa

SEQ ID NO: 77135 - DNA, 26 bp, Homo sapiens
gcctggcctaatgattctattttaaa

SEQ ID NO: 77136 - DNA, 26 bp, Homo sapiens
cctggcctaatgattctattttaaag

SEQ ID NO: 77137 - DNA, 26 bp, Homo sapiens
ctggcctaatgattctattttaaagg

SEQ ID NO: 77138 - DNA, 26 bp, Homo sapiens
tggcctaatgattctattttaaagga

SEQ ID NO: 77139 - DNA, 26 bp, Homo sapiens
ggcctaatgattctattttaaaggaa

SEQ ID NO: 77140 - DNA, 26 bp, Homo sapiens
gcctaatgattctattttaaaggaaa

SEQ ID NO: 77141 - DNA, 26 bp, Homo sapiens
cctaatgattctattttaaaggaaaa

SEQ ID NO: 77142 - DNA, 26 bp, Homo sapiens
ctaatgattctattttaaaggaaaat

SEQ ID NO: 77143 - DNA, 26 bp, Homo sapiens
taatgattctattttaaaggaaaatt

SEQ ID NO: 77144 - DNA, 26 bp, Homo sapiens
aatgattctattttaaaggaaaattt

SEQ ID NO: 77145 - DNA, 26 bp, Homo sapiens
atgattctattttaaaggaaaatttt

SEQ ID NO: 77146 - DNA, 26 bp, Homo sapiens
tgattctattttaaaggaaaattttc

SEQ ID NO: 77147 - DNA, 26 bp, Homo sapiens
gattctattttaaaggaaaattttca

SEQ ID NO: 77148 - DNA, 26 bp, Homo sapiens
attctattttaaaggaaaattttcag

SEQ ID NO: 77149 - DNA, 26 bp, Homo sapiens
ttctattttaaaggaaaattttcagc

SEQ ID NO: 77150 - DNA, 26 bp, Homo sapiens
tctattttaaaggaaaattttcagca

SEQ ID NO: 77151 - DNA, 26 bp, Homo sapiens
ctattttaaaggaaaattttcagcat

SEQ ID NO: 77152 - DNA, 26 bp, Homo sapiens
tattttaaaggaaaattttcagcatt

SEQ ID NO: 77153 - DNA, 26 bp, Homo sapiens
attttaaaggaaaattttcagcattt

SEQ ID NO: 77154 - DNA, 26 bp, Homo sapiens
ttttaaaggaaaattttcagcattta

SEQ ID NO: 77155 - DNA, 26 bp, Homo sapiens
tttaaaggaaaattttcagcatttat

SEQ ID NO: 77156 - DNA, 26 bp, Homo sapiens
ttaaaggaaaattttcagcatttatt

SEQ ID NO: 77157 - DNA, 26 bp, Homo sapiens
taaaggaaaattttcagcatttattt

SEQ ID NO: 77158 - DNA, 26 bp, Homo sapiens
aaaggaaaattttcagcatttatttt

SEQ ID NO: 77159 - DNA, 26 bp, Homo sapiens
aaggaaaattttcagcatttatttta

SEQ ID NO: 77160 - DNA, 26 bp, Homo sapiens
aggaaaattttcagcatttattttac

SEQ ID NO: 77161 - DNA, 26 bp, Homo sapiens
ggaaaattttcagcatttattttact

SEQ ID NO: 77162 - DNA, 26 bp, Homo sapiens
gaaaattttcagcatttattttacta

SEQ ID NO: 77163 - DNA, 26 bp, Homo sapiens
aaaattttcagcatttattttactac

SEQ ID NO: 77164 - DNA, 26 bp, Homo sapiens
aaattttcagcatttattttactacc

SEQ ID NO: 77165 - DNA, 26 bp, Homo sapiens
aattttcagcatttattttactacca

SEQ ID NO: 77166 - DNA, 26 bp, Homo sapiens
attttcagcatttattttactaccag

SEQ ID NO: 77167 - DNA, 26 bp, Homo sapiens
ttttcagcatttattttactaccagg

SEQ ID NO: 77168 - DNA, 26 bp, Homo sapiens
tttcagcatttattttactaccaggt

SEQ ID NO: 77169 - DNA, 26 bp, Homo sapiens
ttcagcatttattttactaccaggta

SEQ ID NO: 77170 - DNA, 26 bp, Homo sapiens
tcagcatttattttactaccaggtat

SEQ ID NO: 77171 - DNA, 26 bp, Homo sapiens
cagcatttattttactaccaggtatt

SEQ ID NO: 77172 - DNA, 26 bp, Homo sapiens
agcatttattttactaccaggtattt

SEQ ID NO: 77173 - DNA, 26 bp, Homo sapiens
gcatttattttactaccaggtatttt

SEQ ID NO: 77174 - DNA, 26 bp, Homo sapiens
catttattttactaccaggtattttg

SEQ ID NO: 77175 - DNA, 26 bp, Homo sapiens
atttattttactaccaggtattttgc

SEQ ID NO: 77176 - DNA, 26 bp, Homo sapiens
tttattttactaccaggtattttgca

SEQ ID NO: 77177 - DNA, 26 bp, Homo sapiens
ttattttactaccaggtattttgcat

SEQ ID NO: 77178 - DNA, 26 bp, Homo sapiens
tattttactaccaggtattttgcatt

SEQ ID NO: 77179 - DNA, 26 bp, Homo sapiens
attttactaccaggtattttgcatta

SEQ ID NO: 77180 - DNA, 26 bp, Homo sapiens
ttttactaccaggtattttgcattat

SEQ ID NO: 77181 - DNA, 26 bp, Homo sapiens
tttactaccaggtattttgcattatt

SEQ ID NO: 77182 - DNA, 26 bp, Homo sapiens
ttactaccaggtattttgcattattt

SEQ ID NO: 77183 - DNA, 26 bp, Homo sapiens
tactaccaggtattttgcattattta

SEQ ID NO: 77184 - DNA, 26 bp, Homo sapiens
actaccaggtattttgcattatttac

SEQ ID NO: 77185 - DNA, 26 bp, Homo sapiens
ctaccaggtattttgcattatttacc

SEQ ID NO: 77186 - DNA, 26 bp, Homo sapiens
taccaggtattttgcattatttaccc

SEQ ID NO: 77187 - DNA, 26 bp, Homo sapiens
accaggtattttgcattatttaccct

SEQ ID NO: 77188 - DNA, 26 bp, Homo sapiens
ccaggtattttgcattatttaccctt

SEQ ID NO: 77189 - DNA, 26 bp, Homo sapiens
caggtattttgcattatttacccttt

SEQ ID NO: 77190 - DNA, 26 bp, Homo sapiens
aggtattttgcattatttaccctttc

SEQ ID NO: 77191 - DNA, 26 bp, Homo sapiens
ggtattttgcattatttaccctttct

SEQ ID NO: 77192 - DNA, 26 bp, Homo sapiens
gtattttgcattatttaccctttctg

SEQ ID NO: 77193 - DNA, 26 bp, Homo sapiens
tattttgcattatttaccctttctgt

SEQ ID NO: 77194 - DNA, 26 bp, Homo sapiens
attttgcattatttaccctttctgta

SEQ ID NO: 77195 - DNA, 26 bp, Homo sapiens
ttttgcattatttaccctttctgtac

SEQ ID NO: 77196 - DNA, 26 bp, Homo sapiens
tttgcattatttaccctttctgtaca

SEQ ID NO: 77197 - DNA, 26 bp, Homo sapiens
ttgcattatttaccctttctgtacac

SEQ ID NO: 77198 - DNA, 26 bp, Homo sapiens
tgcattatttaccctttctgtacaca

SEQ ID NO: 77199 - DNA, 26 bp, Homo sapiens
gcattatttaccctttctgtacacaa

SEQ ID NO: 77200 - DNA, 26 bp, Homo sapiens
cattatttaccctttctgtacacaat

SEQ ID NO: 77201 - DNA, 26 bp, Homo sapiens
attatttaccctttctgtacacaata

SEQ ID NO: 77202 - DNA, 26 bp, Homo sapiens
ttatttaccctttctgtacacaatag

SEQ ID NO: 77203 - DNA, 26 bp, Homo sapiens
tatttaccctttctgtacacaataga

SEQ ID NO: 77204 - DNA, 26 bp, Homo sapiens
atttaccctttctgtacacaatagag

SEQ ID NO: 77205 - DNA, 26 bp, Homo sapiens
tttaccctttctgtacacaatagaga

SEQ ID NO: 77206 - DNA, 26 bp, Homo sapiens
ttaccctttctgtacacaatagagag

SEQ ID NO: 77207 - DNA, 26 bp, Homo sapiens
taccctttctgtacacaatagagagc

SEQ ID NO: 77208 - DNA, 26 bp, Homo sapiens
accctttctgtacacaatagagagct

SEQ ID NO: 77209 - DNA, 26 bp, Homo sapiens
ccctttctgtacacaatagagagctg

SEQ ID NO: 77210 - DNA, 26 bp, Homo sapiens
cctttctgtacacaatagagagctgt

SEQ ID NO: 77211 - DNA, 26 bp, Homo sapiens
ctttctgtacacaatagagagctgtt

SEQ ID NO: 77212 - DNA, 26 bp, Homo sapiens
tttctgtacacaatagagagctgttt

SEQ ID NO: 77213 - DNA, 26 bp, Homo sapiens
ttctgtacacaatagagagctgtttt

SEQ ID NO: 77214 - DNA, 26 bp, Homo sapiens
tctgtacacaatagagagctgttttg

SEQ ID NO: 77215 - DNA, 26 bp, Homo sapiens
ctgtacacaatagagagctgttttgc

SEQ ID NO: 77216 - DNA, 26 bp, Homo sapiens
tgtacacaatagagagctgttttgca

SEQ ID NO: 77217 - DNA, 26 bp, Homo sapiens
gtacacaatagagagctgttttgcat

SEQ ID NO: 77218 - DNA, 26 bp, Homo sapiens
tacacaatagagagctgttttgcatc

SEQ ID NO: 77219 - DNA, 26 bp, Homo sapiens
acacaatagagagctgttttgcatct

SEQ ID NO: 77220 - DNA, 26 bp, Homo sapiens
cacaatagagagctgttttgcatctt

SEQ ID NO: 77221 - DNA, 26 bp, Homo sapiens
acaatagagagctgttttgcatcttt

SEQ ID NO: 77222 - DNA, 26 bp, Homo sapiens
caatagagagctgttttgcatctttc

SEQ ID NO: 77223 - DNA, 26 bp, Homo sapiens
aatagagagctgttttgcatctttca

SEQ ID NO: 77224 - DNA, 26 bp, Homo sapiens
atagagagctgttttgcatctttcaa

SEQ ID NO: 77225 - DNA, 26 bp, Homo sapiens
tagagagctgttttgcatctttcaat

SEQ ID NO: 77226 - DNA, 26 bp, Homo sapiens
agagagctgttttgcatctttcaatg

SEQ ID NO: 77227 - DNA, 26 bp, Homo sapiens
gagagctgttttgcatctttcaatga

SEQ ID NO: 77228 - DNA, 26 bp, Homo sapiens
agagctgttttgcatctttcaatgag

SEQ ID NO: 77229 - DNA, 26 bp, Homo sapiens
gagctgttttgcatctttcaatgagg

SEQ ID NO: 77230 - DNA, 26 bp, Homo sapiens
agctgttttgcatctttcaatgaggg

SEQ ID NO: 77231 - DNA, 26 bp, Homo sapiens
gctgttttgcatctttcaatgaggga

SEQ ID NO: 77232 - DNA, 26 bp, Homo sapiens
ctgttttgcatctttcaatgagggaa

SEQ ID NO: 77233 - DNA, 26 bp, Homo sapiens
tgttttgcatctttcaatgagggaaa

SEQ ID NO: 77234 - DNA, 26 bp, Homo sapiens
gttttgcatctttcaatgagggaaaa

SEQ ID NO: 77235 - DNA, 26 bp, Homo sapiens
ttttgcatctttcaatgagggaaaat

SEQ ID NO: 77236 - DNA, 26 bp, Homo sapiens
tttgcatctttcaatgagggaaaata

SEQ ID NO: 77237 - DNA, 26 bp, Homo sapiens
ttgcatctttcaatgagggaaaataa

SEQ ID NO: 77238 - DNA, 26 bp, Homo sapiens
tgcatctttcaatgagggaaaataaa

SEQ ID NO: 77239 - DNA, 26 bp, Homo sapiens
gcatctttcaatgagggaaaataaag

SEQ ID NO: 77240 - DNA, 26 bp, Homo sapiens
catctttcaatgagggaaaataaaga

SEQ ID NO: 77241 - DNA, 26 bp, Homo sapiens
atctttcaatgagggaaaataaagag

SEQ ID NO: 77242 - DNA, 26 bp, Homo sapiens
tctttcaatgagggaaaataaagagg

SEQ ID NO: 77243 - DNA, 26 bp, Homo sapiens
ctttcaatgagggaaaataaagagga

SEQ ID NO: 77244 - DNA, 26 bp, Homo sapiens
tttcaatgagggaaaataaagaggaa

SEQ ID NO: 77245 - DNA, 26 bp, Homo sapiens
ttcaatgagggaaaataaagaggaaa

SEQ ID NO: 77246 - DNA, 26 bp, Homo sapiens
tcaatgagggaaaataaagaggaaat

SEQ ID NO: 77247 - DNA, 26 bp, Homo sapiens
caatgagggaaaataaagaggaaata

SEQ ID NO: 77248 - DNA, 26 bp, Homo sapiens
aatgagggaaaataaagaggaaatag

SEQ ID NO: 77249 - DNA, 26 bp, Homo sapiens
atgagggaaaataaagaggaaatagt

SEQ ID NO: 77250 - DNA, 26 bp, Homo sapiens
tgagggaaaataaagaggaaatagtt

SEQ ID NO: 77251 - DNA, 26 bp, Homo sapiens
gagggaaaataaagaggaaatagttg

SEQ ID NO: 77252 - DNA, 26 bp, Homo sapiens
agggaaaataaagaggaaatagttga

SEQ ID NO: 77253 - DNA, 26 bp, Homo sapiens
gggaaaataaagaggaaatagttgac

SEQ ID NO: 77254 - DNA, 26 bp, Homo sapiens
ggaaaataaagaggaaatagttgact

SEQ ID NO: 77255 - DNA, 26 bp, Homo sapiens
gaaaataaagaggaaatagttgactc

SEQ ID NO: 77256 - DNA, 26 bp, Homo sapiens
aaaataaagaggaaatagttgactct

SEQ ID NO: 77257 - DNA, 26 bp, Homo sapiens
aaataaagaggaaatagttgactcta

SEQ ID NO: 77258 - DNA, 26 bp, Homo sapiens
aataaagaggaaatagttgactctat

SEQ ID NO: 77259 - DNA, 26 bp, Homo sapiens
ataaagaggaaatagttgactctata

SEQ ID NO: 77260 - DNA, 26 bp, Homo sapiens
taaagaggaaatagttgactctataa

SEQ ID NO: 77261 - DNA, 26 bp, Homo sapiens
aaagaggaaatagttgactctataaa

SEQ ID NO: 77262 - DNA, 26 bp, Homo sapiens
aagaggaaatagttgactctataaaa

SEQ ID NO: 77263 - DNA, 26 bp, Homo sapiens
agaggaaatagttgactctataaaaa

SEQ ID NO: 77264 - DNA, 26 bp, Homo sapiens
gaggaaatagttgactctataaaaaa

SEQ ID NO: 77265 - DNA, 26 bp, Homo sapiens
aggaaatagttgactctataaaaaat

SEQ ID NO: 77266 - DNA, 26 bp, Homo sapiens
ggaaatagttgactctataaaaaata

SEQ ID NO: 77267 - DNA, 26 bp, Homo sapiens
gaaatagttgactctataaaaaatac

SEQ ID NO: 77268 - DNA, 26 bp, Homo sapiens
aaatagttgactctataaaaaataca

SEQ ID NO: 77269 - DNA, 26 bp, Homo sapiens
aatagttgactctataaaaaatacat

SEQ ID NO: 77270 - DNA, 26 bp, Homo sapiens
atagttgactctataaaaaatacatg

SEQ ID NO: 77271 - DNA, 26 bp, Homo sapiens
tagttgactctataaaaaatacatga

SEQ ID NO: 77272 - DNA, 26 bp, Homo sapiens
agttgactctataaaaaatacatgag

SEQ ID NO: 77273 - DNA, 26 bp, Homo sapiens
gttgactctataaaaaatacatgagg

SEQ ID NO: 77274 - DNA, 26 bp, Homo sapiens
ttgactctataaaaaatacatgaggc

SEQ ID NO: 77275 - DNA, 26 bp, Homo sapiens
tgactctataaaaaatacatgaggcg

SEQ ID NO: 77276 - DNA, 26 bp, Homo sapiens
gactctataaaaaatacatgaggcgt

SEQ ID NO: 77277 - DNA, 26 bp, Homo sapiens
actctataaaaaatacatgaggcgtc

SEQ ID NO: 77278 - DNA, 26 bp, Homo sapiens
ctctataaaaaatacatgaggcgtcc

SEQ ID NO: 77279 - DNA, 26 bp, Homo sapiens
tctataaaaaatacatgaggcgtcca

SEQ ID NO: 77280 - DNA, 26 bp, Homo sapiens
ctataaaaaatacatgaggcgtccac

SEQ ID NO: 77281 - DNA, 26 bp, Homo sapiens
tataaaaaatacatgaggcgtccaca

SEQ ID NO: 77282 - DNA, 26 bp, Homo sapiens
ataaaaaatacatgaggcgtccacat

SEQ ID NO: 77283 - DNA, 26 bp, Homo sapiens
taaaaaatacatgaggcgtccacata

SEQ ID NO: 77284 - DNA, 26 bp, Homo sapiens
aaaaaatacatgaggcgtccacataa

SEQ ID NO: 77285 - DNA, 26 bp, Homo sapiens
aaaaatacatgaggcgtccacataat

SEQ ID NO: 77286 - DNA, 26 bp, Homo sapiens
aaaatacatgaggcgtccacataatg

SEQ ID NO: 77287 - DNA, 26 bp, Homo sapiens
aaatacatgaggcgtccacataatgc

SEQ ID NO: 77288 - DNA, 26 bp, Homo sapiens
aatacatgaggcgtccacataatgct

SEQ ID NO: 77289 - DNA, 26 bp, Homo sapiens
atacatgaggcgtccacataatgctg

SEQ ID NO: 77290 - DNA, 26 bp, Homo sapiens
tacatgaggcgtccacataatgctgt

SEQ ID NO: 77291 - DNA, 26 bp, Homo sapiens
acatgaggcgtccacataatgctgtt

SEQ ID NO: 77292 - DNA, 26 bp, Homo sapiens
catgaggcgtccacataatgctgttt

SEQ ID NO: 77293 - DNA, 26 bp, Homo sapiens
atgaggcgtccacataatgctgtttt

SEQ ID NO: 77294 - DNA, 26 bp, Homo sapiens
tgaggcgtccacataatgctgttttt

SEQ ID NO: 77295 - DNA, 26 bp, Homo sapiens
gaggcgtccacataatgctgtttttg

SEQ ID NO: 77296 - DNA, 26 bp, Homo sapiens
aggcgtccacataatgctgtttttgt

SEQ ID NO: 77297 - DNA, 26 bp, Homo sapiens
ggcgtccacataatgctgtttttgtg

SEQ ID NO: 77298 - DNA, 26 bp, Homo sapiens
gcgtccacataatgctgtttttgtgc

SEQ ID NO: 77299 - DNA, 26 bp, Homo sapiens
cgtccacataatgctgtttttgtgcc

SEQ ID NO: 77300 - DNA, 26 bp, Homo sapiens
gtccacataatgctgtttttgtgcct

SEQ ID NO: 77301 - DNA, 26 bp, Homo sapiens
tccacataatgctgtttttgtgcctg

SEQ ID NO: 77302 - DNA, 26 bp, Homo sapiens
ccacataatgctgtttttgtgcctgt

SEQ ID NO: 77303 - DNA, 26 bp, Homo sapiens
cacataatgctgtttttgtgcctgta

SEQ ID NO: 77304 - DNA, 26 bp, Homo sapiens
acataatgctgtttttgtgcctgtat

SEQ ID NO: 77305 - DNA, 26 bp, Homo sapiens
cataatgctgtttttgtgcctgtatg

SEQ ID NO: 77306 - DNA, 26 bp, Homo sapiens
ataatgctgtttttgtgcctgtatgt

SEQ ID NO: 77307 - DNA, 26 bp, Homo sapiens
taatgctgtttttgtgcctgtatgtg

SEQ ID NO: 77308 - DNA, 26 bp, Homo sapiens
aatgctgtttttgtgcctgtatgtgt

SEQ ID NO: 77309 - DNA, 26 bp, Homo sapiens
atgctgtttttgtgcctgtatgtgtg

SEQ ID NO: 77310 - DNA, 26 bp, Homo sapiens
tgctgtttttgtgcctgtatgtgtga

SEQ ID NO: 77311 - DNA, 26 bp, Homo sapiens
gctgtttttgtgcctgtatgtgtgac

SEQ ID NO: 77312 - DNA, 26 bp, Homo sapiens
ctgtttttgtgcctgtatgtgtgacc

SEQ ID NO: 77313 - DNA, 26 bp, Homo sapiens
tgtttttgtgcctgtatgtgtgacca

SEQ ID NO: 77314 - DNA, 26 bp, Homo sapiens
gtttttgtgcctgtatgtgtgaccat

SEQ ID NO: 77315 - DNA, 26 bp, Homo sapiens
tttttgtgcctgtatgtgtgaccatg

SEQ ID NO: 77316 - DNA, 26 bp, Homo sapiens
ttttgtgcctgtatgtgtgaccatga

SEQ ID NO: 77317 - DNA, 26 bp, Homo sapiens
tttgtgcctgtatgtgtgaccatgaa

SEQ ID NO: 77318 - DNA, 26 bp, Homo sapiens
ttgtgcctgtatgtgtgaccatgaag

SEQ ID NO: 77319 - DNA, 26 bp, Homo sapiens
tgtgcctgtatgtgtgaccatgaagc

SEQ ID NO: 77320 - DNA, 26 bp, Homo sapiens
gtgcctgtatgtgtgaccatgaagca

SEQ ID NO: 77321 - DNA, 26 bp, Homo sapiens
tgcctgtatgtgtgaccatgaagcat

SEQ ID NO: 77322 - DNA, 26 bp, Homo sapiens
gcctgtatgtgtgaccatgaagcatg

SEQ ID NO: 77323 - DNA, 26 bp, Homo sapiens
cctgtatgtgtgaccatgaagcatgt

SEQ ID NO: 77324 - DNA, 26 bp, Homo sapiens
ctgtatgtgtgaccatgaagcatgtt

SEQ ID NO: 77325 - DNA, 26 bp, Homo sapiens
tgtatgtgtgaccatgaagcatgttc

SEQ ID NO: 77326 - DNA, 26 bp, Homo sapiens
gtatgtgtgaccatgaagcatgttcc

SEQ ID NO: 77327 - DNA, 26 bp, Homo sapiens
tatgtgtgaccatgaagcatgttcca

SEQ ID NO: 77328 - DNA, 26 bp, Homo sapiens
atgtgtgaccatgaagcatgttccac

SEQ ID NO: 77329 - DNA, 26 bp, Homo sapiens
tgtgtgaccatgaagcatgttccacc

SEQ ID NO: 77330 - DNA, 26 bp, Homo sapiens
gtgtgaccatgaagcatgttccacct

SEQ ID NO: 77331 - DNA, 26 bp, Homo sapiens
tgtgaccatgaagcatgttccacctt

SEQ ID NO: 77332 - DNA, 26 bp, Homo sapiens
gtgaccatgaagcatgttccaccttc

SEQ ID NO: 77333 - DNA, 26 bp, Homo sapiens
tgaccatgaagcatgttccaccttcg

SEQ ID NO: 77334 - DNA, 26 bp, Homo sapiens
gaccatgaagcatgttccaccttcgg

SEQ ID NO: 77335 - DNA, 26 bp, Homo sapiens
accatgaagcatgttccaccttcggg

SEQ ID NO: 77336 - DNA, 26 bp, Homo sapiens
ccatgaagcatgttccaccttcggga

SEQ ID NO: 77337 - DNA, 26 bp, Homo sapiens
catgaagcatgttccaccttcgggac

SEQ ID NO: 77338 - DNA, 26 bp, Homo sapiens
atgaagcatgttccaccttcgggacc

SEQ ID NO: 77339 - DNA, 26 bp, Homo sapiens
tgaagcatgttccaccttcgggacct

SEQ ID NO: 77340 - DNA, 26 bp, Homo sapiens
gaagcatgttccaccttcgggacctt

SEQ ID NO: 77341 - DNA, 26 bp, Homo sapiens
aagcatgttccaccttcgggacctta

SEQ ID NO: 77342 - DNA, 26 bp, Homo sapiens
agcatgttccaccttcgggaccttaa

SEQ ID NO: 77343 - DNA, 26 bp, Homo sapiens
gcatgttccaccttcgggaccttaat

SEQ ID NO: 77344 - DNA, 26 bp, Homo sapiens
catgttccaccttcgggaccttaatt

SEQ ID NO: 77345 - DNA, 26 bp, Homo sapiens
atgttccaccttcgggaccttaattc

SEQ ID NO: 77346 - DNA, 26 bp, Homo sapiens
tgttccaccttcgggaccttaattct

SEQ ID NO: 77347 - DNA, 26 bp, Homo sapiens
gttccaccttcgggaccttaattctc

SEQ ID NO: 77348 - DNA, 26 bp, Homo sapiens
ttccaccttcgggaccttaattctct

SEQ ID NO: 77349 - DNA, 26 bp, Homo sapiens
tccaccttcgggaccttaattctcta

SEQ ID NO: 77350 - DNA, 26 bp, Homo sapiens
ccaccttcgggaccttaattctctaa

SEQ ID NO: 77351 - DNA, 26 bp, Homo sapiens
caccttcgggaccttaattctctaat

SEQ ID NO: 77352 - DNA, 26 bp, Homo sapiens
accttcgggaccttaattctctaatt

SEQ ID NO: 77353 - DNA, 26 bp, Homo sapiens
ccttcgggaccttaattctctaattt

SEQ ID NO: 77354 - DNA, 26 bp, Homo sapiens
cttcgggaccttaattctctaatttt

SEQ ID NO: 77355 - DNA, 26 bp, Homo sapiens
ttcgggaccttaattctctaatttta

SEQ ID NO: 77356 - DNA, 26 bp, Homo sapiens
tcgggaccttaattctctaattttaa

SEQ ID NO: 77357 - DNA, 26 bp, Homo sapiens
cgggaccttaattctctaattttaag

SEQ ID NO: 77358 - DNA, 26 bp, Homo sapiens
gggaccttaattctctaattttaaga

SEQ ID NO: 77359 - DNA, 26 bp, Homo sapiens
ggaccttaattctctaattttaagaa

SEQ ID NO: 77360 - DNA, 26 bp, Homo sapiens
gaccttaattctctaattttaagaaa

SEQ ID NO: 77361 - DNA, 26 bp, Homo sapiens
accttaattctctaattttaagaaat

SEQ ID NO: 77362 - DNA, 26 bp, Homo sapiens
ccttaattctctaattttaagaaatg

SEQ ID NO: 77363 - DNA, 26 bp, Homo sapiens
cttaattctctaattttaagaaatga

SEQ ID NO: 77364 - DNA, 26 bp, Homo sapiens
ttaattctctaattttaagaaatgag

SEQ ID NO: 77365 - DNA, 26 bp, Homo sapiens
taattctctaattttaagaaatgagg

SEQ ID NO: 77366 - DNA, 26 bp, Homo sapiens
aattctctaattttaagaaatgaggc

SEQ ID NO: 77367 - DNA, 26 bp, Homo sapiens
attctctaattttaagaaatgaggca

SEQ ID NO: 77368 - DNA, 26 bp, Homo sapiens
ttctctaattttaagaaatgaggcag

SEQ ID NO: 77369 - DNA, 26 bp, Homo sapiens
tctctaattttaagaaatgaggcaga

SEQ ID NO: 77370 - DNA, 26 bp, Homo sapiens
ctctaattttaagaaatgaggcagaa

SEQ ID NO: 77371 - DNA, 26 bp, Homo sapiens
tctaattttaagaaatgaggcagaag

SEQ ID NO: 77372 - DNA, 26 bp, Homo sapiens
ctaattttaagaaatgaggcagaaga

SEQ ID NO: 77373 - DNA, 26 bp, Homo sapiens
taattttaagaaatgaggcagaagaa

SEQ ID NO: 77374 - DNA, 26 bp, Homo sapiens
aattttaagaaatgaggcagaagaat

SEQ ID NO: 77375 - DNA, 26 bp, Homo sapiens
attttaagaaatgaggcagaagaatg

SEQ ID NO: 77376 - DNA, 26 bp, Homo sapiens
ttttaagaaatgaggcagaagaatgg

SEQ ID NO: 77377 - DNA, 26 bp, Homo sapiens
tttaagaaatgaggcagaagaatggc

SEQ ID NO: 77378 - DNA, 26 bp, Homo sapiens
ttaagaaatgaggcagaagaatggct

SEQ ID NO: 77379 - DNA, 26 bp, Homo sapiens
taagaaatgaggcagaagaatggcta

SEQ ID NO: 77380 - DNA, 26 bp, Homo sapiens
aagaaatgaggcagaagaatggctaa

SEQ ID NO: 77381 - DNA, 26 bp, Homo sapiens
agaaatgaggcagaagaatggctaaa

SEQ ID NO: 77382 - DNA, 26 bp, Homo sapiens
gaaatgaggcagaagaatggctaaaa

SEQ ID NO: 77383 - DNA, 26 bp, Homo sapiens
aaatgaggcagaagaatggctaaaat

SEQ ID NO: 77384 - DNA, 26 bp, Homo sapiens
aatgaggcagaagaatggctaaaatt

SEQ ID NO: 77385 - DNA, 26 bp, Homo sapiens
atgaggcagaagaatggctaaaatta

SEQ ID NO: 77386 - DNA, 26 bp, Homo sapiens
tgaggcagaagaatggctaaaattaa

SEQ ID NO: 77387 - DNA, 26 bp, Homo sapiens
gaggcagaagaatggctaaaattaaa

SEQ ID NO: 77388 - DNA, 26 bp, Homo sapiens
aggcagaagaatggctaaaattaaaa

SEQ ID NO: 77389 - DNA, 26 bp, Homo sapiens
ggcagaagaatggctaaaattaaaaa

SEQ ID NO: 77390 - DNA, 26 bp, Homo sapiens
gcagaagaatggctaaaattaaaaag

SEQ ID NO: 77391 - DNA, 26 bp, Homo sapiens
cagaagaatggctaaaattaaaaagg

SEQ ID NO: 77392 - DNA, 26 bp, Homo sapiens
agaagaatggctaaaattaaaaaggc

SEQ ID NO: 77393 - DNA, 26 bp, Homo sapiens
gaagaatggctaaaattaaaaaggca

SEQ ID NO: 77394 - DNA, 26 bp, Homo sapiens
aagaatggctaaaattaaaaaggcat

SEQ ID NO: 77395 - DNA, 26 bp, Homo sapiens
agaatggctaaaattaaaaaggcatg

SEQ ID NO: 77396 - DNA, 26 bp, Homo sapiens
gaatggctaaaattaaaaaggcatgg

SEQ ID NO: 77397 - DNA, 26 bp, Homo sapiens
aatggctaaaattaaaaaggcatgga

SEQ ID NO: 77398 - DNA, 26 bp, Homo sapiens
atggctaaaattaaaaaggcatggag

SEQ ID NO: 77399 - DNA, 26 bp, Homo sapiens
tggctaaaattaaaaaggcatggagc

SEQ ID NO: 77400 - DNA, 26 bp, Homo sapiens
ggctaaaattaaaaaggcatggagct

SEQ ID NO: 77401 - DNA, 26 bp, Homo sapiens
gctaaaattaaaaaggcatggagctc

SEQ ID NO: 77402 - DNA, 26 bp, Homo sapiens
ctaaaattaaaaaggcatggagctcc

SEQ ID NO: 77403 - DNA, 26 bp, Homo sapiens
taaaattaaaaaggcatggagctccc

SEQ ID NO: 77404 - DNA, 26 bp, Homo sapiens
aaaattaaaaaggcatggagctcccg

SEQ ID NO: 77405 - DNA, 26 bp, Homo sapiens
aaattaaaaaggcatggagctcccgg

SEQ ID NO: 77406 - DNA, 26 bp, Homo sapiens
aattaaaaaggcatggagctcccggg

SEQ ID NO: 77407 - DNA, 26 bp, Homo sapiens
attaaaaaggcatggagctcccggga

SEQ ID NO: 77408 - DNA, 26 bp, Homo sapiens
ttaaaaaggcatggagctcccgggaa

SEQ ID NO: 77409 - DNA, 26 bp, Homo sapiens
taaaaaggcatggagctcccgggaat

SEQ ID NO: 77410 - DNA, 26 bp, Homo sapiens
aaaaaggcatggagctcccgggaatt

SEQ ID NO: 77411 - DNA, 26 bp, Homo sapiens
aaaaggcatggagctcccgggaattc

SEQ ID NO: 77412 - DNA, 26 bp, Homo sapiens
aaaggcatggagctcccgggaattct

SEQ ID NO: 77413 - DNA, 26 bp, Homo sapiens
aaggcatggagctcccgggaattctt

SEQ ID NO: 77414 - DNA, 26 bp, Homo sapiens
aggcatggagctcccgggaattctta

SEQ ID NO: 77415 - DNA, 26 bp, Homo sapiens
ggcatggagctcccgggaattcttac

SEQ ID NO: 77416 - DNA, 26 bp, Homo sapiens
gcatggagctcccgggaattcttaca

SEQ ID NO: 77417 - DNA, 26 bp, Homo sapiens
catggagctcccgggaattcttacat

SEQ ID NO: 77418 - DNA, 26 bp, Homo sapiens
atggagctcccgggaattcttacatg

SEQ ID NO: 77419 - DNA, 26 bp, Homo sapiens
tggagctcccgggaattcttacatgg

SEQ ID NO: 77420 - DNA, 26 bp, Homo sapiens
ggagctcccgggaattcttacatggt

SEQ ID NO: 77421 - DNA, 26 bp, Homo sapiens
gagctcccgggaattcttacatggtg

SEQ ID NO: 77422 - DNA, 26 bp, Homo sapiens
agctcccgggaattcttacatggtga

SEQ ID NO: 77423 - DNA, 26 bp, Homo sapiens
gctcccgggaattcttacatggtgat

SEQ ID NO: 77424 - DNA, 26 bp, Homo sapiens
ctcccgggaattcttacatggtgatg

SEQ ID NO: 77425 - DNA, 26 bp, Homo sapiens
tcccgggaattcttacatggtgatgg

SEQ ID NO: 77426 - DNA, 26 bp, Homo sapiens
cccgggaattcttacatggtgatggt

SEQ ID NO: 77427 - DNA, 26 bp, Homo sapiens
ccgggaattcttacatggtgatggta

SEQ ID NO: 77428 - DNA, 26 bp, Homo sapiens
cgggaattcttacatggtgatggtag

SEQ ID NO: 77429 - DNA, 26 bp, Homo sapiens
gggaattcttacatggtgatggtagg

SEQ ID NO: 77430 - DNA, 26 bp, Homo sapiens
ggaattcttacatggtgatggtagga

SEQ ID NO: 77431 - DNA, 26 bp, Homo sapiens
gaattcttacatggtgatggtaggag

SEQ ID NO: 77432 - DNA, 26 bp, Homo sapiens
aattcttacatggtgatggtaggagc

SEQ ID NO: 77433 - DNA, 26 bp, Homo sapiens
attcttacatggtgatggtaggagca

SEQ ID NO: 77434 - DNA, 26 bp, Homo sapiens
ttcttacatggtgatggtaggagcac

SEQ ID NO: 77435 - DNA, 26 bp, Homo sapiens
tcttacatggtgatggtaggagcaca

SEQ ID NO: 77436 - DNA, 26 bp, Homo sapiens
cttacatggtgatggtaggagcacag

SEQ ID NO: 77437 - DNA, 26 bp, Homo sapiens
ttacatggtgatggtaggagcacaga

SEQ ID NO: 77438 - DNA, 26 bp, Homo sapiens
tacatggtgatggtaggagcacagaa

SEQ ID NO: 77439 - DNA, 26 bp, Homo sapiens
acatggtgatggtaggagcacagaaa

SEQ ID NO: 77440 - DNA, 26 bp, Homo sapiens
catggtgatggtaggagcacagaaat

SEQ ID NO: 77441 - DNA, 26 bp, Homo sapiens
atggtgatggtaggagcacagaaatg

SEQ ID NO: 77442 - DNA, 26 bp, Homo sapiens
tggtgatggtaggagcacagaaatgt

SEQ ID NO: 77443 - DNA, 26 bp, Homo sapiens
ggtgatggtaggagcacagaaatgtc

SEQ ID NO: 77444 - DNA, 26 bp, Homo sapiens
gtgatggtaggagcacagaaatgtca

SEQ ID NO: 77445 - DNA, 26 bp, Homo sapiens
tgatggtaggagcacagaaatgtcac

SEQ ID NO: 77446 - DNA, 26 bp, Homo sapiens
gatggtaggagcacagaaatgtcact

SEQ ID NO: 77447 - DNA, 26 bp, Homo sapiens
atggtaggagcacagaaatgtcacta

SEQ ID NO: 77448 - DNA, 26 bp, Homo sapiens
tggtaggagcacagaaatgtcactac

SEQ ID NO: 77449 - DNA, 26 bp, Homo sapiens
ggtaggagcacagaaatgtcactact

SEQ ID NO: 77450 - DNA, 26 bp, Homo sapiens
gtaggagcacagaaatgtcactactc

SEQ ID NO: 77451 - DNA, 26 bp, Homo sapiens
taggagcacagaaatgtcactactct

SEQ ID NO: 77452 - DNA, 26 bp, Homo sapiens
aggagcacagaaatgtcactactctg

SEQ ID NO: 77453 - DNA, 26 bp, Homo sapiens
ggagcacagaaatgtcactactctgg

SEQ ID NO: 77454 - DNA, 26 bp, Homo sapiens
gagcacagaaatgtcactactctgga

SEQ ID NO: 77455 - DNA, 26 bp, Homo sapiens
agcacagaaatgtcactactctggaa

SEQ ID NO: 77456 - DNA, 26 bp, Homo sapiens
gcacagaaatgtcactactctggaaa

SEQ ID NO: 77457 - DNA, 26 bp, Homo sapiens
cacagaaatgtcactactctggaaac

SEQ ID NO: 77458 - DNA, 26 bp, Homo sapiens
acagaaatgtcactactctggaaaca

SEQ ID NO: 77459 - DNA, 26 bp, Homo sapiens
cagaaatgtcactactctggaaacaa

SEQ ID NO: 77460 - DNA, 26 bp, Homo sapiens
agaaatgtcactactctggaaacaag

SEQ ID NO: 77461 - DNA, 26 bp, Homo sapiens
gaaatgtcactactctggaaacaaga

SEQ ID NO: 77462 - DNA, 26 bp, Homo sapiens
aaatgtcactactctggaaacaagat

SEQ ID NO: 77463 - DNA, 26 bp, Homo sapiens
aatgtcactactctggaaacaagatt

SEQ ID NO: 77464 - DNA, 26 bp, Homo sapiens
atgtcactactctggaaacaagattg

SEQ ID NO: 77465 - DNA, 26 bp, Homo sapiens
tgtcactactctggaaacaagattgg

SEQ ID NO: 77466 - DNA, 26 bp, Homo sapiens
gtcactactctggaaacaagattggt

SEQ ID NO: 77467 - DNA, 26 bp, Homo sapiens
tcactactctggaaacaagattggta

SEQ ID NO: 77468 - DNA, 26 bp, Homo sapiens
cactactctggaaacaagattggtag

SEQ ID NO: 77469 - DNA, 26 bp, Homo sapiens
actactctggaaacaagattggtaga

SEQ ID NO: 77470 - DNA, 26 bp, Homo sapiens
ctactctggaaacaagattggtagaa

SEQ ID NO: 77471 - DNA, 26 bp, Homo sapiens
tactctggaaacaagattggtagaac

SEQ ID NO: 77472 - DNA, 26 bp, Homo sapiens
actctggaaacaagattggtagaact

SEQ ID NO: 77473 - DNA, 26 bp, Homo sapiens
ctctggaaacaagattggtagaactg

SEQ ID NO: 77474 - DNA, 26 bp, Homo sapiens
tctggaaacaagattggtagaactga

SEQ ID NO: 77475 - DNA, 26 bp, Homo sapiens
ctggaaacaagattggtagaactgaa

SEQ ID NO: 77476 - DNA, 26 bp, Homo sapiens
tggaaacaagattggtagaactgaaa

SEQ ID NO: 77477 - DNA, 26 bp, Homo sapiens
ggaaacaagattggtagaactgaaac

SEQ ID NO: 77478 - DNA, 26 bp, Homo sapiens
gaaacaagattggtagaactgaaaca

SEQ ID NO: 77479 - DNA, 26 bp, Homo sapiens
aaacaagattggtagaactgaaacat

SEQ ID NO: 77480 - DNA, 26 bp, Homo sapiens
aacaagattggtagaactgaaacata

SEQ ID NO: 77481 - DNA, 26 bp, Homo sapiens
acaagattggtagaactgaaacatat

SEQ ID NO: 77482 - DNA, 26 bp, Homo sapiens
caagattggtagaactgaaacatatg

SEQ ID NO: 77483 - DNA, 26 bp, Homo sapiens
aagattggtagaactgaaacatatgc

SEQ ID NO: 77484 - DNA, 26 bp, Homo sapiens
agattggtagaactgaaacatatgct

SEQ ID NO: 77485 - DNA, 26 bp, Homo sapiens
gattggtagaactgaaacatatgctt

SEQ ID NO: 77486 - DNA, 26 bp, Homo sapiens
attggtagaactgaaacatatgctta

SEQ ID NO: 77487 - DNA, 26 bp, Homo sapiens
ttggtagaactgaaacatatgcttat

SEQ ID NO: 77488 - DNA, 26 bp, Homo sapiens
tggtagaactgaaacatatgcttatc

SEQ ID NO: 77489 - DNA, 26 bp, Homo sapiens
ggtagaactgaaacatatgcttatca

SEQ ID NO: 77490 - DNA, 26 bp, Homo sapiens
gtagaactgaaacatatgcttatcat

SEQ ID NO: 77491 - DNA, 26 bp, Homo sapiens
tagaactgaaacatatgcttatcata

SEQ ID NO: 77492 - DNA, 26 bp, Homo sapiens
agaactgaaacatatgcttatcatat

SEQ ID NO: 77493 - DNA, 26 bp, Homo sapiens
gaactgaaacatatgcttatcatatg

SEQ ID NO: 77494 - DNA, 26 bp, Homo sapiens
aactgaaacatatgcttatcatatgg

SEQ ID NO: 77495 - DNA, 26 bp, Homo sapiens
actgaaacatatgcttatcatatggc

SEQ ID NO: 77496 - DNA, 26 bp, Homo sapiens
ctgaaacatatgcttatcatatggcc

SEQ ID NO: 77497 - DNA, 26 bp, Homo sapiens
tgaaacatatgcttatcatatggccc

SEQ ID NO: 77498 - DNA, 26 bp, Homo sapiens
gaaacatatgcttatcatatggccca

SEQ ID NO: 77499 - DNA, 26 bp, Homo sapiens
aaacatatgcttatcatatggcccag

SEQ ID NO: 77500 - DNA, 26 bp, Homo sapiens
aacatatgcttatcatatggcccagc

SEQ ID NO: 77501 - DNA, 26 bp, Homo sapiens
acatatgcttatcatatggcccagca

SEQ ID NO: 77502 - DNA, 26 bp, Homo sapiens
catatgcttatcatatggcccagcaa

SEQ ID NO: 77503 - DNA, 26 bp, Homo sapiens
atatgcttatcatatggcccagcaat

SEQ ID NO: 77504 - DNA, 26 bp, Homo sapiens
tatgcttatcatatggcccagcaatc

SEQ ID NO: 77505 - DNA, 26 bp, Homo sapiens
atgcttatcatatggcccagcaatcc

SEQ ID NO: 77506 - DNA, 26 bp, Homo sapiens
tgcttatcatatggcccagcaatccc

SEQ ID NO: 77507 - DNA, 26 bp, Homo sapiens
gcttatcatatggcccagcaatcccc

SEQ ID NO: 77508 - DNA, 26 bp, Homo sapiens
cttatcatatggcccagcaatcccct

SEQ ID NO: 77509 - DNA, 26 bp, Homo sapiens
ttatcatatggcccagcaatccccta

SEQ ID NO: 77510 - DNA, 26 bp, Homo sapiens
tatcatatggcccagcaatcccctac

SEQ ID NO: 77511 - DNA, 26 bp, Homo sapiens
atcatatggcccagcaatcccctacc

SEQ ID NO: 77512 - DNA, 26 bp, Homo sapiens
tcatatggcccagcaatcccctacct

SEQ ID NO: 77513 - DNA, 26 bp, Homo sapiens
catatggcccagcaatcccctaccta

SEQ ID NO: 77514 - DNA, 26 bp, Homo sapiens
atatggcccagcaatcccctacctag

SEQ ID NO: 77515 - DNA, 26 bp, Homo sapiens
tatggcccagcaatcccctacctagg

SEQ ID NO: 77516 - DNA, 26 bp, Homo sapiens
atggcccagcaatcccctacctaggt

SEQ ID NO: 77517 - DNA, 26 bp, Homo sapiens
tggcccagcaatcccctacctaggta

SEQ ID NO: 77518 - DNA, 26 bp, Homo sapiens
ggcccagcaatcccctacctaggtat

SEQ ID NO: 77519 - DNA, 26 bp, Homo sapiens
gcccagcaatcccctacctaggtatt

SEQ ID NO: 77520 - DNA, 26 bp, Homo sapiens
cccagcaatcccctacctaggtattt

SEQ ID NO: 77521 - DNA, 26 bp, Homo sapiens
ccagcaatcccctacctaggtattta

SEQ ID NO: 77522 - DNA, 26 bp, Homo sapiens
cagcaatcccctacctaggtatttat

SEQ ID NO: 77523 - DNA, 26 bp, Homo sapiens
agcaatcccctacctaggtatttatc

SEQ ID NO: 77524 - DNA, 26 bp, Homo sapiens
gcaatcccctacctaggtatttatcc

SEQ ID NO: 77525 - DNA, 26 bp, Homo sapiens
caatcccctacctaggtatttatcca

SEQ ID NO: 77526 - DNA, 26 bp, Homo sapiens
aatcccctacctaggtatttatccaa

SEQ ID NO: 77527 - DNA, 26 bp, Homo sapiens
atcccctacctaggtatttatccaag

SEQ ID NO: 77528 - DNA, 26 bp, Homo sapiens
tcccctacctaggtatttatccaagg

SEQ ID NO: 77529 - DNA, 26 bp, Homo sapiens
cccctacctaggtatttatccaaggg

SEQ ID NO: 77530 - DNA, 26 bp, Homo sapiens
ccctacctaggtatttatccaaggga

SEQ ID NO: 77531 - DNA, 26 bp, Homo sapiens
cctacctaggtatttatccaagggaa

SEQ ID NO: 77532 - DNA, 26 bp, Homo sapiens
ctacctaggtatttatccaagggaaa

SEQ ID NO: 77533 - DNA, 26 bp, Homo sapiens
tacctaggtatttatccaagggaaat

SEQ ID NO: 77534 - DNA, 26 bp, Homo sapiens
acctaggtatttatccaagggaaatg

SEQ ID NO: 77535 - DNA, 26 bp, Homo sapiens
cctaggtatttatccaagggaaatga

SEQ ID NO: 77536 - DNA, 26 bp, Homo sapiens
ctaggtatttatccaagggaaatgaa

SEQ ID NO: 77537 - DNA, 26 bp, Homo sapiens
taggtatttatccaagggaaatgaaa

SEQ ID NO: 77538 - DNA, 26 bp, Homo sapiens
aggtatttatccaagggaaatgaaaa

SEQ ID NO: 77539 - DNA, 26 bp, Homo sapiens
ggtatttatccaagggaaatgaaaac

SEQ ID NO: 77540 - DNA, 26 bp, Homo sapiens
gtatttatccaagggaaatgaaaaca

SEQ ID NO: 77541 - DNA, 26 bp, Homo sapiens
tatttatccaagggaaatgaaaacat

SEQ ID NO: 77542 - DNA, 26 bp, Homo sapiens
atttatccaagggaaatgaaaacatg

SEQ ID NO: 77543 - DNA, 26 bp, Homo sapiens
tttatccaagggaaatgaaaacatgt

SEQ ID NO: 77544 - DNA, 26 bp, Homo sapiens
ttatccaagggaaatgaaaacatgtg

SEQ ID NO: 77545 - DNA, 26 bp, Homo sapiens
tatccaagggaaatgaaaacatgtgt

SEQ ID NO: 77546 - DNA, 26 bp, Homo sapiens
atccaagggaaatgaaaacatgtgtc

SEQ ID NO: 77547 - DNA, 26 bp, Homo sapiens
tccaagggaaatgaaaacatgtgtcc

SEQ ID NO: 77548 - DNA, 26 bp, Homo sapiens
ccaagggaaatgaaaacatgtgtcca

SEQ ID NO: 77549 - DNA, 26 bp, Homo sapiens
caagggaaatgaaaacatgtgtccat

SEQ ID NO: 77550 - DNA, 26 bp, Homo sapiens
aagggaaatgaaaacatgtgtccatg

SEQ ID NO: 77551 - DNA, 26 bp, Homo sapiens
agggaaatgaaaacatgtgtccatgt

SEQ ID NO: 77552 - DNA, 26 bp, Homo sapiens
gggaaatgaaaacatgtgtccatgtg

SEQ ID NO: 77553 - DNA, 26 bp, Homo sapiens
ggaaatgaaaacatgtgtccatgtga

SEQ ID NO: 77554 - DNA, 26 bp, Homo sapiens
gaaatgaaaacatgtgtccatgtgaa

SEQ ID NO: 77555 - DNA, 26 bp, Homo sapiens
aaatgaaaacatgtgtccatgtgaag

SEQ ID NO: 77556 - DNA, 26 bp, Homo sapiens
aatgaaaacatgtgtccatgtgaaga

SEQ ID NO: 77557 - DNA, 26 bp, Homo sapiens
atgaaaacatgtgtccatgtgaagat

SEQ ID NO: 77558 - DNA, 26 bp, Homo sapiens
tgaaaacatgtgtccatgtgaagatt

SEQ ID NO: 77559 - DNA, 26 bp, Homo sapiens
gaaaacatgtgtccatgtgaagattt

SEQ ID NO: 77560 - DNA, 26 bp, Homo sapiens
aaaacatgtgtccatgtgaagatttg

SEQ ID NO: 77561 - DNA, 26 bp, Homo sapiens
aaacatgtgtccatgtgaagatttgt

SEQ ID NO: 77562 - DNA, 26 bp, Homo sapiens
aacatgtgtccatgtgaagatttgta

SEQ ID NO: 77563 - DNA, 26 bp, Homo sapiens
acatgtgtccatgtgaagatttgtat

SEQ ID NO: 77564 - DNA, 26 bp, Homo sapiens
catgtgtccatgtgaagatttgtatg

SEQ ID NO: 77565 - DNA, 26 bp, Homo sapiens
atgtgtccatgtgaagatttgtatgt

SEQ ID NO: 77566 - DNA, 26 bp, Homo sapiens
tgtgtccatgtgaagatttgtatgtg

SEQ ID NO: 77567 - DNA, 26 bp, Homo sapiens
gtgtccatgtgaagatttgtatgtga

SEQ ID NO: 77568 - DNA, 26 bp, Homo sapiens
tgtccatgtgaagatttgtatgtgaa

SEQ ID NO: 77569 - DNA, 26 bp, Homo sapiens
gtccatgtgaagatttgtatgtgaat

SEQ ID NO: 77570 - DNA, 26 bp, Homo sapiens
tccatgtgaagatttgtatgtgaata

SEQ ID NO: 77571 - DNA, 26 bp, Homo sapiens
ccatgtgaagatttgtatgtgaatac

SEQ ID NO: 77572 - DNA, 26 bp, Homo sapiens
catgtgaagatttgtatgtgaataca

SEQ ID NO: 77573 - DNA, 26 bp, Homo sapiens
atgtgaagatttgtatgtgaatacat

SEQ ID NO: 77574 - DNA, 26 bp, Homo sapiens
tgtgaagatttgtatgtgaatacatt

SEQ ID NO: 77575 - DNA, 26 bp, Homo sapiens
gtgaagatttgtatgtgaatacattt

SEQ ID NO: 77576 - DNA, 26 bp, Homo sapiens
tgaagatttgtatgtgaatacatttt

SEQ ID NO: 77577 - DNA, 26 bp, Homo sapiens
gaagatttgtatgtgaatacattttt

SEQ ID NO: 77578 - DNA, 26 bp, Homo sapiens
aagatttgtatgtgaatacatttttt

SEQ ID NO: 77579 - DNA, 26 bp, Homo sapiens
agatttgtatgtgaatacattttttt

SEQ ID NO: 77580 - DNA, 26 bp, Homo sapiens
gatttgtatgtgaatacatttttttc

SEQ ID NO: 77581 - DNA, 26 bp, Homo sapiens
atttgtatgtgaatacatttttttca

SEQ ID NO: 77582 - DNA, 26 bp, Homo sapiens
tttgtatgtgaatacatttttttcaa

SEQ ID NO: 77583 - DNA, 26 bp, Homo sapiens
ttgtatgtgaatacatttttttcaaa

SEQ ID NO: 77584 - DNA, 26 bp, Homo sapiens
tgtatgtgaatacatttttttcaaaa

SEQ ID NO: 77585 - DNA, 26 bp, Homo sapiens
gtatgtgaatacatttttttcaaaaa

SEQ ID NO: 77586 - DNA, 26 bp, Homo sapiens
tatgtgaatacatttttttcaaaaag

SEQ ID NO: 77587 - DNA, 26 bp, Homo sapiens
atgtgaatacatttttttcaaaaaga

SEQ ID NO: 77588 - DNA, 26 bp, Homo sapiens
tgtgaatacatttttttcaaaaagag

SEQ ID NO: 77589 - DNA, 26 bp, Homo sapiens
gtgaatacatttttttcaaaaagagg

SEQ ID NO: 77590 - DNA, 26 bp, Homo sapiens
tgaatacatttttttcaaaaagaggc

SEQ ID NO: 77591 - DNA, 26 bp, Homo sapiens
gaatacatttttttcaaaaagaggca

SEQ ID NO: 77592 - DNA, 26 bp, Homo sapiens
aatacatttttttcaaaaagaggcag

SEQ ID NO: 77593 - DNA, 26 bp, Homo sapiens
atacatttttttcaaaaagaggcaga

SEQ ID NO: 77594 - DNA, 26 bp, Homo sapiens
tacatttttttcaaaaagaggcagaa

SEQ ID NO: 77595 - DNA, 26 bp, Homo sapiens
acatttttttcaaaaagaggcagaat

SEQ ID NO: 77596 - DNA, 26 bp, Homo sapiens
catttttttcaaaaagaggcagaatt

SEQ ID NO: 77597 - DNA, 26 bp, Homo sapiens
atttttttcaaaaagaggcagaattc

SEQ ID NO: 77598 - DNA, 26 bp, Homo sapiens
tttttttcaaaaagaggcagaattca

SEQ ID NO: 77599 - DNA, 26 bp, Homo sapiens
ttttttcaaaaagaggcagaattcaa

SEQ ID NO: 77600 - DNA, 26 bp, Homo sapiens
tttttcaaaaagaggcagaattcaat

SEQ ID NO: 77601 - DNA, 26 bp, Homo sapiens
ttttcaaaaagaggcagaattcaatt

SEQ ID NO: 77602 - DNA, 26 bp, Homo sapiens
tttcaaaaagaggcagaattcaattt

SEQ ID NO: 77603 - DNA, 26 bp, Homo sapiens
ttcaaaaagaggcagaattcaatttc

SEQ ID NO: 77604 - DNA, 26 bp, Homo sapiens
tcaaaaagaggcagaattcaatttct

SEQ ID NO: 77605 - DNA, 26 bp, Homo sapiens
caaaaagaggcagaattcaatttcta

SEQ ID NO: 77606 - DNA, 26 bp, Homo sapiens
aaaaagaggcagaattcaatttctat

SEQ ID NO: 77607 - DNA, 26 bp, Homo sapiens
aaaagaggcagaattcaatttctatt

SEQ ID NO: 77608 - DNA, 26 bp, Homo sapiens
aaagaggcagaattcaatttctattg

SEQ ID NO: 77609 - DNA, 26 bp, Homo sapiens
aagaggcagaattcaatttctattgc

SEQ ID NO: 77610 - DNA, 26 bp, Homo sapiens
agaggcagaattcaatttctattgca

SEQ ID NO: 77611 - DNA, 26 bp, Homo sapiens
gaggcagaattcaatttctattgcag

SEQ ID NO: 77612 - DNA, 26 bp, Homo sapiens
aggcagaattcaatttctattgcagg

SEQ ID NO: 77613 - DNA, 26 bp, Homo sapiens
ggcagaattcaatttctattgcaggg

SEQ ID NO: 77614 - DNA, 26 bp, Homo sapiens
gcagaattcaatttctattgcaggga

SEQ ID NO: 77615 - DNA, 26 bp, Homo sapiens
cagaattcaatttctattgcagggaa

SEQ ID NO: 77616 - DNA, 26 bp, Homo sapiens
agaattcaatttctattgcagggaaa

SEQ ID NO: 77617 - DNA, 26 bp, Homo sapiens
gaattcaatttctattgcagggaaaa

SEQ ID NO: 77618 - DNA, 26 bp, Homo sapiens
aattcaatttctattgcagggaaaac

SEQ ID NO: 77619 - DNA, 26 bp, Homo sapiens
attcaatttctattgcagggaaaacc

SEQ ID NO: 77620 - DNA, 26 bp, Homo sapiens
ttcaatttctattgcagggaaaaccc

SEQ ID NO: 77621 - DNA, 26 bp, Homo sapiens
tcaatttctattgcagggaaaaccca

SEQ ID NO: 77622 - DNA, 26 bp, Homo sapiens
caatttctattgcagggaaaacccaa

SEQ ID NO: 77623 - DNA, 26 bp, Homo sapiens
aatttctattgcagggaaaacccaag

SEQ ID NO: 77624 - DNA, 26 bp, Homo sapiens
atttctattgcagggaaaacccaagt

SEQ ID NO: 77625 - DNA, 26 bp, Homo sapiens
tttctattgcagggaaaacccaagtt

SEQ ID NO: 77626 - DNA, 26 bp, Homo sapiens
ttctattgcagggaaaacccaagttc

SEQ ID NO: 77627 - DNA, 26 bp, Homo sapiens
tctattgcagggaaaacccaagttca

SEQ ID NO: 77628 - DNA, 26 bp, Homo sapiens
ctattgcagggaaaacccaagttcag

SEQ ID NO: 77629 - DNA, 26 bp, Homo sapiens
tattgcagggaaaacccaagttcaga

SEQ ID NO: 77630 - DNA, 26 bp, Homo sapiens
attgcagggaaaacccaagttcagat

SEQ ID NO: 77631 - DNA, 26 bp, Homo sapiens
ttgcagggaaaacccaagttcagatt

SEQ ID NO: 77632 - DNA, 26 bp, Homo sapiens
tgcagggaaaacccaagttcagattg

SEQ ID NO: 77633 - DNA, 26 bp, Homo sapiens
gcagggaaaacccaagttcagattgc

SEQ ID NO: 77634 - DNA, 26 bp, Homo sapiens
cagggaaaacccaagttcagattgca

SEQ ID NO: 77635 - DNA, 26 bp, Homo sapiens
agggaaaacccaagttcagattgcaa

SEQ ID NO: 77636 - DNA, 26 bp, Homo sapiens
gggaaaacccaagttcagattgcaag

SEQ ID NO: 77637 - DNA, 26 bp, Homo sapiens
ggaaaacccaagttcagattgcaagg

SEQ ID NO: 77638 - DNA, 26 bp, Homo sapiens
gaaaacccaagttcagattgcaaggc

SEQ ID NO: 77639 - DNA, 26 bp, Homo sapiens
aaaacccaagttcagattgcaaggca

SEQ ID NO: 77640 - DNA, 26 bp, Homo sapiens
aaacccaagttcagattgcaaggcag

SEQ ID NO: 77641 - DNA, 26 bp, Homo sapiens
aacccaagttcagattgcaaggcagc

SEQ ID NO: 77642 - DNA, 26 bp, Homo sapiens
acccaagttcagattgcaaggcagct

SEQ ID NO: 77643 - DNA, 26 bp, Homo sapiens
cccaagttcagattgcaaggcagctt

SEQ ID NO: 77644 - DNA, 26 bp, Homo sapiens
ccaagttcagattgcaaggcagcttt

SEQ ID NO: 77645 - DNA, 26 bp, Homo sapiens
caagttcagattgcaaggcagctttc

SEQ ID NO: 77646 - DNA, 26 bp, Homo sapiens
aagttcagattgcaaggcagctttct

SEQ ID NO: 77647 - DNA, 26 bp, Homo sapiens
agttcagattgcaaggcagctttctc

SEQ ID NO: 77648 - DNA, 26 bp, Homo sapiens
gttcagattgcaaggcagctttctca

SEQ ID NO: 77649 - DNA, 26 bp, Homo sapiens
ttcagattgcaaggcagctttctcat

SEQ ID NO: 77650 - DNA, 26 bp, Homo sapiens
tcagattgcaaggcagctttctcata

SEQ ID NO: 77651 - DNA, 26 bp, Homo sapiens
cagattgcaaggcagctttctcatat

SEQ ID NO: 77652 - DNA, 26 bp, Homo sapiens
agattgcaaggcagctttctcatatt

SEQ ID NO: 77653 - DNA, 26 bp, Homo sapiens
gattgcaaggcagctttctcatattg

SEQ ID NO: 77654 - DNA, 26 bp, Homo sapiens
attgcaaggcagctttctcatattga

SEQ ID NO: 77655 - DNA, 26 bp, Homo sapiens
ttgcaaggcagctttctcatattgat

SEQ ID NO: 77656 - DNA, 26 bp, Homo sapiens
tgcaaggcagctttctcatattgatt

SEQ ID NO: 77657 - DNA, 26 bp, Homo sapiens
gcaaggcagctttctcatattgattt

SEQ ID NO: 77658 - DNA, 26 bp, Homo sapiens
caaggcagctttctcatattgatttt

SEQ ID NO: 77659 - DNA, 26 bp, Homo sapiens
aaggcagctttctcatattgattttg

SEQ ID NO: 77660 - DNA, 26 bp, Homo sapiens
aggcagctttctcatattgattttga

SEQ ID NO: 77661 - DNA, 26 bp, Homo sapiens
ggcagctttctcatattgattttgac

SEQ ID NO: 77662 - DNA, 26 bp, Homo sapiens
gcagctttctcatattgattttgacc

SEQ ID NO: 77663 - DNA, 26 bp, Homo sapiens
cagctttctcatattgattttgacca

SEQ ID NO: 77664 - DNA, 26 bp, Homo sapiens
agctttctcatattgattttgaccac

SEQ ID NO: 77665 - DNA, 26 bp, Homo sapiens
gctttctcatattgattttgaccaca

SEQ ID NO: 77666 - DNA, 26 bp, Homo sapiens
ctttctcatattgattttgaccacac

SEQ ID NO: 77667 - DNA, 26 bp, Homo sapiens
tttctcatattgattttgaccacaca

SEQ ID NO: 77668 - DNA, 26 bp, Homo sapiens
ttctcatattgattttgaccacacag

SEQ ID NO: 77669 - DNA, 26 bp, Homo sapiens
tctcatattgattttgaccacacagc

SEQ ID NO: 77670 - DNA, 26 bp, Homo sapiens
ctcatattgattttgaccacacagct

SEQ ID NO: 77671 - DNA, 26 bp, Homo sapiens
tcatattgattttgaccacacagctc

SEQ ID NO: 77672 - DNA, 26 bp, Homo sapiens
catattgattttgaccacacagctct

SEQ ID NO: 77673 - DNA, 26 bp, Homo sapiens
atattgattttgaccacacagctcta

SEQ ID NO: 77674 - DNA, 26 bp, Homo sapiens
tattgattttgaccacacagctctac

SEQ ID NO: 77675 - DNA, 26 bp, Homo sapiens
attgattttgaccacacagctctact

SEQ ID NO: 77676 - DNA, 26 bp, Homo sapiens
ttgattttgaccacacagctctactt

SEQ ID NO: 77677 - DNA, 26 bp, Homo sapiens
tgattttgaccacacagctctacttt

SEQ ID NO: 77678 - DNA, 26 bp, Homo sapiens
gattttgaccacacagctctactttt

SEQ ID NO: 77679 - DNA, 26 bp, Homo sapiens
attttgaccacacagctctacttttc

SEQ ID NO: 77680 - DNA, 26 bp, Homo sapiens
ttttgaccacacagctctacttttcc

SEQ ID NO: 77681 - DNA, 26 bp, Homo sapiens
tttgaccacacagctctacttttcca

SEQ ID NO: 77682 - DNA, 26 bp, Homo sapiens
ttgaccacacagctctacttttccaa

SEQ ID NO: 77683 - DNA, 26 bp, Homo sapiens
tgaccacacagctctacttttccaag

SEQ ID NO: 77684 - DNA, 26 bp, Homo sapiens
gaccacacagctctacttttccaaga

SEQ ID NO: 77685 - DNA, 26 bp, Homo sapiens
accacacagctctacttttccaagag

SEQ ID NO: 77686 - DNA, 26 bp, Homo sapiens
ccacacagctctacttttccaagagt

SEQ ID NO: 77687 - DNA, 26 bp, Homo sapiens
cacacagctctacttttccaagagtg

SEQ ID NO: 77688 - DNA, 26 bp, Homo sapiens
acacagctctacttttccaagagtga

SEQ ID NO: 77689 - DNA, 26 bp, Homo sapiens
cacagctctacttttccaagagtgaa

SEQ ID NO: 77690 - DNA, 26 bp, Homo sapiens
acagctctacttttccaagagtgaaa

SEQ ID NO: 77691 - DNA, 26 bp, Homo sapiens
cagctctacttttccaagagtgaaat

SEQ ID NO: 77692 - DNA, 26 bp, Homo sapiens
agctctacttttccaagagtgaaatc

SEQ ID NO: 77693 - DNA, 26 bp, Homo sapiens
gctctacttttccaagagtgaaatcc

SEQ ID NO: 77694 - DNA, 26 bp, Homo sapiens
ctctacttttccaagagtgaaatcct

SEQ ID NO: 77695 - DNA, 26 bp, Homo sapiens
tctacttttccaagagtgaaatccta

SEQ ID NO: 77696 - DNA, 26 bp, Homo sapiens
ctacttttccaagagtgaaatcctat

SEQ ID NO: 77697 - DNA, 26 bp, Homo sapiens
tacttttccaagagtgaaatcctatt

SEQ ID NO: 77698 - DNA, 26 bp, Homo sapiens
acttttccaagagtgaaatcctattg

SEQ ID NO: 77699 - DNA, 26 bp, Homo sapiens
cttttccaagagtgaaatcctattga

SEQ ID NO: 77700 - DNA, 26 bp, Homo sapiens
ttttccaagagtgaaatcctattgaa

SEQ ID NO: 77701 - DNA, 26 bp, Homo sapiens
tttccaagagtgaaatcctattgaag

SEQ ID NO: 77702 - DNA, 26 bp, Homo sapiens
ttccaagagtgaaatcctattgaagt

SEQ ID NO: 77703 - DNA, 26 bp, Homo sapiens
tccaagagtgaaatcctattgaagtg

SEQ ID NO: 77704 - DNA, 26 bp, Homo sapiens
ccaagagtgaaatcctattgaagtgg

SEQ ID NO: 77705 - DNA, 26 bp, Homo sapiens
caagagtgaaatcctattgaagtggc

SEQ ID NO: 77706 - DNA, 26 bp, Homo sapiens
aagagtgaaatcctattgaagtggct

SEQ ID NO: 77707 - DNA, 26 bp, Homo sapiens
agagtgaaatcctattgaagtggctt

SEQ ID NO: 77708 - DNA, 26 bp, Homo sapiens
gagtgaaatcctattgaagtggcttt

SEQ ID NO: 77709 - DNA, 26 bp, Homo sapiens
agtgaaatcctattgaagtggctttc

SEQ ID NO: 77710 - DNA, 26 bp, Homo sapiens
gtgaaatcctattgaagtggctttcc

SEQ ID NO: 77711 - DNA, 26 bp, Homo sapiens
tgaaatcctattgaagtggctttcca

SEQ ID NO: 77712 - DNA, 26 bp, Homo sapiens
gaaatcctattgaagtggctttccaa

SEQ ID NO: 77713 - DNA, 26 bp, Homo sapiens
aaatcctattgaagtggctttccaaa

SEQ ID NO: 77714 - DNA, 26 bp, Homo sapiens
aatcctattgaagtggctttccaaaa

SEQ ID NO: 77715 - DNA, 26 bp, Homo sapiens
atcctattgaagtggctttccaaaat

SEQ ID NO: 77716 - DNA, 26 bp, Homo sapiens
tcctattgaagtggctttccaaaata

SEQ ID NO: 77717 - DNA, 26 bp, Homo sapiens
cctattgaagtggctttccaaaatat

SEQ ID NO: 77718 - DNA, 26 bp, Homo sapiens
ctattgaagtggctttccaaaatatt

SEQ ID NO: 77719 - DNA, 26 bp, Homo sapiens
tattgaagtggctttccaaaatattt

SEQ ID NO: 77720 - DNA, 26 bp, Homo sapiens
attgaagtggctttccaaaatatttt

SEQ ID NO: 77721 - DNA, 26 bp, Homo sapiens
ttgaagtggctttccaaaatattttg

SEQ ID NO: 77722 - DNA, 26 bp, Homo sapiens
tgaagtggctttccaaaatattttgt

SEQ ID NO: 77723 - DNA, 26 bp, Homo sapiens
gaagtggctttccaaaatattttgtg

SEQ ID NO: 77724 - DNA, 26 bp, Homo sapiens
aagtggctttccaaaatattttgtgg

SEQ ID NO: 77725 - DNA, 26 bp, Homo sapiens
agtggctttccaaaatattttgtgga

SEQ ID NO: 77726 - DNA, 26 bp, Homo sapiens
gtggctttccaaaatattttgtggaa

SEQ ID NO: 77727 - DNA, 26 bp, Homo sapiens
tggctttccaaaatattttgtggaaa

SEQ ID NO: 77728 - DNA, 26 bp, Homo sapiens
ggctttccaaaatattttgtggaaaa

SEQ ID NO: 77729 - DNA, 26 bp, Homo sapiens
gctttccaaaatattttgtggaaaat

SEQ ID NO: 77730 - DNA, 26 bp, Homo sapiens
ctttccaaaatattttgtggaaaata

SEQ ID NO: 77731 - DNA, 26 bp, Homo sapiens
tttccaaaatattttgtggaaaataa

SEQ ID NO: 77732 - DNA, 26 bp, Homo sapiens
ttccaaaatattttgtggaaaataag

SEQ ID NO: 77733 - DNA, 26 bp, Homo sapiens
tccaaaatattttgtggaaaataagt

SEQ ID NO: 77734 - DNA, 26 bp, Homo sapiens
ccaaaatattttgtggaaaataagta

SEQ ID NO: 77735 - DNA, 26 bp, Homo sapiens
caaaatattttgtggaaaataagtat

SEQ ID NO: 77736 - DNA, 26 bp, Homo sapiens
aaaatattttgtggaaaataagtatt

SEQ ID NO: 77737 - DNA, 26 bp, Homo sapiens
aaatattttgtggaaaataagtatta

SEQ ID NO: 77738 - DNA, 26 bp, Homo sapiens
aatattttgtggaaaataagtattaa

SEQ ID NO: 77739 - DNA, 26 bp, Homo sapiens
atattttgtggaaaataagtattaat

SEQ ID NO: 77740 - DNA, 26 bp, Homo sapiens
tattttgtggaaaataagtattaata

SEQ ID NO: 77741 - DNA, 26 bp, Homo sapiens
attttgtggaaaataagtattaatag

SEQ ID NO: 77742 - DNA, 26 bp, Homo sapiens
ttttgtggaaaataagtattaataga

SEQ ID NO: 77743 - DNA, 26 bp, Homo sapiens
tttgtggaaaataagtattaatagat

SEQ ID NO: 77744 - DNA, 26 bp, Homo sapiens
ttgtggaaaataagtattaatagatg

SEQ ID NO: 77745 - DNA, 26 bp, Homo sapiens
tgtggaaaataagtattaatagatgg

SEQ ID NO: 77746 - DNA, 26 bp, Homo sapiens
gtggaaaataagtattaatagatggc

SEQ ID NO: 77747 - DNA, 26 bp, Homo sapiens
tggaaaataagtattaatagatggca

SEQ ID NO: 77748 - DNA, 26 bp, Homo sapiens
ggaaaataagtattaatagatggcaa

SEQ ID NO: 77749 - DNA, 26 bp, Homo sapiens
gaaaataagtattaatagatggcaac

SEQ ID NO: 77750 - DNA, 26 bp, Homo sapiens
aaaataagtattaatagatggcaact

SEQ ID NO: 77751 - DNA, 26 bp, Homo sapiens
aaataagtattaatagatggcaactc

SEQ ID NO: 77752 - DNA, 26 bp, Homo sapiens
aataagtattaatagatggcaactcc

SEQ ID NO: 77753 - DNA, 26 bp, Homo sapiens
ataagtattaatagatggcaactcct

SEQ ID NO: 77754 - DNA, 26 bp, Homo sapiens
taagtattaatagatggcaactcctc

SEQ ID NO: 77755 - DNA, 26 bp, Homo sapiens
aagtattaatagatggcaactcctca

SEQ ID NO: 77756 - DNA, 26 bp, Homo sapiens
agtattaatagatggcaactcctcat

SEQ ID NO: 77757 - DNA, 26 bp, Homo sapiens
gtattaatagatggcaactcctcatt

SEQ ID NO: 77758 - DNA, 26 bp, Homo sapiens
tattaatagatggcaactcctcattc

SEQ ID NO: 77759 - DNA, 26 bp, Homo sapiens
attaatagatggcaactcctcattca

SEQ ID NO: 77760 - DNA, 26 bp, Homo sapiens
ttaatagatggcaactcctcattcac

SEQ ID NO: 77761 - DNA, 26 bp, Homo sapiens
taatagatggcaactcctcattcacg

SEQ ID NO: 77762 - DNA, 26 bp, Homo sapiens
aatagatggcaactcctcattcacga

SEQ ID NO: 77763 - DNA, 26 bp, Homo sapiens
atagatggcaactcctcattcacgat

SEQ ID NO: 77764 - DNA, 26 bp, Homo sapiens
tagatggcaactcctcattcacgatc

SEQ ID NO: 77765 - DNA, 26 bp, Homo sapiens
agatggcaactcctcattcacgatcc

SEQ ID NO: 77766 - DNA, 26 bp, Homo sapiens
gatggcaactcctcattcacgatccc

SEQ ID NO: 77767 - DNA, 26 bp, Homo sapiens
atggcaactcctcattcacgatcccc

SEQ ID NO: 77768 - DNA, 26 bp, Homo sapiens
tggcaactcctcattcacgatcccca

SEQ ID NO: 77769 - DNA, 26 bp, Homo sapiens
ggcaactcctcattcacgatccccaa

SEQ ID NO: 77770 - DNA, 26 bp, Homo sapiens
gcaactcctcattcacgatccccaaa

SEQ ID NO: 77771 - DNA, 26 bp, Homo sapiens
caactcctcattcacgatccccaaac

SEQ ID NO: 77772 - DNA, 26 bp, Homo sapiens
aactcctcattcacgatccccaaaca

SEQ ID NO: 77773 - DNA, 26 bp, Homo sapiens
actcctcattcacgatccccaaacag

SEQ ID NO: 77774 - DNA, 26 bp, Homo sapiens
ctcctcattcacgatccccaaacagg

SEQ ID NO: 77775 - DNA, 26 bp, Homo sapiens
tcctcattcacgatccccaaacagga

SEQ ID NO: 77776 - DNA, 26 bp, Homo sapiens
cctcattcacgatccccaaacaggag

SEQ ID NO: 77777 - DNA, 26 bp, Homo sapiens
ctcattcacgatccccaaacaggaga

SEQ ID NO: 77778 - DNA, 26 bp, Homo sapiens
tcattcacgatccccaaacaggagac

SEQ ID NO: 77779 - DNA, 26 bp, Homo sapiens
cattcacgatccccaaacaggagaca

SEQ ID NO: 77780 - DNA, 26 bp, Homo sapiens
attcacgatccccaaacaggagacaa

SEQ ID NO: 77781 - DNA, 26 bp, Homo sapiens
ttcacgatccccaaacaggagacaaa

SEQ ID NO: 77782 - DNA, 26 bp, Homo sapiens
tcacgatccccaaacaggagacaaat

SEQ ID NO: 77783 - DNA, 26 bp, Homo sapiens
cacgatccccaaacaggagacaaatt

SEQ ID NO: 77784 - DNA, 26 bp, Homo sapiens
acgatccccaaacaggagacaaattc

SEQ ID NO: 77785 - DNA, 26 bp, Homo sapiens
cgatccccaaacaggagacaaattca

SEQ ID NO: 77786 - DNA, 26 bp, Homo sapiens
gatccccaaacaggagacaaattcat

SEQ ID NO: 77787 - DNA, 26 bp, Homo sapiens
atccccaaacaggagacaaattcatc

SEQ ID NO: 77788 - DNA, 26 bp, Homo sapiens
tccccaaacaggagacaaattcatca

SEQ ID NO: 77789 - DNA, 26 bp, Homo sapiens
ccccaaacaggagacaaattcatcag

SEQ ID NO: 77790 - DNA, 26 bp, Homo sapiens
cccaaacaggagacaaattcatcagg

SEQ ID NO: 77791 - DNA, 26 bp, Homo sapiens
ccaaacaggagacaaattcatcagga

SEQ ID NO: 77792 - DNA, 26 bp, Homo sapiens
caaacaggagacaaattcatcaggaa

SEQ ID NO: 77793 - DNA, 26 bp, Homo sapiens
aaacaggagacaaattcatcaggaag

SEQ ID NO: 77794 - DNA, 26 bp, Homo sapiens
aacaggagacaaattcatcaggaagc

SEQ ID NO: 77795 - DNA, 26 bp, Homo sapiens
acaggagacaaattcatcaggaagca

SEQ ID NO: 77796 - DNA, 26 bp, Homo sapiens
caggagacaaattcatcaggaagcag

SEQ ID NO: 77797 - DNA, 26 bp, Homo sapiens
aggagacaaattcatcaggaagcagg

SEQ ID NO: 77798 - DNA, 26 bp, Homo sapiens
ggagacaaattcatcaggaagcaggg

SEQ ID NO: 77799 - DNA, 26 bp, Homo sapiens
gagacaaattcatcaggaagcagggt

SEQ ID NO: 77800 - DNA, 26 bp, Homo sapiens
agacaaattcatcaggaagcagggtc

SEQ ID NO: 77801 - DNA, 26 bp, Homo sapiens
gacaaattcatcaggaagcagggtct

SEQ ID NO: 77802 - DNA, 26 bp, Homo sapiens
acaaattcatcaggaagcagggtctg

SEQ ID NO: 77803 - DNA, 26 bp, Homo sapiens
caaattcatcaggaagcagggtctgt

SEQ ID NO: 77804 - DNA, 26 bp, Homo sapiens
aaattcatcaggaagcagggtctgtt

SEQ ID NO: 77805 - DNA, 26 bp, Homo sapiens
aattcatcaggaagcagggtctgttc

SEQ ID NO: 77806 - DNA, 26 bp, Homo sapiens
attcatcaggaagcagggtctgttct

SEQ ID NO: 77807 - DNA, 26 bp, Homo sapiens
ttcatcaggaagcagggtctgttctg

SEQ ID NO: 77808 - DNA, 26 bp, Homo sapiens
tcatcaggaagcagggtctgttctgg

SEQ ID NO: 77809 - DNA, 26 bp, Homo sapiens
catcaggaagcagggtctgttctgga

SEQ ID NO: 77810 - DNA, 26 bp, Homo sapiens
atcaggaagcagggtctgttctggaa

SEQ ID NO: 77811 - DNA, 26 bp, Homo sapiens
tcaggaagcagggtctgttctggaat

SEQ ID NO: 77812 - DNA, 26 bp, Homo sapiens
caggaagcagggtctgttctggaata

SEQ ID NO: 77813 - DNA, 26 bp, Homo sapiens
aggaagcagggtctgttctggaatag

SEQ ID NO: 77814 - DNA, 26 bp, Homo sapiens
ggaagcagggtctgttctggaatagt

SEQ ID NO: 77815 - DNA, 26 bp, Homo sapiens
gaagcagggtctgttctggaatagtt

SEQ ID NO: 77816 - DNA, 26 bp, Homo sapiens
aagcagggtctgttctggaatagttt

SEQ ID NO: 77817 - DNA, 26 bp, Homo sapiens
agcagggtctgttctggaatagtttc

SEQ ID NO: 77818 - DNA, 26 bp, Homo sapiens
gcagggtctgttctggaatagtttca

SEQ ID NO: 77819 - DNA, 26 bp, Homo sapiens
cagggtctgttctggaatagtttcac

SEQ ID NO: 77820 - DNA, 26 bp, Homo sapiens
agggtctgttctggaatagtttcact

SEQ ID NO: 77821 - DNA, 26 bp, Homo sapiens
gggtctgttctggaatagtttcactg

SEQ ID NO: 77822 - DNA, 26 bp, Homo sapiens
ggtctgttctggaatagtttcactgg

SEQ ID NO: 77823 - DNA, 26 bp, Homo sapiens
gtctgttctggaatagtttcactggg

SEQ ID NO: 77824 - DNA, 26 bp, Homo sapiens
tctgttctggaatagtttcactgggt

SEQ ID NO: 77825 - DNA, 26 bp, Homo sapiens
ctgttctggaatagtttcactgggtg

SEQ ID NO: 77826 - DNA, 26 bp, Homo sapiens
tgttctggaatagtttcactgggtga

SEQ ID NO: 77827 - DNA, 26 bp, Homo sapiens
gttctggaatagtttcactgggtgaa

SEQ ID NO: 77828 - DNA, 26 bp, Homo sapiens
ttctggaatagtttcactgggtgaat

SEQ ID NO: 77829 - DNA, 26 bp, Homo sapiens
tctggaatagtttcactgggtgaatc

SEQ ID NO: 77830 - DNA, 26 bp, Homo sapiens
ctggaatagtttcactgggtgaatca

SEQ ID NO: 77831 - DNA, 26 bp, Homo sapiens
tggaatagtttcactgggtgaatcat

SEQ ID NO: 77832 - DNA, 26 bp, Homo sapiens
ggaatagtttcactgggtgaatcatt

SEQ ID NO: 77833 - DNA, 26 bp, Homo sapiens
gaatagtttcactgggtgaatcattt

SEQ ID NO: 77834 - DNA, 26 bp, Homo sapiens
aatagtttcactgggtgaatcatttt

SEQ ID NO: 77835 - DNA, 26 bp, Homo sapiens
atagtttcactgggtgaatcattttc

SEQ ID NO: 77836 - DNA, 26 bp, Homo sapiens
tagtttcactgggtgaatcattttcc

SEQ ID NO: 77837 - DNA, 26 bp, Homo sapiens
agtttcactgggtgaatcattttcca

SEQ ID NO: 77838 - DNA, 26 bp, Homo sapiens
gtttcactgggtgaatcattttccaa

SEQ ID NO: 77839 - DNA, 26 bp, Homo sapiens
tttcactgggtgaatcattttccaaa

SEQ ID NO: 77840 - DNA, 26 bp, Homo sapiens
ttcactgggtgaatcattttccaaaa

SEQ ID NO: 77841 - DNA, 26 bp, Homo sapiens
tcactgggtgaatcattttccaaaag

SEQ ID NO: 77842 - DNA, 26 bp, Homo sapiens
cactgggtgaatcattttccaaaagc

SEQ ID NO: 77843 - DNA, 26 bp, Homo sapiens
actgggtgaatcattttccaaaagca

SEQ ID NO: 77844 - DNA, 26 bp, Homo sapiens
ctgggtgaatcattttccaaaagcat

SEQ ID NO: 77845 - DNA, 26 bp, Homo sapiens
tgggtgaatcattttccaaaagcatg

SEQ ID NO: 77846 - DNA, 26 bp, Homo sapiens
gggtgaatcattttccaaaagcatgg

SEQ ID NO: 77847 - DNA, 26 bp, Homo sapiens
ggtgaatcattttccaaaagcatggt

SEQ ID NO: 77848 - DNA, 26 bp, Homo sapiens
gtgaatcattttccaaaagcatggtg

SEQ ID NO: 77849 - DNA, 26 bp, Homo sapiens
tgaatcattttccaaaagcatggtgg

SEQ ID NO: 77850 - DNA, 26 bp, Homo sapiens
gaatcattttccaaaagcatggtggt

SEQ ID NO: 77851 - DNA, 26 bp, Homo sapiens
aatcattttccaaaagcatggtggtt

SEQ ID NO: 77852 - DNA, 26 bp, Homo sapiens
atcattttccaaaagcatggtggttt

SEQ ID NO: 77853 - DNA, 26 bp, Homo sapiens
tcattttccaaaagcatggtggtttc

SEQ ID NO: 77854 - DNA, 26 bp, Homo sapiens
cattttccaaaagcatggtggtttcc

SEQ ID NO: 77855 - DNA, 26 bp, Homo sapiens
attttccaaaagcatggtggtttcct

SEQ ID NO: 77856 - DNA, 26 bp, Homo sapiens
ttttccaaaagcatggtggtttcctc

SEQ ID NO: 77857 - DNA, 26 bp, Homo sapiens
tttccaaaagcatggtggtttcctcc

SEQ ID NO: 77858 - DNA, 26 bp, Homo sapiens
ttccaaaagcatggtggtttcctcct

SEQ ID NO: 77859 - DNA, 26 bp, Homo sapiens
tccaaaagcatggtggtttcctcctc

SEQ ID NO: 77860 - DNA, 26 bp, Homo sapiens
ccaaaagcatggtggtttcctcctct

SEQ ID NO: 77861 - DNA, 26 bp, Homo sapiens
caaaagcatggtggtttcctcctcta

SEQ ID NO: 77862 - DNA, 26 bp, Homo sapiens
aaaagcatggtggtttcctcctctac

SEQ ID NO: 77863 - DNA, 26 bp, Homo sapiens
aaagcatggtggtttcctcctctact

SEQ ID NO: 77864 - DNA, 26 bp, Homo sapiens
aagcatggtggtttcctcctctactg

SEQ ID NO: 77865 - DNA, 26 bp, Homo sapiens
agcatggtggtttcctcctctactga

SEQ ID NO: 77866 - DNA, 26 bp, Homo sapiens
gcatggtggtttcctcctctactgag

SEQ ID NO: 77867 - DNA, 26 bp, Homo sapiens
catggtggtttcctcctctactgagt

SEQ ID NO: 77868 - DNA, 26 bp, Homo sapiens
atggtggtttcctcctctactgagtt

SEQ ID NO: 77869 - DNA, 26 bp, Homo sapiens
tggtggtttcctcctctactgagttt

SEQ ID NO: 77870 - DNA, 26 bp, Homo sapiens
ggtggtttcctcctctactgagtttt

SEQ ID NO: 77871 - DNA, 26 bp, Homo sapiens
gtggtttcctcctctactgagttttg

SEQ ID NO: 77872 - DNA, 26 bp, Homo sapiens
tggtttcctcctctactgagttttgt

SEQ ID NO: 77873 - DNA, 26 bp, Homo sapiens
ggtttcctcctctactgagttttgta

SEQ ID NO: 77874 - DNA, 26 bp, Homo sapiens
gtttcctcctctactgagttttgtat

SEQ ID NO: 77875 - DNA, 26 bp, Homo sapiens
tttcctcctctactgagttttgtatg

SEQ ID NO: 77876 - DNA, 26 bp, Homo sapiens
ttcctcctctactgagttttgtatgt

SEQ ID NO: 77877 - DNA, 26 bp, Homo sapiens
tcctcctctactgagttttgtatgtc

SEQ ID NO: 77878 - DNA, 26 bp, Homo sapiens
cctcctctactgagttttgtatgtca

SEQ ID NO: 77879 - DNA, 26 bp, Homo sapiens
ctcctctactgagttttgtatgtcag

SEQ ID NO: 77880 - DNA, 26 bp, Homo sapiens
tcctctactgagttttgtatgtcagg

SEQ ID NO: 77881 - DNA, 26 bp, Homo sapiens
cctctactgagttttgtatgtcagga

SEQ ID NO: 77882 - DNA, 26 bp, Homo sapiens
ctctactgagttttgtatgtcaggag

SEQ ID NO: 77883 - DNA, 26 bp, Homo sapiens
tctactgagttttgtatgtcaggaga

SEQ ID NO: 77884 - DNA, 26 bp, Homo sapiens
ctactgagttttgtatgtcaggagaa

SEQ ID NO: 77885 - DNA, 26 bp, Homo sapiens
tactgagttttgtatgtcaggagaac

SEQ ID NO: 77886 - DNA, 26 bp, Homo sapiens
actgagttttgtatgtcaggagaact

SEQ ID NO: 77887 - DNA, 26 bp, Homo sapiens
ctgagttttgtatgtcaggagaactg

SEQ ID NO: 77888 - DNA, 26 bp, Homo sapiens
tgagttttgtatgtcaggagaactgc

SEQ ID NO: 77889 - DNA, 26 bp, Homo sapiens
gagttttgtatgtcaggagaactgca

SEQ ID NO: 77890 - DNA, 26 bp, Homo sapiens
agttttgtatgtcaggagaactgcat

SEQ ID NO: 77891 - DNA, 26 bp, Homo sapiens
gttttgtatgtcaggagaactgcatt

SEQ ID NO: 77892 - DNA, 26 bp, Homo sapiens
ttttgtatgtcaggagaactgcattc

SEQ ID NO: 77893 - DNA, 26 bp, Homo sapiens
tttgtatgtcaggagaactgcattct

SEQ ID NO: 77894 - DNA, 26 bp, Homo sapiens
ttgtatgtcaggagaactgcattctc

SEQ ID NO: 77895 - DNA, 26 bp, Homo sapiens
tgtatgtcaggagaactgcattctcc

SEQ ID NO: 77896 - DNA, 26 bp, Homo sapiens
gtatgtcaggagaactgcattctcct

SEQ ID NO: 77897 - DNA, 26 bp, Homo sapiens
tatgtcaggagaactgcattctcctt

SEQ ID NO: 77898 - DNA, 26 bp, Homo sapiens
atgtcaggagaactgcattctccttg

SEQ ID NO: 77899 - DNA, 26 bp, Homo sapiens
tgtcaggagaactgcattctccttga

SEQ ID NO: 77900 - DNA, 26 bp, Homo sapiens
gtcaggagaactgcattctccttgat

SEQ ID NO: 77901 - DNA, 26 bp, Homo sapiens
tcaggagaactgcattctccttgatt

SEQ ID NO: 77902 - DNA, 26 bp, Homo sapiens
caggagaactgcattctccttgattt

SEQ ID NO: 77903 - DNA, 26 bp, Homo sapiens
aggagaactgcattctccttgattta

SEQ ID NO: 77904 - DNA, 26 bp, Homo sapiens
ggagaactgcattctccttgatttaa

SEQ ID NO: 77905 - DNA, 26 bp, Homo sapiens
gagaactgcattctccttgatttaat

SEQ ID NO: 77906 - DNA, 26 bp, Homo sapiens
agaactgcattctccttgatttaata

SEQ ID NO: 77907 - DNA, 26 bp, Homo sapiens
gaactgcattctccttgatttaatat

SEQ ID NO: 77908 - DNA, 26 bp, Homo sapiens
aactgcattctccttgatttaatatg

SEQ ID NO: 77909 - DNA, 26 bp, Homo sapiens
actgcattctccttgatttaatatga

SEQ ID NO: 77910 - DNA, 26 bp, Homo sapiens
ctgcattctccttgatttaatatgag

SEQ ID NO: 77911 - DNA, 26 bp, Homo sapiens
tgcattctccttgatttaatatgagg

SEQ ID NO: 77912 - DNA, 26 bp, Homo sapiens
gcattctccttgatttaatatgaggc

SEQ ID NO: 77913 - DNA, 26 bp, Homo sapiens
cattctccttgatttaatatgaggct

SEQ ID NO: 77914 - DNA, 26 bp, Homo sapiens
attctccttgatttaatatgaggctt

SEQ ID NO: 77915 - DNA, 26 bp, Homo sapiens
ttctccttgatttaatatgaggctta

SEQ ID NO: 77916 - DNA, 26 bp, Homo sapiens
tctccttgatttaatatgaggcttaa

SEQ ID NO: 77917 - DNA, 26 bp, Homo sapiens
ctccttgatttaatatgaggcttaat

SEQ ID NO: 77918 - DNA, 26 bp, Homo sapiens
tccttgatttaatatgaggcttaatt

SEQ ID NO: 77919 - DNA, 26 bp, Homo sapiens
ccttgatttaatatgaggcttaattc

SEQ ID NO: 77920 - DNA, 26 bp, Homo sapiens
cttgatttaatatgaggcttaattct

SEQ ID NO: 77921 - DNA, 26 bp, Homo sapiens
ttgatttaatatgaggcttaattctc

SEQ ID NO: 77922 - DNA, 26 bp, Homo sapiens
tgatttaatatgaggcttaattctcc

SEQ ID NO: 77923 - DNA, 26 bp, Homo sapiens
gatttaatatgaggcttaattctcca

SEQ ID NO: 77924 - DNA, 26 bp, Homo sapiens
atttaatatgaggcttaattctccaa

SEQ ID NO: 77925 - DNA, 26 bp, Homo sapiens
tttaatatgaggcttaattctccaag

SEQ ID NO: 77926 - DNA, 26 bp, Homo sapiens
ttaatatgaggcttaattctccaaga

SEQ ID NO: 77927 - DNA, 26 bp, Homo sapiens
taatatgaggcttaattctccaagaa

SEQ ID NO: 77928 - DNA, 26 bp, Homo sapiens
aatatgaggcttaattctccaagaaa

SEQ ID NO: 77929 - DNA, 26 bp, Homo sapiens
atatgaggcttaattctccaagaaat

SEQ ID NO: 77930 - DNA, 26 bp, Homo sapiens
tatgaggcttaattctccaagaaata

SEQ ID NO: 77931 - DNA, 26 bp, Homo sapiens
atgaggcttaattctccaagaaatat

SEQ ID NO: 77932 - DNA, 26 bp, Homo sapiens
tgaggcttaattctccaagaaatatt

SEQ ID NO: 77933 - DNA, 26 bp, Homo sapiens
gaggcttaattctccaagaaatattg

SEQ ID NO: 77934 - DNA, 26 bp, Homo sapiens
aggcttaattctccaagaaatattgt

SEQ ID NO: 77935 - DNA, 26 bp, Homo sapiens
ggcttaattctccaagaaatattgtg

SEQ ID NO: 77936 - DNA, 26 bp, Homo sapiens
gcttaattctccaagaaatattgtgt

SEQ ID NO: 77937 - DNA, 26 bp, Homo sapiens
cttaattctccaagaaatattgtgtt

SEQ ID NO: 77938 - DNA, 26 bp, Homo sapiens
ttaattctccaagaaatattgtgttg

SEQ ID NO: 77939 - DNA, 26 bp, Homo sapiens
taattctccaagaaatattgtgttgc

SEQ ID NO: 77940 - DNA, 26 bp, Homo sapiens
aattctccaagaaatattgtgttgct

SEQ ID NO: 77941 - DNA, 26 bp, Homo sapiens
attctccaagaaatattgtgttgctt

SEQ ID NO: 77942 - DNA, 26 bp, Homo sapiens
ttctccaagaaatattgtgttgctta

SEQ ID NO: 77943 - DNA, 26 bp, Homo sapiens
tctccaagaaatattgtgttgcttag

SEQ ID NO: 77944 - DNA, 26 bp, Homo sapiens
ctccaagaaatattgtgttgcttagt

SEQ ID NO: 77945 - DNA, 26 bp, Homo sapiens
tccaagaaatattgtgttgcttagtg

SEQ ID NO: 77946 - DNA, 26 bp, Homo sapiens
ccaagaaatattgtgttgcttagtga

SEQ ID NO: 77947 - DNA, 26 bp, Homo sapiens
caagaaatattgtgttgcttagtgaa

SEQ ID NO: 77948 - DNA, 26 bp, Homo sapiens
aagaaatattgtgttgcttagtgaat

SEQ ID NO: 77949 - DNA, 26 bp, Homo sapiens
agaaatattgtgttgcttagtgaatt

SEQ ID NO: 77950 - DNA, 26 bp, Homo sapiens
gaaatattgtgttgcttagtgaattc

SEQ ID NO: 77951 - DNA, 26 bp, Homo sapiens
aaatattgtgttgcttagtgaattca

SEQ ID NO: 77952 - DNA, 26 bp, Homo sapiens
aatattgtgttgcttagtgaattcac

SEQ ID NO: 77953 - DNA, 26 bp, Homo sapiens
atattgtgttgcttagtgaattcaca

SEQ ID NO: 77954 - DNA, 26 bp, Homo sapiens
tattgtgttgcttagtgaattcacac

SEQ ID NO: 77955 - DNA, 26 bp, Homo sapiens
attgtgttgcttagtgaattcacact

SEQ ID NO: 77956 - DNA, 26 bp, Homo sapiens
ttgtgttgcttagtgaattcacactt

SEQ ID NO: 77957 - DNA, 26 bp, Homo sapiens
tgtgttgcttagtgaattcacacttg

SEQ ID NO: 77958 - DNA, 26 bp, Homo sapiens
gtgttgcttagtgaattcacacttga

SEQ ID NO: 77959 - DNA, 26 bp, Homo sapiens
tgttgcttagtgaattcacacttgaa

SEQ ID NO: 77960 - DNA, 26 bp, Homo sapiens
gttgcttagtgaattcacacttgaaa

SEQ ID NO: 77961 - DNA, 26 bp, Homo sapiens
ttgcttagtgaattcacacttgaaac

SEQ ID NO: 77962 - DNA, 26 bp, Homo sapiens
tgcttagtgaattcacacttgaaaca

SEQ ID NO: 77963 - DNA, 26 bp, Homo sapiens
gcttagtgaattcacacttgaaacag

SEQ ID NO: 77964 - DNA, 26 bp, Homo sapiens
cttagtgaattcacacttgaaacaga

SEQ ID NO: 77965 - DNA, 26 bp, Homo sapiens
ttagtgaattcacacttgaaacagaa

SEQ ID NO: 77966 - DNA, 26 bp, Homo sapiens
tagtgaattcacacttgaaacagaaa

SEQ ID NO: 77967 - DNA, 26 bp, Homo sapiens
agtgaattcacacttgaaacagaaaa

SEQ ID NO: 77968 - DNA, 26 bp, Homo sapiens
gtgaattcacacttgaaacagaaaaa

SEQ ID NO: 77969 - DNA, 26 bp, Homo sapiens
tgaattcacacttgaaacagaaaaag

SEQ ID NO: 77970 - DNA, 26 bp, Homo sapiens
gaattcacacttgaaacagaaaaagc

SEQ ID NO: 77971 - DNA, 26 bp, Homo sapiens
aattcacacttgaaacagaaaaagca

SEQ ID NO: 77972 - DNA, 26 bp, Homo sapiens
attcacacttgaaacagaaaaagcaa

SEQ ID NO: 77973 - DNA, 26 bp, Homo sapiens
ttcacacttgaaacagaaaaagcaaa

SEQ ID NO: 77974 - DNA, 26 bp, Homo sapiens
tcacacttgaaacagaaaaagcaaaa

SEQ ID NO: 77975 - DNA, 26 bp, Homo sapiens
cacacttgaaacagaaaaagcaaaat

SEQ ID NO: 77976 - DNA, 26 bp, Homo sapiens
acacttgaaacagaaaaagcaaaatt

SEQ ID NO: 77977 - DNA, 26 bp, Homo sapiens
cacttgaaacagaaaaagcaaaatta

SEQ ID NO: 77978 - DNA, 26 bp, Homo sapiens
acttgaaacagaaaaagcaaaattag

SEQ ID NO: 77979 - DNA, 26 bp, Homo sapiens
cttgaaacagaaaaagcaaaattagg

SEQ ID NO: 77980 - DNA, 26 bp, Homo sapiens
ttgaaacagaaaaagcaaaattagga

SEQ ID NO: 77981 - DNA, 26 bp, Homo sapiens
tgaaacagaaaaagcaaaattaggat

SEQ ID NO: 77982 - DNA, 26 bp, Homo sapiens
gaaacagaaaaagcaaaattaggatg

SEQ ID NO: 77983 - DNA, 26 bp, Homo sapiens
aaacagaaaaagcaaaattaggatgc

SEQ ID NO: 77984 - DNA, 26 bp, Homo sapiens
aacagaaaaagcaaaattaggatgct

SEQ ID NO: 77985 - DNA, 26 bp, Homo sapiens
acagaaaaagcaaaattaggatgctt

SEQ ID NO: 77986 - DNA, 26 bp, Homo sapiens
cagaaaaagcaaaattaggatgcttt

SEQ ID NO: 77987 - DNA, 26 bp, Homo sapiens
agaaaaagcaaaattaggatgctttt

SEQ ID NO: 77988 - DNA, 26 bp, Homo sapiens
gaaaaagcaaaattaggatgcttttg

SEQ ID NO: 77989 - DNA, 26 bp, Homo sapiens
aaaaagcaaaattaggatgcttttgt

SEQ ID NO: 77990 - DNA, 26 bp, Homo sapiens
aaaagcaaaattaggatgcttttgta

SEQ ID NO: 77991 - DNA, 26 bp, Homo sapiens
aaagcaaaattaggatgcttttgtaa

SEQ ID NO: 77992 - DNA, 26 bp, Homo sapiens
aagcaaaattaggatgcttttgtaac

SEQ ID NO: 77993 - DNA, 26 bp, Homo sapiens
agcaaaattaggatgcttttgtaacc

SEQ ID NO: 77994 - DNA, 26 bp, Homo sapiens
gcaaaattaggatgcttttgtaacct

SEQ ID NO: 77995 - DNA, 26 bp, Homo sapiens
caaaattaggatgcttttgtaacctg

SEQ ID NO: 77996 - DNA, 26 bp, Homo sapiens
aaaattaggatgcttttgtaacctgg

SEQ ID NO: 77997 - DNA, 26 bp, Homo sapiens
aaattaggatgcttttgtaacctggg

SEQ ID NO: 77998 - DNA, 26 bp, Homo sapiens
aattaggatgcttttgtaacctggga

SEQ ID NO: 77999 - DNA, 26 bp, Homo sapiens
attaggatgcttttgtaacctgggat

SEQ ID NO: 78000 - DNA, 26 bp, Homo sapiens
ttaggatgcttttgtaacctgggatt

SEQ ID NO: 78001 - DNA, 26 bp, Homo sapiens
taggatgcttttgtaacctgggatta

SEQ ID NO: 78002 - DNA, 26 bp, Homo sapiens
aggatgcttttgtaacctgggattat

SEQ ID NO: 78003 - DNA, 26 bp, Homo sapiens
ggatgcttttgtaacctgggattatt

SEQ ID NO: 78004 - DNA, 26 bp, Homo sapiens
gatgcttttgtaacctgggattattt

SEQ ID NO: 78005 - DNA, 26 bp, Homo sapiens
atgcttttgtaacctgggattatttc

SEQ ID NO: 78006 - DNA, 26 bp, Homo sapiens
tgcttttgtaacctgggattatttcc

SEQ ID NO: 78007 - DNA, 26 bp, Homo sapiens
gcttttgtaacctgggattatttcct

SEQ ID NO: 78008 - DNA, 26 bp, Homo sapiens
cttttgtaacctgggattatttcctg

SEQ ID NO: 78009 - DNA, 26 bp, Homo sapiens
ttttgtaacctgggattatttcctga

SEQ ID NO: 78010 - DNA, 26 bp, Homo sapiens
tttgtaacctgggattatttcctgag

SEQ ID NO: 78011 - DNA, 26 bp, Homo sapiens
ttgtaacctgggattatttcctgagt

SEQ ID NO: 78012 - DNA, 26 bp, Homo sapiens
tgtaacctgggattatttcctgagtc

SEQ ID NO: 78013 - DNA, 26 bp, Homo sapiens
gtaacctgggattatttcctgagtct

SEQ ID NO: 78014 - DNA, 26 bp, Homo sapiens
taacctgggattatttcctgagtcta

SEQ ID NO: 78015 - DNA, 26 bp, Homo sapiens
aacctgggattatttcctgagtctaa

SEQ ID NO: 78016 - DNA, 26 bp, Homo sapiens
acctgggattatttcctgagtctaag

SEQ ID NO: 78017 - DNA, 26 bp, Homo sapiens
cctgggattatttcctgagtctaagg

SEQ ID NO: 78018 - DNA, 26 bp, Homo sapiens
ctgggattatttcctgagtctaagga

SEQ ID NO: 78019 - DNA, 26 bp, Homo sapiens
tgggattatttcctgagtctaaggaa

SEQ ID NO: 78020 - DNA, 26 bp, Homo sapiens
gggattatttcctgagtctaaggaat

SEQ ID NO: 78021 - DNA, 26 bp, Homo sapiens
ggattatttcctgagtctaaggaatc

SEQ ID NO: 78022 - DNA, 26 bp, Homo sapiens
gattatttcctgagtctaaggaatca

SEQ ID NO: 78023 - DNA, 26 bp, Homo sapiens
attatttcctgagtctaaggaatcaa

SEQ ID NO: 78024 - DNA, 26 bp, Homo sapiens
ttatttcctgagtctaaggaatcaac

SEQ ID NO: 78025 - DNA, 26 bp, Homo sapiens
tatttcctgagtctaaggaatcaact

SEQ ID NO: 78026 - DNA, 26 bp, Homo sapiens
atttcctgagtctaaggaatcaactg

SEQ ID NO: 78027 - DNA, 26 bp, Homo sapiens
tttcctgagtctaaggaatcaactgg

SEQ ID NO: 78028 - DNA, 26 bp, Homo sapiens
ttcctgagtctaaggaatcaactggt

SEQ ID NO: 78029 - DNA, 26 bp, Homo sapiens
tcctgagtctaaggaatcaactggtg

SEQ ID NO: 78030 - DNA, 26 bp, Homo sapiens
cctgagtctaaggaatcaactggtgg

SEQ ID NO: 78031 - DNA, 26 bp, Homo sapiens
ctgagtctaaggaatcaactggtggt

SEQ ID NO: 78032 - DNA, 26 bp, Homo sapiens
tgagtctaaggaatcaactggtggtt

SEQ ID NO: 78033 - DNA, 26 bp, Homo sapiens
gagtctaaggaatcaactggtggttt

SEQ ID NO: 78034 - DNA, 26 bp, Homo sapiens
agtctaaggaatcaactggtggttta

SEQ ID NO: 78035 - DNA, 26 bp, Homo sapiens
gtctaaggaatcaactggtggtttaa

SEQ ID NO: 78036 - DNA, 26 bp, Homo sapiens
tctaaggaatcaactggtggtttaag

SEQ ID NO: 78037 - DNA, 26 bp, Homo sapiens
ctaaggaatcaactggtggtttaagt

SEQ ID NO: 78038 - DNA, 26 bp, Homo sapiens
taaggaatcaactggtggtttaagtg

SEQ ID NO: 78039 - DNA, 26 bp, Homo sapiens
aaggaatcaactggtggtttaagtgt

SEQ ID NO: 78040 - DNA, 26 bp, Homo sapiens
aggaatcaactggtggtttaagtgtt

SEQ ID NO: 78041 - DNA, 26 bp, Homo sapiens
ggaatcaactggtggtttaagtgtta

SEQ ID NO: 78042 - DNA, 26 bp, Homo sapiens
gaatcaactggtggtttaagtgttaa

SEQ ID NO: 78043 - DNA, 26 bp, Homo sapiens
aatcaactggtggtttaagtgttaag

SEQ ID NO: 78044 - DNA, 26 bp, Homo sapiens
atcaactggtggtttaagtgttaagg

SEQ ID NO: 78045 - DNA, 26 bp, Homo sapiens
tcaactggtggtttaagtgttaagga

SEQ ID NO: 78046 - DNA, 26 bp, Homo sapiens
caactggtggtttaagtgttaaggaa

SEQ ID NO: 78047 - DNA, 26 bp, Homo sapiens
aactggtggtttaagtgttaaggaag

SEQ ID NO: 78048 - DNA, 26 bp, Homo sapiens
actggtggtttaagtgttaaggaagt

SEQ ID NO: 78049 - DNA, 26 bp, Homo sapiens
ctggtggtttaagtgttaaggaagta

SEQ ID NO: 78050 - DNA, 26 bp, Homo sapiens
tggtggtttaagtgttaaggaagtaa

SEQ ID NO: 78051 - DNA, 26 bp, Homo sapiens
ggtggtttaagtgttaaggaagtaat

SEQ ID NO: 78052 - DNA, 26 bp, Homo sapiens
gtggtttaagtgttaaggaagtaatt

SEQ ID NO: 78053 - DNA, 26 bp, Homo sapiens
tggtttaagtgttaaggaagtaattt

SEQ ID NO: 78054 - DNA, 26 bp, Homo sapiens
ggtttaagtgttaaggaagtaatttc

SEQ ID NO: 78055 - DNA, 26 bp, Homo sapiens
gtttaagtgttaaggaagtaatttca

SEQ ID NO: 78056 - DNA, 26 bp, Homo sapiens
tttaagtgttaaggaagtaatttcat

SEQ ID NO: 78057 - DNA, 26 bp, Homo sapiens
ttaagtgttaaggaagtaatttcatt

SEQ ID NO: 78058 - DNA, 26 bp, Homo sapiens
taagtgttaaggaagtaatttcatta

SEQ ID NO: 78059 - DNA, 26 bp, Homo sapiens
aagtgttaaggaagtaatttcattat

SEQ ID NO: 78060 - DNA, 26 bp, Homo sapiens
agtgttaaggaagtaatttcattatt

SEQ ID NO: 78061 - DNA, 26 bp, Homo sapiens
gtgttaaggaagtaatttcattatta

SEQ ID NO: 78062 - DNA, 26 bp, Homo sapiens
tgttaaggaagtaatttcattattat

SEQ ID NO: 78063 - DNA, 26 bp, Homo sapiens
gttaaggaagtaatttcattattatt

SEQ ID NO: 78064 - DNA, 26 bp, Homo sapiens
ttaaggaagtaatttcattattattg

SEQ ID NO: 78065 - DNA, 26 bp, Homo sapiens
taaggaagtaatttcattattattgc

SEQ ID NO: 78066 - DNA, 26 bp, Homo sapiens
aaggaagtaatttcattattattgct

SEQ ID NO: 78067 - DNA, 26 bp, Homo sapiens
aggaagtaatttcattattattgctg

SEQ ID NO: 78068 - DNA, 26 bp, Homo sapiens
ggaagtaatttcattattattgctga

SEQ ID NO: 78069 - DNA, 26 bp, Homo sapiens
gaagtaatttcattattattgctgag

SEQ ID NO: 78070 - DNA, 26 bp, Homo sapiens
aagtaatttcattattattgctgaga

SEQ ID NO: 78071 - DNA, 26 bp, Homo sapiens
agtaatttcattattattgctgagat

SEQ ID NO: 78072 - DNA, 26 bp, Homo sapiens
gtaatttcattattattgctgagatg

SEQ ID NO: 78073 - DNA, 26 bp, Homo sapiens
taatttcattattattgctgagatgg

SEQ ID NO: 78074 - DNA, 26 bp, Homo sapiens
aatttcattattattgctgagatggc

SEQ ID NO: 78075 - DNA, 26 bp, Homo sapiens
atttcattattattgctgagatggct

SEQ ID NO: 78076 - DNA, 26 bp, Homo sapiens
tttcattattattgctgagatggctt

SEQ ID NO: 78077 - DNA, 26 bp, Homo sapiens
ttcattattattgctgagatggcttc

SEQ ID NO: 78078 - DNA, 26 bp, Homo sapiens
tcattattattgctgagatggcttcc

SEQ ID NO: 78079 - DNA, 26 bp, Homo sapiens
cattattattgctgagatggcttccc

SEQ ID NO: 78080 - DNA, 26 bp, Homo sapiens
attattattgctgagatggcttccct

SEQ ID NO: 78081 - DNA, 26 bp, Homo sapiens
ttattattgctgagatggcttccctc

SEQ ID NO: 78082 - DNA, 26 bp, Homo sapiens
tattattgctgagatggcttccctca

SEQ ID NO: 78083 - DNA, 26 bp, Homo sapiens
attattgctgagatggcttccctcag

SEQ ID NO: 78084 - DNA, 26 bp, Homo sapiens
ttattgctgagatggcttccctcagg

SEQ ID NO: 78085 - DNA, 26 bp, Homo sapiens
tattgctgagatggcttccctcaggc

SEQ ID NO: 78086 - DNA, 26 bp, Homo sapiens
attgctgagatggcttccctcaggca

SEQ ID NO: 78087 - DNA, 26 bp, Homo sapiens
ttgctgagatggcttccctcaggcag

SEQ ID NO: 78088 - DNA, 26 bp, Homo sapiens
tgctgagatggcttccctcaggcaga

SEQ ID NO: 78089 - DNA, 26 bp, Homo sapiens
gctgagatggcttccctcaggcagaa

SEQ ID NO: 78090 - DNA, 26 bp, Homo sapiens
ctgagatggcttccctcaggcagaaa

SEQ ID NO: 78091 - DNA, 26 bp, Homo sapiens
tgagatggcttccctcaggcagaaaa

SEQ ID NO: 78092 - DNA, 26 bp, Homo sapiens
gagatggcttccctcaggcagaaaat

SEQ ID NO: 78093 - DNA, 26 bp, Homo sapiens
agatggcttccctcaggcagaaaatt

SEQ ID NO: 78094 - DNA, 26 bp, Homo sapiens
gatggcttccctcaggcagaaaattt

SEQ ID NO: 78095 - DNA, 26 bp, Homo sapiens
atggcttccctcaggcagaaaatttg

SEQ ID NO: 78096 - DNA, 26 bp, Homo sapiens
tggcttccctcaggcagaaaatttga

SEQ ID NO: 78097 - DNA, 26 bp, Homo sapiens
ggcttccctcaggcagaaaatttgaa

SEQ ID NO: 78098 - DNA, 26 bp, Homo sapiens
gcttccctcaggcagaaaatttgaaa

SEQ ID NO: 78099 - DNA, 26 bp, Homo sapiens
cttccctcaggcagaaaatttgaaat

SEQ ID NO: 78100 - DNA, 26 bp, Homo sapiens
ttccctcaggcagaaaatttgaaatt

SEQ ID NO: 78101 - DNA, 26 bp, Homo sapiens
tccctcaggcagaaaatttgaaattt

SEQ ID NO: 78102 - DNA, 26 bp, Homo sapiens
ccctcaggcagaaaatttgaaatttg

SEQ ID NO: 78103 - DNA, 26 bp, Homo sapiens
cctcaggcagaaaatttgaaatttgg

SEQ ID NO: 78104 - DNA, 26 bp, Homo sapiens
ctcaggcagaaaatttgaaatttggg

SEQ ID NO: 78105 - DNA, 26 bp, Homo sapiens
tcaggcagaaaatttgaaatttgggg

SEQ ID NO: 78106 - DNA, 26 bp, Homo sapiens
caggcagaaaatttgaaatttggggt

SEQ ID NO: 78107 - DNA, 26 bp, Homo sapiens
aggcagaaaatttgaaatttggggtt

SEQ ID NO: 78108 - DNA, 26 bp, Homo sapiens
ggcagaaaatttgaaatttggggttt

SEQ ID NO: 78109 - DNA, 26 bp, Homo sapiens
gcagaaaatttgaaatttggggttta

SEQ ID NO: 78110 - DNA, 26 bp, Homo sapiens
cagaaaatttgaaatttggggtttat

SEQ ID NO: 78111 - DNA, 26 bp, Homo sapiens
agaaaatttgaaatttggggtttata

SEQ ID NO: 78112 - DNA, 26 bp, Homo sapiens
gaaaatttgaaatttggggtttatat

SEQ ID NO: 78113 - DNA, 26 bp, Homo sapiens
aaaatttgaaatttggggtttatatc

SEQ ID NO: 78114 - DNA, 26 bp, Homo sapiens
aaatttgaaatttggggtttatatcc

SEQ ID NO: 78115 - DNA, 26 bp, Homo sapiens
aatttgaaatttggggtttatatcca

SEQ ID NO: 78116 - DNA, 26 bp, Homo sapiens
atttgaaatttggggtttatatccag

SEQ ID NO: 78117 - DNA, 26 bp, Homo sapiens
tttgaaatttggggtttatatccagt

SEQ ID NO: 78118 - DNA, 26 bp, Homo sapiens
ttgaaatttggggtttatatccagtg

SEQ ID NO: 78119 - DNA, 26 bp, Homo sapiens
tgaaatttggggtttatatccagtgt

SEQ ID NO: 78120 - DNA, 26 bp, Homo sapiens
gaaatttggggtttatatccagtgtt

SEQ ID NO: 78121 - DNA, 26 bp, Homo sapiens
aaatttggggtttatatccagtgttg

SEQ ID NO: 78122 - DNA, 26 bp, Homo sapiens
aatttggggtttatatccagtgttga

SEQ ID NO: 78123 - DNA, 26 bp, Homo sapiens
atttggggtttatatccagtgttgag

SEQ ID NO: 78124 - DNA, 26 bp, Homo sapiens
tttggggtttatatccagtgttgaga

SEQ ID NO: 78125 - DNA, 26 bp, Homo sapiens
ttggggtttatatccagtgttgagat

SEQ ID NO: 78126 - DNA, 26 bp, Homo sapiens
tggggtttatatccagtgttgagatc

SEQ ID NO: 78127 - DNA, 26 bp, Homo sapiens
ggggtttatatccagtgttgagatca

SEQ ID NO: 78128 - DNA, 26 bp, Homo sapiens
gggtttatatccagtgttgagatcag

SEQ ID NO: 78129 - DNA, 26 bp, Homo sapiens
ggtttatatccagtgttgagatcagg

SEQ ID NO: 78130 - DNA, 26 bp, Homo sapiens
gtttatatccagtgttgagatcagga

SEQ ID NO: 78131 - DNA, 26 bp, Homo sapiens
tttatatccagtgttgagatcaggaa

SEQ ID NO: 78132 - DNA, 26 bp, Homo sapiens
ttatatccagtgttgagatcaggaat

SEQ ID NO: 78133 - DNA, 26 bp, Homo sapiens
tatatccagtgttgagatcaggaata

SEQ ID NO: 78134 - DNA, 26 bp, Homo sapiens
atatccagtgttgagatcaggaatat

SEQ ID NO: 78135 - DNA, 26 bp, Homo sapiens
tatccagtgttgagatcaggaatata

SEQ ID NO: 78136 - DNA, 26 bp, Homo sapiens
atccagtgttgagatcaggaatatat

SEQ ID NO: 78137 - DNA, 26 bp, Homo sapiens
tccagtgttgagatcaggaatatata

SEQ ID NO: 78138 - DNA, 26 bp, Homo sapiens
ccagtgttgagatcaggaatatatac

SEQ ID NO: 78139 - DNA, 26 bp, Homo sapiens
cagtgttgagatcaggaatatataca

SEQ ID NO: 78140 - DNA, 26 bp, Homo sapiens
agtgttgagatcaggaatatatacaa

SEQ ID NO: 78141 - DNA, 26 bp, Homo sapiens
gtgttgagatcaggaatatatacaac

SEQ ID NO: 78142 - DNA, 26 bp, Homo sapiens
tgttgagatcaggaatatatacaact

SEQ ID NO: 78143 - DNA, 26 bp, Homo sapiens
gttgagatcaggaatatatacaactg

SEQ ID NO: 78144 - DNA, 26 bp, Homo sapiens
ttgagatcaggaatatatacaactgt

SEQ ID NO: 78145 - DNA, 26 bp, Homo sapiens
tgagatcaggaatatatacaactgta

SEQ ID NO: 78146 - DNA, 26 bp, Homo sapiens
gagatcaggaatatatacaactgtag

SEQ ID NO: 78147 - DNA, 26 bp, Homo sapiens
agatcaggaatatatacaactgtagt

SEQ ID NO: 78148 - DNA, 26 bp, Homo sapiens
gatcaggaatatatacaactgtagta

SEQ ID NO: 78149 - DNA, 26 bp, Homo sapiens
atcaggaatatatacaactgtagtat

SEQ ID NO: 78150 - DNA, 26 bp, Homo sapiens
tcaggaatatatacaactgtagtatt

SEQ ID NO: 78151 - DNA, 26 bp, Homo sapiens
caggaatatatacaactgtagtattg

SEQ ID NO: 78152 - DNA, 26 bp, Homo sapiens
aggaatatatacaactgtagtattgt

SEQ ID NO: 78153 - DNA, 26 bp, Homo sapiens
ggaatatatacaactgtagtattgtc

SEQ ID NO: 78154 - DNA, 26 bp, Homo sapiens
gaatatatacaactgtagtattgtcg

SEQ ID NO: 78155 - DNA, 26 bp, Homo sapiens
aatatatacaactgtagtattgtcga

SEQ ID NO: 78156 - DNA, 26 bp, Homo sapiens
atatatacaactgtagtattgtcgaa

SEQ ID NO: 78157 - DNA, 26 bp, Homo sapiens
tatatacaactgtagtattgtcgaat

SEQ ID NO: 78158 - DNA, 26 bp, Homo sapiens
atatacaactgtagtattgtcgaata

SEQ ID NO: 78159 - DNA, 26 bp, Homo sapiens
tatacaactgtagtattgtcgaatag

SEQ ID NO: 78160 - DNA, 26 bp, Homo sapiens
atacaactgtagtattgtcgaatagc

SEQ ID NO: 78161 - DNA, 26 bp, Homo sapiens
tacaactgtagtattgtcgaatagcg

SEQ ID NO: 78162 - DNA, 26 bp, Homo sapiens
acaactgtagtattgtcgaatagcga

SEQ ID NO: 78163 - DNA, 26 bp, Homo sapiens
caactgtagtattgtcgaatagcgag

SEQ ID NO: 78164 - DNA, 26 bp, Homo sapiens
aactgtagtattgtcgaatagcgagt

SEQ ID NO: 78165 - DNA, 26 bp, Homo sapiens
actgtagtattgtcgaatagcgagtt

SEQ ID NO: 78166 - DNA, 26 bp, Homo sapiens
ctgtagtattgtcgaatagcgagttt

SEQ ID NO: 78167 - DNA, 26 bp, Homo sapiens
tgtagtattgtcgaatagcgagtttt

SEQ ID NO: 78168 - DNA, 26 bp, Homo sapiens
gtagtattgtcgaatagcgagttttg

SEQ ID NO: 78169 - DNA, 26 bp, Homo sapiens
tagtattgtcgaatagcgagttttgc

SEQ ID NO: 78170 - DNA, 26 bp, Homo sapiens
agtattgtcgaatagcgagttttgcg

SEQ ID NO: 78171 - DNA, 26 bp, Homo sapiens
gtattgtcgaatagcgagttttgcgg

SEQ ID NO: 78172 - DNA, 26 bp, Homo sapiens
tattgtcgaatagcgagttttgcggg

SEQ ID NO: 78173 - DNA, 26 bp, Homo sapiens
attgtcgaatagcgagttttgcgggt

SEQ ID NO: 78174 - DNA, 26 bp, Homo sapiens
ttgtcgaatagcgagttttgcgggta

SEQ ID NO: 78175 - DNA, 26 bp, Homo sapiens
tgtcgaatagcgagttttgcgggtag

SEQ ID NO: 78176 - DNA, 26 bp, Homo sapiens
gtcgaatagcgagttttgcgggtagt

SEQ ID NO: 78177 - DNA, 26 bp, Homo sapiens
tcgaatagcgagttttgcgggtagtc

SEQ ID NO: 78178 - DNA, 26 bp, Homo sapiens
cgaatagcgagttttgcgggtagtct

SEQ ID NO: 78179 - DNA, 26 bp, Homo sapiens
gaatagcgagttttgcgggtagtctc

SEQ ID NO: 78180 - DNA, 26 bp, Homo sapiens
aatagcgagttttgcgggtagtctct

SEQ ID NO: 78181 - DNA, 26 bp, Homo sapiens
atagcgagttttgcgggtagtctctt

SEQ ID NO: 78182 - DNA, 26 bp, Homo sapiens
tagcgagttttgcgggtagtctcttg

SEQ ID NO: 78183 - DNA, 26 bp, Homo sapiens
agcgagttttgcgggtagtctcttgt

SEQ ID NO: 78184 - DNA, 26 bp, Homo sapiens
gcgagttttgcgggtagtctcttgtc

SEQ ID NO: 78185 - DNA, 26 bp, Homo sapiens
cgagttttgcgggtagtctcttgtct

SEQ ID NO: 78186 - DNA, 26 bp, Homo sapiens
gagttttgcgggtagtctcttgtctc

SEQ ID NO: 78187 - DNA, 26 bp, Homo sapiens
agttttgcgggtagtctcttgtctcc

SEQ ID NO: 78188 - DNA, 26 bp, Homo sapiens
gttttgcgggtagtctcttgtctcca

SEQ ID NO: 78189 - DNA, 26 bp, Homo sapiens
ttttgcgggtagtctcttgtctccag

SEQ ID NO: 78190 - DNA, 26 bp, Homo sapiens
tttgcgggtagtctcttgtctccagg

SEQ ID NO: 78191 - DNA, 26 bp, Homo sapiens
ttgcgggtagtctcttgtctccaggg

SEQ ID NO: 78192 - DNA, 26 bp, Homo sapiens
tgcgggtagtctcttgtctccagggg

SEQ ID NO: 78193 - DNA, 26 bp, Homo sapiens
gcgggtagtctcttgtctccaggggt

SEQ ID NO: 78194 - DNA, 26 bp, Homo sapiens
cgggtagtctcttgtctccaggggtc

SEQ ID NO: 78195 - DNA, 26 bp, Homo sapiens
gggtagtctcttgtctccaggggtcc

SEQ ID NO: 78196 - DNA, 26 bp, Homo sapiens
ggtagtctcttgtctccaggggtcct

SEQ ID NO: 78197 - DNA, 26 bp, Homo sapiens
gtagtctcttgtctccaggggtcctg

SEQ ID NO: 78198 - DNA, 26 bp, Homo sapiens
tagtctcttgtctccaggggtcctgt

SEQ ID NO: 78199 - DNA, 26 bp, Homo sapiens
agtctcttgtctccaggggtcctgta

SEQ ID NO: 78200 - DNA, 26 bp, Homo sapiens
gtctcttgtctccaggggtcctgtat

SEQ ID NO: 78201 - DNA, 26 bp, Homo sapiens
tctcttgtctccaggggtcctgtatt

SEQ ID NO: 78202 - DNA, 26 bp, Homo sapiens
ctcttgtctccaggggtcctgtattc

SEQ ID NO: 78203 - DNA, 26 bp, Homo sapiens
tcttgtctccaggggtcctgtattct

SEQ ID NO: 78204 - DNA, 26 bp, Homo sapiens
cttgtctccaggggtcctgtattctc

SEQ ID NO: 78205 - DNA, 26 bp, Homo sapiens
ttgtctccaggggtcctgtattctcc

SEQ ID NO: 78206 - DNA, 26 bp, Homo sapiens
tgtctccaggggtcctgtattctcct

SEQ ID NO: 78207 - DNA, 26 bp, Homo sapiens
gtctccaggggtcctgtattctcctt

SEQ ID NO: 78208 - DNA, 26 bp, Homo sapiens
tctccaggggtcctgtattctccttc

SEQ ID NO: 78209 - DNA, 26 bp, Homo sapiens
ctccaggggtcctgtattctccttct

SEQ ID NO: 78210 - DNA, 26 bp, Homo sapiens
tccaggggtcctgtattctccttctt

SEQ ID NO: 78211 - DNA, 26 bp, Homo sapiens
ccaggggtcctgtattctccttcttg

SEQ ID NO: 78212 - DNA, 26 bp, Homo sapiens
caggggtcctgtattctccttcttgt

SEQ ID NO: 78213 - DNA, 26 bp, Homo sapiens
aggggtcctgtattctccttcttgta

SEQ ID NO: 78214 - DNA, 26 bp, Homo sapiens
ggggtcctgtattctccttcttgtag

SEQ ID NO: 78215 - DNA, 26 bp, Homo sapiens
gggtcctgtattctccttcttgtagt

SEQ ID NO: 78216 - DNA, 26 bp, Homo sapiens
ggtcctgtattctccttcttgtagtc

SEQ ID NO: 78217 - DNA, 26 bp, Homo sapiens
gtcctgtattctccttcttgtagtct

SEQ ID NO: 78218 - DNA, 26 bp, Homo sapiens
tcctgtattctccttcttgtagtctg

SEQ ID NO: 78219 - DNA, 26 bp, Homo sapiens
cctgtattctccttcttgtagtctgt

SEQ ID NO: 78220 - DNA, 26 bp, Homo sapiens
ctgtattctccttcttgtagtctgta

SEQ ID NO: 78221 - DNA, 26 bp, Homo sapiens
tgtattctccttcttgtagtctgtag

SEQ ID NO: 78222 - DNA, 26 bp, Homo sapiens
gtattctccttcttgtagtctgtagg

SEQ ID NO: 78223 - DNA, 26 bp, Homo sapiens
tattctccttcttgtagtctgtaggc

SEQ ID NO: 78224 - DNA, 26 bp, Homo sapiens
attctccttcttgtagtctgtaggct

SEQ ID NO: 78225 - DNA, 26 bp, Homo sapiens
ttctccttcttgtagtctgtaggctt

SEQ ID NO: 78226 - DNA, 26 bp, Homo sapiens
tctccttcttgtagtctgtaggcttg

SEQ ID NO: 78227 - DNA, 26 bp, Homo sapiens
ctccttcttgtagtctgtaggcttgt

SEQ ID NO: 78228 - DNA, 26 bp, Homo sapiens
tccttcttgtagtctgtaggcttgtg

SEQ ID NO: 78229 - DNA, 26 bp, Homo sapiens
ccttcttgtagtctgtaggcttgtgt

SEQ ID NO: 78230 - DNA, 26 bp, Homo sapiens
cttcttgtagtctgtaggcttgtgtt

SEQ ID NO: 78231 - DNA, 26 bp, Homo sapiens
ttcttgtagtctgtaggcttgtgttc

SEQ ID NO: 78232 - DNA, 26 bp, Homo sapiens
tcttgtagtctgtaggcttgtgttct

SEQ ID NO: 78233 - DNA, 26 bp, Homo sapiens
cttgtagtctgtaggcttgtgttctg

SEQ ID NO: 78234 - DNA, 26 bp, Homo sapiens
ttgtagtctgtaggcttgtgttctgg

SEQ ID NO: 78235 - DNA, 26 bp, Homo sapiens
tgtagtctgtaggcttgtgttctggg

SEQ ID NO: 78236 - DNA, 26 bp, Homo sapiens
gtagtctgtaggcttgtgttctggga

SEQ ID NO: 78237 - DNA, 26 bp, Homo sapiens
tagtctgtaggcttgtgttctgggat

SEQ ID NO: 78238 - DNA, 26 bp, Homo sapiens
agtctgtaggcttgtgttctgggatg

SEQ ID NO: 78239 - DNA, 26 bp, Homo sapiens
gtctgtaggcttgtgttctgggatga

SEQ ID NO: 78240 - DNA, 26 bp, Homo sapiens
tctgtaggcttgtgttctgggatgaa

SEQ ID NO: 78241 - DNA, 26 bp, Homo sapiens
ctgtaggcttgtgttctgggatgaag

SEQ ID NO: 78242 - DNA, 26 bp, Homo sapiens
tgtaggcttgtgttctgggatgaaga

SEQ ID NO: 78243 - DNA, 26 bp, Homo sapiens
gtaggcttgtgttctgggatgaagat

SEQ ID NO: 78244 - DNA, 26 bp, Homo sapiens
taggcttgtgttctgggatgaagatt

SEQ ID NO: 78245 - DNA, 26 bp, Homo sapiens
aggcttgtgttctgggatgaagattt

SEQ ID NO: 78246 - DNA, 26 bp, Homo sapiens
ggcttgtgttctgggatgaagatttc

SEQ ID NO: 78247 - DNA, 26 bp, Homo sapiens
gcttgtgttctgggatgaagatttct

SEQ ID NO: 78248 - DNA, 26 bp, Homo sapiens
cttgtgttctgggatgaagatttctt

SEQ ID NO: 78249 - DNA, 26 bp, Homo sapiens
ttgtgttctgggatgaagatttcttt

SEQ ID NO: 78250 - DNA, 26 bp, Homo sapiens
tgtgttctgggatgaagatttctttt

SEQ ID NO: 78251 - DNA, 26 bp, Homo sapiens
gtgttctgggatgaagatttctttta

SEQ ID NO: 78252 - DNA, 26 bp, Homo sapiens
tgttctgggatgaagatttcttttat

SEQ ID NO: 78253 - DNA, 26 bp, Homo sapiens
gttctgggatgaagatttcttttatc

SEQ ID NO: 78254 - DNA, 26 bp, Homo sapiens
ttctgggatgaagatttcttttatct

SEQ ID NO: 78255 - DNA, 26 bp, Homo sapiens
tctgggatgaagatttcttttatctc

SEQ ID NO: 78256 - DNA, 26 bp, Homo sapiens
ctgggatgaagatttcttttatctct

SEQ ID NO: 78257 - DNA, 26 bp, Homo sapiens
tgggatgaagatttcttttatctctg

SEQ ID NO: 78258 - DNA, 26 bp, Homo sapiens
gggatgaagatttcttttatctctgt

SEQ ID NO: 78259 - DNA, 26 bp, Homo sapiens
ggatgaagatttcttttatctctgta

SEQ ID NO: 78260 - DNA, 26 bp, Homo sapiens
gatgaagatttcttttatctctgtaa

SEQ ID NO: 78261 - DNA, 26 bp, Homo sapiens
atgaagatttcttttatctctgtaat

SEQ ID NO: 78262 - DNA, 26 bp, Homo sapiens
tgaagatttcttttatctctgtaatc

SEQ ID NO: 78263 - DNA, 26 bp, Homo sapiens
gaagatttcttttatctctgtaatca

SEQ ID NO: 78264 - DNA, 26 bp, Homo sapiens
aagatttcttttatctctgtaatcat

SEQ ID NO: 78265 - DNA, 26 bp, Homo sapiens
agatttcttttatctctgtaatcatg

SEQ ID NO: 78266 - DNA, 26 bp, Homo sapiens
gatttcttttatctctgtaatcatgg

SEQ ID NO: 78267 - DNA, 26 bp, Homo sapiens
atttcttttatctctgtaatcatggg

SEQ ID NO: 78268 - DNA, 26 bp, Homo sapiens
tttcttttatctctgtaatcatggga

SEQ ID NO: 78269 - DNA, 26 bp, Homo sapiens
ttcttttatctctgtaatcatgggat

SEQ ID NO: 78270 - DNA, 26 bp, Homo sapiens
tcttttatctctgtaatcatgggatc

SEQ ID NO: 78271 - DNA, 26 bp, Homo sapiens
cttttatctctgtaatcatgggatca

SEQ ID NO: 78272 - DNA, 26 bp, Homo sapiens
ttttatctctgtaatcatgggatcaa

SEQ ID NO: 78273 - DNA, 26 bp, Homo sapiens
tttatctctgtaatcatgggatcaac

SEQ ID NO: 78274 - DNA, 26 bp, Homo sapiens
ttatctctgtaatcatgggatcaaca

SEQ ID NO: 78275 - DNA, 26 bp, Homo sapiens
tatctctgtaatcatgggatcaacat

SEQ ID NO: 78276 - DNA, 26 bp, Homo sapiens
atctctgtaatcatgggatcaacata

SEQ ID NO: 78277 - DNA, 26 bp, Homo sapiens
tctctgtaatcatgggatcaacatat

SEQ ID NO: 78278 - DNA, 26 bp, Homo sapiens
ctctgtaatcatgggatcaacatata

SEQ ID NO: 78279 - DNA, 26 bp, Homo sapiens
tctgtaatcatgggatcaacatatag

SEQ ID NO: 78280 - DNA, 26 bp, Homo sapiens
ctgtaatcatgggatcaacatatagg

SEQ ID NO: 78281 - DNA, 26 bp, Homo sapiens
tgtaatcatgggatcaacatatagga

SEQ ID NO: 78282 - DNA, 26 bp, Homo sapiens
gtaatcatgggatcaacatataggac

SEQ ID NO: 78283 - DNA, 26 bp, Homo sapiens
taatcatgggatcaacatataggacc

SEQ ID NO: 78284 - DNA, 26 bp, Homo sapiens
aatcatgggatcaacatataggacct

SEQ ID NO: 78285 - DNA, 26 bp, Homo sapiens
atcatgggatcaacatataggacctg

SEQ ID NO: 78286 - DNA, 26 bp, Homo sapiens
tcatgggatcaacatataggacctgc

SEQ ID NO: 78287 - DNA, 26 bp, Homo sapiens
catgggatcaacatataggacctgct

SEQ ID NO: 78288 - DNA, 26 bp, Homo sapiens
atgggatcaacatataggacctgctc

SEQ ID NO: 78289 - DNA, 26 bp, Homo sapiens
tgggatcaacatataggacctgctca

SEQ ID NO: 78290 - DNA, 26 bp, Homo sapiens
gggatcaacatataggacctgctcac

SEQ ID NO: 78291 - DNA, 26 bp, Homo sapiens
ggatcaacatataggacctgctcact

SEQ ID NO: 78292 - DNA, 26 bp, Homo sapiens
gatcaacatataggacctgctcactg

SEQ ID NO: 78293 - DNA, 26 bp, Homo sapiens
atcaacatataggacctgctcactgg

SEQ ID NO: 78294 - DNA, 26 bp, Homo sapiens
tcaacatataggacctgctcactgga

SEQ ID NO: 78295 - DNA, 26 bp, Homo sapiens
caacatataggacctgctcactggaa

SEQ ID NO: 78296 - DNA, 26 bp, Homo sapiens
aacatataggacctgctcactggaat

SEQ ID NO: 78297 - DNA, 26 bp, Homo sapiens
acatataggacctgctcactggaatt

SEQ ID NO: 78298 - DNA, 26 bp, Homo sapiens
catataggacctgctcactggaatta

SEQ ID NO: 78299 - DNA, 26 bp, Homo sapiens
atataggacctgctcactggaattat

SEQ ID NO: 78300 - DNA, 26 bp, Homo sapiens
tataggacctgctcactggaattatt

SEQ ID NO: 78301 - DNA, 26 bp, Homo sapiens
ataggacctgctcactggaattatta

SEQ ID NO: 78302 - DNA, 26 bp, Homo sapiens
taggacctgctcactggaattattat

SEQ ID NO: 78303 - DNA, 26 bp, Homo sapiens
aggacctgctcactggaattattatt

SEQ ID NO: 78304 - DNA, 26 bp, Homo sapiens
ggacctgctcactggaattattattc

SEQ ID NO: 78305 - DNA, 26 bp, Homo sapiens
gacctgctcactggaattattattca

SEQ ID NO: 78306 - DNA, 26 bp, Homo sapiens
acctgctcactggaattattattcat

SEQ ID NO: 78307 - DNA, 26 bp, Homo sapiens
cctgctcactggaattattattcata

SEQ ID NO: 78308 - DNA, 26 bp, Homo sapiens
ctgctcactggaattattattcataa

SEQ ID NO: 78309 - DNA, 26 bp, Homo sapiens
tgctcactggaattattattcataag

SEQ ID NO: 78310 - DNA, 26 bp, Homo sapiens
gctcactggaattattattcataagt

SEQ ID NO: 78311 - DNA, 26 bp, Homo sapiens
ctcactggaattattattcataagtt

SEQ ID NO: 78312 - DNA, 26 bp, Homo sapiens
tcactggaattattattcataagttc

SEQ ID NO: 78313 - DNA, 26 bp, Homo sapiens
cactggaattattattcataagttca

SEQ ID NO: 78314 - DNA, 26 bp, Homo sapiens
actggaattattattcataagttcac

SEQ ID NO: 78315 - DNA, 26 bp, Homo sapiens
ctggaattattattcataagttcact

SEQ ID NO: 78316 - DNA, 26 bp, Homo sapiens
tggaattattattcataagttcacta

SEQ ID NO: 78317 - DNA, 26 bp, Homo sapiens
ggaattattattcataagttcactat

SEQ ID NO: 78318 - DNA, 26 bp, Homo sapiens
gaattattattcataagttcactatt

SEQ ID NO: 78319 - DNA, 26 bp, Homo sapiens
aattattattcataagttcactattt

SEQ ID NO: 78320 - DNA, 26 bp, Homo sapiens
attattattcataagttcactatttt

SEQ ID NO: 78321 - DNA, 26 bp, Homo sapiens
ttattattcataagttcactattttc

SEQ ID NO: 78322 - DNA, 26 bp, Homo sapiens
tattattcataagttcactattttcc

SEQ ID NO: 78323 - DNA, 26 bp, Homo sapiens
attattcataagttcactattttcct

SEQ ID NO: 78324 - DNA, 26 bp, Homo sapiens
ttattcataagttcactattttcctg

SEQ ID NO: 78325 - DNA, 26 bp, Homo sapiens
tattcataagttcactattttcctgt

SEQ ID NO: 78326 - DNA, 26 bp, Homo sapiens
attcataagttcactattttcctgta

SEQ ID NO: 78327 - DNA, 26 bp, Homo sapiens
ttcataagttcactattttcctgtag

SEQ ID NO: 78328 - DNA, 26 bp, Homo sapiens
tcataagttcactattttcctgtagc

SEQ ID NO: 78329 - DNA, 26 bp, Homo sapiens
cataagttcactattttcctgtagca

SEQ ID NO: 78330 - DNA, 26 bp, Homo sapiens
ataagttcactattttcctgtagcat

SEQ ID NO: 78331 - DNA, 26 bp, Homo sapiens
taagttcactattttcctgtagcatt

SEQ ID NO: 78332 - DNA, 26 bp, Homo sapiens
aagttcactattttcctgtagcattt

SEQ ID NO: 78333 - DNA, 26 bp, Homo sapiens
agttcactattttcctgtagcatttt

SEQ ID NO: 78334 - DNA, 26 bp, Homo sapiens
gttcactattttcctgtagcattttc

SEQ ID NO: 78335 - DNA, 26 bp, Homo sapiens
ttcactattttcctgtagcattttca

SEQ ID NO: 78336 - DNA, 26 bp, Homo sapiens
tcactattttcctgtagcattttcac

SEQ ID NO: 78337 - DNA, 26 bp, Homo sapiens
cactattttcctgtagcattttcaca

SEQ ID NO: 78338 - DNA, 26 bp, Homo sapiens
actattttcctgtagcattttcacaa

SEQ ID NO: 78339 - DNA, 26 bp, Homo sapiens
ctattttcctgtagcattttcacaac

SEQ ID NO: 78340 - DNA, 26 bp, Homo sapiens
tattttcctgtagcattttcacaaca

SEQ ID NO: 78341 - DNA, 26 bp, Homo sapiens
attttcctgtagcattttcacaacat

SEQ ID NO: 78342 - DNA, 26 bp, Homo sapiens
ttttcctgtagcattttcacaacatt

SEQ ID NO: 78343 - DNA, 26 bp, Homo sapiens
tttcctgtagcattttcacaacattg

SEQ ID NO: 78344 - DNA, 26 bp, Homo sapiens
ttcctgtagcattttcacaacattgc

SEQ ID NO: 78345 - DNA, 26 bp, Homo sapiens
tcctgtagcattttcacaacattgct

SEQ ID NO: 78346 - DNA, 26 bp, Homo sapiens
cctgtagcattttcacaacattgctg

SEQ ID NO: 78347 - DNA, 26 bp, Homo sapiens
ctgtagcattttcacaacattgctgt

SEQ ID NO: 78348 - DNA, 26 bp, Homo sapiens
tgtagcattttcacaacattgctgtt

SEQ ID NO: 78349 - DNA, 26 bp, Homo sapiens
gtagcattttcacaacattgctgttt

SEQ ID NO: 78350 - DNA, 26 bp, Homo sapiens
tagcattttcacaacattgctgtttt

SEQ ID NO: 78351 - DNA, 26 bp, Homo sapiens
agcattttcacaacattgctgttttt

SEQ ID NO: 78352 - DNA, 26 bp, Homo sapiens
gcattttcacaacattgctgtttttc

SEQ ID NO: 78353 - DNA, 26 bp, Homo sapiens
cattttcacaacattgctgtttttca

SEQ ID NO: 78354 - DNA, 26 bp, Homo sapiens
attttcacaacattgctgtttttcat

SEQ ID NO: 78355 - DNA, 26 bp, Homo sapiens
ttttcacaacattgctgtttttcata

SEQ ID NO: 78356 - DNA, 26 bp, Homo sapiens
tttcacaacattgctgtttttcatat

SEQ ID NO: 78357 - DNA, 26 bp, Homo sapiens
ttcacaacattgctgtttttcatatt

SEQ ID NO: 78358 - DNA, 26 bp, Homo sapiens
tcacaacattgctgtttttcatatta

SEQ ID NO: 78359 - DNA, 26 bp, Homo sapiens
cacaacattgctgtttttcatattag

SEQ ID NO: 78360 - DNA, 26 bp, Homo sapiens
acaacattgctgtttttcatattagg

SEQ ID NO: 78361 - DNA, 26 bp, Homo sapiens
caacattgctgtttttcatattagga

SEQ ID NO: 78362 - DNA, 26 bp, Homo sapiens
aacattgctgtttttcatattaggaa

SEQ ID NO: 78363 - DNA, 26 bp, Homo sapiens
acattgctgtttttcatattaggaat

SEQ ID NO: 78364 - DNA, 26 bp, Homo sapiens
cattgctgtttttcatattaggaata

SEQ ID NO: 78365 - DNA, 26 bp, Homo sapiens
attgctgtttttcatattaggaatat

SEQ ID NO: 78366 - DNA, 26 bp, Homo sapiens
ttgctgtttttcatattaggaatatc

SEQ ID NO: 78367 - DNA, 26 bp, Homo sapiens
tgctgtttttcatattaggaatatct

SEQ ID NO: 78368 - DNA, 26 bp, Homo sapiens
gctgtttttcatattaggaatatctt

SEQ ID NO: 78369 - DNA, 26 bp, Homo sapiens
ctgtttttcatattaggaatatcttc

SEQ ID NO: 78370 - DNA, 26 bp, Homo sapiens
tgtttttcatattaggaatatcttca

SEQ ID NO: 78371 - DNA, 26 bp, Homo sapiens
gtttttcatattaggaatatcttcat

SEQ ID NO: 78372 - DNA, 26 bp, Homo sapiens
tttttcatattaggaatatcttcata

SEQ ID NO: 78373 - DNA, 26 bp, Homo sapiens
ttttcatattaggaatatcttcataa

SEQ ID NO: 78374 - DNA, 26 bp, Homo sapiens
tttcatattaggaatatcttcataaa

SEQ ID NO: 78375 - DNA, 26 bp, Homo sapiens
ttcatattaggaatatcttcataaag

SEQ ID NO: 78376 - DNA, 26 bp, Homo sapiens
tcatattaggaatatcttcataaagc

SEQ ID NO: 78377 - DNA, 26 bp, Homo sapiens
catattaggaatatcttcataaagcc

SEQ ID NO: 78378 - DNA, 26 bp, Homo sapiens
atattaggaatatcttcataaagcca

SEQ ID NO: 78379 - DNA, 26 bp, Homo sapiens
tattaggaatatcttcataaagccac

SEQ ID NO: 78380 - DNA, 26 bp, Homo sapiens
attaggaatatcttcataaagccact

SEQ ID NO: 78381 - DNA, 26 bp, Homo sapiens
ttaggaatatcttcataaagccactt

SEQ ID NO: 78382 - DNA, 26 bp, Homo sapiens
taggaatatcttcataaagccacttt

SEQ ID NO: 78383 - DNA, 26 bp, Homo sapiens
aggaatatcttcataaagccactttg

SEQ ID NO: 78384 - DNA, 26 bp, Homo sapiens
ggaatatcttcataaagccactttgg

SEQ ID NO: 78385 - DNA, 26 bp, Homo sapiens
gaatatcttcataaagccactttggt

SEQ ID NO: 78386 - DNA, 26 bp, Homo sapiens
aatatcttcataaagccactttggta

SEQ ID NO: 78387 - DNA, 26 bp, Homo sapiens
atatcttcataaagccactttggtat

SEQ ID NO: 78388 - DNA, 26 bp, Homo sapiens
tatcttcataaagccactttggtatt

SEQ ID NO: 78389 - DNA, 26 bp, Homo sapiens
atcttcataaagccactttggtatta

SEQ ID NO: 78390 - DNA, 26 bp, Homo sapiens
tcttcataaagccactttggtattaa

SEQ ID NO: 78391 - DNA, 26 bp, Homo sapiens
cttcataaagccactttggtattaac

SEQ ID NO: 78392 - DNA, 26 bp, Homo sapiens
ttcataaagccactttggtattaaca

SEQ ID NO: 78393 - DNA, 26 bp, Homo sapiens
tcataaagccactttggtattaacaa

SEQ ID NO: 78394 - DNA, 26 bp, Homo sapiens
cataaagccactttggtattaacaat

SEQ ID NO: 78395 - DNA, 26 bp, Homo sapiens
ataaagccactttggtattaacaata

SEQ ID NO: 78396 - DNA, 26 bp, Homo sapiens
taaagccactttggtattaacaataa

SEQ ID NO: 78397 - DNA, 26 bp, Homo sapiens
aaagccactttggtattaacaataag

SEQ ID NO: 78398 - DNA, 26 bp, Homo sapiens
aagccactttggtattaacaataaga

SEQ ID NO: 78399 - DNA, 26 bp, Homo sapiens
agccactttggtattaacaataagat

SEQ ID NO: 78400 - DNA, 26 bp, Homo sapiens
gccactttggtattaacaataagatc

SEQ ID NO: 78401 - DNA, 26 bp, Homo sapiens
ccactttggtattaacaataagatcc

SEQ ID NO: 78402 - DNA, 26 bp, Homo sapiens
cactttggtattaacaataagatcct

SEQ ID NO: 78403 - DNA, 26 bp, Homo sapiens
actttggtattaacaataagatcctt

SEQ ID NO: 78404 - DNA, 26 bp, Homo sapiens
ctttggtattaacaataagatccttc

SEQ ID NO: 78405 - DNA, 26 bp, Homo sapiens
tttggtattaacaataagatccttct

SEQ ID NO: 78406 - DNA, 26 bp, Homo sapiens
ttggtattaacaataagatccttctt

SEQ ID NO: 78407 - DNA, 26 bp, Homo sapiens
tggtattaacaataagatccttcttt

SEQ ID NO: 78408 - DNA, 26 bp, Homo sapiens
ggtattaacaataagatccttctttt

SEQ ID NO: 78409 - DNA, 26 bp, Homo sapiens
gtattaacaataagatccttctttta

SEQ ID NO: 78410 - DNA, 26 bp, Homo sapiens
tattaacaataagatccttcttttaa

SEQ ID NO: 78411 - DNA, 26 bp, Homo sapiens
attaacaataagatccttcttttaat

SEQ ID NO: 78412 - DNA, 26 bp, Homo sapiens
ttaacaataagatccttcttttaatc

SEQ ID NO: 78413 - DNA, 26 bp, Homo sapiens
taacaataagatccttcttttaatcc

SEQ ID NO: 78414 - DNA, 26 bp, Homo sapiens
aacaataagatccttcttttaatccc

SEQ ID NO: 78415 - DNA, 26 bp, Homo sapiens
acaataagatccttcttttaatccca

SEQ ID NO: 78416 - DNA, 26 bp, Homo sapiens
caataagatccttcttttaatcccag

SEQ ID NO: 78417 - DNA, 26 bp, Homo sapiens
aataagatccttcttttaatcccagt

SEQ ID NO: 78418 - DNA, 26 bp, Homo sapiens
ataagatccttcttttaatcccagtt

SEQ ID NO: 78419 - DNA, 26 bp, Homo sapiens
taagatccttcttttaatcccagttc

SEQ ID NO: 78420 - DNA, 26 bp, Homo sapiens
aagatccttcttttaatcccagttcg

SEQ ID NO: 78421 - DNA, 26 bp, Homo sapiens
agatccttcttttaatcccagttcgg

SEQ ID NO: 78422 - DNA, 26 bp, Homo sapiens
gatccttcttttaatcccagttcgga

SEQ ID NO: 78423 - DNA, 26 bp, Homo sapiens
atccttcttttaatcccagttcggaa

SEQ ID NO: 78424 - DNA, 26 bp, Homo sapiens
tccttcttttaatcccagttcggaat

SEQ ID NO: 78425 - DNA, 26 bp, Homo sapiens
ccttcttttaatcccagttcggaatg

SEQ ID NO: 78426 - DNA, 26 bp, Homo sapiens
cttcttttaatcccagttcggaatga

SEQ ID NO: 78427 - DNA, 26 bp, Homo sapiens
ttcttttaatcccagttcggaatgat

SEQ ID NO: 78428 - DNA, 26 bp, Homo sapiens
tcttttaatcccagttcggaatgatc

SEQ ID NO: 78429 - DNA, 26 bp, Homo sapiens
cttttaatcccagttcggaatgatct

SEQ ID NO: 78430 - DNA, 26 bp, Homo sapiens
ttttaatcccagttcggaatgatctg

SEQ ID NO: 78431 - DNA, 26 bp, Homo sapiens
tttaatcccagttcggaatgatctgt

SEQ ID NO: 78432 - DNA, 26 bp, Homo sapiens
ttaatcccagttcggaatgatctgtt

SEQ ID NO: 78433 - DNA, 26 bp, Homo sapiens
taatcccagttcggaatgatctgtta

SEQ ID NO: 78434 - DNA, 26 bp, Homo sapiens
aatcccagttcggaatgatctgttaa

SEQ ID NO: 78435 - DNA, 26 bp, Homo sapiens
atcccagttcggaatgatctgttaaa

SEQ ID NO: 78436 - DNA, 26 bp, Homo sapiens
tcccagttcggaatgatctgttaaat

SEQ ID NO: 78437 - DNA, 26 bp, Homo sapiens
cccagttcggaatgatctgttaaata

SEQ ID NO: 78438 - DNA, 26 bp, Homo sapiens
ccagttcggaatgatctgttaaatat

SEQ ID NO: 78439 - DNA, 26 bp, Homo sapiens
cagttcggaatgatctgttaaatatc

SEQ ID NO: 78440 - DNA, 26 bp, Homo sapiens
agttcggaatgatctgttaaatatcc

SEQ ID NO: 78441 - DNA, 26 bp, Homo sapiens
gttcggaatgatctgttaaatatccc

SEQ ID NO: 78442 - DNA, 26 bp, Homo sapiens
ttcggaatgatctgttaaatatccca

SEQ ID NO: 78443 - DNA, 26 bp, Homo sapiens
tcggaatgatctgttaaatatcccaa

SEQ ID NO: 78444 - DNA, 26 bp, Homo sapiens
cggaatgatctgttaaatatcccaat

SEQ ID NO: 78445 - DNA, 26 bp, Homo sapiens
ggaatgatctgttaaatatcccaatc

SEQ ID NO: 78446 - DNA, 26 bp, Homo sapiens
gaatgatctgttaaatatcccaatca

SEQ ID NO: 78447 - DNA, 26 bp, Homo sapiens
aatgatctgttaaatatcccaatcaa

SEQ ID NO: 78448 - DNA, 26 bp, Homo sapiens
atgatctgttaaatatcccaatcaaa

SEQ ID NO: 78449 - DNA, 26 bp, Homo sapiens
tgatctgttaaatatcccaatcaaag

SEQ ID NO: 78450 - DNA, 26 bp, Homo sapiens
gatctgttaaatatcccaatcaaaga

SEQ ID NO: 78451 - DNA, 26 bp, Homo sapiens
atctgttaaatatcccaatcaaagaa

SEQ ID NO: 78452 - DNA, 26 bp, Homo sapiens
tctgttaaatatcccaatcaaagaaa

SEQ ID NO: 78453 - DNA, 26 bp, Homo sapiens
ctgttaaatatcccaatcaaagaaag

SEQ ID NO: 78454 - DNA, 26 bp, Homo sapiens
tgttaaatatcccaatcaaagaaaga

SEQ ID NO: 78455 - DNA, 26 bp, Homo sapiens
gttaaatatcccaatcaaagaaagaa

SEQ ID NO: 78456 - DNA, 26 bp, Homo sapiens
ttaaatatcccaatcaaagaaagaat

SEQ ID NO: 78457 - DNA, 26 bp, Homo sapiens
taaatatcccaatcaaagaaagaatt

SEQ ID NO: 78458 - DNA, 26 bp, Homo sapiens
aaatatcccaatcaaagaaagaattg

SEQ ID NO: 78459 - DNA, 26 bp, Homo sapiens
aatatcccaatcaaagaaagaattga

SEQ ID NO: 78460 - DNA, 26 bp, Homo sapiens
atatcccaatcaaagaaagaattgac

SEQ ID NO: 78461 - DNA, 26 bp, Homo sapiens
tatcccaatcaaagaaagaattgaca

SEQ ID NO: 78462 - DNA, 26 bp, Homo sapiens
atcccaatcaaagaaagaattgacaa

SEQ ID NO: 78463 - DNA, 26 bp, Homo sapiens
tcccaatcaaagaaagaattgacaac

SEQ ID NO: 78464 - DNA, 26 bp, Homo sapiens
cccaatcaaagaaagaattgacaaca

SEQ ID NO: 78465 - DNA, 26 bp, Homo sapiens
ccaatcaaagaaagaattgacaacat

SEQ ID NO: 78466 - DNA, 26 bp, Homo sapiens
caatcaaagaaagaattgacaacata

SEQ ID NO: 78467 - DNA, 26 bp, Homo sapiens
aatcaaagaaagaattgacaacataa

SEQ ID NO: 78468 - DNA, 26 bp, Homo sapiens
atcaaagaaagaattgacaacataac

SEQ ID NO: 78469 - DNA, 26 bp, Homo sapiens
tcaaagaaagaattgacaacataaca

SEQ ID NO: 78470 - DNA, 26 bp, Homo sapiens
caaagaaagaattgacaacataacag

SEQ ID NO: 78471 - DNA, 26 bp, Homo sapiens
aaagaaagaattgacaacataacagc

SEQ ID NO: 78472 - DNA, 26 bp, Homo sapiens
aagaaagaattgacaacataacagca

SEQ ID NO: 78473 - DNA, 26 bp, Homo sapiens
agaaagaattgacaacataacagcaa

SEQ ID NO: 78474 - DNA, 26 bp, Homo sapiens
gaaagaattgacaacataacagcaaa

SEQ ID NO: 78475 - DNA, 26 bp, Homo sapiens
aaagaattgacaacataacagcaaag

SEQ ID NO: 78476 - DNA, 26 bp, Homo sapiens
aagaattgacaacataacagcaaaga

SEQ ID NO: 78477 - DNA, 26 bp, Homo sapiens
agaattgacaacataacagcaaagac

SEQ ID NO: 78478 - DNA, 26 bp, Homo sapiens
gaattgacaacataacagcaaagacg

SEQ ID NO: 78479 - DNA, 26 bp, Homo sapiens
aattgacaacataacagcaaagacga

SEQ ID NO: 78480 - DNA, 26 bp, Homo sapiens
attgacaacataacagcaaagacgat

SEQ ID NO: 78481 - DNA, 26 bp, Homo sapiens
ttgacaacataacagcaaagacgatc

SEQ ID NO: 78482 - DNA, 26 bp, Homo sapiens
tgacaacataacagcaaagacgatca

SEQ ID NO: 78483 - DNA, 26 bp, Homo sapiens
gacaacataacagcaaagacgatcat

SEQ ID NO: 78484 - DNA, 26 bp, Homo sapiens
acaacataacagcaaagacgatcatt

SEQ ID NO: 78485 - DNA, 26 bp, Homo sapiens
caacataacagcaaagacgatcattc

SEQ ID NO: 78486 - DNA, 26 bp, Homo sapiens
aacataacagcaaagacgatcattcc

SEQ ID NO: 78487 - DNA, 26 bp, Homo sapiens
acataacagcaaagacgatcattccc

SEQ ID NO: 78488 - DNA, 26 bp, Homo sapiens
cataacagcaaagacgatcattccca

SEQ ID NO: 78489 - DNA, 26 bp, Homo sapiens
ataacagcaaagacgatcattcccaa

SEQ ID NO: 78490 - DNA, 26 bp, Homo sapiens
taacagcaaagacgatcattcccaat

SEQ ID NO: 78491 - DNA, 26 bp, Homo sapiens
aacagcaaagacgatcattcccaata

SEQ ID NO: 78492 - DNA, 26 bp, Homo sapiens
acagcaaagacgatcattcccaataa

SEQ ID NO: 78493 - DNA, 26 bp, Homo sapiens
cagcaaagacgatcattcccaataaa

SEQ ID NO: 78494 - DNA, 26 bp, Homo sapiens
agcaaagacgatcattcccaataaaa

SEQ ID NO: 78495 - DNA, 26 bp, Homo sapiens
gcaaagacgatcattcccaataaaag

SEQ ID NO: 78496 - DNA, 26 bp, Homo sapiens
caaagacgatcattcccaataaaagt

SEQ ID NO: 78497 - DNA, 26 bp, Homo sapiens
aaagacgatcattcccaataaaagtc

SEQ ID NO: 78498 - DNA, 26 bp, Homo sapiens
aagacgatcattcccaataaaagtcc

SEQ ID NO: 78499 - DNA, 26 bp, Homo sapiens
agacgatcattcccaataaaagtcca

SEQ ID NO: 78500 - DNA, 26 bp, Homo sapiens
gacgatcattcccaataaaagtccaa

SEQ ID NO: 78501 - DNA, 26 bp, Homo sapiens
acgatcattcccaataaaagtccaat

SEQ ID NO: 78502 - DNA, 26 bp, Homo sapiens
cgatcattcccaataaaagtccaatg

SEQ ID NO: 78503 - DNA, 26 bp, Homo sapiens
gatcattcccaataaaagtccaatgt

SEQ ID NO: 78504 - DNA, 26 bp, Homo sapiens
atcattcccaataaaagtccaatgtc

SEQ ID NO: 78505 - DNA, 26 bp, Homo sapiens
tcattcccaataaaagtccaatgtct

SEQ ID NO: 78506 - DNA, 26 bp, Homo sapiens
cattcccaataaaagtccaatgtctc

SEQ ID NO: 78507 - DNA, 26 bp, Homo sapiens
attcccaataaaagtccaatgtctcc

SEQ ID NO: 78508 - DNA, 26 bp, Homo sapiens
ttcccaataaaagtccaatgtctcct

SEQ ID NO: 78509 - DNA, 26 bp, Homo sapiens
tcccaataaaagtccaatgtctcctc

SEQ ID NO: 78510 - DNA, 26 bp, Homo sapiens
cccaataaaagtccaatgtctcctct

SEQ ID NO: 78511 - DNA, 26 bp, Homo sapiens
ccaataaaagtccaatgtctcctctg

SEQ ID NO: 78512 - DNA, 26 bp, Homo sapiens
caataaaagtccaatgtctcctctgt

SEQ ID NO: 78513 - DNA, 26 bp, Homo sapiens
aataaaagtccaatgtctcctctgtt

SEQ ID NO: 78514 - DNA, 26 bp, Homo sapiens
ataaaagtccaatgtctcctctgttg

SEQ ID NO: 78515 - DNA, 26 bp, Homo sapiens
taaaagtccaatgtctcctctgttgt

SEQ ID NO: 78516 - DNA, 26 bp, Homo sapiens
aaaagtccaatgtctcctctgttgtc

SEQ ID NO: 78517 - DNA, 26 bp, Homo sapiens
aaagtccaatgtctcctctgttgtca

SEQ ID NO: 78518 - DNA, 26 bp, Homo sapiens
aagtccaatgtctcctctgttgtcag

SEQ ID NO: 78519 - DNA, 26 bp, Homo sapiens
agtccaatgtctcctctgttgtcaga

SEQ ID NO: 78520 - DNA, 26 bp, Homo sapiens
gtccaatgtctcctctgttgtcagaa

SEQ ID NO: 78521 - DNA, 26 bp, Homo sapiens
tccaatgtctcctctgttgtcagaag

SEQ ID NO: 78522 - DNA, 26 bp, Homo sapiens
ccaatgtctcctctgttgtcagaagt

SEQ ID NO: 78523 - DNA, 26 bp, Homo sapiens
caatgtctcctctgttgtcagaagta

SEQ ID NO: 78524 - DNA, 26 bp, Homo sapiens
aatgtctcctctgttgtcagaagtaa

SEQ ID NO: 78525 - DNA, 26 bp, Homo sapiens
atgtctcctctgttgtcagaagtaag

SEQ ID NO: 78526 - DNA, 26 bp, Homo sapiens
tgtctcctctgttgtcagaagtaagg

SEQ ID NO: 78527 - DNA, 26 bp, Homo sapiens
gtctcctctgttgtcagaagtaaggt

SEQ ID NO: 78528 - DNA, 26 bp, Homo sapiens
tctcctctgttgtcagaagtaaggtg

SEQ ID NO: 78529 - DNA, 26 bp, Homo sapiens
ctcctctgttgtcagaagtaaggtgc

SEQ ID NO: 78530 - DNA, 26 bp, Homo sapiens
tcctctgttgtcagaagtaaggtgcc

SEQ ID NO: 78531 - DNA, 26 bp, Homo sapiens
cctctgttgtcagaagtaaggtgccc

SEQ ID NO: 78532 - DNA, 26 bp, Homo sapiens
ctctgttgtcagaagtaaggtgccct

SEQ ID NO: 78533 - DNA, 26 bp, Homo sapiens
tctgttgtcagaagtaaggtgccctg

SEQ ID NO: 78534 - DNA, 26 bp, Homo sapiens
ctgttgtcagaagtaaggtgccctgt

SEQ ID NO: 78535 - DNA, 26 bp, Homo sapiens
tgttgtcagaagtaaggtgccctgta

SEQ ID NO: 78536 - DNA, 26 bp, Homo sapiens
gttgtcagaagtaaggtgccctgtag

SEQ ID NO: 78537 - DNA, 26 bp, Homo sapiens
ttgtcagaagtaaggtgccctgtaga

SEQ ID NO: 78538 - DNA, 26 bp, Homo sapiens
tgtcagaagtaaggtgccctgtagag

SEQ ID NO: 78539 - DNA, 26 bp, Homo sapiens
gtcagaagtaaggtgccctgtagaga

SEQ ID NO: 78540 - DNA, 26 bp, Homo sapiens
tcagaagtaaggtgccctgtagagat

SEQ ID NO: 78541 - DNA, 26 bp, Homo sapiens
cagaagtaaggtgccctgtagagatg

SEQ ID NO: 78542 - DNA, 26 bp, Homo sapiens
agaagtaaggtgccctgtagagatgg

SEQ ID NO: 78543 - DNA, 26 bp, Homo sapiens
gaagtaaggtgccctgtagagatgga

SEQ ID NO: 78544 - DNA, 26 bp, Homo sapiens
aagtaaggtgccctgtagagatggaa

SEQ ID NO: 78545 - DNA, 26 bp, Homo sapiens
agtaaggtgccctgtagagatggaag

SEQ ID NO: 78546 - DNA, 26 bp, Homo sapiens
gtaaggtgccctgtagagatggaagc

SEQ ID NO: 78547 - DNA, 26 bp, Homo sapiens
taaggtgccctgtagagatggaagca

SEQ ID NO: 78548 - DNA, 26 bp, Homo sapiens
aaggtgccctgtagagatggaagcaa

SEQ ID NO: 78549 - DNA, 26 bp, Homo sapiens
aggtgccctgtagagatggaagcaac

SEQ ID NO: 78550 - DNA, 26 bp, Homo sapiens
ggtgccctgtagagatggaagcaact

SEQ ID NO: 78551 - DNA, 26 bp, Homo sapiens
gtgccctgtagagatggaagcaactg

SEQ ID NO: 78552 - DNA, 26 bp, Homo sapiens
tgccctgtagagatggaagcaactgt

SEQ ID NO: 78553 - DNA, 26 bp, Homo sapiens
gccctgtagagatggaagcaactgtt

SEQ ID NO: 78554 - DNA, 26 bp, Homo sapiens
ccctgtagagatggaagcaactgtta

SEQ ID NO: 78555 - DNA, 26 bp, Homo sapiens
cctgtagagatggaagcaactgttag

SEQ ID NO: 78556 - DNA, 26 bp, Homo sapiens
ctgtagagatggaagcaactgttagc

SEQ ID NO: 78557 - DNA, 26 bp, Homo sapiens
tgtagagatggaagcaactgttagcc

SEQ ID NO: 78558 - DNA, 26 bp, Homo sapiens
gtagagatggaagcaactgttagccc

SEQ ID NO: 78559 - DNA, 26 bp, Homo sapiens
tagagatggaagcaactgttagccca

SEQ ID NO: 78560 - DNA, 26 bp, Homo sapiens
agagatggaagcaactgttagcccag

SEQ ID NO: 78561 - DNA, 26 bp, Homo sapiens
gagatggaagcaactgttagcccaga

SEQ ID NO: 78562 - DNA, 26 bp, Homo sapiens
agatggaagcaactgttagcccagaa

SEQ ID NO: 78563 - DNA, 26 bp, Homo sapiens
gatggaagcaactgttagcccagaat

SEQ ID NO: 78564 - DNA, 26 bp, Homo sapiens
atggaagcaactgttagcccagaatt

SEQ ID NO: 78565 - DNA, 26 bp, Homo sapiens
tggaagcaactgttagcccagaattc

SEQ ID NO: 78566 - DNA, 26 bp, Homo sapiens
ggaagcaactgttagcccagaattcc

SEQ ID NO: 78567 - DNA, 26 bp, Homo sapiens
gaagcaactgttagcccagaattcca

SEQ ID NO: 78568 - DNA, 26 bp, Homo sapiens
aagcaactgttagcccagaattccat

SEQ ID NO: 78569 - DNA, 26 bp, Homo sapiens
agcaactgttagcccagaattccatg

SEQ ID NO: 78570 - DNA, 26 bp, Homo sapiens
gcaactgttagcccagaattccatgt

SEQ ID NO: 78571 - DNA, 26 bp, Homo sapiens
caactgttagcccagaattccatgtg

SEQ ID NO: 78572 - DNA, 26 bp, Homo sapiens
aactgttagcccagaattccatgtgt

SEQ ID NO: 78573 - DNA, 26 bp, Homo sapiens
actgttagcccagaattccatgtgtc

SEQ ID NO: 78574 - DNA, 26 bp, Homo sapiens
ctgttagcccagaattccatgtgtca

SEQ ID NO: 78575 - DNA, 26 bp, Homo sapiens
tgttagcccagaattccatgtgtcat

SEQ ID NO: 78576 - DNA, 26 bp, Homo sapiens
gttagcccagaattccatgtgtcatg

SEQ ID NO: 78577 - DNA, 26 bp, Homo sapiens
ttagcccagaattccatgtgtcatgt

SEQ ID NO: 78578 - DNA, 26 bp, Homo sapiens
tagcccagaattccatgtgtcatgtt

SEQ ID NO: 78579 - DNA, 26 bp, Homo sapiens
agcccagaattccatgtgtcatgttg

SEQ ID NO: 78580 - DNA, 26 bp, Homo sapiens
gcccagaattccatgtgtcatgttgg

SEQ ID NO: 78581 - DNA, 26 bp, Homo sapiens
cccagaattccatgtgtcatgttgga

SEQ ID NO: 78582 - DNA, 26 bp, Homo sapiens
ccagaattccatgtgtcatgttggaa

SEQ ID NO: 78583 - DNA, 26 bp, Homo sapiens
cagaattccatgtgtcatgttggaat

SEQ ID NO: 78584 - DNA, 26 bp, Homo sapiens
agaattccatgtgtcatgttggaatg

SEQ ID NO: 78585 - DNA, 26 bp, Homo sapiens
gaattccatgtgtcatgttggaatgc

SEQ ID NO: 78586 - DNA, 26 bp, Homo sapiens
aattccatgtgtcatgttggaatgct

SEQ ID NO: 78587 - DNA, 26 bp, Homo sapiens
attccatgtgtcatgttggaatgctt

SEQ ID NO: 78588 - DNA, 26 bp, Homo sapiens
ttccatgtgtcatgttggaatgcttt

SEQ ID NO: 78589 - DNA, 26 bp, Homo sapiens
tccatgtgtcatgttggaatgctttt

SEQ ID NO: 78590 - DNA, 26 bp, Homo sapiens
ccatgtgtcatgttggaatgcttttg

SEQ ID NO: 78591 - DNA, 26 bp, Homo sapiens
catgtgtcatgttggaatgcttttga

SEQ ID NO: 78592 - DNA, 26 bp, Homo sapiens
atgtgtcatgttggaatgcttttgat

SEQ ID NO: 78593 - DNA, 26 bp, Homo sapiens
tgtgtcatgttggaatgcttttgatg

SEQ ID NO: 78594 - DNA, 26 bp, Homo sapiens
gtgtcatgttggaatgcttttgatgt

SEQ ID NO: 78595 - DNA, 26 bp, Homo sapiens
tgtcatgttggaatgcttttgatgtg

SEQ ID NO: 78596 - DNA, 26 bp, Homo sapiens
gtcatgttggaatgcttttgatgtga

SEQ ID NO: 78597 - DNA, 26 bp, Homo sapiens
tcatgttggaatgcttttgatgtgac

SEQ ID NO: 78598 - DNA, 26 bp, Homo sapiens
catgttggaatgcttttgatgtgacc

SEQ ID NO: 78599 - DNA, 26 bp, Homo sapiens
atgttggaatgcttttgatgtgacct

SEQ ID NO: 78600 - DNA, 26 bp, Homo sapiens
tgttggaatgcttttgatgtgacctg

SEQ ID NO: 78601 - DNA, 26 bp, Homo sapiens
gttggaatgcttttgatgtgacctgg

SEQ ID NO: 78602 - DNA, 26 bp, Homo sapiens
ttggaatgcttttgatgtgacctggg

SEQ ID NO: 78603 - DNA, 26 bp, Homo sapiens
tggaatgcttttgatgtgacctgggg

SEQ ID NO: 78604 - DNA, 26 bp, Homo sapiens
ggaatgcttttgatgtgacctgggga

SEQ ID NO: 78605 - DNA, 26 bp, Homo sapiens
gaatgcttttgatgtgacctggggaa

SEQ ID NO: 78606 - DNA, 26 bp, Homo sapiens
aatgcttttgatgtgacctggggaac

SEQ ID NO: 78607 - DNA, 26 bp, Homo sapiens
atgcttttgatgtgacctggggaact

SEQ ID NO: 78608 - DNA, 26 bp, Homo sapiens
tgcttttgatgtgacctggggaactg

SEQ ID NO: 78609 - DNA, 26 bp, Homo sapiens
gcttttgatgtgacctggggaactgt

SEQ ID NO: 78610 - DNA, 26 bp, Homo sapiens
cttttgatgtgacctggggaactgtt

SEQ ID NO: 78611 - DNA, 26 bp, Homo sapiens
ttttgatgtgacctggggaactgttt

SEQ ID NO: 78612 - DNA, 26 bp, Homo sapiens
tttgatgtgacctggggaactgtttc

SEQ ID NO: 78613 - DNA, 26 bp, Homo sapiens
ttgatgtgacctggggaactgtttca

SEQ ID NO: 78614 - DNA, 26 bp, Homo sapiens
tgatgtgacctggggaactgtttcag

SEQ ID NO: 78615 - DNA, 26 bp, Homo sapiens
gatgtgacctggggaactgtttcagg

SEQ ID NO: 78616 - DNA, 26 bp, Homo sapiens
atgtgacctggggaactgtttcaggt

SEQ ID NO: 78617 - DNA, 26 bp, Homo sapiens
tgtgacctggggaactgtttcaggtg

SEQ ID NO: 78618 - DNA, 26 bp, Homo sapiens
gtgacctggggaactgtttcaggtgt

SEQ ID NO: 78619 - DNA, 26 bp, Homo sapiens
tgacctggggaactgtttcaggtgtt

SEQ ID NO: 78620 - DNA, 26 bp, Homo sapiens
gacctggggaactgtttcaggtgttt

SEQ ID NO: 78621 - DNA, 26 bp, Homo sapiens
acctggggaactgtttcaggtgtttt

SEQ ID NO: 78622 - DNA, 26 bp, Homo sapiens
cctggggaactgtttcaggtgtttta

SEQ ID NO: 78623 - DNA, 26 bp, Homo sapiens
ctggggaactgtttcaggtgttttat

SEQ ID NO: 78624 - DNA, 26 bp, Homo sapiens
tggggaactgtttcaggtgttttatg

SEQ ID NO: 78625 - DNA, 26 bp, Homo sapiens
ggggaactgtttcaggtgttttatga

SEQ ID NO: 78626 - DNA, 26 bp, Homo sapiens
gggaactgtttcaggtgttttatgaa

SEQ ID NO: 78627 - DNA, 26 bp, Homo sapiens
ggaactgtttcaggtgttttatgaaa

SEQ ID NO: 78628 - DNA, 26 bp, Homo sapiens
gaactgtttcaggtgttttatgaaaa

SEQ ID NO: 78629 - DNA, 26 bp, Homo sapiens
aactgtttcaggtgttttatgaaaaa

SEQ ID NO: 78630 - DNA, 26 bp, Homo sapiens
actgtttcaggtgttttatgaaaaaa

SEQ ID NO: 78631 - DNA, 26 bp, Homo sapiens
ctgtttcaggtgttttatgaaaaaac

SEQ ID NO: 78632 - DNA, 26 bp, Homo sapiens
tgtttcaggtgttttatgaaaaaaca

SEQ ID NO: 78633 - DNA, 26 bp, Homo sapiens
gtttcaggtgttttatgaaaaaacag

SEQ ID NO: 78634 - DNA, 26 bp, Homo sapiens
tttcaggtgttttatgaaaaaacagt

SEQ ID NO: 78635 - DNA, 26 bp, Homo sapiens
ttcaggtgttttatgaaaaaacagtg

SEQ ID NO: 78636 - DNA, 26 bp, Homo sapiens
tcaggtgttttatgaaaaaacagtga

SEQ ID NO: 78637 - DNA, 26 bp, Homo sapiens
caggtgttttatgaaaaaacagtgaa

SEQ ID NO: 78638 - DNA, 26 bp, Homo sapiens
aggtgttttatgaaaaaacagtgaac

SEQ ID NO: 78639 - DNA, 26 bp, Homo sapiens
ggtgttttatgaaaaaacagtgaact

SEQ ID NO: 78640 - DNA, 26 bp, Homo sapiens
gtgttttatgaaaaaacagtgaactc

SEQ ID NO: 78641 - DNA, 26 bp, Homo sapiens
tgttttatgaaaaaacagtgaactcc

SEQ ID NO: 78642 - DNA, 26 bp, Homo sapiens
gttttatgaaaaaacagtgaactcca

SEQ ID NO: 78643 - DNA, 26 bp, Homo sapiens
ttttatgaaaaaacagtgaactccaa

SEQ ID NO: 78644 - DNA, 26 bp, Homo sapiens
tttatgaaaaaacagtgaactccaag

SEQ ID NO: 78645 - DNA, 26 bp, Homo sapiens
ttatgaaaaaacagtgaactccaagg

SEQ ID NO: 78646 - DNA, 26 bp, Homo sapiens
tatgaaaaaacagtgaactccaaggc

SEQ ID NO: 78647 - DNA, 26 bp, Homo sapiens
atgaaaaaacagtgaactccaaggct

SEQ ID NO: 78648 - DNA, 26 bp, Homo sapiens
tgaaaaaacagtgaactccaaggctg

SEQ ID NO: 78649 - DNA, 26 bp, Homo sapiens
gaaaaaacagtgaactccaaggctgc

SEQ ID NO: 78650 - DNA, 26 bp, Homo sapiens
aaaaaacagtgaactccaaggctgcc

SEQ ID NO: 78651 - DNA, 26 bp, Homo sapiens
aaaaacagtgaactccaaggctgcca

SEQ ID NO: 78652 - DNA, 26 bp, Homo sapiens
aaaacagtgaactccaaggctgccag

SEQ ID NO: 78653 - DNA, 26 bp, Homo sapiens
aaacagtgaactccaaggctgccagt

SEQ ID NO: 78654 - DNA, 26 bp, Homo sapiens
aacagtgaactccaaggctgccagta

SEQ ID NO: 78655 - DNA, 26 bp, Homo sapiens
acagtgaactccaaggctgccagtac

SEQ ID NO: 78656 - DNA, 26 bp, Homo sapiens
cagtgaactccaaggctgccagtacc

SEQ ID NO: 78657 - DNA, 26 bp, Homo sapiens
agtgaactccaaggctgccagtacct

SEQ ID NO: 78658 - DNA, 26 bp, Homo sapiens
gtgaactccaaggctgccagtacctt

SEQ ID NO: 78659 - DNA, 26 bp, Homo sapiens
tgaactccaaggctgccagtaccttt

SEQ ID NO: 78660 - DNA, 26 bp, Homo sapiens
gaactccaaggctgccagtacctttt

SEQ ID NO: 78661 - DNA, 26 bp, Homo sapiens
aactccaaggctgccagtaccttttg

SEQ ID NO: 78662 - DNA, 26 bp, Homo sapiens
actccaaggctgccagtaccttttgc

SEQ ID NO: 78663 - DNA, 26 bp, Homo sapiens
ctccaaggctgccagtaccttttgcc

SEQ ID NO: 78664 - DNA, 26 bp, Homo sapiens
tccaaggctgccagtaccttttgcct

SEQ ID NO: 78665 - DNA, 26 bp, Homo sapiens
ccaaggctgccagtaccttttgcctg

SEQ ID NO: 78666 - DNA, 26 bp, Homo sapiens
caaggctgccagtaccttttgcctgt

SEQ ID NO: 78667 - DNA, 26 bp, Homo sapiens
aaggctgccagtaccttttgcctgtt

SEQ ID NO: 78668 - DNA, 26 bp, Homo sapiens
aggctgccagtaccttttgcctgttt

SEQ ID NO: 78669 - DNA, 26 bp, Homo sapiens
ggctgccagtaccttttgcctgtttc

SEQ ID NO: 78670 - DNA, 26 bp, Homo sapiens
gctgccagtaccttttgcctgtttct

SEQ ID NO: 78671 - DNA, 26 bp, Homo sapiens
ctgccagtaccttttgcctgtttctt

SEQ ID NO: 78672 - DNA, 26 bp, Homo sapiens
tgccagtaccttttgcctgtttcttg

SEQ ID NO: 78673 - DNA, 26 bp, Homo sapiens
gccagtaccttttgcctgtttcttga

SEQ ID NO: 78674 - DNA, 26 bp, Homo sapiens
ccagtaccttttgcctgtttcttgac

SEQ ID NO: 78675 - DNA, 26 bp, Homo sapiens
cagtaccttttgcctgtttcttgaca

SEQ ID NO: 78676 - DNA, 26 bp, Homo sapiens
agtaccttttgcctgtttcttgacat

SEQ ID NO: 78677 - DNA, 26 bp, Homo sapiens
gtaccttttgcctgtttcttgacatc

SEQ ID NO: 78678 - DNA, 26 bp, Homo sapiens
taccttttgcctgtttcttgacatct

SEQ ID NO: 78679 - DNA, 26 bp, Homo sapiens
accttttgcctgtttcttgacatctc

SEQ ID NO: 78680 - DNA, 26 bp, Homo sapiens
ccttttgcctgtttcttgacatctca

SEQ ID NO: 78681 - DNA, 26 bp, Homo sapiens
cttttgcctgtttcttgacatctcac

SEQ ID NO: 78682 - DNA, 26 bp, Homo sapiens
ttttgcctgtttcttgacatctcact

SEQ ID NO: 78683 - DNA, 26 bp, Homo sapiens
tttgcctgtttcttgacatctcactt

SEQ ID NO: 78684 - DNA, 26 bp, Homo sapiens
ttgcctgtttcttgacatctcacttg

SEQ ID NO: 78685 - DNA, 26 bp, Homo sapiens
tgcctgtttcttgacatctcacttga

SEQ ID NO: 78686 - DNA, 26 bp, Homo sapiens
gcctgtttcttgacatctcacttgaa

SEQ ID NO: 78687 - DNA, 26 bp, Homo sapiens
cctgtttcttgacatctcacttgaaa

SEQ ID NO: 78688 - DNA, 26 bp, Homo sapiens
ctgtttcttgacatctcacttgaaat

SEQ ID NO: 78689 - DNA, 26 bp, Homo sapiens
tgtttcttgacatctcacttgaaata

SEQ ID NO: 78690 - DNA, 26 bp, Homo sapiens
gtttcttgacatctcacttgaaatac

SEQ ID NO: 78691 - DNA, 26 bp, Homo sapiens
tttcttgacatctcacttgaaatacg

SEQ ID NO: 78692 - DNA, 26 bp, Homo sapiens
ttcttgacatctcacttgaaatacgt

SEQ ID NO: 78693 - DNA, 26 bp, Homo sapiens
tcttgacatctcacttgaaatacgta

SEQ ID NO: 78694 - DNA, 26 bp, Homo sapiens
cttgacatctcacttgaaatacgtac

SEQ ID NO: 78695 - DNA, 26 bp, Homo sapiens
ttgacatctcacttgaaatacgtact

SEQ ID NO: 78696 - DNA, 26 bp, Homo sapiens
tgacatctcacttgaaatacgtactt

SEQ ID NO: 78697 - DNA, 26 bp, Homo sapiens
gacatctcacttgaaatacgtactta

SEQ ID NO: 78698 - DNA, 26 bp, Homo sapiens
acatctcacttgaaatacgtacttaa

SEQ ID NO: 78699 - DNA, 26 bp, Homo sapiens
catctcacttgaaatacgtacttaat

SEQ ID NO: 78700 - DNA, 26 bp, Homo sapiens
atctcacttgaaatacgtacttaatg

SEQ ID NO: 78701 - DNA, 26 bp, Homo sapiens
tctcacttgaaatacgtacttaatgt

SEQ ID NO: 78702 - DNA, 26 bp, Homo sapiens
ctcacttgaaatacgtacttaatgtt

SEQ ID NO: 78703 - DNA, 26 bp, Homo sapiens
tcacttgaaatacgtacttaatgttt

SEQ ID NO: 78704 - DNA, 26 bp, Homo sapiens
cacttgaaatacgtacttaatgtttg

SEQ ID NO: 78705 - DNA, 26 bp, Homo sapiens
acttgaaatacgtacttaatgtttgg

SEQ ID NO: 78706 - DNA, 26 bp, Homo sapiens
cttgaaatacgtacttaatgtttggc

SEQ ID NO: 78707 - DNA, 26 bp, Homo sapiens
ttgaaatacgtacttaatgtttggct

SEQ ID NO: 78708 - DNA, 26 bp, Homo sapiens
tgaaatacgtacttaatgtttggctc

SEQ ID NO: 78709 - DNA, 26 bp, Homo sapiens
gaaatacgtacttaatgtttggctcc

SEQ ID NO: 78710 - DNA, 26 bp, Homo sapiens
aaatacgtacttaatgtttggctcca

SEQ ID NO: 78711 - DNA, 26 bp, Homo sapiens
aatacgtacttaatgtttggctccaa

SEQ ID NO: 78712 - DNA, 26 bp, Homo sapiens
atacgtacttaatgtttggctccaag

SEQ ID NO: 78713 - DNA, 26 bp, Homo sapiens
tacgtacttaatgtttggctccaagt

SEQ ID NO: 78714 - DNA, 26 bp, Homo sapiens
acgtacttaatgtttggctccaagta

SEQ ID NO: 78715 - DNA, 26 bp, Homo sapiens
cgtacttaatgtttggctccaagtag

SEQ ID NO: 78716 - DNA, 26 bp, Homo sapiens
gtacttaatgtttggctccaagtaga

SEQ ID NO: 78717 - DNA, 26 bp, Homo sapiens
tacttaatgtttggctccaagtagaa

SEQ ID NO: 78718 - DNA, 26 bp, Homo sapiens
acttaatgtttggctccaagtagaat

SEQ ID NO: 78719 - DNA, 26 bp, Homo sapiens
cttaatgtttggctccaagtagaatt

SEQ ID NO: 78720 - DNA, 26 bp, Homo sapiens
ttaatgtttggctccaagtagaattc

SEQ ID NO: 78721 - DNA, 26 bp, Homo sapiens
taatgtttggctccaagtagaattct

SEQ ID NO: 78722 - DNA, 26 bp, Homo sapiens
aatgtttggctccaagtagaattctg

SEQ ID NO: 78723 - DNA, 26 bp, Homo sapiens
atgtttggctccaagtagaattctga

SEQ ID NO: 78724 - DNA, 26 bp, Homo sapiens
tgtttggctccaagtagaattctgac

SEQ ID NO: 78725 - DNA, 26 bp, Homo sapiens
gtttggctccaagtagaattctgact

SEQ ID NO: 78726 - DNA, 26 bp, Homo sapiens
tttggctccaagtagaattctgactg

SEQ ID NO: 78727 - DNA, 26 bp, Homo sapiens
ttggctccaagtagaattctgactgt

SEQ ID NO: 78728 - DNA, 26 bp, Homo sapiens
tggctccaagtagaattctgactgtt

SEQ ID NO: 78729 - DNA, 26 bp, Homo sapiens
ggctccaagtagaattctgactgttg

SEQ ID NO: 78730 - DNA, 26 bp, Homo sapiens
gctccaagtagaattctgactgttgc

SEQ ID NO: 78731 - DNA, 26 bp, Homo sapiens
ctccaagtagaattctgactgttgca

SEQ ID NO: 78732 - DNA, 26 bp, Homo sapiens
tccaagtagaattctgactgttgcac

SEQ ID NO: 78733 - DNA, 26 bp, Homo sapiens
ccaagtagaattctgactgttgcaca

SEQ ID NO: 78734 - DNA, 26 bp, Homo sapiens
caagtagaattctgactgttgcacat

SEQ ID NO: 78735 - DNA, 26 bp, Homo sapiens
aagtagaattctgactgttgcacata

SEQ ID NO: 78736 - DNA, 26 bp, Homo sapiens
agtagaattctgactgttgcacatat

SEQ ID NO: 78737 - DNA, 26 bp, Homo sapiens
gtagaattctgactgttgcacatatg

SEQ ID NO: 78738 - DNA, 26 bp, Homo sapiens
tagaattctgactgttgcacatatgt

SEQ ID NO: 78739 - DNA, 26 bp, Homo sapiens
agaattctgactgttgcacatatgta

SEQ ID NO: 78740 - DNA, 26 bp, Homo sapiens
gaattctgactgttgcacatatgtaa

SEQ ID NO: 78741 - DNA, 26 bp, Homo sapiens
aattctgactgttgcacatatgtaaa

SEQ ID NO: 78742 - DNA, 26 bp, Homo sapiens
attctgactgttgcacatatgtaaaa

SEQ ID NO: 78743 - DNA, 26 bp, Homo sapiens
ttctgactgttgcacatatgtaaaat

SEQ ID NO: 78744 - DNA, 26 bp, Homo sapiens
tctgactgttgcacatatgtaaaatt

SEQ ID NO: 78745 - DNA, 26 bp, Homo sapiens
ctgactgttgcacatatgtaaaattg

SEQ ID NO: 78746 - DNA, 26 bp, Homo sapiens
tgactgttgcacatatgtaaaattgg

SEQ ID NO: 78747 - DNA, 26 bp, Homo sapiens
gactgttgcacatatgtaaaattggt

SEQ ID NO: 78748 - DNA, 26 bp, Homo sapiens
actgttgcacatatgtaaaattggtg

SEQ ID NO: 78749 - DNA, 26 bp, Homo sapiens
ctgttgcacatatgtaaaattggtgt

SEQ ID NO: 78750 - DNA, 26 bp, Homo sapiens
tgttgcacatatgtaaaattggtgtc

SEQ ID NO: 78751 - DNA, 26 bp, Homo sapiens
gttgcacatatgtaaaattggtgtca

SEQ ID NO: 78752 - DNA, 26 bp, Homo sapiens
ttgcacatatgtaaaattggtgtcaa

SEQ ID NO: 78753 - DNA, 26 bp, Homo sapiens
tgcacatatgtaaaattggtgtcaaa

SEQ ID NO: 78754 - DNA, 26 bp, Homo sapiens
gcacatatgtaaaattggtgtcaaat

SEQ ID NO: 78755 - DNA, 26 bp, Homo sapiens
cacatatgtaaaattggtgtcaaatt

SEQ ID NO: 78756 - DNA, 26 bp, Homo sapiens
acatatgtaaaattggtgtcaaattc

SEQ ID NO: 78757 - DNA, 26 bp, Homo sapiens
catatgtaaaattggtgtcaaattct

SEQ ID NO: 78758 - DNA, 26 bp, Homo sapiens
atatgtaaaattggtgtcaaattctt

SEQ ID NO: 78759 - DNA, 26 bp, Homo sapiens
tatgtaaaattggtgtcaaattcttt

SEQ ID NO: 78760 - DNA, 26 bp, Homo sapiens
atgtaaaattggtgtcaaattcttta

SEQ ID NO: 78761 - DNA, 26 bp, Homo sapiens
tgtaaaattggtgtcaaattctttaa

SEQ ID NO: 78762 - DNA, 26 bp, Homo sapiens
gtaaaattggtgtcaaattctttaac

SEQ ID NO: 78763 - DNA, 26 bp, Homo sapiens
taaaattggtgtcaaattctttaaca

SEQ ID NO: 78764 - DNA, 26 bp, Homo sapiens
aaaattggtgtcaaattctttaacat

SEQ ID NO: 78765 - DNA, 26 bp, Homo sapiens
aaattggtgtcaaattctttaacatt

SEQ ID NO: 78766 - DNA, 26 bp, Homo sapiens
aattggtgtcaaattctttaacattc

SEQ ID NO: 78767 - DNA, 26 bp, Homo sapiens
attggtgtcaaattctttaacattcc

SEQ ID NO: 78768 - DNA, 26 bp, Homo sapiens
ttggtgtcaaattctttaacattcca

SEQ ID NO: 78769 - DNA, 26 bp, Homo sapiens
tggtgtcaaattctttaacattccaa

SEQ ID NO: 78770 - DNA, 26 bp, Homo sapiens
ggtgtcaaattctttaacattccaag

SEQ ID NO: 78771 - DNA, 26 bp, Homo sapiens
gtgtcaaattctttaacattccaagt

SEQ ID NO: 78772 - DNA, 26 bp, Homo sapiens
tgtcaaattctttaacattccaagtt

SEQ ID NO: 78773 - DNA, 26 bp, Homo sapiens
gtcaaattctttaacattccaagttt

SEQ ID NO: 78774 - DNA, 26 bp, Homo sapiens
tcaaattctttaacattccaagtttg

SEQ ID NO: 78775 - DNA, 26 bp, Homo sapiens
caaattctttaacattccaagtttgg

SEQ ID NO: 78776 - DNA, 26 bp, Homo sapiens
aaattctttaacattccaagtttggt

SEQ ID NO: 78777 - DNA, 26 bp, Homo sapiens
aattctttaacattccaagtttggtt

SEQ ID NO: 78778 - DNA, 26 bp, Homo sapiens
attctttaacattccaagtttggttt

SEQ ID NO: 78779 - DNA, 26 bp, Homo sapiens
ttctttaacattccaagtttggtttg

SEQ ID NO: 78780 - DNA, 26 bp, Homo sapiens
tctttaacattccaagtttggtttgt

SEQ ID NO: 78781 - DNA, 26 bp, Homo sapiens
ctttaacattccaagtttggtttgtt

SEQ ID NO: 78782 - DNA, 26 bp, Homo sapiens
tttaacattccaagtttggtttgttg

SEQ ID NO: 78783 - DNA, 26 bp, Homo sapiens
ttaacattccaagtttggtttgttgt

SEQ ID NO: 78784 - DNA, 26 bp, Homo sapiens
taacattccaagtttggtttgttgta

SEQ ID NO: 78785 - DNA, 26 bp, Homo sapiens
aacattccaagtttggtttgttgtag

SEQ ID NO: 78786 - DNA, 26 bp, Homo sapiens
acattccaagtttggtttgttgtagc

SEQ ID NO: 78787 - DNA, 26 bp, Homo sapiens
cattccaagtttggtttgttgtagcc

SEQ ID NO: 78788 - DNA, 26 bp, Homo sapiens
attccaagtttggtttgttgtagcct

SEQ ID NO: 78789 - DNA, 26 bp, Homo sapiens
ttccaagtttggtttgttgtagcctt

SEQ ID NO: 78790 - DNA, 26 bp, Homo sapiens
tccaagtttggtttgttgtagccttg

SEQ ID NO: 78791 - DNA, 26 bp, Homo sapiens
ccaagtttggtttgttgtagccttgt

SEQ ID NO: 78792 - DNA, 26 bp, Homo sapiens
caagtttggtttgttgtagccttgta

SEQ ID NO: 78793 - DNA, 26 bp, Homo sapiens
aagtttggtttgttgtagccttgtat

SEQ ID NO: 78794 - DNA, 26 bp, Homo sapiens
agtttggtttgttgtagccttgtatc

SEQ ID NO: 78795 - DNA, 26 bp, Homo sapiens
gtttggtttgttgtagccttgtatct

SEQ ID NO: 78796 - DNA, 26 bp, Homo sapiens
tttggtttgttgtagccttgtatctc

SEQ ID NO: 78797 - DNA, 26 bp, Homo sapiens
ttggtttgttgtagccttgtatctca

SEQ ID NO: 78798 - DNA, 26 bp, Homo sapiens
tggtttgttgtagccttgtatctcat

SEQ ID NO: 78799 - DNA, 26 bp, Homo sapiens
ggtttgttgtagccttgtatctcatt

SEQ ID NO: 78800 - DNA, 26 bp, Homo sapiens
gtttgttgtagccttgtatctcattt

SEQ ID NO: 78801 - DNA, 26 bp, Homo sapiens
tttgttgtagccttgtatctcatttc

SEQ ID NO: 78802 - DNA, 26 bp, Homo sapiens
ttgttgtagccttgtatctcatttca

SEQ ID NO: 78803 - DNA, 26 bp, Homo sapiens
tgttgtagccttgtatctcatttcac

SEQ ID NO: 78804 - DNA, 26 bp, Homo sapiens
gttgtagccttgtatctcatttcaca

SEQ ID NO: 78805 - DNA, 26 bp, Homo sapiens
ttgtagccttgtatctcatttcacag

SEQ ID NO: 78806 - DNA, 26 bp, Homo sapiens
tgtagccttgtatctcatttcacagg

SEQ ID NO: 78807 - DNA, 26 bp, Homo sapiens
gtagccttgtatctcatttcacagga

SEQ ID NO: 78808 - DNA, 26 bp, Homo sapiens
tagccttgtatctcatttcacaggaa

SEQ ID NO: 78809 - DNA, 26 bp, Homo sapiens
agccttgtatctcatttcacaggaaa

SEQ ID NO: 78810 - DNA, 26 bp, Homo sapiens
gccttgtatctcatttcacaggaaac

SEQ ID NO: 78811 - DNA, 26 bp, Homo sapiens
ccttgtatctcatttcacaggaaacc

SEQ ID NO: 78812 - DNA, 26 bp, Homo sapiens
cttgtatctcatttcacaggaaacct

SEQ ID NO: 78813 - DNA, 26 bp, Homo sapiens
ttgtatctcatttcacaggaaacctt

SEQ ID NO: 78814 - DNA, 26 bp, Homo sapiens
tgtatctcatttcacaggaaaccttt

SEQ ID NO: 78815 - DNA, 26 bp, Homo sapiens
gtatctcatttcacaggaaacctttt

SEQ ID NO: 78816 - DNA, 26 bp, Homo sapiens
tatctcatttcacaggaaaccttttc

SEQ ID NO: 78817 - DNA, 26 bp, Homo sapiens
atctcatttcacaggaaaccttttca

SEQ ID NO: 78818 - DNA, 26 bp, Homo sapiens
tctcatttcacaggaaaccttttcaa

SEQ ID NO: 78819 - DNA, 26 bp, Homo sapiens
ctcatttcacaggaaaccttttcaat

SEQ ID NO: 78820 - DNA, 26 bp, Homo sapiens
tcatttcacaggaaaccttttcaatt

SEQ ID NO: 78821 - DNA, 26 bp, Homo sapiens
catttcacaggaaaccttttcaattg

SEQ ID NO: 78822 - DNA, 26 bp, Homo sapiens
atttcacaggaaaccttttcaattgt

SEQ ID NO: 78823 - DNA, 26 bp, Homo sapiens
tttcacaggaaaccttttcaattgtt

SEQ ID NO: 78824 - DNA, 26 bp, Homo sapiens
ttcacaggaaaccttttcaattgttg

SEQ ID NO: 78825 - DNA, 26 bp, Homo sapiens
tcacaggaaaccttttcaattgttgt

SEQ ID NO: 78826 - DNA, 26 bp, Homo sapiens
cacaggaaaccttttcaattgttgtt

SEQ ID NO: 78827 - DNA, 26 bp, Homo sapiens
acaggaaaccttttcaattgttgttt

SEQ ID NO: 78828 - DNA, 26 bp, Homo sapiens
caggaaaccttttcaattgttgtttg

SEQ ID NO: 78829 - DNA, 26 bp, Homo sapiens
aggaaaccttttcaattgttgtttga

SEQ ID NO: 78830 - DNA, 26 bp, Homo sapiens
ggaaaccttttcaattgttgtttgac

SEQ ID NO: 78831 - DNA, 26 bp, Homo sapiens
gaaaccttttcaattgttgtttgact

SEQ ID NO: 78832 - DNA, 26 bp, Homo sapiens
aaaccttttcaattgttgtttgacta

SEQ ID NO: 78833 - DNA, 26 bp, Homo sapiens
aaccttttcaattgttgtttgactat

SEQ ID NO: 78834 - DNA, 26 bp, Homo sapiens
accttttcaattgttgtttgactatc

SEQ ID NO: 78835 - DNA, 26 bp, Homo sapiens
ccttttcaattgttgtttgactatcc

SEQ ID NO: 78836 - DNA, 26 bp, Homo sapiens
cttttcaattgttgtttgactatccc

SEQ ID NO: 78837 - DNA, 26 bp, Homo sapiens
ttttcaattgttgtttgactatccca

SEQ ID NO: 78838 - DNA, 26 bp, Homo sapiens
tttcaattgttgtttgactatcccaa

SEQ ID NO: 78839 - DNA, 26 bp, Homo sapiens
ttcaattgttgtttgactatcccaat

SEQ ID NO: 78840 - DNA, 26 bp, Homo sapiens
tcaattgttgtttgactatcccaata

SEQ ID NO: 78841 - DNA, 26 bp, Homo sapiens
caattgttgtttgactatcccaataa

SEQ ID NO: 78842 - DNA, 26 bp, Homo sapiens
aattgttgtttgactatcccaataaa

SEQ ID NO: 78843 - DNA, 26 bp, Homo sapiens
attgttgtttgactatcccaataaat

SEQ ID NO: 78844 - DNA, 26 bp, Homo sapiens
ttgttgtttgactatcccaataaatt

SEQ ID NO: 78845 - DNA, 26 bp, Homo sapiens
tgttgtttgactatcccaataaatta

SEQ ID NO: 78846 - DNA, 26 bp, Homo sapiens
gttgtttgactatcccaataaattat

SEQ ID NO: 78847 - DNA, 26 bp, Homo sapiens
ttgtttgactatcccaataaattatg

SEQ ID NO: 78848 - DNA, 26 bp, Homo sapiens
tgtttgactatcccaataaattatgg

SEQ ID NO: 78849 - DNA, 26 bp, Homo sapiens
gtttgactatcccaataaattatggt

SEQ ID NO: 78850 - DNA, 26 bp, Homo sapiens
tttgactatcccaataaattatggtc

SEQ ID NO: 78851 - DNA, 26 bp, Homo sapiens
ttgactatcccaataaattatggtct

SEQ ID NO: 78852 - DNA, 26 bp, Homo sapiens
tgactatcccaataaattatggtctt

SEQ ID NO: 78853 - DNA, 26 bp, Homo sapiens
gactatcccaataaattatggtcttg

SEQ ID NO: 78854 - DNA, 26 bp, Homo sapiens
actatcccaataaattatggtcttgg

SEQ ID NO: 78855 - DNA, 26 bp, Homo sapiens
ctatcccaataaattatggtcttggg

SEQ ID NO: 78856 - DNA, 26 bp, Homo sapiens
tatcccaataaattatggtcttgggc

SEQ ID NO: 78857 - DNA, 26 bp, Homo sapiens
atcccaataaattatggtcttgggca

SEQ ID NO: 78858 - DNA, 26 bp, Homo sapiens
tcccaataaattatggtcttgggcac

SEQ ID NO: 78859 - DNA, 26 bp, Homo sapiens
cccaataaattatggtcttgggcact

SEQ ID NO: 78860 - DNA, 26 bp, Homo sapiens
ccaataaattatggtcttgggcactg

SEQ ID NO: 78861 - DNA, 26 bp, Homo sapiens
caataaattatggtcttgggcactgt

SEQ ID NO: 78862 - DNA, 26 bp, Homo sapiens
aataaattatggtcttgggcactgta

SEQ ID NO: 78863 - DNA, 26 bp, Homo sapiens
ataaattatggtcttgggcactgtag

SEQ ID NO: 78864 - DNA, 26 bp, Homo sapiens
taaattatggtcttgggcactgtagc

SEQ ID NO: 78865 - DNA, 26 bp, Homo sapiens
aaattatggtcttgggcactgtagca

SEQ ID NO: 78866 - DNA, 26 bp, Homo sapiens
aattatggtcttgggcactgtagcat

SEQ ID NO: 78867 - DNA, 26 bp, Homo sapiens
attatggtcttgggcactgtagcatt

SEQ ID NO: 78868 - DNA, 26 bp, Homo sapiens
ttatggtcttgggcactgtagcattt

SEQ ID NO: 78869 - DNA, 26 bp, Homo sapiens
tatggtcttgggcactgtagcattta

SEQ ID NO: 78870 - DNA, 26 bp, Homo sapiens
atggtcttgggcactgtagcatttat

SEQ ID NO: 78871 - DNA, 26 bp, Homo sapiens
tggtcttgggcactgtagcatttata

SEQ ID NO: 78872 - DNA, 26 bp, Homo sapiens
ggtcttgggcactgtagcatttatag

SEQ ID NO: 78873 - DNA, 26 bp, Homo sapiens
gtcttgggcactgtagcatttatagt

SEQ ID NO: 78874 - DNA, 26 bp, Homo sapiens
tcttgggcactgtagcatttatagtc

SEQ ID NO: 78875 - DNA, 26 bp, Homo sapiens
cttgggcactgtagcatttatagtct

SEQ ID NO: 78876 - DNA, 26 bp, Homo sapiens
ttgggcactgtagcatttatagtctc

SEQ ID NO: 78877 - DNA, 26 bp, Homo sapiens
tgggcactgtagcatttatagtctca

SEQ ID NO: 78878 - DNA, 26 bp, Homo sapiens
gggcactgtagcatttatagtctcag

SEQ ID NO: 78879 - DNA, 26 bp, Homo sapiens
ggcactgtagcatttatagtctcagc

SEQ ID NO: 78880 - DNA, 26 bp, Homo sapiens
gcactgtagcatttatagtctcagcc

SEQ ID NO: 78881 - DNA, 26 bp, Homo sapiens
cactgtagcatttatagtctcagccc

SEQ ID NO: 78882 - DNA, 26 bp, Homo sapiens
actgtagcatttatagtctcagccct

SEQ ID NO: 78883 - DNA, 26 bp, Homo sapiens
ctgtagcatttatagtctcagccctg

SEQ ID NO: 78884 - DNA, 26 bp, Homo sapiens
tgtagcatttatagtctcagccctgg

SEQ ID NO: 78885 - DNA, 26 bp, Homo sapiens
gtagcatttatagtctcagccctgga

SEQ ID NO: 78886 - DNA, 26 bp, Homo sapiens
tagcatttatagtctcagccctggaa

SEQ ID NO: 78887 - DNA, 26 bp, Homo sapiens
agcatttatagtctcagccctggaaa

SEQ ID NO: 78888 - DNA, 26 bp, Homo sapiens
gcatttatagtctcagccctggaaat

SEQ ID NO: 78889 - DNA, 26 bp, Homo sapiens
catttatagtctcagccctggaaatg

SEQ ID NO: 78890 - DNA, 26 bp, Homo sapiens
atttatagtctcagccctggaaatga

SEQ ID NO: 78891 - DNA, 26 bp, Homo sapiens
tttatagtctcagccctggaaatgac

SEQ ID NO: 78892 - DNA, 26 bp, Homo sapiens
ttatagtctcagccctggaaatgacg

SEQ ID NO: 78893 - DNA, 26 bp, Homo sapiens
tatagtctcagccctggaaatgacgg

SEQ ID NO: 78894 - DNA, 26 bp, Homo sapiens
atagtctcagccctggaaatgacggc

SEQ ID NO: 78895 - DNA, 26 bp, Homo sapiens
tagtctcagccctggaaatgacggct

SEQ ID NO: 78896 - DNA, 26 bp, Homo sapiens
agtctcagccctggaaatgacggctg

SEQ ID NO: 78897 - DNA, 26 bp, Homo sapiens
gtctcagccctggaaatgacggctgc

SEQ ID NO: 78898 - DNA, 26 bp, Homo sapiens
tctcagccctggaaatgacggctgca

SEQ ID NO: 78899 - DNA, 26 bp, Homo sapiens
ctcagccctggaaatgacggctgcag

SEQ ID NO: 78900 - DNA, 26 bp, Homo sapiens
tcagccctggaaatgacggctgcaga

SEQ ID NO: 78901 - DNA, 26 bp, Homo sapiens
cagccctggaaatgacggctgcagaa

SEQ ID NO: 78902 - DNA, 26 bp, Homo sapiens
agccctggaaatgacggctgcagaag

SEQ ID NO: 78903 - DNA, 26 bp, Homo sapiens
gccctggaaatgacggctgcagaagg

SEQ ID NO: 78904 - DNA, 26 bp, Homo sapiens
ccctggaaatgacggctgcagaaggt

SEQ ID NO: 78905 - DNA, 26 bp, Homo sapiens
cctggaaatgacggctgcagaaggta

SEQ ID NO: 78906 - DNA, 26 bp, Homo sapiens
ctggaaatgacggctgcagaaggtat

SEQ ID NO: 78907 - DNA, 26 bp, Homo sapiens
tggaaatgacggctgcagaaggtatc

SEQ ID NO: 78908 - DNA, 26 bp, Homo sapiens
ggaaatgacggctgcagaaggtatca

SEQ ID NO: 78909 - DNA, 26 bp, Homo sapiens
gaaatgacggctgcagaaggtatcac

SEQ ID NO: 78910 - DNA, 26 bp, Homo sapiens
aaatgacggctgcagaaggtatcact

SEQ ID NO: 78911 - DNA, 26 bp, Homo sapiens
aatgacggctgcagaaggtatcacta

SEQ ID NO: 78912 - DNA, 26 bp, Homo sapiens
atgacggctgcagaaggtatcactat

SEQ ID NO: 78913 - DNA, 26 bp, Homo sapiens
tgacggctgcagaaggtatcactata

SEQ ID NO: 78914 - DNA, 26 bp, Homo sapiens
gacggctgcagaaggtatcactatat

SEQ ID NO: 78915 - DNA, 26 bp, Homo sapiens
acggctgcagaaggtatcactatatc

SEQ ID NO: 78916 - DNA, 26 bp, Homo sapiens
cggctgcagaaggtatcactatatca

SEQ ID NO: 78917 - DNA, 26 bp, Homo sapiens
ggctgcagaaggtatcactatatcat

SEQ ID NO: 78918 - DNA, 26 bp, Homo sapiens
gctgcagaaggtatcactatatcatc

SEQ ID NO: 78919 - DNA, 26 bp, Homo sapiens
ctgcagaaggtatcactatatcatcc

SEQ ID NO: 78920 - DNA, 26 bp, Homo sapiens
tgcagaaggtatcactatatcatcca

SEQ ID NO: 78921 - DNA, 26 bp, Homo sapiens
gcagaaggtatcactatatcatccag

SEQ ID NO: 78922 - DNA, 26 bp, Homo sapiens
cagaaggtatcactatatcatccagg

SEQ ID NO: 78923 - DNA, 26 bp, Homo sapiens
agaaggtatcactatatcatccaggt

SEQ ID NO: 78924 - DNA, 26 bp, Homo sapiens
gaaggtatcactatatcatccaggtg

SEQ ID NO: 78925 - DNA, 26 bp, Homo sapiens
aaggtatcactatatcatccaggtga

SEQ ID NO: 78926 - DNA, 26 bp, Homo sapiens
aggtatcactatatcatccaggtgaa

SEQ ID NO: 78927 - DNA, 26 bp, Homo sapiens
ggtatcactatatcatccaggtgaat

SEQ ID NO: 78928 - DNA, 26 bp, Homo sapiens
gtatcactatatcatccaggtgaatt

SEQ ID NO: 78929 - DNA, 26 bp, Homo sapiens
tatcactatatcatccaggtgaattt

SEQ ID NO: 78930 - DNA, 26 bp, Homo sapiens
atcactatatcatccaggtgaatttg

SEQ ID NO: 78931 - DNA, 26 bp, Homo sapiens
tcactatatcatccaggtgaatttgc

SEQ ID NO: 78932 - DNA, 26 bp, Homo sapiens
cactatatcatccaggtgaatttgca

SEQ ID NO: 78933 - DNA, 26 bp, Homo sapiens
actatatcatccaggtgaatttgcag

SEQ ID NO: 78934 - DNA, 26 bp, Homo sapiens
ctatatcatccaggtgaatttgcagt

SEQ ID NO: 78935 - DNA, 26 bp, Homo sapiens
tatatcatccaggtgaatttgcagtt

SEQ ID NO: 78936 - DNA, 26 bp, Homo sapiens
atatcatccaggtgaatttgcagttg

SEQ ID NO: 78937 - DNA, 26 bp, Homo sapiens
tatcatccaggtgaatttgcagttgt

SEQ ID NO: 78938 - DNA, 26 bp, Homo sapiens
atcatccaggtgaatttgcagttgtt

SEQ ID NO: 78939 - DNA, 26 bp, Homo sapiens
tcatccaggtgaatttgcagttgttt

SEQ ID NO: 78940 - DNA, 26 bp, Homo sapiens
catccaggtgaatttgcagttgtttt

SEQ ID NO: 78941 - DNA, 26 bp, Homo sapiens
atccaggtgaatttgcagttgttttg

SEQ ID NO: 78942 - DNA, 26 bp, Homo sapiens
tccaggtgaatttgcagttgttttga

SEQ ID NO: 78943 - DNA, 26 bp, Homo sapiens
ccaggtgaatttgcagttgttttgac

SEQ ID NO: 78944 - DNA, 26 bp, Homo sapiens
caggtgaatttgcagttgttttgact

SEQ ID NO: 78945 - DNA, 26 bp, Homo sapiens
aggtgaatttgcagttgttttgactc

SEQ ID NO: 78946 - DNA, 26 bp, Homo sapiens
ggtgaatttgcagttgttttgactct

SEQ ID NO: 78947 - DNA, 26 bp, Homo sapiens
gtgaatttgcagttgttttgactctt

SEQ ID NO: 78948 - DNA, 26 bp, Homo sapiens
tgaatttgcagttgttttgactcttc

SEQ ID NO: 78949 - DNA, 26 bp, Homo sapiens
gaatttgcagttgttttgactcttcc

SEQ ID NO: 78950 - DNA, 26 bp, Homo sapiens
aatttgcagttgttttgactcttcca

SEQ ID NO: 78951 - DNA, 26 bp, Homo sapiens
atttgcagttgttttgactcttccat

SEQ ID NO: 78952 - DNA, 26 bp, Homo sapiens
tttgcagttgttttgactcttccatg

SEQ ID NO: 78953 - DNA, 26 bp, Homo sapiens
ttgcagttgttttgactcttccatgc

SEQ ID NO: 78954 - DNA, 26 bp, Homo sapiens
tgcagttgttttgactcttccatgcc

SEQ ID NO: 78955 - DNA, 26 bp, Homo sapiens
gcagttgttttgactcttccatgcct

SEQ ID NO: 78956 - DNA, 26 bp, Homo sapiens
cagttgttttgactcttccatgccta

SEQ ID NO: 78957 - DNA, 26 bp, Homo sapiens
agttgttttgactcttccatgcctag

SEQ ID NO: 78958 - DNA, 26 bp, Homo sapiens
gttgttttgactcttccatgcctagt

SEQ ID NO: 78959 - DNA, 26 bp, Homo sapiens
ttgttttgactcttccatgcctagtg

SEQ ID NO: 78960 - DNA, 26 bp, Homo sapiens
tgttttgactcttccatgcctagtgc

SEQ ID NO: 78961 - DNA, 26 bp, Homo sapiens
gttttgactcttccatgcctagtgcg

SEQ ID NO: 78962 - DNA, 26 bp, Homo sapiens
ttttgactcttccatgcctagtgcgt

SEQ ID NO: 78963 - DNA, 26 bp, Homo sapiens
tttgactcttccatgcctagtgcgtt

SEQ ID NO: 78964 - DNA, 26 bp, Homo sapiens
ttgactcttccatgcctagtgcgttt

SEQ ID NO: 78965 - DNA, 26 bp, Homo sapiens
tgactcttccatgcctagtgcgtttg

SEQ ID NO: 78966 - DNA, 26 bp, Homo sapiens
gactcttccatgcctagtgcgtttgc

SEQ ID NO: 78967 - DNA, 26 bp, Homo sapiens
actcttccatgcctagtgcgtttgct

SEQ ID NO: 78968 - DNA, 26 bp, Homo sapiens
ctcttccatgcctagtgcgtttgctg

SEQ ID NO: 78969 - DNA, 26 bp, Homo sapiens
tcttccatgcctagtgcgtttgctgc

SEQ ID NO: 78970 - DNA, 26 bp, Homo sapiens
cttccatgcctagtgcgtttgctgct

SEQ ID NO: 78971 - DNA, 26 bp, Homo sapiens
ttccatgcctagtgcgtttgctgctt

SEQ ID NO: 78972 - DNA, 26 bp, Homo sapiens
tccatgcctagtgcgtttgctgcttg

SEQ ID NO: 78973 - DNA, 26 bp, Homo sapiens
ccatgcctagtgcgtttgctgcttgg

SEQ ID NO: 78974 - DNA, 26 bp, Homo sapiens
catgcctagtgcgtttgctgcttgga

SEQ ID NO: 78975 - DNA, 26 bp, Homo sapiens
atgcctagtgcgtttgctgcttggac

SEQ ID NO: 78976 - DNA, 26 bp, Homo sapiens
tgcctagtgcgtttgctgcttggacc

SEQ ID NO: 78977 - DNA, 26 bp, Homo sapiens
gcctagtgcgtttgctgcttggaccc

SEQ ID NO: 78978 - DNA, 26 bp, Homo sapiens
cctagtgcgtttgctgcttggaccca

SEQ ID NO: 78979 - DNA, 26 bp, Homo sapiens
ctagtgcgtttgctgcttggacccaa

SEQ ID NO: 78980 - DNA, 26 bp, Homo sapiens
tagtgcgtttgctgcttggacccaaa

SEQ ID NO: 78981 - DNA, 26 bp, Homo sapiens
agtgcgtttgctgcttggacccaaac

SEQ ID NO: 78982 - DNA, 26 bp, Homo sapiens
gtgcgtttgctgcttggacccaaacc

SEQ ID NO: 78983 - DNA, 26 bp, Homo sapiens
tgcgtttgctgcttggacccaaacca

SEQ ID NO: 78984 - DNA, 26 bp, Homo sapiens
gcgtttgctgcttggacccaaaccaa

SEQ ID NO: 78985 - DNA, 26 bp, Homo sapiens
cgtttgctgcttggacccaaaccaag

SEQ ID NO: 78986 - DNA, 26 bp, Homo sapiens
gtttgctgcttggacccaaaccaagt

SEQ ID NO: 78987 - DNA, 26 bp, Homo sapiens
tttgctgcttggacccaaaccaagta

SEQ ID NO: 78988 - DNA, 26 bp, Homo sapiens
ttgctgcttggacccaaaccaagtac

SEQ ID NO: 78989 - DNA, 26 bp, Homo sapiens
tgctgcttggacccaaaccaagtact

SEQ ID NO: 78990 - DNA, 26 bp, Homo sapiens
gctgcttggacccaaaccaagtactt

SEQ ID NO: 78991 - DNA, 26 bp, Homo sapiens
ctgcttggacccaaaccaagtacttc

SEQ ID NO: 78992 - DNA, 26 bp, Homo sapiens
tgcttggacccaaaccaagtacttct

SEQ ID NO: 78993 - DNA, 26 bp, Homo sapiens
gcttggacccaaaccaagtacttctt

SEQ ID NO: 78994 - DNA, 26 bp, Homo sapiens
cttggacccaaaccaagtacttcttg

SEQ ID NO: 78995 - DNA, 26 bp, Homo sapiens
ttggacccaaaccaagtacttcttgc

SEQ ID NO: 78996 - DNA, 26 bp, Homo sapiens
tggacccaaaccaagtacttcttgcc

SEQ ID NO: 78997 - DNA, 26 bp, Homo sapiens
ggacccaaaccaagtacttcttgcca

SEQ ID NO: 78998 - DNA, 26 bp, Homo sapiens
gacccaaaccaagtacttcttgccac

SEQ ID NO: 78999 - DNA, 26 bp, Homo sapiens
acccaaaccaagtacttcttgccacc

SEQ ID NO: 79000 - DNA, 26 bp, Homo sapiens
cccaaaccaagtacttcttgccacct

SEQ ID NO: 79001 - DNA, 26 bp, Homo sapiens
ccaaaccaagtacttcttgccacctt

SEQ ID NO: 79002 - DNA, 26 bp, Homo sapiens
caaaccaagtacttcttgccaccttg

SEQ ID NO: 79003 - DNA, 26 bp, Homo sapiens
aaaccaagtacttcttgccaccttgt

SEQ ID NO: 79004 - DNA, 26 bp, Homo sapiens
aaccaagtacttcttgccaccttgta

SEQ ID NO: 79005 - DNA, 26 bp, Homo sapiens
accaagtacttcttgccaccttgtaa

SEQ ID NO: 79006 - DNA, 26 bp, Homo sapiens
ccaagtacttcttgccaccttgtaat

SEQ ID NO: 79007 - DNA, 26 bp, Homo sapiens
caagtacttcttgccaccttgtaatg

SEQ ID NO: 79008 - DNA, 26 bp, Homo sapiens
aagtacttcttgccaccttgtaatga

SEQ ID NO: 79009 - DNA, 26 bp, Homo sapiens
agtacttcttgccaccttgtaatgaa

SEQ ID NO: 79010 - DNA, 26 bp, Homo sapiens
gtacttcttgccaccttgtaatgaat

SEQ ID NO: 79011 - DNA, 26 bp, Homo sapiens
tacttcttgccaccttgtaatgaatc

SEQ ID NO: 79012 - DNA, 26 bp, Homo sapiens
acttcttgccaccttgtaatgaatca

SEQ ID NO: 79013 - DNA, 26 bp, Homo sapiens
cttcttgccaccttgtaatgaatcag

SEQ ID NO: 79014 - DNA, 26 bp, Homo sapiens
ttcttgccaccttgtaatgaatcagt

SEQ ID NO: 79015 - DNA, 26 bp, Homo sapiens
tcttgccaccttgtaatgaatcagtg

SEQ ID NO: 79016 - DNA, 26 bp, Homo sapiens
cttgccaccttgtaatgaatcagtgg

SEQ ID NO: 79017 - DNA, 26 bp, Homo sapiens
ttgccaccttgtaatgaatcagtgga

SEQ ID NO: 79018 - DNA, 26 bp, Homo sapiens
tgccaccttgtaatgaatcagtggag

SEQ ID NO: 79019 - DNA, 26 bp, Homo sapiens
gccaccttgtaatgaatcagtggaga

SEQ ID NO: 79020 - DNA, 26 bp, Homo sapiens
ccaccttgtaatgaatcagtggagat

SEQ ID NO: 79021 - DNA, 26 bp, Homo sapiens
caccttgtaatgaatcagtggagatg

SEQ ID NO: 79022 - DNA, 26 bp, Homo sapiens
accttgtaatgaatcagtggagatgt

SEQ ID NO: 79023 - DNA, 26 bp, Homo sapiens
ccttgtaatgaatcagtggagatgtt

SEQ ID NO: 79024 - DNA, 26 bp, Homo sapiens
cttgtaatgaatcagtggagatgtta

SEQ ID NO: 79025 - DNA, 26 bp, Homo sapiens
ttgtaatgaatcagtggagatgttaa

SEQ ID NO: 79026 - DNA, 26 bp, Homo sapiens
tgtaatgaatcagtggagatgttaat

SEQ ID NO: 79027 - DNA, 26 bp, Homo sapiens
gtaatgaatcagtggagatgttaata

SEQ ID NO: 79028 - DNA, 26 bp, Homo sapiens
taatgaatcagtggagatgttaatat

SEQ ID NO: 79029 - DNA, 26 bp, Homo sapiens
aatgaatcagtggagatgttaatata

SEQ ID NO: 79030 - DNA, 26 bp, Homo sapiens
atgaatcagtggagatgttaatatag

SEQ ID NO: 79031 - DNA, 26 bp, Homo sapiens
tgaatcagtggagatgttaatatagc

SEQ ID NO: 79032 - DNA, 26 bp, Homo sapiens
gaatcagtggagatgttaatatagct

SEQ ID NO: 79033 - DNA, 26 bp, Homo sapiens
aatcagtggagatgttaatatagctt

SEQ ID NO: 79034 - DNA, 26 bp, Homo sapiens
atcagtggagatgttaatatagcttg

SEQ ID NO: 79035 - DNA, 26 bp, Homo sapiens
tcagtggagatgttaatatagcttga

SEQ ID NO: 79036 - DNA, 26 bp, Homo sapiens
cagtggagatgttaatatagcttgag

SEQ ID NO: 79037 - DNA, 26 bp, Homo sapiens
agtggagatgttaatatagcttgagg

SEQ ID NO: 79038 - DNA, 26 bp, Homo sapiens
gtggagatgttaatatagcttgaggt

SEQ ID NO: 79039 - DNA, 26 bp, Homo sapiens
tggagatgttaatatagcttgaggtg

SEQ ID NO: 79040 - DNA, 26 bp, Homo sapiens
ggagatgttaatatagcttgaggtga

SEQ ID NO: 79041 - DNA, 26 bp, Homo sapiens
gagatgttaatatagcttgaggtgag

SEQ ID NO: 79042 - DNA, 26 bp, Homo sapiens
agatgttaatatagcttgaggtgaga

SEQ ID NO: 79043 - DNA, 26 bp, Homo sapiens
gatgttaatatagcttgaggtgagat

SEQ ID NO: 79044 - DNA, 26 bp, Homo sapiens
atgttaatatagcttgaggtgagata

SEQ ID NO: 79045 - DNA, 26 bp, Homo sapiens
tgttaatatagcttgaggtgagatac

SEQ ID NO: 79046 - DNA, 26 bp, Homo sapiens
gttaatatagcttgaggtgagatact

SEQ ID NO: 79047 - DNA, 26 bp, Homo sapiens
ttaatatagcttgaggtgagatactg

SEQ ID NO: 79048 - DNA, 26 bp, Homo sapiens
taatatagcttgaggtgagatactgt

SEQ ID NO: 79049 - DNA, 26 bp, Homo sapiens
aatatagcttgaggtgagatactgtt

SEQ ID NO: 79050 - DNA, 26 bp, Homo sapiens
atatagcttgaggtgagatactgttg

SEQ ID NO: 79051 - DNA, 26 bp, Homo sapiens
tatagcttgaggtgagatactgttgc

SEQ ID NO: 79052 - DNA, 26 bp, Homo sapiens
atagcttgaggtgagatactgttgct

SEQ ID NO: 79053 - DNA, 26 bp, Homo sapiens
tagcttgaggtgagatactgttgctc

SEQ ID NO: 79054 - DNA, 26 bp, Homo sapiens
agcttgaggtgagatactgttgctct

SEQ ID NO: 79055 - DNA, 26 bp, Homo sapiens
gcttgaggtgagatactgttgctctt

SEQ ID NO: 79056 - DNA, 26 bp, Homo sapiens
cttgaggtgagatactgttgctcttc

SEQ ID NO: 79057 - DNA, 26 bp, Homo sapiens
ttgaggtgagatactgttgctcttct

SEQ ID NO: 79058 - DNA, 26 bp, Homo sapiens
tgaggtgagatactgttgctcttctt

SEQ ID NO: 79059 - DNA, 26 bp, Homo sapiens
gaggtgagatactgttgctcttcttc

SEQ ID NO: 79060 - DNA, 26 bp, Homo sapiens
aggtgagatactgttgctcttcttct

SEQ ID NO: 79061 - DNA, 26 bp, Homo sapiens
ggtgagatactgttgctcttcttctg

SEQ ID NO: 79062 - DNA, 26 bp, Homo sapiens
gtgagatactgttgctcttcttctgt

SEQ ID NO: 79063 - DNA, 26 bp, Homo sapiens
tgagatactgttgctcttcttctgtc

SEQ ID NO: 79064 - DNA, 26 bp, Homo sapiens
gagatactgttgctcttcttctgtct

SEQ ID NO: 79065 - DNA, 26 bp, Homo sapiens
agatactgttgctcttcttctgtctc

SEQ ID NO: 79066 - DNA, 26 bp, Homo sapiens
gatactgttgctcttcttctgtctct

SEQ ID NO: 79067 - DNA, 26 bp, Homo sapiens
atactgttgctcttcttctgtctcta

SEQ ID NO: 79068 - DNA, 26 bp, Homo sapiens
tactgttgctcttcttctgtctctaa

SEQ ID NO: 79069 - DNA, 26 bp, Homo sapiens
actgttgctcttcttctgtctctaaa

SEQ ID NO: 79070 - DNA, 26 bp, Homo sapiens
ctgttgctcttcttctgtctctaaac

SEQ ID NO: 79071 - DNA, 26 bp, Homo sapiens
tgttgctcttcttctgtctctaaact

SEQ ID NO: 79072 - DNA, 26 bp, Homo sapiens
gttgctcttcttctgtctctaaactc

SEQ ID NO: 79073 - DNA, 26 bp, Homo sapiens
ttgctcttcttctgtctctaaactct

SEQ ID NO: 79074 - DNA, 26 bp, Homo sapiens
tgctcttcttctgtctctaaactctt

SEQ ID NO: 79075 - DNA, 26 bp, Homo sapiens
gctcttcttctgtctctaaactcttc

SEQ ID NO: 79076 - DNA, 26 bp, Homo sapiens
ctcttcttctgtctctaaactcttca

SEQ ID NO: 79077 - DNA, 26 bp, Homo sapiens
tcttcttctgtctctaaactcttcac

SEQ ID NO: 79078 - DNA, 26 bp, Homo sapiens
cttcttctgtctctaaactcttcaca

SEQ ID NO: 79079 - DNA, 26 bp, Homo sapiens
ttcttctgtctctaaactcttcacat

SEQ ID NO: 79080 - DNA, 26 bp, Homo sapiens
tcttctgtctctaaactcttcacatg

SEQ ID NO: 79081 - DNA, 26 bp, Homo sapiens
cttctgtctctaaactcttcacatgt

SEQ ID NO: 79082 - DNA, 26 bp, Homo sapiens
ttctgtctctaaactcttcacatgta

SEQ ID NO: 79083 - DNA, 26 bp, Homo sapiens
tctgtctctaaactcttcacatgtac

SEQ ID NO: 79084 - DNA, 26 bp, Homo sapiens
ctgtctctaaactcttcacatgtacc

SEQ ID NO: 79085 - DNA, 26 bp, Homo sapiens
tgtctctaaactcttcacatgtacca

SEQ ID NO: 79086 - DNA, 26 bp, Homo sapiens
gtctctaaactcttcacatgtaccac

SEQ ID NO: 79087 - DNA, 26 bp, Homo sapiens
tctctaaactcttcacatgtaccacg

SEQ ID NO: 79088 - DNA, 26 bp, Homo sapiens
ctctaaactcttcacatgtaccacgt

SEQ ID NO: 79089 - DNA, 26 bp, Homo sapiens
tctaaactcttcacatgtaccacgta

SEQ ID NO: 79090 - DNA, 26 bp, Homo sapiens
ctaaactcttcacatgtaccacgtat

SEQ ID NO: 79091 - DNA, 26 bp, Homo sapiens
taaactcttcacatgtaccacgtatt

SEQ ID NO: 79092 - DNA, 26 bp, Homo sapiens
aaactcttcacatgtaccacgtattt

SEQ ID NO: 79093 - DNA, 26 bp, Homo sapiens
aactcttcacatgtaccacgtatttt

SEQ ID NO: 79094 - DNA, 26 bp, Homo sapiens
actcttcacatgtaccacgtattttg

SEQ ID NO: 79095 - DNA, 26 bp, Homo sapiens
ctcttcacatgtaccacgtattttgt

SEQ ID NO: 79096 - DNA, 26 bp, Homo sapiens
tcttcacatgtaccacgtattttgtg

SEQ ID NO: 79097 - DNA, 26 bp, Homo sapiens
cttcacatgtaccacgtattttgtgt

SEQ ID NO: 79098 - DNA, 26 bp, Homo sapiens
ttcacatgtaccacgtattttgtgtc

SEQ ID NO: 79099 - DNA, 26 bp, Homo sapiens
tcacatgtaccacgtattttgtgtct

SEQ ID NO: 79100 - DNA, 26 bp, Homo sapiens
cacatgtaccacgtattttgtgtcta

SEQ ID NO: 79101 - DNA, 26 bp, Homo sapiens
acatgtaccacgtattttgtgtctat

SEQ ID NO: 79102 - DNA, 26 bp, Homo sapiens
catgtaccacgtattttgtgtctatg

SEQ ID NO: 79103 - DNA, 26 bp, Homo sapiens
atgtaccacgtattttgtgtctatgt

SEQ ID NO: 79104 - DNA, 26 bp, Homo sapiens
tgtaccacgtattttgtgtctatgta

SEQ ID NO: 79105 - DNA, 26 bp, Homo sapiens
gtaccacgtattttgtgtctatgtag

SEQ ID NO: 79106 - DNA, 26 bp, Homo sapiens
taccacgtattttgtgtctatgtagg

SEQ ID NO: 79107 - DNA, 26 bp, Homo sapiens
accacgtattttgtgtctatgtaggt

SEQ ID NO: 79108 - DNA, 26 bp, Homo sapiens
ccacgtattttgtgtctatgtaggtg

SEQ ID NO: 79109 - DNA, 26 bp, Homo sapiens
cacgtattttgtgtctatgtaggtga

SEQ ID NO: 79110 - DNA, 26 bp, Homo sapiens
acgtattttgtgtctatgtaggtgag

SEQ ID NO: 79111 - DNA, 26 bp, Homo sapiens
cgtattttgtgtctatgtaggtgagc

SEQ ID NO: 79112 - DNA, 26 bp, Homo sapiens
gtattttgtgtctatgtaggtgagct

SEQ ID NO: 79113 - DNA, 26 bp, Homo sapiens
tattttgtgtctatgtaggtgagctt

SEQ ID NO: 79114 - DNA, 26 bp, Homo sapiens
attttgtgtctatgtaggtgagcttc

SEQ ID NO: 79115 - DNA, 26 bp, Homo sapiens
ttttgtgtctatgtaggtgagcttcc

SEQ ID NO: 79116 - DNA, 26 bp, Homo sapiens
tttgtgtctatgtaggtgagcttccc

SEQ ID NO: 79117 - DNA, 26 bp, Homo sapiens
ttgtgtctatgtaggtgagcttccca

SEQ ID NO: 79118 - DNA, 26 bp, Homo sapiens
tgtgtctatgtaggtgagcttcccag

SEQ ID NO: 79119 - DNA, 26 bp, Homo sapiens
gtgtctatgtaggtgagcttcccagc

SEQ ID NO: 79120 - DNA, 26 bp, Homo sapiens
tgtctatgtaggtgagcttcccagca

SEQ ID NO: 79121 - DNA, 26 bp, Homo sapiens
gtctatgtaggtgagcttcccagcat

SEQ ID NO: 79122 - DNA, 26 bp, Homo sapiens
tctatgtaggtgagcttcccagcatt

SEQ ID NO: 79123 - DNA, 26 bp, Homo sapiens
ctatgtaggtgagcttcccagcattc

SEQ ID NO: 79124 - DNA, 26 bp, Homo sapiens
tatgtaggtgagcttcccagcattcc

SEQ ID NO: 79125 - DNA, 26 bp, Homo sapiens
atgtaggtgagcttcccagcattcca

SEQ ID NO: 79126 - DNA, 26 bp, Homo sapiens
tgtaggtgagcttcccagcattccag

SEQ ID NO: 79127 - DNA, 26 bp, Homo sapiens
gtaggtgagcttcccagcattccagg

SEQ ID NO: 79128 - DNA, 26 bp, Homo sapiens
taggtgagcttcccagcattccaggt

SEQ ID NO: 79129 - DNA, 26 bp, Homo sapiens
aggtgagcttcccagcattccaggtg

SEQ ID NO: 79130 - DNA, 26 bp, Homo sapiens
ggtgagcttcccagcattccaggtgc

SEQ ID NO: 79131 - DNA, 26 bp, Homo sapiens
gtgagcttcccagcattccaggtgca

SEQ ID NO: 79132 - DNA, 26 bp, Homo sapiens
tgagcttcccagcattccaggtgcaa

SEQ ID NO: 79133 - DNA, 26 bp, Homo sapiens
gagcttcccagcattccaggtgcaag

SEQ ID NO: 79134 - DNA, 26 bp, Homo sapiens
agcttcccagcattccaggtgcaagt

SEQ ID NO: 79135 - DNA, 26 bp, Homo sapiens
gcttcccagcattccaggtgcaagtc

SEQ ID NO: 79136 - DNA, 26 bp, Homo sapiens
cttcccagcattccaggtgcaagtca

SEQ ID NO: 79137 - DNA, 26 bp, Homo sapiens
ttcccagcattccaggtgcaagtcat

SEQ ID NO: 79138 - DNA, 26 bp, Homo sapiens
tcccagcattccaggtgcaagtcatg

SEQ ID NO: 79139 - DNA, 26 bp, Homo sapiens
cccagcattccaggtgcaagtcatgt

SEQ ID NO: 79140 - DNA, 26 bp, Homo sapiens
ccagcattccaggtgcaagtcatgtt

SEQ ID NO: 79141 - DNA, 26 bp, Homo sapiens
cagcattccaggtgcaagtcatgttg

SEQ ID NO: 79142 - DNA, 26 bp, Homo sapiens
agcattccaggtgcaagtcatgttgc

SEQ ID NO: 79143 - DNA, 26 bp, Homo sapiens
gcattccaggtgcaagtcatgttgcc

SEQ ID NO: 79144 - DNA, 26 bp, Homo sapiens
cattccaggtgcaagtcatgttgcct

SEQ ID NO: 79145 - DNA, 26 bp, Homo sapiens
attccaggtgcaagtcatgttgcctg

SEQ ID NO: 79146 - DNA, 26 bp, Homo sapiens
ttccaggtgcaagtcatgttgcctga

SEQ ID NO: 79147 - DNA, 26 bp, Homo sapiens
tccaggtgcaagtcatgttgcctgaa

SEQ ID NO: 79148 - DNA, 26 bp, Homo sapiens
ccaggtgcaagtcatgttgcctgaat

SEQ ID NO: 79149 - DNA, 26 bp, Homo sapiens
caggtgcaagtcatgttgcctgaata

SEQ ID NO: 79150 - DNA, 26 bp, Homo sapiens
aggtgcaagtcatgttgcctgaatat

SEQ ID NO: 79151 - DNA, 26 bp, Homo sapiens
ggtgcaagtcatgttgcctgaatatt

SEQ ID NO: 79152 - DNA, 26 bp, Homo sapiens
gtgcaagtcatgttgcctgaatattc

SEQ ID NO: 79153 - DNA, 26 bp, Homo sapiens
tgcaagtcatgttgcctgaatattca

SEQ ID NO: 79154 - DNA, 26 bp, Homo sapiens
gcaagtcatgttgcctgaatattcat

SEQ ID NO: 79155 - DNA, 26 bp, Homo sapiens
caagtcatgttgcctgaatattcata

SEQ ID NO: 79156 - DNA, 26 bp, Homo sapiens
aagtcatgttgcctgaatattcataa

SEQ ID NO: 79157 - DNA, 26 bp, Homo sapiens
agtcatgttgcctgaatattcataaa

SEQ ID NO: 79158 - DNA, 26 bp, Homo sapiens
gtcatgttgcctgaatattcataaat

SEQ ID NO: 79159 - DNA, 26 bp, Homo sapiens
tcatgttgcctgaatattcataaatg

SEQ ID NO: 79160 - DNA, 26 bp, Homo sapiens
catgttgcctgaatattcataaatga

SEQ ID NO: 79161 - DNA, 26 bp, Homo sapiens
atgttgcctgaatattcataaatgac

SEQ ID NO: 79162 - DNA, 26 bp, Homo sapiens
tgttgcctgaatattcataaatgaca

SEQ ID NO: 79163 - DNA, 26 bp, Homo sapiens
gttgcctgaatattcataaatgacac

SEQ ID NO: 79164 - DNA, 26 bp, Homo sapiens
ttgcctgaatattcataaatgacaca

SEQ ID NO: 79165 - DNA, 26 bp, Homo sapiens
tgcctgaatattcataaatgacacag

SEQ ID NO: 79166 - DNA, 26 bp, Homo sapiens
gcctgaatattcataaatgacacagg

SEQ ID NO: 79167 - DNA, 26 bp, Homo sapiens
cctgaatattcataaatgacacaggt

SEQ ID NO: 79168 - DNA, 26 bp, Homo sapiens
ctgaatattcataaatgacacaggtt

SEQ ID NO: 79169 - DNA, 26 bp, Homo sapiens
tgaatattcataaatgacacaggtta

SEQ ID NO: 79170 - DNA, 26 bp, Homo sapiens
gaatattcataaatgacacaggttac

SEQ ID NO: 79171 - DNA, 26 bp, Homo sapiens
aatattcataaatgacacaggttact

SEQ ID NO: 79172 - DNA, 26 bp, Homo sapiens
atattcataaatgacacaggttactt

SEQ ID NO: 79173 - DNA, 26 bp, Homo sapiens
tattcataaatgacacaggttacttc

SEQ ID NO: 79174 - DNA, 26 bp, Homo sapiens
attcataaatgacacaggttacttca

SEQ ID NO: 79175 - DNA, 26 bp, Homo sapiens
ttcataaatgacacaggttacttcat

SEQ ID NO: 79176 - DNA, 26 bp, Homo sapiens
tcataaatgacacaggttacttcatc

SEQ ID NO: 79177 - DNA, 26 bp, Homo sapiens
cataaatgacacaggttacttcatca

SEQ ID NO: 79178 - DNA, 26 bp, Homo sapiens
ataaatgacacaggttacttcatcag

SEQ ID NO: 79179 - DNA, 26 bp, Homo sapiens
taaatgacacaggttacttcatcagg

SEQ ID NO: 79180 - DNA, 26 bp, Homo sapiens
aaatgacacaggttacttcatcagga

SEQ ID NO: 79181 - DNA, 26 bp, Homo sapiens
aatgacacaggttacttcatcaggaa

SEQ ID NO: 79182 - DNA, 26 bp, Homo sapiens
atgacacaggttacttcatcaggaat

SEQ ID NO: 79183 - DNA, 26 bp, Homo sapiens
tgacacaggttacttcatcaggaata

SEQ ID NO: 79184 - DNA, 26 bp, Homo sapiens
gacacaggttacttcatcaggaatat

SEQ ID NO: 79185 - DNA, 26 bp, Homo sapiens
acacaggttacttcatcaggaatatc

SEQ ID NO: 79186 - DNA, 26 bp, Homo sapiens
cacaggttacttcatcaggaatatct

SEQ ID NO: 79187 - DNA, 26 bp, Homo sapiens
acaggttacttcatcaggaatatctg

SEQ ID NO: 79188 - DNA, 26 bp, Homo sapiens
caggttacttcatcaggaatatctgg

SEQ ID NO: 79189 - DNA, 26 bp, Homo sapiens
aggttacttcatcaggaatatctggc

SEQ ID NO: 79190 - DNA, 26 bp, Homo sapiens
ggttacttcatcaggaatatctggcg

SEQ ID NO: 79191 - DNA, 26 bp, Homo sapiens
gttacttcatcaggaatatctggcgg

SEQ ID NO: 79192 - DNA, 26 bp, Homo sapiens
ttacttcatcaggaatatctggcgga

SEQ ID NO: 79193 - DNA, 26 bp, Homo sapiens
tacttcatcaggaatatctggcggat

SEQ ID NO: 79194 - DNA, 26 bp, Homo sapiens
acttcatcaggaatatctggcggata

SEQ ID NO: 79195 - DNA, 26 bp, Homo sapiens
cttcatcaggaatatctggcggatat

SEQ ID NO: 79196 - DNA, 26 bp, Homo sapiens
ttcatcaggaatatctggcggatatc

SEQ ID NO: 79197 - DNA, 26 bp, Homo sapiens
tcatcaggaatatctggcggatatcc

SEQ ID NO: 79198 - DNA, 26 bp, Homo sapiens
catcaggaatatctggcggatatcca

SEQ ID NO: 79199 - DNA, 26 bp, Homo sapiens
atcaggaatatctggcggatatccag

SEQ ID NO: 79200 - DNA, 26 bp, Homo sapiens
tcaggaatatctggcggatatccaga

SEQ ID NO: 79201 - DNA, 26 bp, Homo sapiens
caggaatatctggcggatatccagaa

SEQ ID NO: 79202 - DNA, 26 bp, Homo sapiens
aggaatatctggcggatatccagaag

SEQ ID NO: 79203 - DNA, 26 bp, Homo sapiens
ggaatatctggcggatatccagaaga

SEQ ID NO: 79204 - DNA, 26 bp, Homo sapiens
gaatatctggcggatatccagaagaa

SEQ ID NO: 79205 - DNA, 26 bp, Homo sapiens
aatatctggcggatatccagaagaaa

SEQ ID NO: 79206 - DNA, 26 bp, Homo sapiens
atatctggcggatatccagaagaaat

SEQ ID NO: 79207 - DNA, 26 bp, Homo sapiens
tatctggcggatatccagaagaaatg

SEQ ID NO: 79208 - DNA, 26 bp, Homo sapiens
atctggcggatatccagaagaaatgt

SEQ ID NO: 79209 - DNA, 26 bp, Homo sapiens
tctggcggatatccagaagaaatgtc

SEQ ID NO: 79210 - DNA, 26 bp, Homo sapiens
ctggcggatatccagaagaaatgtct

SEQ ID NO: 79211 - DNA, 26 bp, Homo sapiens
tggcggatatccagaagaaatgtctt

SEQ ID NO: 79212 - DNA, 26 bp, Homo sapiens
ggcggatatccagaagaaatgtcttt

SEQ ID NO: 79213 - DNA, 26 bp, Homo sapiens
gcggatatccagaagaaatgtctttt

SEQ ID NO: 79214 - DNA, 26 bp, Homo sapiens
cggatatccagaagaaatgtcttttc

SEQ ID NO: 79215 - DNA, 26 bp, Homo sapiens
ggatatccagaagaaatgtcttttcc

SEQ ID NO: 79216 - DNA, 26 bp, Homo sapiens
gatatccagaagaaatgtcttttcca

SEQ ID NO: 79217 - DNA, 26 bp, Homo sapiens
atatccagaagaaatgtcttttccac

SEQ ID NO: 79218 - DNA, 26 bp, Homo sapiens
tatccagaagaaatgtcttttccaca

SEQ ID NO: 79219 - DNA, 26 bp, Homo sapiens
atccagaagaaatgtcttttccacat

SEQ ID NO: 79220 - DNA, 26 bp, Homo sapiens
tccagaagaaatgtcttttccacata

SEQ ID NO: 79221 - DNA, 26 bp, Homo sapiens
ccagaagaaatgtcttttccacatat

SEQ ID NO: 79222 - DNA, 26 bp, Homo sapiens
cagaagaaatgtcttttccacatatc

SEQ ID NO: 79223 - DNA, 26 bp, Homo sapiens
agaagaaatgtcttttccacatatca

SEQ ID NO: 79224 - DNA, 26 bp, Homo sapiens
gaagaaatgtcttttccacatatcag

SEQ ID NO: 79225 - DNA, 26 bp, Homo sapiens
aagaaatgtcttttccacatatcagt

SEQ ID NO: 79226 - DNA, 26 bp, Homo sapiens
agaaatgtcttttccacatatcagtg

SEQ ID NO: 79227 - DNA, 26 bp, Homo sapiens
gaaatgtcttttccacatatcagtgt

SEQ ID NO: 79228 - DNA, 26 bp, Homo sapiens
aaatgtcttttccacatatcagtgtc

SEQ ID NO: 79229 - DNA, 26 bp, Homo sapiens
aatgtcttttccacatatcagtgtct

SEQ ID NO: 79230 - DNA, 26 bp, Homo sapiens
atgtcttttccacatatcagtgtctc

SEQ ID NO: 79231 - DNA, 26 bp, Homo sapiens
tgtcttttccacatatcagtgtctct

SEQ ID NO: 79232 - DNA, 26 bp, Homo sapiens
gtcttttccacatatcagtgtctctt

SEQ ID NO: 79233 - DNA, 26 bp, Homo sapiens
tcttttccacatatcagtgtctcttg

SEQ ID NO: 79234 - DNA, 26 bp, Homo sapiens
cttttccacatatcagtgtctcttga

SEQ ID NO: 79235 - DNA, 26 bp, Homo sapiens
ttttccacatatcagtgtctcttgaa

SEQ ID NO: 79236 - DNA, 26 bp, Homo sapiens
tttccacatatcagtgtctcttgaaa

SEQ ID NO: 79237 - DNA, 26 bp, Homo sapiens
ttccacatatcagtgtctcttgaaaa

SEQ ID NO: 79238 - DNA, 26 bp, Homo sapiens
tccacatatcagtgtctcttgaaaat

SEQ ID NO: 79239 - DNA, 26 bp, Homo sapiens
ccacatatcagtgtctcttgaaaatg

SEQ ID NO: 79240 - DNA, 26 bp, Homo sapiens
cacatatcagtgtctcttgaaaatgt

SEQ ID NO: 79241 - DNA, 26 bp, Homo sapiens
acatatcagtgtctcttgaaaatgtt

SEQ ID NO: 79242 - DNA, 26 bp, Homo sapiens
catatcagtgtctcttgaaaatgttt

SEQ ID NO: 79243 - DNA, 26 bp, Homo sapiens
atatcagtgtctcttgaaaatgtttg

SEQ ID NO: 79244 - DNA, 26 bp, Homo sapiens
tatcagtgtctcttgaaaatgtttgg

SEQ ID NO: 79245 - DNA, 26 bp, Homo sapiens
atcagtgtctcttgaaaatgtttggg

SEQ ID NO: 79246 - DNA, 26 bp, Homo sapiens
tcagtgtctcttgaaaatgtttggga

SEQ ID NO: 79247 - DNA, 26 bp, Homo sapiens
cagtgtctcttgaaaatgtttgggac

SEQ ID NO: 79248 - DNA, 26 bp, Homo sapiens
agtgtctcttgaaaatgtttgggaca

SEQ ID NO: 79249 - DNA, 26 bp, Homo sapiens
gtgtctcttgaaaatgtttgggacat

SEQ ID NO: 79250 - DNA, 26 bp, Homo sapiens
tgtctcttgaaaatgtttgggacatt

SEQ ID NO: 79251 - DNA, 26 bp, Homo sapiens
gtctcttgaaaatgtttgggacattc

SEQ ID NO: 79252 - DNA, 26 bp, Homo sapiens
tctcttgaaaatgtttgggacattca

SEQ ID NO: 79253 - DNA, 26 bp, Homo sapiens
ctcttgaaaatgtttgggacattcag

SEQ ID NO: 79254 - DNA, 26 bp, Homo sapiens
tcttgaaaatgtttgggacattcagc

SEQ ID NO: 79255 - DNA, 26 bp, Homo sapiens
cttgaaaatgtttgggacattcagca

SEQ ID NO: 79256 - DNA, 26 bp, Homo sapiens
ttgaaaatgtttgggacattcagcag

SEQ ID NO: 79257 - DNA, 26 bp, Homo sapiens
tgaaaatgtttgggacattcagcagt

SEQ ID NO: 79258 - DNA, 26 bp, Homo sapiens
gaaaatgtttgggacattcagcagtg

SEQ ID NO: 79259 - DNA, 26 bp, Homo sapiens
aaaatgtttgggacattcagcagtgc

SEQ ID NO: 79260 - DNA, 26 bp, Homo sapiens
aaatgtttgggacattcagcagtgca

SEQ ID NO: 79261 - DNA, 26 bp, Homo sapiens
aatgtttgggacattcagcagtgcag

SEQ ID NO: 79262 - DNA, 26 bp, Homo sapiens
atgtttgggacattcagcagtgcagt

SEQ ID NO: 79263 - DNA, 26 bp, Homo sapiens
tgtttgggacattcagcagtgcagta

SEQ ID NO: 79264 - DNA, 26 bp, Homo sapiens
gtttgggacattcagcagtgcagtac

SEQ ID NO: 79265 - DNA, 26 bp, Homo sapiens
tttgggacattcagcagtgcagtaca

SEQ ID NO: 79266 - DNA, 26 bp, Homo sapiens
ttgggacattcagcagtgcagtacat

SEQ ID NO: 79267 - DNA, 26 bp, Homo sapiens
tgggacattcagcagtgcagtacata

SEQ ID NO: 79268 - DNA, 26 bp, Homo sapiens
gggacattcagcagtgcagtacatag

SEQ ID NO: 79269 - DNA, 26 bp, Homo sapiens
ggacattcagcagtgcagtacataga

SEQ ID NO: 79270 - DNA, 26 bp, Homo sapiens
gacattcagcagtgcagtacatagaa

SEQ ID NO: 79271 - DNA, 26 bp, Homo sapiens
acattcagcagtgcagtacatagaag

SEQ ID NO: 79272 - DNA, 26 bp, Homo sapiens
cattcagcagtgcagtacatagaagc

SEQ ID NO: 79273 - DNA, 26 bp, Homo sapiens
attcagcagtgcagtacatagaagca

SEQ ID NO: 79274 - DNA, 26 bp, Homo sapiens
ttcagcagtgcagtacatagaagcat

SEQ ID NO: 79275 - DNA, 26 bp, Homo sapiens
tcagcagtgcagtacatagaagcatg

SEQ ID NO: 79276 - DNA, 26 bp, Homo sapiens
cagcagtgcagtacatagaagcatgt

SEQ ID NO: 79277 - DNA, 26 bp, Homo sapiens
agcagtgcagtacatagaagcatgtg

SEQ ID NO: 79278 - DNA, 26 bp, Homo sapiens
gcagtgcagtacatagaagcatgtgg

SEQ ID NO: 79279 - DNA, 26 bp, Homo sapiens
cagtgcagtacatagaagcatgtggt

SEQ ID NO: 79280 - DNA, 26 bp, Homo sapiens
agtgcagtacatagaagcatgtggtt

SEQ ID NO: 79281 - DNA, 26 bp, Homo sapiens
gtgcagtacatagaagcatgtggttc

SEQ ID NO: 79282 - DNA, 26 bp, Homo sapiens
tgcagtacatagaagcatgtggttcc

SEQ ID NO: 79283 - DNA, 26 bp, Homo sapiens
gcagtacatagaagcatgtggttcca

SEQ ID NO: 79284 - DNA, 26 bp, Homo sapiens
cagtacatagaagcatgtggttccag

SEQ ID NO: 79285 - DNA, 26 bp, Homo sapiens
agtacatagaagcatgtggttccaga

SEQ ID NO: 79286 - DNA, 26 bp, Homo sapiens
gtacatagaagcatgtggttccagaa

SEQ ID NO: 79287 - DNA, 26 bp, Homo sapiens
tacatagaagcatgtggttccagaaa

SEQ ID NO: 79288 - DNA, 26 bp, Homo sapiens
acatagaagcatgtggttccagaaag

SEQ ID NO: 79289 - DNA, 26 bp, Homo sapiens
catagaagcatgtggttccagaaagt

SEQ ID NO: 79290 - DNA, 26 bp, Homo sapiens
atagaagcatgtggttccagaaagtt

SEQ ID NO: 79291 - DNA, 26 bp, Homo sapiens
tagaagcatgtggttccagaaagttt

SEQ ID NO: 79292 - DNA, 26 bp, Homo sapiens
agaagcatgtggttccagaaagtttt

SEQ ID NO: 79293 - DNA, 26 bp, Homo sapiens
gaagcatgtggttccagaaagttttt

SEQ ID NO: 79294 - DNA, 26 bp, Homo sapiens
aagcatgtggttccagaaagttttta

SEQ ID NO: 79295 - DNA, 26 bp, Homo sapiens
agcatgtggttccagaaagtttttat

SEQ ID NO: 79296 - DNA, 26 bp, Homo sapiens
gcatgtggttccagaaagtttttata

SEQ ID NO: 79297 - DNA, 26 bp, Homo sapiens
catgtggttccagaaagtttttatac

SEQ ID NO: 79298 - DNA, 26 bp, Homo sapiens
atgtggttccagaaagtttttatacc

SEQ ID NO: 79299 - DNA, 26 bp, Homo sapiens
tgtggttccagaaagtttttatacca

SEQ ID NO: 79300 - DNA, 26 bp, Homo sapiens
gtggttccagaaagtttttataccaa

SEQ ID NO: 79301 - DNA, 26 bp, Homo sapiens
tggttccagaaagtttttataccaaa

SEQ ID NO: 79302 - DNA, 26 bp, Homo sapiens
ggttccagaaagtttttataccaaag

SEQ ID NO: 79303 - DNA, 26 bp, Homo sapiens
gttccagaaagtttttataccaaagc

SEQ ID NO: 79304 - DNA, 26 bp, Homo sapiens
ttccagaaagtttttataccaaagcc

SEQ ID NO: 79305 - DNA, 26 bp, Homo sapiens
tccagaaagtttttataccaaagccg

SEQ ID NO: 79306 - DNA, 26 bp, Homo sapiens
ccagaaagtttttataccaaagccga

SEQ ID NO: 79307 - DNA, 26 bp, Homo sapiens
cagaaagtttttataccaaagccgag

SEQ ID NO: 79308 - DNA, 26 bp, Homo sapiens
agaaagtttttataccaaagccgagc

SEQ ID NO: 79309 - DNA, 26 bp, Homo sapiens
gaaagtttttataccaaagccgagct

SEQ ID NO: 79310 - DNA, 26 bp, Homo sapiens
aaagtttttataccaaagccgagctg

SEQ ID NO: 79311 - DNA, 26 bp, Homo sapiens
aagtttttataccaaagccgagctgt

SEQ ID NO: 79312 - DNA, 26 bp, Homo sapiens
agtttttataccaaagccgagctgtt

SEQ ID NO: 79313 - DNA, 26 bp, Homo sapiens
gtttttataccaaagccgagctgttg

SEQ ID NO: 79314 - DNA, 26 bp, Homo sapiens
tttttataccaaagccgagctgttgt

SEQ ID NO: 79315 - DNA, 26 bp, Homo sapiens
ttttataccaaagccgagctgttgtt

SEQ ID NO: 79316 - DNA, 26 bp, Homo sapiens
tttataccaaagccgagctgttgttt

SEQ ID NO: 79317 - DNA, 26 bp, Homo sapiens
ttataccaaagccgagctgttgtttt

SEQ ID NO: 79318 - DNA, 26 bp, Homo sapiens
tataccaaagccgagctgttgtttta

SEQ ID NO: 79319 - DNA, 26 bp, Homo sapiens
ataccaaagccgagctgttgttttat

SEQ ID NO: 79320 - DNA, 26 bp, Homo sapiens
taccaaagccgagctgttgttttatt

SEQ ID NO: 79321 - DNA, 26 bp, Homo sapiens
accaaagccgagctgttgttttatta

SEQ ID NO: 79322 - DNA, 26 bp, Homo sapiens
ccaaagccgagctgttgttttattaa

SEQ ID NO: 79323 - DNA, 26 bp, Homo sapiens
caaagccgagctgttgttttattaat

SEQ ID NO: 79324 - DNA, 26 bp, Homo sapiens
aaagccgagctgttgttttattaatc

SEQ ID NO: 79325 - DNA, 26 bp, Homo sapiens
aagccgagctgttgttttattaatcc

SEQ ID NO: 79326 - DNA, 26 bp, Homo sapiens
agccgagctgttgttttattaatcct

SEQ ID NO: 79327 - DNA, 26 bp, Homo sapiens
gccgagctgttgttttattaatcctt

SEQ ID NO: 79328 - DNA, 26 bp, Homo sapiens
ccgagctgttgttttattaatccttg

SEQ ID NO: 79329 - DNA, 26 bp, Homo sapiens
cgagctgttgttttattaatccttgt

SEQ ID NO: 79330 - DNA, 26 bp, Homo sapiens
gagctgttgttttattaatccttgtg

SEQ ID NO: 79331 - DNA, 26 bp, Homo sapiens
agctgttgttttattaatccttgtga

SEQ ID NO: 79332 - DNA, 26 bp, Homo sapiens
gctgttgttttattaatccttgtgat

SEQ ID NO: 79333 - DNA, 26 bp, Homo sapiens
ctgttgttttattaatccttgtgatt

SEQ ID NO: 79334 - DNA, 26 bp, Homo sapiens
tgttgttttattaatccttgtgattt

SEQ ID NO: 79335 - DNA, 26 bp, Homo sapiens
gttgttttattaatccttgtgatttg

SEQ ID NO: 79336 - DNA, 26 bp, Homo sapiens
ttgttttattaatccttgtgatttga

SEQ ID NO: 79337 - DNA, 26 bp, Homo sapiens
tgttttattaatccttgtgatttgaa

SEQ ID NO: 79338 - DNA, 26 bp, Homo sapiens
gttttattaatccttgtgatttgaaa

SEQ ID NO: 79339 - DNA, 26 bp, Homo sapiens
ttttattaatccttgtgatttgaaat

SEQ ID NO: 79340 - DNA, 26 bp, Homo sapiens
tttattaatccttgtgatttgaaatc

SEQ ID NO: 79341 - DNA, 26 bp, Homo sapiens
ttattaatccttgtgatttgaaatct

SEQ ID NO: 79342 - DNA, 26 bp, Homo sapiens
tattaatccttgtgatttgaaatctt

SEQ ID NO: 79343 - DNA, 26 bp, Homo sapiens
attaatccttgtgatttgaaatcttt

SEQ ID NO: 79344 - DNA, 26 bp, Homo sapiens
ttaatccttgtgatttgaaatctttc

SEQ ID NO: 79345 - DNA, 26 bp, Homo sapiens
taatccttgtgatttgaaatctttct

SEQ ID NO: 79346 - DNA, 26 bp, Homo sapiens
aatccttgtgatttgaaatctttctt

SEQ ID NO: 79347 - DNA, 26 bp, Homo sapiens
atccttgtgatttgaaatctttcttt

SEQ ID NO: 79348 - DNA, 26 bp, Homo sapiens
tccttgtgatttgaaatctttctttg

SEQ ID NO: 79349 - DNA, 26 bp, Homo sapiens
ccttgtgatttgaaatctttctttga

SEQ ID NO: 79350 - DNA, 26 bp, Homo sapiens
cttgtgatttgaaatctttctttgat

SEQ ID NO: 79351 - DNA, 26 bp, Homo sapiens
ttgtgatttgaaatctttctttgatg

SEQ ID NO: 79352 - DNA, 26 bp, Homo sapiens
tgtgatttgaaatctttctttgatgc

SEQ ID NO: 79353 - DNA, 26 bp, Homo sapiens
gtgatttgaaatctttctttgatgcc

SEQ ID NO: 79354 - DNA, 26 bp, Homo sapiens
tgatttgaaatctttctttgatgcca

SEQ ID NO: 79355 - DNA, 26 bp, Homo sapiens
gatttgaaatctttctttgatgccat

SEQ ID NO: 79356 - DNA, 26 bp, Homo sapiens
atttgaaatctttctttgatgccatt

SEQ ID NO: 79357 - DNA, 26 bp, Homo sapiens
tttgaaatctttctttgatgccattt

SEQ ID NO: 79358 - DNA, 26 bp, Homo sapiens
ttgaaatctttctttgatgccatttt

SEQ ID NO: 79359 - DNA, 26 bp, Homo sapiens
tgaaatctttctttgatgccattttt

SEQ ID NO: 79360 - DNA, 26 bp, Homo sapiens
gaaatctttctttgatgccattttta

SEQ ID NO: 79361 - DNA, 26 bp, Homo sapiens
aaatctttctttgatgccatttttat

SEQ ID NO: 79362 - DNA, 26 bp, Homo sapiens
aatctttctttgatgccatttttata

SEQ ID NO: 79363 - DNA, 26 bp, Homo sapiens
atctttctttgatgccatttttataa

SEQ ID NO: 79364 - DNA, 26 bp, Homo sapiens
tctttctttgatgccatttttataaa

SEQ ID NO: 79365 - DNA, 26 bp, Homo sapiens
ctttctttgatgccatttttataaaa

SEQ ID NO: 79366 - DNA, 26 bp, Homo sapiens
tttctttgatgccatttttataaaaa

SEQ ID NO: 79367 - DNA, 26 bp, Homo sapiens
ttctttgatgccatttttataaaaat

SEQ ID NO: 79368 - DNA, 26 bp, Homo sapiens
tctttgatgccatttttataaaaatg

SEQ ID NO: 79369 - DNA, 26 bp, Homo sapiens
ctttgatgccatttttataaaaatga

SEQ ID NO: 79370 - DNA, 26 bp, Homo sapiens
tttgatgccatttttataaaaatgaa

SEQ ID NO: 79371 - DNA, 26 bp, Homo sapiens
ttgatgccatttttataaaaatgaag

SEQ ID NO: 79372 - DNA, 26 bp, Homo sapiens
tgatgccatttttataaaaatgaagt

SEQ ID NO: 79373 - DNA, 26 bp, Homo sapiens
gatgccatttttataaaaatgaagtt

SEQ ID NO: 79374 - DNA, 26 bp, Homo sapiens
atgccatttttataaaaatgaagttt

SEQ ID NO: 79375 - DNA, 26 bp, Homo sapiens
tgccatttttataaaaatgaagtttc

SEQ ID NO: 79376 - DNA, 26 bp, Homo sapiens
gccatttttataaaaatgaagtttcc

SEQ ID NO: 79377 - DNA, 26 bp, Homo sapiens
ccatttttataaaaatgaagtttcct

SEQ ID NO: 79378 - DNA, 26 bp, Homo sapiens
catttttataaaaatgaagtttcctt

SEQ ID NO: 79379 - DNA, 26 bp, Homo sapiens
atttttataaaaatgaagtttccttg

SEQ ID NO: 79380 - DNA, 26 bp, Homo sapiens
tttttataaaaatgaagtttccttgg

SEQ ID NO: 79381 - DNA, 26 bp, Homo sapiens
ttttataaaaatgaagtttccttggt

SEQ ID NO: 79382 - DNA, 26 bp, Homo sapiens
tttataaaaatgaagtttccttggtt

SEQ ID NO: 79383 - DNA, 26 bp, Homo sapiens
ttataaaaatgaagtttccttggttg

SEQ ID NO: 79384 - DNA, 26 bp, Homo sapiens
tataaaaatgaagtttccttggttgg

SEQ ID NO: 79385 - DNA, 26 bp, Homo sapiens
ataaaaatgaagtttccttggttggc

SEQ ID NO: 79386 - DNA, 26 bp, Homo sapiens
taaaaatgaagtttccttggttggca

SEQ ID NO: 79387 - DNA, 26 bp, Homo sapiens
aaaaatgaagtttccttggttggcag

SEQ ID NO: 79388 - DNA, 26 bp, Homo sapiens
aaaatgaagtttccttggttggcagt

SEQ ID NO: 79389 - DNA, 26 bp, Homo sapiens
aaatgaagtttccttggttggcagtt

SEQ ID NO: 79390 - DNA, 26 bp, Homo sapiens
aatgaagtttccttggttggcagttc

SEQ ID NO: 79391 - DNA, 26 bp, Homo sapiens
atgaagtttccttggttggcagttct

SEQ ID NO: 79392 - DNA, 26 bp, Homo sapiens
tgaagtttccttggttggcagttctt

SEQ ID NO: 79393 - DNA, 26 bp, Homo sapiens
gaagtttccttggttggcagttctta

SEQ ID NO: 79394 - DNA, 26 bp, Homo sapiens
aagtttccttggttggcagttcttaa

SEQ ID NO: 79395 - DNA, 26 bp, Homo sapiens
agtttccttggttggcagttcttaat

SEQ ID NO: 79396 - DNA, 26 bp, Homo sapiens
gtttccttggttggcagttcttaatt

SEQ ID NO: 79397 - DNA, 26 bp, Homo sapiens
tttccttggttggcagttcttaattg

SEQ ID NO: 79398 - DNA, 26 bp, Homo sapiens
ttccttggttggcagttcttaattgc

SEQ ID NO: 79399 - DNA, 26 bp, Homo sapiens
tccttggttggcagttcttaattgct

SEQ ID NO: 79400 - DNA, 26 bp, Homo sapiens
ccttggttggcagttcttaattgctg

SEQ ID NO: 79401 - DNA, 26 bp, Homo sapiens
cttggttggcagttcttaattgctgc

SEQ ID NO: 79402 - DNA, 26 bp, Homo sapiens
ttggttggcagttcttaattgctgct

SEQ ID NO: 79403 - DNA, 26 bp, Homo sapiens
tggttggcagttcttaattgctgctt

SEQ ID NO: 79404 - DNA, 26 bp, Homo sapiens
ggttggcagttcttaattgctgcttg

SEQ ID NO: 79405 - DNA, 26 bp, Homo sapiens
gttggcagttcttaattgctgcttgg

SEQ ID NO: 79406 - DNA, 26 bp, Homo sapiens
ttggcagttcttaattgctgcttggc

SEQ ID NO: 79407 - DNA, 26 bp, Homo sapiens
tggcagttcttaattgctgcttggca

SEQ ID NO: 79408 - DNA, 26 bp, Homo sapiens
ggcagttcttaattgctgcttggcaa

SEQ ID NO: 79409 - DNA, 26 bp, Homo sapiens
gcagttcttaattgctgcttggcaat

SEQ ID NO: 79410 - DNA, 26 bp, Homo sapiens
cagttcttaattgctgcttggcaata

SEQ ID NO: 79411 - DNA, 26 bp, Homo sapiens
agttcttaattgctgcttggcaatat

SEQ ID NO: 79412 - DNA, 26 bp, Homo sapiens
gttcttaattgctgcttggcaatata

SEQ ID NO: 79413 - DNA, 26 bp, Homo sapiens
ttcttaattgctgcttggcaatatat

SEQ ID NO: 79414 - DNA, 26 bp, Homo sapiens
tcttaattgctgcttggcaatatata

SEQ ID NO: 79415 - DNA, 26 bp, Homo sapiens
cttaattgctgcttggcaatatatag

SEQ ID NO: 79416 - DNA, 26 bp, Homo sapiens
ttaattgctgcttggcaatatataga

SEQ ID NO: 79417 - DNA, 26 bp, Homo sapiens
taattgctgcttggcaatatatagag

SEQ ID NO: 79418 - DNA, 26 bp, Homo sapiens
aattgctgcttggcaatatatagaga

SEQ ID NO: 79419 - DNA, 26 bp, Homo sapiens
attgctgcttggcaatatatagagat

SEQ ID NO: 79420 - DNA, 26 bp, Homo sapiens
ttgctgcttggcaatatatagagata

SEQ ID NO: 79421 - DNA, 26 bp, Homo sapiens
tgctgcttggcaatatatagagatat

SEQ ID NO: 79422 - DNA, 26 bp, Homo sapiens
gctgcttggcaatatatagagatatt

SEQ ID NO: 79423 - DNA, 26 bp, Homo sapiens
ctgcttggcaatatatagagatattc

SEQ ID NO: 79424 - DNA, 26 bp, Homo sapiens
tgcttggcaatatatagagatattca

SEQ ID NO: 79425 - DNA, 26 bp, Homo sapiens
gcttggcaatatatagagatattcat

SEQ ID NO: 79426 - DNA, 26 bp, Homo sapiens
cttggcaatatatagagatattcata

SEQ ID NO: 79427 - DNA, 26 bp, Homo sapiens
ttggcaatatatagagatattcatac

SEQ ID NO: 79428 - DNA, 26 bp, Homo sapiens
tggcaatatatagagatattcatacc

SEQ ID NO: 79429 - DNA, 26 bp, Homo sapiens
ggcaatatatagagatattcataccc

SEQ ID NO: 79430 - DNA, 26 bp, Homo sapiens
gcaatatatagagatattcataccca

SEQ ID NO: 79431 - DNA, 26 bp, Homo sapiens
caatatatagagatattcatacccat

SEQ ID NO: 79432 - DNA, 26 bp, Homo sapiens
aatatatagagatattcatacccatc

SEQ ID NO: 79433 - DNA, 26 bp, Homo sapiens
atatatagagatattcatacccatct

SEQ ID NO: 79434 - DNA, 26 bp, Homo sapiens
tatatagagatattcatacccatctt

SEQ ID NO: 79435 - DNA, 26 bp, Homo sapiens
atatagagatattcatacccatctta

SEQ ID NO: 79436 - DNA, 26 bp, Homo sapiens
tatagagatattcatacccatcttaa

SEQ ID NO: 79437 - DNA, 26 bp, Homo sapiens
atagagatattcatacccatcttaaa

SEQ ID NO: 79438 - DNA, 26 bp, Homo sapiens
tagagatattcatacccatcttaaaa

SEQ ID NO: 79439 - DNA, 26 bp, Homo sapiens
agagatattcatacccatcttaaaaa

SEQ ID NO: 79440 - DNA, 26 bp, Homo sapiens
gagatattcatacccatcttaaaaat

SEQ ID NO: 79441 - DNA, 26 bp, Homo sapiens
agatattcatacccatcttaaaaatt

SEQ ID NO: 79442 - DNA, 26 bp, Homo sapiens
gatattcatacccatcttaaaaattg

SEQ ID NO: 79443 - DNA, 26 bp, Homo sapiens
atattcatacccatcttaaaaattgt

SEQ ID NO: 79444 - DNA, 26 bp, Homo sapiens
tattcatacccatcttaaaaattgtg

SEQ ID NO: 79445 - DNA, 26 bp, Homo sapiens
attcatacccatcttaaaaattgtgg

SEQ ID NO: 79446 - DNA, 26 bp, Homo sapiens
ttcatacccatcttaaaaattgtggc

SEQ ID NO: 79447 - DNA, 26 bp, Homo sapiens
tcatacccatcttaaaaattgtggct

SEQ ID NO: 79448 - DNA, 26 bp, Homo sapiens
catacccatcttaaaaattgtggctg

SEQ ID NO: 79449 - DNA, 26 bp, Homo sapiens
atacccatcttaaaaattgtggctgg

SEQ ID NO: 79450 - DNA, 26 bp, Homo sapiens
tacccatcttaaaaattgtggctggt

SEQ ID NO: 79451 - DNA, 26 bp, Homo sapiens
acccatcttaaaaattgtggctggtt

SEQ ID NO: 79452 - DNA, 26 bp, Homo sapiens
cccatcttaaaaattgtggctggttc

SEQ ID NO: 79453 - DNA, 26 bp, Homo sapiens
ccatcttaaaaattgtggctggttct

SEQ ID NO: 79454 - DNA, 26 bp, Homo sapiens
catcttaaaaattgtggctggttcta

SEQ ID NO: 79455 - DNA, 26 bp, Homo sapiens
atcttaaaaattgtggctggttctac

SEQ ID NO: 79456 - DNA, 26 bp, Homo sapiens
tcttaaaaattgtggctggttctacc

SEQ ID NO: 79457 - DNA, 26 bp, Homo sapiens
cttaaaaattgtggctggttctaccc

SEQ ID NO: 79458 - DNA, 26 bp, Homo sapiens
ttaaaaattgtggctggttctaccca

SEQ ID NO: 79459 - DNA, 26 bp, Homo sapiens
taaaaattgtggctggttctacccag

SEQ ID NO: 79460 - DNA, 26 bp, Homo sapiens
aaaaattgtggctggttctacccaga

SEQ ID NO: 79461 - DNA, 26 bp, Homo sapiens
aaaattgtggctggttctacccagat

SEQ ID NO: 79462 - DNA, 26 bp, Homo sapiens
aaattgtggctggttctacccagatg

SEQ ID NO: 79463 - DNA, 26 bp, Homo sapiens
aattgtggctggttctacccagatgt

SEQ ID NO: 79464 - DNA, 26 bp, Homo sapiens
attgtggctggttctacccagatgtg

SEQ ID NO: 79465 - DNA, 26 bp, Homo sapiens
ttgtggctggttctacccagatgtgg

SEQ ID NO: 79466 - DNA, 26 bp, Homo sapiens
tgtggctggttctacccagatgtggc

SEQ ID NO: 79467 - DNA, 26 bp, Homo sapiens
gtggctggttctacccagatgtggcc

SEQ ID NO: 79468 - DNA, 26 bp, Homo sapiens
tggctggttctacccagatgtggcca

SEQ ID NO: 79469 - DNA, 26 bp, Homo sapiens
ggctggttctacccagatgtggccag

SEQ ID NO: 79470 - DNA, 26 bp, Homo sapiens
gctggttctacccagatgtggccaga

SEQ ID NO: 79471 - DNA, 26 bp, Homo sapiens
ctggttctacccagatgtggccagag

SEQ ID NO: 79472 - DNA, 26 bp, Homo sapiens
tggttctacccagatgtggccagagc

SEQ ID NO: 79473 - DNA, 26 bp, Homo sapiens
ggttctacccagatgtggccagagca

SEQ ID NO: 79474 - DNA, 26 bp, Homo sapiens
gttctacccagatgtggccagagcag

SEQ ID NO: 79475 - DNA, 26 bp, Homo sapiens
ttctacccagatgtggccagagcagt

SEQ ID NO: 79476 - DNA, 26 bp, Homo sapiens
tctacccagatgtggccagagcagtt

SEQ ID NO: 79477 - DNA, 26 bp, Homo sapiens
ctacccagatgtggccagagcagttt

SEQ ID NO: 79478 - DNA, 26 bp, Homo sapiens
tacccagatgtggccagagcagttta

SEQ ID NO: 79479 - DNA, 26 bp, Homo sapiens
acccagatgtggccagagcagtttat

SEQ ID NO: 79480 - DNA, 26 bp, Homo sapiens
cccagatgtggccagagcagtttata

SEQ ID NO: 79481 - DNA, 26 bp, Homo sapiens
ccagatgtggccagagcagtttatat

SEQ ID NO: 79482 - DNA, 26 bp, Homo sapiens
cagatgtggccagagcagtttatatt

SEQ ID NO: 79483 - DNA, 26 bp, Homo sapiens
agatgtggccagagcagtttatattt

SEQ ID NO: 79484 - DNA, 26 bp, Homo sapiens
gatgtggccagagcagtttatatttg

SEQ ID NO: 79485 - DNA, 26 bp, Homo sapiens
atgtggccagagcagtttatatttgt

SEQ ID NO: 79486 - DNA, 26 bp, Homo sapiens
tgtggccagagcagtttatatttgta

SEQ ID NO: 79487 - DNA, 26 bp, Homo sapiens
gtggccagagcagtttatatttgtaa

SEQ ID NO: 79488 - DNA, 26 bp, Homo sapiens
tggccagagcagtttatatttgtaat

SEQ ID NO: 79489 - DNA, 26 bp, Homo sapiens
ggccagagcagtttatatttgtaatt

SEQ ID NO: 79490 - DNA, 26 bp, Homo sapiens
gccagagcagtttatatttgtaattc

SEQ ID NO: 79491 - DNA, 26 bp, Homo sapiens
ccagagcagtttatatttgtaattcc

SEQ ID NO: 79492 - DNA, 26 bp, Homo sapiens
cagagcagtttatatttgtaattcct

SEQ ID NO: 79493 - DNA, 26 bp, Homo sapiens
agagcagtttatatttgtaattcctc

SEQ ID NO: 79494 - DNA, 26 bp, Homo sapiens
gagcagtttatatttgtaattcctcc

SEQ ID NO: 79495 - DNA, 26 bp, Homo sapiens
agcagtttatatttgtaattcctcca

SEQ ID NO: 79496 - DNA, 26 bp, Homo sapiens
gcagtttatatttgtaattcctccat

SEQ ID NO: 79497 - DNA, 26 bp, Homo sapiens
cagtttatatttgtaattcctccatg

SEQ ID NO: 79498 - DNA, 26 bp, Homo sapiens
agtttatatttgtaattcctccatga

SEQ ID NO: 79499 - DNA, 26 bp, Homo sapiens
gtttatatttgtaattcctccatgac

SEQ ID NO: 79500 - DNA, 26 bp, Homo sapiens
tttatatttgtaattcctccatgaca

SEQ ID NO: 79501 - DNA, 26 bp, Homo sapiens
ttatatttgtaattcctccatgacac

SEQ ID NO: 79502 - DNA, 26 bp, Homo sapiens
tatatttgtaattcctccatgacacc

SEQ ID NO: 79503 - DNA, 26 bp, Homo sapiens
atatttgtaattcctccatgacacca

SEQ ID NO: 79504 - DNA, 26 bp, Homo sapiens
tatttgtaattcctccatgacaccag

SEQ ID NO: 79505 - DNA, 26 bp, Homo sapiens
atttgtaattcctccatgacaccagc

SEQ ID NO: 79506 - DNA, 26 bp, Homo sapiens
tttgtaattcctccatgacaccagct

SEQ ID NO: 79507 - DNA, 26 bp, Homo sapiens
ttgtaattcctccatgacaccagctg

SEQ ID NO: 79508 - DNA, 26 bp, Homo sapiens
tgtaattcctccatgacaccagctga

SEQ ID NO: 79509 - DNA, 26 bp, Homo sapiens
gtaattcctccatgacaccagctgaa

SEQ ID NO: 79510 - DNA, 26 bp, Homo sapiens
taattcctccatgacaccagctgaag

SEQ ID NO: 79511 - DNA, 26 bp, Homo sapiens
aattcctccatgacaccagctgaaga

SEQ ID NO: 79512 - DNA, 26 bp, Homo sapiens
attcctccatgacaccagctgaagag

SEQ ID NO: 79513 - DNA, 26 bp, Homo sapiens
ttcctccatgacaccagctgaagagt

SEQ ID NO: 79514 - DNA, 26 bp, Homo sapiens
tcctccatgacaccagctgaagagta

SEQ ID NO: 79515 - DNA, 26 bp, Homo sapiens
cctccatgacaccagctgaagagtat

SEQ ID NO: 79516 - DNA, 26 bp, Homo sapiens
ctccatgacaccagctgaagagtatg

SEQ ID NO: 79517 - DNA, 26 bp, Homo sapiens
tccatgacaccagctgaagagtatgt

SEQ ID NO: 79518 - DNA, 26 bp, Homo sapiens
ccatgacaccagctgaagagtatgta

SEQ ID NO: 79519 - DNA, 26 bp, Homo sapiens
catgacaccagctgaagagtatgtaa

SEQ ID NO: 79520 - DNA, 26 bp, Homo sapiens
atgacaccagctgaagagtatgtaaa

SEQ ID NO: 79521 - DNA, 26 bp, Homo sapiens
tgacaccagctgaagagtatgtaaag

SEQ ID NO: 79522 - DNA, 26 bp, Homo sapiens
gacaccagctgaagagtatgtaaagg

SEQ ID NO: 79523 - DNA, 26 bp, Homo sapiens
acaccagctgaagagtatgtaaaggg

SEQ ID NO: 79524 - DNA, 26 bp, Homo sapiens
caccagctgaagagtatgtaaagggc

SEQ ID NO: 79525 - DNA, 26 bp, Homo sapiens
accagctgaagagtatgtaaagggct

SEQ ID NO: 79526 - DNA, 26 bp, Homo sapiens
ccagctgaagagtatgtaaagggcta

SEQ ID NO: 79527 - DNA, 26 bp, Homo sapiens
cagctgaagagtatgtaaagggctat

SEQ ID NO: 79528 - DNA, 26 bp, Homo sapiens
agctgaagagtatgtaaagggctatt

SEQ ID NO: 79529 - DNA, 26 bp, Homo sapiens
gctgaagagtatgtaaagggctatta

SEQ ID NO: 79530 - DNA, 26 bp, Homo sapiens
ctgaagagtatgtaaagggctattac

SEQ ID NO: 79531 - DNA, 26 bp, Homo sapiens
tgaagagtatgtaaagggctattact

SEQ ID NO: 79532 - DNA, 26 bp, Homo sapiens
gaagagtatgtaaagggctattactg

SEQ ID NO: 79533 - DNA, 26 bp, Homo sapiens
aagagtatgtaaagggctattactgc

SEQ ID NO: 79534 - DNA, 26 bp, Homo sapiens
agagtatgtaaagggctattactgca

SEQ ID NO: 79535 - DNA, 26 bp, Homo sapiens
gagtatgtaaagggctattactgcat

SEQ ID NO: 79536 - DNA, 26 bp, Homo sapiens
agtatgtaaagggctattactgcatc

SEQ ID NO: 79537 - DNA, 26 bp, Homo sapiens
gtatgtaaagggctattactgcatcc

SEQ ID NO: 79538 - DNA, 26 bp, Homo sapiens
tatgtaaagggctattactgcatccc

SEQ ID NO: 79539 - DNA, 26 bp, Homo sapiens
atgtaaagggctattactgcatccca

SEQ ID NO: 79540 - DNA, 26 bp, Homo sapiens
tgtaaagggctattactgcatcccat

SEQ ID NO: 79541 - DNA, 26 bp, Homo sapiens
gtaaagggctattactgcatcccatt

SEQ ID NO: 79542 - DNA, 26 bp, Homo sapiens
taaagggctattactgcatcccattg

SEQ ID NO: 79543 - DNA, 26 bp, Homo sapiens
aaagggctattactgcatcccattga

SEQ ID NO: 79544 - DNA, 26 bp, Homo sapiens
aagggctattactgcatcccattgaa

SEQ ID NO: 79545 - DNA, 26 bp, Homo sapiens
agggctattactgcatcccattgaat

SEQ ID NO: 79546 - DNA, 26 bp, Homo sapiens
gggctattactgcatcccattgaata

SEQ ID NO: 79547 - DNA, 26 bp, Homo sapiens
ggctattactgcatcccattgaatag

SEQ ID NO: 79548 - DNA, 26 bp, Homo sapiens
gctattactgcatcccattgaatagt

SEQ ID NO: 79549 - DNA, 26 bp, Homo sapiens
ctattactgcatcccattgaatagtg

SEQ ID NO: 79550 - DNA, 26 bp, Homo sapiens
tattactgcatcccattgaatagtga

SEQ ID NO: 79551 - DNA, 26 bp, Homo sapiens
attactgcatcccattgaatagtgac

SEQ ID NO: 79552 - DNA, 26 bp, Homo sapiens
ttactgcatcccattgaatagtgacc

SEQ ID NO: 79553 - DNA, 26 bp, Homo sapiens
tactgcatcccattgaatagtgacct

SEQ ID NO: 79554 - DNA, 26 bp, Homo sapiens
actgcatcccattgaatagtgacctg

SEQ ID NO: 79555 - DNA, 26 bp, Homo sapiens
ctgcatcccattgaatagtgacctga

SEQ ID NO: 79556 - DNA, 26 bp, Homo sapiens
tgcatcccattgaatagtgacctgat

SEQ ID NO: 79557 - DNA, 26 bp, Homo sapiens
gcatcccattgaatagtgacctgatt

SEQ ID NO: 79558 - DNA, 26 bp, Homo sapiens
catcccattgaatagtgacctgattc

SEQ ID NO: 79559 - DNA, 26 bp, Homo sapiens
atcccattgaatagtgacctgattca

SEQ ID NO: 79560 - DNA, 26 bp, Homo sapiens
tcccattgaatagtgacctgattcat

SEQ ID NO: 79561 - DNA, 26 bp, Homo sapiens
cccattgaatagtgacctgattcatg

SEQ ID NO: 79562 - DNA, 26 bp, Homo sapiens
ccattgaatagtgacctgattcatgt

SEQ ID NO: 79563 - DNA, 26 bp, Homo sapiens
cattgaatagtgacctgattcatgtc

SEQ ID NO: 79564 - DNA, 26 bp, Homo sapiens
attgaatagtgacctgattcatgtct

SEQ ID NO: 79565 - DNA, 26 bp, Homo sapiens
ttgaatagtgacctgattcatgtctg

SEQ ID NO: 79566 - DNA, 26 bp, Homo sapiens
tgaatagtgacctgattcatgtctgg

SEQ ID NO: 79567 - DNA, 26 bp, Homo sapiens
gaatagtgacctgattcatgtctgga

SEQ ID NO: 79568 - DNA, 26 bp, Homo sapiens
aatagtgacctgattcatgtctggaa

SEQ ID NO: 79569 - DNA, 26 bp, Homo sapiens
atagtgacctgattcatgtctggaag

SEQ ID NO: 79570 - DNA, 26 bp, Homo sapiens
tagtgacctgattcatgtctggaagc

SEQ ID NO: 79571 - DNA, 26 bp, Homo sapiens
agtgacctgattcatgtctggaagca

SEQ ID NO: 79572 - DNA, 26 bp, Homo sapiens
gtgacctgattcatgtctggaagcag

SEQ ID NO: 79573 - DNA, 26 bp, Homo sapiens
tgacctgattcatgtctggaagcagg

SEQ ID NO: 79574 - DNA, 26 bp, Homo sapiens
gacctgattcatgtctggaagcagga

SEQ ID NO: 79575 - DNA, 26 bp, Homo sapiens
acctgattcatgtctggaagcaggaa

SEQ ID NO: 79576 - DNA, 26 bp, Homo sapiens
cctgattcatgtctggaagcaggaaa

SEQ ID NO: 79577 - DNA, 26 bp, Homo sapiens
ctgattcatgtctggaagcaggaaaa

SEQ ID NO: 79578 - DNA, 26 bp, Homo sapiens
tgattcatgtctggaagcaggaaaag

SEQ ID NO: 79579 - DNA, 26 bp, Homo sapiens
gattcatgtctggaagcaggaaaaga

SEQ ID NO: 79580 - DNA, 26 bp, Homo sapiens
attcatgtctggaagcaggaaaagac

SEQ ID NO: 79581 - DNA, 26 bp, Homo sapiens
ttcatgtctggaagcaggaaaagact

SEQ ID NO: 79582 - DNA, 26 bp, Homo sapiens
tcatgtctggaagcaggaaaagactg

SEQ ID NO: 79583 - DNA, 26 bp, Homo sapiens
catgtctggaagcaggaaaagactgt

SEQ ID NO: 79584 - DNA, 26 bp, Homo sapiens
atgtctggaagcaggaaaagactgtt

SEQ ID NO: 79585 - DNA, 26 bp, Homo sapiens
tgtctggaagcaggaaaagactgttt

SEQ ID NO: 79586 - DNA, 26 bp, Homo sapiens
gtctggaagcaggaaaagactgtttc

SEQ ID NO: 79587 - DNA, 26 bp, Homo sapiens
tctggaagcaggaaaagactgtttcc

SEQ ID NO: 79588 - DNA, 26 bp, Homo sapiens
ctggaagcaggaaaagactgtttccc

SEQ ID NO: 79589 - DNA, 26 bp, Homo sapiens
tggaagcaggaaaagactgtttccct

SEQ ID NO: 79590 - DNA, 26 bp, Homo sapiens
ggaagcaggaaaagactgtttccctc

SEQ ID NO: 79591 - DNA, 26 bp, Homo sapiens
gaagcaggaaaagactgtttccctct

SEQ ID NO: 79592 - DNA, 26 bp, Homo sapiens
aagcaggaaaagactgtttccctctt

SEQ ID NO: 79593 - DNA, 26 bp, Homo sapiens
agcaggaaaagactgtttccctcttt

SEQ ID NO: 79594 - DNA, 26 bp, Homo sapiens
gcaggaaaagactgtttccctctttc

SEQ ID NO: 79595 - DNA, 26 bp, Homo sapiens
caggaaaagactgtttccctctttca

SEQ ID NO: 79596 - DNA, 26 bp, Homo sapiens
aggaaaagactgtttccctctttcaa

SEQ ID NO: 79597 - DNA, 26 bp, Homo sapiens
ggaaaagactgtttccctctttcaac

SEQ ID NO: 79598 - DNA, 26 bp, Homo sapiens
gaaaagactgtttccctctttcaacc

SEQ ID NO: 79599 - DNA, 26 bp, Homo sapiens
aaaagactgtttccctctttcaacct

SEQ ID NO: 79600 - DNA, 26 bp, Homo sapiens
aaagactgtttccctctttcaacctg

SEQ ID NO: 79601 - DNA, 26 bp, Homo sapiens
aagactgtttccctctttcaacctgt

SEQ ID NO: 79602 - DNA, 26 bp, Homo sapiens
agactgtttccctctttcaacctgtt

SEQ ID NO: 79603 - DNA, 26 bp, Homo sapiens
gactgtttccctctttcaacctgttt

SEQ ID NO: 79604 - DNA, 26 bp, Homo sapiens
actgtttccctctttcaacctgtttg

SEQ ID NO: 79605 - DNA, 26 bp, Homo sapiens
ctgtttccctctttcaacctgtttga

SEQ ID NO: 79606 - DNA, 26 bp, Homo sapiens
tgtttccctctttcaacctgtttgaa

SEQ ID NO: 79607 - DNA, 26 bp, Homo sapiens
gtttccctctttcaacctgtttgaag

SEQ ID NO: 79608 - DNA, 26 bp, Homo sapiens
tttccctctttcaacctgtttgaagc

SEQ ID NO: 79609 - DNA, 26 bp, Homo sapiens
ttccctctttcaacctgtttgaagca

SEQ ID NO: 79610 - DNA, 26 bp, Homo sapiens
tccctctttcaacctgtttgaagcac

SEQ ID NO: 79611 - DNA, 26 bp, Homo sapiens
ccctctttcaacctgtttgaagcaca

SEQ ID NO: 79612 - DNA, 26 bp, Homo sapiens
cctctttcaacctgtttgaagcacat

SEQ ID NO: 79613 - DNA, 26 bp, Homo sapiens
ctctttcaacctgtttgaagcacata

SEQ ID NO: 79614 - DNA, 26 bp, Homo sapiens
tctttcaacctgtttgaagcacataa

SEQ ID NO: 79615 - DNA, 26 bp, Homo sapiens
ctttcaacctgtttgaagcacataat

SEQ ID NO: 79616 - DNA, 26 bp, Homo sapiens
tttcaacctgtttgaagcacataatt

SEQ ID NO: 79617 - DNA, 26 bp, Homo sapiens
ttcaacctgtttgaagcacataattc

SEQ ID NO: 79618 - DNA, 26 bp, Homo sapiens
tcaacctgtttgaagcacataattcc

SEQ ID NO: 79619 - DNA, 26 bp, Homo sapiens
caacctgtttgaagcacataattcca

SEQ ID NO: 79620 - DNA, 26 bp, Homo sapiens
aacctgtttgaagcacataattccac

SEQ ID NO: 79621 - DNA, 26 bp, Homo sapiens
acctgtttgaagcacataattccact

SEQ ID NO: 79622 - DNA, 26 bp, Homo sapiens
cctgtttgaagcacataattccactt

SEQ ID NO: 79623 - DNA, 26 bp, Homo sapiens
ctgtttgaagcacataattccacttc

SEQ ID NO: 79624 - DNA, 26 bp, Homo sapiens
tgtttgaagcacataattccacttca

SEQ ID NO: 79625 - DNA, 26 bp, Homo sapiens
gtttgaagcacataattccacttcag

SEQ ID NO: 79626 - DNA, 26 bp, Homo sapiens
tttgaagcacataattccacttcaga

SEQ ID NO: 79627 - DNA, 26 bp, Homo sapiens
ttgaagcacataattccacttcagag

SEQ ID NO: 79628 - DNA, 26 bp, Homo sapiens
tgaagcacataattccacttcagagc

SEQ ID NO: 79629 - DNA, 26 bp, Homo sapiens
gaagcacataattccacttcagagcc

SEQ ID NO: 79630 - DNA, 26 bp, Homo sapiens
aagcacataattccacttcagagcca

SEQ ID NO: 79631 - DNA, 26 bp, Homo sapiens
agcacataattccacttcagagccag

SEQ ID NO: 79632 - DNA, 26 bp, Homo sapiens
gcacataattccacttcagagccagg

SEQ ID NO: 79633 - DNA, 26 bp, Homo sapiens
cacataattccacttcagagccaggc

SEQ ID NO: 79634 - DNA, 26 bp, Homo sapiens
acataattccacttcagagccaggct

SEQ ID NO: 79635 - DNA, 26 bp, Homo sapiens
cataattccacttcagagccaggctg

SEQ ID NO: 79636 - DNA, 26 bp, Homo sapiens
ataattccacttcagagccaggctgc

SEQ ID NO: 79637 - DNA, 26 bp, Homo sapiens
taattccacttcagagccaggctgcc

SEQ ID NO: 79638 - DNA, 26 bp, Homo sapiens
aattccacttcagagccaggctgcca

SEQ ID NO: 79639 - DNA, 26 bp, Homo sapiens
attccacttcagagccaggctgccac

SEQ ID NO: 79640 - DNA, 26 bp, Homo sapiens
ttccacttcagagccaggctgccacc

SEQ ID NO: 79641 - DNA, 26 bp, Homo sapiens
tccacttcagagccaggctgccaccc

SEQ ID NO: 79642 - DNA, 26 bp, Homo sapiens
ccacttcagagccaggctgccaccct

SEQ ID NO: 79643 - DNA, 26 bp, Homo sapiens
cacttcagagccaggctgccaccctt

SEQ ID NO: 79644 - DNA, 26 bp, Homo sapiens
acttcagagccaggctgccacccttg

SEQ ID NO: 79645 - DNA, 26 bp, Homo sapiens
cttcagagccaggctgccacccttgt

SEQ ID NO: 79646 - DNA, 26 bp, Homo sapiens
ttcagagccaggctgccacccttgtt

SEQ ID NO: 79647 - DNA, 26 bp, Homo sapiens
tcagagccaggctgccacccttgttg

SEQ ID NO: 79648 - DNA, 26 bp, Homo sapiens
cagagccaggctgccacccttgttgg

SEQ ID NO: 79649 - DNA, 26 bp, Homo sapiens
agagccaggctgccacccttgttggc

SEQ ID NO: 79650 - DNA, 26 bp, Homo sapiens
gagccaggctgccacccttgttggct

SEQ ID NO: 79651 - DNA, 26 bp, Homo sapiens
agccaggctgccacccttgttggctg

SEQ ID NO: 79652 - DNA, 26 bp, Homo sapiens
gccaggctgccacccttgttggctgt

SEQ ID NO: 79653 - DNA, 26 bp, Homo sapiens
ccaggctgccacccttgttggctgtg

SEQ ID NO: 79654 - DNA, 26 bp, Homo sapiens
caggctgccacccttgttggctgtgt

SEQ ID NO: 79655 - DNA, 26 bp, Homo sapiens
aggctgccacccttgttggctgtgtc

SEQ ID NO: 79656 - DNA, 26 bp, Homo sapiens
ggctgccacccttgttggctgtgtca

SEQ ID NO: 79657 - DNA, 26 bp, Homo sapiens
gctgccacccttgttggctgtgtcat

SEQ ID NO: 79658 - DNA, 26 bp, Homo sapiens
ctgccacccttgttggctgtgtcatg

SEQ ID NO: 79659 - DNA, 26 bp, Homo sapiens
tgccacccttgttggctgtgtcatgt

SEQ ID NO: 79660 - DNA, 26 bp, Homo sapiens
gccacccttgttggctgtgtcatgtc

SEQ ID NO: 79661 - DNA, 26 bp, Homo sapiens
ccacccttgttggctgtgtcatgtct

SEQ ID NO: 79662 - DNA, 26 bp, Homo sapiens
cacccttgttggctgtgtcatgtctt

SEQ ID NO: 79663 - DNA, 26 bp, Homo sapiens
acccttgttggctgtgtcatgtcttc

SEQ ID NO: 79664 - DNA, 26 bp, Homo sapiens
cccttgttggctgtgtcatgtcttct

SEQ ID NO: 79665 - DNA, 26 bp, Homo sapiens
ccttgttggctgtgtcatgtcttctt

SEQ ID NO: 79666 - DNA, 26 bp, Homo sapiens
cttgttggctgtgtcatgtcttcttt

SEQ ID NO: 79667 - DNA, 26 bp, Homo sapiens
ttgttggctgtgtcatgtcttctttc

SEQ ID NO: 79668 - DNA, 26 bp, Homo sapiens
tgttggctgtgtcatgtcttctttcc

SEQ ID NO: 79669 - DNA, 26 bp, Homo sapiens
gttggctgtgtcatgtcttctttcct

SEQ ID NO: 79670 - DNA, 26 bp, Homo sapiens
ttggctgtgtcatgtcttctttcctc

SEQ ID NO: 79671 - DNA, 26 bp, Homo sapiens
tggctgtgtcatgtcttctttcctca

SEQ ID NO: 79672 - DNA, 26 bp, Homo sapiens
ggctgtgtcatgtcttctttcctcac

SEQ ID NO: 79673 - DNA, 26 bp, Homo sapiens
gctgtgtcatgtcttctttcctcact

SEQ ID NO: 79674 - DNA, 26 bp, Homo sapiens
ctgtgtcatgtcttctttcctcactg

SEQ ID NO: 79675 - DNA, 26 bp, Homo sapiens
tgtgtcatgtcttctttcctcactgc

SEQ ID NO: 79676 - DNA, 26 bp, Homo sapiens
tgtatttaactaactttgtattttgc

SEQ ID NO: 79677 - DNA, 26 bp, Homo sapiens
gtatttaactaactttgtattttgcc

SEQ ID NO: 79678 - DNA, 26 bp, Homo sapiens
tatttaactaactttgtattttgcca

SEQ ID NO: 79679 - DNA, 26 bp, Homo sapiens
atttaactaactttgtattttgccac

SEQ ID NO: 79680 - DNA, 26 bp, Homo sapiens
tttaactaactttgtattttgccaca

SEQ ID NO: 79681 - DNA, 26 bp, Homo sapiens
ttaactaactttgtattttgccacac

SEQ ID NO: 79682 - DNA, 26 bp, Homo sapiens
taactaactttgtattttgccacaca

SEQ ID NO: 79683 - DNA, 26 bp, Homo sapiens
aactaactttgtattttgccacacat

SEQ ID NO: 79684 - DNA, 26 bp, Homo sapiens
actaactttgtattttgccacacatt

SEQ ID NO: 79685 - DNA, 26 bp, Homo sapiens
ctaactttgtattttgccacacattg

SEQ ID NO: 79686 - DNA, 26 bp, Homo sapiens
taactttgtattttgccacacattgt

SEQ ID NO: 79687 - DNA, 26 bp, Homo sapiens
aactttgtattttgccacacattgtt

SEQ ID NO: 79688 - DNA, 26 bp, Homo sapiens
actttgtattttgccacacattgttt

SEQ ID NO: 79689 - DNA, 26 bp, Homo sapiens
ctttgtattttgccacacattgtttt

SEQ ID NO: 79690 - DNA, 26 bp, Homo sapiens
tttgtattttgccacacattgttttc

SEQ ID NO: 79691 - DNA, 26 bp, Homo sapiens
ttgtattttgccacacattgttttca

SEQ ID NO: 79692 - DNA, 26 bp, Homo sapiens
tgtattttgccacacattgttttcat

SEQ ID NO: 79693 - DNA, 26 bp, Homo sapiens
gtattttgccacacattgttttcatt

SEQ ID NO: 79694 - DNA, 26 bp, Homo sapiens
tattttgccacacattgttttcattt

SEQ ID NO: 79695 - DNA, 26 bp, Homo sapiens
attttgccacacattgttttcattta

SEQ ID NO: 79696 - DNA, 26 bp, Homo sapiens
ttttgccacacattgttttcatttac

SEQ ID NO: 79697 - DNA, 26 bp, Homo sapiens
tttgccacacattgttttcatttaca

SEQ ID NO: 79698 - DNA, 26 bp, Homo sapiens
ttgccacacattgttttcatttacag

SEQ ID NO: 79699 - DNA, 26 bp, Homo sapiens
tgccacacattgttttcatttacagc

SEQ ID NO: 79700 - DNA, 26 bp, Homo sapiens
gccacacattgttttcatttacagct

SEQ ID NO: 79701 - DNA, 26 bp, Homo sapiens
ccacacattgttttcatttacagcta

SEQ ID NO: 79702 - DNA, 26 bp, Homo sapiens
cacacattgttttcatttacagctat

SEQ ID NO: 79703 - DNA, 26 bp, Homo sapiens
acacattgttttcatttacagctatg

SEQ ID NO: 79704 - DNA, 26 bp, Homo sapiens
cacattgttttcatttacagctatgt

SEQ ID NO: 79705 - DNA, 26 bp, Homo sapiens
acattgttttcatttacagctatgtc

SEQ ID NO: 79706 - DNA, 26 bp, Homo sapiens
cattgttttcatttacagctatgtct

SEQ ID NO: 79707 - DNA, 26 bp, Homo sapiens
attgttttcatttacagctatgtctg

SEQ ID NO: 79708 - DNA, 26 bp, Homo sapiens
ttgttttcatttacagctatgtctga

SEQ ID NO: 79709 - DNA, 26 bp, Homo sapiens
tgttttcatttacagctatgtctgac

SEQ ID NO: 79710 - DNA, 26 bp, Homo sapiens
gttttcatttacagctatgtctgaca

SEQ ID NO: 79711 - DNA, 26 bp, Homo sapiens
ttttcatttacagctatgtctgacaa

SEQ ID NO: 79712 - DNA, 26 bp, Homo sapiens
tttcatttacagctatgtctgacaaa

SEQ ID NO: 79713 - DNA, 26 bp, Homo sapiens
ttcatttacagctatgtctgacaaat

SEQ ID NO: 79714 - DNA, 26 bp, Homo sapiens
tcatttacagctatgtctgacaaatg

SEQ ID NO: 79715 - DNA, 26 bp, Homo sapiens
catttacagctatgtctgacaaatga

SEQ ID NO: 79716 - DNA, 26 bp, Homo sapiens
atttacagctatgtctgacaaatgag

SEQ ID NO: 79717 - DNA, 26 bp, Homo sapiens
tttacagctatgtctgacaaatgagc

SEQ ID NO: 79718 - DNA, 26 bp, Homo sapiens
ttacagctatgtctgacaaatgagca

SEQ ID NO: 79719 - DNA, 26 bp, Homo sapiens
tacagctatgtctgacaaatgagcac

SEQ ID NO: 79720 - DNA, 26 bp, Homo sapiens
acagctatgtctgacaaatgagcacg

SEQ ID NO: 79721 - DNA, 26 bp, Homo sapiens
cagctatgtctgacaaatgagcacgt

SEQ ID NO: 79722 - DNA, 26 bp, Homo sapiens
agctatgtctgacaaatgagcacgtt

SEQ ID NO: 79723 - DNA, 26 bp, Homo sapiens
gctatgtctgacaaatgagcacgttt

SEQ ID NO: 79724 - DNA, 26 bp, Homo sapiens
ctatgtctgacaaatgagcacgtttg

SEQ ID NO: 79725 - DNA, 26 bp, Homo sapiens
tatgtctgacaaatgagcacgtttga

SEQ ID NO: 79726 - DNA, 26 bp, Homo sapiens
atgtctgacaaatgagcacgtttgac

SEQ ID NO: 79727 - DNA, 26 bp, Homo sapiens
tgtctgacaaatgagcacgtttgaca

SEQ ID NO: 79728 - DNA, 26 bp, Homo sapiens
gtctgacaaatgagcacgtttgacat

SEQ ID NO: 79729 - DNA, 26 bp, Homo sapiens
tctgacaaatgagcacgtttgacatc

SEQ ID NO: 79730 - DNA, 26 bp, Homo sapiens
ctgacaaatgagcacgtttgacatca

SEQ ID NO: 79731 - DNA, 26 bp, Homo sapiens
tgacaaatgagcacgtttgacatcac

SEQ ID NO: 79732 - DNA, 26 bp, Homo sapiens
gacaaatgagcacgtttgacatcact

SEQ ID NO: 79733 - DNA, 26 bp, Homo sapiens
acaaatgagcacgtttgacatcactg

SEQ ID NO: 79734 - DNA, 26 bp, Homo sapiens
caaatgagcacgtttgacatcactga

SEQ ID NO: 79735 - DNA, 26 bp, Homo sapiens
aaatgagcacgtttgacatcactgat

SEQ ID NO: 79736 - DNA, 26 bp, Homo sapiens
aatgagcacgtttgacatcactgata

SEQ ID NO: 79737 - DNA, 26 bp, Homo sapiens
atgagcacgtttgacatcactgataa

SEQ ID NO: 79738 - DNA, 26 bp, Homo sapiens
tgagcacgtttgacatcactgataaa

SEQ ID NO: 79739 - DNA, 26 bp, Homo sapiens
gagcacgtttgacatcactgataaat

SEQ ID NO: 79740 - DNA, 26 bp, Homo sapiens
agcacgtttgacatcactgataaatg

SEQ ID NO: 79741 - DNA, 26 bp, Homo sapiens
gcacgtttgacatcactgataaatgc

SEQ ID NO: 79742 - DNA, 26 bp, Homo sapiens
cacgtttgacatcactgataaatgca

SEQ ID NO: 79743 - DNA, 26 bp, Homo sapiens
acgtttgacatcactgataaatgcaa

SEQ ID NO: 79744 - DNA, 26 bp, Homo sapiens
cgtttgacatcactgataaatgcaac

SEQ ID NO: 79745 - DNA, 26 bp, Homo sapiens
gtttgacatcactgataaatgcaaca

SEQ ID NO: 79746 - DNA, 26 bp, Homo sapiens
tttgacatcactgataaatgcaacac

SEQ ID NO: 79747 - DNA, 26 bp, Homo sapiens
ttgacatcactgataaatgcaacacc

SEQ ID NO: 79748 - DNA, 26 bp, Homo sapiens
tgacatcactgataaatgcaacaccg

SEQ ID NO: 79749 - DNA, 26 bp, Homo sapiens
gacatcactgataaatgcaacaccgt

SEQ ID NO: 79750 - DNA, 26 bp, Homo sapiens
acatcactgataaatgcaacaccgtc

SEQ ID NO: 79751 - DNA, 26 bp, Homo sapiens
catcactgataaatgcaacaccgtct

SEQ ID NO: 79752 - DNA, 26 bp, Homo sapiens
atcactgataaatgcaacaccgtcta

SEQ ID NO: 79753 - DNA, 26 bp, Homo sapiens
tcactgataaatgcaacaccgtctag

SEQ ID NO: 79754 - DNA, 26 bp, Homo sapiens
cactgataaatgcaacaccgtctagg

SEQ ID NO: 79755 - DNA, 26 bp, Homo sapiens
actgataaatgcaacaccgtctaggg

SEQ ID NO: 79756 - DNA, 26 bp, Homo sapiens
ctgataaatgcaacaccgtctagggc

SEQ ID NO: 79757 - DNA, 26 bp, Homo sapiens
tgataaatgcaacaccgtctagggcc

SEQ ID NO: 79758 - DNA, 26 bp, Homo sapiens
gataaatgcaacaccgtctagggcct

SEQ ID NO: 79759 - DNA, 26 bp, Homo sapiens
ataaatgcaacaccgtctagggccta

SEQ ID NO: 79760 - DNA, 26 bp, Homo sapiens
taaatgcaacaccgtctagggcctac

SEQ ID NO: 79761 - DNA, 26 bp, Homo sapiens
aaatgcaacaccgtctagggcctacg

SEQ ID NO: 79762 - DNA, 26 bp, Homo sapiens
aatgcaacaccgtctagggcctacga

SEQ ID NO: 79763 - DNA, 26 bp, Homo sapiens
atgcaacaccgtctagggcctacgag

SEQ ID NO: 79764 - DNA, 26 bp, Homo sapiens
tgcaacaccgtctagggcctacgaga

SEQ ID NO: 79765 - DNA, 26 bp, Homo sapiens
gcaacaccgtctagggcctacgagaa

SEQ ID NO: 79766 - DNA, 26 bp, Homo sapiens
caacaccgtctagggcctacgagaaa

SEQ ID NO: 79767 - DNA, 26 bp, Homo sapiens
aacaccgtctagggcctacgagaaaa

SEQ ID NO: 79768 - DNA, 26 bp, Homo sapiens
acaccgtctagggcctacgagaaaac

SEQ ID NO: 79769 - DNA, 26 bp, Homo sapiens
caccgtctagggcctacgagaaaacc

SEQ ID NO: 79770 - DNA, 26 bp, Homo sapiens
accgtctagggcctacgagaaaacca

SEQ ID NO: 79771 - DNA, 26 bp, Homo sapiens
ccgtctagggcctacgagaaaaccag

SEQ ID NO: 79772 - DNA, 26 bp, Homo sapiens
cgtctagggcctacgagaaaaccagg

SEQ ID NO: 79773 - DNA, 26 bp, Homo sapiens
gtctagggcctacgagaaaaccaggg

SEQ ID NO: 79774 - DNA, 26 bp, Homo sapiens
tctagggcctacgagaaaaccagggg

SEQ ID NO: 79775 - DNA, 26 bp, Homo sapiens
ctagggcctacgagaaaaccaggggg

SEQ ID NO: 79776 - DNA, 26 bp, Homo sapiens
tagggcctacgagaaaaccagggggc

SEQ ID NO: 79777 - DNA, 26 bp, Homo sapiens
agggcctacgagaaaaccagggggct

SEQ ID NO: 79778 - DNA, 26 bp, Homo sapiens
gggcctacgagaaaaccagggggctc

SEQ ID NO: 79779 - DNA, 26 bp, Homo sapiens
ggcctacgagaaaaccagggggctcg

SEQ ID NO: 79780 - DNA, 26 bp, Homo sapiens
gcctacgagaaaaccagggggctcgg

SEQ ID NO: 79781 - DNA, 26 bp, Homo sapiens
cctacgagaaaaccagggggctcggc

SEQ ID NO: 79782 - DNA, 26 bp, Homo sapiens
ctacgagaaaaccagggggctcggct

SEQ ID NO: 79783 - DNA, 26 bp, Homo sapiens
tacgagaaaaccagggggctcggctc

SEQ ID NO: 79784 - DNA, 26 bp, Homo sapiens
acgagaaaaccagggggctcggctcc

SEQ ID NO: 79785 - DNA, 26 bp, Homo sapiens
cgagaaaaccagggggctcggctccg

SEQ ID NO: 79786 - DNA, 26 bp, Homo sapiens
gagaaaaccagggggctcggctccgc

SEQ ID NO: 79787 - DNA, 26 bp, Homo sapiens
agaaaaccagggggctcggctccgct

SEQ ID NO: 79788 - DNA, 26 bp, Homo sapiens
gaaaaccagggggctcggctccgctg

SEQ ID NO: 79789 - DNA, 26 bp, Homo sapiens
aaaaccagggggctcggctccgctgg

SEQ ID NO: 79790 - DNA, 26 bp, Homo sapiens
aaaccagggggctcggctccgctgga

SEQ ID NO: 79791 - DNA, 26 bp, Homo sapiens
aaccagggggctcggctccgctggag

SEQ ID NO: 79792 - DNA, 26 bp, Homo sapiens
accagggggctcggctccgctggagc

SEQ ID NO: 79793 - DNA, 26 bp, Homo sapiens
ccagggggctcggctccgctggagcc

SEQ ID NO: 79794 - DNA, 26 bp, Homo sapiens
cagggggctcggctccgctggagcct

SEQ ID NO: 79795 - DNA, 26 bp, Homo sapiens
agggggctcggctccgctggagcctc

SEQ ID NO: 79796 - DNA, 26 bp, Homo sapiens
gggggctcggctccgctggagcctct

SEQ ID NO: 79797 - DNA, 26 bp, Homo sapiens
ggggctcggctccgctggagcctctg

SEQ ID NO: 79798 - DNA, 26 bp, Homo sapiens
gggctcggctccgctggagcctctgc

SEQ ID NO: 79799 - DNA, 26 bp, Homo sapiens
ggctcggctccgctggagcctctgcc

SEQ ID NO: 79800 - DNA, 26 bp, Homo sapiens
gctcggctccgctggagcctctgccc

SEQ ID NO: 79801 - DNA, 26 bp, Homo sapiens
ctcggctccgctggagcctctgcccg

SEQ ID NO: 79802 - DNA, 26 bp, Homo sapiens
tcggctccgctggagcctctgcccgt

SEQ ID NO: 79803 - DNA, 26 bp, Homo sapiens
cggctccgctggagcctctgcccgtg

SEQ ID NO: 79804 - DNA, 26 bp, Homo sapiens
ggctccgctggagcctctgcccgtgg

SEQ ID NO: 79805 - DNA, 26 bp, Homo sapiens
gctccgctggagcctctgcccgtgga

SEQ ID NO: 79806 - DNA, 26 bp, Homo sapiens
ctccgctggagcctctgcccgtggat

SEQ ID NO: 79807 - DNA, 26 bp, Homo sapiens
tccgctggagcctctgcccgtggatt

SEQ ID NO: 79808 - DNA, 26 bp, Homo sapiens
ccgctggagcctctgcccgtggattt

SEQ ID NO: 79809 - DNA, 26 bp, Homo sapiens
cgctggagcctctgcccgtggatttg

SEQ ID NO: 79810 - DNA, 26 bp, Homo sapiens
gctggagcctctgcccgtggatttgt

SEQ ID NO: 79811 - DNA, 26 bp, Homo sapiens
ctggagcctctgcccgtggatttgtt

SEQ ID NO: 79812 - DNA, 26 bp, Homo sapiens
tggagcctctgcccgtggatttgttt

SEQ ID NO: 79813 - DNA, 26 bp, Homo sapiens
ggagcctctgcccgtggatttgttta

SEQ ID NO: 79814 - DNA, 26 bp, Homo sapiens
gagcctctgcccgtggatttgtttag

SEQ ID NO: 79815 - DNA, 26 bp, Homo sapiens
agcctctgcccgtggatttgtttagg

SEQ ID NO: 79816 - DNA, 26 bp, Homo sapiens
gcctctgcccgtggatttgtttaggg

SEQ ID NO: 79817 - DNA, 26 bp, Homo sapiens
cctctgcccgtggatttgtttaggga

SEQ ID NO: 79818 - DNA, 26 bp, Homo sapiens
ctctgcccgtggatttgtttagggaa

SEQ ID NO: 79819 - DNA, 26 bp, Homo sapiens
tctgcccgtggatttgtttagggaag

SEQ ID NO: 79820 - DNA, 26 bp, Homo sapiens
ctgcccgtggatttgtttagggaagg

SEQ ID NO: 79821 - DNA, 26 bp, Homo sapiens
tgcccgtggatttgtttagggaaggg

SEQ ID NO: 79822 - DNA, 26 bp, Homo sapiens
gcccgtggatttgtttagggaagggg

SEQ ID NO: 79823 - DNA, 26 bp, Homo sapiens
cccgtggatttgtttagggaagggga

SEQ ID NO: 79824 - DNA, 26 bp, Homo sapiens
ccgtggatttgtttagggaaggggag

SEQ ID NO: 79825 - DNA, 26 bp, Homo sapiens
cgtggatttgtttagggaaggggagt

SEQ ID NO: 79826 - DNA, 26 bp, Homo sapiens
gtggatttgtttagggaaggggagtc

SEQ ID NO: 79827 - DNA, 26 bp, Homo sapiens
tggatttgtttagggaaggggagtcg

SEQ ID NO: 79828 - DNA, 26 bp, Homo sapiens
ggatttgtttagggaaggggagtcga

SEQ ID NO: 79829 - DNA, 26 bp, Homo sapiens
gatttgtttagggaaggggagtcgaa

SEQ ID NO: 79830 - DNA, 26 bp, Homo sapiens
atttgtttagggaaggggagtcgaat

SEQ ID NO: 79831 - DNA, 26 bp, Homo sapiens
tttgtttagggaaggggagtcgaata

SEQ ID NO: 79832 - DNA, 26 bp, Homo sapiens
ttgtttagggaaggggagtcgaatat

SEQ ID NO: 79833 - DNA, 26 bp, Homo sapiens
tgtttagggaaggggagtcgaatatc

SEQ ID NO: 79834 - DNA, 26 bp, Homo sapiens
gtttagggaaggggagtcgaatatct

SEQ ID NO: 79835 - DNA, 26 bp, Homo sapiens
tttagggaaggggagtcgaatatcta

SEQ ID NO: 79836 - DNA, 26 bp, Homo sapiens
ttagggaaggggagtcgaatatctat

SEQ ID NO: 79837 - DNA, 26 bp, Homo sapiens
tagggaaggggagtcgaatatctatt

SEQ ID NO: 79838 - DNA, 26 bp, Homo sapiens
agggaaggggagtcgaatatctattt

SEQ ID NO: 79839 - DNA, 26 bp, Homo sapiens
gggaaggggagtcgaatatctatttt

SEQ ID NO: 79840 - DNA, 26 bp, Homo sapiens
ggaaggggagtcgaatatctattttt

SEQ ID NO: 79841 - DNA, 26 bp, Homo sapiens
gaaggggagtcgaatatctatttttc

SEQ ID NO: 79842 - DNA, 26 bp, Homo sapiens
aaggggagtcgaatatctatttttct

SEQ ID NO: 79843 - DNA, 26 bp, Homo sapiens
aggggagtcgaatatctatttttctt

SEQ ID NO: 79844 - DNA, 26 bp, Homo sapiens
ggggagtcgaatatctatttttcttc

SEQ ID NO: 79845 - DNA, 26 bp, Homo sapiens
gggagtcgaatatctatttttcttct

SEQ ID NO: 79846 - DNA, 26 bp, Homo sapiens
ggagtcgaatatctatttttcttctt

SEQ ID NO: 79847 - DNA, 26 bp, Homo sapiens
gagtcgaatatctatttttcttctta

SEQ ID NO: 79848 - DNA, 26 bp, Homo sapiens
agtcgaatatctatttttcttcttag

SEQ ID NO: 79849 - DNA, 26 bp, Homo sapiens
gtcgaatatctatttttcttcttagt

SEQ ID NO: 79850 - DNA, 26 bp, Homo sapiens
tcgaatatctatttttcttcttagta

SEQ ID NO: 79851 - DNA, 26 bp, Homo sapiens
cgaatatctatttttcttcttagtaa

SEQ ID NO: 79852 - DNA, 26 bp, Homo sapiens
gaatatctatttttcttcttagtaaa

SEQ ID NO: 79853 - DNA, 26 bp, Homo sapiens
aatatctatttttcttcttagtaaaa

SEQ ID NO: 79854 - DNA, 26 bp, Homo sapiens
atatctatttttcttcttagtaaaat

SEQ ID NO: 79855 - DNA, 26 bp, Homo sapiens
tatctatttttcttcttagtaaaatt

SEQ ID NO: 79856 - DNA, 26 bp, Homo sapiens
atctatttttcttcttagtaaaatta

SEQ ID NO: 79857 - DNA, 26 bp, Homo sapiens
tctatttttcttcttagtaaaattat

SEQ ID NO: 79858 - DNA, 26 bp, Homo sapiens
ctatttttcttcttagtaaaattatc

SEQ ID NO: 79859 - DNA, 26 bp, Homo sapiens
tatttttcttcttagtaaaattatct

SEQ ID NO: 79860 - DNA, 26 bp, Homo sapiens
atttttcttcttagtaaaattatctg

SEQ ID NO: 79861 - DNA, 26 bp, Homo sapiens
tttttcttcttagtaaaattatctgc

SEQ ID NO: 79862 - DNA, 26 bp, Homo sapiens
ttttcttcttagtaaaattatctgcc

SEQ ID NO: 79863 - DNA, 26 bp, Homo sapiens
tttcttcttagtaaaattatctgcca

SEQ ID NO: 79864 - DNA, 26 bp, Homo sapiens
ttcttcttagtaaaattatctgccag

SEQ ID NO: 79865 - DNA, 26 bp, Homo sapiens
tcttcttagtaaaattatctgccaga

SEQ ID NO: 79866 - DNA, 26 bp, Homo sapiens
cttcttagtaaaattatctgccagag

SEQ ID NO: 79867 - DNA, 26 bp, Homo sapiens
ttcttagtaaaattatctgccagaga

SEQ ID NO: 79868 - DNA, 26 bp, Homo sapiens
tcttagtaaaattatctgccagagaa

SEQ ID NO: 79869 - DNA, 26 bp, Homo sapiens
cttagtaaaattatctgccagagaaa

SEQ ID NO: 79870 - DNA, 26 bp, Homo sapiens
ttagtaaaattatctgccagagaaac

SEQ ID NO: 79871 - DNA, 26 bp, Homo sapiens
tagtaaaattatctgccagagaaaca

SEQ ID NO: 79872 - DNA, 26 bp, Homo sapiens
agtaaaattatctgccagagaaacaa

SEQ ID NO: 79873 - DNA, 26 bp, Homo sapiens
gtaaaattatctgccagagaaacaat

SEQ ID NO: 79874 - DNA, 26 bp, Homo sapiens
taaaattatctgccagagaaacaatg

SEQ ID NO: 79875 - DNA, 26 bp, Homo sapiens
aaaattatctgccagagaaacaatga

SEQ ID NO: 79876 - DNA, 26 bp, Homo sapiens
aaattatctgccagagaaacaatgaa

SEQ ID NO: 79877 - DNA, 26 bp, Homo sapiens
aattatctgccagagaaacaatgaag

SEQ ID NO: 79878 - DNA, 26 bp, Homo sapiens
attatctgccagagaaacaatgaagc

SEQ ID NO: 79879 - DNA, 26 bp, Homo sapiens
ttatctgccagagaaacaatgaagca

SEQ ID NO: 79880 - DNA, 26 bp, Homo sapiens
tatctgccagagaaacaatgaagcat

SEQ ID NO: 79881 - DNA, 26 bp, Homo sapiens
atctgccagagaaacaatgaagcatg

SEQ ID NO: 79882 - DNA, 26 bp, Homo sapiens
tctgccagagaaacaatgaagcatga

SEQ ID NO: 79883 - DNA, 26 bp, Homo sapiens
ctgccagagaaacaatgaagcatgaa

SEQ ID NO: 79884 - DNA, 26 bp, Homo sapiens
tgccagagaaacaatgaagcatgaaa

SEQ ID NO: 79885 - DNA, 26 bp, Homo sapiens
gccagagaaacaatgaagcatgaaaa

SEQ ID NO: 79886 - DNA, 26 bp, Homo sapiens
ccagagaaacaatgaagcatgaaaaa

SEQ ID NO: 79887 - DNA, 26 bp, Homo sapiens
cagagaaacaatgaagcatgaaaaag

SEQ ID NO: 79888 - DNA, 26 bp, Homo sapiens
agagaaacaatgaagcatgaaaaagt

SEQ ID NO: 79889 - DNA, 26 bp, Homo sapiens
gagaaacaatgaagcatgaaaaagta

SEQ ID NO: 79890 - DNA, 26 bp, Homo sapiens
agaaacaatgaagcatgaaaaagtac

SEQ ID NO: 79891 - DNA, 26 bp, Homo sapiens
gaaacaatgaagcatgaaaaagtact

SEQ ID NO: 79892 - DNA, 26 bp, Homo sapiens
aaacaatgaagcatgaaaaagtacta

SEQ ID NO: 79893 - DNA, 26 bp, Homo sapiens
aacaatgaagcatgaaaaagtactat

SEQ ID NO: 79894 - DNA, 26 bp, Homo sapiens
acaatgaagcatgaaaaagtactatt

SEQ ID NO: 79895 - DNA, 26 bp, Homo sapiens
caatgaagcatgaaaaagtactattt

SEQ ID NO: 79896 - DNA, 26 bp, Homo sapiens
aatgaagcatgaaaaagtactattta

SEQ ID NO: 79897 - DNA, 26 bp, Homo sapiens
atgaagcatgaaaaagtactatttag

SEQ ID NO: 79898 - DNA, 26 bp, Homo sapiens
tgaagcatgaaaaagtactatttaga

SEQ ID NO: 79899 - DNA, 26 bp, Homo sapiens
gaagcatgaaaaagtactatttagaa

SEQ ID NO: 79900 - DNA, 26 bp, Homo sapiens
aagcatgaaaaagtactatttagaat

SEQ ID NO: 79901 - DNA, 26 bp, Homo sapiens
agcatgaaaaagtactatttagaatg

SEQ ID NO: 79902 - DNA, 26 bp, Homo sapiens
gcatgaaaaagtactatttagaatgt

SEQ ID NO: 79903 - DNA, 26 bp, Homo sapiens
catgaaaaagtactatttagaatgtg

SEQ ID NO: 79904 - DNA, 26 bp, Homo sapiens
atgaaaaagtactatttagaatgtgc

SEQ ID NO: 79905 - DNA, 26 bp, Homo sapiens
tgaaaaagtactatttagaatgtgca

SEQ ID NO: 79906 - DNA, 26 bp, Homo sapiens
gaaaaagtactatttagaatgtgcat

SEQ ID NO: 79907 - DNA, 26 bp, Homo sapiens
aaaaagtactatttagaatgtgcatg

SEQ ID NO: 79908 - DNA, 26 bp, Homo sapiens
aaaagtactatttagaatgtgcatgc

SEQ ID NO: 79909 - DNA, 26 bp, Homo sapiens
aaagtactatttagaatgtgcatgcc

SEQ ID NO: 79910 - DNA, 26 bp, Homo sapiens
aagtactatttagaatgtgcatgcct

SEQ ID NO: 79911 - DNA, 26 bp, Homo sapiens
agtactatttagaatgtgcatgccta

SEQ ID NO: 79912 - DNA, 26 bp, Homo sapiens
gtactatttagaatgtgcatgcctat

SEQ ID NO: 79913 - DNA, 26 bp, Homo sapiens
tactatttagaatgtgcatgcctata

SEQ ID NO: 79914 - DNA, 26 bp, Homo sapiens
actatttagaatgtgcatgcctatat

SEQ ID NO: 79915 - DNA, 26 bp, Homo sapiens
ctatttagaatgtgcatgcctatata

SEQ ID NO: 79916 - DNA, 26 bp, Homo sapiens
tatttagaatgtgcatgcctatatat

SEQ ID NO: 79917 - DNA, 26 bp, Homo sapiens
atttagaatgtgcatgcctatatatg

SEQ ID NO: 79918 - DNA, 26 bp, Homo sapiens
tttagaatgtgcatgcctatatatga

SEQ ID NO: 79919 - DNA, 26 bp, Homo sapiens
ttagaatgtgcatgcctatatatgat

SEQ ID NO: 79920 - DNA, 26 bp, Homo sapiens
tagaatgtgcatgcctatatatgatt

SEQ ID NO: 79921 - DNA, 26 bp, Homo sapiens
agaatgtgcatgcctatatatgattt

SEQ ID NO: 79922 - DNA, 26 bp, Homo sapiens
gaatgtgcatgcctatatatgatttt

SEQ ID NO: 79923 - DNA, 26 bp, Homo sapiens
aatgtgcatgcctatatatgatttta

SEQ ID NO: 79924 - DNA, 26 bp, Homo sapiens
atgtgcatgcctatatatgattttaa

SEQ ID NO: 79925 - DNA, 26 bp, Homo sapiens
tgtgcatgcctatatatgattttaaa

SEQ ID NO: 79926 - DNA, 26 bp, Homo sapiens
gtgcatgcctatatatgattttaaaa

SEQ ID NO: 79927 - DNA, 26 bp, Homo sapiens
tgcatgcctatatatgattttaaaat

SEQ ID NO: 79928 - DNA, 26 bp, Homo sapiens
gcatgcctatatatgattttaaaatg

SEQ ID NO: 79929 - DNA, 26 bp, Homo sapiens
catgcctatatatgattttaaaatgc

SEQ ID NO: 79930 - DNA, 26 bp, Homo sapiens
atgcctatatatgattttaaaatgct

SEQ ID NO: 79931 - DNA, 26 bp, Homo sapiens
tgcctatatatgattttaaaatgcta

SEQ ID NO: 79932 - DNA, 26 bp, Homo sapiens
gcctatatatgattttaaaatgctaa

SEQ ID NO: 79933 - DNA, 26 bp, Homo sapiens
cctatatatgattttaaaatgctaat

SEQ ID NO: 79934 - DNA, 26 bp, Homo sapiens
ctatatatgattttaaaatgctaatt

SEQ ID NO: 79935 - DNA, 26 bp, Homo sapiens
tatatatgattttaaaatgctaattg

SEQ ID NO: 79936 - DNA, 26 bp, Homo sapiens
atatatgattttaaaatgctaattgt

SEQ ID NO: 79937 - DNA, 26 bp, Homo sapiens
tatatgattttaaaatgctaattgtt

SEQ ID NO: 79938 - DNA, 26 bp, Homo sapiens
atatgattttaaaatgctaattgttg

SEQ ID NO: 79939 - DNA, 26 bp, Homo sapiens
tatgattttaaaatgctaattgttgc

SEQ ID NO: 79940 - DNA, 26 bp, Homo sapiens
atgattttaaaatgctaattgttgca

SEQ ID NO: 79941 - DNA, 26 bp, Homo sapiens
tgattttaaaatgctaattgttgcat

SEQ ID NO: 79942 - DNA, 26 bp, Homo sapiens
gattttaaaatgctaattgttgcatt

SEQ ID NO: 79943 - DNA, 26 bp, Homo sapiens
attttaaaatgctaattgttgcattc

SEQ ID NO: 79944 - DNA, 26 bp, Homo sapiens
ttttaaaatgctaattgttgcattcc

SEQ ID NO: 79945 - DNA, 26 bp, Homo sapiens
tttaaaatgctaattgttgcattccg

SEQ ID NO: 79946 - DNA, 26 bp, Homo sapiens
ttaaaatgctaattgttgcattccgg

SEQ ID NO: 79947 - DNA, 26 bp, Homo sapiens
taaaatgctaattgttgcattccggg

SEQ ID NO: 79948 - DNA, 26 bp, Homo sapiens
aaaatgctaattgttgcattccggga

SEQ ID NO: 79949 - DNA, 26 bp, Homo sapiens
aaatgctaattgttgcattccgggaa

SEQ ID NO: 79950 - DNA, 26 bp, Homo sapiens
aatgctaattgttgcattccgggaaa

SEQ ID NO: 79951 - DNA, 26 bp, Homo sapiens
atgctaattgttgcattccgggaaac

SEQ ID NO: 79952 - DNA, 26 bp, Homo sapiens
tgctaattgttgcattccgggaaact

SEQ ID NO: 79953 - DNA, 26 bp, Homo sapiens
gctaattgttgcattccgggaaactt

SEQ ID NO: 79954 - DNA, 26 bp, Homo sapiens
ctaattgttgcattccgggaaacttt

SEQ ID NO: 79955 - DNA, 26 bp, Homo sapiens
taattgttgcattccgggaaactttc

SEQ ID NO: 79956 - DNA, 26 bp, Homo sapiens
aattgttgcattccgggaaactttcc

SEQ ID NO: 79957 - DNA, 26 bp, Homo sapiens
attgttgcattccgggaaactttcca

SEQ ID NO: 79958 - DNA, 26 bp, Homo sapiens
ttgttgcattccgggaaactttccat

SEQ ID NO: 79959 - DNA, 26 bp, Homo sapiens
tgttgcattccgggaaactttccatt

SEQ ID NO: 79960 - DNA, 26 bp, Homo sapiens
gttgcattccgggaaactttccatta

SEQ ID NO: 79961 - DNA, 26 bp, Homo sapiens
ttgcattccgggaaactttccattat

SEQ ID NO: 79962 - DNA, 26 bp, Homo sapiens
tgcattccgggaaactttccattata

SEQ ID NO: 79963 - DNA, 26 bp, Homo sapiens
gcattccgggaaactttccattatat

SEQ ID NO: 79964 - DNA, 26 bp, Homo sapiens
cattccgggaaactttccattatata

SEQ ID NO: 79965 - DNA, 26 bp, Homo sapiens
attccgggaaactttccattatatat

SEQ ID NO: 79966 - DNA, 26 bp, Homo sapiens
ttccgggaaactttccattatatata

SEQ ID NO: 79967 - DNA, 26 bp, Homo sapiens
tccgggaaactttccattatatatat

SEQ ID NO: 79968 - DNA, 26 bp, Homo sapiens
ccgggaaactttccattatatatatg

SEQ ID NO: 79969 - DNA, 26 bp, Homo sapiens
cgggaaactttccattatatatatgc

SEQ ID NO: 79970 - DNA, 26 bp, Homo sapiens
gggaaactttccattatatatatgca

SEQ ID NO: 79971 - DNA, 26 bp, Homo sapiens
ggaaactttccattatatatatgcat

SEQ ID NO: 79972 - DNA, 26 bp, Homo sapiens
gaaactttccattatatatatgcata

SEQ ID NO: 79973 - DNA, 26 bp, Homo sapiens
aaactttccattatatatatgcatat

SEQ ID NO: 79974 - DNA, 26 bp, Homo sapiens
aactttccattatatatatgcatata

SEQ ID NO: 79975 - DNA, 26 bp, Homo sapiens
actttccattatatatatgcatatat

SEQ ID NO: 79976 - DNA, 26 bp, Homo sapiens
ctttccattatatatatgcatatata

SEQ ID NO: 79977 - DNA, 26 bp, Homo sapiens
tttccattatatatatgcatatatat

SEQ ID NO: 79978 - DNA, 26 bp, Homo sapiens
ttccattatatatatgcatatatatg

SEQ ID NO: 79979 - DNA, 26 bp, Homo sapiens
tccattatatatatgcatatatatgt

SEQ ID NO: 79980 - DNA, 26 bp, Homo sapiens
ccattatatatatgcatatatatgta

SEQ ID NO: 79981 - DNA, 26 bp, Homo sapiens
cattatatatatgcatatatatgtat

SEQ ID NO: 79982 - DNA, 26 bp, Homo sapiens
attatatatatgcatatatatgtatc

SEQ ID NO: 79983 - DNA, 26 bp, Homo sapiens
ttatatatatgcatatatatgtatct

SEQ ID NO: 79984 - DNA, 26 bp, Homo sapiens
tatatatatgcatatatatgtatctt

SEQ ID NO: 79985 - DNA, 26 bp, Homo sapiens
atatatatgcatatatatgtatcttt

SEQ ID NO: 79986 - DNA, 26 bp, Homo sapiens
tatatatgcatatatatgtatctttg

SEQ ID NO: 79987 - DNA, 26 bp, Homo sapiens
atatatgcatatatatgtatctttgt

SEQ ID NO: 79988 - DNA, 26 bp, Homo sapiens
tatatgcatatatatgtatctttgta

SEQ ID NO: 79989 - DNA, 26 bp, Homo sapiens
atatgcatatatatgtatctttgtaa

SEQ ID NO: 79990 - DNA, 26 bp, Homo sapiens
tatgcatatatatgtatctttgtaat

SEQ ID NO: 79991 - DNA, 26 bp, Homo sapiens
atgcatatatatgtatctttgtaatt

SEQ ID NO: 79992 - DNA, 26 bp, Homo sapiens
tgcatatatatgtatctttgtaattt

SEQ ID NO: 79993 - DNA, 26 bp, Homo sapiens
gcatatatatgtatctttgtaatttc

SEQ ID NO: 79994 - DNA, 26 bp, Homo sapiens
catatatatgtatctttgtaatttca

SEQ ID NO: 79995 - DNA, 26 bp, Homo sapiens
atatatatgtatctttgtaatttcag

SEQ ID NO: 79996 - DNA, 26 bp, Homo sapiens
tatatatgtatctttgtaatttcagt

SEQ ID NO: 79997 - DNA, 26 bp, Homo sapiens
atatatgtatctttgtaatttcagtg

SEQ ID NO: 79998 - DNA, 26 bp, Homo sapiens
tatatgtatctttgtaatttcagtga

SEQ ID NO: 79999 - DNA, 26 bp, Homo sapiens
atatgtatctttgtaatttcagtgaa

SEQ ID NO: 80000 - DNA, 26 bp, Homo sapiens
tatgtatctttgtaatttcagtgaat

SEQ ID NO: 80001 - DNA, 26 bp, Homo sapiens
atgtatctttgtaatttcagtgaatt

SEQ ID NO: 80002 - DNA, 26 bp, Homo sapiens
tgtatctttgtaatttcagtgaattt

SEQ ID NO: 80003 - DNA, 26 bp, Homo sapiens
gtatctttgtaatttcagtgaatttt

SEQ ID NO: 80004 - DNA, 26 bp, Homo sapiens
tatctttgtaatttcagtgaattttt

SEQ ID NO: 80005 - DNA, 26 bp, Homo sapiens
atctttgtaatttcagtgaattttta

SEQ ID NO: 80006 - DNA, 26 bp, Homo sapiens
tctttgtaatttcagtgaatttttaa

SEQ ID NO: 80007 - DNA, 26 bp, Homo sapiens
ctttgtaatttcagtgaatttttaaa

SEQ ID NO: 80008 - DNA, 26 bp, Homo sapiens
tttgtaatttcagtgaatttttaaaa

SEQ ID NO: 80009 - DNA, 26 bp, Homo sapiens
ttgtaatttcagtgaatttttaaaac

SEQ ID NO: 80010 - DNA, 26 bp, Homo sapiens
tgtaatttcagtgaatttttaaaact

SEQ ID NO: 80011 - DNA, 26 bp, Homo sapiens
gtaatttcagtgaatttttaaaacta

SEQ ID NO: 80012 - DNA, 26 bp, Homo sapiens
taatttcagtgaatttttaaaactag

SEQ ID NO: 80013 - DNA, 26 bp, Homo sapiens
aatttcagtgaatttttaaaactagt

SEQ ID NO: 80014 - DNA, 26 bp, Homo sapiens
atttcagtgaatttttaaaactagta

SEQ ID NO: 80015 - DNA, 26 bp, Homo sapiens
tttcagtgaatttttaaaactagtat

SEQ ID NO: 80016 - DNA, 26 bp, Homo sapiens
ttcagtgaatttttaaaactagtatg

SEQ ID NO: 80017 - DNA, 26 bp, Homo sapiens
tcagtgaatttttaaaactagtatgg

SEQ ID NO: 80018 - DNA, 26 bp, Homo sapiens
cagtgaatttttaaaactagtatggc

SEQ ID NO: 80019 - DNA, 26 bp, Homo sapiens
agtgaatttttaaaactagtatggca

SEQ ID NO: 80020 - DNA, 26 bp, Homo sapiens
gtgaatttttaaaactagtatggcag

SEQ ID NO: 80021 - DNA, 26 bp, Homo sapiens
tgaatttttaaaactagtatggcagg

SEQ ID NO: 80022 - DNA, 26 bp, Homo sapiens
gaatttttaaaactagtatggcaggt

SEQ ID NO: 80023 - DNA, 26 bp, Homo sapiens
aatttttaaaactagtatggcaggtt

SEQ ID NO: 80024 - DNA, 26 bp, Homo sapiens
atttttaaaactagtatggcaggttg

SEQ ID NO: 80025 - DNA, 26 bp, Homo sapiens
tttttaaaactagtatggcaggttga

SEQ ID NO: 80026 - DNA, 26 bp, Homo sapiens
ttttaaaactagtatggcaggttgaa

SEQ ID NO: 80027 - DNA, 26 bp, Homo sapiens
tttaaaactagtatggcaggttgaaa

SEQ ID NO: 80028 - DNA, 26 bp, Homo sapiens
ttaaaactagtatggcaggttgaaag

SEQ ID NO: 80029 - DNA, 26 bp, Homo sapiens
taaaactagtatggcaggttgaaagc

SEQ ID NO: 80030 - DNA, 26 bp, Homo sapiens
aaaactagtatggcaggttgaaagca

SEQ ID NO: 80031 - DNA, 26 bp, Homo sapiens
aaactagtatggcaggttgaaagcaa

SEQ ID NO: 80032 - DNA, 26 bp, Homo sapiens
aactagtatggcaggttgaaagcaat

SEQ ID NO: 80033 - DNA, 26 bp, Homo sapiens
actagtatggcaggttgaaagcaatg

SEQ ID NO: 80034 - DNA, 26 bp, Homo sapiens
ctagtatggcaggttgaaagcaatgc

SEQ ID NO: 80035 - DNA, 26 bp, Homo sapiens
tagtatggcaggttgaaagcaatgca

SEQ ID NO: 80036 - DNA, 26 bp, Homo sapiens
agtatggcaggttgaaagcaatgcac

SEQ ID NO: 80037 - DNA, 26 bp, Homo sapiens
gtatggcaggttgaaagcaatgcacc

SEQ ID NO: 80038 - DNA, 26 bp, Homo sapiens
tatggcaggttgaaagcaatgcacct

SEQ ID NO: 80039 - DNA, 26 bp, Homo sapiens
atggcaggttgaaagcaatgcacctg

SEQ ID NO: 80040 - DNA, 26 bp, Homo sapiens
tggcaggttgaaagcaatgcacctgt

SEQ ID NO: 80041 - DNA, 26 bp, Homo sapiens
ggcaggttgaaagcaatgcacctgtt

SEQ ID NO: 80042 - DNA, 26 bp, Homo sapiens
gcaggttgaaagcaatgcacctgttt

SEQ ID NO: 80043 - DNA, 26 bp, Homo sapiens
caggttgaaagcaatgcacctgttta

SEQ ID NO: 80044 - DNA, 26 bp, Homo sapiens
aggttgaaagcaatgcacctgtttac

SEQ ID NO: 80045 - DNA, 26 bp, Homo sapiens
ggttgaaagcaatgcacctgtttact

SEQ ID NO: 80046 - DNA, 26 bp, Homo sapiens
gttgaaagcaatgcacctgtttactt

SEQ ID NO: 80047 - DNA, 26 bp, Homo sapiens
ttgaaagcaatgcacctgtttacttg

SEQ ID NO: 80048 - DNA, 26 bp, Homo sapiens
tgaaagcaatgcacctgtttacttgc

SEQ ID NO: 80049 - DNA, 26 bp, Homo sapiens
gaaagcaatgcacctgtttacttgca

SEQ ID NO: 80050 - DNA, 26 bp, Homo sapiens
aaagcaatgcacctgtttacttgcac

SEQ ID NO: 80051 - DNA, 26 bp, Homo sapiens
aagcaatgcacctgtttacttgcaca

SEQ ID NO: 80052 - DNA, 26 bp, Homo sapiens
agcaatgcacctgtttacttgcacac

SEQ ID NO: 80053 - DNA, 26 bp, Homo sapiens
gcaatgcacctgtttacttgcacaca

SEQ ID NO: 80054 - DNA, 26 bp, Homo sapiens
caatgcacctgtttacttgcacacac

SEQ ID NO: 80055 - DNA, 26 bp, Homo sapiens
aatgcacctgtttacttgcacacacc

SEQ ID NO: 80056 - DNA, 26 bp, Homo sapiens
atgcacctgtttacttgcacacacca

SEQ ID NO: 80057 - DNA, 26 bp, Homo sapiens
tgcacctgtttacttgcacacaccat

SEQ ID NO: 80058 - DNA, 26 bp, Homo sapiens
gcacctgtttacttgcacacaccata

SEQ ID NO: 80059 - DNA, 26 bp, Homo sapiens
cacctgtttacttgcacacaccataa

SEQ ID NO: 80060 - DNA, 26 bp, Homo sapiens
acctgtttacttgcacacaccataaa

SEQ ID NO: 80061 - DNA, 26 bp, Homo sapiens
cctgtttacttgcacacaccataaat

SEQ ID NO: 80062 - DNA, 26 bp, Homo sapiens
ctgtttacttgcacacaccataaatc

SEQ ID NO: 80063 - DNA, 26 bp, Homo sapiens
tgtttacttgcacacaccataaatcg

SEQ ID NO: 80064 - DNA, 26 bp, Homo sapiens
gtttacttgcacacaccataaatcga

SEQ ID NO: 80065 - DNA, 26 bp, Homo sapiens
tttacttgcacacaccataaatcgaa

SEQ ID NO: 80066 - DNA, 26 bp, Homo sapiens
ttacttgcacacaccataaatcgaaa

SEQ ID NO: 80067 - DNA, 26 bp, Homo sapiens
tacttgcacacaccataaatcgaaaa

SEQ ID NO: 80068 - DNA, 26 bp, Homo sapiens
acttgcacacaccataaatcgaaaag

SEQ ID NO: 80069 - DNA, 26 bp, Homo sapiens
cttgcacacaccataaatcgaaaagc

SEQ ID NO: 80070 - DNA, 26 bp, Homo sapiens
ttgcacacaccataaatcgaaaagca

SEQ ID NO: 80071 - DNA, 26 bp, Homo sapiens
tgcacacaccataaatcgaaaagcag

SEQ ID NO: 80072 - DNA, 26 bp, Homo sapiens
gcacacaccataaatcgaaaagcagg

SEQ ID NO: 80073 - DNA, 26 bp, Homo sapiens
cacacaccataaatcgaaaagcagga

SEQ ID NO: 80074 - DNA, 26 bp, Homo sapiens
acacaccataaatcgaaaagcaggag

SEQ ID NO: 80075 - DNA, 26 bp, Homo sapiens
cacaccataaatcgaaaagcaggagt

SEQ ID NO: 80076 - DNA, 26 bp, Homo sapiens
acaccataaatcgaaaagcaggagtg

SEQ ID NO: 80077 - DNA, 26 bp, Homo sapiens
caccataaatcgaaaagcaggagtgc

SEQ ID NO: 80078 - DNA, 26 bp, Homo sapiens
accataaatcgaaaagcaggagtgcg

SEQ ID NO: 80079 - DNA, 26 bp, Homo sapiens
ccataaatcgaaaagcaggagtgcgc

SEQ ID NO: 80080 - DNA, 26 bp, Homo sapiens
cataaatcgaaaagcaggagtgcgct

SEQ ID NO: 80081 - DNA, 26 bp, Homo sapiens
ataaatcgaaaagcaggagtgcgctt

SEQ ID NO: 80082 - DNA, 26 bp, Homo sapiens
taaatcgaaaagcaggagtgcgcttt

SEQ ID NO: 80083 - DNA, 26 bp, Homo sapiens
aaatcgaaaagcaggagtgcgctttc

SEQ ID NO: 80084 - DNA, 26 bp, Homo sapiens
aatcgaaaagcaggagtgcgctttcc

SEQ ID NO: 80085 - DNA, 26 bp, Homo sapiens
atcgaaaagcaggagtgcgctttcct

SEQ ID NO: 80086 - DNA, 26 bp, Homo sapiens
tcgaaaagcaggagtgcgctttccta

SEQ ID NO: 80087 - DNA, 26 bp, Homo sapiens
cgaaaagcaggagtgcgctttcctac

SEQ ID NO: 80088 - DNA, 26 bp, Homo sapiens
gaaaagcaggagtgcgctttcctacc

SEQ ID NO: 80089 - DNA, 26 bp, Homo sapiens
aaaagcaggagtgcgctttcctaccg

SEQ ID NO: 80090 - DNA, 26 bp, Homo sapiens
aaagcaggagtgcgctttcctaccgg

SEQ ID NO: 80091 - DNA, 26 bp, Homo sapiens
aagcaggagtgcgctttcctaccggt

SEQ ID NO: 80092 - DNA, 26 bp, Homo sapiens
agcaggagtgcgctttcctaccggtc

SEQ ID NO: 80093 - DNA, 26 bp, Homo sapiens
gcaggagtgcgctttcctaccggtct

SEQ ID NO: 80094 - DNA, 26 bp, Homo sapiens
caggagtgcgctttcctaccggtctc

SEQ ID NO: 80095 - DNA, 26 bp, Homo sapiens
aggagtgcgctttcctaccggtctct

SEQ ID NO: 80096 - DNA, 26 bp, Homo sapiens
ggagtgcgctttcctaccggtctcta

SEQ ID NO: 80097 - DNA, 26 bp, Homo sapiens
gagtgcgctttcctaccggtctctat

SEQ ID NO: 80098 - DNA, 26 bp, Homo sapiens
agtgcgctttcctaccggtctctatg

SEQ ID NO: 80099 - DNA, 26 bp, Homo sapiens
gtgcgctttcctaccggtctctatga

SEQ ID NO: 80100 - DNA, 26 bp, Homo sapiens
tgcgctttcctaccggtctctatgaa

SEQ ID NO: 80101 - DNA, 26 bp, Homo sapiens
gcgctttcctaccggtctctatgaaa

SEQ ID NO: 80102 - DNA, 26 bp, Homo sapiens
cgctttcctaccggtctctatgaaac

SEQ ID NO: 80103 - DNA, 26 bp, Homo sapiens
gctttcctaccggtctctatgaaacc

SEQ ID NO: 80104 - DNA, 26 bp, Homo sapiens
ctttcctaccggtctctatgaaaccc

SEQ ID NO: 80105 - DNA, 26 bp, Homo sapiens
tttcctaccggtctctatgaaacccc

SEQ ID NO: 80106 - DNA, 26 bp, Homo sapiens
ttcctaccggtctctatgaaaccccc

SEQ ID NO: 80107 - DNA, 26 bp, Homo sapiens
tcctaccggtctctatgaaaccccca

SEQ ID NO: 80108 - DNA, 26 bp, Homo sapiens
cctaccggtctctatgaaacccccag

SEQ ID NO: 80109 - DNA, 26 bp, Homo sapiens
ctaccggtctctatgaaacccccaga

SEQ ID NO: 80110 - DNA, 26 bp, Homo sapiens
taccggtctctatgaaacccccagac

SEQ ID NO: 80111 - DNA, 26 bp, Homo sapiens
accggtctctatgaaacccccagaca

SEQ ID NO: 80112 - DNA, 26 bp, Homo sapiens
ccggtctctatgaaacccccagacaa

SEQ ID NO: 80113 - DNA, 26 bp, Homo sapiens
cggtctctatgaaacccccagacaag

SEQ ID NO: 80114 - DNA, 26 bp, Homo sapiens
ggtctctatgaaacccccagacaaga

SEQ ID NO: 80115 - DNA, 26 bp, Homo sapiens
gtctctatgaaacccccagacaagag

SEQ ID NO: 80116 - DNA, 26 bp, Homo sapiens
tctctatgaaacccccagacaagagg

SEQ ID NO: 80117 - DNA, 26 bp, Homo sapiens
ctctatgaaacccccagacaagaggc

SEQ ID NO: 80118 - DNA, 26 bp, Homo sapiens
tctatgaaacccccagacaagaggca

SEQ ID NO: 80119 - DNA, 26 bp, Homo sapiens
ctatgaaacccccagacaagaggcat

SEQ ID NO: 80120 - DNA, 26 bp, Homo sapiens
tatgaaacccccagacaagaggcata

SEQ ID NO: 80121 - DNA, 26 bp, Homo sapiens
atgaaacccccagacaagaggcatag

SEQ ID NO: 80122 - DNA, 26 bp, Homo sapiens
tgaaacccccagacaagaggcatagt

SEQ ID NO: 80123 - DNA, 26 bp, Homo sapiens
gaaacccccagacaagaggcatagtt

SEQ ID NO: 80124 - DNA, 26 bp, Homo sapiens
aaacccccagacaagaggcatagtta

SEQ ID NO: 80125 - DNA, 26 bp, Homo sapiens
aacccccagacaagaggcatagttaa

SEQ ID NO: 80126 - DNA, 26 bp, Homo sapiens
acccccagacaagaggcatagttaac

SEQ ID NO: 80127 - DNA, 26 bp, Homo sapiens
cccccagacaagaggcatagttaact

SEQ ID NO: 80128 - DNA, 26 bp, Homo sapiens
ccccagacaagaggcatagttaacta

SEQ ID NO: 80129 - DNA, 26 bp, Homo sapiens
cccagacaagaggcatagttaactac

SEQ ID NO: 80130 - DNA, 26 bp, Homo sapiens
ccagacaagaggcatagttaactact

SEQ ID NO: 80131 - DNA, 26 bp, Homo sapiens
cagacaagaggcatagttaactacta

SEQ ID NO: 80132 - DNA, 26 bp, Homo sapiens
agacaagaggcatagttaactactac

SEQ ID NO: 80133 - DNA, 26 bp, Homo sapiens
gacaagaggcatagttaactactaca

SEQ ID NO: 80134 - DNA, 26 bp, Homo sapiens
acaagaggcatagttaactactacat

SEQ ID NO: 80135 - DNA, 26 bp, Homo sapiens
caagaggcatagttaactactacatt

SEQ ID NO: 80136 - DNA, 26 bp, Homo sapiens
aagaggcatagttaactactacattt

SEQ ID NO: 80137 - DNA, 26 bp, Homo sapiens
agaggcatagttaactactacattta

SEQ ID NO: 80138 - DNA, 26 bp, Homo sapiens
gaggcatagttaactactacatttaa

SEQ ID NO: 80139 - DNA, 26 bp, Homo sapiens
aggcatagttaactactacatttaat

SEQ ID NO: 80140 - DNA, 26 bp, Homo sapiens
ggcatagttaactactacatttaata

SEQ ID NO: 80141 - DNA, 26 bp, Homo sapiens
gcatagttaactactacatttaatag

SEQ ID NO: 80142 - DNA, 26 bp, Homo sapiens
catagttaactactacatttaatagc

SEQ ID NO: 80143 - DNA, 26 bp, Homo sapiens
atagttaactactacatttaatagcc

SEQ ID NO: 80144 - DNA, 26 bp, Homo sapiens
tagttaactactacatttaatagcct

SEQ ID NO: 80145 - DNA, 26 bp, Homo sapiens
agttaactactacatttaatagcctt

SEQ ID NO: 80146 - DNA, 26 bp, Homo sapiens
gttaactactacatttaatagccttc

SEQ ID NO: 80147 - DNA, 26 bp, Homo sapiens
ttaactactacatttaatagccttct

SEQ ID NO: 80148 - DNA, 26 bp, Homo sapiens
taactactacatttaatagccttctt

SEQ ID NO: 80149 - DNA, 26 bp, Homo sapiens
aactactacatttaatagccttcttc

SEQ ID NO: 80150 - DNA, 26 bp, Homo sapiens
actactacatttaatagccttcttct

SEQ ID NO: 80151 - DNA, 26 bp, Homo sapiens
ctactacatttaatagccttcttctc

SEQ ID NO: 80152 - DNA, 26 bp, Homo sapiens
tactacatttaatagccttcttctct

SEQ ID NO: 80153 - DNA, 26 bp, Homo sapiens
actacatttaatagccttcttctcta

SEQ ID NO: 80154 - DNA, 26 bp, Homo sapiens
ctacatttaatagccttcttctctaa

SEQ ID NO: 80155 - DNA, 26 bp, Homo sapiens
tacatttaatagccttcttctctaac

SEQ ID NO: 80156 - DNA, 26 bp, Homo sapiens
acatttaatagccttcttctctaaca

SEQ ID NO: 80157 - DNA, 26 bp, Homo sapiens
catttaatagccttcttctctaacac

SEQ ID NO: 80158 - DNA, 26 bp, Homo sapiens
atttaatagccttcttctctaacaca

SEQ ID NO: 80159 - DNA, 26 bp, Homo sapiens
tttaatagccttcttctctaacacag

SEQ ID NO: 80160 - DNA, 26 bp, Homo sapiens
ttaatagccttcttctctaacacagt

SEQ ID NO: 80161 - DNA, 26 bp, Homo sapiens
taatagccttcttctctaacacagta

SEQ ID NO: 80162 - DNA, 26 bp, Homo sapiens
aatagccttcttctctaacacagtaa

SEQ ID NO: 80163 - DNA, 26 bp, Homo sapiens
atagccttcttctctaacacagtaat

SEQ ID NO: 80164 - DNA, 26 bp, Homo sapiens
tagccttcttctctaacacagtaatt

SEQ ID NO: 80165 - DNA, 26 bp, Homo sapiens
agccttcttctctaacacagtaattt

SEQ ID NO: 80166 - DNA, 26 bp, Homo sapiens
gccttcttctctaacacagtaatttt

SEQ ID NO: 80167 - DNA, 26 bp, Homo sapiens
ccttcttctctaacacagtaattttt

SEQ ID NO: 80168 - DNA, 26 bp, Homo sapiens
cttcttctctaacacagtaattttta

SEQ ID NO: 80169 - DNA, 26 bp, Homo sapiens
ttcttctctaacacagtaatttttat

SEQ ID NO: 80170 - DNA, 26 bp, Homo sapiens
tcttctctaacacagtaatttttatt

SEQ ID NO: 80171 - DNA, 26 bp, Homo sapiens
cttctctaacacagtaatttttattt

SEQ ID NO: 80172 - DNA, 26 bp, Homo sapiens
ttctctaacacagtaatttttattta

SEQ ID NO: 80173 - DNA, 26 bp, Homo sapiens
tctctaacacagtaatttttatttaa

SEQ ID NO: 80174 - DNA, 26 bp, Homo sapiens
ctctaacacagtaatttttatttaaa

SEQ ID NO: 80175 - DNA, 26 bp, Homo sapiens
tctaacacagtaatttttatttaaaa

SEQ ID NO: 80176 - DNA, 26 bp, Homo sapiens
ctaacacagtaatttttatttaaaaa

SEQ ID NO: 80177 - DNA, 26 bp, Homo sapiens
taacacagtaatttttatttaaaaag

SEQ ID NO: 80178 - DNA, 26 bp, Homo sapiens
aacacagtaatttttatttaaaaagg

SEQ ID NO: 80179 - DNA, 26 bp, Homo sapiens
acacagtaatttttatttaaaaagga

SEQ ID NO: 80180 - DNA, 26 bp, Homo sapiens
cacagtaatttttatttaaaaaggag

SEQ ID NO: 80181 - DNA, 26 bp, Homo sapiens
acagtaatttttatttaaaaaggaga

SEQ ID NO: 80182 - DNA, 26 bp, Homo sapiens
cagtaatttttatttaaaaaggagac

SEQ ID NO: 80183 - DNA, 26 bp, Homo sapiens
agtaatttttatttaaaaaggagact

SEQ ID NO: 80184 - DNA, 26 bp, Homo sapiens
gtaatttttatttaaaaaggagacta

SEQ ID NO: 80185 - DNA, 26 bp, Homo sapiens
taatttttatttaaaaaggagactaa

SEQ ID NO: 80186 - DNA, 26 bp, Homo sapiens
aatttttatttaaaaaggagactaaa

SEQ ID NO: 80187 - DNA, 26 bp, Homo sapiens
atttttatttaaaaaggagactaaac

SEQ ID NO: 80188 - DNA, 26 bp, Homo sapiens
tttttatttaaaaaggagactaaaca

SEQ ID NO: 80189 - DNA, 26 bp, Homo sapiens
ttttatttaaaaaggagactaaacag

SEQ ID NO: 80190 - DNA, 26 bp, Homo sapiens
tttatttaaaaaggagactaaacaga

SEQ ID NO: 80191 - DNA, 26 bp, Homo sapiens
ttatttaaaaaggagactaaacagaa

SEQ ID NO: 80192 - DNA, 26 bp, Homo sapiens
tatttaaaaaggagactaaacagaag

SEQ ID NO: 80193 - DNA, 26 bp, Homo sapiens
atttaaaaaggagactaaacagaagt

SEQ ID NO: 80194 - DNA, 26 bp, Homo sapiens
tttaaaaaggagactaaacagaagtc

SEQ ID NO: 80195 - DNA, 26 bp, Homo sapiens
ttaaaaaggagactaaacagaagtca

SEQ ID NO: 80196 - DNA, 26 bp, Homo sapiens
taaaaaggagactaaacagaagtcag

SEQ ID NO: 80197 - DNA, 26 bp, Homo sapiens
aaaaaggagactaaacagaagtcagg

SEQ ID NO: 80198 - DNA, 26 bp, Homo sapiens
aaaaggagactaaacagaagtcaggg

SEQ ID NO: 80199 - DNA, 26 bp, Homo sapiens
aaaggagactaaacagaagtcagggg

SEQ ID NO: 80200 - DNA, 26 bp, Homo sapiens
aaggagactaaacagaagtcaggggt

SEQ ID NO: 80201 - DNA, 26 bp, Homo sapiens
aggagactaaacagaagtcaggggta

SEQ ID NO: 80202 - DNA, 26 bp, Homo sapiens
ggagactaaacagaagtcaggggtag

SEQ ID NO: 80203 - DNA, 26 bp, Homo sapiens
gagactaaacagaagtcaggggtagg

SEQ ID NO: 80204 - DNA, 26 bp, Homo sapiens
agactaaacagaagtcaggggtaggt

SEQ ID NO: 80205 - DNA, 26 bp, Homo sapiens
gactaaacagaagtcaggggtaggtg

SEQ ID NO: 80206 - DNA, 26 bp, Homo sapiens
actaaacagaagtcaggggtaggtgg

SEQ ID NO: 80207 - DNA, 26 bp, Homo sapiens
ctaaacagaagtcaggggtaggtggt

SEQ ID NO: 80208 - DNA, 26 bp, Homo sapiens
taaacagaagtcaggggtaggtggtt

SEQ ID NO: 80209 - DNA, 26 bp, Homo sapiens
aaacagaagtcaggggtaggtggttc

SEQ ID NO: 80210 - DNA, 26 bp, Homo sapiens
aacagaagtcaggggtaggtggttct

SEQ ID NO: 80211 - DNA, 26 bp, Homo sapiens
acagaagtcaggggtaggtggttctc

SEQ ID NO: 80212 - DNA, 26 bp, Homo sapiens
cagaagtcaggggtaggtggttctcc

SEQ ID NO: 80213 - DNA, 26 bp, Homo sapiens
agaagtcaggggtaggtggttctcca

SEQ ID NO: 80214 - DNA, 26 bp, Homo sapiens
gaagtcaggggtaggtggttctccat

SEQ ID NO: 80215 - DNA, 26 bp, Homo sapiens
aagtcaggggtaggtggttctccatg

SEQ ID NO: 80216 - DNA, 26 bp, Homo sapiens
agtcaggggtaggtggttctccatga

SEQ ID NO: 80217 - DNA, 26 bp, Homo sapiens
gtcaggggtaggtggttctccatgac

SEQ ID NO: 80218 - DNA, 26 bp, Homo sapiens
tcaggggtaggtggttctccatgact

SEQ ID NO: 80219 - DNA, 26 bp, Homo sapiens
caggggtaggtggttctccatgactg

SEQ ID NO: 80220 - DNA, 26 bp, Homo sapiens
aggggtaggtggttctccatgactgc

SEQ ID NO: 80221 - DNA, 26 bp, Homo sapiens
ggggtaggtggttctccatgactgca

SEQ ID NO: 80222 - DNA, 26 bp, Homo sapiens
gggtaggtggttctccatgactgcaa

SEQ ID NO: 80223 - DNA, 26 bp, Homo sapiens
ggtaggtggttctccatgactgcaaa

SEQ ID NO: 80224 - DNA, 26 bp, Homo sapiens
gtaggtggttctccatgactgcaaat

SEQ ID NO: 80225 - DNA, 26 bp, Homo sapiens
taggtggttctccatgactgcaaata

SEQ ID NO: 80226 - DNA, 26 bp, Homo sapiens
aggtggttctccatgactgcaaataa

SEQ ID NO: 80227 - DNA, 26 bp, Homo sapiens
ggtggttctccatgactgcaaataat

SEQ ID NO: 80228 - DNA, 26 bp, Homo sapiens
gtggttctccatgactgcaaataata

SEQ ID NO: 80229 - DNA, 26 bp, Homo sapiens
tggttctccatgactgcaaataataa

SEQ ID NO: 80230 - DNA, 26 bp, Homo sapiens
ggttctccatgactgcaaataataat

SEQ ID NO: 80231 - DNA, 26 bp, Homo sapiens
gttctccatgactgcaaataataata

SEQ ID NO: 80232 - DNA, 26 bp, Homo sapiens
ttctccatgactgcaaataataataa

SEQ ID NO: 80233 - DNA, 26 bp, Homo sapiens
tctccatgactgcaaataataataat

SEQ ID NO: 80234 - DNA, 26 bp, Homo sapiens
ctccatgactgcaaataataataata

SEQ ID NO: 80235 - DNA, 26 bp, Homo sapiens
tccatgactgcaaataataataataa

SEQ ID NO: 80236 - DNA, 26 bp, Homo sapiens
ccatgactgcaaataataataataat

SEQ ID NO: 80237 - DNA, 26 bp, Homo sapiens
catgactgcaaataataataataatg

SEQ ID NO: 80238 - DNA, 26 bp, Homo sapiens
atgactgcaaataataataataatga

SEQ ID NO: 80239 - DNA, 26 bp, Homo sapiens
tgactgcaaataataataataatgat

SEQ ID NO: 80240 - DNA, 26 bp, Homo sapiens
gactgcaaataataataataatgatg

SEQ ID NO: 80241 - DNA, 26 bp, Homo sapiens
actgcaaataataataataatgatga

SEQ ID NO: 80242 - DNA, 26 bp, Homo sapiens
ctgcaaataataataataatgatgat

SEQ ID NO: 80243 - DNA, 26 bp, Homo sapiens
tgcaaataataataataatgatgatt

SEQ ID NO: 80244 - DNA, 26 bp, Homo sapiens
gcaaataataataataatgatgattt

SEQ ID NO: 80245 - DNA, 26 bp, Homo sapiens
caaataataataataatgatgatttt

SEQ ID NO: 80246 - DNA, 26 bp, Homo sapiens
aaataataataataatgatgattttt

SEQ ID NO: 80247 - DNA, 26 bp, Homo sapiens
aataataataataatgatgatttttt

SEQ ID NO: 80248 - DNA, 26 bp, Homo sapiens
ataataataataatgatgattttttt

SEQ ID NO: 80249 - DNA, 26 bp, Homo sapiens
taataataataatgatgatttttttt

SEQ ID NO: 80250 - DNA, 26 bp, Homo sapiens
aataataataatgatgatttttttta

SEQ ID NO: 80251 - DNA, 26 bp, Homo sapiens
ataataataatgatgattttttttaa

SEQ ID NO: 80252 - DNA, 26 bp, Homo sapiens
taataataatgatgattttttttaat

SEQ ID NO: 80253 - DNA, 26 bp, Homo sapiens
aataataatgatgattttttttaatg

SEQ ID NO: 80254 - DNA, 26 bp, Homo sapiens
ataataatgatgattttttttaatgt

SEQ ID NO: 80255 - DNA, 26 bp, Homo sapiens
taataatgatgattttttttaatgta

SEQ ID NO: 80256 - DNA, 26 bp, Homo sapiens
aataatgatgattttttttaatgtac

SEQ ID NO: 80257 - DNA, 26 bp, Homo sapiens
ataatgatgattttttttaatgtaca

SEQ ID NO: 80258 - DNA, 26 bp, Homo sapiens
taatgatgattttttttaatgtacag

SEQ ID NO: 80259 - DNA, 26 bp, Homo sapiens
aatgatgattttttttaatgtacagc

SEQ ID NO: 80260 - DNA, 26 bp, Homo sapiens
atgatgattttttttaatgtacagct

SEQ ID NO: 80261 - DNA, 26 bp, Homo sapiens
tgatgattttttttaatgtacagctc

SEQ ID NO: 80262 - DNA, 26 bp, Homo sapiens
gatgattttttttaatgtacagctct

SEQ ID NO: 80263 - DNA, 26 bp, Homo sapiens
atgattttttttaatgtacagctctc

SEQ ID NO: 80264 - DNA, 26 bp, Homo sapiens
tgattttttttaatgtacagctctca

SEQ ID NO: 80265 - DNA, 26 bp, Homo sapiens
gattttttttaatgtacagctctcac

SEQ ID NO: 80266 - DNA, 26 bp, Homo sapiens
attttttttaatgtacagctctcaca

SEQ ID NO: 80267 - DNA, 26 bp, Homo sapiens
ttttttttaatgtacagctctcacac

SEQ ID NO: 80268 - DNA, 26 bp, Homo sapiens
tttttttaatgtacagctctcacaca

SEQ ID NO: 80269 - DNA, 26 bp, Homo sapiens
ttttttaatgtacagctctcacacaa

SEQ ID NO: 80270 - DNA, 26 bp, Homo sapiens
tttttaatgtacagctctcacacaaa

SEQ ID NO: 80271 - DNA, 26 bp, Homo sapiens
ttttaatgtacagctctcacacaaat

SEQ ID NO: 80272 - DNA, 26 bp, Homo sapiens
tttaatgtacagctctcacacaaatt

SEQ ID NO: 80273 - DNA, 26 bp, Homo sapiens
ttaatgtacagctctcacacaaattt

SEQ ID NO: 80274 - DNA, 26 bp, Homo sapiens
taatgtacagctctcacacaaatttc

SEQ ID NO: 80275 - DNA, 26 bp, Homo sapiens
aatgtacagctctcacacaaatttca

SEQ ID NO: 80276 - DNA, 26 bp, Homo sapiens
atgtacagctctcacacaaatttcat

SEQ ID NO: 80277 - DNA, 26 bp, Homo sapiens
tgtacagctctcacacaaatttcatt

SEQ ID NO: 80278 - DNA, 26 bp, Homo sapiens
gtacagctctcacacaaatttcattt

SEQ ID NO: 80279 - DNA, 26 bp, Homo sapiens
tacagctctcacacaaatttcatttt

SEQ ID NO: 80280 - DNA, 26 bp, Homo sapiens
acagctctcacacaaatttcattttg

SEQ ID NO: 80281 - DNA, 26 bp, Homo sapiens
cagctctcacacaaatttcattttgt

SEQ ID NO: 80282 - DNA, 26 bp, Homo sapiens
agctctcacacaaatttcattttgtg

SEQ ID NO: 80283 - DNA, 26 bp, Homo sapiens
gctctcacacaaatttcattttgtga

SEQ ID NO: 80284 - DNA, 26 bp, Homo sapiens
ctctcacacaaatttcattttgtgaa

SEQ ID NO: 80285 - DNA, 26 bp, Homo sapiens
tctcacacaaatttcattttgtgaac

SEQ ID NO: 80286 - DNA, 26 bp, Homo sapiens
ctcacacaaatttcattttgtgaaca

SEQ ID NO: 80287 - DNA, 26 bp, Homo sapiens
tcacacaaatttcattttgtgaacac

SEQ ID NO: 80288 - DNA, 26 bp, Homo sapiens
cacacaaatttcattttgtgaacaca

SEQ ID NO: 80289 - DNA, 26 bp, Homo sapiens
acacaaatttcattttgtgaacacac

SEQ ID NO: 80290 - DNA, 26 bp, Homo sapiens
cacaaatttcattttgtgaacacact

SEQ ID NO: 80291 - DNA, 26 bp, Homo sapiens
acaaatttcattttgtgaacacactg

SEQ ID NO: 80292 - DNA, 26 bp, Homo sapiens
caaatttcattttgtgaacacactgg

SEQ ID NO: 80293 - DNA, 26 bp, Homo sapiens
aaatttcattttgtgaacacactggt

SEQ ID NO: 80294 - DNA, 26 bp, Homo sapiens
aatttcattttgtgaacacactggta

SEQ ID NO: 80295 - DNA, 26 bp, Homo sapiens
atttcattttgtgaacacactggtaa

SEQ ID NO: 80296 - DNA, 26 bp, Homo sapiens
tttcattttgtgaacacactggtaag

SEQ ID NO: 80297 - DNA, 26 bp, Homo sapiens
ttcattttgtgaacacactggtaagt

SEQ ID NO: 80298 - DNA, 26 bp, Homo sapiens
tcattttgtgaacacactggtaagta

SEQ ID NO: 80299 - DNA, 26 bp, Homo sapiens
cattttgtgaacacactggtaagtac

SEQ ID NO: 80300 - DNA, 26 bp, Homo sapiens
attttgtgaacacactggtaagtaca

SEQ ID NO: 80301 - DNA, 26 bp, Homo sapiens
ttttgtgaacacactggtaagtacac

SEQ ID NO: 80302 - DNA, 26 bp, Homo sapiens
tttgtgaacacactggtaagtacacg

SEQ ID NO: 80303 - DNA, 26 bp, Homo sapiens
ttgtgaacacactggtaagtacacga

SEQ ID NO: 80304 - DNA, 26 bp, Homo sapiens
tgtgaacacactggtaagtacacgat

SEQ ID NO: 80305 - DNA, 26 bp, Homo sapiens
gtgaacacactggtaagtacacgatg

SEQ ID NO: 80306 - DNA, 26 bp, Homo sapiens
tgaacacactggtaagtacacgatgc

SEQ ID NO: 80307 - DNA, 26 bp, Homo sapiens
gaacacactggtaagtacacgatgct

SEQ ID NO: 80308 - DNA, 26 bp, Homo sapiens
aacacactggtaagtacacgatgctg

SEQ ID NO: 80309 - DNA, 26 bp, Homo sapiens
acacactggtaagtacacgatgctgg

SEQ ID NO: 80310 - DNA, 26 bp, Homo sapiens
cacactggtaagtacacgatgctggg

SEQ ID NO: 80311 - DNA, 26 bp, Homo sapiens
acactggtaagtacacgatgctgggg

SEQ ID NO: 80312 - DNA, 26 bp, Homo sapiens
cactggtaagtacacgatgctggggc

SEQ ID NO: 80313 - DNA, 26 bp, Homo sapiens
actggtaagtacacgatgctggggct

SEQ ID NO: 80314 - DNA, 26 bp, Homo sapiens
ctggtaagtacacgatgctggggctt

SEQ ID NO: 80315 - DNA, 26 bp, Homo sapiens
tggtaagtacacgatgctggggcttc

SEQ ID NO: 80316 - DNA, 26 bp, Homo sapiens
ggtaagtacacgatgctggggcttcc

SEQ ID NO: 80317 - DNA, 26 bp, Homo sapiens
gtaagtacacgatgctggggcttcca

SEQ ID NO: 80318 - DNA, 26 bp, Homo sapiens
taagtacacgatgctggggcttccaa

SEQ ID NO: 80319 - DNA, 26 bp, Homo sapiens
aagtacacgatgctggggcttccaaa

SEQ ID NO: 80320 - DNA, 26 bp, Homo sapiens
agtacacgatgctggggcttccaaaa

SEQ ID NO: 80321 - DNA, 26 bp, Homo sapiens
gtacacgatgctggggcttccaaaat

SEQ ID NO: 80322 - DNA, 26 bp, Homo sapiens
tacacgatgctggggcttccaaaatg

SEQ ID NO: 80323 - DNA, 26 bp, Homo sapiens
acacgatgctggggcttccaaaatgt

SEQ ID NO: 80324 - DNA, 26 bp, Homo sapiens
cacgatgctggggcttccaaaatgtg

SEQ ID NO: 80325 - DNA, 26 bp, Homo sapiens
acgatgctggggcttccaaaatgtgg

SEQ ID NO: 80326 - DNA, 26 bp, Homo sapiens
cgatgctggggcttccaaaatgtggc

SEQ ID NO: 80327 - DNA, 26 bp, Homo sapiens
gatgctggggcttccaaaatgtggcg

SEQ ID NO: 80328 - DNA, 26 bp, Homo sapiens
atgctggggcttccaaaatgtggcgt

SEQ ID NO: 80329 - DNA, 26 bp, Homo sapiens
tgctggggcttccaaaatgtggcgta

SEQ ID NO: 80330 - DNA, 26 bp, Homo sapiens
gctggggcttccaaaatgtggcgtat

SEQ ID NO: 80331 - DNA, 26 bp, Homo sapiens
ctggggcttccaaaatgtggcgtatc

SEQ ID NO: 80332 - DNA, 26 bp, Homo sapiens
tggggcttccaaaatgtggcgtatcc

SEQ ID NO: 80333 - DNA, 26 bp, Homo sapiens
ggggcttccaaaatgtggcgtatccc

SEQ ID NO: 80334 - DNA, 26 bp, Homo sapiens
gggcttccaaaatgtggcgtatccca

SEQ ID NO: 80335 - DNA, 26 bp, Homo sapiens
ggcttccaaaatgtggcgtatcccac

SEQ ID NO: 80336 - DNA, 26 bp, Homo sapiens
gcttccaaaatgtggcgtatcccact

SEQ ID NO: 80337 - DNA, 26 bp, Homo sapiens
cttccaaaatgtggcgtatcccactg

SEQ ID NO: 80338 - DNA, 26 bp, Homo sapiens
ttccaaaatgtggcgtatcccactga

SEQ ID NO: 80339 - DNA, 26 bp, Homo sapiens
tccaaaatgtggcgtatcccactgat

SEQ ID NO: 80340 - DNA, 26 bp, Homo sapiens
ccaaaatgtggcgtatcccactgatg

SEQ ID NO: 80341 - DNA, 26 bp, Homo sapiens
caaaatgtggcgtatcccactgatgg

SEQ ID NO: 80342 - DNA, 26 bp, Homo sapiens
aaaatgtggcgtatcccactgatggc

SEQ ID NO: 80343 - DNA, 26 bp, Homo sapiens
aaatgtggcgtatcccactgatggct

SEQ ID NO: 80344 - DNA, 26 bp, Homo sapiens
aatgtggcgtatcccactgatggctc

SEQ ID NO: 80345 - DNA, 26 bp, Homo sapiens
atgtggcgtatcccactgatggctcc

SEQ ID NO: 80346 - DNA, 26 bp, Homo sapiens
tgtggcgtatcccactgatggctcca

SEQ ID NO: 80347 - DNA, 26 bp, Homo sapiens
gtggcgtatcccactgatggctccaa

SEQ ID NO: 80348 - DNA, 26 bp, Homo sapiens
tggcgtatcccactgatggctccaac

SEQ ID NO: 80349 - DNA, 26 bp, Homo sapiens
ggcgtatcccactgatggctccaact

SEQ ID NO: 80350 - DNA, 26 bp, Homo sapiens
gcgtatcccactgatggctccaactt

SEQ ID NO: 80351 - DNA, 26 bp, Homo sapiens
cgtatcccactgatggctccaacttg

SEQ ID NO: 80352 - DNA, 26 bp, Homo sapiens
gtatcccactgatggctccaacttgc

SEQ ID NO: 80353 - DNA, 26 bp, Homo sapiens
tatcccactgatggctccaacttgcg

SEQ ID NO: 80354 - DNA, 26 bp, Homo sapiens
atcccactgatggctccaacttgcga

SEQ ID NO: 80355 - DNA, 26 bp, Homo sapiens
tcccactgatggctccaacttgcgag

SEQ ID NO: 80356 - DNA, 26 bp, Homo sapiens
cccactgatggctccaacttgcgagt

SEQ ID NO: 80357 - DNA, 26 bp, Homo sapiens
ccactgatggctccaacttgcgagtg

SEQ ID NO: 80358 - DNA, 26 bp, Homo sapiens
cactgatggctccaacttgcgagtgg

SEQ ID NO: 80359 - DNA, 26 bp, Homo sapiens
actgatggctccaacttgcgagtggg

SEQ ID NO: 80360 - DNA, 26 bp, Homo sapiens
ctgatggctccaacttgcgagtgggc

SEQ ID NO: 80361 - DNA, 26 bp, Homo sapiens
tgatggctccaacttgcgagtgggct

SEQ ID NO: 80362 - DNA, 26 bp, Homo sapiens
gatggctccaacttgcgagtgggctc

SEQ ID NO: 80363 - DNA, 26 bp, Homo sapiens
atggctccaacttgcgagtgggctca

SEQ ID NO: 80364 - DNA, 26 bp, Homo sapiens
tggctccaacttgcgagtgggctcag

SEQ ID NO: 80365 - DNA, 26 bp, Homo sapiens
ggctccaacttgcgagtgggctcagt

SEQ ID NO: 80366 - DNA, 26 bp, Homo sapiens
gctccaacttgcgagtgggctcagtt

SEQ ID NO: 80367 - DNA, 26 bp, Homo sapiens
ctccaacttgcgagtgggctcagtta

SEQ ID NO: 80368 - DNA, 26 bp, Homo sapiens
tccaacttgcgagtgggctcagttat

SEQ ID NO: 80369 - DNA, 26 bp, Homo sapiens
ccaacttgcgagtgggctcagttatg

SEQ ID NO: 80370 - DNA, 26 bp, Homo sapiens
caacttgcgagtgggctcagttatga

SEQ ID NO: 80371 - DNA, 26 bp, Homo sapiens
aacttgcgagtgggctcagttatgaa

SEQ ID NO: 80372 - DNA, 26 bp, Homo sapiens
acttgcgagtgggctcagttatgaaa

SEQ ID NO: 80373 - DNA, 26 bp, Homo sapiens
cttgcgagtgggctcagttatgaaaa

SEQ ID NO: 80374 - DNA, 26 bp, Homo sapiens
ttgcgagtgggctcagttatgaaaaa

SEQ ID NO: 80375 - DNA, 26 bp, Homo sapiens
tgcgagtgggctcagttatgaaaaac

SEQ ID NO: 80376 - DNA, 26 bp, Homo sapiens
gcgagtgggctcagttatgaaaaact

SEQ ID NO: 80377 - DNA, 26 bp, Homo sapiens
cgagtgggctcagttatgaaaaactc

SEQ ID NO: 80378 - DNA, 26 bp, Homo sapiens
gagtgggctcagttatgaaaaactcg

SEQ ID NO: 80379 - DNA, 26 bp, Homo sapiens
agtgggctcagttatgaaaaactcgg

SEQ ID NO: 80380 - DNA, 26 bp, Homo sapiens
gtgggctcagttatgaaaaactcggg

SEQ ID NO: 80381 - DNA, 26 bp, Homo sapiens
tgggctcagttatgaaaaactcggga

SEQ ID NO: 80382 - DNA, 26 bp, Homo sapiens
gggctcagttatgaaaaactcgggag

SEQ ID NO: 80383 - DNA, 26 bp, Homo sapiens
ggctcagttatgaaaaactcgggaga

SEQ ID NO: 80384 - DNA, 26 bp, Homo sapiens
gctcagttatgaaaaactcgggagag

SEQ ID NO: 80385 - DNA, 26 bp, Homo sapiens
ctcagttatgaaaaactcgggagagg

SEQ ID NO: 80386 - DNA, 26 bp, Homo sapiens
tcagttatgaaaaactcgggagagga

SEQ ID NO: 80387 - DNA, 26 bp, Homo sapiens
cagttatgaaaaactcgggagaggac

SEQ ID NO: 80388 - DNA, 26 bp, Homo sapiens
agttatgaaaaactcgggagaggacg

SEQ ID NO: 80389 - DNA, 26 bp, Homo sapiens
gttatgaaaaactcgggagaggacgg

SEQ ID NO: 80390 - DNA, 26 bp, Homo sapiens
ttatgaaaaactcgggagaggacggg

SEQ ID NO: 80391 - DNA, 26 bp, Homo sapiens
tatgaaaaactcgggagaggacgggt

SEQ ID NO: 80392 - DNA, 26 bp, Homo sapiens
atgaaaaactcgggagaggacgggtt

SEQ ID NO: 80393 - DNA, 26 bp, Homo sapiens
tgaaaaactcgggagaggacgggttg

SEQ ID NO: 80394 - DNA, 26 bp, Homo sapiens
gaaaaactcgggagaggacgggttgt

SEQ ID NO: 80395 - DNA, 26 bp, Homo sapiens
aaaaactcgggagaggacgggttgtc

SEQ ID NO: 80396 - DNA, 26 bp, Homo sapiens
aaaactcgggagaggacgggttgtcg

SEQ ID NO: 80397 - DNA, 26 bp, Homo sapiens
aaactcgggagaggacgggttgtcgc

SEQ ID NO: 80398 - DNA, 26 bp, Homo sapiens
aactcgggagaggacgggttgtcgct

SEQ ID NO: 80399 - DNA, 26 bp, Homo sapiens
actcgggagaggacgggttgtcgctg

SEQ ID NO: 80400 - DNA, 26 bp, Homo sapiens
ctcgggagaggacgggttgtcgctgc

SEQ ID NO: 80401 - DNA, 26 bp, Homo sapiens
tcgggagaggacgggttgtcgctgct

SEQ ID NO: 80402 - DNA, 26 bp, Homo sapiens
cgggagaggacgggttgtcgctgctc

SEQ ID NO: 80403 - DNA, 26 bp, Homo sapiens
gggagaggacgggttgtcgctgctcg

SEQ ID NO: 80404 - DNA, 26 bp, Homo sapiens
ggagaggacgggttgtcgctgctcga

SEQ ID NO: 80405 - DNA, 26 bp, Homo sapiens
gagaggacgggttgtcgctgctcgag

SEQ ID NO: 80406 - DNA, 26 bp, Homo sapiens
agaggacgggttgtcgctgctcgagc

SEQ ID NO: 80407 - DNA, 26 bp, Homo sapiens
gaggacgggttgtcgctgctcgagcc

SEQ ID NO: 80408 - DNA, 26 bp, Homo sapiens
aggacgggttgtcgctgctcgagccg

SEQ ID NO: 80409 - DNA, 26 bp, Homo sapiens
ggacgggttgtcgctgctcgagccgt

SEQ ID NO: 80410 - DNA, 26 bp, Homo sapiens
gacgggttgtcgctgctcgagccgtt

SEQ ID NO: 80411 - DNA, 26 bp, Homo sapiens
acgggttgtcgctgctcgagccgttt

SEQ ID NO: 80412 - DNA, 26 bp, Homo sapiens
cgggttgtcgctgctcgagccgtttt

SEQ ID NO: 80413 - DNA, 26 bp, Homo sapiens
gggttgtcgctgctcgagccgttttc

SEQ ID NO: 80414 - DNA, 26 bp, Homo sapiens
ggttgtcgctgctcgagccgttttct

SEQ ID NO: 80415 - DNA, 26 bp, Homo sapiens
gttgtcgctgctcgagccgttttctc

SEQ ID NO: 80416 - DNA, 26 bp, Homo sapiens
ttgtcgctgctcgagccgttttctcg

SEQ ID NO: 80417 - DNA, 26 bp, Homo sapiens
tgtcgctgctcgagccgttttctcgg

SEQ ID NO: 80418 - DNA, 26 bp, Homo sapiens
gtcgctgctcgagccgttttctcgga

SEQ ID NO: 80419 - DNA, 26 bp, Homo sapiens
tcgctgctcgagccgttttctcggaa

SEQ ID NO: 80420 - DNA, 26 bp, Homo sapiens
cgctgctcgagccgttttctcggaag

SEQ ID NO: 80421 - DNA, 26 bp, Homo sapiens
gctgctcgagccgttttctcggaagc

SEQ ID NO: 80422 - DNA, 26 bp, Homo sapiens
ctgctcgagccgttttctcggaagcc

SEQ ID NO: 80423 - DNA, 26 bp, Homo sapiens
tgctcgagccgttttctcggaagccg

SEQ ID NO: 80424 - DNA, 26 bp, Homo sapiens
gctcgagccgttttctcggaagccgc

SEQ ID NO: 80425 - DNA, 26 bp, Homo sapiens
ctcgagccgttttctcggaagccgct

SEQ ID NO: 80426 - DNA, 26 bp, Homo sapiens
tcgagccgttttctcggaagccgctg

SEQ ID NO: 80427 - DNA, 26 bp, Homo sapiens
cgagccgttttctcggaagccgctgc

SEQ ID NO: 80428 - DNA, 26 bp, Homo sapiens
gagccgttttctcggaagccgctgct

SEQ ID NO: 80429 - DNA, 26 bp, Homo sapiens
agccgttttctcggaagccgctgctc

SEQ ID NO: 80430 - DNA, 26 bp, Homo sapiens
gccgttttctcggaagccgctgctca

SEQ ID NO: 80431 - DNA, 26 bp, Homo sapiens
ccgttttctcggaagccgctgctcac

SEQ ID NO: 80432 - DNA, 26 bp, Homo sapiens
cgttttctcggaagccgctgctcacc

SEQ ID NO: 80433 - DNA, 26 bp, Homo sapiens
gttttctcggaagccgctgctcacca

SEQ ID NO: 80434 - DNA, 26 bp, Homo sapiens
ttttctcggaagccgctgctcaccaa

SEQ ID NO: 80435 - DNA, 26 bp, Homo sapiens
tttctcggaagccgctgctcaccaac

SEQ ID NO: 80436 - DNA, 26 bp, Homo sapiens
ttctcggaagccgctgctcaccaact

SEQ ID NO: 80437 - DNA, 26 bp, Homo sapiens
tctcggaagccgctgctcaccaactt

SEQ ID NO: 80438 - DNA, 26 bp, Homo sapiens
ctcggaagccgctgctcaccaacttc

SEQ ID NO: 80439 - DNA, 26 bp, Homo sapiens
tcggaagccgctgctcaccaacttct

SEQ ID NO: 80440 - DNA, 26 bp, Homo sapiens
cggaagccgctgctcaccaacttctc

SEQ ID NO: 80441 - DNA, 26 bp, Homo sapiens
ggaagccgctgctcaccaacttctcg

SEQ ID NO: 80442 - DNA, 26 bp, Homo sapiens
gaagccgctgctcaccaacttctcgt

SEQ ID NO: 80443 - DNA, 26 bp, Homo sapiens
aagccgctgctcaccaacttctcgta

SEQ ID NO: 80444 - DNA, 26 bp, Homo sapiens
agccgctgctcaccaacttctcgtat

SEQ ID NO: 80445 - DNA, 26 bp, Homo sapiens
gccgctgctcaccaacttctcgtatt

SEQ ID NO: 80446 - DNA, 26 bp, Homo sapiens
ccgctgctcaccaacttctcgtattt

SEQ ID NO: 80447 - DNA, 26 bp, Homo sapiens
cgctgctcaccaacttctcgtatttc

SEQ ID NO: 80448 - DNA, 26 bp, Homo sapiens
gctgctcaccaacttctcgtatttct

SEQ ID NO: 80449 - DNA, 26 bp, Homo sapiens
ctgctcaccaacttctcgtatttctc

SEQ ID NO: 80450 - DNA, 26 bp, Homo sapiens
tgctcaccaacttctcgtatttctcc

SEQ ID NO: 80451 - DNA, 26 bp, Homo sapiens
gctcaccaacttctcgtatttctcct

SEQ ID NO: 80452 - DNA, 26 bp, Homo sapiens
ctcaccaacttctcgtatttctcctt

SEQ ID NO: 80453 - DNA, 26 bp, Homo sapiens
tcaccaacttctcgtatttctccttg

SEQ ID NO: 80454 - DNA, 26 bp, Homo sapiens
caccaacttctcgtatttctccttgt

SEQ ID NO: 80455 - DNA, 26 bp, Homo sapiens
accaacttctcgtatttctccttgta

SEQ ID NO: 80456 - DNA, 26 bp, Homo sapiens
ccaacttctcgtatttctccttgtac

SEQ ID NO: 80457 - DNA, 26 bp, Homo sapiens
caacttctcgtatttctccttgtacg

SEQ ID NO: 80458 - DNA, 26 bp, Homo sapiens
aacttctcgtatttctccttgtacgc

SEQ ID NO: 80459 - DNA, 26 bp, Homo sapiens
acttctcgtatttctccttgtacgcg

SEQ ID NO: 80460 - DNA, 26 bp, Homo sapiens
cttctcgtatttctccttgtacgcgt

SEQ ID NO: 80461 - DNA, 26 bp, Homo sapiens
ttctcgtatttctccttgtacgcgtc

SEQ ID NO: 80462 - DNA, 26 bp, Homo sapiens
tctcgtatttctccttgtacgcgtcc

SEQ ID NO: 80463 - DNA, 26 bp, Homo sapiens
ctcgtatttctccttgtacgcgtccc

SEQ ID NO: 80464 - DNA, 26 bp, Homo sapiens
tcgtatttctccttgtacgcgtccct

SEQ ID NO: 80465 - DNA, 26 bp, Homo sapiens
cgtatttctccttgtacgcgtccctc

SEQ ID NO: 80466 - DNA, 26 bp, Homo sapiens
gtatttctccttgtacgcgtccctct

SEQ ID NO: 80467 - DNA, 26 bp, Homo sapiens
tatttctccttgtacgcgtccctctc

SEQ ID NO: 80468 - DNA, 26 bp, Homo sapiens
atttctccttgtacgcgtccctctcg

SEQ ID NO: 80469 - DNA, 26 bp, Homo sapiens
tttctccttgtacgcgtccctctcgc

SEQ ID NO: 80470 - DNA, 26 bp, Homo sapiens
ttctccttgtacgcgtccctctcgcg

SEQ ID NO: 80471 - DNA, 26 bp, Homo sapiens
tctccttgtacgcgtccctctcgcgc

SEQ ID NO: 80472 - DNA, 26 bp, Homo sapiens
ctccttgtacgcgtccctctcgcgca

SEQ ID NO: 80473 - DNA, 26 bp, Homo sapiens
tccttgtacgcgtccctctcgcgcac

SEQ ID NO: 80474 - DNA, 26 bp, Homo sapiens
ccttgtacgcgtccctctcgcgcacc

SEQ ID NO: 80475 - DNA, 26 bp, Homo sapiens
cttgtacgcgtccctctcgcgcacca

SEQ ID NO: 80476 - DNA, 26 bp, Homo sapiens
ttgtacgcgtccctctcgcgcaccag

SEQ ID NO: 80477 - DNA, 26 bp, Homo sapiens
tgtacgcgtccctctcgcgcaccagc

SEQ ID NO: 80478 - DNA, 26 bp, Homo sapiens
gtacgcgtccctctcgcgcaccagcc

SEQ ID NO: 80479 - DNA, 26 bp, Homo sapiens
tacgcgtccctctcgcgcaccagcct

SEQ ID NO: 80480 - DNA, 26 bp, Homo sapiens
acgcgtccctctcgcgcaccagcctg

SEQ ID NO: 80481 - DNA, 26 bp, Homo sapiens
cgcgtccctctcgcgcaccagcctgg

SEQ ID NO: 80482 - DNA, 26 bp, Homo sapiens
gcgtccctctcgcgcaccagcctgga

SEQ ID NO: 80483 - DNA, 26 bp, Homo sapiens
cgtccctctcgcgcaccagcctggag

SEQ ID NO: 80484 - DNA, 26 bp, Homo sapiens
gtccctctcgcgcaccagcctggaga

SEQ ID NO: 80485 - DNA, 26 bp, Homo sapiens
tccctctcgcgcaccagcctggagat

SEQ ID NO: 80486 - DNA, 26 bp, Homo sapiens
ccctctcgcgcaccagcctggagatc

SEQ ID NO: 80487 - DNA, 26 bp, Homo sapiens
cctctcgcgcaccagcctggagatct

SEQ ID NO: 80488 - DNA, 26 bp, Homo sapiens
ctctcgcgcaccagcctggagatctc

SEQ ID NO: 80489 - DNA, 26 bp, Homo sapiens
tctcgcgcaccagcctggagatctcc

SEQ ID NO: 80490 - DNA, 26 bp, Homo sapiens
ctcgcgcaccagcctggagatctcct

SEQ ID NO: 80491 - DNA, 26 bp, Homo sapiens
tcgcgcaccagcctggagatctcctg

SEQ ID NO: 80492 - DNA, 26 bp, Homo sapiens
cgcgcaccagcctggagatctcctgc

SEQ ID NO: 80493 - DNA, 26 bp, Homo sapiens
gcgcaccagcctggagatctcctgct

SEQ ID NO: 80494 - DNA, 26 bp, Homo sapiens
cgcaccagcctggagatctcctgctt

SEQ ID NO: 80495 - DNA, 26 bp, Homo sapiens
gcaccagcctggagatctcctgcttg

SEQ ID NO: 80496 - DNA, 26 bp, Homo sapiens
caccagcctggagatctcctgcttga

SEQ ID NO: 80497 - DNA, 26 bp, Homo sapiens
accagcctggagatctcctgcttgag

SEQ ID NO: 80498 - DNA, 26 bp, Homo sapiens
ccagcctggagatctcctgcttgagg

SEQ ID NO: 80499 - DNA, 26 bp, Homo sapiens
cagcctggagatctcctgcttgaggt

SEQ ID NO: 80500 - DNA, 26 bp, Homo sapiens
agcctggagatctcctgcttgaggtg

SEQ ID NO: 80501 - DNA, 26 bp, Homo sapiens
gcctggagatctcctgcttgaggtgg

SEQ ID NO: 80502 - DNA, 26 bp, Homo sapiens
cctggagatctcctgcttgaggtggt

SEQ ID NO: 80503 - DNA, 26 bp, Homo sapiens
ctggagatctcctgcttgaggtggtc

SEQ ID NO: 80504 - DNA, 26 bp, Homo sapiens
tggagatctcctgcttgaggtggtcg

SEQ ID NO: 80505 - DNA, 26 bp, Homo sapiens
ggagatctcctgcttgaggtggtcga

SEQ ID NO: 80506 - DNA, 26 bp, Homo sapiens
gagatctcctgcttgaggtggtcgac

SEQ ID NO: 80507 - DNA, 26 bp, Homo sapiens
agatctcctgcttgaggtggtcgact

SEQ ID NO: 80508 - DNA, 26 bp, Homo sapiens
gatctcctgcttgaggtggtcgactt

SEQ ID NO: 80509 - DNA, 26 bp, Homo sapiens
atctcctgcttgaggtggtcgacttg

SEQ ID NO: 80510 - DNA, 26 bp, Homo sapiens
tctcctgcttgaggtggtcgacttgc

SEQ ID NO: 80511 - DNA, 26 bp, Homo sapiens
ctcctgcttgaggtggtcgacttgct

SEQ ID NO: 80512 - DNA, 26 bp, Homo sapiens
tcctgcttgaggtggtcgacttgctg

SEQ ID NO: 80513 - DNA, 26 bp, Homo sapiens
cctgcttgaggtggtcgacttgctgc

SEQ ID NO: 80514 - DNA, 26 bp, Homo sapiens
ctgcttgaggtggtcgacttgctgca

SEQ ID NO: 80515 - DNA, 26 bp, Homo sapiens
tgcttgaggtggtcgacttgctgcag

SEQ ID NO: 80516 - DNA, 26 bp, Homo sapiens
gcttgaggtggtcgacttgctgcagc

SEQ ID NO: 80517 - DNA, 26 bp, Homo sapiens
cttgaggtggtcgacttgctgcagca

SEQ ID NO: 80518 - DNA, 26 bp, Homo sapiens
ttgaggtggtcgacttgctgcagcag

SEQ ID NO: 80519 - DNA, 26 bp, Homo sapiens
tgaggtggtcgacttgctgcagcagc

SEQ ID NO: 80520 - DNA, 26 bp, Homo sapiens
gaggtggtcgacttgctgcagcagct

SEQ ID NO: 80521 - DNA, 26 bp, Homo sapiens
aggtggtcgacttgctgcagcagctg

SEQ ID NO: 80522 - DNA, 26 bp, Homo sapiens
ggtggtcgacttgctgcagcagctgg

SEQ ID NO: 80523 - DNA, 26 bp, Homo sapiens
gtggtcgacttgctgcagcagctggt

SEQ ID NO: 80524 - DNA, 26 bp, Homo sapiens
tggtcgacttgctgcagcagctggtt

SEQ ID NO: 80525 - DNA, 26 bp, Homo sapiens
ggtcgacttgctgcagcagctggttc

SEQ ID NO: 80526 - DNA, 26 bp, Homo sapiens
gtcgacttgctgcagcagctggttct

SEQ ID NO: 80527 - DNA, 26 bp, Homo sapiens
tcgacttgctgcagcagctggttctt

SEQ ID NO: 80528 - DNA, 26 bp, Homo sapiens
cgacttgctgcagcagctggttcttc

SEQ ID NO: 80529 - DNA, 26 bp, Homo sapiens
gacttgctgcagcagctggttcttct

SEQ ID NO: 80530 - DNA, 26 bp, Homo sapiens
acttgctgcagcagctggttcttctc

SEQ ID NO: 80531 - DNA, 26 bp, Homo sapiens
cttgctgcagcagctggttcttctcc

SEQ ID NO: 80532 - DNA, 26 bp, Homo sapiens
ttgctgcagcagctggttcttctccg

SEQ ID NO: 80533 - DNA, 26 bp, Homo sapiens
tgctgcagcagctggttcttctccga

SEQ ID NO: 80534 - DNA, 26 bp, Homo sapiens
gctgcagcagctggttcttctccgac

SEQ ID NO: 80535 - DNA, 26 bp, Homo sapiens
ctgcagcagctggttcttctccgact

SEQ ID NO: 80536 - DNA, 26 bp, Homo sapiens
tgcagcagctggttcttctccgactc

SEQ ID NO: 80537 - DNA, 26 bp, Homo sapiens
gcagcagctggttcttctccgactcc

SEQ ID NO: 80538 - DNA, 26 bp, Homo sapiens
cagcagctggttcttctccgactcca

SEQ ID NO: 80539 - DNA, 26 bp, Homo sapiens
agcagctggttcttctccgactccag

SEQ ID NO: 80540 - DNA, 26 bp, Homo sapiens
gcagctggttcttctccgactccagg

SEQ ID NO: 80541 - DNA, 26 bp, Homo sapiens
cagctggttcttctccgactccagga

SEQ ID NO: 80542 - DNA, 26 bp, Homo sapiens
agctggttcttctccgactccaggac

SEQ ID NO: 80543 - DNA, 26 bp, Homo sapiens
gctggttcttctccgactccaggacg

SEQ ID NO: 80544 - DNA, 26 bp, Homo sapiens
ctggttcttctccgactccaggacgt

SEQ ID NO: 80545 - DNA, 26 bp, Homo sapiens
tggttcttctccgactccaggacgtg

SEQ ID NO: 80546 - DNA, 26 bp, Homo sapiens
ggttcttctccgactccaggacgtgt

SEQ ID NO: 80547 - DNA, 26 bp, Homo sapiens
gttcttctccgactccaggacgtgtc

SEQ ID NO: 80548 - DNA, 26 bp, Homo sapiens
ttcttctccgactccaggacgtgtct

SEQ ID NO: 80549 - DNA, 26 bp, Homo sapiens
tcttctccgactccaggacgtgtctc

SEQ ID NO: 80550 - DNA, 26 bp, Homo sapiens
cttctccgactccaggacgtgtctct

SEQ ID NO: 80551 - DNA, 26 bp, Homo sapiens
ttctccgactccaggacgtgtctctg

SEQ ID NO: 80552 - DNA, 26 bp, Homo sapiens
tctccgactccaggacgtgtctctgc

SEQ ID NO: 80553 - DNA, 26 bp, Homo sapiens
ctccgactccaggacgtgtctctgct

SEQ ID NO: 80554 - DNA, 26 bp, Homo sapiens
tccgactccaggacgtgtctctgctg

SEQ ID NO: 80555 - DNA, 26 bp, Homo sapiens
ccgactccaggacgtgtctctgctgc

SEQ ID NO: 80556 - DNA, 26 bp, Homo sapiens
cgactccaggacgtgtctctgctgca

SEQ ID NO: 80557 - DNA, 26 bp, Homo sapiens
gactccaggacgtgtctctgctgcac

SEQ ID NO: 80558 - DNA, 26 bp, Homo sapiens
actccaggacgtgtctctgctgcacc

SEQ ID NO: 80559 - DNA, 26 bp, Homo sapiens
ctccaggacgtgtctctgctgcaccc

SEQ ID NO: 80560 - DNA, 26 bp, Homo sapiens
tccaggacgtgtctctgctgcaccct

SEQ ID NO: 80561 - DNA, 26 bp, Homo sapiens
ccaggacgtgtctctgctgcaccctc

SEQ ID NO: 80562 - DNA, 26 bp, Homo sapiens
caggacgtgtctctgctgcaccctct

SEQ ID NO: 80563 - DNA, 26 bp, Homo sapiens
aggacgtgtctctgctgcaccctctt

SEQ ID NO: 80564 - DNA, 26 bp, Homo sapiens
ggacgtgtctctgctgcaccctcttg

SEQ ID NO: 80565 - DNA, 26 bp, Homo sapiens
gacgtgtctctgctgcaccctcttga

SEQ ID NO: 80566 - DNA, 26 bp, Homo sapiens
acgtgtctctgctgcaccctcttgaa

SEQ ID NO: 80567 - DNA, 26 bp, Homo sapiens
cgtgtctctgctgcaccctcttgaag

SEQ ID NO: 80568 - DNA, 26 bp, Homo sapiens
gtgtctctgctgcaccctcttgaagc

SEQ ID NO: 80569 - DNA, 26 bp, Homo sapiens
tgtctctgctgcaccctcttgaagcg

SEQ ID NO: 80570 - DNA, 26 bp, Homo sapiens
gtctctgctgcaccctcttgaagcgg

SEQ ID NO: 80571 - DNA, 26 bp, Homo sapiens
tctctgctgcaccctcttgaagcggc

SEQ ID NO: 80572 - DNA, 26 bp, Homo sapiens
ctctgctgcaccctcttgaagcggca

SEQ ID NO: 80573 - DNA, 26 bp, Homo sapiens
tctgctgcaccctcttgaagcggcag

SEQ ID NO: 80574 - DNA, 26 bp, Homo sapiens
ctgctgcaccctcttgaagcggcagg

SEQ ID NO: 80575 - DNA, 26 bp, Homo sapiens
tgctgcaccctcttgaagcggcagga

SEQ ID NO: 80576 - DNA, 26 bp, Homo sapiens
gctgcaccctcttgaagcggcaggac

SEQ ID NO: 80577 - DNA, 26 bp, Homo sapiens
ctgcaccctcttgaagcggcaggact

SEQ ID NO: 80578 - DNA, 26 bp, Homo sapiens
tgcaccctcttgaagcggcaggactg

SEQ ID NO: 80579 - DNA, 26 bp, Homo sapiens
gcaccctcttgaagcggcaggactgg

SEQ ID NO: 80580 - DNA, 26 bp, Homo sapiens
caccctcttgaagcggcaggactggg

SEQ ID NO: 80581 - DNA, 26 bp, Homo sapiens
accctcttgaagcggcaggactgggc

SEQ ID NO: 80582 - DNA, 26 bp, Homo sapiens
ccctcttgaagcggcaggactgggca

SEQ ID NO: 80583 - DNA, 26 bp, Homo sapiens
cctcttgaagcggcaggactgggcat

SEQ ID NO: 80584 - DNA, 26 bp, Homo sapiens
ctcttgaagcggcaggactgggcata

SEQ ID NO: 80585 - DNA, 26 bp, Homo sapiens
tcttgaagcggcaggactgggcatag

SEQ ID NO: 80586 - DNA, 26 bp, Homo sapiens
cttgaagcggcaggactgggcatagc

SEQ ID NO: 80587 - DNA, 26 bp, Homo sapiens
ttgaagcggcaggactgggcatagcc

SEQ ID NO: 80588 - DNA, 26 bp, Homo sapiens
tgaagcggcaggactgggcatagccg

SEQ ID NO: 80589 - DNA, 26 bp, Homo sapiens
gaagcggcaggactgggcatagccgc

SEQ ID NO: 80590 - DNA, 26 bp, Homo sapiens
aagcggcaggactgggcatagccgcg

SEQ ID NO: 80591 - DNA, 26 bp, Homo sapiens
agcggcaggactgggcatagccgcgg

SEQ ID NO: 80592 - DNA, 26 bp, Homo sapiens
gcggcaggactgggcatagccgcggt

SEQ ID NO: 80593 - DNA, 26 bp, Homo sapiens
cggcaggactgggcatagccgcggtt

SEQ ID NO: 80594 - DNA, 26 bp, Homo sapiens
ggcaggactgggcatagccgcggttt

SEQ ID NO: 80595 - DNA, 26 bp, Homo sapiens
gcaggactgggcatagccgcggtttt

SEQ ID NO: 80596 - DNA, 26 bp, Homo sapiens
caggactgggcatagccgcggttttt

SEQ ID NO: 80597 - DNA, 26 bp, Homo sapiens
aggactgggcatagccgcggtttttc

SEQ ID NO: 80598 - DNA, 26 bp, Homo sapiens
ggactgggcatagccgcggtttttca

SEQ ID NO: 80599 - DNA, 26 bp, Homo sapiens
gactgggcatagccgcggtttttcag

SEQ ID NO: 80600 - DNA, 26 bp, Homo sapiens
actgggcatagccgcggtttttcagg

SEQ ID NO: 80601 - DNA, 26 bp, Homo sapiens
ctgggcatagccgcggtttttcaggg

SEQ ID NO: 80602 - DNA, 26 bp, Homo sapiens
tgggcatagccgcggtttttcagggt

SEQ ID NO: 80603 - DNA, 26 bp, Homo sapiens
gggcatagccgcggtttttcagggtc

SEQ ID NO: 80604 - DNA, 26 bp, Homo sapiens
ggcatagccgcggtttttcagggtcc

SEQ ID NO: 80605 - DNA, 26 bp, Homo sapiens
gcatagccgcggtttttcagggtccg

SEQ ID NO: 80606 - DNA, 26 bp, Homo sapiens
catagccgcggtttttcagggtccgc

SEQ ID NO: 80607 - DNA, 26 bp, Homo sapiens
atagccgcggtttttcagggtccgcc

SEQ ID NO: 80608 - DNA, 26 bp, Homo sapiens
tagccgcggtttttcagggtccgcct

SEQ ID NO: 80609 - DNA, 26 bp, Homo sapiens
agccgcggtttttcagggtccgcctc

SEQ ID NO: 80610 - DNA, 26 bp, Homo sapiens
gccgcggtttttcagggtccgcctct

SEQ ID NO: 80611 - DNA, 26 bp, Homo sapiens
ccgcggtttttcagggtccgcctctt

SEQ ID NO: 80612 - DNA, 26 bp, Homo sapiens
cgcggtttttcagggtccgcctcttc

SEQ ID NO: 80613 - DNA, 26 bp, Homo sapiens
gcggtttttcagggtccgcctcttct

SEQ ID NO: 80614 - DNA, 26 bp, Homo sapiens
cggtttttcagggtccgcctcttctg

SEQ ID NO: 80615 - DNA, 26 bp, Homo sapiens
ggtttttcagggtccgcctcttctgc

SEQ ID NO: 80616 - DNA, 26 bp, Homo sapiens
gtttttcagggtccgcctcttctgct

SEQ ID NO: 80617 - DNA, 26 bp, Homo sapiens
tttttcagggtccgcctcttctgctt

SEQ ID NO: 80618 - DNA, 26 bp, Homo sapiens
ttttcagggtccgcctcttctgcttc

SEQ ID NO: 80619 - DNA, 26 bp, Homo sapiens
tttcagggtccgcctcttctgcttca

SEQ ID NO: 80620 - DNA, 26 bp, Homo sapiens
ttcagggtccgcctcttctgcttcag

SEQ ID NO: 80621 - DNA, 26 bp, Homo sapiens
tcagggtccgcctcttctgcttcagc

SEQ ID NO: 80622 - DNA, 26 bp, Homo sapiens
cagggtccgcctcttctgcttcagcc

SEQ ID NO: 80623 - DNA, 26 bp, Homo sapiens
agggtccgcctcttctgcttcagccg

SEQ ID NO: 80624 - DNA, 26 bp, Homo sapiens
gggtccgcctcttctgcttcagccgg

SEQ ID NO: 80625 - DNA, 26 bp, Homo sapiens
ggtccgcctcttctgcttcagccgga

SEQ ID NO: 80626 - DNA, 26 bp, Homo sapiens
gtccgcctcttctgcttcagccggat

SEQ ID NO: 80627 - DNA, 26 bp, Homo sapiens
tccgcctcttctgcttcagccggatc

SEQ ID NO: 80628 - DNA, 26 bp, Homo sapiens
ccgcctcttctgcttcagccggatca

SEQ ID NO: 80629 - DNA, 26 bp, Homo sapiens
cgcctcttctgcttcagccggatcac

SEQ ID NO: 80630 - DNA, 26 bp, Homo sapiens
gcctcttctgcttcagccggatcacc

SEQ ID NO: 80631 - DNA, 26 bp, Homo sapiens
cctcttctgcttcagccggatcacct

SEQ ID NO: 80632 - DNA, 26 bp, Homo sapiens
ctcttctgcttcagccggatcacctc

SEQ ID NO: 80633 - DNA, 26 bp, Homo sapiens
tcttctgcttcagccggatcacctcc

SEQ ID NO: 80634 - DNA, 26 bp, Homo sapiens
cttctgcttcagccggatcacctcct

SEQ ID NO: 80635 - DNA, 26 bp, Homo sapiens
ttctgcttcagccggatcacctcctc

SEQ ID NO: 80636 - DNA, 26 bp, Homo sapiens
tctgcttcagccggatcacctcctcc

SEQ ID NO: 80637 - DNA, 26 bp, Homo sapiens
ctgcttcagccggatcacctcctcct

SEQ ID NO: 80638 - DNA, 26 bp, Homo sapiens
tgcttcagccggatcacctcctcctt

SEQ ID NO: 80639 - DNA, 26 bp, Homo sapiens
gcttcagccggatcacctcctccttg

SEQ ID NO: 80640 - DNA, 26 bp, Homo sapiens
cttcagccggatcacctcctccttgc

SEQ ID NO: 80641 - DNA, 26 bp, Homo sapiens
ttcagccggatcacctcctccttgct

SEQ ID NO: 80642 - DNA, 26 bp, Homo sapiens
tcagccggatcacctcctccttgctg

SEQ ID NO: 80643 - DNA, 26 bp, Homo sapiens
cagccggatcacctcctccttgctga

SEQ ID NO: 80644 - DNA, 26 bp, Homo sapiens
agccggatcacctcctccttgctgac

SEQ ID NO: 80645 - DNA, 26 bp, Homo sapiens
gccggatcacctcctccttgctgacc

SEQ ID NO: 80646 - DNA, 26 bp, Homo sapiens
ccggatcacctcctccttgctgaccc

SEQ ID NO: 80647 - DNA, 26 bp, Homo sapiens
cggatcacctcctccttgctgacccc

SEQ ID NO: 80648 - DNA, 26 bp, Homo sapiens
ggatcacctcctccttgctgaccccg

SEQ ID NO: 80649 - DNA, 26 bp, Homo sapiens
gatcacctcctccttgctgaccccgc

SEQ ID NO: 80650 - DNA, 26 bp, Homo sapiens
atcacctcctccttgctgaccccgcg

SEQ ID NO: 80651 - DNA, 26 bp, Homo sapiens
tcacctcctccttgctgaccccgcgc

SEQ ID NO: 80652 - DNA, 26 bp, Homo sapiens
cacctcctccttgctgaccccgcgca

SEQ ID NO: 80653 - DNA, 26 bp, Homo sapiens
acctcctccttgctgaccccgcgcag

SEQ ID NO: 80654 - DNA, 26 bp, Homo sapiens
cctcctccttgctgaccccgcgcagc

SEQ ID NO: 80655 - DNA, 26 bp, Homo sapiens
ctcctccttgctgaccccgcgcagct

SEQ ID NO: 80656 - DNA, 26 bp, Homo sapiens
tcctccttgctgaccccgcgcagctg

SEQ ID NO: 80657 - DNA, 26 bp, Homo sapiens
cctccttgctgaccccgcgcagctgc

SEQ ID NO: 80658 - DNA, 26 bp, Homo sapiens
ctccttgctgaccccgcgcagctgcc

SEQ ID NO: 80659 - DNA, 26 bp, Homo sapiens
tccttgctgaccccgcgcagctgccg

SEQ ID NO: 80660 - DNA, 26 bp, Homo sapiens
ccttgctgaccccgcgcagctgccgg

SEQ ID NO: 80661 - DNA, 26 bp, Homo sapiens
cttgctgaccccgcgcagctgccggt

SEQ ID NO: 80662 - DNA, 26 bp, Homo sapiens
ttgctgaccccgcgcagctgccggtt

SEQ ID NO: 80663 - DNA, 26 bp, Homo sapiens
tgctgaccccgcgcagctgccggttc

SEQ ID NO: 80664 - DNA, 26 bp, Homo sapiens
gctgaccccgcgcagctgccggttca

SEQ ID NO: 80665 - DNA, 26 bp, Homo sapiens
ctgaccccgcgcagctgccggttcag

SEQ ID NO: 80666 - DNA, 26 bp, Homo sapiens
tgaccccgcgcagctgccggttcagc

SEQ ID NO: 80667 - DNA, 26 bp, Homo sapiens
gaccccgcgcagctgccggttcagct

SEQ ID NO: 80668 - DNA, 26 bp, Homo sapiens
accccgcgcagctgccggttcagctc

SEQ ID NO: 80669 - DNA, 26 bp, Homo sapiens
ccccgcgcagctgccggttcagctcg

SEQ ID NO: 80670 - DNA, 26 bp, Homo sapiens
cccgcgcagctgccggttcagctcgc

SEQ ID NO: 80671 - DNA, 26 bp, Homo sapiens
ccgcgcagctgccggttcagctcgcg

SEQ ID NO: 80672 - DNA, 26 bp, Homo sapiens
cgcgcagctgccggttcagctcgcgc

SEQ ID NO: 80673 - DNA, 26 bp, Homo sapiens
gcgcagctgccggttcagctcgcgca

SEQ ID NO: 80674 - DNA, 26 bp, Homo sapiens
cgcagctgccggttcagctcgcgcac

SEQ ID NO: 80675 - DNA, 26 bp, Homo sapiens
gcagctgccggttcagctcgcgcaca

SEQ ID NO: 80676 - DNA, 26 bp, Homo sapiens
cagctgccggttcagctcgcgcacag

SEQ ID NO: 80677 - DNA, 26 bp, Homo sapiens
agctgccggttcagctcgcgcacaga

SEQ ID NO: 80678 - DNA, 26 bp, Homo sapiens
gctgccggttcagctcgcgcacagac

SEQ ID NO: 80679 - DNA, 26 bp, Homo sapiens
ctgccggttcagctcgcgcacagaca

SEQ ID NO: 80680 - DNA, 26 bp, Homo sapiens
tgccggttcagctcgcgcacagacat

SEQ ID NO: 80681 - DNA, 26 bp, Homo sapiens
gccggttcagctcgcgcacagacatg

SEQ ID NO: 80682 - DNA, 26 bp, Homo sapiens
ccggttcagctcgcgcacagacatgg

SEQ ID NO: 80683 - DNA, 26 bp, Homo sapiens
cggttcagctcgcgcacagacatggt

SEQ ID NO: 80684 - DNA, 26 bp, Homo sapiens
ggttcagctcgcgcacagacatggtc

SEQ ID NO: 80685 - DNA, 26 bp, Homo sapiens
gttcagctcgcgcacagacatggtca

SEQ ID NO: 80686 - DNA, 26 bp, Homo sapiens
ttcagctcgcgcacagacatggtcac

SEQ ID NO: 80687 - DNA, 26 bp, Homo sapiens
tcagctcgcgcacagacatggtcacc

SEQ ID NO: 80688 - DNA, 26 bp, Homo sapiens
cagctcgcgcacagacatggtcacca

SEQ ID NO: 80689 - DNA, 26 bp, Homo sapiens
agctcgcgcacagacatggtcaccag

SEQ ID NO: 80690 - DNA, 26 bp, Homo sapiens
gctcgcgcacagacatggtcaccagc

SEQ ID NO: 80691 - DNA, 26 bp, Homo sapiens
ctcgcgcacagacatggtcaccagct

SEQ ID NO: 80692 - DNA, 26 bp, Homo sapiens
tcgcgcacagacatggtcaccagctg

SEQ ID NO: 80693 - DNA, 26 bp, Homo sapiens
cgcgcacagacatggtcaccagctgc

SEQ ID NO: 80694 - DNA, 26 bp, Homo sapiens
gcgcacagacatggtcaccagctgct

SEQ ID NO: 80695 - DNA, 26 bp, Homo sapiens
cgcacagacatggtcaccagctgctc

SEQ ID NO: 80696 - DNA, 26 bp, Homo sapiens
gcacagacatggtcaccagctgctcg

SEQ ID NO: 80697 - DNA, 26 bp, Homo sapiens
cacagacatggtcaccagctgctcgt

SEQ ID NO: 80698 - DNA, 26 bp, Homo sapiens
acagacatggtcaccagctgctcgtc

SEQ ID NO: 80699 - DNA, 26 bp, Homo sapiens
cagacatggtcaccagctgctcgtcg

SEQ ID NO: 80700 - DNA, 26 bp, Homo sapiens
agacatggtcaccagctgctcgtcgg

SEQ ID NO: 80701 - DNA, 26 bp, Homo sapiens
gacatggtcaccagctgctcgtcgga

SEQ ID NO: 80702 - DNA, 26 bp, Homo sapiens
acatggtcaccagctgctcgtcggag

SEQ ID NO: 80703 - DNA, 26 bp, Homo sapiens
catggtcaccagctgctcgtcggaga

SEQ ID NO: 80704 - DNA, 26 bp, Homo sapiens
atggtcaccagctgctcgtcggagaa

SEQ ID NO: 80705 - DNA, 26 bp, Homo sapiens
tggtcaccagctgctcgtcggagaag

SEQ ID NO: 80706 - DNA, 26 bp, Homo sapiens
ggtcaccagctgctcgtcggagaagc

SEQ ID NO: 80707 - DNA, 26 bp, Homo sapiens
gtcaccagctgctcgtcggagaagcg

SEQ ID NO: 80708 - DNA, 26 bp, Homo sapiens
tcaccagctgctcgtcggagaagcgg

SEQ ID NO: 80709 - DNA, 26 bp, Homo sapiens
caccagctgctcgtcggagaagcggt

SEQ ID NO: 80710 - DNA, 26 bp, Homo sapiens
accagctgctcgtcggagaagcggtc

SEQ ID NO: 80711 - DNA, 26 bp, Homo sapiens
ccagctgctcgtcggagaagcggtcg

SEQ ID NO: 80712 - DNA, 26 bp, Homo sapiens
cagctgctcgtcggagaagcggtcgt

SEQ ID NO: 80713 - DNA, 26 bp, Homo sapiens
agctgctcgtcggagaagcggtcgtc

SEQ ID NO: 80714 - DNA, 26 bp, Homo sapiens
gctgctcgtcggagaagcggtcgtcg

SEQ ID NO: 80715 - DNA, 26 bp, Homo sapiens
ctgctcgtcggagaagcggtcgtcga

SEQ ID NO: 80716 - DNA, 26 bp, Homo sapiens
tgctcgtcggagaagcggtcgtcgaa

SEQ ID NO: 80717 - DNA, 26 bp, Homo sapiens
gctcgtcggagaagcggtcgtcgaag

SEQ ID NO: 80718 - DNA, 26 bp, Homo sapiens
ctcgtcggagaagcggtcgtcgaagt

SEQ ID NO: 80719 - DNA, 26 bp, Homo sapiens
tcgtcggagaagcggtcgtcgaagtg

SEQ ID NO: 80720 - DNA, 26 bp, Homo sapiens
cgtcggagaagcggtcgtcgaagtgc

SEQ ID NO: 80721 - DNA, 26 bp, Homo sapiens
gtcggagaagcggtcgtcgaagtgca

SEQ ID NO: 80722 - DNA, 26 bp, Homo sapiens
tcggagaagcggtcgtcgaagtgcag

SEQ ID NO: 80723 - DNA, 26 bp, Homo sapiens
cggagaagcggtcgtcgaagtgcagg

SEQ ID NO: 80724 - DNA, 26 bp, Homo sapiens
ggagaagcggtcgtcgaagtgcaggc

SEQ ID NO: 80725 - DNA, 26 bp, Homo sapiens
gagaagcggtcgtcgaagtgcaggcc

SEQ ID NO: 80726 - DNA, 26 bp, Homo sapiens
agaagcggtcgtcgaagtgcaggccg

SEQ ID NO: 80727 - DNA, 26 bp, Homo sapiens
gaagcggtcgtcgaagtgcaggccgc

SEQ ID NO: 80728 - DNA, 26 bp, Homo sapiens
aagcggtcgtcgaagtgcaggccgcc

SEQ ID NO: 80729 - DNA, 26 bp, Homo sapiens
agcggtcgtcgaagtgcaggccgccg

SEQ ID NO: 80730 - DNA, 26 bp, Homo sapiens
gcggtcgtcgaagtgcaggccgccgg

SEQ ID NO: 80731 - DNA, 26 bp, Homo sapiens
cggtcgtcgaagtgcaggccgccggc

SEQ ID NO: 80732 - DNA, 26 bp, Homo sapiens
ggtcgtcgaagtgcaggccgccggcg

SEQ ID NO: 80733 - DNA, 26 bp, Homo sapiens
gtcgtcgaagtgcaggccgccggcgg

SEQ ID NO: 80734 - DNA, 26 bp, Homo sapiens
tcgtcgaagtgcaggccgccggcggc

SEQ ID NO: 80735 - DNA, 26 bp, Homo sapiens
cgtcgaagtgcaggccgccggcggcg

SEQ ID NO: 80736 - DNA, 26 bp, Homo sapiens
gtcgaagtgcaggccgccggcggcgt

SEQ ID NO: 80737 - DNA, 26 bp, Homo sapiens
tcgaagtgcaggccgccggcggcgtg

SEQ ID NO: 80738 - DNA, 26 bp, Homo sapiens
cgaagtgcaggccgccggcggcgtgg

SEQ ID NO: 80739 - DNA, 26 bp, Homo sapiens
gaagtgcaggccgccggcggcgtggt

SEQ ID NO: 80740 - DNA, 26 bp, Homo sapiens
aagtgcaggccgccggcggcgtggtg

SEQ ID NO: 80741 - DNA, 26 bp, Homo sapiens
agtgcaggccgccggcggcgtggtgc

SEQ ID NO: 80742 - DNA, 26 bp, Homo sapiens
gtgcaggccgccggcggcgtggtgcg

SEQ ID NO: 80743 - DNA, 26 bp, Homo sapiens
tgcaggccgccggcggcgtggtgcgg

SEQ ID NO: 80744 - DNA, 26 bp, Homo sapiens
gcaggccgccggcggcgtggtgcggg

SEQ ID NO: 80745 - DNA, 26 bp, Homo sapiens
caggccgccggcggcgtggtgcgggt

SEQ ID NO: 80746 - DNA, 26 bp, Homo sapiens
aggccgccggcggcgtggtgcgggtg

SEQ ID NO: 80747 - DNA, 26 bp, Homo sapiens
ggccgccggcggcgtggtgcgggtgc

SEQ ID NO: 80748 - DNA, 26 bp, Homo sapiens
gccgccggcggcgtggtgcgggtgca

SEQ ID NO: 80749 - DNA, 26 bp, Homo sapiens
ccgccggcggcgtggtgcgggtgcag

SEQ ID NO: 80750 - DNA, 26 bp, Homo sapiens
cgccggcggcgtggtgcgggtgcagg

SEQ ID NO: 80751 - DNA, 26 bp, Homo sapiens
gccggcggcgtggtgcgggtgcaggg

SEQ ID NO: 80752 - DNA, 26 bp, Homo sapiens
ccggcggcgtggtgcgggtgcagggc

SEQ ID NO: 80753 - DNA, 26 bp, Homo sapiens
cggcggcgtggtgcgggtgcagggcg

SEQ ID NO: 80754 - DNA, 26 bp, Homo sapiens
ggcggcgtggtgcgggtgcagggcgc

SEQ ID NO: 80755 - DNA, 26 bp, Homo sapiens
gcggcgtggtgcgggtgcagggcgcc

SEQ ID NO: 80756 - DNA, 26 bp, Homo sapiens
cggcgtggtgcgggtgcagggcgccc

SEQ ID NO: 80757 - DNA, 26 bp, Homo sapiens
ggcgtggtgcgggtgcagggcgcccc

SEQ ID NO: 80758 - DNA, 26 bp, Homo sapiens
gcgtggtgcgggtgcagggcgccccc

SEQ ID NO: 80759 - DNA, 26 bp, Homo sapiens
cgtggtgcgggtgcagggcgcccccc

SEQ ID NO: 80760 - DNA, 26 bp, Homo sapiens
gtggtgcgggtgcagggcgccccccg

SEQ ID NO: 80761 - DNA, 26 bp, Homo sapiens
tggtgcgggtgcagggcgccccccgc

SEQ ID NO: 80762 - DNA, 26 bp, Homo sapiens
ggtgcgggtgcagggcgccccccgcc

SEQ ID NO: 80763 - DNA, 26 bp, Homo sapiens
gtgcgggtgcagggcgccccccgccc

SEQ ID NO: 80764 - DNA, 26 bp, Homo sapiens
tgcgggtgcagggcgccccccgcccc

SEQ ID NO: 80765 - DNA, 26 bp, Homo sapiens
gcgggtgcagggcgccccccgccccc

SEQ ID NO: 80766 - DNA, 26 bp, Homo sapiens
cgggtgcagggcgccccccgcccccg

SEQ ID NO: 80767 - DNA, 26 bp, Homo sapiens
gggtgcagggcgccccccgcccccgc

SEQ ID NO: 80768 - DNA, 26 bp, Homo sapiens
ggtgcagggcgccccccgcccccgcc

SEQ ID NO: 80769 - DNA, 26 bp, Homo sapiens
gtgcagggcgccccccgcccccgccg

SEQ ID NO: 80770 - DNA, 26 bp, Homo sapiens
tgcagggcgccccccgcccccgccgc

SEQ ID NO: 80771 - DNA, 26 bp, Homo sapiens
gcagggcgccccccgcccccgccgcg

SEQ ID NO: 80772 - DNA, 26 bp, Homo sapiens
cagggcgccccccgcccccgccgcgc

SEQ ID NO: 80773 - DNA, 26 bp, Homo sapiens
agggcgccccccgcccccgccgcgcc

SEQ ID NO: 80774 - DNA, 26 bp, Homo sapiens
gggcgccccccgcccccgccgcgccc

SEQ ID NO: 80775 - DNA, 26 bp, Homo sapiens
ggcgccccccgcccccgccgcgcccc

SEQ ID NO: 80776 - DNA, 26 bp, Homo sapiens
gcgccccccgcccccgccgcgccccc

SEQ ID NO: 80777 - DNA, 26 bp, Homo sapiens
cgccccccgcccccgccgcgcccccg

SEQ ID NO: 80778 - DNA, 26 bp, Homo sapiens
gccccccgcccccgccgcgcccccgc

SEQ ID NO: 80779 - DNA, 26 bp, Homo sapiens
ccccccgcccccgccgcgcccccgcc

SEQ ID NO: 80780 - DNA, 26 bp, Homo sapiens
cccccgcccccgccgcgcccccgccg

SEQ ID NO: 80781 - DNA, 26 bp, Homo sapiens
ccccgcccccgccgcgcccccgccgc

SEQ ID NO: 80782 - DNA, 26 bp, Homo sapiens
cccgcccccgccgcgcccccgccgcc

SEQ ID NO: 80783 - DNA, 26 bp, Homo sapiens
ccgcccccgccgcgcccccgccgcct

SEQ ID NO: 80784 - DNA, 26 bp, Homo sapiens
cgcccccgccgcgcccccgccgcctc

SEQ ID NO: 80785 - DNA, 26 bp, Homo sapiens
gcccccgccgcgcccccgccgcctcc

SEQ ID NO: 80786 - DNA, 26 bp, Homo sapiens
cccccgccgcgcccccgccgcctccg

SEQ ID NO: 80787 - DNA, 26 bp, Homo sapiens
ccccgccgcgcccccgccgcctccgc

SEQ ID NO: 80788 - DNA, 26 bp, Homo sapiens
cccgccgcgcccccgccgcctccgcc

SEQ ID NO: 80789 - DNA, 26 bp, Homo sapiens
ccgccgcgcccccgccgcctccgccg

SEQ ID NO: 80790 - DNA, 26 bp, Homo sapiens
cgccgcgcccccgccgcctccgccgc

SEQ ID NO: 80791 - DNA, 26 bp, Homo sapiens
gccgcgcccccgccgcctccgccgcc

SEQ ID NO: 80792 - DNA, 26 bp, Homo sapiens
ccgcgcccccgccgcctccgccgccg

SEQ ID NO: 80793 - DNA, 26 bp, Homo sapiens
cgcgcccccgccgcctccgccgccgc

SEQ ID NO: 80794 - DNA, 26 bp, Homo sapiens
gcgcccccgccgcctccgccgccgcc

SEQ ID NO: 80795 - DNA, 26 bp, Homo sapiens
cgcccccgccgcctccgccgccgccg

SEQ ID NO: 80796 - DNA, 26 bp, Homo sapiens
gcccccgccgcctccgccgccgccgc

SEQ ID NO: 80797 - DNA, 26 bp, Homo sapiens
cccccgccgcctccgccgccgccgcc

SEQ ID NO: 80798 - DNA, 26 bp, Homo sapiens
ccccgccgcctccgccgccgccgccg

SEQ ID NO: 80799 - DNA, 26 bp, Homo sapiens
cccgccgcctccgccgccgccgccgc

SEQ ID NO: 80800 - DNA, 26 bp, Homo sapiens
ccgccgcctccgccgccgccgccgcc

SEQ ID NO: 80801 - DNA, 26 bp, Homo sapiens
cgccgcctccgccgccgccgccgccg

SEQ ID NO: 80802 - DNA, 26 bp, Homo sapiens
gccgcctccgccgccgccgccgccgc

SEQ ID NO: 80803 - DNA, 26 bp, Homo sapiens
ccgcctccgccgccgccgccgccgcc

SEQ ID NO: 80804 - DNA, 26 bp, Homo sapiens
cgcctccgccgccgccgccgccgccg

SEQ ID NO: 80805 - DNA, 26 bp, Homo sapiens
gcctccgccgccgccgccgccgccgc

SEQ ID NO: 80806 - DNA, 26 bp, Homo sapiens
cctccgccgccgccgccgccgccgcc

SEQ ID NO: 80807 - DNA, 26 bp, Homo sapiens
ctccgccgccgccgccgccgccgccg

SEQ ID NO: 80808 - DNA, 26 bp, Homo sapiens
tccgccgccgccgccgccgccgccgc

SEQ ID NO: 80809 - DNA, 26 bp, Homo sapiens
ccgccgccgccgccgccgccgccgcc

SEQ ID NO: 80810 - DNA, 26 bp, Homo sapiens
cgccgccgccgccgccgccgccgccc

SEQ ID NO: 80811 - DNA, 26 bp, Homo sapiens
gccgccgccgccgccgccgccgcccc

SEQ ID NO: 80812 - DNA, 26 bp, Homo sapiens
ccgccgccgccgccgccgccgccccc

SEQ ID NO: 80813 - DNA, 26 bp, Homo sapiens
cgccgccgccgccgccgccgccccca

SEQ ID NO: 80814 - DNA, 26 bp, Homo sapiens
gccgccgccgccgccgccgcccccag

SEQ ID NO: 80815 - DNA, 26 bp, Homo sapiens
ccgccgccgccgccgccgcccccagc

SEQ ID NO: 80816 - DNA, 26 bp, Homo sapiens
cgccgccgccgccgccgcccccagcg

SEQ ID NO: 80817 - DNA, 26 bp, Homo sapiens
gccgccgccgccgccgcccccagcgc

SEQ ID NO: 80818 - DNA, 26 bp, Homo sapiens
ccgccgccgccgccgcccccagcgct

SEQ ID NO: 80819 - DNA, 26 bp, Homo sapiens
cgccgccgccgccgcccccagcgctg

SEQ ID NO: 80820 - DNA, 26 bp, Homo sapiens
gccgccgccgccgcccccagcgctgg

SEQ ID NO: 80821 - DNA, 26 bp, Homo sapiens
ccgccgccgccgcccccagcgctggc

SEQ ID NO: 80822 - DNA, 26 bp, Homo sapiens
cgccgccgccgcccccagcgctggcc

SEQ ID NO: 80823 - DNA, 26 bp, Homo sapiens
gccgccgccgcccccagcgctggccg

SEQ ID NO: 80824 - DNA, 26 bp, Homo sapiens
ccgccgccgcccccagcgctggccgg

SEQ ID NO: 80825 - DNA, 26 bp, Homo sapiens
cgccgccgcccccagcgctggccggg

SEQ ID NO: 80826 - DNA, 26 bp, Homo sapiens
gccgccgcccccagcgctggccgggc

SEQ ID NO: 80827 - DNA, 26 bp, Homo sapiens
ccgccgcccccagcgctggccgggcc

SEQ ID NO: 80828 - DNA, 26 bp, Homo sapiens
cgccgcccccagcgctggccgggcca

SEQ ID NO: 80829 - DNA, 26 bp, Homo sapiens
gccgcccccagcgctggccgggccac

SEQ ID NO: 80830 - DNA, 26 bp, Homo sapiens
ccgcccccagcgctggccgggccacc

SEQ ID NO: 80831 - DNA, 26 bp, Homo sapiens
cgcccccagcgctggccgggccaccg

SEQ ID NO: 80832 - DNA, 26 bp, Homo sapiens
gcccccagcgctggccgggccaccgc

SEQ ID NO: 80833 - DNA, 26 bp, Homo sapiens
cccccagcgctggccgggccaccgcc

SEQ ID NO: 80834 - DNA, 26 bp, Homo sapiens
ccccagcgctggccgggccaccgccg

SEQ ID NO: 80835 - DNA, 26 bp, Homo sapiens
cccagcgctggccgggccaccgccgc

SEQ ID NO: 80836 - DNA, 26 bp, Homo sapiens
ccagcgctggccgggccaccgccgcc

SEQ ID NO: 80837 - DNA, 26 bp, Homo sapiens
cagcgctggccgggccaccgccgccc

SEQ ID NO: 80838 - DNA, 26 bp, Homo sapiens
agcgctggccgggccaccgccgcccg

SEQ ID NO: 80839 - DNA, 26 bp, Homo sapiens
gcgctggccgggccaccgccgcccgc

SEQ ID NO: 80840 - DNA, 26 bp, Homo sapiens
cgctggccgggccaccgccgcccgcg

SEQ ID NO: 80841 - DNA, 26 bp, Homo sapiens
gctggccgggccaccgccgcccgcgc

SEQ ID NO: 80842 - DNA, 26 bp, Homo sapiens
ctggccgggccaccgccgcccgcgcc

SEQ ID NO: 80843 - DNA, 26 bp, Homo sapiens
tggccgggccaccgccgcccgcgccc

SEQ ID NO: 80844 - DNA, 26 bp, Homo sapiens
ggccgggccaccgccgcccgcgcccc

SEQ ID NO: 80845 - DNA, 26 bp, Homo sapiens
gccgggccaccgccgcccgcgccccc

SEQ ID NO: 80846 - DNA, 26 bp, Homo sapiens
ccgggccaccgccgcccgcgccccca

SEQ ID NO: 80847 - DNA, 26 bp, Homo sapiens
cgggccaccgccgcccgcgcccccag

SEQ ID NO: 80848 - DNA, 26 bp, Homo sapiens
gggccaccgccgcccgcgcccccagc

SEQ ID NO: 80849 - DNA, 26 bp, Homo sapiens
ggccaccgccgcccgcgcccccagcg

SEQ ID NO: 80850 - DNA, 26 bp, Homo sapiens
gccaccgccgcccgcgcccccagcgc

SEQ ID NO: 80851 - DNA, 26 bp, Homo sapiens
ccaccgccgcccgcgcccccagcgcc

SEQ ID NO: 80852 - DNA, 26 bp, Homo sapiens
caccgccgcccgcgcccccagcgcca

SEQ ID NO: 80853 - DNA, 26 bp, Homo sapiens
accgccgcccgcgcccccagcgccac

SEQ ID NO: 80854 - DNA, 26 bp, Homo sapiens
ccgccgcccgcgcccccagcgccacc

SEQ ID NO: 80855 - DNA, 26 bp, Homo sapiens
cgccgcccgcgcccccagcgccaccg

SEQ ID NO: 80856 - DNA, 26 bp, Homo sapiens
gccgcccgcgcccccagcgccaccgg

SEQ ID NO: 80857 - DNA, 26 bp, Homo sapiens
ccgcccgcgcccccagcgccaccggc

SEQ ID NO: 80858 - DNA, 26 bp, Homo sapiens
cgcccgcgcccccagcgccaccggcc

SEQ ID NO: 80859 - DNA, 26 bp, Homo sapiens
gcccgcgcccccagcgccaccggccg

SEQ ID NO: 80860 - DNA, 26 bp, Homo sapiens
cccgcgcccccagcgccaccggccga

SEQ ID NO: 80861 - DNA, 26 bp, Homo sapiens
ccgcgcccccagcgccaccggccgag

SEQ ID NO: 80862 - DNA, 26 bp, Homo sapiens
cgcgcccccagcgccaccggccgagg

SEQ ID NO: 80863 - DNA, 26 bp, Homo sapiens
gcgcccccagcgccaccggccgaggc

SEQ ID NO: 80864 - DNA, 26 bp, Homo sapiens
cgcccccagcgccaccggccgaggcg

SEQ ID NO: 80865 - DNA, 26 bp, Homo sapiens
gcccccagcgccaccggccgaggcgg

SEQ ID NO: 80866 - DNA, 26 bp, Homo sapiens
cccccagcgccaccggccgaggcggc

SEQ ID NO: 80867 - DNA, 26 bp, Homo sapiens
ccccagcgccaccggccgaggcggcc

SEQ ID NO: 80868 - DNA, 26 bp, Homo sapiens
cccagcgccaccggccgaggcggccg

SEQ ID NO: 80869 - DNA, 26 bp, Homo sapiens
ccagcgccaccggccgaggcggccgc

SEQ ID NO: 80870 - DNA, 26 bp, Homo sapiens
cagcgccaccggccgaggcggccgcg

SEQ ID NO: 80871 - DNA, 26 bp, Homo sapiens
agcgccaccggccgaggcggccgcgc

SEQ ID NO: 80872 - DNA, 26 bp, Homo sapiens
gcgccaccggccgaggcggccgcgct

SEQ ID NO: 80873 - DNA, 26 bp, Homo sapiens
cgccaccggccgaggcggccgcgctg

SEQ ID NO: 80874 - DNA, 26 bp, Homo sapiens
gccaccggccgaggcggccgcgctgc

SEQ ID NO: 80875 - DNA, 26 bp, Homo sapiens
ccaccggccgaggcggccgcgctgcc

SEQ ID NO: 80876 - DNA, 26 bp, Homo sapiens
caccggccgaggcggccgcgctgccc

SEQ ID NO: 80877 - DNA, 26 bp, Homo sapiens
accggccgaggcggccgcgctgcccg

SEQ ID NO: 80878 - DNA, 26 bp, Homo sapiens
ccggccgaggcggccgcgctgcccgc

SEQ ID NO: 80879 - DNA, 26 bp, Homo sapiens
cggccgaggcggccgcgctgcccgcg

SEQ ID NO: 80880 - DNA, 26 bp, Homo sapiens
ggccgaggcggccgcgctgcccgcgg

SEQ ID NO: 80881 - DNA, 26 bp, Homo sapiens
gccgaggcggccgcgctgcccgcggc

SEQ ID NO: 80882 - DNA, 26 bp, Homo sapiens
ccgaggcggccgcgctgcccgcggcg

SEQ ID NO: 80883 - DNA, 26 bp, Homo sapiens
cgaggcggccgcgctgcccgcggcgc

SEQ ID NO: 80884 - DNA, 26 bp, Homo sapiens
gaggcggccgcgctgcccgcggcgcc

SEQ ID NO: 80885 - DNA, 26 bp, Homo sapiens
aggcggccgcgctgcccgcggcgccg

SEQ ID NO: 80886 - DNA, 26 bp, Homo sapiens
ggcggccgcgctgcccgcggcgccgg

SEQ ID NO: 80887 - DNA, 26 bp, Homo sapiens
gcggccgcgctgcccgcggcgccggg

SEQ ID NO: 80888 - DNA, 26 bp, Homo sapiens
cggccgcgctgcccgcggcgccgggc

SEQ ID NO: 80889 - DNA, 26 bp, Homo sapiens
ggccgcgctgcccgcggcgccgggcg

SEQ ID NO: 80890 - DNA, 26 bp, Homo sapiens
gccgcgctgcccgcggcgccgggcgc

SEQ ID NO: 80891 - DNA, 26 bp, Homo sapiens
ccgcgctgcccgcggcgccgggcgcg

SEQ ID NO: 80892 - DNA, 26 bp, Homo sapiens
cgcgctgcccgcggcgccgggcgcgc

SEQ ID NO: 80893 - DNA, 26 bp, Homo sapiens
gcgctgcccgcggcgccgggcgcgcc

SEQ ID NO: 80894 - DNA, 26 bp, Homo sapiens
cgctgcccgcggcgccgggcgcgccg

SEQ ID NO: 80895 - DNA, 26 bp, Homo sapiens
gctgcccgcggcgccgggcgcgccgg

SEQ ID NO: 80896 - DNA, 26 bp, Homo sapiens
ctgcccgcggcgccgggcgcgccggc

SEQ ID NO: 80897 - DNA, 26 bp, Homo sapiens
tgcccgcggcgccgggcgcgccggcc

SEQ ID NO: 80898 - DNA, 26 bp, Homo sapiens
gcccgcggcgccgggcgcgccggccg

SEQ ID NO: 80899 - DNA, 26 bp, Homo sapiens
cccgcggcgccgggcgcgccggccgt

SEQ ID NO: 80900 - DNA, 26 bp, Homo sapiens
ccgcggcgccgggcgcgccggccgtc

SEQ ID NO: 80901 - DNA, 26 bp, Homo sapiens
cgcggcgccgggcgcgccggccgtcg

SEQ ID NO: 80902 - DNA, 26 bp, Homo sapiens
gcggcgccgggcgcgccggccgtcgg

SEQ ID NO: 80903 - DNA, 26 bp, Homo sapiens
cggcgccgggcgcgccggccgtcggg

SEQ ID NO: 80904 - DNA, 26 bp, Homo sapiens
ggcgccgggcgcgccggccgtcgggt

SEQ ID NO: 80905 - DNA, 26 bp, Homo sapiens
gcgccgggcgcgccggccgtcgggtg

SEQ ID NO: 80906 - DNA, 26 bp, Homo sapiens
cgccgggcgcgccggccgtcgggtgg

SEQ ID NO: 80907 - DNA, 26 bp, Homo sapiens
gccgggcgcgccggccgtcgggtggt

SEQ ID NO: 80908 - DNA, 26 bp, Homo sapiens
ccgggcgcgccggccgtcgggtggtg

SEQ ID NO: 80909 - DNA, 26 bp, Homo sapiens
cgggcgcgccggccgtcgggtggtgg

SEQ ID NO: 80910 - DNA, 26 bp, Homo sapiens
gggcgcgccggccgtcgggtggtggt

SEQ ID NO: 80911 - DNA, 26 bp, Homo sapiens
ggcgcgccggccgtcgggtggtggtg

SEQ ID NO: 80912 - DNA, 26 bp, Homo sapiens
gcgcgccggccgtcgggtggtggtgg

SEQ ID NO: 80913 - DNA, 26 bp, Homo sapiens
cgcgccggccgtcgggtggtggtggt

SEQ ID NO: 80914 - DNA, 26 bp, Homo sapiens
gcgccggccgtcgggtggtggtggtg

SEQ ID NO: 80915 - DNA, 26 bp, Homo sapiens
cgccggccgtcgggtggtggtggtgg

SEQ ID NO: 80916 - DNA, 26 bp, Homo sapiens
gccggccgtcgggtggtggtggtggc

SEQ ID NO: 80917 - DNA, 26 bp, Homo sapiens
ccggccgtcgggtggtggtggtggcc

SEQ ID NO: 80918 - DNA, 26 bp, Homo sapiens
cggccgtcgggtggtggtggtggccg

SEQ ID NO: 80919 - DNA, 26 bp, Homo sapiens
ggccgtcgggtggtggtggtggccgg

SEQ ID NO: 80920 - DNA, 26 bp, Homo sapiens
gccgtcgggtggtggtggtggccggc

SEQ ID NO: 80921 - DNA, 26 bp, Homo sapiens
ccgtcgggtggtggtggtggccggcg

SEQ ID NO: 80922 - DNA, 26 bp, Homo sapiens
cgtcgggtggtggtggtggccggcgg

SEQ ID NO: 80923 - DNA, 26 bp, Homo sapiens
gtcgggtggtggtggtggccggcggc

SEQ ID NO: 80924 - DNA, 26 bp, Homo sapiens
tcgggtggtggtggtggccggcggcg

SEQ ID NO: 80925 - DNA, 26 bp, Homo sapiens
cgggtggtggtggtggccggcggcgt

SEQ ID NO: 80926 - DNA, 26 bp, Homo sapiens
gggtggtggtggtggccggcggcgtg

SEQ ID NO: 80927 - DNA, 26 bp, Homo sapiens
ggtggtggtggtggccggcggcgtgg

SEQ ID NO: 80928 - DNA, 26 bp, Homo sapiens
gtggtggtggtggccggcggcgtggt

SEQ ID NO: 80929 - DNA, 26 bp, Homo sapiens
tggtggtggtggccggcggcgtggtg

SEQ ID NO: 80930 - DNA, 26 bp, Homo sapiens
ggtggtggtggccggcggcgtggtgg

SEQ ID NO: 80931 - DNA, 26 bp, Homo sapiens
gtggtggtggccggcggcgtggtggt

SEQ ID NO: 80932 - DNA, 26 bp, Homo sapiens
tggtggtggccggcggcgtggtggtg

SEQ ID NO: 80933 - DNA, 26 bp, Homo sapiens
ggtggtggccggcggcgtggtggtgg

SEQ ID NO: 80934 - DNA, 26 bp, Homo sapiens
gtggtggccggcggcgtggtggtggt

SEQ ID NO: 80935 - DNA, 26 bp, Homo sapiens
tggtggccggcggcgtggtggtggtg

SEQ ID NO: 80936 - DNA, 26 bp, Homo sapiens
ggtggccggcggcgtggtggtggtgg

SEQ ID NO: 80937 - DNA, 26 bp, Homo sapiens
gtggccggcggcgtggtggtggtggt

SEQ ID NO: 80938 - DNA, 26 bp, Homo sapiens
tggccggcggcgtggtggtggtggtg

SEQ ID NO: 80939 - DNA, 26 bp, Homo sapiens
ggccggcggcgtggtggtggtggtgg

SEQ ID NO: 80940 - DNA, 26 bp, Homo sapiens
gccggcggcgtggtggtggtggtggt

SEQ ID NO: 80941 - DNA, 26 bp, Homo sapiens
ccggcggcgtggtggtggtggtggtg

SEQ ID NO: 80942 - DNA, 26 bp, Homo sapiens
cggcggcgtggtggtggtggtggtgg

SEQ ID NO: 80943 - DNA, 26 bp, Homo sapiens
ggcggcgtggtggtggtggtggtggt

SEQ ID NO: 80944 - DNA, 26 bp, Homo sapiens
gcggcgtggtggtggtggtggtggta

SEQ ID NO: 80945 - DNA, 26 bp, Homo sapiens
cggcgtggtggtggtggtggtggtag

SEQ ID NO: 80946 - DNA, 26 bp, Homo sapiens
ggcgtggtggtggtggtggtggtagt

SEQ ID NO: 80947 - DNA, 26 bp, Homo sapiens
gcgtggtggtggtggtggtggtagtg

SEQ ID NO: 80948 - DNA, 26 bp, Homo sapiens
cgtggtggtggtggtggtggtagtgc

SEQ ID NO: 80949 - DNA, 26 bp, Homo sapiens
gtggtggtggtggtggtggtagtgcg

SEQ ID NO: 80950 - DNA, 26 bp, Homo sapiens
tggtggtggtggtggtggtagtgcgg

SEQ ID NO: 80951 - DNA, 26 bp, Homo sapiens
ggtggtggtggtggtggtagtgcggg

SEQ ID NO: 80952 - DNA, 26 bp, Homo sapiens
gtggtggtggtggtggtagtgcgggc

SEQ ID NO: 80953 - DNA, 26 bp, Homo sapiens
tggtggtggtggtggtagtgcgggcc

SEQ ID NO: 80954 - DNA, 26 bp, Homo sapiens
ggtggtggtggtggtagtgcgggccc

SEQ ID NO: 80955 - DNA, 26 bp, Homo sapiens
gtggtggtggtggtagtgcgggcccg

SEQ ID NO: 80956 - DNA, 26 bp, Homo sapiens
tggtggtggtggtagtgcgggcccgc

SEQ ID NO: 80957 - DNA, 26 bp, Homo sapiens
ggtggtggtggtagtgcgggcccgcg

SEQ ID NO: 80958 - DNA, 26 bp, Homo sapiens
gtggtggtggtagtgcgggcccgcgc

SEQ ID NO: 80959 - DNA, 26 bp, Homo sapiens
tggtggtggtagtgcgggcccgcgcc

SEQ ID NO: 80960 - DNA, 26 bp, Homo sapiens
ggtggtggtagtgcgggcccgcgccg

SEQ ID NO: 80961 - DNA, 26 bp, Homo sapiens
gtggtggtagtgcgggcccgcgccgc

SEQ ID NO: 80962 - DNA, 26 bp, Homo sapiens
tggtggtagtgcgggcccgcgccgct

SEQ ID NO: 80963 - DNA, 26 bp, Homo sapiens
ggtggtagtgcgggcccgcgccgctc

SEQ ID NO: 80964 - DNA, 26 bp, Homo sapiens
gtggtagtgcgggcccgcgccgctct

SEQ ID NO: 80965 - DNA, 26 bp, Homo sapiens
tggtagtgcgggcccgcgccgctctg

SEQ ID NO: 80966 - DNA, 26 bp, Homo sapiens
ggtagtgcgggcccgcgccgctctgc

SEQ ID NO: 80967 - DNA, 26 bp, Homo sapiens
gtagtgcgggcccgcgccgctctgcg

SEQ ID NO: 80968 - DNA, 26 bp, Homo sapiens
tagtgcgggcccgcgccgctctgcgc

SEQ ID NO: 80969 - DNA, 26 bp, Homo sapiens
agtgcgggcccgcgccgctctgcgcg

SEQ ID NO: 80970 - DNA, 26 bp, Homo sapiens
gtgcgggcccgcgccgctctgcgcgg

SEQ ID NO: 80971 - DNA, 26 bp, Homo sapiens
tgcgggcccgcgccgctctgcgcggc

SEQ ID NO: 80972 - DNA, 26 bp, Homo sapiens
gcgggcccgcgccgctctgcgcggcg

SEQ ID NO: 80973 - DNA, 26 bp, Homo sapiens
cgggcccgcgccgctctgcgcggcgg

SEQ ID NO: 80974 - DNA, 26 bp, Homo sapiens
gggcccgcgccgctctgcgcggcggc

SEQ ID NO: 80975 - DNA, 26 bp, Homo sapiens
ggcccgcgccgctctgcgcggcggcc

SEQ ID NO: 80976 - DNA, 26 bp, Homo sapiens
gcccgcgccgctctgcgcggcggccg

SEQ ID NO: 80977 - DNA, 26 bp, Homo sapiens
cccgcgccgctctgcgcggcggccgc

SEQ ID NO: 80978 - DNA, 26 bp, Homo sapiens
ccgcgccgctctgcgcggcggccgcg

SEQ ID NO: 80979 - DNA, 26 bp, Homo sapiens
cgcgccgctctgcgcggcggccgcgg

SEQ ID NO: 80980 - DNA, 26 bp, Homo sapiens
gcgccgctctgcgcggcggccgcggc

SEQ ID NO: 80981 - DNA, 26 bp, Homo sapiens
cgccgctctgcgcggcggccgcggcg

SEQ ID NO: 80982 - DNA, 26 bp, Homo sapiens
gccgctctgcgcggcggccgcggcga

SEQ ID NO: 80983 - DNA, 26 bp, Homo sapiens
ccgctctgcgcggcggccgcggcgat

SEQ ID NO: 80984 - DNA, 26 bp, Homo sapiens
cgctctgcgcggcggccgcggcgatc

SEQ ID NO: 80985 - DNA, 26 bp, Homo sapiens
gctctgcgcggcggccgcggcgatca

SEQ ID NO: 80986 - DNA, 26 bp, Homo sapiens
ctctgcgcggcggccgcggcgatcac

SEQ ID NO: 80987 - DNA, 26 bp, Homo sapiens
tctgcgcggcggccgcggcgatcacg

SEQ ID NO: 80988 - DNA, 26 bp, Homo sapiens
ctgcgcggcggccgcggcgatcacgg

SEQ ID NO: 80989 - DNA, 26 bp, Homo sapiens
tgcgcggcggccgcggcgatcacggc

SEQ ID NO: 80990 - DNA, 26 bp, Homo sapiens
gcgcggcggccgcggcgatcacggcg

SEQ ID NO: 80991 - DNA, 26 bp, Homo sapiens
cgcggcggccgcggcgatcacggcgg

SEQ ID NO: 80992 - DNA, 26 bp, Homo sapiens
gcggcggccgcggcgatcacggcgga

SEQ ID NO: 80993 - DNA, 26 bp, Homo sapiens
cggcggccgcggcgatcacggcggac

SEQ ID NO: 80994 - DNA, 26 bp, Homo sapiens
ggcggccgcggcgatcacggcggaca

SEQ ID NO: 80995 - DNA, 26 bp, Homo sapiens
gcggccgcggcgatcacggcggacac

SEQ ID NO: 80996 - DNA, 26 bp, Homo sapiens
cggccgcggcgatcacggcggacacc

SEQ ID NO: 80997 - DNA, 26 bp, Homo sapiens
ggccgcggcgatcacggcggacacca

SEQ ID NO: 80998 - DNA, 26 bp, Homo sapiens
gccgcggcgatcacggcggacaccac

SEQ ID NO: 80999 - DNA, 26 bp, Homo sapiens
ccgcggcgatcacggcggacaccacg

SEQ ID NO: 81000 - DNA, 26 bp, Homo sapiens
cgcggcgatcacggcggacaccacgg

SEQ ID NO: 81001 - DNA, 26 bp, Homo sapiens
gcggcgatcacggcggacaccacggc

SEQ ID NO: 81002 - DNA, 26 bp, Homo sapiens
cggcgatcacggcggacaccacggcg

SEQ ID NO: 81003 - DNA, 26 bp, Homo sapiens
ggcgatcacggcggacaccacggcgg

SEQ ID NO: 81004 - DNA, 26 bp, Homo sapiens
gcgatcacggcggacaccacggcggc

SEQ ID NO: 81005 - DNA, 26 bp, Homo sapiens
cgatcacggcggacaccacggcggcg

SEQ ID NO: 81006 - DNA, 26 bp, Homo sapiens
gatcacggcggacaccacggcggcgg

SEQ ID NO: 81007 - DNA, 26 bp, Homo sapiens
atcacggcggacaccacggcggcggc

SEQ ID NO: 81008 - DNA, 26 bp, Homo sapiens
tcacggcggacaccacggcggcggcg

SEQ ID NO: 81009 - DNA, 26 bp, Homo sapiens
cacggcggacaccacggcggcggcgg

SEQ ID NO: 81010 - DNA, 26 bp, Homo sapiens
acggcggacaccacggcggcggcggg

SEQ ID NO: 81011 - DNA, 26 bp, Homo sapiens
cggcggacaccacggcggcggcgggg

SEQ ID NO: 81012 - DNA, 26 bp, Homo sapiens
ggcggacaccacggcggcggcggggc

SEQ ID NO: 81013 - DNA, 26 bp, Homo sapiens
gcggacaccacggcggcggcggggcc

SEQ ID NO: 81014 - DNA, 26 bp, Homo sapiens
cggacaccacggcggcggcggggccc

SEQ ID NO: 81015 - DNA, 26 bp, Homo sapiens
ggacaccacggcggcggcggggccca

SEQ ID NO: 81016 - DNA, 26 bp, Homo sapiens
gacaccacggcggcggcggggcccat

SEQ ID NO: 81017 - DNA, 26 bp, Homo sapiens
acaccacggcggcggcggggcccatc

SEQ ID NO: 81018 - DNA, 26 bp, Homo sapiens
caccacggcggcggcggggcccatct

SEQ ID NO: 81019 - DNA, 26 bp, Homo sapiens
accacggcggcggcggggcccatctc

SEQ ID NO: 81020 - DNA, 26 bp, Homo sapiens
ccacggcggcggcggggcccatctcc

SEQ ID NO: 81021 - DNA, 26 bp, Homo sapiens
cacggcggcggcggggcccatctcct

SEQ ID NO: 81022 - DNA, 26 bp, Homo sapiens
acggcggcggcggggcccatctcctc

SEQ ID NO: 81023 - DNA, 26 bp, Homo sapiens
cggcggcggcggggcccatctcctcg

SEQ ID NO: 81024 - DNA, 26 bp, Homo sapiens
ggcggcggcggggcccatctcctcgc

SEQ ID NO: 81025 - DNA, 26 bp, Homo sapiens
gcggcggcggggcccatctcctcgcc

SEQ ID NO: 81026 - DNA, 26 bp, Homo sapiens
cggcggcggggcccatctcctcgccg

SEQ ID NO: 81027 - DNA, 26 bp, Homo sapiens
ggcggcggggcccatctcctcgccgc

SEQ ID NO: 81028 - DNA, 26 bp, Homo sapiens
gcggcggggcccatctcctcgccgct

SEQ ID NO: 81029 - DNA, 26 bp, Homo sapiens
cggcggggcccatctcctcgccgctg

SEQ ID NO: 81030 - DNA, 26 bp, Homo sapiens
ggcggggcccatctcctcgccgctgc

SEQ ID NO: 81031 - DNA, 26 bp, Homo sapiens
gcggggcccatctcctcgccgctgcc

SEQ ID NO: 81032 - DNA, 26 bp, Homo sapiens
cggggcccatctcctcgccgctgccg

SEQ ID NO: 81033 - DNA, 26 bp, Homo sapiens
ggggcccatctcctcgccgctgccgc

SEQ ID NO: 81034 - DNA, 26 bp, Homo sapiens
gggcccatctcctcgccgctgccgcc

SEQ ID NO: 81035 - DNA, 26 bp, Homo sapiens
ggcccatctcctcgccgctgccgccc

SEQ ID NO: 81036 - DNA, 26 bp, Homo sapiens
gcccatctcctcgccgctgccgccca

SEQ ID NO: 81037 - DNA, 26 bp, Homo sapiens
cccatctcctcgccgctgccgcccaa

SEQ ID NO: 81038 - DNA, 26 bp, Homo sapiens
ccatctcctcgccgctgccgcccaag

SEQ ID NO: 81039 - DNA, 26 bp, Homo sapiens
catctcctcgccgctgccgcccaagg

SEQ ID NO: 81040 - DNA, 26 bp, Homo sapiens
atctcctcgccgctgccgcccaagga

SEQ ID NO: 81041 - DNA, 26 bp, Homo sapiens
tctcctcgccgctgccgcccaaggag

SEQ ID NO: 81042 - DNA, 26 bp, Homo sapiens
ctcctcgccgctgccgcccaaggagg

SEQ ID NO: 81043 - DNA, 26 bp, Homo sapiens
tcctcgccgctgccgcccaaggaggc

SEQ ID NO: 81044 - DNA, 26 bp, Homo sapiens
cctcgccgctgccgcccaaggaggcg

SEQ ID NO: 81045 - DNA, 26 bp, Homo sapiens
ctcgccgctgccgcccaaggaggcgc

SEQ ID NO: 81046 - DNA, 26 bp, Homo sapiens
tcgccgctgccgcccaaggaggcgcc

SEQ ID NO: 81047 - DNA, 26 bp, Homo sapiens
cgccgctgccgcccaaggaggcgccg

SEQ ID NO: 81048 - DNA, 26 bp, Homo sapiens
gccgctgccgcccaaggaggcgccgg

SEQ ID NO: 81049 - DNA, 26 bp, Homo sapiens
ccgctgccgcccaaggaggcgccggc

SEQ ID NO: 81050 - DNA, 26 bp, Homo sapiens
cgctgccgcccaaggaggcgccggca

SEQ ID NO: 81051 - DNA, 26 bp, Homo sapiens
gctgccgcccaaggaggcgccggcac

SEQ ID NO: 81052 - DNA, 26 bp, Homo sapiens
ctgccgcccaaggaggcgccggcacc

SEQ ID NO: 81053 - DNA, 26 bp, Homo sapiens
tgccgcccaaggaggcgccggcaccg

SEQ ID NO: 81054 - DNA, 26 bp, Homo sapiens
gccgcccaaggaggcgccggcaccgg

SEQ ID NO: 81055 - DNA, 26 bp, Homo sapiens
ccgcccaaggaggcgccggcaccggc

SEQ ID NO: 81056 - DNA, 26 bp, Homo sapiens
cgcccaaggaggcgccggcaccggcc

SEQ ID NO: 81057 - DNA, 26 bp, Homo sapiens
gcccaaggaggcgccggcaccggccc

SEQ ID NO: 81058 - DNA, 26 bp, Homo sapiens
cccaaggaggcgccggcaccggcccc

SEQ ID NO: 81059 - DNA, 26 bp, Homo sapiens
ccaaggaggcgccggcaccggccccg

SEQ ID NO: 81060 - DNA, 26 bp, Homo sapiens
caaggaggcgccggcaccggccccgg

SEQ ID NO: 81061 - DNA, 26 bp, Homo sapiens
aaggaggcgccggcaccggccccggc

SEQ ID NO: 81062 - DNA, 26 bp, Homo sapiens
aggaggcgccggcaccggccccggcc

SEQ ID NO: 81063 - DNA, 26 bp, Homo sapiens
ggaggcgccggcaccggccccggccg

SEQ ID NO: 81064 - DNA, 26 bp, Homo sapiens
gaggcgccggcaccggccccggccgc

SEQ ID NO: 81065 - DNA, 26 bp, Homo sapiens
aggcgccggcaccggccccggccgcc

SEQ ID NO: 81066 - DNA, 26 bp, Homo sapiens
ggcgccggcaccggccccggccgccg

SEQ ID NO: 81067 - DNA, 26 bp, Homo sapiens
gcgccggcaccggccccggccgccgc

SEQ ID NO: 81068 - DNA, 26 bp, Homo sapiens
cgccggcaccggccccggccgccgcg

SEQ ID NO: 81069 - DNA, 26 bp, Homo sapiens
gccggcaccggccccggccgccgcgg

SEQ ID NO: 81070 - DNA, 26 bp, Homo sapiens
ccggcaccggccccggccgccgcggc

SEQ ID NO: 81071 - DNA, 26 bp, Homo sapiens
cggcaccggccccggccgccgcggcc

SEQ ID NO: 81072 - DNA, 26 bp, Homo sapiens
ggcaccggccccggccgccgcggcca

SEQ ID NO: 81073 - DNA, 26 bp, Homo sapiens
gcaccggccccggccgccgcggccag

SEQ ID NO: 81074 - DNA, 26 bp, Homo sapiens
caccggccccggccgccgcggccagc

SEQ ID NO: 81075 - DNA, 26 bp, Homo sapiens
accggccccggccgccgcggccagct

SEQ ID NO: 81076 - DNA, 26 bp, Homo sapiens
ccggccccggccgccgcggccagctg

SEQ ID NO: 81077 - DNA, 26 bp, Homo sapiens
cggccccggccgccgcggccagctgc

SEQ ID NO: 81078 - DNA, 26 bp, Homo sapiens
ggccccggccgccgcggccagctgct

SEQ ID NO: 81079 - DNA, 26 bp, Homo sapiens
gccccggccgccgcggccagctgctg

SEQ ID NO: 81080 - DNA, 26 bp, Homo sapiens
ccccggccgccgcggccagctgctgc

SEQ ID NO: 81081 - DNA, 26 bp, Homo sapiens
cccggccgccgcggccagctgctgcg

SEQ ID NO: 81082 - DNA, 26 bp, Homo sapiens
ccggccgccgcggccagctgctgcgc

SEQ ID NO: 81083 - DNA, 26 bp, Homo sapiens
cggccgccgcggccagctgctgcgcc

SEQ ID NO: 81084 - DNA, 26 bp, Homo sapiens
ggccgccgcggccagctgctgcgccc

SEQ ID NO: 81085 - DNA, 26 bp, Homo sapiens
gccgccgcggccagctgctgcgcccc

SEQ ID NO: 81086 - DNA, 26 bp, Homo sapiens
ccgccgcggccagctgctgcgccccg

SEQ ID NO: 81087 - DNA, 26 bp, Homo sapiens
cgccgcggccagctgctgcgccccgc

SEQ ID NO: 81088 - DNA, 26 bp, Homo sapiens
gccgcggccagctgctgcgccccgcg

SEQ ID NO: 81089 - DNA, 26 bp, Homo sapiens
ccgcggccagctgctgcgccccgcgc

SEQ ID NO: 81090 - DNA, 26 bp, Homo sapiens
cgcggccagctgctgcgccccgcgcg

SEQ ID NO: 81091 - DNA, 26 bp, Homo sapiens
gcggccagctgctgcgccccgcgcgc

SEQ ID NO: 81092 - DNA, 26 bp, Homo sapiens
cggccagctgctgcgccccgcgcgcg

SEQ ID NO: 81093 - DNA, 26 bp, Homo sapiens
ggccagctgctgcgccccgcgcgcgt

SEQ ID NO: 81094 - DNA, 26 bp, Homo sapiens
gccagctgctgcgccccgcgcgcgta

SEQ ID NO: 81095 - DNA, 26 bp, Homo sapiens
ccagctgctgcgccccgcgcgcgtag

SEQ ID NO: 81096 - DNA, 26 bp, Homo sapiens
cagctgctgcgccccgcgcgcgtagc

SEQ ID NO: 81097 - DNA, 26 bp, Homo sapiens
agctgctgcgccccgcgcgcgtagcc

SEQ ID NO: 81098 - DNA, 26 bp, Homo sapiens
gctgctgcgccccgcgcgcgtagcca

SEQ ID NO: 81099 - DNA, 26 bp, Homo sapiens
ctgctgcgccccgcgcgcgtagccat

SEQ ID NO: 81100 - DNA, 26 bp, Homo sapiens
tgctgcgccccgcgcgcgtagccatc

SEQ ID NO: 81101 - DNA, 26 bp, Homo sapiens
gctgcgccccgcgcgcgtagccatcg

SEQ ID NO: 81102 - DNA, 26 bp, Homo sapiens
ctgcgccccgcgcgcgtagccatcga

SEQ ID NO: 81103 - DNA, 26 bp, Homo sapiens
tgcgccccgcgcgcgtagccatcgaa

SEQ ID NO: 81104 - DNA, 26 bp, Homo sapiens
gcgccccgcgcgcgtagccatcgaag

SEQ ID NO: 81105 - DNA, 26 bp, Homo sapiens
cgccccgcgcgcgtagccatcgaagc

SEQ ID NO: 81106 - DNA, 26 bp, Homo sapiens
gccccgcgcgcgtagccatcgaagcc

SEQ ID NO: 81107 - DNA, 26 bp, Homo sapiens
ccccgcgcgcgtagccatcgaagccg

SEQ ID NO: 81108 - DNA, 26 bp, Homo sapiens
cccgcgcgcgtagccatcgaagccgc

SEQ ID NO: 81109 - DNA, 26 bp, Homo sapiens
ccgcgcgcgtagccatcgaagccgcc

SEQ ID NO: 81110 - DNA, 26 bp, Homo sapiens
cgcgcgcgtagccatcgaagccgccc

SEQ ID NO: 81111 - DNA, 26 bp, Homo sapiens
gcgcgcgtagccatcgaagccgccct

SEQ ID NO: 81112 - DNA, 26 bp, Homo sapiens
cgcgcgtagccatcgaagccgccctg

SEQ ID NO: 81113 - DNA, 26 bp, Homo sapiens
gcgcgtagccatcgaagccgccctgg

SEQ ID NO: 81114 - DNA, 26 bp, Homo sapiens
cgcgtagccatcgaagccgccctgga

SEQ ID NO: 81115 - DNA, 26 bp, Homo sapiens
gcgtagccatcgaagccgccctggag

SEQ ID NO: 81116 - DNA, 26 bp, Homo sapiens
cgtagccatcgaagccgccctggagc

SEQ ID NO: 81117 - DNA, 26 bp, Homo sapiens
gtagccatcgaagccgccctggagct

SEQ ID NO: 81118 - DNA, 26 bp, Homo sapiens
tagccatcgaagccgccctggagctg

SEQ ID NO: 81119 - DNA, 26 bp, Homo sapiens
agccatcgaagccgccctggagctgg

SEQ ID NO: 81120 - DNA, 26 bp, Homo sapiens
gccatcgaagccgccctggagctggt

SEQ ID NO: 81121 - DNA, 26 bp, Homo sapiens
ccatcgaagccgccctggagctggtg

SEQ ID NO: 81122 - DNA, 26 bp, Homo sapiens
catcgaagccgccctggagctggtgg

SEQ ID NO: 81123 - DNA, 26 bp, Homo sapiens
atcgaagccgccctggagctggtggc

SEQ ID NO: 81124 - DNA, 26 bp, Homo sapiens
tcgaagccgccctggagctggtggct

SEQ ID NO: 81125 - DNA, 26 bp, Homo sapiens
cgaagccgccctggagctggtggctg

SEQ ID NO: 81126 - DNA, 26 bp, Homo sapiens
gaagccgccctggagctggtggctgt

SEQ ID NO: 81127 - DNA, 26 bp, Homo sapiens
aagccgccctggagctggtggctgtt

SEQ ID NO: 81128 - DNA, 26 bp, Homo sapiens
agccgccctggagctggtggctgttg

SEQ ID NO: 81129 - DNA, 26 bp, Homo sapiens
gccgccctggagctggtggctgttgc

SEQ ID NO: 81130 - DNA, 26 bp, Homo sapiens
ccgccctggagctggtggctgttgct

SEQ ID NO: 81131 - DNA, 26 bp, Homo sapiens
cgccctggagctggtggctgttgctg

SEQ ID NO: 81132 - DNA, 26 bp, Homo sapiens
gccctggagctggtggctgttgctga

SEQ ID NO: 81133 - DNA, 26 bp, Homo sapiens
ccctggagctggtggctgttgctgat

SEQ ID NO: 81134 - DNA, 26 bp, Homo sapiens
cctggagctggtggctgttgctgatg

SEQ ID NO: 81135 - DNA, 26 bp, Homo sapiens
ctggagctggtggctgttgctgatga

SEQ ID NO: 81136 - DNA, 26 bp, Homo sapiens
tggagctggtggctgttgctgatgag

SEQ ID NO: 81137 - DNA, 26 bp, Homo sapiens
ggagctggtggctgttgctgatgagc

SEQ ID NO: 81138 - DNA, 26 bp, Homo sapiens
gagctggtggctgttgctgatgagcg

SEQ ID NO: 81139 - DNA, 26 bp, Homo sapiens
agctggtggctgttgctgatgagcgc

SEQ ID NO: 81140 - DNA, 26 bp, Homo sapiens
gctggtggctgttgctgatgagcgcc

SEQ ID NO: 81141 - DNA, 26 bp, Homo sapiens
ctggtggctgttgctgatgagcgcct

SEQ ID NO: 81142 - DNA, 26 bp, Homo sapiens
tggtggctgttgctgatgagcgcctc

SEQ ID NO: 81143 - DNA, 26 bp, Homo sapiens
ggtggctgttgctgatgagcgcctcg

SEQ ID NO: 81144 - DNA, 26 bp, Homo sapiens
gtggctgttgctgatgagcgcctcga

SEQ ID NO: 81145 - DNA, 26 bp, Homo sapiens
tggctgttgctgatgagcgcctcgac

SEQ ID NO: 81146 - DNA, 26 bp, Homo sapiens
ggctgttgctgatgagcgcctcgacc

SEQ ID NO: 81147 - DNA, 26 bp, Homo sapiens
gctgttgctgatgagcgcctcgaccg

SEQ ID NO: 81148 - DNA, 26 bp, Homo sapiens
ctgttgctgatgagcgcctcgaccgc

SEQ ID NO: 81149 - DNA, 26 bp, Homo sapiens
tgttgctgatgagcgcctcgaccgcg

SEQ ID NO: 81150 - DNA, 26 bp, Homo sapiens
gttgctgatgagcgcctcgaccgcgt

SEQ ID NO: 81151 - DNA, 26 bp, Homo sapiens
ttgctgatgagcgcctcgaccgcgtc

SEQ ID NO: 81152 - DNA, 26 bp, Homo sapiens
tgctgatgagcgcctcgaccgcgtcc

SEQ ID NO: 81153 - DNA, 26 bp, Homo sapiens
gctgatgagcgcctcgaccgcgtcct

SEQ ID NO: 81154 - DNA, 26 bp, Homo sapiens
ctgatgagcgcctcgaccgcgtcctc

SEQ ID NO: 81155 - DNA, 26 bp, Homo sapiens
tgatgagcgcctcgaccgcgtcctcg

SEQ ID NO: 81156 - DNA, 26 bp, Homo sapiens
gatgagcgcctcgaccgcgtcctcgg

SEQ ID NO: 81157 - DNA, 26 bp, Homo sapiens
atgagcgcctcgaccgcgtcctcggg

SEQ ID NO: 81158 - DNA, 26 bp, Homo sapiens
tgagcgcctcgaccgcgtcctcgggg

SEQ ID NO: 81159 - DNA, 26 bp, Homo sapiens
gagcgcctcgaccgcgtcctcggggc

SEQ ID NO: 81160 - DNA, 26 bp, Homo sapiens
agcgcctcgaccgcgtcctcggggct

SEQ ID NO: 81161 - DNA, 26 bp, Homo sapiens
gcgcctcgaccgcgtcctcggggctg

SEQ ID NO: 81162 - DNA, 26 bp, Homo sapiens
cgcctcgaccgcgtcctcggggctga

SEQ ID NO: 81163 - DNA, 26 bp, Homo sapiens
gcctcgaccgcgtcctcggggctgaa

SEQ ID NO: 81164 - DNA, 26 bp, Homo sapiens
cctcgaccgcgtcctcggggctgaag

SEQ ID NO: 81165 - DNA, 26 bp, Homo sapiens
ctcgaccgcgtcctcggggctgaagc

SEQ ID NO: 81166 - DNA, 26 bp, Homo sapiens
tcgaccgcgtcctcggggctgaagcc

SEQ ID NO: 81167 - DNA, 26 bp, Homo sapiens
cgaccgcgtcctcggggctgaagccc

SEQ ID NO: 81168 - DNA, 26 bp, Homo sapiens
gaccgcgtcctcggggctgaagccca

SEQ ID NO: 81169 - DNA, 26 bp, Homo sapiens
accgcgtcctcggggctgaagcccag

SEQ ID NO: 81170 - DNA, 26 bp, Homo sapiens
ccgcgtcctcggggctgaagcccagc

SEQ ID NO: 81171 - DNA, 26 bp, Homo sapiens
cgcgtcctcggggctgaagcccagcg

SEQ ID NO: 81172 - DNA, 26 bp, Homo sapiens
gcgtcctcggggctgaagcccagcgc

SEQ ID NO: 81173 - DNA, 26 bp, Homo sapiens
cgtcctcggggctgaagcccagcgcc

SEQ ID NO: 81174 - DNA, 26 bp, Homo sapiens
gtcctcggggctgaagcccagcgcct

SEQ ID NO: 81175 - DNA, 26 bp, Homo sapiens
tcctcggggctgaagcccagcgcctc

SEQ ID NO: 81176 - DNA, 26 bp, Homo sapiens
cctcggggctgaagcccagcgcctcg

SEQ ID NO: 81177 - DNA, 26 bp, Homo sapiens
ctcggggctgaagcccagcgcctcgg

SEQ ID NO: 81178 - DNA, 26 bp, Homo sapiens
tcggggctgaagcccagcgcctcggg

SEQ ID NO: 81179 - DNA, 26 bp, Homo sapiens
cggggctgaagcccagcgcctcgggg

SEQ ID NO: 81180 - DNA, 26 bp, Homo sapiens
ggggctgaagcccagcgcctcggggt

SEQ ID NO: 81181 - DNA, 26 bp, Homo sapiens
gggctgaagcccagcgcctcggggtt

SEQ ID NO: 81182 - DNA, 26 bp, Homo sapiens
ggctgaagcccagcgcctcggggttc

SEQ ID NO: 81183 - DNA, 26 bp, Homo sapiens
gctgaagcccagcgcctcggggttca

SEQ ID NO: 81184 - DNA, 26 bp, Homo sapiens
ctgaagcccagcgcctcggggttcag

SEQ ID NO: 81185 - DNA, 26 bp, Homo sapiens
tgaagcccagcgcctcggggttcagc

SEQ ID NO: 81186 - DNA, 26 bp, Homo sapiens
gaagcccagcgcctcggggttcagct

SEQ ID NO: 81187 - DNA, 26 bp, Homo sapiens
aagcccagcgcctcggggttcagctg

SEQ ID NO: 81188 - DNA, 26 bp, Homo sapiens
agcccagcgcctcggggttcagctgc

SEQ ID NO: 81189 - DNA, 26 bp, Homo sapiens
gcccagcgcctcggggttcagctgct

SEQ ID NO: 81190 - DNA, 26 bp, Homo sapiens
cccagcgcctcggggttcagctgctg

SEQ ID NO: 81191 - DNA, 26 bp, Homo sapiens
ccagcgcctcggggttcagctgctgc

SEQ ID NO: 81192 - DNA, 26 bp, Homo sapiens
cagcgcctcggggttcagctgctgcg

SEQ ID NO: 81193 - DNA, 26 bp, Homo sapiens
agcgcctcggggttcagctgctgcgg

SEQ ID NO: 81194 - DNA, 26 bp, Homo sapiens
gcgcctcggggttcagctgctgcggg

SEQ ID NO: 81195 - DNA, 26 bp, Homo sapiens
cgcctcggggttcagctgctgcgggt

SEQ ID NO: 81196 - DNA, 26 bp, Homo sapiens
gcctcggggttcagctgctgcgggta

SEQ ID NO: 81197 - DNA, 26 bp, Homo sapiens
cctcggggttcagctgctgcgggtag

SEQ ID NO: 81198 - DNA, 26 bp, Homo sapiens
ctcggggttcagctgctgcgggtagc

SEQ ID NO: 81199 - DNA, 26 bp, Homo sapiens
tcggggttcagctgctgcgggtagcc

SEQ ID NO: 81200 - DNA, 26 bp, Homo sapiens
cggggttcagctgctgcgggtagccg

SEQ ID NO: 81201 - DNA, 26 bp, Homo sapiens
ggggttcagctgctgcgggtagccgg

SEQ ID NO: 81202 - DNA, 26 bp, Homo sapiens
gggttcagctgctgcgggtagccggt

SEQ ID NO: 81203 - DNA, 26 bp, Homo sapiens
ggttcagctgctgcgggtagccggtc

SEQ ID NO: 81204 - DNA, 26 bp, Homo sapiens
gttcagctgctgcgggtagccggtca

SEQ ID NO: 81205 - DNA, 26 bp, Homo sapiens
ttcagctgctgcgggtagccggtcat

SEQ ID NO: 81206 - DNA, 26 bp, Homo sapiens
tcagctgctgcgggtagccggtcatc

SEQ ID NO: 81207 - DNA, 26 bp, Homo sapiens
cagctgctgcgggtagccggtcatcc

SEQ ID NO: 81208 - DNA, 26 bp, Homo sapiens
agctgctgcgggtagccggtcatcca

SEQ ID NO: 81209 - DNA, 26 bp, Homo sapiens
gctgctgcgggtagccggtcatccag

SEQ ID NO: 81210 - DNA, 26 bp, Homo sapiens
ctgctgcgggtagccggtcatccagt

SEQ ID NO: 81211 - DNA, 26 bp, Homo sapiens
tgctgcgggtagccggtcatccagta

SEQ ID NO: 81212 - DNA, 26 bp, Homo sapiens
gctgcgggtagccggtcatccagtag

SEQ ID NO: 81213 - DNA, 26 bp, Homo sapiens
ctgcgggtagccggtcatccagtagt

SEQ ID NO: 81214 - DNA, 26 bp, Homo sapiens
tgcgggtagccggtcatccagtagta

SEQ ID NO: 81215 - DNA, 26 bp, Homo sapiens
gcgggtagccggtcatccagtagtag

SEQ ID NO: 81216 - DNA, 26 bp, Homo sapiens
cgggtagccggtcatccagtagtagt

SEQ ID NO: 81217 - DNA, 26 bp, Homo sapiens
gggtagccggtcatccagtagtagtc

SEQ ID NO: 81218 - DNA, 26 bp, Homo sapiens
ggtagccggtcatccagtagtagtct

SEQ ID NO: 81219 - DNA, 26 bp, Homo sapiens
gtagccggtcatccagtagtagtctt

SEQ ID NO: 81220 - DNA, 26 bp, Homo sapiens
tagccggtcatccagtagtagtcttc

SEQ ID NO: 81221 - DNA, 26 bp, Homo sapiens
agccggtcatccagtagtagtcttcc

SEQ ID NO: 81222 - DNA, 26 bp, Homo sapiens
gccggtcatccagtagtagtcttcca

SEQ ID NO: 81223 - DNA, 26 bp, Homo sapiens
ccggtcatccagtagtagtcttccag

SEQ ID NO: 81224 - DNA, 26 bp, Homo sapiens
cggtcatccagtagtagtcttccagg

SEQ ID NO: 81225 - DNA, 26 bp, Homo sapiens
ggtcatccagtagtagtcttccaggt

SEQ ID NO: 81226 - DNA, 26 bp, Homo sapiens
gtcatccagtagtagtcttccaggtg

SEQ ID NO: 81227 - DNA, 26 bp, Homo sapiens
tcatccagtagtagtcttccaggtgc

SEQ ID NO: 81228 - DNA, 26 bp, Homo sapiens
catccagtagtagtcttccaggtgcg

SEQ ID NO: 81229 - DNA, 26 bp, Homo sapiens
atccagtagtagtcttccaggtgcgc

SEQ ID NO: 81230 - DNA, 26 bp, Homo sapiens
tccagtagtagtcttccaggtgcgcc

SEQ ID NO: 81231 - DNA, 26 bp, Homo sapiens
ccagtagtagtcttccaggtgcgcct

SEQ ID NO: 81232 - DNA, 26 bp, Homo sapiens
cagtagtagtcttccaggtgcgcctt

SEQ ID NO: 81233 - DNA, 26 bp, Homo sapiens
agtagtagtcttccaggtgcgccttc

SEQ ID NO: 81234 - DNA, 26 bp, Homo sapiens
gtagtagtcttccaggtgcgccttct

SEQ ID NO: 81235 - DNA, 26 bp, Homo sapiens
tagtagtcttccaggtgcgccttctg

SEQ ID NO: 81236 - DNA, 26 bp, Homo sapiens
agtagtcttccaggtgcgccttctgc

SEQ ID NO: 81237 - DNA, 26 bp, Homo sapiens
gtagtcttccaggtgcgccttctgct

SEQ ID NO: 81238 - DNA, 26 bp, Homo sapiens
tagtcttccaggtgcgccttctgctc

SEQ ID NO: 81239 - DNA, 26 bp, Homo sapiens
agtcttccaggtgcgccttctgctcg

SEQ ID NO: 81240 - DNA, 26 bp, Homo sapiens
gtcttccaggtgcgccttctgctcgc

SEQ ID NO: 81241 - DNA, 26 bp, Homo sapiens
tcttccaggtgcgccttctgctcgct

SEQ ID NO: 81242 - DNA, 26 bp, Homo sapiens
cttccaggtgcgccttctgctcgctg

SEQ ID NO: 81243 - DNA, 26 bp, Homo sapiens
ttccaggtgcgccttctgctcgctgc

SEQ ID NO: 81244 - DNA, 26 bp, Homo sapiens
tccaggtgcgccttctgctcgctgcc

SEQ ID NO: 81245 - DNA, 26 bp, Homo sapiens
ccaggtgcgccttctgctcgctgccc

SEQ ID NO: 81246 - DNA, 26 bp, Homo sapiens
caggtgcgccttctgctcgctgcccg

SEQ ID NO: 81247 - DNA, 26 bp, Homo sapiens
aggtgcgccttctgctcgctgcccga

SEQ ID NO: 81248 - DNA, 26 bp, Homo sapiens
ggtgcgccttctgctcgctgcccgag

SEQ ID NO: 81249 - DNA, 26 bp, Homo sapiens
gtgcgccttctgctcgctgcccgagc

SEQ ID NO: 81250 - DNA, 26 bp, Homo sapiens
tgcgccttctgctcgctgcccgagcc

SEQ ID NO: 81251 - DNA, 26 bp, Homo sapiens
gcgccttctgctcgctgcccgagccc

SEQ ID NO: 81252 - DNA, 26 bp, Homo sapiens
cgccttctgctcgctgcccgagcccg

SEQ ID NO: 81253 - DNA, 26 bp, Homo sapiens
gccttctgctcgctgcccgagcccgg

SEQ ID NO: 81254 - DNA, 26 bp, Homo sapiens
ccttctgctcgctgcccgagcccggg

SEQ ID NO: 81255 - DNA, 26 bp, Homo sapiens
cttctgctcgctgcccgagcccgggc

SEQ ID NO: 81256 - DNA, 26 bp, Homo sapiens
ttctgctcgctgcccgagcccgggct

SEQ ID NO: 81257 - DNA, 26 bp, Homo sapiens
tctgctcgctgcccgagcccgggctg

SEQ ID NO: 81258 - DNA, 26 bp, Homo sapiens
ctgctcgctgcccgagcccgggctgg

SEQ ID NO: 81259 - DNA, 26 bp, Homo sapiens
tgctcgctgcccgagcccgggctggg

SEQ ID NO: 81260 - DNA, 26 bp, Homo sapiens
gctcgctgcccgagcccgggctgggc

SEQ ID NO: 81261 - DNA, 26 bp, Homo sapiens
ctcgctgcccgagcccgggctgggcg

SEQ ID NO: 81262 - DNA, 26 bp, Homo sapiens
tcgctgcccgagcccgggctgggcgc

SEQ ID NO: 81263 - DNA, 26 bp, Homo sapiens
cgctgcccgagcccgggctgggcgcc

SEQ ID NO: 81264 - DNA, 26 bp, Homo sapiens
gctgcccgagcccgggctgggcgccg

SEQ ID NO: 81265 - DNA, 26 bp, Homo sapiens
ctgcccgagcccgggctgggcgccga

SEQ ID NO: 81266 - DNA, 26 bp, Homo sapiens
tgcccgagcccgggctgggcgccgag

SEQ ID NO: 81267 - DNA, 26 bp, Homo sapiens
gcccgagcccgggctgggcgccgaga

SEQ ID NO: 81268 - DNA, 26 bp, Homo sapiens
cccgagcccgggctgggcgccgagaa

SEQ ID NO: 81269 - DNA, 26 bp, Homo sapiens
ccgagcccgggctgggcgccgagaag

SEQ ID NO: 81270 - DNA, 26 bp, Homo sapiens
cgagcccgggctgggcgccgagaagc

SEQ ID NO: 81271 - DNA, 26 bp, Homo sapiens
gagcccgggctgggcgccgagaagct

SEQ ID NO: 81272 - DNA, 26 bp, Homo sapiens
agcccgggctgggcgccgagaagctg

SEQ ID NO: 81273 - DNA, 26 bp, Homo sapiens
gcccgggctgggcgccgagaagctgg

SEQ ID NO: 81274 - DNA, 26 bp, Homo sapiens
cccgggctgggcgccgagaagctggg

SEQ ID NO: 81275 - DNA, 26 bp, Homo sapiens
ccgggctgggcgccgagaagctgggg

SEQ ID NO: 81276 - DNA, 26 bp, Homo sapiens
cgggctgggcgccgagaagctggggg

SEQ ID NO: 81277 - DNA, 26 bp, Homo sapiens
gggctgggcgccgagaagctggggga

SEQ ID NO: 81278 - DNA, 26 bp, Homo sapiens
ggctgggcgccgagaagctgggggaa

SEQ ID NO: 81279 - DNA, 26 bp, Homo sapiens
gctgggcgccgagaagctgggggaag

SEQ ID NO: 81280 - DNA, 26 bp, Homo sapiens
ctgggcgccgagaagctgggggaagg

SEQ ID NO: 81281 - DNA, 26 bp, Homo sapiens
tgggcgccgagaagctgggggaaggg

SEQ ID NO: 81282 - DNA, 26 bp, Homo sapiens
gggcgccgagaagctgggggaagggg

SEQ ID NO: 81283 - DNA, 26 bp, Homo sapiens
ggcgccgagaagctgggggaaggggg

SEQ ID NO: 81284 - DNA, 26 bp, Homo sapiens
gcgccgagaagctgggggaagggggc

SEQ ID NO: 81285 - DNA, 26 bp, Homo sapiens
cgccgagaagctgggggaagggggca

SEQ ID NO: 81286 - DNA, 26 bp, Homo sapiens
gccgagaagctgggggaagggggcac

SEQ ID NO: 81287 - DNA, 26 bp, Homo sapiens
ccgagaagctgggggaagggggcacc

SEQ ID NO: 81288 - DNA, 26 bp, Homo sapiens
cgagaagctgggggaagggggcaccg

SEQ ID NO: 81289 - DNA, 26 bp, Homo sapiens
gagaagctgggggaagggggcaccga

SEQ ID NO: 81290 - DNA, 26 bp, Homo sapiens
agaagctgggggaagggggcaccgag

SEQ ID NO: 81291 - DNA, 26 bp, Homo sapiens
gaagctgggggaagggggcaccgagc

SEQ ID NO: 81292 - DNA, 26 bp, Homo sapiens
aagctgggggaagggggcaccgagct

SEQ ID NO: 81293 - DNA, 26 bp, Homo sapiens
agctgggggaagggggcaccgagctg

SEQ ID NO: 81294 - DNA, 26 bp, Homo sapiens
gctgggggaagggggcaccgagctgc

SEQ ID NO: 81295 - DNA, 26 bp, Homo sapiens
ctgggggaagggggcaccgagctgca

SEQ ID NO: 81296 - DNA, 26 bp, Homo sapiens
tgggggaagggggcaccgagctgcac

SEQ ID NO: 81297 - DNA, 26 bp, Homo sapiens
gggggaagggggcaccgagctgcacg

SEQ ID NO: 81298 - DNA, 26 bp, Homo sapiens
ggggaagggggcaccgagctgcacgg

SEQ ID NO: 81299 - DNA, 26 bp, Homo sapiens
gggaagggggcaccgagctgcacggc

SEQ ID NO: 81300 - DNA, 26 bp, Homo sapiens
ggaagggggcaccgagctgcacggcg

SEQ ID NO: 81301 - DNA, 26 bp, Homo sapiens
gaagggggcaccgagctgcacggcgt

SEQ ID NO: 81302 - DNA, 26 bp, Homo sapiens
aagggggcaccgagctgcacggcgtg

SEQ ID NO: 81303 - DNA, 26 bp, Homo sapiens
agggggcaccgagctgcacggcgtgc

SEQ ID NO: 81304 - DNA, 26 bp, Homo sapiens
gggggcaccgagctgcacggcgtgct

SEQ ID NO: 81305 - DNA, 26 bp, Homo sapiens
ggggcaccgagctgcacggcgtgctc

SEQ ID NO: 81306 - DNA, 26 bp, Homo sapiens
gggcaccgagctgcacggcgtgctca

SEQ ID NO: 81307 - DNA, 26 bp, Homo sapiens
ggcaccgagctgcacggcgtgctcat

SEQ ID NO: 81308 - DNA, 26 bp, Homo sapiens
gcaccgagctgcacggcgtgctcatg

SEQ ID NO: 81309 - DNA, 26 bp, Homo sapiens
caccgagctgcacggcgtgctcatgg

SEQ ID NO: 81310 - DNA, 26 bp, Homo sapiens
accgagctgcacggcgtgctcatggg

SEQ ID NO: 81311 - DNA, 26 bp, Homo sapiens
ccgagctgcacggcgtgctcatgggg

SEQ ID NO: 81312 - DNA, 26 bp, Homo sapiens
cgagctgcacggcgtgctcatggggg

SEQ ID NO: 81313 - DNA, 26 bp, Homo sapiens
gagctgcacggcgtgctcatgggggt

SEQ ID NO: 81314 - DNA, 26 bp, Homo sapiens
agctgcacggcgtgctcatgggggtg

SEQ ID NO: 81315 - DNA, 26 bp, Homo sapiens
gctgcacggcgtgctcatgggggtgg

SEQ ID NO: 81316 - DNA, 26 bp, Homo sapiens
ctgcacggcgtgctcatgggggtgga

SEQ ID NO: 81317 - DNA, 26 bp, Homo sapiens
tgcacggcgtgctcatgggggtggag

SEQ ID NO: 81318 - DNA, 26 bp, Homo sapiens
gcacggcgtgctcatgggggtggagg

SEQ ID NO: 81319 - DNA, 26 bp, Homo sapiens
cacggcgtgctcatgggggtggagga

SEQ ID NO: 81320 - DNA, 26 bp, Homo sapiens
acggcgtgctcatgggggtggaggac

SEQ ID NO: 81321 - DNA, 26 bp, Homo sapiens
cggcgtgctcatgggggtggaggaca

SEQ ID NO: 81322 - DNA, 26 bp, Homo sapiens
ggcgtgctcatgggggtggaggacag

SEQ ID NO: 81323 - DNA, 26 bp, Homo sapiens
gcgtgctcatgggggtggaggacagc

SEQ ID NO: 81324 - DNA, 26 bp, Homo sapiens
cgtgctcatgggggtggaggacagcg

SEQ ID NO: 81325 - DNA, 26 bp, Homo sapiens
gtgctcatgggggtggaggacagcga

SEQ ID NO: 81326 - DNA, 26 bp, Homo sapiens
tgctcatgggggtggaggacagcgag

SEQ ID NO: 81327 - DNA, 26 bp, Homo sapiens
gctcatgggggtggaggacagcgagc

SEQ ID NO: 81328 - DNA, 26 bp, Homo sapiens
ctcatgggggtggaggacagcgagcc

SEQ ID NO: 81329 - DNA, 26 bp, Homo sapiens
tcatgggggtggaggacagcgagccc

SEQ ID NO: 81330 - DNA, 26 bp, Homo sapiens
catgggggtggaggacagcgagcccc

SEQ ID NO: 81331 - DNA, 26 bp, Homo sapiens
atgggggtggaggacagcgagccccc

SEQ ID NO: 81332 - DNA, 26 bp, Homo sapiens
tgggggtggaggacagcgagcccccg

SEQ ID NO: 81333 - DNA, 26 bp, Homo sapiens
gggggtggaggacagcgagcccccgg

SEQ ID NO: 81334 - DNA, 26 bp, Homo sapiens
ggggtggaggacagcgagcccccggc

SEQ ID NO: 81335 - DNA, 26 bp, Homo sapiens
gggtggaggacagcgagcccccggcg

SEQ ID NO: 81336 - DNA, 26 bp, Homo sapiens
ggtggaggacagcgagcccccggcga

SEQ ID NO: 81337 - DNA, 26 bp, Homo sapiens
gtggaggacagcgagcccccggcgat

SEQ ID NO: 81338 - DNA, 26 bp, Homo sapiens
tggaggacagcgagcccccggcgatg

SEQ ID NO: 81339 - DNA, 26 bp, Homo sapiens
ggaggacagcgagcccccggcgatga

SEQ ID NO: 81340 - DNA, 26 bp, Homo sapiens
gaggacagcgagcccccggcgatgag

SEQ ID NO: 81341 - DNA, 26 bp, Homo sapiens
aggacagcgagcccccggcgatgaga

SEQ ID NO: 81342 - DNA, 26 bp, Homo sapiens
ggacagcgagcccccggcgatgagac

SEQ ID NO: 81343 - DNA, 26 bp, Homo sapiens
gacagcgagcccccggcgatgagacg

SEQ ID NO: 81344 - DNA, 26 bp, Homo sapiens
acagcgagcccccggcgatgagacgg

SEQ ID NO: 81345 - DNA, 26 bp, Homo sapiens
cagcgagcccccggcgatgagacggc

SEQ ID NO: 81346 - DNA, 26 bp, Homo sapiens
agcgagcccccggcgatgagacggcc

SEQ ID NO: 81347 - DNA, 26 bp, Homo sapiens
gcgagcccccggcgatgagacggccg

SEQ ID NO: 81348 - DNA, 26 bp, Homo sapiens
cgagcccccggcgatgagacggccgc

SEQ ID NO: 81349 - DNA, 26 bp, Homo sapiens
gagcccccggcgatgagacggccgca

SEQ ID NO: 81350 - DNA, 26 bp, Homo sapiens
agcccccggcgatgagacggccgcac

SEQ ID NO: 81351 - DNA, 26 bp, Homo sapiens
gcccccggcgatgagacggccgcact

SEQ ID NO: 81352 - DNA, 26 bp, Homo sapiens
cccccggcgatgagacggccgcactg

SEQ ID NO: 81353 - DNA, 26 bp, Homo sapiens
ccccggcgatgagacggccgcactgg

SEQ ID NO: 81354 - DNA, 26 bp, Homo sapiens
cccggcgatgagacggccgcactggc

SEQ ID NO: 81355 - DNA, 26 bp, Homo sapiens
ccggcgatgagacggccgcactggct

SEQ ID NO: 81356 - DNA, 26 bp, Homo sapiens
cggcgatgagacggccgcactggctg

SEQ ID NO: 81357 - DNA, 26 bp, Homo sapiens
ggcgatgagacggccgcactggctga

SEQ ID NO: 81358 - DNA, 26 bp, Homo sapiens
gcgatgagacggccgcactggctgat

SEQ ID NO: 81359 - DNA, 26 bp, Homo sapiens
cgatgagacggccgcactggctgatg

SEQ ID NO: 81360 - DNA, 26 bp, Homo sapiens
gatgagacggccgcactggctgatga

SEQ ID NO: 81361 - DNA, 26 bp, Homo sapiens
atgagacggccgcactggctgatgat

SEQ ID NO: 81362 - DNA, 26 bp, Homo sapiens
tgagacggccgcactggctgatgatg

SEQ ID NO: 81363 - DNA, 26 bp, Homo sapiens
gagacggccgcactggctgatgatgc

SEQ ID NO: 81364 - DNA, 26 bp, Homo sapiens
agacggccgcactggctgatgatgcg

SEQ ID NO: 81365 - DNA, 26 bp, Homo sapiens
gacggccgcactggctgatgatgcgg

SEQ ID NO: 81366 - DNA, 26 bp, Homo sapiens
acggccgcactggctgatgatgcggt

SEQ ID NO: 81367 - DNA, 26 bp, Homo sapiens
cggccgcactggctgatgatgcggtc

SEQ ID NO: 81368 - DNA, 26 bp, Homo sapiens
ggccgcactggctgatgatgcggtcg

SEQ ID NO: 81369 - DNA, 26 bp, Homo sapiens
gccgcactggctgatgatgcggtcgg

SEQ ID NO: 81370 - DNA, 26 bp, Homo sapiens
ccgcactggctgatgatgcggtcggt

SEQ ID NO: 81371 - DNA, 26 bp, Homo sapiens
cgcactggctgatgatgcggtcggtc

SEQ ID NO: 81372 - DNA, 26 bp, Homo sapiens
gcactggctgatgatgcggtcggtct

SEQ ID NO: 81373 - DNA, 26 bp, Homo sapiens
cactggctgatgatgcggtcggtctc

SEQ ID NO: 81374 - DNA, 26 bp, Homo sapiens
actggctgatgatgcggtcggtctcc

SEQ ID NO: 81375 - DNA, 26 bp, Homo sapiens
ctggctgatgatgcggtcggtctcca

SEQ ID NO: 81376 - DNA, 26 bp, Homo sapiens
tggctgatgatgcggtcggtctccac

SEQ ID NO: 81377 - DNA, 26 bp, Homo sapiens
ggctgatgatgcggtcggtctccacc

SEQ ID NO: 81378 - DNA, 26 bp, Homo sapiens
gctgatgatgcggtcggtctccaccg

SEQ ID NO: 81379 - DNA, 26 bp, Homo sapiens
ctgatgatgcggtcggtctccaccgg

SEQ ID NO: 81380 - DNA, 26 bp, Homo sapiens
tgatgatgcggtcggtctccaccggt

SEQ ID NO: 81381 - DNA, 26 bp, Homo sapiens
gatgatgcggtcggtctccaccggtt

SEQ ID NO: 81382 - DNA, 26 bp, Homo sapiens
atgatgcggtcggtctccaccggttc

SEQ ID NO: 81383 - DNA, 26 bp, Homo sapiens
tgatgcggtcggtctccaccggttcc

SEQ ID NO: 81384 - DNA, 26 bp, Homo sapiens
gatgcggtcggtctccaccggttcct

SEQ ID NO: 81385 - DNA, 26 bp, Homo sapiens
atgcggtcggtctccaccggttcctt

SEQ ID NO: 81386 - DNA, 26 bp, Homo sapiens
tgcggtcggtctccaccggttccttt

SEQ ID NO: 81387 - DNA, 26 bp, Homo sapiens
gcggtcggtctccaccggttcctttt

SEQ ID NO: 81388 - DNA, 26 bp, Homo sapiens
cggtcggtctccaccggttccttttt

SEQ ID NO: 81389 - DNA, 26 bp, Homo sapiens
ggtcggtctccaccggttcctttttc

SEQ ID NO: 81390 - DNA, 26 bp, Homo sapiens
gtcggtctccaccggttcctttttca

SEQ ID NO: 81391 - DNA, 26 bp, Homo sapiens
tcggtctccaccggttcctttttcac

SEQ ID NO: 81392 - DNA, 26 bp, Homo sapiens
cggtctccaccggttcctttttcact

SEQ ID NO: 81393 - DNA, 26 bp, Homo sapiens
ggtctccaccggttcctttttcactt

SEQ ID NO: 81394 - DNA, 26 bp, Homo sapiens
gtctccaccggttcctttttcacttc

SEQ ID NO: 81395 - DNA, 26 bp, Homo sapiens
tctccaccggttcctttttcacttca

SEQ ID NO: 81396 - DNA, 26 bp, Homo sapiens
ctccaccggttcctttttcacttcaa

SEQ ID NO: 81397 - DNA, 26 bp, Homo sapiens
tccaccggttcctttttcacttcaaa

SEQ ID NO: 81398 - DNA, 26 bp, Homo sapiens
ccaccggttcctttttcacttcaaac

SEQ ID NO: 81399 - DNA, 26 bp, Homo sapiens
caccggttcctttttcacttcaaact

SEQ ID NO: 81400 - DNA, 26 bp, Homo sapiens
accggttcctttttcacttcaaactt

SEQ ID NO: 81401 - DNA, 26 bp, Homo sapiens
ccggttcctttttcacttcaaacttc

SEQ ID NO: 81402 - DNA, 26 bp, Homo sapiens
cggttcctttttcacttcaaacttca

SEQ ID NO: 81403 - DNA, 26 bp, Homo sapiens
ggttcctttttcacttcaaacttcat

SEQ ID NO: 81404 - DNA, 26 bp, Homo sapiens
gttcctttttcacttcaaacttcatc

SEQ ID NO: 81405 - DNA, 26 bp, Homo sapiens
ttcctttttcacttcaaacttcatca

SEQ ID NO: 81406 - DNA, 26 bp, Homo sapiens
tcctttttcacttcaaacttcatcag

SEQ ID NO: 81407 - DNA, 26 bp, Homo sapiens
cctttttcacttcaaacttcatcaga

SEQ ID NO: 81408 - DNA, 26 bp, Homo sapiens
ctttttcacttcaaacttcatcagat

SEQ ID NO: 81409 - DNA, 26 bp, Homo sapiens
tttttcacttcaaacttcatcagatc

SEQ ID NO: 81410 - DNA, 26 bp, Homo sapiens
ttttcacttcaaacttcatcagatcg

SEQ ID NO: 81411 - DNA, 26 bp, Homo sapiens
tttcacttcaaacttcatcagatcga

SEQ ID NO: 81412 - DNA, 26 bp, Homo sapiens
ttcacttcaaacttcatcagatcgaa

SEQ ID NO: 81413 - DNA, 26 bp, Homo sapiens
tcacttcaaacttcatcagatcgaag

SEQ ID NO: 81414 - DNA, 26 bp, Homo sapiens
cacttcaaacttcatcagatcgaagt

SEQ ID NO: 81415 - DNA, 26 bp, Homo sapiens
acttcaaacttcatcagatcgaagtc

SEQ ID NO: 81416 - DNA, 26 bp, Homo sapiens
cttcaaacttcatcagatcgaagtca

SEQ ID NO: 81417 - DNA, 26 bp, Homo sapiens
ttcaaacttcatcagatcgaagtcat

SEQ ID NO: 81418 - DNA, 26 bp, Homo sapiens
tcaaacttcatcagatcgaagtcatt

SEQ ID NO: 81419 - DNA, 26 bp, Homo sapiens
caaacttcatcagatcgaagtcatta

SEQ ID NO: 81420 - DNA, 26 bp, Homo sapiens
aaacttcatcagatcgaagtcattaa

SEQ ID NO: 81421 - DNA, 26 bp, Homo sapiens
aacttcatcagatcgaagtcattaac

SEQ ID NO: 81422 - DNA, 26 bp, Homo sapiens
acttcatcagatcgaagtcattaaca

SEQ ID NO: 81423 - DNA, 26 bp, Homo sapiens
cttcatcagatcgaagtcattaacat

SEQ ID NO: 81424 - DNA, 26 bp, Homo sapiens
ttcatcagatcgaagtcattaacata

SEQ ID NO: 81425 - DNA, 26 bp, Homo sapiens
tcatcagatcgaagtcattaacatat

SEQ ID NO: 81426 - DNA, 26 bp, Homo sapiens
catcagatcgaagtcattaacatatt

SEQ ID NO: 81427 - DNA, 26 bp, Homo sapiens
atcagatcgaagtcattaacatattc

SEQ ID NO: 81428 - DNA, 26 bp, Homo sapiens
tcagatcgaagtcattaacatattcc

SEQ ID NO: 81429 - DNA, 26 bp, Homo sapiens
cagatcgaagtcattaacatattcca

SEQ ID NO: 81430 - DNA, 26 bp, Homo sapiens
agatcgaagtcattaacatattccat

SEQ ID NO: 81431 - DNA, 26 bp, Homo sapiens
gatcgaagtcattaacatattccatg

SEQ ID NO: 81432 - DNA, 26 bp, Homo sapiens
atcgaagtcattaacatattccatgg

SEQ ID NO: 81433 - DNA, 26 bp, Homo sapiens
tcgaagtcattaacatattccatggc

SEQ ID NO: 81434 - DNA, 26 bp, Homo sapiens
cgaagtcattaacatattccatggcc

SEQ ID NO: 81435 - DNA, 26 bp, Homo sapiens
gaagtcattaacatattccatggcca

SEQ ID NO: 81436 - DNA, 26 bp, Homo sapiens
aagtcattaacatattccatggccag

SEQ ID NO: 81437 - DNA, 26 bp, Homo sapiens
agtcattaacatattccatggccagg

SEQ ID NO: 81438 - DNA, 26 bp, Homo sapiens
gtcattaacatattccatggccaggg

SEQ ID NO: 81439 - DNA, 26 bp, Homo sapiens
tcattaacatattccatggccagggg

SEQ ID NO: 81440 - DNA, 26 bp, Homo sapiens
cattaacatattccatggccagggga

SEQ ID NO: 81441 - DNA, 26 bp, Homo sapiens
attaacatattccatggccaggggac

SEQ ID NO: 81442 - DNA, 26 bp, Homo sapiens
ttaacatattccatggccaggggact

SEQ ID NO: 81443 - DNA, 26 bp, Homo sapiens
taacatattccatggccaggggactg

SEQ ID NO: 81444 - DNA, 26 bp, Homo sapiens
aacatattccatggccaggggactgg

SEQ ID NO: 81445 - DNA, 26 bp, Homo sapiens
acatattccatggccaggggactggt

SEQ ID NO: 81446 - DNA, 26 bp, Homo sapiens
catattccatggccaggggactggtg

SEQ ID NO: 81447 - DNA, 26 bp, Homo sapiens
atattccatggccaggggactggtgg

SEQ ID NO: 81448 - DNA, 26 bp, Homo sapiens
tattccatggccaggggactggtggg

SEQ ID NO: 81449 - DNA, 26 bp, Homo sapiens
attccatggccaggggactggtgggc

SEQ ID NO: 81450 - DNA, 26 bp, Homo sapiens
ttccatggccaggggactggtgggca

SEQ ID NO: 81451 - DNA, 26 bp, Homo sapiens
tccatggccaggggactggtgggcag

SEQ ID NO: 81452 - DNA, 26 bp, Homo sapiens
ccatggccaggggactggtgggcagg

SEQ ID NO: 81453 - DNA, 26 bp, Homo sapiens
catggccaggggactggtgggcaggt

SEQ ID NO: 81454 - DNA, 26 bp, Homo sapiens
atggccaggggactggtgggcaggtc

SEQ ID NO: 81455 - DNA, 26 bp, Homo sapiens
tggccaggggactggtgggcaggtcg

SEQ ID NO: 81456 - DNA, 26 bp, Homo sapiens
ggccaggggactggtgggcaggtcgg

SEQ ID NO: 81457 - DNA, 26 bp, Homo sapiens
gccaggggactggtgggcaggtcgga

SEQ ID NO: 81458 - DNA, 26 bp, Homo sapiens
ccaggggactggtgggcaggtcggag

SEQ ID NO: 81459 - DNA, 26 bp, Homo sapiens
caggggactggtgggcaggtcggagt

SEQ ID NO: 81460 - DNA, 26 bp, Homo sapiens
aggggactggtgggcaggtcggagtt

SEQ ID NO: 81461 - DNA, 26 bp, Homo sapiens
ggggactggtgggcaggtcggagttg

SEQ ID NO: 81462 - DNA, 26 bp, Homo sapiens
gggactggtgggcaggtcggagttgc

SEQ ID NO: 81463 - DNA, 26 bp, Homo sapiens
ggactggtgggcaggtcggagttgct

SEQ ID NO: 81464 - DNA, 26 bp, Homo sapiens
gactggtgggcaggtcggagttgctc

SEQ ID NO: 81465 - DNA, 26 bp, Homo sapiens
actggtgggcaggtcggagttgctca

SEQ ID NO: 81466 - DNA, 26 bp, Homo sapiens
ctggtgggcaggtcggagttgctcat

SEQ ID NO: 81467 - DNA, 26 bp, Homo sapiens
tggtgggcaggtcggagttgctcatt

SEQ ID NO: 81468 - DNA, 26 bp, Homo sapiens
ggtgggcaggtcggagttgctcattg

SEQ ID NO: 81469 - DNA, 26 bp, Homo sapiens
gtgggcaggtcggagttgctcattgc

SEQ ID NO: 81470 - DNA, 26 bp, Homo sapiens
tgggcaggtcggagttgctcattgcc

SEQ ID NO: 81471 - DNA, 26 bp, Homo sapiens
gggcaggtcggagttgctcattgcca

SEQ ID NO: 81472 - DNA, 26 bp, Homo sapiens
ggcaggtcggagttgctcattgccag

SEQ ID NO: 81473 - DNA, 26 bp, Homo sapiens
gcaggtcggagttgctcattgccagt

SEQ ID NO: 81474 - DNA, 26 bp, Homo sapiens
caggtcggagttgctcattgccagtt

SEQ ID NO: 81475 - DNA, 26 bp, Homo sapiens
aggtcggagttgctcattgccagttc

SEQ ID NO: 81476 - DNA, 26 bp, Homo sapiens
ggtcggagttgctcattgccagttct

SEQ ID NO: 81477 - DNA, 26 bp, Homo sapiens
gtcggagttgctcattgccagttctg

SEQ ID NO: 81478 - DNA, 26 bp, Homo sapiens
tcggagttgctcattgccagttctga

SEQ ID NO: 81479 - DNA, 26 bp, Homo sapiens
cggagttgctcattgccagttctgat

SEQ ID NO: 81480 - DNA, 26 bp, Homo sapiens
ggagttgctcattgccagttctgatg

SEQ ID NO: 81481 - DNA, 26 bp, Homo sapiens
gagttgctcattgccagttctgatgc

SEQ ID NO: 81482 - DNA, 26 bp, Homo sapiens
agttgctcattgccagttctgatgcc

SEQ ID NO: 81483 - DNA, 26 bp, Homo sapiens
gttgctcattgccagttctgatgcca

SEQ ID NO: 81484 - DNA, 26 bp, Homo sapiens
ttgctcattgccagttctgatgccat

SEQ ID NO: 81485 - DNA, 26 bp, Homo sapiens
tgctcattgccagttctgatgccatt

SEQ ID NO: 81486 - DNA, 26 bp, Homo sapiens
gctcattgccagttctgatgccattc

SEQ ID NO: 81487 - DNA, 26 bp, Homo sapiens
ctcattgccagttctgatgccattct

SEQ ID NO: 81488 - DNA, 26 bp, Homo sapiens
tcattgccagttctgatgccattctc

SEQ ID NO: 81489 - DNA, 26 bp, Homo sapiens
cattgccagttctgatgccattctcc

SEQ ID NO: 81490 - DNA, 26 bp, Homo sapiens
attgccagttctgatgccattctcct

SEQ ID NO: 81491 - DNA, 26 bp, Homo sapiens
ttgccagttctgatgccattctcctg

SEQ ID NO: 81492 - DNA, 26 bp, Homo sapiens
tgccagttctgatgccattctcctgc

SEQ ID NO: 81493 - DNA, 26 bp, Homo sapiens
gccagttctgatgccattctcctgcc

SEQ ID NO: 81494 - DNA, 26 bp, Homo sapiens
ccagttctgatgccattctcctgccg

SEQ ID NO: 81495 - DNA, 26 bp, Homo sapiens
cagttctgatgccattctcctgccgc

SEQ ID NO: 81496 - DNA, 26 bp, Homo sapiens
agttctgatgccattctcctgccgcc

SEQ ID NO: 81497 - DNA, 26 bp, Homo sapiens
gttctgatgccattctcctgccgccg

SEQ ID NO: 81498 - DNA, 26 bp, Homo sapiens
ttctgatgccattctcctgccgccgc

SEQ ID NO: 81499 - DNA, 26 bp, Homo sapiens
tctgatgccattctcctgccgccgcc

SEQ ID NO: 81500 - DNA, 26 bp, Homo sapiens
ctgatgccattctcctgccgccgccg

SEQ ID NO: 81501 - DNA, 26 bp, Homo sapiens
tgatgccattctcctgccgccgccgc

SEQ ID NO: 81502 - DNA, 26 bp, Homo sapiens
gatgccattctcctgccgccgccgcc

SEQ ID NO: 81503 - DNA, 26 bp, Homo sapiens
atgccattctcctgccgccgccgccg

SEQ ID NO: 81504 - DNA, 26 bp, Homo sapiens
tgccattctcctgccgccgccgccgc

SEQ ID NO: 81505 - DNA, 26 bp, Homo sapiens
gccattctcctgccgccgccgccgcc

SEQ ID NO: 81506 - DNA, 26 bp, Homo sapiens
ccattctcctgccgccgccgccgccg

SEQ ID NO: 81507 - DNA, 26 bp, Homo sapiens
cattctcctgccgccgccgccgccgc

SEQ ID NO: 81508 - DNA, 26 bp, Homo sapiens
attctcctgccgccgccgccgccgcc

SEQ ID NO: 81509 - DNA, 26 bp, Homo sapiens
ttctcctgccgccgccgccgccgccg

SEQ ID NO: 81510 - DNA, 26 bp, Homo sapiens
tctcctgccgccgccgccgccgccgc

SEQ ID NO: 81511 - DNA, 26 bp, Homo sapiens
ctcctgccgccgccgccgccgccgcc

SEQ ID NO: 81512 - DNA, 26 bp, Homo sapiens
tcctgccgccgccgccgccgccgccg

SEQ ID NO: 81513 - DNA, 26 bp, Homo sapiens
cctgccgccgccgccgccgccgccgc

SEQ ID NO: 81514 - DNA, 26 bp, Homo sapiens
ctgccgccgccgccgccgccgccgcc

SEQ ID NO: 81515 - DNA, 26 bp, Homo sapiens
tgccgccgccgccgccgccgccgccg

SEQ ID NO: 81516 - DNA, 26 bp, Homo sapiens
gccgccgccgccgccgccgccgccgc

SEQ ID NO: 81517 - DNA, 26 bp, Homo sapiens
ccgccgccgccgccgccgccgccgct

SEQ ID NO: 81518 - DNA, 26 bp, Homo sapiens
cgccgccgccgccgccgccgccgctc

SEQ ID NO: 81519 - DNA, 26 bp, Homo sapiens
gccgccgccgccgccgccgccgctcc

SEQ ID NO: 81520 - DNA, 26 bp, Homo sapiens
ccgccgccgccgccgccgccgctccg

SEQ ID NO: 81521 - DNA, 26 bp, Homo sapiens
cgccgccgccgccgccgccgctccgc

SEQ ID NO: 81522 - DNA, 26 bp, Homo sapiens
gccgccgccgccgccgccgctccgcc

SEQ ID NO: 81523 - DNA, 26 bp, Homo sapiens
ccgccgccgccgccgccgctccgcca

SEQ ID NO: 81524 - DNA, 26 bp, Homo sapiens
cgccgccgccgccgccgctccgccag

SEQ ID NO: 81525 - DNA, 26 bp, Homo sapiens
gccgccgccgccgccgctccgccaga

SEQ ID NO: 81526 - DNA, 26 bp, Homo sapiens
ccgccgccgccgccgctccgccagat

SEQ ID NO: 81527 - DNA, 26 bp, Homo sapiens
cgccgccgccgccgctccgccagatg

SEQ ID NO: 81528 - DNA, 26 bp, Homo sapiens
gccgccgccgccgctccgccagatgg

SEQ ID NO: 81529 - DNA, 26 bp, Homo sapiens
ccgccgccgccgctccgccagatggg

SEQ ID NO: 81530 - DNA, 26 bp, Homo sapiens
cgccgccgccgctccgccagatgggc

SEQ ID NO: 81531 - DNA, 26 bp, Homo sapiens
gccgccgccgctccgccagatgggct

SEQ ID NO: 81532 - DNA, 26 bp, Homo sapiens
ccgccgccgctccgccagatgggctg

SEQ ID NO: 81533 - DNA, 26 bp, Homo sapiens
cgccgccgctccgccagatgggctgc

SEQ ID NO: 81534 - DNA, 26 bp, Homo sapiens
gccgccgctccgccagatgggctgca

SEQ ID NO: 81535 - DNA, 26 bp, Homo sapiens
ccgccgctccgccagatgggctgcag

SEQ ID NO: 81536 - DNA, 26 bp, Homo sapiens
cgccgctccgccagatgggctgcagg

SEQ ID NO: 81537 - DNA, 26 bp, Homo sapiens
gccgctccgccagatgggctgcagga

SEQ ID NO: 81538 - DNA, 26 bp, Homo sapiens
ccgctccgccagatgggctgcaggag

SEQ ID NO: 81539 - DNA, 26 bp, Homo sapiens
cgctccgccagatgggctgcaggaga

SEQ ID NO: 81540 - DNA, 26 bp, Homo sapiens
gctccgccagatgggctgcaggagag

SEQ ID NO: 81541 - DNA, 26 bp, Homo sapiens
ctccgccagatgggctgcaggagagg

SEQ ID NO: 81542 - DNA, 26 bp, Homo sapiens
tccgccagatgggctgcaggagaggg

SEQ ID NO: 81543 - DNA, 26 bp, Homo sapiens
ccgccagatgggctgcaggagagggg

SEQ ID NO: 81544 - DNA, 26 bp, Homo sapiens
cgccagatgggctgcaggagaggggc

SEQ ID NO: 81545 - DNA, 26 bp, Homo sapiens
gccagatgggctgcaggagaggggcc

SEQ ID NO: 81546 - DNA, 26 bp, Homo sapiens
ccagatgggctgcaggagaggggcca

SEQ ID NO: 81547 - DNA, 26 bp, Homo sapiens
cagatgggctgcaggagaggggccag

SEQ ID NO: 81548 - DNA, 26 bp, Homo sapiens
agatgggctgcaggagaggggccagc

SEQ ID NO: 81549 - DNA, 26 bp, Homo sapiens
gatgggctgcaggagaggggccagcg

SEQ ID NO: 81550 - DNA, 26 bp, Homo sapiens
atgggctgcaggagaggggccagcgg

SEQ ID NO: 81551 - DNA, 26 bp, Homo sapiens
tgggctgcaggagaggggccagcggg

SEQ ID NO: 81552 - DNA, 26 bp, Homo sapiens
gggctgcaggagaggggccagcgggc

SEQ ID NO: 81553 - DNA, 26 bp, Homo sapiens
ggctgcaggagaggggccagcgggct

SEQ ID NO: 81554 - DNA, 26 bp, Homo sapiens
gctgcaggagaggggccagcgggctg

SEQ ID NO: 81555 - DNA, 26 bp, Homo sapiens
ctgcaggagaggggccagcgggctgt

SEQ ID NO: 81556 - DNA, 26 bp, Homo sapiens
tgcaggagaggggccagcgggctgtg

SEQ ID NO: 81557 - DNA, 26 bp, Homo sapiens
gcaggagaggggccagcgggctgtgc

SEQ ID NO: 81558 - DNA, 26 bp, Homo sapiens
caggagaggggccagcgggctgtgct

SEQ ID NO: 81559 - DNA, 26 bp, Homo sapiens
aggagaggggccagcgggctgtgctg

SEQ ID NO: 81560 - DNA, 26 bp, Homo sapiens
ggagaggggccagcgggctgtgctgg

SEQ ID NO: 81561 - DNA, 26 bp, Homo sapiens
gagaggggccagcgggctgtgctggg

SEQ ID NO: 81562 - DNA, 26 bp, Homo sapiens
agaggggccagcgggctgtgctgggt

SEQ ID NO: 81563 - DNA, 26 bp, Homo sapiens
gaggggccagcgggctgtgctgggtg

SEQ ID NO: 81564 - DNA, 26 bp, Homo sapiens
aggggccagcgggctgtgctgggtgg

SEQ ID NO: 81565 - DNA, 26 bp, Homo sapiens
ggggccagcgggctgtgctgggtggc

SEQ ID NO: 81566 - DNA, 26 bp, Homo sapiens
gggccagcgggctgtgctgggtggcc

SEQ ID NO: 81567 - DNA, 26 bp, Homo sapiens
ggccagcgggctgtgctgggtggcca

SEQ ID NO: 81568 - DNA, 26 bp, Homo sapiens
gccagcgggctgtgctgggtggccag

SEQ ID NO: 81569 - DNA, 26 bp, Homo sapiens
ccagcgggctgtgctgggtggccagc

SEQ ID NO: 81570 - DNA, 26 bp, Homo sapiens
cagcgggctgtgctgggtggccagcg

SEQ ID NO: 81571 - DNA, 26 bp, Homo sapiens
agcgggctgtgctgggtggccagcgg

SEQ ID NO: 81572 - DNA, 26 bp, Homo sapiens
gcgggctgtgctgggtggccagcggg

SEQ ID NO: 81573 - DNA, 26 bp, Homo sapiens
cgggctgtgctgggtggccagcgggt

SEQ ID NO: 81574 - DNA, 26 bp, Homo sapiens
gggctgtgctgggtggccagcgggtg

SEQ ID NO: 81575 - DNA, 26 bp, Homo sapiens
ggctgtgctgggtggccagcgggtga

SEQ ID NO: 81576 - DNA, 26 bp, Homo sapiens
gctgtgctgggtggccagcgggtgag

SEQ ID NO: 81577 - DNA, 26 bp, Homo sapiens
ctgtgctgggtggccagcgggtgagc

SEQ ID NO: 81578 - DNA, 26 bp, Homo sapiens
tgtgctgggtggccagcgggtgagcc

SEQ ID NO: 81579 - DNA, 26 bp, Homo sapiens
gtgctgggtggccagcgggtgagcca

SEQ ID NO: 81580 - DNA, 26 bp, Homo sapiens
tgctgggtggccagcgggtgagccag

SEQ ID NO: 81581 - DNA, 26 bp, Homo sapiens
gctgggtggccagcgggtgagccagc

SEQ ID NO: 81582 - DNA, 26 bp, Homo sapiens
ctgggtggccagcgggtgagccagct

SEQ ID NO: 81583 - DNA, 26 bp, Homo sapiens
tgggtggccagcgggtgagccagctt

SEQ ID NO: 81584 - DNA, 26 bp, Homo sapiens
gggtggccagcgggtgagccagcttg

SEQ ID NO: 81585 - DNA, 26 bp, Homo sapiens
ggtggccagcgggtgagccagcttgc

SEQ ID NO: 81586 - DNA, 26 bp, Homo sapiens
gtggccagcgggtgagccagcttgcc

SEQ ID NO: 81587 - DNA, 26 bp, Homo sapiens
tggccagcgggtgagccagcttgccg

SEQ ID NO: 81588 - DNA, 26 bp, Homo sapiens
ggccagcgggtgagccagcttgccgg

SEQ ID NO: 81589 - DNA, 26 bp, Homo sapiens
gccagcgggtgagccagcttgccggg

SEQ ID NO: 81590 - DNA, 26 bp, Homo sapiens
ccagcgggtgagccagcttgccgggc

SEQ ID NO: 81591 - DNA, 26 bp, Homo sapiens
cagcgggtgagccagcttgccgggct

SEQ ID NO: 81592 - DNA, 26 bp, Homo sapiens
agcgggtgagccagcttgccgggctg

SEQ ID NO: 81593 - DNA, 26 bp, Homo sapiens
gcgggtgagccagcttgccgggctgg

SEQ ID NO: 81594 - DNA, 26 bp, Homo sapiens
cgggtgagccagcttgccgggctggg

SEQ ID NO: 81595 - DNA, 26 bp, Homo sapiens
gggtgagccagcttgccgggctgggg

SEQ ID NO: 81596 - DNA, 26 bp, Homo sapiens
ggtgagccagcttgccgggctggggc

SEQ ID NO: 81597 - DNA, 26 bp, Homo sapiens
gtgagccagcttgccgggctggggcg

SEQ ID NO: 81598 - DNA, 26 bp, Homo sapiens
tgagccagcttgccgggctggggcgc

SEQ ID NO: 81599 - DNA, 26 bp, Homo sapiens
gagccagcttgccgggctggggcgct

SEQ ID NO: 81600 - DNA, 26 bp, Homo sapiens
agccagcttgccgggctggggcgctt

SEQ ID NO: 81601 - DNA, 26 bp, Homo sapiens
gccagcttgccgggctggggcgcttc

SEQ ID NO: 81602 - DNA, 26 bp, Homo sapiens
ccagcttgccgggctggggcgcttct

SEQ ID NO: 81603 - DNA, 26 bp, Homo sapiens
cagcttgccgggctggggcgcttcta

SEQ ID NO: 81604 - DNA, 26 bp, Homo sapiens
agcttgccgggctggggcgcttctag

SEQ ID NO: 81605 - DNA, 26 bp, Homo sapiens
gcttgccgggctggggcgcttctagc

SEQ ID NO: 81606 - DNA, 26 bp, Homo sapiens
cttgccgggctggggcgcttctagct

SEQ ID NO: 81607 - DNA, 26 bp, Homo sapiens
ttgccgggctggggcgcttctagctt

SEQ ID NO: 81608 - DNA, 26 bp, Homo sapiens
tgccgggctggggcgcttctagcttg

SEQ ID NO: 81609 - DNA, 26 bp, Homo sapiens
gccgggctggggcgcttctagcttgc

SEQ ID NO: 81610 - DNA, 26 bp, Homo sapiens
ccgggctggggcgcttctagcttgcg

SEQ ID NO: 81611 - DNA, 26 bp, Homo sapiens
cgggctggggcgcttctagcttgcgc

SEQ ID NO: 81612 - DNA, 26 bp, Homo sapiens
gggctggggcgcttctagcttgcgcg

SEQ ID NO: 81613 - DNA, 26 bp, Homo sapiens
ggctggggcgcttctagcttgcgcgg

SEQ ID NO: 81614 - DNA, 26 bp, Homo sapiens
gctggggcgcttctagcttgcgcggc

SEQ ID NO: 81615 - DNA, 26 bp, Homo sapiens
ctggggcgcttctagcttgcgcggcg

SEQ ID NO: 81616 - DNA, 26 bp, Homo sapiens
tggggcgcttctagcttgcgcggcgg

SEQ ID NO: 81617 - DNA, 26 bp, Homo sapiens
ggggcgcttctagcttgcgcggcggt

SEQ ID NO: 81618 - DNA, 26 bp, Homo sapiens
gggcgcttctagcttgcgcggcggtg

SEQ ID NO: 81619 - DNA, 26 bp, Homo sapiens
ggcgcttctagcttgcgcggcggtgg

SEQ ID NO: 81620 - DNA, 26 bp, Homo sapiens
gcgcttctagcttgcgcggcggtggc

SEQ ID NO: 81621 - DNA, 26 bp, Homo sapiens
cgcttctagcttgcgcggcggtggct

SEQ ID NO: 81622 - DNA, 26 bp, Homo sapiens
gcttctagcttgcgcggcggtggctg

SEQ ID NO: 81623 - DNA, 26 bp, Homo sapiens
cttctagcttgcgcggcggtggctgg

SEQ ID NO: 81624 - DNA, 26 bp, Homo sapiens
ttctagcttgcgcggcggtggctggc

SEQ ID NO: 81625 - DNA, 26 bp, Homo sapiens
tctagcttgcgcggcggtggctggcc

SEQ ID NO: 81626 - DNA, 26 bp, Homo sapiens
ctagcttgcgcggcggtggctggccc

SEQ ID NO: 81627 - DNA, 26 bp, Homo sapiens
tagcttgcgcggcggtggctggcccg

SEQ ID NO: 81628 - DNA, 26 bp, Homo sapiens
agcttgcgcggcggtggctggcccga

SEQ ID NO: 81629 - DNA, 26 bp, Homo sapiens
gcttgcgcggcggtggctggcccgaa

SEQ ID NO: 81630 - DNA, 26 bp, Homo sapiens
cttgcgcggcggtggctggcccgaaa

SEQ ID NO: 81631 - DNA, 26 bp, Homo sapiens
ttgcgcggcggtggctggcccgaaac

SEQ ID NO: 81632 - DNA, 26 bp, Homo sapiens
tgcgcggcggtggctggcccgaaacc

SEQ ID NO: 81633 - DNA, 26 bp, Homo sapiens
gcgcggcggtggctggcccgaaacct

SEQ ID NO: 81634 - DNA, 26 bp, Homo sapiens
cgcggcggtggctggcccgaaacctc

SEQ ID NO: 81635 - DNA, 26 bp, Homo sapiens
gcggcggtggctggcccgaaacctcc

SEQ ID NO: 81636 - DNA, 26 bp, Homo sapiens
cggcggtggctggcccgaaacctccg

SEQ ID NO: 81637 - DNA, 26 bp, Homo sapiens
ggcggtggctggcccgaaacctccga

SEQ ID NO: 81638 - DNA, 26 bp, Homo sapiens
gcggtggctggcccgaaacctccgag

SEQ ID NO: 81639 - DNA, 26 bp, Homo sapiens
cggtggctggcccgaaacctccgagc

SEQ ID NO: 81640 - DNA, 26 bp, Homo sapiens
ggtggctggcccgaaacctccgagcg

SEQ ID NO: 81641 - DNA, 26 bp, Homo sapiens
gtggctggcccgaaacctccgagcgc

SEQ ID NO: 81642 - DNA, 26 bp, Homo sapiens
tggctggcccgaaacctccgagcgcg

SEQ ID NO: 81643 - DNA, 26 bp, Homo sapiens
ggctggcccgaaacctccgagcgcgc

SEQ ID NO: 81644 - DNA, 26 bp, Homo sapiens
gctggcccgaaacctccgagcgcgct

SEQ ID NO: 81645 - DNA, 26 bp, Homo sapiens
ctggcccgaaacctccgagcgcgctc

SEQ ID NO: 81646 - DNA, 26 bp, Homo sapiens
tggcccgaaacctccgagcgcgctca

SEQ ID NO: 81647 - DNA, 26 bp, Homo sapiens
ggcccgaaacctccgagcgcgctcac

SEQ ID NO: 81648 - DNA, 26 bp, Homo sapiens
gcccgaaacctccgagcgcgctcaca

SEQ ID NO: 81649 - DNA, 26 bp, Homo sapiens
cccgaaacctccgagcgcgctcacac

SEQ ID NO: 81650 - DNA, 26 bp, Homo sapiens
ccgaaacctccgagcgcgctcacaca

SEQ ID NO: 81651 - DNA, 26 bp, Homo sapiens
cgaaacctccgagcgcgctcacacac

SEQ ID NO: 81652 - DNA, 26 bp, Homo sapiens
gaaacctccgagcgcgctcacacaca

SEQ ID NO: 81653 - DNA, 26 bp, Homo sapiens
aaacctccgagcgcgctcacacacac

SEQ ID NO: 81654 - DNA, 26 bp, Homo sapiens
aacctccgagcgcgctcacacacaca

SEQ ID NO: 81655 - DNA, 26 bp, Homo sapiens
acctccgagcgcgctcacacacacac

SEQ ID NO: 81656 - DNA, 26 bp, Homo sapiens
cctccgagcgcgctcacacacacacc

SEQ ID NO: 81657 - DNA, 26 bp, Homo sapiens
ctccgagcgcgctcacacacacaccc

SEQ ID NO: 81658 - DNA, 26 bp, Homo sapiens
tccgagcgcgctcacacacacacccc

SEQ ID NO: 81659 - DNA, 26 bp, Homo sapiens
ccgagcgcgctcacacacacaccccc

SEQ ID NO: 81660 - DNA, 26 bp, Homo sapiens
cgagcgcgctcacacacacacccccc

SEQ ID NO: 81661 - DNA, 26 bp, Homo sapiens
gagcgcgctcacacacacaccccccc

SEQ ID NO: 81662 - DNA, 26 bp, Homo sapiens
agcgcgctcacacacacacccccccg

SEQ ID NO: 81663 - DNA, 26 bp, Homo sapiens
gcgcgctcacacacacacccccccgc

SEQ ID NO: 81664 - DNA, 26 bp, Homo sapiens
cgcgctcacacacacacccccccgcc

SEQ ID NO: 81665 - DNA, 26 bp, Homo sapiens
gcgctcacacacacacccccccgccc

SEQ ID NO: 81666 - DNA, 26 bp, Homo sapiens
cgctcacacacacacccccccgccct

SEQ ID NO: 81667 - DNA, 26 bp, Homo sapiens
gctcacacacacacccccccgccctg

SEQ ID NO: 81668 - DNA, 26 bp, Homo sapiens
ctcacacacacacccccccgccctgc

SEQ ID NO: 81669 - DNA, 26 bp, Homo sapiens
tcacacacacacccccccgccctgcc

SEQ ID NO: 81670 - DNA, 26 bp, Homo sapiens
cacacacacacccccccgccctgccc

SEQ ID NO: 81671 - DNA, 26 bp, Homo sapiens
acacacacacccccccgccctgcccg

SEQ ID NO: 81672 - DNA, 26 bp, Homo sapiens
cacacacacccccccgccctgcccgc

SEQ ID NO: 81673 - DNA, 26 bp, Homo sapiens
acacacacccccccgccctgcccgcg

SEQ ID NO: 81674 - DNA, 26 bp, Homo sapiens
cacacacccccccgccctgcccgcgc

SEQ ID NO: 81675 - DNA, 26 bp, Homo sapiens
acacacccccccgccctgcccgcgcc

SEQ ID NO: 81676 - DNA, 26 bp, Homo sapiens
cacacccccccgccctgcccgcgccc

SEQ ID NO: 81677 - DNA, 26 bp, Homo sapiens
acacccccccgccctgcccgcgcccc

SEQ ID NO: 81678 - DNA, 26 bp, Homo sapiens
cacccccccgccctgcccgcgccccc

SEQ ID NO: 81679 - DNA, 26 bp, Homo sapiens
acccccccgccctgcccgcgcccccc

SEQ ID NO: 81680 - DNA, 26 bp, Homo sapiens
cccccccgccctgcccgcgccccccg

SEQ ID NO: 81681 - DNA, 26 bp, Homo sapiens
ccccccgccctgcccgcgccccccgc

SEQ ID NO: 81682 - DNA, 26 bp, Homo sapiens
cccccgccctgcccgcgccccccgcg

SEQ ID NO: 81683 - DNA, 26 bp, Homo sapiens
ccccgccctgcccgcgccccccgcgc

SEQ ID NO: 81684 - DNA, 26 bp, Homo sapiens
cccgccctgcccgcgccccccgcgcc

SEQ ID NO: 81685 - DNA, 26 bp, Homo sapiens
ccgccctgcccgcgccccccgcgccc

SEQ ID NO: 81686 - DNA, 26 bp, Homo sapiens
cgccctgcccgcgccccccgcgcccg

SEQ ID NO: 81687 - DNA, 26 bp, Homo sapiens
gccctgcccgcgccccccgcgcccgc

SEQ ID NO: 81688 - DNA, 26 bp, Homo sapiens
ccctgcccgcgccccccgcgcccgcc

SEQ ID NO: 81689 - DNA, 26 bp, Homo sapiens
cctgcccgcgccccccgcgcccgccc

SEQ ID NO: 81690 - DNA, 26 bp, Homo sapiens
ctgcccgcgccccccgcgcccgccct

SEQ ID NO: 81691 - DNA, 26 bp, Homo sapiens
tgcccgcgccccccgcgcccgccctc

SEQ ID NO: 81692 - DNA, 26 bp, Homo sapiens
gcccgcgccccccgcgcccgccctcc

SEQ ID NO: 81693 - DNA, 26 bp, Homo sapiens
cccgcgccccccgcgcccgccctccc

SEQ ID NO: 81694 - DNA, 26 bp, Homo sapiens
ccgcgccccccgcgcccgccctccct

SEQ ID NO: 81695 - DNA, 26 bp, Homo sapiens
cgcgccccccgcgcccgccctccctc

SEQ ID NO: 81696 - DNA, 26 bp, Homo sapiens
gcgccccccgcgcccgccctccctcc

SEQ ID NO: 81697 - DNA, 26 bp, Homo sapiens
cgccccccgcgcccgccctccctccc

SEQ ID NO: 81698 - DNA, 26 bp, Homo sapiens
gccccccgcgcccgccctccctcccc

SEQ ID NO: 81699 - DNA, 26 bp, Homo sapiens
ccccccgcgcccgccctccctccccc

SEQ ID NO: 81700 - DNA, 26 bp, Homo sapiens
cccccgcgcccgccctccctcccccc

SEQ ID NO: 81701 - DNA, 26 bp, Homo sapiens
ccccgcgcccgccctccctcccccct

SEQ ID NO: 81702 - DNA, 26 bp, Homo sapiens
cccgcgcccgccctccctcccccctg

SEQ ID NO: 81703 - DNA, 26 bp, Homo sapiens
ccgcgcccgccctccctcccccctgc

SEQ ID NO: 81704 - DNA, 26 bp, Homo sapiens
cgcgcccgccctccctcccccctgct

SEQ ID NO: 81705 - DNA, 26 bp, Homo sapiens
gcgcccgccctccctcccccctgctc

SEQ ID NO: 81706 - DNA, 26 bp, Homo sapiens
cgcccgccctccctcccccctgctca

SEQ ID NO: 81707 - DNA, 26 bp, Homo sapiens
gcccgccctccctcccccctgctcac

SEQ ID NO: 81708 - DNA, 26 bp, Homo sapiens
cccgccctccctcccccctgctcacg

SEQ ID NO: 81709 - DNA, 26 bp, Homo sapiens
ccgccctccctcccccctgctcacgc

SEQ ID NO: 81710 - DNA, 26 bp, Homo sapiens
cgccctccctcccccctgctcacgcc

SEQ ID NO: 81711 - DNA, 26 bp, Homo sapiens
gccctccctcccccctgctcacgcca

SEQ ID NO: 81712 - DNA, 26 bp, Homo sapiens
ccctccctcccccctgctcacgccaa

SEQ ID NO: 81713 - DNA, 26 bp, Homo sapiens
cctccctcccccctgctcacgccaat

SEQ ID NO: 81714 - DNA, 26 bp, Homo sapiens
ctccctcccccctgctcacgccaatg

SEQ ID NO: 81715 - DNA, 26 bp, Homo sapiens
tccctcccccctgctcacgccaatgt

SEQ ID NO: 81716 - DNA, 26 bp, Homo sapiens
ccctcccccctgctcacgccaatgtg

SEQ ID NO: 81717 - DNA, 26 bp, Homo sapiens
cctcccccctgctcacgccaatgtgc

SEQ ID NO: 81718 - DNA, 26 bp, Homo sapiens
ctcccccctgctcacgccaatgtgct

SEQ ID NO: 81719 - DNA, 26 bp, Homo sapiens
tcccccctgctcacgccaatgtgctc

SEQ ID NO: 81720 - DNA, 26 bp, Homo sapiens
cccccctgctcacgccaatgtgctcc

SEQ ID NO: 81721 - DNA, 26 bp, Homo sapiens
ccccctgctcacgccaatgtgctccc

SEQ ID NO: 81722 - DNA, 26 bp, Homo sapiens
cccctgctcacgccaatgtgctccct

SEQ ID NO: 81723 - DNA, 26 bp, Homo sapiens
ccctgctcacgccaatgtgctccctc

SEQ ID NO: 81724 - DNA, 26 bp, Homo sapiens
cctgctcacgccaatgtgctccctcg

SEQ ID NO: 81725 - DNA, 26 bp, Homo sapiens
ctgctcacgccaatgtgctccctcgc

SEQ ID NO: 81726 - DNA, 26 bp, Homo sapiens
tgctcacgccaatgtgctccctcgct

SEQ ID NO: 81727 - DNA, 26 bp, Homo sapiens
gctcacgccaatgtgctccctcgctc

SEQ ID NO: 81728 - DNA, 26 bp, Homo sapiens
ctcacgccaatgtgctccctcgctcg

SEQ ID NO: 81729 - DNA, 26 bp, Homo sapiens
tcacgccaatgtgctccctcgctcgc

SEQ ID NO: 81730 - DNA, 26 bp, Homo sapiens
cacgccaatgtgctccctcgctcgcc

SEQ ID NO: 81731 - DNA, 26 bp, Homo sapiens
acgccaatgtgctccctcgctcgccc

SEQ ID NO: 81732 - DNA, 26 bp, Homo sapiens
cgccaatgtgctccctcgctcgcccc

SEQ ID NO: 81733 - DNA, 26 bp, Homo sapiens
gccaatgtgctccctcgctcgccccg

SEQ ID NO: 81734 - DNA, 26 bp, Homo sapiens
ccaatgtgctccctcgctcgccccgg

SEQ ID NO: 81735 - DNA, 26 bp, Homo sapiens
caatgtgctccctcgctcgccccggc

SEQ ID NO: 81736 - DNA, 26 bp, Homo sapiens
aatgtgctccctcgctcgccccggcc

SEQ ID NO: 81737 - DNA, 26 bp, Homo sapiens
atgtgctccctcgctcgccccggccc

SEQ ID NO: 81738 - DNA, 26 bp, Homo sapiens
tgtgctccctcgctcgccccggcccc

SEQ ID NO: 81739 - DNA, 26 bp, Homo sapiens
gtgctccctcgctcgccccggcccct

SEQ ID NO: 81740 - DNA, 26 bp, Homo sapiens
tgctccctcgctcgccccggcccctc

SEQ ID NO: 81741 - DNA, 26 bp, Homo sapiens
gctccctcgctcgccccggcccctcc

SEQ ID NO: 81742 - DNA, 26 bp, Homo sapiens
ctccctcgctcgccccggcccctcct

SEQ ID NO: 81743 - DNA, 26 bp, Homo sapiens
tccctcgctcgccccggcccctcctt

SEQ ID NO: 81744 - DNA, 26 bp, Homo sapiens
ccctcgctcgccccggcccctccttg

SEQ ID NO: 81745 - DNA, 26 bp, Homo sapiens
cctcgctcgccccggcccctccttgc

SEQ ID NO: 81746 - DNA, 26 bp, Homo sapiens
ctcgctcgccccggcccctccttgct

SEQ ID NO: 81747 - DNA, 26 bp, Homo sapiens
tcgctcgccccggcccctccttgctc

SEQ ID NO: 81748 - DNA, 26 bp, Homo sapiens
cgctcgccccggcccctccttgctcg

SEQ ID NO: 81749 - DNA, 26 bp, Homo sapiens
gctcgccccggcccctccttgctcgc

SEQ ID NO: 81750 - DNA, 26 bp, Homo sapiens
ctcgccccggcccctccttgctcgct

SEQ ID NO: 81751 - DNA, 26 bp, Homo sapiens
tcgccccggcccctccttgctcgctc

SEQ ID NO: 81752 - DNA, 26 bp, Homo sapiens
cgccccggcccctccttgctcgctcg

SEQ ID NO: 81753 - DNA, 26 bp, Homo sapiens
gccccggcccctccttgctcgctcgc

SEQ ID NO: 81754 - DNA, 26 bp, Homo sapiens
ccccggcccctccttgctcgctcgcc

SEQ ID NO: 81755 - DNA, 26 bp, Homo sapiens
cccggcccctccttgctcgctcgcct

SEQ ID NO: 81756 - DNA, 26 bp, Homo sapiens
ccggcccctccttgctcgctcgcctc

SEQ ID NO: 81757 - DNA, 26 bp, Homo sapiens
cggcccctccttgctcgctcgcctcc

SEQ ID NO: 81758 - DNA, 26 bp, Homo sapiens
ggcccctccttgctcgctcgcctcct

SEQ ID NO: 81759 - DNA, 26 bp, Homo sapiens
gcccctccttgctcgctcgcctcctt

SEQ ID NO: 81760 - DNA, 26 bp, Homo sapiens
cccctccttgctcgctcgcctccttg

SEQ ID NO: 81761 - DNA, 26 bp, Homo sapiens
ccctccttgctcgctcgcctccttgc

SEQ ID NO: 81762 - DNA, 26 bp, Homo sapiens
cctccttgctcgctcgcctccttgcg

SEQ ID NO: 81763 - DNA, 26 bp, Homo sapiens
ctccttgctcgctcgcctccttgcgc

SEQ ID NO: 81764 - DNA, 26 bp, Homo sapiens
tccttgctcgctcgcctccttgcgcg

SEQ ID NO: 81765 - DNA, 26 bp, Homo sapiens
ccttgctcgctcgcctccttgcgcgc

SEQ ID NO: 81766 - DNA, 26 bp, Homo sapiens
cttgctcgctcgcctccttgcgcgcc

SEQ ID NO: 81767 - DNA, 26 bp, Homo sapiens
ttgctcgctcgcctccttgcgcgccg

SEQ ID NO: 81768 - DNA, 26 bp, Homo sapiens
tgctcgctcgcctccttgcgcgccga

SEQ ID NO: 81769 - DNA, 26 bp, Homo sapiens
gctcgctcgcctccttgcgcgccgag

SEQ ID NO: 81770 - DNA, 26 bp, Homo sapiens
ctcgctcgcctccttgcgcgccgagc

SEQ ID NO: 81771 - DNA, 26 bp, Homo sapiens
tcgctcgcctccttgcgcgccgagcc

SEQ ID NO: 81772 - DNA, 26 bp, Homo sapiens
cgctcgcctccttgcgcgccgagccg

SEQ ID NO: 81773 - DNA, 26 bp, Homo sapiens
gctcgcctccttgcgcgccgagccgg

SEQ ID NO: 81774 - DNA, 26 bp, Homo sapiens
ctcgcctccttgcgcgccgagccggc

SEQ ID NO: 81775 - DNA, 26 bp, Homo sapiens
tcgcctccttgcgcgccgagccggcg

SEQ ID NO: 81776 - DNA, 26 bp, Homo sapiens
cgcctccttgcgcgccgagccggcgg

SEQ ID NO: 81777 - DNA, 26 bp, Homo sapiens
gcctccttgcgcgccgagccggcggc

SEQ ID NO: 81778 - DNA, 26 bp, Homo sapiens
cctccttgcgcgccgagccggcggct

SEQ ID NO: 81779 - DNA, 26 bp, Homo sapiens
ctccttgcgcgccgagccggcggctt

SEQ ID NO: 81780 - DNA, 26 bp, Homo sapiens
tccttgcgcgccgagccggcggcttc

SEQ ID NO: 81781 - DNA, 26 bp, Homo sapiens
ccttgcgcgccgagccggcggcttca

SEQ ID NO: 81782 - DNA, 26 bp, Homo sapiens
cttgcgcgccgagccggcggcttcag

SEQ ID NO: 81783 - DNA, 26 bp, Homo sapiens
ttgcgcgccgagccggcggcttcagg

SEQ ID NO: 81784 - DNA, 26 bp, Homo sapiens
tgcgcgccgagccggcggcttcaggc

SEQ ID NO: 81785 - DNA, 26 bp, Homo sapiens
gcgcgccgagccggcggcttcaggct

SEQ ID NO: 81786 - DNA, 26 bp, Homo sapiens
cgcgccgagccggcggcttcaggctc

SEQ ID NO: 81787 - DNA, 26 bp, Homo sapiens
gcgccgagccggcggcttcaggctcg

SEQ ID NO: 81788 - DNA, 26 bp, Homo sapiens
cgccgagccggcggcttcaggctcgg

SEQ ID NO: 81789 - DNA, 26 bp, Homo sapiens
gccgagccggcggcttcaggctcggg

SEQ ID NO: 81790 - DNA, 26 bp, Homo sapiens
ccgagccggcggcttcaggctcggga

SEQ ID NO: 81791 - DNA, 26 bp, Homo sapiens
cgagccggcggcttcaggctcgggaa

SEQ ID NO: 81792 - DNA, 26 bp, Homo sapiens
gagccggcggcttcaggctcgggaag

SEQ ID NO: 81793 - DNA, 26 bp, Homo sapiens
agccggcggcttcaggctcgggaaga

SEQ ID NO: 81794 - DNA, 26 bp, Homo sapiens
gccggcggcttcaggctcgggaagat

SEQ ID NO: 81795 - DNA, 26 bp, Homo sapiens
ccggcggcttcaggctcgggaagatc

SEQ ID NO: 81796 - DNA, 26 bp, Homo sapiens
cggcggcttcaggctcgggaagatcc

SEQ ID NO: 81797 - DNA, 26 bp, Homo sapiens
ggcggcttcaggctcgggaagatcct

SEQ ID NO: 81798 - DNA, 26 bp, Homo sapiens
gcggcttcaggctcgggaagatcctc

SEQ ID NO: 81799 - DNA, 26 bp, Homo sapiens
cggcttcaggctcgggaagatcctcc

SEQ ID NO: 81800 - DNA, 26 bp, Homo sapiens
ggcttcaggctcgggaagatcctccg

SEQ ID NO: 81801 - DNA, 26 bp, Homo sapiens
gcttcaggctcgggaagatcctccgc

SEQ ID NO: 81802 - DNA, 26 bp, Homo sapiens
cttcaggctcgggaagatcctccgcg

SEQ ID NO: 81803 - DNA, 26 bp, Homo sapiens
ttcaggctcgggaagatcctccgcga

SEQ ID NO: 81804 - DNA, 26 bp, Homo sapiens
tcaggctcgggaagatcctccgcgag

SEQ ID NO: 81805 - DNA, 26 bp, Homo sapiens
caggctcgggaagatcctccgcgagc

SEQ ID NO: 81806 - DNA, 26 bp, Homo sapiens
aggctcgggaagatcctccgcgagct

SEQ ID NO: 81807 - DNA, 26 bp, Homo sapiens
ggctcgggaagatcctccgcgagctg

SEQ ID NO: 81808 - DNA, 26 bp, Homo sapiens
gctcgggaagatcctccgcgagctgc

SEQ ID NO: 81809 - DNA, 26 bp, Homo sapiens
ctcgggaagatcctccgcgagctgcg

SEQ ID NO: 81810 - DNA, 26 bp, Homo sapiens
tcgggaagatcctccgcgagctgcgg

SEQ ID NO: 81811 - DNA, 26 bp, Homo sapiens
cgggaagatcctccgcgagctgcggt

SEQ ID NO: 81812 - DNA, 26 bp, Homo sapiens
gggaagatcctccgcgagctgcggtg

SEQ ID NO: 81813 - DNA, 26 bp, Homo sapiens
ggaagatcctccgcgagctgcggtgg

SEQ ID NO: 81814 - DNA, 26 bp, Homo sapiens
gaagatcctccgcgagctgcggtggc

SEQ ID NO: 81815 - DNA, 26 bp, Homo sapiens
aagatcctccgcgagctgcggtggcg

SEQ ID NO: 81816 - DNA, 26 bp, Homo sapiens
agatcctccgcgagctgcggtggcgg

SEQ ID NO: 81817 - DNA, 26 bp, Homo sapiens
gatcctccgcgagctgcggtggcggc

SEQ ID NO: 81818 - DNA, 26 bp, Homo sapiens
atcctccgcgagctgcggtggcggcg

SEQ ID NO: 81819 - DNA, 26 bp, Homo sapiens
tcctccgcgagctgcggtggcggcgg

SEQ ID NO: 81820 - DNA, 26 bp, Homo sapiens
cctccgcgagctgcggtggcggcggt

SEQ ID NO: 81821 - DNA, 26 bp, Homo sapiens
ctccgcgagctgcggtggcggcggtg

SEQ ID NO: 81822 - DNA, 26 bp, Homo sapiens
tccgcgagctgcggtggcggcggtgg

SEQ ID NO: 81823 - DNA, 26 bp, Homo sapiens
ccgcgagctgcggtggcggcggtggt

SEQ ID NO: 81824 - DNA, 26 bp, Homo sapiens
cgcgagctgcggtggcggcggtggtg

SEQ ID NO: 81825 - DNA, 26 bp, Homo sapiens
gcgagctgcggtggcggcggtggtgg

SEQ ID NO: 81826 - DNA, 26 bp, Homo sapiens
cgagctgcggtggcggcggtggtggc

SEQ ID NO: 81827 - DNA, 26 bp, Homo sapiens
gagctgcggtggcggcggtggtggct

SEQ ID NO: 81828 - DNA, 26 bp, Homo sapiens
agctgcggtggcggcggtggtggctg

SEQ ID NO: 81829 - DNA, 26 bp, Homo sapiens
gctgcggtggcggcggtggtggctgc

SEQ ID NO: 81830 - DNA, 26 bp, Homo sapiens
ctgcggtggcggcggtggtggctgcg

SEQ ID NO: 81831 - DNA, 26 bp, Homo sapiens
tgcggtggcggcggtggtggctgcgg

SEQ ID NO: 81832 - DNA, 26 bp, Homo sapiens
gcggtggcggcggtggtggctgcggc

SEQ ID NO: 81833 - DNA, 26 bp, Homo sapiens
cggtggcggcggtggtggctgcggcg

SEQ ID NO: 81834 - DNA, 26 bp, Homo sapiens
ggtggcggcggtggtggctgcggcgg

SEQ ID NO: 81835 - DNA, 26 bp, Homo sapiens
gtggcggcggtggtggctgcggcggc

SEQ ID NO: 81836 - DNA, 26 bp, Homo sapiens
tggcggcggtggtggctgcggcggcg

SEQ ID NO: 81837 - DNA, 26 bp, Homo sapiens
ggcggcggtggtggctgcggcggcga

SEQ ID NO: 81838 - DNA, 26 bp, Homo sapiens
gcggcggtggtggctgcggcggcgaa

SEQ ID NO: 81839 - DNA, 26 bp, Homo sapiens
cggcggtggtggctgcggcggcgaag

SEQ ID NO: 81840 - DNA, 26 bp, Homo sapiens
ggcggtggtggctgcggcggcgaagc

SEQ ID NO: 81841 - DNA, 26 bp, Homo sapiens
gcggtggtggctgcggcggcgaagct

SEQ ID NO: 81842 - DNA, 26 bp, Homo sapiens
cggtggtggctgcggcggcgaagctg

SEQ ID NO: 81843 - DNA, 26 bp, Homo sapiens
ggtggtggctgcggcggcgaagctgg

SEQ ID NO: 81844 - DNA, 26 bp, Homo sapiens
gtggtggctgcggcggcgaagctgga

SEQ ID NO: 81845 - DNA, 26 bp, Homo sapiens
tggtggctgcggcggcgaagctggag

SEQ ID NO: 81846 - DNA, 26 bp, Homo sapiens
ggtggctgcggcggcgaagctggagg

SEQ ID NO: 81847 - DNA, 26 bp, Homo sapiens
gtggctgcggcggcgaagctggagga

SEQ ID NO: 81848 - DNA, 26 bp, Homo sapiens
tggctgcggcggcgaagctggaggag

SEQ ID NO: 81849 - DNA, 26 bp, Homo sapiens
ggctgcggcggcgaagctggaggagc

SEQ ID NO: 81850 - DNA, 26 bp, Homo sapiens
gctgcggcggcgaagctggaggagcc

SEQ ID NO: 81851 - DNA, 26 bp, Homo sapiens
ctgcggcggcgaagctggaggagccc

SEQ ID NO: 81852 - DNA, 26 bp, Homo sapiens
tgcggcggcgaagctggaggagcccg

SEQ ID NO: 81853 - DNA, 26 bp, Homo sapiens
gcggcggcgaagctggaggagcccgg

SEQ ID NO: 81854 - DNA, 26 bp, Homo sapiens
cggcggcgaagctggaggagcccggc

SEQ ID NO: 81855 - DNA, 26 bp, Homo sapiens
ggcggcgaagctggaggagcccggcc

SEQ ID NO: 81856 - DNA, 26 bp, Homo sapiens
gcggcgaagctggaggagcccggccc

SEQ ID NO: 81857 - DNA, 26 bp, Homo sapiens
cggcgaagctggaggagcccggcccg

SEQ ID NO: 81858 - DNA, 26 bp, Homo sapiens
ggcgaagctggaggagcccggcccgg

SEQ ID NO: 81859 - DNA, 26 bp, Homo sapiens
gcgaagctggaggagcccggcccggt

SEQ ID NO: 81860 - DNA, 26 bp, Homo sapiens
cgaagctggaggagcccggcccggtg

SEQ ID NO: 81861 - DNA, 26 bp, Homo sapiens
gaagctggaggagcccggcccggtgc

SEQ ID NO: 81862 - DNA, 26 bp, Homo sapiens
aagctggaggagcccggcccggtgcg

SEQ ID NO: 81863 - DNA, 26 bp, Homo sapiens
agctggaggagcccggcccggtgcgc

SEQ ID NO: 81864 - DNA, 26 bp, Homo sapiens
gctggaggagcccggcccggtgcgcg

SEQ ID NO: 81865 - DNA, 26 bp, Homo sapiens
ctggaggagcccggcccggtgcgcgg

SEQ ID NO: 81866 - DNA, 26 bp, Homo sapiens
tggaggagcccggcccggtgcgcggc

SEQ ID NO: 81867 - DNA, 26 bp, Homo sapiens
ggaggagcccggcccggtgcgcggcg

SEQ ID NO: 81868 - DNA, 26 bp, Homo sapiens
gaggagcccggcccggtgcgcggcgt

SEQ ID NO: 81869 - DNA, 26 bp, Homo sapiens
aggagcccggcccggtgcgcggcgtc

SEQ ID NO: 81870 - DNA, 26 bp, Homo sapiens
ggagcccggcccggtgcgcggcgtcc

SEQ ID NO: 81871 - DNA, 26 bp, Homo sapiens
gagcccggcccggtgcgcggcgtccc

SEQ ID NO: 81872 - DNA, 26 bp, Homo sapiens
agcccggcccggtgcgcggcgtcccc

SEQ ID NO: 81873 - DNA, 26 bp, Homo sapiens
gcccggcccggtgcgcggcgtccccc

SEQ ID NO: 81874 - DNA, 26 bp, Homo sapiens
cccggcccggtgcgcggcgtcccccg

SEQ ID NO: 81875 - DNA, 26 bp, Homo sapiens
ccggcccggtgcgcggcgtcccccgc

SEQ ID NO: 81876 - DNA, 26 bp, Homo sapiens
cggcccggtgcgcggcgtcccccgct

SEQ ID NO: 81877 - DNA, 26 bp, Homo sapiens
ggcccggtgcgcggcgtcccccgctc

SEQ ID NO: 81878 - DNA, 26 bp, Homo sapiens
gcccggtgcgcggcgtcccccgctcg

SEQ ID NO: 81879 - DNA, 26 bp, Homo sapiens
cccggtgcgcggcgtcccccgctcgc

SEQ ID NO: 81880 - DNA, 26 bp, Homo sapiens
ccggtgcgcggcgtcccccgctcgcc

SEQ ID NO: 81881 - DNA, 26 bp, Homo sapiens
cggtgcgcggcgtcccccgctcgccg

SEQ ID NO: 81882 - DNA, 26 bp, Homo sapiens
ggtgcgcggcgtcccccgctcgccgc

SEQ ID NO: 81883 - DNA, 26 bp, Homo sapiens
gtgcgcggcgtcccccgctcgccgct

SEQ ID NO: 81884 - DNA, 26 bp, Homo sapiens
tgcgcggcgtcccccgctcgccgctc

SEQ ID NO: 81885 - DNA, 26 bp, Homo sapiens
gcgcggcgtcccccgctcgccgctcc

SEQ ID NO: 81886 - DNA, 26 bp, Homo sapiens
cgcggcgtcccccgctcgccgctccg

SEQ ID NO: 81887 - DNA, 26 bp, Homo sapiens
gcggcgtcccccgctcgccgctccgc

SEQ ID NO: 81888 - DNA, 26 bp, Homo sapiens
cggcgtcccccgctcgccgctccgct

SEQ ID NO: 81889 - DNA, 26 bp, Homo sapiens
ggcgtcccccgctcgccgctccgctg

SEQ ID NO: 81890 - DNA, 26 bp, Homo sapiens
gcgtcccccgctcgccgctccgctgc

SEQ ID NO: 81891 - DNA, 26 bp, Homo sapiens
cgtcccccgctcgccgctccgctgcg

SEQ ID NO: 81892 - DNA, 26 bp, Homo sapiens
gtcccccgctcgccgctccgctgcgc

SEQ ID NO: 81893 - DNA, 26 bp, Homo sapiens
tcccccgctcgccgctccgctgcgcg

SEQ ID NO: 81894 - DNA, 26 bp, Homo sapiens
cccccgctcgccgctccgctgcgcgc

SEQ ID NO: 81895 - DNA, 26 bp, Homo sapiens
ccccgctcgccgctccgctgcgcgct

SEQ ID NO: 81896 - DNA, 26 bp, Homo sapiens
cccgctcgccgctccgctgcgcgctt

SEQ ID NO: 81897 - DNA, 26 bp, Homo sapiens
ccgctcgccgctccgctgcgcgcttt

SEQ ID NO: 81898 - DNA, 26 bp, Homo sapiens
cgctcgccgctccgctgcgcgctttg

SEQ ID NO: 81899 - DNA, 26 bp, Homo sapiens
gctcgccgctccgctgcgcgctttgc

SEQ ID NO: 81900 - DNA, 26 bp, Homo sapiens
ctcgccgctccgctgcgcgctttgca

SEQ ID NO: 81901 - DNA, 26 bp, Homo sapiens
tcgccgctccgctgcgcgctttgcat

SEQ ID NO: 81902 - DNA, 26 bp, Homo sapiens
cgccgctccgctgcgcgctttgcata

SEQ ID NO: 81903 - DNA, 26 bp, Homo sapiens
gccgctccgctgcgcgctttgcataa

SEQ ID NO: 81904 - DNA, 26 bp, Homo sapiens
ccgctccgctgcgcgctttgcataag

SEQ ID NO: 81905 - DNA, 26 bp, Homo sapiens
cgctccgctgcgcgctttgcataagg

SEQ ID NO: 81906 - DNA, 26 bp, Homo sapiens
gctccgctgcgcgctttgcataagga

SEQ ID NO: 81907 - DNA, 26 bp, Homo sapiens
ctccgctgcgcgctttgcataaggaa

SEQ ID NO: 81908 - DNA, 26 bp, Homo sapiens
tccgctgcgcgctttgcataaggaag

SEQ ID NO: 81909 - DNA, 26 bp, Homo sapiens
ccgctgcgcgctttgcataaggaagg

SEQ ID NO: 81910 - DNA, 26 bp, Homo sapiens
cgctgcgcgctttgcataaggaaggg

SEQ ID NO: 81911 - DNA, 26 bp, Homo sapiens
gctgcgcgctttgcataaggaagggc

SEQ ID NO: 81912 - DNA, 26 bp, Homo sapiens
ctgcgcgctttgcataaggaagggct

SEQ ID NO: 81913 - DNA, 26 bp, Homo sapiens
tgcgcgctttgcataaggaagggctc

SEQ ID NO: 81914 - DNA, 26 bp, Homo sapiens
gcgcgctttgcataaggaagggctcg

SEQ ID NO: 81915 - DNA, 26 bp, Homo sapiens
cgcgctttgcataaggaagggctcgc

SEQ ID NO: 81916 - DNA, 26 bp, Homo sapiens
gcgctttgcataaggaagggctcgcc

SEQ ID NO: 81917 - DNA, 26 bp, Homo sapiens
cgctttgcataaggaagggctcgcct

SEQ ID NO: 81918 - DNA, 26 bp, Homo sapiens
gctttgcataaggaagggctcgcctc

SEQ ID NO: 81919 - DNA, 26 bp, Homo sapiens
ctttgcataaggaagggctcgcctcg

SEQ ID NO: 81920 - DNA, 26 bp, Homo sapiens
tttgcataaggaagggctcgcctcgc

SEQ ID NO: 81921 - DNA, 26 bp, Homo sapiens
ttgcataaggaagggctcgcctcgcc

SEQ ID NO: 81922 - DNA, 26 bp, Homo sapiens
tgcataaggaagggctcgcctcgccg

SEQ ID NO: 81923 - DNA, 26 bp, Homo sapiens
gcataaggaagggctcgcctcgccgg

SEQ ID NO: 81924 - DNA, 26 bp, Homo sapiens
cataaggaagggctcgcctcgccggc

SEQ ID NO: 81925 - DNA, 26 bp, Homo sapiens
ataaggaagggctcgcctcgccggcc

SEQ ID NO: 81926 - DNA, 26 bp, Homo sapiens
taaggaagggctcgcctcgccggccc

SEQ ID NO: 81927 - DNA, 26 bp, Homo sapiens
aaggaagggctcgcctcgccggcccg

SEQ ID NO: 81928 - DNA, 26 bp, Homo sapiens
aggaagggctcgcctcgccggcccgg

SEQ ID NO: 81929 - DNA, 26 bp, Homo sapiens
ggaagggctcgcctcgccggcccggg

SEQ ID NO: 81930 - DNA, 26 bp, Homo sapiens
gaagggctcgcctcgccggcccgggc

SEQ ID NO: 81931 - DNA, 26 bp, Homo sapiens
aagggctcgcctcgccggcccgggct

SEQ ID NO: 81932 - DNA, 26 bp, Homo sapiens
agggctcgcctcgccggcccgggctg

SEQ ID NO: 81933 - DNA, 26 bp, Homo sapiens
gggctcgcctcgccggcccgggctgc

SEQ ID NO: 81934 - DNA, 26 bp, Homo sapiens
ggctcgcctcgccggcccgggctgca

SEQ ID NO: 81935 - DNA, 26 bp, Homo sapiens
gctcgcctcgccggcccgggctgcag

SEQ ID NO: 81936 - DNA, 26 bp, Homo sapiens
ctcgcctcgccggcccgggctgcagg

SEQ ID NO: 81937 - DNA, 26 bp, Homo sapiens
tcgcctcgccggcccgggctgcaggc

SEQ ID NO: 81938 - DNA, 26 bp, Homo sapiens
cgcctcgccggcccgggctgcaggca

SEQ ID NO: 81939 - DNA, 26 bp, Homo sapiens
gcctcgccggcccgggctgcaggcag

SEQ ID NO: 81940 - DNA, 26 bp, Homo sapiens
cctcgccggcccgggctgcaggcagg

SEQ ID NO: 81941 - DNA, 26 bp, Homo sapiens
ctcgccggcccgggctgcaggcaggg

SEQ ID NO: 81942 - DNA, 26 bp, Homo sapiens
tcgccggcccgggctgcaggcagggc

SEQ ID NO: 81943 - DNA, 26 bp, Homo sapiens
cgccggcccgggctgcaggcagggcg

SEQ ID NO: 81944 - DNA, 26 bp, Homo sapiens
gccggcccgggctgcaggcagggcgc

SEQ ID NO: 81945 - DNA, 26 bp, Homo sapiens
ccggcccgggctgcaggcagggcgcg

SEQ ID NO: 81946 - DNA, 26 bp, Homo sapiens
cggcccgggctgcaggcagggcgcgc

SEQ ID NO: 81947 - DNA, 26 bp, Homo sapiens
ggcccgggctgcaggcagggcgcgcg

SEQ ID NO: 81948 - DNA, 26 bp, Homo sapiens
gcccgggctgcaggcagggcgcgcgc

SEQ ID NO: 81949 - DNA, 26 bp, Homo sapiens
cccgggctgcaggcagggcgcgcgcg

SEQ ID NO: 81950 - DNA, 26 bp, Homo sapiens
ccgggctgcaggcagggcgcgcgcgg

SEQ ID NO: 81951 - DNA, 26 bp, Homo sapiens
cgggctgcaggcagggcgcgcgcggc

SEQ ID NO: 81952 - DNA, 26 bp, Homo sapiens
gggctgcaggcagggcgcgcgcggcg

SEQ ID NO: 81953 - DNA, 26 bp, Homo sapiens
ggctgcaggcagggcgcgcgcggcgt

SEQ ID NO: 81954 - DNA, 26 bp, Homo sapiens
gctgcaggcagggcgcgcgcggcgtc

SEQ ID NO: 81955 - DNA, 26 bp, Homo sapiens
ctgcaggcagggcgcgcgcggcgtcc

SEQ ID NO: 81956 - DNA, 26 bp, Homo sapiens
tgcaggcagggcgcgcgcggcgtccg

SEQ ID NO: 81957 - DNA, 26 bp, Homo sapiens
gcaggcagggcgcgcgcggcgtccgc

SEQ ID NO: 81958 - DNA, 26 bp, Homo sapiens
caggcagggcgcgcgcggcgtccgct

SEQ ID NO: 81959 - DNA, 26 bp, Homo sapiens
aggcagggcgcgcgcggcgtccgctc

SEQ ID NO: 81960 - DNA, 26 bp, Homo sapiens
ggcagggcgcgcgcggcgtccgctcg

SEQ ID NO: 81961 - DNA, 26 bp, Homo sapiens
gcagggcgcgcgcggcgtccgctcgg

SEQ ID NO: 81962 - DNA, 26 bp, Homo sapiens
cagggcgcgcgcggcgtccgctcggg

SEQ ID NO: 81963 - DNA, 26 bp, Homo sapiens
agggcgcgcgcggcgtccgctcgggg

SEQ ID NO: 81964 - DNA, 26 bp, Homo sapiens
gggcgcgcgcggcgtccgctcggggc

SEQ ID NO: 81965 - DNA, 26 bp, Homo sapiens
ggcgcgcgcggcgtccgctcggggct

SEQ ID NO: 81966 - DNA, 26 bp, Homo sapiens
gcgcgcgcggcgtccgctcggggctg

SEQ ID NO: 81967 - DNA, 26 bp, Homo sapiens
cgcgcgcggcgtccgctcggggctgg

SEQ ID NO: 81968 - DNA, 26 bp, Homo sapiens
gcgcgcggcgtccgctcggggctgga

SEQ ID NO: 81969 - DNA, 26 bp, Homo sapiens
cgcgcggcgtccgctcggggctggag

SEQ ID NO: 81970 - DNA, 26 bp, Homo sapiens
gcgcggcgtccgctcggggctggagg

SEQ ID NO: 81971 - DNA, 26 bp, Homo sapiens
cgcggcgtccgctcggggctggaggc

SEQ ID NO: 81972 - DNA, 26 bp, Homo sapiens
gcggcgtccgctcggggctggaggcg

SEQ ID NO: 81973 - DNA, 26 bp, Homo sapiens
cggcgtccgctcggggctggaggcgc

SEQ ID NO: 81974 - DNA, 26 bp, Homo sapiens
ggcgtccgctcggggctggaggcgcg

SEQ ID NO: 81975 - DNA, 26 bp, Homo sapiens
gcgtccgctcggggctggaggcgcgg

SEQ ID NO: 81976 - DNA, 26 bp, Homo sapiens
cgtccgctcggggctggaggcgcggc

SEQ ID NO: 81977 - DNA, 26 bp, Homo sapiens
gtccgctcggggctggaggcgcggcg

SEQ ID NO: 81978 - DNA, 26 bp, Homo sapiens
tccgctcggggctggaggcgcggcgg

SEQ ID NO: 81979 - DNA, 26 bp, Homo sapiens
ccgctcggggctggaggcgcggcggg

SEQ ID NO: 81980 - DNA, 26 bp, Homo sapiens
cgctcggggctggaggcgcggcgggc

SEQ ID NO: 81981 - DNA, 26 bp, Homo sapiens
gctcggggctggaggcgcggcgggcg

SEQ ID NO: 81982 - DNA, 26 bp, Homo sapiens
ctcggggctggaggcgcggcgggcgt

SEQ ID NO: 81983 - DNA, 26 bp, Homo sapiens
tcggggctggaggcgcggcgggcgtc

SEQ ID NO: 81984 - DNA, 26 bp, Homo sapiens
cggggctggaggcgcggcgggcgtct

SEQ ID NO: 81985 - DNA, 26 bp, Homo sapiens
ggggctggaggcgcggcgggcgtctg

SEQ ID NO: 81986 - DNA, 26 bp, Homo sapiens
gggctggaggcgcggcgggcgtctgt

SEQ ID NO: 81987 - DNA, 26 bp, Homo sapiens
ggctggaggcgcggcgggcgtctgtc

SEQ ID NO: 81988 - DNA, 26 bp, Homo sapiens
gctggaggcgcggcgggcgtctgtcc

SEQ ID NO: 81989 - DNA, 26 bp, Homo sapiens
ctggaggcgcggcgggcgtctgtccg

SEQ ID NO: 81990 - DNA, 26 bp, Homo sapiens
tggaggcgcggcgggcgtctgtccgg

SEQ ID NO: 81991 - DNA, 26 bp, Homo sapiens
ggaggcgcggcgggcgtctgtccggg

SEQ ID NO: 81992 - DNA, 26 bp, Homo sapiens
gaggcgcggcgggcgtctgtccgggc

SEQ ID NO: 81993 - DNA, 26 bp, Homo sapiens
aggcgcggcgggcgtctgtccgggcg

SEQ ID NO: 81994 - DNA, 26 bp, Homo sapiens
ggcgcggcgggcgtctgtccgggcgg

SEQ ID NO: 81995 - DNA, 26 bp, Homo sapiens
gcgcggcgggcgtctgtccgggcggc

SEQ ID NO: 81996 - DNA, 26 bp, Homo sapiens
cgcggcgggcgtctgtccgggcggcg

SEQ ID NO: 81997 - DNA, 26 bp, Homo sapiens
gcggcgggcgtctgtccgggcggcgc

SEQ ID NO: 81998 - DNA, 26 bp, Homo sapiens
cggcgggcgtctgtccgggcggcgcg

SEQ ID NO: 81999 - DNA, 26 bp, Homo sapiens
ggcgggcgtctgtccgggcggcgcgg

SEQ ID NO: 82000 - DNA, 26 bp, Homo sapiens
gcgggcgtctgtccgggcggcgcggg

SEQ ID NO: 82001 - DNA, 26 bp, Homo sapiens
cgggcgtctgtccgggcggcgcgggc

SEQ ID NO: 82002 - DNA, 26 bp, Homo sapiens
gggcgtctgtccgggcggcgcgggcc

SEQ ID NO: 82003 - DNA, 26 bp, Homo sapiens
ggcgtctgtccgggcggcgcgggcct

SEQ ID NO: 82004 - DNA, 26 bp, Homo sapiens
gcgtctgtccgggcggcgcgggcctt

SEQ ID NO: 82005 - DNA, 26 bp, Homo sapiens
cgtctgtccgggcggcgcgggccttg

SEQ ID NO: 82006 - DNA, 26 bp, Homo sapiens
gtctgtccgggcggcgcgggccttgg

SEQ ID NO: 82007 - DNA, 26 bp, Homo sapiens
tctgtccgggcggcgcgggccttggc

SEQ ID NO: 82008 - DNA, 26 bp, Homo sapiens
ctgtccgggcggcgcgggccttggca

SEQ ID NO: 82009 - DNA, 26 bp, Homo sapiens
tgtccgggcggcgcgggccttggcac

SEQ ID NO: 82010 - DNA, 26 bp, Homo sapiens
gtccgggcggcgcgggccttggcacg

SEQ ID NO: 82011 - DNA, 26 bp, Homo sapiens
tccgggcggcgcgggccttggcacgg

SEQ ID NO: 82012 - DNA, 26 bp, Homo sapiens
ccgggcggcgcgggccttggcacggg

SEQ ID NO: 82013 - DNA, 26 bp, Homo sapiens
cgggcggcgcgggccttggcacgggg

SEQ ID NO: 82014 - DNA, 26 bp, Homo sapiens
gggcggcgcgggccttggcacggggg

SEQ ID NO: 82015 - DNA, 26 bp, Homo sapiens
ggcggcgcgggccttggcacggggga

SEQ ID NO: 82016 - DNA, 26 bp, Homo sapiens
gcggcgcgggccttggcacgggggag

SEQ ID NO: 82017 - DNA, 26 bp, Homo sapiens
cggcgcgggccttggcacgggggagt

SEQ ID NO: 82018 - DNA, 26 bp, Homo sapiens
ggcgcgggccttggcacgggggagtt

SEQ ID NO: 82019 - DNA, 26 bp, Homo sapiens
gcgcgggccttggcacgggggagtta

SEQ ID NO: 82020 - DNA, 26 bp, Homo sapiens
cgcgggccttggcacgggggagttaa

SEQ ID NO: 82021 - DNA, 26 bp, Homo sapiens
gcgggccttggcacgggggagttaac

SEQ ID NO: 82022 - DNA, 26 bp, Homo sapiens
cgggccttggcacgggggagttaaca

SEQ ID NO: 82023 - DNA, 26 bp, Homo sapiens
gggccttggcacgggggagttaacac

SEQ ID NO: 82024 - DNA, 26 bp, Homo sapiens
ggccttggcacgggggagttaacact

SEQ ID NO: 82025 - DNA, 26 bp, Homo sapiens
gccttggcacgggggagttaacactt

SEQ ID NO: 82026 - DNA, 26 bp, Homo sapiens
ccttggcacgggggagttaacacttc

SEQ ID NO: 82027 - DNA, 26 bp, Homo sapiens
cttggcacgggggagttaacacttca

SEQ ID NO: 82028 - DNA, 26 bp, Homo sapiens
ttggcacgggggagttaacacttcat

SEQ ID NO: 82029 - DNA, 26 bp, Homo sapiens
tggcacgggggagttaacacttcatg

SEQ ID NO: 82030 - DNA, 26 bp, Homo sapiens
ggcacgggggagttaacacttcatgc

SEQ ID NO: 82031 - DNA, 26 bp, Homo sapiens
gcacgggggagttaacacttcatgct

SEQ ID NO: 82032 - DNA, 26 bp, Homo sapiens
cacgggggagttaacacttcatgctt

SEQ ID NO: 82033 - DNA, 26 bp, Homo sapiens
acgggggagttaacacttcatgcttc

SEQ ID NO: 82034 - DNA, 26 bp, Homo sapiens
cgggggagttaacacttcatgcttct

SEQ ID NO: 82035 - DNA, 26 bp, Homo sapiens
gggggagttaacacttcatgcttctc

SEQ ID NO: 82036 - DNA, 26 bp, Homo sapiens
ggggagttaacacttcatgcttctcg

SEQ ID NO: 82037 - DNA, 26 bp, Homo sapiens
gggagttaacacttcatgcttctcgc

SEQ ID NO: 82038 - DNA, 26 bp, Homo sapiens
ggagttaacacttcatgcttctcgcc

SEQ ID NO: 82039 - DNA, 26 bp, Homo sapiens
gagttaacacttcatgcttctcgcct

SEQ ID NO: 82040 - DNA, 26 bp, Homo sapiens
agttaacacttcatgcttctcgcctc

SEQ ID NO: 82041 - DNA, 26 bp, Homo sapiens
gttaacacttcatgcttctcgcctcc

SEQ ID NO: 82042 - DNA, 26 bp, Homo sapiens
ttaacacttcatgcttctcgcctcct

SEQ ID NO: 82043 - DNA, 26 bp, Homo sapiens
taacacttcatgcttctcgcctcctc

SEQ ID NO: 82044 - DNA, 26 bp, Homo sapiens
aacacttcatgcttctcgcctcctct

SEQ ID NO: 82045 - DNA, 26 bp, Homo sapiens
acacttcatgcttctcgcctcctctt

SEQ ID NO: 82046 - DNA, 26 bp, Homo sapiens
cacttcatgcttctcgcctcctcttc

SEQ ID NO: 82047 - DNA, 26 bp, Homo sapiens
acttcatgcttctcgcctcctcttct

SEQ ID NO: 82048 - DNA, 26 bp, Homo sapiens
cttcatgcttctcgcctcctcttctg

SEQ ID NO: 82049 - DNA, 26 bp, Homo sapiens
ttcatgcttctcgcctcctcttctgc

SEQ ID NO: 82050 - DNA, 26 bp, Homo sapiens
tcatgcttctcgcctcctcttctgct

SEQ ID NO: 82051 - DNA, 26 bp, Homo sapiens
catgcttctcgcctcctcttctgctt

SEQ ID NO: 82052 - DNA, 26 bp, Homo sapiens
atgcttctcgcctcctcttctgcttg

SEQ ID NO: 82053 - DNA, 26 bp, Homo sapiens
tgcttctcgcctcctcttctgcttgg

SEQ ID NO: 82054 - DNA, 26 bp, Homo sapiens
gcttctcgcctcctcttctgcttggc

SEQ ID NO: 82055 - DNA, 26 bp, Homo sapiens
cttctcgcctcctcttctgcttggct

SEQ ID NO: 82056 - DNA, 26 bp, Homo sapiens
ttctcgcctcctcttctgcttggctc

SEQ ID NO: 82057 - DNA, 26 bp, Homo sapiens
tctcgcctcctcttctgcttggctct

SEQ ID NO: 82058 - DNA, 26 bp, Homo sapiens
ctcgcctcctcttctgcttggctctc

SEQ ID NO: 82059 - DNA, 26 bp, Homo sapiens
tcgcctcctcttctgcttggctctct

SEQ ID NO: 82060 - DNA, 26 bp, Homo sapiens
cgcctcctcttctgcttggctctctt

SEQ ID NO: 82061 - DNA, 26 bp, Homo sapiens
gcctcctcttctgcttggctctcttt

SEQ ID NO: 82062 - DNA, 26 bp, Homo sapiens
cctcctcttctgcttggctctcttta

SEQ ID NO: 82063 - DNA, 26 bp, Homo sapiens
ctcctcttctgcttggctctctttat

SEQ ID NO: 82064 - DNA, 26 bp, Homo sapiens
tcctcttctgcttggctctctttatt

SEQ ID NO: 82065 - DNA, 26 bp, Homo sapiens
cctcttctgcttggctctctttatta

SEQ ID NO: 82066 - DNA, 26 bp, Homo sapiens
ctcttctgcttggctctctttattat

SEQ ID NO: 82067 - DNA, 26 bp, Homo sapiens
tcttctgcttggctctctttattatt

SEQ ID NO: 82068 - DNA, 26 bp, Homo sapiens
cttctgcttggctctctttattattt

SEQ ID NO: 82069 - DNA, 26 bp, Homo sapiens
ttctgcttggctctctttattatttt

SEQ ID NO: 82070 - DNA, 26 bp, Homo sapiens
tctgcttggctctctttattattttt

SEQ ID NO: 82071 - DNA, 26 bp, Homo sapiens
ctgcttggctctctttattatttttt

SEQ ID NO: 82072 - DNA, 26 bp, Homo sapiens
tgcttggctctctttattattttttt

SEQ ID NO: 82073 - DNA, 26 bp, Homo sapiens
gcttggctctctttattatttttttt

SEQ ID NO: 82074 - DNA, 26 bp, Homo sapiens
cttggctctctttattattttttttc

SEQ ID NO: 82075 - DNA, 26 bp, Homo sapiens
ttggctctctttattattttttttct

SEQ ID NO: 82076 - DNA, 26 bp, Homo sapiens
tggctctctttattattttttttctt

SEQ ID NO: 82077 - DNA, 26 bp, Homo sapiens
ggctctctttattattttttttcttt

SEQ ID NO: 82078 - DNA, 26 bp, Homo sapiens
gctctctttattattttttttctttc

SEQ ID NO: 82079 - DNA, 26 bp, Homo sapiens
ctctctttattattttttttctttcc

SEQ ID NO: 82080 - DNA, 26 bp, Homo sapiens
tctctttattattttttttctttcct

SEQ ID NO: 82081 - DNA, 26 bp, Homo sapiens
ctctttattattttttttctttcctc

SEQ ID NO: 82082 - DNA, 26 bp, Homo sapiens
tctttattattttttttctttcctct

SEQ ID NO: 82083 - DNA, 26 bp, Homo sapiens
ctttattattttttttctttcctctc

SEQ ID NO: 82084 - DNA, 26 bp, Homo sapiens
tttattattttttttctttcctctct

SEQ ID NO: 82085 - DNA, 26 bp, Homo sapiens
ttattattttttttctttcctctctc

SEQ ID NO: 82086 - DNA, 26 bp, Homo sapiens
tattattttttttctttcctctctct

SEQ ID NO: 82087 - DNA, 26 bp, Homo sapiens
attattttttttctttcctctctctc

SEQ ID NO: 82088 - DNA, 26 bp, Homo sapiens
ttattttttttctttcctctctctcc

SEQ ID NO: 82089 - DNA, 26 bp, Homo sapiens
tattttttttctttcctctctctccc

SEQ ID NO: 82090 - DNA, 26 bp, Homo sapiens
attttttttctttcctctctctccct

SEQ ID NO: 82091 - DNA, 26 bp, Homo sapiens
ttttttttctttcctctctctccctc

SEQ ID NO: 82092 - DNA, 26 bp, Homo sapiens
tttttttctttcctctctctccctcg

SEQ ID NO: 82093 - DNA, 26 bp, Homo sapiens
ttttttctttcctctctctccctcgc

SEQ ID NO: 82094 - DNA, 26 bp, Homo sapiens
tttttctttcctctctctccctcgcg

SEQ ID NO: 82095 - DNA, 26 bp, Homo sapiens
ttttctttcctctctctccctcgcgc

SEQ ID NO: 82096 - DNA, 26 bp, Homo sapiens
tttctttcctctctctccctcgcgcg

SEQ ID NO: 82097 - DNA, 26 bp, Homo sapiens
ttctttcctctctctccctcgcgcgc

SEQ ID NO: 82098 - DNA, 26 bp, Homo sapiens
tctttcctctctctccctcgcgcgct

SEQ ID NO: 82099 - DNA, 26 bp, Homo sapiens
ctttcctctctctccctcgcgcgctc

SEQ ID NO: 82100 - DNA, 26 bp, Homo sapiens
tttcctctctctccctcgcgcgctct

SEQ ID NO: 82101 - DNA, 26 bp, Homo sapiens
ttcctctctctccctcgcgcgctctc

SEQ ID NO: 82102 - DNA, 26 bp, Homo sapiens
tcctctctctccctcgcgcgctctct

SEQ ID NO: 82103 - DNA, 26 bp, Homo sapiens
cctctctctccctcgcgcgctctcta

SEQ ID NO: 82104 - DNA, 26 bp, Homo sapiens
ctctctctccctcgcgcgctctctac

SEQ ID NO: 82105 - DNA, 26 bp, Homo sapiens
tctctctccctcgcgcgctctctacc

SEQ ID NO: 82106 - DNA, 26 bp, Homo sapiens
ctctctccctcgcgcgctctctacct

SEQ ID NO: 82107 - DNA, 26 bp, Homo sapiens
tctctccctcgcgcgctctctacctc

SEQ ID NO: 82108 - DNA, 26 bp, Homo sapiens
ctctccctcgcgcgctctctacctct

SEQ ID NO: 82109 - DNA, 26 bp, Homo sapiens
tctccctcgcgcgctctctacctctg

SEQ ID NO: 82110 - DNA, 26 bp, Homo sapiens
ctccctcgcgcgctctctacctctgt

SEQ ID NO: 82111 - DNA, 26 bp, Homo sapiens
tccctcgcgcgctctctacctctgtg

SEQ ID NO: 82112 - DNA, 26 bp, Homo sapiens
ccctcgcgcgctctctacctctgtgc

SEQ ID NO: 82113 - DNA, 26 bp, Homo sapiens
cctcgcgcgctctctacctctgtgca

SEQ ID NO: 82114 - DNA, 26 bp, Homo sapiens
ctcgcgcgctctctacctctgtgcaa

SEQ ID NO: 82115 - DNA, 26 bp, Homo sapiens
tcgcgcgctctctacctctgtgcaaa

SEQ ID NO: 82116 - DNA, 26 bp, Homo sapiens
cgcgcgctctctacctctgtgcaaag

SEQ ID NO: 82117 - DNA, 26 bp, Homo sapiens
gcgcgctctctacctctgtgcaaagt

SEQ ID NO: 82118 - DNA, 26 bp, Homo sapiens
cgcgctctctacctctgtgcaaagtg

SEQ ID NO: 82119 - DNA, 26 bp, Homo sapiens
gcgctctctacctctgtgcaaagtgc

SEQ ID NO: 82120 - DNA, 26 bp, Homo sapiens
cgctctctacctctgtgcaaagtgca

SEQ ID NO: 82121 - DNA, 26 bp, Homo sapiens
gctctctacctctgtgcaaagtgcaa

SEQ ID NO: 82122 - DNA, 26 bp, Homo sapiens
ctctctacctctgtgcaaagtgcaag

SEQ ID NO: 82123 - DNA, 26 bp, Homo sapiens
tctctacctctgtgcaaagtgcaagg

SEQ ID NO: 82124 - DNA, 26 bp, Homo sapiens
ctctacctctgtgcaaagtgcaaggc

SEQ ID NO: 82125 - DNA, 26 bp, Homo sapiens
tctacctctgtgcaaagtgcaaggca

SEQ ID NO: 82126 - DNA, 26 bp, Homo sapiens
ctacctctgtgcaaagtgcaaggcag

SEQ ID NO: 82127 - DNA, 26 bp, Homo sapiens
tacctctgtgcaaagtgcaaggcaga

SEQ ID NO: 82128 - DNA, 26 bp, Homo sapiens
acctctgtgcaaagtgcaaggcagag

SEQ ID NO: 82129 - DNA, 26 bp, Homo sapiens
cctctgtgcaaagtgcaaggcagagg

SEQ ID NO: 82130 - DNA, 26 bp, Homo sapiens
ctctgtgcaaagtgcaaggcagaggt

SEQ ID NO: 82131 - DNA, 26 bp, Homo sapiens
tctgtgcaaagtgcaaggcagaggtg

SEQ ID NO: 82132 - DNA, 26 bp, Homo sapiens
ctgtgcaaagtgcaaggcagaggtgc

SEQ ID NO: 82133 - DNA, 26 bp, Homo sapiens
tgtgcaaagtgcaaggcagaggtgca

SEQ ID NO: 82134 - DNA, 26 bp, Homo sapiens
gtgcaaagtgcaaggcagaggtgcag

SEQ ID NO: 82135 - DNA, 26 bp, Homo sapiens
tgcaaagtgcaaggcagaggtgcagc

SEQ ID NO: 82136 - DNA, 26 bp, Homo sapiens
gcaaagtgcaaggcagaggtgcagcc

SEQ ID NO: 82137 - DNA, 26 bp, Homo sapiens
caaagtgcaaggcagaggtgcagccc

SEQ ID NO: 82138 - DNA, 26 bp, Homo sapiens
aaagtgcaaggcagaggtgcagcccg

SEQ ID NO: 82139 - DNA, 26 bp, Homo sapiens
aagtgcaaggcagaggtgcagcccga

SEQ ID NO: 82140 - DNA, 26 bp, Homo sapiens
agtgcaaggcagaggtgcagcccgac

SEQ ID NO: 82141 - DNA, 26 bp, Homo sapiens
gtgcaaggcagaggtgcagcccgact

SEQ ID NO: 82142 - DNA, 26 bp, Homo sapiens
tgcaaggcagaggtgcagcccgactg

SEQ ID NO: 82143 - DNA, 26 bp, Homo sapiens
gcaaggcagaggtgcagcccgactgg

SEQ ID NO: 82144 - DNA, 26 bp, Homo sapiens
caaggcagaggtgcagcccgactgga

SEQ ID NO: 82145 - DNA, 26 bp, Homo sapiens
aaggcagaggtgcagcccgactggag

SEQ ID NO: 82146 - DNA, 26 bp, Homo sapiens
aggcagaggtgcagcccgactggagg

SEQ ID NO: 82147 - DNA, 26 bp, Homo sapiens
ggcagaggtgcagcccgactggagga

SEQ ID NO: 82148 - DNA, 26 bp, Homo sapiens
gcagaggtgcagcccgactggaggag

SEQ ID NO: 82149 - DNA, 26 bp, Homo sapiens
cagaggtgcagcccgactggaggaga

SEQ ID NO: 82150 - DNA, 26 bp, Homo sapiens
agaggtgcagcccgactggaggagag

SEQ ID NO: 82151 - DNA, 26 bp, Homo sapiens
gaggtgcagcccgactggaggagagg

SEQ ID NO: 82152 - DNA, 26 bp, Homo sapiens
aggtgcagcccgactggaggagaggg

SEQ ID NO: 82153 - DNA, 26 bp, Homo sapiens
ggtgcagcccgactggaggagaggga

SEQ ID NO: 82154 - DNA, 26 bp, Homo sapiens
gtgcagcccgactggaggagagggag

SEQ ID NO: 82155 - DNA, 26 bp, Homo sapiens
tgcagcccgactggaggagagggagg

SEQ ID NO: 82156 - DNA, 26 bp, Homo sapiens
gcagcccgactggaggagagggaggg

SEQ ID NO: 82157 - DNA, 26 bp, Homo sapiens
cagcccgactggaggagagggagggg

SEQ ID NO: 82158 - DNA, 26 bp, Homo sapiens
agcccgactggaggagagggaggggg

SEQ ID NO: 82159 - DNA, 26 bp, Homo sapiens
gcccgactggaggagagggagggggg

SEQ ID NO: 82160 - DNA, 26 bp, Homo sapiens
cccgactggaggagagggagggggga

SEQ ID NO: 82161 - DNA, 26 bp, Homo sapiens
ccgactggaggagagggaggggggag

SEQ ID NO: 82162 - DNA, 26 bp, Homo sapiens
cgactggaggagagggaggggggagt

SEQ ID NO: 82163 - DNA, 26 bp, Homo sapiens
gactggaggagagggaggggggagtt

SEQ ID NO: 82164 - DNA, 26 bp, Homo sapiens
actggaggagagggaggggggagttt

SEQ ID NO: 82165 - DNA, 26 bp, Homo sapiens
ctggaggagagggaggggggagttta

SEQ ID NO: 82166 - DNA, 26 bp, Homo sapiens
tggaggagagggaggggggagtttag

SEQ ID NO: 82167 - DNA, 26 bp, Homo sapiens
ggaggagagggaggggggagtttagt

SEQ ID NO: 82168 - DNA, 26 bp, Homo sapiens
gaggagagggaggggggagtttagtt

SEQ ID NO: 82169 - DNA, 26 bp, Homo sapiens
aggagagggaggggggagtttagttc

SEQ ID NO: 82170 - DNA, 26 bp, Homo sapiens
ggagagggaggggggagtttagttct

SEQ ID NO: 82171 - DNA, 26 bp, Homo sapiens
gagagggaggggggagtttagttctt

SEQ ID NO: 82172 - DNA, 26 bp, Homo sapiens
agagggaggggggagtttagttcttt

SEQ ID NO: 82173 - DNA, 26 bp, Homo sapiens
gagggaggggggagtttagttctttc

SEQ ID NO: 82174 - DNA, 26 bp, Homo sapiens
agggaggggggagtttagttctttct

SEQ ID NO: 82175 - DNA, 26 bp, Homo sapiens
gggaggggggagtttagttctttctt

SEQ ID NO: 82176 - DNA, 26 bp, Homo sapiens
ggaggggggagtttagttctttcttg

SEQ ID NO: 82177 - DNA, 26 bp, Homo sapiens
gaggggggagtttagttctttcttgc

SEQ ID NO: 82178 - DNA, 26 bp, Homo sapiens
aggggggagtttagttctttcttgcc

SEQ ID NO: 82179 - DNA, 26 bp, Homo sapiens
ggggggagtttagttctttcttgcct

SEQ ID NO: 82180 - DNA, 26 bp, Homo sapiens
gggggagtttagttctttcttgcctt

SEQ ID NO: 82181 - DNA, 26 bp, Homo sapiens
ggggagtttagttctttcttgccttt

SEQ ID NO: 82182 - DNA, 26 bp, Homo sapiens
gggagtttagttctttcttgcctttt

SEQ ID NO: 82183 - DNA, 26 bp, Homo sapiens
ggagtttagttctttcttgccttttt

SEQ ID NO: 82184 - DNA, 26 bp, Homo sapiens
gagtttagttctttcttgcctttttt

SEQ ID NO: 82185 - DNA, 26 bp, Homo sapiens
agtttagttctttcttgccttttttt

SEQ ID NO: 82186 - DNA, 26 bp, Homo sapiens
gtttagttctttcttgccttttttta

SEQ ID NO: 82187 - DNA, 26 bp, Homo sapiens
tttagttctttcttgcctttttttaa

SEQ ID NO: 82188 - DNA, 26 bp, Homo sapiens
ttagttctttcttgcctttttttaaa

SEQ ID NO: 82189 - DNA, 26 bp, Homo sapiens
tagttctttcttgcctttttttaaaa

SEQ ID NO: 82190 - DNA, 26 bp, Homo sapiens
agttctttcttgcctttttttaaaaa

SEQ ID NO: 82191 - DNA, 26 bp, Homo sapiens
gttctttcttgcctttttttaaaaaa

SEQ ID NO: 82192 - DNA, 26 bp, Homo sapiens
ttctttcttgcctttttttaaaaaag

SEQ ID NO: 82193 - DNA, 26 bp, Homo sapiens
tctttcttgcctttttttaaaaaagc

SEQ ID NO: 82194 - DNA, 26 bp, Homo sapiens
ctttcttgcctttttttaaaaaagca

SEQ ID NO: 82195 - DNA, 26 bp, Homo sapiens
tttcttgcctttttttaaaaaagcaa

SEQ ID NO: 82196 - DNA, 26 bp, Homo sapiens
ttcttgcctttttttaaaaaagcaaa

SEQ ID NO: 82197 - DNA, 26 bp, Homo sapiens
tcttgcctttttttaaaaaagcaaaa

SEQ ID NO: 82198 - DNA, 26 bp, Homo sapiens
cttgcctttttttaaaaaagcaaaat

SEQ ID NO: 82199 - DNA, 26 bp, Homo sapiens
ttgcctttttttaaaaaagcaaaata

SEQ ID NO: 82200 - DNA, 26 bp, Homo sapiens
tgcctttttttaaaaaagcaaaatag

SEQ ID NO: 82201 - DNA, 26 bp, Homo sapiens
gcctttttttaaaaaagcaaaatagc

SEQ ID NO: 82202 - DNA, 26 bp, Homo sapiens
cctttttttaaaaaagcaaaatagcg

SEQ ID NO: 82203 - DNA, 26 bp, Homo sapiens
ctttttttaaaaaagcaaaatagcga

SEQ ID NO: 82204 - DNA, 26 bp, Homo sapiens
tttttttaaaaaagcaaaatagcgaa

SEQ ID NO: 82205 - DNA, 26 bp, Homo sapiens
ttttttaaaaaagcaaaatagcgaag

SEQ ID NO: 82206 - DNA, 26 bp, Homo sapiens
tttttaaaaaagcaaaatagcgaagt

SEQ ID NO: 82207 - DNA, 26 bp, Homo sapiens
ttttaaaaaagcaaaatagcgaagtc

SEQ ID NO: 82208 - DNA, 26 bp, Homo sapiens
tttaaaaaagcaaaatagcgaagtcc

SEQ ID NO: 82209 - DNA, 26 bp, Homo sapiens
ttaaaaaagcaaaatagcgaagtcct

SEQ ID NO: 82210 - DNA, 26 bp, Homo sapiens
taaaaaagcaaaatagcgaagtcctg

SEQ ID NO: 82211 - DNA, 26 bp, Homo sapiens
aaaaaagcaaaatagcgaagtcctgg

SEQ ID NO: 82212 - DNA, 26 bp, Homo sapiens
aaaaagcaaaatagcgaagtcctggg

SEQ ID NO: 82213 - DNA, 26 bp, Homo sapiens
aaaagcaaaatagcgaagtcctgggg

SEQ ID NO: 82214 - DNA, 26 bp, Homo sapiens
aaagcaaaatagcgaagtcctgggga

SEQ ID NO: 82215 - DNA, 26 bp, Homo sapiens
aagcaaaatagcgaagtcctggggaa

SEQ ID NO: 82216 - DNA, 26 bp, Homo sapiens
agcaaaatagcgaagtcctggggaaa

SEQ ID NO: 82217 - DNA, 26 bp, Homo sapiens
gcaaaatagcgaagtcctggggaaag

SEQ ID NO: 82218 - DNA, 26 bp, Homo sapiens
caaaatagcgaagtcctggggaaaga

SEQ ID NO: 82219 - DNA, 26 bp, Homo sapiens
aaaatagcgaagtcctggggaaagac

SEQ ID NO: 82220 - DNA, 26 bp, Homo sapiens
aaatagcgaagtcctggggaaagacg

SEQ ID NO: 82221 - DNA, 26 bp, Homo sapiens
aatagcgaagtcctggggaaagacga

SEQ ID NO: 82222 - DNA, 26 bp, Homo sapiens
atagcgaagtcctggggaaagacgag

SEQ ID NO: 82223 - DNA, 26 bp, Homo sapiens
tagcgaagtcctggggaaagacgagg

SEQ ID NO: 82224 - DNA, 26 bp, Homo sapiens
agcgaagtcctggggaaagacgaggc

SEQ ID NO: 82225 - DNA, 26 bp, Homo sapiens
gcgaagtcctggggaaagacgaggca

SEQ ID NO: 82226 - DNA, 26 bp, Homo sapiens
cgaagtcctggggaaagacgaggcag

SEQ ID NO: 82227 - DNA, 26 bp, Homo sapiens
gaagtcctggggaaagacgaggcaga

SEQ ID NO: 82228 - DNA, 26 bp, Homo sapiens
aagtcctggggaaagacgaggcagag

SEQ ID NO: 82229 - DNA, 26 bp, Homo sapiens
agtcctggggaaagacgaggcagaga

SEQ ID NO: 82230 - DNA, 26 bp, Homo sapiens
gtcctggggaaagacgaggcagagag

SEQ ID NO: 82231 - DNA, 26 bp, Homo sapiens
tcctggggaaagacgaggcagagagc

SEQ ID NO: 82232 - DNA, 26 bp, Homo sapiens
cctggggaaagacgaggcagagagca

SEQ ID NO: 82233 - DNA, 26 bp, Homo sapiens
ctggggaaagacgaggcagagagcaa

SEQ ID NO: 82234 - DNA, 26 bp, Homo sapiens
tggggaaagacgaggcagagagcaaa

SEQ ID NO: 82235 - DNA, 26 bp, Homo sapiens
ggggaaagacgaggcagagagcaaag

SEQ ID NO: 82236 - DNA, 26 bp, Homo sapiens
gggaaagacgaggcagagagcaaagg

SEQ ID NO: 82237 - DNA, 26 bp, Homo sapiens
ggaaagacgaggcagagagcaaaggg

SEQ ID NO: 82238 - DNA, 26 bp, Homo sapiens
gaaagacgaggcagagagcaaagggg

SEQ ID NO: 82239 - DNA, 26 bp, Homo sapiens
aaagacgaggcagagagcaaaggggg

SEQ ID NO: 82240 - DNA, 26 bp, Homo sapiens
aagacgaggcagagagcaaagggggg

SEQ ID NO: 82241 - DNA, 26 bp, Homo sapiens
agacgaggcagagagcaaagggggga

SEQ ID NO: 82242 - DNA, 26 bp, Homo sapiens
gacgaggcagagagcaaaggggggag

SEQ ID NO: 82243 - DNA, 26 bp, Homo sapiens
acgaggcagagagcaaaggggggagg

SEQ ID NO: 82244 - DNA, 26 bp, Homo sapiens
cgaggcagagagcaaaggggggaggg

SEQ ID NO: 82245 - DNA, 26 bp, Homo sapiens
gaggcagagagcaaaggggggagggg

SEQ ID NO: 82246 - DNA, 26 bp, Homo sapiens
aggcagagagcaaaggggggaggggg

SEQ ID NO: 82247 - DNA, 26 bp, Homo sapiens
ggcagagagcaaaggggggaggggga

SEQ ID NO: 82248 - DNA, 26 bp, Homo sapiens
gcagagagcaaaggggggagggggag

SEQ ID NO: 82249 - DNA, 26 bp, Homo sapiens
cagagagcaaaggggggagggggagg

SEQ ID NO: 82250 - DNA, 26 bp, Homo sapiens
agagagcaaaggggggagggggaggc

SEQ ID NO: 82251 - DNA, 26 bp, Homo sapiens
gagagcaaaggggggagggggaggcc

SEQ ID NO: 82252 - DNA, 26 bp, Homo sapiens
agagcaaaggggggagggggaggcca

SEQ ID NO: 82253 - DNA, 26 bp, Homo sapiens
gagcaaaggggggagggggaggccaa

SEQ ID NO: 82254 - DNA, 26 bp, Homo sapiens
agcaaaggggggagggggaggccaag

SEQ ID NO: 82255 - DNA, 26 bp, Homo sapiens
gcaaaggggggagggggaggccaagc

SEQ ID NO: 82256 - DNA, 26 bp, Homo sapiens
caaaggggggagggggaggccaagcc

SEQ ID NO: 82257 - DNA, 26 bp, Homo sapiens
aaaggggggagggggaggccaagccg

SEQ ID NO: 82258 - DNA, 26 bp, Homo sapiens
aaggggggagggggaggccaagccga

SEQ ID NO: 82259 - DNA, 26 bp, Homo sapiens
aggggggagggggaggccaagccgac

SEQ ID NO: 82260 - DNA, 26 bp, Homo sapiens
ggggggagggggaggccaagccgaca

SEQ ID NO: 82261 - DNA, 26 bp, Homo sapiens
gggggagggggaggccaagccgacaa

SEQ ID NO: 82262 - DNA, 26 bp, Homo sapiens
ggggagggggaggccaagccgacaag

SEQ ID NO: 82263 - DNA, 26 bp, Homo sapiens
gggagggggaggccaagccgacaagc

SEQ ID NO: 82264 - DNA, 26 bp, Homo sapiens
ggagggggaggccaagccgacaagca

SEQ ID NO: 82265 - DNA, 26 bp, Homo sapiens
gagggggaggccaagccgacaagcag

SEQ ID NO: 82266 - DNA, 26 bp, Homo sapiens
agggggaggccaagccgacaagcagc

SEQ ID NO: 82267 - DNA, 26 bp, Homo sapiens
gggggaggccaagccgacaagcagcc

SEQ ID NO: 82268 - DNA, 26 bp, Homo sapiens
ggggaggccaagccgacaagcagccc

SEQ ID NO: 82269 - DNA, 26 bp, Homo sapiens
gggaggccaagccgacaagcagcccg

SEQ ID NO: 82270 - DNA, 26 bp, Homo sapiens
ggaggccaagccgacaagcagcccga

SEQ ID NO: 82271 - DNA, 26 bp, Homo sapiens
gaggccaagccgacaagcagcccgag

SEQ ID NO: 82272 - DNA, 26 bp, Homo sapiens
aggccaagccgacaagcagcccgagc

SEQ ID NO: 82273 - DNA, 26 bp, Homo sapiens
ggccaagccgacaagcagcccgagct

SEQ ID NO: 82274 - DNA, 26 bp, Homo sapiens
gccaagccgacaagcagcccgagcta

SEQ ID NO: 82275 - DNA, 26 bp, Homo sapiens
ccaagccgacaagcagcccgagctac

SEQ ID NO: 82276 - DNA, 26 bp, Homo sapiens
caagccgacaagcagcccgagctaca

SEQ ID NO: 82277 - DNA, 26 bp, Homo sapiens
aagccgacaagcagcccgagctacag

SEQ ID NO: 82278 - DNA, 26 bp, Homo sapiens
agccgacaagcagcccgagctacagc

SEQ ID NO: 82279 - DNA, 26 bp, Homo sapiens
gccgacaagcagcccgagctacagct

SEQ ID NO: 82280 - DNA, 26 bp, Homo sapiens
ccgacaagcagcccgagctacagcta

SEQ ID NO: 82281 - DNA, 26 bp, Homo sapiens
cgacaagcagcccgagctacagctag

SEQ ID NO: 82282 - DNA, 26 bp, Homo sapiens
gacaagcagcccgagctacagctaga

SEQ ID NO: 82283 - DNA, 26 bp, Homo sapiens
acaagcagcccgagctacagctagaa

SEQ ID NO: 82284 - DNA, 26 bp, Homo sapiens
caagcagcccgagctacagctagaag

SEQ ID NO: 82285 - DNA, 26 bp, Homo sapiens
aagcagcccgagctacagctagaaga

SEQ ID NO: 82286 - DNA, 26 bp, Homo sapiens
agcagcccgagctacagctagaagat

SEQ ID NO: 82287 - DNA, 26 bp, Homo sapiens
gcagcccgagctacagctagaagatg

SEQ ID NO: 82288 - DNA, 26 bp, Homo sapiens
cagcccgagctacagctagaagatga

SEQ ID NO: 82289 - DNA, 26 bp, Homo sapiens
agcccgagctacagctagaagatgaa

SEQ ID NO: 82290 - DNA, 26 bp, Homo sapiens
gcccgagctacagctagaagatgaaa

SEQ ID NO: 82291 - DNA, 26 bp, Homo sapiens
cccgagctacagctagaagatgaaaa

SEQ ID NO: 82292 - DNA, 26 bp, Homo sapiens
ccgagctacagctagaagatgaaaaa

SEQ ID NO: 82293 - DNA, 26 bp, Homo sapiens
cgagctacagctagaagatgaaaaaa

SEQ ID NO: 82294 - DNA, 26 bp, Homo sapiens
gagctacagctagaagatgaaaaaag

SEQ ID NO: 82295 - DNA, 26 bp, Homo sapiens
agctacagctagaagatgaaaaaaga

SEQ ID NO: 82296 - DNA, 26 bp, Homo sapiens
gctacagctagaagatgaaaaaagat

SEQ ID NO: 82297 - DNA, 26 bp, Homo sapiens
ctacagctagaagatgaaaaaagatt

SEQ ID NO: 82298 - DNA, 26 bp, Homo sapiens
tacagctagaagatgaaaaaagattt

SEQ ID NO: 82299 - DNA, 26 bp, Homo sapiens
acagctagaagatgaaaaaagatttt

SEQ ID NO: 82300 - DNA, 26 bp, Homo sapiens
cagctagaagatgaaaaaagatttta

SEQ ID NO: 82301 - DNA, 26 bp, Homo sapiens
agctagaagatgaaaaaagattttaa

SEQ ID NO: 82302 - DNA, 26 bp, Homo sapiens
gctagaagatgaaaaaagattttaaa

SEQ ID NO: 82303 - DNA, 26 bp, Homo sapiens
ctagaagatgaaaaaagattttaaag

SEQ ID NO: 82304 - DNA, 26 bp, Homo sapiens
tagaagatgaaaaaagattttaaagc

SEQ ID NO: 82305 - DNA, 26 bp, Homo sapiens
agaagatgaaaaaagattttaaagcc

SEQ ID NO: 82306 - DNA, 26 bp, Homo sapiens
gaagatgaaaaaagattttaaagcct

SEQ ID NO: 82307 - DNA, 26 bp, Homo sapiens
aagatgaaaaaagattttaaagcctc

SEQ ID NO: 82308 - DNA, 26 bp, Homo sapiens
agatgaaaaaagattttaaagcctct

SEQ ID NO: 82309 - DNA, 26 bp, Homo sapiens
gatgaaaaaagattttaaagcctctg

SEQ ID NO: 82310 - DNA, 26 bp, Homo sapiens
atgaaaaaagattttaaagcctctga

SEQ ID NO: 82311 - DNA, 26 bp, Homo sapiens
tgaaaaaagattttaaagcctctgat

SEQ ID NO: 82312 - DNA, 26 bp, Homo sapiens
gaaaaaagattttaaagcctctgatc

SEQ ID NO: 82313 - DNA, 26 bp, Homo sapiens
aaaaaagattttaaagcctctgatcc

SEQ ID NO: 82314 - DNA, 26 bp, Homo sapiens
aaaaagattttaaagcctctgatcca

SEQ ID NO: 82315 - DNA, 26 bp, Homo sapiens
aaaagattttaaagcctctgatccag

SEQ ID NO: 82316 - DNA, 26 bp, Homo sapiens
aaagattttaaagcctctgatccagc

SEQ ID NO: 82317 - DNA, 26 bp, Homo sapiens
aagattttaaagcctctgatccagca

SEQ ID NO: 82318 - DNA, 26 bp, Homo sapiens
agattttaaagcctctgatccagcaa

SEQ ID NO: 82319 - DNA, 26 bp, Homo sapiens
tattatttgtcaaatatttattgatg

SEQ ID NO: 82320 - DNA, 26 bp, Homo sapiens
attatttgtcaaatatttattgatgt

SEQ ID NO: 82321 - DNA, 26 bp, Homo sapiens
ttatttgtcaaatatttattgatgtt

SEQ ID NO: 82322 - DNA, 26 bp, Homo sapiens
tatttgtcaaatatttattgatgtta

SEQ ID NO: 82323 - DNA, 26 bp, Homo sapiens
atttgtcaaatatttattgatgttaa

SEQ ID NO: 82324 - DNA, 26 bp, Homo sapiens
tttgtcaaatatttattgatgttaaa

SEQ ID NO: 82325 - DNA, 26 bp, Homo sapiens
ttgtcaaatatttattgatgttaaat

SEQ ID NO: 82326 - DNA, 26 bp, Homo sapiens
tgtcaaatatttattgatgttaaatc

SEQ ID NO: 82327 - DNA, 26 bp, Homo sapiens
gtcaaatatttattgatgttaaatcc

SEQ ID NO: 82328 - DNA, 26 bp, Homo sapiens
tcaaatatttattgatgttaaatcca

SEQ ID NO: 82329 - DNA, 26 bp, Homo sapiens
caaatatttattgatgttaaatccac

SEQ ID NO: 82330 - DNA, 26 bp, Homo sapiens
aaatatttattgatgttaaatccaca

SEQ ID NO: 82331 - DNA, 26 bp, Homo sapiens
aatatttattgatgttaaatccacat

SEQ ID NO: 82332 - DNA, 26 bp, Homo sapiens
atatttattgatgttaaatccacatt

SEQ ID NO: 82333 - DNA, 26 bp, Homo sapiens
tatttattgatgttaaatccacatta

SEQ ID NO: 82334 - DNA, 26 bp, Homo sapiens
atttattgatgttaaatccacattac

SEQ ID NO: 82335 - DNA, 26 bp, Homo sapiens
tttattgatgttaaatccacattaca

SEQ ID NO: 82336 - DNA, 26 bp, Homo sapiens
ttattgatgttaaatccacattacac

SEQ ID NO: 82337 - DNA, 26 bp, Homo sapiens
tattgatgttaaatccacattacacc

SEQ ID NO: 82338 - DNA, 26 bp, Homo sapiens
attgatgttaaatccacattacacca

SEQ ID NO: 82339 - DNA, 26 bp, Homo sapiens
ttgatgttaaatccacattacaccag

SEQ ID NO: 82340 - DNA, 26 bp, Homo sapiens
tgatgttaaatccacattacaccagc

SEQ ID NO: 82341 - DNA, 26 bp, Homo sapiens
gatgttaaatccacattacaccagca

SEQ ID NO: 82342 - DNA, 26 bp, Homo sapiens
atgttaaatccacattacaccagcac

SEQ ID NO: 82343 - DNA, 26 bp, Homo sapiens
tgttaaatccacattacaccagcaca

SEQ ID NO: 82344 - DNA, 26 bp, Homo sapiens
gttaaatccacattacaccagcacaa

SEQ ID NO: 82345 - DNA, 26 bp, Homo sapiens
ttaaatccacattacaccagcacaac

SEQ ID NO: 82346 - DNA, 26 bp, Homo sapiens
taaatccacattacaccagcacaaca

SEQ ID NO: 82347 - DNA, 26 bp, Homo sapiens
aaatccacattacaccagcacaacaa

SEQ ID NO: 82348 - DNA, 26 bp, Homo sapiens
aatccacattacaccagcacaacaat

SEQ ID NO: 82349 - DNA, 26 bp, Homo sapiens
atccacattacaccagcacaacaatc

SEQ ID NO: 82350 - DNA, 26 bp, Homo sapiens
tccacattacaccagcacaacaatcc

SEQ ID NO: 82351 - DNA, 26 bp, Homo sapiens
ccacattacaccagcacaacaatcca

SEQ ID NO: 82352 - DNA, 26 bp, Homo sapiens
cacattacaccagcacaacaatccaa

SEQ ID NO: 82353 - DNA, 26 bp, Homo sapiens
acattacaccagcacaacaatccaaa

SEQ ID NO: 82354 - DNA, 26 bp, Homo sapiens
cattacaccagcacaacaatccaaag

SEQ ID NO: 82355 - DNA, 26 bp, Homo sapiens
attacaccagcacaacaatccaaagt

SEQ ID NO: 82356 - DNA, 26 bp, Homo sapiens
ttacaccagcacaacaatccaaagta

SEQ ID NO: 82357 - DNA, 26 bp, Homo sapiens
tacaccagcacaacaatccaaagtag

SEQ ID NO: 82358 - DNA, 26 bp, Homo sapiens
acaccagcacaacaatccaaagtagt

SEQ ID NO: 82359 - DNA, 26 bp, Homo sapiens
caccagcacaacaatccaaagtagta

SEQ ID NO: 82360 - DNA, 26 bp, Homo sapiens
accagcacaacaatccaaagtagtat

SEQ ID NO: 82361 - DNA, 26 bp, Homo sapiens
ccagcacaacaatccaaagtagtatg

SEQ ID NO: 82362 - DNA, 26 bp, Homo sapiens
cagcacaacaatccaaagtagtatga

SEQ ID NO: 82363 - DNA, 26 bp, Homo sapiens
agcacaacaatccaaagtagtatgat

SEQ ID NO: 82364 - DNA, 26 bp, Homo sapiens
gcacaacaatccaaagtagtatgatt

SEQ ID NO: 82365 - DNA, 26 bp, Homo sapiens
cacaacaatccaaagtagtatgattg

SEQ ID NO: 82366 - DNA, 26 bp, Homo sapiens
acaacaatccaaagtagtatgattga

SEQ ID NO: 82367 - DNA, 26 bp, Homo sapiens
caacaatccaaagtagtatgattgat

SEQ ID NO: 82368 - DNA, 26 bp, Homo sapiens
aacaatccaaagtagtatgattgatt

SEQ ID NO: 82369 - DNA, 26 bp, Homo sapiens
acaatccaaagtagtatgattgattg

SEQ ID NO: 82370 - DNA, 26 bp, Homo sapiens
caatccaaagtagtatgattgattga

SEQ ID NO: 82371 - DNA, 26 bp, Homo sapiens
aatccaaagtagtatgattgattgat

SEQ ID NO: 82372 - DNA, 26 bp, Homo sapiens
atccaaagtagtatgattgattgata

SEQ ID NO: 82373 - DNA, 26 bp, Homo sapiens
tccaaagtagtatgattgattgatag

SEQ ID NO: 82374 - DNA, 26 bp, Homo sapiens
ccaaagtagtatgattgattgatagt

SEQ ID NO: 82375 - DNA, 26 bp, Homo sapiens
caaagtagtatgattgattgatagta

SEQ ID NO: 82376 - DNA, 26 bp, Homo sapiens
aaagtagtatgattgattgatagtac

SEQ ID NO: 82377 - DNA, 26 bp, Homo sapiens
aagtagtatgattgattgatagtact

SEQ ID NO: 82378 - DNA, 26 bp, Homo sapiens
agtagtatgattgattgatagtactt

SEQ ID NO: 82379 - DNA, 26 bp, Homo sapiens
gtagtatgattgattgatagtacttt

SEQ ID NO: 82380 - DNA, 26 bp, Homo sapiens
tagtatgattgattgatagtactttt

SEQ ID NO: 82381 - DNA, 26 bp, Homo sapiens
agtatgattgattgatagtacttttt

SEQ ID NO: 82382 - DNA, 26 bp, Homo sapiens
gtatgattgattgatagtactttttt

SEQ ID NO: 82383 - DNA, 26 bp, Homo sapiens
tatgattgattgatagtacttttttt

SEQ ID NO: 82384 - DNA, 26 bp, Homo sapiens
atgattgattgatagtactttttttt

SEQ ID NO: 82385 - DNA, 26 bp, Homo sapiens
tgattgattgatagtacttttttttt

SEQ ID NO: 82386 - DNA, 26 bp, Homo sapiens
gattgattgatagtactttttttttt

SEQ ID NO: 82387 - DNA, 26 bp, Homo sapiens
attgattgatagtactttttttttta

SEQ ID NO: 82388 - DNA, 26 bp, Homo sapiens
ttgattgatagtacttttttttttat

SEQ ID NO: 82389 - DNA, 26 bp, Homo sapiens
tgattgatagtacttttttttttata

SEQ ID NO: 82390 - DNA, 26 bp, Homo sapiens
gattgatagtacttttttttttataa

SEQ ID NO: 82391 - DNA, 26 bp, Homo sapiens
attgatagtacttttttttttataaa

SEQ ID NO: 82392 - DNA, 26 bp, Homo sapiens
ttgatagtacttttttttttataaat

SEQ ID NO: 82393 - DNA, 26 bp, Homo sapiens
tgatagtacttttttttttataaata

SEQ ID NO: 82394 - DNA, 26 bp, Homo sapiens
gatagtacttttttttttataaatac

SEQ ID NO: 82395 - DNA, 26 bp, Homo sapiens
atagtacttttttttttataaataca

SEQ ID NO: 82396 - DNA, 26 bp, Homo sapiens
tagtacttttttttttataaatacaa

SEQ ID NO: 82397 - DNA, 26 bp, Homo sapiens
agtacttttttttttataaatacaat

SEQ ID NO: 82398 - DNA, 26 bp, Homo sapiens
gtacttttttttttataaatacaata

SEQ ID NO: 82399 - DNA, 26 bp, Homo sapiens
tacttttttttttataaatacaatat

SEQ ID NO: 82400 - DNA, 26 bp, Homo sapiens
acttttttttttataaatacaatata

SEQ ID NO: 82401 - DNA, 26 bp, Homo sapiens
cttttttttttataaatacaatataa

SEQ ID NO: 82402 - DNA, 26 bp, Homo sapiens
ttttttttttataaatacaatataaa

SEQ ID NO: 82403 - DNA, 26 bp, Homo sapiens
tttttttttataaatacaatataaag

SEQ ID NO: 82404 - DNA, 26 bp, Homo sapiens
ttttttttataaatacaatataaagg

SEQ ID NO: 82405 - DNA, 26 bp, Homo sapiens
tttttttataaatacaatataaaggt

SEQ ID NO: 82406 - DNA, 26 bp, Homo sapiens
ttttttataaatacaatataaaggtg

SEQ ID NO: 82407 - DNA, 26 bp, Homo sapiens
tttttataaatacaatataaaggtgg

SEQ ID NO: 82408 - DNA, 26 bp, Homo sapiens
ttttataaatacaatataaaggtggc

SEQ ID NO: 82409 - DNA, 26 bp, Homo sapiens
tttataaatacaatataaaggtggca

SEQ ID NO: 82410 - DNA, 26 bp, Homo sapiens
ttataaatacaatataaaggtggcaa

SEQ ID NO: 82411 - DNA, 26 bp, Homo sapiens
tataaatacaatataaaggtggcaaa

SEQ ID NO: 82412 - DNA, 26 bp, Homo sapiens
ataaatacaatataaaggtggcaaaa

SEQ ID NO: 82413 - DNA, 26 bp, Homo sapiens
taaatacaatataaaggtggcaaaat

SEQ ID NO: 82414 - DNA, 26 bp, Homo sapiens
aaatacaatataaaggtggcaaaata

SEQ ID NO: 82415 - DNA, 26 bp, Homo sapiens
aatacaatataaaggtggcaaaataa

SEQ ID NO: 82416 - DNA, 26 bp, Homo sapiens
atacaatataaaggtggcaaaataat

SEQ ID NO: 82417 - DNA, 26 bp, Homo sapiens
tacaatataaaggtggcaaaataatg

SEQ ID NO: 82418 - DNA, 26 bp, Homo sapiens
acaatataaaggtggcaaaataatgc

SEQ ID NO: 82419 - DNA, 26 bp, Homo sapiens
caatataaaggtggcaaaataatgct

SEQ ID NO: 82420 - DNA, 26 bp, Homo sapiens
aatataaaggtggcaaaataatgcta

SEQ ID NO: 82421 - DNA, 26 bp, Homo sapiens
atataaaggtggcaaaataatgctag

SEQ ID NO: 82422 - DNA, 26 bp, Homo sapiens
tataaaggtggcaaaataatgctagt

SEQ ID NO: 82423 - DNA, 26 bp, Homo sapiens
ataaaggtggcaaaataatgctagtt

SEQ ID NO: 82424 - DNA, 26 bp, Homo sapiens
taaaggtggcaaaataatgctagtta

SEQ ID NO: 82425 - DNA, 26 bp, Homo sapiens
aaaggtggcaaaataatgctagttaa

SEQ ID NO: 82426 - DNA, 26 bp, Homo sapiens
aaggtggcaaaataatgctagttaat

SEQ ID NO: 82427 - DNA, 26 bp, Homo sapiens
aggtggcaaaataatgctagttaatc

SEQ ID NO: 82428 - DNA, 26 bp, Homo sapiens
ggtggcaaaataatgctagttaatcc

SEQ ID NO: 82429 - DNA, 26 bp, Homo sapiens
gtggcaaaataatgctagttaatccc

SEQ ID NO: 82430 - DNA, 26 bp, Homo sapiens
tggcaaaataatgctagttaatccca

SEQ ID NO: 82431 - DNA, 26 bp, Homo sapiens
ggcaaaataatgctagttaatcccaa

SEQ ID NO: 82432 - DNA, 26 bp, Homo sapiens
gcaaaataatgctagttaatcccaaa

SEQ ID NO: 82433 - DNA, 26 bp, Homo sapiens
caaaataatgctagttaatcccaaac

SEQ ID NO: 82434 - DNA, 26 bp, Homo sapiens
aaaataatgctagttaatcccaaacc

SEQ ID NO: 82435 - DNA, 26 bp, Homo sapiens
aaataatgctagttaatcccaaaccc

SEQ ID NO: 82436 - DNA, 26 bp, Homo sapiens
aataatgctagttaatcccaaaccca

SEQ ID NO: 82437 - DNA, 26 bp, Homo sapiens
ataatgctagttaatcccaaacccag

SEQ ID NO: 82438 - DNA, 26 bp, Homo sapiens
taatgctagttaatcccaaacccagc

SEQ ID NO: 82439 - DNA, 26 bp, Homo sapiens
aatgctagttaatcccaaacccagca

SEQ ID NO: 82440 - DNA, 26 bp, Homo sapiens
atgctagttaatcccaaacccagcaa

SEQ ID NO: 82441 - DNA, 26 bp, Homo sapiens
tgctagttaatcccaaacccagcaaa

SEQ ID NO: 82442 - DNA, 26 bp, Homo sapiens
gctagttaatcccaaacccagcaaat

SEQ ID NO: 82443 - DNA, 26 bp, Homo sapiens
ctagttaatcccaaacccagcaaatc

SEQ ID NO: 82444 - DNA, 26 bp, Homo sapiens
tagttaatcccaaacccagcaaatca

SEQ ID NO: 82445 - DNA, 26 bp, Homo sapiens
agttaatcccaaacccagcaaatcag

SEQ ID NO: 82446 - DNA, 26 bp, Homo sapiens
gttaatcccaaacccagcaaatcagc

SEQ ID NO: 82447 - DNA, 26 bp, Homo sapiens
ttaatcccaaacccagcaaatcagca

SEQ ID NO: 82448 - DNA, 26 bp, Homo sapiens
taatcccaaacccagcaaatcagcaa

SEQ ID NO: 82449 - DNA, 26 bp, Homo sapiens
aatcccaaacccagcaaatcagcaaa

SEQ ID NO: 82450 - DNA, 26 bp, Homo sapiens
atcccaaacccagcaaatcagcaaaa

SEQ ID NO: 82451 - DNA, 26 bp, Homo sapiens
tcccaaacccagcaaatcagcaaaaa

SEQ ID NO: 82452 - DNA, 26 bp, Homo sapiens
cccaaacccagcaaatcagcaaaaaa

SEQ ID NO: 82453 - DNA, 26 bp, Homo sapiens
ccaaacccagcaaatcagcaaaaaaa

SEQ ID NO: 82454 - DNA, 26 bp, Homo sapiens
caaacccagcaaatcagcaaaaaaag

SEQ ID NO: 82455 - DNA, 26 bp, Homo sapiens
aaacccagcaaatcagcaaaaaaagg

SEQ ID NO: 82456 - DNA, 26 bp, Homo sapiens
aacccagcaaatcagcaaaaaaaggt

SEQ ID NO: 82457 - DNA, 26 bp, Homo sapiens
acccagcaaatcagcaaaaaaaggtc

SEQ ID NO: 82458 - DNA, 26 bp, Homo sapiens
cccagcaaatcagcaaaaaaaggtca

SEQ ID NO: 82459 - DNA, 26 bp, Homo sapiens
ccagcaaatcagcaaaaaaaggtcac

SEQ ID NO: 82460 - DNA, 26 bp, Homo sapiens
cagcaaatcagcaaaaaaaggtcaca

SEQ ID NO: 82461 - DNA, 26 bp, Homo sapiens
agcaaatcagcaaaaaaaggtcacat

SEQ ID NO: 82462 - DNA, 26 bp, Homo sapiens
gcaaatcagcaaaaaaaggtcacatt

SEQ ID NO: 82463 - DNA, 26 bp, Homo sapiens
caaatcagcaaaaaaaggtcacattc

SEQ ID NO: 82464 - DNA, 26 bp, Homo sapiens
aaatcagcaaaaaaaggtcacattca

SEQ ID NO: 82465 - DNA, 26 bp, Homo sapiens
aatcagcaaaaaaaggtcacattcag

SEQ ID NO: 82466 - DNA, 26 bp, Homo sapiens
atcagcaaaaaaaggtcacattcaga

SEQ ID NO: 82467 - DNA, 26 bp, Homo sapiens
tcagcaaaaaaaggtcacattcagaa

SEQ ID NO: 82468 - DNA, 26 bp, Homo sapiens
cagcaaaaaaaggtcacattcagaaa

SEQ ID NO: 82469 - DNA, 26 bp, Homo sapiens
agcaaaaaaaggtcacattcagaaaa

SEQ ID NO: 82470 - DNA, 26 bp, Homo sapiens
gcaaaaaaaggtcacattcagaaaaa

SEQ ID NO: 82471 - DNA, 26 bp, Homo sapiens
caaaaaaaggtcacattcagaaaaat

SEQ ID NO: 82472 - DNA, 26 bp, Homo sapiens
aaaaaaaggtcacattcagaaaaatt

SEQ ID NO: 82473 - DNA, 26 bp, Homo sapiens
aaaaaaggtcacattcagaaaaattt

SEQ ID NO: 82474 - DNA, 26 bp, Homo sapiens
aaaaaggtcacattcagaaaaatttg

SEQ ID NO: 82475 - DNA, 26 bp, Homo sapiens
aaaaggtcacattcagaaaaatttgg

SEQ ID NO: 82476 - DNA, 26 bp, Homo sapiens
aaaggtcacattcagaaaaatttggc

SEQ ID NO: 82477 - DNA, 26 bp, Homo sapiens
aaggtcacattcagaaaaatttggca

SEQ ID NO: 82478 - DNA, 26 bp, Homo sapiens
aggtcacattcagaaaaatttggcaa

SEQ ID NO: 82479 - DNA, 26 bp, Homo sapiens
ggtcacattcagaaaaatttggcaag

SEQ ID NO: 82480 - DNA, 26 bp, Homo sapiens
gtcacattcagaaaaatttggcaagt

SEQ ID NO: 82481 - DNA, 26 bp, Homo sapiens
tcacattcagaaaaatttggcaagta

SEQ ID NO: 82482 - DNA, 26 bp, Homo sapiens
cacattcagaaaaatttggcaagtaa

SEQ ID NO: 82483 - DNA, 26 bp, Homo sapiens
acattcagaaaaatttggcaagtaag

SEQ ID NO: 82484 - DNA, 26 bp, Homo sapiens
cattcagaaaaatttggcaagtaaga

SEQ ID NO: 82485 - DNA, 26 bp, Homo sapiens
attcagaaaaatttggcaagtaagac

SEQ ID NO: 82486 - DNA, 26 bp, Homo sapiens
ttcagaaaaatttggcaagtaagaca

SEQ ID NO: 82487 - DNA, 26 bp, Homo sapiens
tcagaaaaatttggcaagtaagacat

SEQ ID NO: 82488 - DNA, 26 bp, Homo sapiens
cagaaaaatttggcaagtaagacata

SEQ ID NO: 82489 - DNA, 26 bp, Homo sapiens
agaaaaatttggcaagtaagacataa

SEQ ID NO: 82490 - DNA, 26 bp, Homo sapiens
gaaaaatttggcaagtaagacataag

SEQ ID NO: 82491 - DNA, 26 bp, Homo sapiens
aaaaatttggcaagtaagacataagt

SEQ ID NO: 82492 - DNA, 26 bp, Homo sapiens
aaaatttggcaagtaagacataagtc

SEQ ID NO: 82493 - DNA, 26 bp, Homo sapiens
aaatttggcaagtaagacataagtca

SEQ ID NO: 82494 - DNA, 26 bp, Homo sapiens
aatttggcaagtaagacataagtcat

SEQ ID NO: 82495 - DNA, 26 bp, Homo sapiens
atttggcaagtaagacataagtcata

SEQ ID NO: 82496 - DNA, 26 bp, Homo sapiens
tttggcaagtaagacataagtcataa

SEQ ID NO: 82497 - DNA, 26 bp, Homo sapiens
ttggcaagtaagacataagtcataat

SEQ ID NO: 82498 - DNA, 26 bp, Homo sapiens
tggcaagtaagacataagtcataatt

SEQ ID NO: 82499 - DNA, 26 bp, Homo sapiens
ggcaagtaagacataagtcataattc

SEQ ID NO: 82500 - DNA, 26 bp, Homo sapiens
gcaagtaagacataagtcataattct

SEQ ID NO: 82501 - DNA, 26 bp, Homo sapiens
caagtaagacataagtcataattcta

SEQ ID NO: 82502 - DNA, 26 bp, Homo sapiens
aagtaagacataagtcataattctac

SEQ ID NO: 82503 - DNA, 26 bp, Homo sapiens
agtaagacataagtcataattctaca

SEQ ID NO: 82504 - DNA, 26 bp, Homo sapiens
gtaagacataagtcataattctacaa

SEQ ID NO: 82505 - DNA, 26 bp, Homo sapiens
taagacataagtcataattctacaat

SEQ ID NO: 82506 - DNA, 26 bp, Homo sapiens
aagacataagtcataattctacaata

SEQ ID NO: 82507 - DNA, 26 bp, Homo sapiens
agacataagtcataattctacaatag

SEQ ID NO: 82508 - DNA, 26 bp, Homo sapiens
gacataagtcataattctacaataga

SEQ ID NO: 82509 - DNA, 26 bp, Homo sapiens
acataagtcataattctacaatagag

SEQ ID NO: 82510 - DNA, 26 bp, Homo sapiens
cataagtcataattctacaatagaga

SEQ ID NO: 82511 - DNA, 26 bp, Homo sapiens
ataagtcataattctacaatagagat

SEQ ID NO: 82512 - DNA, 26 bp, Homo sapiens
taagtcataattctacaatagagata

SEQ ID NO: 82513 - DNA, 26 bp, Homo sapiens
aagtcataattctacaatagagatag

SEQ ID NO: 82514 - DNA, 26 bp, Homo sapiens
agtcataattctacaatagagatagg

SEQ ID NO: 82515 - DNA, 26 bp, Homo sapiens
gtcataattctacaatagagataggt

SEQ ID NO: 82516 - DNA, 26 bp, Homo sapiens
tcataattctacaatagagataggtc

SEQ ID NO: 82517 - DNA, 26 bp, Homo sapiens
cataattctacaatagagataggtcc

SEQ ID NO: 82518 - DNA, 26 bp, Homo sapiens
ataattctacaatagagataggtcca

SEQ ID NO: 82519 - DNA, 26 bp, Homo sapiens
taattctacaatagagataggtccat

SEQ ID NO: 82520 - DNA, 26 bp, Homo sapiens
aattctacaatagagataggtccatg

SEQ ID NO: 82521 - DNA, 26 bp, Homo sapiens
attctacaatagagataggtccatga

SEQ ID NO: 82522 - DNA, 26 bp, Homo sapiens
ttctacaatagagataggtccatgag

SEQ ID NO: 82523 - DNA, 26 bp, Homo sapiens
tctacaatagagataggtccatgaga

SEQ ID NO: 82524 - DNA, 26 bp, Homo sapiens
ctacaatagagataggtccatgagag

SEQ ID NO: 82525 - DNA, 26 bp, Homo sapiens
tacaatagagataggtccatgagaga

SEQ ID NO: 82526 - DNA, 26 bp, Homo sapiens
acaatagagataggtccatgagagac

SEQ ID NO: 82527 - DNA, 26 bp, Homo sapiens
caatagagataggtccatgagagact

SEQ ID NO: 82528 - DNA, 26 bp, Homo sapiens
aatagagataggtccatgagagactg

SEQ ID NO: 82529 - DNA, 26 bp, Homo sapiens
atagagataggtccatgagagactgt

SEQ ID NO: 82530 - DNA, 26 bp, Homo sapiens
tagagataggtccatgagagactgtg

SEQ ID NO: 82531 - DNA, 26 bp, Homo sapiens
agagataggtccatgagagactgtgt

SEQ ID NO: 82532 - DNA, 26 bp, Homo sapiens
gagataggtccatgagagactgtgta

SEQ ID NO: 82533 - DNA, 26 bp, Homo sapiens
agataggtccatgagagactgtgtat

SEQ ID NO: 82534 - DNA, 26 bp, Homo sapiens
gataggtccatgagagactgtgtatg

SEQ ID NO: 82535 - DNA, 26 bp, Homo sapiens
ataggtccatgagagactgtgtatgg

SEQ ID NO: 82536 - DNA, 26 bp, Homo sapiens
taggtccatgagagactgtgtatggt

SEQ ID NO: 82537 - DNA, 26 bp, Homo sapiens
aggtccatgagagactgtgtatggta

SEQ ID NO: 82538 - DNA, 26 bp, Homo sapiens
ggtccatgagagactgtgtatggtat

SEQ ID NO: 82539 - DNA, 26 bp, Homo sapiens
gtccatgagagactgtgtatggtatc

SEQ ID NO: 82540 - DNA, 26 bp, Homo sapiens
tccatgagagactgtgtatggtatct

SEQ ID NO: 82541 - DNA, 26 bp, Homo sapiens
ccatgagagactgtgtatggtatctt

SEQ ID NO: 82542 - DNA, 26 bp, Homo sapiens
catgagagactgtgtatggtatctta

SEQ ID NO: 82543 - DNA, 26 bp, Homo sapiens
atgagagactgtgtatggtatcttaa

SEQ ID NO: 82544 - DNA, 26 bp, Homo sapiens
tgagagactgtgtatggtatcttaaa

SEQ ID NO: 82545 - DNA, 26 bp, Homo sapiens
gagagactgtgtatggtatcttaaat

SEQ ID NO: 82546 - DNA, 26 bp, Homo sapiens
agagactgtgtatggtatcttaaatt

SEQ ID NO: 82547 - DNA, 26 bp, Homo sapiens
gagactgtgtatggtatcttaaattc

SEQ ID NO: 82548 - DNA, 26 bp, Homo sapiens
agactgtgtatggtatcttaaattcc

SEQ ID NO: 82549 - DNA, 26 bp, Homo sapiens
gactgtgtatggtatcttaaattcca

SEQ ID NO: 82550 - DNA, 26 bp, Homo sapiens
actgtgtatggtatcttaaattccat

SEQ ID NO: 82551 - DNA, 26 bp, Homo sapiens
ctgtgtatggtatcttaaattccata

SEQ ID NO: 82552 - DNA, 26 bp, Homo sapiens
tgtgtatggtatcttaaattccatat

SEQ ID NO: 82553 - DNA, 26 bp, Homo sapiens
gtgtatggtatcttaaattccatatt

SEQ ID NO: 82554 - DNA, 26 bp, Homo sapiens
tgtatggtatcttaaattccatatta

SEQ ID NO: 82555 - DNA, 26 bp, Homo sapiens
gtatggtatcttaaattccatattag

SEQ ID NO: 82556 - DNA, 26 bp, Homo sapiens
tatggtatcttaaattccatattagc

SEQ ID NO: 82557 - DNA, 26 bp, Homo sapiens
atggtatcttaaattccatattagca

SEQ ID NO: 82558 - DNA, 26 bp, Homo sapiens
tggtatcttaaattccatattagcaa

SEQ ID NO: 82559 - DNA, 26 bp, Homo sapiens
ggtatcttaaattccatattagcaat

SEQ ID NO: 82560 - DNA, 26 bp, Homo sapiens
gtatcttaaattccatattagcaatg

SEQ ID NO: 82561 - DNA, 26 bp, Homo sapiens
tatcttaaattccatattagcaatgc

SEQ ID NO: 82562 - DNA, 26 bp, Homo sapiens
atcttaaattccatattagcaatgca

SEQ ID NO: 82563 - DNA, 26 bp, Homo sapiens
tcttaaattccatattagcaatgcat

SEQ ID NO: 82564 - DNA, 26 bp, Homo sapiens
cttaaattccatattagcaatgcata

SEQ ID NO: 82565 - DNA, 26 bp, Homo sapiens
ttaaattccatattagcaatgcatat

SEQ ID NO: 82566 - DNA, 26 bp, Homo sapiens
taaattccatattagcaatgcatata

SEQ ID NO: 82567 - DNA, 26 bp, Homo sapiens
aaattccatattagcaatgcatataa

SEQ ID NO: 82568 - DNA, 26 bp, Homo sapiens
aattccatattagcaatgcatataag

SEQ ID NO: 82569 - DNA, 26 bp, Homo sapiens
attccatattagcaatgcatataagt

SEQ ID NO: 82570 - DNA, 26 bp, Homo sapiens
ttccatattagcaatgcatataagtg

SEQ ID NO: 82571 - DNA, 26 bp, Homo sapiens
tccatattagcaatgcatataagtgc

SEQ ID NO: 82572 - DNA, 26 bp, Homo sapiens
ccatattagcaatgcatataagtgcg

SEQ ID NO: 82573 - DNA, 26 bp, Homo sapiens
catattagcaatgcatataagtgcgg

SEQ ID NO: 82574 - DNA, 26 bp, Homo sapiens
atattagcaatgcatataagtgcggt

SEQ ID NO: 82575 - DNA, 26 bp, Homo sapiens
tattagcaatgcatataagtgcggtc

SEQ ID NO: 82576 - DNA, 26 bp, Homo sapiens
attagcaatgcatataagtgcggtca

SEQ ID NO: 82577 - DNA, 26 bp, Homo sapiens
ttagcaatgcatataagtgcggtcaa

SEQ ID NO: 82578 - DNA, 26 bp, Homo sapiens
tagcaatgcatataagtgcggtcaaa

SEQ ID NO: 82579 - DNA, 26 bp, Homo sapiens
agcaatgcatataagtgcggtcaaag

SEQ ID NO: 82580 - DNA, 26 bp, Homo sapiens
gcaatgcatataagtgcggtcaaaga

SEQ ID NO: 82581 - DNA, 26 bp, Homo sapiens
caatgcatataagtgcggtcaaagaa

SEQ ID NO: 82582 - DNA, 26 bp, Homo sapiens
aatgcatataagtgcggtcaaagaaa

SEQ ID NO: 82583 - DNA, 26 bp, Homo sapiens
atgcatataagtgcggtcaaagaaac

SEQ ID NO: 82584 - DNA, 26 bp, Homo sapiens
tgcatataagtgcggtcaaagaaact

SEQ ID NO: 82585 - DNA, 26 bp, Homo sapiens
gcatataagtgcggtcaaagaaactt

SEQ ID NO: 82586 - DNA, 26 bp, Homo sapiens
catataagtgcggtcaaagaaacttg

SEQ ID NO: 82587 - DNA, 26 bp, Homo sapiens
atataagtgcggtcaaagaaacttga

SEQ ID NO: 82588 - DNA, 26 bp, Homo sapiens
tataagtgcggtcaaagaaacttgaa

SEQ ID NO: 82589 - DNA, 26 bp, Homo sapiens
ataagtgcggtcaaagaaacttgaac

SEQ ID NO: 82590 - DNA, 26 bp, Homo sapiens
taagtgcggtcaaagaaacttgaacc

SEQ ID NO: 82591 - DNA, 26 bp, Homo sapiens
aagtgcggtcaaagaaacttgaacca

SEQ ID NO: 82592 - DNA, 26 bp, Homo sapiens
agtgcggtcaaagaaacttgaaccac

SEQ ID NO: 82593 - DNA, 26 bp, Homo sapiens
gtgcggtcaaagaaacttgaaccaca

SEQ ID NO: 82594 - DNA, 26 bp, Homo sapiens
tgcggtcaaagaaacttgaaccacac

SEQ ID NO: 82595 - DNA, 26 bp, Homo sapiens
gcggtcaaagaaacttgaaccacact

SEQ ID NO: 82596 - DNA, 26 bp, Homo sapiens
cggtcaaagaaacttgaaccacactg

SEQ ID NO: 82597 - DNA, 26 bp, Homo sapiens
ggtcaaagaaacttgaaccacactgc

SEQ ID NO: 82598 - DNA, 26 bp, Homo sapiens
gtcaaagaaacttgaaccacactgca

SEQ ID NO: 82599 - DNA, 26 bp, Homo sapiens
tcaaagaaacttgaaccacactgcat

SEQ ID NO: 82600 - DNA, 26 bp, Homo sapiens
caaagaaacttgaaccacactgcata

SEQ ID NO: 82601 - DNA, 26 bp, Homo sapiens
aaagaaacttgaaccacactgcatag

SEQ ID NO: 82602 - DNA, 26 bp, Homo sapiens
aagaaacttgaaccacactgcataga

SEQ ID NO: 82603 - DNA, 26 bp, Homo sapiens
agaaacttgaaccacactgcatagaa

SEQ ID NO: 82604 - DNA, 26 bp, Homo sapiens
gaaacttgaaccacactgcatagaac

SEQ ID NO: 82605 - DNA, 26 bp, Homo sapiens
aaacttgaaccacactgcatagaaca

SEQ ID NO: 82606 - DNA, 26 bp, Homo sapiens
aacttgaaccacactgcatagaacat

SEQ ID NO: 82607 - DNA, 26 bp, Homo sapiens
acttgaaccacactgcatagaacatc

SEQ ID NO: 82608 - DNA, 26 bp, Homo sapiens
cttgaaccacactgcatagaacatct

SEQ ID NO: 82609 - DNA, 26 bp, Homo sapiens
ttgaaccacactgcatagaacatctg

SEQ ID NO: 82610 - DNA, 26 bp, Homo sapiens
tgaaccacactgcatagaacatctgc

SEQ ID NO: 82611 - DNA, 26 bp, Homo sapiens
gaaccacactgcatagaacatctgcc

SEQ ID NO: 82612 - DNA, 26 bp, Homo sapiens
aaccacactgcatagaacatctgcca

SEQ ID NO: 82613 - DNA, 26 bp, Homo sapiens
accacactgcatagaacatctgccac

SEQ ID NO: 82614 - DNA, 26 bp, Homo sapiens
ccacactgcatagaacatctgccacc

SEQ ID NO: 82615 - DNA, 26 bp, Homo sapiens
cacactgcatagaacatctgccaccc

SEQ ID NO: 82616 - DNA, 26 bp, Homo sapiens
acactgcatagaacatctgccacccg

SEQ ID NO: 82617 - DNA, 26 bp, Homo sapiens
cactgcatagaacatctgccacccgg

SEQ ID NO: 82618 - DNA, 26 bp, Homo sapiens
actgcatagaacatctgccacccggt

SEQ ID NO: 82619 - DNA, 26 bp, Homo sapiens
ctgcatagaacatctgccacccggtg

SEQ ID NO: 82620 - DNA, 26 bp, Homo sapiens
tgcatagaacatctgccacccggtgc

SEQ ID NO: 82621 - DNA, 26 bp, Homo sapiens
gcatagaacatctgccacccggtgct

SEQ ID NO: 82622 - DNA, 26 bp, Homo sapiens
catagaacatctgccacccggtgctc

SEQ ID NO: 82623 - DNA, 26 bp, Homo sapiens
atagaacatctgccacccggtgctca

SEQ ID NO: 82624 - DNA, 26 bp, Homo sapiens
tagaacatctgccacccggtgctcaa

SEQ ID NO: 82625 - DNA, 26 bp, Homo sapiens
agaacatctgccacccggtgctcaag

SEQ ID NO: 82626 - DNA, 26 bp, Homo sapiens
gaacatctgccacccggtgctcaagc

SEQ ID NO: 82627 - DNA, 26 bp, Homo sapiens
aacatctgccacccggtgctcaagcc

SEQ ID NO: 82628 - DNA, 26 bp, Homo sapiens
acatctgccacccggtgctcaagcct

SEQ ID NO: 82629 - DNA, 26 bp, Homo sapiens
catctgccacccggtgctcaagccta

SEQ ID NO: 82630 - DNA, 26 bp, Homo sapiens
atctgccacccggtgctcaagcctat

SEQ ID NO: 82631 - DNA, 26 bp, Homo sapiens
tctgccacccggtgctcaagcctatt

SEQ ID NO: 82632 - DNA, 26 bp, Homo sapiens
ctgccacccggtgctcaagcctatta

SEQ ID NO: 82633 - DNA, 26 bp, Homo sapiens
tgccacccggtgctcaagcctattaa

SEQ ID NO: 82634 - DNA, 26 bp, Homo sapiens
gccacccggtgctcaagcctattaat

SEQ ID NO: 82635 - DNA, 26 bp, Homo sapiens
ccacccggtgctcaagcctattaatc

SEQ ID NO: 82636 - DNA, 26 bp, Homo sapiens
cacccggtgctcaagcctattaatca

SEQ ID NO: 82637 - DNA, 26 bp, Homo sapiens
acccggtgctcaagcctattaatcac

SEQ ID NO: 82638 - DNA, 26 bp, Homo sapiens
cccggtgctcaagcctattaatcact

SEQ ID NO: 82639 - DNA, 26 bp, Homo sapiens
ccggtgctcaagcctattaatcactt

SEQ ID NO: 82640 - DNA, 26 bp, Homo sapiens
cggtgctcaagcctattaatcactta

SEQ ID NO: 82641 - DNA, 26 bp, Homo sapiens
ggtgctcaagcctattaatcacttaa

SEQ ID NO: 82642 - DNA, 26 bp, Homo sapiens
gtgctcaagcctattaatcacttaaa

SEQ ID NO: 82643 - DNA, 26 bp, Homo sapiens
tgctcaagcctattaatcacttaaac

SEQ ID NO: 82644 - DNA, 26 bp, Homo sapiens
gctcaagcctattaatcacttaaacc

SEQ ID NO: 82645 - DNA, 26 bp, Homo sapiens
ctcaagcctattaatcacttaaacct

SEQ ID NO: 82646 - DNA, 26 bp, Homo sapiens
tcaagcctattaatcacttaaacctt

SEQ ID NO: 82647 - DNA, 26 bp, Homo sapiens
caagcctattaatcacttaaaccttg

SEQ ID NO: 82648 - DNA, 26 bp, Homo sapiens
aagcctattaatcacttaaaccttgg

SEQ ID NO: 82649 - DNA, 26 bp, Homo sapiens
agcctattaatcacttaaaccttggt

SEQ ID NO: 82650 - DNA, 26 bp, Homo sapiens
gcctattaatcacttaaaccttggtt

SEQ ID NO: 82651 - DNA, 26 bp, Homo sapiens
cctattaatcacttaaaccttggttg

SEQ ID NO: 82652 - DNA, 26 bp, Homo sapiens
ctattaatcacttaaaccttggttgg

SEQ ID NO: 82653 - DNA, 26 bp, Homo sapiens
tattaatcacttaaaccttggttggt

SEQ ID NO: 82654 - DNA, 26 bp, Homo sapiens
attaatcacttaaaccttggttggtt

SEQ ID NO: 82655 - DNA, 26 bp, Homo sapiens
ttaatcacttaaaccttggttggttg

SEQ ID NO: 82656 - DNA, 26 bp, Homo sapiens
taatcacttaaaccttggttggttgg

SEQ ID NO: 82657 - DNA, 26 bp, Homo sapiens
aatcacttaaaccttggttggttggt

SEQ ID NO: 82658 - DNA, 26 bp, Homo sapiens
atcacttaaaccttggttggttggtg

SEQ ID NO: 82659 - DNA, 26 bp, Homo sapiens
tcacttaaaccttggttggttggtgt

SEQ ID NO: 82660 - DNA, 26 bp, Homo sapiens
cacttaaaccttggttggttggtgtt

SEQ ID NO: 82661 - DNA, 26 bp, Homo sapiens
acttaaaccttggttggttggtgttc

SEQ ID NO: 82662 - DNA, 26 bp, Homo sapiens
cttaaaccttggttggttggtgttct

SEQ ID NO: 82663 - DNA, 26 bp, Homo sapiens
ttaaaccttggttggttggtgttctt

SEQ ID NO: 82664 - DNA, 26 bp, Homo sapiens
taaaccttggttggttggtgttctta

SEQ ID NO: 82665 - DNA, 26 bp, Homo sapiens
aaaccttggttggttggtgttcttac

SEQ ID NO: 82666 - DNA, 26 bp, Homo sapiens
aaccttggttggttggtgttcttaca

SEQ ID NO: 82667 - DNA, 26 bp, Homo sapiens
accttggttggttggtgttcttacaa

SEQ ID NO: 82668 - DNA, 26 bp, Homo sapiens
ccttggttggttggtgttcttacaaa

SEQ ID NO: 82669 - DNA, 26 bp, Homo sapiens
cttggttggttggtgttcttacaaag

SEQ ID NO: 82670 - DNA, 26 bp, Homo sapiens
ttggttggttggtgttcttacaaaga

SEQ ID NO: 82671 - DNA, 26 bp, Homo sapiens
tggttggttggtgttcttacaaagaa

SEQ ID NO: 82672 - DNA, 26 bp, Homo sapiens
ggttggttggtgttcttacaaagaag

SEQ ID NO: 82673 - DNA, 26 bp, Homo sapiens
gttggttggtgttcttacaaagaagt

SEQ ID NO: 82674 - DNA, 26 bp, Homo sapiens
ttggttggtgttcttacaaagaagta

SEQ ID NO: 82675 - DNA, 26 bp, Homo sapiens
tggttggtgttcttacaaagaagtag

SEQ ID NO: 82676 - DNA, 26 bp, Homo sapiens
ggttggtgttcttacaaagaagtaga

SEQ ID NO: 82677 - DNA, 26 bp, Homo sapiens
gttggtgttcttacaaagaagtagaa

SEQ ID NO: 82678 - DNA, 26 bp, Homo sapiens
ttggtgttcttacaaagaagtagaaa

SEQ ID NO: 82679 - DNA, 26 bp, Homo sapiens
tggtgttcttacaaagaagtagaaag

SEQ ID NO: 82680 - DNA, 26 bp, Homo sapiens
ggtgttcttacaaagaagtagaaagc

SEQ ID NO: 82681 - DNA, 26 bp, Homo sapiens
gtgttcttacaaagaagtagaaagct

SEQ ID NO: 82682 - DNA, 26 bp, Homo sapiens
tgttcttacaaagaagtagaaagctg

SEQ ID NO: 82683 - DNA, 26 bp, Homo sapiens
gttcttacaaagaagtagaaagctgt

SEQ ID NO: 82684 - DNA, 26 bp, Homo sapiens
ttcttacaaagaagtagaaagctgta

SEQ ID NO: 82685 - DNA, 26 bp, Homo sapiens
tcttacaaagaagtagaaagctgtac

SEQ ID NO: 82686 - DNA, 26 bp, Homo sapiens
cttacaaagaagtagaaagctgtaca

SEQ ID NO: 82687 - DNA, 26 bp, Homo sapiens
ttacaaagaagtagaaagctgtacat

SEQ ID NO: 82688 - DNA, 26 bp, Homo sapiens
tacaaagaagtagaaagctgtacatg

SEQ ID NO: 82689 - DNA, 26 bp, Homo sapiens
acaaagaagtagaaagctgtacatgt

SEQ ID NO: 82690 - DNA, 26 bp, Homo sapiens
caaagaagtagaaagctgtacatgtg

SEQ ID NO: 82691 - DNA, 26 bp, Homo sapiens
aaagaagtagaaagctgtacatgtga

SEQ ID NO: 82692 - DNA, 26 bp, Homo sapiens
aagaagtagaaagctgtacatgtgaa

SEQ ID NO: 82693 - DNA, 26 bp, Homo sapiens
agaagtagaaagctgtacatgtgaaa

SEQ ID NO: 82694 - DNA, 26 bp, Homo sapiens
gaagtagaaagctgtacatgtgaaac

SEQ ID NO: 82695 - DNA, 26 bp, Homo sapiens
aagtagaaagctgtacatgtgaaaca

SEQ ID NO: 82696 - DNA, 26 bp, Homo sapiens
agtagaaagctgtacatgtgaaacag

SEQ ID NO: 82697 - DNA, 26 bp, Homo sapiens
gtagaaagctgtacatgtgaaacagt

SEQ ID NO: 82698 - DNA, 26 bp, Homo sapiens
tagaaagctgtacatgtgaaacagta

SEQ ID NO: 82699 - DNA, 26 bp, Homo sapiens
agaaagctgtacatgtgaaacagtaa

SEQ ID NO: 82700 - DNA, 26 bp, Homo sapiens
gaaagctgtacatgtgaaacagtaat

SEQ ID NO: 82701 - DNA, 26 bp, Homo sapiens
aaagctgtacatgtgaaacagtaata

SEQ ID NO: 82702 - DNA, 26 bp, Homo sapiens
aagctgtacatgtgaaacagtaatat

SEQ ID NO: 82703 - DNA, 26 bp, Homo sapiens
agctgtacatgtgaaacagtaatatg

SEQ ID NO: 82704 - DNA, 26 bp, Homo sapiens
gctgtacatgtgaaacagtaatatga

SEQ ID NO: 82705 - DNA, 26 bp, Homo sapiens
ctgtacatgtgaaacagtaatatgaa

SEQ ID NO: 82706 - DNA, 26 bp, Homo sapiens
tgtacatgtgaaacagtaatatgaaa

SEQ ID NO: 82707 - DNA, 26 bp, Homo sapiens
gtacatgtgaaacagtaatatgaaat

SEQ ID NO: 82708 - DNA, 26 bp, Homo sapiens
tacatgtgaaacagtaatatgaaata

SEQ ID NO: 82709 - DNA, 26 bp, Homo sapiens
acatgtgaaacagtaatatgaaatat

SEQ ID NO: 82710 - DNA, 26 bp, Homo sapiens
catgtgaaacagtaatatgaaatata

SEQ ID NO: 82711 - DNA, 26 bp, Homo sapiens
atgtgaaacagtaatatgaaatatat

SEQ ID NO: 82712 - DNA, 26 bp, Homo sapiens
tgtgaaacagtaatatgaaatatatg

SEQ ID NO: 82713 - DNA, 26 bp, Homo sapiens
gtgaaacagtaatatgaaatatatgg

SEQ ID NO: 82714 - DNA, 26 bp, Homo sapiens
tgaaacagtaatatgaaatatatggg

SEQ ID NO: 82715 - DNA, 26 bp, Homo sapiens
gaaacagtaatatgaaatatatgggg

SEQ ID NO: 82716 - DNA, 26 bp, Homo sapiens
aaacagtaatatgaaatatatggggt

SEQ ID NO: 82717 - DNA, 26 bp, Homo sapiens
aacagtaatatgaaatatatggggtg

SEQ ID NO: 82718 - DNA, 26 bp, Homo sapiens
acagtaatatgaaatatatggggtgg

SEQ ID NO: 82719 - DNA, 26 bp, Homo sapiens
cagtaatatgaaatatatggggtggt

SEQ ID NO: 82720 - DNA, 26 bp, Homo sapiens
agtaatatgaaatatatggggtggta

SEQ ID NO: 82721 - DNA, 26 bp, Homo sapiens
gtaatatgaaatatatggggtggtac

SEQ ID NO: 82722 - DNA, 26 bp, Homo sapiens
taatatgaaatatatggggtggtaca

SEQ ID NO: 82723 - DNA, 26 bp, Homo sapiens
aatatgaaatatatggggtggtacac

SEQ ID NO: 82724 - DNA, 26 bp, Homo sapiens
atatgaaatatatggggtggtacaca

SEQ ID NO: 82725 - DNA, 26 bp, Homo sapiens
tatgaaatatatggggtggtacacag

SEQ ID NO: 82726 - DNA, 26 bp, Homo sapiens
atgaaatatatggggtggtacacaga

SEQ ID NO: 82727 - DNA, 26 bp, Homo sapiens
tgaaatatatggggtggtacacagat

SEQ ID NO: 82728 - DNA, 26 bp, Homo sapiens
gaaatatatggggtggtacacagata

SEQ ID NO: 82729 - DNA, 26 bp, Homo sapiens
aaatatatggggtggtacacagatat

SEQ ID NO: 82730 - DNA, 26 bp, Homo sapiens
aatatatggggtggtacacagatata

SEQ ID NO: 82731 - DNA, 26 bp, Homo sapiens
atatatggggtggtacacagatataa

SEQ ID NO: 82732 - DNA, 26 bp, Homo sapiens
tatatggggtggtacacagatataaa

SEQ ID NO: 82733 - DNA, 26 bp, Homo sapiens
atatggggtggtacacagatataaaa

SEQ ID NO: 82734 - DNA, 26 bp, Homo sapiens
tatggggtggtacacagatataaaat

SEQ ID NO: 82735 - DNA, 26 bp, Homo sapiens
atggggtggtacacagatataaaatt

SEQ ID NO: 82736 - DNA, 26 bp, Homo sapiens
tggggtggtacacagatataaaatta

SEQ ID NO: 82737 - DNA, 26 bp, Homo sapiens
ggggtggtacacagatataaaattat

SEQ ID NO: 82738 - DNA, 26 bp, Homo sapiens
gggtggtacacagatataaaattatt

SEQ ID NO: 82739 - DNA, 26 bp, Homo sapiens
ggtggtacacagatataaaattattt

SEQ ID NO: 82740 - DNA, 26 bp, Homo sapiens
gtggtacacagatataaaattatttt

SEQ ID NO: 82741 - DNA, 26 bp, Homo sapiens
tggtacacagatataaaattatttta

SEQ ID NO: 82742 - DNA, 26 bp, Homo sapiens
ggtacacagatataaaattattttaa

SEQ ID NO: 82743 - DNA, 26 bp, Homo sapiens
gtacacagatataaaattattttaaa

SEQ ID NO: 82744 - DNA, 26 bp, Homo sapiens
tacacagatataaaattattttaaaa

SEQ ID NO: 82745 - DNA, 26 bp, Homo sapiens
acacagatataaaattattttaaaaa

SEQ ID NO: 82746 - DNA, 26 bp, Homo sapiens
cacagatataaaattattttaaaaaa

SEQ ID NO: 82747 - DNA, 26 bp, Homo sapiens
acagatataaaattattttaaaaaat

SEQ ID NO: 82748 - DNA, 26 bp, Homo sapiens
cagatataaaattattttaaaaaata

SEQ ID NO: 82749 - DNA, 26 bp, Homo sapiens
agatataaaattattttaaaaaatac

SEQ ID NO: 82750 - DNA, 26 bp, Homo sapiens
gatataaaattattttaaaaaatact

SEQ ID NO: 82751 - DNA, 26 bp, Homo sapiens
atataaaattattttaaaaaatacta

SEQ ID NO: 82752 - DNA, 26 bp, Homo sapiens
tataaaattattttaaaaaatactac

SEQ ID NO: 82753 - DNA, 26 bp, Homo sapiens
ataaaattattttaaaaaatactacg

SEQ ID NO: 82754 - DNA, 26 bp, Homo sapiens
taaaattattttaaaaaatactacgt

SEQ ID NO: 82755 - DNA, 26 bp, Homo sapiens
aaaattattttaaaaaatactacgta

SEQ ID NO: 82756 - DNA, 26 bp, Homo sapiens
aaattattttaaaaaatactacgtat

SEQ ID NO: 82757 - DNA, 26 bp, Homo sapiens
aattattttaaaaaatactacgtatg

SEQ ID NO: 82758 - DNA, 26 bp, Homo sapiens
attattttaaaaaatactacgtatga

SEQ ID NO: 82759 - DNA, 26 bp, Homo sapiens
ttattttaaaaaatactacgtatgaa

SEQ ID NO: 82760 - DNA, 26 bp, Homo sapiens
tattttaaaaaatactacgtatgaat

SEQ ID NO: 82761 - DNA, 26 bp, Homo sapiens
attttaaaaaatactacgtatgaatt

SEQ ID NO: 82762 - DNA, 26 bp, Homo sapiens
ttttaaaaaatactacgtatgaattg

SEQ ID NO: 82763 - DNA, 26 bp, Homo sapiens
tttaaaaaatactacgtatgaattga

SEQ ID NO: 82764 - DNA, 26 bp, Homo sapiens
ttaaaaaatactacgtatgaattgag

SEQ ID NO: 82765 - DNA, 26 bp, Homo sapiens
taaaaaatactacgtatgaattgagt

SEQ ID NO: 82766 - DNA, 26 bp, Homo sapiens
aaaaaatactacgtatgaattgagta

SEQ ID NO: 82767 - DNA, 26 bp, Homo sapiens
aaaaatactacgtatgaattgagtaa

SEQ ID NO: 82768 - DNA, 26 bp, Homo sapiens
aaaatactacgtatgaattgagtaac

SEQ ID NO: 82769 - DNA, 26 bp, Homo sapiens
aaatactacgtatgaattgagtaact

SEQ ID NO: 82770 - DNA, 26 bp, Homo sapiens
aatactacgtatgaattgagtaactg

SEQ ID NO: 82771 - DNA, 26 bp, Homo sapiens
atactacgtatgaattgagtaactga

SEQ ID NO: 82772 - DNA, 26 bp, Homo sapiens
tactacgtatgaattgagtaactgag

SEQ ID NO: 82773 - DNA, 26 bp, Homo sapiens
actacgtatgaattgagtaactgagc

SEQ ID NO: 82774 - DNA, 26 bp, Homo sapiens
ctacgtatgaattgagtaactgagct

SEQ ID NO: 82775 - DNA, 26 bp, Homo sapiens
tacgtatgaattgagtaactgagcta

SEQ ID NO: 82776 - DNA, 26 bp, Homo sapiens
acgtatgaattgagtaactgagctaa

SEQ ID NO: 82777 - DNA, 26 bp, Homo sapiens
cgtatgaattgagtaactgagctaag

SEQ ID NO: 82778 - DNA, 26 bp, Homo sapiens
gtatgaattgagtaactgagctaaga

SEQ ID NO: 82779 - DNA, 26 bp, Homo sapiens
tatgaattgagtaactgagctaagag

SEQ ID NO: 82780 - DNA, 26 bp, Homo sapiens
atgaattgagtaactgagctaagaga

SEQ ID NO: 82781 - DNA, 26 bp, Homo sapiens
tgaattgagtaactgagctaagagag

SEQ ID NO: 82782 - DNA, 26 bp, Homo sapiens
gaattgagtaactgagctaagagagg

SEQ ID NO: 82783 - DNA, 26 bp, Homo sapiens
aattgagtaactgagctaagagaggc

SEQ ID NO: 82784 - DNA, 26 bp, Homo sapiens
attgagtaactgagctaagagaggcc

SEQ ID NO: 82785 - DNA, 26 bp, Homo sapiens
ttgagtaactgagctaagagaggcca

SEQ ID NO: 82786 - DNA, 26 bp, Homo sapiens
tgagtaactgagctaagagaggccac

SEQ ID NO: 82787 - DNA, 26 bp, Homo sapiens
gagtaactgagctaagagaggccact

SEQ ID NO: 82788 - DNA, 26 bp, Homo sapiens
agtaactgagctaagagaggccactt

SEQ ID NO: 82789 - DNA, 26 bp, Homo sapiens
gtaactgagctaagagaggccactta

SEQ ID NO: 82790 - DNA, 26 bp, Homo sapiens
taactgagctaagagaggccacttat

SEQ ID NO: 82791 - DNA, 26 bp, Homo sapiens
aactgagctaagagaggccacttata

SEQ ID NO: 82792 - DNA, 26 bp, Homo sapiens
actgagctaagagaggccacttataa

SEQ ID NO: 82793 - DNA, 26 bp, Homo sapiens
ctgagctaagagaggccacttataaa

SEQ ID NO: 82794 - DNA, 26 bp, Homo sapiens
tgagctaagagaggccacttataaat

SEQ ID NO: 82795 - DNA, 26 bp, Homo sapiens
gagctaagagaggccacttataaata

SEQ ID NO: 82796 - DNA, 26 bp, Homo sapiens
agctaagagaggccacttataaataa

SEQ ID NO: 82797 - DNA, 26 bp, Homo sapiens
gctaagagaggccacttataaataat

SEQ ID NO: 82798 - DNA, 26 bp, Homo sapiens
ctaagagaggccacttataaataatg

SEQ ID NO: 82799 - DNA, 26 bp, Homo sapiens
taagagaggccacttataaataatga

SEQ ID NO: 82800 - DNA, 26 bp, Homo sapiens
aagagaggccacttataaataatgaa

SEQ ID NO: 82801 - DNA, 26 bp, Homo sapiens
agagaggccacttataaataatgaaa

SEQ ID NO: 82802 - DNA, 26 bp, Homo sapiens
gagaggccacttataaataatgaaag

SEQ ID NO: 82803 - DNA, 26 bp, Homo sapiens
agaggccacttataaataatgaaaga

SEQ ID NO: 82804 - DNA, 26 bp, Homo sapiens
gaggccacttataaataatgaaagat

SEQ ID NO: 82805 - DNA, 26 bp, Homo sapiens
aggccacttataaataatgaaagata

SEQ ID NO: 82806 - DNA, 26 bp, Homo sapiens
ggccacttataaataatgaaagatac

SEQ ID NO: 82807 - DNA, 26 bp, Homo sapiens
gccacttataaataatgaaagataca

SEQ ID NO: 82808 - DNA, 26 bp, Homo sapiens
ccacttataaataatgaaagatacat

SEQ ID NO: 82809 - DNA, 26 bp, Homo sapiens
cacttataaataatgaaagatacatg

SEQ ID NO: 82810 - DNA, 26 bp, Homo sapiens
acttataaataatgaaagatacatgt

SEQ ID NO: 82811 - DNA, 26 bp, Homo sapiens
cttataaataatgaaagatacatgtg

SEQ ID NO: 82812 - DNA, 26 bp, Homo sapiens
ttataaataatgaaagatacatgtgt

SEQ ID NO: 82813 - DNA, 26 bp, Homo sapiens
tataaataatgaaagatacatgtgtt

SEQ ID NO: 82814 - DNA, 26 bp, Homo sapiens
ataaataatgaaagatacatgtgttt

SEQ ID NO: 82815 - DNA, 26 bp, Homo sapiens
taaataatgaaagatacatgtgtttt

SEQ ID NO: 82816 - DNA, 26 bp, Homo sapiens
aaataatgaaagatacatgtgttttg

SEQ ID NO: 82817 - DNA, 26 bp, Homo sapiens
aataatgaaagatacatgtgttttgc

SEQ ID NO: 82818 - DNA, 26 bp, Homo sapiens
ataatgaaagatacatgtgttttgca

SEQ ID NO: 82819 - DNA, 26 bp, Homo sapiens
taatgaaagatacatgtgttttgcat

SEQ ID NO: 82820 - DNA, 26 bp, Homo sapiens
aatgaaagatacatgtgttttgcata

SEQ ID NO: 82821 - DNA, 26 bp, Homo sapiens
atgaaagatacatgtgttttgcataa

SEQ ID NO: 82822 - DNA, 26 bp, Homo sapiens
tgaaagatacatgtgttttgcataag

SEQ ID NO: 82823 - DNA, 26 bp, Homo sapiens
gaaagatacatgtgttttgcataagg

SEQ ID NO: 82824 - DNA, 26 bp, Homo sapiens
aaagatacatgtgttttgcataagga

SEQ ID NO: 82825 - DNA, 26 bp, Homo sapiens
aagatacatgtgttttgcataaggaa

SEQ ID NO: 82826 - DNA, 26 bp, Homo sapiens
agatacatgtgttttgcataaggaat

SEQ ID NO: 82827 - DNA, 26 bp, Homo sapiens
gatacatgtgttttgcataaggaata

SEQ ID NO: 82828 - DNA, 26 bp, Homo sapiens
atacatgtgttttgcataaggaatac

SEQ ID NO: 82829 - DNA, 26 bp, Homo sapiens
tacatgtgttttgcataaggaataca

SEQ ID NO: 82830 - DNA, 26 bp, Homo sapiens
acatgtgttttgcataaggaatacag

SEQ ID NO: 82831 - DNA, 26 bp, Homo sapiens
catgtgttttgcataaggaatacagt

SEQ ID NO: 82832 - DNA, 26 bp, Homo sapiens
atgtgttttgcataaggaatacagtg

SEQ ID NO: 82833 - DNA, 26 bp, Homo sapiens
tgtgttttgcataaggaatacagtgt

SEQ ID NO: 82834 - DNA, 26 bp, Homo sapiens
gtgttttgcataaggaatacagtgtt

SEQ ID NO: 82835 - DNA, 26 bp, Homo sapiens
tgttttgcataaggaatacagtgttt

SEQ ID NO: 82836 - DNA, 26 bp, Homo sapiens
gttttgcataaggaatacagtgtttt

SEQ ID NO: 82837 - DNA, 26 bp, Homo sapiens
ttttgcataaggaatacagtgttttc

SEQ ID NO: 82838 - DNA, 26 bp, Homo sapiens
tttgcataaggaatacagtgttttct

SEQ ID NO: 82839 - DNA, 26 bp, Homo sapiens
ttgcataaggaatacagtgttttctt

SEQ ID NO: 82840 - DNA, 26 bp, Homo sapiens
tgcataaggaatacagtgttttcttt

SEQ ID NO: 82841 - DNA, 26 bp, Homo sapiens
gcataaggaatacagtgttttctttt

SEQ ID NO: 82842 - DNA, 26 bp, Homo sapiens
cataaggaatacagtgttttcttttc

SEQ ID NO: 82843 - DNA, 26 bp, Homo sapiens
ataaggaatacagtgttttcttttca

SEQ ID NO: 82844 - DNA, 26 bp, Homo sapiens
taaggaatacagtgttttcttttcat

SEQ ID NO: 82845 - DNA, 26 bp, Homo sapiens
aaggaatacagtgttttcttttcata

SEQ ID NO: 82846 - DNA, 26 bp, Homo sapiens
aggaatacagtgttttcttttcatag

SEQ ID NO: 82847 - DNA, 26 bp, Homo sapiens
ggaatacagtgttttcttttcatagc

SEQ ID NO: 82848 - DNA, 26 bp, Homo sapiens
gaatacagtgttttcttttcatagca

SEQ ID NO: 82849 - DNA, 26 bp, Homo sapiens
aatacagtgttttcttttcatagcaa

SEQ ID NO: 82850 - DNA, 26 bp, Homo sapiens
atacagtgttttcttttcatagcaaa

SEQ ID NO: 82851 - DNA, 26 bp, Homo sapiens
tacagtgttttcttttcatagcaaag

SEQ ID NO: 82852 - DNA, 26 bp, Homo sapiens
acagtgttttcttttcatagcaaagt

SEQ ID NO: 82853 - DNA, 26 bp, Homo sapiens
cagtgttttcttttcatagcaaagta

SEQ ID NO: 82854 - DNA, 26 bp, Homo sapiens
agtgttttcttttcatagcaaagtac

SEQ ID NO: 82855 - DNA, 26 bp, Homo sapiens
gtgttttcttttcatagcaaagtacc

SEQ ID NO: 82856 - DNA, 26 bp, Homo sapiens
tgttttcttttcatagcaaagtacca

SEQ ID NO: 82857 - DNA, 26 bp, Homo sapiens
gttttcttttcatagcaaagtaccat

SEQ ID NO: 82858 - DNA, 26 bp, Homo sapiens
ttttcttttcatagcaaagtaccatt

SEQ ID NO: 82859 - DNA, 26 bp, Homo sapiens
tttcttttcatagcaaagtaccatta

SEQ ID NO: 82860 - DNA, 26 bp, Homo sapiens
ttcttttcatagcaaagtaccattaa

SEQ ID NO: 82861 - DNA, 26 bp, Homo sapiens
tcttttcatagcaaagtaccattaaa

SEQ ID NO: 82862 - DNA, 26 bp, Homo sapiens
cttttcatagcaaagtaccattaaag

SEQ ID NO: 82863 - DNA, 26 bp, Homo sapiens
ttttcatagcaaagtaccattaaagc

SEQ ID NO: 82864 - DNA, 26 bp, Homo sapiens
tttcatagcaaagtaccattaaagcc

SEQ ID NO: 82865 - DNA, 26 bp, Homo sapiens
ttcatagcaaagtaccattaaagcct

SEQ ID NO: 82866 - DNA, 26 bp, Homo sapiens
tcatagcaaagtaccattaaagcctc

SEQ ID NO: 82867 - DNA, 26 bp, Homo sapiens
catagcaaagtaccattaaagcctca

SEQ ID NO: 82868 - DNA, 26 bp, Homo sapiens
atagcaaagtaccattaaagcctcat

SEQ ID NO: 82869 - DNA, 26 bp, Homo sapiens
tagcaaagtaccattaaagcctcatg

SEQ ID NO: 82870 - DNA, 26 bp, Homo sapiens
agcaaagtaccattaaagcctcatgt

SEQ ID NO: 82871 - DNA, 26 bp, Homo sapiens
gcaaagtaccattaaagcctcatgtt

SEQ ID NO: 82872 - DNA, 26 bp, Homo sapiens
caaagtaccattaaagcctcatgttt

SEQ ID NO: 82873 - DNA, 26 bp, Homo sapiens
aaagtaccattaaagcctcatgtttt

SEQ ID NO: 82874 - DNA, 26 bp, Homo sapiens
aagtaccattaaagcctcatgtttta

SEQ ID NO: 82875 - DNA, 26 bp, Homo sapiens
agtaccattaaagcctcatgttttat

SEQ ID NO: 82876 - DNA, 26 bp, Homo sapiens
gtaccattaaagcctcatgttttata

SEQ ID NO: 82877 - DNA, 26 bp, Homo sapiens
taccattaaagcctcatgttttatac

SEQ ID NO: 82878 - DNA, 26 bp, Homo sapiens
accattaaagcctcatgttttatact

SEQ ID NO: 82879 - DNA, 26 bp, Homo sapiens
ccattaaagcctcatgttttatacta

SEQ ID NO: 82880 - DNA, 26 bp, Homo sapiens
cattaaagcctcatgttttatactac

SEQ ID NO: 82881 - DNA, 26 bp, Homo sapiens
attaaagcctcatgttttatactact

SEQ ID NO: 82882 - DNA, 26 bp, Homo sapiens
ttaaagcctcatgttttatactacta

SEQ ID NO: 82883 - DNA, 26 bp, Homo sapiens
taaagcctcatgttttatactactag

SEQ ID NO: 82884 - DNA, 26 bp, Homo sapiens
aaagcctcatgttttatactactagg

SEQ ID NO: 82885 - DNA, 26 bp, Homo sapiens
aagcctcatgttttatactactaggt

SEQ ID NO: 82886 - DNA, 26 bp, Homo sapiens
agcctcatgttttatactactaggtc

SEQ ID NO: 82887 - DNA, 26 bp, Homo sapiens
gcctcatgttttatactactaggtca

SEQ ID NO: 82888 - DNA, 26 bp, Homo sapiens
cctcatgttttatactactaggtcaa

SEQ ID NO: 82889 - DNA, 26 bp, Homo sapiens
ctcatgttttatactactaggtcaaa

SEQ ID NO: 82890 - DNA, 26 bp, Homo sapiens
tcatgttttatactactaggtcaaat

SEQ ID NO: 82891 - DNA, 26 bp, Homo sapiens
catgttttatactactaggtcaaatt

SEQ ID NO: 82892 - DNA, 26 bp, Homo sapiens
atgttttatactactaggtcaaatta

SEQ ID NO: 82893 - DNA, 26 bp, Homo sapiens
tgttttatactactaggtcaaattat

SEQ ID NO: 82894 - DNA, 26 bp, Homo sapiens
gttttatactactaggtcaaattatt

SEQ ID NO: 82895 - DNA, 26 bp, Homo sapiens
ttttatactactaggtcaaattattt

SEQ ID NO: 82896 - DNA, 26 bp, Homo sapiens
tttatactactaggtcaaattatttt

SEQ ID NO: 82897 - DNA, 26 bp, Homo sapiens
ttatactactaggtcaaattattttt

SEQ ID NO: 82898 - DNA, 26 bp, Homo sapiens
tatactactaggtcaaattatttttt

SEQ ID NO: 82899 - DNA, 26 bp, Homo sapiens
atactactaggtcaaattattttttc

SEQ ID NO: 82900 - DNA, 26 bp, Homo sapiens
tactactaggtcaaattattttttct

SEQ ID NO: 82901 - DNA, 26 bp, Homo sapiens
actactaggtcaaattattttttctc

SEQ ID NO: 82902 - DNA, 26 bp, Homo sapiens
ctactaggtcaaattattttttctcc

SEQ ID NO: 82903 - DNA, 26 bp, Homo sapiens
tactaggtcaaattattttttctcct

SEQ ID NO: 82904 - DNA, 26 bp, Homo sapiens
actaggtcaaattattttttctcctt

SEQ ID NO: 82905 - DNA, 26 bp, Homo sapiens
ctaggtcaaattattttttctccttt

SEQ ID NO: 82906 - DNA, 26 bp, Homo sapiens
taggtcaaattattttttctcctttt

SEQ ID NO: 82907 - DNA, 26 bp, Homo sapiens
aggtcaaattattttttctccttttt

SEQ ID NO: 82908 - DNA, 26 bp, Homo sapiens
ggtcaaattattttttctccttttta

SEQ ID NO: 82909 - DNA, 26 bp, Homo sapiens
gtcaaattattttttctcctttttaa

SEQ ID NO: 82910 - DNA, 26 bp, Homo sapiens
tcaaattattttttctcctttttaaa

SEQ ID NO: 82911 - DNA, 26 bp, Homo sapiens
caaattattttttctcctttttaaaa

SEQ ID NO: 82912 - DNA, 26 bp, Homo sapiens
aaattattttttctcctttttaaaat

SEQ ID NO: 82913 - DNA, 26 bp, Homo sapiens
aattattttttctcctttttaaaatt

SEQ ID NO: 82914 - DNA, 26 bp, Homo sapiens
attattttttctcctttttaaaattt

SEQ ID NO: 82915 - DNA, 26 bp, Homo sapiens
ttattttttctcctttttaaaattta

SEQ ID NO: 82916 - DNA, 26 bp, Homo sapiens
tattttttctcctttttaaaatttat

SEQ ID NO: 82917 - DNA, 26 bp, Homo sapiens
attttttctcctttttaaaatttatc

SEQ ID NO: 82918 - DNA, 26 bp, Homo sapiens
ttttttctcctttttaaaatttatcg

SEQ ID NO: 82919 - DNA, 26 bp, Homo sapiens
tttttctcctttttaaaatttatcgg

SEQ ID NO: 82920 - DNA, 26 bp, Homo sapiens
ttttctcctttttaaaatttatcggt

SEQ ID NO: 82921 - DNA, 26 bp, Homo sapiens
tttctcctttttaaaatttatcggtt

SEQ ID NO: 82922 - DNA, 26 bp, Homo sapiens
ttctcctttttaaaatttatcggttc

SEQ ID NO: 82923 - DNA, 26 bp, Homo sapiens
tctcctttttaaaatttatcggttcc

SEQ ID NO: 82924 - DNA, 26 bp, Homo sapiens
ctcctttttaaaatttatcggttccg

SEQ ID NO: 82925 - DNA, 26 bp, Homo sapiens
tcctttttaaaatttatcggttccga

SEQ ID NO: 82926 - DNA, 26 bp, Homo sapiens
cctttttaaaatttatcggttccgac

SEQ ID NO: 82927 - DNA, 26 bp, Homo sapiens
ctttttaaaatttatcggttccgact

SEQ ID NO: 82928 - DNA, 26 bp, Homo sapiens
tttttaaaatttatcggttccgactt

SEQ ID NO: 82929 - DNA, 26 bp, Homo sapiens
ttttaaaatttatcggttccgactta

SEQ ID NO: 82930 - DNA, 26 bp, Homo sapiens
tttaaaatttatcggttccgacttaa

SEQ ID NO: 82931 - DNA, 26 bp, Homo sapiens
ttaaaatttatcggttccgacttaaa

SEQ ID NO: 82932 - DNA, 26 bp, Homo sapiens
taaaatttatcggttccgacttaaaa

SEQ ID NO: 82933 - DNA, 26 bp, Homo sapiens
aaaatttatcggttccgacttaaaac

SEQ ID NO: 82934 - DNA, 26 bp, Homo sapiens
aaatttatcggttccgacttaaaacc

SEQ ID NO: 82935 - DNA, 26 bp, Homo sapiens
aatttatcggttccgacttaaaacca

SEQ ID NO: 82936 - DNA, 26 bp, Homo sapiens
atttatcggttccgacttaaaaccat

SEQ ID NO: 82937 - DNA, 26 bp, Homo sapiens
tttatcggttccgacttaaaaccatc

SEQ ID NO: 82938 - DNA, 26 bp, Homo sapiens
ttatcggttccgacttaaaaccatca

SEQ ID NO: 82939 - DNA, 26 bp, Homo sapiens
tatcggttccgacttaaaaccatcaa

SEQ ID NO: 82940 - DNA, 26 bp, Homo sapiens
atcggttccgacttaaaaccatcaag

SEQ ID NO: 82941 - DNA, 26 bp, Homo sapiens
tcggttccgacttaaaaccatcaagt

SEQ ID NO: 82942 - DNA, 26 bp, Homo sapiens
cggttccgacttaaaaccatcaagtc

SEQ ID NO: 82943 - DNA, 26 bp, Homo sapiens
ggttccgacttaaaaccatcaagtct

SEQ ID NO: 82944 - DNA, 26 bp, Homo sapiens
gttccgacttaaaaccatcaagtctg

SEQ ID NO: 82945 - DNA, 26 bp, Homo sapiens
ttccgacttaaaaccatcaagtctgg

SEQ ID NO: 82946 - DNA, 26 bp, Homo sapiens
tccgacttaaaaccatcaagtctggt

SEQ ID NO: 82947 - DNA, 26 bp, Homo sapiens
ccgacttaaaaccatcaagtctggtc

SEQ ID NO: 82948 - DNA, 26 bp, Homo sapiens
cgacttaaaaccatcaagtctggtca

SEQ ID NO: 82949 - DNA, 26 bp, Homo sapiens
gacttaaaaccatcaagtctggtcag

SEQ ID NO: 82950 - DNA, 26 bp, Homo sapiens
acttaaaaccatcaagtctggtcaga

SEQ ID NO: 82951 - DNA, 26 bp, Homo sapiens
cttaaaaccatcaagtctggtcagaa

SEQ ID NO: 82952 - DNA, 26 bp, Homo sapiens
ttaaaaccatcaagtctggtcagaat

SEQ ID NO: 82953 - DNA, 26 bp, Homo sapiens
taaaaccatcaagtctggtcagaatc

SEQ ID NO: 82954 - DNA, 26 bp, Homo sapiens
aaaaccatcaagtctggtcagaatca

SEQ ID NO: 82955 - DNA, 26 bp, Homo sapiens
aaaccatcaagtctggtcagaatcaa

SEQ ID NO: 82956 - DNA, 26 bp, Homo sapiens
aaccatcaagtctggtcagaatcaac

SEQ ID NO: 82957 - DNA, 26 bp, Homo sapiens
accatcaagtctggtcagaatcaact

SEQ ID NO: 82958 - DNA, 26 bp, Homo sapiens
ccatcaagtctggtcagaatcaactc

SEQ ID NO: 82959 - DNA, 26 bp, Homo sapiens
catcaagtctggtcagaatcaactca

SEQ ID NO: 82960 - DNA, 26 bp, Homo sapiens
atcaagtctggtcagaatcaactcag

SEQ ID NO: 82961 - DNA, 26 bp, Homo sapiens
tcaagtctggtcagaatcaactcagt

SEQ ID NO: 82962 - DNA, 26 bp, Homo sapiens
caagtctggtcagaatcaactcagtc

SEQ ID NO: 82963 - DNA, 26 bp, Homo sapiens
aagtctggtcagaatcaactcagtct

SEQ ID NO: 82964 - DNA, 26 bp, Homo sapiens
agtctggtcagaatcaactcagtcta

SEQ ID NO: 82965 - DNA, 26 bp, Homo sapiens
gtctggtcagaatcaactcagtctag

SEQ ID NO: 82966 - DNA, 26 bp, Homo sapiens
tctggtcagaatcaactcagtctagc

SEQ ID NO: 82967 - DNA, 26 bp, Homo sapiens
ctggtcagaatcaactcagtctagct

SEQ ID NO: 82968 - DNA, 26 bp, Homo sapiens
tggtcagaatcaactcagtctagctg

SEQ ID NO: 82969 - DNA, 26 bp, Homo sapiens
ggtcagaatcaactcagtctagctga

SEQ ID NO: 82970 - DNA, 26 bp, Homo sapiens
gtcagaatcaactcagtctagctgat

SEQ ID NO: 82971 - DNA, 26 bp, Homo sapiens
tcagaatcaactcagtctagctgatg

SEQ ID NO: 82972 - DNA, 26 bp, Homo sapiens
cagaatcaactcagtctagctgatgc

SEQ ID NO: 82973 - DNA, 26 bp, Homo sapiens
agaatcaactcagtctagctgatgca

SEQ ID NO: 82974 - DNA, 26 bp, Homo sapiens
gaatcaactcagtctagctgatgcaa

SEQ ID NO: 82975 - DNA, 26 bp, Homo sapiens
aatcaactcagtctagctgatgcaaa

SEQ ID NO: 82976 - DNA, 26 bp, Homo sapiens
atcaactcagtctagctgatgcaaaa

SEQ ID NO: 82977 - DNA, 26 bp, Homo sapiens
tcaactcagtctagctgatgcaaaat

SEQ ID NO: 82978 - DNA, 26 bp, Homo sapiens
caactcagtctagctgatgcaaaatc

SEQ ID NO: 82979 - DNA, 26 bp, Homo sapiens
aactcagtctagctgatgcaaaatca

SEQ ID NO: 82980 - DNA, 26 bp, Homo sapiens
actcagtctagctgatgcaaaatcat

SEQ ID NO: 82981 - DNA, 26 bp, Homo sapiens
ctcagtctagctgatgcaaaatcata

SEQ ID NO: 82982 - DNA, 26 bp, Homo sapiens
tcagtctagctgatgcaaaatcatat

SEQ ID NO: 82983 - DNA, 26 bp, Homo sapiens
cagtctagctgatgcaaaatcatatg

SEQ ID NO: 82984 - DNA, 26 bp, Homo sapiens
agtctagctgatgcaaaatcatatgc

SEQ ID NO: 82985 - DNA, 26 bp, Homo sapiens
gtctagctgatgcaaaatcatatgca

SEQ ID NO: 82986 - DNA, 26 bp, Homo sapiens
tctagctgatgcaaaatcatatgcat

SEQ ID NO: 82987 - DNA, 26 bp, Homo sapiens
ctagctgatgcaaaatcatatgcatt

SEQ ID NO: 82988 - DNA, 26 bp, Homo sapiens
tagctgatgcaaaatcatatgcattc

SEQ ID NO: 82989 - DNA, 26 bp, Homo sapiens
agctgatgcaaaatcatatgcattca

SEQ ID NO: 82990 - DNA, 26 bp, Homo sapiens
gctgatgcaaaatcatatgcattcaa

SEQ ID NO: 82991 - DNA, 26 bp, Homo sapiens
ctgatgcaaaatcatatgcattcaaa

SEQ ID NO: 82992 - DNA, 26 bp, Homo sapiens
tgatgcaaaatcatatgcattcaaaa

SEQ ID NO: 82993 - DNA, 26 bp, Homo sapiens
gatgcaaaatcatatgcattcaaaaa

SEQ ID NO: 82994 - DNA, 26 bp, Homo sapiens
atgcaaaatcatatgcattcaaaaag

SEQ ID NO: 82995 - DNA, 26 bp, Homo sapiens
tgcaaaatcatatgcattcaaaaagc

SEQ ID NO: 82996 - DNA, 26 bp, Homo sapiens
gcaaaatcatatgcattcaaaaagca

SEQ ID NO: 82997 - DNA, 26 bp, Homo sapiens
caaaatcatatgcattcaaaaagcag

SEQ ID NO: 82998 - DNA, 26 bp, Homo sapiens
aaaatcatatgcattcaaaaagcagt

SEQ ID NO: 82999 - DNA, 26 bp, Homo sapiens
aaatcatatgcattcaaaaagcagtc

SEQ ID NO: 83000 - DNA, 26 bp, Homo sapiens
aatcatatgcattcaaaaagcagtct

SEQ ID NO: 83001 - DNA, 26 bp, Homo sapiens
atcatatgcattcaaaaagcagtctt

SEQ ID NO: 83002 - DNA, 26 bp, Homo sapiens
tcatatgcattcaaaaagcagtcttt

SEQ ID NO: 83003 - DNA, 26 bp, Homo sapiens
catatgcattcaaaaagcagtcttta

SEQ ID NO: 83004 - DNA, 26 bp, Homo sapiens
atatgcattcaaaaagcagtctttac

SEQ ID NO: 83005 - DNA, 26 bp, Homo sapiens
tatgcattcaaaaagcagtctttacc

SEQ ID NO: 83006 - DNA, 26 bp, Homo sapiens
atgcattcaaaaagcagtctttaccg

SEQ ID NO: 83007 - DNA, 26 bp, Homo sapiens
tgcattcaaaaagcagtctttaccga

SEQ ID NO: 83008 - DNA, 26 bp, Homo sapiens
gcattcaaaaagcagtctttaccgag

SEQ ID NO: 83009 - DNA, 26 bp, Homo sapiens
cattcaaaaagcagtctttaccgaga

SEQ ID NO: 83010 - DNA, 26 bp, Homo sapiens
attcaaaaagcagtctttaccgagat

SEQ ID NO: 83011 - DNA, 26 bp, Homo sapiens
ttcaaaaagcagtctttaccgagatg

SEQ ID NO: 83012 - DNA, 26 bp, Homo sapiens
tcaaaaagcagtctttaccgagatgc

SEQ ID NO: 83013 - DNA, 26 bp, Homo sapiens
caaaaagcagtctttaccgagatgcc

SEQ ID NO: 83014 - DNA, 26 bp, Homo sapiens
aaaaagcagtctttaccgagatgcct

SEQ ID NO: 83015 - DNA, 26 bp, Homo sapiens
aaaagcagtctttaccgagatgcctt

SEQ ID NO: 83016 - DNA, 26 bp, Homo sapiens
aaagcagtctttaccgagatgccttt

SEQ ID NO: 83017 - DNA, 26 bp, Homo sapiens
aagcagtctttaccgagatgccttta

SEQ ID NO: 83018 - DNA, 26 bp, Homo sapiens
agcagtctttaccgagatgcctttac

SEQ ID NO: 83019 - DNA, 26 bp, Homo sapiens
gcagtctttaccgagatgcctttaca

SEQ ID NO: 83020 - DNA, 26 bp, Homo sapiens
cagtctttaccgagatgcctttacaa

SEQ ID NO: 83021 - DNA, 26 bp, Homo sapiens
agtctttaccgagatgcctttacaaa

SEQ ID NO: 83022 - DNA, 26 bp, Homo sapiens
gtctttaccgagatgcctttacaaac

SEQ ID NO: 83023 - DNA, 26 bp, Homo sapiens
tctttaccgagatgcctttacaaacc

SEQ ID NO: 83024 - DNA, 26 bp, Homo sapiens
ctttaccgagatgcctttacaaacct

SEQ ID NO: 83025 - DNA, 26 bp, Homo sapiens
tttaccgagatgcctttacaaacctt

SEQ ID NO: 83026 - DNA, 26 bp, Homo sapiens
ttaccgagatgcctttacaaaccttg

SEQ ID NO: 83027 - DNA, 26 bp, Homo sapiens
taccgagatgcctttacaaaccttgg

SEQ ID NO: 83028 - DNA, 26 bp, Homo sapiens
accgagatgcctttacaaaccttgga

SEQ ID NO: 83029 - DNA, 26 bp, Homo sapiens
ccgagatgcctttacaaaccttggaa

SEQ ID NO: 83030 - DNA, 26 bp, Homo sapiens
cgagatgcctttacaaaccttggaat

SEQ ID NO: 83031 - DNA, 26 bp, Homo sapiens
gagatgcctttacaaaccttggaatc

SEQ ID NO: 83032 - DNA, 26 bp, Homo sapiens
agatgcctttacaaaccttggaatcc

SEQ ID NO: 83033 - DNA, 26 bp, Homo sapiens
gatgcctttacaaaccttggaatcca

SEQ ID NO: 83034 - DNA, 26 bp, Homo sapiens
atgcctttacaaaccttggaatccag

SEQ ID NO: 83035 - DNA, 26 bp, Homo sapiens
tgcctttacaaaccttggaatccagc

SEQ ID NO: 83036 - DNA, 26 bp, Homo sapiens
gcctttacaaaccttggaatccagca

SEQ ID NO: 83037 - DNA, 26 bp, Homo sapiens
cctttacaaaccttggaatccagcac

SEQ ID NO: 83038 - DNA, 26 bp, Homo sapiens
ctttacaaaccttggaatccagcacc

SEQ ID NO: 83039 - DNA, 26 bp, Homo sapiens
tttacaaaccttggaatccagcacct

SEQ ID NO: 83040 - DNA, 26 bp, Homo sapiens
ttacaaaccttggaatccagcacctt

SEQ ID NO: 83041 - DNA, 26 bp, Homo sapiens
tacaaaccttggaatccagcaccttc

SEQ ID NO: 83042 - DNA, 26 bp, Homo sapiens
acaaaccttggaatccagcaccttct

SEQ ID NO: 83043 - DNA, 26 bp, Homo sapiens
caaaccttggaatccagcaccttctt

SEQ ID NO: 83044 - DNA, 26 bp, Homo sapiens
aaaccttggaatccagcaccttctta

SEQ ID NO: 83045 - DNA, 26 bp, Homo sapiens
aaccttggaatccagcaccttcttaa

SEQ ID NO: 83046 - DNA, 26 bp, Homo sapiens
accttggaatccagcaccttcttaag

SEQ ID NO: 83047 - DNA, 26 bp, Homo sapiens
ccttggaatccagcaccttcttaagg

SEQ ID NO: 83048 - DNA, 26 bp, Homo sapiens
cttggaatccagcaccttcttaaggc

SEQ ID NO: 83049 - DNA, 26 bp, Homo sapiens
ttggaatccagcaccttcttaaggca

SEQ ID NO: 83050 - DNA, 26 bp, Homo sapiens
tggaatccagcaccttcttaaggcaa

SEQ ID NO: 83051 - DNA, 26 bp, Homo sapiens
ggaatccagcaccttcttaaggcaaa

SEQ ID NO: 83052 - DNA, 26 bp, Homo sapiens
gaatccagcaccttcttaaggcaaag

SEQ ID NO: 83053 - DNA, 26 bp, Homo sapiens
aatccagcaccttcttaaggcaaagt

SEQ ID NO: 83054 - DNA, 26 bp, Homo sapiens
atccagcaccttcttaaggcaaagtt

SEQ ID NO: 83055 - DNA, 26 bp, Homo sapiens
tccagcaccttcttaaggcaaagttt

SEQ ID NO: 83056 - DNA, 26 bp, Homo sapiens
ccagcaccttcttaaggcaaagtttc

SEQ ID NO: 83057 - DNA, 26 bp, Homo sapiens
cagcaccttcttaaggcaaagtttca

SEQ ID NO: 83058 - DNA, 26 bp, Homo sapiens
agcaccttcttaaggcaaagtttcat

SEQ ID NO: 83059 - DNA, 26 bp, Homo sapiens
gcaccttcttaaggcaaagtttcatg

SEQ ID NO: 83060 - DNA, 26 bp, Homo sapiens
caccttcttaaggcaaagtttcatgg

SEQ ID NO: 83061 - DNA, 26 bp, Homo sapiens
accttcttaaggcaaagtttcatggc

SEQ ID NO: 83062 - DNA, 26 bp, Homo sapiens
ccttcttaaggcaaagtttcatggca

SEQ ID NO: 83063 - DNA, 26 bp, Homo sapiens
cttcttaaggcaaagtttcatggcag

SEQ ID NO: 83064 - DNA, 26 bp, Homo sapiens
ttcttaaggcaaagtttcatggcagc

SEQ ID NO: 83065 - DNA, 26 bp, Homo sapiens
tcttaaggcaaagtttcatggcagca

SEQ ID NO: 83066 - DNA, 26 bp, Homo sapiens
cttaaggcaaagtttcatggcagcag

SEQ ID NO: 83067 - DNA, 26 bp, Homo sapiens
ttaaggcaaagtttcatggcagcagg

SEQ ID NO: 83068 - DNA, 26 bp, Homo sapiens
taaggcaaagtttcatggcagcaggg

SEQ ID NO: 83069 - DNA, 26 bp, Homo sapiens
aaggcaaagtttcatggcagcaggga

SEQ ID NO: 83070 - DNA, 26 bp, Homo sapiens
aggcaaagtttcatggcagcagggaa

SEQ ID NO: 83071 - DNA, 26 bp, Homo sapiens
ggcaaagtttcatggcagcagggaag

SEQ ID NO: 83072 - DNA, 26 bp, Homo sapiens
gcaaagtttcatggcagcagggaagt

SEQ ID NO: 83073 - DNA, 26 bp, Homo sapiens
caaagtttcatggcagcagggaagtg

SEQ ID NO: 83074 - DNA, 26 bp, Homo sapiens
aaagtttcatggcagcagggaagtga

SEQ ID NO: 83075 - DNA, 26 bp, Homo sapiens
aagtttcatggcagcagggaagtgaa

SEQ ID NO: 83076 - DNA, 26 bp, Homo sapiens
agtttcatggcagcagggaagtgaac

SEQ ID NO: 83077 - DNA, 26 bp, Homo sapiens
gtttcatggcagcagggaagtgaact

SEQ ID NO: 83078 - DNA, 26 bp, Homo sapiens
tttcatggcagcagggaagtgaacta

SEQ ID NO: 83079 - DNA, 26 bp, Homo sapiens
ttcatggcagcagggaagtgaactaa

SEQ ID NO: 83080 - DNA, 26 bp, Homo sapiens
tcatggcagcagggaagtgaactaat

SEQ ID NO: 83081 - DNA, 26 bp, Homo sapiens
catggcagcagggaagtgaactaata

SEQ ID NO: 83082 - DNA, 26 bp, Homo sapiens
atggcagcagggaagtgaactaataa

SEQ ID NO: 83083 - DNA, 26 bp, Homo sapiens
tggcagcagggaagtgaactaataat

SEQ ID NO: 83084 - DNA, 26 bp, Homo sapiens
ggcagcagggaagtgaactaataatt

SEQ ID NO: 83085 - DNA, 26 bp, Homo sapiens
gcagcagggaagtgaactaataattt

SEQ ID NO: 83086 - DNA, 26 bp, Homo sapiens
cagcagggaagtgaactaataatttt

SEQ ID NO: 83087 - DNA, 26 bp, Homo sapiens
agcagggaagtgaactaataattttc

SEQ ID NO: 83088 - DNA, 26 bp, Homo sapiens
gcagggaagtgaactaataattttca

SEQ ID NO: 83089 - DNA, 26 bp, Homo sapiens
cagggaagtgaactaataattttcat

SEQ ID NO: 83090 - DNA, 26 bp, Homo sapiens
agggaagtgaactaataattttcatt

SEQ ID NO: 83091 - DNA, 26 bp, Homo sapiens
gggaagtgaactaataattttcattt

SEQ ID NO: 83092 - DNA, 26 bp, Homo sapiens
ggaagtgaactaataattttcattta

SEQ ID NO: 83093 - DNA, 26 bp, Homo sapiens
gaagtgaactaataattttcatttac

SEQ ID NO: 83094 - DNA, 26 bp, Homo sapiens
aagtgaactaataattttcatttacc

SEQ ID NO: 83095 - DNA, 26 bp, Homo sapiens
agtgaactaataattttcatttacca

SEQ ID NO: 83096 - DNA, 26 bp, Homo sapiens
gtgaactaataattttcatttaccac

SEQ ID NO: 83097 - DNA, 26 bp, Homo sapiens
tgaactaataattttcatttaccaca

SEQ ID NO: 83098 - DNA, 26 bp, Homo sapiens
gaactaataattttcatttaccacat

SEQ ID NO: 83099 - DNA, 26 bp, Homo sapiens
aactaataattttcatttaccacatc

SEQ ID NO: 83100 - DNA, 26 bp, Homo sapiens
actaataattttcatttaccacatct

SEQ ID NO: 83101 - DNA, 26 bp, Homo sapiens
ctaataattttcatttaccacatctt

SEQ ID NO: 83102 - DNA, 26 bp, Homo sapiens
taataattttcatttaccacatcttg

SEQ ID NO: 83103 - DNA, 26 bp, Homo sapiens
aataattttcatttaccacatcttgg

SEQ ID NO: 83104 - DNA, 26 bp, Homo sapiens
ataattttcatttaccacatcttggt

SEQ ID NO: 83105 - DNA, 26 bp, Homo sapiens
taattttcatttaccacatcttggtg

SEQ ID NO: 83106 - DNA, 26 bp, Homo sapiens
aattttcatttaccacatcttggtgt

SEQ ID NO: 83107 - DNA, 26 bp, Homo sapiens
attttcatttaccacatcttggtgtc

SEQ ID NO: 83108 - DNA, 26 bp, Homo sapiens
ttttcatttaccacatcttggtgtct

SEQ ID NO: 83109 - DNA, 26 bp, Homo sapiens
tttcatttaccacatcttggtgtctt

SEQ ID NO: 83110 - DNA, 26 bp, Homo sapiens
ttcatttaccacatcttggtgtcttt

SEQ ID NO: 83111 - DNA, 26 bp, Homo sapiens
tcatttaccacatcttggtgtctttg

SEQ ID NO: 83112 - DNA, 26 bp, Homo sapiens
catttaccacatcttggtgtctttga

SEQ ID NO: 83113 - DNA, 26 bp, Homo sapiens
atttaccacatcttggtgtctttgaa

SEQ ID NO: 83114 - DNA, 26 bp, Homo sapiens
tttaccacatcttggtgtctttgaaa

SEQ ID NO: 83115 - DNA, 26 bp, Homo sapiens
ttaccacatcttggtgtctttgaaaa

SEQ ID NO: 83116 - DNA, 26 bp, Homo sapiens
taccacatcttggtgtctttgaaaaa

SEQ ID NO: 83117 - DNA, 26 bp, Homo sapiens
accacatcttggtgtctttgaaaaaa

SEQ ID NO: 83118 - DNA, 26 bp, Homo sapiens
ccacatcttggtgtctttgaaaaaat

SEQ ID NO: 83119 - DNA, 26 bp, Homo sapiens
cacatcttggtgtctttgaaaaaata

SEQ ID NO: 83120 - DNA, 26 bp, Homo sapiens
acatcttggtgtctttgaaaaaatac

SEQ ID NO: 83121 - DNA, 26 bp, Homo sapiens
catcttggtgtctttgaaaaaatact

SEQ ID NO: 83122 - DNA, 26 bp, Homo sapiens
atcttggtgtctttgaaaaaatactt

SEQ ID NO: 83123 - DNA, 26 bp, Homo sapiens
tcttggtgtctttgaaaaaatacttt

SEQ ID NO: 83124 - DNA, 26 bp, Homo sapiens
cttggtgtctttgaaaaaatacttta

SEQ ID NO: 83125 - DNA, 26 bp, Homo sapiens
ttggtgtctttgaaaaaatactttat

SEQ ID NO: 83126 - DNA, 26 bp, Homo sapiens
tggtgtctttgaaaaaatactttatg

SEQ ID NO: 83127 - DNA, 26 bp, Homo sapiens
ggtgtctttgaaaaaatactttatgg

SEQ ID NO: 83128 - DNA, 26 bp, Homo sapiens
gtgtctttgaaaaaatactttatggc

SEQ ID NO: 83129 - DNA, 26 bp, Homo sapiens
tgtctttgaaaaaatactttatggca

SEQ ID NO: 83130 - DNA, 26 bp, Homo sapiens
gtctttgaaaaaatactttatggcac

SEQ ID NO: 83131 - DNA, 26 bp, Homo sapiens
tctttgaaaaaatactttatggcaca

SEQ ID NO: 83132 - DNA, 26 bp, Homo sapiens
ctttgaaaaaatactttatggcacaa

SEQ ID NO: 83133 - DNA, 26 bp, Homo sapiens
tttgaaaaaatactttatggcacaaa

SEQ ID NO: 83134 - DNA, 26 bp, Homo sapiens
ttgaaaaaatactttatggcacaaac

SEQ ID NO: 83135 - DNA, 26 bp, Homo sapiens
tgaaaaaatactttatggcacaaacc

SEQ ID NO: 83136 - DNA, 26 bp, Homo sapiens
gaaaaaatactttatggcacaaacct

SEQ ID NO: 83137 - DNA, 26 bp, Homo sapiens
aaaaaatactttatggcacaaacctg

SEQ ID NO: 83138 - DNA, 26 bp, Homo sapiens
aaaaatactttatggcacaaacctgt

SEQ ID NO: 83139 - DNA, 26 bp, Homo sapiens
aaaatactttatggcacaaacctgtt

SEQ ID NO: 83140 - DNA, 26 bp, Homo sapiens
aaatactttatggcacaaacctgttt

SEQ ID NO: 83141 - DNA, 26 bp, Homo sapiens
aatactttatggcacaaacctgtttt

SEQ ID NO: 83142 - DNA, 26 bp, Homo sapiens
atactttatggcacaaacctgttttt

SEQ ID NO: 83143 - DNA, 26 bp, Homo sapiens
tactttatggcacaaacctgtttttg

SEQ ID NO: 83144 - DNA, 26 bp, Homo sapiens
actttatggcacaaacctgtttttgt

SEQ ID NO: 83145 - DNA, 26 bp, Homo sapiens
ctttatggcacaaacctgtttttgtc

SEQ ID NO: 83146 - DNA, 26 bp, Homo sapiens
tttatggcacaaacctgtttttgtct

SEQ ID NO: 83147 - DNA, 26 bp, Homo sapiens
ttatggcacaaacctgtttttgtctc

SEQ ID NO: 83148 - DNA, 26 bp, Homo sapiens
tatggcacaaacctgtttttgtctct

SEQ ID NO: 83149 - DNA, 26 bp, Homo sapiens
atggcacaaacctgtttttgtctctc

SEQ ID NO: 83150 - DNA, 26 bp, Homo sapiens
tggcacaaacctgtttttgtctctcc

SEQ ID NO: 83151 - DNA, 26 bp, Homo sapiens
ggcacaaacctgtttttgtctctcct

SEQ ID NO: 83152 - DNA, 26 bp, Homo sapiens
gcacaaacctgtttttgtctctcctt

SEQ ID NO: 83153 - DNA, 26 bp, Homo sapiens
cacaaacctgtttttgtctctcctta

SEQ ID NO: 83154 - DNA, 26 bp, Homo sapiens
acaaacctgtttttgtctctccttat

SEQ ID NO: 83155 - DNA, 26 bp, Homo sapiens
caaacctgtttttgtctctccttatg

SEQ ID NO: 83156 - DNA, 26 bp, Homo sapiens
aaacctgtttttgtctctccttatgt

SEQ ID NO: 83157 - DNA, 26 bp, Homo sapiens
aacctgtttttgtctctccttatgtc

SEQ ID NO: 83158 - DNA, 26 bp, Homo sapiens
acctgtttttgtctctccttatgtct

SEQ ID NO: 83159 - DNA, 26 bp, Homo sapiens
cctgtttttgtctctccttatgtctc

SEQ ID NO: 83160 - DNA, 26 bp, Homo sapiens
ctgtttttgtctctccttatgtctcc

SEQ ID NO: 83161 - DNA, 26 bp, Homo sapiens
tgtttttgtctctccttatgtctcca

SEQ ID NO: 83162 - DNA, 26 bp, Homo sapiens
gtttttgtctctccttatgtctccac

SEQ ID NO: 83163 - DNA, 26 bp, Homo sapiens
tttttgtctctccttatgtctccact

SEQ ID NO: 83164 - DNA, 26 bp, Homo sapiens
ttttgtctctccttatgtctccactt

SEQ ID NO: 83165 - DNA, 26 bp, Homo sapiens
tttgtctctccttatgtctccacttc

SEQ ID NO: 83166 - DNA, 26 bp, Homo sapiens
ttgtctctccttatgtctccacttcc

SEQ ID NO: 83167 - DNA, 26 bp, Homo sapiens
tgtctctccttatgtctccacttcct

SEQ ID NO: 83168 - DNA, 26 bp, Homo sapiens
gtctctccttatgtctccacttcctt

SEQ ID NO: 83169 - DNA, 26 bp, Homo sapiens
tctctccttatgtctccacttccttc

SEQ ID NO: 83170 - DNA, 26 bp, Homo sapiens
ctctccttatgtctccacttccttca

SEQ ID NO: 83171 - DNA, 26 bp, Homo sapiens
tctccttatgtctccacttccttcaa

SEQ ID NO: 83172 - DNA, 26 bp, Homo sapiens
ctccttatgtctccacttccttcaag

SEQ ID NO: 83173 - DNA, 26 bp, Homo sapiens
tccttatgtctccacttccttcaagt

SEQ ID NO: 83174 - DNA, 26 bp, Homo sapiens
ccttatgtctccacttccttcaagta

SEQ ID NO: 83175 - DNA, 26 bp, Homo sapiens
cttatgtctccacttccttcaagtag

SEQ ID NO: 83176 - DNA, 26 bp, Homo sapiens
ttatgtctccacttccttcaagtaga

SEQ ID NO: 83177 - DNA, 26 bp, Homo sapiens
tatgtctccacttccttcaagtagac

SEQ ID NO: 83178 - DNA, 26 bp, Homo sapiens
atgtctccacttccttcaagtagact

SEQ ID NO: 83179 - DNA, 26 bp, Homo sapiens
tgtctccacttccttcaagtagacta

SEQ ID NO: 83180 - DNA, 26 bp, Homo sapiens
gtctccacttccttcaagtagactag

SEQ ID NO: 83181 - DNA, 26 bp, Homo sapiens
tctccacttccttcaagtagactaga

SEQ ID NO: 83182 - DNA, 26 bp, Homo sapiens
ctccacttccttcaagtagactagat

SEQ ID NO: 83183 - DNA, 26 bp, Homo sapiens
tccacttccttcaagtagactagatg

SEQ ID NO: 83184 - DNA, 26 bp, Homo sapiens
ccacttccttcaagtagactagatgc

SEQ ID NO: 83185 - DNA, 26 bp, Homo sapiens
cacttccttcaagtagactagatgct

SEQ ID NO: 83186 - DNA, 26 bp, Homo sapiens
acttccttcaagtagactagatgcta

SEQ ID NO: 83187 - DNA, 26 bp, Homo sapiens
cttccttcaagtagactagatgctac

SEQ ID NO: 83188 - DNA, 26 bp, Homo sapiens
ttccttcaagtagactagatgctaca

SEQ ID NO: 83189 - DNA, 26 bp, Homo sapiens
tccttcaagtagactagatgctacag

SEQ ID NO: 83190 - DNA, 26 bp, Homo sapiens
ccttcaagtagactagatgctacagg

SEQ ID NO: 83191 - DNA, 26 bp, Homo sapiens
cttcaagtagactagatgctacaggc

SEQ ID NO: 83192 - DNA, 26 bp, Homo sapiens
ttcaagtagactagatgctacaggca

SEQ ID NO: 83193 - DNA, 26 bp, Homo sapiens
tcaagtagactagatgctacaggcaa

SEQ ID NO: 83194 - DNA, 26 bp, Homo sapiens
caagtagactagatgctacaggcaat

SEQ ID NO: 83195 - DNA, 26 bp, Homo sapiens
aagtagactagatgctacaggcaatt

SEQ ID NO: 83196 - DNA, 26 bp, Homo sapiens
agtagactagatgctacaggcaattt

SEQ ID NO: 83197 - DNA, 26 bp, Homo sapiens
gtagactagatgctacaggcaatttc

SEQ ID NO: 83198 - DNA, 26 bp, Homo sapiens
tagactagatgctacaggcaatttct

SEQ ID NO: 83199 - DNA, 26 bp, Homo sapiens
agactagatgctacaggcaatttctc

SEQ ID NO: 83200 - DNA, 26 bp, Homo sapiens
gactagatgctacaggcaatttctca

SEQ ID NO: 83201 - DNA, 26 bp, Homo sapiens
actagatgctacaggcaatttctcat

SEQ ID NO: 83202 - DNA, 26 bp, Homo sapiens
ctagatgctacaggcaatttctcatt

SEQ ID NO: 83203 - DNA, 26 bp, Homo sapiens
tagatgctacaggcaatttctcattt

SEQ ID NO: 83204 - DNA, 26 bp, Homo sapiens
agatgctacaggcaatttctcattta

SEQ ID NO: 83205 - DNA, 26 bp, Homo sapiens
gatgctacaggcaatttctcatttat

SEQ ID NO: 83206 - DNA, 26 bp, Homo sapiens
atgctacaggcaatttctcatttatg

SEQ ID NO: 83207 - DNA, 26 bp, Homo sapiens
tgctacaggcaatttctcatttatgc

SEQ ID NO: 83208 - DNA, 26 bp, Homo sapiens
gctacaggcaatttctcatttatgcc

SEQ ID NO: 83209 - DNA, 26 bp, Homo sapiens
ctacaggcaatttctcatttatgcca

SEQ ID NO: 83210 - DNA, 26 bp, Homo sapiens
tacaggcaatttctcatttatgccac

SEQ ID NO: 83211 - DNA, 26 bp, Homo sapiens
acaggcaatttctcatttatgccacc

SEQ ID NO: 83212 - DNA, 26 bp, Homo sapiens
caggcaatttctcatttatgccacca

SEQ ID NO: 83213 - DNA, 26 bp, Homo sapiens
aggcaatttctcatttatgccaccat

SEQ ID NO: 83214 - DNA, 26 bp, Homo sapiens
ggcaatttctcatttatgccaccatg

SEQ ID NO: 83215 - DNA, 26 bp, Homo sapiens
gcaatttctcatttatgccaccatgc

SEQ ID NO: 83216 - DNA, 26 bp, Homo sapiens
caatttctcatttatgccaccatgca

SEQ ID NO: 83217 - DNA, 26 bp, Homo sapiens
aatttctcatttatgccaccatgcag

SEQ ID NO: 83218 - DNA, 26 bp, Homo sapiens
atttctcatttatgccaccatgcagt

SEQ ID NO: 83219 - DNA, 26 bp, Homo sapiens
tttctcatttatgccaccatgcagtc

SEQ ID NO: 83220 - DNA, 26 bp, Homo sapiens
ttctcatttatgccaccatgcagtct

SEQ ID NO: 83221 - DNA, 26 bp, Homo sapiens
tctcatttatgccaccatgcagtctc

SEQ ID NO: 83222 - DNA, 26 bp, Homo sapiens
ctcatttatgccaccatgcagtctca

SEQ ID NO: 83223 - DNA, 26 bp, Homo sapiens
tcatttatgccaccatgcagtctcaa

SEQ ID NO: 83224 - DNA, 26 bp, Homo sapiens
catttatgccaccatgcagtctcaat

SEQ ID NO: 83225 - DNA, 26 bp, Homo sapiens
atttatgccaccatgcagtctcaatc

SEQ ID NO: 83226 - DNA, 26 bp, Homo sapiens
tttatgccaccatgcagtctcaatcc

SEQ ID NO: 83227 - DNA, 26 bp, Homo sapiens
ttatgccaccatgcagtctcaatcca

SEQ ID NO: 83228 - DNA, 26 bp, Homo sapiens
tatgccaccatgcagtctcaatccat

SEQ ID NO: 83229 - DNA, 26 bp, Homo sapiens
atgccaccatgcagtctcaatccatt

SEQ ID NO: 83230 - DNA, 26 bp, Homo sapiens
tgccaccatgcagtctcaatccattt

SEQ ID NO: 83231 - DNA, 26 bp, Homo sapiens
gccaccatgcagtctcaatccatttt

SEQ ID NO: 83232 - DNA, 26 bp, Homo sapiens
ccaccatgcagtctcaatccattttc

SEQ ID NO: 83233 - DNA, 26 bp, Homo sapiens
caccatgcagtctcaatccattttca

SEQ ID NO: 83234 - DNA, 26 bp, Homo sapiens
accatgcagtctcaatccattttcaa

SEQ ID NO: 83235 - DNA, 26 bp, Homo sapiens
ccatgcagtctcaatccattttcaac

SEQ ID NO: 83236 - DNA, 26 bp, Homo sapiens
catgcagtctcaatccattttcaact

SEQ ID NO: 83237 - DNA, 26 bp, Homo sapiens
atgcagtctcaatccattttcaactt

SEQ ID NO: 83238 - DNA, 26 bp, Homo sapiens
tgcagtctcaatccattttcaacttg

SEQ ID NO: 83239 - DNA, 26 bp, Homo sapiens
gcagtctcaatccattttcaacttgc

SEQ ID NO: 83240 - DNA, 26 bp, Homo sapiens
cagtctcaatccattttcaacttgct

SEQ ID NO: 83241 - DNA, 26 bp, Homo sapiens
agtctcaatccattttcaacttgctc

SEQ ID NO: 83242 - DNA, 26 bp, Homo sapiens
gtctcaatccattttcaacttgctct

SEQ ID NO: 83243 - DNA, 26 bp, Homo sapiens
tctcaatccattttcaacttgctcta

SEQ ID NO: 83244 - DNA, 26 bp, Homo sapiens
ctcaatccattttcaacttgctctac

SEQ ID NO: 83245 - DNA, 26 bp, Homo sapiens
tcaatccattttcaacttgctctaca

SEQ ID NO: 83246 - DNA, 26 bp, Homo sapiens
caatccattttcaacttgctctacat

SEQ ID NO: 83247 - DNA, 26 bp, Homo sapiens
aatccattttcaacttgctctacata

SEQ ID NO: 83248 - DNA, 26 bp, Homo sapiens
atccattttcaacttgctctacatac

SEQ ID NO: 83249 - DNA, 26 bp, Homo sapiens
tccattttcaacttgctctacatacc

SEQ ID NO: 83250 - DNA, 26 bp, Homo sapiens
ccattttcaacttgctctacatacct

SEQ ID NO: 83251 - DNA, 26 bp, Homo sapiens
cattttcaacttgctctacataccta

SEQ ID NO: 83252 - DNA, 26 bp, Homo sapiens
attttcaacttgctctacatacctaa

SEQ ID NO: 83253 - DNA, 26 bp, Homo sapiens
ttttcaacttgctctacatacctaaa

SEQ ID NO: 83254 - DNA, 26 bp, Homo sapiens
tttcaacttgctctacatacctaaaa

SEQ ID NO: 83255 - DNA, 26 bp, Homo sapiens
ttcaacttgctctacatacctaaaat

SEQ ID NO: 83256 - DNA, 26 bp, Homo sapiens
tcaacttgctctacatacctaaaatc

SEQ ID NO: 83257 - DNA, 26 bp, Homo sapiens
caacttgctctacatacctaaaatct

SEQ ID NO: 83258 - DNA, 26 bp, Homo sapiens
aacttgctctacatacctaaaatctt

SEQ ID NO: 83259 - DNA, 26 bp, Homo sapiens
acttgctctacatacctaaaatcttc

SEQ ID NO: 83260 - DNA, 26 bp, Homo sapiens
cttgctctacatacctaaaatcttcc

SEQ ID NO: 83261 - DNA, 26 bp, Homo sapiens
ttgctctacatacctaaaatcttcca

SEQ ID NO: 83262 - DNA, 26 bp, Homo sapiens
tgctctacatacctaaaatcttccac

SEQ ID NO: 83263 - DNA, 26 bp, Homo sapiens
gctctacatacctaaaatcttccact

SEQ ID NO: 83264 - DNA, 26 bp, Homo sapiens
ctctacatacctaaaatcttccacta

SEQ ID NO: 83265 - DNA, 26 bp, Homo sapiens
tctacatacctaaaatcttccactac

SEQ ID NO: 83266 - DNA, 26 bp, Homo sapiens
ctacatacctaaaatcttccactact

SEQ ID NO: 83267 - DNA, 26 bp, Homo sapiens
tacatacctaaaatcttccactacta

SEQ ID NO: 83268 - DNA, 26 bp, Homo sapiens
acatacctaaaatcttccactactac

SEQ ID NO: 83269 - DNA, 26 bp, Homo sapiens
catacctaaaatcttccactactaca

SEQ ID NO: 83270 - DNA, 26 bp, Homo sapiens
atacctaaaatcttccactactacac

SEQ ID NO: 83271 - DNA, 26 bp, Homo sapiens
tacctaaaatcttccactactacaca

SEQ ID NO: 83272 - DNA, 26 bp, Homo sapiens
acctaaaatcttccactactacacaa

SEQ ID NO: 83273 - DNA, 26 bp, Homo sapiens
cctaaaatcttccactactacacaaa

SEQ ID NO: 83274 - DNA, 26 bp, Homo sapiens
ctaaaatcttccactactacacaaac

SEQ ID NO: 83275 - DNA, 26 bp, Homo sapiens
taaaatcttccactactacacaaacc

SEQ ID NO: 83276 - DNA, 26 bp, Homo sapiens
aaaatcttccactactacacaaacct

SEQ ID NO: 83277 - DNA, 26 bp, Homo sapiens
aaatcttccactactacacaaacctc

SEQ ID NO: 83278 - DNA, 26 bp, Homo sapiens
aatcttccactactacacaaacctca

SEQ ID NO: 83279 - DNA, 26 bp, Homo sapiens
atcttccactactacacaaacctcag

SEQ ID NO: 83280 - DNA, 26 bp, Homo sapiens
tcttccactactacacaaacctcaga

SEQ ID NO: 83281 - DNA, 26 bp, Homo sapiens
cttccactactacacaaacctcagac

SEQ ID NO: 83282 - DNA, 26 bp, Homo sapiens
ttccactactacacaaacctcagaca

SEQ ID NO: 83283 - DNA, 26 bp, Homo sapiens
tccactactacacaaacctcagacac

SEQ ID NO: 83284 - DNA, 26 bp, Homo sapiens
ccactactacacaaacctcagacaca

SEQ ID NO: 83285 - DNA, 26 bp, Homo sapiens
cactactacacaaacctcagacacac

SEQ ID NO: 83286 - DNA, 26 bp, Homo sapiens
actactacacaaacctcagacacact

SEQ ID NO: 83287 - DNA, 26 bp, Homo sapiens
ctactacacaaacctcagacacactg

SEQ ID NO: 83288 - DNA, 26 bp, Homo sapiens
tactacacaaacctcagacacactgc

SEQ ID NO: 83289 - DNA, 26 bp, Homo sapiens
actacacaaacctcagacacactgca

SEQ ID NO: 83290 - DNA, 26 bp, Homo sapiens
ctacacaaacctcagacacactgcaa

SEQ ID NO: 83291 - DNA, 26 bp, Homo sapiens
tacacaaacctcagacacactgcaat

SEQ ID NO: 83292 - DNA, 26 bp, Homo sapiens
acacaaacctcagacacactgcaatc

SEQ ID NO: 83293 - DNA, 26 bp, Homo sapiens
cacaaacctcagacacactgcaatct

SEQ ID NO: 83294 - DNA, 26 bp, Homo sapiens
acaaacctcagacacactgcaatctc

SEQ ID NO: 83295 - DNA, 26 bp, Homo sapiens
caaacctcagacacactgcaatctcc

SEQ ID NO: 83296 - DNA, 26 bp, Homo sapiens
aaacctcagacacactgcaatctcca

SEQ ID NO: 83297 - DNA, 26 bp, Homo sapiens
aacctcagacacactgcaatctccac

SEQ ID NO: 83298 - DNA, 26 bp, Homo sapiens
acctcagacacactgcaatctccaca

SEQ ID NO: 83299 - DNA, 26 bp, Homo sapiens
cctcagacacactgcaatctccacag

SEQ ID NO: 83300 - DNA, 26 bp, Homo sapiens
ctcagacacactgcaatctccacagc

SEQ ID NO: 83301 - DNA, 26 bp, Homo sapiens
tcagacacactgcaatctccacagca

SEQ ID NO: 83302 - DNA, 26 bp, Homo sapiens
cagacacactgcaatctccacagcat

SEQ ID NO: 83303 - DNA, 26 bp, Homo sapiens
agacacactgcaatctccacagcatg

SEQ ID NO: 83304 - DNA, 26 bp, Homo sapiens
gacacactgcaatctccacagcatgt

SEQ ID NO: 83305 - DNA, 26 bp, Homo sapiens
acacactgcaatctccacagcatgtg

SEQ ID NO: 83306 - DNA, 26 bp, Homo sapiens
cacactgcaatctccacagcatgtgt

SEQ ID NO: 83307 - DNA, 26 bp, Homo sapiens
acactgcaatctccacagcatgtgtg

SEQ ID NO: 83308 - DNA, 26 bp, Homo sapiens
cactgcaatctccacagcatgtgtgc

SEQ ID NO: 83309 - DNA, 26 bp, Homo sapiens
actgcaatctccacagcatgtgtgct

SEQ ID NO: 83310 - DNA, 26 bp, Homo sapiens
ctgcaatctccacagcatgtgtgctc

SEQ ID NO: 83311 - DNA, 26 bp, Homo sapiens
tgcaatctccacagcatgtgtgctcc

SEQ ID NO: 83312 - DNA, 26 bp, Homo sapiens
gcaatctccacagcatgtgtgctcca

SEQ ID NO: 83313 - DNA, 26 bp, Homo sapiens
caatctccacagcatgtgtgctccac

SEQ ID NO: 83314 - DNA, 26 bp, Homo sapiens
aatctccacagcatgtgtgctccaca

SEQ ID NO: 83315 - DNA, 26 bp, Homo sapiens
atctccacagcatgtgtgctccacag

SEQ ID NO: 83316 - DNA, 26 bp, Homo sapiens
tctccacagcatgtgtgctccacagc

SEQ ID NO: 83317 - DNA, 26 bp, Homo sapiens
ctccacagcatgtgtgctccacagca

SEQ ID NO: 83318 - DNA, 26 bp, Homo sapiens
tccacagcatgtgtgctccacagcat

SEQ ID NO: 83319 - DNA, 26 bp, Homo sapiens
ccacagcatgtgtgctccacagcatg

SEQ ID NO: 83320 - DNA, 26 bp, Homo sapiens
cacagcatgtgtgctccacagcatgt

SEQ ID NO: 83321 - DNA, 26 bp, Homo sapiens
acagcatgtgtgctccacagcatgtg

SEQ ID NO: 83322 - DNA, 26 bp, Homo sapiens
cagcatgtgtgctccacagcatgtgt

SEQ ID NO: 83323 - DNA, 26 bp, Homo sapiens
agcatgtgtgctccacagcatgtgtg

SEQ ID NO: 83324 - DNA, 26 bp, Homo sapiens
gcatgtgtgctccacagcatgtgtgc

SEQ ID NO: 83325 - DNA, 26 bp, Homo sapiens
catgtgtgctccacagcatgtgtgct

SEQ ID NO: 83326 - DNA, 26 bp, Homo sapiens
atgtgtgctccacagcatgtgtgctc

SEQ ID NO: 83327 - DNA, 26 bp, Homo sapiens
tgtgtgctccacagcatgtgtgctcc

SEQ ID NO: 83328 - DNA, 26 bp, Homo sapiens
gtgtgctccacagcatgtgtgctcca

SEQ ID NO: 83329 - DNA, 26 bp, Homo sapiens
tgtgctccacagcatgtgtgctccac

SEQ ID NO: 83330 - DNA, 26 bp, Homo sapiens
gtgctccacagcatgtgtgctccaca

SEQ ID NO: 83331 - DNA, 26 bp, Homo sapiens
tgctccacagcatgtgtgctccacac

SEQ ID NO: 83332 - DNA, 26 bp, Homo sapiens
gctccacagcatgtgtgctccacact

SEQ ID NO: 83333 - DNA, 26 bp, Homo sapiens
ctccacagcatgtgtgctccacactt

SEQ ID NO: 83334 - DNA, 26 bp, Homo sapiens
tccacagcatgtgtgctccacacttc

SEQ ID NO: 83335 - DNA, 26 bp, Homo sapiens
ccacagcatgtgtgctccacacttcc

SEQ ID NO: 83336 - DNA, 26 bp, Homo sapiens
cacagcatgtgtgctccacacttcca

SEQ ID NO: 83337 - DNA, 26 bp, Homo sapiens
acagcatgtgtgctccacacttccag

SEQ ID NO: 83338 - DNA, 26 bp, Homo sapiens
cagcatgtgtgctccacacttccagc

SEQ ID NO: 83339 - DNA, 26 bp, Homo sapiens
agcatgtgtgctccacacttccagct

SEQ ID NO: 83340 - DNA, 26 bp, Homo sapiens
gcatgtgtgctccacacttccagctg

SEQ ID NO: 83341 - DNA, 26 bp, Homo sapiens
catgtgtgctccacacttccagctgg

SEQ ID NO: 83342 - DNA, 26 bp, Homo sapiens
atgtgtgctccacacttccagctggc

SEQ ID NO: 83343 - DNA, 26 bp, Homo sapiens
tgtgtgctccacacttccagctggcc

SEQ ID NO: 83344 - DNA, 26 bp, Homo sapiens
gtgtgctccacacttccagctggccc

SEQ ID NO: 83345 - DNA, 26 bp, Homo sapiens
tgtgctccacacttccagctggccct

SEQ ID NO: 83346 - DNA, 26 bp, Homo sapiens
gtgctccacacttccagctggccctg

SEQ ID NO: 83347 - DNA, 26 bp, Homo sapiens
tgctccacacttccagctggccctgg

SEQ ID NO: 83348 - DNA, 26 bp, Homo sapiens
gctccacacttccagctggccctggg

SEQ ID NO: 83349 - DNA, 26 bp, Homo sapiens
ctccacacttccagctggccctgggt

SEQ ID NO: 83350 - DNA, 26 bp, Homo sapiens
tccacacttccagctggccctgggtt

SEQ ID NO: 83351 - DNA, 26 bp, Homo sapiens
ccacacttccagctggccctgggttc

SEQ ID NO: 83352 - DNA, 26 bp, Homo sapiens
cacacttccagctggccctgggttcc

SEQ ID NO: 83353 - DNA, 26 bp, Homo sapiens
acacttccagctggccctgggttcct

SEQ ID NO: 83354 - DNA, 26 bp, Homo sapiens
cacttccagctggccctgggttcctt

SEQ ID NO: 83355 - DNA, 26 bp, Homo sapiens
acttccagctggccctgggttccttg

SEQ ID NO: 83356 - DNA, 26 bp, Homo sapiens
cttccagctggccctgggttccttga

SEQ ID NO: 83357 - DNA, 26 bp, Homo sapiens
ttccagctggccctgggttccttgac

SEQ ID NO: 83358 - DNA, 26 bp, Homo sapiens
tccagctggccctgggttccttgact

SEQ ID NO: 83359 - DNA, 26 bp, Homo sapiens
ccagctggccctgggttccttgactt

SEQ ID NO: 83360 - DNA, 26 bp, Homo sapiens
cagctggccctgggttccttgacttg

SEQ ID NO: 83361 - DNA, 26 bp, Homo sapiens
agctggccctgggttccttgacttgt

SEQ ID NO: 83362 - DNA, 26 bp, Homo sapiens
gctggccctgggttccttgacttgtg

SEQ ID NO: 83363 - DNA, 26 bp, Homo sapiens
ctggccctgggttccttgacttgtga

SEQ ID NO: 83364 - DNA, 26 bp, Homo sapiens
tggccctgggttccttgacttgtgaa

SEQ ID NO: 83365 - DNA, 26 bp, Homo sapiens
ggccctgggttccttgacttgtgaat

SEQ ID NO: 83366 - DNA, 26 bp, Homo sapiens
gccctgggttccttgacttgtgaatg

SEQ ID NO: 83367 - DNA, 26 bp, Homo sapiens
ccctgggttccttgacttgtgaatgg

SEQ ID NO: 83368 - DNA, 26 bp, Homo sapiens
cctgggttccttgacttgtgaatggc

SEQ ID NO: 83369 - DNA, 26 bp, Homo sapiens
ctgggttccttgacttgtgaatggca

SEQ ID NO: 83370 - DNA, 26 bp, Homo sapiens
tgggttccttgacttgtgaatggcag

SEQ ID NO: 83371 - DNA, 26 bp, Homo sapiens
gggttccttgacttgtgaatggcagt

SEQ ID NO: 83372 - DNA, 26 bp, Homo sapiens
ggttccttgacttgtgaatggcagtg

SEQ ID NO: 83373 - DNA, 26 bp, Homo sapiens
gttccttgacttgtgaatggcagtgt

SEQ ID NO: 83374 - DNA, 26 bp, Homo sapiens
ttccttgacttgtgaatggcagtgtt

SEQ ID NO: 83375 - DNA, 26 bp, Homo sapiens
tccttgacttgtgaatggcagtgttt

SEQ ID NO: 83376 - DNA, 26 bp, Homo sapiens
ccttgacttgtgaatggcagtgtttt

SEQ ID NO: 83377 - DNA, 26 bp, Homo sapiens
cttgacttgtgaatggcagtgttttt

SEQ ID NO: 83378 - DNA, 26 bp, Homo sapiens
ttgacttgtgaatggcagtgtttttt

SEQ ID NO: 83379 - DNA, 26 bp, Homo sapiens
tgacttgtgaatggcagtgttttttt

SEQ ID NO: 83380 - DNA, 26 bp, Homo sapiens
gacttgtgaatggcagtgtttttttc

SEQ ID NO: 83381 - DNA, 26 bp, Homo sapiens
acttgtgaatggcagtgtttttttca

SEQ ID NO: 83382 - DNA, 26 bp, Homo sapiens
cttgtgaatggcagtgtttttttcac

SEQ ID NO: 83383 - DNA, 26 bp, Homo sapiens
ttgtgaatggcagtgtttttttcacc

SEQ ID NO: 83384 - DNA, 26 bp, Homo sapiens
tgtgaatggcagtgtttttttcacct

SEQ ID NO: 83385 - DNA, 26 bp, Homo sapiens
gtgaatggcagtgtttttttcaccta

SEQ ID NO: 83386 - DNA, 26 bp, Homo sapiens
tgaatggcagtgtttttttcacctat

SEQ ID NO: 83387 - DNA, 26 bp, Homo sapiens
gaatggcagtgtttttttcacctatg

SEQ ID NO: 83388 - DNA, 26 bp, Homo sapiens
aatggcagtgtttttttcacctatgt

SEQ ID NO: 83389 - DNA, 26 bp, Homo sapiens
atggcagtgtttttttcacctatgtt

SEQ ID NO: 83390 - DNA, 26 bp, Homo sapiens
tggcagtgtttttttcacctatgttt

SEQ ID NO: 83391 - DNA, 26 bp, Homo sapiens
ggcagtgtttttttcacctatgtttg

SEQ ID NO: 83392 - DNA, 26 bp, Homo sapiens
gcagtgtttttttcacctatgtttga

SEQ ID NO: 83393 - DNA, 26 bp, Homo sapiens
cagtgtttttttcacctatgtttgaa

SEQ ID NO: 83394 - DNA, 26 bp, Homo sapiens
agtgtttttttcacctatgtttgaag

SEQ ID NO: 83395 - DNA, 26 bp, Homo sapiens
gtgtttttttcacctatgtttgaaga

SEQ ID NO: 83396 - DNA, 26 bp, Homo sapiens
tgtttttttcacctatgtttgaagaa

SEQ ID NO: 83397 - DNA, 26 bp, Homo sapiens
gtttttttcacctatgtttgaagaaa

SEQ ID NO: 83398 - DNA, 26 bp, Homo sapiens
tttttttcacctatgtttgaagaaaa

SEQ ID NO: 83399 - DNA, 26 bp, Homo sapiens
ttttttcacctatgtttgaagaaaac

SEQ ID NO: 83400 - DNA, 26 bp, Homo sapiens
tttttcacctatgtttgaagaaaacc

SEQ ID NO: 83401 - DNA, 26 bp, Homo sapiens
ttttcacctatgtttgaagaaaacca

SEQ ID NO: 83402 - DNA, 26 bp, Homo sapiens
tttcacctatgtttgaagaaaaccaa

SEQ ID NO: 83403 - DNA, 26 bp, Homo sapiens
ttcacctatgtttgaagaaaaccaaa

SEQ ID NO: 83404 - DNA, 26 bp, Homo sapiens
tcacctatgtttgaagaaaaccaaag

SEQ ID NO: 83405 - DNA, 26 bp, Homo sapiens
cacctatgtttgaagaaaaccaaaga

SEQ ID NO: 83406 - DNA, 26 bp, Homo sapiens
acctatgtttgaagaaaaccaaagaa

SEQ ID NO: 83407 - DNA, 26 bp, Homo sapiens
cctatgtttgaagaaaaccaaagaaa

SEQ ID NO: 83408 - DNA, 26 bp, Homo sapiens
ctatgtttgaagaaaaccaaagaaaa

SEQ ID NO: 83409 - DNA, 26 bp, Homo sapiens
tatgtttgaagaaaaccaaagaaaag

SEQ ID NO: 83410 - DNA, 26 bp, Homo sapiens
atgtttgaagaaaaccaaagaaaagc

SEQ ID NO: 83411 - DNA, 26 bp, Homo sapiens
tgtttgaagaaaaccaaagaaaagcc

SEQ ID NO: 83412 - DNA, 26 bp, Homo sapiens
gtttgaagaaaaccaaagaaaagcct

SEQ ID NO: 83413 - DNA, 26 bp, Homo sapiens
tttgaagaaaaccaaagaaaagcctg

SEQ ID NO: 83414 - DNA, 26 bp, Homo sapiens
ttgaagaaaaccaaagaaaagcctgg

SEQ ID NO: 83415 - DNA, 26 bp, Homo sapiens
tgaagaaaaccaaagaaaagcctggc

SEQ ID NO: 83416 - DNA, 26 bp, Homo sapiens
gaagaaaaccaaagaaaagcctggcc

SEQ ID NO: 83417 - DNA, 26 bp, Homo sapiens
aagaaaaccaaagaaaagcctggcct

SEQ ID NO: 83418 - DNA, 26 bp, Homo sapiens
agaaaaccaaagaaaagcctggcctt

SEQ ID NO: 83419 - DNA, 26 bp, Homo sapiens
gaaaaccaaagaaaagcctggccttt

SEQ ID NO: 83420 - DNA, 26 bp, Homo sapiens
aaaaccaaagaaaagcctggcctttg

SEQ ID NO: 83421 - DNA, 26 bp, Homo sapiens
aaaccaaagaaaagcctggcctttgc

SEQ ID NO: 83422 - DNA, 26 bp, Homo sapiens
aaccaaagaaaagcctggcctttgct

SEQ ID NO: 83423 - DNA, 26 bp, Homo sapiens
accaaagaaaagcctggcctttgcta

SEQ ID NO: 83424 - DNA, 26 bp, Homo sapiens
ccaaagaaaagcctggcctttgctac

SEQ ID NO: 83425 - DNA, 26 bp, Homo sapiens
caaagaaaagcctggcctttgctacc

SEQ ID NO: 83426 - DNA, 26 bp, Homo sapiens
aaagaaaagcctggcctttgctacct

SEQ ID NO: 83427 - DNA, 26 bp, Homo sapiens
aagaaaagcctggcctttgctacctc

SEQ ID NO: 83428 - DNA, 26 bp, Homo sapiens
agaaaagcctggcctttgctacctct

SEQ ID NO: 83429 - DNA, 26 bp, Homo sapiens
gaaaagcctggcctttgctacctctc

SEQ ID NO: 83430 - DNA, 26 bp, Homo sapiens
aaaagcctggcctttgctacctctcc

SEQ ID NO: 83431 - DNA, 26 bp, Homo sapiens
aaagcctggcctttgctacctctcct

SEQ ID NO: 83432 - DNA, 26 bp, Homo sapiens
aagcctggcctttgctacctctcctg

SEQ ID NO: 83433 - DNA, 26 bp, Homo sapiens
agcctggcctttgctacctctcctgt

SEQ ID NO: 83434 - DNA, 26 bp, Homo sapiens
gcctggcctttgctacctctcctgtg

SEQ ID NO: 83435 - DNA, 26 bp, Homo sapiens
cctggcctttgctacctctcctgtgc

SEQ ID NO: 83436 - DNA, 26 bp, Homo sapiens
ctggcctttgctacctctcctgtgcc

SEQ ID NO: 83437 - DNA, 26 bp, Homo sapiens
tggcctttgctacctctcctgtgcct

SEQ ID NO: 83438 - DNA, 26 bp, Homo sapiens
ggcctttgctacctctcctgtgcctt

SEQ ID NO: 83439 - DNA, 26 bp, Homo sapiens
gcctttgctacctctcctgtgccttc

SEQ ID NO: 83440 - DNA, 26 bp, Homo sapiens
cctttgctacctctcctgtgccttct

SEQ ID NO: 83441 - DNA, 26 bp, Homo sapiens
ctttgctacctctcctgtgccttcta

SEQ ID NO: 83442 - DNA, 26 bp, Homo sapiens
tttgctacctctcctgtgccttctac

SEQ ID NO: 83443 - DNA, 26 bp, Homo sapiens
ttgctacctctcctgtgccttctact

SEQ ID NO: 83444 - DNA, 26 bp, Homo sapiens
tgctacctctcctgtgccttctactt

SEQ ID NO: 83445 - DNA, 26 bp, Homo sapiens
gctacctctcctgtgccttctacttt

SEQ ID NO: 83446 - DNA, 26 bp, Homo sapiens
ctacctctcctgtgccttctactttt

SEQ ID NO: 83447 - DNA, 26 bp, Homo sapiens
tacctctcctgtgccttctactttta

SEQ ID NO: 83448 - DNA, 26 bp, Homo sapiens
acctctcctgtgccttctacttttat

SEQ ID NO: 83449 - DNA, 26 bp, Homo sapiens
cctctcctgtgccttctacttttatc

SEQ ID NO: 83450 - DNA, 26 bp, Homo sapiens
ctctcctgtgccttctacttttatct

SEQ ID NO: 83451 - DNA, 26 bp, Homo sapiens
tctcctgtgccttctacttttatcta

SEQ ID NO: 83452 - DNA, 26 bp, Homo sapiens
ctcctgtgccttctacttttatctaa

SEQ ID NO: 83453 - DNA, 26 bp, Homo sapiens
tcctgtgccttctacttttatctaaa

SEQ ID NO: 83454 - DNA, 26 bp, Homo sapiens
cctgtgccttctacttttatctaaat

SEQ ID NO: 83455 - DNA, 26 bp, Homo sapiens
ctgtgccttctacttttatctaaatg

SEQ ID NO: 83456 - DNA, 26 bp, Homo sapiens
tgtgccttctacttttatctaaatga

SEQ ID NO: 83457 - DNA, 26 bp, Homo sapiens
gtgccttctacttttatctaaatgaa

SEQ ID NO: 83458 - DNA, 26 bp, Homo sapiens
tgccttctacttttatctaaatgaac

SEQ ID NO: 83459 - DNA, 26 bp, Homo sapiens
gccttctacttttatctaaatgaaca

SEQ ID NO: 83460 - DNA, 26 bp, Homo sapiens
ccttctacttttatctaaatgaacac

SEQ ID NO: 83461 - DNA, 26 bp, Homo sapiens
cttctacttttatctaaatgaacaca

SEQ ID NO: 83462 - DNA, 26 bp, Homo sapiens
ttctacttttatctaaatgaacacac

SEQ ID NO: 83463 - DNA, 26 bp, Homo sapiens
tctacttttatctaaatgaacacact

SEQ ID NO: 83464 - DNA, 26 bp, Homo sapiens
ctacttttatctaaatgaacacacta

SEQ ID NO: 83465 - DNA, 26 bp, Homo sapiens
tacttttatctaaatgaacacactat

SEQ ID NO: 83466 - DNA, 26 bp, Homo sapiens
acttttatctaaatgaacacactata

SEQ ID NO: 83467 - DNA, 26 bp, Homo sapiens
cttttatctaaatgaacacactataa

SEQ ID NO: 83468 - DNA, 26 bp, Homo sapiens
ttttatctaaatgaacacactataat

SEQ ID NO: 83469 - DNA, 26 bp, Homo sapiens
tttatctaaatgaacacactataatc

SEQ ID NO: 83470 - DNA, 26 bp, Homo sapiens
ttatctaaatgaacacactataatca

SEQ ID NO: 83471 - DNA, 26 bp, Homo sapiens
tatctaaatgaacacactataatcat

SEQ ID NO: 83472 - DNA, 26 bp, Homo sapiens
atctaaatgaacacactataatcatg

SEQ ID NO: 83473 - DNA, 26 bp, Homo sapiens
tctaaatgaacacactataatcatgc

SEQ ID NO: 83474 - DNA, 26 bp, Homo sapiens
ctaaatgaacacactataatcatgct

SEQ ID NO: 83475 - DNA, 26 bp, Homo sapiens
taaatgaacacactataatcatgctg

SEQ ID NO: 83476 - DNA, 26 bp, Homo sapiens
aaatgaacacactataatcatgctgg

SEQ ID NO: 83477 - DNA, 26 bp, Homo sapiens
aatgaacacactataatcatgctggt

SEQ ID NO: 83478 - DNA, 26 bp, Homo sapiens
atgaacacactataatcatgctggtt

SEQ ID NO: 83479 - DNA, 26 bp, Homo sapiens
tgaacacactataatcatgctggttg

SEQ ID NO: 83480 - DNA, 26 bp, Homo sapiens
gaacacactataatcatgctggttgc

SEQ ID NO: 83481 - DNA, 26 bp, Homo sapiens
aacacactataatcatgctggttgca

SEQ ID NO: 83482 - DNA, 26 bp, Homo sapiens
acacactataatcatgctggttgcat

SEQ ID NO: 83483 - DNA, 26 bp, Homo sapiens
cacactataatcatgctggttgcatt

SEQ ID NO: 83484 - DNA, 26 bp, Homo sapiens
acactataatcatgctggttgcattt

SEQ ID NO: 83485 - DNA, 26 bp, Homo sapiens
cactataatcatgctggttgcatttt

SEQ ID NO: 83486 - DNA, 26 bp, Homo sapiens
actataatcatgctggttgcattttc

SEQ ID NO: 83487 - DNA, 26 bp, Homo sapiens
ctataatcatgctggttgcattttcc

SEQ ID NO: 83488 - DNA, 26 bp, Homo sapiens
tataatcatgctggttgcattttcct

SEQ ID NO: 83489 - DNA, 26 bp, Homo sapiens
ataatcatgctggttgcattttcctt

SEQ ID NO: 83490 - DNA, 26 bp, Homo sapiens
taatcatgctggttgcattttccttc

SEQ ID NO: 83491 - DNA, 26 bp, Homo sapiens
aatcatgctggttgcattttccttca

SEQ ID NO: 83492 - DNA, 26 bp, Homo sapiens
atcatgctggttgcattttccttcat

SEQ ID NO: 83493 - DNA, 26 bp, Homo sapiens
tcatgctggttgcattttccttcatt

SEQ ID NO: 83494 - DNA, 26 bp, Homo sapiens
catgctggttgcattttccttcattc

SEQ ID NO: 83495 - DNA, 26 bp, Homo sapiens
atgctggttgcattttccttcattct

SEQ ID NO: 83496 - DNA, 26 bp, Homo sapiens
tgctggttgcattttccttcattctc

SEQ ID NO: 83497 - DNA, 26 bp, Homo sapiens
gctggttgcattttccttcattctcc

SEQ ID NO: 83498 - DNA, 26 bp, Homo sapiens
ctggttgcattttccttcattctcct

SEQ ID NO: 83499 - DNA, 26 bp, Homo sapiens
tggttgcattttccttcattctcctc

SEQ ID NO: 83500 - DNA, 26 bp, Homo sapiens
ggttgcattttccttcattctcctcc

SEQ ID NO: 83501 - DNA, 26 bp, Homo sapiens
gttgcattttccttcattctcctccc

SEQ ID NO: 83502 - DNA, 26 bp, Homo sapiens
ttgcattttccttcattctcctccct

SEQ ID NO: 83503 - DNA, 26 bp, Homo sapiens
tgcattttccttcattctcctcccta

SEQ ID NO: 83504 - DNA, 26 bp, Homo sapiens
gcattttccttcattctcctccctac

SEQ ID NO: 83505 - DNA, 26 bp, Homo sapiens
cattttccttcattctcctccctact

SEQ ID NO: 83506 - DNA, 26 bp, Homo sapiens
attttccttcattctcctccctactc

SEQ ID NO: 83507 - DNA, 26 bp, Homo sapiens
ttttccttcattctcctccctactcc

SEQ ID NO: 83508 - DNA, 26 bp, Homo sapiens
tttccttcattctcctccctactcct

SEQ ID NO: 83509 - DNA, 26 bp, Homo sapiens
ttccttcattctcctccctactcctt

SEQ ID NO: 83510 - DNA, 26 bp, Homo sapiens
tccttcattctcctccctactccttc

SEQ ID NO: 83511 - DNA, 26 bp, Homo sapiens
ccttcattctcctccctactccttcc

SEQ ID NO: 83512 - DNA, 26 bp, Homo sapiens
cttcattctcctccctactccttcca

SEQ ID NO: 83513 - DNA, 26 bp, Homo sapiens
ttcattctcctccctactccttccaa

SEQ ID NO: 83514 - DNA, 26 bp, Homo sapiens
tcattctcctccctactccttccaaa

SEQ ID NO: 83515 - DNA, 26 bp, Homo sapiens
cattctcctccctactccttccaaac

SEQ ID NO: 83516 - DNA, 26 bp, Homo sapiens
attctcctccctactccttccaaacc

SEQ ID NO: 83517 - DNA, 26 bp, Homo sapiens
ttctcctccctactccttccaaaccc

SEQ ID NO: 83518 - DNA, 26 bp, Homo sapiens
tctcctccctactccttccaaacccc

SEQ ID NO: 83519 - DNA, 26 bp, Homo sapiens
ctcctccctactccttccaaacccct

SEQ ID NO: 83520 - DNA, 26 bp, Homo sapiens
tcctccctactccttccaaacccctg

SEQ ID NO: 83521 - DNA, 26 bp, Homo sapiens
cctccctactccttccaaacccctga

SEQ ID NO: 83522 - DNA, 26 bp, Homo sapiens
ctccctactccttccaaacccctgat

SEQ ID NO: 83523 - DNA, 26 bp, Homo sapiens
tccctactccttccaaacccctgatt

SEQ ID NO: 83524 - DNA, 26 bp, Homo sapiens
ccctactccttccaaacccctgattc

SEQ ID NO: 83525 - DNA, 26 bp, Homo sapiens
cctactccttccaaacccctgattcc

SEQ ID NO: 83526 - DNA, 26 bp, Homo sapiens
ctactccttccaaacccctgattcct

SEQ ID NO: 83527 - DNA, 26 bp, Homo sapiens
tactccttccaaacccctgattcctc

SEQ ID NO: 83528 - DNA, 26 bp, Homo sapiens
actccttccaaacccctgattcctcc

SEQ ID NO: 83529 - DNA, 26 bp, Homo sapiens
ctccttccaaacccctgattcctcca

SEQ ID NO: 83530 - DNA, 26 bp, Homo sapiens
tccttccaaacccctgattcctccaa

SEQ ID NO: 83531 - DNA, 26 bp, Homo sapiens
ccttccaaacccctgattcctccaaa

SEQ ID NO: 83532 - DNA, 26 bp, Homo sapiens
cttccaaacccctgattcctccaaat

SEQ ID NO: 83533 - DNA, 26 bp, Homo sapiens
ttccaaacccctgattcctccaaata

SEQ ID NO: 83534 - DNA, 26 bp, Homo sapiens
tccaaacccctgattcctccaaatac

SEQ ID NO: 83535 - DNA, 26 bp, Homo sapiens
ccaaacccctgattcctccaaatact

SEQ ID NO: 83536 - DNA, 26 bp, Homo sapiens
caaacccctgattcctccaaatacta

SEQ ID NO: 83537 - DNA, 26 bp, Homo sapiens
aaacccctgattcctccaaatactat

SEQ ID NO: 83538 - DNA, 26 bp, Homo sapiens
aacccctgattcctccaaatactata

SEQ ID NO: 83539 - DNA, 26 bp, Homo sapiens
acccctgattcctccaaatactatat

SEQ ID NO: 83540 - DNA, 26 bp, Homo sapiens
cccctgattcctccaaatactatata

SEQ ID NO: 83541 - DNA, 26 bp, Homo sapiens
ccctgattcctccaaatactatatat

SEQ ID NO: 83542 - DNA, 26 bp, Homo sapiens
cctgattcctccaaatactatatatg

SEQ ID NO: 83543 - DNA, 26 bp, Homo sapiens
ctgattcctccaaatactatatatgc

SEQ ID NO: 83544 - DNA, 26 bp, Homo sapiens
tgattcctccaaatactatatatgcc

SEQ ID NO: 83545 - DNA, 26 bp, Homo sapiens
gattcctccaaatactatatatgcct

SEQ ID NO: 83546 - DNA, 26 bp, Homo sapiens
attcctccaaatactatatatgcctt

SEQ ID NO: 83547 - DNA, 26 bp, Homo sapiens
ttcctccaaatactatatatgccttg

SEQ ID NO: 83548 - DNA, 26 bp, Homo sapiens
tcctccaaatactatatatgccttgg

SEQ ID NO: 83549 - DNA, 26 bp, Homo sapiens
cctccaaatactatatatgccttggt

SEQ ID NO: 83550 - DNA, 26 bp, Homo sapiens
ctccaaatactatatatgccttggtc

SEQ ID NO: 83551 - DNA, 26 bp, Homo sapiens
tccaaatactatatatgccttggtca

SEQ ID NO: 83552 - DNA, 26 bp, Homo sapiens
ccaaatactatatatgccttggtcat

SEQ ID NO: 83553 - DNA, 26 bp, Homo sapiens
caaatactatatatgccttggtcatt

SEQ ID NO: 83554 - DNA, 26 bp, Homo sapiens
aaatactatatatgccttggtcattt

SEQ ID NO: 83555 - DNA, 26 bp, Homo sapiens
aatactatatatgccttggtcatttg

SEQ ID NO: 83556 - DNA, 26 bp, Homo sapiens
atactatatatgccttggtcatttgg

SEQ ID NO: 83557 - DNA, 26 bp, Homo sapiens
tactatatatgccttggtcatttggg

SEQ ID NO: 83558 - DNA, 26 bp, Homo sapiens
actatatatgccttggtcatttgggt

SEQ ID NO: 83559 - DNA, 26 bp, Homo sapiens
ctatatatgccttggtcatttgggtg

SEQ ID NO: 83560 - DNA, 26 bp, Homo sapiens
tatatatgccttggtcatttgggtgg

SEQ ID NO: 83561 - DNA, 26 bp, Homo sapiens
atatatgccttggtcatttgggtggt

SEQ ID NO: 83562 - DNA, 26 bp, Homo sapiens
tatatgccttggtcatttgggtggtt

SEQ ID NO: 83563 - DNA, 26 bp, Homo sapiens
atatgccttggtcatttgggtggttt

SEQ ID NO: 83564 - DNA, 26 bp, Homo sapiens
tatgccttggtcatttgggtggtttg

SEQ ID NO: 83565 - DNA, 26 bp, Homo sapiens
atgccttggtcatttgggtggtttgg

SEQ ID NO: 83566 - DNA, 26 bp, Homo sapiens
tgccttggtcatttgggtggtttgga

SEQ ID NO: 83567 - DNA, 26 bp, Homo sapiens
gccttggtcatttgggtggtttggat

SEQ ID NO: 83568 - DNA, 26 bp, Homo sapiens
ccttggtcatttgggtggtttggatg

SEQ ID NO: 83569 - DNA, 26 bp, Homo sapiens
cttggtcatttgggtggtttggatgc

SEQ ID NO: 83570 - DNA, 26 bp, Homo sapiens
ttggtcatttgggtggtttggatgct

SEQ ID NO: 83571 - DNA, 26 bp, Homo sapiens
tggtcatttgggtggtttggatgctt

SEQ ID NO: 83572 - DNA, 26 bp, Homo sapiens
ggtcatttgggtggtttggatgcttt

SEQ ID NO: 83573 - DNA, 26 bp, Homo sapiens
gtcatttgggtggtttggatgctttc

SEQ ID NO: 83574 - DNA, 26 bp, Homo sapiens
tcatttgggtggtttggatgctttct

SEQ ID NO: 83575 - DNA, 26 bp, Homo sapiens
catttgggtggtttggatgctttctg

SEQ ID NO: 83576 - DNA, 26 bp, Homo sapiens
atttgggtggtttggatgctttctgt

SEQ ID NO: 83577 - DNA, 26 bp, Homo sapiens
tttgggtggtttggatgctttctgtg

SEQ ID NO: 83578 - DNA, 26 bp, Homo sapiens
ttgggtggtttggatgctttctgtgg

SEQ ID NO: 83579 - DNA, 26 bp, Homo sapiens
tgggtggtttggatgctttctgtgga

SEQ ID NO: 83580 - DNA, 26 bp, Homo sapiens
gggtggtttggatgctttctgtggaa

SEQ ID NO: 83581 - DNA, 26 bp, Homo sapiens
ggtggtttggatgctttctgtggaat

SEQ ID NO: 83582 - DNA, 26 bp, Homo sapiens
gtggtttggatgctttctgtggaatg

SEQ ID NO: 83583 - DNA, 26 bp, Homo sapiens
tggtttggatgctttctgtggaatga

SEQ ID NO: 83584 - DNA, 26 bp, Homo sapiens
ggtttggatgctttctgtggaatgaa

SEQ ID NO: 83585 - DNA, 26 bp, Homo sapiens
gtttggatgctttctgtggaatgaac

SEQ ID NO: 83586 - DNA, 26 bp, Homo sapiens
tttggatgctttctgtggaatgaact

SEQ ID NO: 83587 - DNA, 26 bp, Homo sapiens
ttggatgctttctgtggaatgaactg

SEQ ID NO: 83588 - DNA, 26 bp, Homo sapiens
tggatgctttctgtggaatgaactgt

SEQ ID NO: 83589 - DNA, 26 bp, Homo sapiens
ggatgctttctgtggaatgaactgta

SEQ ID NO: 83590 - DNA, 26 bp, Homo sapiens
gatgctttctgtggaatgaactgtaa

SEQ ID NO: 83591 - DNA, 26 bp, Homo sapiens
atgctttctgtggaatgaactgtaat

SEQ ID NO: 83592 - DNA, 26 bp, Homo sapiens
tgctttctgtggaatgaactgtaata

SEQ ID NO: 83593 - DNA, 26 bp, Homo sapiens
gctttctgtggaatgaactgtaatat

SEQ ID NO: 83594 - DNA, 26 bp, Homo sapiens
ctttctgtggaatgaactgtaatata

SEQ ID NO: 83595 - DNA, 26 bp, Homo sapiens
tttctgtggaatgaactgtaatatat

SEQ ID NO: 83596 - DNA, 26 bp, Homo sapiens
ttctgtggaatgaactgtaatatatt

SEQ ID NO: 83597 - DNA, 26 bp, Homo sapiens
tctgtggaatgaactgtaatatattt

SEQ ID NO: 83598 - DNA, 26 bp, Homo sapiens
ctgtggaatgaactgtaatatatttc

SEQ ID NO: 83599 - DNA, 26 bp, Homo sapiens
tgtggaatgaactgtaatatatttct

SEQ ID NO: 83600 - DNA, 26 bp, Homo sapiens
gtggaatgaactgtaatatatttctg

SEQ ID NO: 83601 - DNA, 26 bp, Homo sapiens
tggaatgaactgtaatatatttctgc

SEQ ID NO: 83602 - DNA, 26 bp, Homo sapiens
ggaatgaactgtaatatatttctgct

SEQ ID NO: 83603 - DNA, 26 bp, Homo sapiens
gaatgaactgtaatatatttctgctt

SEQ ID NO: 83604 - DNA, 26 bp, Homo sapiens
aatgaactgtaatatatttctgcttt

SEQ ID NO: 83605 - DNA, 26 bp, Homo sapiens
atgaactgtaatatatttctgcttta

SEQ ID NO: 83606 - DNA, 26 bp, Homo sapiens
tgaactgtaatatatttctgctttat

SEQ ID NO: 83607 - DNA, 26 bp, Homo sapiens
gaactgtaatatatttctgctttatt

SEQ ID NO: 83608 - DNA, 26 bp, Homo sapiens
aactgtaatatatttctgctttattc

SEQ ID NO: 83609 - DNA, 26 bp, Homo sapiens
actgtaatatatttctgctttattca

SEQ ID NO: 83610 - DNA, 26 bp, Homo sapiens
ctgtaatatatttctgctttattcag

SEQ ID NO: 83611 - DNA, 26 bp, Homo sapiens
tgtaatatatttctgctttattcaga

SEQ ID NO: 83612 - DNA, 26 bp, Homo sapiens
gtaatatatttctgctttattcagag

SEQ ID NO: 83613 - DNA, 26 bp, Homo sapiens
taatatatttctgctttattcagagc

SEQ ID NO: 83614 - DNA, 26 bp, Homo sapiens
aatatatttctgctttattcagagca

SEQ ID NO: 83615 - DNA, 26 bp, Homo sapiens
atatatttctgctttattcagagcac

SEQ ID NO: 83616 - DNA, 26 bp, Homo sapiens
tatatttctgctttattcagagcact

SEQ ID NO: 83617 - DNA, 26 bp, Homo sapiens
atatttctgctttattcagagcactt

SEQ ID NO: 83618 - DNA, 26 bp, Homo sapiens
tatttctgctttattcagagcacttt

SEQ ID NO: 83619 - DNA, 26 bp, Homo sapiens
atttctgctttattcagagcacttta

SEQ ID NO: 83620 - DNA, 26 bp, Homo sapiens
tttctgctttattcagagcactttat

SEQ ID NO: 83621 - DNA, 26 bp, Homo sapiens
ttctgctttattcagagcactttata

SEQ ID NO: 83622 - DNA, 26 bp, Homo sapiens
tctgctttattcagagcactttatat

SEQ ID NO: 83623 - DNA, 26 bp, Homo sapiens
ctgctttattcagagcactttatatt

SEQ ID NO: 83624 - DNA, 26 bp, Homo sapiens
tgctttattcagagcactttatatta

SEQ ID NO: 83625 - DNA, 26 bp, Homo sapiens
gctttattcagagcactttatattat

SEQ ID NO: 83626 - DNA, 26 bp, Homo sapiens
ctttattcagagcactttatattatt

SEQ ID NO: 83627 - DNA, 26 bp, Homo sapiens
tttattcagagcactttatattattt

SEQ ID NO: 83628 - DNA, 26 bp, Homo sapiens
ttattcagagcactttatattattta

SEQ ID NO: 83629 - DNA, 26 bp, Homo sapiens
tattcagagcactttatattatttat

SEQ ID NO: 83630 - DNA, 26 bp, Homo sapiens
attcagagcactttatattatttata

SEQ ID NO: 83631 - DNA, 26 bp, Homo sapiens
ttcagagcactttatattatttatat

SEQ ID NO: 83632 - DNA, 26 bp, Homo sapiens
tcagagcactttatattatttatatt

SEQ ID NO: 83633 - DNA, 26 bp, Homo sapiens
cagagcactttatattatttatattt

SEQ ID NO: 83634 - DNA, 26 bp, Homo sapiens
agagcactttatattatttatattta

SEQ ID NO: 83635 - DNA, 26 bp, Homo sapiens
gagcactttatattatttatatttaa

SEQ ID NO: 83636 - DNA, 26 bp, Homo sapiens
agcactttatattatttatatttaaa

SEQ ID NO: 83637 - DNA, 26 bp, Homo sapiens
gcactttatattatttatatttaaat

SEQ ID NO: 83638 - DNA, 26 bp, Homo sapiens
cactttatattatttatatttaaatt

SEQ ID NO: 83639 - DNA, 26 bp, Homo sapiens
actttatattatttatatttaaatta

SEQ ID NO: 83640 - DNA, 26 bp, Homo sapiens
ctttatattatttatatttaaattag

SEQ ID NO: 83641 - DNA, 26 bp, Homo sapiens
tttatattatttatatttaaattagc

SEQ ID NO: 83642 - DNA, 26 bp, Homo sapiens
ttatattatttatatttaaattagcc

SEQ ID NO: 83643 - DNA, 26 bp, Homo sapiens
tatattatttatatttaaattagcct

SEQ ID NO: 83644 - DNA, 26 bp, Homo sapiens
atattatttatatttaaattagcctt

SEQ ID NO: 83645 - DNA, 26 bp, Homo sapiens
tattatttatatttaaattagccttt

SEQ ID NO: 83646 - DNA, 26 bp, Homo sapiens
attatttatatttaaattagcctttt

SEQ ID NO: 83647 - DNA, 26 bp, Homo sapiens
ttatttatatttaaattagcctttta

SEQ ID NO: 83648 - DNA, 26 bp, Homo sapiens
tatttatatttaaattagccttttaa

SEQ ID NO: 83649 - DNA, 26 bp, Homo sapiens
atttatatttaaattagccttttaat

SEQ ID NO: 83650 - DNA, 26 bp, Homo sapiens
tttatatttaaattagccttttaata

SEQ ID NO: 83651 - DNA, 26 bp, Homo sapiens
ttatatttaaattagccttttaatat

SEQ ID NO: 83652 - DNA, 26 bp, Homo sapiens
tatatttaaattagccttttaatatg

SEQ ID NO: 83653 - DNA, 26 bp, Homo sapiens
atatttaaattagccttttaatatgg

SEQ ID NO: 83654 - DNA, 26 bp, Homo sapiens
tatttaaattagccttttaatatggt

SEQ ID NO: 83655 - DNA, 26 bp, Homo sapiens
atttaaattagccttttaatatggtt

SEQ ID NO: 83656 - DNA, 26 bp, Homo sapiens
tttaaattagccttttaatatggttt

SEQ ID NO: 83657 - DNA, 26 bp, Homo sapiens
ttaaattagccttttaatatggtttg

SEQ ID NO: 83658 - DNA, 26 bp, Homo sapiens
taaattagccttttaatatggtttgt

SEQ ID NO: 83659 - DNA, 26 bp, Homo sapiens
aaattagccttttaatatggtttgta

SEQ ID NO: 83660 - DNA, 26 bp, Homo sapiens
aattagccttttaatatggtttgtaa

SEQ ID NO: 83661 - DNA, 26 bp, Homo sapiens
attagccttttaatatggtttgtaaa

SEQ ID NO: 83662 - DNA, 26 bp, Homo sapiens
ttagccttttaatatggtttgtaaat

SEQ ID NO: 83663 - DNA, 26 bp, Homo sapiens
tagccttttaatatggtttgtaaata

SEQ ID NO: 83664 - DNA, 26 bp, Homo sapiens
agccttttaatatggtttgtaaataa

SEQ ID NO: 83665 - DNA, 26 bp, Homo sapiens
gccttttaatatggtttgtaaataag

SEQ ID NO: 83666 - DNA, 26 bp, Homo sapiens
ccttttaatatggtttgtaaataagt

SEQ ID NO: 83667 - DNA, 26 bp, Homo sapiens
cttttaatatggtttgtaaataagtt

SEQ ID NO: 83668 - DNA, 26 bp, Homo sapiens
ttttaatatggtttgtaaataagttt

SEQ ID NO: 83669 - DNA, 26 bp, Homo sapiens
tttaatatggtttgtaaataagtttc

SEQ ID NO: 83670 - DNA, 26 bp, Homo sapiens
ttaatatggtttgtaaataagtttcc

SEQ ID NO: 83671 - DNA, 26 bp, Homo sapiens
taatatggtttgtaaataagtttcct

SEQ ID NO: 83672 - DNA, 26 bp, Homo sapiens
aatatggtttgtaaataagtttccta

SEQ ID NO: 83673 - DNA, 26 bp, Homo sapiens
atatggtttgtaaataagtttcctac

SEQ ID NO: 83674 - DNA, 26 bp, Homo sapiens
tatggtttgtaaataagtttcctacc

SEQ ID NO: 83675 - DNA, 26 bp, Homo sapiens
atggtttgtaaataagtttcctacca

SEQ ID NO: 83676 - DNA, 26 bp, Homo sapiens
tggtttgtaaataagtttcctaccaa

SEQ ID NO: 83677 - DNA, 26 bp, Homo sapiens
ggtttgtaaataagtttcctaccaag

SEQ ID NO: 83678 - DNA, 26 bp, Homo sapiens
gtttgtaaataagtttcctaccaagg

SEQ ID NO: 83679 - DNA, 26 bp, Homo sapiens
tttgtaaataagtttcctaccaaggt

SEQ ID NO: 83680 - DNA, 26 bp, Homo sapiens
ttgtaaataagtttcctaccaaggta

SEQ ID NO: 83681 - DNA, 26 bp, Homo sapiens
tgtaaataagtttcctaccaaggtag

SEQ ID NO: 83682 - DNA, 26 bp, Homo sapiens
gtaaataagtttcctaccaaggtagc

SEQ ID NO: 83683 - DNA, 26 bp, Homo sapiens
taaataagtttcctaccaaggtagca

SEQ ID NO: 83684 - DNA, 26 bp, Homo sapiens
aaataagtttcctaccaaggtagcat

SEQ ID NO: 83685 - DNA, 26 bp, Homo sapiens
aataagtttcctaccaaggtagcatg

SEQ ID NO: 83686 - DNA, 26 bp, Homo sapiens
ataagtttcctaccaaggtagcatga

SEQ ID NO: 83687 - DNA, 26 bp, Homo sapiens
taagtttcctaccaaggtagcatgaa

SEQ ID NO: 83688 - DNA, 26 bp, Homo sapiens
aagtttcctaccaaggtagcatgaaa

SEQ ID NO: 83689 - DNA, 26 bp, Homo sapiens
agtttcctaccaaggtagcatgaaaa

SEQ ID NO: 83690 - DNA, 26 bp, Homo sapiens
gtttcctaccaaggtagcatgaaaac

SEQ ID NO: 83691 - DNA, 26 bp, Homo sapiens
tttcctaccaaggtagcatgaaaaca

SEQ ID NO: 83692 - DNA, 26 bp, Homo sapiens
ttcctaccaaggtagcatgaaaacac

SEQ ID NO: 83693 - DNA, 26 bp, Homo sapiens
tcctaccaaggtagcatgaaaacact

SEQ ID NO: 83694 - DNA, 26 bp, Homo sapiens
cctaccaaggtagcatgaaaacacta

SEQ ID NO: 83695 - DNA, 26 bp, Homo sapiens
ctaccaaggtagcatgaaaacactac

SEQ ID NO: 83696 - DNA, 26 bp, Homo sapiens
taccaaggtagcatgaaaacactaca

SEQ ID NO: 83697 - DNA, 26 bp, Homo sapiens
accaaggtagcatgaaaacactacac

SEQ ID NO: 83698 - DNA, 26 bp, Homo sapiens
ccaaggtagcatgaaaacactacaca

SEQ ID NO: 83699 - DNA, 26 bp, Homo sapiens
caaggtagcatgaaaacactacacat

SEQ ID NO: 83700 - DNA, 26 bp, Homo sapiens
aaggtagcatgaaaacactacacata

SEQ ID NO: 83701 - DNA, 26 bp, Homo sapiens
aggtagcatgaaaacactacacataa

SEQ ID NO: 83702 - DNA, 26 bp, Homo sapiens
ggtagcatgaaaacactacacataaa

SEQ ID NO: 83703 - DNA, 26 bp, Homo sapiens
gtagcatgaaaacactacacataaag

SEQ ID NO: 83704 - DNA, 26 bp, Homo sapiens
tagcatgaaaacactacacataaaga

SEQ ID NO: 83705 - DNA, 26 bp, Homo sapiens
agcatgaaaacactacacataaagaa

SEQ ID NO: 83706 - DNA, 26 bp, Homo sapiens
gcatgaaaacactacacataaagaaa

SEQ ID NO: 83707 - DNA, 26 bp, Homo sapiens
catgaaaacactacacataaagaaaa

SEQ ID NO: 83708 - DNA, 26 bp, Homo sapiens
atgaaaacactacacataaagaaaaa

SEQ ID NO: 83709 - DNA, 26 bp, Homo sapiens
tgaaaacactacacataaagaaaaaa

SEQ ID NO: 83710 - DNA, 26 bp, Homo sapiens
gaaaacactacacataaagaaaaaaa

SEQ ID NO: 83711 - DNA, 26 bp, Homo sapiens
aaaacactacacataaagaaaaaaaa

SEQ ID NO: 83712 - DNA, 26 bp, Homo sapiens
aaacactacacataaagaaaaaaaat

SEQ ID NO: 83713 - DNA, 26 bp, Homo sapiens
aacactacacataaagaaaaaaaatg

SEQ ID NO: 83714 - DNA, 26 bp, Homo sapiens
acactacacataaagaaaaaaaatgt

SEQ ID NO: 83715 - DNA, 26 bp, Homo sapiens
cactacacataaagaaaaaaaatgtt

SEQ ID NO: 83716 - DNA, 26 bp, Homo sapiens
actacacataaagaaaaaaaatgtta

SEQ ID NO: 83717 - DNA, 26 bp, Homo sapiens
ctacacataaagaaaaaaaatgttaa

SEQ ID NO: 83718 - DNA, 26 bp, Homo sapiens
tacacataaagaaaaaaaatgttaag

SEQ ID NO: 83719 - DNA, 26 bp, Homo sapiens
acacataaagaaaaaaaatgttaaga

SEQ ID NO: 83720 - DNA, 26 bp, Homo sapiens
cacataaagaaaaaaaatgttaagaa

SEQ ID NO: 83721 - DNA, 26 bp, Homo sapiens
acataaagaaaaaaaatgttaagaac

SEQ ID NO: 83722 - DNA, 26 bp, Homo sapiens
cataaagaaaaaaaatgttaagaact

SEQ ID NO: 83723 - DNA, 26 bp, Homo sapiens
ataaagaaaaaaaatgttaagaacta

SEQ ID NO: 83724 - DNA, 26 bp, Homo sapiens
taaagaaaaaaaatgttaagaactaa

SEQ ID NO: 83725 - DNA, 26 bp, Homo sapiens
aaagaaaaaaaatgttaagaactaag

SEQ ID NO: 83726 - DNA, 26 bp, Homo sapiens
aagaaaaaaaatgttaagaactaagg

SEQ ID NO: 83727 - DNA, 26 bp, Homo sapiens
agaaaaaaaatgttaagaactaaggt

SEQ ID NO: 83728 - DNA, 26 bp, Homo sapiens
gaaaaaaaatgttaagaactaaggta

SEQ ID NO: 83729 - DNA, 26 bp, Homo sapiens
aaaaaaaatgttaagaactaaggtat

SEQ ID NO: 83730 - DNA, 26 bp, Homo sapiens
aaaaaaatgttaagaactaaggtatt

SEQ ID NO: 83731 - DNA, 26 bp, Homo sapiens
aaaaaatgttaagaactaaggtatta

SEQ ID NO: 83732 - DNA, 26 bp, Homo sapiens
aaaaatgttaagaactaaggtattaa

SEQ ID NO: 83733 - DNA, 26 bp, Homo sapiens
aaaatgttaagaactaaggtattaac

SEQ ID NO: 83734 - DNA, 26 bp, Homo sapiens
aaatgttaagaactaaggtattaacc

SEQ ID NO: 83735 - DNA, 26 bp, Homo sapiens
aatgttaagaactaaggtattaacct

SEQ ID NO: 83736 - DNA, 26 bp, Homo sapiens
atgttaagaactaaggtattaacctt

SEQ ID NO: 83737 - DNA, 26 bp, Homo sapiens
tgttaagaactaaggtattaaccttg

SEQ ID NO: 83738 - DNA, 26 bp, Homo sapiens
gttaagaactaaggtattaaccttgt

SEQ ID NO: 83739 - DNA, 26 bp, Homo sapiens
ttaagaactaaggtattaaccttgtt

SEQ ID NO: 83740 - DNA, 26 bp, Homo sapiens
taagaactaaggtattaaccttgtta

SEQ ID NO: 83741 - DNA, 26 bp, Homo sapiens
aagaactaaggtattaaccttgttag

SEQ ID NO: 83742 - DNA, 26 bp, Homo sapiens
agaactaaggtattaaccttgttaga

SEQ ID NO: 83743 - DNA, 26 bp, Homo sapiens
gaactaaggtattaaccttgttagaa

SEQ ID NO: 83744 - DNA, 26 bp, Homo sapiens
aactaaggtattaaccttgttagaaa

SEQ ID NO: 83745 - DNA, 26 bp, Homo sapiens
actaaggtattaaccttgttagaaaa

SEQ ID NO: 83746 - DNA, 26 bp, Homo sapiens
ctaaggtattaaccttgttagaaaac

SEQ ID NO: 83747 - DNA, 26 bp, Homo sapiens
taaggtattaaccttgttagaaaact

SEQ ID NO: 83748 - DNA, 26 bp, Homo sapiens
aaggtattaaccttgttagaaaactc

SEQ ID NO: 83749 - DNA, 26 bp, Homo sapiens
aggtattaaccttgttagaaaactct

SEQ ID NO: 83750 - DNA, 26 bp, Homo sapiens
ggtattaaccttgttagaaaactctt

SEQ ID NO: 83751 - DNA, 26 bp, Homo sapiens
gtattaaccttgttagaaaactcttt

SEQ ID NO: 83752 - DNA, 26 bp, Homo sapiens
tattaaccttgttagaaaactctttt

SEQ ID NO: 83753 - DNA, 26 bp, Homo sapiens
attaaccttgttagaaaactcttttg

SEQ ID NO: 83754 - DNA, 26 bp, Homo sapiens
ttaaccttgttagaaaactcttttga

SEQ ID NO: 83755 - DNA, 26 bp, Homo sapiens
taaccttgttagaaaactcttttgat

SEQ ID NO: 83756 - DNA, 26 bp, Homo sapiens
aaccttgttagaaaactcttttgata

SEQ ID NO: 83757 - DNA, 26 bp, Homo sapiens
accttgttagaaaactcttttgatat

SEQ ID NO: 83758 - DNA, 26 bp, Homo sapiens
ccttgttagaaaactcttttgatatt

SEQ ID NO: 83759 - DNA, 26 bp, Homo sapiens
cttgttagaaaactcttttgatatta

SEQ ID NO: 83760 - DNA, 26 bp, Homo sapiens
ttgttagaaaactcttttgatattaa

SEQ ID NO: 83761 - DNA, 26 bp, Homo sapiens
tgttagaaaactcttttgatattaac

SEQ ID NO: 83762 - DNA, 26 bp, Homo sapiens
gttagaaaactcttttgatattaaca

SEQ ID NO: 83763 - DNA, 26 bp, Homo sapiens
ttagaaaactcttttgatattaacat

SEQ ID NO: 83764 - DNA, 26 bp, Homo sapiens
tagaaaactcttttgatattaacatt

SEQ ID NO: 83765 - DNA, 26 bp, Homo sapiens
agaaaactcttttgatattaacattt

SEQ ID NO: 83766 - DNA, 26 bp, Homo sapiens
gaaaactcttttgatattaacattta

SEQ ID NO: 83767 - DNA, 26 bp, Homo sapiens
aaaactcttttgatattaacatttaa

SEQ ID NO: 83768 - DNA, 26 bp, Homo sapiens
aaactcttttgatattaacatttaag

SEQ ID NO: 83769 - DNA, 26 bp, Homo sapiens
aactcttttgatattaacatttaagg

SEQ ID NO: 83770 - DNA, 26 bp, Homo sapiens
actcttttgatattaacatttaaggc

SEQ ID NO: 83771 - DNA, 26 bp, Homo sapiens
ctcttttgatattaacatttaaggca

SEQ ID NO: 83772 - DNA, 26 bp, Homo sapiens
tcttttgatattaacatttaaggcaa

SEQ ID NO: 83773 - DNA, 26 bp, Homo sapiens
cttttgatattaacatttaaggcaag

SEQ ID NO: 83774 - DNA, 26 bp, Homo sapiens
ttttgatattaacatttaaggcaagt

SEQ ID NO: 83775 - DNA, 26 bp, Homo sapiens
tttgatattaacatttaaggcaagta

SEQ ID NO: 83776 - DNA, 26 bp, Homo sapiens
ttgatattaacatttaaggcaagtag

SEQ ID NO: 83777 - DNA, 26 bp, Homo sapiens
tgatattaacatttaaggcaagtagt

SEQ ID NO: 83778 - DNA, 26 bp, Homo sapiens
gatattaacatttaaggcaagtagtt

SEQ ID NO: 83779 - DNA, 26 bp, Homo sapiens
atattaacatttaaggcaagtagttc

SEQ ID NO: 83780 - DNA, 26 bp, Homo sapiens
tattaacatttaaggcaagtagttcc

SEQ ID NO: 83781 - DNA, 26 bp, Homo sapiens
attaacatttaaggcaagtagttcct

SEQ ID NO: 83782 - DNA, 26 bp, Homo sapiens
ttaacatttaaggcaagtagttcctt

SEQ ID NO: 83783 - DNA, 26 bp, Homo sapiens
taacatttaaggcaagtagttccttc

SEQ ID NO: 83784 - DNA, 26 bp, Homo sapiens
aacatttaaggcaagtagttccttcc

SEQ ID NO: 83785 - DNA, 26 bp, Homo sapiens
acatttaaggcaagtagttccttcct

SEQ ID NO: 83786 - DNA, 26 bp, Homo sapiens
catttaaggcaagtagttccttcctt

SEQ ID NO: 83787 - DNA, 26 bp, Homo sapiens
atttaaggcaagtagttccttcctta

SEQ ID NO: 83788 - DNA, 26 bp, Homo sapiens
tttaaggcaagtagttccttccttat

SEQ ID NO: 83789 - DNA, 26 bp, Homo sapiens
ttaaggcaagtagttccttccttatg

SEQ ID NO: 83790 - DNA, 26 bp, Homo sapiens
taaggcaagtagttccttccttatga

SEQ ID NO: 83791 - DNA, 26 bp, Homo sapiens
aaggcaagtagttccttccttatgat

SEQ ID NO: 83792 - DNA, 26 bp, Homo sapiens
aggcaagtagttccttccttatgatt

SEQ ID NO: 83793 - DNA, 26 bp, Homo sapiens
ggcaagtagttccttccttatgattt

SEQ ID NO: 83794 - DNA, 26 bp, Homo sapiens
gcaagtagttccttccttatgattta

SEQ ID NO: 83795 - DNA, 26 bp, Homo sapiens
caagtagttccttccttatgatttaa

SEQ ID NO: 83796 - DNA, 26 bp, Homo sapiens
aagtagttccttccttatgatttaat

SEQ ID NO: 83797 - DNA, 26 bp, Homo sapiens
agtagttccttccttatgatttaata

SEQ ID NO: 83798 - DNA, 26 bp, Homo sapiens
gtagttccttccttatgatttaatat

SEQ ID NO: 83799 - DNA, 26 bp, Homo sapiens
tagttccttccttatgatttaatata

SEQ ID NO: 83800 - DNA, 26 bp, Homo sapiens
agttccttccttatgatttaatataa

SEQ ID NO: 83801 - DNA, 26 bp, Homo sapiens
gttccttccttatgatttaatataaa

SEQ ID NO: 83802 - DNA, 26 bp, Homo sapiens
ttccttccttatgatttaatataaaa

SEQ ID NO: 83803 - DNA, 26 bp, Homo sapiens
tccttccttatgatttaatataaaaa

SEQ ID NO: 83804 - DNA, 26 bp, Homo sapiens
ccttccttatgatttaatataaaaac

SEQ ID NO: 83805 - DNA, 26 bp, Homo sapiens
cttccttatgatttaatataaaaaca

SEQ ID NO: 83806 - DNA, 26 bp, Homo sapiens
ttccttatgatttaatataaaaacat

SEQ ID NO: 83807 - DNA, 26 bp, Homo sapiens
tccttatgatttaatataaaaacatt

SEQ ID NO: 83808 - DNA, 26 bp, Homo sapiens
ccttatgatttaatataaaaacattt

SEQ ID NO: 83809 - DNA, 26 bp, Homo sapiens
cttatgatttaatataaaaacatttg

SEQ ID NO: 83810 - DNA, 26 bp, Homo sapiens
ttatgatttaatataaaaacatttgc

SEQ ID NO: 83811 - DNA, 26 bp, Homo sapiens
tatgatttaatataaaaacatttgca

SEQ ID NO: 83812 - DNA, 26 bp, Homo sapiens
atgatttaatataaaaacatttgcaa

SEQ ID NO: 83813 - DNA, 26 bp, Homo sapiens
tgatttaatataaaaacatttgcaaa

SEQ ID NO: 83814 - DNA, 26 bp, Homo sapiens
gatttaatataaaaacatttgcaaag

SEQ ID NO: 83815 - DNA, 26 bp, Homo sapiens
atttaatataaaaacatttgcaaaga

SEQ ID NO: 83816 - DNA, 26 bp, Homo sapiens
tttaatataaaaacatttgcaaagac

SEQ ID NO: 83817 - DNA, 26 bp, Homo sapiens
ttaatataaaaacatttgcaaagaca

SEQ ID NO: 83818 - DNA, 26 bp, Homo sapiens
taatataaaaacatttgcaaagacaa

SEQ ID NO: 83819 - DNA, 26 bp, Homo sapiens
aatataaaaacatttgcaaagacaag

SEQ ID NO: 83820 - DNA, 26 bp, Homo sapiens
atataaaaacatttgcaaagacaagg

SEQ ID NO: 83821 - DNA, 26 bp, Homo sapiens
tataaaaacatttgcaaagacaaggc

SEQ ID NO: 83822 - DNA, 26 bp, Homo sapiens
ataaaaacatttgcaaagacaaggca

SEQ ID NO: 83823 - DNA, 26 bp, Homo sapiens
taaaaacatttgcaaagacaaggcat

SEQ ID NO: 83824 - DNA, 26 bp, Homo sapiens
aaaaacatttgcaaagacaaggcatt

SEQ ID NO: 83825 - DNA, 26 bp, Homo sapiens
aaaacatttgcaaagacaaggcattt

SEQ ID NO: 83826 - DNA, 26 bp, Homo sapiens
aaacatttgcaaagacaaggcattta

SEQ ID NO: 83827 - DNA, 26 bp, Homo sapiens
aacatttgcaaagacaaggcatttac

SEQ ID NO: 83828 - DNA, 26 bp, Homo sapiens
acatttgcaaagacaaggcatttact

SEQ ID NO: 83829 - DNA, 26 bp, Homo sapiens
catttgcaaagacaaggcatttactt

SEQ ID NO: 83830 - DNA, 26 bp, Homo sapiens
atttgcaaagacaaggcatttacttg

SEQ ID NO: 83831 - DNA, 26 bp, Homo sapiens
tttgcaaagacaaggcatttacttgg

SEQ ID NO: 83832 - DNA, 26 bp, Homo sapiens
ttgcaaagacaaggcatttacttgga

SEQ ID NO: 83833 - DNA, 26 bp, Homo sapiens
tgcaaagacaaggcatttacttggat

SEQ ID NO: 83834 - DNA, 26 bp, Homo sapiens
gcaaagacaaggcatttacttggatt

SEQ ID NO: 83835 - DNA, 26 bp, Homo sapiens
caaagacaaggcatttacttggattt

SEQ ID NO: 83836 - DNA, 26 bp, Homo sapiens
aaagacaaggcatttacttggatttc

SEQ ID NO: 83837 - DNA, 26 bp, Homo sapiens
aagacaaggcatttacttggatttct

SEQ ID NO: 83838 - DNA, 26 bp, Homo sapiens
agacaaggcatttacttggatttctt

SEQ ID NO: 83839 - DNA, 26 bp, Homo sapiens
gacaaggcatttacttggatttcttt

SEQ ID NO: 83840 - DNA, 26 bp, Homo sapiens
acaaggcatttacttggatttctttg

SEQ ID NO: 83841 - DNA, 26 bp, Homo sapiens
caaggcatttacttggatttctttgt

SEQ ID NO: 83842 - DNA, 26 bp, Homo sapiens
aaggcatttacttggatttctttgtc

SEQ ID NO: 83843 - DNA, 26 bp, Homo sapiens
aggcatttacttggatttctttgtca

SEQ ID NO: 83844 - DNA, 26 bp, Homo sapiens
ggcatttacttggatttctttgtcat

SEQ ID NO: 83845 - DNA, 26 bp, Homo sapiens
gcatttacttggatttctttgtcatc

SEQ ID NO: 83846 - DNA, 26 bp, Homo sapiens
catttacttggatttctttgtcatct

SEQ ID NO: 83847 - DNA, 26 bp, Homo sapiens
atttacttggatttctttgtcatctc

SEQ ID NO: 83848 - DNA, 26 bp, Homo sapiens
tttacttggatttctttgtcatctct

SEQ ID NO: 83849 - DNA, 26 bp, Homo sapiens
ttacttggatttctttgtcatctctt

SEQ ID NO: 83850 - DNA, 26 bp, Homo sapiens
tacttggatttctttgtcatctcttc

SEQ ID NO: 83851 - DNA, 26 bp, Homo sapiens
acttggatttctttgtcatctcttct

SEQ ID NO: 83852 - DNA, 26 bp, Homo sapiens
cttggatttctttgtcatctcttctt

SEQ ID NO: 83853 - DNA, 26 bp, Homo sapiens
ttggatttctttgtcatctcttcttc

SEQ ID NO: 83854 - DNA, 26 bp, Homo sapiens
tggatttctttgtcatctcttcttct

SEQ ID NO: 83855 - DNA, 26 bp, Homo sapiens
ggatttctttgtcatctcttcttctt

SEQ ID NO: 83856 - DNA, 26 bp, Homo sapiens
gatttctttgtcatctcttcttcttt

SEQ ID NO: 83857 - DNA, 26 bp, Homo sapiens
atttctttgtcatctcttcttctttc

SEQ ID NO: 83858 - DNA, 26 bp, Homo sapiens
tttctttgtcatctcttcttctttca

SEQ ID NO: 83859 - DNA, 26 bp, Homo sapiens
ttctttgtcatctcttcttctttcat

SEQ ID NO: 83860 - DNA, 26 bp, Homo sapiens
tctttgtcatctcttcttctttcatc

SEQ ID NO: 83861 - DNA, 26 bp, Homo sapiens
ctttgtcatctcttcttctttcatcc

SEQ ID NO: 83862 - DNA, 26 bp, Homo sapiens
tttgtcatctcttcttctttcatcct

SEQ ID NO: 83863 - DNA, 26 bp, Homo sapiens
ttgtcatctcttcttctttcatcctt

SEQ ID NO: 83864 - DNA, 26 bp, Homo sapiens
tgtcatctcttcttctttcatcctta

SEQ ID NO: 83865 - DNA, 26 bp, Homo sapiens
gtcatctcttcttctttcatccttac

SEQ ID NO: 83866 - DNA, 26 bp, Homo sapiens
tcatctcttcttctttcatccttaca

SEQ ID NO: 83867 - DNA, 26 bp, Homo sapiens
catctcttcttctttcatccttacat

SEQ ID NO: 83868 - DNA, 26 bp, Homo sapiens
atctcttcttctttcatccttacata

SEQ ID NO: 83869 - DNA, 26 bp, Homo sapiens
tctcttcttctttcatccttacatat

SEQ ID NO: 83870 - DNA, 26 bp, Homo sapiens
ctcttcttctttcatccttacatatt

SEQ ID NO: 83871 - DNA, 26 bp, Homo sapiens
tcttcttctttcatccttacatattg

SEQ ID NO: 83872 - DNA, 26 bp, Homo sapiens
cttcttctttcatccttacatattgc

SEQ ID NO: 83873 - DNA, 26 bp, Homo sapiens
ttcttctttcatccttacatattgca

SEQ ID NO: 83874 - DNA, 26 bp, Homo sapiens
tcttctttcatccttacatattgcac

SEQ ID NO: 83875 - DNA, 26 bp, Homo sapiens
cttctttcatccttacatattgcact

SEQ ID NO: 83876 - DNA, 26 bp, Homo sapiens
ttctttcatccttacatattgcactt

SEQ ID NO: 83877 - DNA, 26 bp, Homo sapiens
tctttcatccttacatattgcacttg

SEQ ID NO: 83878 - DNA, 26 bp, Homo sapiens
ctttcatccttacatattgcacttgg

SEQ ID NO: 83879 - DNA, 26 bp, Homo sapiens
tttcatccttacatattgcacttggt

SEQ ID NO: 83880 - DNA, 26 bp, Homo sapiens
ttcatccttacatattgcacttggtt

SEQ ID NO: 83881 - DNA, 26 bp, Homo sapiens
tcatccttacatattgcacttggttc

SEQ ID NO: 83882 - DNA, 26 bp, Homo sapiens
catccttacatattgcacttggttca

SEQ ID NO: 83883 - DNA, 26 bp, Homo sapiens
atccttacatattgcacttggttcac

SEQ ID NO: 83884 - DNA, 26 bp, Homo sapiens
tccttacatattgcacttggttcact

SEQ ID NO: 83885 - DNA, 26 bp, Homo sapiens
ccttacatattgcacttggttcactg

SEQ ID NO: 83886 - DNA, 26 bp, Homo sapiens
cttacatattgcacttggttcactgt

SEQ ID NO: 83887 - DNA, 26 bp, Homo sapiens
ttacatattgcacttggttcactgta

SEQ ID NO: 83888 - DNA, 26 bp, Homo sapiens
tacatattgcacttggttcactgtat

SEQ ID NO: 83889 - DNA, 26 bp, Homo sapiens
acatattgcacttggttcactgtatc

SEQ ID NO: 83890 - DNA, 26 bp, Homo sapiens
catattgcacttggttcactgtatct

SEQ ID NO: 83891 - DNA, 26 bp, Homo sapiens
atattgcacttggttcactgtatctg

SEQ ID NO: 83892 - DNA, 26 bp, Homo sapiens
tattgcacttggttcactgtatctgt

SEQ ID NO: 83893 - DNA, 26 bp, Homo sapiens
attgcacttggttcactgtatctgtc

SEQ ID NO: 83894 - DNA, 26 bp, Homo sapiens
ttgcacttggttcactgtatctgtct

SEQ ID NO: 83895 - DNA, 26 bp, Homo sapiens
tgcacttggttcactgtatctgtctg

SEQ ID NO: 83896 - DNA, 26 bp, Homo sapiens
gcacttggttcactgtatctgtctga

SEQ ID NO: 83897 - DNA, 26 bp, Homo sapiens
cacttggttcactgtatctgtctgaa

SEQ ID NO: 83898 - DNA, 26 bp, Homo sapiens
acttggttcactgtatctgtctgaat

SEQ ID NO: 83899 - DNA, 26 bp, Homo sapiens
cttggttcactgtatctgtctgaata

SEQ ID NO: 83900 - DNA, 26 bp, Homo sapiens
ttggttcactgtatctgtctgaatac

SEQ ID NO: 83901 - DNA, 26 bp, Homo sapiens
tggttcactgtatctgtctgaataca

SEQ ID NO: 83902 - DNA, 26 bp, Homo sapiens
ggttcactgtatctgtctgaatacac

SEQ ID NO: 83903 - DNA, 26 bp, Homo sapiens
gttcactgtatctgtctgaatacact

SEQ ID NO: 83904 - DNA, 26 bp, Homo sapiens
ttcactgtatctgtctgaatacactg

SEQ ID NO: 83905 - DNA, 26 bp, Homo sapiens
tcactgtatctgtctgaatacactgt

SEQ ID NO: 83906 - DNA, 26 bp, Homo sapiens
cactgtatctgtctgaatacactgtg

SEQ ID NO: 83907 - DNA, 26 bp, Homo sapiens
actgtatctgtctgaatacactgtgc

SEQ ID NO: 83908 - DNA, 26 bp, Homo sapiens
ctgtatctgtctgaatacactgtgct

SEQ ID NO: 83909 - DNA, 26 bp, Homo sapiens
tgtatctgtctgaatacactgtgctt

SEQ ID NO: 83910 - DNA, 26 bp, Homo sapiens
gtatctgtctgaatacactgtgcttc

SEQ ID NO: 83911 - DNA, 26 bp, Homo sapiens
tatctgtctgaatacactgtgcttca

SEQ ID NO: 83912 - DNA, 26 bp, Homo sapiens
atctgtctgaatacactgtgcttcag

SEQ ID NO: 83913 - DNA, 26 bp, Homo sapiens
tctgtctgaatacactgtgcttcaga

SEQ ID NO: 83914 - DNA, 26 bp, Homo sapiens
ctgtctgaatacactgtgcttcagaa

SEQ ID NO: 83915 - DNA, 26 bp, Homo sapiens
tgtctgaatacactgtgcttcagaat

SEQ ID NO: 83916 - DNA, 26 bp, Homo sapiens
gtctgaatacactgtgcttcagaatc

SEQ ID NO: 83917 - DNA, 26 bp, Homo sapiens
tctgaatacactgtgcttcagaatca

SEQ ID NO: 83918 - DNA, 26 bp, Homo sapiens
ctgaatacactgtgcttcagaatcat

SEQ ID NO: 83919 - DNA, 26 bp, Homo sapiens
tgaatacactgtgcttcagaatcatt

SEQ ID NO: 83920 - DNA, 26 bp, Homo sapiens
gaatacactgtgcttcagaatcattg

SEQ ID NO: 83921 - DNA, 26 bp, Homo sapiens
aatacactgtgcttcagaatcattgt

SEQ ID NO: 83922 - DNA, 26 bp, Homo sapiens
atacactgtgcttcagaatcattgta

SEQ ID NO: 83923 - DNA, 26 bp, Homo sapiens
tacactgtgcttcagaatcattgtag

SEQ ID NO: 83924 - DNA, 26 bp, Homo sapiens
acactgtgcttcagaatcattgtagt

SEQ ID NO: 83925 - DNA, 26 bp, Homo sapiens
cactgtgcttcagaatcattgtagta

SEQ ID NO: 83926 - DNA, 26 bp, Homo sapiens
actgtgcttcagaatcattgtagtac

SEQ ID NO: 83927 - DNA, 26 bp, Homo sapiens
ctgtgcttcagaatcattgtagtact

SEQ ID NO: 83928 - DNA, 26 bp, Homo sapiens
tgtgcttcagaatcattgtagtactg

SEQ ID NO: 83929 - DNA, 26 bp, Homo sapiens
gtgcttcagaatcattgtagtactgt

SEQ ID NO: 83930 - DNA, 26 bp, Homo sapiens
tgcttcagaatcattgtagtactgtt

SEQ ID NO: 83931 - DNA, 26 bp, Homo sapiens
gcttcagaatcattgtagtactgttt

SEQ ID NO: 83932 - DNA, 26 bp, Homo sapiens
cttcagaatcattgtagtactgtttg

SEQ ID NO: 83933 - DNA, 26 bp, Homo sapiens
ttcagaatcattgtagtactgtttgt

SEQ ID NO: 83934 - DNA, 26 bp, Homo sapiens
tcagaatcattgtagtactgtttgtg

SEQ ID NO: 83935 - DNA, 26 bp, Homo sapiens
cagaatcattgtagtactgtttgtgg

SEQ ID NO: 83936 - DNA, 26 bp, Homo sapiens
agaatcattgtagtactgtttgtggt

SEQ ID NO: 83937 - DNA, 26 bp, Homo sapiens
gaatcattgtagtactgtttgtggta

SEQ ID NO: 83938 - DNA, 26 bp, Homo sapiens
aatcattgtagtactgtttgtggtac

SEQ ID NO: 83939 - DNA, 26 bp, Homo sapiens
atcattgtagtactgtttgtggtaca

SEQ ID NO: 83940 - DNA, 26 bp, Homo sapiens
tcattgtagtactgtttgtggtacaa

SEQ ID NO: 83941 - DNA, 26 bp, Homo sapiens
cattgtagtactgtttgtggtacaac

SEQ ID NO: 83942 - DNA, 26 bp, Homo sapiens
attgtagtactgtttgtggtacaact

SEQ ID NO: 83943 - DNA, 26 bp, Homo sapiens
ttgtagtactgtttgtggtacaactc

SEQ ID NO: 83944 - DNA, 26 bp, Homo sapiens
tgtagtactgtttgtggtacaactcc

SEQ ID NO: 83945 - DNA, 26 bp, Homo sapiens
gtagtactgtttgtggtacaactccc

SEQ ID NO: 83946 - DNA, 26 bp, Homo sapiens
tagtactgtttgtggtacaactccct

SEQ ID NO: 83947 - DNA, 26 bp, Homo sapiens
agtactgtttgtggtacaactccctc

SEQ ID NO: 83948 - DNA, 26 bp, Homo sapiens
gtactgtttgtggtacaactccctca

SEQ ID NO: 83949 - DNA, 26 bp, Homo sapiens
tactgtttgtggtacaactccctcat

SEQ ID NO: 83950 - DNA, 26 bp, Homo sapiens
actgtttgtggtacaactccctcatt

SEQ ID NO: 83951 - DNA, 26 bp, Homo sapiens
ctgtttgtggtacaactccctcatta

SEQ ID NO: 83952 - DNA, 26 bp, Homo sapiens
tgtttgtggtacaactccctcattaa

SEQ ID NO: 83953 - DNA, 26 bp, Homo sapiens
gtttgtggtacaactccctcattaaa

SEQ ID NO: 83954 - DNA, 26 bp, Homo sapiens
tttgtggtacaactccctcattaaac

SEQ ID NO: 83955 - DNA, 26 bp, Homo sapiens
ttgtggtacaactccctcattaaaca

SEQ ID NO: 83956 - DNA, 26 bp, Homo sapiens
tgtggtacaactccctcattaaacat

SEQ ID NO: 83957 - DNA, 26 bp, Homo sapiens
gtggtacaactccctcattaaacatt

SEQ ID NO: 83958 - DNA, 26 bp, Homo sapiens
tggtacaactccctcattaaacattt

SEQ ID NO: 83959 - DNA, 26 bp, Homo sapiens
ggtacaactccctcattaaacatttc

SEQ ID NO: 83960 - DNA, 26 bp, Homo sapiens
gtacaactccctcattaaacatttca

SEQ ID NO: 83961 - DNA, 26 bp, Homo sapiens
tacaactccctcattaaacatttcac

SEQ ID NO: 83962 - DNA, 26 bp, Homo sapiens
acaactccctcattaaacatttcaca

SEQ ID NO: 83963 - DNA, 26 bp, Homo sapiens
caactccctcattaaacatttcacac

SEQ ID NO: 83964 - DNA, 26 bp, Homo sapiens
aactccctcattaaacatttcacact

SEQ ID NO: 83965 - DNA, 26 bp, Homo sapiens
actccctcattaaacatttcacacta

SEQ ID NO: 83966 - DNA, 26 bp, Homo sapiens
ctccctcattaaacatttcacactat

SEQ ID NO: 83967 - DNA, 26 bp, Homo sapiens
tccctcattaaacatttcacactatc

SEQ ID NO: 83968 - DNA, 26 bp, Homo sapiens
ccctcattaaacatttcacactatca

SEQ ID NO: 83969 - DNA, 26 bp, Homo sapiens
cctcattaaacatttcacactatcag

SEQ ID NO: 83970 - DNA, 26 bp, Homo sapiens
ctcattaaacatttcacactatcagg

SEQ ID NO: 83971 - DNA, 26 bp, Homo sapiens
tcattaaacatttcacactatcaggc

SEQ ID NO: 83972 - DNA, 26 bp, Homo sapiens
cattaaacatttcacactatcaggct

SEQ ID NO: 83973 - DNA, 26 bp, Homo sapiens
attaaacatttcacactatcaggcta

SEQ ID NO: 83974 - DNA, 26 bp, Homo sapiens
ttaaacatttcacactatcaggctac

SEQ ID NO: 83975 - DNA, 26 bp, Homo sapiens
taaacatttcacactatcaggctaca

SEQ ID NO: 83976 - DNA, 26 bp, Homo sapiens
aaacatttcacactatcaggctacac

SEQ ID NO: 83977 - DNA, 26 bp, Homo sapiens
aacatttcacactatcaggctacaca

SEQ ID NO: 83978 - DNA, 26 bp, Homo sapiens
acatttcacactatcaggctacacag

SEQ ID NO: 83979 - DNA, 26 bp, Homo sapiens
catttcacactatcaggctacacagc

SEQ ID NO: 83980 - DNA, 26 bp, Homo sapiens
atttcacactatcaggctacacagca

SEQ ID NO: 83981 - DNA, 26 bp, Homo sapiens
tttcacactatcaggctacacagcac

SEQ ID NO: 83982 - DNA, 26 bp, Homo sapiens
ttcacactatcaggctacacagcacc

SEQ ID NO: 83983 - DNA, 26 bp, Homo sapiens
tcacactatcaggctacacagcacct

SEQ ID NO: 83984 - DNA, 26 bp, Homo sapiens
cacactatcaggctacacagcaccta

SEQ ID NO: 83985 - DNA, 26 bp, Homo sapiens
acactatcaggctacacagcacctat

SEQ ID NO: 83986 - DNA, 26 bp, Homo sapiens
cactatcaggctacacagcacctata

SEQ ID NO: 83987 - DNA, 26 bp, Homo sapiens
actatcaggctacacagcacctatat

SEQ ID NO: 83988 - DNA, 26 bp, Homo sapiens
ctatcaggctacacagcacctatatc

SEQ ID NO: 83989 - DNA, 26 bp, Homo sapiens
tatcaggctacacagcacctatatct

SEQ ID NO: 83990 - DNA, 26 bp, Homo sapiens
atcaggctacacagcacctatatctt

SEQ ID NO: 83991 - DNA, 26 bp, Homo sapiens
tcaggctacacagcacctatatcttg

SEQ ID NO: 83992 - DNA, 26 bp, Homo sapiens
caggctacacagcacctatatcttgt

SEQ ID NO: 83993 - DNA, 26 bp, Homo sapiens
aggctacacagcacctatatcttgtg

SEQ ID NO: 83994 - DNA, 26 bp, Homo sapiens
ggctacacagcacctatatcttgtgt

SEQ ID NO: 83995 - DNA, 26 bp, Homo sapiens
gctacacagcacctatatcttgtgtt

SEQ ID NO: 83996 - DNA, 26 bp, Homo sapiens
ctacacagcacctatatcttgtgttt

SEQ ID NO: 83997 - DNA, 26 bp, Homo sapiens
tacacagcacctatatcttgtgttta

SEQ ID NO: 83998 - DNA, 26 bp, Homo sapiens
acacagcacctatatcttgtgtttaa

SEQ ID NO: 83999 - DNA, 26 bp, Homo sapiens
cacagcacctatatcttgtgtttaaa

SEQ ID NO: 84000 - DNA, 26 bp, Homo sapiens
acagcacctatatcttgtgtttaaag

SEQ ID NO: 84001 - DNA, 26 bp, Homo sapiens
cagcacctatatcttgtgtttaaagg

SEQ ID NO: 84002 - DNA, 26 bp, Homo sapiens
agcacctatatcttgtgtttaaaggc

SEQ ID NO: 84003 - DNA, 26 bp, Homo sapiens
gcacctatatcttgtgtttaaaggca

SEQ ID NO: 84004 - DNA, 26 bp, Homo sapiens
cacctatatcttgtgtttaaaggcac

SEQ ID NO: 84005 - DNA, 26 bp, Homo sapiens
acctatatcttgtgtttaaaggcact

SEQ ID NO: 84006 - DNA, 26 bp, Homo sapiens
cctatatcttgtgtttaaaggcactt

SEQ ID NO: 84007 - DNA, 26 bp, Homo sapiens
ctatatcttgtgtttaaaggcacttg

SEQ ID NO: 84008 - DNA, 26 bp, Homo sapiens
tatatcttgtgtttaaaggcacttgt

SEQ ID NO: 84009 - DNA, 26 bp, Homo sapiens
atatcttgtgtttaaaggcacttgta

SEQ ID NO: 84010 - DNA, 26 bp, Homo sapiens
tatcttgtgtttaaaggcacttgtag

SEQ ID NO: 84011 - DNA, 26 bp, Homo sapiens
atcttgtgtttaaaggcacttgtaga

SEQ ID NO: 84012 - DNA, 26 bp, Homo sapiens
tcttgtgtttaaaggcacttgtagat

SEQ ID NO: 84013 - DNA, 26 bp, Homo sapiens
cttgtgtttaaaggcacttgtagata

SEQ ID NO: 84014 - DNA, 26 bp, Homo sapiens
ttgtgtttaaaggcacttgtagataa

SEQ ID NO: 84015 - DNA, 26 bp, Homo sapiens
tgtgtttaaaggcacttgtagataat

SEQ ID NO: 84016 - DNA, 26 bp, Homo sapiens
gtgtttaaaggcacttgtagataata

SEQ ID NO: 84017 - DNA, 26 bp, Homo sapiens
tgtttaaaggcacttgtagataatac

SEQ ID NO: 84018 - DNA, 26 bp, Homo sapiens
gtttaaaggcacttgtagataataca

SEQ ID NO: 84019 - DNA, 26 bp, Homo sapiens
tttaaaggcacttgtagataatacaa

SEQ ID NO: 84020 - DNA, 26 bp, Homo sapiens
ttaaaggcacttgtagataatacaaa

SEQ ID NO: 84021 - DNA, 26 bp, Homo sapiens
taaaggcacttgtagataatacaaat

SEQ ID NO: 84022 - DNA, 26 bp, Homo sapiens
aaaggcacttgtagataatacaaatt

SEQ ID NO: 84023 - DNA, 26 bp, Homo sapiens
aaggcacttgtagataatacaaattg

SEQ ID NO: 84024 - DNA, 26 bp, Homo sapiens
aggcacttgtagataatacaaattgt

SEQ ID NO: 84025 - DNA, 26 bp, Homo sapiens
ggcacttgtagataatacaaattgta

SEQ ID NO: 84026 - DNA, 26 bp, Homo sapiens
gcacttgtagataatacaaattgtag

SEQ ID NO: 84027 - DNA, 26 bp, Homo sapiens
cacttgtagataatacaaattgtagt

SEQ ID NO: 84028 - DNA, 26 bp, Homo sapiens
acttgtagataatacaaattgtagtt

SEQ ID NO: 84029 - DNA, 26 bp, Homo sapiens
cttgtagataatacaaattgtagtta

SEQ ID NO: 84030 - DNA, 26 bp, Homo sapiens
ttgtagataatacaaattgtagttac

SEQ ID NO: 84031 - DNA, 26 bp, Homo sapiens
tgtagataatacaaattgtagttacc

SEQ ID NO: 84032 - DNA, 26 bp, Homo sapiens
gtagataatacaaattgtagttacct

SEQ ID NO: 84033 - DNA, 26 bp, Homo sapiens
tagataatacaaattgtagttacctg

SEQ ID NO: 84034 - DNA, 26 bp, Homo sapiens
agataatacaaattgtagttacctgt

SEQ ID NO: 84035 - DNA, 26 bp, Homo sapiens
gataatacaaattgtagttacctgtg

SEQ ID NO: 84036 - DNA, 26 bp, Homo sapiens
ataatacaaattgtagttacctgtga

SEQ ID NO: 84037 - DNA, 26 bp, Homo sapiens
taatacaaattgtagttacctgtgaa

SEQ ID NO: 84038 - DNA, 26 bp, Homo sapiens
aatacaaattgtagttacctgtgaac

SEQ ID NO: 84039 - DNA, 26 bp, Homo sapiens
atacaaattgtagttacctgtgaaca

SEQ ID NO: 84040 - DNA, 26 bp, Homo sapiens
tacaaattgtagttacctgtgaacaa

SEQ ID NO: 84041 - DNA, 26 bp, Homo sapiens
acaaattgtagttacctgtgaacaat

SEQ ID NO: 84042 - DNA, 26 bp, Homo sapiens
caaattgtagttacctgtgaacaatt

SEQ ID NO: 84043 - DNA, 26 bp, Homo sapiens
aaattgtagttacctgtgaacaattg

SEQ ID NO: 84044 - DNA, 26 bp, Homo sapiens
aattgtagttacctgtgaacaattga

SEQ ID NO: 84045 - DNA, 26 bp, Homo sapiens
attgtagttacctgtgaacaattgat

SEQ ID NO: 84046 - DNA, 26 bp, Homo sapiens
ttgtagttacctgtgaacaattgatt

SEQ ID NO: 84047 - DNA, 26 bp, Homo sapiens
tgtagttacctgtgaacaattgattt

SEQ ID NO: 84048 - DNA, 26 bp, Homo sapiens
gtagttacctgtgaacaattgatttc

SEQ ID NO: 84049 - DNA, 26 bp, Homo sapiens
tagttacctgtgaacaattgatttcc

SEQ ID NO: 84050 - DNA, 26 bp, Homo sapiens
agttacctgtgaacaattgatttcct

SEQ ID NO: 84051 - DNA, 26 bp, Homo sapiens
gttacctgtgaacaattgatttcctt

SEQ ID NO: 84052 - DNA, 26 bp, Homo sapiens
ttacctgtgaacaattgatttccttt

SEQ ID NO: 84053 - DNA, 26 bp, Homo sapiens
tacctgtgaacaattgatttccttta

SEQ ID NO: 84054 - DNA, 26 bp, Homo sapiens
acctgtgaacaattgatttcctttag

SEQ ID NO: 84055 - DNA, 26 bp, Homo sapiens
cctgtgaacaattgatttcctttagt

SEQ ID NO: 84056 - DNA, 26 bp, Homo sapiens
ctgtgaacaattgatttcctttagta

SEQ ID NO: 84057 - DNA, 26 bp, Homo sapiens
tgtgaacaattgatttcctttagtat

SEQ ID NO: 84058 - DNA, 26 bp, Homo sapiens
gtgaacaattgatttcctttagtatt

SEQ ID NO: 84059 - DNA, 26 bp, Homo sapiens
tgaacaattgatttcctttagtattt

SEQ ID NO: 84060 - DNA, 26 bp, Homo sapiens
gaacaattgatttcctttagtatttt

SEQ ID NO: 84061 - DNA, 26 bp, Homo sapiens
aacaattgatttcctttagtattttg

SEQ ID NO: 84062 - DNA, 26 bp, Homo sapiens
acaattgatttcctttagtattttgg

SEQ ID NO: 84063 - DNA, 26 bp, Homo sapiens
caattgatttcctttagtattttggc

SEQ ID NO: 84064 - DNA, 26 bp, Homo sapiens
aattgatttcctttagtattttggca

SEQ ID NO: 84065 - DNA, 26 bp, Homo sapiens
attgatttcctttagtattttggcat

SEQ ID NO: 84066 - DNA, 26 bp, Homo sapiens
ttgatttcctttagtattttggcatt

SEQ ID NO: 84067 - DNA, 26 bp, Homo sapiens
tgatttcctttagtattttggcattt

SEQ ID NO: 84068 - DNA, 26 bp, Homo sapiens
gatttcctttagtattttggcatttt

SEQ ID NO: 84069 - DNA, 26 bp, Homo sapiens
atttcctttagtattttggcattttg

SEQ ID NO: 84070 - DNA, 26 bp, Homo sapiens
tttcctttagtattttggcattttga

SEQ ID NO: 84071 - DNA, 26 bp, Homo sapiens
ttcctttagtattttggcattttgat

SEQ ID NO: 84072 - DNA, 26 bp, Homo sapiens
tcctttagtattttggcattttgatc

SEQ ID NO: 84073 - DNA, 26 bp, Homo sapiens
cctttagtattttggcattttgatca

SEQ ID NO: 84074 - DNA, 26 bp, Homo sapiens
ctttagtattttggcattttgatcac

SEQ ID NO: 84075 - DNA, 26 bp, Homo sapiens
tttagtattttggcattttgatcact

SEQ ID NO: 84076 - DNA, 26 bp, Homo sapiens
ttagtattttggcattttgatcactt

SEQ ID NO: 84077 - DNA, 26 bp, Homo sapiens
tagtattttggcattttgatcacttt

SEQ ID NO: 84078 - DNA, 26 bp, Homo sapiens
agtattttggcattttgatcacttta

SEQ ID NO: 84079 - DNA, 26 bp, Homo sapiens
gtattttggcattttgatcactttaa

SEQ ID NO: 84080 - DNA, 26 bp, Homo sapiens
tattttggcattttgatcactttaat

SEQ ID NO: 84081 - DNA, 26 bp, Homo sapiens
attttggcattttgatcactttaatc

SEQ ID NO: 84082 - DNA, 26 bp, Homo sapiens
ttttggcattttgatcactttaatca

SEQ ID NO: 84083 - DNA, 26 bp, Homo sapiens
tttggcattttgatcactttaatcac

SEQ ID NO: 84084 - DNA, 26 bp, Homo sapiens
ttggcattttgatcactttaatcaca

SEQ ID NO: 84085 - DNA, 26 bp, Homo sapiens
tggcattttgatcactttaatcacag

SEQ ID NO: 84086 - DNA, 26 bp, Homo sapiens
ggcattttgatcactttaatcacagc

SEQ ID NO: 84087 - DNA, 26 bp, Homo sapiens
gcattttgatcactttaatcacagca

SEQ ID NO: 84088 - DNA, 26 bp, Homo sapiens
cattttgatcactttaatcacagcaa

SEQ ID NO: 84089 - DNA, 26 bp, Homo sapiens
attttgatcactttaatcacagcaat

SEQ ID NO: 84090 - DNA, 26 bp, Homo sapiens
ttttgatcactttaatcacagcaatt

SEQ ID NO: 84091 - DNA, 26 bp, Homo sapiens
tttgatcactttaatcacagcaattc

SEQ ID NO: 84092 - DNA, 26 bp, Homo sapiens
ttgatcactttaatcacagcaattcc

SEQ ID NO: 84093 - DNA, 26 bp, Homo sapiens
tgatcactttaatcacagcaattcca

SEQ ID NO: 84094 - DNA, 26 bp, Homo sapiens
gatcactttaatcacagcaattccaa

SEQ ID NO: 84095 - DNA, 26 bp, Homo sapiens
atcactttaatcacagcaattccaaa

SEQ ID NO: 84096 - DNA, 26 bp, Homo sapiens
tcactttaatcacagcaattccaaag

SEQ ID NO: 84097 - DNA, 26 bp, Homo sapiens
cactttaatcacagcaattccaaagt

SEQ ID NO: 84098 - DNA, 26 bp, Homo sapiens
actttaatcacagcaattccaaagtt

SEQ ID NO: 84099 - DNA, 26 bp, Homo sapiens
ctttaatcacagcaattccaaagttt

SEQ ID NO: 84100 - DNA, 26 bp, Homo sapiens
tttaatcacagcaattccaaagtttt

SEQ ID NO: 84101 - DNA, 26 bp, Homo sapiens
ttaatcacagcaattccaaagtttta

SEQ ID NO: 84102 - DNA, 26 bp, Homo sapiens
taatcacagcaattccaaagttttaa

SEQ ID NO: 84103 - DNA, 26 bp, Homo sapiens
aatcacagcaattccaaagttttaaa

SEQ ID NO: 84104 - DNA, 26 bp, Homo sapiens
atcacagcaattccaaagttttaaat

SEQ ID NO: 84105 - DNA, 26 bp, Homo sapiens
tcacagcaattccaaagttttaaatt

SEQ ID NO: 84106 - DNA, 26 bp, Homo sapiens
cacagcaattccaaagttttaaattg

SEQ ID NO: 84107 - DNA, 26 bp, Homo sapiens
acagcaattccaaagttttaaattgg

SEQ ID NO: 84108 - DNA, 26 bp, Homo sapiens
cagcaattccaaagttttaaattgga

SEQ ID NO: 84109 - DNA, 26 bp, Homo sapiens
agcaattccaaagttttaaattggac

SEQ ID NO: 84110 - DNA, 26 bp, Homo sapiens
gcaattccaaagttttaaattggaca

SEQ ID NO: 84111 - DNA, 26 bp, Homo sapiens
caattccaaagttttaaattggacag

SEQ ID NO: 84112 - DNA, 26 bp, Homo sapiens
aattccaaagttttaaattggacagt

SEQ ID NO: 84113 - DNA, 26 bp, Homo sapiens
attccaaagttttaaattggacagta

SEQ ID NO: 84114 - DNA, 26 bp, Homo sapiens
ttccaaagttttaaattggacagtaa

SEQ ID NO: 84115 - DNA, 26 bp, Homo sapiens
tccaaagttttaaattggacagtaaa

SEQ ID NO: 84116 - DNA, 26 bp, Homo sapiens
ccaaagttttaaattggacagtaaat

SEQ ID NO: 84117 - DNA, 26 bp, Homo sapiens
caaagttttaaattggacagtaaatg

SEQ ID NO: 84118 - DNA, 26 bp, Homo sapiens
aaagttttaaattggacagtaaatgt

SEQ ID NO: 84119 - DNA, 26 bp, Homo sapiens
aagttttaaattggacagtaaatgtg

SEQ ID NO: 84120 - DNA, 26 bp, Homo sapiens
agttttaaattggacagtaaatgtgt

SEQ ID NO: 84121 - DNA, 26 bp, Homo sapiens
gttttaaattggacagtaaatgtgta

SEQ ID NO: 84122 - DNA, 26 bp, Homo sapiens
ttttaaattggacagtaaatgtgtat

SEQ ID NO: 84123 - DNA, 26 bp, Homo sapiens
tttaaattggacagtaaatgtgtatt

SEQ ID NO: 84124 - DNA, 26 bp, Homo sapiens
ttaaattggacagtaaatgtgtattt

SEQ ID NO: 84125 - DNA, 26 bp, Homo sapiens
taaattggacagtaaatgtgtatttt

SEQ ID NO: 84126 - DNA, 26 bp, Homo sapiens
aaattggacagtaaatgtgtattttc

SEQ ID NO: 84127 - DNA, 26 bp, Homo sapiens
aattggacagtaaatgtgtattttct

SEQ ID NO: 84128 - DNA, 26 bp, Homo sapiens
attggacagtaaatgtgtattttctg

SEQ ID NO: 84129 - DNA, 26 bp, Homo sapiens
ttggacagtaaatgtgtattttctgt

SEQ ID NO: 84130 - DNA, 26 bp, Homo sapiens
tggacagtaaatgtgtattttctgtg

SEQ ID NO: 84131 - DNA, 26 bp, Homo sapiens
ggacagtaaatgtgtattttctgtgc

SEQ ID NO: 84132 - DNA, 26 bp, Homo sapiens
gacagtaaatgtgtattttctgtgca

SEQ ID NO: 84133 - DNA, 26 bp, Homo sapiens
acagtaaatgtgtattttctgtgcaa

SEQ ID NO: 84134 - DNA, 26 bp, Homo sapiens
cagtaaatgtgtattttctgtgcaat

SEQ ID NO: 84135 - DNA, 26 bp, Homo sapiens
agtaaatgtgtattttctgtgcaatg

SEQ ID NO: 84136 - DNA, 26 bp, Homo sapiens
gtaaatgtgtattttctgtgcaatgt

SEQ ID NO: 84137 - DNA, 26 bp, Homo sapiens
taaatgtgtattttctgtgcaatgtg

SEQ ID NO: 84138 - DNA, 26 bp, Homo sapiens
aaatgtgtattttctgtgcaatgtgt

SEQ ID NO: 84139 - DNA, 26 bp, Homo sapiens
aatgtgtattttctgtgcaatgtgta

SEQ ID NO: 84140 - DNA, 26 bp, Homo sapiens
atgtgtattttctgtgcaatgtgtat

SEQ ID NO: 84141 - DNA, 26 bp, Homo sapiens
tgtgtattttctgtgcaatgtgtata

SEQ ID NO: 84142 - DNA, 26 bp, Homo sapiens
gtgtattttctgtgcaatgtgtatat

SEQ ID NO: 84143 - DNA, 26 bp, Homo sapiens
tgtattttctgtgcaatgtgtatatt

SEQ ID NO: 84144 - DNA, 26 bp, Homo sapiens
gtattttctgtgcaatgtgtatattt

SEQ ID NO: 84145 - DNA, 26 bp, Homo sapiens
tattttctgtgcaatgtgtatatttg

SEQ ID NO: 84146 - DNA, 26 bp, Homo sapiens
attttctgtgcaatgtgtatatttgt

SEQ ID NO: 84147 - DNA, 26 bp, Homo sapiens
ttttctgtgcaatgtgtatatttgta

SEQ ID NO: 84148 - DNA, 26 bp, Homo sapiens
tttctgtgcaatgtgtatatttgtat

SEQ ID NO: 84149 - DNA, 26 bp, Homo sapiens
ttctgtgcaatgtgtatatttgtatt

SEQ ID NO: 84150 - DNA, 26 bp, Homo sapiens
tctgtgcaatgtgtatatttgtatta

SEQ ID NO: 84151 - DNA, 26 bp, Homo sapiens
ctgtgcaatgtgtatatttgtattag

SEQ ID NO: 84152 - DNA, 26 bp, Homo sapiens
tgtgcaatgtgtatatttgtattagc

SEQ ID NO: 84153 - DNA, 26 bp, Homo sapiens
gtgcaatgtgtatatttgtattagca

SEQ ID NO: 84154 - DNA, 26 bp, Homo sapiens
tgcaatgtgtatatttgtattagcat

SEQ ID NO: 84155 - DNA, 26 bp, Homo sapiens
gcaatgtgtatatttgtattagcatt

SEQ ID NO: 84156 - DNA, 26 bp, Homo sapiens
caatgtgtatatttgtattagcatta

SEQ ID NO: 84157 - DNA, 26 bp, Homo sapiens
aatgtgtatatttgtattagcattat

SEQ ID NO: 84158 - DNA, 26 bp, Homo sapiens
atgtgtatatttgtattagcattatc

SEQ ID NO: 84159 - DNA, 26 bp, Homo sapiens
tgtgtatatttgtattagcattatct

SEQ ID NO: 84160 - DNA, 26 bp, Homo sapiens
gtgtatatttgtattagcattatcta

SEQ ID NO: 84161 - DNA, 26 bp, Homo sapiens
tgtatatttgtattagcattatctac

SEQ ID NO: 84162 - DNA, 26 bp, Homo sapiens
gtatatttgtattagcattatctact

SEQ ID NO: 84163 - DNA, 26 bp, Homo sapiens
tatatttgtattagcattatctactt

SEQ ID NO: 84164 - DNA, 26 bp, Homo sapiens
atatttgtattagcattatctactta

SEQ ID NO: 84165 - DNA, 26 bp, Homo sapiens
tatttgtattagcattatctacttaa

SEQ ID NO: 84166 - DNA, 26 bp, Homo sapiens
atttgtattagcattatctacttaaa

SEQ ID NO: 84167 - DNA, 26 bp, Homo sapiens
tttgtattagcattatctacttaaac

SEQ ID NO: 84168 - DNA, 26 bp, Homo sapiens
ttgtattagcattatctacttaaact

SEQ ID NO: 84169 - DNA, 26 bp, Homo sapiens
tgtattagcattatctacttaaacta

SEQ ID NO: 84170 - DNA, 26 bp, Homo sapiens
gtattagcattatctacttaaactaa

SEQ ID NO: 84171 - DNA, 26 bp, Homo sapiens
tattagcattatctacttaaactaag

SEQ ID NO: 84172 - DNA, 26 bp, Homo sapiens
attagcattatctacttaaactaagt

SEQ ID NO: 84173 - DNA, 26 bp, Homo sapiens
ttagcattatctacttaaactaagtt

SEQ ID NO: 84174 - DNA, 26 bp, Homo sapiens
tagcattatctacttaaactaagttt

SEQ ID NO: 84175 - DNA, 26 bp, Homo sapiens
agcattatctacttaaactaagtttg

SEQ ID NO: 84176 - DNA, 26 bp, Homo sapiens
gcattatctacttaaactaagtttgg

SEQ ID NO: 84177 - DNA, 26 bp, Homo sapiens
cattatctacttaaactaagtttggt

SEQ ID NO: 84178 - DNA, 26 bp, Homo sapiens
attatctacttaaactaagtttggta

SEQ ID NO: 84179 - DNA, 26 bp, Homo sapiens
ttatctacttaaactaagtttggtat

SEQ ID NO: 84180 - DNA, 26 bp, Homo sapiens
tatctacttaaactaagtttggtata

SEQ ID NO: 84181 - DNA, 26 bp, Homo sapiens
atctacttaaactaagtttggtatat

SEQ ID NO: 84182 - DNA, 26 bp, Homo sapiens
tctacttaaactaagtttggtatatc

SEQ ID NO: 84183 - DNA, 26 bp, Homo sapiens
ctacttaaactaagtttggtatatca

SEQ ID NO: 84184 - DNA, 26 bp, Homo sapiens
tacttaaactaagtttggtatatcaa

SEQ ID NO: 84185 - DNA, 26 bp, Homo sapiens
acttaaactaagtttggtatatcaag

SEQ ID NO: 84186 - DNA, 26 bp, Homo sapiens
cttaaactaagtttggtatatcaagt

SEQ ID NO: 84187 - DNA, 26 bp, Homo sapiens
ttaaactaagtttggtatatcaagta

SEQ ID NO: 84188 - DNA, 26 bp, Homo sapiens
taaactaagtttggtatatcaagtaa

SEQ ID NO: 84189 - DNA, 26 bp, Homo sapiens
aaactaagtttggtatatcaagtaag

SEQ ID NO: 84190 - DNA, 26 bp, Homo sapiens
aactaagtttggtatatcaagtaaga

SEQ ID NO: 84191 - DNA, 26 bp, Homo sapiens
actaagtttggtatatcaagtaagaa

SEQ ID NO: 84192 - DNA, 26 bp, Homo sapiens
ctaagtttggtatatcaagtaagaaa

SEQ ID NO: 84193 - DNA, 26 bp, Homo sapiens
taagtttggtatatcaagtaagaaaa

SEQ ID NO: 84194 - DNA, 26 bp, Homo sapiens
aagtttggtatatcaagtaagaaaaa

SEQ ID NO: 84195 - DNA, 26 bp, Homo sapiens
agtttggtatatcaagtaagaaaaat

SEQ ID NO: 84196 - DNA, 26 bp, Homo sapiens
gtttggtatatcaagtaagaaaaata

SEQ ID NO: 84197 - DNA, 26 bp, Homo sapiens
tttggtatatcaagtaagaaaaatat

SEQ ID NO: 84198 - DNA, 26 bp, Homo sapiens
ttggtatatcaagtaagaaaaatatt

SEQ ID NO: 84199 - DNA, 26 bp, Homo sapiens
tggtatatcaagtaagaaaaatatta

SEQ ID NO: 84200 - DNA, 26 bp, Homo sapiens
ggtatatcaagtaagaaaaatattat

SEQ ID NO: 84201 - DNA, 26 bp, Homo sapiens
gtatatcaagtaagaaaaatattatt

SEQ ID NO: 84202 - DNA, 26 bp, Homo sapiens
tatatcaagtaagaaaaatattattt

SEQ ID NO: 84203 - DNA, 26 bp, Homo sapiens
atatcaagtaagaaaaatattatttt

SEQ ID NO: 84204 - DNA, 26 bp, Homo sapiens
tatcaagtaagaaaaatattattttg

SEQ ID NO: 84205 - DNA, 26 bp, Homo sapiens
atcaagtaagaaaaatattattttgg

SEQ ID NO: 84206 - DNA, 26 bp, Homo sapiens
tcaagtaagaaaaatattattttggt

SEQ ID NO: 84207 - DNA, 26 bp, Homo sapiens
caagtaagaaaaatattattttggtg

SEQ ID NO: 84208 - DNA, 26 bp, Homo sapiens
aagtaagaaaaatattattttggtgt

SEQ ID NO: 84209 - DNA, 26 bp, Homo sapiens
agtaagaaaaatattattttggtgtt

SEQ ID NO: 84210 - DNA, 26 bp, Homo sapiens
gtaagaaaaatattattttggtgttt

SEQ ID NO: 84211 - DNA, 26 bp, Homo sapiens
taagaaaaatattattttggtgtttt

SEQ ID NO: 84212 - DNA, 26 bp, Homo sapiens
aagaaaaatattattttggtgttttt

SEQ ID NO: 84213 - DNA, 26 bp, Homo sapiens
agaaaaatattattttggtgtttttt

SEQ ID NO: 84214 - DNA, 26 bp, Homo sapiens
gaaaaatattattttggtgttttttt

SEQ ID NO: 84215 - DNA, 26 bp, Homo sapiens
aaaaatattattttggtgtttttttt

SEQ ID NO: 84216 - DNA, 26 bp, Homo sapiens
aaaatattattttggtgttttttttt

SEQ ID NO: 84217 - DNA, 26 bp, Homo sapiens
aaatattattttggtgtttttttttt

SEQ ID NO: 84218 - DNA, 26 bp, Homo sapiens
aatattattttggtgtttttttttta

SEQ ID NO: 84219 - DNA, 26 bp, Homo sapiens
atattattttggtgttttttttttaa

SEQ ID NO: 84220 - DNA, 26 bp, Homo sapiens
tattattttggtgttttttttttaat

SEQ ID NO: 84221 - DNA, 26 bp, Homo sapiens
attattttggtgttttttttttaatt

SEQ ID NO: 84222 - DNA, 26 bp, Homo sapiens
ttattttggtgttttttttttaattt

SEQ ID NO: 84223 - DNA, 26 bp, Homo sapiens
tattttggtgttttttttttaatttc

SEQ ID NO: 84224 - DNA, 26 bp, Homo sapiens
attttggtgttttttttttaatttct

SEQ ID NO: 84225 - DNA, 26 bp, Homo sapiens
ttttggtgttttttttttaatttctt

SEQ ID NO: 84226 - DNA, 26 bp, Homo sapiens
tttggtgttttttttttaatttctta

SEQ ID NO: 84227 - DNA, 26 bp, Homo sapiens
ttggtgttttttttttaatttcttat

SEQ ID NO: 84228 - DNA, 26 bp, Homo sapiens
tggtgttttttttttaatttcttata

SEQ ID NO: 84229 - DNA, 26 bp, Homo sapiens
ggtgttttttttttaatttcttatag

SEQ ID NO: 84230 - DNA, 26 bp, Homo sapiens
gtgttttttttttaatttcttatagt

SEQ ID NO: 84231 - DNA, 26 bp, Homo sapiens
tgttttttttttaatttcttatagtc

SEQ ID NO: 84232 - DNA, 26 bp, Homo sapiens
gttttttttttaatttcttatagtca

SEQ ID NO: 84233 - DNA, 26 bp, Homo sapiens
ttttttttttaatttcttatagtcaa

SEQ ID NO: 84234 - DNA, 26 bp, Homo sapiens
tttttttttaatttcttatagtcaaa

SEQ ID NO: 84235 - DNA, 26 bp, Homo sapiens
ttttttttaatttcttatagtcaaag

SEQ ID NO: 84236 - DNA, 26 bp, Homo sapiens
tttttttaatttcttatagtcaaagg

SEQ ID NO: 84237 - DNA, 26 bp, Homo sapiens
ttttttaatttcttatagtcaaaggt

SEQ ID NO: 84238 - DNA, 26 bp, Homo sapiens
tttttaatttcttatagtcaaaggta

SEQ ID NO: 84239 - DNA, 26 bp, Homo sapiens
ttttaatttcttatagtcaaaggtat

SEQ ID NO: 84240 - DNA, 26 bp, Homo sapiens
tttaatttcttatagtcaaaggtatg

SEQ ID NO: 84241 - DNA, 26 bp, Homo sapiens
ttaatttcttatagtcaaaggtatgt

SEQ ID NO: 84242 - DNA, 26 bp, Homo sapiens
taatttcttatagtcaaaggtatgtt

SEQ ID NO: 84243 - DNA, 26 bp, Homo sapiens
aatttcttatagtcaaaggtatgttt

SEQ ID NO: 84244 - DNA, 26 bp, Homo sapiens
atttcttatagtcaaaggtatgtttc

SEQ ID NO: 84245 - DNA, 26 bp, Homo sapiens
tttcttatagtcaaaggtatgtttct

SEQ ID NO: 84246 - DNA, 26 bp, Homo sapiens
ttcttatagtcaaaggtatgtttctg

SEQ ID NO: 84247 - DNA, 26 bp, Homo sapiens
tcttatagtcaaaggtatgtttctgc

SEQ ID NO: 84248 - DNA, 26 bp, Homo sapiens
cttatagtcaaaggtatgtttctgcc

SEQ ID NO: 84249 - DNA, 26 bp, Homo sapiens
ttatagtcaaaggtatgtttctgcct

SEQ ID NO: 84250 - DNA, 26 bp, Homo sapiens
tatagtcaaaggtatgtttctgcctt

SEQ ID NO: 84251 - DNA, 26 bp, Homo sapiens
atagtcaaaggtatgtttctgccttt

SEQ ID NO: 84252 - DNA, 26 bp, Homo sapiens
tagtcaaaggtatgtttctgcctttt

SEQ ID NO: 84253 - DNA, 26 bp, Homo sapiens
agtcaaaggtatgtttctgcctttta

SEQ ID NO: 84254 - DNA, 26 bp, Homo sapiens
gtcaaaggtatgtttctgccttttac

SEQ ID NO: 84255 - DNA, 26 bp, Homo sapiens
tcaaaggtatgtttctgccttttaca

SEQ ID NO: 84256 - DNA, 26 bp, Homo sapiens
caaaggtatgtttctgccttttacat

SEQ ID NO: 84257 - DNA, 26 bp, Homo sapiens
aaaggtatgtttctgccttttacata

SEQ ID NO: 84258 - DNA, 26 bp, Homo sapiens
aaggtatgtttctgccttttacataa

SEQ ID NO: 84259 - DNA, 26 bp, Homo sapiens
aggtatgtttctgccttttacataat

SEQ ID NO: 84260 - DNA, 26 bp, Homo sapiens
ggtatgtttctgccttttacataatg

SEQ ID NO: 84261 - DNA, 26 bp, Homo sapiens
gtatgtttctgccttttacataatgt

SEQ ID NO: 84262 - DNA, 26 bp, Homo sapiens
tatgtttctgccttttacataatgtg

SEQ ID NO: 84263 - DNA, 26 bp, Homo sapiens
atgtttctgccttttacataatgtga

SEQ ID NO: 84264 - DNA, 26 bp, Homo sapiens
tgtttctgccttttacataatgtgac

SEQ ID NO: 84265 - DNA, 26 bp, Homo sapiens
gtttctgccttttacataatgtgaca

SEQ ID NO: 84266 - DNA, 26 bp, Homo sapiens
tttctgccttttacataatgtgacaa

SEQ ID NO: 84267 - DNA, 26 bp, Homo sapiens
ttctgccttttacataatgtgacaaa

SEQ ID NO: 84268 - DNA, 26 bp, Homo sapiens
tctgccttttacataatgtgacaaag

SEQ ID NO: 84269 - DNA, 26 bp, Homo sapiens
ctgccttttacataatgtgacaaagg

SEQ ID NO: 84270 - DNA, 26 bp, Homo sapiens
tgccttttacataatgtgacaaagga

SEQ ID NO: 84271 - DNA, 26 bp, Homo sapiens
gccttttacataatgtgacaaaggaa

SEQ ID NO: 84272 - DNA, 26 bp, Homo sapiens
ccttttacataatgtgacaaaggaat

SEQ ID NO: 84273 - DNA, 26 bp, Homo sapiens
cttttacataatgtgacaaaggaata

SEQ ID NO: 84274 - DNA, 26 bp, Homo sapiens
ttttacataatgtgacaaaggaatat

SEQ ID NO: 84275 - DNA, 26 bp, Homo sapiens
tttacataatgtgacaaaggaatatg

SEQ ID NO: 84276 - DNA, 26 bp, Homo sapiens
ttacataatgtgacaaaggaatatgt

SEQ ID NO: 84277 - DNA, 26 bp, Homo sapiens
tacataatgtgacaaaggaatatgtt

SEQ ID NO: 84278 - DNA, 26 bp, Homo sapiens
acataatgtgacaaaggaatatgttg

SEQ ID NO: 84279 - DNA, 26 bp, Homo sapiens
cataatgtgacaaaggaatatgttgg

SEQ ID NO: 84280 - DNA, 26 bp, Homo sapiens
ataatgtgacaaaggaatatgttggt

SEQ ID NO: 84281 - DNA, 26 bp, Homo sapiens
taatgtgacaaaggaatatgttggtc

SEQ ID NO: 84282 - DNA, 26 bp, Homo sapiens
aatgtgacaaaggaatatgttggtca

SEQ ID NO: 84283 - DNA, 26 bp, Homo sapiens
atgtgacaaaggaatatgttggtcaa

SEQ ID NO: 84284 - DNA, 26 bp, Homo sapiens
tgtgacaaaggaatatgttggtcaag

SEQ ID NO: 84285 - DNA, 26 bp, Homo sapiens
gtgacaaaggaatatgttggtcaagg

SEQ ID NO: 84286 - DNA, 26 bp, Homo sapiens
tgacaaaggaatatgttggtcaaggc

SEQ ID NO: 84287 - DNA, 26 bp, Homo sapiens
gacaaaggaatatgttggtcaaggca

SEQ ID NO: 84288 - DNA, 26 bp, Homo sapiens
acaaaggaatatgttggtcaaggcaa

SEQ ID NO: 84289 - DNA, 26 bp, Homo sapiens
caaaggaatatgttggtcaaggcaat

SEQ ID NO: 84290 - DNA, 26 bp, Homo sapiens
aaaggaatatgttggtcaaggcaatg

SEQ ID NO: 84291 - DNA, 26 bp, Homo sapiens
aaggaatatgttggtcaaggcaatgg

SEQ ID NO: 84292 - DNA, 26 bp, Homo sapiens
aggaatatgttggtcaaggcaatggc

SEQ ID NO: 84293 - DNA, 26 bp, Homo sapiens
ggaatatgttggtcaaggcaatggct

SEQ ID NO: 84294 - DNA, 26 bp, Homo sapiens
gaatatgttggtcaaggcaatggctg

SEQ ID NO: 84295 - DNA, 26 bp, Homo sapiens
aatatgttggtcaaggcaatggctgt

SEQ ID NO: 84296 - DNA, 26 bp, Homo sapiens
atatgttggtcaaggcaatggctgtt

SEQ ID NO: 84297 - DNA, 26 bp, Homo sapiens
tatgttggtcaaggcaatggctgttt

SEQ ID NO: 84298 - DNA, 26 bp, Homo sapiens
atgttggtcaaggcaatggctgtttc

SEQ ID NO: 84299 - DNA, 26 bp, Homo sapiens
tgttggtcaaggcaatggctgtttca

SEQ ID NO: 84300 - DNA, 26 bp, Homo sapiens
gttggtcaaggcaatggctgtttcag

SEQ ID NO: 84301 - DNA, 26 bp, Homo sapiens
ttggtcaaggcaatggctgtttcagt

SEQ ID NO: 84302 - DNA, 26 bp, Homo sapiens
tggtcaaggcaatggctgtttcagtg

SEQ ID NO: 84303 - DNA, 26 bp, Homo sapiens
ggtcaaggcaatggctgtttcagtgt

SEQ ID NO: 84304 - DNA, 26 bp, Homo sapiens
gtcaaggcaatggctgtttcagtgtt

SEQ ID NO: 84305 - DNA, 26 bp, Homo sapiens
tcaaggcaatggctgtttcagtgttt

SEQ ID NO: 84306 - DNA, 26 bp, Homo sapiens
caaggcaatggctgtttcagtgtttc

SEQ ID NO: 84307 - DNA, 26 bp, Homo sapiens
aaggcaatggctgtttcagtgtttca

SEQ ID NO: 84308 - DNA, 26 bp, Homo sapiens
aggcaatggctgtttcagtgtttcag

SEQ ID NO: 84309 - DNA, 26 bp, Homo sapiens
ggcaatggctgtttcagtgtttcagc

SEQ ID NO: 84310 - DNA, 26 bp, Homo sapiens
gcaatggctgtttcagtgtttcagct

SEQ ID NO: 84311 - DNA, 26 bp, Homo sapiens
caatggctgtttcagtgtttcagctt

SEQ ID NO: 84312 - DNA, 26 bp, Homo sapiens
aatggctgtttcagtgtttcagcttt

SEQ ID NO: 84313 - DNA, 26 bp, Homo sapiens
atggctgtttcagtgtttcagcttta

SEQ ID NO: 84314 - DNA, 26 bp, Homo sapiens
tggctgtttcagtgtttcagctttaa

SEQ ID NO: 84315 - DNA, 26 bp, Homo sapiens
ggctgtttcagtgtttcagctttaac

SEQ ID NO: 84316 - DNA, 26 bp, Homo sapiens
gctgtttcagtgtttcagctttaaca

SEQ ID NO: 84317 - DNA, 26 bp, Homo sapiens
ctgtttcagtgtttcagctttaacaa

SEQ ID NO: 84318 - DNA, 26 bp, Homo sapiens
tgtttcagtgtttcagctttaacaag

SEQ ID NO: 84319 - DNA, 26 bp, Homo sapiens
gtttcagtgtttcagctttaacaaga

SEQ ID NO: 84320 - DNA, 26 bp, Homo sapiens
tttcagtgtttcagctttaacaagaa

SEQ ID NO: 84321 - DNA, 26 bp, Homo sapiens
ttcagtgtttcagctttaacaagaat

SEQ ID NO: 84322 - DNA, 26 bp, Homo sapiens
tcagtgtttcagctttaacaagaatg

SEQ ID NO: 84323 - DNA, 26 bp, Homo sapiens
cagtgtttcagctttaacaagaatgc

SEQ ID NO: 84324 - DNA, 26 bp, Homo sapiens
agtgtttcagctttaacaagaatgct

SEQ ID NO: 84325 - DNA, 26 bp, Homo sapiens
gtgtttcagctttaacaagaatgctg

SEQ ID NO: 84326 - DNA, 26 bp, Homo sapiens
tgtttcagctttaacaagaatgctgg

SEQ ID NO: 84327 - DNA, 26 bp, Homo sapiens
gtttcagctttaacaagaatgctgga

SEQ ID NO: 84328 - DNA, 26 bp, Homo sapiens
tttcagctttaacaagaatgctggat

SEQ ID NO: 84329 - DNA, 26 bp, Homo sapiens
ttcagctttaacaagaatgctggatt

SEQ ID NO: 84330 - DNA, 26 bp, Homo sapiens
tcagctttaacaagaatgctggatta

SEQ ID NO: 84331 - DNA, 26 bp, Homo sapiens
cagctttaacaagaatgctggattac

SEQ ID NO: 84332 - DNA, 26 bp, Homo sapiens
agctttaacaagaatgctggattaca

SEQ ID NO: 84333 - DNA, 26 bp, Homo sapiens
gctttaacaagaatgctggattacag

SEQ ID NO: 84334 - DNA, 26 bp, Homo sapiens
ctttaacaagaatgctggattacagg

SEQ ID NO: 84335 - DNA, 26 bp, Homo sapiens
tttaacaagaatgctggattacaggt

SEQ ID NO: 84336 - DNA, 26 bp, Homo sapiens
ttaacaagaatgctggattacaggtc

SEQ ID NO: 84337 - DNA, 26 bp, Homo sapiens
taacaagaatgctggattacaggtcc

SEQ ID NO: 84338 - DNA, 26 bp, Homo sapiens
aacaagaatgctggattacaggtcct

SEQ ID NO: 84339 - DNA, 26 bp, Homo sapiens
acaagaatgctggattacaggtcctc

SEQ ID NO: 84340 - DNA, 26 bp, Homo sapiens
caagaatgctggattacaggtcctca

SEQ ID NO: 84341 - DNA, 26 bp, Homo sapiens
aagaatgctggattacaggtcctcac

SEQ ID NO: 84342 - DNA, 26 bp, Homo sapiens
agaatgctggattacaggtcctcact

SEQ ID NO: 84343 - DNA, 26 bp, Homo sapiens
gaatgctggattacaggtcctcactt

SEQ ID NO: 84344 - DNA, 26 bp, Homo sapiens
aatgctggattacaggtcctcacttt

SEQ ID NO: 84345 - DNA, 26 bp, Homo sapiens
atgctggattacaggtcctcactttc

SEQ ID NO: 84346 - DNA, 26 bp, Homo sapiens
tgctggattacaggtcctcactttct

SEQ ID NO: 84347 - DNA, 26 bp, Homo sapiens
gctggattacaggtcctcactttcta

SEQ ID NO: 84348 - DNA, 26 bp, Homo sapiens
ctggattacaggtcctcactttctac

SEQ ID NO: 84349 - DNA, 26 bp, Homo sapiens
tggattacaggtcctcactttctacc

SEQ ID NO: 84350 - DNA, 26 bp, Homo sapiens
ggattacaggtcctcactttctacca

SEQ ID NO: 84351 - DNA, 26 bp, Homo sapiens
gattacaggtcctcactttctaccaa

SEQ ID NO: 84352 - DNA, 26 bp, Homo sapiens
attacaggtcctcactttctaccaag

SEQ ID NO: 84353 - DNA, 26 bp, Homo sapiens
ttacaggtcctcactttctaccaagg

SEQ ID NO: 84354 - DNA, 26 bp, Homo sapiens
tacaggtcctcactttctaccaaggc

SEQ ID NO: 84355 - DNA, 26 bp, Homo sapiens
acaggtcctcactttctaccaaggca

SEQ ID NO: 84356 - DNA, 26 bp, Homo sapiens
caggtcctcactttctaccaaggcag

SEQ ID NO: 84357 - DNA, 26 bp, Homo sapiens
aggtcctcactttctaccaaggcagt

SEQ ID NO: 84358 - DNA, 26 bp, Homo sapiens
ggtcctcactttctaccaaggcagta

SEQ ID NO: 84359 - DNA, 26 bp, Homo sapiens
gtcctcactttctaccaaggcagtat

SEQ ID NO: 84360 - DNA, 26 bp, Homo sapiens
tcctcactttctaccaaggcagtatt

SEQ ID NO: 84361 - DNA, 26 bp, Homo sapiens
cctcactttctaccaaggcagtattc

SEQ ID NO: 84362 - DNA, 26 bp, Homo sapiens
ctcactttctaccaaggcagtattca

SEQ ID NO: 84363 - DNA, 26 bp, Homo sapiens
tcactttctaccaaggcagtattcag

SEQ ID NO: 84364 - DNA, 26 bp, Homo sapiens
cactttctaccaaggcagtattcagt

SEQ ID NO: 84365 - DNA, 26 bp, Homo sapiens
actttctaccaaggcagtattcagtg

SEQ ID NO: 84366 - DNA, 26 bp, Homo sapiens
ctttctaccaaggcagtattcagtgt

SEQ ID NO: 84367 - DNA, 26 bp, Homo sapiens
tttctaccaaggcagtattcagtgtc

SEQ ID NO: 84368 - DNA, 26 bp, Homo sapiens
ttctaccaaggcagtattcagtgtca

SEQ ID NO: 84369 - DNA, 26 bp, Homo sapiens
tctaccaaggcagtattcagtgtcag

SEQ ID NO: 84370 - DNA, 26 bp, Homo sapiens
ctaccaaggcagtattcagtgtcagg

SEQ ID NO: 84371 - DNA, 26 bp, Homo sapiens
taccaaggcagtattcagtgtcaggt

SEQ ID NO: 84372 - DNA, 26 bp, Homo sapiens
accaaggcagtattcagtgtcaggtg

SEQ ID NO: 84373 - DNA, 26 bp, Homo sapiens
ccaaggcagtattcagtgtcaggtga

SEQ ID NO: 84374 - DNA, 26 bp, Homo sapiens
caaggcagtattcagtgtcaggtgag

SEQ ID NO: 84375 - DNA, 26 bp, Homo sapiens
aaggcagtattcagtgtcaggtgaga

SEQ ID NO: 84376 - DNA, 26 bp, Homo sapiens
aggcagtattcagtgtcaggtgagat

SEQ ID NO: 84377 - DNA, 26 bp, Homo sapiens
ggcagtattcagtgtcaggtgagatg

SEQ ID NO: 84378 - DNA, 26 bp, Homo sapiens
gcagtattcagtgtcaggtgagatgg

SEQ ID NO: 84379 - DNA, 26 bp, Homo sapiens
cagtattcagtgtcaggtgagatggg

SEQ ID NO: 84380 - DNA, 26 bp, Homo sapiens
agtattcagtgtcaggtgagatgggt

SEQ ID NO: 84381 - DNA, 26 bp, Homo sapiens
gtattcagtgtcaggtgagatgggtt

SEQ ID NO: 84382 - DNA, 26 bp, Homo sapiens
tattcagtgtcaggtgagatgggttg

SEQ ID NO: 84383 - DNA, 26 bp, Homo sapiens
attcagtgtcaggtgagatgggttgg

SEQ ID NO: 84384 - DNA, 26 bp, Homo sapiens
ttcagtgtcaggtgagatgggttggc

SEQ ID NO: 84385 - DNA, 26 bp, Homo sapiens
tcagtgtcaggtgagatgggttggcc

SEQ ID NO: 84386 - DNA, 26 bp, Homo sapiens
cagtgtcaggtgagatgggttggcct

SEQ ID NO: 84387 - DNA, 26 bp, Homo sapiens
agtgtcaggtgagatgggttggcctc

SEQ ID NO: 84388 - DNA, 26 bp, Homo sapiens
gtgtcaggtgagatgggttggcctca

SEQ ID NO: 84389 - DNA, 26 bp, Homo sapiens
tgtcaggtgagatgggttggcctcag

SEQ ID NO: 84390 - DNA, 26 bp, Homo sapiens
gtcaggtgagatgggttggcctcagg

SEQ ID NO: 84391 - DNA, 26 bp, Homo sapiens
tcaggtgagatgggttggcctcaggt

SEQ ID NO: 84392 - DNA, 26 bp, Homo sapiens
caggtgagatgggttggcctcaggtt

SEQ ID NO: 84393 - DNA, 26 bp, Homo sapiens
aggtgagatgggttggcctcaggttg

SEQ ID NO: 84394 - DNA, 26 bp, Homo sapiens
ggtgagatgggttggcctcaggttgg

SEQ ID NO: 84395 - DNA, 26 bp, Homo sapiens
gtgagatgggttggcctcaggttgga

SEQ ID NO: 84396 - DNA, 26 bp, Homo sapiens
tgagatgggttggcctcaggttggaa

SEQ ID NO: 84397 - DNA, 26 bp, Homo sapiens
gagatgggttggcctcaggttggaac

SEQ ID NO: 84398 - DNA, 26 bp, Homo sapiens
agatgggttggcctcaggttggaacg

SEQ ID NO: 84399 - DNA, 26 bp, Homo sapiens
gatgggttggcctcaggttggaacgc

SEQ ID NO: 84400 - DNA, 26 bp, Homo sapiens
atgggttggcctcaggttggaacgct

SEQ ID NO: 84401 - DNA, 26 bp, Homo sapiens
tgggttggcctcaggttggaacgctg

SEQ ID NO: 84402 - DNA, 26 bp, Homo sapiens
gggttggcctcaggttggaacgctgc

SEQ ID NO: 84403 - DNA, 26 bp, Homo sapiens
ggttggcctcaggttggaacgctgct

SEQ ID NO: 84404 - DNA, 26 bp, Homo sapiens
gttggcctcaggttggaacgctgctt

SEQ ID NO: 84405 - DNA, 26 bp, Homo sapiens
ttggcctcaggttggaacgctgcttt

SEQ ID NO: 84406 - DNA, 26 bp, Homo sapiens
tggcctcaggttggaacgctgctttg

SEQ ID NO: 84407 - DNA, 26 bp, Homo sapiens
ggcctcaggttggaacgctgctttga

SEQ ID NO: 84408 - DNA, 26 bp, Homo sapiens
gcctcaggttggaacgctgctttgat

SEQ ID NO: 84409 - DNA, 26 bp, Homo sapiens
cctcaggttggaacgctgctttgatg

SEQ ID NO: 84410 - DNA, 26 bp, Homo sapiens
ctcaggttggaacgctgctttgatgt

SEQ ID NO: 84411 - DNA, 26 bp, Homo sapiens
tcaggttggaacgctgctttgatgtc

SEQ ID NO: 84412 - DNA, 26 bp, Homo sapiens
caggttggaacgctgctttgatgtct

SEQ ID NO: 84413 - DNA, 26 bp, Homo sapiens
aggttggaacgctgctttgatgtcta

SEQ ID NO: 84414 - DNA, 26 bp, Homo sapiens
ggttggaacgctgctttgatgtctag

SEQ ID NO: 84415 - DNA, 26 bp, Homo sapiens
gttggaacgctgctttgatgtctagt

SEQ ID NO: 84416 - DNA, 26 bp, Homo sapiens
ttggaacgctgctttgatgtctagtc

SEQ ID NO: 84417 - DNA, 26 bp, Homo sapiens
tggaacgctgctttgatgtctagtcc

SEQ ID NO: 84418 - DNA, 26 bp, Homo sapiens
ggaacgctgctttgatgtctagtccc

SEQ ID NO: 84419 - DNA, 26 bp, Homo sapiens
gaacgctgctttgatgtctagtccct

SEQ ID NO: 84420 - DNA, 26 bp, Homo sapiens
aacgctgctttgatgtctagtccctg

SEQ ID NO: 84421 - DNA, 26 bp, Homo sapiens
acgctgctttgatgtctagtccctgg

SEQ ID NO: 84422 - DNA, 26 bp, Homo sapiens
cgctgctttgatgtctagtccctggt

SEQ ID NO: 84423 - DNA, 26 bp, Homo sapiens
gctgctttgatgtctagtccctggtc

SEQ ID NO: 84424 - DNA, 26 bp, Homo sapiens
ctgctttgatgtctagtccctggtcc

SEQ ID NO: 84425 - DNA, 26 bp, Homo sapiens
tgctttgatgtctagtccctggtccg

SEQ ID NO: 84426 - DNA, 26 bp, Homo sapiens
gctttgatgtctagtccctggtccga

SEQ ID NO: 84427 - DNA, 26 bp, Homo sapiens
ctttgatgtctagtccctggtccgaa

SEQ ID NO: 84428 - DNA, 26 bp, Homo sapiens
tttgatgtctagtccctggtccgaaa

SEQ ID NO: 84429 - DNA, 26 bp, Homo sapiens
ttgatgtctagtccctggtccgaaag

SEQ ID NO: 84430 - DNA, 26 bp, Homo sapiens
tgatgtctagtccctggtccgaaagt

SEQ ID NO: 84431 - DNA, 26 bp, Homo sapiens
gatgtctagtccctggtccgaaagtg

SEQ ID NO: 84432 - DNA, 26 bp, Homo sapiens
atgtctagtccctggtccgaaagtgc

SEQ ID NO: 84433 - DNA, 26 bp, Homo sapiens
tgtctagtccctggtccgaaagtgct

SEQ ID NO: 84434 - DNA, 26 bp, Homo sapiens
gtctagtccctggtccgaaagtgctg

SEQ ID NO: 84435 - DNA, 26 bp, Homo sapiens
tctagtccctggtccgaaagtgctgc

SEQ ID NO: 84436 - DNA, 26 bp, Homo sapiens
ctagtccctggtccgaaagtgctgca

SEQ ID NO: 84437 - DNA, 26 bp, Homo sapiens
tagtccctggtccgaaagtgctgcat

SEQ ID NO: 84438 - DNA, 26 bp, Homo sapiens
agtccctggtccgaaagtgctgcata

SEQ ID NO: 84439 - DNA, 26 bp, Homo sapiens
gtccctggtccgaaagtgctgcatag

SEQ ID NO: 84440 - DNA, 26 bp, Homo sapiens
tccctggtccgaaagtgctgcatagc

SEQ ID NO: 84441 - DNA, 26 bp, Homo sapiens
ccctggtccgaaagtgctgcatagcg

SEQ ID NO: 84442 - DNA, 26 bp, Homo sapiens
cctggtccgaaagtgctgcatagcga

SEQ ID NO: 84443 - DNA, 26 bp, Homo sapiens
ctggtccgaaagtgctgcatagcgac

SEQ ID NO: 84444 - DNA, 26 bp, Homo sapiens
tggtccgaaagtgctgcatagcgact

SEQ ID NO: 84445 - DNA, 26 bp, Homo sapiens
ggtccgaaagtgctgcatagcgactg

SEQ ID NO: 84446 - DNA, 26 bp, Homo sapiens
gtccgaaagtgctgcatagcgactgg

SEQ ID NO: 84447 - DNA, 26 bp, Homo sapiens
tccgaaagtgctgcatagcgactggc

SEQ ID NO: 84448 - DNA, 26 bp, Homo sapiens
ccgaaagtgctgcatagcgactggct

SEQ ID NO: 84449 - DNA, 26 bp, Homo sapiens
cgaaagtgctgcatagcgactggctg

SEQ ID NO: 84450 - DNA, 26 bp, Homo sapiens
gaaagtgctgcatagcgactggctga

SEQ ID NO: 84451 - DNA, 26 bp, Homo sapiens
aaagtgctgcatagcgactggctgag

SEQ ID NO: 84452 - DNA, 26 bp, Homo sapiens
aagtgctgcatagcgactggctgagg

SEQ ID NO: 84453 - DNA, 26 bp, Homo sapiens
agtgctgcatagcgactggctgaggg

SEQ ID NO: 84454 - DNA, 26 bp, Homo sapiens
gtgctgcatagcgactggctgagggc

SEQ ID NO: 84455 - DNA, 26 bp, Homo sapiens
tgctgcatagcgactggctgagggcc

SEQ ID NO: 84456 - DNA, 26 bp, Homo sapiens
gctgcatagcgactggctgagggccg

SEQ ID NO: 84457 - DNA, 26 bp, Homo sapiens
ctgcatagcgactggctgagggccgt

SEQ ID NO: 84458 - DNA, 26 bp, Homo sapiens
tgcatagcgactggctgagggccgta

SEQ ID NO: 84459 - DNA, 26 bp, Homo sapiens
gcatagcgactggctgagggccgtac

SEQ ID NO: 84460 - DNA, 26 bp, Homo sapiens
catagcgactggctgagggccgtact

SEQ ID NO: 84461 - DNA, 26 bp, Homo sapiens
atagcgactggctgagggccgtactt

SEQ ID NO: 84462 - DNA, 26 bp, Homo sapiens
tagcgactggctgagggccgtacttt

SEQ ID NO: 84463 - DNA, 26 bp, Homo sapiens
agcgactggctgagggccgtactttt

SEQ ID NO: 84464 - DNA, 26 bp, Homo sapiens
gcgactggctgagggccgtacttttt

SEQ ID NO: 84465 - DNA, 26 bp, Homo sapiens
cgactggctgagggccgtactttttt

SEQ ID NO: 84466 - DNA, 26 bp, Homo sapiens
gactggctgagggccgtacttttttt

SEQ ID NO: 84467 - DNA, 26 bp, Homo sapiens
actggctgagggccgtactttttttg

SEQ ID NO: 84468 - DNA, 26 bp, Homo sapiens
ctggctgagggccgtactttttttgg

SEQ ID NO: 84469 - DNA, 26 bp, Homo sapiens
tggctgagggccgtactttttttggc

SEQ ID NO: 84470 - DNA, 26 bp, Homo sapiens
ggctgagggccgtactttttttggct

SEQ ID NO: 84471 - DNA, 26 bp, Homo sapiens
gctgagggccgtactttttttggctt

SEQ ID NO: 84472 - DNA, 26 bp, Homo sapiens
ctgagggccgtactttttttggcttg

SEQ ID NO: 84473 - DNA, 26 bp, Homo sapiens
tgagggccgtactttttttggcttgg

SEQ ID NO: 84474 - DNA, 26 bp, Homo sapiens
gagggccgtactttttttggcttggt

SEQ ID NO: 84475 - DNA, 26 bp, Homo sapiens
agggccgtactttttttggcttggtg

SEQ ID NO: 84476 - DNA, 26 bp, Homo sapiens
gggccgtactttttttggcttggtgc

SEQ ID NO: 84477 - DNA, 26 bp, Homo sapiens
ggccgtactttttttggcttggtgct

SEQ ID NO: 84478 - DNA, 26 bp, Homo sapiens
gccgtactttttttggcttggtgctc

SEQ ID NO: 84479 - DNA, 26 bp, Homo sapiens
ccgtactttttttggcttggtgctct

SEQ ID NO: 84480 - DNA, 26 bp, Homo sapiens
cgtactttttttggcttggtgctctg

SEQ ID NO: 84481 - DNA, 26 bp, Homo sapiens
gtactttttttggcttggtgctctgt

SEQ ID NO: 84482 - DNA, 26 bp, Homo sapiens
tactttttttggcttggtgctctgtg

SEQ ID NO: 84483 - DNA, 26 bp, Homo sapiens
actttttttggcttggtgctctgtga

SEQ ID NO: 84484 - DNA, 26 bp, Homo sapiens
ctttttttggcttggtgctctgtgac

SEQ ID NO: 84485 - DNA, 26 bp, Homo sapiens
tttttttggcttggtgctctgtgact

SEQ ID NO: 84486 - DNA, 26 bp, Homo sapiens
ttttttggcttggtgctctgtgactg

SEQ ID NO: 84487 - DNA, 26 bp, Homo sapiens
tttttggcttggtgctctgtgactgc

SEQ ID NO: 84488 - DNA, 26 bp, Homo sapiens
ttttggcttggtgctctgtgactgct

SEQ ID NO: 84489 - DNA, 26 bp, Homo sapiens
tttggcttggtgctctgtgactgctg

SEQ ID NO: 84490 - DNA, 26 bp, Homo sapiens
ttggcttggtgctctgtgactgctga

SEQ ID NO: 84491 - DNA, 26 bp, Homo sapiens
tggcttggtgctctgtgactgctgat

SEQ ID NO: 84492 - DNA, 26 bp, Homo sapiens
ggcttggtgctctgtgactgctgatg

SEQ ID NO: 84493 - DNA, 26 bp, Homo sapiens
gcttggtgctctgtgactgctgatgc

SEQ ID NO: 84494 - DNA, 26 bp, Homo sapiens
cttggtgctctgtgactgctgatgcc

SEQ ID NO: 84495 - DNA, 26 bp, Homo sapiens
ttggtgctctgtgactgctgatgcca

SEQ ID NO: 84496 - DNA, 26 bp, Homo sapiens
tggtgctctgtgactgctgatgccac

SEQ ID NO: 84497 - DNA, 26 bp, Homo sapiens
ggtgctctgtgactgctgatgccact

SEQ ID NO: 84498 - DNA, 26 bp, Homo sapiens
gtgctctgtgactgctgatgccactg

SEQ ID NO: 84499 - DNA, 26 bp, Homo sapiens
tgctctgtgactgctgatgccactgg

SEQ ID NO: 84500 - DNA, 26 bp, Homo sapiens
gctctgtgactgctgatgccactggg

SEQ ID NO: 84501 - DNA, 26 bp, Homo sapiens
ctctgtgactgctgatgccactgggt

SEQ ID NO: 84502 - DNA, 26 bp, Homo sapiens
tctgtgactgctgatgccactgggtg

SEQ ID NO: 84503 - DNA, 26 bp, Homo sapiens
ctgtgactgctgatgccactgggtgt

SEQ ID NO: 84504 - DNA, 26 bp, Homo sapiens
tgtgactgctgatgccactgggtgta

SEQ ID NO: 84505 - DNA, 26 bp, Homo sapiens
gtgactgctgatgccactgggtgtaa

SEQ ID NO: 84506 - DNA, 26 bp, Homo sapiens
tgactgctgatgccactgggtgtaaa

SEQ ID NO: 84507 - DNA, 26 bp, Homo sapiens
gactgctgatgccactgggtgtaaac

SEQ ID NO: 84508 - DNA, 26 bp, Homo sapiens
actgctgatgccactgggtgtaaacg

SEQ ID NO: 84509 - DNA, 26 bp, Homo sapiens
ctgctgatgccactgggtgtaaacgt

SEQ ID NO: 84510 - DNA, 26 bp, Homo sapiens
tgctgatgccactgggtgtaaacgtc

SEQ ID NO: 84511 - DNA, 26 bp, Homo sapiens
gctgatgccactgggtgtaaacgtcc

SEQ ID NO: 84512 - DNA, 26 bp, Homo sapiens
ctgatgccactgggtgtaaacgtcca

SEQ ID NO: 84513 - DNA, 26 bp, Homo sapiens
tgatgccactgggtgtaaacgtccag

SEQ ID NO: 84514 - DNA, 26 bp, Homo sapiens
gatgccactgggtgtaaacgtccagc

SEQ ID NO: 84515 - DNA, 26 bp, Homo sapiens
atgccactgggtgtaaacgtccagcc

SEQ ID NO: 84516 - DNA, 26 bp, Homo sapiens
tgccactgggtgtaaacgtccagcct

SEQ ID NO: 84517 - DNA, 26 bp, Homo sapiens
gccactgggtgtaaacgtccagcctg

SEQ ID NO: 84518 - DNA, 26 bp, Homo sapiens
ccactgggtgtaaacgtccagcctgg

SEQ ID NO: 84519 - DNA, 26 bp, Homo sapiens
cactgggtgtaaacgtccagcctggc

SEQ ID NO: 84520 - DNA, 26 bp, Homo sapiens
actgggtgtaaacgtccagcctggca

SEQ ID NO: 84521 - DNA, 26 bp, Homo sapiens
ctgggtgtaaacgtccagcctggcag

SEQ ID NO: 84522 - DNA, 26 bp, Homo sapiens
tgggtgtaaacgtccagcctggcagt

SEQ ID NO: 84523 - DNA, 26 bp, Homo sapiens
gggtgtaaacgtccagcctggcagta

SEQ ID NO: 84524 - DNA, 26 bp, Homo sapiens
ggtgtaaacgtccagcctggcagtac

SEQ ID NO: 84525 - DNA, 26 bp, Homo sapiens
gtgtaaacgtccagcctggcagtaca

SEQ ID NO: 84526 - DNA, 26 bp, Homo sapiens
tgtaaacgtccagcctggcagtacag

SEQ ID NO: 84527 - DNA, 26 bp, Homo sapiens
gtaaacgtccagcctggcagtacagg

SEQ ID NO: 84528 - DNA, 26 bp, Homo sapiens
taaacgtccagcctggcagtacagga

SEQ ID NO: 84529 - DNA, 26 bp, Homo sapiens
aaacgtccagcctggcagtacaggac

SEQ ID NO: 84530 - DNA, 26 bp, Homo sapiens
aacgtccagcctggcagtacaggaca

SEQ ID NO: 84531 - DNA, 26 bp, Homo sapiens
acgtccagcctggcagtacaggacac

SEQ ID NO: 84532 - DNA, 26 bp, Homo sapiens
cgtccagcctggcagtacaggacaca

SEQ ID NO: 84533 - DNA, 26 bp, Homo sapiens
gtccagcctggcagtacaggacacaa

SEQ ID NO: 84534 - DNA, 26 bp, Homo sapiens
tccagcctggcagtacaggacacaat

SEQ ID NO: 84535 - DNA, 26 bp, Homo sapiens
ccagcctggcagtacaggacacaatc

SEQ ID NO: 84536 - DNA, 26 bp, Homo sapiens
cagcctggcagtacaggacacaatcc

SEQ ID NO: 84537 - DNA, 26 bp, Homo sapiens
agcctggcagtacaggacacaatccc

SEQ ID NO: 84538 - DNA, 26 bp, Homo sapiens
gcctggcagtacaggacacaatccct

SEQ ID NO: 84539 - DNA, 26 bp, Homo sapiens
cctggcagtacaggacacaatccctg

SEQ ID NO: 84540 - DNA, 26 bp, Homo sapiens
ctggcagtacaggacacaatccctgc

SEQ ID NO: 84541 - DNA, 26 bp, Homo sapiens
tggcagtacaggacacaatccctgct

SEQ ID NO: 84542 - DNA, 26 bp, Homo sapiens
ggcagtacaggacacaatccctgctt

SEQ ID NO: 84543 - DNA, 26 bp, Homo sapiens
gcagtacaggacacaatccctgcttc

SEQ ID NO: 84544 - DNA, 26 bp, Homo sapiens
cagtacaggacacaatccctgcttca

SEQ ID NO: 84545 - DNA, 26 bp, Homo sapiens
agtacaggacacaatccctgcttcat

SEQ ID NO: 84546 - DNA, 26 bp, Homo sapiens
gtacaggacacaatccctgcttcatt

SEQ ID NO: 84547 - DNA, 26 bp, Homo sapiens
tacaggacacaatccctgcttcattc

SEQ ID NO: 84548 - DNA, 26 bp, Homo sapiens
acaggacacaatccctgcttcattct

SEQ ID NO: 84549 - DNA, 26 bp, Homo sapiens
caggacacaatccctgcttcattctt

SEQ ID NO: 84550 - DNA, 26 bp, Homo sapiens
aggacacaatccctgcttcattcttg

SEQ ID NO: 84551 - DNA, 26 bp, Homo sapiens
ggacacaatccctgcttcattcttgg

SEQ ID NO: 84552 - DNA, 26 bp, Homo sapiens
gacacaatccctgcttcattcttggc

SEQ ID NO: 84553 - DNA, 26 bp, Homo sapiens
acacaatccctgcttcattcttggct

SEQ ID NO: 84554 - DNA, 26 bp, Homo sapiens
cacaatccctgcttcattcttggctg

SEQ ID NO: 84555 - DNA, 26 bp, Homo sapiens
acaatccctgcttcattcttggctga

SEQ ID NO: 84556 - DNA, 26 bp, Homo sapiens
caatccctgcttcattcttggctgac

SEQ ID NO: 84557 - DNA, 26 bp, Homo sapiens
aatccctgcttcattcttggctgaca

SEQ ID NO: 84558 - DNA, 26 bp, Homo sapiens
atccctgcttcattcttggctgacac

SEQ ID NO: 84559 - DNA, 26 bp, Homo sapiens
tccctgcttcattcttggctgacaca

SEQ ID NO: 84560 - DNA, 26 bp, Homo sapiens
ccctgcttcattcttggctgacacag

SEQ ID NO: 84561 - DNA, 26 bp, Homo sapiens
cctgcttcattcttggctgacacagt

SEQ ID NO: 84562 - DNA, 26 bp, Homo sapiens
ctgcttcattcttggctgacacagta

SEQ ID NO: 84563 - DNA, 26 bp, Homo sapiens
tgcttcattcttggctgacacagtat

SEQ ID NO: 84564 - DNA, 26 bp, Homo sapiens
gcttcattcttggctgacacagtata

SEQ ID NO: 84565 - DNA, 26 bp, Homo sapiens
cttcattcttggctgacacagtatac

SEQ ID NO: 84566 - DNA, 26 bp, Homo sapiens
ttcattcttggctgacacagtatacc

SEQ ID NO: 84567 - DNA, 26 bp, Homo sapiens
tcattcttggctgacacagtatacca

SEQ ID NO: 84568 - DNA, 26 bp, Homo sapiens
cattcttggctgacacagtataccac

SEQ ID NO: 84569 - DNA, 26 bp, Homo sapiens
attcttggctgacacagtataccacc

SEQ ID NO: 84570 - DNA, 26 bp, Homo sapiens
ttcttggctgacacagtataccaccc

SEQ ID NO: 84571 - DNA, 26 bp, Homo sapiens
tcttggctgacacagtataccaccca

SEQ ID NO: 84572 - DNA, 26 bp, Homo sapiens
cttggctgacacagtataccacccag

SEQ ID NO: 84573 - DNA, 26 bp, Homo sapiens
ttggctgacacagtataccacccagc

SEQ ID NO: 84574 - DNA, 26 bp, Homo sapiens
tggctgacacagtataccacccagca

SEQ ID NO: 84575 - DNA, 26 bp, Homo sapiens
ggctgacacagtataccacccagcat

SEQ ID NO: 84576 - DNA, 26 bp, Homo sapiens
gctgacacagtataccacccagcatc

SEQ ID NO: 84577 - DNA, 26 bp, Homo sapiens
ctgacacagtataccacccagcatct

SEQ ID NO: 84578 - DNA, 26 bp, Homo sapiens
tgacacagtataccacccagcatctt

SEQ ID NO: 84579 - DNA, 26 bp, Homo sapiens
gacacagtataccacccagcatcttc

SEQ ID NO: 84580 - DNA, 26 bp, Homo sapiens
acacagtataccacccagcatcttct

SEQ ID NO: 84581 - DNA, 26 bp, Homo sapiens
cacagtataccacccagcatcttctt

SEQ ID NO: 84582 - DNA, 26 bp, Homo sapiens
acagtataccacccagcatcttcttt

SEQ ID NO: 84583 - DNA, 26 bp, Homo sapiens
cagtataccacccagcatcttctttt

SEQ ID NO: 84584 - DNA, 26 bp, Homo sapiens
agtataccacccagcatcttcttttg

SEQ ID NO: 84585 - DNA, 26 bp, Homo sapiens
gtataccacccagcatcttcttttgt

SEQ ID NO: 84586 - DNA, 26 bp, Homo sapiens
tataccacccagcatcttcttttgtg

SEQ ID NO: 84587 - DNA, 26 bp, Homo sapiens
ataccacccagcatcttcttttgtgg

SEQ ID NO: 84588 - DNA, 26 bp, Homo sapiens
taccacccagcatcttcttttgtggc

SEQ ID NO: 84589 - DNA, 26 bp, Homo sapiens
accacccagcatcttcttttgtggct

SEQ ID NO: 84590 - DNA, 26 bp, Homo sapiens
ccacccagcatcttcttttgtggctc

SEQ ID NO: 84591 - DNA, 26 bp, Homo sapiens
cacccagcatcttcttttgtggctcc

SEQ ID NO: 84592 - DNA, 26 bp, Homo sapiens
acccagcatcttcttttgtggctccc

SEQ ID NO: 84593 - DNA, 26 bp, Homo sapiens
cccagcatcttcttttgtggctccct

SEQ ID NO: 84594 - DNA, 26 bp, Homo sapiens
ccagcatcttcttttgtggctccctg

SEQ ID NO: 84595 - DNA, 26 bp, Homo sapiens
cagcatcttcttttgtggctccctga

SEQ ID NO: 84596 - DNA, 26 bp, Homo sapiens
agcatcttcttttgtggctccctgaa

SEQ ID NO: 84597 - DNA, 26 bp, Homo sapiens
gcatcttcttttgtggctccctgaat

SEQ ID NO: 84598 - DNA, 26 bp, Homo sapiens
catcttcttttgtggctccctgaatg

SEQ ID NO: 84599 - DNA, 26 bp, Homo sapiens
atcttcttttgtggctccctgaatga

SEQ ID NO: 84600 - DNA, 26 bp, Homo sapiens
tcttcttttgtggctccctgaatgag

SEQ ID NO: 84601 - DNA, 26 bp, Homo sapiens
cttcttttgtggctccctgaatgagc

SEQ ID NO: 84602 - DNA, 26 bp, Homo sapiens
ttcttttgtggctccctgaatgagca

SEQ ID NO: 84603 - DNA, 26 bp, Homo sapiens
tcttttgtggctccctgaatgagcag

SEQ ID NO: 84604 - DNA, 26 bp, Homo sapiens
cttttgtggctccctgaatgagcagg

SEQ ID NO: 84605 - DNA, 26 bp, Homo sapiens
ttttgtggctccctgaatgagcaggc

SEQ ID NO: 84606 - DNA, 26 bp, Homo sapiens
tttgtggctccctgaatgagcaggca

SEQ ID NO: 84607 - DNA, 26 bp, Homo sapiens
ttgtggctccctgaatgagcaggcag

SEQ ID NO: 84608 - DNA, 26 bp, Homo sapiens
tgtggctccctgaatgagcaggcaga

SEQ ID NO: 84609 - DNA, 26 bp, Homo sapiens
gtggctccctgaatgagcaggcagat

SEQ ID NO: 84610 - DNA, 26 bp, Homo sapiens
tggctccctgaatgagcaggcagatg

SEQ ID NO: 84611 - DNA, 26 bp, Homo sapiens
ggctccctgaatgagcaggcagatgt

SEQ ID NO: 84612 - DNA, 26 bp, Homo sapiens
gctccctgaatgagcaggcagatgta

SEQ ID NO: 84613 - DNA, 26 bp, Homo sapiens
ctccctgaatgagcaggcagatgtag

SEQ ID NO: 84614 - DNA, 26 bp, Homo sapiens
tccctgaatgagcaggcagatgtagc

SEQ ID NO: 84615 - DNA, 26 bp, Homo sapiens
ccctgaatgagcaggcagatgtagcc

SEQ ID NO: 84616 - DNA, 26 bp, Homo sapiens
cctgaatgagcaggcagatgtagccg

SEQ ID NO: 84617 - DNA, 26 bp, Homo sapiens
ctgaatgagcaggcagatgtagccgt

SEQ ID NO: 84618 - DNA, 26 bp, Homo sapiens
tgaatgagcaggcagatgtagccgtg

SEQ ID NO: 84619 - DNA, 26 bp, Homo sapiens
gaatgagcaggcagatgtagccgtgg

SEQ ID NO: 84620 - DNA, 26 bp, Homo sapiens
aatgagcaggcagatgtagccgtggt

SEQ ID NO: 84621 - DNA, 26 bp, Homo sapiens
atgagcaggcagatgtagccgtggtt

SEQ ID NO: 84622 - DNA, 26 bp, Homo sapiens
tgagcaggcagatgtagccgtggttg

SEQ ID NO: 84623 - DNA, 26 bp, Homo sapiens
gagcaggcagatgtagccgtggttgt

SEQ ID NO: 84624 - DNA, 26 bp, Homo sapiens
agcaggcagatgtagccgtggttgtc

SEQ ID NO: 84625 - DNA, 26 bp, Homo sapiens
gcaggcagatgtagccgtggttgtcc

SEQ ID NO: 84626 - DNA, 26 bp, Homo sapiens
caggcagatgtagccgtggttgtcct

SEQ ID NO: 84627 - DNA, 26 bp, Homo sapiens
aggcagatgtagccgtggttgtcctg

SEQ ID NO: 84628 - DNA, 26 bp, Homo sapiens
ggcagatgtagccgtggttgtcctgg

SEQ ID NO: 84629 - DNA, 26 bp, Homo sapiens
gcagatgtagccgtggttgtcctggt

SEQ ID NO: 84630 - DNA, 26 bp, Homo sapiens
cagatgtagccgtggttgtcctggtg

SEQ ID NO: 84631 - DNA, 26 bp, Homo sapiens
agatgtagccgtggttgtcctggtgc

SEQ ID NO: 84632 - DNA, 26 bp, Homo sapiens
gatgtagccgtggttgtcctggtgca

SEQ ID NO: 84633 - DNA, 26 bp, Homo sapiens
atgtagccgtggttgtcctggtgcat

SEQ ID NO: 84634 - DNA, 26 bp, Homo sapiens
tgtagccgtggttgtcctggtgcatg

SEQ ID NO: 84635 - DNA, 26 bp, Homo sapiens
gtagccgtggttgtcctggtgcatgc

SEQ ID NO: 84636 - DNA, 26 bp, Homo sapiens
tagccgtggttgtcctggtgcatgct

SEQ ID NO: 84637 - DNA, 26 bp, Homo sapiens
agccgtggttgtcctggtgcatgctc

SEQ ID NO: 84638 - DNA, 26 bp, Homo sapiens
gccgtggttgtcctggtgcatgctca

SEQ ID NO: 84639 - DNA, 26 bp, Homo sapiens
ccgtggttgtcctggtgcatgctcac

SEQ ID NO: 84640 - DNA, 26 bp, Homo sapiens
cgtggttgtcctggtgcatgctcact

SEQ ID NO: 84641 - DNA, 26 bp, Homo sapiens
gtggttgtcctggtgcatgctcactc

SEQ ID NO: 84642 - DNA, 26 bp, Homo sapiens
tggttgtcctggtgcatgctcactcg

SEQ ID NO: 84643 - DNA, 26 bp, Homo sapiens
ggttgtcctggtgcatgctcactcgg

SEQ ID NO: 84644 - DNA, 26 bp, Homo sapiens
gttgtcctggtgcatgctcactcggt

SEQ ID NO: 84645 - DNA, 26 bp, Homo sapiens
ttgtcctggtgcatgctcactcggtc

SEQ ID NO: 84646 - DNA, 26 bp, Homo sapiens
tgtcctggtgcatgctcactcggtca

SEQ ID NO: 84647 - DNA, 26 bp, Homo sapiens
gtcctggtgcatgctcactcggtcag

SEQ ID NO: 84648 - DNA, 26 bp, Homo sapiens
tcctggtgcatgctcactcggtcagt

SEQ ID NO: 84649 - DNA, 26 bp, Homo sapiens
cctggtgcatgctcactcggtcagtg

SEQ ID NO: 84650 - DNA, 26 bp, Homo sapiens
ctggtgcatgctcactcggtcagtgc

SEQ ID NO: 84651 - DNA, 26 bp, Homo sapiens
tggtgcatgctcactcggtcagtgct

SEQ ID NO: 84652 - DNA, 26 bp, Homo sapiens
ggtgcatgctcactcggtcagtgctg

SEQ ID NO: 84653 - DNA, 26 bp, Homo sapiens
gtgcatgctcactcggtcagtgctgt

SEQ ID NO: 84654 - DNA, 26 bp, Homo sapiens
tgcatgctcactcggtcagtgctgtg

SEQ ID NO: 84655 - DNA, 26 bp, Homo sapiens
gcatgctcactcggtcagtgctgtga

SEQ ID NO: 84656 - DNA, 26 bp, Homo sapiens
catgctcactcggtcagtgctgtgag

SEQ ID NO: 84657 - DNA, 26 bp, Homo sapiens
atgctcactcggtcagtgctgtgagt

SEQ ID NO: 84658 - DNA, 26 bp, Homo sapiens
tgctcactcggtcagtgctgtgagtg

SEQ ID NO: 84659 - DNA, 26 bp, Homo sapiens
gctcactcggtcagtgctgtgagtga

SEQ ID NO: 84660 - DNA, 26 bp, Homo sapiens
ctcactcggtcagtgctgtgagtgag

SEQ ID NO: 84661 - DNA, 26 bp, Homo sapiens
tcactcggtcagtgctgtgagtgagt

SEQ ID NO: 84662 - DNA, 26 bp, Homo sapiens
cactcggtcagtgctgtgagtgagtg

SEQ ID NO: 84663 - DNA, 26 bp, Homo sapiens
actcggtcagtgctgtgagtgagtga

SEQ ID NO: 84664 - DNA, 26 bp, Homo sapiens
ctcggtcagtgctgtgagtgagtgat

SEQ ID NO: 84665 - DNA, 26 bp, Homo sapiens
tcggtcagtgctgtgagtgagtgatt

SEQ ID NO: 84666 - DNA, 26 bp, Homo sapiens
cggtcagtgctgtgagtgagtgattc

SEQ ID NO: 84667 - DNA, 26 bp, Homo sapiens
ggtcagtgctgtgagtgagtgattca

SEQ ID NO: 84668 - DNA, 26 bp, Homo sapiens
gtcagtgctgtgagtgagtgattcat

SEQ ID NO: 84669 - DNA, 26 bp, Homo sapiens
tcagtgctgtgagtgagtgattcatt

SEQ ID NO: 84670 - DNA, 26 bp, Homo sapiens
cagtgctgtgagtgagtgattcattt

SEQ ID NO: 84671 - DNA, 26 bp, Homo sapiens
agtgctgtgagtgagtgattcatttt

SEQ ID NO: 84672 - DNA, 26 bp, Homo sapiens
gtgctgtgagtgagtgattcattttc

SEQ ID NO: 84673 - DNA, 26 bp, Homo sapiens
tgctgtgagtgagtgattcattttct

SEQ ID NO: 84674 - DNA, 26 bp, Homo sapiens
gctgtgagtgagtgattcattttctt

SEQ ID NO: 84675 - DNA, 26 bp, Homo sapiens
ctgtgagtgagtgattcattttcttt

SEQ ID NO: 84676 - DNA, 26 bp, Homo sapiens
tgtgagtgagtgattcattttctttc

SEQ ID NO: 84677 - DNA, 26 bp, Homo sapiens
gtgagtgagtgattcattttctttct

SEQ ID NO: 84678 - DNA, 26 bp, Homo sapiens
tgagtgagtgattcattttctttctt

SEQ ID NO: 84679 - DNA, 26 bp, Homo sapiens
gagtgagtgattcattttctttcttc

SEQ ID NO: 84680 - DNA, 26 bp, Homo sapiens
agtgagtgattcattttctttcttcc

SEQ ID NO: 84681 - DNA, 26 bp, Homo sapiens
gtgagtgattcattttctttcttcca

SEQ ID NO: 84682 - DNA, 26 bp, Homo sapiens
tgagtgattcattttctttcttccaa

SEQ ID NO: 84683 - DNA, 26 bp, Homo sapiens
gagtgattcattttctttcttccaaa

SEQ ID NO: 84684 - DNA, 26 bp, Homo sapiens
agtgattcattttctttcttccaaaa

SEQ ID NO: 84685 - DNA, 26 bp, Homo sapiens
gtgattcattttctttcttccaaaat

SEQ ID NO: 84686 - DNA, 26 bp, Homo sapiens
tgattcattttctttcttccaaaata

SEQ ID NO: 84687 - DNA, 26 bp, Homo sapiens
gattcattttctttcttccaaaatat

SEQ ID NO: 84688 - DNA, 26 bp, Homo sapiens
attcattttctttcttccaaaatatc

SEQ ID NO: 84689 - DNA, 26 bp, Homo sapiens
ttcattttctttcttccaaaatatct

SEQ ID NO: 84690 - DNA, 26 bp, Homo sapiens
tcattttctttcttccaaaatatctg

SEQ ID NO: 84691 - DNA, 26 bp, Homo sapiens
cattttctttcttccaaaatatctga

SEQ ID NO: 84692 - DNA, 26 bp, Homo sapiens
attttctttcttccaaaatatctgag

SEQ ID NO: 84693 - DNA, 26 bp, Homo sapiens
ttttctttcttccaaaatatctgagg

SEQ ID NO: 84694 - DNA, 26 bp, Homo sapiens
tttctttcttccaaaatatctgaggt

SEQ ID NO: 84695 - DNA, 26 bp, Homo sapiens
ttctttcttccaaaatatctgaggtg

SEQ ID NO: 84696 - DNA, 26 bp, Homo sapiens
tctttcttccaaaatatctgaggtgg

SEQ ID NO: 84697 - DNA, 26 bp, Homo sapiens
ctttcttccaaaatatctgaggtggt

SEQ ID NO: 84698 - DNA, 26 bp, Homo sapiens
tttcttccaaaatatctgaggtggtg

SEQ ID NO: 84699 - DNA, 26 bp, Homo sapiens
ttcttccaaaatatctgaggtggtgg

SEQ ID NO: 84700 - DNA, 26 bp, Homo sapiens
tcttccaaaatatctgaggtggtggc

SEQ ID NO: 84701 - DNA, 26 bp, Homo sapiens
cttccaaaatatctgaggtggtggca

SEQ ID NO: 84702 - DNA, 26 bp, Homo sapiens
ttccaaaatatctgaggtggtggcac

SEQ ID NO: 84703 - DNA, 26 bp, Homo sapiens
tccaaaatatctgaggtggtggcact

SEQ ID NO: 84704 - DNA, 26 bp, Homo sapiens
ccaaaatatctgaggtggtggcactc

SEQ ID NO: 84705 - DNA, 26 bp, Homo sapiens
caaaatatctgaggtggtggcactcc

SEQ ID NO: 84706 - DNA, 26 bp, Homo sapiens
aaaatatctgaggtggtggcactccc

SEQ ID NO: 84707 - DNA, 26 bp, Homo sapiens
aaatatctgaggtggtggcactccca

SEQ ID NO: 84708 - DNA, 26 bp, Homo sapiens
aatatctgaggtggtggcactcccaa

SEQ ID NO: 84709 - DNA, 26 bp, Homo sapiens
atatctgaggtggtggcactcccaat

SEQ ID NO: 84710 - DNA, 26 bp, Homo sapiens
tatctgaggtggtggcactcccaata

SEQ ID NO: 84711 - DNA, 26 bp, Homo sapiens
atctgaggtggtggcactcccaatac

SEQ ID NO: 84712 - DNA, 26 bp, Homo sapiens
tctgaggtggtggcactcccaataca

SEQ ID NO: 84713 - DNA, 26 bp, Homo sapiens
ctgaggtggtggcactcccaatacac

SEQ ID NO: 84714 - DNA, 26 bp, Homo sapiens
tgaggtggtggcactcccaatacacg

SEQ ID NO: 84715 - DNA, 26 bp, Homo sapiens
gaggtggtggcactcccaatacacga

SEQ ID NO: 84716 - DNA, 26 bp, Homo sapiens
aggtggtggcactcccaatacacgac

SEQ ID NO: 84717 - DNA, 26 bp, Homo sapiens
ggtggtggcactcccaatacacgaca

SEQ ID NO: 84718 - DNA, 26 bp, Homo sapiens
gtggtggcactcccaatacacgacat

SEQ ID NO: 84719 - DNA, 26 bp, Homo sapiens
tggtggcactcccaatacacgacatt

SEQ ID NO: 84720 - DNA, 26 bp, Homo sapiens
ggtggcactcccaatacacgacattc

SEQ ID NO: 84721 - DNA, 26 bp, Homo sapiens
gtggcactcccaatacacgacattcc

SEQ ID NO: 84722 - DNA, 26 bp, Homo sapiens
tggcactcccaatacacgacattcca

SEQ ID NO: 84723 - DNA, 26 bp, Homo sapiens
ggcactcccaatacacgacattccag

SEQ ID NO: 84724 - DNA, 26 bp, Homo sapiens
gcactcccaatacacgacattccagc

SEQ ID NO: 84725 - DNA, 26 bp, Homo sapiens
cactcccaatacacgacattccagcc

SEQ ID NO: 84726 - DNA, 26 bp, Homo sapiens
actcccaatacacgacattccagccg

SEQ ID NO: 84727 - DNA, 26 bp, Homo sapiens
ctcccaatacacgacattccagccgc

SEQ ID NO: 84728 - DNA, 26 bp, Homo sapiens
tcccaatacacgacattccagccgca

SEQ ID NO: 84729 - DNA, 26 bp, Homo sapiens
cccaatacacgacattccagccgcac

SEQ ID NO: 84730 - DNA, 26 bp, Homo sapiens
ccaatacacgacattccagccgcact

SEQ ID NO: 84731 - DNA, 26 bp, Homo sapiens
caatacacgacattccagccgcactg

SEQ ID NO: 84732 - DNA, 26 bp, Homo sapiens
aatacacgacattccagccgcactgg

SEQ ID NO: 84733 - DNA, 26 bp, Homo sapiens
atacacgacattccagccgcactggg

SEQ ID NO: 84734 - DNA, 26 bp, Homo sapiens
tacacgacattccagccgcactgggt

SEQ ID NO: 84735 - DNA, 26 bp, Homo sapiens
acacgacattccagccgcactgggta

SEQ ID NO: 84736 - DNA, 26 bp, Homo sapiens
cacgacattccagccgcactgggtac

SEQ ID NO: 84737 - DNA, 26 bp, Homo sapiens
acgacattccagccgcactgggtacc

SEQ ID NO: 84738 - DNA, 26 bp, Homo sapiens
cgacattccagccgcactgggtaccc

SEQ ID NO: 84739 - DNA, 26 bp, Homo sapiens
gacattccagccgcactgggtaccca

SEQ ID NO: 84740 - DNA, 26 bp, Homo sapiens
acattccagccgcactgggtacccat

SEQ ID NO: 84741 - DNA, 26 bp, Homo sapiens
cattccagccgcactgggtacccatc

SEQ ID NO: 84742 - DNA, 26 bp, Homo sapiens
attccagccgcactgggtacccatca

SEQ ID NO: 84743 - DNA, 26 bp, Homo sapiens
ttccagccgcactgggtacccatcag

SEQ ID NO: 84744 - DNA, 26 bp, Homo sapiens
tccagccgcactgggtacccatcagc

SEQ ID NO: 84745 - DNA, 26 bp, Homo sapiens
ccagccgcactgggtacccatcagca

SEQ ID NO: 84746 - DNA, 26 bp, Homo sapiens
cagccgcactgggtacccatcagcaa

SEQ ID NO: 84747 - DNA, 26 bp, Homo sapiens
agccgcactgggtacccatcagcaac

SEQ ID NO: 84748 - DNA, 26 bp, Homo sapiens
gccgcactgggtacccatcagcaact

SEQ ID NO: 84749 - DNA, 26 bp, Homo sapiens
ccgcactgggtacccatcagcaactc

SEQ ID NO: 84750 - DNA, 26 bp, Homo sapiens
cgcactgggtacccatcagcaactcc

SEQ ID NO: 84751 - DNA, 26 bp, Homo sapiens
gcactgggtacccatcagcaactcct

SEQ ID NO: 84752 - DNA, 26 bp, Homo sapiens
cactgggtacccatcagcaactcctg

SEQ ID NO: 84753 - DNA, 26 bp, Homo sapiens
actgggtacccatcagcaactcctgt

SEQ ID NO: 84754 - DNA, 26 bp, Homo sapiens
ctgggtacccatcagcaactcctgtg

SEQ ID NO: 84755 - DNA, 26 bp, Homo sapiens
tgggtacccatcagcaactcctgtgt

SEQ ID NO: 84756 - DNA, 26 bp, Homo sapiens
gggtacccatcagcaactcctgtgtt

SEQ ID NO: 84757 - DNA, 26 bp, Homo sapiens
ggtacccatcagcaactcctgtgttt

SEQ ID NO: 84758 - DNA, 26 bp, Homo sapiens
gtacccatcagcaactcctgtgtttt

SEQ ID NO: 84759 - DNA, 26 bp, Homo sapiens
tacccatcagcaactcctgtgttttg

SEQ ID NO: 84760 - DNA, 26 bp, Homo sapiens
acccatcagcaactcctgtgttttgg

SEQ ID NO: 84761 - DNA, 26 bp, Homo sapiens
cccatcagcaactcctgtgttttgga

SEQ ID NO: 84762 - DNA, 26 bp, Homo sapiens
ccatcagcaactcctgtgttttggag

SEQ ID NO: 84763 - DNA, 26 bp, Homo sapiens
catcagcaactcctgtgttttggagc

SEQ ID NO: 84764 - DNA, 26 bp, Homo sapiens
atcagcaactcctgtgttttggagct

SEQ ID NO: 84765 - DNA, 26 bp, Homo sapiens
tcagcaactcctgtgttttggagctt

SEQ ID NO: 84766 - DNA, 26 bp, Homo sapiens
cagcaactcctgtgttttggagcttc

SEQ ID NO: 84767 - DNA, 26 bp, Homo sapiens
agcaactcctgtgttttggagcttct

SEQ ID NO: 84768 - DNA, 26 bp, Homo sapiens
gcaactcctgtgttttggagcttctc

SEQ ID NO: 84769 - DNA, 26 bp, Homo sapiens
caactcctgtgttttggagcttctca

SEQ ID NO: 84770 - DNA, 26 bp, Homo sapiens
aactcctgtgttttggagcttctcaa

SEQ ID NO: 84771 - DNA, 26 bp, Homo sapiens
actcctgtgttttggagcttctcaat

SEQ ID NO: 84772 - DNA, 26 bp, Homo sapiens
ctcctgtgttttggagcttctcaata

SEQ ID NO: 84773 - DNA, 26 bp, Homo sapiens
tcctgtgttttggagcttctcaataa

SEQ ID NO: 84774 - DNA, 26 bp, Homo sapiens
cctgtgttttggagcttctcaataaa

SEQ ID NO: 84775 - DNA, 26 bp, Homo sapiens
ctgtgttttggagcttctcaataaac

SEQ ID NO: 84776 - DNA, 26 bp, Homo sapiens
tgtgttttggagcttctcaataaaca

SEQ ID NO: 84777 - DNA, 26 bp, Homo sapiens
gtgttttggagcttctcaataaacac

SEQ ID NO: 84778 - DNA, 26 bp, Homo sapiens
tgttttggagcttctcaataaacaca

SEQ ID NO: 84779 - DNA, 26 bp, Homo sapiens
gttttggagcttctcaataaacacag

SEQ ID NO: 84780 - DNA, 26 bp, Homo sapiens
ttttggagcttctcaataaacacagg

SEQ ID NO: 84781 - DNA, 26 bp, Homo sapiens
tttggagcttctcaataaacacaggg

SEQ ID NO: 84782 - DNA, 26 bp, Homo sapiens
ttggagcttctcaataaacacagggg

SEQ ID NO: 84783 - DNA, 26 bp, Homo sapiens
tggagcttctcaataaacacaggggg

SEQ ID NO: 84784 - DNA, 26 bp, Homo sapiens
ggagcttctcaataaacacagggggt

SEQ ID NO: 84785 - DNA, 26 bp, Homo sapiens
gagcttctcaataaacacagggggtt

SEQ ID NO: 84786 - DNA, 26 bp, Homo sapiens
agcttctcaataaacacagggggttt

SEQ ID NO: 84787 - DNA, 26 bp, Homo sapiens
gcttctcaataaacacagggggtttg

SEQ ID NO: 84788 - DNA, 26 bp, Homo sapiens
cttctcaataaacacagggggtttgt

SEQ ID NO: 84789 - DNA, 26 bp, Homo sapiens
ttctcaataaacacagggggtttgtg

SEQ ID NO: 84790 - DNA, 26 bp, Homo sapiens
tctcaataaacacagggggtttgtgt

SEQ ID NO: 84791 - DNA, 26 bp, Homo sapiens
ctcaataaacacagggggtttgtgtg

SEQ ID NO: 84792 - DNA, 26 bp, Homo sapiens
tcaataaacacagggggtttgtgtgc

SEQ ID NO: 84793 - DNA, 26 bp, Homo sapiens
caataaacacagggggtttgtgtgct

SEQ ID NO: 84794 - DNA, 26 bp, Homo sapiens
aataaacacagggggtttgtgtgctt

SEQ ID NO: 84795 - DNA, 26 bp, Homo sapiens
ataaacacagggggtttgtgtgcttc

SEQ ID NO: 84796 - DNA, 26 bp, Homo sapiens
taaacacagggggtttgtgtgcttct

SEQ ID NO: 84797 - DNA, 26 bp, Homo sapiens
aaacacagggggtttgtgtgcttctt

SEQ ID NO: 84798 - DNA, 26 bp, Homo sapiens
aacacagggggtttgtgtgcttcttt

SEQ ID NO: 84799 - DNA, 26 bp, Homo sapiens
acacagggggtttgtgtgcttcttta

SEQ ID NO: 84800 - DNA, 26 bp, Homo sapiens
cacagggggtttgtgtgcttctttag

SEQ ID NO: 84801 - DNA, 26 bp, Homo sapiens
acagggggtttgtgtgcttctttagc

SEQ ID NO: 84802 - DNA, 26 bp, Homo sapiens
cagggggtttgtgtgcttctttagca

SEQ ID NO: 84803 - DNA, 26 bp, Homo sapiens
agggggtttgtgtgcttctttagcag

SEQ ID NO: 84804 - DNA, 26 bp, Homo sapiens
gggggtttgtgtgcttctttagcagc

SEQ ID NO: 84805 - DNA, 26 bp, Homo sapiens
ggggtttgtgtgcttctttagcagca

SEQ ID NO: 84806 - DNA, 26 bp, Homo sapiens
gggtttgtgtgcttctttagcagcaa

SEQ ID NO: 84807 - DNA, 26 bp, Homo sapiens
ggtttgtgtgcttctttagcagcaac

SEQ ID NO: 84808 - DNA, 26 bp, Homo sapiens
gtttgtgtgcttctttagcagcaacc

SEQ ID NO: 84809 - DNA, 26 bp, Homo sapiens
tttgtgtgcttctttagcagcaacca

SEQ ID NO: 84810 - DNA, 26 bp, Homo sapiens
ttgtgtgcttctttagcagcaaccac

SEQ ID NO: 84811 - DNA, 26 bp, Homo sapiens
tgtgtgcttctttagcagcaaccaca

SEQ ID NO: 84812 - DNA, 26 bp, Homo sapiens
gtgtgcttctttagcagcaaccacaa

SEQ ID NO: 84813 - DNA, 26 bp, Homo sapiens
tgtgcttctttagcagcaaccacaag

SEQ ID NO: 84814 - DNA, 26 bp, Homo sapiens
gtgcttctttagcagcaaccacaagc

SEQ ID NO: 84815 - DNA, 26 bp, Homo sapiens
tgcttctttagcagcaaccacaagct

SEQ ID NO: 84816 - DNA, 26 bp, Homo sapiens
gcttctttagcagcaaccacaagctc

SEQ ID NO: 84817 - DNA, 26 bp, Homo sapiens
cttctttagcagcaaccacaagctcc

SEQ ID NO: 84818 - DNA, 26 bp, Homo sapiens
ttctttagcagcaaccacaagctcca

SEQ ID NO: 84819 - DNA, 26 bp, Homo sapiens
tctttagcagcaaccacaagctccag

SEQ ID NO: 84820 - DNA, 26 bp, Homo sapiens
ctttagcagcaaccacaagctccagg

SEQ ID NO: 84821 - DNA, 26 bp, Homo sapiens
tttagcagcaaccacaagctccaggc

SEQ ID NO: 84822 - DNA, 26 bp, Homo sapiens
ttagcagcaaccacaagctccaggct

SEQ ID NO: 84823 - DNA, 26 bp, Homo sapiens
tagcagcaaccacaagctccaggctg

SEQ ID NO: 84824 - DNA, 26 bp, Homo sapiens
agcagcaaccacaagctccaggctga

SEQ ID NO: 84825 - DNA, 26 bp, Homo sapiens
gcagcaaccacaagctccaggctgaa

SEQ ID NO: 84826 - DNA, 26 bp, Homo sapiens
cagcaaccacaagctccaggctgaat

SEQ ID NO: 84827 - DNA, 26 bp, Homo sapiens
agcaaccacaagctccaggctgaatg

SEQ ID NO: 84828 - DNA, 26 bp, Homo sapiens
gcaaccacaagctccaggctgaatga

SEQ ID NO: 84829 - DNA, 26 bp, Homo sapiens
caaccacaagctccaggctgaatgag

SEQ ID NO: 84830 - DNA, 26 bp, Homo sapiens
aaccacaagctccaggctgaatgagt

SEQ ID NO: 84831 - DNA, 26 bp, Homo sapiens
accacaagctccaggctgaatgagtt

SEQ ID NO: 84832 - DNA, 26 bp, Homo sapiens
ccacaagctccaggctgaatgagttc

SEQ ID NO: 84833 - DNA, 26 bp, Homo sapiens
cacaagctccaggctgaatgagttct

SEQ ID NO: 84834 - DNA, 26 bp, Homo sapiens
acaagctccaggctgaatgagttctg

SEQ ID NO: 84835 - DNA, 26 bp, Homo sapiens
caagctccaggctgaatgagttctgt

SEQ ID NO: 84836 - DNA, 26 bp, Homo sapiens
aagctccaggctgaatgagttctgtc

SEQ ID NO: 84837 - DNA, 26 bp, Homo sapiens
agctccaggctgaatgagttctgtcc

SEQ ID NO: 84838 - DNA, 26 bp, Homo sapiens
gctccaggctgaatgagttctgtcct

SEQ ID NO: 84839 - DNA, 26 bp, Homo sapiens
ctccaggctgaatgagttctgtcctg

SEQ ID NO: 84840 - DNA, 26 bp, Homo sapiens
tccaggctgaatgagttctgtcctgc

SEQ ID NO: 84841 - DNA, 26 bp, Homo sapiens
ccaggctgaatgagttctgtcctgct

SEQ ID NO: 84842 - DNA, 26 bp, Homo sapiens
caggctgaatgagttctgtcctgctc

SEQ ID NO: 84843 - DNA, 26 bp, Homo sapiens
aggctgaatgagttctgtcctgctcg

SEQ ID NO: 84844 - DNA, 26 bp, Homo sapiens
ggctgaatgagttctgtcctgctcgg

SEQ ID NO: 84845 - DNA, 26 bp, Homo sapiens
gctgaatgagttctgtcctgctcggt

SEQ ID NO: 84846 - DNA, 26 bp, Homo sapiens
ctgaatgagttctgtcctgctcggtt

SEQ ID NO: 84847 - DNA, 26 bp, Homo sapiens
tgaatgagttctgtcctgctcggttg

SEQ ID NO: 84848 - DNA, 26 bp, Homo sapiens
gaatgagttctgtcctgctcggttgg

SEQ ID NO: 84849 - DNA, 26 bp, Homo sapiens
aatgagttctgtcctgctcggttggt

SEQ ID NO: 84850 - DNA, 26 bp, Homo sapiens
atgagttctgtcctgctcggttggta

SEQ ID NO: 84851 - DNA, 26 bp, Homo sapiens
tgagttctgtcctgctcggttggtag

SEQ ID NO: 84852 - DNA, 26 bp, Homo sapiens
gagttctgtcctgctcggttggtagc

SEQ ID NO: 84853 - DNA, 26 bp, Homo sapiens
agttctgtcctgctcggttggtagct

SEQ ID NO: 84854 - DNA, 26 bp, Homo sapiens
gttctgtcctgctcggttggtagcta

SEQ ID NO: 84855 - DNA, 26 bp, Homo sapiens
ttctgtcctgctcggttggtagctat

SEQ ID NO: 84856 - DNA, 26 bp, Homo sapiens
tctgtcctgctcggttggtagctata

SEQ ID NO: 84857 - DNA, 26 bp, Homo sapiens
ctgtcctgctcggttggtagctatac

SEQ ID NO: 84858 - DNA, 26 bp, Homo sapiens
tgtcctgctcggttggtagctataca

SEQ ID NO: 84859 - DNA, 26 bp, Homo sapiens
gtcctgctcggttggtagctatacat

SEQ ID NO: 84860 - DNA, 26 bp, Homo sapiens
tcctgctcggttggtagctatacatg

SEQ ID NO: 84861 - DNA, 26 bp, Homo sapiens
cctgctcggttggtagctatacatgt

SEQ ID NO: 84862 - DNA, 26 bp, Homo sapiens
ctgctcggttggtagctatacatgtg

SEQ ID NO: 84863 - DNA, 26 bp, Homo sapiens
tgctcggttggtagctatacatgtgt

SEQ ID NO: 84864 - DNA, 26 bp, Homo sapiens
gctcggttggtagctatacatgtgta

SEQ ID NO: 84865 - DNA, 26 bp, Homo sapiens
ctcggttggtagctatacatgtgtag

SEQ ID NO: 84866 - DNA, 26 bp, Homo sapiens
tcggttggtagctatacatgtgtaga

SEQ ID NO: 84867 - DNA, 26 bp, Homo sapiens
cggttggtagctatacatgtgtagat

SEQ ID NO: 84868 - DNA, 26 bp, Homo sapiens
ggttggtagctatacatgtgtagatg

SEQ ID NO: 84869 - DNA, 26 bp, Homo sapiens
gttggtagctatacatgtgtagatgc

SEQ ID NO: 84870 - DNA, 26 bp, Homo sapiens
ttggtagctatacatgtgtagatgcc

SEQ ID NO: 84871 - DNA, 26 bp, Homo sapiens
tggtagctatacatgtgtagatgccg

SEQ ID NO: 84872 - DNA, 26 bp, Homo sapiens
ggtagctatacatgtgtagatgccgg

SEQ ID NO: 84873 - DNA, 26 bp, Homo sapiens
gtagctatacatgtgtagatgccggc

SEQ ID NO: 84874 - DNA, 26 bp, Homo sapiens
tagctatacatgtgtagatgccggca

SEQ ID NO: 84875 - DNA, 26 bp, Homo sapiens
agctatacatgtgtagatgccggcat

SEQ ID NO: 84876 - DNA, 26 bp, Homo sapiens
gctatacatgtgtagatgccggcatc

SEQ ID NO: 84877 - DNA, 26 bp, Homo sapiens
ctatacatgtgtagatgccggcatca

SEQ ID NO: 84878 - DNA, 26 bp, Homo sapiens
tatacatgtgtagatgccggcatcac

SEQ ID NO: 84879 - DNA, 26 bp, Homo sapiens
atacatgtgtagatgccggcatcacg

SEQ ID NO: 84880 - DNA, 26 bp, Homo sapiens
tacatgtgtagatgccggcatcacgt

SEQ ID NO: 84881 - DNA, 26 bp, Homo sapiens
acatgtgtagatgccggcatcacgtg

SEQ ID NO: 84882 - DNA, 26 bp, Homo sapiens
catgtgtagatgccggcatcacgtga

SEQ ID NO: 84883 - DNA, 26 bp, Homo sapiens
atgtgtagatgccggcatcacgtgac

SEQ ID NO: 84884 - DNA, 26 bp, Homo sapiens
tgtgtagatgccggcatcacgtgacg

SEQ ID NO: 84885 - DNA, 26 bp, Homo sapiens
gtgtagatgccggcatcacgtgacgt

SEQ ID NO: 84886 - DNA, 26 bp, Homo sapiens
tgtagatgccggcatcacgtgacgtg

SEQ ID NO: 84887 - DNA, 26 bp, Homo sapiens
gtagatgccggcatcacgtgacgtga

SEQ ID NO: 84888 - DNA, 26 bp, Homo sapiens
tagatgccggcatcacgtgacgtgac

SEQ ID NO: 84889 - DNA, 26 bp, Homo sapiens
agatgccggcatcacgtgacgtgact

SEQ ID NO: 84890 - DNA, 26 bp, Homo sapiens
gatgccggcatcacgtgacgtgactg

SEQ ID NO: 84891 - DNA, 26 bp, Homo sapiens
atgccggcatcacgtgacgtgactgg

SEQ ID NO: 84892 - DNA, 26 bp, Homo sapiens
tgccggcatcacgtgacgtgactggc

SEQ ID NO: 84893 - DNA, 26 bp, Homo sapiens
gccggcatcacgtgacgtgactggct

SEQ ID NO: 84894 - DNA, 26 bp, Homo sapiens
ccggcatcacgtgacgtgactggctc

SEQ ID NO: 84895 - DNA, 26 bp, Homo sapiens
cggcatcacgtgacgtgactggctct

SEQ ID NO: 84896 - DNA, 26 bp, Homo sapiens
ggcatcacgtgacgtgactggctcta

SEQ ID NO: 84897 - DNA, 26 bp, Homo sapiens
gcatcacgtgacgtgactggctctat

SEQ ID NO: 84898 - DNA, 26 bp, Homo sapiens
catcacgtgacgtgactggctctatg

SEQ ID NO: 84899 - DNA, 26 bp, Homo sapiens
atcacgtgacgtgactggctctatga

SEQ ID NO: 84900 - DNA, 26 bp, Homo sapiens
tcacgtgacgtgactggctctatgat

SEQ ID NO: 84901 - DNA, 26 bp, Homo sapiens
cacgtgacgtgactggctctatgatc

SEQ ID NO: 84902 - DNA, 26 bp, Homo sapiens
acgtgacgtgactggctctatgatca

SEQ ID NO: 84903 - DNA, 26 bp, Homo sapiens
cgtgacgtgactggctctatgatcag

SEQ ID NO: 84904 - DNA, 26 bp, Homo sapiens
gtgacgtgactggctctatgatcaga

SEQ ID NO: 84905 - DNA, 26 bp, Homo sapiens
tgacgtgactggctctatgatcagag

SEQ ID NO: 84906 - DNA, 26 bp, Homo sapiens
gacgtgactggctctatgatcagaga

SEQ ID NO: 84907 - DNA, 26 bp, Homo sapiens
acgtgactggctctatgatcagagag

SEQ ID NO: 84908 - DNA, 26 bp, Homo sapiens
cgtgactggctctatgatcagagagt

SEQ ID NO: 84909 - DNA, 26 bp, Homo sapiens
gtgactggctctatgatcagagagtg

SEQ ID NO: 84910 - DNA, 26 bp, Homo sapiens
tgactggctctatgatcagagagtgc

SEQ ID NO: 84911 - DNA, 26 bp, Homo sapiens
gactggctctatgatcagagagtgca

SEQ ID NO: 84912 - DNA, 26 bp, Homo sapiens
actggctctatgatcagagagtgcac

SEQ ID NO: 84913 - DNA, 26 bp, Homo sapiens
ctggctctatgatcagagagtgcacc

SEQ ID NO: 84914 - DNA, 26 bp, Homo sapiens
tggctctatgatcagagagtgcaccc

SEQ ID NO: 84915 - DNA, 26 bp, Homo sapiens
ggctctatgatcagagagtgcacccc

SEQ ID NO: 84916 - DNA, 26 bp, Homo sapiens
gctctatgatcagagagtgcaccccg

SEQ ID NO: 84917 - DNA, 26 bp, Homo sapiens
ctctatgatcagagagtgcaccccgt

SEQ ID NO: 84918 - DNA, 26 bp, Homo sapiens
tctatgatcagagagtgcaccccgtt

SEQ ID NO: 84919 - DNA, 26 bp, Homo sapiens
ctatgatcagagagtgcaccccgttc

SEQ ID NO: 84920 - DNA, 26 bp, Homo sapiens
tatgatcagagagtgcaccccgttct

SEQ ID NO: 84921 - DNA, 26 bp, Homo sapiens
atgatcagagagtgcaccccgttctc

SEQ ID NO: 84922 - DNA, 26 bp, Homo sapiens
tgatcagagagtgcaccccgttctca

SEQ ID NO: 84923 - DNA, 26 bp, Homo sapiens
gatcagagagtgcaccccgttctcac

SEQ ID NO: 84924 - DNA, 26 bp, Homo sapiens
atcagagagtgcaccccgttctcacg

SEQ ID NO: 84925 - DNA, 26 bp, Homo sapiens
tcagagagtgcaccccgttctcacgc

SEQ ID NO: 84926 - DNA, 26 bp, Homo sapiens
cagagagtgcaccccgttctcacgca

SEQ ID NO: 84927 - DNA, 26 bp, Homo sapiens
agagagtgcaccccgttctcacgcac

SEQ ID NO: 84928 - DNA, 26 bp, Homo sapiens
gagagtgcaccccgttctcacgcacc

SEQ ID NO: 84929 - DNA, 26 bp, Homo sapiens
agagtgcaccccgttctcacgcacca

SEQ ID NO: 84930 - DNA, 26 bp, Homo sapiens
gagtgcaccccgttctcacgcaccag

SEQ ID NO: 84931 - DNA, 26 bp, Homo sapiens
agtgcaccccgttctcacgcaccagc

SEQ ID NO: 84932 - DNA, 26 bp, Homo sapiens
gtgcaccccgttctcacgcaccagca

SEQ ID NO: 84933 - DNA, 26 bp, Homo sapiens
tgcaccccgttctcacgcaccagcat

SEQ ID NO: 84934 - DNA, 26 bp, Homo sapiens
gcaccccgttctcacgcaccagcatc

SEQ ID NO: 84935 - DNA, 26 bp, Homo sapiens
caccccgttctcacgcaccagcatct

SEQ ID NO: 84936 - DNA, 26 bp, Homo sapiens
accccgttctcacgcaccagcatctt

SEQ ID NO: 84937 - DNA, 26 bp, Homo sapiens
ccccgttctcacgcaccagcatcttg

SEQ ID NO: 84938 - DNA, 26 bp, Homo sapiens
cccgttctcacgcaccagcatcttgt

SEQ ID NO: 84939 - DNA, 26 bp, Homo sapiens
ccgttctcacgcaccagcatcttgtg

SEQ ID NO: 84940 - DNA, 26 bp, Homo sapiens
cgttctcacgcaccagcatcttgtga

SEQ ID NO: 84941 - DNA, 26 bp, Homo sapiens
gttctcacgcaccagcatcttgtgag

SEQ ID NO: 84942 - DNA, 26 bp, Homo sapiens
ttctcacgcaccagcatcttgtgagc

SEQ ID NO: 84943 - DNA, 26 bp, Homo sapiens
tctcacgcaccagcatcttgtgagca

SEQ ID NO: 84944 - DNA, 26 bp, Homo sapiens
ctcacgcaccagcatcttgtgagcac

SEQ ID NO: 84945 - DNA, 26 bp, Homo sapiens
tcacgcaccagcatcttgtgagcact

SEQ ID NO: 84946 - DNA, 26 bp, Homo sapiens
cacgcaccagcatcttgtgagcactg

SEQ ID NO: 84947 - DNA, 26 bp, Homo sapiens
acgcaccagcatcttgtgagcactgt

SEQ ID NO: 84948 - DNA, 26 bp, Homo sapiens
cgcaccagcatcttgtgagcactgtc

SEQ ID NO: 84949 - DNA, 26 bp, Homo sapiens
gcaccagcatcttgtgagcactgtca

SEQ ID NO: 84950 - DNA, 26 bp, Homo sapiens
caccagcatcttgtgagcactgtcag

SEQ ID NO: 84951 - DNA, 26 bp, Homo sapiens
accagcatcttgtgagcactgtcagg

SEQ ID NO: 84952 - DNA, 26 bp, Homo sapiens
ccagcatcttgtgagcactgtcaggg

SEQ ID NO: 84953 - DNA, 26 bp, Homo sapiens
cagcatcttgtgagcactgtcagggc

SEQ ID NO: 84954 - DNA, 26 bp, Homo sapiens
agcatcttgtgagcactgtcagggcg

SEQ ID NO: 84955 - DNA, 26 bp, Homo sapiens
gcatcttgtgagcactgtcagggcgt

SEQ ID NO: 84956 - DNA, 26 bp, Homo sapiens
catcttgtgagcactgtcagggcgta

SEQ ID NO: 84957 - DNA, 26 bp, Homo sapiens
atcttgtgagcactgtcagggcgtac

SEQ ID NO: 84958 - DNA, 26 bp, Homo sapiens
tcttgtgagcactgtcagggcgtacg

SEQ ID NO: 84959 - DNA, 26 bp, Homo sapiens
cttgtgagcactgtcagggcgtacgg

SEQ ID NO: 84960 - DNA, 26 bp, Homo sapiens
ttgtgagcactgtcagggcgtacggg

SEQ ID NO: 84961 - DNA, 26 bp, Homo sapiens
tgtgagcactgtcagggcgtacgggc

SEQ ID NO: 84962 - DNA, 26 bp, Homo sapiens
gtgagcactgtcagggcgtacgggct

SEQ ID NO: 84963 - DNA, 26 bp, Homo sapiens
tgagcactgtcagggcgtacgggctt

SEQ ID NO: 84964 - DNA, 26 bp, Homo sapiens
gagcactgtcagggcgtacgggcttt

SEQ ID NO: 84965 - DNA, 26 bp, Homo sapiens
agcactgtcagggcgtacgggctttc

SEQ ID NO: 84966 - DNA, 26 bp, Homo sapiens
gcactgtcagggcgtacgggctttcc

SEQ ID NO: 84967 - DNA, 26 bp, Homo sapiens
cactgtcagggcgtacgggctttcca

SEQ ID NO: 84968 - DNA, 26 bp, Homo sapiens
actgtcagggcgtacgggctttccat

SEQ ID NO: 84969 - DNA, 26 bp, Homo sapiens
ctgtcagggcgtacgggctttccatc

SEQ ID NO: 84970 - DNA, 26 bp, Homo sapiens
tgtcagggcgtacgggctttccatct

SEQ ID NO: 84971 - DNA, 26 bp, Homo sapiens
gtcagggcgtacgggctttccatcta

SEQ ID NO: 84972 - DNA, 26 bp, Homo sapiens
tcagggcgtacgggctttccatctag

SEQ ID NO: 84973 - DNA, 26 bp, Homo sapiens
cagggcgtacgggctttccatctagt

SEQ ID NO: 84974 - DNA, 26 bp, Homo sapiens
agggcgtacgggctttccatctagtt

SEQ ID NO: 84975 - DNA, 26 bp, Homo sapiens
gggcgtacgggctttccatctagttg

SEQ ID NO: 84976 - DNA, 26 bp, Homo sapiens
ggcgtacgggctttccatctagttgc

SEQ ID NO: 84977 - DNA, 26 bp, Homo sapiens
gcgtacgggctttccatctagttgcc

SEQ ID NO: 84978 - DNA, 26 bp, Homo sapiens
cgtacgggctttccatctagttgcca

SEQ ID NO: 84979 - DNA, 26 bp, Homo sapiens
gtacgggctttccatctagttgccag

SEQ ID NO: 84980 - DNA, 26 bp, Homo sapiens
tacgggctttccatctagttgccagc

SEQ ID NO: 84981 - DNA, 26 bp, Homo sapiens
acgggctttccatctagttgccagct

SEQ ID NO: 84982 - DNA, 26 bp, Homo sapiens
cgggctttccatctagttgccagctt

SEQ ID NO: 84983 - DNA, 26 bp, Homo sapiens
gggctttccatctagttgccagctta

SEQ ID NO: 84984 - DNA, 26 bp, Homo sapiens
ggctttccatctagttgccagcttag

SEQ ID NO: 84985 - DNA, 26 bp, Homo sapiens
gctttccatctagttgccagcttaga

SEQ ID NO: 84986 - DNA, 26 bp, Homo sapiens
ctttccatctagttgccagcttagat

SEQ ID NO: 84987 - DNA, 26 bp, Homo sapiens
tttccatctagttgccagcttagatc

SEQ ID NO: 84988 - DNA, 26 bp, Homo sapiens
ttccatctagttgccagcttagatct

SEQ ID NO: 84989 - DNA, 26 bp, Homo sapiens
tccatctagttgccagcttagatctg

SEQ ID NO: 84990 - DNA, 26 bp, Homo sapiens
ccatctagttgccagcttagatctgg

SEQ ID NO: 84991 - DNA, 26 bp, Homo sapiens
catctagttgccagcttagatctggg

SEQ ID NO: 84992 - DNA, 26 bp, Homo sapiens
atctagttgccagcttagatctgggg

SEQ ID NO: 84993 - DNA, 26 bp, Homo sapiens
tctagttgccagcttagatctggggt

SEQ ID NO: 84994 - DNA, 26 bp, Homo sapiens
ctagttgccagcttagatctggggtt

SEQ ID NO: 84995 - DNA, 26 bp, Homo sapiens
tagttgccagcttagatctggggttg

SEQ ID NO: 84996 - DNA, 26 bp, Homo sapiens
agttgccagcttagatctggggttgg

SEQ ID NO: 84997 - DNA, 26 bp, Homo sapiens
gttgccagcttagatctggggttggt

SEQ ID NO: 84998 - DNA, 26 bp, Homo sapiens
ttgccagcttagatctggggttggta

SEQ ID NO: 84999 - DNA, 26 bp, Homo sapiens
tgccagcttagatctggggttggtaa

SEQ ID NO: 85000 - DNA, 26 bp, Homo sapiens
gccagcttagatctggggttggtaac

SEQ ID NO: 85001 - DNA, 26 bp, Homo sapiens
ccagcttagatctggggttggtaacc

SEQ ID NO: 85002 - DNA, 26 bp, Homo sapiens
cagcttagatctggggttggtaaccc

SEQ ID NO: 85003 - DNA, 26 bp, Homo sapiens
agcttagatctggggttggtaaccca

SEQ ID NO: 85004 - DNA, 26 bp, Homo sapiens
gcttagatctggggttggtaacccac

SEQ ID NO: 85005 - DNA, 26 bp, Homo sapiens
cttagatctggggttggtaacccact

SEQ ID NO: 85006 - DNA, 26 bp, Homo sapiens
ttagatctggggttggtaacccactg

SEQ ID NO: 85007 - DNA, 26 bp, Homo sapiens
tagatctggggttggtaacccactga

SEQ ID NO: 85008 - DNA, 26 bp, Homo sapiens
agatctggggttggtaacccactgac

SEQ ID NO: 85009 - DNA, 26 bp, Homo sapiens
gatctggggttggtaacccactgact

SEQ ID NO: 85010 - DNA, 26 bp, Homo sapiens
atctggggttggtaacccactgactt

SEQ ID NO: 85011 - DNA, 26 bp, Homo sapiens
tctggggttggtaacccactgacttt

SEQ ID NO: 85012 - DNA, 26 bp, Homo sapiens
ctggggttggtaacccactgactttg

SEQ ID NO: 85013 - DNA, 26 bp, Homo sapiens
tggggttggtaacccactgactttgc

SEQ ID NO: 85014 - DNA, 26 bp, Homo sapiens
ggggttggtaacccactgactttgca

SEQ ID NO: 85015 - DNA, 26 bp, Homo sapiens
gggttggtaacccactgactttgcag

SEQ ID NO: 85016 - DNA, 26 bp, Homo sapiens
ggttggtaacccactgactttgcagt

SEQ ID NO: 85017 - DNA, 26 bp, Homo sapiens
gttggtaacccactgactttgcagtc

SEQ ID NO: 85018 - DNA, 26 bp, Homo sapiens
ttggtaacccactgactttgcagtcc

SEQ ID NO: 85019 - DNA, 26 bp, Homo sapiens
tggtaacccactgactttgcagtcca

SEQ ID NO: 85020 - DNA, 26 bp, Homo sapiens
ggtaacccactgactttgcagtccat

SEQ ID NO: 85021 - DNA, 26 bp, Homo sapiens
gtaacccactgactttgcagtccatt

SEQ ID NO: 85022 - DNA, 26 bp, Homo sapiens
taacccactgactttgcagtccattc

SEQ ID NO: 85023 - DNA, 26 bp, Homo sapiens
aacccactgactttgcagtccattct

SEQ ID NO: 85024 - DNA, 26 bp, Homo sapiens
acccactgactttgcagtccattctg

SEQ ID NO: 85025 - DNA, 26 bp, Homo sapiens
cccactgactttgcagtccattctgc

SEQ ID NO: 85026 - DNA, 26 bp, Homo sapiens
ccactgactttgcagtccattctgca

SEQ ID NO: 85027 - DNA, 26 bp, Homo sapiens
cactgactttgcagtccattctgcag

SEQ ID NO: 85028 - DNA, 26 bp, Homo sapiens
actgactttgcagtccattctgcaga

SEQ ID NO: 85029 - DNA, 26 bp, Homo sapiens
ctgactttgcagtccattctgcagag

SEQ ID NO: 85030 - DNA, 26 bp, Homo sapiens
tgactttgcagtccattctgcagagt

SEQ ID NO: 85031 - DNA, 26 bp, Homo sapiens
gactttgcagtccattctgcagagtt

SEQ ID NO: 85032 - DNA, 26 bp, Homo sapiens
actttgcagtccattctgcagagttt

SEQ ID NO: 85033 - DNA, 26 bp, Homo sapiens
ctttgcagtccattctgcagagtttt

SEQ ID NO: 85034 - DNA, 26 bp, Homo sapiens
tttgcagtccattctgcagagttttc

SEQ ID NO: 85035 - DNA, 26 bp, Homo sapiens
ttgcagtccattctgcagagttttcc

SEQ ID NO: 85036 - DNA, 26 bp, Homo sapiens
tgcagtccattctgcagagttttcct

SEQ ID NO: 85037 - DNA, 26 bp, Homo sapiens
gcagtccattctgcagagttttcctt

SEQ ID NO: 85038 - DNA, 26 bp, Homo sapiens
cagtccattctgcagagttttccttc

SEQ ID NO: 85039 - DNA, 26 bp, Homo sapiens
agtccattctgcagagttttccttct

SEQ ID NO: 85040 - DNA, 26 bp, Homo sapiens
gtccattctgcagagttttccttctt

SEQ ID NO: 85041 - DNA, 26 bp, Homo sapiens
tccattctgcagagttttccttcttg

SEQ ID NO: 85042 - DNA, 26 bp, Homo sapiens
ccattctgcagagttttccttcttga

SEQ ID NO: 85043 - DNA, 26 bp, Homo sapiens
cattctgcagagttttccttcttgaa

SEQ ID NO: 85044 - DNA, 26 bp, Homo sapiens
attctgcagagttttccttcttgaac

SEQ ID NO: 85045 - DNA, 26 bp, Homo sapiens
ttctgcagagttttccttcttgaaca

SEQ ID NO: 85046 - DNA, 26 bp, Homo sapiens
tctgcagagttttccttcttgaacag

SEQ ID NO: 85047 - DNA, 26 bp, Homo sapiens
ctgcagagttttccttcttgaacagt

SEQ ID NO: 85048 - DNA, 26 bp, Homo sapiens
tgcagagttttccttcttgaacagtc

SEQ ID NO: 85049 - DNA, 26 bp, Homo sapiens
gcagagttttccttcttgaacagtca

SEQ ID NO: 85050 - DNA, 26 bp, Homo sapiens
cagagttttccttcttgaacagtcag

SEQ ID NO: 85051 - DNA, 26 bp, Homo sapiens
agagttttccttcttgaacagtcaga

SEQ ID NO: 85052 - DNA, 26 bp, Homo sapiens
gagttttccttcttgaacagtcagat

SEQ ID NO: 85053 - DNA, 26 bp, Homo sapiens
agttttccttcttgaacagtcagatc

SEQ ID NO: 85054 - DNA, 26 bp, Homo sapiens
gttttccttcttgaacagtcagatct

SEQ ID NO: 85055 - DNA, 26 bp, Homo sapiens
ttttccttcttgaacagtcagatctc

SEQ ID NO: 85056 - DNA, 26 bp, Homo sapiens
tttccttcttgaacagtcagatctcc

SEQ ID NO: 85057 - DNA, 26 bp, Homo sapiens
ttccttcttgaacagtcagatctcca

SEQ ID NO: 85058 - DNA, 26 bp, Homo sapiens
tccttcttgaacagtcagatctccag

SEQ ID NO: 85059 - DNA, 26 bp, Homo sapiens
ccttcttgaacagtcagatctccagg

SEQ ID NO: 85060 - DNA, 26 bp, Homo sapiens
cttcttgaacagtcagatctccagga

SEQ ID NO: 85061 - DNA, 26 bp, Homo sapiens
ttcttgaacagtcagatctccaggag

SEQ ID NO: 85062 - DNA, 26 bp, Homo sapiens
tcttgaacagtcagatctccaggagc

SEQ ID NO: 85063 - DNA, 26 bp, Homo sapiens
cttgaacagtcagatctccaggagcc

SEQ ID NO: 85064 - DNA, 26 bp, Homo sapiens
ttgaacagtcagatctccaggagcct

SEQ ID NO: 85065 - DNA, 26 bp, Homo sapiens
tgaacagtcagatctccaggagcctg

SEQ ID NO: 85066 - DNA, 26 bp, Homo sapiens
gaacagtcagatctccaggagcctgc

SEQ ID NO: 85067 - DNA, 26 bp, Homo sapiens
aacagtcagatctccaggagcctgca

SEQ ID NO: 85068 - DNA, 26 bp, Homo sapiens
acagtcagatctccaggagcctgcaa

SEQ ID NO: 85069 - DNA, 26 bp, Homo sapiens
cagtcagatctccaggagcctgcaag

SEQ ID NO: 85070 - DNA, 26 bp, Homo sapiens
agtcagatctccaggagcctgcaaga

SEQ ID NO: 85071 - DNA, 26 bp, Homo sapiens
gtcagatctccaggagcctgcaagaa

SEQ ID NO: 85072 - DNA, 26 bp, Homo sapiens
tcagatctccaggagcctgcaagaag

SEQ ID NO: 85073 - DNA, 26 bp, Homo sapiens
cagatctccaggagcctgcaagaagt

SEQ ID NO: 85074 - DNA, 26 bp, Homo sapiens
agatctccaggagcctgcaagaagtg

SEQ ID NO: 85075 - DNA, 26 bp, Homo sapiens
gatctccaggagcctgcaagaagtga

SEQ ID NO: 85076 - DNA, 26 bp, Homo sapiens
atctccaggagcctgcaagaagtgag

SEQ ID NO: 85077 - DNA, 26 bp, Homo sapiens
tctccaggagcctgcaagaagtgagg

SEQ ID NO: 85078 - DNA, 26 bp, Homo sapiens
ctccaggagcctgcaagaagtgaggt

SEQ ID NO: 85079 - DNA, 26 bp, Homo sapiens
tccaggagcctgcaagaagtgaggtc

SEQ ID NO: 85080 - DNA, 26 bp, Homo sapiens
ccaggagcctgcaagaagtgaggtct

SEQ ID NO: 85081 - DNA, 26 bp, Homo sapiens
caggagcctgcaagaagtgaggtctg

SEQ ID NO: 85082 - DNA, 26 bp, Homo sapiens
aggagcctgcaagaagtgaggtctga

SEQ ID NO: 85083 - DNA, 26 bp, Homo sapiens
ggagcctgcaagaagtgaggtctgaa

SEQ ID NO: 85084 - DNA, 26 bp, Homo sapiens
gagcctgcaagaagtgaggtctgaag

SEQ ID NO: 85085 - DNA, 26 bp, Homo sapiens
agcctgcaagaagtgaggtctgaaga

SEQ ID NO: 85086 - DNA, 26 bp, Homo sapiens
gcctgcaagaagtgaggtctgaagaa

SEQ ID NO: 85087 - DNA, 26 bp, Homo sapiens
cctgcaagaagtgaggtctgaagaat

SEQ ID NO: 85088 - DNA, 26 bp, Homo sapiens
ctgcaagaagtgaggtctgaagaatc

SEQ ID NO: 85089 - DNA, 26 bp, Homo sapiens
tgcaagaagtgaggtctgaagaatcg

SEQ ID NO: 85090 - DNA, 26 bp, Homo sapiens
gcaagaagtgaggtctgaagaatcgc

SEQ ID NO: 85091 - DNA, 26 bp, Homo sapiens
caagaagtgaggtctgaagaatcgct

SEQ ID NO: 85092 - DNA, 26 bp, Homo sapiens
aagaagtgaggtctgaagaatcgctc

SEQ ID NO: 85093 - DNA, 26 bp, Homo sapiens
agaagtgaggtctgaagaatcgctcc

SEQ ID NO: 85094 - DNA, 26 bp, Homo sapiens
gaagtgaggtctgaagaatcgctcct

SEQ ID NO: 85095 - DNA, 26 bp, Homo sapiens
aagtgaggtctgaagaatcgctcctg

SEQ ID NO: 85096 - DNA, 26 bp, Homo sapiens
agtgaggtctgaagaatcgctcctga

SEQ ID NO: 85097 - DNA, 26 bp, Homo sapiens
gtgaggtctgaagaatcgctcctgaa

SEQ ID NO: 85098 - DNA, 26 bp, Homo sapiens
tgaggtctgaagaatcgctcctgaat

SEQ ID NO: 85099 - DNA, 26 bp, Homo sapiens
gaggtctgaagaatcgctcctgaatt

SEQ ID NO: 85100 - DNA, 26 bp, Homo sapiens
aggtctgaagaatcgctcctgaattg

SEQ ID NO: 85101 - DNA, 26 bp, Homo sapiens
ggtctgaagaatcgctcctgaattgg

SEQ ID NO: 85102 - DNA, 26 bp, Homo sapiens
gtctgaagaatcgctcctgaattggt

SEQ ID NO: 85103 - DNA, 26 bp, Homo sapiens
tctgaagaatcgctcctgaattggtt

SEQ ID NO: 85104 - DNA, 26 bp, Homo sapiens
ctgaagaatcgctcctgaattggttc

SEQ ID NO: 85105 - DNA, 26 bp, Homo sapiens
tgaagaatcgctcctgaattggttca

SEQ ID NO: 85106 - DNA, 26 bp, Homo sapiens
gaagaatcgctcctgaattggttcat

SEQ ID NO: 85107 - DNA, 26 bp, Homo sapiens
aagaatcgctcctgaattggttcatt

SEQ ID NO: 85108 - DNA, 26 bp, Homo sapiens
agaatcgctcctgaattggttcattt

SEQ ID NO: 85109 - DNA, 26 bp, Homo sapiens
gaatcgctcctgaattggttcatttt

SEQ ID NO: 85110 - DNA, 26 bp, Homo sapiens
aatcgctcctgaattggttcattttc

SEQ ID NO: 85111 - DNA, 26 bp, Homo sapiens
atcgctcctgaattggttcattttcg

SEQ ID NO: 85112 - DNA, 26 bp, Homo sapiens
tcgctcctgaattggttcattttcgt

SEQ ID NO: 85113 - DNA, 26 bp, Homo sapiens
cgctcctgaattggttcattttcgtc

SEQ ID NO: 85114 - DNA, 26 bp, Homo sapiens
gctcctgaattggttcattttcgtct

SEQ ID NO: 85115 - DNA, 26 bp, Homo sapiens
ctcctgaattggttcattttcgtctc

SEQ ID NO: 85116 - DNA, 26 bp, Homo sapiens
tcctgaattggttcattttcgtctcc

SEQ ID NO: 85117 - DNA, 26 bp, Homo sapiens
cctgaattggttcattttcgtctcca

SEQ ID NO: 85118 - DNA, 26 bp, Homo sapiens
ctgaattggttcattttcgtctccac

SEQ ID NO: 85119 - DNA, 26 bp, Homo sapiens
tgaattggttcattttcgtctccact

SEQ ID NO: 85120 - DNA, 26 bp, Homo sapiens
gaattggttcattttcgtctccactg

SEQ ID NO: 85121 - DNA, 26 bp, Homo sapiens
aattggttcattttcgtctccactgt

SEQ ID NO: 85122 - DNA, 26 bp, Homo sapiens
attggttcattttcgtctccactgtc

SEQ ID NO: 85123 - DNA, 26 bp, Homo sapiens
ttggttcattttcgtctccactgtcc

SEQ ID NO: 85124 - DNA, 26 bp, Homo sapiens
tggttcattttcgtctccactgtccc

SEQ ID NO: 85125 - DNA, 26 bp, Homo sapiens
ggttcattttcgtctccactgtccct

SEQ ID NO: 85126 - DNA, 26 bp, Homo sapiens
gttcattttcgtctccactgtccctt

SEQ ID NO: 85127 - DNA, 26 bp, Homo sapiens
ttcattttcgtctccactgtcccttg

SEQ ID NO: 85128 - DNA, 26 bp, Homo sapiens
tcattttcgtctccactgtcccttga

SEQ ID NO: 85129 - DNA, 26 bp, Homo sapiens
cattttcgtctccactgtcccttgat

SEQ ID NO: 85130 - DNA, 26 bp, Homo sapiens
attttcgtctccactgtcccttgatc

SEQ ID NO: 85131 - DNA, 26 bp, Homo sapiens
ttttcgtctccactgtcccttgatct

SEQ ID NO: 85132 - DNA, 26 bp, Homo sapiens
tttcgtctccactgtcccttgatcta

SEQ ID NO: 85133 - DNA, 26 bp, Homo sapiens
ttcgtctccactgtcccttgatctag

SEQ ID NO: 85134 - DNA, 26 bp, Homo sapiens
tcgtctccactgtcccttgatctaga

SEQ ID NO: 85135 - DNA, 26 bp, Homo sapiens
cgtctccactgtcccttgatctagaa

SEQ ID NO: 85136 - DNA, 26 bp, Homo sapiens
gtctccactgtcccttgatctagaac

SEQ ID NO: 85137 - DNA, 26 bp, Homo sapiens
tctccactgtcccttgatctagaacg

SEQ ID NO: 85138 - DNA, 26 bp, Homo sapiens
ctccactgtcccttgatctagaacga

SEQ ID NO: 85139 - DNA, 26 bp, Homo sapiens
tccactgtcccttgatctagaacgag

SEQ ID NO: 85140 - DNA, 26 bp, Homo sapiens
ccactgtcccttgatctagaacgagg

SEQ ID NO: 85141 - DNA, 26 bp, Homo sapiens
cactgtcccttgatctagaacgaggc

SEQ ID NO: 85142 - DNA, 26 bp, Homo sapiens
actgtcccttgatctagaacgaggcc

SEQ ID NO: 85143 - DNA, 26 bp, Homo sapiens
ctgtcccttgatctagaacgaggcct

SEQ ID NO: 85144 - DNA, 26 bp, Homo sapiens
tgtcccttgatctagaacgaggcctt

SEQ ID NO: 85145 - DNA, 26 bp, Homo sapiens
gtcccttgatctagaacgaggccttc

SEQ ID NO: 85146 - DNA, 26 bp, Homo sapiens
tcccttgatctagaacgaggccttct

SEQ ID NO: 85147 - DNA, 26 bp, Homo sapiens
cccttgatctagaacgaggccttctg

SEQ ID NO: 85148 - DNA, 26 bp, Homo sapiens
ccttgatctagaacgaggccttctga

SEQ ID NO: 85149 - DNA, 26 bp, Homo sapiens
cttgatctagaacgaggccttctgac

SEQ ID NO: 85150 - DNA, 26 bp, Homo sapiens
ttgatctagaacgaggccttctgaca

SEQ ID NO: 85151 - DNA, 26 bp, Homo sapiens
tgatctagaacgaggccttctgacat

SEQ ID NO: 85152 - DNA, 26 bp, Homo sapiens
gatctagaacgaggccttctgacatg

SEQ ID NO: 85153 - DNA, 26 bp, Homo sapiens
atctagaacgaggccttctgacatga

SEQ ID NO: 85154 - DNA, 26 bp, Homo sapiens
tctagaacgaggccttctgacatgag

SEQ ID NO: 85155 - DNA, 26 bp, Homo sapiens
ctagaacgaggccttctgacatgagg

SEQ ID NO: 85156 - DNA, 26 bp, Homo sapiens
tagaacgaggccttctgacatgagga

SEQ ID NO: 85157 - DNA, 26 bp, Homo sapiens
agaacgaggccttctgacatgaggat

SEQ ID NO: 85158 - DNA, 26 bp, Homo sapiens
gaacgaggccttctgacatgaggatg

SEQ ID NO: 85159 - DNA, 26 bp, Homo sapiens
aacgaggccttctgacatgaggatgg

SEQ ID NO: 85160 - DNA, 26 bp, Homo sapiens
acgaggccttctgacatgaggatggc

SEQ ID NO: 85161 - DNA, 26 bp, Homo sapiens
cgaggccttctgacatgaggatggcc

SEQ ID NO: 85162 - DNA, 26 bp, Homo sapiens
gaggccttctgacatgaggatggcct

SEQ ID NO: 85163 - DNA, 26 bp, Homo sapiens
aggccttctgacatgaggatggcctg

SEQ ID NO: 85164 - DNA, 26 bp, Homo sapiens
ggccttctgacatgaggatggcctga

SEQ ID NO: 85165 - DNA, 26 bp, Homo sapiens
gccttctgacatgaggatggcctgag

SEQ ID NO: 85166 - DNA, 26 bp, Homo sapiens
ccttctgacatgaggatggcctgagg

SEQ ID NO: 85167 - DNA, 26 bp, Homo sapiens
cttctgacatgaggatggcctgaggg

SEQ ID NO: 85168 - DNA, 26 bp, Homo sapiens
ttctgacatgaggatggcctgaggga

SEQ ID NO: 85169 - DNA, 26 bp, Homo sapiens
tctgacatgaggatggcctgagggag

SEQ ID NO: 85170 - DNA, 26 bp, Homo sapiens
ctgacatgaggatggcctgagggaga

SEQ ID NO: 85171 - DNA, 26 bp, Homo sapiens
tgacatgaggatggcctgagggagac

SEQ ID NO: 85172 - DNA, 26 bp, Homo sapiens
gacatgaggatggcctgagggagacc

SEQ ID NO: 85173 - DNA, 26 bp, Homo sapiens
acatgaggatggcctgagggagaccg

SEQ ID NO: 85174 - DNA, 26 bp, Homo sapiens
catgaggatggcctgagggagaccgg

SEQ ID NO: 85175 - DNA, 26 bp, Homo sapiens
atgaggatggcctgagggagaccggg

SEQ ID NO: 85176 - DNA, 26 bp, Homo sapiens
tgaggatggcctgagggagaccgggg

SEQ ID NO: 85177 - DNA, 26 bp, Homo sapiens
gaggatggcctgagggagaccgggga

SEQ ID NO: 85178 - DNA, 26 bp, Homo sapiens
aggatggcctgagggagaccggggac

SEQ ID NO: 85179 - DNA, 26 bp, Homo sapiens
ggatggcctgagggagaccggggact

SEQ ID NO: 85180 - DNA, 26 bp, Homo sapiens
gatggcctgagggagaccggggactt

SEQ ID NO: 85181 - DNA, 26 bp, Homo sapiens
atggcctgagggagaccggggacttc

SEQ ID NO: 85182 - DNA, 26 bp, Homo sapiens
tggcctgagggagaccggggacttcg

SEQ ID NO: 85183 - DNA, 26 bp, Homo sapiens
ggcctgagggagaccggggacttcga

SEQ ID NO: 85184 - DNA, 26 bp, Homo sapiens
gcctgagggagaccggggacttcgac

SEQ ID NO: 85185 - DNA, 26 bp, Homo sapiens
cctgagggagaccggggacttcgacc

SEQ ID NO: 85186 - DNA, 26 bp, Homo sapiens
ctgagggagaccggggacttcgacct

SEQ ID NO: 85187 - DNA, 26 bp, Homo sapiens
tgagggagaccggggacttcgacctc

SEQ ID NO: 85188 - DNA, 26 bp, Homo sapiens
gagggagaccggggacttcgacctct

SEQ ID NO: 85189 - DNA, 26 bp, Homo sapiens
agggagaccggggacttcgacctctt

SEQ ID NO: 85190 - DNA, 26 bp, Homo sapiens
gggagaccggggacttcgacctcttt

SEQ ID NO: 85191 - DNA, 26 bp, Homo sapiens
ggagaccggggacttcgacctctttg

SEQ ID NO: 85192 - DNA, 26 bp, Homo sapiens
gagaccggggacttcgacctctttgg

SEQ ID NO: 85193 - DNA, 26 bp, Homo sapiens
agaccggggacttcgacctctttggt

SEQ ID NO: 85194 - DNA, 26 bp, Homo sapiens
gaccggggacttcgacctctttggtt

SEQ ID NO: 85195 - DNA, 26 bp, Homo sapiens
accggggacttcgacctctttggttg

SEQ ID NO: 85196 - DNA, 26 bp, Homo sapiens
ccggggacttcgacctctttggttga

SEQ ID NO: 85197 - DNA, 26 bp, Homo sapiens
cggggacttcgacctctttggttgac

SEQ ID NO: 85198 - DNA, 26 bp, Homo sapiens
ggggacttcgacctctttggttgaca

SEQ ID NO: 85199 - DNA, 26 bp, Homo sapiens
gggacttcgacctctttggttgacag

SEQ ID NO: 85200 - DNA, 26 bp, Homo sapiens
ggacttcgacctctttggttgacagc

SEQ ID NO: 85201 - DNA, 26 bp, Homo sapiens
gacttcgacctctttggttgacagcc

SEQ ID NO: 85202 - DNA, 26 bp, Homo sapiens
acttcgacctctttggttgacagcct

SEQ ID NO: 85203 - DNA, 26 bp, Homo sapiens
cttcgacctctttggttgacagcctg

SEQ ID NO: 85204 - DNA, 26 bp, Homo sapiens
ttcgacctctttggttgacagcctgt

SEQ ID NO: 85205 - DNA, 26 bp, Homo sapiens
tcgacctctttggttgacagcctgta

SEQ ID NO: 85206 - DNA, 26 bp, Homo sapiens
cgacctctttggttgacagcctgtac

SEQ ID NO: 85207 - DNA, 26 bp, Homo sapiens
gacctctttggttgacagcctgtacc

SEQ ID NO: 85208 - DNA, 26 bp, Homo sapiens
acctctttggttgacagcctgtacca

SEQ ID NO: 85209 - DNA, 26 bp, Homo sapiens
cctctttggttgacagcctgtaccat

SEQ ID NO: 85210 - DNA, 26 bp, Homo sapiens
ctctttggttgacagcctgtaccatt

SEQ ID NO: 85211 - DNA, 26 bp, Homo sapiens
tctttggttgacagcctgtaccatta

SEQ ID NO: 85212 - DNA, 26 bp, Homo sapiens
ctttggttgacagcctgtaccattag

SEQ ID NO: 85213 - DNA, 26 bp, Homo sapiens
tttggttgacagcctgtaccattagc

SEQ ID NO: 85214 - DNA, 26 bp, Homo sapiens
ttggttgacagcctgtaccattagcc

SEQ ID NO: 85215 - DNA, 26 bp, Homo sapiens
tggttgacagcctgtaccattagccg

SEQ ID NO: 85216 - DNA, 26 bp, Homo sapiens
ggttgacagcctgtaccattagccgt

SEQ ID NO: 85217 - DNA, 26 bp, Homo sapiens
gttgacagcctgtaccattagccgtc

SEQ ID NO: 85218 - DNA, 26 bp, Homo sapiens
ttgacagcctgtaccattagccgtcc

SEQ ID NO: 85219 - DNA, 26 bp, Homo sapiens
tgacagcctgtaccattagccgtcca

SEQ ID NO: 85220 - DNA, 26 bp, Homo sapiens
gacagcctgtaccattagccgtccag

SEQ ID NO: 85221 - DNA, 26 bp, Homo sapiens
acagcctgtaccattagccgtccagt

SEQ ID NO: 85222 - DNA, 26 bp, Homo sapiens
cagcctgtaccattagccgtccagta

SEQ ID NO: 85223 - DNA, 26 bp, Homo sapiens
agcctgtaccattagccgtccagtac

SEQ ID NO: 85224 - DNA, 26 bp, Homo sapiens
gcctgtaccattagccgtccagtaca

SEQ ID NO: 85225 - DNA, 26 bp, Homo sapiens
cctgtaccattagccgtccagtacaa

SEQ ID NO: 85226 - DNA, 26 bp, Homo sapiens
ctgtaccattagccgtccagtacaac

SEQ ID NO: 85227 - DNA, 26 bp, Homo sapiens
tgtaccattagccgtccagtacaact

SEQ ID NO: 85228 - DNA, 26 bp, Homo sapiens
gtaccattagccgtccagtacaactg

SEQ ID NO: 85229 - DNA, 26 bp, Homo sapiens
taccattagccgtccagtacaactga

SEQ ID NO: 85230 - DNA, 26 bp, Homo sapiens
accattagccgtccagtacaactgat

SEQ ID NO: 85231 - DNA, 26 bp, Homo sapiens
ccattagccgtccagtacaactgatg

SEQ ID NO: 85232 - DNA, 26 bp, Homo sapiens
cattagccgtccagtacaactgatgc

SEQ ID NO: 85233 - DNA, 26 bp, Homo sapiens
attagccgtccagtacaactgatgcg

SEQ ID NO: 85234 - DNA, 26 bp, Homo sapiens
ttagccgtccagtacaactgatgcgg

SEQ ID NO: 85235 - DNA, 26 bp, Homo sapiens
tagccgtccagtacaactgatgcggc

SEQ ID NO: 85236 - DNA, 26 bp, Homo sapiens
agccgtccagtacaactgatgcggcc

SEQ ID NO: 85237 - DNA, 26 bp, Homo sapiens
gccgtccagtacaactgatgcggccc

SEQ ID NO: 85238 - DNA, 26 bp, Homo sapiens
ccgtccagtacaactgatgcggccct

SEQ ID NO: 85239 - DNA, 26 bp, Homo sapiens
cgtccagtacaactgatgcggccctg

SEQ ID NO: 85240 - DNA, 26 bp, Homo sapiens
gtccagtacaactgatgcggccctga

SEQ ID NO: 85241 - DNA, 26 bp, Homo sapiens
tccagtacaactgatgcggccctgag

SEQ ID NO: 85242 - DNA, 26 bp, Homo sapiens
ccagtacaactgatgcggccctgagg

SEQ ID NO: 85243 - DNA, 26 bp, Homo sapiens
cagtacaactgatgcggccctgaggg

SEQ ID NO: 85244 - DNA, 26 bp, Homo sapiens
agtacaactgatgcggccctgagggt

SEQ ID NO: 85245 - DNA, 26 bp, Homo sapiens
gtacaactgatgcggccctgagggtt

SEQ ID NO: 85246 - DNA, 26 bp, Homo sapiens
tacaactgatgcggccctgagggttt

SEQ ID NO: 85247 - DNA, 26 bp, Homo sapiens
acaactgatgcggccctgagggtttg

SEQ ID NO: 85248 - DNA, 26 bp, Homo sapiens
caactgatgcggccctgagggtttgc

SEQ ID NO: 85249 - DNA, 26 bp, Homo sapiens
aactgatgcggccctgagggtttgca

SEQ ID NO: 85250 - DNA, 26 bp, Homo sapiens
actgatgcggccctgagggtttgcag

SEQ ID NO: 85251 - DNA, 26 bp, Homo sapiens
ctgatgcggccctgagggtttgcagc

SEQ ID NO: 85252 - DNA, 26 bp, Homo sapiens
tgatgcggccctgagggtttgcagcc

SEQ ID NO: 85253 - DNA, 26 bp, Homo sapiens
gatgcggccctgagggtttgcagcca

SEQ ID NO: 85254 - DNA, 26 bp, Homo sapiens
atgcggccctgagggtttgcagccat

SEQ ID NO: 85255 - DNA, 26 bp, Homo sapiens
tgcggccctgagggtttgcagccata

SEQ ID NO: 85256 - DNA, 26 bp, Homo sapiens
gcggccctgagggtttgcagccataa

SEQ ID NO: 85257 - DNA, 26 bp, Homo sapiens
cggccctgagggtttgcagccataat

SEQ ID NO: 85258 - DNA, 26 bp, Homo sapiens
ggccctgagggtttgcagccataatt

SEQ ID NO: 85259 - DNA, 26 bp, Homo sapiens
gccctgagggtttgcagccataattg

SEQ ID NO: 85260 - DNA, 26 bp, Homo sapiens
ccctgagggtttgcagccataattgt

SEQ ID NO: 85261 - DNA, 26 bp, Homo sapiens
cctgagggtttgcagccataattgta

SEQ ID NO: 85262 - DNA, 26 bp, Homo sapiens
ctgagggtttgcagccataattgtat

SEQ ID NO: 85263 - DNA, 26 bp, Homo sapiens
tgagggtttgcagccataattgtata

SEQ ID NO: 85264 - DNA, 26 bp, Homo sapiens
gagggtttgcagccataattgtataa

SEQ ID NO: 85265 - DNA, 26 bp, Homo sapiens
agggtttgcagccataattgtataat

SEQ ID NO: 85266 - DNA, 26 bp, Homo sapiens
gggtttgcagccataattgtataatt

SEQ ID NO: 85267 - DNA, 26 bp, Homo sapiens
ggtttgcagccataattgtataattc

SEQ ID NO: 85268 - DNA, 26 bp, Homo sapiens
gtttgcagccataattgtataattcc

SEQ ID NO: 85269 - DNA, 26 bp, Homo sapiens
tttgcagccataattgtataattccc

SEQ ID NO: 85270 - DNA, 26 bp, Homo sapiens
ttgcagccataattgtataattccca

SEQ ID NO: 85271 - DNA, 26 bp, Homo sapiens
tgcagccataattgtataattcccat

SEQ ID NO: 85272 - DNA, 26 bp, Homo sapiens
gcagccataattgtataattcccatc

SEQ ID NO: 85273 - DNA, 26 bp, Homo sapiens
cagccataattgtataattcccatca

SEQ ID NO: 85274 - DNA, 26 bp, Homo sapiens
agccataattgtataattcccatcat

SEQ ID NO: 85275 - DNA, 26 bp, Homo sapiens
gccataattgtataattcccatcatc

SEQ ID NO: 85276 - DNA, 26 bp, Homo sapiens
ccataattgtataattcccatcatca

SEQ ID NO: 85277 - DNA, 26 bp, Homo sapiens
cataattgtataattcccatcatcat

SEQ ID NO: 85278 - DNA, 26 bp, Homo sapiens
ataattgtataattcccatcatcatc

SEQ ID NO: 85279 - DNA, 26 bp, Homo sapiens
taattgtataattcccatcatcatct

SEQ ID NO: 85280 - DNA, 26 bp, Homo sapiens
aattgtataattcccatcatcatcta

SEQ ID NO: 85281 - DNA, 26 bp, Homo sapiens
attgtataattcccatcatcatctag

SEQ ID NO: 85282 - DNA, 26 bp, Homo sapiens
ttgtataattcccatcatcatctagg

SEQ ID NO: 85283 - DNA, 26 bp, Homo sapiens
tgtataattcccatcatcatctaggg

SEQ ID NO: 85284 - DNA, 26 bp, Homo sapiens
gtataattcccatcatcatctagggt

SEQ ID NO: 85285 - DNA, 26 bp, Homo sapiens
tataattcccatcatcatctagggtg

SEQ ID NO: 85286 - DNA, 26 bp, Homo sapiens
ataattcccatcatcatctagggtgg

SEQ ID NO: 85287 - DNA, 26 bp, Homo sapiens
taattcccatcatcatctagggtgga

SEQ ID NO: 85288 - DNA, 26 bp, Homo sapiens
aattcccatcatcatctagggtggag

SEQ ID NO: 85289 - DNA, 26 bp, Homo sapiens
attcccatcatcatctagggtggagg

SEQ ID NO: 85290 - DNA, 26 bp, Homo sapiens
ttcccatcatcatctagggtggaggc

SEQ ID NO: 85291 - DNA, 26 bp, Homo sapiens
tcccatcatcatctagggtggaggct

SEQ ID NO: 85292 - DNA, 26 bp, Homo sapiens
cccatcatcatctagggtggaggctg

SEQ ID NO: 85293 - DNA, 26 bp, Homo sapiens
ccatcatcatctagggtggaggctgt

SEQ ID NO: 85294 - DNA, 26 bp, Homo sapiens
catcatcatctagggtggaggctgtg

SEQ ID NO: 85295 - DNA, 26 bp, Homo sapiens
atcatcatctagggtggaggctgtgg

SEQ ID NO: 85296 - DNA, 26 bp, Homo sapiens
tcatcatctagggtggaggctgtggt

SEQ ID NO: 85297 - DNA, 26 bp, Homo sapiens
catcatctagggtggaggctgtggta

SEQ ID NO: 85298 - DNA, 26 bp, Homo sapiens
atcatctagggtggaggctgtggtat

SEQ ID NO: 85299 - DNA, 26 bp, Homo sapiens
tcatctagggtggaggctgtggtatg

SEQ ID NO: 85300 - DNA, 26 bp, Homo sapiens
catctagggtggaggctgtggtatgg

SEQ ID NO: 85301 - DNA, 26 bp, Homo sapiens
atctagggtggaggctgtggtatgga

SEQ ID NO: 85302 - DNA, 26 bp, Homo sapiens
tctagggtggaggctgtggtatggag

SEQ ID NO: 85303 - DNA, 26 bp, Homo sapiens
ctagggtggaggctgtggtatggagg

SEQ ID NO: 85304 - DNA, 26 bp, Homo sapiens
tagggtggaggctgtggtatggaggg

SEQ ID NO: 85305 - DNA, 26 bp, Homo sapiens
agggtggaggctgtggtatggaggga

SEQ ID NO: 85306 - DNA, 26 bp, Homo sapiens
gggtggaggctgtggtatggagggag

SEQ ID NO: 85307 - DNA, 26 bp, Homo sapiens
ggtggaggctgtggtatggagggagc

SEQ ID NO: 85308 - DNA, 26 bp, Homo sapiens
gtggaggctgtggtatggagggagca

SEQ ID NO: 85309 - DNA, 26 bp, Homo sapiens
tggaggctgtggtatggagggagcag

SEQ ID NO: 85310 - DNA, 26 bp, Homo sapiens
ggaggctgtggtatggagggagcagg

SEQ ID NO: 85311 - DNA, 26 bp, Homo sapiens
gaggctgtggtatggagggagcaggt

SEQ ID NO: 85312 - DNA, 26 bp, Homo sapiens
aggctgtggtatggagggagcaggtc

SEQ ID NO: 85313 - DNA, 26 bp, Homo sapiens
ggctgtggtatggagggagcaggtcc

SEQ ID NO: 85314 - DNA, 26 bp, Homo sapiens
gctgtggtatggagggagcaggtccc

SEQ ID NO: 85315 - DNA, 26 bp, Homo sapiens
ctgtggtatggagggagcaggtccca

SEQ ID NO: 85316 - DNA, 26 bp, Homo sapiens
tgtggtatggagggagcaggtcccat

SEQ ID NO: 85317 - DNA, 26 bp, Homo sapiens
gtggtatggagggagcaggtcccatc

SEQ ID NO: 85318 - DNA, 26 bp, Homo sapiens
tggtatggagggagcaggtcccatcg

SEQ ID NO: 85319 - DNA, 26 bp, Homo sapiens
ggtatggagggagcaggtcccatcga

SEQ ID NO: 85320 - DNA, 26 bp, Homo sapiens
gtatggagggagcaggtcccatcgag

SEQ ID NO: 85321 - DNA, 26 bp, Homo sapiens
tatggagggagcaggtcccatcgaga

SEQ ID NO: 85322 - DNA, 26 bp, Homo sapiens
atggagggagcaggtcccatcgagat

SEQ ID NO: 85323 - DNA, 26 bp, Homo sapiens
tggagggagcaggtcccatcgagatc

SEQ ID NO: 85324 - DNA, 26 bp, Homo sapiens
ggagggagcaggtcccatcgagatct

SEQ ID NO: 85325 - DNA, 26 bp, Homo sapiens
gagggagcaggtcccatcgagatctc

SEQ ID NO: 85326 - DNA, 26 bp, Homo sapiens
agggagcaggtcccatcgagatctct

SEQ ID NO: 85327 - DNA, 26 bp, Homo sapiens
gggagcaggtcccatcgagatctctt

SEQ ID NO: 85328 - DNA, 26 bp, Homo sapiens
ggagcaggtcccatcgagatctcttt

SEQ ID NO: 85329 - DNA, 26 bp, Homo sapiens
gagcaggtcccatcgagatctctttg

SEQ ID NO: 85330 - DNA, 26 bp, Homo sapiens
agcaggtcccatcgagatctctttga

SEQ ID NO: 85331 - DNA, 26 bp, Homo sapiens
gcaggtcccatcgagatctctttgaa

SEQ ID NO: 85332 - DNA, 26 bp, Homo sapiens
caggtcccatcgagatctctttgaat

SEQ ID NO: 85333 - DNA, 26 bp, Homo sapiens
aggtcccatcgagatctctttgaatg

SEQ ID NO: 85334 - DNA, 26 bp, Homo sapiens
ggtcccatcgagatctctttgaatgg

SEQ ID NO: 85335 - DNA, 26 bp, Homo sapiens
gtcccatcgagatctctttgaatggt

SEQ ID NO: 85336 - DNA, 26 bp, Homo sapiens
tcccatcgagatctctttgaatggtg

SEQ ID NO: 85337 - DNA, 26 bp, Homo sapiens
cccatcgagatctctttgaatggtgt

SEQ ID NO: 85338 - DNA, 26 bp, Homo sapiens
ccatcgagatctctttgaatggtgta

SEQ ID NO: 85339 - DNA, 26 bp, Homo sapiens
catcgagatctctttgaatggtgtag

SEQ ID NO: 85340 - DNA, 26 bp, Homo sapiens
atcgagatctctttgaatggtgtagt

SEQ ID NO: 85341 - DNA, 26 bp, Homo sapiens
tcgagatctctttgaatggtgtagtg

SEQ ID NO: 85342 - DNA, 26 bp, Homo sapiens
cgagatctctttgaatggtgtagtga

SEQ ID NO: 85343 - DNA, 26 bp, Homo sapiens
gagatctctttgaatggtgtagtgat

SEQ ID NO: 85344 - DNA, 26 bp, Homo sapiens
agatctctttgaatggtgtagtgatc

SEQ ID NO: 85345 - DNA, 26 bp, Homo sapiens
gatctctttgaatggtgtagtgatca

SEQ ID NO: 85346 - DNA, 26 bp, Homo sapiens
atctctttgaatggtgtagtgatcac

SEQ ID NO: 85347 - DNA, 26 bp, Homo sapiens
tctctttgaatggtgtagtgatcact

SEQ ID NO: 85348 - DNA, 26 bp, Homo sapiens
ctctttgaatggtgtagtgatcactc

SEQ ID NO: 85349 - DNA, 26 bp, Homo sapiens
tctttgaatggtgtagtgatcactct

SEQ ID NO: 85350 - DNA, 26 bp, Homo sapiens
ctttgaatggtgtagtgatcactctt

SEQ ID NO: 85351 - DNA, 26 bp, Homo sapiens
tttgaatggtgtagtgatcactcttt

SEQ ID NO: 85352 - DNA, 26 bp, Homo sapiens
ttgaatggtgtagtgatcactctttg

SEQ ID NO: 85353 - DNA, 26 bp, Homo sapiens
tgaatggtgtagtgatcactctttgg

SEQ ID NO: 85354 - DNA, 26 bp, Homo sapiens
gaatggtgtagtgatcactctttgga

SEQ ID NO: 85355 - DNA, 26 bp, Homo sapiens
aatggtgtagtgatcactctttggag

SEQ ID NO: 85356 - DNA, 26 bp, Homo sapiens
atggtgtagtgatcactctttggaga

SEQ ID NO: 85357 - DNA, 26 bp, Homo sapiens
tggtgtagtgatcactctttggagag

SEQ ID NO: 85358 - DNA, 26 bp, Homo sapiens
ggtgtagtgatcactctttggagaga

SEQ ID NO: 85359 - DNA, 26 bp, Homo sapiens
gtgtagtgatcactctttggagagat

SEQ ID NO: 85360 - DNA, 26 bp, Homo sapiens
tgtagtgatcactctttggagagatc

SEQ ID NO: 85361 - DNA, 26 bp, Homo sapiens
gtagtgatcactctttggagagatct

SEQ ID NO: 85362 - DNA, 26 bp, Homo sapiens
tagtgatcactctttggagagatctg

SEQ ID NO: 85363 - DNA, 26 bp, Homo sapiens
agtgatcactctttggagagatctgc

SEQ ID NO: 85364 - DNA, 26 bp, Homo sapiens
gtgatcactctttggagagatctgct

SEQ ID NO: 85365 - DNA, 26 bp, Homo sapiens
tgatcactctttggagagatctgctt

SEQ ID NO: 85366 - DNA, 26 bp, Homo sapiens
gatcactctttggagagatctgcttc

SEQ ID NO: 85367 - DNA, 26 bp, Homo sapiens
atcactctttggagagatctgcttcc

SEQ ID NO: 85368 - DNA, 26 bp, Homo sapiens
tcactctttggagagatctgcttccc

SEQ ID NO: 85369 - DNA, 26 bp, Homo sapiens
cactctttggagagatctgcttccca

SEQ ID NO: 85370 - DNA, 26 bp, Homo sapiens
actctttggagagatctgcttcccat

SEQ ID NO: 85371 - DNA, 26 bp, Homo sapiens
ctctttggagagatctgcttcccatc

SEQ ID NO: 85372 - DNA, 26 bp, Homo sapiens
tctttggagagatctgcttcccatct

SEQ ID NO: 85373 - DNA, 26 bp, Homo sapiens
ctttggagagatctgcttcccatctt

SEQ ID NO: 85374 - DNA, 26 bp, Homo sapiens
tttggagagatctgcttcccatcttt

SEQ ID NO: 85375 - DNA, 26 bp, Homo sapiens
ttggagagatctgcttcccatcttta

SEQ ID NO: 85376 - DNA, 26 bp, Homo sapiens
tggagagatctgcttcccatctttaa

SEQ ID NO: 85377 - DNA, 26 bp, Homo sapiens
ggagagatctgcttcccatctttaaa

SEQ ID NO: 85378 - DNA, 26 bp, Homo sapiens
gagagatctgcttcccatctttaaac

SEQ ID NO: 85379 - DNA, 26 bp, Homo sapiens
agagatctgcttcccatctttaaacc

SEQ ID NO: 85380 - DNA, 26 bp, Homo sapiens
gagatctgcttcccatctttaaacca

SEQ ID NO: 85381 - DNA, 26 bp, Homo sapiens
agatctgcttcccatctttaaaccaa

SEQ ID NO: 85382 - DNA, 26 bp, Homo sapiens
gatctgcttcccatctttaaaccaat

SEQ ID NO: 85383 - DNA, 26 bp, Homo sapiens
atctgcttcccatctttaaaccaata

SEQ ID NO: 85384 - DNA, 26 bp, Homo sapiens
tctgcttcccatctttaaaccaatag

SEQ ID NO: 85385 - DNA, 26 bp, Homo sapiens
ctgcttcccatctttaaaccaataga

SEQ ID NO: 85386 - DNA, 26 bp, Homo sapiens
tgcttcccatctttaaaccaatagat

SEQ ID NO: 85387 - DNA, 26 bp, Homo sapiens
gcttcccatctttaaaccaatagatc

SEQ ID NO: 85388 - DNA, 26 bp, Homo sapiens
cttcccatctttaaaccaatagatct

SEQ ID NO: 85389 - DNA, 26 bp, Homo sapiens
ttcccatctttaaaccaatagatctt

SEQ ID NO: 85390 - DNA, 26 bp, Homo sapiens
tcccatctttaaaccaatagatcttt

SEQ ID NO: 85391 - DNA, 26 bp, Homo sapiens
cccatctttaaaccaatagatctttg

SEQ ID NO: 85392 - DNA, 26 bp, Homo sapiens
ccatctttaaaccaatagatctttgg

SEQ ID NO: 85393 - DNA, 26 bp, Homo sapiens
catctttaaaccaatagatctttggc

SEQ ID NO: 85394 - DNA, 26 bp, Homo sapiens
atctttaaaccaatagatctttggct

SEQ ID NO: 85395 - DNA, 26 bp, Homo sapiens
tctttaaaccaatagatctttggctt

SEQ ID NO: 85396 - DNA, 26 bp, Homo sapiens
ctttaaaccaatagatctttggcttt

SEQ ID NO: 85397 - DNA, 26 bp, Homo sapiens
tttaaaccaatagatctttggctttg

SEQ ID NO: 85398 - DNA, 26 bp, Homo sapiens
ttaaaccaatagatctttggctttgg

SEQ ID NO: 85399 - DNA, 26 bp, Homo sapiens
taaaccaatagatctttggctttgga

SEQ ID NO: 85400 - DNA, 26 bp, Homo sapiens
aaaccaatagatctttggctttggat

SEQ ID NO: 85401 - DNA, 26 bp, Homo sapiens
aaccaatagatctttggctttggatt

SEQ ID NO: 85402 - DNA, 26 bp, Homo sapiens
accaatagatctttggctttggattt

SEQ ID NO: 85403 - DNA, 26 bp, Homo sapiens
ccaatagatctttggctttggatttc

SEQ ID NO: 85404 - DNA, 26 bp, Homo sapiens
caatagatctttggctttggatttcc

SEQ ID NO: 85405 - DNA, 26 bp, Homo sapiens
aatagatctttggctttggatttcca

SEQ ID NO: 85406 - DNA, 26 bp, Homo sapiens
atagatctttggctttggatttccag

SEQ ID NO: 85407 - DNA, 26 bp, Homo sapiens
tagatctttggctttggatttccagc

SEQ ID NO: 85408 - DNA, 26 bp, Homo sapiens
agatctttggctttggatttccagcc

SEQ ID NO: 85409 - DNA, 26 bp, Homo sapiens
gatctttggctttggatttccagcca

SEQ ID NO: 85410 - DNA, 26 bp, Homo sapiens
atctttggctttggatttccagccac

SEQ ID NO: 85411 - DNA, 26 bp, Homo sapiens
tctttggctttggatttccagccact

SEQ ID NO: 85412 - DNA, 26 bp, Homo sapiens
ctttggctttggatttccagccactc

SEQ ID NO: 85413 - DNA, 26 bp, Homo sapiens
tttggctttggatttccagccactct

SEQ ID NO: 85414 - DNA, 26 bp, Homo sapiens
ttggctttggatttccagccactcta

SEQ ID NO: 85415 - DNA, 26 bp, Homo sapiens
tggctttggatttccagccactctac

SEQ ID NO: 85416 - DNA, 26 bp, Homo sapiens
ggctttggatttccagccactctaca

SEQ ID NO: 85417 - DNA, 26 bp, Homo sapiens
gctttggatttccagccactctacat

SEQ ID NO: 85418 - DNA, 26 bp, Homo sapiens
ctttggatttccagccactctacatg

SEQ ID NO: 85419 - DNA, 26 bp, Homo sapiens
tttggatttccagccactctacatgt

SEQ ID NO: 85420 - DNA, 26 bp, Homo sapiens
ttggatttccagccactctacatgtg

SEQ ID NO: 85421 - DNA, 26 bp, Homo sapiens
tggatttccagccactctacatgtga

SEQ ID NO: 85422 - DNA, 26 bp, Homo sapiens
ggatttccagccactctacatgtgaa

SEQ ID NO: 85423 - DNA, 26 bp, Homo sapiens
gatttccagccactctacatgtgaaa

SEQ ID NO: 85424 - DNA, 26 bp, Homo sapiens
atttccagccactctacatgtgaaag

SEQ ID NO: 85425 - DNA, 26 bp, Homo sapiens
tttccagccactctacatgtgaaagt

SEQ ID NO: 85426 - DNA, 26 bp, Homo sapiens
ttccagccactctacatgtgaaagtt

SEQ ID NO: 85427 - DNA, 26 bp, Homo sapiens
tccagccactctacatgtgaaagtta

SEQ ID NO: 85428 - DNA, 26 bp, Homo sapiens
ccagccactctacatgtgaaagttac

SEQ ID NO: 85429 - DNA, 26 bp, Homo sapiens
cagccactctacatgtgaaagttact

SEQ ID NO: 85430 - DNA, 26 bp, Homo sapiens
agccactctacatgtgaaagttactg

SEQ ID NO: 85431 - DNA, 26 bp, Homo sapiens
gccactctacatgtgaaagttactgg

SEQ ID NO: 85432 - DNA, 26 bp, Homo sapiens
ccactctacatgtgaaagttactggc

SEQ ID NO: 85433 - DNA, 26 bp, Homo sapiens
cactctacatgtgaaagttactggca

SEQ ID NO: 85434 - DNA, 26 bp, Homo sapiens
actctacatgtgaaagttactggcat

SEQ ID NO: 85435 - DNA, 26 bp, Homo sapiens
ctctacatgtgaaagttactggcatt

SEQ ID NO: 85436 - DNA, 26 bp, Homo sapiens
tctacatgtgaaagttactggcattc

SEQ ID NO: 85437 - DNA, 26 bp, Homo sapiens
ctacatgtgaaagttactggcattcc

SEQ ID NO: 85438 - DNA, 26 bp, Homo sapiens
tacatgtgaaagttactggcattccc

SEQ ID NO: 85439 - DNA, 26 bp, Homo sapiens
acatgtgaaagttactggcattccct

SEQ ID NO: 85440 - DNA, 26 bp, Homo sapiens
catgtgaaagttactggcattccctc

SEQ ID NO: 85441 - DNA, 26 bp, Homo sapiens
atgtgaaagttactggcattccctca

SEQ ID NO: 85442 - DNA, 26 bp, Homo sapiens
tgtgaaagttactggcattccctcaa

SEQ ID NO: 85443 - DNA, 26 bp, Homo sapiens
gtgaaagttactggcattccctcaaa

SEQ ID NO: 85444 - DNA, 26 bp, Homo sapiens
tgaaagttactggcattccctcaaag

SEQ ID NO: 85445 - DNA, 26 bp, Homo sapiens
gaaagttactggcattccctcaaaga

SEQ ID NO: 85446 - DNA, 26 bp, Homo sapiens
aaagttactggcattccctcaaagat

SEQ ID NO: 85447 - DNA, 26 bp, Homo sapiens
aagttactggcattccctcaaagatc

SEQ ID NO: 85448 - DNA, 26 bp, Homo sapiens
agttactggcattccctcaaagatct

SEQ ID NO: 85449 - DNA, 26 bp, Homo sapiens
gttactggcattccctcaaagatctt

SEQ ID NO: 85450 - DNA, 26 bp, Homo sapiens
ttactggcattccctcaaagatcttg

SEQ ID NO: 85451 - DNA, 26 bp, Homo sapiens
tactggcattccctcaaagatcttgt

SEQ ID NO: 85452 - DNA, 26 bp, Homo sapiens
actggcattccctcaaagatcttgta

SEQ ID NO: 85453 - DNA, 26 bp, Homo sapiens
ctggcattccctcaaagatcttgtaa

SEQ ID NO: 85454 - DNA, 26 bp, Homo sapiens
tggcattccctcaaagatcttgtaat

SEQ ID NO: 85455 - DNA, 26 bp, Homo sapiens
ggcattccctcaaagatcttgtaatg

SEQ ID NO: 85456 - DNA, 26 bp, Homo sapiens
gcattccctcaaagatcttgtaatgt

SEQ ID NO: 85457 - DNA, 26 bp, Homo sapiens
cattccctcaaagatcttgtaatgtt

SEQ ID NO: 85458 - DNA, 26 bp, Homo sapiens
attccctcaaagatcttgtaatgttt

SEQ ID NO: 85459 - DNA, 26 bp, Homo sapiens
ttccctcaaagatcttgtaatgtttc

SEQ ID NO: 85460 - DNA, 26 bp, Homo sapiens
tccctcaaagatcttgtaatgtttca

SEQ ID NO: 85461 - DNA, 26 bp, Homo sapiens
ccctcaaagatcttgtaatgtttcag

SEQ ID NO: 85462 - DNA, 26 bp, Homo sapiens
cctcaaagatcttgtaatgtttcagc

SEQ ID NO: 85463 - DNA, 26 bp, Homo sapiens
ctcaaagatcttgtaatgtttcagct

SEQ ID NO: 85464 - DNA, 26 bp, Homo sapiens
tcaaagatcttgtaatgtttcagctt

SEQ ID NO: 85465 - DNA, 26 bp, Homo sapiens
caaagatcttgtaatgtttcagcttc

SEQ ID NO: 85466 - DNA, 26 bp, Homo sapiens
aaagatcttgtaatgtttcagcttca

SEQ ID NO: 85467 - DNA, 26 bp, Homo sapiens
aagatcttgtaatgtttcagcttcat

SEQ ID NO: 85468 - DNA, 26 bp, Homo sapiens
agatcttgtaatgtttcagcttcatc

SEQ ID NO: 85469 - DNA, 26 bp, Homo sapiens
gatcttgtaatgtttcagcttcatct

SEQ ID NO: 85470 - DNA, 26 bp, Homo sapiens
atcttgtaatgtttcagcttcatctc

SEQ ID NO: 85471 - DNA, 26 bp, Homo sapiens
tcttgtaatgtttcagcttcatctca

SEQ ID NO: 85472 - DNA, 26 bp, Homo sapiens
cttgtaatgtttcagcttcatctcaa

SEQ ID NO: 85473 - DNA, 26 bp, Homo sapiens
ttgtaatgtttcagcttcatctcaaa

SEQ ID NO: 85474 - DNA, 26 bp, Homo sapiens
tgtaatgtttcagcttcatctcaaag

SEQ ID NO: 85475 - DNA, 26 bp, Homo sapiens
gtaatgtttcagcttcatctcaaaga

SEQ ID NO: 85476 - DNA, 26 bp, Homo sapiens
taatgtttcagcttcatctcaaagaa

SEQ ID NO: 85477 - DNA, 26 bp, Homo sapiens
aatgtttcagcttcatctcaaagaat

SEQ ID NO: 85478 - DNA, 26 bp, Homo sapiens
atgtttcagcttcatctcaaagaatg

SEQ ID NO: 85479 - DNA, 26 bp, Homo sapiens
tgtttcagcttcatctcaaagaatgg

SEQ ID NO: 85480 - DNA, 26 bp, Homo sapiens
gtttcagcttcatctcaaagaatggt

SEQ ID NO: 85481 - DNA, 26 bp, Homo sapiens
tttcagcttcatctcaaagaatggtg

SEQ ID NO: 85482 - DNA, 26 bp, Homo sapiens
ttcagcttcatctcaaagaatggtgc

SEQ ID NO: 85483 - DNA, 26 bp, Homo sapiens
tcagcttcatctcaaagaatggtgcc

SEQ ID NO: 85484 - DNA, 26 bp, Homo sapiens
cagcttcatctcaaagaatggtgcca

SEQ ID NO: 85485 - DNA, 26 bp, Homo sapiens
agcttcatctcaaagaatggtgccat

SEQ ID NO: 85486 - DNA, 26 bp, Homo sapiens
gcttcatctcaaagaatggtgccatt

SEQ ID NO: 85487 - DNA, 26 bp, Homo sapiens
cttcatctcaaagaatggtgccattc

SEQ ID NO: 85488 - DNA, 26 bp, Homo sapiens
ttcatctcaaagaatggtgccattcc

SEQ ID NO: 85489 - DNA, 26 bp, Homo sapiens
tcatctcaaagaatggtgccattcca

SEQ ID NO: 85490 - DNA, 26 bp, Homo sapiens
catctcaaagaatggtgccattccat

SEQ ID NO: 85491 - DNA, 26 bp, Homo sapiens
atctcaaagaatggtgccattccatt

SEQ ID NO: 85492 - DNA, 26 bp, Homo sapiens
tctcaaagaatggtgccattccattt

SEQ ID NO: 85493 - DNA, 26 bp, Homo sapiens
ctcaaagaatggtgccattccatttt

SEQ ID NO: 85494 - DNA, 26 bp, Homo sapiens
tcaaagaatggtgccattccattttc

SEQ ID NO: 85495 - DNA, 26 bp, Homo sapiens
caaagaatggtgccattccattttcc

SEQ ID NO: 85496 - DNA, 26 bp, Homo sapiens
aaagaatggtgccattccattttcca

SEQ ID NO: 85497 - DNA, 26 bp, Homo sapiens
aagaatggtgccattccattttccac

SEQ ID NO: 85498 - DNA, 26 bp, Homo sapiens
agaatggtgccattccattttccaca

SEQ ID NO: 85499 - DNA, 26 bp, Homo sapiens
gaatggtgccattccattttccacag

SEQ ID NO: 85500 - DNA, 26 bp, Homo sapiens
aatggtgccattccattttccacagg

SEQ ID NO: 85501 - DNA, 26 bp, Homo sapiens
atggtgccattccattttccacaggc

SEQ ID NO: 85502 - DNA, 26 bp, Homo sapiens
tggtgccattccattttccacaggca

SEQ ID NO: 85503 - DNA, 26 bp, Homo sapiens
ggtgccattccattttccacaggcac

SEQ ID NO: 85504 - DNA, 26 bp, Homo sapiens
gtgccattccattttccacaggcaca

SEQ ID NO: 85505 - DNA, 26 bp, Homo sapiens
tgccattccattttccacaggcacat

SEQ ID NO: 85506 - DNA, 26 bp, Homo sapiens
gccattccattttccacaggcacatc

SEQ ID NO: 85507 - DNA, 26 bp, Homo sapiens
ccattccattttccacaggcacatct

SEQ ID NO: 85508 - DNA, 26 bp, Homo sapiens
cattccattttccacaggcacatctc

SEQ ID NO: 85509 - DNA, 26 bp, Homo sapiens
attccattttccacaggcacatctcc

SEQ ID NO: 85510 - DNA, 26 bp, Homo sapiens
ttccattttccacaggcacatctcca

SEQ ID NO: 85511 - DNA, 26 bp, Homo sapiens
tccattttccacaggcacatctccat

SEQ ID NO: 85512 - DNA, 26 bp, Homo sapiens
ccattttccacaggcacatctccata

SEQ ID NO: 85513 - DNA, 26 bp, Homo sapiens
cattttccacaggcacatctccatac

SEQ ID NO: 85514 - DNA, 26 bp, Homo sapiens
attttccacaggcacatctccatact

SEQ ID NO: 85515 - DNA, 26 bp, Homo sapiens
ttttccacaggcacatctccatactg

SEQ ID NO: 85516 - DNA, 26 bp, Homo sapiens
tttccacaggcacatctccatactga

SEQ ID NO: 85517 - DNA, 26 bp, Homo sapiens
ttccacaggcacatctccatactgaa

SEQ ID NO: 85518 - DNA, 26 bp, Homo sapiens
tccacaggcacatctccatactgaac

SEQ ID NO: 85519 - DNA, 26 bp, Homo sapiens
ccacaggcacatctccatactgaact

SEQ ID NO: 85520 - DNA, 26 bp, Homo sapiens
cacaggcacatctccatactgaactt

SEQ ID NO: 85521 - DNA, 26 bp, Homo sapiens
acaggcacatctccatactgaacttc

SEQ ID NO: 85522 - DNA, 26 bp, Homo sapiens
caggcacatctccatactgaacttca

SEQ ID NO: 85523 - DNA, 26 bp, Homo sapiens
aggcacatctccatactgaacttcat

SEQ ID NO: 85524 - DNA, 26 bp, Homo sapiens
ggcacatctccatactgaacttcatc

SEQ ID NO: 85525 - DNA, 26 bp, Homo sapiens
gcacatctccatactgaacttcatca

SEQ ID NO: 85526 - DNA, 26 bp, Homo sapiens
cacatctccatactgaacttcatcac

SEQ ID NO: 85527 - DNA, 26 bp, Homo sapiens
acatctccatactgaacttcatcacc

SEQ ID NO: 85528 - DNA, 26 bp, Homo sapiens
catctccatactgaacttcatcacct

SEQ ID NO: 85529 - DNA, 26 bp, Homo sapiens
atctccatactgaacttcatcacctg

SEQ ID NO: 85530 - DNA, 26 bp, Homo sapiens
tctccatactgaacttcatcacctga

SEQ ID NO: 85531 - DNA, 26 bp, Homo sapiens
ctccatactgaacttcatcacctgat

SEQ ID NO: 85532 - DNA, 26 bp, Homo sapiens
tccatactgaacttcatcacctgatt

SEQ ID NO: 85533 - DNA, 26 bp, Homo sapiens
ccatactgaacttcatcacctgattc

SEQ ID NO: 85534 - DNA, 26 bp, Homo sapiens
catactgaacttcatcacctgattca

SEQ ID NO: 85535 - DNA, 26 bp, Homo sapiens
atactgaacttcatcacctgattcat

SEQ ID NO: 85536 - DNA, 26 bp, Homo sapiens
tactgaacttcatcacctgattcatc

SEQ ID NO: 85537 - DNA, 26 bp, Homo sapiens
actgaacttcatcacctgattcatcc

SEQ ID NO: 85538 - DNA, 26 bp, Homo sapiens
ctgaacttcatcacctgattcatcca

SEQ ID NO: 85539 - DNA, 26 bp, Homo sapiens
tgaacttcatcacctgattcatccac

SEQ ID NO: 85540 - DNA, 26 bp, Homo sapiens
gaacttcatcacctgattcatccaca

SEQ ID NO: 85541 - DNA, 26 bp, Homo sapiens
aacttcatcacctgattcatccacag

SEQ ID NO: 85542 - DNA, 26 bp, Homo sapiens
acttcatcacctgattcatccacagg

SEQ ID NO: 85543 - DNA, 26 bp, Homo sapiens
cttcatcacctgattcatccacagga

SEQ ID NO: 85544 - DNA, 26 bp, Homo sapiens
ttcatcacctgattcatccacaggag

SEQ ID NO: 85545 - DNA, 26 bp, Homo sapiens
tcatcacctgattcatccacaggaga

SEQ ID NO: 85546 - DNA, 26 bp, Homo sapiens
catcacctgattcatccacaggagac

SEQ ID NO: 85547 - DNA, 26 bp, Homo sapiens
atcacctgattcatccacaggagacc

SEQ ID NO: 85548 - DNA, 26 bp, Homo sapiens
tcacctgattcatccacaggagacct

SEQ ID NO: 85549 - DNA, 26 bp, Homo sapiens
cacctgattcatccacaggagacctt

SEQ ID NO: 85550 - DNA, 26 bp, Homo sapiens
acctgattcatccacaggagaccttt

SEQ ID NO: 85551 - DNA, 26 bp, Homo sapiens
cctgattcatccacaggagacctttc

SEQ ID NO: 85552 - DNA, 26 bp, Homo sapiens
ctgattcatccacaggagacctttct

SEQ ID NO: 85553 - DNA, 26 bp, Homo sapiens
tgattcatccacaggagacctttcta

SEQ ID NO: 85554 - DNA, 26 bp, Homo sapiens
gattcatccacaggagacctttctag

SEQ ID NO: 85555 - DNA, 26 bp, Homo sapiens
attcatccacaggagacctttctagc

SEQ ID NO: 85556 - DNA, 26 bp, Homo sapiens
ttcatccacaggagacctttctagcc

SEQ ID NO: 85557 - DNA, 26 bp, Homo sapiens
tcatccacaggagacctttctagcct

SEQ ID NO: 85558 - DNA, 26 bp, Homo sapiens
catccacaggagacctttctagcctg

SEQ ID NO: 85559 - DNA, 26 bp, Homo sapiens
atccacaggagacctttctagcctgt

SEQ ID NO: 85560 - DNA, 26 bp, Homo sapiens
tccacaggagacctttctagcctgta

SEQ ID NO: 85561 - DNA, 26 bp, Homo sapiens
ccacaggagacctttctagcctgtac

SEQ ID NO: 85562 - DNA, 26 bp, Homo sapiens
cacaggagacctttctagcctgtact

SEQ ID NO: 85563 - DNA, 26 bp, Homo sapiens
acaggagacctttctagcctgtactc

SEQ ID NO: 85564 - DNA, 26 bp, Homo sapiens
caggagacctttctagcctgtactct

SEQ ID NO: 85565 - DNA, 26 bp, Homo sapiens
aggagacctttctagcctgtactcta

SEQ ID NO: 85566 - DNA, 26 bp, Homo sapiens
ggagacctttctagcctgtactctat

SEQ ID NO: 85567 - DNA, 26 bp, Homo sapiens
gagacctttctagcctgtactctatt

SEQ ID NO: 85568 - DNA, 26 bp, Homo sapiens
agacctttctagcctgtactctattt

SEQ ID NO: 85569 - DNA, 26 bp, Homo sapiens
gacctttctagcctgtactctatttc

SEQ ID NO: 85570 - DNA, 26 bp, Homo sapiens
acctttctagcctgtactctatttca

SEQ ID NO: 85571 - DNA, 26 bp, Homo sapiens
cctttctagcctgtactctatttcac

SEQ ID NO: 85572 - DNA, 26 bp, Homo sapiens
ctttctagcctgtactctatttcact

SEQ ID NO: 85573 - DNA, 26 bp, Homo sapiens
tttctagcctgtactctatttcactg

SEQ ID NO: 85574 - DNA, 26 bp, Homo sapiens
ttctagcctgtactctatttcactga

SEQ ID NO: 85575 - DNA, 26 bp, Homo sapiens
tctagcctgtactctatttcactgat

SEQ ID NO: 85576 - DNA, 26 bp, Homo sapiens
ctagcctgtactctatttcactgatg

SEQ ID NO: 85577 - DNA, 26 bp, Homo sapiens
tagcctgtactctatttcactgatga

SEQ ID NO: 85578 - DNA, 26 bp, Homo sapiens
agcctgtactctatttcactgatgag

SEQ ID NO: 85579 - DNA, 26 bp, Homo sapiens
gcctgtactctatttcactgatgagt

SEQ ID NO: 85580 - DNA, 26 bp, Homo sapiens
cctgtactctatttcactgatgagtc

SEQ ID NO: 85581 - DNA, 26 bp, Homo sapiens
ctgtactctatttcactgatgagtct

SEQ ID NO: 85582 - DNA, 26 bp, Homo sapiens
tgtactctatttcactgatgagtctc

SEQ ID NO: 85583 - DNA, 26 bp, Homo sapiens
gtactctatttcactgatgagtctct

SEQ ID NO: 85584 - DNA, 26 bp, Homo sapiens
tactctatttcactgatgagtctctg

SEQ ID NO: 85585 - DNA, 26 bp, Homo sapiens
actctatttcactgatgagtctctgt

SEQ ID NO: 85586 - DNA, 26 bp, Homo sapiens
ctctatttcactgatgagtctctgtt

SEQ ID NO: 85587 - DNA, 26 bp, Homo sapiens
tctatttcactgatgagtctctgttc

SEQ ID NO: 85588 - DNA, 26 bp, Homo sapiens
ctatttcactgatgagtctctgttca

SEQ ID NO: 85589 - DNA, 26 bp, Homo sapiens
tatttcactgatgagtctctgttcac

SEQ ID NO: 85590 - DNA, 26 bp, Homo sapiens
atttcactgatgagtctctgttcaca

SEQ ID NO: 85591 - DNA, 26 bp, Homo sapiens
tttcactgatgagtctctgttcacag

SEQ ID NO: 85592 - DNA, 26 bp, Homo sapiens
ttcactgatgagtctctgttcacagc

SEQ ID NO: 85593 - DNA, 26 bp, Homo sapiens
tcactgatgagtctctgttcacagct

SEQ ID NO: 85594 - DNA, 26 bp, Homo sapiens
cactgatgagtctctgttcacagctg

SEQ ID NO: 85595 - DNA, 26 bp, Homo sapiens
actgatgagtctctgttcacagctgg

SEQ ID NO: 85596 - DNA, 26 bp, Homo sapiens
ctgatgagtctctgttcacagctgga

SEQ ID NO: 85597 - DNA, 26 bp, Homo sapiens
tgatgagtctctgttcacagctggag

SEQ ID NO: 85598 - DNA, 26 bp, Homo sapiens
gatgagtctctgttcacagctggaga

SEQ ID NO: 85599 - DNA, 26 bp, Homo sapiens
atgagtctctgttcacagctggagac

SEQ ID NO: 85600 - DNA, 26 bp, Homo sapiens
tgagtctctgttcacagctggagact

SEQ ID NO: 85601 - DNA, 26 bp, Homo sapiens
gagtctctgttcacagctggagactt

SEQ ID NO: 85602 - DNA, 26 bp, Homo sapiens
agtctctgttcacagctggagacttt

SEQ ID NO: 85603 - DNA, 26 bp, Homo sapiens
gtctctgttcacagctggagactttg

SEQ ID NO: 85604 - DNA, 26 bp, Homo sapiens
tctctgttcacagctggagactttgt

SEQ ID NO: 85605 - DNA, 26 bp, Homo sapiens
ctctgttcacagctggagactttgta

SEQ ID NO: 85606 - DNA, 26 bp, Homo sapiens
tctgttcacagctggagactttgtat

SEQ ID NO: 85607 - DNA, 26 bp, Homo sapiens
ctgttcacagctggagactttgtatt

SEQ ID NO: 85608 - DNA, 26 bp, Homo sapiens
tgttcacagctggagactttgtattc

SEQ ID NO: 85609 - DNA, 26 bp, Homo sapiens
gttcacagctggagactttgtattcc

SEQ ID NO: 85610 - DNA, 26 bp, Homo sapiens
ttcacagctggagactttgtattcct

SEQ ID NO: 85611 - DNA, 26 bp, Homo sapiens
tcacagctggagactttgtattcctt

SEQ ID NO: 85612 - DNA, 26 bp, Homo sapiens
cacagctggagactttgtattccttt

SEQ ID NO: 85613 - DNA, 26 bp, Homo sapiens
acagctggagactttgtattcctttt

SEQ ID NO: 85614 - DNA, 26 bp, Homo sapiens
cagctggagactttgtattccttttg

SEQ ID NO: 85615 - DNA, 26 bp, Homo sapiens
agctggagactttgtattccttttga

SEQ ID NO: 85616 - DNA, 26 bp, Homo sapiens
gctggagactttgtattccttttgac

SEQ ID NO: 85617 - DNA, 26 bp, Homo sapiens
ctggagactttgtattccttttgacc

SEQ ID NO: 85618 - DNA, 26 bp, Homo sapiens
tggagactttgtattccttttgacca

SEQ ID NO: 85619 - DNA, 26 bp, Homo sapiens
ggagactttgtattccttttgaccat

SEQ ID NO: 85620 - DNA, 26 bp, Homo sapiens
gagactttgtattccttttgaccatc

SEQ ID NO: 85621 - DNA, 26 bp, Homo sapiens
agactttgtattccttttgaccatcc

SEQ ID NO: 85622 - DNA, 26 bp, Homo sapiens
gactttgtattccttttgaccatcca

SEQ ID NO: 85623 - DNA, 26 bp, Homo sapiens
actttgtattccttttgaccatccag

SEQ ID NO: 85624 - DNA, 26 bp, Homo sapiens
ctttgtattccttttgaccatccaga

SEQ ID NO: 85625 - DNA, 26 bp, Homo sapiens
tttgtattccttttgaccatccagag

SEQ ID NO: 85626 - DNA, 26 bp, Homo sapiens
ttgtattccttttgaccatccagagg

SEQ ID NO: 85627 - DNA, 26 bp, Homo sapiens
tgtattccttttgaccatccagagga

SEQ ID NO: 85628 - DNA, 26 bp, Homo sapiens
gtattccttttgaccatccagaggac

SEQ ID NO: 85629 - DNA, 26 bp, Homo sapiens
tattccttttgaccatccagaggact

SEQ ID NO: 85630 - DNA, 26 bp, Homo sapiens
attccttttgaccatccagaggactc

SEQ ID NO: 85631 - DNA, 26 bp, Homo sapiens
ttccttttgaccatccagaggactcc

SEQ ID NO: 85632 - DNA, 26 bp, Homo sapiens
tccttttgaccatccagaggactccc

SEQ ID NO: 85633 - DNA, 26 bp, Homo sapiens
ccttttgaccatccagaggactccct

SEQ ID NO: 85634 - DNA, 26 bp, Homo sapiens
cttttgaccatccagaggactcccta

SEQ ID NO: 85635 - DNA, 26 bp, Homo sapiens
ttttgaccatccagaggactccctac

SEQ ID NO: 85636 - DNA, 26 bp, Homo sapiens
tttgaccatccagaggactccctaca

SEQ ID NO: 85637 - DNA, 26 bp, Homo sapiens
ttgaccatccagaggactccctacag

SEQ ID NO: 85638 - DNA, 26 bp, Homo sapiens
tgaccatccagaggactccctacaga

SEQ ID NO: 85639 - DNA, 26 bp, Homo sapiens
gaccatccagaggactccctacagaa

SEQ ID NO: 85640 - DNA, 26 bp, Homo sapiens
accatccagaggactccctacagaag

SEQ ID NO: 85641 - DNA, 26 bp, Homo sapiens
ccatccagaggactccctacagaagc

SEQ ID NO: 85642 - DNA, 26 bp, Homo sapiens
catccagaggactccctacagaagca

SEQ ID NO: 85643 - DNA, 26 bp, Homo sapiens
atccagaggactccctacagaagcat

SEQ ID NO: 85644 - DNA, 26 bp, Homo sapiens
tccagaggactccctacagaagcatg

SEQ ID NO: 85645 - DNA, 26 bp, Homo sapiens
ccagaggactccctacagaagcatga

SEQ ID NO: 85646 - DNA, 26 bp, Homo sapiens
cagaggactccctacagaagcatgag

SEQ ID NO: 85647 - DNA, 26 bp, Homo sapiens
agaggactccctacagaagcatgagg

SEQ ID NO: 85648 - DNA, 26 bp, Homo sapiens
gaggactccctacagaagcatgagga

SEQ ID NO: 85649 - DNA, 26 bp, Homo sapiens
aggactccctacagaagcatgaggag

SEQ ID NO: 85650 - DNA, 26 bp, Homo sapiens
ggactccctacagaagcatgaggaga

SEQ ID NO: 85651 - DNA, 26 bp, Homo sapiens
gactccctacagaagcatgaggagaa

SEQ ID NO: 85652 - DNA, 26 bp, Homo sapiens
actccctacagaagcatgaggagaac

SEQ ID NO: 85653 - DNA, 26 bp, Homo sapiens
ctccctacagaagcatgaggagaacc

SEQ ID NO: 85654 - DNA, 26 bp, Homo sapiens
tccctacagaagcatgaggagaacca

SEQ ID NO: 85655 - DNA, 26 bp, Homo sapiens
ccctacagaagcatgaggagaaccaa

SEQ ID NO: 85656 - DNA, 26 bp, Homo sapiens
cctacagaagcatgaggagaaccaat

SEQ ID NO: 85657 - DNA, 26 bp, Homo sapiens
ctacagaagcatgaggagaaccaatg

SEQ ID NO: 85658 - DNA, 26 bp, Homo sapiens
tacagaagcatgaggagaaccaatgt

SEQ ID NO: 85659 - DNA, 26 bp, Homo sapiens
acagaagcatgaggagaaccaatgtc

SEQ ID NO: 85660 - DNA, 26 bp, Homo sapiens
cagaagcatgaggagaaccaatgtcc

SEQ ID NO: 85661 - DNA, 26 bp, Homo sapiens
agaagcatgaggagaaccaatgtcct

SEQ ID NO: 85662 - DNA, 26 bp, Homo sapiens
gaagcatgaggagaaccaatgtcctg

SEQ ID NO: 85663 - DNA, 26 bp, Homo sapiens
aagcatgaggagaaccaatgtcctga

SEQ ID NO: 85664 - DNA, 26 bp, Homo sapiens
agcatgaggagaaccaatgtcctgat

SEQ ID NO: 85665 - DNA, 26 bp, Homo sapiens
gcatgaggagaaccaatgtcctgatt

SEQ ID NO: 85666 - DNA, 26 bp, Homo sapiens
catgaggagaaccaatgtcctgatta

SEQ ID NO: 85667 - DNA, 26 bp, Homo sapiens
atgaggagaaccaatgtcctgattag

SEQ ID NO: 85668 - DNA, 26 bp, Homo sapiens
tgaggagaaccaatgtcctgattagc

SEQ ID NO: 85669 - DNA, 26 bp, Homo sapiens
gaggagaaccaatgtcctgattagct

SEQ ID NO: 85670 - DNA, 26 bp, Homo sapiens
aggagaaccaatgtcctgattagctg

SEQ ID NO: 85671 - DNA, 26 bp, Homo sapiens
ggagaaccaatgtcctgattagctgt

SEQ ID NO: 85672 - DNA, 26 bp, Homo sapiens
gagaaccaatgtcctgattagctgtt

SEQ ID NO: 85673 - DNA, 26 bp, Homo sapiens
agaaccaatgtcctgattagctgttt

SEQ ID NO: 85674 - DNA, 26 bp, Homo sapiens
gaaccaatgtcctgattagctgtttc

SEQ ID NO: 85675 - DNA, 26 bp, Homo sapiens
aaccaatgtcctgattagctgtttcc

SEQ ID NO: 85676 - DNA, 26 bp, Homo sapiens
accaatgtcctgattagctgtttcct

SEQ ID NO: 85677 - DNA, 26 bp, Homo sapiens
ccaatgtcctgattagctgtttcctc

SEQ ID NO: 85678 - DNA, 26 bp, Homo sapiens
caatgtcctgattagctgtttcctct

SEQ ID NO: 85679 - DNA, 26 bp, Homo sapiens
aatgtcctgattagctgtttcctctt

SEQ ID NO: 85680 - DNA, 26 bp, Homo sapiens
atgtcctgattagctgtttcctcttc

SEQ ID NO: 85681 - DNA, 26 bp, Homo sapiens
tgtcctgattagctgtttcctcttct

SEQ ID NO: 85682 - DNA, 26 bp, Homo sapiens
gtcctgattagctgtttcctcttctg

SEQ ID NO: 85683 - DNA, 26 bp, Homo sapiens
tcctgattagctgtttcctcttctgg

SEQ ID NO: 85684 - DNA, 26 bp, Homo sapiens
cctgattagctgtttcctcttctggc

SEQ ID NO: 85685 - DNA, 26 bp, Homo sapiens
ctgattagctgtttcctcttctggct

SEQ ID NO: 85686 - DNA, 26 bp, Homo sapiens
tgattagctgtttcctcttctggctc

SEQ ID NO: 85687 - DNA, 26 bp, Homo sapiens
gattagctgtttcctcttctggctcc

SEQ ID NO: 85688 - DNA, 26 bp, Homo sapiens
attagctgtttcctcttctggctcct

SEQ ID NO: 85689 - DNA, 26 bp, Homo sapiens
ttagctgtttcctcttctggctcctg

SEQ ID NO: 85690 - DNA, 26 bp, Homo sapiens
tagctgtttcctcttctggctcctga

SEQ ID NO: 85691 - DNA, 26 bp, Homo sapiens
agctgtttcctcttctggctcctgaa

SEQ ID NO: 85692 - DNA, 26 bp, Homo sapiens
gctgtttcctcttctggctcctgaat

SEQ ID NO: 85693 - DNA, 26 bp, Homo sapiens
ctgtttcctcttctggctcctgaata

SEQ ID NO: 85694 - DNA, 26 bp, Homo sapiens
tgtttcctcttctggctcctgaatat

SEQ ID NO: 85695 - DNA, 26 bp, Homo sapiens
gtttcctcttctggctcctgaatatt

SEQ ID NO: 85696 - DNA, 26 bp, Homo sapiens
tttcctcttctggctcctgaatatta

SEQ ID NO: 85697 - DNA, 26 bp, Homo sapiens
ttcctcttctggctcctgaatattaa

SEQ ID NO: 85698 - DNA, 26 bp, Homo sapiens
tcctcttctggctcctgaatattaaa

SEQ ID NO: 85699 - DNA, 26 bp, Homo sapiens
cctcttctggctcctgaatattaaag

SEQ ID NO: 85700 - DNA, 26 bp, Homo sapiens
ctcttctggctcctgaatattaaaga

SEQ ID NO: 85701 - DNA, 26 bp, Homo sapiens
tcttctggctcctgaatattaaagac

SEQ ID NO: 85702 - DNA, 26 bp, Homo sapiens
cttctggctcctgaatattaaagaca

SEQ ID NO: 85703 - DNA, 26 bp, Homo sapiens
ttctggctcctgaatattaaagacag

SEQ ID NO: 85704 - DNA, 26 bp, Homo sapiens
tctggctcctgaatattaaagacagt

SEQ ID NO: 85705 - DNA, 26 bp, Homo sapiens
ctggctcctgaatattaaagacagtt

SEQ ID NO: 85706 - DNA, 26 bp, Homo sapiens
tggctcctgaatattaaagacagttg

SEQ ID NO: 85707 - DNA, 26 bp, Homo sapiens
ggctcctgaatattaaagacagttgc

SEQ ID NO: 85708 - DNA, 26 bp, Homo sapiens
gctcctgaatattaaagacagttgca

SEQ ID NO: 85709 - DNA, 26 bp, Homo sapiens
ctcctgaatattaaagacagttgcac

SEQ ID NO: 85710 - DNA, 26 bp, Homo sapiens
tcctgaatattaaagacagttgcact

SEQ ID NO: 85711 - DNA, 26 bp, Homo sapiens
cctgaatattaaagacagttgcactg

SEQ ID NO: 85712 - DNA, 26 bp, Homo sapiens
ctgaatattaaagacagttgcactgt

SEQ ID NO: 85713 - DNA, 26 bp, Homo sapiens
tgaatattaaagacagttgcactgtc

SEQ ID NO: 85714 - DNA, 26 bp, Homo sapiens
gaatattaaagacagttgcactgtca

SEQ ID NO: 85715 - DNA, 26 bp, Homo sapiens
aatattaaagacagttgcactgtcag

SEQ ID NO: 85716 - DNA, 26 bp, Homo sapiens
atattaaagacagttgcactgtcagc

SEQ ID NO: 85717 - DNA, 26 bp, Homo sapiens
tattaaagacagttgcactgtcagca

SEQ ID NO: 85718 - DNA, 26 bp, Homo sapiens
attaaagacagttgcactgtcagcac

SEQ ID NO: 85719 - DNA, 26 bp, Homo sapiens
ttaaagacagttgcactgtcagcacc

SEQ ID NO: 85720 - DNA, 26 bp, Homo sapiens
taaagacagttgcactgtcagcacct

SEQ ID NO: 85721 - DNA, 26 bp, Homo sapiens
aaagacagttgcactgtcagcaccta

SEQ ID NO: 85722 - DNA, 26 bp, Homo sapiens
aagacagttgcactgtcagcacctag

SEQ ID NO: 85723 - DNA, 26 bp, Homo sapiens
agacagttgcactgtcagcacctagc

SEQ ID NO: 85724 - DNA, 26 bp, Homo sapiens
gacagttgcactgtcagcacctagca

SEQ ID NO: 85725 - DNA, 26 bp, Homo sapiens
acagttgcactgtcagcacctagcag

SEQ ID NO: 85726 - DNA, 26 bp, Homo sapiens
cagttgcactgtcagcacctagcagt

SEQ ID NO: 85727 - DNA, 26 bp, Homo sapiens
agttgcactgtcagcacctagcagtc

SEQ ID NO: 85728 - DNA, 26 bp, Homo sapiens
gttgcactgtcagcacctagcagtcg

SEQ ID NO: 85729 - DNA, 26 bp, Homo sapiens
ttgcactgtcagcacctagcagtcga

SEQ ID NO: 85730 - DNA, 26 bp, Homo sapiens
tgcactgtcagcacctagcagtcgac

SEQ ID NO: 85731 - DNA, 26 bp, Homo sapiens
gcactgtcagcacctagcagtcgacg

SEQ ID NO: 85732 - DNA, 26 bp, Homo sapiens
cactgtcagcacctagcagtcgacga

SEQ ID NO: 85733 - DNA, 26 bp, Homo sapiens
actgtcagcacctagcagtcgacgag

SEQ ID NO: 85734 - DNA, 26 bp, Homo sapiens
ctgtcagcacctagcagtcgacgagc

SEQ ID NO: 85735 - DNA, 26 bp, Homo sapiens
tgtcagcacctagcagtcgacgagcc

SEQ ID NO: 85736 - DNA, 26 bp, Homo sapiens
gtcagcacctagcagtcgacgagcca

SEQ ID NO: 85737 - DNA, 26 bp, Homo sapiens
tcagcacctagcagtcgacgagccat

SEQ ID NO: 85738 - DNA, 26 bp, Homo sapiens
cagcacctagcagtcgacgagccatt

SEQ ID NO: 85739 - DNA, 26 bp, Homo sapiens
agcacctagcagtcgacgagccattc

SEQ ID NO: 85740 - DNA, 26 bp, Homo sapiens
gcacctagcagtcgacgagccattct

SEQ ID NO: 85741 - DNA, 26 bp, Homo sapiens
cacctagcagtcgacgagccattctt

SEQ ID NO: 85742 - DNA, 26 bp, Homo sapiens
acctagcagtcgacgagccattcttt

SEQ ID NO: 85743 - DNA, 26 bp, Homo sapiens
cctagcagtcgacgagccattctttc

SEQ ID NO: 85744 - DNA, 26 bp, Homo sapiens
ctagcagtcgacgagccattctttct

SEQ ID NO: 85745 - DNA, 26 bp, Homo sapiens
tagcagtcgacgagccattctttctt

SEQ ID NO: 85746 - DNA, 26 bp, Homo sapiens
agcagtcgacgagccattctttcttc

SEQ ID NO: 85747 - DNA, 26 bp, Homo sapiens
gcagtcgacgagccattctttcttcg

SEQ ID NO: 85748 - DNA, 26 bp, Homo sapiens
cagtcgacgagccattctttcttcgt

SEQ ID NO: 85749 - DNA, 26 bp, Homo sapiens
agtcgacgagccattctttcttcgta

SEQ ID NO: 85750 - DNA, 26 bp, Homo sapiens
gtcgacgagccattctttcttcgtat

SEQ ID NO: 85751 - DNA, 26 bp, Homo sapiens
tcgacgagccattctttcttcgtatg

SEQ ID NO: 85752 - DNA, 26 bp, Homo sapiens
cgacgagccattctttcttcgtatgt

SEQ ID NO: 85753 - DNA, 26 bp, Homo sapiens
gacgagccattctttcttcgtatgtt

SEQ ID NO: 85754 - DNA, 26 bp, Homo sapiens
acgagccattctttcttcgtatgtta

SEQ ID NO: 85755 - DNA, 26 bp, Homo sapiens
cgagccattctttcttcgtatgttaa

SEQ ID NO: 85756 - DNA, 26 bp, Homo sapiens
gagccattctttcttcgtatgttaac

SEQ ID NO: 85757 - DNA, 26 bp, Homo sapiens
agccattctttcttcgtatgttaacc

SEQ ID NO: 85758 - DNA, 26 bp, Homo sapiens
gccattctttcttcgtatgttaacct

SEQ ID NO: 85759 - DNA, 26 bp, Homo sapiens
ccattctttcttcgtatgttaacctc

SEQ ID NO: 85760 - DNA, 26 bp, Homo sapiens
cattctttcttcgtatgttaacctcg

SEQ ID NO: 85761 - DNA, 26 bp, Homo sapiens
attctttcttcgtatgttaacctcgg

SEQ ID NO: 85762 - DNA, 26 bp, Homo sapiens
ttctttcttcgtatgttaacctcggc

SEQ ID NO: 85763 - DNA, 26 bp, Homo sapiens
tctttcttcgtatgttaacctcggct

SEQ ID NO: 85764 - DNA, 26 bp, Homo sapiens
ctttcttcgtatgttaacctcggctg

SEQ ID NO: 85765 - DNA, 26 bp, Homo sapiens
tttcttcgtatgttaacctcggctgg

SEQ ID NO: 85766 - DNA, 26 bp, Homo sapiens
ttcttcgtatgttaacctcggctggc

SEQ ID NO: 85767 - DNA, 26 bp, Homo sapiens
tcttcgtatgttaacctcggctggcc

SEQ ID NO: 85768 - DNA, 26 bp, Homo sapiens
cttcgtatgttaacctcggctggcca

SEQ ID NO: 85769 - DNA, 26 bp, Homo sapiens
ttcgtatgttaacctcggctggccat

SEQ ID NO: 85770 - DNA, 26 bp, Homo sapiens
tcgtatgttaacctcggctggccatt

SEQ ID NO: 85771 - DNA, 26 bp, Homo sapiens
cgtatgttaacctcggctggccattg

SEQ ID NO: 85772 - DNA, 26 bp, Homo sapiens
gtatgttaacctcggctggccattgt

SEQ ID NO: 85773 - DNA, 26 bp, Homo sapiens
tatgttaacctcggctggccattgtt

SEQ ID NO: 85774 - DNA, 26 bp, Homo sapiens
atgttaacctcggctggccattgttc

SEQ ID NO: 85775 - DNA, 26 bp, Homo sapiens
tgttaacctcggctggccattgttca

SEQ ID NO: 85776 - DNA, 26 bp, Homo sapiens
gttaacctcggctggccattgttcag

SEQ ID NO: 85777 - DNA, 26 bp, Homo sapiens
ttaacctcggctggccattgttcagg

SEQ ID NO: 85778 - DNA, 26 bp, Homo sapiens
taacctcggctggccattgttcagga

SEQ ID NO: 85779 - DNA, 26 bp, Homo sapiens
aacctcggctggccattgttcaggag

SEQ ID NO: 85780 - DNA, 26 bp, Homo sapiens
acctcggctggccattgttcaggagg

SEQ ID NO: 85781 - DNA, 26 bp, Homo sapiens
cctcggctggccattgttcaggaggt

SEQ ID NO: 85782 - DNA, 26 bp, Homo sapiens
ctcggctggccattgttcaggaggtc

SEQ ID NO: 85783 - DNA, 26 bp, Homo sapiens
tcggctggccattgttcaggaggtcc

SEQ ID NO: 85784 - DNA, 26 bp, Homo sapiens
cggctggccattgttcaggaggtcct

SEQ ID NO: 85785 - DNA, 26 bp, Homo sapiens
ggctggccattgttcaggaggtcctc

SEQ ID NO: 85786 - DNA, 26 bp, Homo sapiens
gctggccattgttcaggaggtcctcc

SEQ ID NO: 85787 - DNA, 26 bp, Homo sapiens
ctggccattgttcaggaggtcctcct

SEQ ID NO: 85788 - DNA, 26 bp, Homo sapiens
tggccattgttcaggaggtcctcctt

SEQ ID NO: 85789 - DNA, 26 bp, Homo sapiens
ggccattgttcaggaggtcctccttg

SEQ ID NO: 85790 - DNA, 26 bp, Homo sapiens
gccattgttcaggaggtcctccttga

SEQ ID NO: 85791 - DNA, 26 bp, Homo sapiens
ccattgttcaggaggtcctccttgaa

SEQ ID NO: 85792 - DNA, 26 bp, Homo sapiens
cattgttcaggaggtcctccttgaag

SEQ ID NO: 85793 - DNA, 26 bp, Homo sapiens
attgttcaggaggtcctccttgaagc

SEQ ID NO: 85794 - DNA, 26 bp, Homo sapiens
ttgttcaggaggtcctccttgaagcg

SEQ ID NO: 85795 - DNA, 26 bp, Homo sapiens
tgttcaggaggtcctccttgaagcga

SEQ ID NO: 85796 - DNA, 26 bp, Homo sapiens
gttcaggaggtcctccttgaagcgaa

SEQ ID NO: 85797 - DNA, 26 bp, Homo sapiens
ttcaggaggtcctccttgaagcgaag

SEQ ID NO: 85798 - DNA, 26 bp, Homo sapiens
tcaggaggtcctccttgaagcgaagt

SEQ ID NO: 85799 - DNA, 26 bp, Homo sapiens
caggaggtcctccttgaagcgaagtt

SEQ ID NO: 85800 - DNA, 26 bp, Homo sapiens
aggaggtcctccttgaagcgaagttt

SEQ ID NO: 85801 - DNA, 26 bp, Homo sapiens
ggaggtcctccttgaagcgaagtttt

SEQ ID NO: 85802 - DNA, 26 bp, Homo sapiens
gaggtcctccttgaagcgaagttttc

SEQ ID NO: 85803 - DNA, 26 bp, Homo sapiens
aggtcctccttgaagcgaagttttcg

SEQ ID NO: 85804 - DNA, 26 bp, Homo sapiens
ggtcctccttgaagcgaagttttcgt

SEQ ID NO: 85805 - DNA, 26 bp, Homo sapiens
gtcctccttgaagcgaagttttcgtt

SEQ ID NO: 85806 - DNA, 26 bp, Homo sapiens
tcctccttgaagcgaagttttcgttc

SEQ ID NO: 85807 - DNA, 26 bp, Homo sapiens
cctccttgaagcgaagttttcgttcc

SEQ ID NO: 85808 - DNA, 26 bp, Homo sapiens
ctccttgaagcgaagttttcgttcca

SEQ ID NO: 85809 - DNA, 26 bp, Homo sapiens
tccttgaagcgaagttttcgttccag

SEQ ID NO: 85810 - DNA, 26 bp, Homo sapiens
ccttgaagcgaagttttcgttccagg

SEQ ID NO: 85811 - DNA, 26 bp, Homo sapiens
cttgaagcgaagttttcgttccaggt

SEQ ID NO: 85812 - DNA, 26 bp, Homo sapiens
ttgaagcgaagttttcgttccaggtc

SEQ ID NO: 85813 - DNA, 26 bp, Homo sapiens
tgaagcgaagttttcgttccaggtct

SEQ ID NO: 85814 - DNA, 26 bp, Homo sapiens
gaagcgaagttttcgttccaggtctt

SEQ ID NO: 85815 - DNA, 26 bp, Homo sapiens
aagcgaagttttcgttccaggtcttg

SEQ ID NO: 85816 - DNA, 26 bp, Homo sapiens
agcgaagttttcgttccaggtcttga

SEQ ID NO: 85817 - DNA, 26 bp, Homo sapiens
gcgaagttttcgttccaggtcttgaa

SEQ ID NO: 85818 - DNA, 26 bp, Homo sapiens
cgaagttttcgttccaggtcttgaat

SEQ ID NO: 85819 - DNA, 26 bp, Homo sapiens
gaagttttcgttccaggtcttgaata

SEQ ID NO: 85820 - DNA, 26 bp, Homo sapiens
aagttttcgttccaggtcttgaataa

SEQ ID NO: 85821 - DNA, 26 bp, Homo sapiens
agttttcgttccaggtcttgaataac

SEQ ID NO: 85822 - DNA, 26 bp, Homo sapiens
gttttcgttccaggtcttgaataaca

SEQ ID NO: 85823 - DNA, 26 bp, Homo sapiens
ttttcgttccaggtcttgaataacag

SEQ ID NO: 85824 - DNA, 26 bp, Homo sapiens
tttcgttccaggtcttgaataacagc

SEQ ID NO: 85825 - DNA, 26 bp, Homo sapiens
ttcgttccaggtcttgaataacagca

SEQ ID NO: 85826 - DNA, 26 bp, Homo sapiens
tcgttccaggtcttgaataacagcat

SEQ ID NO: 85827 - DNA, 26 bp, Homo sapiens
cgttccaggtcttgaataacagcatc

SEQ ID NO: 85828 - DNA, 26 bp, Homo sapiens
gttccaggtcttgaataacagcatcc

SEQ ID NO: 85829 - DNA, 26 bp, Homo sapiens
ttccaggtcttgaataacagcatcct

SEQ ID NO: 85830 - DNA, 26 bp, Homo sapiens
tccaggtcttgaataacagcatcctt

SEQ ID NO: 85831 - DNA, 26 bp, Homo sapiens
ccaggtcttgaataacagcatccttt

SEQ ID NO: 85832 - DNA, 26 bp, Homo sapiens
caggtcttgaataacagcatcctttg

SEQ ID NO: 85833 - DNA, 26 bp, Homo sapiens
aggtcttgaataacagcatcctttgt

SEQ ID NO: 85834 - DNA, 26 bp, Homo sapiens
ggtcttgaataacagcatcctttgtg

SEQ ID NO: 85835 - DNA, 26 bp, Homo sapiens
gtcttgaataacagcatcctttgtgc

SEQ ID NO: 85836 - DNA, 26 bp, Homo sapiens
tcttgaataacagcatcctttgtgcc

SEQ ID NO: 85837 - DNA, 26 bp, Homo sapiens
cttgaataacagcatcctttgtgcct

SEQ ID NO: 85838 - DNA, 26 bp, Homo sapiens
ttgaataacagcatcctttgtgcctt

SEQ ID NO: 85839 - DNA, 26 bp, Homo sapiens
tgaataacagcatcctttgtgccttg

SEQ ID NO: 85840 - DNA, 26 bp, Homo sapiens
gaataacagcatcctttgtgccttga

SEQ ID NO: 85841 - DNA, 26 bp, Homo sapiens
aataacagcatcctttgtgccttgaa

SEQ ID NO: 85842 - DNA, 26 bp, Homo sapiens
ataacagcatcctttgtgccttgaat

SEQ ID NO: 85843 - DNA, 26 bp, Homo sapiens
taacagcatcctttgtgccttgaatt

SEQ ID NO: 85844 - DNA, 26 bp, Homo sapiens
aacagcatcctttgtgccttgaattt

SEQ ID NO: 85845 - DNA, 26 bp, Homo sapiens
acagcatcctttgtgccttgaatttc

SEQ ID NO: 85846 - DNA, 26 bp, Homo sapiens
cagcatcctttgtgccttgaatttcc

SEQ ID NO: 85847 - DNA, 26 bp, Homo sapiens
agcatcctttgtgccttgaatttcct

SEQ ID NO: 85848 - DNA, 26 bp, Homo sapiens
gcatcctttgtgccttgaatttcctc

SEQ ID NO: 85849 - DNA, 26 bp, Homo sapiens
catcctttgtgccttgaatttcctca

SEQ ID NO: 85850 - DNA, 26 bp, Homo sapiens
atcctttgtgccttgaatttcctcat

SEQ ID NO: 85851 - DNA, 26 bp, Homo sapiens
tcctttgtgccttgaatttcctcatc

SEQ ID NO: 85852 - DNA, 26 bp, Homo sapiens
cctttgtgccttgaatttcctcatcg

SEQ ID NO: 85853 - DNA, 26 bp, Homo sapiens
ctttgtgccttgaatttcctcatcgg

SEQ ID NO: 85854 - DNA, 26 bp, Homo sapiens
tttgtgccttgaatttcctcatcgga

SEQ ID NO: 85855 - DNA, 26 bp, Homo sapiens
ttgtgccttgaatttcctcatcggag

SEQ ID NO: 85856 - DNA, 26 bp, Homo sapiens
tgtgccttgaatttcctcatcggagg

SEQ ID NO: 85857 - DNA, 26 bp, Homo sapiens
gtgccttgaatttcctcatcggaggc

SEQ ID NO: 85858 - DNA, 26 bp, Homo sapiens
tgccttgaatttcctcatcggaggct

SEQ ID NO: 85859 - DNA, 26 bp, Homo sapiens
gccttgaatttcctcatcggaggcta

SEQ ID NO: 85860 - DNA, 26 bp, Homo sapiens
ccttgaatttcctcatcggaggctat

SEQ ID NO: 85861 - DNA, 26 bp, Homo sapiens
cttgaatttcctcatcggaggctatt

SEQ ID NO: 85862 - DNA, 26 bp, Homo sapiens
ttgaatttcctcatcggaggctattc

SEQ ID NO: 85863 - DNA, 26 bp, Homo sapiens
tgaatttcctcatcggaggctattct

SEQ ID NO: 85864 - DNA, 26 bp, Homo sapiens
gaatttcctcatcggaggctattcta

SEQ ID NO: 85865 - DNA, 26 bp, Homo sapiens
aatttcctcatcggaggctattctag

SEQ ID NO: 85866 - DNA, 26 bp, Homo sapiens
atttcctcatcggaggctattctagc

SEQ ID NO: 85867 - DNA, 26 bp, Homo sapiens
tttcctcatcggaggctattctagca

SEQ ID NO: 85868 - DNA, 26 bp, Homo sapiens
ttcctcatcggaggctattctagcag

SEQ ID NO: 85869 - DNA, 26 bp, Homo sapiens
tcctcatcggaggctattctagcagt

SEQ ID NO: 85870 - DNA, 26 bp, Homo sapiens
cctcatcggaggctattctagcagtt

SEQ ID NO: 85871 - DNA, 26 bp, Homo sapiens
ctcatcggaggctattctagcagttc

SEQ ID NO: 85872 - DNA, 26 bp, Homo sapiens
tcatcggaggctattctagcagttct

SEQ ID NO: 85873 - DNA, 26 bp, Homo sapiens
catcggaggctattctagcagttcta

SEQ ID NO: 85874 - DNA, 26 bp, Homo sapiens
atcggaggctattctagcagttctac

SEQ ID NO: 85875 - DNA, 26 bp, Homo sapiens
tcggaggctattctagcagttctact

SEQ ID NO: 85876 - DNA, 26 bp, Homo sapiens
cggaggctattctagcagttctactg

SEQ ID NO: 85877 - DNA, 26 bp, Homo sapiens
ggaggctattctagcagttctactgg

SEQ ID NO: 85878 - DNA, 26 bp, Homo sapiens
gaggctattctagcagttctactggc

SEQ ID NO: 85879 - DNA, 26 bp, Homo sapiens
aggctattctagcagttctactggcc

SEQ ID NO: 85880 - DNA, 26 bp, Homo sapiens
ggctattctagcagttctactggcct

SEQ ID NO: 85881 - DNA, 26 bp, Homo sapiens
gctattctagcagttctactggcctt

SEQ ID NO: 85882 - DNA, 26 bp, Homo sapiens
ctattctagcagttctactggccttc

SEQ ID NO: 85883 - DNA, 26 bp, Homo sapiens
tattctagcagttctactggccttct

SEQ ID NO: 85884 - DNA, 26 bp, Homo sapiens
attctagcagttctactggccttctt

SEQ ID NO: 85885 - DNA, 26 bp, Homo sapiens
ttctagcagttctactggccttcttt

SEQ ID NO: 85886 - DNA, 26 bp, Homo sapiens
tctagcagttctactggccttctttg

SEQ ID NO: 85887 - DNA, 26 bp, Homo sapiens
ctagcagttctactggccttctttgg

SEQ ID NO: 85888 - DNA, 26 bp, Homo sapiens
tagcagttctactggccttctttgga

SEQ ID NO: 85889 - DNA, 26 bp, Homo sapiens
agcagttctactggccttctttggaa

SEQ ID NO: 85890 - DNA, 26 bp, Homo sapiens
gcagttctactggccttctttggaaa

SEQ ID NO: 85891 - DNA, 26 bp, Homo sapiens
cagttctactggccttctttggaaat

SEQ ID NO: 85892 - DNA, 26 bp, Homo sapiens
agttctactggccttctttggaaatc

SEQ ID NO: 85893 - DNA, 26 bp, Homo sapiens
gttctactggccttctttggaaatcc

SEQ ID NO: 85894 - DNA, 26 bp, Homo sapiens
ttctactggccttctttggaaatcct

SEQ ID NO: 85895 - DNA, 26 bp, Homo sapiens
tctactggccttctttggaaatcctg

SEQ ID NO: 85896 - DNA, 26 bp, Homo sapiens
ctactggccttctttggaaatcctgc

SEQ ID NO: 85897 - DNA, 26 bp, Homo sapiens
tactggccttctttggaaatcctgcg

SEQ ID NO: 85898 - DNA, 26 bp, Homo sapiens
actggccttctttggaaatcctgcgg

SEQ ID NO: 85899 - DNA, 26 bp, Homo sapiens
ctggccttctttggaaatcctgcggg

SEQ ID NO: 85900 - DNA, 26 bp, Homo sapiens
tggccttctttggaaatcctgcgggg

SEQ ID NO: 85901 - DNA, 26 bp, Homo sapiens
ggccttctttggaaatcctgcggggg

SEQ ID NO: 85902 - DNA, 26 bp, Homo sapiens
gccttctttggaaatcctgcgggggt

SEQ ID NO: 85903 - DNA, 26 bp, Homo sapiens
ccttctttggaaatcctgcgggggtg

SEQ ID NO: 85904 - DNA, 26 bp, Homo sapiens
cttctttggaaatcctgcgggggtga

SEQ ID NO: 85905 - DNA, 26 bp, Homo sapiens
ttctttggaaatcctgcgggggtgac

SEQ ID NO: 85906 - DNA, 26 bp, Homo sapiens
tctttggaaatcctgcgggggtgaca

SEQ ID NO: 85907 - DNA, 26 bp, Homo sapiens
ctttggaaatcctgcgggggtgacac

SEQ ID NO: 85908 - DNA, 26 bp, Homo sapiens
tttggaaatcctgcgggggtgacacc

SEQ ID NO: 85909 - DNA, 26 bp, Homo sapiens
ttggaaatcctgcgggggtgacaccc

SEQ ID NO: 85910 - DNA, 26 bp, Homo sapiens
tggaaatcctgcgggggtgacaccct

SEQ ID NO: 85911 - DNA, 26 bp, Homo sapiens
ggaaatcctgcgggggtgacaccctt

SEQ ID NO: 85912 - DNA, 26 bp, Homo sapiens
gaaatcctgcgggggtgacacccttg

SEQ ID NO: 85913 - DNA, 26 bp, Homo sapiens
aaatcctgcgggggtgacacccttgg

SEQ ID NO: 85914 - DNA, 26 bp, Homo sapiens
aatcctgcgggggtgacacccttggg

SEQ ID NO: 85915 - DNA, 26 bp, Homo sapiens
atcctgcgggggtgacacccttgggc

SEQ ID NO: 85916 - DNA, 26 bp, Homo sapiens
tcctgcgggggtgacacccttgggca

SEQ ID NO: 85917 - DNA, 26 bp, Homo sapiens
cctgcgggggtgacacccttgggcag

SEQ ID NO: 85918 - DNA, 26 bp, Homo sapiens
ctgcgggggtgacacccttgggcagc

SEQ ID NO: 85919 - DNA, 26 bp, Homo sapiens
tgcgggggtgacacccttgggcagcc

SEQ ID NO: 85920 - DNA, 26 bp, Homo sapiens
gcgggggtgacacccttgggcagccc

SEQ ID NO: 85921 - DNA, 26 bp, Homo sapiens
cgggggtgacacccttgggcagcccc

SEQ ID NO: 85922 - DNA, 26 bp, Homo sapiens
gggggtgacacccttgggcagcccca

SEQ ID NO: 85923 - DNA, 26 bp, Homo sapiens
ggggtgacacccttgggcagccccag

SEQ ID NO: 85924 - DNA, 26 bp, Homo sapiens
gggtgacacccttgggcagccccagg

SEQ ID NO: 85925 - DNA, 26 bp, Homo sapiens
ggtgacacccttgggcagccccaggg

SEQ ID NO: 85926 - DNA, 26 bp, Homo sapiens
gtgacacccttgggcagccccagggc

SEQ ID NO: 85927 - DNA, 26 bp, Homo sapiens
tgacacccttgggcagccccagggcg

SEQ ID NO: 85928 - DNA, 26 bp, Homo sapiens
gacacccttgggcagccccagggcgt

SEQ ID NO: 85929 - DNA, 26 bp, Homo sapiens
acacccttgggcagccccagggcgtt

SEQ ID NO: 85930 - DNA, 26 bp, Homo sapiens
cacccttgggcagccccagggcgttg

SEQ ID NO: 85931 - DNA, 26 bp, Homo sapiens
acccttgggcagccccagggcgttga

SEQ ID NO: 85932 - DNA, 26 bp, Homo sapiens
cccttgggcagccccagggcgttgac

SEQ ID NO: 85933 - DNA, 26 bp, Homo sapiens
ccttgggcagccccagggcgttgacg

SEQ ID NO: 85934 - DNA, 26 bp, Homo sapiens
cttgggcagccccagggcgttgacgg

SEQ ID NO: 85935 - DNA, 26 bp, Homo sapiens
ttgggcagccccagggcgttgacggc

SEQ ID NO: 85936 - DNA, 26 bp, Homo sapiens
tgggcagccccagggcgttgacggcc

SEQ ID NO: 85937 - DNA, 26 bp, Homo sapiens
gggcagccccagggcgttgacggccg

SEQ ID NO: 85938 - DNA, 26 bp, Homo sapiens
ggcagccccagggcgttgacggccgc

SEQ ID NO: 85939 - DNA, 26 bp, Homo sapiens
gcagccccagggcgttgacggccgcc

SEQ ID NO: 85940 - DNA, 26 bp, Homo sapiens
cagccccagggcgttgacggccgccg

SEQ ID NO: 85941 - DNA, 26 bp, Homo sapiens
agccccagggcgttgacggccgccgg

SEQ ID NO: 85942 - DNA, 26 bp, Homo sapiens
gccccagggcgttgacggccgccggc

SEQ ID NO: 85943 - DNA, 26 bp, Homo sapiens
ccccagggcgttgacggccgccggcg

SEQ ID NO: 85944 - DNA, 26 bp, Homo sapiens
cccagggcgttgacggccgccggcgg

SEQ ID NO: 85945 - DNA, 26 bp, Homo sapiens
ccagggcgttgacggccgccggcggc

SEQ ID NO: 85946 - DNA, 26 bp, Homo sapiens
cagggcgttgacggccgccggcggcg

SEQ ID NO: 85947 - DNA, 26 bp, Homo sapiens
agggcgttgacggccgccggcggcgg

SEQ ID NO: 85948 - DNA, 26 bp, Homo sapiens
gggcgttgacggccgccggcggcggc

SEQ ID NO: 85949 - DNA, 26 bp, Homo sapiens
ggcgttgacggccgccggcggcggct

SEQ ID NO: 85950 - DNA, 26 bp, Homo sapiens
gcgttgacggccgccggcggcggctg

SEQ ID NO: 85951 - DNA, 26 bp, Homo sapiens
cgttgacggccgccggcggcggctgc

SEQ ID NO: 85952 - DNA, 26 bp, Homo sapiens
gttgacggccgccggcggcggctgcg

SEQ ID NO: 85953 - DNA, 26 bp, Homo sapiens
ttgacggccgccggcggcggctgcga

SEQ ID NO: 85954 - DNA, 26 bp, Homo sapiens
tgacggccgccggcggcggctgcgag

SEQ ID NO: 85955 - DNA, 26 bp, Homo sapiens
gacggccgccggcggcggctgcgagg

SEQ ID NO: 85956 - DNA, 26 bp, Homo sapiens
acggccgccggcggcggctgcgaggg

SEQ ID NO: 85957 - DNA, 26 bp, Homo sapiens
cggccgccggcggcggctgcgagggc

SEQ ID NO: 85958 - DNA, 26 bp, Homo sapiens
ggccgccggcggcggctgcgagggca

SEQ ID NO: 85959 - DNA, 26 bp, Homo sapiens
gccgccggcggcggctgcgagggcag

SEQ ID NO: 85960 - DNA, 26 bp, Homo sapiens
ccgccggcggcggctgcgagggcagc

SEQ ID NO: 85961 - DNA, 26 bp, Homo sapiens
cgccggcggcggctgcgagggcagca

SEQ ID NO: 85962 - DNA, 26 bp, Homo sapiens
gccggcggcggctgcgagggcagcag

SEQ ID NO: 85963 - DNA, 26 bp, Homo sapiens
ccggcggcggctgcgagggcagcaga

SEQ ID NO: 85964 - DNA, 26 bp, Homo sapiens
cggcggcggctgcgagggcagcagag

SEQ ID NO: 85965 - DNA, 26 bp, Homo sapiens
ggcggcggctgcgagggcagcagagc

SEQ ID NO: 85966 - DNA, 26 bp, Homo sapiens
gcggcggctgcgagggcagcagagcg

SEQ ID NO: 85967 - DNA, 26 bp, Homo sapiens
cggcggctgcgagggcagcagagcgc

SEQ ID NO: 85968 - DNA, 26 bp, Homo sapiens
ggcggctgcgagggcagcagagcgct

SEQ ID NO: 85969 - DNA, 26 bp, Homo sapiens
gcggctgcgagggcagcagagcgctg

SEQ ID NO: 85970 - DNA, 26 bp, Homo sapiens
cggctgcgagggcagcagagcgctga

SEQ ID NO: 85971 - DNA, 26 bp, Homo sapiens
ggctgcgagggcagcagagcgctgag

SEQ ID NO: 85972 - DNA, 26 bp, Homo sapiens
gctgcgagggcagcagagcgctgagg

SEQ ID NO: 85973 - DNA, 26 bp, Homo sapiens
ctgcgagggcagcagagcgctgagga

SEQ ID NO: 85974 - DNA, 26 bp, Homo sapiens
tgcgagggcagcagagcgctgaggaa

SEQ ID NO: 85975 - DNA, 26 bp, Homo sapiens
gcgagggcagcagagcgctgaggaag

SEQ ID NO: 85976 - DNA, 26 bp, Homo sapiens
cgagggcagcagagcgctgaggaagg

SEQ ID NO: 85977 - DNA, 26 bp, Homo sapiens
gagggcagcagagcgctgaggaaggc

SEQ ID NO: 85978 - DNA, 26 bp, Homo sapiens
agggcagcagagcgctgaggaaggcc

SEQ ID NO: 85979 - DNA, 26 bp, Homo sapiens
gggcagcagagcgctgaggaaggccg

SEQ ID NO: 85980 - DNA, 26 bp, Homo sapiens
ggcagcagagcgctgaggaaggccgc

SEQ ID NO: 85981 - DNA, 26 bp, Homo sapiens
gcagcagagcgctgaggaaggccgcg

SEQ ID NO: 85982 - DNA, 26 bp, Homo sapiens
cagcagagcgctgaggaaggccgcgg

SEQ ID NO: 85983 - DNA, 26 bp, Homo sapiens
agcagagcgctgaggaaggccgcggg

SEQ ID NO: 85984 - DNA, 26 bp, Homo sapiens
gcagagcgctgaggaaggccgcgggc

SEQ ID NO: 85985 - DNA, 26 bp, Homo sapiens
cagagcgctgaggaaggccgcgggcg

SEQ ID NO: 85986 - DNA, 26 bp, Homo sapiens
agagcgctgaggaaggccgcgggcgt

SEQ ID NO: 85987 - DNA, 26 bp, Homo sapiens
gagcgctgaggaaggccgcgggcgtc

SEQ ID NO: 85988 - DNA, 26 bp, Homo sapiens
agcgctgaggaaggccgcgggcgtct

SEQ ID NO: 85989 - DNA, 26 bp, Homo sapiens
gcgctgaggaaggccgcgggcgtctg

SEQ ID NO: 85990 - DNA, 26 bp, Homo sapiens
cgctgaggaaggccgcgggcgtctgg

SEQ ID NO: 85991 - DNA, 26 bp, Homo sapiens
gctgaggaaggccgcgggcgtctggc

SEQ ID NO: 85992 - DNA, 26 bp, Homo sapiens
ctgaggaaggccgcgggcgtctggct

SEQ ID NO: 85993 - DNA, 26 bp, Homo sapiens
tgaggaaggccgcgggcgtctggctg

SEQ ID NO: 85994 - DNA, 26 bp, Homo sapiens
gaggaaggccgcgggcgtctggctgt

SEQ ID NO: 85995 - DNA, 26 bp, Homo sapiens
aggaaggccgcgggcgtctggctgtg

SEQ ID NO: 85996 - DNA, 26 bp, Homo sapiens
ggaaggccgcgggcgtctggctgtgg

SEQ ID NO: 85997 - DNA, 26 bp, Homo sapiens
gaaggccgcgggcgtctggctgtggc

SEQ ID NO: 85998 - DNA, 26 bp, Homo sapiens
aaggccgcgggcgtctggctgtggcc

SEQ ID NO: 85999 - DNA, 26 bp, Homo sapiens
aggccgcgggcgtctggctgtggccg

SEQ ID NO: 86000 - DNA, 26 bp, Homo sapiens
ggccgcgggcgtctggctgtggccga

SEQ ID NO: 86001 - DNA, 26 bp, Homo sapiens
gccgcgggcgtctggctgtggccgaa

SEQ ID NO: 86002 - DNA, 26 bp, Homo sapiens
ccgcgggcgtctggctgtggccgaag

SEQ ID NO: 86003 - DNA, 26 bp, Homo sapiens
cgcgggcgtctggctgtggccgaagc

SEQ ID NO: 86004 - DNA, 26 bp, Homo sapiens
gcgggcgtctggctgtggccgaagcg

SEQ ID NO: 86005 - DNA, 26 bp, Homo sapiens
cgggcgtctggctgtggccgaagcgg

SEQ ID NO: 86006 - DNA, 26 bp, Homo sapiens
gggcgtctggctgtggccgaagcggg

SEQ ID NO: 86007 - DNA, 26 bp, Homo sapiens
ggcgtctggctgtggccgaagcgggt

SEQ ID NO: 86008 - DNA, 26 bp, Homo sapiens
gcgtctggctgtggccgaagcgggtg

SEQ ID NO: 86009 - DNA, 26 bp, Homo sapiens
cgtctggctgtggccgaagcgggtgg

SEQ ID NO: 86010 - DNA, 26 bp, Homo sapiens
gtctggctgtggccgaagcgggtggc

SEQ ID NO: 86011 - DNA, 26 bp, Homo sapiens
tctggctgtggccgaagcgggtggca

SEQ ID NO: 86012 - DNA, 26 bp, Homo sapiens
ctggctgtggccgaagcgggtggcag

SEQ ID NO: 86013 - DNA, 26 bp, Homo sapiens
tggctgtggccgaagcgggtggcagg

SEQ ID NO: 86014 - DNA, 26 bp, Homo sapiens
ggctgtggccgaagcgggtggcaggc

SEQ ID NO: 86015 - DNA, 26 bp, Homo sapiens
gctgtggccgaagcgggtggcaggcg

SEQ ID NO: 86016 - DNA, 26 bp, Homo sapiens
ctgtggccgaagcgggtggcaggcga

SEQ ID NO: 86017 - DNA, 26 bp, Homo sapiens
tgtggccgaagcgggtggcaggcgac

SEQ ID NO: 86018 - DNA, 26 bp, Homo sapiens
gtggccgaagcgggtggcaggcgacg

SEQ ID NO: 86019 - DNA, 26 bp, Homo sapiens
tggccgaagcgggtggcaggcgacga

SEQ ID NO: 86020 - DNA, 26 bp, Homo sapiens
ggccgaagcgggtggcaggcgacgag

SEQ ID NO: 86021 - DNA, 26 bp, Homo sapiens
gccgaagcgggtggcaggcgacgagc

SEQ ID NO: 86022 - DNA, 26 bp, Homo sapiens
ccgaagcgggtggcaggcgacgagca

SEQ ID NO: 86023 - DNA, 26 bp, Homo sapiens
cgaagcgggtggcaggcgacgagcag

SEQ ID NO: 86024 - DNA, 26 bp, Homo sapiens
gaagcgggtggcaggcgacgagcagt

SEQ ID NO: 86025 - DNA, 26 bp, Homo sapiens
aagcgggtggcaggcgacgagcagtg

SEQ ID NO: 86026 - DNA, 26 bp, Homo sapiens
agcgggtggcaggcgacgagcagtgg

SEQ ID NO: 86027 - DNA, 26 bp, Homo sapiens
gcgggtggcaggcgacgagcagtggg

SEQ ID NO: 86028 - DNA, 26 bp, Homo sapiens
cgggtggcaggcgacgagcagtggga

SEQ ID NO: 86029 - DNA, 26 bp, Homo sapiens
gggtggcaggcgacgagcagtgggac

SEQ ID NO: 86030 - DNA, 26 bp, Homo sapiens
ggtggcaggcgacgagcagtgggacg

SEQ ID NO: 86031 - DNA, 26 bp, Homo sapiens
gtggcaggcgacgagcagtgggacgc

SEQ ID NO: 86032 - DNA, 26 bp, Homo sapiens
tggcaggcgacgagcagtgggacgcc

SEQ ID NO: 86033 - DNA, 26 bp, Homo sapiens
ggcaggcgacgagcagtgggacgcct

SEQ ID NO: 86034 - DNA, 26 bp, Homo sapiens
gcaggcgacgagcagtgggacgcctg

SEQ ID NO: 86035 - DNA, 26 bp, Homo sapiens
caggcgacgagcagtgggacgcctgt

SEQ ID NO: 86036 - DNA, 26 bp, Homo sapiens
aggcgacgagcagtgggacgcctgtc

SEQ ID NO: 86037 - DNA, 26 bp, Homo sapiens
ggcgacgagcagtgggacgcctgtcc

SEQ ID NO: 86038 - DNA, 26 bp, Homo sapiens
gcgacgagcagtgggacgcctgtccc

SEQ ID NO: 86039 - DNA, 26 bp, Homo sapiens
cgacgagcagtgggacgcctgtcccg

SEQ ID NO: 86040 - DNA, 26 bp, Homo sapiens
gacgagcagtgggacgcctgtcccgg

SEQ ID NO: 86041 - DNA, 26 bp, Homo sapiens
acgagcagtgggacgcctgtcccggg

SEQ ID NO: 86042 - DNA, 26 bp, Homo sapiens
cgagcagtgggacgcctgtcccgggc

SEQ ID NO: 86043 - DNA, 26 bp, Homo sapiens
gagcagtgggacgcctgtcccgggct

SEQ ID NO: 86044 - DNA, 26 bp, Homo sapiens
agcagtgggacgcctgtcccgggctc

SEQ ID NO: 86045 - DNA, 26 bp, Homo sapiens
gcagtgggacgcctgtcccgggctcg

SEQ ID NO: 86046 - DNA, 26 bp, Homo sapiens
cagtgggacgcctgtcccgggctcgg

SEQ ID NO: 86047 - DNA, 26 bp, Homo sapiens
agtgggacgcctgtcccgggctcggg

SEQ ID NO: 86048 - DNA, 26 bp, Homo sapiens
gtgggacgcctgtcccgggctcggga

SEQ ID NO: 86049 - DNA, 26 bp, Homo sapiens
tgggacgcctgtcccgggctcgggag

SEQ ID NO: 86050 - DNA, 26 bp, Homo sapiens
gggacgcctgtcccgggctcgggagc

SEQ ID NO: 86051 - DNA, 26 bp, Homo sapiens
ggacgcctgtcccgggctcgggagcg

SEQ ID NO: 86052 - DNA, 26 bp, Homo sapiens
gacgcctgtcccgggctcgggagcgg

SEQ ID NO: 86053 - DNA, 26 bp, Homo sapiens
acgcctgtcccgggctcgggagcggc

SEQ ID NO: 86054 - DNA, 26 bp, Homo sapiens
cgcctgtcccgggctcgggagcggcg

SEQ ID NO: 86055 - DNA, 26 bp, Homo sapiens
gcctgtcccgggctcgggagcggcgg

SEQ ID NO: 86056 - DNA, 26 bp, Homo sapiens
cctgtcccgggctcgggagcggcggt

SEQ ID NO: 86057 - DNA, 26 bp, Homo sapiens
ctgtcccgggctcgggagcggcggtg

SEQ ID NO: 86058 - DNA, 26 bp, Homo sapiens
tgtcccgggctcgggagcggcggtgg

SEQ ID NO: 86059 - DNA, 26 bp, Homo sapiens
gtcccgggctcgggagcggcggtggt

SEQ ID NO: 86060 - DNA, 26 bp, Homo sapiens
tcccgggctcgggagcggcggtggtg

SEQ ID NO: 86061 - DNA, 26 bp, Homo sapiens
cccgggctcgggagcggcggtggtgg

SEQ ID NO: 86062 - DNA, 26 bp, Homo sapiens
ccgggctcgggagcggcggtggtggc

SEQ ID NO: 86063 - DNA, 26 bp, Homo sapiens
cgggctcgggagcggcggtggtggcg

SEQ ID NO: 86064 - DNA, 26 bp, Homo sapiens
gggctcgggagcggcggtggtggcgg

SEQ ID NO: 86065 - DNA, 26 bp, Homo sapiens
ggctcgggagcggcggtggtggcggc

SEQ ID NO: 86066 - DNA, 26 bp, Homo sapiens
gctcgggagcggcggtggtggcggcg

SEQ ID NO: 86067 - DNA, 26 bp, Homo sapiens
ctcgggagcggcggtggtggcggcgg

SEQ ID NO: 86068 - DNA, 26 bp, Homo sapiens
tcgggagcggcggtggtggcggcggc

SEQ ID NO: 86069 - DNA, 26 bp, Homo sapiens
cgggagcggcggtggtggcggcggca

SEQ ID NO: 86070 - DNA, 26 bp, Homo sapiens
gggagcggcggtggtggcggcggcag

SEQ ID NO: 86071 - DNA, 26 bp, Homo sapiens
ggagcggcggtggtggcggcggcagt

SEQ ID NO: 86072 - DNA, 26 bp, Homo sapiens
gagcggcggtggtggcggcggcagtg

SEQ ID NO: 86073 - DNA, 26 bp, Homo sapiens
agcggcggtggtggcggcggcagtgg

SEQ ID NO: 86074 - DNA, 26 bp, Homo sapiens
gcggcggtggtggcggcggcagtggg

SEQ ID NO: 86075 - DNA, 26 bp, Homo sapiens
cggcggtggtggcggcggcagtggga

SEQ ID NO: 86076 - DNA, 26 bp, Homo sapiens
ggcggtggtggcggcggcagtgggaa

SEQ ID NO: 86077 - DNA, 26 bp, Homo sapiens
gcggtggtggcggcggcagtgggaac

SEQ ID NO: 86078 - DNA, 26 bp, Homo sapiens
cggtggtggcggcggcagtgggaaca

SEQ ID NO: 86079 - DNA, 26 bp, Homo sapiens
ggtggtggcggcggcagtgggaacac

SEQ ID NO: 86080 - DNA, 26 bp, Homo sapiens
gtggtggcggcggcagtgggaacacg

SEQ ID NO: 86081 - DNA, 26 bp, Homo sapiens
tggtggcggcggcagtgggaacacgt

SEQ ID NO: 86082 - DNA, 26 bp, Homo sapiens
ggtggcggcggcagtgggaacacgtc

SEQ ID NO: 86083 - DNA, 26 bp, Homo sapiens
gtggcggcggcagtgggaacacgtcg

SEQ ID NO: 86084 - DNA, 26 bp, Homo sapiens
tggcggcggcagtgggaacacgtcgg

SEQ ID NO: 86085 - DNA, 26 bp, Homo sapiens
ggcggcggcagtgggaacacgtcggg

SEQ ID NO: 86086 - DNA, 26 bp, Homo sapiens
gcggcggcagtgggaacacgtcgggc

SEQ ID NO: 86087 - DNA, 26 bp, Homo sapiens
cggcggcagtgggaacacgtcgggca

SEQ ID NO: 86088 - DNA, 26 bp, Homo sapiens
ggcggcagtgggaacacgtcgggcac

SEQ ID NO: 86089 - DNA, 26 bp, Homo sapiens
gcggcagtgggaacacgtcgggcacc

SEQ ID NO: 86090 - DNA, 26 bp, Homo sapiens
cggcagtgggaacacgtcgggcaccg

SEQ ID NO: 86091 - DNA, 26 bp, Homo sapiens
ggcagtgggaacacgtcgggcaccgg

SEQ ID NO: 86092 - DNA, 26 bp, Homo sapiens
gcagtgggaacacgtcgggcaccggg

SEQ ID NO: 86093 - DNA, 26 bp, Homo sapiens
cagtgggaacacgtcgggcaccggga

SEQ ID NO: 86094 - DNA, 26 bp, Homo sapiens
agtgggaacacgtcgggcaccgggaa

SEQ ID NO: 86095 - DNA, 26 bp, Homo sapiens
gtgggaacacgtcgggcaccgggaag

SEQ ID NO: 86096 - DNA, 26 bp, Homo sapiens
tgggaacacgtcgggcaccgggaagg

SEQ ID NO: 86097 - DNA, 26 bp, Homo sapiens
gggaacacgtcgggcaccgggaaggc

SEQ ID NO: 86098 - DNA, 26 bp, Homo sapiens
ggaacacgtcgggcaccgggaaggca

SEQ ID NO: 86099 - DNA, 26 bp, Homo sapiens
gaacacgtcgggcaccgggaaggcag

SEQ ID NO: 86100 - DNA, 26 bp, Homo sapiens
aacacgtcgggcaccgggaaggcagc

SEQ ID NO: 86101 - DNA, 26 bp, Homo sapiens
acacgtcgggcaccgggaaggcagcc

SEQ ID NO: 86102 - DNA, 26 bp, Homo sapiens
cacgtcgggcaccgggaaggcagccg

SEQ ID NO: 86103 - DNA, 26 bp, Homo sapiens
acgtcgggcaccgggaaggcagccgt

SEQ ID NO: 86104 - DNA, 26 bp, Homo sapiens
cgtcgggcaccgggaaggcagccgtg

SEQ ID NO: 86105 - DNA, 26 bp, Homo sapiens
gtcgggcaccgggaaggcagccgtgg

SEQ ID NO: 86106 - DNA, 26 bp, Homo sapiens
tcgggcaccgggaaggcagccgtggg

SEQ ID NO: 86107 - DNA, 26 bp, Homo sapiens
cgggcaccgggaaggcagccgtgggg

SEQ ID NO: 86108 - DNA, 26 bp, Homo sapiens
gggcaccgggaaggcagccgtggggc

SEQ ID NO: 86109 - DNA, 26 bp, Homo sapiens
ggcaccgggaaggcagccgtggggct

SEQ ID NO: 86110 - DNA, 26 bp, Homo sapiens
gcaccgggaaggcagccgtggggctg

SEQ ID NO: 86111 - DNA, 26 bp, Homo sapiens
caccgggaaggcagccgtggggctga

SEQ ID NO: 86112 - DNA, 26 bp, Homo sapiens
accgggaaggcagccgtggggctgaa

SEQ ID NO: 86113 - DNA, 26 bp, Homo sapiens
ccgggaaggcagccgtggggctgaag

SEQ ID NO: 86114 - DNA, 26 bp, Homo sapiens
cgggaaggcagccgtggggctgaaga

SEQ ID NO: 86115 - DNA, 26 bp, Homo sapiens
gggaaggcagccgtggggctgaagac

SEQ ID NO: 86116 - DNA, 26 bp, Homo sapiens
ggaaggcagccgtggggctgaagacc

SEQ ID NO: 86117 - DNA, 26 bp, Homo sapiens
gaaggcagccgtggggctgaagaccg

SEQ ID NO: 86118 - DNA, 26 bp, Homo sapiens
aaggcagccgtggggctgaagaccgg

SEQ ID NO: 86119 - DNA, 26 bp, Homo sapiens
aggcagccgtggggctgaagaccggg

SEQ ID NO: 86120 - DNA, 26 bp, Homo sapiens
ggcagccgtggggctgaagaccgggg

SEQ ID NO: 86121 - DNA, 26 bp, Homo sapiens
gcagccgtggggctgaagaccggggg

SEQ ID NO: 86122 - DNA, 26 bp, Homo sapiens
cagccgtggggctgaagaccgggggt

SEQ ID NO: 86123 - DNA, 26 bp, Homo sapiens
agccgtggggctgaagaccgggggtg

SEQ ID NO: 86124 - DNA, 26 bp, Homo sapiens
gccgtggggctgaagaccgggggtgg

SEQ ID NO: 86125 - DNA, 26 bp, Homo sapiens
ccgtggggctgaagaccgggggtggc

SEQ ID NO: 86126 - DNA, 26 bp, Homo sapiens
cgtggggctgaagaccgggggtggcg

SEQ ID NO: 86127 - DNA, 26 bp, Homo sapiens
gtggggctgaagaccgggggtggcgg

SEQ ID NO: 86128 - DNA, 26 bp, Homo sapiens
tggggctgaagaccgggggtggcggg

SEQ ID NO: 86129 - DNA, 26 bp, Homo sapiens
ggggctgaagaccgggggtggcgggg

SEQ ID NO: 86130 - DNA, 26 bp, Homo sapiens
gggctgaagaccgggggtggcggggg

SEQ ID NO: 86131 - DNA, 26 bp, Homo sapiens
ggctgaagaccgggggtggcgggggc

SEQ ID NO: 86132 - DNA, 26 bp, Homo sapiens
gctgaagaccgggggtggcgggggcg

SEQ ID NO: 86133 - DNA, 26 bp, Homo sapiens
ctgaagaccgggggtggcgggggcgg

SEQ ID NO: 86134 - DNA, 26 bp, Homo sapiens
tgaagaccgggggtggcgggggcggg

SEQ ID NO: 86135 - DNA, 26 bp, Homo sapiens
gaagaccgggggtggcgggggcgggg

SEQ ID NO: 86136 - DNA, 26 bp, Homo sapiens
aagaccgggggtggcgggggcggggg

SEQ ID NO: 86137 - DNA, 26 bp, Homo sapiens
agaccgggggtggcgggggcgggggc

SEQ ID NO: 86138 - DNA, 26 bp, Homo sapiens
gaccgggggtggcgggggcgggggcg

SEQ ID NO: 86139 - DNA, 26 bp, Homo sapiens
accgggggtggcgggggcgggggcga

SEQ ID NO: 86140 - DNA, 26 bp, Homo sapiens
ccgggggtggcgggggcgggggcgac

SEQ ID NO: 86141 - DNA, 26 bp, Homo sapiens
cgggggtggcgggggcgggggcgacg

SEQ ID NO: 86142 - DNA, 26 bp, Homo sapiens
gggggtggcgggggcgggggcgacgg

SEQ ID NO: 86143 - DNA, 26 bp, Homo sapiens
ggggtggcgggggcgggggcgacggc

SEQ ID NO: 86144 - DNA, 26 bp, Homo sapiens
gggtggcgggggcgggggcgacggcg

SEQ ID NO: 86145 - DNA, 26 bp, Homo sapiens
ggtggcgggggcgggggcgacggcga

SEQ ID NO: 86146 - DNA, 26 bp, Homo sapiens
gtggcgggggcgggggcgacggcgag

SEQ ID NO: 86147 - DNA, 26 bp, Homo sapiens
tggcgggggcgggggcgacggcgagg

SEQ ID NO: 86148 - DNA, 26 bp, Homo sapiens
ggcgggggcgggggcgacggcgagga

SEQ ID NO: 86149 - DNA, 26 bp, Homo sapiens
gcgggggcgggggcgacggcgaggag

SEQ ID NO: 86150 - DNA, 26 bp, Homo sapiens
cgggggcgggggcgacggcgaggagg

SEQ ID NO: 86151 - DNA, 26 bp, Homo sapiens
gggggcgggggcgacggcgaggagga

SEQ ID NO: 86152 - DNA, 26 bp, Homo sapiens
ggggcgggggcgacggcgaggaggag

SEQ ID NO: 86153 - DNA, 26 bp, Homo sapiens
gggcgggggcgacggcgaggaggagc

SEQ ID NO: 86154 - DNA, 26 bp, Homo sapiens
ggcgggggcgacggcgaggaggagcc

SEQ ID NO: 86155 - DNA, 26 bp, Homo sapiens
gcgggggcgacggcgaggaggagccc

SEQ ID NO: 86156 - DNA, 26 bp, Homo sapiens
cgggggcgacggcgaggaggagcccc

SEQ ID NO: 86157 - DNA, 26 bp, Homo sapiens
gggggcgacggcgaggaggagcccca

SEQ ID NO: 86158 - DNA, 26 bp, Homo sapiens
ggggcgacggcgaggaggagccccac

SEQ ID NO: 86159 - DNA, 26 bp, Homo sapiens
gggcgacggcgaggaggagccccacg

SEQ ID NO: 86160 - DNA, 26 bp, Homo sapiens
ggcgacggcgaggaggagccccacgg

SEQ ID NO: 86161 - DNA, 26 bp, Homo sapiens
gcgacggcgaggaggagccccacggg

SEQ ID NO: 86162 - DNA, 26 bp, Homo sapiens
cgacggcgaggaggagccccacgggg

SEQ ID NO: 86163 - DNA, 26 bp, Homo sapiens
gacggcgaggaggagccccacggggc

SEQ ID NO: 86164 - DNA, 26 bp, Homo sapiens
acggcgaggaggagccccacggggcc

SEQ ID NO: 86165 - DNA, 26 bp, Homo sapiens
cggcgaggaggagccccacggggcct

SEQ ID NO: 86166 - DNA, 26 bp, Homo sapiens
ggcgaggaggagccccacggggcctc

SEQ ID NO: 86167 - DNA, 26 bp, Homo sapiens
gcgaggaggagccccacggggcctcg

SEQ ID NO: 86168 - DNA, 26 bp, Homo sapiens
cgaggaggagccccacggggcctcgg

SEQ ID NO: 86169 - DNA, 26 bp, Homo sapiens
gaggaggagccccacggggcctcggg

SEQ ID NO: 86170 - DNA, 26 bp, Homo sapiens
aggaggagccccacggggcctcgggc

SEQ ID NO: 86171 - DNA, 26 bp, Homo sapiens
ggaggagccccacggggcctcgggct

SEQ ID NO: 86172 - DNA, 26 bp, Homo sapiens
gaggagccccacggggcctcgggctc

SEQ ID NO: 86173 - DNA, 26 bp, Homo sapiens
aggagccccacggggcctcgggctca

SEQ ID NO: 86174 - DNA, 26 bp, Homo sapiens
ggagccccacggggcctcgggctcag

SEQ ID NO: 86175 - DNA, 26 bp, Homo sapiens
gagccccacggggcctcgggctcagc

SEQ ID NO: 86176 - DNA, 26 bp, Homo sapiens
agccccacggggcctcgggctcagcg

SEQ ID NO: 86177 - DNA, 26 bp, Homo sapiens
gccccacggggcctcgggctcagcgc

SEQ ID NO: 86178 - DNA, 26 bp, Homo sapiens
ccccacggggcctcgggctcagcgcc

SEQ ID NO: 86179 - DNA, 26 bp, Homo sapiens
cccacggggcctcgggctcagcgccg

SEQ ID NO: 86180 - DNA, 26 bp, Homo sapiens
ccacggggcctcgggctcagcgccga

SEQ ID NO: 86181 - DNA, 26 bp, Homo sapiens
cacggggcctcgggctcagcgccgaa

SEQ ID NO: 86182 - DNA, 26 bp, Homo sapiens
acggggcctcgggctcagcgccgaag

SEQ ID NO: 86183 - DNA, 26 bp, Homo sapiens
cggggcctcgggctcagcgccgaagg

SEQ ID NO: 86184 - DNA, 26 bp, Homo sapiens
ggggcctcgggctcagcgccgaaggg

SEQ ID NO: 86185 - DNA, 26 bp, Homo sapiens
gggcctcgggctcagcgccgaagggc

SEQ ID NO: 86186 - DNA, 26 bp, Homo sapiens
ggcctcgggctcagcgccgaagggct

SEQ ID NO: 86187 - DNA, 26 bp, Homo sapiens
gcctcgggctcagcgccgaagggctg

SEQ ID NO: 86188 - DNA, 26 bp, Homo sapiens
cctcgggctcagcgccgaagggctgc

SEQ ID NO: 86189 - DNA, 26 bp, Homo sapiens
ctcgggctcagcgccgaagggctgcg

SEQ ID NO: 86190 - DNA, 26 bp, Homo sapiens
tcgggctcagcgccgaagggctgcgc

SEQ ID NO: 86191 - DNA, 26 bp, Homo sapiens
cgggctcagcgccgaagggctgcgcg

SEQ ID NO: 86192 - DNA, 26 bp, Homo sapiens
gggctcagcgccgaagggctgcgcga

SEQ ID NO: 86193 - DNA, 26 bp, Homo sapiens
ggctcagcgccgaagggctgcgcgaa

SEQ ID NO: 86194 - DNA, 26 bp, Homo sapiens
gctcagcgccgaagggctgcgcgaag

SEQ ID NO: 86195 - DNA, 26 bp, Homo sapiens
ctcagcgccgaagggctgcgcgaagg

SEQ ID NO: 86196 - DNA, 26 bp, Homo sapiens
tcagcgccgaagggctgcgcgaaggg

SEQ ID NO: 86197 - DNA, 26 bp, Homo sapiens
cagcgccgaagggctgcgcgaagggc

SEQ ID NO: 86198 - DNA, 26 bp, Homo sapiens
agcgccgaagggctgcgcgaagggcg

SEQ ID NO: 86199 - DNA, 26 bp, Homo sapiens
gcgccgaagggctgcgcgaagggcgg

SEQ ID NO: 86200 - DNA, 26 bp, Homo sapiens
cgccgaagggctgcgcgaagggcggc

SEQ ID NO: 86201 - DNA, 26 bp, Homo sapiens
gccgaagggctgcgcgaagggcggca

SEQ ID NO: 86202 - DNA, 26 bp, Homo sapiens
ccgaagggctgcgcgaagggcggcac

SEQ ID NO: 86203 - DNA, 26 bp, Homo sapiens
cgaagggctgcgcgaagggcggcacg

SEQ ID NO: 86204 - DNA, 26 bp, Homo sapiens
gaagggctgcgcgaagggcggcacgg

SEQ ID NO: 86205 - DNA, 26 bp, Homo sapiens
aagggctgcgcgaagggcggcacggg

SEQ ID NO: 86206 - DNA, 26 bp, Homo sapiens
agggctgcgcgaagggcggcacgggg

SEQ ID NO: 86207 - DNA, 26 bp, Homo sapiens
gggctgcgcgaagggcggcacggggg

SEQ ID NO: 86208 - DNA, 26 bp, Homo sapiens
ggctgcgcgaagggcggcacgggggc

SEQ ID NO: 86209 - DNA, 26 bp, Homo sapiens
gctgcgcgaagggcggcacgggggcg

SEQ ID NO: 86210 - DNA, 26 bp, Homo sapiens
ctgcgcgaagggcggcacgggggcgc

SEQ ID NO: 86211 - DNA, 26 bp, Homo sapiens
tgcgcgaagggcggcacgggggcgcg

SEQ ID NO: 86212 - DNA, 26 bp, Homo sapiens
gcgcgaagggcggcacgggggcgcgg

SEQ ID NO: 86213 - DNA, 26 bp, Homo sapiens
cgcgaagggcggcacgggggcgcggc

SEQ ID NO: 86214 - DNA, 26 bp, Homo sapiens
gcgaagggcggcacgggggcgcggcc

SEQ ID NO: 86215 - DNA, 26 bp, Homo sapiens
cgaagggcggcacgggggcgcggccg

SEQ ID NO: 86216 - DNA, 26 bp, Homo sapiens
gaagggcggcacgggggcgcggccga

SEQ ID NO: 86217 - DNA, 26 bp, Homo sapiens
aagggcggcacgggggcgcggccgaa

SEQ ID NO: 86218 - DNA, 26 bp, Homo sapiens
agggcggcacgggggcgcggccgaac

SEQ ID NO: 86219 - DNA, 26 bp, Homo sapiens
gggcggcacgggggcgcggccgaact

SEQ ID NO: 86220 - DNA, 26 bp, Homo sapiens
ggcggcacgggggcgcggccgaactg

SEQ ID NO: 86221 - DNA, 26 bp, Homo sapiens
gcggcacgggggcgcggccgaactgc

SEQ ID NO: 86222 - DNA, 26 bp, Homo sapiens
cggcacgggggcgcggccgaactgcc

SEQ ID NO: 86223 - DNA, 26 bp, Homo sapiens
ggcacgggggcgcggccgaactgcct

SEQ ID NO: 86224 - DNA, 26 bp, Homo sapiens
gcacgggggcgcggccgaactgcctc

SEQ ID NO: 86225 - DNA, 26 bp, Homo sapiens
cacgggggcgcggccgaactgcctcg

SEQ ID NO: 86226 - DNA, 26 bp, Homo sapiens
acgggggcgcggccgaactgcctcgg

SEQ ID NO: 86227 - DNA, 26 bp, Homo sapiens
cgggggcgcggccgaactgcctcggc

SEQ ID NO: 86228 - DNA, 26 bp, Homo sapiens
gggggcgcggccgaactgcctcggcg

SEQ ID NO: 86229 - DNA, 26 bp, Homo sapiens
ggggcgcggccgaactgcctcggcgt

SEQ ID NO: 86230 - DNA, 26 bp, Homo sapiens
gggcgcggccgaactgcctcggcgtc

SEQ ID NO: 86231 - DNA, 26 bp, Homo sapiens
ggcgcggccgaactgcctcggcgtcg

SEQ ID NO: 86232 - DNA, 26 bp, Homo sapiens
gcgcggccgaactgcctcggcgtcgg

SEQ ID NO: 86233 - DNA, 26 bp, Homo sapiens
cgcggccgaactgcctcggcgtcggg

SEQ ID NO: 86234 - DNA, 26 bp, Homo sapiens
gcggccgaactgcctcggcgtcgggg

SEQ ID NO: 86235 - DNA, 26 bp, Homo sapiens
cggccgaactgcctcggcgtcgggga

SEQ ID NO: 86236 - DNA, 26 bp, Homo sapiens
ggccgaactgcctcggcgtcggggac

SEQ ID NO: 86237 - DNA, 26 bp, Homo sapiens
gccgaactgcctcggcgtcggggaca

SEQ ID NO: 86238 - DNA, 26 bp, Homo sapiens
ccgaactgcctcggcgtcggggacat

SEQ ID NO: 86239 - DNA, 26 bp, Homo sapiens
cgaactgcctcggcgtcggggacatg

SEQ ID NO: 86240 - DNA, 26 bp, Homo sapiens
gaactgcctcggcgtcggggacatgg

SEQ ID NO: 86241 - DNA, 26 bp, Homo sapiens
aactgcctcggcgtcggggacatggg

SEQ ID NO: 86242 - DNA, 26 bp, Homo sapiens
actgcctcggcgtcggggacatgggc

SEQ ID NO: 86243 - DNA, 26 bp, Homo sapiens
ctgcctcggcgtcggggacatgggcg

SEQ ID NO: 86244 - DNA, 26 bp, Homo sapiens
tgcctcggcgtcggggacatgggcga

SEQ ID NO: 86245 - DNA, 26 bp, Homo sapiens
gcctcggcgtcggggacatgggcgac

SEQ ID NO: 86246 - DNA, 26 bp, Homo sapiens
cctcggcgtcggggacatgggcgacg

SEQ ID NO: 86247 - DNA, 26 bp, Homo sapiens
ctcggcgtcggggacatgggcgacgg

SEQ ID NO: 86248 - DNA, 26 bp, Homo sapiens
tcggcgtcggggacatgggcgacggg

SEQ ID NO: 86249 - DNA, 26 bp, Homo sapiens
cggcgtcggggacatgggcgacggga

SEQ ID NO: 86250 - DNA, 26 bp, Homo sapiens
ggcgtcggggacatgggcgacgggag

SEQ ID NO: 86251 - DNA, 26 bp, Homo sapiens
gcgtcggggacatgggcgacgggagg

SEQ ID NO: 86252 - DNA, 26 bp, Homo sapiens
cgtcggggacatgggcgacgggaggc

SEQ ID NO: 86253 - DNA, 26 bp, Homo sapiens
gtcggggacatgggcgacgggaggct

SEQ ID NO: 86254 - DNA, 26 bp, Homo sapiens
tcggggacatgggcgacgggaggctg

SEQ ID NO: 86255 - DNA, 26 bp, Homo sapiens
cggggacatgggcgacgggaggctgg

SEQ ID NO: 86256 - DNA, 26 bp, Homo sapiens
ggggacatgggcgacgggaggctgga

SEQ ID NO: 86257 - DNA, 26 bp, Homo sapiens
gggacatgggcgacgggaggctggac

SEQ ID NO: 86258 - DNA, 26 bp, Homo sapiens
ggacatgggcgacgggaggctggacg

SEQ ID NO: 86259 - DNA, 26 bp, Homo sapiens
gacatgggcgacgggaggctggacga

SEQ ID NO: 86260 - DNA, 26 bp, Homo sapiens
acatgggcgacgggaggctggacgag

SEQ ID NO: 86261 - DNA, 26 bp, Homo sapiens
catgggcgacgggaggctggacgagc

SEQ ID NO: 86262 - DNA, 26 bp, Homo sapiens
atgggcgacgggaggctggacgagct

SEQ ID NO: 86263 - DNA, 26 bp, Homo sapiens
tgggcgacgggaggctggacgagctg

SEQ ID NO: 86264 - DNA, 26 bp, Homo sapiens
gggcgacgggaggctggacgagctgg

SEQ ID NO: 86265 - DNA, 26 bp, Homo sapiens
ggcgacgggaggctggacgagctggg

SEQ ID NO: 86266 - DNA, 26 bp, Homo sapiens
gcgacgggaggctggacgagctgggg

SEQ ID NO: 86267 - DNA, 26 bp, Homo sapiens
cgacgggaggctggacgagctggggc

SEQ ID NO: 86268 - DNA, 26 bp, Homo sapiens
gacgggaggctggacgagctggggct

SEQ ID NO: 86269 - DNA, 26 bp, Homo sapiens
acgggaggctggacgagctggggctg

SEQ ID NO: 86270 - DNA, 26 bp, Homo sapiens
cgggaggctggacgagctggggctgg

SEQ ID NO: 86271 - DNA, 26 bp, Homo sapiens
gggaggctggacgagctggggctgga

SEQ ID NO: 86272 - DNA, 26 bp, Homo sapiens
ggaggctggacgagctggggctggag

SEQ ID NO: 86273 - DNA, 26 bp, Homo sapiens
gaggctggacgagctggggctggagg

SEQ ID NO: 86274 - DNA, 26 bp, Homo sapiens
aggctggacgagctggggctggaggc

SEQ ID NO: 86275 - DNA, 26 bp, Homo sapiens
ggctggacgagctggggctggaggcc

SEQ ID NO: 86276 - DNA, 26 bp, Homo sapiens
gctggacgagctggggctggaggccg

SEQ ID NO: 86277 - DNA, 26 bp, Homo sapiens
ctggacgagctggggctggaggccgg

SEQ ID NO: 86278 - DNA, 26 bp, Homo sapiens
tggacgagctggggctggaggccggc

SEQ ID NO: 86279 - DNA, 26 bp, Homo sapiens
ggacgagctggggctggaggccggcg

SEQ ID NO: 86280 - DNA, 26 bp, Homo sapiens
gacgagctggggctggaggccggcgt

SEQ ID NO: 86281 - DNA, 26 bp, Homo sapiens
acgagctggggctggaggccggcgtg

SEQ ID NO: 86282 - DNA, 26 bp, Homo sapiens
cgagctggggctggaggccggcgtgc

SEQ ID NO: 86283 - DNA, 26 bp, Homo sapiens
gagctggggctggaggccggcgtgcc

SEQ ID NO: 86284 - DNA, 26 bp, Homo sapiens
agctggggctggaggccggcgtgccg

SEQ ID NO: 86285 - DNA, 26 bp, Homo sapiens
gctggggctggaggccggcgtgccgt

SEQ ID NO: 86286 - DNA, 26 bp, Homo sapiens
ctggggctggaggccggcgtgccgtg

SEQ ID NO: 86287 - DNA, 26 bp, Homo sapiens
tggggctggaggccggcgtgccgtgg

SEQ ID NO: 86288 - DNA, 26 bp, Homo sapiens
ggggctggaggccggcgtgccgtggc

SEQ ID NO: 86289 - DNA, 26 bp, Homo sapiens
gggctggaggccggcgtgccgtggcc

SEQ ID NO: 86290 - DNA, 26 bp, Homo sapiens
ggctggaggccggcgtgccgtggccc

SEQ ID NO: 86291 - DNA, 26 bp, Homo sapiens
gctggaggccggcgtgccgtggcccg

SEQ ID NO: 86292 - DNA, 26 bp, Homo sapiens
ctggaggccggcgtgccgtggcccga

SEQ ID NO: 86293 - DNA, 26 bp, Homo sapiens
tggaggccggcgtgccgtggcccgac

SEQ ID NO: 86294 - DNA, 26 bp, Homo sapiens
ggaggccggcgtgccgtggcccgacg

SEQ ID NO: 86295 - DNA, 26 bp, Homo sapiens
gaggccggcgtgccgtggcccgacgc

SEQ ID NO: 86296 - DNA, 26 bp, Homo sapiens
aggccggcgtgccgtggcccgacgcg

SEQ ID NO: 86297 - DNA, 26 bp, Homo sapiens
ggccggcgtgccgtggcccgacgcgg

SEQ ID NO: 86298 - DNA, 26 bp, Homo sapiens
gccggcgtgccgtggcccgacgcggg

SEQ ID NO: 86299 - DNA, 26 bp, Homo sapiens
ccggcgtgccgtggcccgacgcgggc

SEQ ID NO: 86300 - DNA, 26 bp, Homo sapiens
cggcgtgccgtggcccgacgcgggcc

SEQ ID NO: 86301 - DNA, 26 bp, Homo sapiens
ggcgtgccgtggcccgacgcgggccc

SEQ ID NO: 86302 - DNA, 26 bp, Homo sapiens
gcgtgccgtggcccgacgcgggcccg

SEQ ID NO: 86303 - DNA, 26 bp, Homo sapiens
cgtgccgtggcccgacgcgggcccga

SEQ ID NO: 86304 - DNA, 26 bp, Homo sapiens
gtgccgtggcccgacgcgggcccgag

SEQ ID NO: 86305 - DNA, 26 bp, Homo sapiens
tgccgtggcccgacgcgggcccgagg

SEQ ID NO: 86306 - DNA, 26 bp, Homo sapiens
gccgtggcccgacgcgggcccgaggt

SEQ ID NO: 86307 - DNA, 26 bp, Homo sapiens
ccgtggcccgacgcgggcccgaggtt

SEQ ID NO: 86308 - DNA, 26 bp, Homo sapiens
cgtggcccgacgcgggcccgaggttc

SEQ ID NO: 86309 - DNA, 26 bp, Homo sapiens
gtggcccgacgcgggcccgaggttct

SEQ ID NO: 86310 - DNA, 26 bp, Homo sapiens
tggcccgacgcgggcccgaggttctg

SEQ ID NO: 86311 - DNA, 26 bp, Homo sapiens
ggcccgacgcgggcccgaggttctgc

SEQ ID NO: 86312 - DNA, 26 bp, Homo sapiens
gcccgacgcgggcccgaggttctgcg

SEQ ID NO: 86313 - DNA, 26 bp, Homo sapiens
cccgacgcgggcccgaggttctgcgc

SEQ ID NO: 86314 - DNA, 26 bp, Homo sapiens
ccgacgcgggcccgaggttctgcgcg

SEQ ID NO: 86315 - DNA, 26 bp, Homo sapiens
cgacgcgggcccgaggttctgcgcgg

SEQ ID NO: 86316 - DNA, 26 bp, Homo sapiens
gacgcgggcccgaggttctgcgcggc

SEQ ID NO: 86317 - DNA, 26 bp, Homo sapiens
acgcgggcccgaggttctgcgcggcg

SEQ ID NO: 86318 - DNA, 26 bp, Homo sapiens
cgcgggcccgaggttctgcgcggcga

SEQ ID NO: 86319 - DNA, 26 bp, Homo sapiens
gcgggcccgaggttctgcgcggcgat

SEQ ID NO: 86320 - DNA, 26 bp, Homo sapiens
cgggcccgaggttctgcgcggcgatg

SEQ ID NO: 86321 - DNA, 26 bp, Homo sapiens
gggcccgaggttctgcgcggcgatga

SEQ ID NO: 86322 - DNA, 26 bp, Homo sapiens
ggcccgaggttctgcgcggcgatgaa

SEQ ID NO: 86323 - DNA, 26 bp, Homo sapiens
gcccgaggttctgcgcggcgatgaac

SEQ ID NO: 86324 - DNA, 26 bp, Homo sapiens
cccgaggttctgcgcggcgatgaact

SEQ ID NO: 86325 - DNA, 26 bp, Homo sapiens
ccgaggttctgcgcggcgatgaactg

SEQ ID NO: 86326 - DNA, 26 bp, Homo sapiens
cgaggttctgcgcggcgatgaactgc

SEQ ID NO: 86327 - DNA, 26 bp, Homo sapiens
gaggttctgcgcggcgatgaactgct

SEQ ID NO: 86328 - DNA, 26 bp, Homo sapiens
aggttctgcgcggcgatgaactgctt

SEQ ID NO: 86329 - DNA, 26 bp, Homo sapiens
ggttctgcgcggcgatgaactgcttg

SEQ ID NO: 86330 - DNA, 26 bp, Homo sapiens
gttctgcgcggcgatgaactgcttgg

SEQ ID NO: 86331 - DNA, 26 bp, Homo sapiens
ttctgcgcggcgatgaactgcttggg

SEQ ID NO: 86332 - DNA, 26 bp, Homo sapiens
tctgcgcggcgatgaactgcttgggg

SEQ ID NO: 86333 - DNA, 26 bp, Homo sapiens
ctgcgcggcgatgaactgcttggggc

SEQ ID NO: 86334 - DNA, 26 bp, Homo sapiens
tgcgcggcgatgaactgcttggggcg

SEQ ID NO: 86335 - DNA, 26 bp, Homo sapiens
gcgcggcgatgaactgcttggggcgc

SEQ ID NO: 86336 - DNA, 26 bp, Homo sapiens
cgcggcgatgaactgcttggggcgcg

SEQ ID NO: 86337 - DNA, 26 bp, Homo sapiens
gcggcgatgaactgcttggggcgcgc

SEQ ID NO: 86338 - DNA, 26 bp, Homo sapiens
cggcgatgaactgcttggggcgcgcg

SEQ ID NO: 86339 - DNA, 26 bp, Homo sapiens
ggcgatgaactgcttggggcgcgcgt

SEQ ID NO: 86340 - DNA, 26 bp, Homo sapiens
gcgatgaactgcttggggcgcgcgta

SEQ ID NO: 86341 - DNA, 26 bp, Homo sapiens
cgatgaactgcttggggcgcgcgtag

SEQ ID NO: 86342 - DNA, 26 bp, Homo sapiens
gatgaactgcttggggcgcgcgtagt

SEQ ID NO: 86343 - DNA, 26 bp, Homo sapiens
atgaactgcttggggcgcgcgtagtt

SEQ ID NO: 86344 - DNA, 26 bp, Homo sapiens
tgaactgcttggggcgcgcgtagttg

SEQ ID NO: 86345 - DNA, 26 bp, Homo sapiens
gaactgcttggggcgcgcgtagttga

SEQ ID NO: 86346 - DNA, 26 bp, Homo sapiens
aactgcttggggcgcgcgtagttgaa

SEQ ID NO: 86347 - DNA, 26 bp, Homo sapiens
actgcttggggcgcgcgtagttgaag

SEQ ID NO: 86348 - DNA, 26 bp, Homo sapiens
ctgcttggggcgcgcgtagttgaagg

SEQ ID NO: 86349 - DNA, 26 bp, Homo sapiens
tgcttggggcgcgcgtagttgaagga

SEQ ID NO: 86350 - DNA, 26 bp, Homo sapiens
gcttggggcgcgcgtagttgaaggag

SEQ ID NO: 86351 - DNA, 26 bp, Homo sapiens
cttggggcgcgcgtagttgaaggagc

SEQ ID NO: 86352 - DNA, 26 bp, Homo sapiens
ttggggcgcgcgtagttgaaggagcc

SEQ ID NO: 86353 - DNA, 26 bp, Homo sapiens
tggggcgcgcgtagttgaaggagccg

SEQ ID NO: 86354 - DNA, 26 bp, Homo sapiens
ggggcgcgcgtagttgaaggagccgg

SEQ ID NO: 86355 - DNA, 26 bp, Homo sapiens
gggcgcgcgtagttgaaggagccgga

SEQ ID NO: 86356 - DNA, 26 bp, Homo sapiens
ggcgcgcgtagttgaaggagccggag

SEQ ID NO: 86357 - DNA, 26 bp, Homo sapiens
gcgcgcgtagttgaaggagccggagg

SEQ ID NO: 86358 - DNA, 26 bp, Homo sapiens
cgcgcgtagttgaaggagccggagga

SEQ ID NO: 86359 - DNA, 26 bp, Homo sapiens
gcgcgtagttgaaggagccggaggac

SEQ ID NO: 86360 - DNA, 26 bp, Homo sapiens
cgcgtagttgaaggagccggaggact

SEQ ID NO: 86361 - DNA, 26 bp, Homo sapiens
gcgtagttgaaggagccggaggactg

SEQ ID NO: 86362 - DNA, 26 bp, Homo sapiens
cgtagttgaaggagccggaggactgc

SEQ ID NO: 86363 - DNA, 26 bp, Homo sapiens
gtagttgaaggagccggaggactgca

SEQ ID NO: 86364 - DNA, 26 bp, Homo sapiens
tagttgaaggagccggaggactgcat

SEQ ID NO: 86365 - DNA, 26 bp, Homo sapiens
agttgaaggagccggaggactgcatg

SEQ ID NO: 86366 - DNA, 26 bp, Homo sapiens
gttgaaggagccggaggactgcatgg

SEQ ID NO: 86367 - DNA, 26 bp, Homo sapiens
ttgaaggagccggaggactgcatggc

SEQ ID NO: 86368 - DNA, 26 bp, Homo sapiens
tgaaggagccggaggactgcatggcg

SEQ ID NO: 86369 - DNA, 26 bp, Homo sapiens
gaaggagccggaggactgcatggcgg

SEQ ID NO: 86370 - DNA, 26 bp, Homo sapiens
aaggagccggaggactgcatggcggg

SEQ ID NO: 86371 - DNA, 26 bp, Homo sapiens
aggagccggaggactgcatggcgggg

SEQ ID NO: 86372 - DNA, 26 bp, Homo sapiens
ggagccggaggactgcatggcggggg

SEQ ID NO: 86373 - DNA, 26 bp, Homo sapiens
gagccggaggactgcatggcgggggc

SEQ ID NO: 86374 - DNA, 26 bp, Homo sapiens
agccggaggactgcatggcgggggcg

SEQ ID NO: 86375 - DNA, 26 bp, Homo sapiens
gccggaggactgcatggcgggggcgg

SEQ ID NO: 86376 - DNA, 26 bp, Homo sapiens
ccggaggactgcatggcgggggcgga

SEQ ID NO: 86377 - DNA, 26 bp, Homo sapiens
cggaggactgcatggcgggggcggag

SEQ ID NO: 86378 - DNA, 26 bp, Homo sapiens
ggaggactgcatggcgggggcggagc

SEQ ID NO: 86379 - DNA, 26 bp, Homo sapiens
gaggactgcatggcgggggcggagcg

SEQ ID NO: 86380 - DNA, 26 bp, Homo sapiens
aggactgcatggcgggggcggagcgg

SEQ ID NO: 86381 - DNA, 26 bp, Homo sapiens
ggactgcatggcgggggcggagcggg

SEQ ID NO: 86382 - DNA, 26 bp, Homo sapiens
gactgcatggcgggggcggagcggga

SEQ ID NO: 86383 - DNA, 26 bp, Homo sapiens
actgcatggcgggggcggagcgggag

SEQ ID NO: 86384 - DNA, 26 bp, Homo sapiens
ctgcatggcgggggcggagcgggagg

SEQ ID NO: 86385 - DNA, 26 bp, Homo sapiens
tgcatggcgggggcggagcgggaggc

SEQ ID NO: 86386 - DNA, 26 bp, Homo sapiens
gcatggcgggggcggagcgggaggcc

SEQ ID NO: 86387 - DNA, 26 bp, Homo sapiens
catggcgggggcggagcgggaggcca

SEQ ID NO: 86388 - DNA, 26 bp, Homo sapiens
atggcgggggcggagcgggaggccag

SEQ ID NO: 86389 - DNA, 26 bp, Homo sapiens
tggcgggggcggagcgggaggccagc

SEQ ID NO: 86390 - DNA, 26 bp, Homo sapiens
ggcgggggcggagcgggaggccagcg

SEQ ID NO: 86391 - DNA, 26 bp, Homo sapiens
gcgggggcggagcgggaggccagcgc

SEQ ID NO: 86392 - DNA, 26 bp, Homo sapiens
cgggggcggagcgggaggccagcgcg

SEQ ID NO: 86393 - DNA, 26 bp, Homo sapiens
gggggcggagcgggaggccagcgcgc

SEQ ID NO: 86394 - DNA, 26 bp, Homo sapiens
ggggcggagcgggaggccagcgcgct

SEQ ID NO: 86395 - DNA, 26 bp, Homo sapiens
gggcggagcgggaggccagcgcgctc

SEQ ID NO: 86396 - DNA, 26 bp, Homo sapiens
ggcggagcgggaggccagcgcgctca

SEQ ID NO: 86397 - DNA, 26 bp, Homo sapiens
gcggagcgggaggccagcgcgctcat

SEQ ID NO: 86398 - DNA, 26 bp, Homo sapiens
cggagcgggaggccagcgcgctcatg

SEQ ID NO: 86399 - DNA, 26 bp, Homo sapiens
ggagcgggaggccagcgcgctcatgg

SEQ ID NO: 86400 - DNA, 26 bp, Homo sapiens
gagcgggaggccagcgcgctcatggg

SEQ ID NO: 86401 - DNA, 26 bp, Homo sapiens
agcgggaggccagcgcgctcatgggc

SEQ ID NO: 86402 - DNA, 26 bp, Homo sapiens
gcgggaggccagcgcgctcatgggct

SEQ ID NO: 86403 - DNA, 26 bp, Homo sapiens
cgggaggccagcgcgctcatgggctc

SEQ ID NO: 86404 - DNA, 26 bp, Homo sapiens
gggaggccagcgcgctcatgggctcc

SEQ ID NO: 86405 - DNA, 26 bp, Homo sapiens
ggaggccagcgcgctcatgggctccg

SEQ ID NO: 86406 - DNA, 26 bp, Homo sapiens
gaggccagcgcgctcatgggctccgg

SEQ ID NO: 86407 - DNA, 26 bp, Homo sapiens
aggccagcgcgctcatgggctccggg

SEQ ID NO: 86408 - DNA, 26 bp, Homo sapiens
ggccagcgcgctcatgggctccgggg

SEQ ID NO: 86409 - DNA, 26 bp, Homo sapiens
gccagcgcgctcatgggctccgggga

SEQ ID NO: 86410 - DNA, 26 bp, Homo sapiens
ccagcgcgctcatgggctccggggac

SEQ ID NO: 86411 - DNA, 26 bp, Homo sapiens
cagcgcgctcatgggctccggggacg

SEQ ID NO: 86412 - DNA, 26 bp, Homo sapiens
agcgcgctcatgggctccggggacgc

SEQ ID NO: 86413 - DNA, 26 bp, Homo sapiens
gcgcgctcatgggctccggggacgcg

SEQ ID NO: 86414 - DNA, 26 bp, Homo sapiens
cgcgctcatgggctccggggacgcgg

SEQ ID NO: 86415 - DNA, 26 bp, Homo sapiens
gcgctcatgggctccggggacgcggg

SEQ ID NO: 86416 - DNA, 26 bp, Homo sapiens
cgctcatgggctccggggacgcgggc

SEQ ID NO: 86417 - DNA, 26 bp, Homo sapiens
gctcatgggctccggggacgcgggcg

SEQ ID NO: 86418 - DNA, 26 bp, Homo sapiens
ctcatgggctccggggacgcgggcgg

SEQ ID NO: 86419 - DNA, 26 bp, Homo sapiens
tcatgggctccggggacgcgggcggc

SEQ ID NO: 86420 - DNA, 26 bp, Homo sapiens
catgggctccggggacgcgggcggcg

SEQ ID NO: 86421 - DNA, 26 bp, Homo sapiens
atgggctccggggacgcgggcggcgt

SEQ ID NO: 86422 - DNA, 26 bp, Homo sapiens
tgggctccggggacgcgggcggcgtg

SEQ ID NO: 86423 - DNA, 26 bp, Homo sapiens
gggctccggggacgcgggcggcgtgc

SEQ ID NO: 86424 - DNA, 26 bp, Homo sapiens
ggctccggggacgcgggcggcgtgca

SEQ ID NO: 86425 - DNA, 26 bp, Homo sapiens
gctccggggacgcgggcggcgtgcag

SEQ ID NO: 86426 - DNA, 26 bp, Homo sapiens
ctccggggacgcgggcggcgtgcagg

SEQ ID NO: 86427 - DNA, 26 bp, Homo sapiens
tccggggacgcgggcggcgtgcaggc

SEQ ID NO: 86428 - DNA, 26 bp, Homo sapiens
ccggggacgcgggcggcgtgcaggcc

SEQ ID NO: 86429 - DNA, 26 bp, Homo sapiens
cggggacgcgggcggcgtgcaggccg

SEQ ID NO: 86430 - DNA, 26 bp, Homo sapiens
ggggacgcgggcggcgtgcaggccgc

SEQ ID NO: 86431 - DNA, 26 bp, Homo sapiens
gggacgcgggcggcgtgcaggccgcg

SEQ ID NO: 86432 - DNA, 26 bp, Homo sapiens
ggacgcgggcggcgtgcaggccgcga

SEQ ID NO: 86433 - DNA, 26 bp, Homo sapiens
gacgcgggcggcgtgcaggccgcgag

SEQ ID NO: 86434 - DNA, 26 bp, Homo sapiens
acgcgggcggcgtgcaggccgcgagc

SEQ ID NO: 86435 - DNA, 26 bp, Homo sapiens
cgcgggcggcgtgcaggccgcgagct

SEQ ID NO: 86436 - DNA, 26 bp, Homo sapiens
gcgggcggcgtgcaggccgcgagctc

SEQ ID NO: 86437 - DNA, 26 bp, Homo sapiens
cgggcggcgtgcaggccgcgagctcg

SEQ ID NO: 86438 - DNA, 26 bp, Homo sapiens
gggcggcgtgcaggccgcgagctcgg

SEQ ID NO: 86439 - DNA, 26 bp, Homo sapiens
ggcggcgtgcaggccgcgagctcggg

SEQ ID NO: 86440 - DNA, 26 bp, Homo sapiens
gcggcgtgcaggccgcgagctcgggg

SEQ ID NO: 86441 - DNA, 26 bp, Homo sapiens
cggcgtgcaggccgcgagctcgggga

SEQ ID NO: 86442 - DNA, 26 bp, Homo sapiens
ggcgtgcaggccgcgagctcggggaa

SEQ ID NO: 86443 - DNA, 26 bp, Homo sapiens
gcgtgcaggccgcgagctcggggaag

SEQ ID NO: 86444 - DNA, 26 bp, Homo sapiens
cgtgcaggccgcgagctcggggaagg

SEQ ID NO: 86445 - DNA, 26 bp, Homo sapiens
gtgcaggccgcgagctcggggaaggc

SEQ ID NO: 86446 - DNA, 26 bp, Homo sapiens
tgcaggccgcgagctcggggaaggcg

SEQ ID NO: 86447 - DNA, 26 bp, Homo sapiens
gcaggccgcgagctcggggaaggcgg

SEQ ID NO: 86448 - DNA, 26 bp, Homo sapiens
caggccgcgagctcggggaaggcggg

SEQ ID NO: 86449 - DNA, 26 bp, Homo sapiens
aggccgcgagctcggggaaggcgggc

SEQ ID NO: 86450 - DNA, 26 bp, Homo sapiens
ggccgcgagctcggggaaggcgggcg

SEQ ID NO: 86451 - DNA, 26 bp, Homo sapiens
gccgcgagctcggggaaggcgggcgg

SEQ ID NO: 86452 - DNA, 26 bp, Homo sapiens
ccgcgagctcggggaaggcgggcggc

SEQ ID NO: 86453 - DNA, 26 bp, Homo sapiens
cgcgagctcggggaaggcgggcggcg

SEQ ID NO: 86454 - DNA, 26 bp, Homo sapiens
gcgagctcggggaaggcgggcggcgg

SEQ ID NO: 86455 - DNA, 26 bp, Homo sapiens
cgagctcggggaaggcgggcggcggc

SEQ ID NO: 86456 - DNA, 26 bp, Homo sapiens
gagctcggggaaggcgggcggcggcg

SEQ ID NO: 86457 - DNA, 26 bp, Homo sapiens
agctcggggaaggcgggcggcggcgg

SEQ ID NO: 86458 - DNA, 26 bp, Homo sapiens
gctcggggaaggcgggcggcggcggg

SEQ ID NO: 86459 - DNA, 26 bp, Homo sapiens
ctcggggaaggcgggcggcggcggga

SEQ ID NO: 86460 - DNA, 26 bp, Homo sapiens
tcggggaaggcgggcggcggcgggaa

SEQ ID NO: 86461 - DNA, 26 bp, Homo sapiens
cggggaaggcgggcggcggcgggaag

SEQ ID NO: 86462 - DNA, 26 bp, Homo sapiens
ggggaaggcgggcggcggcgggaagg

SEQ ID NO: 86463 - DNA, 26 bp, Homo sapiens
gggaaggcgggcggcggcgggaaggg

SEQ ID NO: 86464 - DNA, 26 bp, Homo sapiens
ggaaggcgggcggcggcgggaagggg

SEQ ID NO: 86465 - DNA, 26 bp, Homo sapiens
gaaggcgggcggcggcgggaaggggg

SEQ ID NO: 86466 - DNA, 26 bp, Homo sapiens
aaggcgggcggcggcgggaagggggg

SEQ ID NO: 86467 - DNA, 26 bp, Homo sapiens
aggcgggcggcggcgggaaggggggc

SEQ ID NO: 86468 - DNA, 26 bp, Homo sapiens
ggcgggcggcggcgggaaggggggcg

SEQ ID NO: 86469 - DNA, 26 bp, Homo sapiens
gcgggcggcggcgggaaggggggcga

SEQ ID NO: 86470 - DNA, 26 bp, Homo sapiens
cgggcggcggcgggaaggggggcgag

SEQ ID NO: 86471 - DNA, 26 bp, Homo sapiens
gggcggcggcgggaaggggggcgagg

SEQ ID NO: 86472 - DNA, 26 bp, Homo sapiens
ggcggcggcgggaaggggggcgaggg

SEQ ID NO: 86473 - DNA, 26 bp, Homo sapiens
gcggcggcgggaaggggggcgagggc

SEQ ID NO: 86474 - DNA, 26 bp, Homo sapiens
cggcggcgggaaggggggcgagggcg

SEQ ID NO: 86475 - DNA, 26 bp, Homo sapiens
ggcggcgggaaggggggcgagggcgg

SEQ ID NO: 86476 - DNA, 26 bp, Homo sapiens
gcggcgggaaggggggcgagggcggc

SEQ ID NO: 86477 - DNA, 26 bp, Homo sapiens
cggcgggaaggggggcgagggcggcg

SEQ ID NO: 86478 - DNA, 26 bp, Homo sapiens
ggcgggaaggggggcgagggcggcgc

SEQ ID NO: 86479 - DNA, 26 bp, Homo sapiens
gcgggaaggggggcgagggcggcgcg

SEQ ID NO: 86480 - DNA, 26 bp, Homo sapiens
cgggaaggggggcgagggcggcgcgc

SEQ ID NO: 86481 - DNA, 26 bp, Homo sapiens
gggaaggggggcgagggcggcgcgct

SEQ ID NO: 86482 - DNA, 26 bp, Homo sapiens
ggaaggggggcgagggcggcgcgctg

SEQ ID NO: 86483 - DNA, 26 bp, Homo sapiens
gaaggggggcgagggcggcgcgctgc

SEQ ID NO: 86484 - DNA, 26 bp, Homo sapiens
aaggggggcgagggcggcgcgctgcg

SEQ ID NO: 86485 - DNA, 26 bp, Homo sapiens
aggggggcgagggcggcgcgctgcgc

SEQ ID NO: 86486 - DNA, 26 bp, Homo sapiens
ggggggcgagggcggcgcgctgcgcg

SEQ ID NO: 86487 - DNA, 26 bp, Homo sapiens
gggggcgagggcggcgcgctgcgcgg

SEQ ID NO: 86488 - DNA, 26 bp, Homo sapiens
ggggcgagggcggcgcgctgcgcggg

SEQ ID NO: 86489 - DNA, 26 bp, Homo sapiens
gggcgagggcggcgcgctgcgcgggg

SEQ ID NO: 86490 - DNA, 26 bp, Homo sapiens
ggcgagggcggcgcgctgcgcggggc

SEQ ID NO: 86491 - DNA, 26 bp, Homo sapiens
gcgagggcggcgcgctgcgcggggct

SEQ ID NO: 86492 - DNA, 26 bp, Homo sapiens
cgagggcggcgcgctgcgcggggctg

SEQ ID NO: 86493 - DNA, 26 bp, Homo sapiens
gagggcggcgcgctgcgcggggctgg

SEQ ID NO: 86494 - DNA, 26 bp, Homo sapiens
agggcggcgcgctgcgcggggctggc

SEQ ID NO: 86495 - DNA, 26 bp, Homo sapiens
gggcggcgcgctgcgcggggctggcg

SEQ ID NO: 86496 - DNA, 26 bp, Homo sapiens
ggcggcgcgctgcgcggggctggcgg

SEQ ID NO: 86497 - DNA, 26 bp, Homo sapiens
gcggcgcgctgcgcggggctggcgga

SEQ ID NO: 86498 - DNA, 26 bp, Homo sapiens
cggcgcgctgcgcggggctggcggag

SEQ ID NO: 86499 - DNA, 26 bp, Homo sapiens
ggcgcgctgcgcggggctggcggagg

SEQ ID NO: 86500 - DNA, 26 bp, Homo sapiens
gcgcgctgcgcggggctggcggaggc

SEQ ID NO: 86501 - DNA, 26 bp, Homo sapiens
cgcgctgcgcggggctggcggaggct

SEQ ID NO: 86502 - DNA, 26 bp, Homo sapiens
gcgctgcgcggggctggcggaggctg

SEQ ID NO: 86503 - DNA, 26 bp, Homo sapiens
cgctgcgcggggctggcggaggctgc

SEQ ID NO: 86504 - DNA, 26 bp, Homo sapiens
gctgcgcggggctggcggaggctgcc

SEQ ID NO: 86505 - DNA, 26 bp, Homo sapiens
ctgcgcggggctggcggaggctgccg

SEQ ID NO: 86506 - DNA, 26 bp, Homo sapiens
tgcgcggggctggcggaggctgccga

SEQ ID NO: 86507 - DNA, 26 bp, Homo sapiens
gcgcggggctggcggaggctgccgag

SEQ ID NO: 86508 - DNA, 26 bp, Homo sapiens
cgcggggctggcggaggctgccgagc

SEQ ID NO: 86509 - DNA, 26 bp, Homo sapiens
gcggggctggcggaggctgccgagcg

SEQ ID NO: 86510 - DNA, 26 bp, Homo sapiens
cggggctggcggaggctgccgagcgc

SEQ ID NO: 86511 - DNA, 26 bp, Homo sapiens
ggggctggcggaggctgccgagcgcc

SEQ ID NO: 86512 - DNA, 26 bp, Homo sapiens
gggctggcggaggctgccgagcgccg

SEQ ID NO: 86513 - DNA, 26 bp, Homo sapiens
ggctggcggaggctgccgagcgccgg

SEQ ID NO: 86514 - DNA, 26 bp, Homo sapiens
gctggcggaggctgccgagcgccggc

SEQ ID NO: 86515 - DNA, 26 bp, Homo sapiens
ctggcggaggctgccgagcgccggcc

SEQ ID NO: 86516 - DNA, 26 bp, Homo sapiens
tggcggaggctgccgagcgccggcct

SEQ ID NO: 86517 - DNA, 26 bp, Homo sapiens
ggcggaggctgccgagcgccggcctc

SEQ ID NO: 86518 - DNA, 26 bp, Homo sapiens
gcggaggctgccgagcgccggcctcc

SEQ ID NO: 86519 - DNA, 26 bp, Homo sapiens
cggaggctgccgagcgccggcctcct

SEQ ID NO: 86520 - DNA, 26 bp, Homo sapiens
ggaggctgccgagcgccggcctcctg

SEQ ID NO: 86521 - DNA, 26 bp, Homo sapiens
gaggctgccgagcgccggcctcctgc

SEQ ID NO: 86522 - DNA, 26 bp, Homo sapiens
aggctgccgagcgccggcctcctgct

SEQ ID NO: 86523 - DNA, 26 bp, Homo sapiens
ggctgccgagcgccggcctcctgctc

SEQ ID NO: 86524 - DNA, 26 bp, Homo sapiens
gctgccgagcgccggcctcctgctcc

SEQ ID NO: 86525 - DNA, 26 bp, Homo sapiens
ctgccgagcgccggcctcctgctcca

SEQ ID NO: 86526 - DNA, 26 bp, Homo sapiens
tgccgagcgccggcctcctgctccag

SEQ ID NO: 86527 - DNA, 26 bp, Homo sapiens
gccgagcgccggcctcctgctccagt

SEQ ID NO: 86528 - DNA, 26 bp, Homo sapiens
ccgagcgccggcctcctgctccagtc

SEQ ID NO: 86529 - DNA, 26 bp, Homo sapiens
cgagcgccggcctcctgctccagtcg

SEQ ID NO: 86530 - DNA, 26 bp, Homo sapiens
gagcgccggcctcctgctccagtcgg

SEQ ID NO: 86531 - DNA, 26 bp, Homo sapiens
agcgccggcctcctgctccagtcgga

SEQ ID NO: 86532 - DNA, 26 bp, Homo sapiens
gcgccggcctcctgctccagtcggat

SEQ ID NO: 86533 - DNA, 26 bp, Homo sapiens
cgccggcctcctgctccagtcggatt

SEQ ID NO: 86534 - DNA, 26 bp, Homo sapiens
gccggcctcctgctccagtcggattt

SEQ ID NO: 86535 - DNA, 26 bp, Homo sapiens
ccggcctcctgctccagtcggatttg

SEQ ID NO: 86536 - DNA, 26 bp, Homo sapiens
cggcctcctgctccagtcggatttgg

SEQ ID NO: 86537 - DNA, 26 bp, Homo sapiens
ggcctcctgctccagtcggatttggt

SEQ ID NO: 86538 - DNA, 26 bp, Homo sapiens
gcctcctgctccagtcggatttggtt

SEQ ID NO: 86539 - DNA, 26 bp, Homo sapiens
cctcctgctccagtcggatttggttc

SEQ ID NO: 86540 - DNA, 26 bp, Homo sapiens
ctcctgctccagtcggatttggttct

SEQ ID NO: 86541 - DNA, 26 bp, Homo sapiens
tcctgctccagtcggatttggttctg

SEQ ID NO: 86542 - DNA, 26 bp, Homo sapiens
cctgctccagtcggatttggttctgg

SEQ ID NO: 86543 - DNA, 26 bp, Homo sapiens
ctgctccagtcggatttggttctgga

SEQ ID NO: 86544 - DNA, 26 bp, Homo sapiens
tgctccagtcggatttggttctggag

SEQ ID NO: 86545 - DNA, 26 bp, Homo sapiens
gctccagtcggatttggttctggagt

SEQ ID NO: 86546 - DNA, 26 bp, Homo sapiens
ctccagtcggatttggttctggagtt

SEQ ID NO: 86547 - DNA, 26 bp, Homo sapiens
tccagtcggatttggttctggagttg

SEQ ID NO: 86548 - DNA, 26 bp, Homo sapiens
ccagtcggatttggttctggagttgc

SEQ ID NO: 86549 - DNA, 26 bp, Homo sapiens
cagtcggatttggttctggagttgct

SEQ ID NO: 86550 - DNA, 26 bp, Homo sapiens
agtcggatttggttctggagttgctg

SEQ ID NO: 86551 - DNA, 26 bp, Homo sapiens
gtcggatttggttctggagttgctgg

SEQ ID NO: 86552 - DNA, 26 bp, Homo sapiens
tcggatttggttctggagttgctgga

SEQ ID NO: 86553 - DNA, 26 bp, Homo sapiens
cggatttggttctggagttgctggag

SEQ ID NO: 86554 - DNA, 26 bp, Homo sapiens
ggatttggttctggagttgctggagc

SEQ ID NO: 86555 - DNA, 26 bp, Homo sapiens
gatttggttctggagttgctggagct

SEQ ID NO: 86556 - DNA, 26 bp, Homo sapiens
atttggttctggagttgctggagctt

SEQ ID NO: 86557 - DNA, 26 bp, Homo sapiens
tttggttctggagttgctggagcttc

SEQ ID NO: 86558 - DNA, 26 bp, Homo sapiens
ttggttctggagttgctggagcttca

SEQ ID NO: 86559 - DNA, 26 bp, Homo sapiens
tggttctggagttgctggagcttcag

SEQ ID NO: 86560 - DNA, 26 bp, Homo sapiens
ggttctggagttgctggagcttcaga

SEQ ID NO: 86561 - DNA, 26 bp, Homo sapiens
gttctggagttgctggagcttcagag

SEQ ID NO: 86562 - DNA, 26 bp, Homo sapiens
ttctggagttgctggagcttcagagg

SEQ ID NO: 86563 - DNA, 26 bp, Homo sapiens
tctggagttgctggagcttcagaggg

SEQ ID NO: 86564 - DNA, 26 bp, Homo sapiens
ctggagttgctggagcttcagagggt

SEQ ID NO: 86565 - DNA, 26 bp, Homo sapiens
tggagttgctggagcttcagagggtc

SEQ ID NO: 86566 - DNA, 26 bp, Homo sapiens
ggagttgctggagcttcagagggtcc

SEQ ID NO: 86567 - DNA, 26 bp, Homo sapiens
gagttgctggagcttcagagggtcca

SEQ ID NO: 86568 - DNA, 26 bp, Homo sapiens
agttgctggagcttcagagggtccag

SEQ ID NO: 86569 - DNA, 26 bp, Homo sapiens
gttgctggagcttcagagggtccagt

SEQ ID NO: 86570 - DNA, 26 bp, Homo sapiens
ttgctggagcttcagagggtccagtt

SEQ ID NO: 86571 - DNA, 26 bp, Homo sapiens
tgctggagcttcagagggtccagttt

SEQ ID NO: 86572 - DNA, 26 bp, Homo sapiens
gctggagcttcagagggtccagtttt

SEQ ID NO: 86573 - DNA, 26 bp, Homo sapiens
ctggagcttcagagggtccagttttg

SEQ ID NO: 86574 - DNA, 26 bp, Homo sapiens
tggagcttcagagggtccagttttgg

SEQ ID NO: 86575 - DNA, 26 bp, Homo sapiens
ggagcttcagagggtccagttttggt

SEQ ID NO: 86576 - DNA, 26 bp, Homo sapiens
gagcttcagagggtccagttttggtt

SEQ ID NO: 86577 - DNA, 26 bp, Homo sapiens
agcttcagagggtccagttttggttt

SEQ ID NO: 86578 - DNA, 26 bp, Homo sapiens
gcttcagagggtccagttttggtttg

SEQ ID NO: 86579 - DNA, 26 bp, Homo sapiens
cttcagagggtccagttttggtttgg

SEQ ID NO: 86580 - DNA, 26 bp, Homo sapiens
ttcagagggtccagttttggtttggc

SEQ ID NO: 86581 - DNA, 26 bp, Homo sapiens
tcagagggtccagttttggtttggca

SEQ ID NO: 86582 - DNA, 26 bp, Homo sapiens
cagagggtccagttttggtttggcaa

SEQ ID NO: 86583 - DNA, 26 bp, Homo sapiens
agagggtccagttttggtttggcaag

SEQ ID NO: 86584 - DNA, 26 bp, Homo sapiens
gagggtccagttttggtttggcaagc

SEQ ID NO: 86585 - DNA, 26 bp, Homo sapiens
agggtccagttttggtttggcaagca

SEQ ID NO: 86586 - DNA, 26 bp, Homo sapiens
gggtccagttttggtttggcaagcag

SEQ ID NO: 86587 - DNA, 26 bp, Homo sapiens
ggtccagttttggtttggcaagcaga

SEQ ID NO: 86588 - DNA, 26 bp, Homo sapiens
gtccagttttggtttggcaagcagag

SEQ ID NO: 86589 - DNA, 26 bp, Homo sapiens
tccagttttggtttggcaagcagagg

SEQ ID NO: 86590 - DNA, 26 bp, Homo sapiens
ccagttttggtttggcaagcagaggt

SEQ ID NO: 86591 - DNA, 26 bp, Homo sapiens
cagttttggtttggcaagcagaggtg

SEQ ID NO: 86592 - DNA, 26 bp, Homo sapiens
agttttggtttggcaagcagaggtgg

SEQ ID NO: 86593 - DNA, 26 bp, Homo sapiens
gttttggtttggcaagcagaggtggt

SEQ ID NO: 86594 - DNA, 26 bp, Homo sapiens
ttttggtttggcaagcagaggtggtg

SEQ ID NO: 86595 - DNA, 26 bp, Homo sapiens
tttggtttggcaagcagaggtggtgg

SEQ ID NO: 86596 - DNA, 26 bp, Homo sapiens
ttggtttggcaagcagaggtggtggc

SEQ ID NO: 86597 - DNA, 26 bp, Homo sapiens
tggtttggcaagcagaggtggtggct

SEQ ID NO: 86598 - DNA, 26 bp, Homo sapiens
ggtttggcaagcagaggtggtggctc

SEQ ID NO: 86599 - DNA, 26 bp, Homo sapiens
gtttggcaagcagaggtggtggctcc

SEQ ID NO: 86600 - DNA, 26 bp, Homo sapiens
tttggcaagcagaggtggtggctcct

SEQ ID NO: 86601 - DNA, 26 bp, Homo sapiens
ttggcaagcagaggtggtggctcctt

SEQ ID NO: 86602 - DNA, 26 bp, Homo sapiens
tggcaagcagaggtggtggctcctta

SEQ ID NO: 86603 - DNA, 26 bp, Homo sapiens
ggcaagcagaggtggtggctccttag

SEQ ID NO: 86604 - DNA, 26 bp, Homo sapiens
gcaagcagaggtggtggctccttagt

SEQ ID NO: 86605 - DNA, 26 bp, Homo sapiens
caagcagaggtggtggctccttagtg

SEQ ID NO: 86606 - DNA, 26 bp, Homo sapiens
aagcagaggtggtggctccttagtgg

SEQ ID NO: 86607 - DNA, 26 bp, Homo sapiens
agcagaggtggtggctccttagtggg

SEQ ID NO: 86608 - DNA, 26 bp, Homo sapiens
gcagaggtggtggctccttagtgggt

SEQ ID NO: 86609 - DNA, 26 bp, Homo sapiens
cagaggtggtggctccttagtgggtg

SEQ ID NO: 86610 - DNA, 26 bp, Homo sapiens
agaggtggtggctccttagtgggtga

SEQ ID NO: 86611 - DNA, 26 bp, Homo sapiens
gaggtggtggctccttagtgggtgaa

SEQ ID NO: 86612 - DNA, 26 bp, Homo sapiens
aggtggtggctccttagtgggtgaaa

SEQ ID NO: 86613 - DNA, 26 bp, Homo sapiens
ggtggtggctccttagtgggtgaaag

SEQ ID NO: 86614 - DNA, 26 bp, Homo sapiens
gtggtggctccttagtgggtgaaagc

SEQ ID NO: 86615 - DNA, 26 bp, Homo sapiens
tggtggctccttagtgggtgaaagca

SEQ ID NO: 86616 - DNA, 26 bp, Homo sapiens
ggtggctccttagtgggtgaaagcag

SEQ ID NO: 86617 - DNA, 26 bp, Homo sapiens
gtggctccttagtgggtgaaagcagg

SEQ ID NO: 86618 - DNA, 26 bp, Homo sapiens
tggctccttagtgggtgaaagcagga

SEQ ID NO: 86619 - DNA, 26 bp, Homo sapiens
ggctccttagtgggtgaaagcaggac

SEQ ID NO: 86620 - DNA, 26 bp, Homo sapiens
gctccttagtgggtgaaagcaggaca

SEQ ID NO: 86621 - DNA, 26 bp, Homo sapiens
ctccttagtgggtgaaagcaggacag

SEQ ID NO: 86622 - DNA, 26 bp, Homo sapiens
tccttagtgggtgaaagcaggacagc

SEQ ID NO: 86623 - DNA, 26 bp, Homo sapiens
ccttagtgggtgaaagcaggacagct

SEQ ID NO: 86624 - DNA, 26 bp, Homo sapiens
cttagtgggtgaaagcaggacagctg

SEQ ID NO: 86625 - DNA, 26 bp, Homo sapiens
ttagtgggtgaaagcaggacagctgg

SEQ ID NO: 86626 - DNA, 26 bp, Homo sapiens
tagtgggtgaaagcaggacagctggt

SEQ ID NO: 86627 - DNA, 26 bp, Homo sapiens
agtgggtgaaagcaggacagctggtg

SEQ ID NO: 86628 - DNA, 26 bp, Homo sapiens
gtgggtgaaagcaggacagctggtgt

SEQ ID NO: 86629 - DNA, 26 bp, Homo sapiens
tgggtgaaagcaggacagctggtgtt

SEQ ID NO: 86630 - DNA, 26 bp, Homo sapiens
gggtgaaagcaggacagctggtgttg

SEQ ID NO: 86631 - DNA, 26 bp, Homo sapiens
ggtgaaagcaggacagctggtgttgg

SEQ ID NO: 86632 - DNA, 26 bp, Homo sapiens
gtgaaagcaggacagctggtgttgga

SEQ ID NO: 86633 - DNA, 26 bp, Homo sapiens
tgaaagcaggacagctggtgttggaa

SEQ ID NO: 86634 - DNA, 26 bp, Homo sapiens
gaaagcaggacagctggtgttggaag

SEQ ID NO: 86635 - DNA, 26 bp, Homo sapiens
aaagcaggacagctggtgttggaaga

SEQ ID NO: 86636 - DNA, 26 bp, Homo sapiens
aagcaggacagctggtgttggaagag

SEQ ID NO: 86637 - DNA, 26 bp, Homo sapiens
agcaggacagctggtgttggaagaga

SEQ ID NO: 86638 - DNA, 26 bp, Homo sapiens
gcaggacagctggtgttggaagagat

SEQ ID NO: 86639 - DNA, 26 bp, Homo sapiens
caggacagctggtgttggaagagatt

SEQ ID NO: 86640 - DNA, 26 bp, Homo sapiens
aggacagctggtgttggaagagattt

SEQ ID NO: 86641 - DNA, 26 bp, Homo sapiens
ggacagctggtgttggaagagattta

SEQ ID NO: 86642 - DNA, 26 bp, Homo sapiens
gacagctggtgttggaagagatttat

SEQ ID NO: 86643 - DNA, 26 bp, Homo sapiens
acagctggtgttggaagagatttatt

SEQ ID NO: 86644 - DNA, 26 bp, Homo sapiens
cagctggtgttggaagagatttatta

SEQ ID NO: 86645 - DNA, 26 bp, Homo sapiens
agctggtgttggaagagatttattac

SEQ ID NO: 86646 - DNA, 26 bp, Homo sapiens
gctggtgttggaagagatttattact

SEQ ID NO: 86647 - DNA, 26 bp, Homo sapiens
ctggtgttggaagagatttattactg

SEQ ID NO: 86648 - DNA, 26 bp, Homo sapiens
tggtgttggaagagatttattactgt

SEQ ID NO: 86649 - DNA, 26 bp, Homo sapiens
ggtgttggaagagatttattactgtt

SEQ ID NO: 86650 - DNA, 26 bp, Homo sapiens
gtgttggaagagatttattactgtta

SEQ ID NO: 86651 - DNA, 26 bp, Homo sapiens
tgttggaagagatttattactgttag

SEQ ID NO: 86652 - DNA, 26 bp, Homo sapiens
gttggaagagatttattactgttagc

SEQ ID NO: 86653 - DNA, 26 bp, Homo sapiens
ttggaagagatttattactgttagct

SEQ ID NO: 86654 - DNA, 26 bp, Homo sapiens
tggaagagatttattactgttagctt

SEQ ID NO: 86655 - DNA, 26 bp, Homo sapiens
ggaagagatttattactgttagcttt

SEQ ID NO: 86656 - DNA, 26 bp, Homo sapiens
gaagagatttattactgttagctttg

SEQ ID NO: 86657 - DNA, 26 bp, Homo sapiens
aagagatttattactgttagctttgc

SEQ ID NO: 86658 - DNA, 26 bp, Homo sapiens
agagatttattactgttagctttgcc

SEQ ID NO: 86659 - DNA, 26 bp, Homo sapiens
gagatttattactgttagctttgccg

SEQ ID NO: 86660 - DNA, 26 bp, Homo sapiens
agatttattactgttagctttgccgt

SEQ ID NO: 86661 - DNA, 26 bp, Homo sapiens
gatttattactgttagctttgccgtt

SEQ ID NO: 86662 - DNA, 26 bp, Homo sapiens
atttattactgttagctttgccgtta

SEQ ID NO: 86663 - DNA, 26 bp, Homo sapiens
tttattactgttagctttgccgttaa

SEQ ID NO: 86664 - DNA, 26 bp, Homo sapiens
ttattactgttagctttgccgttaat

SEQ ID NO: 86665 - DNA, 26 bp, Homo sapiens
tattactgttagctttgccgttaatc

SEQ ID NO: 86666 - DNA, 26 bp, Homo sapiens
attactgttagctttgccgttaatca

SEQ ID NO: 86667 - DNA, 26 bp, Homo sapiens
ttactgttagctttgccgttaatcag

SEQ ID NO: 86668 - DNA, 26 bp, Homo sapiens
tactgttagctttgccgttaatcagt

SEQ ID NO: 86669 - DNA, 26 bp, Homo sapiens
actgttagctttgccgttaatcagtc

SEQ ID NO: 86670 - DNA, 26 bp, Homo sapiens
ctgttagctttgccgttaatcagtcc

SEQ ID NO: 86671 - DNA, 26 bp, Homo sapiens
tgttagctttgccgttaatcagtcca

SEQ ID NO: 86672 - DNA, 26 bp, Homo sapiens
gttagctttgccgttaatcagtccat

SEQ ID NO: 86673 - DNA, 26 bp, Homo sapiens
ttagctttgccgttaatcagtccatt

SEQ ID NO: 86674 - DNA, 26 bp, Homo sapiens
tagctttgccgttaatcagtccattt

SEQ ID NO: 86675 - DNA, 26 bp, Homo sapiens
agctttgccgttaatcagtccattta

SEQ ID NO: 86676 - DNA, 26 bp, Homo sapiens
gctttgccgttaatcagtccatttac

SEQ ID NO: 86677 - DNA, 26 bp, Homo sapiens
ctttgccgttaatcagtccatttact

SEQ ID NO: 86678 - DNA, 26 bp, Homo sapiens
tttgccgttaatcagtccatttactc

SEQ ID NO: 86679 - DNA, 26 bp, Homo sapiens
ttgccgttaatcagtccatttactcc

SEQ ID NO: 86680 - DNA, 26 bp, Homo sapiens
tgccgttaatcagtccatttactcca

SEQ ID NO: 86681 - DNA, 26 bp, Homo sapiens
gccgttaatcagtccatttactccac

SEQ ID NO: 86682 - DNA, 26 bp, Homo sapiens
ccgttaatcagtccatttactccacg

SEQ ID NO: 86683 - DNA, 26 bp, Homo sapiens
cgttaatcagtccatttactccacgg

SEQ ID NO: 86684 - DNA, 26 bp, Homo sapiens
gttaatcagtccatttactccacggc

SEQ ID NO: 86685 - DNA, 26 bp, Homo sapiens
ttaatcagtccatttactccacggct

SEQ ID NO: 86686 - DNA, 26 bp, Homo sapiens
taatcagtccatttactccacggctg

SEQ ID NO: 86687 - DNA, 26 bp, Homo sapiens
aatcagtccatttactccacggctgg

SEQ ID NO: 86688 - DNA, 26 bp, Homo sapiens
atcagtccatttactccacggctggg

SEQ ID NO: 86689 - DNA, 26 bp, Homo sapiens
tcagtccatttactccacggctggga

SEQ ID NO: 86690 - DNA, 26 bp, Homo sapiens
cagtccatttactccacggctgggat

SEQ ID NO: 86691 - DNA, 26 bp, Homo sapiens
agtccatttactccacggctgggatg

SEQ ID NO: 86692 - DNA, 26 bp, Homo sapiens
gtccatttactccacggctgggatgg

SEQ ID NO: 86693 - DNA, 26 bp, Homo sapiens
tccatttactccacggctgggatgga

SEQ ID NO: 86694 - DNA, 26 bp, Homo sapiens
ccatttactccacggctgggatggac

SEQ ID NO: 86695 - DNA, 26 bp, Homo sapiens
catttactccacggctgggatggact

SEQ ID NO: 86696 - DNA, 26 bp, Homo sapiens
atttactccacggctgggatggactc

SEQ ID NO: 86697 - DNA, 26 bp, Homo sapiens
tttactccacggctgggatggactcc

SEQ ID NO: 86698 - DNA, 26 bp, Homo sapiens
ttactccacggctgggatggactccg

SEQ ID NO: 86699 - DNA, 26 bp, Homo sapiens
tactccacggctgggatggactccgt

SEQ ID NO: 86700 - DNA, 26 bp, Homo sapiens
actccacggctgggatggactccgtt

SEQ ID NO: 86701 - DNA, 26 bp, Homo sapiens
ctccacggctgggatggactccgttc

SEQ ID NO: 86702 - DNA, 26 bp, Homo sapiens
tccacggctgggatggactccgttcg

SEQ ID NO: 86703 - DNA, 26 bp, Homo sapiens
ccacggctgggatggactccgttcgt

SEQ ID NO: 86704 - DNA, 26 bp, Homo sapiens
cacggctgggatggactccgttcgtt

SEQ ID NO: 86705 - DNA, 26 bp, Homo sapiens
acggctgggatggactccgttcgttt

SEQ ID NO: 86706 - DNA, 26 bp, Homo sapiens
cggctgggatggactccgttcgtttc

SEQ ID NO: 86707 - DNA, 26 bp, Homo sapiens
ggctgggatggactccgttcgtttcc

SEQ ID NO: 86708 - DNA, 26 bp, Homo sapiens
gctgggatggactccgttcgtttccc

SEQ ID NO: 86709 - DNA, 26 bp, Homo sapiens
ctgggatggactccgttcgtttccct

SEQ ID NO: 86710 - DNA, 26 bp, Homo sapiens
tgggatggactccgttcgtttccctc

SEQ ID NO: 86711 - DNA, 26 bp, Homo sapiens
gggatggactccgttcgtttccctct

SEQ ID NO: 86712 - DNA, 26 bp, Homo sapiens
ggatggactccgttcgtttccctctc

SEQ ID NO: 86713 - DNA, 26 bp, Homo sapiens
gatggactccgttcgtttccctctca

SEQ ID NO: 86714 - DNA, 26 bp, Homo sapiens
atggactccgttcgtttccctctcag

SEQ ID NO: 86715 - DNA, 26 bp, Homo sapiens
tggactccgttcgtttccctctcagc

SEQ ID NO: 86716 - DNA, 26 bp, Homo sapiens
ggactccgttcgtttccctctcagca

SEQ ID NO: 86717 - DNA, 26 bp, Homo sapiens
gactccgttcgtttccctctcagcag

SEQ ID NO: 86718 - DNA, 26 bp, Homo sapiens
actccgttcgtttccctctcagcagc

SEQ ID NO: 86719 - DNA, 26 bp, Homo sapiens
ctccgttcgtttccctctcagcagca

SEQ ID NO: 86720 - DNA, 26 bp, Homo sapiens
tccgttcgtttccctctcagcagcat

SEQ ID NO: 86721 - DNA, 26 bp, Homo sapiens
ccgttcgtttccctctcagcagcatt

SEQ ID NO: 86722 - DNA, 26 bp, Homo sapiens
cgttcgtttccctctcagcagcattg

SEQ ID NO: 86723 - DNA, 26 bp, Homo sapiens
gttcgtttccctctcagcagcattga

SEQ ID NO: 86724 - DNA, 26 bp, Homo sapiens
ttcgtttccctctcagcagcattgaa

SEQ ID NO: 86725 - DNA, 26 bp, Homo sapiens
tcgtttccctctcagcagcattgaat

SEQ ID NO: 86726 - DNA, 26 bp, Homo sapiens
cgtttccctctcagcagcattgaatt

SEQ ID NO: 86727 - DNA, 26 bp, Homo sapiens
gtttccctctcagcagcattgaattg

SEQ ID NO: 86728 - DNA, 26 bp, Homo sapiens
tttccctctcagcagcattgaattgc

SEQ ID NO: 86729 - DNA, 26 bp, Homo sapiens
ttccctctcagcagcattgaattgca

SEQ ID NO: 86730 - DNA, 26 bp, Homo sapiens
tccctctcagcagcattgaattgcat

SEQ ID NO: 86731 - DNA, 26 bp, Homo sapiens
ccctctcagcagcattgaattgcatt

SEQ ID NO: 86732 - DNA, 26 bp, Homo sapiens
cctctcagcagcattgaattgcattt

SEQ ID NO: 86733 - DNA, 26 bp, Homo sapiens
ctctcagcagcattgaattgcatttg

SEQ ID NO: 86734 - DNA, 26 bp, Homo sapiens
tctcagcagcattgaattgcatttga

SEQ ID NO: 86735 - DNA, 26 bp, Homo sapiens
ctcagcagcattgaattgcatttgaa

SEQ ID NO: 86736 - DNA, 26 bp, Homo sapiens
tcagcagcattgaattgcatttgaag

SEQ ID NO: 86737 - DNA, 26 bp, Homo sapiens
cagcagcattgaattgcatttgaagg

SEQ ID NO: 86738 - DNA, 26 bp, Homo sapiens
agcagcattgaattgcatttgaaggg

SEQ ID NO: 86739 - DNA, 26 bp, Homo sapiens
gcagcattgaattgcatttgaagggc

SEQ ID NO: 86740 - DNA, 26 bp, Homo sapiens
cagcattgaattgcatttgaagggct

SEQ ID NO: 86741 - DNA, 26 bp, Homo sapiens
agcattgaattgcatttgaagggctg

SEQ ID NO: 86742 - DNA, 26 bp, Homo sapiens
gcattgaattgcatttgaagggctgc

SEQ ID NO: 86743 - DNA, 26 bp, Homo sapiens
cattgaattgcatttgaagggctgcc

SEQ ID NO: 86744 - DNA, 26 bp, Homo sapiens
attgaattgcatttgaagggctgccc

SEQ ID NO: 86745 - DNA, 26 bp, Homo sapiens
ttgaattgcatttgaagggctgccct

SEQ ID NO: 86746 - DNA, 26 bp, Homo sapiens
tgaattgcatttgaagggctgccctg

SEQ ID NO: 86747 - DNA, 26 bp, Homo sapiens
gaattgcatttgaagggctgccctgc

SEQ ID NO: 86748 - DNA, 26 bp, Homo sapiens
aattgcatttgaagggctgccctgct

SEQ ID NO: 86749 - DNA, 26 bp, Homo sapiens
attgcatttgaagggctgccctgctc

SEQ ID NO: 86750 - DNA, 26 bp, Homo sapiens
ttgcatttgaagggctgccctgctca

SEQ ID NO: 86751 - DNA, 26 bp, Homo sapiens
tgcatttgaagggctgccctgctcag

SEQ ID NO: 86752 - DNA, 26 bp, Homo sapiens
gcatttgaagggctgccctgctcagg

SEQ ID NO: 86753 - DNA, 26 bp, Homo sapiens
catttgaagggctgccctgctcaggc

SEQ ID NO: 86754 - DNA, 26 bp, Homo sapiens
atttgaagggctgccctgctcaggcc

SEQ ID NO: 86755 - DNA, 26 bp, Homo sapiens
tttgaagggctgccctgctcaggcct

SEQ ID NO: 86756 - DNA, 26 bp, Homo sapiens
ttgaagggctgccctgctcaggccta

SEQ ID NO: 86757 - DNA, 26 bp, Homo sapiens
tgaagggctgccctgctcaggcctaa

SEQ ID NO: 86758 - DNA, 26 bp, Homo sapiens
gaagggctgccctgctcaggcctaac

SEQ ID NO: 86759 - DNA, 26 bp, Homo sapiens
aagggctgccctgctcaggcctaact

SEQ ID NO: 86760 - DNA, 26 bp, Homo sapiens
agggctgccctgctcaggcctaactc

SEQ ID NO: 86761 - DNA, 26 bp, Homo sapiens
gggctgccctgctcaggcctaactca

SEQ ID NO: 86762 - DNA, 26 bp, Homo sapiens
ggctgccctgctcaggcctaactcag

SEQ ID NO: 86763 - DNA, 26 bp, Homo sapiens
gctgccctgctcaggcctaactcagg

SEQ ID NO: 86764 - DNA, 26 bp, Homo sapiens
ctgccctgctcaggcctaactcaggg

SEQ ID NO: 86765 - DNA, 26 bp, Homo sapiens
tgccctgctcaggcctaactcagggt

SEQ ID NO: 86766 - DNA, 26 bp, Homo sapiens
gccctgctcaggcctaactcagggtt

SEQ ID NO: 86767 - DNA, 26 bp, Homo sapiens
ccctgctcaggcctaactcagggttg

SEQ ID NO: 86768 - DNA, 26 bp, Homo sapiens
cctgctcaggcctaactcagggttgt

SEQ ID NO: 86769 - DNA, 26 bp, Homo sapiens
ctgctcaggcctaactcagggttgtt

SEQ ID NO: 86770 - DNA, 26 bp, Homo sapiens
tgctcaggcctaactcagggttgttc

SEQ ID NO: 86771 - DNA, 26 bp, Homo sapiens
gctcaggcctaactcagggttgttca

SEQ ID NO: 86772 - DNA, 26 bp, Homo sapiens
ctcaggcctaactcagggttgttcac

SEQ ID NO: 86773 - DNA, 26 bp, Homo sapiens
tcaggcctaactcagggttgttcacc

SEQ ID NO: 86774 - DNA, 26 bp, Homo sapiens
caggcctaactcagggttgttcacct

SEQ ID NO: 86775 - DNA, 26 bp, Homo sapiens
aggcctaactcagggttgttcacctg

SEQ ID NO: 86776 - DNA, 26 bp, Homo sapiens
ggcctaactcagggttgttcacctgc

SEQ ID NO: 86777 - DNA, 26 bp, Homo sapiens
gcctaactcagggttgttcacctgct

SEQ ID NO: 86778 - DNA, 26 bp, Homo sapiens
cctaactcagggttgttcacctgctg

SEQ ID NO: 86779 - DNA, 26 bp, Homo sapiens
ctaactcagggttgttcacctgctgg

SEQ ID NO: 86780 - DNA, 26 bp, Homo sapiens
taactcagggttgttcacctgctgga

SEQ ID NO: 86781 - DNA, 26 bp, Homo sapiens
aactcagggttgttcacctgctggat

SEQ ID NO: 86782 - DNA, 26 bp, Homo sapiens
actcagggttgttcacctgctggatc

SEQ ID NO: 86783 - DNA, 26 bp, Homo sapiens
ctcagggttgttcacctgctggatct

SEQ ID NO: 86784 - DNA, 26 bp, Homo sapiens
tcagggttgttcacctgctggatctc

SEQ ID NO: 86785 - DNA, 26 bp, Homo sapiens
cagggttgttcacctgctggatctca

SEQ ID NO: 86786 - DNA, 26 bp, Homo sapiens
agggttgttcacctgctggatctcag

SEQ ID NO: 86787 - DNA, 26 bp, Homo sapiens
gggttgttcacctgctggatctcaga

SEQ ID NO: 86788 - DNA, 26 bp, Homo sapiens
ggttgttcacctgctggatctcagat

SEQ ID NO: 86789 - DNA, 26 bp, Homo sapiens
gttgttcacctgctggatctcagatg

SEQ ID NO: 86790 - DNA, 26 bp, Homo sapiens
ttgttcacctgctggatctcagatgg

SEQ ID NO: 86791 - DNA, 26 bp, Homo sapiens
tgttcacctgctggatctcagatggt

SEQ ID NO: 86792 - DNA, 26 bp, Homo sapiens
gttcacctgctggatctcagatggtt

SEQ ID NO: 86793 - DNA, 26 bp, Homo sapiens
ttcacctgctggatctcagatggttt

SEQ ID NO: 86794 - DNA, 26 bp, Homo sapiens
tcacctgctggatctcagatggtttc

SEQ ID NO: 86795 - DNA, 26 bp, Homo sapiens
cacctgctggatctcagatggtttct

SEQ ID NO: 86796 - DNA, 26 bp, Homo sapiens
acctgctggatctcagatggtttctt

SEQ ID NO: 86797 - DNA, 26 bp, Homo sapiens
cctgctggatctcagatggtttcttt

SEQ ID NO: 86798 - DNA, 26 bp, Homo sapiens
ctgctggatctcagatggtttctttg

SEQ ID NO: 86799 - DNA, 26 bp, Homo sapiens
tgctggatctcagatggtttctttga

SEQ ID NO: 86800 - DNA, 26 bp, Homo sapiens
gctggatctcagatggtttctttgaa

SEQ ID NO: 86801 - DNA, 26 bp, Homo sapiens
ctggatctcagatggtttctttgaag

SEQ ID NO: 86802 - DNA, 26 bp, Homo sapiens
tggatctcagatggtttctttgaagc

SEQ ID NO: 86803 - DNA, 26 bp, Homo sapiens
ggatctcagatggtttctttgaagcc

SEQ ID NO: 86804 - DNA, 26 bp, Homo sapiens
gatctcagatggtttctttgaagcca

SEQ ID NO: 86805 - DNA, 26 bp, Homo sapiens
atctcagatggtttctttgaagccaa

SEQ ID NO: 86806 - DNA, 26 bp, Homo sapiens
tctcagatggtttctttgaagccaac

SEQ ID NO: 86807 - DNA, 26 bp, Homo sapiens
ctcagatggtttctttgaagccaact

SEQ ID NO: 86808 - DNA, 26 bp, Homo sapiens
tcagatggtttctttgaagccaactc

SEQ ID NO: 86809 - DNA, 26 bp, Homo sapiens
cagatggtttctttgaagccaactcc

SEQ ID NO: 86810 - DNA, 26 bp, Homo sapiens
agatggtttctttgaagccaactcca

SEQ ID NO: 86811 - DNA, 26 bp, Homo sapiens
gatggtttctttgaagccaactccaa

SEQ ID NO: 86812 - DNA, 26 bp, Homo sapiens
atggtttctttgaagccaactccaag

SEQ ID NO: 86813 - DNA, 26 bp, Homo sapiens
tggtttctttgaagccaactccaagg

SEQ ID NO: 86814 - DNA, 26 bp, Homo sapiens
ggtttctttgaagccaactccaagga

SEQ ID NO: 86815 - DNA, 26 bp, Homo sapiens
gtttctttgaagccaactccaaggaa

SEQ ID NO: 86816 - DNA, 26 bp, Homo sapiens
tttctttgaagccaactccaaggaac

SEQ ID NO: 86817 - DNA, 26 bp, Homo sapiens
ttctttgaagccaactccaaggaact

SEQ ID NO: 86818 - DNA, 26 bp, Homo sapiens
tctttgaagccaactccaaggaactt

SEQ ID NO: 86819 - DNA, 26 bp, Homo sapiens
ctttgaagccaactccaaggaacttg

SEQ ID NO: 86820 - DNA, 26 bp, Homo sapiens
tttgaagccaactccaaggaacttgt

SEQ ID NO: 86821 - DNA, 26 bp, Homo sapiens
ttgaagccaactccaaggaacttgtc

SEQ ID NO: 86822 - DNA, 26 bp, Homo sapiens
tgaagccaactccaaggaacttgtct

SEQ ID NO: 86823 - DNA, 26 bp, Homo sapiens
gaagccaactccaaggaacttgtctc

SEQ ID NO: 86824 - DNA, 26 bp, Homo sapiens
aagccaactccaaggaacttgtctcc

SEQ ID NO: 86825 - DNA, 26 bp, Homo sapiens
agccaactccaaggaacttgtctcca

SEQ ID NO: 86826 - DNA, 26 bp, Homo sapiens
gccaactccaaggaacttgtctccaa

SEQ ID NO: 86827 - DNA, 26 bp, Homo sapiens
ccaactccaaggaacttgtctccaag

SEQ ID NO: 86828 - DNA, 26 bp, Homo sapiens
caactccaaggaacttgtctccaaga

SEQ ID NO: 86829 - DNA, 26 bp, Homo sapiens
aactccaaggaacttgtctccaagat

SEQ ID NO: 86830 - DNA, 26 bp, Homo sapiens
actccaaggaacttgtctccaagatt

SEQ ID NO: 86831 - DNA, 26 bp, Homo sapiens
ctccaaggaacttgtctccaagattg

SEQ ID NO: 86832 - DNA, 26 bp, Homo sapiens
tccaaggaacttgtctccaagattgg

SEQ ID NO: 86833 - DNA, 26 bp, Homo sapiens
ccaaggaacttgtctccaagattgga

SEQ ID NO: 86834 - DNA, 26 bp, Homo sapiens
caaggaacttgtctccaagattggag

SEQ ID NO: 86835 - DNA, 26 bp, Homo sapiens
aaggaacttgtctccaagattggagg

SEQ ID NO: 86836 - DNA, 26 bp, Homo sapiens
aggaacttgtctccaagattggaggg

SEQ ID NO: 86837 - DNA, 26 bp, Homo sapiens
ggaacttgtctccaagattggagggg

SEQ ID NO: 86838 - DNA, 26 bp, Homo sapiens
gaacttgtctccaagattggaggggg

SEQ ID NO: 86839 - DNA, 26 bp, Homo sapiens
aacttgtctccaagattggaggggga

SEQ ID NO: 86840 - DNA, 26 bp, Homo sapiens
acttgtctccaagattggagggggag

SEQ ID NO: 86841 - DNA, 26 bp, Homo sapiens
cttgtctccaagattggagggggagg

SEQ ID NO: 86842 - DNA, 26 bp, Homo sapiens
ttgtctccaagattggagggggaggt

SEQ ID NO: 86843 - DNA, 26 bp, Homo sapiens
tgtctccaagattggagggggaggtg

SEQ ID NO: 86844 - DNA, 26 bp, Homo sapiens
gtctccaagattggagggggaggtgg

SEQ ID NO: 86845 - DNA, 26 bp, Homo sapiens
tctccaagattggagggggaggtgga

SEQ ID NO: 86846 - DNA, 26 bp, Homo sapiens
ctccaagattggagggggaggtggaa

SEQ ID NO: 86847 - DNA, 26 bp, Homo sapiens
tccaagattggagggggaggtggaaa

SEQ ID NO: 86848 - DNA, 26 bp, Homo sapiens
ccaagattggagggggaggtggaaag

SEQ ID NO: 86849 - DNA, 26 bp, Homo sapiens
caagattggagggggaggtggaaagt

SEQ ID NO: 86850 - DNA, 26 bp, Homo sapiens
aagattggagggggaggtggaaagtg

SEQ ID NO: 86851 - DNA, 26 bp, Homo sapiens
agattggagggggaggtggaaagtgt

SEQ ID NO: 86852 - DNA, 26 bp, Homo sapiens
gattggagggggaggtggaaagtgtt

SEQ ID NO: 86853 - DNA, 26 bp, Homo sapiens
attggagggggaggtggaaagtgttg

SEQ ID NO: 86854 - DNA, 26 bp, Homo sapiens
ttggagggggaggtggaaagtgttgg

SEQ ID NO: 86855 - DNA, 26 bp, Homo sapiens
tggagggggaggtggaaagtgttgga

SEQ ID NO: 86856 - DNA, 26 bp, Homo sapiens
ggagggggaggtggaaagtgttggaa

SEQ ID NO: 86857 - DNA, 26 bp, Homo sapiens
gagggggaggtggaaagtgttggaag

SEQ ID NO: 86858 - DNA, 26 bp, Homo sapiens
agggggaggtggaaagtgttggaagt

SEQ ID NO: 86859 - DNA, 26 bp, Homo sapiens
gggggaggtggaaagtgttggaagtg

SEQ ID NO: 86860 - DNA, 26 bp, Homo sapiens
ggggaggtggaaagtgttggaagtgg

SEQ ID NO: 86861 - DNA, 26 bp, Homo sapiens
gggaggtggaaagtgttggaagtggt

SEQ ID NO: 86862 - DNA, 26 bp, Homo sapiens
ggaggtggaaagtgttggaagtggtc

SEQ ID NO: 86863 - DNA, 26 bp, Homo sapiens
gaggtggaaagtgttggaagtggtca

SEQ ID NO: 86864 - DNA, 26 bp, Homo sapiens
aggtggaaagtgttggaagtggtcat

SEQ ID NO: 86865 - DNA, 26 bp, Homo sapiens
ggtggaaagtgttggaagtggtcatt

SEQ ID NO: 86866 - DNA, 26 bp, Homo sapiens
gtggaaagtgttggaagtggtcattg

SEQ ID NO: 86867 - DNA, 26 bp, Homo sapiens
tggaaagtgttggaagtggtcattgt

SEQ ID NO: 86868 - DNA, 26 bp, Homo sapiens
ggaaagtgttggaagtggtcattgtt

SEQ ID NO: 86869 - DNA, 26 bp, Homo sapiens
gaaagtgttggaagtggtcattgttg

SEQ ID NO: 86870 - DNA, 26 bp, Homo sapiens
aaagtgttggaagtggtcattgttgg

SEQ ID NO: 86871 - DNA, 26 bp, Homo sapiens
aagtgttggaagtggtcattgttgga

SEQ ID NO: 86872 - DNA, 26 bp, Homo sapiens
agtgttggaagtggtcattgttggat

SEQ ID NO: 86873 - DNA, 26 bp, Homo sapiens
gtgttggaagtggtcattgttggatt

SEQ ID NO: 86874 - DNA, 26 bp, Homo sapiens
tgttggaagtggtcattgttggattc

SEQ ID NO: 86875 - DNA, 26 bp, Homo sapiens
gttggaagtggtcattgttggattct

SEQ ID NO: 86876 - DNA, 26 bp, Homo sapiens
ttggaagtggtcattgttggattctc

SEQ ID NO: 86877 - DNA, 26 bp, Homo sapiens
tggaagtggtcattgttggattctcc

SEQ ID NO: 86878 - DNA, 26 bp, Homo sapiens
ggaagtggtcattgttggattctccc

SEQ ID NO: 86879 - DNA, 26 bp, Homo sapiens
gaagtggtcattgttggattctccca

SEQ ID NO: 86880 - DNA, 26 bp, Homo sapiens
aagtggtcattgttggattctcccat

SEQ ID NO: 86881 - DNA, 26 bp, Homo sapiens
agtggtcattgttggattctcccatt

SEQ ID NO: 86882 - DNA, 26 bp, Homo sapiens
gtggtcattgttggattctcccattg

SEQ ID NO: 86883 - DNA, 26 bp, Homo sapiens
tggtcattgttggattctcccattga

SEQ ID NO: 86884 - DNA, 26 bp, Homo sapiens
ggtcattgttggattctcccattgac

SEQ ID NO: 86885 - DNA, 26 bp, Homo sapiens
gtcattgttggattctcccattgact

SEQ ID NO: 86886 - DNA, 26 bp, Homo sapiens
tcattgttggattctcccattgactc

SEQ ID NO: 86887 - DNA, 26 bp, Homo sapiens
cattgttggattctcccattgactcg

SEQ ID NO: 86888 - DNA, 26 bp, Homo sapiens
attgttggattctcccattgactcgt

SEQ ID NO: 86889 - DNA, 26 bp, Homo sapiens
ttgttggattctcccattgactcgta

SEQ ID NO: 86890 - DNA, 26 bp, Homo sapiens
tgttggattctcccattgactcgtaa

SEQ ID NO: 86891 - DNA, 26 bp, Homo sapiens
gttggattctcccattgactcgtaac

SEQ ID NO: 86892 - DNA, 26 bp, Homo sapiens
ttggattctcccattgactcgtaact

SEQ ID NO: 86893 - DNA, 26 bp, Homo sapiens
tggattctcccattgactcgtaacta

SEQ ID NO: 86894 - DNA, 26 bp, Homo sapiens
ggattctcccattgactcgtaactac

SEQ ID NO: 86895 - DNA, 26 bp, Homo sapiens
gattctcccattgactcgtaactaca

SEQ ID NO: 86896 - DNA, 26 bp, Homo sapiens
attctcccattgactcgtaactacag

SEQ ID NO: 86897 - DNA, 26 bp, Homo sapiens
ttctcccattgactcgtaactacagt

SEQ ID NO: 86898 - DNA, 26 bp, Homo sapiens
tctcccattgactcgtaactacagtt

SEQ ID NO: 86899 - DNA, 26 bp, Homo sapiens
ctcccattgactcgtaactacagttt

SEQ ID NO: 86900 - DNA, 26 bp, Homo sapiens
tcccattgactcgtaactacagtttt

SEQ ID NO: 86901 - DNA, 26 bp, Homo sapiens
cccattgactcgtaactacagttttc

SEQ ID NO: 86902 - DNA, 26 bp, Homo sapiens
ccattgactcgtaactacagttttca

SEQ ID NO: 86903 - DNA, 26 bp, Homo sapiens
cattgactcgtaactacagttttcag

SEQ ID NO: 86904 - DNA, 26 bp, Homo sapiens
attgactcgtaactacagttttcagt

SEQ ID NO: 86905 - DNA, 26 bp, Homo sapiens
ttgactcgtaactacagttttcagtg

SEQ ID NO: 86906 - DNA, 26 bp, Homo sapiens
tgactcgtaactacagttttcagtgt

SEQ ID NO: 86907 - DNA, 26 bp, Homo sapiens
gactcgtaactacagttttcagtgtt

SEQ ID NO: 86908 - DNA, 26 bp, Homo sapiens
actcgtaactacagttttcagtgttg

SEQ ID NO: 86909 - DNA, 26 bp, Homo sapiens
ctcgtaactacagttttcagtgttgg

SEQ ID NO: 86910 - DNA, 26 bp, Homo sapiens
tcgtaactacagttttcagtgttggc

SEQ ID NO: 86911 - DNA, 26 bp, Homo sapiens
cgtaactacagttttcagtgttggct

SEQ ID NO: 86912 - DNA, 26 bp, Homo sapiens
gtaactacagttttcagtgttggctg

SEQ ID NO: 86913 - DNA, 26 bp, Homo sapiens
taactacagttttcagtgttggctga

SEQ ID NO: 86914 - DNA, 26 bp, Homo sapiens
aactacagttttcagtgttggctgag

SEQ ID NO: 86915 - DNA, 26 bp, Homo sapiens
actacagttttcagtgttggctgagg

SEQ ID NO: 86916 - DNA, 26 bp, Homo sapiens
ctacagttttcagtgttggctgaggt

SEQ ID NO: 86917 - DNA, 26 bp, Homo sapiens
tacagttttcagtgttggctgaggtg

SEQ ID NO: 86918 - DNA, 26 bp, Homo sapiens
acagttttcagtgttggctgaggtga

SEQ ID NO: 86919 - DNA, 26 bp, Homo sapiens
cagttttcagtgttggctgaggtgac

SEQ ID NO: 86920 - DNA, 26 bp, Homo sapiens
agttttcagtgttggctgaggtgaca

SEQ ID NO: 86921 - DNA, 26 bp, Homo sapiens
gttttcagtgttggctgaggtgacaa

SEQ ID NO: 86922 - DNA, 26 bp, Homo sapiens
ttttcagtgttggctgaggtgacaac

SEQ ID NO: 86923 - DNA, 26 bp, Homo sapiens
tttcagtgttggctgaggtgacaacc

SEQ ID NO: 86924 - DNA, 26 bp, Homo sapiens
ttcagtgttggctgaggtgacaacca

SEQ ID NO: 86925 - DNA, 26 bp, Homo sapiens
tcagtgttggctgaggtgacaaccag

SEQ ID NO: 86926 - DNA, 26 bp, Homo sapiens
cagtgttggctgaggtgacaaccagc

SEQ ID NO: 86927 - DNA, 26 bp, Homo sapiens
agtgttggctgaggtgacaaccagct

SEQ ID NO: 86928 - DNA, 26 bp, Homo sapiens
gtgttggctgaggtgacaaccagctg

SEQ ID NO: 86929 - DNA, 26 bp, Homo sapiens
tgttggctgaggtgacaaccagctgg

SEQ ID NO: 86930 - DNA, 26 bp, Homo sapiens
gttggctgaggtgacaaccagctggg

SEQ ID NO: 86931 - DNA, 26 bp, Homo sapiens
ttggctgaggtgacaaccagctgggc

SEQ ID NO: 86932 - DNA, 26 bp, Homo sapiens
tggctgaggtgacaaccagctgggca

SEQ ID NO: 86933 - DNA, 26 bp, Homo sapiens
ggctgaggtgacaaccagctgggcag

SEQ ID NO: 86934 - DNA, 26 bp, Homo sapiens
gctgaggtgacaaccagctgggcagt

SEQ ID NO: 86935 - DNA, 26 bp, Homo sapiens
ctgaggtgacaaccagctgggcagtg

SEQ ID NO: 86936 - DNA, 26 bp, Homo sapiens
tgaggtgacaaccagctgggcagtgc

SEQ ID NO: 86937 - DNA, 26 bp, Homo sapiens
gaggtgacaaccagctgggcagtgct

SEQ ID NO: 86938 - DNA, 26 bp, Homo sapiens
aggtgacaaccagctgggcagtgctg

SEQ ID NO: 86939 - DNA, 26 bp, Homo sapiens
ggtgacaaccagctgggcagtgctgg

SEQ ID NO: 86940 - DNA, 26 bp, Homo sapiens
gtgacaaccagctgggcagtgctggt

SEQ ID NO: 86941 - DNA, 26 bp, Homo sapiens
tgacaaccagctgggcagtgctggtt

SEQ ID NO: 86942 - DNA, 26 bp, Homo sapiens
gacaaccagctgggcagtgctggttg

SEQ ID NO: 86943 - DNA, 26 bp, Homo sapiens
acaaccagctgggcagtgctggttgc

SEQ ID NO: 86944 - DNA, 26 bp, Homo sapiens
caaccagctgggcagtgctggttgct

SEQ ID NO: 86945 - DNA, 26 bp, Homo sapiens
aaccagctgggcagtgctggttgctg

SEQ ID NO: 86946 - DNA, 26 bp, Homo sapiens
accagctgggcagtgctggttgctga

SEQ ID NO: 86947 - DNA, 26 bp, Homo sapiens
ccagctgggcagtgctggttgctgat

SEQ ID NO: 86948 - DNA, 26 bp, Homo sapiens
cagctgggcagtgctggttgctgatc

SEQ ID NO: 86949 - DNA, 26 bp, Homo sapiens
agctgggcagtgctggttgctgatcc

SEQ ID NO: 86950 - DNA, 26 bp, Homo sapiens
gctgggcagtgctggttgctgatcca

SEQ ID NO: 86951 - DNA, 26 bp, Homo sapiens
ctgggcagtgctggttgctgatccat

SEQ ID NO: 86952 - DNA, 26 bp, Homo sapiens
tgggcagtgctggttgctgatccata

SEQ ID NO: 86953 - DNA, 26 bp, Homo sapiens
gggcagtgctggttgctgatccataa

SEQ ID NO: 86954 - DNA, 26 bp, Homo sapiens
ggcagtgctggttgctgatccataat

SEQ ID NO: 86955 - DNA, 26 bp, Homo sapiens
gcagtgctggttgctgatccataatc

SEQ ID NO: 86956 - DNA, 26 bp, Homo sapiens
cagtgctggttgctgatccataatca

SEQ ID NO: 86957 - DNA, 26 bp, Homo sapiens
agtgctggttgctgatccataatcat

SEQ ID NO: 86958 - DNA, 26 bp, Homo sapiens
gtgctggttgctgatccataatcatt

SEQ ID NO: 86959 - DNA, 26 bp, Homo sapiens
tgctggttgctgatccataatcattt

SEQ ID NO: 86960 - DNA, 26 bp, Homo sapiens
gctggttgctgatccataatcatttc

SEQ ID NO: 86961 - DNA, 26 bp, Homo sapiens
ctggttgctgatccataatcatttct

SEQ ID NO: 86962 - DNA, 26 bp, Homo sapiens
tggttgctgatccataatcatttctt

SEQ ID NO: 86963 - DNA, 26 bp, Homo sapiens
ggttgctgatccataatcatttcttg

SEQ ID NO: 86964 - DNA, 26 bp, Homo sapiens
gttgctgatccataatcatttcttgc

SEQ ID NO: 86965 - DNA, 26 bp, Homo sapiens
ttgctgatccataatcatttcttgct

SEQ ID NO: 86966 - DNA, 26 bp, Homo sapiens
tgctgatccataatcatttcttgctg

SEQ ID NO: 86967 - DNA, 26 bp, Homo sapiens
gctgatccataatcatttcttgctga

SEQ ID NO: 86968 - DNA, 26 bp, Homo sapiens
ctgatccataatcatttcttgctgaa

SEQ ID NO: 86969 - DNA, 26 bp, Homo sapiens
tgatccataatcatttcttgctgaac

SEQ ID NO: 86970 - DNA, 26 bp, Homo sapiens
gatccataatcatttcttgctgaaca

SEQ ID NO: 86971 - DNA, 26 bp, Homo sapiens
atccataatcatttcttgctgaacat

SEQ ID NO: 86972 - DNA, 26 bp, Homo sapiens
tccataatcatttcttgctgaacatg

SEQ ID NO: 86973 - DNA, 26 bp, Homo sapiens
ccataatcatttcttgctgaacatgt

SEQ ID NO: 86974 - DNA, 26 bp, Homo sapiens
cataatcatttcttgctgaacatgta

SEQ ID NO: 86975 - DNA, 26 bp, Homo sapiens
ataatcatttcttgctgaacatgtaa

SEQ ID NO: 86976 - DNA, 26 bp, Homo sapiens
taatcatttcttgctgaacatgtaaa

SEQ ID NO: 86977 - DNA, 26 bp, Homo sapiens
aatcatttcttgctgaacatgtaaag

SEQ ID NO: 86978 - DNA, 26 bp, Homo sapiens
atcatttcttgctgaacatgtaaaga

SEQ ID NO: 86979 - DNA, 26 bp, Homo sapiens
tcatttcttgctgaacatgtaaagat

SEQ ID NO: 86980 - DNA, 26 bp, Homo sapiens
catttcttgctgaacatgtaaagatc

SEQ ID NO: 86981 - DNA, 26 bp, Homo sapiens
atttcttgctgaacatgtaaagatcc

SEQ ID NO: 86982 - DNA, 26 bp, Homo sapiens
tttcttgctgaacatgtaaagatccc

SEQ ID NO: 86983 - DNA, 26 bp, Homo sapiens
ttcttgctgaacatgtaaagatccct

SEQ ID NO: 86984 - DNA, 26 bp, Homo sapiens
tcttgctgaacatgtaaagatccctg

SEQ ID NO: 86985 - DNA, 26 bp, Homo sapiens
cttgctgaacatgtaaagatccctgc

SEQ ID NO: 86986 - DNA, 26 bp, Homo sapiens
ttgctgaacatgtaaagatccctgca

SEQ ID NO: 86987 - DNA, 26 bp, Homo sapiens
tgctgaacatgtaaagatccctgcat

SEQ ID NO: 86988 - DNA, 26 bp, Homo sapiens
gctgaacatgtaaagatccctgcatc

SEQ ID NO: 86989 - DNA, 26 bp, Homo sapiens
ctgaacatgtaaagatccctgcatct

SEQ ID NO: 86990 - DNA, 26 bp, Homo sapiens
tgaacatgtaaagatccctgcatctt

SEQ ID NO: 86991 - DNA, 26 bp, Homo sapiens
gaacatgtaaagatccctgcatcttc

SEQ ID NO: 86992 - DNA, 26 bp, Homo sapiens
aacatgtaaagatccctgcatcttca

SEQ ID NO: 86993 - DNA, 26 bp, Homo sapiens
acatgtaaagatccctgcatcttcag

SEQ ID NO: 86994 - DNA, 26 bp, Homo sapiens
catgtaaagatccctgcatcttcagg

SEQ ID NO: 86995 - DNA, 26 bp, Homo sapiens
atgtaaagatccctgcatcttcaggg

SEQ ID NO: 86996 - DNA, 26 bp, Homo sapiens
tgtaaagatccctgcatcttcaggga

SEQ ID NO: 86997 - DNA, 26 bp, Homo sapiens
gtaaagatccctgcatcttcagggaa

SEQ ID NO: 86998 - DNA, 26 bp, Homo sapiens
taaagatccctgcatcttcagggaaa

SEQ ID NO: 86999 - DNA, 26 bp, Homo sapiens
aaagatccctgcatcttcagggaaag

SEQ ID NO: 87000 - DNA, 26 bp, Homo sapiens
aagatccctgcatcttcagggaaagt

SEQ ID NO: 87001 - DNA, 26 bp, Homo sapiens
agatccctgcatcttcagggaaagtc

SEQ ID NO: 87002 - DNA, 26 bp, Homo sapiens
gatccctgcatcttcagggaaagtct

SEQ ID NO: 87003 - DNA, 26 bp, Homo sapiens
atccctgcatcttcagggaaagtctc

SEQ ID NO: 87004 - DNA, 26 bp, Homo sapiens
tccctgcatcttcagggaaagtctca

SEQ ID NO: 87005 - DNA, 26 bp, Homo sapiens
ccctgcatcttcagggaaagtctcag

SEQ ID NO: 87006 - DNA, 26 bp, Homo sapiens
cctgcatcttcagggaaagtctcagc

SEQ ID NO: 87007 - DNA, 26 bp, Homo sapiens
ctgcatcttcagggaaagtctcagcg

SEQ ID NO: 87008 - DNA, 26 bp, Homo sapiens
tgcatcttcagggaaagtctcagcga

SEQ ID NO: 87009 - DNA, 26 bp, Homo sapiens
gcatcttcagggaaagtctcagcgat

SEQ ID NO: 87010 - DNA, 26 bp, Homo sapiens
catcttcagggaaagtctcagcgata

SEQ ID NO: 87011 - DNA, 26 bp, Homo sapiens
atcttcagggaaagtctcagcgataa

SEQ ID NO: 87012 - DNA, 26 bp, Homo sapiens
tcttcagggaaagtctcagcgataac

SEQ ID NO: 87013 - DNA, 26 bp, Homo sapiens
cttcagggaaagtctcagcgataact

SEQ ID NO: 87014 - DNA, 26 bp, Homo sapiens
ttcagggaaagtctcagcgataacta

SEQ ID NO: 87015 - DNA, 26 bp, Homo sapiens
tcagggaaagtctcagcgataactag

SEQ ID NO: 87016 - DNA, 26 bp, Homo sapiens
cagggaaagtctcagcgataactagg

SEQ ID NO: 87017 - DNA, 26 bp, Homo sapiens
agggaaagtctcagcgataactaggg

SEQ ID NO: 87018 - DNA, 26 bp, Homo sapiens
gggaaagtctcagcgataactagggt

SEQ ID NO: 87019 - DNA, 26 bp, Homo sapiens
ggaaagtctcagcgataactagggtg

SEQ ID NO: 87020 - DNA, 26 bp, Homo sapiens
gaaagtctcagcgataactagggtgc

SEQ ID NO: 87021 - DNA, 26 bp, Homo sapiens
aaagtctcagcgataactagggtgca

SEQ ID NO: 87022 - DNA, 26 bp, Homo sapiens
aagtctcagcgataactagggtgcaa

SEQ ID NO: 87023 - DNA, 26 bp, Homo sapiens
agtctcagcgataactagggtgcaaa

SEQ ID NO: 87024 - DNA, 26 bp, Homo sapiens
gtctcagcgataactagggtgcaaat

SEQ ID NO: 87025 - DNA, 26 bp, Homo sapiens
tctcagcgataactagggtgcaaatc

SEQ ID NO: 87026 - DNA, 26 bp, Homo sapiens
ctcagcgataactagggtgcaaatct

SEQ ID NO: 87027 - DNA, 26 bp, Homo sapiens
tcagcgataactagggtgcaaatctc

SEQ ID NO: 87028 - DNA, 26 bp, Homo sapiens
cagcgataactagggtgcaaatctcc

SEQ ID NO: 87029 - DNA, 26 bp, Homo sapiens
agcgataactagggtgcaaatctcct

SEQ ID NO: 87030 - DNA, 26 bp, Homo sapiens
gcgataactagggtgcaaatctcctc

SEQ ID NO: 87031 - DNA, 26 bp, Homo sapiens
cgataactagggtgcaaatctcctca

SEQ ID NO: 87032 - DNA, 26 bp, Homo sapiens
gataactagggtgcaaatctcctcag

SEQ ID NO: 87033 - DNA, 26 bp, Homo sapiens
ataactagggtgcaaatctcctcagg

SEQ ID NO: 87034 - DNA, 26 bp, Homo sapiens
taactagggtgcaaatctcctcaggt

SEQ ID NO: 87035 - DNA, 26 bp, Homo sapiens
aactagggtgcaaatctcctcaggtt

SEQ ID NO: 87036 - DNA, 26 bp, Homo sapiens
actagggtgcaaatctcctcaggttc

SEQ ID NO: 87037 - DNA, 26 bp, Homo sapiens
ctagggtgcaaatctcctcaggttca

SEQ ID NO: 87038 - DNA, 26 bp, Homo sapiens
tagggtgcaaatctcctcaggttcag

SEQ ID NO: 87039 - DNA, 26 bp, Homo sapiens
agggtgcaaatctcctcaggttcagc

SEQ ID NO: 87040 - DNA, 26 bp, Homo sapiens
gggtgcaaatctcctcaggttcagct

SEQ ID NO: 87041 - DNA, 26 bp, Homo sapiens
ggtgcaaatctcctcaggttcagctg

SEQ ID NO: 87042 - DNA, 26 bp, Homo sapiens
gtgcaaatctcctcaggttcagctgt

SEQ ID NO: 87043 - DNA, 26 bp, Homo sapiens
tgcaaatctcctcaggttcagctgta

SEQ ID NO: 87044 - DNA, 26 bp, Homo sapiens
gcaaatctcctcaggttcagctgtag

SEQ ID NO: 87045 - DNA, 26 bp, Homo sapiens
caaatctcctcaggttcagctgtaga

SEQ ID NO: 87046 - DNA, 26 bp, Homo sapiens
aaatctcctcaggttcagctgtagat

SEQ ID NO: 87047 - DNA, 26 bp, Homo sapiens
aatctcctcaggttcagctgtagatc

SEQ ID NO: 87048 - DNA, 26 bp, Homo sapiens
atctcctcaggttcagctgtagatct

SEQ ID NO: 87049 - DNA, 26 bp, Homo sapiens
tctcctcaggttcagctgtagatcta

SEQ ID NO: 87050 - DNA, 26 bp, Homo sapiens
ctcctcaggttcagctgtagatctag

SEQ ID NO: 87051 - DNA, 26 bp, Homo sapiens
tcctcaggttcagctgtagatctagg

SEQ ID NO: 87052 - DNA, 26 bp, Homo sapiens
cctcaggttcagctgtagatctaggt

SEQ ID NO: 87053 - DNA, 26 bp, Homo sapiens
ctcaggttcagctgtagatctaggtt

SEQ ID NO: 87054 - DNA, 26 bp, Homo sapiens
tcaggttcagctgtagatctaggttt

SEQ ID NO: 87055 - DNA, 26 bp, Homo sapiens
caggttcagctgtagatctaggtttt

SEQ ID NO: 87056 - DNA, 26 bp, Homo sapiens
aggttcagctgtagatctaggttttt

SEQ ID NO: 87057 - DNA, 26 bp, Homo sapiens
ggttcagctgtagatctaggtttttt

SEQ ID NO: 87058 - DNA, 26 bp, Homo sapiens
gttcagctgtagatctaggttttttc

SEQ ID NO: 87059 - DNA, 26 bp, Homo sapiens
ttcagctgtagatctaggttttttct

SEQ ID NO: 87060 - DNA, 26 bp, Homo sapiens
tcagctgtagatctaggttttttctg

SEQ ID NO: 87061 - DNA, 26 bp, Homo sapiens
cagctgtagatctaggttttttctgt

SEQ ID NO: 87062 - DNA, 26 bp, Homo sapiens
agctgtagatctaggttttttctgta

SEQ ID NO: 87063 - DNA, 26 bp, Homo sapiens
gctgtagatctaggttttttctgtag

SEQ ID NO: 87064 - DNA, 26 bp, Homo sapiens
ctgtagatctaggttttttctgtaga

SEQ ID NO: 87065 - DNA, 26 bp, Homo sapiens
tgtagatctaggttttttctgtagaa

SEQ ID NO: 87066 - DNA, 26 bp, Homo sapiens
gtagatctaggttttttctgtagaat

SEQ ID NO: 87067 - DNA, 26 bp, Homo sapiens
tagatctaggttttttctgtagaatt

SEQ ID NO: 87068 - DNA, 26 bp, Homo sapiens
agatctaggttttttctgtagaattc

SEQ ID NO: 87069 - DNA, 26 bp, Homo sapiens
gatctaggttttttctgtagaattcg

SEQ ID NO: 87070 - DNA, 26 bp, Homo sapiens
atctaggttttttctgtagaattcgg

SEQ ID NO: 87071 - DNA, 26 bp, Homo sapiens
tctaggttttttctgtagaattcgga

SEQ ID NO: 87072 - DNA, 26 bp, Homo sapiens
ctaggttttttctgtagaattcggaa

SEQ ID NO: 87073 - DNA, 26 bp, Homo sapiens
taggttttttctgtagaattcggaaa

SEQ ID NO: 87074 - DNA, 26 bp, Homo sapiens
aggttttttctgtagaattcggaaat

SEQ ID NO: 87075 - DNA, 26 bp, Homo sapiens
ggttttttctgtagaattcggaaatc

SEQ ID NO: 87076 - DNA, 26 bp, Homo sapiens
gttttttctgtagaattcggaaatct

SEQ ID NO: 87077 - DNA, 26 bp, Homo sapiens
ttttttctgtagaattcggaaatctg

SEQ ID NO: 87078 - DNA, 26 bp, Homo sapiens
tttttctgtagaattcggaaatctgg

SEQ ID NO: 87079 - DNA, 26 bp, Homo sapiens
ttttctgtagaattcggaaatctgga

SEQ ID NO: 87080 - DNA, 26 bp, Homo sapiens
tttctgtagaattcggaaatctggag

SEQ ID NO: 87081 - DNA, 26 bp, Homo sapiens
ttctgtagaattcggaaatctggaga

SEQ ID NO: 87082 - DNA, 26 bp, Homo sapiens
tctgtagaattcggaaatctggagag

SEQ ID NO: 87083 - DNA, 26 bp, Homo sapiens
ctgtagaattcggaaatctggagagt

SEQ ID NO: 87084 - DNA, 26 bp, Homo sapiens
tgtagaattcggaaatctggagagtc

SEQ ID NO: 87085 - DNA, 26 bp, Homo sapiens
gtagaattcggaaatctggagagtct

SEQ ID NO: 87086 - DNA, 26 bp, Homo sapiens
tagaattcggaaatctggagagtctt

SEQ ID NO: 87087 - DNA, 26 bp, Homo sapiens
agaattcggaaatctggagagtcttg

SEQ ID NO: 87088 - DNA, 26 bp, Homo sapiens
gaattcggaaatctggagagtcttgg

SEQ ID NO: 87089 - DNA, 26 bp, Homo sapiens
aattcggaaatctggagagtcttgga

SEQ ID NO: 87090 - DNA, 26 bp, Homo sapiens
attcggaaatctggagagtcttggat

SEQ ID NO: 87091 - DNA, 26 bp, Homo sapiens
ttcggaaatctggagagtcttggatt

SEQ ID NO: 87092 - DNA, 26 bp, Homo sapiens
tcggaaatctggagagtcttggattt

SEQ ID NO: 87093 - DNA, 26 bp, Homo sapiens
cggaaatctggagagtcttggatttc

SEQ ID NO: 87094 - DNA, 26 bp, Homo sapiens
ggaaatctggagagtcttggatttca

SEQ ID NO: 87095 - DNA, 26 bp, Homo sapiens
gaaatctggagagtcttggatttcac

SEQ ID NO: 87096 - DNA, 26 bp, Homo sapiens
aaatctggagagtcttggatttcact

SEQ ID NO: 87097 - DNA, 26 bp, Homo sapiens
aatctggagagtcttggatttcactc

SEQ ID NO: 87098 - DNA, 26 bp, Homo sapiens
atctggagagtcttggatttcactcc

SEQ ID NO: 87099 - DNA, 26 bp, Homo sapiens
tctggagagtcttggatttcactccc

SEQ ID NO: 87100 - DNA, 26 bp, Homo sapiens
ctggagagtcttggatttcactccct

SEQ ID NO: 87101 - DNA, 26 bp, Homo sapiens
tggagagtcttggatttcactccctt

SEQ ID NO: 87102 - DNA, 26 bp, Homo sapiens
ggagagtcttggatttcactcccttg

SEQ ID NO: 87103 - DNA, 26 bp, Homo sapiens
gagagtcttggatttcactcccttgc

SEQ ID NO: 87104 - DNA, 26 bp, Homo sapiens
agagtcttggatttcactcccttgcc

SEQ ID NO: 87105 - DNA, 26 bp, Homo sapiens
gagtcttggatttcactcccttgccg

SEQ ID NO: 87106 - DNA, 26 bp, Homo sapiens
agtcttggatttcactcccttgccga

SEQ ID NO: 87107 - DNA, 26 bp, Homo sapiens
gtcttggatttcactcccttgccgaa

SEQ ID NO: 87108 - DNA, 26 bp, Homo sapiens
tcttggatttcactcccttgccgaaa

SEQ ID NO: 87109 - DNA, 26 bp, Homo sapiens
cttggatttcactcccttgccgaaac

SEQ ID NO: 87110 - DNA, 26 bp, Homo sapiens
ttggatttcactcccttgccgaaacc

SEQ ID NO: 87111 - DNA, 26 bp, Homo sapiens
tggatttcactcccttgccgaaacca

SEQ ID NO: 87112 - DNA, 26 bp, Homo sapiens
ggatttcactcccttgccgaaaccac

SEQ ID NO: 87113 - DNA, 26 bp, Homo sapiens
gatttcactcccttgccgaaaccact

SEQ ID NO: 87114 - DNA, 26 bp, Homo sapiens
atttcactcccttgccgaaaccactg

SEQ ID NO: 87115 - DNA, 26 bp, Homo sapiens
tttcactcccttgccgaaaccactgg

SEQ ID NO: 87116 - DNA, 26 bp, Homo sapiens
ttcactcccttgccgaaaccactgga

SEQ ID NO: 87117 - DNA, 26 bp, Homo sapiens
tcactcccttgccgaaaccactggac

SEQ ID NO: 87118 - DNA, 26 bp, Homo sapiens
cactcccttgccgaaaccactggacc

SEQ ID NO: 87119 - DNA, 26 bp, Homo sapiens
actcccttgccgaaaccactggacct

SEQ ID NO: 87120 - DNA, 26 bp, Homo sapiens
ctcccttgccgaaaccactggacctg

SEQ ID NO: 87121 - DNA, 26 bp, Homo sapiens
tcccttgccgaaaccactggacctgc

SEQ ID NO: 87122 - DNA, 26 bp, Homo sapiens
cccttgccgaaaccactggacctgca

SEQ ID NO: 87123 - DNA, 26 bp, Homo sapiens
ccttgccgaaaccactggacctgcag

SEQ ID NO: 87124 - DNA, 26 bp, Homo sapiens
cttgccgaaaccactggacctgcaga

SEQ ID NO: 87125 - DNA, 26 bp, Homo sapiens
ttgccgaaaccactggacctgcagag

SEQ ID NO: 87126 - DNA, 26 bp, Homo sapiens
tgccgaaaccactggacctgcagagg

SEQ ID NO: 87127 - DNA, 26 bp, Homo sapiens
gccgaaaccactggacctgcagaggg

SEQ ID NO: 87128 - DNA, 26 bp, Homo sapiens
ccgaaaccactggacctgcagagggg

SEQ ID NO: 87129 - DNA, 26 bp, Homo sapiens
cgaaaccactggacctgcagaggggg

SEQ ID NO: 87130 - DNA, 26 bp, Homo sapiens
gaaaccactggacctgcagagggggt

SEQ ID NO: 87131 - DNA, 26 bp, Homo sapiens
aaaccactggacctgcagagggggtg

SEQ ID NO: 87132 - DNA, 26 bp, Homo sapiens
aaccactggacctgcagagggggtgc

SEQ ID NO: 87133 - DNA, 26 bp, Homo sapiens
accactggacctgcagagggggtgcc

SEQ ID NO: 87134 - DNA, 26 bp, Homo sapiens
ccactggacctgcagagggggtgccc

SEQ ID NO: 87135 - DNA, 26 bp, Homo sapiens
cactggacctgcagagggggtgcccc

SEQ ID NO: 87136 - DNA, 26 bp, Homo sapiens
actggacctgcagagggggtgcccca

SEQ ID NO: 87137 - DNA, 26 bp, Homo sapiens
ctggacctgcagagggggtgccccac

SEQ ID NO: 87138 - DNA, 26 bp, Homo sapiens
tggacctgcagagggggtgccccacg

SEQ ID NO: 87139 - DNA, 26 bp, Homo sapiens
ggacctgcagagggggtgccccacgg

SEQ ID NO: 87140 - DNA, 26 bp, Homo sapiens
gacctgcagagggggtgccccacgga

SEQ ID NO: 87141 - DNA, 26 bp, Homo sapiens
acctgcagagggggtgccccacggac

SEQ ID NO: 87142 - DNA, 26 bp, Homo sapiens
cctgcagagggggtgccccacggacc

SEQ ID NO: 87143 - DNA, 26 bp, Homo sapiens
ctgcagagggggtgccccacggaccc

SEQ ID NO: 87144 - DNA, 26 bp, Homo sapiens
tgcagagggggtgccccacggacccg

SEQ ID NO: 87145 - DNA, 26 bp, Homo sapiens
gcagagggggtgccccacggacccgg

SEQ ID NO: 87146 - DNA, 26 bp, Homo sapiens
cagagggggtgccccacggacccggc

SEQ ID NO: 87147 - DNA, 26 bp, Homo sapiens
agagggggtgccccacggacccggca

SEQ ID NO: 87148 - DNA, 26 bp, Homo sapiens
gagggggtgccccacggacccggcac

SEQ ID NO: 87149 - DNA, 26 bp, Homo sapiens
agggggtgccccacggacccggcact

SEQ ID NO: 87150 - DNA, 26 bp, Homo sapiens
gggggtgccccacggacccggcactc

SEQ ID NO: 87151 - DNA, 26 bp, Homo sapiens
ggggtgccccacggacccggcactcc

SEQ ID NO: 87152 - DNA, 26 bp, Homo sapiens
gggtgccccacggacccggcactcca

SEQ ID NO: 87153 - DNA, 26 bp, Homo sapiens
ggtgccccacggacccggcactccag

SEQ ID NO: 87154 - DNA, 26 bp, Homo sapiens
gtgccccacggacccggcactccaga

SEQ ID NO: 87155 - DNA, 26 bp, Homo sapiens
tgccccacggacccggcactccagaa

SEQ ID NO: 87156 - DNA, 26 bp, Homo sapiens
gccccacggacccggcactccagaac

SEQ ID NO: 87157 - DNA, 26 bp, Homo sapiens
ccccacggacccggcactccagaacc

SEQ ID NO: 87158 - DNA, 26 bp, Homo sapiens
cccacggacccggcactccagaacca

SEQ ID NO: 87159 - DNA, 26 bp, Homo sapiens
ccacggacccggcactccagaaccac

SEQ ID NO: 87160 - DNA, 26 bp, Homo sapiens
cacggacccggcactccagaaccacc

SEQ ID NO: 87161 - DNA, 26 bp, Homo sapiens
acggacccggcactccagaaccacca

SEQ ID NO: 87162 - DNA, 26 bp, Homo sapiens
cggacccggcactccagaaccaccac

SEQ ID NO: 87163 - DNA, 26 bp, Homo sapiens
ggacccggcactccagaaccaccacc

SEQ ID NO: 87164 - DNA, 26 bp, Homo sapiens
gacccggcactccagaaccaccacct

SEQ ID NO: 87165 - DNA, 26 bp, Homo sapiens
acccggcactccagaaccaccacctg

SEQ ID NO: 87166 - DNA, 26 bp, Homo sapiens
cccggcactccagaaccaccacctgg

SEQ ID NO: 87167 - DNA, 26 bp, Homo sapiens
ccggcactccagaaccaccacctggc

SEQ ID NO: 87168 - DNA, 26 bp, Homo sapiens
cggcactccagaaccaccacctggcc

SEQ ID NO: 87169 - DNA, 26 bp, Homo sapiens
ggcactccagaaccaccacctggcct

SEQ ID NO: 87170 - DNA, 26 bp, Homo sapiens
gcactccagaaccaccacctggcctt

SEQ ID NO: 87171 - DNA, 26 bp, Homo sapiens
cactccagaaccaccacctggccttc

SEQ ID NO: 87172 - DNA, 26 bp, Homo sapiens
actccagaaccaccacctggccttcc

SEQ ID NO: 87173 - DNA, 26 bp, Homo sapiens
ctccagaaccaccacctggccttccg

SEQ ID NO: 87174 - DNA, 26 bp, Homo sapiens
tccagaaccaccacctggccttccgc

SEQ ID NO: 87175 - DNA, 26 bp, Homo sapiens
ccagaaccaccacctggccttccgcc

SEQ ID NO: 87176 - DNA, 26 bp, Homo sapiens
cagaaccaccacctggccttccgcca

SEQ ID NO: 87177 - DNA, 26 bp, Homo sapiens
agaaccaccacctggccttccgccac

SEQ ID NO: 87178 - DNA, 26 bp, Homo sapiens
gaaccaccacctggccttccgccacg

SEQ ID NO: 87179 - DNA, 26 bp, Homo sapiens
aaccaccacctggccttccgccacgg

SEQ ID NO: 87180 - DNA, 26 bp, Homo sapiens
accaccacctggccttccgccacggc

SEQ ID NO: 87181 - DNA, 26 bp, Homo sapiens
ccaccacctggccttccgccacggct

SEQ ID NO: 87182 - DNA, 26 bp, Homo sapiens
caccacctggccttccgccacggctg

SEQ ID NO: 87183 - DNA, 26 bp, Homo sapiens
accacctggccttccgccacggctgt

SEQ ID NO: 87184 - DNA, 26 bp, Homo sapiens
ccacctggccttccgccacggctgtg

SEQ ID NO: 87185 - DNA, 26 bp, Homo sapiens
cacctggccttccgccacggctgtgt

SEQ ID NO: 87186 - DNA, 26 bp, Homo sapiens
acctggccttccgccacggctgtgtt

SEQ ID NO: 87187 - DNA, 26 bp, Homo sapiens
cctggccttccgccacggctgtgttt

SEQ ID NO: 87188 - DNA, 26 bp, Homo sapiens
ctggccttccgccacggctgtgtttt

SEQ ID NO: 87189 - DNA, 26 bp, Homo sapiens
tggccttccgccacggctgtgttttg

SEQ ID NO: 87190 - DNA, 26 bp, Homo sapiens
ggccttccgccacggctgtgttttgc

SEQ ID NO: 87191 - DNA, 26 bp, Homo sapiens
gccttccgccacggctgtgttttgca

SEQ ID NO: 87192 - DNA, 26 bp, Homo sapiens
ccttccgccacggctgtgttttgcag

SEQ ID NO: 87193 - DNA, 26 bp, Homo sapiens
cttccgccacggctgtgttttgcagt

SEQ ID NO: 87194 - DNA, 26 bp, Homo sapiens
ttccgccacggctgtgttttgcagtt

SEQ ID NO: 87195 - DNA, 26 bp, Homo sapiens
tccgccacggctgtgttttgcagttc

SEQ ID NO: 87196 - DNA, 26 bp, Homo sapiens
ccgccacggctgtgttttgcagttcc

SEQ ID NO: 87197 - DNA, 26 bp, Homo sapiens
cgccacggctgtgttttgcagttcct

SEQ ID NO: 87198 - DNA, 26 bp, Homo sapiens
gccacggctgtgttttgcagttcctt

SEQ ID NO: 87199 - DNA, 26 bp, Homo sapiens
ccacggctgtgttttgcagttccttt

SEQ ID NO: 87200 - DNA, 26 bp, Homo sapiens
cacggctgtgttttgcagttcctttg

SEQ ID NO: 87201 - DNA, 26 bp, Homo sapiens
acggctgtgttttgcagttcctttgt

SEQ ID NO: 87202 - DNA, 26 bp, Homo sapiens
cggctgtgttttgcagttcctttgta

SEQ ID NO: 87203 - DNA, 26 bp, Homo sapiens
ggctgtgttttgcagttcctttgtaa

SEQ ID NO: 87204 - DNA, 26 bp, Homo sapiens
gctgtgttttgcagttcctttgtaaa

SEQ ID NO: 87205 - DNA, 26 bp, Homo sapiens
ctgtgttttgcagttcctttgtaaaa

SEQ ID NO: 87206 - DNA, 26 bp, Homo sapiens
tgtgttttgcagttcctttgtaaaaa

SEQ ID NO: 87207 - DNA, 26 bp, Homo sapiens
gtgttttgcagttcctttgtaaaaac

SEQ ID NO: 87208 - DNA, 26 bp, Homo sapiens
tgttttgcagttcctttgtaaaaaca

SEQ ID NO: 87209 - DNA, 26 bp, Homo sapiens
gttttgcagttcctttgtaaaaacag

SEQ ID NO: 87210 - DNA, 26 bp, Homo sapiens
ttttgcagttcctttgtaaaaacagg

SEQ ID NO: 87211 - DNA, 26 bp, Homo sapiens
tttgcagttcctttgtaaaaacagga

SEQ ID NO: 87212 - DNA, 26 bp, Homo sapiens
ttgcagttcctttgtaaaaacaggag

SEQ ID NO: 87213 - DNA, 26 bp, Homo sapiens
tgcagttcctttgtaaaaacaggagg

SEQ ID NO: 87214 - DNA, 26 bp, Homo sapiens
gcagttcctttgtaaaaacaggagga

SEQ ID NO: 87215 - DNA, 26 bp, Homo sapiens
cagttcctttgtaaaaacaggaggaa

SEQ ID NO: 87216 - DNA, 26 bp, Homo sapiens
agttcctttgtaaaaacaggaggaaa

SEQ ID NO: 87217 - DNA, 26 bp, Homo sapiens
gttcctttgtaaaaacaggaggaaag

SEQ ID NO: 87218 - DNA, 26 bp, Homo sapiens
ttcctttgtaaaaacaggaggaaagt

SEQ ID NO: 87219 - DNA, 26 bp, Homo sapiens
tcctttgtaaaaacaggaggaaagta

SEQ ID NO: 87220 - DNA, 26 bp, Homo sapiens
cctttgtaaaaacaggaggaaagtag

SEQ ID NO: 87221 - DNA, 26 bp, Homo sapiens
ctttgtaaaaacaggaggaaagtagg

SEQ ID NO: 87222 - DNA, 26 bp, Homo sapiens
tttgtaaaaacaggaggaaagtaggc

SEQ ID NO: 87223 - DNA, 26 bp, Homo sapiens
ttgtaaaaacaggaggaaagtaggca

SEQ ID NO: 87224 - DNA, 26 bp, Homo sapiens
tgtaaaaacaggaggaaagtaggcag

SEQ ID NO: 87225 - DNA, 26 bp, Homo sapiens
gtaaaaacaggaggaaagtaggcagt

SEQ ID NO: 87226 - DNA, 26 bp, Homo sapiens
taaaaacaggaggaaagtaggcagta

SEQ ID NO: 87227 - DNA, 26 bp, Homo sapiens
aaaaacaggaggaaagtaggcagtag

SEQ ID NO: 87228 - DNA, 26 bp, Homo sapiens
aaaacaggaggaaagtaggcagtagt

SEQ ID NO: 87229 - DNA, 26 bp, Homo sapiens
aaacaggaggaaagtaggcagtagtg

SEQ ID NO: 87230 - DNA, 26 bp, Homo sapiens
aacaggaggaaagtaggcagtagtgg

SEQ ID NO: 87231 - DNA, 26 bp, Homo sapiens
acaggaggaaagtaggcagtagtggt

SEQ ID NO: 87232 - DNA, 26 bp, Homo sapiens
caggaggaaagtaggcagtagtggtt

SEQ ID NO: 87233 - DNA, 26 bp, Homo sapiens
aggaggaaagtaggcagtagtggttc

SEQ ID NO: 87234 - DNA, 26 bp, Homo sapiens
ggaggaaagtaggcagtagtggttcc

SEQ ID NO: 87235 - DNA, 26 bp, Homo sapiens
gaggaaagtaggcagtagtggttcca

SEQ ID NO: 87236 - DNA, 26 bp, Homo sapiens
aggaaagtaggcagtagtggttccat

SEQ ID NO: 87237 - DNA, 26 bp, Homo sapiens
ggaaagtaggcagtagtggttccatc

SEQ ID NO: 87238 - DNA, 26 bp, Homo sapiens
gaaagtaggcagtagtggttccatca

SEQ ID NO: 87239 - DNA, 26 bp, Homo sapiens
aaagtaggcagtagtggttccatcag

SEQ ID NO: 87240 - DNA, 26 bp, Homo sapiens
aagtaggcagtagtggttccatcagg

SEQ ID NO: 87241 - DNA, 26 bp, Homo sapiens
agtaggcagtagtggttccatcaggt

SEQ ID NO: 87242 - DNA, 26 bp, Homo sapiens
gtaggcagtagtggttccatcaggtc

SEQ ID NO: 87243 - DNA, 26 bp, Homo sapiens
taggcagtagtggttccatcaggtcg

SEQ ID NO: 87244 - DNA, 26 bp, Homo sapiens
aggcagtagtggttccatcaggtcgg

SEQ ID NO: 87245 - DNA, 26 bp, Homo sapiens
ggcagtagtggttccatcaggtcggc

SEQ ID NO: 87246 - DNA, 26 bp, Homo sapiens
gcagtagtggttccatcaggtcggca

SEQ ID NO: 87247 - DNA, 26 bp, Homo sapiens
cagtagtggttccatcaggtcggcag

SEQ ID NO: 87248 - DNA, 26 bp, Homo sapiens
agtagtggttccatcaggtcggcaga

SEQ ID NO: 87249 - DNA, 26 bp, Homo sapiens
gtagtggttccatcaggtcggcagag

SEQ ID NO: 87250 - DNA, 26 bp, Homo sapiens
tagtggttccatcaggtcggcagaga

SEQ ID NO: 87251 - DNA, 26 bp, Homo sapiens
agtggttccatcaggtcggcagagat

SEQ ID NO: 87252 - DNA, 26 bp, Homo sapiens
gtggttccatcaggtcggcagagata

SEQ ID NO: 87253 - DNA, 26 bp, Homo sapiens
tggttccatcaggtcggcagagatat

SEQ ID NO: 87254 - DNA, 26 bp, Homo sapiens
ggttccatcaggtcggcagagatatg

SEQ ID NO: 87255 - DNA, 26 bp, Homo sapiens
gttccatcaggtcggcagagatatga

SEQ ID NO: 87256 - DNA, 26 bp, Homo sapiens
ttccatcaggtcggcagagatatgaa

SEQ ID NO: 87257 - DNA, 26 bp, Homo sapiens
tccatcaggtcggcagagatatgaag

SEQ ID NO: 87258 - DNA, 26 bp, Homo sapiens
ccatcaggtcggcagagatatgaagt

SEQ ID NO: 87259 - DNA, 26 bp, Homo sapiens
catcaggtcggcagagatatgaagtt

SEQ ID NO: 87260 - DNA, 26 bp, Homo sapiens
atcaggtcggcagagatatgaagttg

SEQ ID NO: 87261 - DNA, 26 bp, Homo sapiens
tcaggtcggcagagatatgaagttgg

SEQ ID NO: 87262 - DNA, 26 bp, Homo sapiens
caggtcggcagagatatgaagttgga

SEQ ID NO: 87263 - DNA, 26 bp, Homo sapiens
aggtcggcagagatatgaagttggac

SEQ ID NO: 87264 - DNA, 26 bp, Homo sapiens
ggtcggcagagatatgaagttggact

SEQ ID NO: 87265 - DNA, 26 bp, Homo sapiens
gtcggcagagatatgaagttggactg

SEQ ID NO: 87266 - DNA, 26 bp, Homo sapiens
tcggcagagatatgaagttggactgt

SEQ ID NO: 87267 - DNA, 26 bp, Homo sapiens
cggcagagatatgaagttggactgtg

SEQ ID NO: 87268 - DNA, 26 bp, Homo sapiens
ggcagagatatgaagttggactgtga

SEQ ID NO: 87269 - DNA, 26 bp, Homo sapiens
gcagagatatgaagttggactgtgaa

SEQ ID NO: 87270 - DNA, 26 bp, Homo sapiens
cagagatatgaagttggactgtgaac

SEQ ID NO: 87271 - DNA, 26 bp, Homo sapiens
agagatatgaagttggactgtgaacc

SEQ ID NO: 87272 - DNA, 26 bp, Homo sapiens
gagatatgaagttggactgtgaacct

SEQ ID NO: 87273 - DNA, 26 bp, Homo sapiens
agatatgaagttggactgtgaacctg

SEQ ID NO: 87274 - DNA, 26 bp, Homo sapiens
gatatgaagttggactgtgaacctgt

SEQ ID NO: 87275 - DNA, 26 bp, Homo sapiens
atatgaagttggactgtgaacctgtt

SEQ ID NO: 87276 - DNA, 26 bp, Homo sapiens
tatgaagttggactgtgaacctgttg

SEQ ID NO: 87277 - DNA, 26 bp, Homo sapiens
atgaagttggactgtgaacctgttgc

SEQ ID NO: 87278 - DNA, 26 bp, Homo sapiens
tgaagttggactgtgaacctgttgca

SEQ ID NO: 87279 - DNA, 26 bp, Homo sapiens
gaagttggactgtgaacctgttgcac

SEQ ID NO: 87280 - DNA, 26 bp, Homo sapiens
aagttggactgtgaacctgttgcaca

SEQ ID NO: 87281 - DNA, 26 bp, Homo sapiens
agttggactgtgaacctgttgcacag

SEQ ID NO: 87282 - DNA, 26 bp, Homo sapiens
gttggactgtgaacctgttgcacagg

SEQ ID NO: 87283 - DNA, 26 bp, Homo sapiens
ttggactgtgaacctgttgcacaggg

SEQ ID NO: 87284 - DNA, 26 bp, Homo sapiens
tggactgtgaacctgttgcacaggga

SEQ ID NO: 87285 - DNA, 26 bp, Homo sapiens
ggactgtgaacctgttgcacagggac

SEQ ID NO: 87286 - DNA, 26 bp, Homo sapiens
gactgtgaacctgttgcacagggaca

SEQ ID NO: 87287 - DNA, 26 bp, Homo sapiens
actgtgaacctgttgcacagggacag

SEQ ID NO: 87288 - DNA, 26 bp, Homo sapiens
ctgtgaacctgttgcacagggacaga

SEQ ID NO: 87289 - DNA, 26 bp, Homo sapiens
tgtgaacctgttgcacagggacagac

SEQ ID NO: 87290 - DNA, 26 bp, Homo sapiens
gtgaacctgttgcacagggacagaca

SEQ ID NO: 87291 - DNA, 26 bp, Homo sapiens
tgaacctgttgcacagggacagacag

SEQ ID NO: 87292 - DNA, 26 bp, Homo sapiens
gaacctgttgcacagggacagacagt

SEQ ID NO: 87293 - DNA, 26 bp, Homo sapiens
aacctgttgcacagggacagacagtg

SEQ ID NO: 87294 - DNA, 26 bp, Homo sapiens
acctgttgcacagggacagacagtgg

SEQ ID NO: 87295 - DNA, 26 bp, Homo sapiens
cctgttgcacagggacagacagtggt

SEQ ID NO: 87296 - DNA, 26 bp, Homo sapiens
ctgttgcacagggacagacagtggtt

SEQ ID NO: 87297 - DNA, 26 bp, Homo sapiens
tgttgcacagggacagacagtggttg

SEQ ID NO: 87298 - DNA, 26 bp, Homo sapiens
gttgcacagggacagacagtggttga

SEQ ID NO: 87299 - DNA, 26 bp, Homo sapiens
ttgcacagggacagacagtggttgaa

SEQ ID NO: 87300 - DNA, 26 bp, Homo sapiens
tgcacagggacagacagtggttgaat

SEQ ID NO: 87301 - DNA, 26 bp, Homo sapiens
gcacagggacagacagtggttgaatc

SEQ ID NO: 87302 - DNA, 26 bp, Homo sapiens
cacagggacagacagtggttgaatca

SEQ ID NO: 87303 - DNA, 26 bp, Homo sapiens
acagggacagacagtggttgaatcac

SEQ ID NO: 87304 - DNA, 26 bp, Homo sapiens
cagggacagacagtggttgaatcaca

SEQ ID NO: 87305 - DNA, 26 bp, Homo sapiens
agggacagacagtggttgaatcacag

SEQ ID NO: 87306 - DNA, 26 bp, Homo sapiens
gggacagacagtggttgaatcacagc

SEQ ID NO: 87307 - DNA, 26 bp, Homo sapiens
ggacagacagtggttgaatcacagct

SEQ ID NO: 87308 - DNA, 26 bp, Homo sapiens
gacagacagtggttgaatcacagctg

SEQ ID NO: 87309 - DNA, 26 bp, Homo sapiens
acagacagtggttgaatcacagctgt

SEQ ID NO: 87310 - DNA, 26 bp, Homo sapiens
cagacagtggttgaatcacagctgtg

SEQ ID NO: 87311 - DNA, 26 bp, Homo sapiens
agacagtggttgaatcacagctgtgg

SEQ ID NO: 87312 - DNA, 26 bp, Homo sapiens
gacagtggttgaatcacagctgtggt

SEQ ID NO: 87313 - DNA, 26 bp, Homo sapiens
acagtggttgaatcacagctgtggtc

SEQ ID NO: 87314 - DNA, 26 bp, Homo sapiens
cagtggttgaatcacagctgtggtca

SEQ ID NO: 87315 - DNA, 26 bp, Homo sapiens
agtggttgaatcacagctgtggtcac

SEQ ID NO: 87316 - DNA, 26 bp, Homo sapiens
gtggttgaatcacagctgtggtcacc

SEQ ID NO: 87317 - DNA, 26 bp, Homo sapiens
tggttgaatcacagctgtggtcaccc

SEQ ID NO: 87318 - DNA, 26 bp, Homo sapiens
ggttgaatcacagctgtggtcacccc

SEQ ID NO: 87319 - DNA, 26 bp, Homo sapiens
gttgaatcacagctgtggtcacccct

SEQ ID NO: 87320 - DNA, 26 bp, Homo sapiens
ttgaatcacagctgtggtcacccctg

SEQ ID NO: 87321 - DNA, 26 bp, Homo sapiens
tgaatcacagctgtggtcacccctgt

SEQ ID NO: 87322 - DNA, 26 bp, Homo sapiens
gaatcacagctgtggtcacccctgtc

SEQ ID NO: 87323 - DNA, 26 bp, Homo sapiens
aatcacagctgtggtcacccctgtct

SEQ ID NO: 87324 - DNA, 26 bp, Homo sapiens
atcacagctgtggtcacccctgtctt

SEQ ID NO: 87325 - DNA, 26 bp, Homo sapiens
tcacagctgtggtcacccctgtcttt

SEQ ID NO: 87326 - DNA, 26 bp, Homo sapiens
cacagctgtggtcacccctgtctttg

SEQ ID NO: 87327 - DNA, 26 bp, Homo sapiens
acagctgtggtcacccctgtctttgg

SEQ ID NO: 87328 - DNA, 26 bp, Homo sapiens
cagctgtggtcacccctgtctttgga

SEQ ID NO: 87329 - DNA, 26 bp, Homo sapiens
agctgtggtcacccctgtctttggag

SEQ ID NO: 87330 - DNA, 26 bp, Homo sapiens
gctgtggtcacccctgtctttggaga

SEQ ID NO: 87331 - DNA, 26 bp, Homo sapiens
ctgtggtcacccctgtctttggagat

SEQ ID NO: 87332 - DNA, 26 bp, Homo sapiens
tgtggtcacccctgtctttggagatg

SEQ ID NO: 87333 - DNA, 26 bp, Homo sapiens
gtggtcacccctgtctttggagatga

SEQ ID NO: 87334 - DNA, 26 bp, Homo sapiens
tggtcacccctgtctttggagatgat

SEQ ID NO: 87335 - DNA, 26 bp, Homo sapiens
ggtcacccctgtctttggagatgatg

SEQ ID NO: 87336 - DNA, 26 bp, Homo sapiens
gtcacccctgtctttggagatgatga

SEQ ID NO: 87337 - DNA, 26 bp, Homo sapiens
tcacccctgtctttggagatgatgat

SEQ ID NO: 87338 - DNA, 26 bp, Homo sapiens
cacccctgtctttggagatgatgatc

SEQ ID NO: 87339 - DNA, 26 bp, Homo sapiens
acccctgtctttggagatgatgatcc

SEQ ID NO: 87340 - DNA, 26 bp, Homo sapiens
cccctgtctttggagatgatgatcct

SEQ ID NO: 87341 - DNA, 26 bp, Homo sapiens
ccctgtctttggagatgatgatccta

SEQ ID NO: 87342 - DNA, 26 bp, Homo sapiens
cctgtctttggagatgatgatcctat

SEQ ID NO: 87343 - DNA, 26 bp, Homo sapiens
ctgtctttggagatgatgatcctatt

SEQ ID NO: 87344 - DNA, 26 bp, Homo sapiens
tgtctttggagatgatgatcctattg

SEQ ID NO: 87345 - DNA, 26 bp, Homo sapiens
gtctttggagatgatgatcctattgt

SEQ ID NO: 87346 - DNA, 26 bp, Homo sapiens
tctttggagatgatgatcctattgtc

SEQ ID NO: 87347 - DNA, 26 bp, Homo sapiens
ctttggagatgatgatcctattgtca

SEQ ID NO: 87348 - DNA, 26 bp, Homo sapiens
tttggagatgatgatcctattgtcaa

SEQ ID NO: 87349 - DNA, 26 bp, Homo sapiens
ttggagatgatgatcctattgtcaag

SEQ ID NO: 87350 - DNA, 26 bp, Homo sapiens
tggagatgatgatcctattgtcaagg

SEQ ID NO: 87351 - DNA, 26 bp, Homo sapiens
ggagatgatgatcctattgtcaagga

SEQ ID NO: 87352 - DNA, 26 bp, Homo sapiens
gagatgatgatcctattgtcaaggaa

SEQ ID NO: 87353 - DNA, 26 bp, Homo sapiens
agatgatgatcctattgtcaaggaaa

SEQ ID NO: 87354 - DNA, 26 bp, Homo sapiens
gatgatgatcctattgtcaaggaaac

SEQ ID NO: 87355 - DNA, 26 bp, Homo sapiens
atgatgatcctattgtcaaggaaaca

SEQ ID NO: 87356 - DNA, 26 bp, Homo sapiens
tgatgatcctattgtcaaggaaacag

SEQ ID NO: 87357 - DNA, 26 bp, Homo sapiens
gatgatcctattgtcaaggaaacaga

SEQ ID NO: 87358 - DNA, 26 bp, Homo sapiens
atgatcctattgtcaaggaaacagaa

SEQ ID NO: 87359 - DNA, 26 bp, Homo sapiens
tgatcctattgtcaaggaaacagaag

SEQ ID NO: 87360 - DNA, 26 bp, Homo sapiens
gatcctattgtcaaggaaacagaagt

SEQ ID NO: 87361 - DNA, 26 bp, Homo sapiens
atcctattgtcaaggaaacagaagtt

SEQ ID NO: 87362 - DNA, 26 bp, Homo sapiens
tcctattgtcaaggaaacagaagttg

SEQ ID NO: 87363 - DNA, 26 bp, Homo sapiens
cctattgtcaaggaaacagaagttgt

SEQ ID NO: 87364 - DNA, 26 bp, Homo sapiens
ctattgtcaaggaaacagaagttgtt

SEQ ID NO: 87365 - DNA, 26 bp, Homo sapiens
tattgtcaaggaaacagaagttgttt

SEQ ID NO: 87366 - DNA, 26 bp, Homo sapiens
attgtcaaggaaacagaagttgtttt

SEQ ID NO: 87367 - DNA, 26 bp, Homo sapiens
ttgtcaaggaaacagaagttgttttc

SEQ ID NO: 87368 - DNA, 26 bp, Homo sapiens
tgtcaaggaaacagaagttgttttct

SEQ ID NO: 87369 - DNA, 26 bp, Homo sapiens
gtcaaggaaacagaagttgttttctt

SEQ ID NO: 87370 - DNA, 26 bp, Homo sapiens
tcaaggaaacagaagttgttttcttt

SEQ ID NO: 87371 - DNA, 26 bp, Homo sapiens
caaggaaacagaagttgttttctttt

SEQ ID NO: 87372 - DNA, 26 bp, Homo sapiens
aaggaaacagaagttgttttcttttg

SEQ ID NO: 87373 - DNA, 26 bp, Homo sapiens
aggaaacagaagttgttttcttttga

SEQ ID NO: 87374 - DNA, 26 bp, Homo sapiens
ggaaacagaagttgttttcttttgag

SEQ ID NO: 87375 - DNA, 26 bp, Homo sapiens
gaaacagaagttgttttcttttgagc

SEQ ID NO: 87376 - DNA, 26 bp, Homo sapiens
aaacagaagttgttttcttttgagct

SEQ ID NO: 87377 - DNA, 26 bp, Homo sapiens
aacagaagttgttttcttttgagctt

SEQ ID NO: 87378 - DNA, 26 bp, Homo sapiens
acagaagttgttttcttttgagcttg

SEQ ID NO: 87379 - DNA, 26 bp, Homo sapiens
cagaagttgttttcttttgagcttgt

SEQ ID NO: 87380 - DNA, 26 bp, Homo sapiens
agaagttgttttcttttgagcttgtg

SEQ ID NO: 87381 - DNA, 26 bp, Homo sapiens
gaagttgttttcttttgagcttgtgg

SEQ ID NO: 87382 - DNA, 26 bp, Homo sapiens
aagttgttttcttttgagcttgtggc

SEQ ID NO: 87383 - DNA, 26 bp, Homo sapiens
agttgttttcttttgagcttgtggca

SEQ ID NO: 87384 - DNA, 26 bp, Homo sapiens
gttgttttcttttgagcttgtggcat

SEQ ID NO: 87385 - DNA, 26 bp, Homo sapiens
ttgttttcttttgagcttgtggcata

SEQ ID NO: 87386 - DNA, 26 bp, Homo sapiens
tgttttcttttgagcttgtggcatag

SEQ ID NO: 87387 - DNA, 26 bp, Homo sapiens
gttttcttttgagcttgtggcatagc

SEQ ID NO: 87388 - DNA, 26 bp, Homo sapiens
ttttcttttgagcttgtggcatagct

SEQ ID NO: 87389 - DNA, 26 bp, Homo sapiens
tttcttttgagcttgtggcatagctc

SEQ ID NO: 87390 - DNA, 26 bp, Homo sapiens
ttcttttgagcttgtggcatagctcc

SEQ ID NO: 87391 - DNA, 26 bp, Homo sapiens
tcttttgagcttgtggcatagctcca

SEQ ID NO: 87392 - DNA, 26 bp, Homo sapiens
cttttgagcttgtggcatagctccag

SEQ ID NO: 87393 - DNA, 26 bp, Homo sapiens
ttttgagcttgtggcatagctccagc

SEQ ID NO: 87394 - DNA, 26 bp, Homo sapiens
tttgagcttgtggcatagctccagct

SEQ ID NO: 87395 - DNA, 26 bp, Homo sapiens
ttgagcttgtggcatagctccagctc

SEQ ID NO: 87396 - DNA, 26 bp, Homo sapiens
tgagcttgtggcatagctccagctct

SEQ ID NO: 87397 - DNA, 26 bp, Homo sapiens
gagcttgtggcatagctccagctctt

SEQ ID NO: 87398 - DNA, 26 bp, Homo sapiens
agcttgtggcatagctccagctcttg

SEQ ID NO: 87399 - DNA, 26 bp, Homo sapiens
gcttgtggcatagctccagctcttga

SEQ ID NO: 87400 - DNA, 26 bp, Homo sapiens
cttgtggcatagctccagctcttgat

SEQ ID NO: 87401 - DNA, 26 bp, Homo sapiens
ttgtggcatagctccagctcttgatt

SEQ ID NO: 87402 - DNA, 26 bp, Homo sapiens
tgtggcatagctccagctcttgattt

SEQ ID NO: 87403 - DNA, 26 bp, Homo sapiens
gtggcatagctccagctcttgatttg

SEQ ID NO: 87404 - DNA, 26 bp, Homo sapiens
tggcatagctccagctcttgatttga

SEQ ID NO: 87405 - DNA, 26 bp, Homo sapiens
ggcatagctccagctcttgatttgaa

SEQ ID NO: 87406 - DNA, 26 bp, Homo sapiens
gcatagctccagctcttgatttgaaa

SEQ ID NO: 87407 - DNA, 26 bp, Homo sapiens
catagctccagctcttgatttgaaag

SEQ ID NO: 87408 - DNA, 26 bp, Homo sapiens
atagctccagctcttgatttgaaagc

SEQ ID NO: 87409 - DNA, 26 bp, Homo sapiens
tagctccagctcttgatttgaaagct

SEQ ID NO: 87410 - DNA, 26 bp, Homo sapiens
agctccagctcttgatttgaaagcta

SEQ ID NO: 87411 - DNA, 26 bp, Homo sapiens
gctccagctcttgatttgaaagctaa

SEQ ID NO: 87412 - DNA, 26 bp, Homo sapiens
ctccagctcttgatttgaaagctaaa

SEQ ID NO: 87413 - DNA, 26 bp, Homo sapiens
tccagctcttgatttgaaagctaaac

SEQ ID NO: 87414 - DNA, 26 bp, Homo sapiens
ccagctcttgatttgaaagctaaact

SEQ ID NO: 87415 - DNA, 26 bp, Homo sapiens
cagctcttgatttgaaagctaaactt

SEQ ID NO: 87416 - DNA, 26 bp, Homo sapiens
agctcttgatttgaaagctaaacttt

SEQ ID NO: 87417 - DNA, 26 bp, Homo sapiens
gctcttgatttgaaagctaaactttc

SEQ ID NO: 87418 - DNA, 26 bp, Homo sapiens
ctcttgatttgaaagctaaactttca

SEQ ID NO: 87419 - DNA, 26 bp, Homo sapiens
tcttgatttgaaagctaaactttcac

SEQ ID NO: 87420 - DNA, 26 bp, Homo sapiens
cttgatttgaaagctaaactttcact

SEQ ID NO: 87421 - DNA, 26 bp, Homo sapiens
ttgatttgaaagctaaactttcactg

SEQ ID NO: 87422 - DNA, 26 bp, Homo sapiens
tgatttgaaagctaaactttcactgt

SEQ ID NO: 87423 - DNA, 26 bp, Homo sapiens
gatttgaaagctaaactttcactgtc

SEQ ID NO: 87424 - DNA, 26 bp, Homo sapiens
atttgaaagctaaactttcactgtca

SEQ ID NO: 87425 - DNA, 26 bp, Homo sapiens
tttgaaagctaaactttcactgtcag

SEQ ID NO: 87426 - DNA, 26 bp, Homo sapiens
ttgaaagctaaactttcactgtcaga

SEQ ID NO: 87427 - DNA, 26 bp, Homo sapiens
tgaaagctaaactttcactgtcagaa

SEQ ID NO: 87428 - DNA, 26 bp, Homo sapiens
gaaagctaaactttcactgtcagaat

SEQ ID NO: 87429 - DNA, 26 bp, Homo sapiens
aaagctaaactttcactgtcagaatc

SEQ ID NO: 87430 - DNA, 26 bp, Homo sapiens
aagctaaactttcactgtcagaatct

SEQ ID NO: 87431 - DNA, 26 bp, Homo sapiens
agctaaactttcactgtcagaatctg

SEQ ID NO: 87432 - DNA, 26 bp, Homo sapiens
gctaaactttcactgtcagaatctgt

SEQ ID NO: 87433 - DNA, 26 bp, Homo sapiens
ctaaactttcactgtcagaatctgtt

SEQ ID NO: 87434 - DNA, 26 bp, Homo sapiens
taaactttcactgtcagaatctgttg

SEQ ID NO: 87435 - DNA, 26 bp, Homo sapiens
aaactttcactgtcagaatctgttga

SEQ ID NO: 87436 - DNA, 26 bp, Homo sapiens
aactttcactgtcagaatctgttgaa

SEQ ID NO: 87437 - DNA, 26 bp, Homo sapiens
actttcactgtcagaatctgttgaac

SEQ ID NO: 87438 - DNA, 26 bp, Homo sapiens
ctttcactgtcagaatctgttgaact

SEQ ID NO: 87439 - DNA, 26 bp, Homo sapiens
tttcactgtcagaatctgttgaactg

SEQ ID NO: 87440 - DNA, 26 bp, Homo sapiens
ttcactgtcagaatctgttgaactgg

SEQ ID NO: 87441 - DNA, 26 bp, Homo sapiens
tcactgtcagaatctgttgaactggc

SEQ ID NO: 87442 - DNA, 26 bp, Homo sapiens
cactgtcagaatctgttgaactggca

SEQ ID NO: 87443 - DNA, 26 bp, Homo sapiens
actgtcagaatctgttgaactggcac

SEQ ID NO: 87444 - DNA, 26 bp, Homo sapiens
ctgtcagaatctgttgaactggcacc

SEQ ID NO: 87445 - DNA, 26 bp, Homo sapiens
tgtcagaatctgttgaactggcacct

SEQ ID NO: 87446 - DNA, 26 bp, Homo sapiens
gtcagaatctgttgaactggcacctt

SEQ ID NO: 87447 - DNA, 26 bp, Homo sapiens
tcagaatctgttgaactggcaccttc

SEQ ID NO: 87448 - DNA, 26 bp, Homo sapiens
cagaatctgttgaactggcaccttca

SEQ ID NO: 87449 - DNA, 26 bp, Homo sapiens
agaatctgttgaactggcaccttcaa

SEQ ID NO: 87450 - DNA, 26 bp, Homo sapiens
gaatctgttgaactggcaccttcaat

SEQ ID NO: 87451 - DNA, 26 bp, Homo sapiens
aatctgttgaactggcaccttcaatg

SEQ ID NO: 87452 - DNA, 26 bp, Homo sapiens
atctgttgaactggcaccttcaatga

SEQ ID NO: 87453 - DNA, 26 bp, Homo sapiens
tctgttgaactggcaccttcaatgaa

SEQ ID NO: 87454 - DNA, 26 bp, Homo sapiens
ctgttgaactggcaccttcaatgaac

SEQ ID NO: 87455 - DNA, 26 bp, Homo sapiens
tgttgaactggcaccttcaatgaaca

SEQ ID NO: 87456 - DNA, 26 bp, Homo sapiens
gttgaactggcaccttcaatgaacac

SEQ ID NO: 87457 - DNA, 26 bp, Homo sapiens
ttgaactggcaccttcaatgaacacc

SEQ ID NO: 87458 - DNA, 26 bp, Homo sapiens
tgaactggcaccttcaatgaacacct

SEQ ID NO: 87459 - DNA, 26 bp, Homo sapiens
gaactggcaccttcaatgaacacctc

SEQ ID NO: 87460 - DNA, 26 bp, Homo sapiens
aactggcaccttcaatgaacacctca

SEQ ID NO: 87461 - DNA, 26 bp, Homo sapiens
actggcaccttcaatgaacacctcag

SEQ ID NO: 87462 - DNA, 26 bp, Homo sapiens
ctggcaccttcaatgaacacctcagc

SEQ ID NO: 87463 - DNA, 26 bp, Homo sapiens
tggcaccttcaatgaacacctcagca

SEQ ID NO: 87464 - DNA, 26 bp, Homo sapiens
ggcaccttcaatgaacacctcagcag

SEQ ID NO: 87465 - DNA, 26 bp, Homo sapiens
gcaccttcaatgaacacctcagcaga

SEQ ID NO: 87466 - DNA, 26 bp, Homo sapiens
caccttcaatgaacacctcagcagat

SEQ ID NO: 87467 - DNA, 26 bp, Homo sapiens
accttcaatgaacacctcagcagatg

SEQ ID NO: 87468 - DNA, 26 bp, Homo sapiens
ccttcaatgaacacctcagcagatgt

SEQ ID NO: 87469 - DNA, 26 bp, Homo sapiens
cttcaatgaacacctcagcagatgtt

SEQ ID NO: 87470 - DNA, 26 bp, Homo sapiens
ttcaatgaacacctcagcagatgttg

SEQ ID NO: 87471 - DNA, 26 bp, Homo sapiens
tcaatgaacacctcagcagatgttgt

SEQ ID NO: 87472 - DNA, 26 bp, Homo sapiens
caatgaacacctcagcagatgttgtg

SEQ ID NO: 87473 - DNA, 26 bp, Homo sapiens
aatgaacacctcagcagatgttgtgt

SEQ ID NO: 87474 - DNA, 26 bp, Homo sapiens
atgaacacctcagcagatgttgtgtc

SEQ ID NO: 87475 - DNA, 26 bp, Homo sapiens
tgaacacctcagcagatgttgtgtct

SEQ ID NO: 87476 - DNA, 26 bp, Homo sapiens
gaacacctcagcagatgttgtgtctg

SEQ ID NO: 87477 - DNA, 26 bp, Homo sapiens
aacacctcagcagatgttgtgtctga

SEQ ID NO: 87478 - DNA, 26 bp, Homo sapiens
acacctcagcagatgttgtgtctgag

SEQ ID NO: 87479 - DNA, 26 bp, Homo sapiens
cacctcagcagatgttgtgtctgagc

SEQ ID NO: 87480 - DNA, 26 bp, Homo sapiens
acctcagcagatgttgtgtctgagcc

SEQ ID NO: 87481 - DNA, 26 bp, Homo sapiens
cctcagcagatgttgtgtctgagccg

SEQ ID NO: 87482 - DNA, 26 bp, Homo sapiens
ctcagcagatgttgtgtctgagccgc

SEQ ID NO: 87483 - DNA, 26 bp, Homo sapiens
tcagcagatgttgtgtctgagccgct

SEQ ID NO: 87484 - DNA, 26 bp, Homo sapiens
cagcagatgttgtgtctgagccgctg

SEQ ID NO: 87485 - DNA, 26 bp, Homo sapiens
agcagatgttgtgtctgagccgctgg

SEQ ID NO: 87486 - DNA, 26 bp, Homo sapiens
gcagatgttgtgtctgagccgctggg

SEQ ID NO: 87487 - DNA, 26 bp, Homo sapiens
cagatgttgtgtctgagccgctggga

SEQ ID NO: 87488 - DNA, 26 bp, Homo sapiens
agatgttgtgtctgagccgctgggat

SEQ ID NO: 87489 - DNA, 26 bp, Homo sapiens
gatgttgtgtctgagccgctgggatt

SEQ ID NO: 87490 - DNA, 26 bp, Homo sapiens
atgttgtgtctgagccgctgggattc

SEQ ID NO: 87491 - DNA, 26 bp, Homo sapiens
tgttgtgtctgagccgctgggattcg

SEQ ID NO: 87492 - DNA, 26 bp, Homo sapiens
gttgtgtctgagccgctgggattcgt

SEQ ID NO: 87493 - DNA, 26 bp, Homo sapiens
ttgtgtctgagccgctgggattcgta

SEQ ID NO: 87494 - DNA, 26 bp, Homo sapiens
tgtgtctgagccgctgggattcgtag

SEQ ID NO: 87495 - DNA, 26 bp, Homo sapiens
gtgtctgagccgctgggattcgtagc

SEQ ID NO: 87496 - DNA, 26 bp, Homo sapiens
tgtctgagccgctgggattcgtagcc

SEQ ID NO: 87497 - DNA, 26 bp, Homo sapiens
gtctgagccgctgggattcgtagcca

SEQ ID NO: 87498 - DNA, 26 bp, Homo sapiens
tctgagccgctgggattcgtagccaa

SEQ ID NO: 87499 - DNA, 26 bp, Homo sapiens
ctgagccgctgggattcgtagccaaa

SEQ ID NO: 87500 - DNA, 26 bp, Homo sapiens
tgagccgctgggattcgtagccaaac

SEQ ID NO: 87501 - DNA, 26 bp, Homo sapiens
gagccgctgggattcgtagccaaaca

SEQ ID NO: 87502 - DNA, 26 bp, Homo sapiens
agccgctgggattcgtagccaaacag

SEQ ID NO: 87503 - DNA, 26 bp, Homo sapiens
gccgctgggattcgtagccaaacagg

SEQ ID NO: 87504 - DNA, 26 bp, Homo sapiens
ccgctgggattcgtagccaaacaggt

SEQ ID NO: 87505 - DNA, 26 bp, Homo sapiens
cgctgggattcgtagccaaacaggtg

SEQ ID NO: 87506 - DNA, 26 bp, Homo sapiens
gctgggattcgtagccaaacaggtgt

SEQ ID NO: 87507 - DNA, 26 bp, Homo sapiens
ctgggattcgtagccaaacaggtgta

SEQ ID NO: 87508 - DNA, 26 bp, Homo sapiens
tgggattcgtagccaaacaggtgtag

SEQ ID NO: 87509 - DNA, 26 bp, Homo sapiens
gggattcgtagccaaacaggtgtagc

SEQ ID NO: 87510 - DNA, 26 bp, Homo sapiens
ggattcgtagccaaacaggtgtagcg

SEQ ID NO: 87511 - DNA, 26 bp, Homo sapiens
gattcgtagccaaacaggtgtagcga

SEQ ID NO: 87512 - DNA, 26 bp, Homo sapiens
attcgtagccaaacaggtgtagcgac

SEQ ID NO: 87513 - DNA, 26 bp, Homo sapiens
ttcgtagccaaacaggtgtagcgacc

SEQ ID NO: 87514 - DNA, 26 bp, Homo sapiens
tcgtagccaaacaggtgtagcgacct

SEQ ID NO: 87515 - DNA, 26 bp, Homo sapiens
cgtagccaaacaggtgtagcgacctg

SEQ ID NO: 87516 - DNA, 26 bp, Homo sapiens
gtagccaaacaggtgtagcgacctgt

SEQ ID NO: 87517 - DNA, 26 bp, Homo sapiens
tagccaaacaggtgtagcgacctgtg

SEQ ID NO: 87518 - DNA, 26 bp, Homo sapiens
agccaaacaggtgtagcgacctgtgt

SEQ ID NO: 87519 - DNA, 26 bp, Homo sapiens
gccaaacaggtgtagcgacctgtgtc

SEQ ID NO: 87520 - DNA, 26 bp, Homo sapiens
ccaaacaggtgtagcgacctgtgtcg

SEQ ID NO: 87521 - DNA, 26 bp, Homo sapiens
caaacaggtgtagcgacctgtgtcgt

SEQ ID NO: 87522 - DNA, 26 bp, Homo sapiens
aaacaggtgtagcgacctgtgtcgtc

SEQ ID NO: 87523 - DNA, 26 bp, Homo sapiens
aacaggtgtagcgacctgtgtcgtcc

SEQ ID NO: 87524 - DNA, 26 bp, Homo sapiens
acaggtgtagcgacctgtgtcgtcct

SEQ ID NO: 87525 - DNA, 26 bp, Homo sapiens
caggtgtagcgacctgtgtcgtcctc

SEQ ID NO: 87526 - DNA, 26 bp, Homo sapiens
aggtgtagcgacctgtgtcgtcctca

SEQ ID NO: 87527 - DNA, 26 bp, Homo sapiens
ggtgtagcgacctgtgtcgtcctcaa

SEQ ID NO: 87528 - DNA, 26 bp, Homo sapiens
gtgtagcgacctgtgtcgtcctcaaa

SEQ ID NO: 87529 - DNA, 26 bp, Homo sapiens
tgtagcgacctgtgtcgtcctcaaag

SEQ ID NO: 87530 - DNA, 26 bp, Homo sapiens
gtagcgacctgtgtcgtcctcaaagg

SEQ ID NO: 87531 - DNA, 26 bp, Homo sapiens
tagcgacctgtgtcgtcctcaaaggc

SEQ ID NO: 87532 - DNA, 26 bp, Homo sapiens
agcgacctgtgtcgtcctcaaaggcc

SEQ ID NO: 87533 - DNA, 26 bp, Homo sapiens
gcgacctgtgtcgtcctcaaaggcct

SEQ ID NO: 87534 - DNA, 26 bp, Homo sapiens
cgacctgtgtcgtcctcaaaggcctc

SEQ ID NO: 87535 - DNA, 26 bp, Homo sapiens
gacctgtgtcgtcctcaaaggcctct

SEQ ID NO: 87536 - DNA, 26 bp, Homo sapiens
acctgtgtcgtcctcaaaggcctctg

SEQ ID NO: 87537 - DNA, 26 bp, Homo sapiens
cctgtgtcgtcctcaaaggcctctgc

SEQ ID NO: 87538 - DNA, 26 bp, Homo sapiens
ctgtgtcgtcctcaaaggcctctgct

SEQ ID NO: 87539 - DNA, 26 bp, Homo sapiens
tgtgtcgtcctcaaaggcctctgcta

SEQ ID NO: 87540 - DNA, 26 bp, Homo sapiens
gtgtcgtcctcaaaggcctctgctat

SEQ ID NO: 87541 - DNA, 26 bp, Homo sapiens
tgtcgtcctcaaaggcctctgctatg

SEQ ID NO: 87542 - DNA, 26 bp, Homo sapiens
gtcgtcctcaaaggcctctgctatga

SEQ ID NO: 87543 - DNA, 26 bp, Homo sapiens
tcgtcctcaaaggcctctgctatgat

SEQ ID NO: 87544 - DNA, 26 bp, Homo sapiens
cgtcctcaaaggcctctgctatgatc

SEQ ID NO: 87545 - DNA, 26 bp, Homo sapiens
gtcctcaaaggcctctgctatgatca

SEQ ID NO: 87546 - DNA, 26 bp, Homo sapiens
tcctcaaaggcctctgctatgatcag

SEQ ID NO: 87547 - DNA, 26 bp, Homo sapiens
cctcaaaggcctctgctatgatcagg

SEQ ID NO: 87548 - DNA, 26 bp, Homo sapiens
ctcaaaggcctctgctatgatcaggg

SEQ ID NO: 87549 - DNA, 26 bp, Homo sapiens
tcaaaggcctctgctatgatcagggt

SEQ ID NO: 87550 - DNA, 26 bp, Homo sapiens
caaaggcctctgctatgatcagggta

SEQ ID NO: 87551 - DNA, 26 bp, Homo sapiens
aaaggcctctgctatgatcagggtat

SEQ ID NO: 87552 - DNA, 26 bp, Homo sapiens
aaggcctctgctatgatcagggtatg

SEQ ID NO: 87553 - DNA, 26 bp, Homo sapiens
aggcctctgctatgatcagggtatgg

SEQ ID NO: 87554 - DNA, 26 bp, Homo sapiens
ggcctctgctatgatcagggtatgga

SEQ ID NO: 87555 - DNA, 26 bp, Homo sapiens
gcctctgctatgatcagggtatggag

SEQ ID NO: 87556 - DNA, 26 bp, Homo sapiens
cctctgctatgatcagggtatggagg

SEQ ID NO: 87557 - DNA, 26 bp, Homo sapiens
ctctgctatgatcagggtatggaggt

SEQ ID NO: 87558 - DNA, 26 bp, Homo sapiens
tctgctatgatcagggtatggaggtc

SEQ ID NO: 87559 - DNA, 26 bp, Homo sapiens
ctgctatgatcagggtatggaggtcc

SEQ ID NO: 87560 - DNA, 26 bp, Homo sapiens
tgctatgatcagggtatggaggtccc

SEQ ID NO: 87561 - DNA, 26 bp, Homo sapiens
gctatgatcagggtatggaggtcccc

SEQ ID NO: 87562 - DNA, 26 bp, Homo sapiens
ctatgatcagggtatggaggtcccct

SEQ ID NO: 87563 - DNA, 26 bp, Homo sapiens
tatgatcagggtatggaggtcccctc

SEQ ID NO: 87564 - DNA, 26 bp, Homo sapiens
atgatcagggtatggaggtcccctcc

SEQ ID NO: 87565 - DNA, 26 bp, Homo sapiens
tgatcagggtatggaggtcccctccc

SEQ ID NO: 87566 - DNA, 26 bp, Homo sapiens
gatcagggtatggaggtcccctccct

SEQ ID NO: 87567 - DNA, 26 bp, Homo sapiens
atcagggtatggaggtcccctccctc

SEQ ID NO: 87568 - DNA, 26 bp, Homo sapiens
tcagggtatggaggtcccctccctca

SEQ ID NO: 87569 - DNA, 26 bp, Homo sapiens
cagggtatggaggtcccctccctcac

SEQ ID NO: 87570 - DNA, 26 bp, Homo sapiens
agggtatggaggtcccctccctcaca

SEQ ID NO: 87571 - DNA, 26 bp, Homo sapiens
gggtatggaggtcccctccctcacag

SEQ ID NO: 87572 - DNA, 26 bp, Homo sapiens
ggtatggaggtcccctccctcacagt

SEQ ID NO: 87573 - DNA, 26 bp, Homo sapiens
gtatggaggtcccctccctcacagtg

SEQ ID NO: 87574 - DNA, 26 bp, Homo sapiens
tatggaggtcccctccctcacagtgg

SEQ ID NO: 87575 - DNA, 26 bp, Homo sapiens
atggaggtcccctccctcacagtgga

SEQ ID NO: 87576 - DNA, 26 bp, Homo sapiens
tggaggtcccctccctcacagtggat

SEQ ID NO: 87577 - DNA, 26 bp, Homo sapiens
ggaggtcccctccctcacagtggatt

SEQ ID NO: 87578 - DNA, 26 bp, Homo sapiens
gaggtcccctccctcacagtggattt

SEQ ID NO: 87579 - DNA, 26 bp, Homo sapiens
aggtcccctccctcacagtggatttg

SEQ ID NO: 87580 - DNA, 26 bp, Homo sapiens
ggtcccctccctcacagtggatttga

SEQ ID NO: 87581 - DNA, 26 bp, Homo sapiens
gtcccctccctcacagtggatttgaa

SEQ ID NO: 87582 - DNA, 26 bp, Homo sapiens
tcccctccctcacagtggatttgaat

SEQ ID NO: 87583 - DNA, 26 bp, Homo sapiens
cccctccctcacagtggatttgaata

SEQ ID NO: 87584 - DNA, 26 bp, Homo sapiens
ccctccctcacagtggatttgaatat

SEQ ID NO: 87585 - DNA, 26 bp, Homo sapiens
cctccctcacagtggatttgaatatc

SEQ ID NO: 87586 - DNA, 26 bp, Homo sapiens
ctccctcacagtggatttgaatatca

SEQ ID NO: 87587 - DNA, 26 bp, Homo sapiens
tccctcacagtggatttgaatatcag

SEQ ID NO: 87588 - DNA, 26 bp, Homo sapiens
ccctcacagtggatttgaatatcagg

SEQ ID NO: 87589 - DNA, 26 bp, Homo sapiens
cctcacagtggatttgaatatcagga

SEQ ID NO: 87590 - DNA, 26 bp, Homo sapiens
ctcacagtggatttgaatatcaggag

SEQ ID NO: 87591 - DNA, 26 bp, Homo sapiens
tcacagtggatttgaatatcaggagt

SEQ ID NO: 87592 - DNA, 26 bp, Homo sapiens
cacagtggatttgaatatcaggagtg

SEQ ID NO: 87593 - DNA, 26 bp, Homo sapiens
acagtggatttgaatatcaggagtgt

SEQ ID NO: 87594 - DNA, 26 bp, Homo sapiens
cagtggatttgaatatcaggagtgtt

SEQ ID NO: 87595 - DNA, 26 bp, Homo sapiens
agtggatttgaatatcaggagtgttg

SEQ ID NO: 87596 - DNA, 26 bp, Homo sapiens
gtggatttgaatatcaggagtgttgt

SEQ ID NO: 87597 - DNA, 26 bp, Homo sapiens
tggatttgaatatcaggagtgttgtg

SEQ ID NO: 87598 - DNA, 26 bp, Homo sapiens
ggatttgaatatcaggagtgttgtgc

SEQ ID NO: 87599 - DNA, 26 bp, Homo sapiens
gatttgaatatcaggagtgttgtgca

SEQ ID NO: 87600 - DNA, 26 bp, Homo sapiens
atttgaatatcaggagtgttgtgcag

SEQ ID NO: 87601 - DNA, 26 bp, Homo sapiens
tttgaatatcaggagtgttgtgcagt

SEQ ID NO: 87602 - DNA, 26 bp, Homo sapiens
ttgaatatcaggagtgttgtgcagtt

SEQ ID NO: 87603 - DNA, 26 bp, Homo sapiens
tgaatatcaggagtgttgtgcagttc

SEQ ID NO: 87604 - DNA, 26 bp, Homo sapiens
gaatatcaggagtgttgtgcagttct

SEQ ID NO: 87605 - DNA, 26 bp, Homo sapiens
aatatcaggagtgttgtgcagttctt

SEQ ID NO: 87606 - DNA, 26 bp, Homo sapiens
atatcaggagtgttgtgcagttcttt

SEQ ID NO: 87607 - DNA, 26 bp, Homo sapiens
tatcaggagtgttgtgcagttctttc

SEQ ID NO: 87608 - DNA, 26 bp, Homo sapiens
atcaggagtgttgtgcagttctttcc

SEQ ID NO: 87609 - DNA, 26 bp, Homo sapiens
tcaggagtgttgtgcagttctttccc

SEQ ID NO: 87610 - DNA, 26 bp, Homo sapiens
caggagtgttgtgcagttctttccct

SEQ ID NO: 87611 - DNA, 26 bp, Homo sapiens
aggagtgttgtgcagttctttccctt

SEQ ID NO: 87612 - DNA, 26 bp, Homo sapiens
ggagtgttgtgcagttctttcccttc

SEQ ID NO: 87613 - DNA, 26 bp, Homo sapiens
gagtgttgtgcagttctttcccttca

SEQ ID NO: 87614 - DNA, 26 bp, Homo sapiens
agtgttgtgcagttctttcccttcac

SEQ ID NO: 87615 - DNA, 26 bp, Homo sapiens
gtgttgtgcagttctttcccttcaca

SEQ ID NO: 87616 - DNA, 26 bp, Homo sapiens
tgttgtgcagttctttcccttcacag

SEQ ID NO: 87617 - DNA, 26 bp, Homo sapiens
gttgtgcagttctttcccttcacaga

SEQ ID NO: 87618 - DNA, 26 bp, Homo sapiens
ttgtgcagttctttcccttcacagaa

SEQ ID NO: 87619 - DNA, 26 bp, Homo sapiens
tgtgcagttctttcccttcacagaac

SEQ ID NO: 87620 - DNA, 26 bp, Homo sapiens
gtgcagttctttcccttcacagaacc

SEQ ID NO: 87621 - DNA, 26 bp, Homo sapiens
tgcagttctttcccttcacagaacca

SEQ ID NO: 87622 - DNA, 26 bp, Homo sapiens
gcagttctttcccttcacagaaccat

SEQ ID NO: 87623 - DNA, 26 bp, Homo sapiens
cagttctttcccttcacagaaccatc

SEQ ID NO: 87624 - DNA, 26 bp, Homo sapiens
agttctttcccttcacagaaccatct

SEQ ID NO: 87625 - DNA, 26 bp, Homo sapiens
gttctttcccttcacagaaccatctg

SEQ ID NO: 87626 - DNA, 26 bp, Homo sapiens
ttctttcccttcacagaaccatctga

SEQ ID NO: 87627 - DNA, 26 bp, Homo sapiens
tctttcccttcacagaaccatctgac

SEQ ID NO: 87628 - DNA, 26 bp, Homo sapiens
ctttcccttcacagaaccatctgact

SEQ ID NO: 87629 - DNA, 26 bp, Homo sapiens
tttcccttcacagaaccatctgactc

SEQ ID NO: 87630 - DNA, 26 bp, Homo sapiens
ttcccttcacagaaccatctgactcg

SEQ ID NO: 87631 - DNA, 26 bp, Homo sapiens
tcccttcacagaaccatctgactcga

SEQ ID NO: 87632 - DNA, 26 bp, Homo sapiens
cccttcacagaaccatctgactcgag

SEQ ID NO: 87633 - DNA, 26 bp, Homo sapiens
ccttcacagaaccatctgactcgagg

SEQ ID NO: 87634 - DNA, 26 bp, Homo sapiens
cttcacagaaccatctgactcgagga

SEQ ID NO: 87635 - DNA, 26 bp, Homo sapiens
ttcacagaaccatctgactcgaggag

SEQ ID NO: 87636 - DNA, 26 bp, Homo sapiens
tcacagaaccatctgactcgaggagt

SEQ ID NO: 87637 - DNA, 26 bp, Homo sapiens
cacagaaccatctgactcgaggagtg

SEQ ID NO: 87638 - DNA, 26 bp, Homo sapiens
acagaaccatctgactcgaggagtgg

SEQ ID NO: 87639 - DNA, 26 bp, Homo sapiens
cagaaccatctgactcgaggagtggg

SEQ ID NO: 87640 - DNA, 26 bp, Homo sapiens
agaaccatctgactcgaggagtgggg

SEQ ID NO: 87641 - DNA, 26 bp, Homo sapiens
gaaccatctgactcgaggagtggggt

SEQ ID NO: 87642 - DNA, 26 bp, Homo sapiens
aaccatctgactcgaggagtggggtt

SEQ ID NO: 87643 - DNA, 26 bp, Homo sapiens
accatctgactcgaggagtggggttt

SEQ ID NO: 87644 - DNA, 26 bp, Homo sapiens
ccatctgactcgaggagtggggtttc

SEQ ID NO: 87645 - DNA, 26 bp, Homo sapiens
catctgactcgaggagtggggtttcc

SEQ ID NO: 87646 - DNA, 26 bp, Homo sapiens
atctgactcgaggagtggggtttcca

SEQ ID NO: 87647 - DNA, 26 bp, Homo sapiens
tctgactcgaggagtggggtttccag

SEQ ID NO: 87648 - DNA, 26 bp, Homo sapiens
ctgactcgaggagtggggtttccagt

SEQ ID NO: 87649 - DNA, 26 bp, Homo sapiens
tgactcgaggagtggggtttccagtg

SEQ ID NO: 87650 - DNA, 26 bp, Homo sapiens
gactcgaggagtggggtttccagtga

SEQ ID NO: 87651 - DNA, 26 bp, Homo sapiens
actcgaggagtggggtttccagtgac

SEQ ID NO: 87652 - DNA, 26 bp, Homo sapiens
ctcgaggagtggggtttccagtgact

SEQ ID NO: 87653 - DNA, 26 bp, Homo sapiens
tcgaggagtggggtttccagtgactc

SEQ ID NO: 87654 - DNA, 26 bp, Homo sapiens
cgaggagtggggtttccagtgactct

SEQ ID NO: 87655 - DNA, 26 bp, Homo sapiens
gaggagtggggtttccagtgactcta

SEQ ID NO: 87656 - DNA, 26 bp, Homo sapiens
aggagtggggtttccagtgactctac

SEQ ID NO: 87657 - DNA, 26 bp, Homo sapiens
ggagtggggtttccagtgactctaca

SEQ ID NO: 87658 - DNA, 26 bp, Homo sapiens
gagtggggtttccagtgactctacac

SEQ ID NO: 87659 - DNA, 26 bp, Homo sapiens
agtggggtttccagtgactctacact

SEQ ID NO: 87660 - DNA, 26 bp, Homo sapiens
gtggggtttccagtgactctacactc

SEQ ID NO: 87661 - DNA, 26 bp, Homo sapiens
tggggtttccagtgactctacactcc

SEQ ID NO: 87662 - DNA, 26 bp, Homo sapiens
ggggtttccagtgactctacactcca

SEQ ID NO: 87663 - DNA, 26 bp, Homo sapiens
gggtttccagtgactctacactccag

SEQ ID NO: 87664 - DNA, 26 bp, Homo sapiens
ggtttccagtgactctacactccaga

SEQ ID NO: 87665 - DNA, 26 bp, Homo sapiens
gtttccagtgactctacactccagat

SEQ ID NO: 87666 - DNA, 26 bp, Homo sapiens
tttccagtgactctacactccagata

SEQ ID NO: 87667 - DNA, 26 bp, Homo sapiens
ttccagtgactctacactccagataa

SEQ ID NO: 87668 - DNA, 26 bp, Homo sapiens
tccagtgactctacactccagataaa

SEQ ID NO: 87669 - DNA, 26 bp, Homo sapiens
ccagtgactctacactccagataaac

SEQ ID NO: 87670 - DNA, 26 bp, Homo sapiens
cagtgactctacactccagataaact

SEQ ID NO: 87671 - DNA, 26 bp, Homo sapiens
agtgactctacactccagataaactc

SEQ ID NO: 87672 - DNA, 26 bp, Homo sapiens
gtgactctacactccagataaactcg

SEQ ID NO: 87673 - DNA, 26 bp, Homo sapiens
tgactctacactccagataaactcgg

SEQ ID NO: 87674 - DNA, 26 bp, Homo sapiens
gactctacactccagataaactcggc

SEQ ID NO: 87675 - DNA, 26 bp, Homo sapiens
actctacactccagataaactcggct

SEQ ID NO: 87676 - DNA, 26 bp, Homo sapiens
ctctacactccagataaactcggctc

SEQ ID NO: 87677 - DNA, 26 bp, Homo sapiens
tctacactccagataaactcggctcc

SEQ ID NO: 87678 - DNA, 26 bp, Homo sapiens
ctacactccagataaactcggctccc

SEQ ID NO: 87679 - DNA, 26 bp, Homo sapiens
tacactccagataaactcggctccct

SEQ ID NO: 87680 - DNA, 26 bp, Homo sapiens
acactccagataaactcggctccctt

SEQ ID NO: 87681 - DNA, 26 bp, Homo sapiens
cactccagataaactcggctcccttc

SEQ ID NO: 87682 - DNA, 26 bp, Homo sapiens
actccagataaactcggctcccttct

SEQ ID NO: 87683 - DNA, 26 bp, Homo sapiens
ctccagataaactcggctcccttctg

SEQ ID NO: 87684 - DNA, 26 bp, Homo sapiens
tccagataaactcggctcccttctgc

SEQ ID NO: 87685 - DNA, 26 bp, Homo sapiens
ccagataaactcggctcccttctgct

SEQ ID NO: 87686 - DNA, 26 bp, Homo sapiens
cagataaactcggctcccttctgcta

SEQ ID NO: 87687 - DNA, 26 bp, Homo sapiens
agataaactcggctcccttctgctac

SEQ ID NO: 87688 - DNA, 26 bp, Homo sapiens
gataaactcggctcccttctgctact

SEQ ID NO: 87689 - DNA, 26 bp, Homo sapiens
ataaactcggctcccttctgctactt

SEQ ID NO: 87690 - DNA, 26 bp, Homo sapiens
taaactcggctcccttctgctacttc

SEQ ID NO: 87691 - DNA, 26 bp, Homo sapiens
aaactcggctcccttctgctacttct

SEQ ID NO: 87692 - DNA, 26 bp, Homo sapiens
aactcggctcccttctgctacttctt

SEQ ID NO: 87693 - DNA, 26 bp, Homo sapiens
actcggctcccttctgctacttcttg

SEQ ID NO: 87694 - DNA, 26 bp, Homo sapiens
ctcggctcccttctgctacttcttgg

SEQ ID NO: 87695 - DNA, 26 bp, Homo sapiens
tcggctcccttctgctacttcttggc

SEQ ID NO: 87696 - DNA, 26 bp, Homo sapiens
cggctcccttctgctacttcttggct

SEQ ID NO: 87697 - DNA, 26 bp, Homo sapiens
ggctcccttctgctacttcttggctc

SEQ ID NO: 87698 - DNA, 26 bp, Homo sapiens
gctcccttctgctacttcttggctcc

SEQ ID NO: 87699 - DNA, 26 bp, Homo sapiens
ctcccttctgctacttcttggctcct

SEQ ID NO: 87700 - DNA, 26 bp, Homo sapiens
tcccttctgctacttcttggctcctc

SEQ ID NO: 87701 - DNA, 26 bp, Homo sapiens
cccttctgctacttcttggctcctca

SEQ ID NO: 87702 - DNA, 26 bp, Homo sapiens
ccttctgctacttcttggctcctcag

SEQ ID NO: 87703 - DNA, 26 bp, Homo sapiens
cttctgctacttcttggctcctcagc

SEQ ID NO: 87704 - DNA, 26 bp, Homo sapiens
ttctgctacttcttggctcctcagct

SEQ ID NO: 87705 - DNA, 26 bp, Homo sapiens
tctgctacttcttggctcctcagctt

SEQ ID NO: 87706 - DNA, 26 bp, Homo sapiens
ctgctacttcttggctcctcagcttt

SEQ ID NO: 87707 - DNA, 26 bp, Homo sapiens
tgctacttcttggctcctcagctttt

SEQ ID NO: 87708 - DNA, 26 bp, Homo sapiens
gctacttcttggctcctcagcttttg

SEQ ID NO: 87709 - DNA, 26 bp, Homo sapiens
ctacttcttggctcctcagcttttgg

SEQ ID NO: 87710 - DNA, 26 bp, Homo sapiens
tacttcttggctcctcagcttttgga

SEQ ID NO: 87711 - DNA, 26 bp, Homo sapiens
acttcttggctcctcagcttttggat

SEQ ID NO: 87712 - DNA, 26 bp, Homo sapiens
cttcttggctcctcagcttttggatg

SEQ ID NO: 87713 - DNA, 26 bp, Homo sapiens
ttcttggctcctcagcttttggatga

SEQ ID NO: 87714 - DNA, 26 bp, Homo sapiens
tcttggctcctcagcttttggatgaa

SEQ ID NO: 87715 - DNA, 26 bp, Homo sapiens
cttggctcctcagcttttggatgaat

SEQ ID NO: 87716 - DNA, 26 bp, Homo sapiens
ttggctcctcagcttttggatgaatc

SEQ ID NO: 87717 - DNA, 26 bp, Homo sapiens
tggctcctcagcttttggatgaatcg

SEQ ID NO: 87718 - DNA, 26 bp, Homo sapiens
ggctcctcagcttttggatgaatcga

SEQ ID NO: 87719 - DNA, 26 bp, Homo sapiens
gctcctcagcttttggatgaatcgag

SEQ ID NO: 87720 - DNA, 26 bp, Homo sapiens
ctcctcagcttttggatgaatcgagg

SEQ ID NO: 87721 - DNA, 26 bp, Homo sapiens
tcctcagcttttggatgaatcgaggt

SEQ ID NO: 87722 - DNA, 26 bp, Homo sapiens
cctcagcttttggatgaatcgaggtg

SEQ ID NO: 87723 - DNA, 26 bp, Homo sapiens
ctcagcttttggatgaatcgaggtgc

SEQ ID NO: 87724 - DNA, 26 bp, Homo sapiens
tcagcttttggatgaatcgaggtgca

SEQ ID NO: 87725 - DNA, 26 bp, Homo sapiens
cagcttttggatgaatcgaggtgcag

SEQ ID NO: 87726 - DNA, 26 bp, Homo sapiens
agcttttggatgaatcgaggtgcagc

SEQ ID NO: 87727 - DNA, 26 bp, Homo sapiens
gcttttggatgaatcgaggtgcagct

SEQ ID NO: 87728 - DNA, 26 bp, Homo sapiens
cttttggatgaatcgaggtgcagctg

SEQ ID NO: 87729 - DNA, 26 bp, Homo sapiens
ttttggatgaatcgaggtgcagctgg

SEQ ID NO: 87730 - DNA, 26 bp, Homo sapiens
tttggatgaatcgaggtgcagctggg

SEQ ID NO: 87731 - DNA, 26 bp, Homo sapiens
ttggatgaatcgaggtgcagctggga

SEQ ID NO: 87732 - DNA, 26 bp, Homo sapiens
tggatgaatcgaggtgcagctgggaa

SEQ ID NO: 87733 - DNA, 26 bp, Homo sapiens
ggatgaatcgaggtgcagctgggaag

SEQ ID NO: 87734 - DNA, 26 bp, Homo sapiens
gatgaatcgaggtgcagctgggaagt

SEQ ID NO: 87735 - DNA, 26 bp, Homo sapiens
atgaatcgaggtgcagctgggaagtg

SEQ ID NO: 87736 - DNA, 26 bp, Homo sapiens
tgaatcgaggtgcagctgggaagtgg

SEQ ID NO: 87737 - DNA, 26 bp, Homo sapiens
gaatcgaggtgcagctgggaagtgga

SEQ ID NO: 87738 - DNA, 26 bp, Homo sapiens
aatcgaggtgcagctgggaagtggag

SEQ ID NO: 87739 - DNA, 26 bp, Homo sapiens
atcgaggtgcagctgggaagtggagg

SEQ ID NO: 87740 - DNA, 26 bp, Homo sapiens
tcgaggtgcagctgggaagtggaggg

SEQ ID NO: 87741 - DNA, 26 bp, Homo sapiens
cgaggtgcagctgggaagtggagggc

SEQ ID NO: 87742 - DNA, 26 bp, Homo sapiens
gaggtgcagctgggaagtggagggcg

SEQ ID NO: 87743 - DNA, 26 bp, Homo sapiens
aggtgcagctgggaagtggagggcgc

SEQ ID NO: 87744 - DNA, 26 bp, Homo sapiens
ggtgcagctgggaagtggagggcgct

SEQ ID NO: 87745 - DNA, 26 bp, Homo sapiens
gtgcagctgggaagtggagggcgctg

SEQ ID NO: 87746 - DNA, 26 bp, Homo sapiens
tgcagctgggaagtggagggcgctgt

SEQ ID NO: 87747 - DNA, 26 bp, Homo sapiens
gcagctgggaagtggagggcgctgtg

SEQ ID NO: 87748 - DNA, 26 bp, Homo sapiens
cagctgggaagtggagggcgctgtgg

SEQ ID NO: 87749 - DNA, 26 bp, Homo sapiens
agctgggaagtggagggcgctgtggg

SEQ ID NO: 87750 - DNA, 26 bp, Homo sapiens
gctgggaagtggagggcgctgtgggg

SEQ ID NO: 87751 - DNA, 26 bp, Homo sapiens
ctgggaagtggagggcgctgtggggc

SEQ ID NO: 87752 - DNA, 26 bp, Homo sapiens
tgggaagtggagggcgctgtggggct

SEQ ID NO: 87753 - DNA, 26 bp, Homo sapiens
gggaagtggagggcgctgtggggctg

SEQ ID NO: 87754 - DNA, 26 bp, Homo sapiens
ggaagtggagggcgctgtggggctgt

SEQ ID NO: 87755 - DNA, 26 bp, Homo sapiens
gaagtggagggcgctgtggggctgtg

SEQ ID NO: 87756 - DNA, 26 bp, Homo sapiens
aagtggagggcgctgtggggctgtgg

SEQ ID NO: 87757 - DNA, 26 bp, Homo sapiens
agtggagggcgctgtggggctgtggg

SEQ ID NO: 87758 - DNA, 26 bp, Homo sapiens
gtggagggcgctgtggggctgtgggt

SEQ ID NO: 87759 - DNA, 26 bp, Homo sapiens
tggagggcgctgtggggctgtgggtg

SEQ ID NO: 87760 - DNA, 26 bp, Homo sapiens
ggagggcgctgtggggctgtgggtga

SEQ ID NO: 87761 - DNA, 26 bp, Homo sapiens
gagggcgctgtggggctgtgggtgag

SEQ ID NO: 87762 - DNA, 26 bp, Homo sapiens
agggcgctgtggggctgtgggtgaga

SEQ ID NO: 87763 - DNA, 26 bp, Homo sapiens
gggcgctgtggggctgtgggtgagac

SEQ ID NO: 87764 - DNA, 26 bp, Homo sapiens
ggcgctgtggggctgtgggtgagact

SEQ ID NO: 87765 - DNA, 26 bp, Homo sapiens
gcgctgtggggctgtgggtgagactt

SEQ ID NO: 87766 - DNA, 26 bp, Homo sapiens
cgctgtggggctgtgggtgagacttg

SEQ ID NO: 87767 - DNA, 26 bp, Homo sapiens
gctgtggggctgtgggtgagacttgc

SEQ ID NO: 87768 - DNA, 26 bp, Homo sapiens
ctgtggggctgtgggtgagacttgcg

SEQ ID NO: 87769 - DNA, 26 bp, Homo sapiens
tgtggggctgtgggtgagacttgcgg

SEQ ID NO: 87770 - DNA, 26 bp, Homo sapiens
gtggggctgtgggtgagacttgcggt

SEQ ID NO: 87771 - DNA, 26 bp, Homo sapiens
tggggctgtgggtgagacttgcggtt

SEQ ID NO: 87772 - DNA, 26 bp, Homo sapiens
ggggctgtgggtgagacttgcggttg

SEQ ID NO: 87773 - DNA, 26 bp, Homo sapiens
gggctgtgggtgagacttgcggttgt

SEQ ID NO: 87774 - DNA, 26 bp, Homo sapiens
ggctgtgggtgagacttgcggttgtg

SEQ ID NO: 87775 - DNA, 26 bp, Homo sapiens
gctgtgggtgagacttgcggttgtgt

SEQ ID NO: 87776 - DNA, 26 bp, Homo sapiens
ctgtgggtgagacttgcggttgtgtg

SEQ ID NO: 87777 - DNA, 26 bp, Homo sapiens
tgtgggtgagacttgcggttgtgtgg

SEQ ID NO: 87778 - DNA, 26 bp, Homo sapiens
gtgggtgagacttgcggttgtgtggc

SEQ ID NO: 87779 - DNA, 26 bp, Homo sapiens
tgggtgagacttgcggttgtgtggca

SEQ ID NO: 87780 - DNA, 26 bp, Homo sapiens
gggtgagacttgcggttgtgtggcac

SEQ ID NO: 87781 - DNA, 26 bp, Homo sapiens
ggtgagacttgcggttgtgtggcact

SEQ ID NO: 87782 - DNA, 26 bp, Homo sapiens
gtgagacttgcggttgtgtggcactg

SEQ ID NO: 87783 - DNA, 26 bp, Homo sapiens
tgagacttgcggttgtgtggcactgc

SEQ ID NO: 87784 - DNA, 26 bp, Homo sapiens
gagacttgcggttgtgtggcactgcc

SEQ ID NO: 87785 - DNA, 26 bp, Homo sapiens
agacttgcggttgtgtggcactgcca

SEQ ID NO: 87786 - DNA, 26 bp, Homo sapiens
gacttgcggttgtgtggcactgccaa

SEQ ID NO: 87787 - DNA, 26 bp, Homo sapiens
acttgcggttgtgtggcactgccaag

SEQ ID NO: 87788 - DNA, 26 bp, Homo sapiens
cttgcggttgtgtggcactgccaagt

SEQ ID NO: 87789 - DNA, 26 bp, Homo sapiens
ttgcggttgtgtggcactgccaagtc

SEQ ID NO: 87790 - DNA, 26 bp, Homo sapiens
tgcggttgtgtggcactgccaagtcc

SEQ ID NO: 87791 - DNA, 26 bp, Homo sapiens
gcggttgtgtggcactgccaagtcct

SEQ ID NO: 87792 - DNA, 26 bp, Homo sapiens
cggttgtgtggcactgccaagtcctg

SEQ ID NO: 87793 - DNA, 26 bp, Homo sapiens
ggttgtgtggcactgccaagtcctgg

SEQ ID NO: 87794 - DNA, 26 bp, Homo sapiens
gttgtgtggcactgccaagtcctggt

SEQ ID NO: 87795 - DNA, 26 bp, Homo sapiens
ttgtgtggcactgccaagtcctggtt

SEQ ID NO: 87796 - DNA, 26 bp, Homo sapiens
tgtgtggcactgccaagtcctggttg

SEQ ID NO: 87797 - DNA, 26 bp, Homo sapiens
gtgtggcactgccaagtcctggttgt

SEQ ID NO: 87798 - DNA, 26 bp, Homo sapiens
tgtggcactgccaagtcctggttgtc

SEQ ID NO: 87799 - DNA, 26 bp, Homo sapiens
gtggcactgccaagtcctggttgtcc

SEQ ID NO: 87800 - DNA, 26 bp, Homo sapiens
tggcactgccaagtcctggttgtcct

SEQ ID NO: 87801 - DNA, 26 bp, Homo sapiens
ggcactgccaagtcctggttgtcctg

SEQ ID NO: 87802 - DNA, 26 bp, Homo sapiens
gcactgccaagtcctggttgtcctgg

SEQ ID NO: 87803 - DNA, 26 bp, Homo sapiens
cactgccaagtcctggttgtcctggt

SEQ ID NO: 87804 - DNA, 26 bp, Homo sapiens
actgccaagtcctggttgtcctggta

SEQ ID NO: 87805 - DNA, 26 bp, Homo sapiens
ctgccaagtcctggttgtcctggtag

SEQ ID NO: 87806 - DNA, 26 bp, Homo sapiens
tgccaagtcctggttgtcctggtagc

SEQ ID NO: 87807 - DNA, 26 bp, Homo sapiens
gccaagtcctggttgtcctggtagca

SEQ ID NO: 87808 - DNA, 26 bp, Homo sapiens
ccaagtcctggttgtcctggtagcaa

SEQ ID NO: 87809 - DNA, 26 bp, Homo sapiens
caagtcctggttgtcctggtagcaat

SEQ ID NO: 87810 - DNA, 26 bp, Homo sapiens
aagtcctggttgtcctggtagcaatg

SEQ ID NO: 87811 - DNA, 26 bp, Homo sapiens
agtcctggttgtcctggtagcaatgc

SEQ ID NO: 87812 - DNA, 26 bp, Homo sapiens
gtcctggttgtcctggtagcaatgcc

SEQ ID NO: 87813 - DNA, 26 bp, Homo sapiens
tcctggttgtcctggtagcaatgcct

SEQ ID NO: 87814 - DNA, 26 bp, Homo sapiens
cctggttgtcctggtagcaatgcctg

SEQ ID NO: 87815 - DNA, 26 bp, Homo sapiens
ctggttgtcctggtagcaatgcctgg

SEQ ID NO: 87816 - DNA, 26 bp, Homo sapiens
tggttgtcctggtagcaatgcctggc

SEQ ID NO: 87817 - DNA, 26 bp, Homo sapiens
ggttgtcctggtagcaatgcctggcc

SEQ ID NO: 87818 - DNA, 26 bp, Homo sapiens
gttgtcctggtagcaatgcctggccc

SEQ ID NO: 87819 - DNA, 26 bp, Homo sapiens
ttgtcctggtagcaatgcctggcccc

SEQ ID NO: 87820 - DNA, 26 bp, Homo sapiens
tgtcctggtagcaatgcctggcccca

SEQ ID NO: 87821 - DNA, 26 bp, Homo sapiens
gtcctggtagcaatgcctggccccag

SEQ ID NO: 87822 - DNA, 26 bp, Homo sapiens
tcctggtagcaatgcctggccccagg

SEQ ID NO: 87823 - DNA, 26 bp, Homo sapiens
cctggtagcaatgcctggccccaggg

SEQ ID NO: 87824 - DNA, 26 bp, Homo sapiens
ctggtagcaatgcctggccccagggg

SEQ ID NO: 87825 - DNA, 26 bp, Homo sapiens
tggtagcaatgcctggccccagggga

SEQ ID NO: 87826 - DNA, 26 bp, Homo sapiens
ggtagcaatgcctggccccaggggac

SEQ ID NO: 87827 - DNA, 26 bp, Homo sapiens
gtagcaatgcctggccccaggggact

SEQ ID NO: 87828 - DNA, 26 bp, Homo sapiens
tagcaatgcctggccccaggggactt

SEQ ID NO: 87829 - DNA, 26 bp, Homo sapiens
agcaatgcctggccccaggggacttg

SEQ ID NO: 87830 - DNA, 26 bp, Homo sapiens
gcaatgcctggccccaggggacttga

SEQ ID NO: 87831 - DNA, 26 bp, Homo sapiens
caatgcctggccccaggggacttgac

SEQ ID NO: 87832 - DNA, 26 bp, Homo sapiens
aatgcctggccccaggggacttgacc

SEQ ID NO: 87833 - DNA, 26 bp, Homo sapiens
atgcctggccccaggggacttgacct

SEQ ID NO: 87834 - DNA, 26 bp, Homo sapiens
tgcctggccccaggggacttgacctc

SEQ ID NO: 87835 - DNA, 26 bp, Homo sapiens
gcctggccccaggggacttgacctct

SEQ ID NO: 87836 - DNA, 26 bp, Homo sapiens
cctggccccaggggacttgacctctc

SEQ ID NO: 87837 - DNA, 26 bp, Homo sapiens
ctggccccaggggacttgacctctct

SEQ ID NO: 87838 - DNA, 26 bp, Homo sapiens
tggccccaggggacttgacctctctt

SEQ ID NO: 87839 - DNA, 26 bp, Homo sapiens
ggccccaggggacttgacctctcttt

SEQ ID NO: 87840 - DNA, 26 bp, Homo sapiens
gccccaggggacttgacctctctttc

SEQ ID NO: 87841 - DNA, 26 bp, Homo sapiens
ccccaggggacttgacctctctttcc

SEQ ID NO: 87842 - DNA, 26 bp, Homo sapiens
cccaggggacttgacctctctttcca

SEQ ID NO: 87843 - DNA, 26 bp, Homo sapiens
ccaggggacttgacctctctttccat

SEQ ID NO: 87844 - DNA, 26 bp, Homo sapiens
caggggacttgacctctctttccatc

SEQ ID NO: 87845 - DNA, 26 bp, Homo sapiens
aggggacttgacctctctttccatct

SEQ ID NO: 87846 - DNA, 26 bp, Homo sapiens
ggggacttgacctctctttccatctc

SEQ ID NO: 87847 - DNA, 26 bp, Homo sapiens
gggacttgacctctctttccatctcc

SEQ ID NO: 87848 - DNA, 26 bp, Homo sapiens
ggacttgacctctctttccatctccc

SEQ ID NO: 87849 - DNA, 26 bp, Homo sapiens
gacttgacctctctttccatctcccc

SEQ ID NO: 87850 - DNA, 26 bp, Homo sapiens
acttgacctctctttccatctcccct

SEQ ID NO: 87851 - DNA, 26 bp, Homo sapiens
cttgacctctctttccatctcccctt

SEQ ID NO: 87852 - DNA, 26 bp, Homo sapiens
ttgacctctctttccatctccccttg

SEQ ID NO: 87853 - DNA, 26 bp, Homo sapiens
tgacctctctttccatctccccttgg

SEQ ID NO: 87854 - DNA, 26 bp, Homo sapiens
gacctctctttccatctccccttggt

SEQ ID NO: 87855 - DNA, 26 bp, Homo sapiens
acctctctttccatctccccttggtc

SEQ ID NO: 87856 - DNA, 26 bp, Homo sapiens
cctctctttccatctccccttggtct

SEQ ID NO: 87857 - DNA, 26 bp, Homo sapiens
ctctctttccatctccccttggtctt

SEQ ID NO: 87858 - DNA, 26 bp, Homo sapiens
tctctttccatctccccttggtcttc

SEQ ID NO: 87859 - DNA, 26 bp, Homo sapiens
ctctttccatctccccttggtcttcc

SEQ ID NO: 87860 - DNA, 26 bp, Homo sapiens
tctttccatctccccttggtcttcca

SEQ ID NO: 87861 - DNA, 26 bp, Homo sapiens
ctttccatctccccttggtcttccat

SEQ ID NO: 87862 - DNA, 26 bp, Homo sapiens
tttccatctccccttggtcttccata

SEQ ID NO: 87863 - DNA, 26 bp, Homo sapiens
ttccatctccccttggtcttccatag

SEQ ID NO: 87864 - DNA, 26 bp, Homo sapiens
tccatctccccttggtcttccatagg

SEQ ID NO: 87865 - DNA, 26 bp, Homo sapiens
ccatctccccttggtcttccataggg

SEQ ID NO: 87866 - DNA, 26 bp, Homo sapiens
catctccccttggtcttccatagggc

SEQ ID NO: 87867 - DNA, 26 bp, Homo sapiens
atctccccttggtcttccatagggct

SEQ ID NO: 87868 - DNA, 26 bp, Homo sapiens
tctccccttggtcttccatagggctc

SEQ ID NO: 87869 - DNA, 26 bp, Homo sapiens
ctccccttggtcttccatagggctct

SEQ ID NO: 87870 - DNA, 26 bp, Homo sapiens
tccccttggtcttccatagggctctg

SEQ ID NO: 87871 - DNA, 26 bp, Homo sapiens
ccccttggtcttccatagggctctgg

SEQ ID NO: 87872 - DNA, 26 bp, Homo sapiens
cccttggtcttccatagggctctggc

SEQ ID NO: 87873 - DNA, 26 bp, Homo sapiens
ccttggtcttccatagggctctggct

SEQ ID NO: 87874 - DNA, 26 bp, Homo sapiens
cttggtcttccatagggctctggctg

SEQ ID NO: 87875 - DNA, 26 bp, Homo sapiens
ttggtcttccatagggctctggctgg

SEQ ID NO: 87876 - DNA, 26 bp, Homo sapiens
tggtcttccatagggctctggctggc

SEQ ID NO: 87877 - DNA, 26 bp, Homo sapiens
ggtcttccatagggctctggctggct

SEQ ID NO: 87878 - DNA, 26 bp, Homo sapiens
gtcttccatagggctctggctggctg

SEQ ID NO: 87879 - DNA, 26 bp, Homo sapiens
tcttccatagggctctggctggctga

SEQ ID NO: 87880 - DNA, 26 bp, Homo sapiens
cttccatagggctctggctggctgag

SEQ ID NO: 87881 - DNA, 26 bp, Homo sapiens
ttccatagggctctggctggctgagg

SEQ ID NO: 87882 - DNA, 26 bp, Homo sapiens
tccatagggctctggctggctgaggc

SEQ ID NO: 87883 - DNA, 26 bp, Homo sapiens
ccatagggctctggctggctgaggca

SEQ ID NO: 87884 - DNA, 26 bp, Homo sapiens
catagggctctggctggctgaggcac

SEQ ID NO: 87885 - DNA, 26 bp, Homo sapiens
atagggctctggctggctgaggcact

SEQ ID NO: 87886 - DNA, 26 bp, Homo sapiens
tagggctctggctggctgaggcactc

SEQ ID NO: 87887 - DNA, 26 bp, Homo sapiens
agggctctggctggctgaggcactca

SEQ ID NO: 87888 - DNA, 26 bp, Homo sapiens
gggctctggctggctgaggcactcag

SEQ ID NO: 87889 - DNA, 26 bp, Homo sapiens
ggctctggctggctgaggcactcagc

SEQ ID NO: 87890 - DNA, 26 bp, Homo sapiens
gctctggctggctgaggcactcagca

SEQ ID NO: 87891 - DNA, 26 bp, Homo sapiens
ctctggctggctgaggcactcagcag

SEQ ID NO: 87892 - DNA, 26 bp, Homo sapiens
tctggctggctgaggcactcagcagg

SEQ ID NO: 87893 - DNA, 26 bp, Homo sapiens
ctggctggctgaggcactcagcaggg

SEQ ID NO: 87894 - DNA, 26 bp, Homo sapiens
tggctggctgaggcactcagcagggc

SEQ ID NO: 87895 - DNA, 26 bp, Homo sapiens
ggctggctgaggcactcagcagggct

SEQ ID NO: 87896 - DNA, 26 bp, Homo sapiens
gctggctgaggcactcagcagggctg

SEQ ID NO: 87897 - DNA, 26 bp, Homo sapiens
ctggctgaggcactcagcagggctga

SEQ ID NO: 87898 - DNA, 26 bp, Homo sapiens
tggctgaggcactcagcagggctgac

SEQ ID NO: 87899 - DNA, 26 bp, Homo sapiens
ggctgaggcactcagcagggctgacg

SEQ ID NO: 87900 - DNA, 26 bp, Homo sapiens
gctgaggcactcagcagggctgacgg

SEQ ID NO: 87901 - DNA, 26 bp, Homo sapiens
ctgaggcactcagcagggctgacggc

SEQ ID NO: 87902 - DNA, 26 bp, Homo sapiens
tgaggcactcagcagggctgacggct

SEQ ID NO: 87903 - DNA, 26 bp, Homo sapiens
gaggcactcagcagggctgacggctg

SEQ ID NO: 87904 - DNA, 26 bp, Homo sapiens
aggcactcagcagggctgacggctga

SEQ ID NO: 87905 - DNA, 26 bp, Homo sapiens
ggcactcagcagggctgacggctgat

SEQ ID NO: 87906 - DNA, 26 bp, Homo sapiens
gcactcagcagggctgacggctgatt

SEQ ID NO: 87907 - DNA, 26 bp, Homo sapiens
cactcagcagggctgacggctgattt

SEQ ID NO: 87908 - DNA, 26 bp, Homo sapiens
actcagcagggctgacggctgatttt

SEQ ID NO: 87909 - DNA, 26 bp, Homo sapiens
ctcagcagggctgacggctgattttt

SEQ ID NO: 87910 - DNA, 26 bp, Homo sapiens
tcagcagggctgacggctgattttta

SEQ ID NO: 87911 - DNA, 26 bp, Homo sapiens
cagcagggctgacggctgatttttag

SEQ ID NO: 87912 - DNA, 26 bp, Homo sapiens
agcagggctgacggctgatttttagg

SEQ ID NO: 87913 - DNA, 26 bp, Homo sapiens
gcagggctgacggctgatttttagga

SEQ ID NO: 87914 - DNA, 26 bp, Homo sapiens
cagggctgacggctgatttttaggag

SEQ ID NO: 87915 - DNA, 26 bp, Homo sapiens
agggctgacggctgatttttaggaga

SEQ ID NO: 87916 - DNA, 26 bp, Homo sapiens
gggctgacggctgatttttaggagac

SEQ ID NO: 87917 - DNA, 26 bp, Homo sapiens
ggctgacggctgatttttaggagaca

SEQ ID NO: 87918 - DNA, 26 bp, Homo sapiens
gctgacggctgatttttaggagacag

SEQ ID NO: 87919 - DNA, 26 bp, Homo sapiens
ctgacggctgatttttaggagacagg

SEQ ID NO: 87920 - DNA, 26 bp, Homo sapiens
tgacggctgatttttaggagacaggt

SEQ ID NO: 87921 - DNA, 26 bp, Homo sapiens
gacggctgatttttaggagacaggta

SEQ ID NO: 87922 - DNA, 26 bp, Homo sapiens
acggctgatttttaggagacaggtac

SEQ ID NO: 87923 - DNA, 26 bp, Homo sapiens
cggctgatttttaggagacaggtacc

SEQ ID NO: 87924 - DNA, 26 bp, Homo sapiens
ggctgatttttaggagacaggtaccc

SEQ ID NO: 87925 - DNA, 26 bp, Homo sapiens
gctgatttttaggagacaggtaccca

SEQ ID NO: 87926 - DNA, 26 bp, Homo sapiens
ctgatttttaggagacaggtacccac

SEQ ID NO: 87927 - DNA, 26 bp, Homo sapiens
tgatttttaggagacaggtacccact

SEQ ID NO: 87928 - DNA, 26 bp, Homo sapiens
gatttttaggagacaggtacccactg

SEQ ID NO: 87929 - DNA, 26 bp, Homo sapiens
atttttaggagacaggtacccactgt

SEQ ID NO: 87930 - DNA, 26 bp, Homo sapiens
tttttaggagacaggtacccactgtc

SEQ ID NO: 87931 - DNA, 26 bp, Homo sapiens
ttttaggagacaggtacccactgtct

SEQ ID NO: 87932 - DNA, 26 bp, Homo sapiens
tttaggagacaggtacccactgtctg

SEQ ID NO: 87933 - DNA, 26 bp, Homo sapiens
ttaggagacaggtacccactgtctgg

SEQ ID NO: 87934 - DNA, 26 bp, Homo sapiens
taggagacaggtacccactgtctggt

SEQ ID NO: 87935 - DNA, 26 bp, Homo sapiens
aggagacaggtacccactgtctggtg

SEQ ID NO: 87936 - DNA, 26 bp, Homo sapiens
ggagacaggtacccactgtctggtga

SEQ ID NO: 87937 - DNA, 26 bp, Homo sapiens
gagacaggtacccactgtctggtgac

SEQ ID NO: 87938 - DNA, 26 bp, Homo sapiens
agacaggtacccactgtctggtgacg

SEQ ID NO: 87939 - DNA, 26 bp, Homo sapiens
gacaggtacccactgtctggtgacga

SEQ ID NO: 87940 - DNA, 26 bp, Homo sapiens
acaggtacccactgtctggtgacgag

SEQ ID NO: 87941 - DNA, 26 bp, Homo sapiens
caggtacccactgtctggtgacgagg

SEQ ID NO: 87942 - DNA, 26 bp, Homo sapiens
aggtacccactgtctggtgacgagga

SEQ ID NO: 87943 - DNA, 26 bp, Homo sapiens
ggtacccactgtctggtgacgaggac

SEQ ID NO: 87944 - DNA, 26 bp, Homo sapiens
gtacccactgtctggtgacgaggact

SEQ ID NO: 87945 - DNA, 26 bp, Homo sapiens
tacccactgtctggtgacgaggactc

SEQ ID NO: 87946 - DNA, 26 bp, Homo sapiens
acccactgtctggtgacgaggactcc

SEQ ID NO: 87947 - DNA, 26 bp, Homo sapiens
cccactgtctggtgacgaggactccc

SEQ ID NO: 87948 - DNA, 26 bp, Homo sapiens
ccactgtctggtgacgaggactcccc

SEQ ID NO: 87949 - DNA, 26 bp, Homo sapiens
cactgtctggtgacgaggactcccca

SEQ ID NO: 87950 - DNA, 26 bp, Homo sapiens
actgtctggtgacgaggactccccat

SEQ ID NO: 87951 - DNA, 26 bp, Homo sapiens
ctgtctggtgacgaggactccccatt

SEQ ID NO: 87952 - DNA, 26 bp, Homo sapiens
tgtctggtgacgaggactccccattt

SEQ ID NO: 87953 - DNA, 26 bp, Homo sapiens
gtctggtgacgaggactccccatttg

SEQ ID NO: 87954 - DNA, 26 bp, Homo sapiens
tctggtgacgaggactccccatttgg

SEQ ID NO: 87955 - DNA, 26 bp, Homo sapiens
ctggtgacgaggactccccatttggg

SEQ ID NO: 87956 - DNA, 26 bp, Homo sapiens
tggtgacgaggactccccatttgggc

SEQ ID NO: 87957 - DNA, 26 bp, Homo sapiens
ggtgacgaggactccccatttgggct

SEQ ID NO: 87958 - DNA, 26 bp, Homo sapiens
gtgacgaggactccccatttgggctt

SEQ ID NO: 87959 - DNA, 26 bp, Homo sapiens
tgacgaggactccccatttgggcttc

SEQ ID NO: 87960 - DNA, 26 bp, Homo sapiens
gacgaggactccccatttgggcttct

SEQ ID NO: 87961 - DNA, 26 bp, Homo sapiens
acgaggactccccatttgggcttctg

SEQ ID NO: 87962 - DNA, 26 bp, Homo sapiens
cgaggactccccatttgggcttctgt

SEQ ID NO: 87963 - DNA, 26 bp, Homo sapiens
gaggactccccatttgggcttctgtt

SEQ ID NO: 87964 - DNA, 26 bp, Homo sapiens
aggactccccatttgggcttctgttt

SEQ ID NO: 87965 - DNA, 26 bp, Homo sapiens
ggactccccatttgggcttctgtttc

SEQ ID NO: 87966 - DNA, 26 bp, Homo sapiens
gactccccatttgggcttctgtttct

SEQ ID NO: 87967 - DNA, 26 bp, Homo sapiens
actccccatttgggcttctgtttctt

SEQ ID NO: 87968 - DNA, 26 bp, Homo sapiens
ctccccatttgggcttctgtttcttg

SEQ ID NO: 87969 - DNA, 26 bp, Homo sapiens
tccccatttgggcttctgtttcttgg

SEQ ID NO: 87970 - DNA, 26 bp, Homo sapiens
ccccatttgggcttctgtttcttggc

SEQ ID NO: 87971 - DNA, 26 bp, Homo sapiens
cccatttgggcttctgtttcttggct

SEQ ID NO: 87972 - DNA, 26 bp, Homo sapiens
ccatttgggcttctgtttcttggctt

SEQ ID NO: 87973 - DNA, 26 bp, Homo sapiens
catttgggcttctgtttcttggcttt

SEQ ID NO: 87974 - DNA, 26 bp, Homo sapiens
atttgggcttctgtttcttggctttg

SEQ ID NO: 87975 - DNA, 26 bp, Homo sapiens
tttgggcttctgtttcttggctttgc

SEQ ID NO: 87976 - DNA, 26 bp, Homo sapiens
ttgggcttctgtttcttggctttgcg

SEQ ID NO: 87977 - DNA, 26 bp, Homo sapiens
tgggcttctgtttcttggctttgcgg

SEQ ID NO: 87978 - DNA, 26 bp, Homo sapiens
gggcttctgtttcttggctttgcggc

SEQ ID NO: 87979 - DNA, 26 bp, Homo sapiens
ggcttctgtttcttggctttgcggct

SEQ ID NO: 87980 - DNA, 26 bp, Homo sapiens
gcttctgtttcttggctttgcggctt

SEQ ID NO: 87981 - DNA, 26 bp, Homo sapiens
cttctgtttcttggctttgcggcttt

SEQ ID NO: 87982 - DNA, 26 bp, Homo sapiens
ttctgtttcttggctttgcggcttta

SEQ ID NO: 87983 - DNA, 26 bp, Homo sapiens
tctgtttcttggctttgcggctttaa

SEQ ID NO: 87984 - DNA, 26 bp, Homo sapiens
ctgtttcttggctttgcggctttaaa

SEQ ID NO: 87985 - DNA, 26 bp, Homo sapiens
tgtttcttggctttgcggctttaaat

SEQ ID NO: 87986 - DNA, 26 bp, Homo sapiens
gtttcttggctttgcggctttaaata

SEQ ID NO: 87987 - DNA, 26 bp, Homo sapiens
tttcttggctttgcggctttaaatat

SEQ ID NO: 87988 - DNA, 26 bp, Homo sapiens
ttcttggctttgcggctttaaatatg

SEQ ID NO: 87989 - DNA, 26 bp, Homo sapiens
tcttggctttgcggctttaaatatgg

SEQ ID NO: 87990 - DNA, 26 bp, Homo sapiens
cttggctttgcggctttaaatatgga

SEQ ID NO: 87991 - DNA, 26 bp, Homo sapiens
ttggctttgcggctttaaatatggat

SEQ ID NO: 87992 - DNA, 26 bp, Homo sapiens
tggctttgcggctttaaatatggatg

SEQ ID NO: 87993 - DNA, 26 bp, Homo sapiens
ggctttgcggctttaaatatggatgt

SEQ ID NO: 87994 - DNA, 26 bp, Homo sapiens
gctttgcggctttaaatatggatgtt

SEQ ID NO: 87995 - DNA, 26 bp, Homo sapiens
ctttgcggctttaaatatggatgtta

SEQ ID NO: 87996 - DNA, 26 bp, Homo sapiens
tttgcggctttaaatatggatgttag

SEQ ID NO: 87997 - DNA, 26 bp, Homo sapiens
ttgcggctttaaatatggatgttagc

SEQ ID NO: 87998 - DNA, 26 bp, Homo sapiens
tgcggctttaaatatggatgttagct

SEQ ID NO: 87999 - DNA, 26 bp, Homo sapiens
gcggctttaaatatggatgttagctc

SEQ ID NO: 88000 - DNA, 26 bp, Homo sapiens
cggctttaaatatggatgttagctcc

SEQ ID NO: 88001 - DNA, 26 bp, Homo sapiens
ggctttaaatatggatgttagctcct

SEQ ID NO: 88002 - DNA, 26 bp, Homo sapiens
gctttaaatatggatgttagctcctc

SEQ ID NO: 88003 - DNA, 26 bp, Homo sapiens
ctttaaatatggatgttagctcctca

SEQ ID NO: 88004 - DNA, 26 bp, Homo sapiens
tttaaatatggatgttagctcctcaa

SEQ ID NO: 88005 - DNA, 26 bp, Homo sapiens
ttaaatatggatgttagctcctcaat

SEQ ID NO: 88006 - DNA, 26 bp, Homo sapiens
taaatatggatgttagctcctcaatt

SEQ ID NO: 88007 - DNA, 26 bp, Homo sapiens
aaatatggatgttagctcctcaatta

SEQ ID NO: 88008 - DNA, 26 bp, Homo sapiens
aatatggatgttagctcctcaattaa

SEQ ID NO: 88009 - DNA, 26 bp, Homo sapiens
atatggatgttagctcctcaattaaa

SEQ ID NO: 88010 - DNA, 26 bp, Homo sapiens
tatggatgttagctcctcaattaaat

SEQ ID NO: 88011 - DNA, 26 bp, Homo sapiens
atggatgttagctcctcaattaaatt

SEQ ID NO: 88012 - DNA, 26 bp, Homo sapiens
tggatgttagctcctcaattaaatta

SEQ ID NO: 88013 - DNA, 26 bp, Homo sapiens
ggatgttagctcctcaattaaattag

SEQ ID NO: 88014 - DNA, 26 bp, Homo sapiens
gatgttagctcctcaattaaattagc

SEQ ID NO: 88015 - DNA, 26 bp, Homo sapiens
atgttagctcctcaattaaattagct

SEQ ID NO: 88016 - DNA, 26 bp, Homo sapiens
tgttagctcctcaattaaattagctg

SEQ ID NO: 88017 - DNA, 26 bp, Homo sapiens
gttagctcctcaattaaattagctgc

SEQ ID NO: 88018 - DNA, 26 bp, Homo sapiens
ttagctcctcaattaaattagctgcc

SEQ ID NO: 88019 - DNA, 26 bp, Homo sapiens
tagctcctcaattaaattagctgcct

SEQ ID NO: 88020 - DNA, 26 bp, Homo sapiens
agctcctcaattaaattagctgcctt

SEQ ID NO: 88021 - DNA, 26 bp, Homo sapiens
gctcctcaattaaattagctgccttg

SEQ ID NO: 88022 - DNA, 26 bp, Homo sapiens
ctcctcaattaaattagctgccttgt

SEQ ID NO: 88023 - DNA, 26 bp, Homo sapiens
tcctcaattaaattagctgccttgtc

SEQ ID NO: 88024 - DNA, 26 bp, Homo sapiens
cctcaattaaattagctgccttgtca

SEQ ID NO: 88025 - DNA, 26 bp, Homo sapiens
ctcaattaaattagctgccttgtcac

SEQ ID NO: 88026 - DNA, 26 bp, Homo sapiens
tcaattaaattagctgccttgtcaca

SEQ ID NO: 88027 - DNA, 26 bp, Homo sapiens
caattaaattagctgccttgtcacac

SEQ ID NO: 88028 - DNA, 26 bp, Homo sapiens
aattaaattagctgccttgtcacaca

SEQ ID NO: 88029 - DNA, 26 bp, Homo sapiens
attaaattagctgccttgtcacacag

SEQ ID NO: 88030 - DNA, 26 bp, Homo sapiens
ttaaattagctgccttgtcacacagc

SEQ ID NO: 88031 - DNA, 26 bp, Homo sapiens
taaattagctgccttgtcacacagct

SEQ ID NO: 88032 - DNA, 26 bp, Homo sapiens
aaattagctgccttgtcacacagctg

SEQ ID NO: 88033 - DNA, 26 bp, Homo sapiens
aattagctgccttgtcacacagctgg

SEQ ID NO: 88034 - DNA, 26 bp, Homo sapiens
attagctgccttgtcacacagctggc

SEQ ID NO: 88035 - DNA, 26 bp, Homo sapiens
ttagctgccttgtcacacagctggct

SEQ ID NO: 88036 - DNA, 26 bp, Homo sapiens
tagctgccttgtcacacagctggctc

SEQ ID NO: 88037 - DNA, 26 bp, Homo sapiens
agctgccttgtcacacagctggctct

SEQ ID NO: 88038 - DNA, 26 bp, Homo sapiens
gctgccttgtcacacagctggctctg

SEQ ID NO: 88039 - DNA, 26 bp, Homo sapiens
ctgccttgtcacacagctggctctgg

SEQ ID NO: 88040 - DNA, 26 bp, Homo sapiens
tgccttgtcacacagctggctctggg

SEQ ID NO: 88041 - DNA, 26 bp, Homo sapiens
gccttgtcacacagctggctctgggg

SEQ ID NO: 88042 - DNA, 26 bp, Homo sapiens
ccttgtcacacagctggctctggggg

SEQ ID NO: 88043 - DNA, 26 bp, Homo sapiens
cttgtcacacagctggctctgggggc

SEQ ID NO: 88044 - DNA, 26 bp, Homo sapiens
ttgtcacacagctggctctgggggcc

SEQ ID NO: 88045 - DNA, 26 bp, Homo sapiens
tgtcacacagctggctctgggggcca

SEQ ID NO: 88046 - DNA, 26 bp, Homo sapiens
gtcacacagctggctctgggggccac

SEQ ID NO: 88047 - DNA, 26 bp, Homo sapiens
tcacacagctggctctgggggccacc

SEQ ID NO: 88048 - DNA, 26 bp, Homo sapiens
cacacagctggctctgggggccaccc

SEQ ID NO: 88049 - DNA, 26 bp, Homo sapiens
acacagctggctctgggggccaccct

SEQ ID NO: 88050 - DNA, 26 bp, Homo sapiens
cacagctggctctgggggccaccctt

SEQ ID NO: 88051 - DNA, 26 bp, Homo sapiens
acagctggctctgggggccacccttt

SEQ ID NO: 88052 - DNA, 26 bp, Homo sapiens
cagctggctctgggggccaccctttc

SEQ ID NO: 88053 - DNA, 26 bp, Homo sapiens
agctggctctgggggccaccctttct

SEQ ID NO: 88054 - DNA, 26 bp, Homo sapiens
gctggctctgggggccaccctttctt

SEQ ID NO: 88055 - DNA, 26 bp, Homo sapiens
ctggctctgggggccaccctttcttt

SEQ ID NO: 88056 - DNA, 26 bp, Homo sapiens
tggctctgggggccaccctttctttg

SEQ ID NO: 88057 - DNA, 26 bp, Homo sapiens
ggctctgggggccaccctttctttga

SEQ ID NO: 88058 - DNA, 26 bp, Homo sapiens
gctctgggggccaccctttctttgat

SEQ ID NO: 88059 - DNA, 26 bp, Homo sapiens
ctctgggggccaccctttctttgatg

SEQ ID NO: 88060 - DNA, 26 bp, Homo sapiens
tctgggggccaccctttctttgatgt

SEQ ID NO: 88061 - DNA, 26 bp, Homo sapiens
ctgggggccaccctttctttgatgtg

SEQ ID NO: 88062 - DNA, 26 bp, Homo sapiens
tgggggccaccctttctttgatgtgg

SEQ ID NO: 88063 - DNA, 26 bp, Homo sapiens
gggggccaccctttctttgatgtggc

SEQ ID NO: 88064 - DNA, 26 bp, Homo sapiens
ggggccaccctttctttgatgtggcg

SEQ ID NO: 88065 - DNA, 26 bp, Homo sapiens
gggccaccctttctttgatgtggcgt

SEQ ID NO: 88066 - DNA, 26 bp, Homo sapiens
ggccaccctttctttgatgtggcgtt

SEQ ID NO: 88067 - DNA, 26 bp, Homo sapiens
gccaccctttctttgatgtggcgttt

SEQ ID NO: 88068 - DNA, 26 bp, Homo sapiens
ccaccctttctttgatgtggcgtttt

SEQ ID NO: 88069 - DNA, 26 bp, Homo sapiens
caccctttctttgatgtggcgttttg

SEQ ID NO: 88070 - DNA, 26 bp, Homo sapiens
accctttctttgatgtggcgttttgg

SEQ ID NO: 88071 - DNA, 26 bp, Homo sapiens
ccctttctttgatgtggcgttttggg

SEQ ID NO: 88072 - DNA, 26 bp, Homo sapiens
cctttctttgatgtggcgttttgggc

SEQ ID NO: 88073 - DNA, 26 bp, Homo sapiens
ctttctttgatgtggcgttttgggct

SEQ ID NO: 88074 - DNA, 26 bp, Homo sapiens
tttctttgatgtggcgttttgggctt

SEQ ID NO: 88075 - DNA, 26 bp, Homo sapiens
ttctttgatgtggcgttttgggcttt

SEQ ID NO: 88076 - DNA, 26 bp, Homo sapiens
tctttgatgtggcgttttgggcttta

SEQ ID NO: 88077 - DNA, 26 bp, Homo sapiens
ctttgatgtggcgttttgggctttac

SEQ ID NO: 88078 - DNA, 26 bp, Homo sapiens
tttgatgtggcgttttgggctttacg

SEQ ID NO: 88079 - DNA, 26 bp, Homo sapiens
ttgatgtggcgttttgggctttacgt

SEQ ID NO: 88080 - DNA, 26 bp, Homo sapiens
tgatgtggcgttttgggctttacgtt

SEQ ID NO: 88081 - DNA, 26 bp, Homo sapiens
gatgtggcgttttgggctttacgttt

SEQ ID NO: 88082 - DNA, 26 bp, Homo sapiens
atgtggcgttttgggctttacgtttg

SEQ ID NO: 88083 - DNA, 26 bp, Homo sapiens
tgtggcgttttgggctttacgtttgt

SEQ ID NO: 88084 - DNA, 26 bp, Homo sapiens
gtggcgttttgggctttacgtttgtg

SEQ ID NO: 88085 - DNA, 26 bp, Homo sapiens
tggcgttttgggctttacgtttgtgc

SEQ ID NO: 88086 - DNA, 26 bp, Homo sapiens
ggcgttttgggctttacgtttgtgct

SEQ ID NO: 88087 - DNA, 26 bp, Homo sapiens
gcgttttgggctttacgtttgtgctg

SEQ ID NO: 88088 - DNA, 26 bp, Homo sapiens
cgttttgggctttacgtttgtgctgg

SEQ ID NO: 88089 - DNA, 26 bp, Homo sapiens
gttttgggctttacgtttgtgctggg

SEQ ID NO: 88090 - DNA, 26 bp, Homo sapiens
ttttgggctttacgtttgtgctggga

SEQ ID NO: 88091 - DNA, 26 bp, Homo sapiens
tttgggctttacgtttgtgctgggag

SEQ ID NO: 88092 - DNA, 26 bp, Homo sapiens
ttgggctttacgtttgtgctgggagt

SEQ ID NO: 88093 - DNA, 26 bp, Homo sapiens
tgggctttacgtttgtgctgggagtt

SEQ ID NO: 88094 - DNA, 26 bp, Homo sapiens
gggctttacgtttgtgctgggagttt

SEQ ID NO: 88095 - DNA, 26 bp, Homo sapiens
ggctttacgtttgtgctgggagtttt

SEQ ID NO: 88096 - DNA, 26 bp, Homo sapiens
gctttacgtttgtgctgggagttttt

SEQ ID NO: 88097 - DNA, 26 bp, Homo sapiens
ctttacgtttgtgctgggagtttttg

SEQ ID NO: 88098 - DNA, 26 bp, Homo sapiens
tttacgtttgtgctgggagtttttgc

SEQ ID NO: 88099 - DNA, 26 bp, Homo sapiens
ttacgtttgtgctgggagtttttgca

SEQ ID NO: 88100 - DNA, 26 bp, Homo sapiens
tacgtttgtgctgggagtttttgcac

SEQ ID NO: 88101 - DNA, 26 bp, Homo sapiens
acgtttgtgctgggagtttttgcacc

SEQ ID NO: 88102 - DNA, 26 bp, Homo sapiens
cgtttgtgctgggagtttttgcacca

SEQ ID NO: 88103 - DNA, 26 bp, Homo sapiens
gtttgtgctgggagtttttgcaccac

SEQ ID NO: 88104 - DNA, 26 bp, Homo sapiens
tttgtgctgggagtttttgcaccacg

SEQ ID NO: 88105 - DNA, 26 bp, Homo sapiens
ttgtgctgggagtttttgcaccacgc

SEQ ID NO: 88106 - DNA, 26 bp, Homo sapiens
tgtgctgggagtttttgcaccacgct

SEQ ID NO: 88107 - DNA, 26 bp, Homo sapiens
gtgctgggagtttttgcaccacgctt

SEQ ID NO: 88108 - DNA, 26 bp, Homo sapiens
tgctgggagtttttgcaccacgcttt

SEQ ID NO: 88109 - DNA, 26 bp, Homo sapiens
gctgggagtttttgcaccacgctttt

SEQ ID NO: 88110 - DNA, 26 bp, Homo sapiens
ctgggagtttttgcaccacgcttttc

SEQ ID NO: 88111 - DNA, 26 bp, Homo sapiens
tgggagtttttgcaccacgcttttca

SEQ ID NO: 88112 - DNA, 26 bp, Homo sapiens
gggagtttttgcaccacgcttttcag

SEQ ID NO: 88113 - DNA, 26 bp, Homo sapiens
ggagtttttgcaccacgcttttcagc

SEQ ID NO: 88114 - DNA, 26 bp, Homo sapiens
gagtttttgcaccacgcttttcagcc

SEQ ID NO: 88115 - DNA, 26 bp, Homo sapiens
agtttttgcaccacgcttttcagcct

SEQ ID NO: 88116 - DNA, 26 bp, Homo sapiens
gtttttgcaccacgcttttcagcctt

SEQ ID NO: 88117 - DNA, 26 bp, Homo sapiens
tttttgcaccacgcttttcagccttt

SEQ ID NO: 88118 - DNA, 26 bp, Homo sapiens
ttttgcaccacgcttttcagcctttc

SEQ ID NO: 88119 - DNA, 26 bp, Homo sapiens
tttgcaccacgcttttcagcctttcg

SEQ ID NO: 88120 - DNA, 26 bp, Homo sapiens
ttgcaccacgcttttcagcctttcgg

SEQ ID NO: 88121 - DNA, 26 bp, Homo sapiens
tgcaccacgcttttcagcctttcgga

SEQ ID NO: 88122 - DNA, 26 bp, Homo sapiens
gcaccacgcttttcagcctttcggag

SEQ ID NO: 88123 - DNA, 26 bp, Homo sapiens
caccacgcttttcagcctttcggagg

SEQ ID NO: 88124 - DNA, 26 bp, Homo sapiens
accacgcttttcagcctttcggaggc

SEQ ID NO: 88125 - DNA, 26 bp, Homo sapiens
ccacgcttttcagcctttcggaggct

SEQ ID NO: 88126 - DNA, 26 bp, Homo sapiens
cacgcttttcagcctttcggaggctc

SEQ ID NO: 88127 - DNA, 26 bp, Homo sapiens
acgcttttcagcctttcggaggctcc

SEQ ID NO: 88128 - DNA, 26 bp, Homo sapiens
cgcttttcagcctttcggaggctccg

SEQ ID NO: 88129 - DNA, 26 bp, Homo sapiens
gcttttcagcctttcggaggctccgg

SEQ ID NO: 88130 - DNA, 26 bp, Homo sapiens
cttttcagcctttcggaggctccgga

SEQ ID NO: 88131 - DNA, 26 bp, Homo sapiens
ttttcagcctttcggaggctccggat

SEQ ID NO: 88132 - DNA, 26 bp, Homo sapiens
tttcagcctttcggaggctccggatg

SEQ ID NO: 88133 - DNA, 26 bp, Homo sapiens
ttcagcctttcggaggctccggatgt

SEQ ID NO: 88134 - DNA, 26 bp, Homo sapiens
tcagcctttcggaggctccggatgta

SEQ ID NO: 88135 - DNA, 26 bp, Homo sapiens
cagcctttcggaggctccggatgtag

SEQ ID NO: 88136 - DNA, 26 bp, Homo sapiens
agcctttcggaggctccggatgtagc

SEQ ID NO: 88137 - DNA, 26 bp, Homo sapiens
gcctttcggaggctccggatgtagct

SEQ ID NO: 88138 - DNA, 26 bp, Homo sapiens
cctttcggaggctccggatgtagctg

SEQ ID NO: 88139 - DNA, 26 bp, Homo sapiens
ctttcggaggctccggatgtagctgg

SEQ ID NO: 88140 - DNA, 26 bp, Homo sapiens
tttcggaggctccggatgtagctggg

SEQ ID NO: 88141 - DNA, 26 bp, Homo sapiens
ttcggaggctccggatgtagctgggc

SEQ ID NO: 88142 - DNA, 26 bp, Homo sapiens
tcggaggctccggatgtagctgggcc

SEQ ID NO: 88143 - DNA, 26 bp, Homo sapiens
cggaggctccggatgtagctgggcct

SEQ ID NO: 88144 - DNA, 26 bp, Homo sapiens
ggaggctccggatgtagctgggcctg

SEQ ID NO: 88145 - DNA, 26 bp, Homo sapiens
gaggctccggatgtagctgggcctgg

SEQ ID NO: 88146 - DNA, 26 bp, Homo sapiens
aggctccggatgtagctgggcctggt

SEQ ID NO: 88147 - DNA, 26 bp, Homo sapiens
ggctccggatgtagctgggcctggtg

SEQ ID NO: 88148 - DNA, 26 bp, Homo sapiens
gctccggatgtagctgggcctggtga

SEQ ID NO: 88149 - DNA, 26 bp, Homo sapiens
ctccggatgtagctgggcctggtgag

SEQ ID NO: 88150 - DNA, 26 bp, Homo sapiens
tccggatgtagctgggcctggtgagc

SEQ ID NO: 88151 - DNA, 26 bp, Homo sapiens
ccggatgtagctgggcctggtgagca

SEQ ID NO: 88152 - DNA, 26 bp, Homo sapiens
cggatgtagctgggcctggtgagcag

SEQ ID NO: 88153 - DNA, 26 bp, Homo sapiens
ggatgtagctgggcctggtgagcagg

SEQ ID NO: 88154 - DNA, 26 bp, Homo sapiens
gatgtagctgggcctggtgagcaggg

SEQ ID NO: 88155 - DNA, 26 bp, Homo sapiens
atgtagctgggcctggtgagcagggg

SEQ ID NO: 88156 - DNA, 26 bp, Homo sapiens
tgtagctgggcctggtgagcaggggt

SEQ ID NO: 88157 - DNA, 26 bp, Homo sapiens
gtagctgggcctggtgagcaggggtg

SEQ ID NO: 88158 - DNA, 26 bp, Homo sapiens
tagctgggcctggtgagcaggggtga

SEQ ID NO: 88159 - DNA, 26 bp, Homo sapiens
agctgggcctggtgagcaggggtgac

SEQ ID NO: 88160 - DNA, 26 bp, Homo sapiens
gctgggcctggtgagcaggggtgaca

SEQ ID NO: 88161 - DNA, 26 bp, Homo sapiens
ctgggcctggtgagcaggggtgacat

SEQ ID NO: 88162 - DNA, 26 bp, Homo sapiens
tgggcctggtgagcaggggtgacatg

SEQ ID NO: 88163 - DNA, 26 bp, Homo sapiens
gggcctggtgagcaggggtgacatgg

SEQ ID NO: 88164 - DNA, 26 bp, Homo sapiens
ggcctggtgagcaggggtgacatggc

SEQ ID NO: 88165 - DNA, 26 bp, Homo sapiens
gcctggtgagcaggggtgacatggca

SEQ ID NO: 88166 - DNA, 26 bp, Homo sapiens
cctggtgagcaggggtgacatggcag

SEQ ID NO: 88167 - DNA, 26 bp, Homo sapiens
ctggtgagcaggggtgacatggcagg

SEQ ID NO: 88168 - DNA, 26 bp, Homo sapiens
tggtgagcaggggtgacatggcaggt

SEQ ID NO: 88169 - DNA, 26 bp, Homo sapiens
ggtgagcaggggtgacatggcaggtt

SEQ ID NO: 88170 - DNA, 26 bp, Homo sapiens
gtgagcaggggtgacatggcaggttt

SEQ ID NO: 88171 - DNA, 26 bp, Homo sapiens
tgagcaggggtgacatggcaggtttc

SEQ ID NO: 88172 - DNA, 26 bp, Homo sapiens
gagcaggggtgacatggcaggtttcc

SEQ ID NO: 88173 - DNA, 26 bp, Homo sapiens
agcaggggtgacatggcaggtttcct

SEQ ID NO: 88174 - DNA, 26 bp, Homo sapiens
gcaggggtgacatggcaggtttcctc

SEQ ID NO: 88175 - DNA, 26 bp, Homo sapiens
caggggtgacatggcaggtttcctct

SEQ ID NO: 88176 - DNA, 26 bp, Homo sapiens
aggggtgacatggcaggtttcctctt

SEQ ID NO: 88177 - DNA, 26 bp, Homo sapiens
ggggtgacatggcaggtttcctcttt

SEQ ID NO: 88178 - DNA, 26 bp, Homo sapiens
gggtgacatggcaggtttcctctttg

SEQ ID NO: 88179 - DNA, 26 bp, Homo sapiens
ggtgacatggcaggtttcctctttga

SEQ ID NO: 88180 - DNA, 26 bp, Homo sapiens
gtgacatggcaggtttcctctttgaa

SEQ ID NO: 88181 - DNA, 26 bp, Homo sapiens
tgacatggcaggtttcctctttgaaa

SEQ ID NO: 88182 - DNA, 26 bp, Homo sapiens
gacatggcaggtttcctctttgaaac

SEQ ID NO: 88183 - DNA, 26 bp, Homo sapiens
acatggcaggtttcctctttgaaaca

SEQ ID NO: 88184 - DNA, 26 bp, Homo sapiens
catggcaggtttcctctttgaaacag

SEQ ID NO: 88185 - DNA, 26 bp, Homo sapiens
atggcaggtttcctctttgaaacagg

SEQ ID NO: 88186 - DNA, 26 bp, Homo sapiens
tggcaggtttcctctttgaaacaggt

SEQ ID NO: 88187 - DNA, 26 bp, Homo sapiens
ggcaggtttcctctttgaaacaggtg

SEQ ID NO: 88188 - DNA, 26 bp, Homo sapiens
gcaggtttcctctttgaaacaggtga

SEQ ID NO: 88189 - DNA, 26 bp, Homo sapiens
caggtttcctctttgaaacaggtgaa

SEQ ID NO: 88190 - DNA, 26 bp, Homo sapiens
aggtttcctctttgaaacaggtgaag

SEQ ID NO: 88191 - DNA, 26 bp, Homo sapiens
ggtttcctctttgaaacaggtgaaga

SEQ ID NO: 88192 - DNA, 26 bp, Homo sapiens
gtttcctctttgaaacaggtgaagag

SEQ ID NO: 88193 - DNA, 26 bp, Homo sapiens
tttcctctttgaaacaggtgaagaga

SEQ ID NO: 88194 - DNA, 26 bp, Homo sapiens
ttcctctttgaaacaggtgaagagat

SEQ ID NO: 88195 - DNA, 26 bp, Homo sapiens
tcctctttgaaacaggtgaagagata

SEQ ID NO: 88196 - DNA, 26 bp, Homo sapiens
cctctttgaaacaggtgaagagatac

SEQ ID NO: 88197 - DNA, 26 bp, Homo sapiens
ctctttgaaacaggtgaagagatact

SEQ ID NO: 88198 - DNA, 26 bp, Homo sapiens
tctttgaaacaggtgaagagatactc

SEQ ID NO: 88199 - DNA, 26 bp, Homo sapiens
ctttgaaacaggtgaagagatactct

SEQ ID NO: 88200 - DNA, 26 bp, Homo sapiens
tttgaaacaggtgaagagatactctt

SEQ ID NO: 88201 - DNA, 26 bp, Homo sapiens
ttgaaacaggtgaagagatactctta

SEQ ID NO: 88202 - DNA, 26 bp, Homo sapiens
tgaaacaggtgaagagatactcttag

SEQ ID NO: 88203 - DNA, 26 bp, Homo sapiens
gaaacaggtgaagagatactcttagt

SEQ ID NO: 88204 - DNA, 26 bp, Homo sapiens
aaacaggtgaagagatactcttagtt

SEQ ID NO: 88205 - DNA, 26 bp, Homo sapiens
aacaggtgaagagatactcttagttt

SEQ ID NO: 88206 - DNA, 26 bp, Homo sapiens
acaggtgaagagatactcttagtttg

SEQ ID NO: 88207 - DNA, 26 bp, Homo sapiens
caggtgaagagatactcttagtttgt

SEQ ID NO: 88208 - DNA, 26 bp, Homo sapiens
aggtgaagagatactcttagtttgtt

SEQ ID NO: 88209 - DNA, 26 bp, Homo sapiens
ggtgaagagatactcttagtttgttt

SEQ ID NO: 88210 - DNA, 26 bp, Homo sapiens
gtgaagagatactcttagtttgtttc

SEQ ID NO: 88211 - DNA, 26 bp, Homo sapiens
tgaagagatactcttagtttgtttct

SEQ ID NO: 88212 - DNA, 26 bp, Homo sapiens
gaagagatactcttagtttgtttctc

SEQ ID NO: 88213 - DNA, 26 bp, Homo sapiens
aagagatactcttagtttgtttctct

SEQ ID NO: 88214 - DNA, 26 bp, Homo sapiens
agagatactcttagtttgtttctctg

SEQ ID NO: 88215 - DNA, 26 bp, Homo sapiens
gagatactcttagtttgtttctctgc

SEQ ID NO: 88216 - DNA, 26 bp, Homo sapiens
agatactcttagtttgtttctctgcc

SEQ ID NO: 88217 - DNA, 26 bp, Homo sapiens
gatactcttagtttgtttctctgcca

SEQ ID NO: 88218 - DNA, 26 bp, Homo sapiens
atactcttagtttgtttctctgccag

SEQ ID NO: 88219 - DNA, 26 bp, Homo sapiens
tactcttagtttgtttctctgccaga

SEQ ID NO: 88220 - DNA, 26 bp, Homo sapiens
actcttagtttgtttctctgccagag

SEQ ID NO: 88221 - DNA, 26 bp, Homo sapiens
ctcttagtttgtttctctgccagagg

SEQ ID NO: 88222 - DNA, 26 bp, Homo sapiens
tcttagtttgtttctctgccagaggc

SEQ ID NO: 88223 - DNA, 26 bp, Homo sapiens
cttagtttgtttctctgccagaggct

SEQ ID NO: 88224 - DNA, 26 bp, Homo sapiens
ttagtttgtttctctgccagaggctg

SEQ ID NO: 88225 - DNA, 26 bp, Homo sapiens
tagtttgtttctctgccagaggctgg

SEQ ID NO: 88226 - DNA, 26 bp, Homo sapiens
agtttgtttctctgccagaggctgga

SEQ ID NO: 88227 - DNA, 26 bp, Homo sapiens
gtttgtttctctgccagaggctggac

SEQ ID NO: 88228 - DNA, 26 bp, Homo sapiens
tttgtttctctgccagaggctggaca

SEQ ID NO: 88229 - DNA, 26 bp, Homo sapiens
ttgtttctctgccagaggctggacag

SEQ ID NO: 88230 - DNA, 26 bp, Homo sapiens
tgtttctctgccagaggctggacagg

SEQ ID NO: 88231 - DNA, 26 bp, Homo sapiens
gtttctctgccagaggctggacaggt

SEQ ID NO: 88232 - DNA, 26 bp, Homo sapiens
tttctctgccagaggctggacaggtg

SEQ ID NO: 88233 - DNA, 26 bp, Homo sapiens
ttctctgccagaggctggacaggtgt

SEQ ID NO: 88234 - DNA, 26 bp, Homo sapiens
tctctgccagaggctggacaggtgtt

SEQ ID NO: 88235 - DNA, 26 bp, Homo sapiens
ctctgccagaggctggacaggtgttg

SEQ ID NO: 88236 - DNA, 26 bp, Homo sapiens
tctgccagaggctggacaggtgttga

SEQ ID NO: 88237 - DNA, 26 bp, Homo sapiens
ctgccagaggctggacaggtgttgac

SEQ ID NO: 88238 - DNA, 26 bp, Homo sapiens
tgccagaggctggacaggtgttgacc

SEQ ID NO: 88239 - DNA, 26 bp, Homo sapiens
gccagaggctggacaggtgttgacct

SEQ ID NO: 88240 - DNA, 26 bp, Homo sapiens
ccagaggctggacaggtgttgacctg

SEQ ID NO: 88241 - DNA, 26 bp, Homo sapiens
cagaggctggacaggtgttgacctgt

SEQ ID NO: 88242 - DNA, 26 bp, Homo sapiens
agaggctggacaggtgttgacctgtt

SEQ ID NO: 88243 - DNA, 26 bp, Homo sapiens
gaggctggacaggtgttgacctgtta

SEQ ID NO: 88244 - DNA, 26 bp, Homo sapiens
aggctggacaggtgttgacctgttat

SEQ ID NO: 88245 - DNA, 26 bp, Homo sapiens
ggctggacaggtgttgacctgttatc

SEQ ID NO: 88246 - DNA, 26 bp, Homo sapiens
gctggacaggtgttgacctgttatcc

SEQ ID NO: 88247 - DNA, 26 bp, Homo sapiens
ctggacaggtgttgacctgttatcct

SEQ ID NO: 88248 - DNA, 26 bp, Homo sapiens
tggacaggtgttgacctgttatcctg

SEQ ID NO: 88249 - DNA, 26 bp, Homo sapiens
ggacaggtgttgacctgttatcctga

SEQ ID NO: 88250 - DNA, 26 bp, Homo sapiens
gacaggtgttgacctgttatcctgag

SEQ ID NO: 88251 - DNA, 26 bp, Homo sapiens
acaggtgttgacctgttatcctgagg

SEQ ID NO: 88252 - DNA, 26 bp, Homo sapiens
caggtgttgacctgttatcctgaggt

SEQ ID NO: 88253 - DNA, 26 bp, Homo sapiens
aggtgttgacctgttatcctgaggtc

SEQ ID NO: 88254 - DNA, 26 bp, Homo sapiens
ggtgttgacctgttatcctgaggtct

SEQ ID NO: 88255 - DNA, 26 bp, Homo sapiens
gtgttgacctgttatcctgaggtctc

SEQ ID NO: 88256 - DNA, 26 bp, Homo sapiens
tgttgacctgttatcctgaggtctcc

SEQ ID NO: 88257 - DNA, 26 bp, Homo sapiens
gttgacctgttatcctgaggtctcct

SEQ ID NO: 88258 - DNA, 26 bp, Homo sapiens
ttgacctgttatcctgaggtctcctc

SEQ ID NO: 88259 - DNA, 26 bp, Homo sapiens
tgacctgttatcctgaggtctcctcg

SEQ ID NO: 88260 - DNA, 26 bp, Homo sapiens
gacctgttatcctgaggtctcctcga

SEQ ID NO: 88261 - DNA, 26 bp, Homo sapiens
acctgttatcctgaggtctcctcgag

SEQ ID NO: 88262 - DNA, 26 bp, Homo sapiens
cctgttatcctgaggtctcctcgagg

SEQ ID NO: 88263 - DNA, 26 bp, Homo sapiens
ctgttatcctgaggtctcctcgaggc

SEQ ID NO: 88264 - DNA, 26 bp, Homo sapiens
tgttatcctgaggtctcctcgaggcg

SEQ ID NO: 88265 - DNA, 26 bp, Homo sapiens
gttatcctgaggtctcctcgaggcgt

SEQ ID NO: 88266 - DNA, 26 bp, Homo sapiens
ttatcctgaggtctcctcgaggcgtg

SEQ ID NO: 88267 - DNA, 26 bp, Homo sapiens
tatcctgaggtctcctcgaggcgtgt

SEQ ID NO: 88268 - DNA, 26 bp, Homo sapiens
atcctgaggtctcctcgaggcgtgtt

SEQ ID NO: 88269 - DNA, 26 bp, Homo sapiens
tcctgaggtctcctcgaggcgtgttc

SEQ ID NO: 88270 - DNA, 26 bp, Homo sapiens
cctgaggtctcctcgaggcgtgttca

SEQ ID NO: 88271 - DNA, 26 bp, Homo sapiens
ctgaggtctcctcgaggcgtgttcac

SEQ ID NO: 88272 - DNA, 26 bp, Homo sapiens
tgaggtctcctcgaggcgtgttcacc

SEQ ID NO: 88273 - DNA, 26 bp, Homo sapiens
gaggtctcctcgaggcgtgttcaccc

SEQ ID NO: 88274 - DNA, 26 bp, Homo sapiens
aggtctcctcgaggcgtgttcaccca

SEQ ID NO: 88275 - DNA, 26 bp, Homo sapiens
ggtctcctcgaggcgtgttcacccaa

SEQ ID NO: 88276 - DNA, 26 bp, Homo sapiens
gtctcctcgaggcgtgttcacccaat

SEQ ID NO: 88277 - DNA, 26 bp, Homo sapiens
tctcctcgaggcgtgttcacccaatt

SEQ ID NO: 88278 - DNA, 26 bp, Homo sapiens
ctcctcgaggcgtgttcacccaattt

SEQ ID NO: 88279 - DNA, 26 bp, Homo sapiens
tcctcgaggcgtgttcacccaatttg

SEQ ID NO: 88280 - DNA, 26 bp, Homo sapiens
cctcgaggcgtgttcacccaatttgg

SEQ ID NO: 88281 - DNA, 26 bp, Homo sapiens
ctcgaggcgtgttcacccaatttggt

SEQ ID NO: 88282 - DNA, 26 bp, Homo sapiens
tcgaggcgtgttcacccaatttggtc

SEQ ID NO: 88283 - DNA, 26 bp, Homo sapiens
cgaggcgtgttcacccaatttggtct

SEQ ID NO: 88284 - DNA, 26 bp, Homo sapiens
gaggcgtgttcacccaatttggtctc

SEQ ID NO: 88285 - DNA, 26 bp, Homo sapiens
aggcgtgttcacccaatttggtctcc

SEQ ID NO: 88286 - DNA, 26 bp, Homo sapiens
ggcgtgttcacccaatttggtctcct

SEQ ID NO: 88287 - DNA, 26 bp, Homo sapiens
gcgtgttcacccaatttggtctcctt

SEQ ID NO: 88288 - DNA, 26 bp, Homo sapiens
cgtgttcacccaatttggtctcctta

SEQ ID NO: 88289 - DNA, 26 bp, Homo sapiens
gtgttcacccaatttggtctccttat

SEQ ID NO: 88290 - DNA, 26 bp, Homo sapiens
tgttcacccaatttggtctccttatg

SEQ ID NO: 88291 - DNA, 26 bp, Homo sapiens
gttcacccaatttggtctccttatgg

SEQ ID NO: 88292 - DNA, 26 bp, Homo sapiens
ttcacccaatttggtctccttatggg

SEQ ID NO: 88293 - DNA, 26 bp, Homo sapiens
tcacccaatttggtctccttatggga

SEQ ID NO: 88294 - DNA, 26 bp, Homo sapiens
cacccaatttggtctccttatgggaa

SEQ ID NO: 88295 - DNA, 26 bp, Homo sapiens
acccaatttggtctccttatgggaag

SEQ ID NO: 88296 - DNA, 26 bp, Homo sapiens
cccaatttggtctccttatgggaagg

SEQ ID NO: 88297 - DNA, 26 bp, Homo sapiens
ccaatttggtctccttatgggaagga

SEQ ID NO: 88298 - DNA, 26 bp, Homo sapiens
caatttggtctccttatgggaaggat

SEQ ID NO: 88299 - DNA, 26 bp, Homo sapiens
aatttggtctccttatgggaaggatg

SEQ ID NO: 88300 - DNA, 26 bp, Homo sapiens
atttggtctccttatgggaaggatgt

SEQ ID NO: 88301 - DNA, 26 bp, Homo sapiens
tttggtctccttatgggaaggatgtt

SEQ ID NO: 88302 - DNA, 26 bp, Homo sapiens
ttggtctccttatgggaaggatgttc

SEQ ID NO: 88303 - DNA, 26 bp, Homo sapiens
tggtctccttatgggaaggatgttca

SEQ ID NO: 88304 - DNA, 26 bp, Homo sapiens
ggtctccttatgggaaggatgttcac

SEQ ID NO: 88305 - DNA, 26 bp, Homo sapiens
gtctccttatgggaaggatgttcaca

SEQ ID NO: 88306 - DNA, 26 bp, Homo sapiens
tctccttatgggaaggatgttcacag

SEQ ID NO: 88307 - DNA, 26 bp, Homo sapiens
ctccttatgggaaggatgttcacaga

SEQ ID NO: 88308 - DNA, 26 bp, Homo sapiens
tccttatgggaaggatgttcacagag

SEQ ID NO: 88309 - DNA, 26 bp, Homo sapiens
ccttatgggaaggatgttcacagagg

SEQ ID NO: 88310 - DNA, 26 bp, Homo sapiens
cttatgggaaggatgttcacagaggc

SEQ ID NO: 88311 - DNA, 26 bp, Homo sapiens
ttatgggaaggatgttcacagaggct

SEQ ID NO: 88312 - DNA, 26 bp, Homo sapiens
tatgggaaggatgttcacagaggctt

SEQ ID NO: 88313 - DNA, 26 bp, Homo sapiens
atgggaaggatgttcacagaggcttg

SEQ ID NO: 88314 - DNA, 26 bp, Homo sapiens
tgggaaggatgttcacagaggcttgc

SEQ ID NO: 88315 - DNA, 26 bp, Homo sapiens
gggaaggatgttcacagaggcttgca

SEQ ID NO: 88316 - DNA, 26 bp, Homo sapiens
ggaaggatgttcacagaggcttgcag

SEQ ID NO: 88317 - DNA, 26 bp, Homo sapiens
gaaggatgttcacagaggcttgcagg

SEQ ID NO: 88318 - DNA, 26 bp, Homo sapiens
aaggatgttcacagaggcttgcagga

SEQ ID NO: 88319 - DNA, 26 bp, Homo sapiens
aggatgttcacagaggcttgcaggag

SEQ ID NO: 88320 - DNA, 26 bp, Homo sapiens
ggatgttcacagaggcttgcaggaga

SEQ ID NO: 88321 - DNA, 26 bp, Homo sapiens
gatgttcacagaggcttgcaggagaa

SEQ ID NO: 88322 - DNA, 26 bp, Homo sapiens
atgttcacagaggcttgcaggagaag

SEQ ID NO: 88323 - DNA, 26 bp, Homo sapiens
tgttcacagaggcttgcaggagaagt

SEQ ID NO: 88324 - DNA, 26 bp, Homo sapiens
gttcacagaggcttgcaggagaagta

SEQ ID NO: 88325 - DNA, 26 bp, Homo sapiens
ttcacagaggcttgcaggagaagtac

SEQ ID NO: 88326 - DNA, 26 bp, Homo sapiens
tcacagaggcttgcaggagaagtact

SEQ ID NO: 88327 - DNA, 26 bp, Homo sapiens
cacagaggcttgcaggagaagtactg

SEQ ID NO: 88328 - DNA, 26 bp, Homo sapiens
acagaggcttgcaggagaagtactga

SEQ ID NO: 88329 - DNA, 26 bp, Homo sapiens
cagaggcttgcaggagaagtactgaa

SEQ ID NO: 88330 - DNA, 26 bp, Homo sapiens
agaggcttgcaggagaagtactgaaa

SEQ ID NO: 88331 - DNA, 26 bp, Homo sapiens
gaggcttgcaggagaagtactgaaaa

SEQ ID NO: 88332 - DNA, 26 bp, Homo sapiens
aggcttgcaggagaagtactgaaaat

SEQ ID NO: 88333 - DNA, 26 bp, Homo sapiens
ggcttgcaggagaagtactgaaaatc

SEQ ID NO: 88334 - DNA, 26 bp, Homo sapiens
gcttgcaggagaagtactgaaaatct

SEQ ID NO: 88335 - DNA, 26 bp, Homo sapiens
cttgcaggagaagtactgaaaatctg

SEQ ID NO: 88336 - DNA, 26 bp, Homo sapiens
ttgcaggagaagtactgaaaatctgc

SEQ ID NO: 88337 - DNA, 26 bp, Homo sapiens
tgcaggagaagtactgaaaatctgcg

SEQ ID NO: 88338 - DNA, 26 bp, Homo sapiens
gcaggagaagtactgaaaatctgcga

SEQ ID NO: 88339 - DNA, 26 bp, Homo sapiens
caggagaagtactgaaaatctgcgag

SEQ ID NO: 88340 - DNA, 26 bp, Homo sapiens
aggagaagtactgaaaatctgcgaga

SEQ ID NO: 88341 - DNA, 26 bp, Homo sapiens
ggagaagtactgaaaatctgcgagat

SEQ ID NO: 88342 - DNA, 26 bp, Homo sapiens
gagaagtactgaaaatctgcgagatc

SEQ ID NO: 88343 - DNA, 26 bp, Homo sapiens
agaagtactgaaaatctgcgagatct

SEQ ID NO: 88344 - DNA, 26 bp, Homo sapiens
gaagtactgaaaatctgcgagatctc

SEQ ID NO: 88345 - DNA, 26 bp, Homo sapiens
aagtactgaaaatctgcgagatctcc

SEQ ID NO: 88346 - DNA, 26 bp, Homo sapiens
agtactgaaaatctgcgagatctcct

SEQ ID NO: 88347 - DNA, 26 bp, Homo sapiens
gtactgaaaatctgcgagatctcctt

SEQ ID NO: 88348 - DNA, 26 bp, Homo sapiens
tactgaaaatctgcgagatctccttt

SEQ ID NO: 88349 - DNA, 26 bp, Homo sapiens
actgaaaatctgcgagatctcctttt

SEQ ID NO: 88350 - DNA, 26 bp, Homo sapiens
ctgaaaatctgcgagatctccttttc

SEQ ID NO: 88351 - DNA, 26 bp, Homo sapiens
tgaaaatctgcgagatctccttttcc

SEQ ID NO: 88352 - DNA, 26 bp, Homo sapiens
gaaaatctgcgagatctccttttccg

SEQ ID NO: 88353 - DNA, 26 bp, Homo sapiens
aaaatctgcgagatctccttttccga

SEQ ID NO: 88354 - DNA, 26 bp, Homo sapiens
aaatctgcgagatctccttttccgag

SEQ ID NO: 88355 - DNA, 26 bp, Homo sapiens
aatctgcgagatctccttttccgagt

SEQ ID NO: 88356 - DNA, 26 bp, Homo sapiens
atctgcgagatctccttttccgagtc

SEQ ID NO: 88357 - DNA, 26 bp, Homo sapiens
tctgcgagatctccttttccgagtca

SEQ ID NO: 88358 - DNA, 26 bp, Homo sapiens
ctgcgagatctccttttccgagtcaa

SEQ ID NO: 88359 - DNA, 26 bp, Homo sapiens
tgcgagatctccttttccgagtcaaa

SEQ ID NO: 88360 - DNA, 26 bp, Homo sapiens
gcgagatctccttttccgagtcaaaa

SEQ ID NO: 88361 - DNA, 26 bp, Homo sapiens
cgagatctccttttccgagtcaaaat

SEQ ID NO: 88362 - DNA, 26 bp, Homo sapiens
gagatctccttttccgagtcaaaatc

SEQ ID NO: 88363 - DNA, 26 bp, Homo sapiens
agatctccttttccgagtcaaaatct

SEQ ID NO: 88364 - DNA, 26 bp, Homo sapiens
gatctccttttccgagtcaaaatctt

SEQ ID NO: 88365 - DNA, 26 bp, Homo sapiens
atctccttttccgagtcaaaatcttc

SEQ ID NO: 88366 - DNA, 26 bp, Homo sapiens
tctccttttccgagtcaaaatcttct

SEQ ID NO: 88367 - DNA, 26 bp, Homo sapiens
ctccttttccgagtcaaaatcttctg

SEQ ID NO: 88368 - DNA, 26 bp, Homo sapiens
tccttttccgagtcaaaatcttctgt

SEQ ID NO: 88369 - DNA, 26 bp, Homo sapiens
ccttttccgagtcaaaatcttctgtt

SEQ ID NO: 88370 - DNA, 26 bp, Homo sapiens
cttttccgagtcaaaatcttctgttt

SEQ ID NO: 88371 - DNA, 26 bp, Homo sapiens
ttttccgagtcaaaatcttctgtttc

SEQ ID NO: 88372 - DNA, 26 bp, Homo sapiens
tttccgagtcaaaatcttctgtttcg

SEQ ID NO: 88373 - DNA, 26 bp, Homo sapiens
ttccgagtcaaaatcttctgtttcgg

SEQ ID NO: 88374 - DNA, 26 bp, Homo sapiens
tccgagtcaaaatcttctgtttcgga

SEQ ID NO: 88375 - DNA, 26 bp, Homo sapiens
ccgagtcaaaatcttctgtttcggag

SEQ ID NO: 88376 - DNA, 26 bp, Homo sapiens
cgagtcaaaatcttctgtttcggagt

SEQ ID NO: 88377 - DNA, 26 bp, Homo sapiens
gagtcaaaatcttctgtttcggagtc

SEQ ID NO: 88378 - DNA, 26 bp, Homo sapiens
agtcaaaatcttctgtttcggagtcg

SEQ ID NO: 88379 - DNA, 26 bp, Homo sapiens
gtcaaaatcttctgtttcggagtcgg

SEQ ID NO: 88380 - DNA, 26 bp, Homo sapiens
tcaaaatcttctgtttcggagtcggc

SEQ ID NO: 88381 - DNA, 26 bp, Homo sapiens
caaaatcttctgtttcggagtcggct

SEQ ID NO: 88382 - DNA, 26 bp, Homo sapiens
aaaatcttctgtttcggagtcggcta

SEQ ID NO: 88383 - DNA, 26 bp, Homo sapiens
aaatcttctgtttcggagtcggctat

SEQ ID NO: 88384 - DNA, 26 bp, Homo sapiens
aatcttctgtttcggagtcggctatg

SEQ ID NO: 88385 - DNA, 26 bp, Homo sapiens
atcttctgtttcggagtcggctatgg

SEQ ID NO: 88386 - DNA, 26 bp, Homo sapiens
tcttctgtttcggagtcggctatggc

SEQ ID NO: 88387 - DNA, 26 bp, Homo sapiens
cttctgtttcggagtcggctatggct

SEQ ID NO: 88388 - DNA, 26 bp, Homo sapiens
ttctgtttcggagtcggctatggctc

SEQ ID NO: 88389 - DNA, 26 bp, Homo sapiens
tctgtttcggagtcggctatggctct

SEQ ID NO: 88390 - DNA, 26 bp, Homo sapiens
ctgtttcggagtcggctatggctctc

SEQ ID NO: 88391 - DNA, 26 bp, Homo sapiens
tgtttcggagtcggctatggctctcc

SEQ ID NO: 88392 - DNA, 26 bp, Homo sapiens
gtttcggagtcggctatggctctccg

SEQ ID NO: 88393 - DNA, 26 bp, Homo sapiens
tttcggagtcggctatggctctccgg

SEQ ID NO: 88394 - DNA, 26 bp, Homo sapiens
ttcggagtcggctatggctctccggg

SEQ ID NO: 88395 - DNA, 26 bp, Homo sapiens
tcggagtcggctatggctctccgggc

SEQ ID NO: 88396 - DNA, 26 bp, Homo sapiens
cggagtcggctatggctctccgggcc

SEQ ID NO: 88397 - DNA, 26 bp, Homo sapiens
ggagtcggctatggctctccgggcca

SEQ ID NO: 88398 - DNA, 26 bp, Homo sapiens
gagtcggctatggctctccgggccag

SEQ ID NO: 88399 - DNA, 26 bp, Homo sapiens
agtcggctatggctctccgggccagg

SEQ ID NO: 88400 - DNA, 26 bp, Homo sapiens
gtcggctatggctctccgggccaggt

SEQ ID NO: 88401 - DNA, 26 bp, Homo sapiens
tcggctatggctctccgggccaggtc

SEQ ID NO: 88402 - DNA, 26 bp, Homo sapiens
cggctatggctctccgggccaggtca

SEQ ID NO: 88403 - DNA, 26 bp, Homo sapiens
ggctatggctctccgggccaggtcaa

SEQ ID NO: 88404 - DNA, 26 bp, Homo sapiens
gctatggctctccgggccaggtcaag

SEQ ID NO: 88405 - DNA, 26 bp, Homo sapiens
ctatggctctccgggccaggtcaaga

SEQ ID NO: 88406 - DNA, 26 bp, Homo sapiens
tatggctctccgggccaggtcaagac

SEQ ID NO: 88407 - DNA, 26 bp, Homo sapiens
atggctctccgggccaggtcaagact

SEQ ID NO: 88408 - DNA, 26 bp, Homo sapiens
tggctctccgggccaggtcaagactc

SEQ ID NO: 88409 - DNA, 26 bp, Homo sapiens
ggctctccgggccaggtcaagactct

SEQ ID NO: 88410 - DNA, 26 bp, Homo sapiens
gctctccgggccaggtcaagactctt

SEQ ID NO: 88411 - DNA, 26 bp, Homo sapiens
ctctccgggccaggtcaagactcttg

SEQ ID NO: 88412 - DNA, 26 bp, Homo sapiens
tctccgggccaggtcaagactcttgt

SEQ ID NO: 88413 - DNA, 26 bp, Homo sapiens
ctccgggccaggtcaagactcttgtt

SEQ ID NO: 88414 - DNA, 26 bp, Homo sapiens
tccgggccaggtcaagactcttgttt

SEQ ID NO: 88415 - DNA, 26 bp, Homo sapiens
ccgggccaggtcaagactcttgttta

SEQ ID NO: 88416 - DNA, 26 bp, Homo sapiens
cgggccaggtcaagactcttgtttat

SEQ ID NO: 88417 - DNA, 26 bp, Homo sapiens
gggccaggtcaagactcttgtttatc

SEQ ID NO: 88418 - DNA, 26 bp, Homo sapiens
ggccaggtcaagactcttgtttatct

SEQ ID NO: 88419 - DNA, 26 bp, Homo sapiens
gccaggtcaagactcttgtttatctc

SEQ ID NO: 88420 - DNA, 26 bp, Homo sapiens
ccaggtcaagactcttgtttatctct

SEQ ID NO: 88421 - DNA, 26 bp, Homo sapiens
caggtcaagactcttgtttatctctt

SEQ ID NO: 88422 - DNA, 26 bp, Homo sapiens
aggtcaagactcttgtttatctcttc

SEQ ID NO: 88423 - DNA, 26 bp, Homo sapiens
ggtcaagactcttgtttatctcttcc

SEQ ID NO: 88424 - DNA, 26 bp, Homo sapiens
gtcaagactcttgtttatctcttcct

SEQ ID NO: 88425 - DNA, 26 bp, Homo sapiens
tcaagactcttgtttatctcttcctg

SEQ ID NO: 88426 - DNA, 26 bp, Homo sapiens
caagactcttgtttatctcttcctgg

SEQ ID NO: 88427 - DNA, 26 bp, Homo sapiens
aagactcttgtttatctcttcctggc

SEQ ID NO: 88428 - DNA, 26 bp, Homo sapiens
agactcttgtttatctcttcctggct

SEQ ID NO: 88429 - DNA, 26 bp, Homo sapiens
gactcttgtttatctcttcctggctg

SEQ ID NO: 88430 - DNA, 26 bp, Homo sapiens
actcttgtttatctcttcctggctga

SEQ ID NO: 88431 - DNA, 26 bp, Homo sapiens
ctcttgtttatctcttcctggctgag

SEQ ID NO: 88432 - DNA, 26 bp, Homo sapiens
tcttgtttatctcttcctggctgagg

SEQ ID NO: 88433 - DNA, 26 bp, Homo sapiens
cttgtttatctcttcctggctgagga

SEQ ID NO: 88434 - DNA, 26 bp, Homo sapiens
ttgtttatctcttcctggctgaggaa

SEQ ID NO: 88435 - DNA, 26 bp, Homo sapiens
tgtttatctcttcctggctgaggaaa

SEQ ID NO: 88436 - DNA, 26 bp, Homo sapiens
gtttatctcttcctggctgaggaaag

SEQ ID NO: 88437 - DNA, 26 bp, Homo sapiens
tttatctcttcctggctgaggaaagc

SEQ ID NO: 88438 - DNA, 26 bp, Homo sapiens
ttatctcttcctggctgaggaaagca

SEQ ID NO: 88439 - DNA, 26 bp, Homo sapiens
tatctcttcctggctgaggaaagcag

SEQ ID NO: 88440 - DNA, 26 bp, Homo sapiens
atctcttcctggctgaggaaagcaga

SEQ ID NO: 88441 - DNA, 26 bp, Homo sapiens
tctcttcctggctgaggaaagcagaa

SEQ ID NO: 88442 - DNA, 26 bp, Homo sapiens
ctcttcctggctgaggaaagcagaaa

SEQ ID NO: 88443 - DNA, 26 bp, Homo sapiens
tcttcctggctgaggaaagcagaaag

SEQ ID NO: 88444 - DNA, 26 bp, Homo sapiens
cttcctggctgaggaaagcagaaagg

SEQ ID NO: 88445 - DNA, 26 bp, Homo sapiens
ttcctggctgaggaaagcagaaaggc

SEQ ID NO: 88446 - DNA, 26 bp, Homo sapiens
tcctggctgaggaaagcagaaaggcc

SEQ ID NO: 88447 - DNA, 26 bp, Homo sapiens
cctggctgaggaaagcagaaaggccc

SEQ ID NO: 88448 - DNA, 26 bp, Homo sapiens
ctggctgaggaaagcagaaaggcccg

SEQ ID NO: 88449 - DNA, 26 bp, Homo sapiens
tggctgaggaaagcagaaaggcccgg

SEQ ID NO: 88450 - DNA, 26 bp, Homo sapiens
ggctgaggaaagcagaaaggcccggg

SEQ ID NO: 88451 - DNA, 26 bp, Homo sapiens
gctgaggaaagcagaaaggcccggga

SEQ ID NO: 88452 - DNA, 26 bp, Homo sapiens
ctgaggaaagcagaaaggcccgggaa

SEQ ID NO: 88453 - DNA, 26 bp, Homo sapiens
tgaggaaagcagaaaggcccgggaag

SEQ ID NO: 88454 - DNA, 26 bp, Homo sapiens
gaggaaagcagaaaggcccgggaaga

SEQ ID NO: 88455 - DNA, 26 bp, Homo sapiens
aggaaagcagaaaggcccgggaagaa

SEQ ID NO: 88456 - DNA, 26 bp, Homo sapiens
ggaaagcagaaaggcccgggaagaag

SEQ ID NO: 88457 - DNA, 26 bp, Homo sapiens
gaaagcagaaaggcccgggaagaagt

SEQ ID NO: 88458 - DNA, 26 bp, Homo sapiens
aaagcagaaaggcccgggaagaagtc

SEQ ID NO: 88459 - DNA, 26 bp, Homo sapiens
aagcagaaaggcccgggaagaagtca

SEQ ID NO: 88460 - DNA, 26 bp, Homo sapiens
agcagaaaggcccgggaagaagtcag

SEQ ID NO: 88461 - DNA, 26 bp, Homo sapiens
gcagaaaggcccgggaagaagtcagt

SEQ ID NO: 88462 - DNA, 26 bp, Homo sapiens
cagaaaggcccgggaagaagtcagta

SEQ ID NO: 88463 - DNA, 26 bp, Homo sapiens
agaaaggcccgggaagaagtcagtat

SEQ ID NO: 88464 - DNA, 26 bp, Homo sapiens
gaaaggcccgggaagaagtcagtatt

SEQ ID NO: 88465 - DNA, 26 bp, Homo sapiens
aaaggcccgggaagaagtcagtattc

SEQ ID NO: 88466 - DNA, 26 bp, Homo sapiens
aaggcccgggaagaagtcagtattct

SEQ ID NO: 88467 - DNA, 26 bp, Homo sapiens
aggcccgggaagaagtcagtattctt

SEQ ID NO: 88468 - DNA, 26 bp, Homo sapiens
ggcccgggaagaagtcagtattcttg

SEQ ID NO: 88469 - DNA, 26 bp, Homo sapiens
gcccgggaagaagtcagtattcttgc

SEQ ID NO: 88470 - DNA, 26 bp, Homo sapiens
cccgggaagaagtcagtattcttgct

SEQ ID NO: 88471 - DNA, 26 bp, Homo sapiens
ccgggaagaagtcagtattcttgctt

SEQ ID NO: 88472 - DNA, 26 bp, Homo sapiens
cgggaagaagtcagtattcttgcttt

SEQ ID NO: 88473 - DNA, 26 bp, Homo sapiens
gggaagaagtcagtattcttgctttc

SEQ ID NO: 88474 - DNA, 26 bp, Homo sapiens
ggaagaagtcagtattcttgctttct

SEQ ID NO: 88475 - DNA, 26 bp, Homo sapiens
gaagaagtcagtattcttgctttctt

SEQ ID NO: 88476 - DNA, 26 bp, Homo sapiens
aagaagtcagtattcttgctttcttc

SEQ ID NO: 88477 - DNA, 26 bp, Homo sapiens
agaagtcagtattcttgctttcttcc

SEQ ID NO: 88478 - DNA, 26 bp, Homo sapiens
gaagtcagtattcttgctttcttcct

SEQ ID NO: 88479 - DNA, 26 bp, Homo sapiens
aagtcagtattcttgctttcttcctg

SEQ ID NO: 88480 - DNA, 26 bp, Homo sapiens
agtcagtattcttgctttcttcctgc

SEQ ID NO: 88481 - DNA, 26 bp, Homo sapiens
gtcagtattcttgctttcttcctgca

SEQ ID NO: 88482 - DNA, 26 bp, Homo sapiens
tcagtattcttgctttcttcctgcat

SEQ ID NO: 88483 - DNA, 26 bp, Homo sapiens
cagtattcttgctttcttcctgcatg

SEQ ID NO: 88484 - DNA, 26 bp, Homo sapiens
agtattcttgctttcttcctgcatgt

SEQ ID NO: 88485 - DNA, 26 bp, Homo sapiens
gtattcttgctttcttcctgcatgtc

SEQ ID NO: 88486 - DNA, 26 bp, Homo sapiens
tattcttgctttcttcctgcatgtct

SEQ ID NO: 88487 - DNA, 26 bp, Homo sapiens
attcttgctttcttcctgcatgtctg

SEQ ID NO: 88488 - DNA, 26 bp, Homo sapiens
ttcttgctttcttcctgcatgtctga

SEQ ID NO: 88489 - DNA, 26 bp, Homo sapiens
tcttgctttcttcctgcatgtctgag

SEQ ID NO: 88490 - DNA, 26 bp, Homo sapiens
cttgctttcttcctgcatgtctgaga

SEQ ID NO: 88491 - DNA, 26 bp, Homo sapiens
ttgctttcttcctgcatgtctgagag

SEQ ID NO: 88492 - DNA, 26 bp, Homo sapiens
tgctttcttcctgcatgtctgagagg

SEQ ID NO: 88493 - DNA, 26 bp, Homo sapiens
gctttcttcctgcatgtctgagaggg

SEQ ID NO: 88494 - DNA, 26 bp, Homo sapiens
ctttcttcctgcatgtctgagaggga

SEQ ID NO: 88495 - DNA, 26 bp, Homo sapiens
tttcttcctgcatgtctgagagggag

SEQ ID NO: 88496 - DNA, 26 bp, Homo sapiens
ttcttcctgcatgtctgagagggagt

SEQ ID NO: 88497 - DNA, 26 bp, Homo sapiens
tcttcctgcatgtctgagagggagtc

SEQ ID NO: 88498 - DNA, 26 bp, Homo sapiens
cttcctgcatgtctgagagggagtca

SEQ ID NO: 88499 - DNA, 26 bp, Homo sapiens
ttcctgcatgtctgagagggagtcat

SEQ ID NO: 88500 - DNA, 26 bp, Homo sapiens
tcctgcatgtctgagagggagtcata

SEQ ID NO: 88501 - DNA, 26 bp, Homo sapiens
cctgcatgtctgagagggagtcatag

SEQ ID NO: 88502 - DNA, 26 bp, Homo sapiens
ctgcatgtctgagagggagtcataga

SEQ ID NO: 88503 - DNA, 26 bp, Homo sapiens
tgcatgtctgagagggagtcatagaa

SEQ ID NO: 88504 - DNA, 26 bp, Homo sapiens
gcatgtctgagagggagtcatagaag

SEQ ID NO: 88505 - DNA, 26 bp, Homo sapiens
catgtctgagagggagtcatagaagg

SEQ ID NO: 88506 - DNA, 26 bp, Homo sapiens
atgtctgagagggagtcatagaagga

SEQ ID NO: 88507 - DNA, 26 bp, Homo sapiens
tgtctgagagggagtcatagaaggac

SEQ ID NO: 88508 - DNA, 26 bp, Homo sapiens
gtctgagagggagtcatagaaggact

SEQ ID NO: 88509 - DNA, 26 bp, Homo sapiens
tctgagagggagtcatagaaggactc

SEQ ID NO: 88510 - DNA, 26 bp, Homo sapiens
ctgagagggagtcatagaaggactca

SEQ ID NO: 88511 - DNA, 26 bp, Homo sapiens
tgagagggagtcatagaaggactcat

SEQ ID NO: 88512 - DNA, 26 bp, Homo sapiens
gagagggagtcatagaaggactcatg

SEQ ID NO: 88513 - DNA, 26 bp, Homo sapiens
agagggagtcatagaaggactcatgg

SEQ ID NO: 88514 - DNA, 26 bp, Homo sapiens
gagggagtcatagaaggactcatggg

SEQ ID NO: 88515 - DNA, 26 bp, Homo sapiens
agggagtcatagaaggactcatggga

SEQ ID NO: 88516 - DNA, 26 bp, Homo sapiens
gggagtcatagaaggactcatgggag

SEQ ID NO: 88517 - DNA, 26 bp, Homo sapiens
ggagtcatagaaggactcatgggagg

SEQ ID NO: 88518 - DNA, 26 bp, Homo sapiens
gagtcatagaaggactcatgggagga

SEQ ID NO: 88519 - DNA, 26 bp, Homo sapiens
agtcatagaaggactcatgggaggag

SEQ ID NO: 88520 - DNA, 26 bp, Homo sapiens
gtcatagaaggactcatgggaggagg

SEQ ID NO: 88521 - DNA, 26 bp, Homo sapiens
tcatagaaggactcatgggaggaggt

SEQ ID NO: 88522 - DNA, 26 bp, Homo sapiens
catagaaggactcatgggaggaggtc

SEQ ID NO: 88523 - DNA, 26 bp, Homo sapiens
atagaaggactcatgggaggaggtcc

SEQ ID NO: 88524 - DNA, 26 bp, Homo sapiens
tagaaggactcatgggaggaggtccc

SEQ ID NO: 88525 - DNA, 26 bp, Homo sapiens
agaaggactcatgggaggaggtccct

SEQ ID NO: 88526 - DNA, 26 bp, Homo sapiens
gaaggactcatgggaggaggtccctg

SEQ ID NO: 88527 - DNA, 26 bp, Homo sapiens
aaggactcatgggaggaggtccctga

SEQ ID NO: 88528 - DNA, 26 bp, Homo sapiens
aggactcatgggaggaggtccctgac

SEQ ID NO: 88529 - DNA, 26 bp, Homo sapiens
ggactcatgggaggaggtccctgaca

SEQ ID NO: 88530 - DNA, 26 bp, Homo sapiens
gactcatgggaggaggtccctgacat

SEQ ID NO: 88531 - DNA, 26 bp, Homo sapiens
actcatgggaggaggtccctgacata

SEQ ID NO: 88532 - DNA, 26 bp, Homo sapiens
ctcatgggaggaggtccctgacatat

SEQ ID NO: 88533 - DNA, 26 bp, Homo sapiens
tcatgggaggaggtccctgacatatt

SEQ ID NO: 88534 - DNA, 26 bp, Homo sapiens
catgggaggaggtccctgacatattt

SEQ ID NO: 88535 - DNA, 26 bp, Homo sapiens
atgggaggaggtccctgacatatttg

SEQ ID NO: 88536 - DNA, 26 bp, Homo sapiens
tgggaggaggtccctgacatatttga

SEQ ID NO: 88537 - DNA, 26 bp, Homo sapiens
gggaggaggtccctgacatatttgaa

SEQ ID NO: 88538 - DNA, 26 bp, Homo sapiens
ggaggaggtccctgacatatttgaac

SEQ ID NO: 88539 - DNA, 26 bp, Homo sapiens
gaggaggtccctgacatatttgaacg

SEQ ID NO: 88540 - DNA, 26 bp, Homo sapiens
aggaggtccctgacatatttgaacgg

SEQ ID NO: 88541 - DNA, 26 bp, Homo sapiens
ggaggtccctgacatatttgaacggt

SEQ ID NO: 88542 - DNA, 26 bp, Homo sapiens
gaggtccctgacatatttgaacggtc

SEQ ID NO: 88543 - DNA, 26 bp, Homo sapiens
aggtccctgacatatttgaacggtct

SEQ ID NO: 88544 - DNA, 26 bp, Homo sapiens
ggtccctgacatatttgaacggtctt

SEQ ID NO: 88545 - DNA, 26 bp, Homo sapiens
gtccctgacatatttgaacggtcttc

SEQ ID NO: 88546 - DNA, 26 bp, Homo sapiens
tccctgacatatttgaacggtcttca

SEQ ID NO: 88547 - DNA, 26 bp, Homo sapiens
ccctgacatatttgaacggtcttcat

SEQ ID NO: 88548 - DNA, 26 bp, Homo sapiens
cctgacatatttgaacggtcttcatg

SEQ ID NO: 88549 - DNA, 26 bp, Homo sapiens
ctgacatatttgaacggtcttcatgc

SEQ ID NO: 88550 - DNA, 26 bp, Homo sapiens
tgacatatttgaacggtcttcatgca

SEQ ID NO: 88551 - DNA, 26 bp, Homo sapiens
gacatatttgaacggtcttcatgcac

SEQ ID NO: 88552 - DNA, 26 bp, Homo sapiens
acatatttgaacggtcttcatgcact

SEQ ID NO: 88553 - DNA, 26 bp, Homo sapiens
catatttgaacggtcttcatgcactc

SEQ ID NO: 88554 - DNA, 26 bp, Homo sapiens
atatttgaacggtcttcatgcactct

SEQ ID NO: 88555 - DNA, 26 bp, Homo sapiens
tatttgaacggtcttcatgcactctg

SEQ ID NO: 88556 - DNA, 26 bp, Homo sapiens
atttgaacggtcttcatgcactctgt

SEQ ID NO: 88557 - DNA, 26 bp, Homo sapiens
tttgaacggtcttcatgcactctgtg

SEQ ID NO: 88558 - DNA, 26 bp, Homo sapiens
ttgaacggtcttcatgcactctgtgt

SEQ ID NO: 88559 - DNA, 26 bp, Homo sapiens
tgaacggtcttcatgcactctgtgtc

SEQ ID NO: 88560 - DNA, 26 bp, Homo sapiens
gaacggtcttcatgcactctgtgtct

SEQ ID NO: 88561 - DNA, 26 bp, Homo sapiens
aacggtcttcatgcactctgtgtctg

SEQ ID NO: 88562 - DNA, 26 bp, Homo sapiens
acggtcttcatgcactctgtgtctgc

SEQ ID NO: 88563 - DNA, 26 bp, Homo sapiens
cggtcttcatgcactctgtgtctgct

SEQ ID NO: 88564 - DNA, 26 bp, Homo sapiens
ggtcttcatgcactctgtgtctgctt

SEQ ID NO: 88565 - DNA, 26 bp, Homo sapiens
gtcttcatgcactctgtgtctgcttt

SEQ ID NO: 88566 - DNA, 26 bp, Homo sapiens
tcttcatgcactctgtgtctgctttc

SEQ ID NO: 88567 - DNA, 26 bp, Homo sapiens
cttcatgcactctgtgtctgctttca

SEQ ID NO: 88568 - DNA, 26 bp, Homo sapiens
ttcatgcactctgtgtctgctttcag

SEQ ID NO: 88569 - DNA, 26 bp, Homo sapiens
tcatgcactctgtgtctgctttcagt

SEQ ID NO: 88570 - DNA, 26 bp, Homo sapiens
catgcactctgtgtctgctttcagta

SEQ ID NO: 88571 - DNA, 26 bp, Homo sapiens
atgcactctgtgtctgctttcagtag

SEQ ID NO: 88572 - DNA, 26 bp, Homo sapiens
tgcactctgtgtctgctttcagtagg

SEQ ID NO: 88573 - DNA, 26 bp, Homo sapiens
gcactctgtgtctgctttcagtagga

SEQ ID NO: 88574 - DNA, 26 bp, Homo sapiens
cactctgtgtctgctttcagtaggaa

SEQ ID NO: 88575 - DNA, 26 bp, Homo sapiens
actctgtgtctgctttcagtaggaag

SEQ ID NO: 88576 - DNA, 26 bp, Homo sapiens
ctctgtgtctgctttcagtaggaagg

SEQ ID NO: 88577 - DNA, 26 bp, Homo sapiens
tctgtgtctgctttcagtaggaaggc

SEQ ID NO: 88578 - DNA, 26 bp, Homo sapiens
ctgtgtctgctttcagtaggaaggcc

SEQ ID NO: 88579 - DNA, 26 bp, Homo sapiens
tgtgtctgctttcagtaggaaggcca

SEQ ID NO: 88580 - DNA, 26 bp, Homo sapiens
gtgtctgctttcagtaggaaggccag

SEQ ID NO: 88581 - DNA, 26 bp, Homo sapiens
tgtctgctttcagtaggaaggccaga

SEQ ID NO: 88582 - DNA, 26 bp, Homo sapiens
gtctgctttcagtaggaaggccagag

SEQ ID NO: 88583 - DNA, 26 bp, Homo sapiens
tctgctttcagtaggaaggccagagg

SEQ ID NO: 88584 - DNA, 26 bp, Homo sapiens
ctgctttcagtaggaaggccagaggc

SEQ ID NO: 88585 - DNA, 26 bp, Homo sapiens
tgctttcagtaggaaggccagaggca

SEQ ID NO: 88586 - DNA, 26 bp, Homo sapiens
gctttcagtaggaaggccagaggcac

SEQ ID NO: 88587 - DNA, 26 bp, Homo sapiens
ctttcagtaggaaggccagaggcact

SEQ ID NO: 88588 - DNA, 26 bp, Homo sapiens
tttcagtaggaaggccagaggcactg

SEQ ID NO: 88589 - DNA, 26 bp, Homo sapiens
ttcagtaggaaggccagaggcactgg

SEQ ID NO: 88590 - DNA, 26 bp, Homo sapiens
tcagtaggaaggccagaggcactgga

SEQ ID NO: 88591 - DNA, 26 bp, Homo sapiens
cagtaggaaggccagaggcactggaa

SEQ ID NO: 88592 - DNA, 26 bp, Homo sapiens
agtaggaaggccagaggcactggaaa

SEQ ID NO: 88593 - DNA, 26 bp, Homo sapiens
gtaggaaggccagaggcactggaaac

SEQ ID NO: 88594 - DNA, 26 bp, Homo sapiens
taggaaggccagaggcactggaaact

SEQ ID NO: 88595 - DNA, 26 bp, Homo sapiens
aggaaggccagaggcactggaaactg

SEQ ID NO: 88596 - DNA, 26 bp, Homo sapiens
ggaaggccagaggcactggaaactgt

SEQ ID NO: 88597 - DNA, 26 bp, Homo sapiens
gaaggccagaggcactggaaactgtt

SEQ ID NO: 88598 - DNA, 26 bp, Homo sapiens
aaggccagaggcactggaaactgttt

SEQ ID NO: 88599 - DNA, 26 bp, Homo sapiens
aggccagaggcactggaaactgtttt

SEQ ID NO: 88600 - DNA, 26 bp, Homo sapiens
ggccagaggcactggaaactgttttc

SEQ ID NO: 88601 - DNA, 26 bp, Homo sapiens
gccagaggcactggaaactgttttct

SEQ ID NO: 88602 - DNA, 26 bp, Homo sapiens
ccagaggcactggaaactgttttctg

SEQ ID NO: 88603 - DNA, 26 bp, Homo sapiens
cagaggcactggaaactgttttctga

SEQ ID NO: 88604 - DNA, 26 bp, Homo sapiens
agaggcactggaaactgttttctgaa

SEQ ID NO: 88605 - DNA, 26 bp, Homo sapiens
gaggcactggaaactgttttctgaaa

SEQ ID NO: 88606 - DNA, 26 bp, Homo sapiens
aggcactggaaactgttttctgaaac

SEQ ID NO: 88607 - DNA, 26 bp, Homo sapiens
ggcactggaaactgttttctgaaact

SEQ ID NO: 88608 - DNA, 26 bp, Homo sapiens
gcactggaaactgttttctgaaactg

SEQ ID NO: 88609 - DNA, 26 bp, Homo sapiens
cactggaaactgttttctgaaactgt

SEQ ID NO: 88610 - DNA, 26 bp, Homo sapiens
actggaaactgttttctgaaactgtg

SEQ ID NO: 88611 - DNA, 26 bp, Homo sapiens
ctggaaactgttttctgaaactgtgt

SEQ ID NO: 88612 - DNA, 26 bp, Homo sapiens
tggaaactgttttctgaaactgtgtt

SEQ ID NO: 88613 - DNA, 26 bp, Homo sapiens
ggaaactgttttctgaaactgtgtta

SEQ ID NO: 88614 - DNA, 26 bp, Homo sapiens
gaaactgttttctgaaactgtgttat

SEQ ID NO: 88615 - DNA, 26 bp, Homo sapiens
aaactgttttctgaaactgtgttatt

SEQ ID NO: 88616 - DNA, 26 bp, Homo sapiens
aactgttttctgaaactgtgttattt

SEQ ID NO: 88617 - DNA, 26 bp, Homo sapiens
actgttttctgaaactgtgttatttt

SEQ ID NO: 88618 - DNA, 26 bp, Homo sapiens
ctgttttctgaaactgtgttattttt

SEQ ID NO: 88619 - DNA, 26 bp, Homo sapiens
tgttttctgaaactgtgttatttttg

SEQ ID NO: 88620 - DNA, 26 bp, Homo sapiens
gttttctgaaactgtgttatttttga

SEQ ID NO: 88621 - DNA, 26 bp, Homo sapiens
ttttctgaaactgtgttatttttgag

SEQ ID NO: 88622 - DNA, 26 bp, Homo sapiens
tttctgaaactgtgttatttttgaga

SEQ ID NO: 88623 - DNA, 26 bp, Homo sapiens
ttctgaaactgtgttatttttgagag

SEQ ID NO: 88624 - DNA, 26 bp, Homo sapiens
tctgaaactgtgttatttttgagaga

SEQ ID NO: 88625 - DNA, 26 bp, Homo sapiens
ctgaaactgtgttatttttgagagat

SEQ ID NO: 88626 - DNA, 26 bp, Homo sapiens
tgaaactgtgttatttttgagagata

SEQ ID NO: 88627 - DNA, 26 bp, Homo sapiens
gaaactgtgttatttttgagagataa

SEQ ID NO: 88628 - DNA, 26 bp, Homo sapiens
aaactgtgttatttttgagagataac

SEQ ID NO: 88629 - DNA, 26 bp, Homo sapiens
aactgtgttatttttgagagataact

SEQ ID NO: 88630 - DNA, 26 bp, Homo sapiens
actgtgttatttttgagagataactg

SEQ ID NO: 88631 - DNA, 26 bp, Homo sapiens
ctgtgttatttttgagagataactga

SEQ ID NO: 88632 - DNA, 26 bp, Homo sapiens
tgtgttatttttgagagataactgat

SEQ ID NO: 88633 - DNA, 26 bp, Homo sapiens
gtgttatttttgagagataactgatt

SEQ ID NO: 88634 - DNA, 26 bp, Homo sapiens
tgttatttttgagagataactgattg

SEQ ID NO: 88635 - DNA, 26 bp, Homo sapiens
gttatttttgagagataactgattgc

SEQ ID NO: 88636 - DNA, 26 bp, Homo sapiens
ttatttttgagagataactgattgca

SEQ ID NO: 88637 - DNA, 26 bp, Homo sapiens
tatttttgagagataactgattgcag

SEQ ID NO: 88638 - DNA, 26 bp, Homo sapiens
atttttgagagataactgattgcagt

SEQ ID NO: 88639 - DNA, 26 bp, Homo sapiens
tttttgagagataactgattgcagtc

SEQ ID NO: 88640 - DNA, 26 bp, Homo sapiens
ttttgagagataactgattgcagtct

SEQ ID NO: 88641 - DNA, 26 bp, Homo sapiens
tttgagagataactgattgcagtctg

SEQ ID NO: 88642 - DNA, 26 bp, Homo sapiens
ttgagagataactgattgcagtctgg

SEQ ID NO: 88643 - DNA, 26 bp, Homo sapiens
tgagagataactgattgcagtctgga

SEQ ID NO: 88644 - DNA, 26 bp, Homo sapiens
gagagataactgattgcagtctggat

SEQ ID NO: 88645 - DNA, 26 bp, Homo sapiens
agagataactgattgcagtctggatc

SEQ ID NO: 88646 - DNA, 26 bp, Homo sapiens
gagataactgattgcagtctggatcc

SEQ ID NO: 88647 - DNA, 26 bp, Homo sapiens
agataactgattgcagtctggatccg

SEQ ID NO: 88648 - DNA, 26 bp, Homo sapiens
gataactgattgcagtctggatccgg

SEQ ID NO: 88649 - DNA, 26 bp, Homo sapiens
ataactgattgcagtctggatccggg

SEQ ID NO: 88650 - DNA, 26 bp, Homo sapiens
taactgattgcagtctggatccggga

SEQ ID NO: 88651 - DNA, 26 bp, Homo sapiens
aactgattgcagtctggatccgggac

SEQ ID NO: 88652 - DNA, 26 bp, Homo sapiens
actgattgcagtctggatccgggaca

SEQ ID NO: 88653 - DNA, 26 bp, Homo sapiens
ctgattgcagtctggatccgggacag

SEQ ID NO: 88654 - DNA, 26 bp, Homo sapiens
tgattgcagtctggatccgggacaga

SEQ ID NO: 88655 - DNA, 26 bp, Homo sapiens
gattgcagtctggatccgggacagag

SEQ ID NO: 88656 - DNA, 26 bp, Homo sapiens
attgcagtctggatccgggacagagg

SEQ ID NO: 88657 - DNA, 26 bp, Homo sapiens
ttgcagtctggatccgggacagaggt

SEQ ID NO: 88658 - DNA, 26 bp, Homo sapiens
tgcagtctggatccgggacagaggta

SEQ ID NO: 88659 - DNA, 26 bp, Homo sapiens
gcagtctggatccgggacagaggtag

SEQ ID NO: 88660 - DNA, 26 bp, Homo sapiens
cagtctggatccgggacagaggtagg

SEQ ID NO: 88661 - DNA, 26 bp, Homo sapiens
agtctggatccgggacagaggtaggg

SEQ ID NO: 88662 - DNA, 26 bp, Homo sapiens
gtctggatccgggacagaggtaggga

SEQ ID NO: 88663 - DNA, 26 bp, Homo sapiens
tctggatccgggacagaggtagggaa

SEQ ID NO: 88664 - DNA, 26 bp, Homo sapiens
ctggatccgggacagaggtagggaaa

SEQ ID NO: 88665 - DNA, 26 bp, Homo sapiens
tggatccgggacagaggtagggaaag

SEQ ID NO: 88666 - DNA, 26 bp, Homo sapiens
ggatccgggacagaggtagggaaaga

SEQ ID NO: 88667 - DNA, 26 bp, Homo sapiens
gatccgggacagaggtagggaaagag

SEQ ID NO: 88668 - DNA, 26 bp, Homo sapiens
atccgggacagaggtagggaaagagg

SEQ ID NO: 88669 - DNA, 26 bp, Homo sapiens
tccgggacagaggtagggaaagagga

SEQ ID NO: 88670 - DNA, 26 bp, Homo sapiens
ccgggacagaggtagggaaagaggaa

SEQ ID NO: 88671 - DNA, 26 bp, Homo sapiens
cgggacagaggtagggaaagaggaag

SEQ ID NO: 88672 - DNA, 26 bp, Homo sapiens
gggacagaggtagggaaagaggaaga

SEQ ID NO: 88673 - DNA, 26 bp, Homo sapiens
ggacagaggtagggaaagaggaagac

SEQ ID NO: 88674 - DNA, 26 bp, Homo sapiens
gacagaggtagggaaagaggaagaca

SEQ ID NO: 88675 - DNA, 26 bp, Homo sapiens
acagaggtagggaaagaggaagacaa

SEQ ID NO: 88676 - DNA, 26 bp, Homo sapiens
cagaggtagggaaagaggaagacaag

SEQ ID NO: 88677 - DNA, 26 bp, Homo sapiens
agaggtagggaaagaggaagacaaga

SEQ ID NO: 88678 - DNA, 26 bp, Homo sapiens
gaggtagggaaagaggaagacaagac

SEQ ID NO: 88679 - DNA, 26 bp, Homo sapiens
aggtagggaaagaggaagacaagact

SEQ ID NO: 88680 - DNA, 26 bp, Homo sapiens
ggtagggaaagaggaagacaagactg

SEQ ID NO: 88681 - DNA, 26 bp, Homo sapiens
gtagggaaagaggaagacaagactga

SEQ ID NO: 88682 - DNA, 26 bp, Homo sapiens
tagggaaagaggaagacaagactgac

SEQ ID NO: 88683 - DNA, 26 bp, Homo sapiens
agggaaagaggaagacaagactgaca

SEQ ID NO: 88684 - DNA, 26 bp, Homo sapiens
gggaaagaggaagacaagactgacag

SEQ ID NO: 88685 - DNA, 26 bp, Homo sapiens
ggaaagaggaagacaagactgacagt

SEQ ID NO: 88686 - DNA, 26 bp, Homo sapiens
gaaagaggaagacaagactgacagta

SEQ ID NO: 88687 - DNA, 26 bp, Homo sapiens
aaagaggaagacaagactgacagtag

SEQ ID NO: 88688 - DNA, 26 bp, Homo sapiens
aagaggaagacaagactgacagtagg

SEQ ID NO: 88689 - DNA, 26 bp, Homo sapiens
agaggaagacaagactgacagtaggg

SEQ ID NO: 88690 - DNA, 26 bp, Homo sapiens
gaggaagacaagactgacagtagggc

SEQ ID NO: 88691 - DNA, 26 bp, Homo sapiens
aggaagacaagactgacagtagggcg

SEQ ID NO: 88692 - DNA, 26 bp, Homo sapiens
ggaagacaagactgacagtagggcgg

SEQ ID NO: 88693 - DNA, 26 bp, Homo sapiens
gaagacaagactgacagtagggcggt

SEQ ID NO: 88694 - DNA, 26 bp, Homo sapiens
aagacaagactgacagtagggcggtc

SEQ ID NO: 88695 - DNA, 26 bp, Homo sapiens
agacaagactgacagtagggcggtcc

SEQ ID NO: 88696 - DNA, 26 bp, Homo sapiens
gacaagactgacagtagggcggtccg

SEQ ID NO: 88697 - DNA, 26 bp, Homo sapiens
acaagactgacagtagggcggtccgt

SEQ ID NO: 88698 - DNA, 26 bp, Homo sapiens
caagactgacagtagggcggtccgtg

SEQ ID NO: 88699 - DNA, 26 bp, Homo sapiens
aagactgacagtagggcggtccgtga

SEQ ID NO: 88700 - DNA, 26 bp, Homo sapiens
agactgacagtagggcggtccgtgag

SEQ ID NO: 88701 - DNA, 26 bp, Homo sapiens
gactgacagtagggcggtccgtgaga

SEQ ID NO: 88702 - DNA, 26 bp, Homo sapiens
actgacagtagggcggtccgtgagaa

SEQ ID NO: 88703 - DNA, 26 bp, Homo sapiens
ctgacagtagggcggtccgtgagaag

SEQ ID NO: 88704 - DNA, 26 bp, Homo sapiens
tgacagtagggcggtccgtgagaagg

SEQ ID NO: 88705 - DNA, 26 bp, Homo sapiens
gacagtagggcggtccgtgagaaggc

SEQ ID NO: 88706 - DNA, 26 bp, Homo sapiens
acagtagggcggtccgtgagaaggct

SEQ ID NO: 88707 - DNA, 26 bp, Homo sapiens
cagtagggcggtccgtgagaaggctt

SEQ ID NO: 88708 - DNA, 26 bp, Homo sapiens
agtagggcggtccgtgagaaggcttg

SEQ ID NO: 88709 - DNA, 26 bp, Homo sapiens
gtagggcggtccgtgagaaggcttgt

SEQ ID NO: 88710 - DNA, 26 bp, Homo sapiens
tagggcggtccgtgagaaggcttgtg

SEQ ID NO: 88711 - DNA, 26 bp, Homo sapiens
agggcggtccgtgagaaggcttgtgc

SEQ ID NO: 88712 - DNA, 26 bp, Homo sapiens
gggcggtccgtgagaaggcttgtgca

SEQ ID NO: 88713 - DNA, 26 bp, Homo sapiens
ggcggtccgtgagaaggcttgtgcag

SEQ ID NO: 88714 - DNA, 26 bp, Homo sapiens
gcggtccgtgagaaggcttgtgcagt

SEQ ID NO: 88715 - DNA, 26 bp, Homo sapiens
cggtccgtgagaaggcttgtgcagta

SEQ ID NO: 88716 - DNA, 26 bp, Homo sapiens
ggtccgtgagaaggcttgtgcagtaa

SEQ ID NO: 88717 - DNA, 26 bp, Homo sapiens
gtccgtgagaaggcttgtgcagtaat

SEQ ID NO: 88718 - DNA, 26 bp, Homo sapiens
tccgtgagaaggcttgtgcagtaatc

SEQ ID NO: 88719 - DNA, 26 bp, Homo sapiens
ccgtgagaaggcttgtgcagtaatcc

SEQ ID NO: 88720 - DNA, 26 bp, Homo sapiens
cgtgagaaggcttgtgcagtaatcca

SEQ ID NO: 88721 - DNA, 26 bp, Homo sapiens
gtgagaaggcttgtgcagtaatccag

SEQ ID NO: 88722 - DNA, 26 bp, Homo sapiens
tgagaaggcttgtgcagtaatccagg

SEQ ID NO: 88723 - DNA, 26 bp, Homo sapiens
gagaaggcttgtgcagtaatccaggg

SEQ ID NO: 88724 - DNA, 26 bp, Homo sapiens
agaaggcttgtgcagtaatccagggg

SEQ ID NO: 88725 - DNA, 26 bp, Homo sapiens
gaaggcttgtgcagtaatccaggggg

SEQ ID NO: 88726 - DNA, 26 bp, Homo sapiens
aaggcttgtgcagtaatccagggggt

SEQ ID NO: 88727 - DNA, 26 bp, Homo sapiens
aggcttgtgcagtaatccagggggtg

SEQ ID NO: 88728 - DNA, 26 bp, Homo sapiens
ggcttgtgcagtaatccagggggtgc

SEQ ID NO: 88729 - DNA, 26 bp, Homo sapiens
gcttgtgcagtaatccagggggtgca

SEQ ID NO: 88730 - DNA, 26 bp, Homo sapiens
cttgtgcagtaatccagggggtgcac

SEQ ID NO: 88731 - DNA, 26 bp, Homo sapiens
ttgtgcagtaatccagggggtgcaca

SEQ ID NO: 88732 - DNA, 26 bp, Homo sapiens
tgtgcagtaatccagggggtgcacac

SEQ ID NO: 88733 - DNA, 26 bp, Homo sapiens
gtgcagtaatccagggggtgcacaca

SEQ ID NO: 88734 - DNA, 26 bp, Homo sapiens
tgcagtaatccagggggtgcacacat

SEQ ID NO: 88735 - DNA, 26 bp, Homo sapiens
gcagtaatccagggggtgcacacatt

SEQ ID NO: 88736 - DNA, 26 bp, Homo sapiens
cagtaatccagggggtgcacacattt

SEQ ID NO: 88737 - DNA, 26 bp, Homo sapiens
agtaatccagggggtgcacacattta

SEQ ID NO: 88738 - DNA, 26 bp, Homo sapiens
gtaatccagggggtgcacacatttat

SEQ ID NO: 88739 - DNA, 26 bp, Homo sapiens
taatccagggggtgcacacatttatc

SEQ ID NO: 88740 - DNA, 26 bp, Homo sapiens
aatccagggggtgcacacatttatca

SEQ ID NO: 88741 - DNA, 26 bp, Homo sapiens
atccagggggtgcacacatttatcat

SEQ ID NO: 88742 - DNA, 26 bp, Homo sapiens
tccagggggtgcacacatttatcatg

SEQ ID NO: 88743 - DNA, 26 bp, Homo sapiens
ccagggggtgcacacatttatcatgg

SEQ ID NO: 88744 - DNA, 26 bp, Homo sapiens
cagggggtgcacacatttatcatggt

SEQ ID NO: 88745 - DNA, 26 bp, Homo sapiens
agggggtgcacacatttatcatggtt

SEQ ID NO: 88746 - DNA, 26 bp, Homo sapiens
gggggtgcacacatttatcatggttt

SEQ ID NO: 88747 - DNA, 26 bp, Homo sapiens
ggggtgcacacatttatcatggtttc

SEQ ID NO: 88748 - DNA, 26 bp, Homo sapiens
gggtgcacacatttatcatggtttca

SEQ ID NO: 88749 - DNA, 26 bp, Homo sapiens
ggtgcacacatttatcatggtttcac

SEQ ID NO: 88750 - DNA, 26 bp, Homo sapiens
gtgcacacatttatcatggtttcacg

SEQ ID NO: 88751 - DNA, 26 bp, Homo sapiens
tgcacacatttatcatggtttcacgt

SEQ ID NO: 88752 - DNA, 26 bp, Homo sapiens
gcacacatttatcatggtttcacgtt

SEQ ID NO: 88753 - DNA, 26 bp, Homo sapiens
cacacatttatcatggtttcacgttt

SEQ ID NO: 88754 - DNA, 26 bp, Homo sapiens
acacatttatcatggtttcacgtttg

SEQ ID NO: 88755 - DNA, 26 bp, Homo sapiens
cacatttatcatggtttcacgtttgg

SEQ ID NO: 88756 - DNA, 26 bp, Homo sapiens
acatttatcatggtttcacgtttggt

SEQ ID NO: 88757 - DNA, 26 bp, Homo sapiens
catttatcatggtttcacgtttggtg

SEQ ID NO: 88758 - DNA, 26 bp, Homo sapiens
atttatcatggtttcacgtttggtgt

SEQ ID NO: 88759 - DNA, 26 bp, Homo sapiens
tttatcatggtttcacgtttggtgtt

SEQ ID NO: 88760 - DNA, 26 bp, Homo sapiens
ttatcatggtttcacgtttggtgttg

SEQ ID NO: 88761 - DNA, 26 bp, Homo sapiens
tatcatggtttcacgtttggtgttgc

SEQ ID NO: 88762 - DNA, 26 bp, Homo sapiens
atcatggtttcacgtttggtgttgct

SEQ ID NO: 88763 - DNA, 26 bp, Homo sapiens
tcatggtttcacgtttggtgttgctg

SEQ ID NO: 88764 - DNA, 26 bp, Homo sapiens
catggtttcacgtttggtgttgctgt

SEQ ID NO: 88765 - DNA, 26 bp, Homo sapiens
atggtttcacgtttggtgttgctgtc

SEQ ID NO: 88766 - DNA, 26 bp, Homo sapiens
tggtttcacgtttggtgttgctgtca

SEQ ID NO: 88767 - DNA, 26 bp, Homo sapiens
ggtttcacgtttggtgttgctgtcat

SEQ ID NO: 88768 - DNA, 26 bp, Homo sapiens
gtttcacgtttggtgttgctgtcatc

SEQ ID NO: 88769 - DNA, 26 bp, Homo sapiens
tttcacgtttggtgttgctgtcatct

SEQ ID NO: 88770 - DNA, 26 bp, Homo sapiens
ttcacgtttggtgttgctgtcatctg

SEQ ID NO: 88771 - DNA, 26 bp, Homo sapiens
tcacgtttggtgttgctgtcatctgg

SEQ ID NO: 88772 - DNA, 26 bp, Homo sapiens
cacgtttggtgttgctgtcatctgga

SEQ ID NO: 88773 - DNA, 26 bp, Homo sapiens
acgtttggtgttgctgtcatctggac

SEQ ID NO: 88774 - DNA, 26 bp, Homo sapiens
cgtttggtgttgctgtcatctggacg

SEQ ID NO: 88775 - DNA, 26 bp, Homo sapiens
gtttggtgttgctgtcatctggacgt

SEQ ID NO: 88776 - DNA, 26 bp, Homo sapiens
tttggtgttgctgtcatctggacgtc

SEQ ID NO: 88777 - DNA, 26 bp, Homo sapiens
ttggtgttgctgtcatctggacgtct

SEQ ID NO: 88778 - DNA, 26 bp, Homo sapiens
tggtgttgctgtcatctggacgtctt

SEQ ID NO: 88779 - DNA, 26 bp, Homo sapiens
ggtgttgctgtcatctggacgtcttc

SEQ ID NO: 88780 - DNA, 26 bp, Homo sapiens
gtgttgctgtcatctggacgtcttca

SEQ ID NO: 88781 - DNA, 26 bp, Homo sapiens
tgttgctgtcatctggacgtcttcat

SEQ ID NO: 88782 - DNA, 26 bp, Homo sapiens
gttgctgtcatctggacgtcttcatt

SEQ ID NO: 88783 - DNA, 26 bp, Homo sapiens
ttgctgtcatctggacgtcttcattt

SEQ ID NO: 88784 - DNA, 26 bp, Homo sapiens
tgctgtcatctggacgtcttcatttt

SEQ ID NO: 88785 - DNA, 26 bp, Homo sapiens
gctgtcatctggacgtcttcattttg

SEQ ID NO: 88786 - DNA, 26 bp, Homo sapiens
ctgtcatctggacgtcttcattttgg

SEQ ID NO: 88787 - DNA, 26 bp, Homo sapiens
tgtcatctggacgtcttcattttgga

SEQ ID NO: 88788 - DNA, 26 bp, Homo sapiens
gtcatctggacgtcttcattttggag

SEQ ID NO: 88789 - DNA, 26 bp, Homo sapiens
tcatctggacgtcttcattttggaga

SEQ ID NO: 88790 - DNA, 26 bp, Homo sapiens
catctggacgtcttcattttggagaa

SEQ ID NO: 88791 - DNA, 26 bp, Homo sapiens
atctggacgtcttcattttggagaat

SEQ ID NO: 88792 - DNA, 26 bp, Homo sapiens
tctggacgtcttcattttggagaatt

SEQ ID NO: 88793 - DNA, 26 bp, Homo sapiens
ctggacgtcttcattttggagaattc

SEQ ID NO: 88794 - DNA, 26 bp, Homo sapiens
tggacgtcttcattttggagaattcc

SEQ ID NO: 88795 - DNA, 26 bp, Homo sapiens
ggacgtcttcattttggagaattcct

SEQ ID NO: 88796 - DNA, 26 bp, Homo sapiens
gacgtcttcattttggagaattcctc

SEQ ID NO: 88797 - DNA, 26 bp, Homo sapiens
acgtcttcattttggagaattcctca

SEQ ID NO: 88798 - DNA, 26 bp, Homo sapiens
cgtcttcattttggagaattcctcat

SEQ ID NO: 88799 - DNA, 26 bp, Homo sapiens
gtcttcattttggagaattcctcata

SEQ ID NO: 88800 - DNA, 26 bp, Homo sapiens
tcttcattttggagaattcctcatat

SEQ ID NO: 88801 - DNA, 26 bp, Homo sapiens
cttcattttggagaattcctcatatt

SEQ ID NO: 88802 - DNA, 26 bp, Homo sapiens
ttcattttggagaattcctcatattc

SEQ ID NO: 88803 - DNA, 26 bp, Homo sapiens
tcattttggagaattcctcatattct

SEQ ID NO: 88804 - DNA, 26 bp, Homo sapiens
cattttggagaattcctcatattctg

SEQ ID NO: 88805 - DNA, 26 bp, Homo sapiens
attttggagaattcctcatattctga

SEQ ID NO: 88806 - DNA, 26 bp, Homo sapiens
ttttggagaattcctcatattctgag

SEQ ID NO: 88807 - DNA, 26 bp, Homo sapiens
tttggagaattcctcatattctgagg

SEQ ID NO: 88808 - DNA, 26 bp, Homo sapiens
ttggagaattcctcatattctgaggc

SEQ ID NO: 88809 - DNA, 26 bp, Homo sapiens
tggagaattcctcatattctgaggct

SEQ ID NO: 88810 - DNA, 26 bp, Homo sapiens
ggagaattcctcatattctgaggctc

SEQ ID NO: 88811 - DNA, 26 bp, Homo sapiens
gagaattcctcatattctgaggctca

SEQ ID NO: 88812 - DNA, 26 bp, Homo sapiens
agaattcctcatattctgaggctcag

SEQ ID NO: 88813 - DNA, 26 bp, Homo sapiens
gaattcctcatattctgaggctcagt

SEQ ID NO: 88814 - DNA, 26 bp, Homo sapiens
aattcctcatattctgaggctcagtg

SEQ ID NO: 88815 - DNA, 26 bp, Homo sapiens
attcctcatattctgaggctcagtga

SEQ ID NO: 88816 - DNA, 26 bp, Homo sapiens
ttcctcatattctgaggctcagtgag

SEQ ID NO: 88817 - DNA, 26 bp, Homo sapiens
tcctcatattctgaggctcagtgaga

SEQ ID NO: 88818 - DNA, 26 bp, Homo sapiens
cctcatattctgaggctcagtgagaa

SEQ ID NO: 88819 - DNA, 26 bp, Homo sapiens
ctcatattctgaggctcagtgagaaa

SEQ ID NO: 88820 - DNA, 26 bp, Homo sapiens
tcatattctgaggctcagtgagaaac

SEQ ID NO: 88821 - DNA, 26 bp, Homo sapiens
catattctgaggctcagtgagaaact

SEQ ID NO: 88822 - DNA, 26 bp, Homo sapiens
atattctgaggctcagtgagaaactg

SEQ ID NO: 88823 - DNA, 26 bp, Homo sapiens
tattctgaggctcagtgagaaactga

SEQ ID NO: 88824 - DNA, 26 bp, Homo sapiens
attctgaggctcagtgagaaactgaa

SEQ ID NO: 88825 - DNA, 26 bp, Homo sapiens
ttctgaggctcagtgagaaactgaac

SEQ ID NO: 88826 - DNA, 26 bp, Homo sapiens
tctgaggctcagtgagaaactgaact

SEQ ID NO: 88827 - DNA, 26 bp, Homo sapiens
ctgaggctcagtgagaaactgaactc

SEQ ID NO: 88828 - DNA, 26 bp, Homo sapiens
tgaggctcagtgagaaactgaactca

SEQ ID NO: 88829 - DNA, 26 bp, Homo sapiens
gaggctcagtgagaaactgaactcac

SEQ ID NO: 88830 - DNA, 26 bp, Homo sapiens
aggctcagtgagaaactgaactcact

SEQ ID NO: 88831 - DNA, 26 bp, Homo sapiens
ggctcagtgagaaactgaactcactt

SEQ ID NO: 88832 - DNA, 26 bp, Homo sapiens
gctcagtgagaaactgaactcacttg

SEQ ID NO: 88833 - DNA, 26 bp, Homo sapiens
ctcagtgagaaactgaactcacttgt

SEQ ID NO: 88834 - DNA, 26 bp, Homo sapiens
tcagtgagaaactgaactcacttgta

SEQ ID NO: 88835 - DNA, 26 bp, Homo sapiens
cagtgagaaactgaactcacttgtaa

SEQ ID NO: 88836 - DNA, 26 bp, Homo sapiens
agtgagaaactgaactcacttgtaat

SEQ ID NO: 88837 - DNA, 26 bp, Homo sapiens
gtgagaaactgaactcacttgtaatg

SEQ ID NO: 88838 - DNA, 26 bp, Homo sapiens
tgagaaactgaactcacttgtaatgg

SEQ ID NO: 88839 - DNA, 26 bp, Homo sapiens
gagaaactgaactcacttgtaatggg

SEQ ID NO: 88840 - DNA, 26 bp, Homo sapiens
agaaactgaactcacttgtaatggga

SEQ ID NO: 88841 - DNA, 26 bp, Homo sapiens
gaaactgaactcacttgtaatgggat

SEQ ID NO: 88842 - DNA, 26 bp, Homo sapiens
aaactgaactcacttgtaatgggatg

SEQ ID NO: 88843 - DNA, 26 bp, Homo sapiens
aactgaactcacttgtaatgggatgt

SEQ ID NO: 88844 - DNA, 26 bp, Homo sapiens
actgaactcacttgtaatgggatgtg

SEQ ID NO: 88845 - DNA, 26 bp, Homo sapiens
ctgaactcacttgtaatgggatgtga

SEQ ID NO: 88846 - DNA, 26 bp, Homo sapiens
tgaactcacttgtaatgggatgtgaa

SEQ ID NO: 88847 - DNA, 26 bp, Homo sapiens
gaactcacttgtaatgggatgtgaaa

SEQ ID NO: 88848 - DNA, 26 bp, Homo sapiens
aactcacttgtaatgggatgtgaaat

SEQ ID NO: 88849 - DNA, 26 bp, Homo sapiens
actcacttgtaatgggatgtgaaatc

SEQ ID NO: 88850 - DNA, 26 bp, Homo sapiens
ctcacttgtaatgggatgtgaaatct

SEQ ID NO: 88851 - DNA, 26 bp, Homo sapiens
tcacttgtaatgggatgtgaaatctc

SEQ ID NO: 88852 - DNA, 26 bp, Homo sapiens
cacttgtaatgggatgtgaaatctcc

SEQ ID NO: 88853 - DNA, 26 bp, Homo sapiens
acttgtaatgggatgtgaaatctcca

SEQ ID NO: 88854 - DNA, 26 bp, Homo sapiens
cttgtaatgggatgtgaaatctccaa

SEQ ID NO: 88855 - DNA, 26 bp, Homo sapiens
ttgtaatgggatgtgaaatctccaag

SEQ ID NO: 88856 - DNA, 26 bp, Homo sapiens
tgtaatgggatgtgaaatctccaagt

SEQ ID NO: 88857 - DNA, 26 bp, Homo sapiens
gtaatgggatgtgaaatctccaagta

SEQ ID NO: 88858 - DNA, 26 bp, Homo sapiens
taatgggatgtgaaatctccaagtat

SEQ ID NO: 88859 - DNA, 26 bp, Homo sapiens
aatgggatgtgaaatctccaagtatt

SEQ ID NO: 88860 - DNA, 26 bp, Homo sapiens
atgggatgtgaaatctccaagtattt

SEQ ID NO: 88861 - DNA, 26 bp, Homo sapiens
tgggatgtgaaatctccaagtatttt

SEQ ID NO: 88862 - DNA, 26 bp, Homo sapiens
gggatgtgaaatctccaagtattttc

SEQ ID NO: 88863 - DNA, 26 bp, Homo sapiens
ggatgtgaaatctccaagtattttct

SEQ ID NO: 88864 - DNA, 26 bp, Homo sapiens
gatgtgaaatctccaagtattttctt

SEQ ID NO: 88865 - DNA, 26 bp, Homo sapiens
atgtgaaatctccaagtattttcttt

SEQ ID NO: 88866 - DNA, 26 bp, Homo sapiens
tgtgaaatctccaagtattttctttc

SEQ ID NO: 88867 - DNA, 26 bp, Homo sapiens
gtgaaatctccaagtattttctttcc

SEQ ID NO: 88868 - DNA, 26 bp, Homo sapiens
tgaaatctccaagtattttctttccc

SEQ ID NO: 88869 - DNA, 26 bp, Homo sapiens
gaaatctccaagtattttctttccca

SEQ ID NO: 88870 - DNA, 26 bp, Homo sapiens
aaatctccaagtattttctttcccag

SEQ ID NO: 88871 - DNA, 26 bp, Homo sapiens
aatctccaagtattttctttcccagc

SEQ ID NO: 88872 - DNA, 26 bp, Homo sapiens
atctccaagtattttctttcccagcc

SEQ ID NO: 88873 - DNA, 26 bp, Homo sapiens
tctccaagtattttctttcccagccg

SEQ ID NO: 88874 - DNA, 26 bp, Homo sapiens
ctccaagtattttctttcccagccgc

SEQ ID NO: 88875 - DNA, 26 bp, Homo sapiens
tccaagtattttctttcccagccgct

SEQ ID NO: 88876 - DNA, 26 bp, Homo sapiens
ccaagtattttctttcccagccgctt

SEQ ID NO: 88877 - DNA, 26 bp, Homo sapiens
caagtattttctttcccagccgcttg

SEQ ID NO: 88878 - DNA, 26 bp, Homo sapiens
aagtattttctttcccagccgcttgg

SEQ ID NO: 88879 - DNA, 26 bp, Homo sapiens
agtattttctttcccagccgcttgga

SEQ ID NO: 88880 - DNA, 26 bp, Homo sapiens
gtattttctttcccagccgcttggag

SEQ ID NO: 88881 - DNA, 26 bp, Homo sapiens
tattttctttcccagccgcttggaga

SEQ ID NO: 88882 - DNA, 26 bp, Homo sapiens
attttctttcccagccgcttggagac

SEQ ID NO: 88883 - DNA, 26 bp, Homo sapiens
ttttctttcccagccgcttggagact

SEQ ID NO: 88884 - DNA, 26 bp, Homo sapiens
tttctttcccagccgcttggagactg

SEQ ID NO: 88885 - DNA, 26 bp, Homo sapiens
ttctttcccagccgcttggagactgg

SEQ ID NO: 88886 - DNA, 26 bp, Homo sapiens
tctttcccagccgcttggagactggg

SEQ ID NO: 88887 - DNA, 26 bp, Homo sapiens
ctttcccagccgcttggagactgggc

SEQ ID NO: 88888 - DNA, 26 bp, Homo sapiens
tttcccagccgcttggagactgggca

SEQ ID NO: 88889 - DNA, 26 bp, Homo sapiens
ttcccagccgcttggagactgggcac

SEQ ID NO: 88890 - DNA, 26 bp, Homo sapiens
tcccagccgcttggagactgggcaca

SEQ ID NO: 88891 - DNA, 26 bp, Homo sapiens
cccagccgcttggagactgggcacaa

SEQ ID NO: 88892 - DNA, 26 bp, Homo sapiens
ccagccgcttggagactgggcacaag

SEQ ID NO: 88893 - DNA, 26 bp, Homo sapiens
cagccgcttggagactgggcacaagt

SEQ ID NO: 88894 - DNA, 26 bp, Homo sapiens
agccgcttggagactgggcacaagtc

SEQ ID NO: 88895 - DNA, 26 bp, Homo sapiens
gccgcttggagactgggcacaagtct

SEQ ID NO: 88896 - DNA, 26 bp, Homo sapiens
ccgcttggagactgggcacaagtctt

SEQ ID NO: 88897 - DNA, 26 bp, Homo sapiens
cgcttggagactgggcacaagtcttg

SEQ ID NO: 88898 - DNA, 26 bp, Homo sapiens
gcttggagactgggcacaagtcttgg

SEQ ID NO: 88899 - DNA, 26 bp, Homo sapiens
cttggagactgggcacaagtcttggc

SEQ ID NO: 88900 - DNA, 26 bp, Homo sapiens
ttggagactgggcacaagtcttggca

SEQ ID NO: 88901 - DNA, 26 bp, Homo sapiens
tggagactgggcacaagtcttggcac

SEQ ID NO: 88902 - DNA, 26 bp, Homo sapiens
ggagactgggcacaagtcttggcact

SEQ ID NO: 88903 - DNA, 26 bp, Homo sapiens
gagactgggcacaagtcttggcactt

SEQ ID NO: 88904 - DNA, 26 bp, Homo sapiens
agactgggcacaagtcttggcacttg

SEQ ID NO: 88905 - DNA, 26 bp, Homo sapiens
gactgggcacaagtcttggcacttgg

SEQ ID NO: 88906 - DNA, 26 bp, Homo sapiens
actgggcacaagtcttggcacttggc

SEQ ID NO: 88907 - DNA, 26 bp, Homo sapiens
ctgggcacaagtcttggcacttggcc

SEQ ID NO: 88908 - DNA, 26 bp, Homo sapiens
tgggcacaagtcttggcacttggcct

SEQ ID NO: 88909 - DNA, 26 bp, Homo sapiens
gggcacaagtcttggcacttggccta

SEQ ID NO: 88910 - DNA, 26 bp, Homo sapiens
ggcacaagtcttggcacttggcctag

SEQ ID NO: 88911 - DNA, 26 bp, Homo sapiens
gcacaagtcttggcacttggcctaga

SEQ ID NO: 88912 - DNA, 26 bp, Homo sapiens
cacaagtcttggcacttggcctagac

SEQ ID NO: 88913 - DNA, 26 bp, Homo sapiens
acaagtcttggcacttggcctagaca

SEQ ID NO: 88914 - DNA, 26 bp, Homo sapiens
caagtcttggcacttggcctagacag

SEQ ID NO: 88915 - DNA, 26 bp, Homo sapiens
aagtcttggcacttggcctagacagc

SEQ ID NO: 88916 - DNA, 26 bp, Homo sapiens
agtcttggcacttggcctagacagcg

SEQ ID NO: 88917 - DNA, 26 bp, Homo sapiens
gtcttggcacttggcctagacagcga

SEQ ID NO: 88918 - DNA, 26 bp, Homo sapiens
tcttggcacttggcctagacagcgat

SEQ ID NO: 88919 - DNA, 26 bp, Homo sapiens
cttggcacttggcctagacagcgatt

SEQ ID NO: 88920 - DNA, 26 bp, Homo sapiens
ttggcacttggcctagacagcgatta

SEQ ID NO: 88921 - DNA, 26 bp, Homo sapiens
tggcacttggcctagacagcgattag

SEQ ID NO: 88922 - DNA, 26 bp, Homo sapiens
ggcacttggcctagacagcgattaga

SEQ ID NO: 88923 - DNA, 26 bp, Homo sapiens
gcacttggcctagacagcgattagat

SEQ ID NO: 88924 - DNA, 26 bp, Homo sapiens
cacttggcctagacagcgattagatg

SEQ ID NO: 88925 - DNA, 26 bp, Homo sapiens
acttggcctagacagcgattagatgt

SEQ ID NO: 88926 - DNA, 26 bp, Homo sapiens
cttggcctagacagcgattagatgtg

SEQ ID NO: 88927 - DNA, 26 bp, Homo sapiens
ttggcctagacagcgattagatgtgt

SEQ ID NO: 88928 - DNA, 26 bp, Homo sapiens
tggcctagacagcgattagatgtgtc

SEQ ID NO: 88929 - DNA, 26 bp, Homo sapiens
ggcctagacagcgattagatgtgtcc

SEQ ID NO: 88930 - DNA, 26 bp, Homo sapiens
gcctagacagcgattagatgtgtcct

SEQ ID NO: 88931 - DNA, 26 bp, Homo sapiens
cctagacagcgattagatgtgtcctt

SEQ ID NO: 88932 - DNA, 26 bp, Homo sapiens
ctagacagcgattagatgtgtccttc

SEQ ID NO: 88933 - DNA, 26 bp, Homo sapiens
tagacagcgattagatgtgtccttct

SEQ ID NO: 88934 - DNA, 26 bp, Homo sapiens
agacagcgattagatgtgtccttctt

SEQ ID NO: 88935 - DNA, 26 bp, Homo sapiens
gacagcgattagatgtgtccttcttg

SEQ ID NO: 88936 - DNA, 26 bp, Homo sapiens
acagcgattagatgtgtccttcttgg

SEQ ID NO: 88937 - DNA, 26 bp, Homo sapiens
cagcgattagatgtgtccttcttgga

SEQ ID NO: 88938 - DNA, 26 bp, Homo sapiens
agcgattagatgtgtccttcttggac

SEQ ID NO: 88939 - DNA, 26 bp, Homo sapiens
gcgattagatgtgtccttcttggact

SEQ ID NO: 88940 - DNA, 26 bp, Homo sapiens
cgattagatgtgtccttcttggactc

SEQ ID NO: 88941 - DNA, 26 bp, Homo sapiens
gattagatgtgtccttcttggactct

SEQ ID NO: 88942 - DNA, 26 bp, Homo sapiens
attagatgtgtccttcttggactctg

SEQ ID NO: 88943 - DNA, 26 bp, Homo sapiens
ttagatgtgtccttcttggactctga

SEQ ID NO: 88944 - DNA, 26 bp, Homo sapiens
tagatgtgtccttcttggactctgaa

SEQ ID NO: 88945 - DNA, 26 bp, Homo sapiens
agatgtgtccttcttggactctgaag

SEQ ID NO: 88946 - DNA, 26 bp, Homo sapiens
gatgtgtccttcttggactctgaagt

SEQ ID NO: 88947 - DNA, 26 bp, Homo sapiens
atgtgtccttcttggactctgaagtg

SEQ ID NO: 88948 - DNA, 26 bp, Homo sapiens
tgtgtccttcttggactctgaagtga

SEQ ID NO: 88949 - DNA, 26 bp, Homo sapiens
gtgtccttcttggactctgaagtgag

SEQ ID NO: 88950 - DNA, 26 bp, Homo sapiens
tgtccttcttggactctgaagtgaga

SEQ ID NO: 88951 - DNA, 26 bp, Homo sapiens
gtccttcttggactctgaagtgagag

SEQ ID NO: 88952 - DNA, 26 bp, Homo sapiens
tccttcttggactctgaagtgagagc

SEQ ID NO: 88953 - DNA, 26 bp, Homo sapiens
ccttcttggactctgaagtgagagct

SEQ ID NO: 88954 - DNA, 26 bp, Homo sapiens
cttcttggactctgaagtgagagctt

SEQ ID NO: 88955 - DNA, 26 bp, Homo sapiens
ttcttggactctgaagtgagagcttt

SEQ ID NO: 88956 - DNA, 26 bp, Homo sapiens
tcttggactctgaagtgagagctttt

SEQ ID NO: 88957 - DNA, 26 bp, Homo sapiens
cttggactctgaagtgagagcttttc

SEQ ID NO: 88958 - DNA, 26 bp, Homo sapiens
ttggactctgaagtgagagcttttca

SEQ ID NO: 88959 - DNA, 26 bp, Homo sapiens
tggactctgaagtgagagcttttcaa

SEQ ID NO: 88960 - DNA, 26 bp, Homo sapiens
ggactctgaagtgagagcttttcaat

SEQ ID NO: 88961 - DNA, 26 bp, Homo sapiens
gactctgaagtgagagcttttcaatg

SEQ ID NO: 88962 - DNA, 26 bp, Homo sapiens
actctgaagtgagagcttttcaatgc

SEQ ID NO: 88963 - DNA, 26 bp, Homo sapiens
ctctgaagtgagagcttttcaatgct

SEQ ID NO: 88964 - DNA, 26 bp, Homo sapiens
tctgaagtgagagcttttcaatgctt

SEQ ID NO: 88965 - DNA, 26 bp, Homo sapiens
ctgaagtgagagcttttcaatgcttg

SEQ ID NO: 88966 - DNA, 26 bp, Homo sapiens
tgaagtgagagcttttcaatgcttgg

SEQ ID NO: 88967 - DNA, 26 bp, Homo sapiens
gaagtgagagcttttcaatgcttggt

SEQ ID NO: 88968 - DNA, 26 bp, Homo sapiens
aagtgagagcttttcaatgcttggtc

SEQ ID NO: 88969 - DNA, 26 bp, Homo sapiens
agtgagagcttttcaatgcttggtca

SEQ ID NO: 88970 - DNA, 26 bp, Homo sapiens
gtgagagcttttcaatgcttggtcag

SEQ ID NO: 88971 - DNA, 26 bp, Homo sapiens
tgagagcttttcaatgcttggtcagt

SEQ ID NO: 88972 - DNA, 26 bp, Homo sapiens
gagagcttttcaatgcttggtcagtt

SEQ ID NO: 88973 - DNA, 26 bp, Homo sapiens
agagcttttcaatgcttggtcagttt

SEQ ID NO: 88974 - DNA, 26 bp, Homo sapiens
gagcttttcaatgcttggtcagtttg

SEQ ID NO: 88975 - DNA, 26 bp, Homo sapiens
agcttttcaatgcttggtcagtttga

SEQ ID NO: 88976 - DNA, 26 bp, Homo sapiens
gcttttcaatgcttggtcagtttgaa

SEQ ID NO: 88977 - DNA, 26 bp, Homo sapiens
cttttcaatgcttggtcagtttgaag

SEQ ID NO: 88978 - DNA, 26 bp, Homo sapiens
ttttcaatgcttggtcagtttgaaga

SEQ ID NO: 88979 - DNA, 26 bp, Homo sapiens
tttcaatgcttggtcagtttgaagac

SEQ ID NO: 88980 - DNA, 26 bp, Homo sapiens
ttcaatgcttggtcagtttgaagact

SEQ ID NO: 88981 - DNA, 26 bp, Homo sapiens
tcaatgcttggtcagtttgaagactc

SEQ ID NO: 88982 - DNA, 26 bp, Homo sapiens
caatgcttggtcagtttgaagactcc

SEQ ID NO: 88983 - DNA, 26 bp, Homo sapiens
aatgcttggtcagtttgaagactcca

SEQ ID NO: 88984 - DNA, 26 bp, Homo sapiens
atgcttggtcagtttgaagactccag

SEQ ID NO: 88985 - DNA, 26 bp, Homo sapiens
tgcttggtcagtttgaagactccaga

SEQ ID NO: 88986 - DNA, 26 bp, Homo sapiens
gcttggtcagtttgaagactccagag

SEQ ID NO: 88987 - DNA, 26 bp, Homo sapiens
cttggtcagtttgaagactccagaga

SEQ ID NO: 88988 - DNA, 26 bp, Homo sapiens
ttggtcagtttgaagactccagagag

SEQ ID NO: 88989 - DNA, 26 bp, Homo sapiens
tggtcagtttgaagactccagagagg

SEQ ID NO: 88990 - DNA, 26 bp, Homo sapiens
ggtcagtttgaagactccagagaggt

SEQ ID NO: 88991 - DNA, 26 bp, Homo sapiens
gtcagtttgaagactccagagaggtg

SEQ ID NO: 88992 - DNA, 26 bp, Homo sapiens
tcagtttgaagactccagagaggtga

SEQ ID NO: 88993 - DNA, 26 bp, Homo sapiens
cagtttgaagactccagagaggtgat

SEQ ID NO: 88994 - DNA, 26 bp, Homo sapiens
agtttgaagactccagagaggtgatg

SEQ ID NO: 88995 - DNA, 26 bp, Homo sapiens
gtttgaagactccagagaggtgatga

SEQ ID NO: 88996 - DNA, 26 bp, Homo sapiens
tttgaagactccagagaggtgatgaa

SEQ ID NO: 88997 - DNA, 26 bp, Homo sapiens
ttgaagactccagagaggtgatgaat

SEQ ID NO: 88998 - DNA, 26 bp, Homo sapiens
tgaagactccagagaggtgatgaatt

SEQ ID NO: 88999 - DNA, 26 bp, Homo sapiens
gaagactccagagaggtgatgaattt

SEQ ID NO: 89000 - DNA, 26 bp, Homo sapiens
aagactccagagaggtgatgaatttc

SEQ ID NO: 89001 - DNA, 26 bp, Homo sapiens
agactccagagaggtgatgaatttca

SEQ ID NO: 89002 - DNA, 26 bp, Homo sapiens
gactccagagaggtgatgaatttcag

SEQ ID NO: 89003 - DNA, 26 bp, Homo sapiens
actccagagaggtgatgaatttcaga

SEQ ID NO: 89004 - DNA, 26 bp, Homo sapiens
ctccagagaggtgatgaatttcagat

SEQ ID NO: 89005 - DNA, 26 bp, Homo sapiens
tccagagaggtgatgaatttcagatg

SEQ ID NO: 89006 - DNA, 26 bp, Homo sapiens
ccagagaggtgatgaatttcagatga

SEQ ID NO: 89007 - DNA, 26 bp, Homo sapiens
cagagaggtgatgaatttcagatgag

SEQ ID NO: 89008 - DNA, 26 bp, Homo sapiens
agagaggtgatgaatttcagatgagc

SEQ ID NO: 89009 - DNA, 26 bp, Homo sapiens
gagaggtgatgaatttcagatgagca

SEQ ID NO: 89010 - DNA, 26 bp, Homo sapiens
agaggtgatgaatttcagatgagcat

SEQ ID NO: 89011 - DNA, 26 bp, Homo sapiens
gaggtgatgaatttcagatgagcatt

SEQ ID NO: 89012 - DNA, 26 bp, Homo sapiens
aggtgatgaatttcagatgagcattt

SEQ ID NO: 89013 - DNA, 26 bp, Homo sapiens
ggtgatgaatttcagatgagcatttc

SEQ ID NO: 89014 - DNA, 26 bp, Homo sapiens
gtgatgaatttcagatgagcatttct

SEQ ID NO: 89015 - DNA, 26 bp, Homo sapiens
tgatgaatttcagatgagcatttctt

SEQ ID NO: 89016 - DNA, 26 bp, Homo sapiens
gatgaatttcagatgagcatttcttc

SEQ ID NO: 89017 - DNA, 26 bp, Homo sapiens
atgaatttcagatgagcatttcttct

SEQ ID NO: 89018 - DNA, 26 bp, Homo sapiens
tgaatttcagatgagcatttcttctt

SEQ ID NO: 89019 - DNA, 26 bp, Homo sapiens
gaatttcagatgagcatttcttcttt

SEQ ID NO: 89020 - DNA, 26 bp, Homo sapiens
aatttcagatgagcatttcttctttt

SEQ ID NO: 89021 - DNA, 26 bp, Homo sapiens
atttcagatgagcatttcttcttttc

SEQ ID NO: 89022 - DNA, 26 bp, Homo sapiens
ttcaacaaaaagttaaggttttattt

SEQ ID NO: 89023 - DNA, 26 bp, Homo sapiens
tcaacaaaaagttaaggttttattta

SEQ ID NO: 89024 - DNA, 26 bp, Homo sapiens
caacaaaaagttaaggttttatttag

SEQ ID NO: 89025 - DNA, 26 bp, Homo sapiens
aacaaaaagttaaggttttatttaga

SEQ ID NO: 89026 - DNA, 26 bp, Homo sapiens
acaaaaagttaaggttttatttagaa

SEQ ID NO: 89027 - DNA, 26 bp, Homo sapiens
caaaaagttaaggttttatttagaat

SEQ ID NO: 89028 - DNA, 26 bp, Homo sapiens
aaaaagttaaggttttatttagaata

SEQ ID NO: 89029 - DNA, 26 bp, Homo sapiens
aaaagttaaggttttatttagaatat

SEQ ID NO: 89030 - DNA, 26 bp, Homo sapiens
aaagttaaggttttatttagaatatc

SEQ ID NO: 89031 - DNA, 26 bp, Homo sapiens
aagttaaggttttatttagaatatca

SEQ ID NO: 89032 - DNA, 26 bp, Homo sapiens
agttaaggttttatttagaatatcat

SEQ ID NO: 89033 - DNA, 26 bp, Homo sapiens
gttaaggttttatttagaatatcatt

SEQ ID NO: 89034 - DNA, 26 bp, Homo sapiens
ttaaggttttatttagaatatcattt

SEQ ID NO: 89035 - DNA, 26 bp, Homo sapiens
taaggttttatttagaatatcatttt

SEQ ID NO: 89036 - DNA, 26 bp, Homo sapiens
aaggttttatttagaatatcatttta

SEQ ID NO: 89037 - DNA, 26 bp, Homo sapiens
aggttttatttagaatatcattttag

SEQ ID NO: 89038 - DNA, 26 bp, Homo sapiens
ggttttatttagaatatcattttaga

SEQ ID NO: 89039 - DNA, 26 bp, Homo sapiens
gttttatttagaatatcattttagag

SEQ ID NO: 89040 - DNA, 26 bp, Homo sapiens
ttttatttagaatatcattttagaga

SEQ ID NO: 89041 - DNA, 26 bp, Homo sapiens
tttatttagaatatcattttagagac

SEQ ID NO: 89042 - DNA, 26 bp, Homo sapiens
ttatttagaatatcattttagagaca

SEQ ID NO: 89043 - DNA, 26 bp, Homo sapiens
tatttagaatatcattttagagacaa

SEQ ID NO: 89044 - DNA, 26 bp, Homo sapiens
atttagaatatcattttagagacaaa

SEQ ID NO: 89045 - DNA, 26 bp, Homo sapiens
tttagaatatcattttagagacaaaa

SEQ ID NO: 89046 - DNA, 26 bp, Homo sapiens
ttagaatatcattttagagacaaaaa

SEQ ID NO: 89047 - DNA, 26 bp, Homo sapiens
tagaatatcattttagagacaaaaag

SEQ ID NO: 89048 - DNA, 26 bp, Homo sapiens
agaatatcattttagagacaaaaagc

SEQ ID NO: 89049 - DNA, 26 bp, Homo sapiens
gaatatcattttagagacaaaaagca

SEQ ID NO: 89050 - DNA, 26 bp, Homo sapiens
aatatcattttagagacaaaaagcag

SEQ ID NO: 89051 - DNA, 26 bp, Homo sapiens
atatcattttagagacaaaaagcagt

SEQ ID NO: 89052 - DNA, 26 bp, Homo sapiens
tatcattttagagacaaaaagcagtt

SEQ ID NO: 89053 - DNA, 26 bp, Homo sapiens
atcattttagagacaaaaagcagttc

SEQ ID NO: 89054 - DNA, 26 bp, Homo sapiens
tcattttagagacaaaaagcagttca

SEQ ID NO: 89055 - DNA, 26 bp, Homo sapiens
cattttagagacaaaaagcagttcac

SEQ ID NO: 89056 - DNA, 26 bp, Homo sapiens
attttagagacaaaaagcagttcact

SEQ ID NO: 89057 - DNA, 26 bp, Homo sapiens
ttttagagacaaaaagcagttcactt

SEQ ID NO: 89058 - DNA, 26 bp, Homo sapiens
tttagagacaaaaagcagttcacttt

SEQ ID NO: 89059 - DNA, 26 bp, Homo sapiens
ttagagacaaaaagcagttcacttta

SEQ ID NO: 89060 - DNA, 26 bp, Homo sapiens
tagagacaaaaagcagttcactttat

SEQ ID NO: 89061 - DNA, 26 bp, Homo sapiens
agagacaaaaagcagttcactttatt

SEQ ID NO: 89062 - DNA, 26 bp, Homo sapiens
gagacaaaaagcagttcactttattt

SEQ ID NO: 89063 - DNA, 26 bp, Homo sapiens
agacaaaaagcagttcactttattta

SEQ ID NO: 89064 - DNA, 26 bp, Homo sapiens
gacaaaaagcagttcactttatttag

SEQ ID NO: 89065 - DNA, 26 bp, Homo sapiens
acaaaaagcagttcactttatttagc

SEQ ID NO: 89066 - DNA, 26 bp, Homo sapiens
caaaaagcagttcactttatttagca

SEQ ID NO: 89067 - DNA, 26 bp, Homo sapiens
aaaaagcagttcactttatttagcaa

SEQ ID NO: 89068 - DNA, 26 bp, Homo sapiens
aaaagcagttcactttatttagcaaa

SEQ ID NO: 89069 - DNA, 26 bp, Homo sapiens
aaagcagttcactttatttagcaaaa

SEQ ID NO: 89070 - DNA, 26 bp, Homo sapiens
aagcagttcactttatttagcaaaat

SEQ ID NO: 89071 - DNA, 26 bp, Homo sapiens
agcagttcactttatttagcaaaata

SEQ ID NO: 89072 - DNA, 26 bp, Homo sapiens
gcagttcactttatttagcaaaataa

SEQ ID NO: 89073 - DNA, 26 bp, Homo sapiens
cagttcactttatttagcaaaataaa

SEQ ID NO: 89074 - DNA, 26 bp, Homo sapiens
agttcactttatttagcaaaataaac

SEQ ID NO: 89075 - DNA, 26 bp, Homo sapiens
gttcactttatttagcaaaataaact

SEQ ID NO: 89076 - DNA, 26 bp, Homo sapiens
ttcactttatttagcaaaataaactt

SEQ ID NO: 89077 - DNA, 26 bp, Homo sapiens
tcactttatttagcaaaataaactta

SEQ ID NO: 89078 - DNA, 26 bp, Homo sapiens
cactttatttagcaaaataaacttaa

SEQ ID NO: 89079 - DNA, 26 bp, Homo sapiens
actttatttagcaaaataaacttaac

SEQ ID NO: 89080 - DNA, 26 bp, Homo sapiens
ctttatttagcaaaataaacttaacc

SEQ ID NO: 89081 - DNA, 26 bp, Homo sapiens
tttatttagcaaaataaacttaacca

SEQ ID NO: 89082 - DNA, 26 bp, Homo sapiens
ttatttagcaaaataaacttaaccaa

SEQ ID NO: 89083 - DNA, 26 bp, Homo sapiens
tatttagcaaaataaacttaaccaat

SEQ ID NO: 89084 - DNA, 26 bp, Homo sapiens
atttagcaaaataaacttaaccaatg

SEQ ID NO: 89085 - DNA, 26 bp, Homo sapiens
tttagcaaaataaacttaaccaatgc

SEQ ID NO: 89086 - DNA, 26 bp, Homo sapiens
ttagcaaaataaacttaaccaatgca

SEQ ID NO: 89087 - DNA, 26 bp, Homo sapiens
tagcaaaataaacttaaccaatgcat

SEQ ID NO: 89088 - DNA, 26 bp, Homo sapiens
agcaaaataaacttaaccaatgcatt

SEQ ID NO: 89089 - DNA, 26 bp, Homo sapiens
gcaaaataaacttaaccaatgcattt

SEQ ID NO: 89090 - DNA, 26 bp, Homo sapiens
caaaataaacttaaccaatgcattta

SEQ ID NO: 89091 - DNA, 26 bp, Homo sapiens
aaaataaacttaaccaatgcatttaa

SEQ ID NO: 89092 - DNA, 26 bp, Homo sapiens
aaataaacttaaccaatgcatttaaa

SEQ ID NO: 89093 - DNA, 26 bp, Homo sapiens
aataaacttaaccaatgcatttaaat

SEQ ID NO: 89094 - DNA, 26 bp, Homo sapiens
ataaacttaaccaatgcatttaaata

SEQ ID NO: 89095 - DNA, 26 bp, Homo sapiens
taaacttaaccaatgcatttaaatat

SEQ ID NO: 89096 - DNA, 26 bp, Homo sapiens
aaacttaaccaatgcatttaaatata

SEQ ID NO: 89097 - DNA, 26 bp, Homo sapiens
aacttaaccaatgcatttaaatatag

SEQ ID NO: 89098 - DNA, 26 bp, Homo sapiens
acttaaccaatgcatttaaatatagt

SEQ ID NO: 89099 - DNA, 26 bp, Homo sapiens
cttaaccaatgcatttaaatatagta

SEQ ID NO: 89100 - DNA, 26 bp, Homo sapiens
ttaaccaatgcatttaaatatagtaa

SEQ ID NO: 89101 - DNA, 26 bp, Homo sapiens
taaccaatgcatttaaatatagtaaa

SEQ ID NO: 89102 - DNA, 26 bp, Homo sapiens
aaccaatgcatttaaatatagtaaat

SEQ ID NO: 89103 - DNA, 26 bp, Homo sapiens
accaatgcatttaaatatagtaaatt

SEQ ID NO: 89104 - DNA, 26 bp, Homo sapiens
ccaatgcatttaaatatagtaaattc

SEQ ID NO: 89105 - DNA, 26 bp, Homo sapiens
caatgcatttaaatatagtaaattca

SEQ ID NO: 89106 - DNA, 26 bp, Homo sapiens
aatgcatttaaatatagtaaattcaa

SEQ ID NO: 89107 - DNA, 26 bp, Homo sapiens
atgcatttaaatatagtaaattcaag

SEQ ID NO: 89108 - DNA, 26 bp, Homo sapiens
tgcatttaaatatagtaaattcaaga

SEQ ID NO: 89109 - DNA, 26 bp, Homo sapiens
gcatttaaatatagtaaattcaagaa

SEQ ID NO: 89110 - DNA, 26 bp, Homo sapiens
catttaaatatagtaaattcaagaac

SEQ ID NO: 89111 - DNA, 26 bp, Homo sapiens
atttaaatatagtaaattcaagaact

SEQ ID NO: 89112 - DNA, 26 bp, Homo sapiens
tttaaatatagtaaattcaagaactt

SEQ ID NO: 89113 - DNA, 26 bp, Homo sapiens
ttaaatatagtaaattcaagaacttt

SEQ ID NO: 89114 - DNA, 26 bp, Homo sapiens
taaatatagtaaattcaagaactttg

SEQ ID NO: 89115 - DNA, 26 bp, Homo sapiens
aaatatagtaaattcaagaactttgg

SEQ ID NO: 89116 - DNA, 26 bp, Homo sapiens
aatatagtaaattcaagaactttggt

SEQ ID NO: 89117 - DNA, 26 bp, Homo sapiens
atatagtaaattcaagaactttggtg

SEQ ID NO: 89118 - DNA, 26 bp, Homo sapiens
tatagtaaattcaagaactttggtgg

SEQ ID NO: 89119 - DNA, 26 bp, Homo sapiens
atagtaaattcaagaactttggtggt

SEQ ID NO: 89120 - DNA, 26 bp, Homo sapiens
tagtaaattcaagaactttggtggtt

SEQ ID NO: 89121 - DNA, 26 bp, Homo sapiens
agtaaattcaagaactttggtggttt

SEQ ID NO: 89122 - DNA, 26 bp, Homo sapiens
gtaaattcaagaactttggtggtttt

SEQ ID NO: 89123 - DNA, 26 bp, Homo sapiens
taaattcaagaactttggtggttttt

SEQ ID NO: 89124 - DNA, 26 bp, Homo sapiens
aaattcaagaactttggtggtttttt

SEQ ID NO: 89125 - DNA, 26 bp, Homo sapiens
aattcaagaactttggtggttttttt

SEQ ID NO: 89126 - DNA, 26 bp, Homo sapiens
attcaagaactttggtggtttttttt

SEQ ID NO: 89127 - DNA, 26 bp, Homo sapiens
ttcaagaactttggtggttttttttc

SEQ ID NO: 89128 - DNA, 26 bp, Homo sapiens
tcaagaactttggtggttttttttct

SEQ ID NO: 89129 - DNA, 26 bp, Homo sapiens
caagaactttggtggttttttttctt

SEQ ID NO: 89130 - DNA, 26 bp, Homo sapiens
aagaactttggtggttttttttctta

SEQ ID NO: 89131 - DNA, 26 bp, Homo sapiens
agaactttggtggttttttttcttag

SEQ ID NO: 89132 - DNA, 26 bp, Homo sapiens
gaactttggtggttttttttcttaga

SEQ ID NO: 89133 - DNA, 26 bp, Homo sapiens
aactttggtggttttttttcttagat

SEQ ID NO: 89134 - DNA, 26 bp, Homo sapiens
actttggtggttttttttcttagatg

SEQ ID NO: 89135 - DNA, 26 bp, Homo sapiens
ctttggtggttttttttcttagatgc

SEQ ID NO: 89136 - DNA, 26 bp, Homo sapiens
tttggtggttttttttcttagatgct

SEQ ID NO: 89137 - DNA, 26 bp, Homo sapiens
ttggtggttttttttcttagatgctt

SEQ ID NO: 89138 - DNA, 26 bp, Homo sapiens
tggtggttttttttcttagatgcttg

SEQ ID NO: 89139 - DNA, 26 bp, Homo sapiens
ggtggttttttttcttagatgcttgc

SEQ ID NO: 89140 - DNA, 26 bp, Homo sapiens
gtggttttttttcttagatgcttgct

SEQ ID NO: 89141 - DNA, 26 bp, Homo sapiens
tggttttttttcttagatgcttgctt

SEQ ID NO: 89142 - DNA, 26 bp, Homo sapiens
ggttttttttcttagatgcttgcttt

SEQ ID NO: 89143 - DNA, 26 bp, Homo sapiens
gttttttttcttagatgcttgctttt

SEQ ID NO: 89144 - DNA, 26 bp, Homo sapiens
ttttttttcttagatgcttgcttttt

SEQ ID NO: 89145 - DNA, 26 bp, Homo sapiens
tttttttcttagatgcttgctttttt

SEQ ID NO: 89146 - DNA, 26 bp, Homo sapiens
ttttttcttagatgcttgcttttttg

SEQ ID NO: 89147 - DNA, 26 bp, Homo sapiens
tttttcttagatgcttgcttttttgc

SEQ ID NO: 89148 - DNA, 26 bp, Homo sapiens
ttttcttagatgcttgcttttttgcc

SEQ ID NO: 89149 - DNA, 26 bp, Homo sapiens
tttcttagatgcttgcttttttgcca

SEQ ID NO: 89150 - DNA, 26 bp, Homo sapiens
ttcttagatgcttgcttttttgccag

SEQ ID NO: 89151 - DNA, 26 bp, Homo sapiens
tcttagatgcttgcttttttgccagt

SEQ ID NO: 89152 - DNA, 26 bp, Homo sapiens
cttagatgcttgcttttttgccagtt

SEQ ID NO: 89153 - DNA, 26 bp, Homo sapiens
ttagatgcttgcttttttgccagttg

SEQ ID NO: 89154 - DNA, 26 bp, Homo sapiens
tagatgcttgcttttttgccagttgg

SEQ ID NO: 89155 - DNA, 26 bp, Homo sapiens
agatgcttgcttttttgccagttgga

SEQ ID NO: 89156 - DNA, 26 bp, Homo sapiens
gatgcttgcttttttgccagttggag

SEQ ID NO: 89157 - DNA, 26 bp, Homo sapiens
atgcttgcttttttgccagttggagt

SEQ ID NO: 89158 - DNA, 26 bp, Homo sapiens
tgcttgcttttttgccagttggagtt

SEQ ID NO: 89159 - DNA, 26 bp, Homo sapiens
gcttgcttttttgccagttggagttt

SEQ ID NO: 89160 - DNA, 26 bp, Homo sapiens
cttgcttttttgccagttggagtttc

SEQ ID NO: 89161 - DNA, 26 bp, Homo sapiens
ttgcttttttgccagttggagtttct

SEQ ID NO: 89162 - DNA, 26 bp, Homo sapiens
tgcttttttgccagttggagtttctg

SEQ ID NO: 89163 - DNA, 26 bp, Homo sapiens
gcttttttgccagttggagtttctgt

SEQ ID NO: 89164 - DNA, 26 bp, Homo sapiens
cttttttgccagttggagtttctgtc

SEQ ID NO: 89165 - DNA, 26 bp, Homo sapiens
ttttttgccagttggagtttctgtct

SEQ ID NO: 89166 - DNA, 26 bp, Homo sapiens
tttttgccagttggagtttctgtctt

SEQ ID NO: 89167 - DNA, 26 bp, Homo sapiens
ttttgccagttggagtttctgtcttc

SEQ ID NO: 89168 - DNA, 26 bp, Homo sapiens
tttgccagttggagtttctgtcttct

SEQ ID NO: 89169 - DNA, 26 bp, Homo sapiens
ttgccagttggagtttctgtcttctg

SEQ ID NO: 89170 - DNA, 26 bp, Homo sapiens
tgccagttggagtttctgtcttctgg

SEQ ID NO: 89171 - DNA, 26 bp, Homo sapiens
gccagttggagtttctgtcttctggc

SEQ ID NO: 89172 - DNA, 26 bp, Homo sapiens
ccagttggagtttctgtcttctggcc

SEQ ID NO: 89173 - DNA, 26 bp, Homo sapiens
cagttggagtttctgtcttctggccc

SEQ ID NO: 89174 - DNA, 26 bp, Homo sapiens
agttggagtttctgtcttctggccca

SEQ ID NO: 89175 - DNA, 26 bp, Homo sapiens
gttggagtttctgtcttctggcccaa

SEQ ID NO: 89176 - DNA, 26 bp, Homo sapiens
ttggagtttctgtcttctggcccaac

SEQ ID NO: 89177 - DNA, 26 bp, Homo sapiens
tggagtttctgtcttctggcccaaca

SEQ ID NO: 89178 - DNA, 26 bp, Homo sapiens
ggagtttctgtcttctggcccaacag

SEQ ID NO: 89179 - DNA, 26 bp, Homo sapiens
gagtttctgtcttctggcccaacagg

SEQ ID NO: 89180 - DNA, 26 bp, Homo sapiens
agtttctgtcttctggcccaacaggc

SEQ ID NO: 89181 - DNA, 26 bp, Homo sapiens
gtttctgtcttctggcccaacaggct

SEQ ID NO: 89182 - DNA, 26 bp, Homo sapiens
tttctgtcttctggcccaacaggctt

SEQ ID NO: 89183 - DNA, 26 bp, Homo sapiens
ttctgtcttctggcccaacaggcttc

SEQ ID NO: 89184 - DNA, 26 bp, Homo sapiens
tctgtcttctggcccaacaggcttct

SEQ ID NO: 89185 - DNA, 26 bp, Homo sapiens
ctgtcttctggcccaacaggcttctt

SEQ ID NO: 89186 - DNA, 26 bp, Homo sapiens
tgtcttctggcccaacaggcttcttt

SEQ ID NO: 89187 - DNA, 26 bp, Homo sapiens
gtcttctggcccaacaggcttctttc

SEQ ID NO: 89188 - DNA, 26 bp, Homo sapiens
tcttctggcccaacaggcttctttcc

SEQ ID NO: 89189 - DNA, 26 bp, Homo sapiens
cttctggcccaacaggcttctttcca

SEQ ID NO: 89190 - DNA, 26 bp, Homo sapiens
ttctggcccaacaggcttctttccaa

SEQ ID NO: 89191 - DNA, 26 bp, Homo sapiens
tctggcccaacaggcttctttccaag

SEQ ID NO: 89192 - DNA, 26 bp, Homo sapiens
ctggcccaacaggcttctttccaagt

SEQ ID NO: 89193 - DNA, 26 bp, Homo sapiens
tggcccaacaggcttctttccaagtt

SEQ ID NO: 89194 - DNA, 26 bp, Homo sapiens
ggcccaacaggcttctttccaagtta

SEQ ID NO: 89195 - DNA, 26 bp, Homo sapiens
gcccaacaggcttctttccaagttaa

SEQ ID NO: 89196 - DNA, 26 bp, Homo sapiens
cccaacaggcttctttccaagttaat

SEQ ID NO: 89197 - DNA, 26 bp, Homo sapiens
ccaacaggcttctttccaagttaatg

SEQ ID NO: 89198 - DNA, 26 bp, Homo sapiens
caacaggcttctttccaagttaatgc

SEQ ID NO: 89199 - DNA, 26 bp, Homo sapiens
aacaggcttctttccaagttaatgca

SEQ ID NO: 89200 - DNA, 26 bp, Homo sapiens
acaggcttctttccaagttaatgcag

SEQ ID NO: 89201 - DNA, 26 bp, Homo sapiens
caggcttctttccaagttaatgcagc

SEQ ID NO: 89202 - DNA, 26 bp, Homo sapiens
aggcttctttccaagttaatgcagct

SEQ ID NO: 89203 - DNA, 26 bp, Homo sapiens
ggcttctttccaagttaatgcagcta

SEQ ID NO: 89204 - DNA, 26 bp, Homo sapiens
gcttctttccaagttaatgcagctat

SEQ ID NO: 89205 - DNA, 26 bp, Homo sapiens
cttctttccaagttaatgcagctata

SEQ ID NO: 89206 - DNA, 26 bp, Homo sapiens
ttctttccaagttaatgcagctatat

SEQ ID NO: 89207 - DNA, 26 bp, Homo sapiens
tctttccaagttaatgcagctatatt

SEQ ID NO: 89208 - DNA, 26 bp, Homo sapiens
ctttccaagttaatgcagctatattc

SEQ ID NO: 89209 - DNA, 26 bp, Homo sapiens
tttccaagttaatgcagctatattcc

SEQ ID NO: 89210 - DNA, 26 bp, Homo sapiens
ttccaagttaatgcagctatattcca

SEQ ID NO: 89211 - DNA, 26 bp, Homo sapiens
tccaagttaatgcagctatattccaa

SEQ ID NO: 89212 - DNA, 26 bp, Homo sapiens
ccaagttaatgcagctatattccaag

SEQ ID NO: 89213 - DNA, 26 bp, Homo sapiens
caagttaatgcagctatattccaagg

SEQ ID NO: 89214 - DNA, 26 bp, Homo sapiens
aagttaatgcagctatattccaagga

SEQ ID NO: 89215 - DNA, 26 bp, Homo sapiens
agttaatgcagctatattccaaggaa

SEQ ID NO: 89216 - DNA, 26 bp, Homo sapiens
gttaatgcagctatattccaaggaag

SEQ ID NO: 89217 - DNA, 26 bp, Homo sapiens
ttaatgcagctatattccaaggaagt

SEQ ID NO: 89218 - DNA, 26 bp, Homo sapiens
taatgcagctatattccaaggaagtg

SEQ ID NO: 89219 - DNA, 26 bp, Homo sapiens
aatgcagctatattccaaggaagtgt

SEQ ID NO: 89220 - DNA, 26 bp, Homo sapiens
atgcagctatattccaaggaagtgtt

SEQ ID NO: 89221 - DNA, 26 bp, Homo sapiens
tgcagctatattccaaggaagtgttt

SEQ ID NO: 89222 - DNA, 26 bp, Homo sapiens
gcagctatattccaaggaagtgtttt

SEQ ID NO: 89223 - DNA, 26 bp, Homo sapiens
cagctatattccaaggaagtgtttta

SEQ ID NO: 89224 - DNA, 26 bp, Homo sapiens
agctatattccaaggaagtgttttat

SEQ ID NO: 89225 - DNA, 26 bp, Homo sapiens
gctatattccaaggaagtgttttatg

SEQ ID NO: 89226 - DNA, 26 bp, Homo sapiens
ctatattccaaggaagtgttttatga

SEQ ID NO: 89227 - DNA, 26 bp, Homo sapiens
tatattccaaggaagtgttttatgaa

SEQ ID NO: 89228 - DNA, 26 bp, Homo sapiens
atattccaaggaagtgttttatgaaa

SEQ ID NO: 89229 - DNA, 26 bp, Homo sapiens
tattccaaggaagtgttttatgaaat

SEQ ID NO: 89230 - DNA, 26 bp, Homo sapiens
attccaaggaagtgttttatgaaatc

SEQ ID NO: 89231 - DNA, 26 bp, Homo sapiens
ttccaaggaagtgttttatgaaatct

SEQ ID NO: 89232 - DNA, 26 bp, Homo sapiens
tccaaggaagtgttttatgaaatctg

SEQ ID NO: 89233 - DNA, 26 bp, Homo sapiens
ccaaggaagtgttttatgaaatctga

SEQ ID NO: 89234 - DNA, 26 bp, Homo sapiens
caaggaagtgttttatgaaatctgaa

SEQ ID NO: 89235 - DNA, 26 bp, Homo sapiens
aaggaagtgttttatgaaatctgaat

SEQ ID NO: 89236 - DNA, 26 bp, Homo sapiens
aggaagtgttttatgaaatctgaata

SEQ ID NO: 89237 - DNA, 26 bp, Homo sapiens
ggaagtgttttatgaaatctgaatac

SEQ ID NO: 89238 - DNA, 26 bp, Homo sapiens
gaagtgttttatgaaatctgaatact

SEQ ID NO: 89239 - DNA, 26 bp, Homo sapiens
aagtgttttatgaaatctgaatactc

SEQ ID NO: 89240 - DNA, 26 bp, Homo sapiens
agtgttttatgaaatctgaatactca

SEQ ID NO: 89241 - DNA, 26 bp, Homo sapiens
gtgttttatgaaatctgaatactcaa

SEQ ID NO: 89242 - DNA, 26 bp, Homo sapiens
tgttttatgaaatctgaatactcaaa

SEQ ID NO: 89243 - DNA, 26 bp, Homo sapiens
gttttatgaaatctgaatactcaaac

SEQ ID NO: 89244 - DNA, 26 bp, Homo sapiens
ttttatgaaatctgaatactcaaaca

SEQ ID NO: 89245 - DNA, 26 bp, Homo sapiens
tttatgaaatctgaatactcaaacac

SEQ ID NO: 89246 - DNA, 26 bp, Homo sapiens
ttatgaaatctgaatactcaaacacc

SEQ ID NO: 89247 - DNA, 26 bp, Homo sapiens
tatgaaatctgaatactcaaacaccc

SEQ ID NO: 89248 - DNA, 26 bp, Homo sapiens
atgaaatctgaatactcaaacacccc

SEQ ID NO: 89249 - DNA, 26 bp, Homo sapiens
tgaaatctgaatactcaaacacccct

SEQ ID NO: 89250 - DNA, 26 bp, Homo sapiens
gaaatctgaatactcaaacacccctt

SEQ ID NO: 89251 - DNA, 26 bp, Homo sapiens
aaatctgaatactcaaacaccccttc

SEQ ID NO: 89252 - DNA, 26 bp, Homo sapiens
aatctgaatactcaaacaccccttct

SEQ ID NO: 89253 - DNA, 26 bp, Homo sapiens
atctgaatactcaaacaccccttctg

SEQ ID NO: 89254 - DNA, 26 bp, Homo sapiens
tctgaatactcaaacaccccttctgt

SEQ ID NO: 89255 - DNA, 26 bp, Homo sapiens
ctgaatactcaaacaccccttctgta

SEQ ID NO: 89256 - DNA, 26 bp, Homo sapiens
tgaatactcaaacaccccttctgtat

SEQ ID NO: 89257 - DNA, 26 bp, Homo sapiens
gaatactcaaacaccccttctgtatt

SEQ ID NO: 89258 - DNA, 26 bp, Homo sapiens
aatactcaaacaccccttctgtattt

SEQ ID NO: 89259 - DNA, 26 bp, Homo sapiens
atactcaaacaccccttctgtatttt

SEQ ID NO: 89260 - DNA, 26 bp, Homo sapiens
tactcaaacaccccttctgtattttc

SEQ ID NO: 89261 - DNA, 26 bp, Homo sapiens
actcaaacaccccttctgtattttca

SEQ ID NO: 89262 - DNA, 26 bp, Homo sapiens
ctcaaacaccccttctgtattttcac

SEQ ID NO: 89263 - DNA, 26 bp, Homo sapiens
tcaaacaccccttctgtattttcact

SEQ ID NO: 89264 - DNA, 26 bp, Homo sapiens
caaacaccccttctgtattttcactc

SEQ ID NO: 89265 - DNA, 26 bp, Homo sapiens
aaacaccccttctgtattttcactca

SEQ ID NO: 89266 - DNA, 26 bp, Homo sapiens
aacaccccttctgtattttcactcaa

SEQ ID NO: 89267 - DNA, 26 bp, Homo sapiens
acaccccttctgtattttcactcaac

SEQ ID NO: 89268 - DNA, 26 bp, Homo sapiens
caccccttctgtattttcactcaacc

SEQ ID NO: 89269 - DNA, 26 bp, Homo sapiens
accccttctgtattttcactcaacca

SEQ ID NO: 89270 - DNA, 26 bp, Homo sapiens
ccccttctgtattttcactcaaccat

SEQ ID NO: 89271 - DNA, 26 bp, Homo sapiens
cccttctgtattttcactcaaccatc

SEQ ID NO: 89272 - DNA, 26 bp, Homo sapiens
ccttctgtattttcactcaaccatca

SEQ ID NO: 89273 - DNA, 26 bp, Homo sapiens
cttctgtattttcactcaaccatcat

SEQ ID NO: 89274 - DNA, 26 bp, Homo sapiens
ttctgtattttcactcaaccatcatt

SEQ ID NO: 89275 - DNA, 26 bp, Homo sapiens
tctgtattttcactcaaccatcattg

SEQ ID NO: 89276 - DNA, 26 bp, Homo sapiens
ctgtattttcactcaaccatcattgt

SEQ ID NO: 89277 - DNA, 26 bp, Homo sapiens
tgtattttcactcaaccatcattgta

SEQ ID NO: 89278 - DNA, 26 bp, Homo sapiens
gtattttcactcaaccatcattgtat

SEQ ID NO: 89279 - DNA, 26 bp, Homo sapiens
tattttcactcaaccatcattgtatt

SEQ ID NO: 89280 - DNA, 26 bp, Homo sapiens
attttcactcaaccatcattgtatta

SEQ ID NO: 89281 - DNA, 26 bp, Homo sapiens
ttttcactcaaccatcattgtattag

SEQ ID NO: 89282 - DNA, 26 bp, Homo sapiens
tttcactcaaccatcattgtattaga

SEQ ID NO: 89283 - DNA, 26 bp, Homo sapiens
ttcactcaaccatcattgtattagat

SEQ ID NO: 89284 - DNA, 26 bp, Homo sapiens
tcactcaaccatcattgtattagatg

SEQ ID NO: 89285 - DNA, 26 bp, Homo sapiens
cactcaaccatcattgtattagatga

SEQ ID NO: 89286 - DNA, 26 bp, Homo sapiens
actcaaccatcattgtattagatgat

SEQ ID NO: 89287 - DNA, 26 bp, Homo sapiens
ctcaaccatcattgtattagatgata

SEQ ID NO: 89288 - DNA, 26 bp, Homo sapiens
tcaaccatcattgtattagatgatac

SEQ ID NO: 89289 - DNA, 26 bp, Homo sapiens
caaccatcattgtattagatgataca

SEQ ID NO: 89290 - DNA, 26 bp, Homo sapiens
aaccatcattgtattagatgatacat

SEQ ID NO: 89291 - DNA, 26 bp, Homo sapiens
accatcattgtattagatgatacata

SEQ ID NO: 89292 - DNA, 26 bp, Homo sapiens
ccatcattgtattagatgatacataa

SEQ ID NO: 89293 - DNA, 26 bp, Homo sapiens
catcattgtattagatgatacataag

SEQ ID NO: 89294 - DNA, 26 bp, Homo sapiens
atcattgtattagatgatacataagg

SEQ ID NO: 89295 - DNA, 26 bp, Homo sapiens
tcattgtattagatgatacataagga

SEQ ID NO: 89296 - DNA, 26 bp, Homo sapiens
cattgtattagatgatacataaggaa

SEQ ID NO: 89297 - DNA, 26 bp, Homo sapiens
attgtattagatgatacataaggaaa

SEQ ID NO: 89298 - DNA, 26 bp, Homo sapiens
ttgtattagatgatacataaggaaag

SEQ ID NO: 89299 - DNA, 26 bp, Homo sapiens
tgtattagatgatacataaggaaagt

SEQ ID NO: 89300 - DNA, 26 bp, Homo sapiens
gtattagatgatacataaggaaagtg

SEQ ID NO: 89301 - DNA, 26 bp, Homo sapiens
tattagatgatacataaggaaagtga

SEQ ID NO: 89302 - DNA, 26 bp, Homo sapiens
attagatgatacataaggaaagtgac

SEQ ID NO: 89303 - DNA, 26 bp, Homo sapiens
ttagatgatacataaggaaagtgact

SEQ ID NO: 89304 - DNA, 26 bp, Homo sapiens
tagatgatacataaggaaagtgactt

SEQ ID NO: 89305 - DNA, 26 bp, Homo sapiens
agatgatacataaggaaagtgactta

SEQ ID NO: 89306 - DNA, 26 bp, Homo sapiens
gatgatacataaggaaagtgacttag

SEQ ID NO: 89307 - DNA, 26 bp, Homo sapiens
atgatacataaggaaagtgacttagg

SEQ ID NO: 89308 - DNA, 26 bp, Homo sapiens
tgatacataaggaaagtgacttaggg

SEQ ID NO: 89309 - DNA, 26 bp, Homo sapiens
gatacataaggaaagtgacttaggga

SEQ ID NO: 89310 - DNA, 26 bp, Homo sapiens
atacataaggaaagtgacttagggaa

SEQ ID NO: 89311 - DNA, 26 bp, Homo sapiens
tacataaggaaagtgacttagggaag

SEQ ID NO: 89312 - DNA, 26 bp, Homo sapiens
acataaggaaagtgacttagggaagt

SEQ ID NO: 89313 - DNA, 26 bp, Homo sapiens
cataaggaaagtgacttagggaagta

SEQ ID NO: 89314 - DNA, 26 bp, Homo sapiens
ataaggaaagtgacttagggaagtaa

SEQ ID NO: 89315 - DNA, 26 bp, Homo sapiens
taaggaaagtgacttagggaagtaag

SEQ ID NO: 89316 - DNA, 26 bp, Homo sapiens
aaggaaagtgacttagggaagtaagt

SEQ ID NO: 89317 - DNA, 26 bp, Homo sapiens
aggaaagtgacttagggaagtaagtt

SEQ ID NO: 89318 - DNA, 26 bp, Homo sapiens
ggaaagtgacttagggaagtaagttc

SEQ ID NO: 89319 - DNA, 26 bp, Homo sapiens
gaaagtgacttagggaagtaagttca

SEQ ID NO: 89320 - DNA, 26 bp, Homo sapiens
aaagtgacttagggaagtaagttcag

SEQ ID NO: 89321 - DNA, 26 bp, Homo sapiens
aagtgacttagggaagtaagttcaga

SEQ ID NO: 89322 - DNA, 26 bp, Homo sapiens
agtgacttagggaagtaagttcagaa

SEQ ID NO: 89323 - DNA, 26 bp, Homo sapiens
gtgacttagggaagtaagttcagaag

SEQ ID NO: 89324 - DNA, 26 bp, Homo sapiens
tgacttagggaagtaagttcagaagg

SEQ ID NO: 89325 - DNA, 26 bp, Homo sapiens
gacttagggaagtaagttcagaagga

SEQ ID NO: 89326 - DNA, 26 bp, Homo sapiens
acttagggaagtaagttcagaaggaa

SEQ ID NO: 89327 - DNA, 26 bp, Homo sapiens
cttagggaagtaagttcagaaggaaa

SEQ ID NO: 89328 - DNA, 26 bp, Homo sapiens
ttagggaagtaagttcagaaggaaat

SEQ ID NO: 89329 - DNA, 26 bp, Homo sapiens
tagggaagtaagttcagaaggaaatg

SEQ ID NO: 89330 - DNA, 26 bp, Homo sapiens
agggaagtaagttcagaaggaaatgt

SEQ ID NO: 89331 - DNA, 26 bp, Homo sapiens
gggaagtaagttcagaaggaaatgtg

SEQ ID NO: 89332 - DNA, 26 bp, Homo sapiens
ggaagtaagttcagaaggaaatgtgt

SEQ ID NO: 89333 - DNA, 26 bp, Homo sapiens
gaagtaagttcagaaggaaatgtgtt

SEQ ID NO: 89334 - DNA, 26 bp, Homo sapiens
aagtaagttcagaaggaaatgtgttc

SEQ ID NO: 89335 - DNA, 26 bp, Homo sapiens
agtaagttcagaaggaaatgtgttcc

SEQ ID NO: 89336 - DNA, 26 bp, Homo sapiens
gtaagttcagaaggaaatgtgttccc

SEQ ID NO: 89337 - DNA, 26 bp, Homo sapiens
taagttcagaaggaaatgtgttccct

SEQ ID NO: 89338 - DNA, 26 bp, Homo sapiens
aagttcagaaggaaatgtgttccctt

SEQ ID NO: 89339 - DNA, 26 bp, Homo sapiens
agttcagaaggaaatgtgttcccttc

SEQ ID NO: 89340 - DNA, 26 bp, Homo sapiens
gttcagaaggaaatgtgttcccttct

SEQ ID NO: 89341 - DNA, 26 bp, Homo sapiens
ttcagaaggaaatgtgttcccttctc

SEQ ID NO: 89342 - DNA, 26 bp, Homo sapiens
tcagaaggaaatgtgttcccttctcc

SEQ ID NO: 89343 - DNA, 26 bp, Homo sapiens
cagaaggaaatgtgttcccttctccc

SEQ ID NO: 89344 - DNA, 26 bp, Homo sapiens
agaaggaaatgtgttcccttctccct

SEQ ID NO: 89345 - DNA, 26 bp, Homo sapiens
gaaggaaatgtgttcccttctccctc

SEQ ID NO: 89346 - DNA, 26 bp, Homo sapiens
aaggaaatgtgttcccttctccctca

SEQ ID NO: 89347 - DNA, 26 bp, Homo sapiens
aggaaatgtgttcccttctccctcat

SEQ ID NO: 89348 - DNA, 26 bp, Homo sapiens
ggaaatgtgttcccttctccctcata

SEQ ID NO: 89349 - DNA, 26 bp, Homo sapiens
gaaatgtgttcccttctccctcatat

SEQ ID NO: 89350 - DNA, 26 bp, Homo sapiens
aaatgtgttcccttctccctcatatt

SEQ ID NO: 89351 - DNA, 26 bp, Homo sapiens
aatgtgttcccttctccctcatatta

SEQ ID NO: 89352 - DNA, 26 bp, Homo sapiens
atgtgttcccttctccctcatattat

SEQ ID NO: 89353 - DNA, 26 bp, Homo sapiens
tgtgttcccttctccctcatattatc

SEQ ID NO: 89354 - DNA, 26 bp, Homo sapiens
gtgttcccttctccctcatattatct

SEQ ID NO: 89355 - DNA, 26 bp, Homo sapiens
tgttcccttctccctcatattatctt

SEQ ID NO: 89356 - DNA, 26 bp, Homo sapiens
gttcccttctccctcatattatcttt

SEQ ID NO: 89357 - DNA, 26 bp, Homo sapiens
ttcccttctccctcatattatctttt

SEQ ID NO: 89358 - DNA, 26 bp, Homo sapiens
tcccttctccctcatattatcttttc

SEQ ID NO: 89359 - DNA, 26 bp, Homo sapiens
cccttctccctcatattatcttttca

SEQ ID NO: 89360 - DNA, 26 bp, Homo sapiens
ccttctccctcatattatcttttcaa

SEQ ID NO: 89361 - DNA, 26 bp, Homo sapiens
cttctccctcatattatcttttcaac

SEQ ID NO: 89362 - DNA, 26 bp, Homo sapiens
ttctccctcatattatcttttcaaca

SEQ ID NO: 89363 - DNA, 26 bp, Homo sapiens
tctccctcatattatcttttcaacag

SEQ ID NO: 89364 - DNA, 26 bp, Homo sapiens
ctccctcatattatcttttcaacaga

SEQ ID NO: 89365 - DNA, 26 bp, Homo sapiens
tccctcatattatcttttcaacagag

SEQ ID NO: 89366 - DNA, 26 bp, Homo sapiens
ccctcatattatcttttcaacagagg

SEQ ID NO: 89367 - DNA, 26 bp, Homo sapiens
cctcatattatcttttcaacagaggc

SEQ ID NO: 89368 - DNA, 26 bp, Homo sapiens
ctcatattatcttttcaacagaggcc

SEQ ID NO: 89369 - DNA, 26 bp, Homo sapiens
tcatattatcttttcaacagaggcct

SEQ ID NO: 89370 - DNA, 26 bp, Homo sapiens
catattatcttttcaacagaggcctg

SEQ ID NO: 89371 - DNA, 26 bp, Homo sapiens
atattatcttttcaacagaggcctgg

SEQ ID NO: 89372 - DNA, 26 bp, Homo sapiens
tattatcttttcaacagaggcctgga

SEQ ID NO: 89373 - DNA, 26 bp, Homo sapiens
attatcttttcaacagaggcctggat

SEQ ID NO: 89374 - DNA, 26 bp, Homo sapiens
ttatcttttcaacagaggcctggatt

SEQ ID NO: 89375 - DNA, 26 bp, Homo sapiens
tatcttttcaacagaggcctggattg

SEQ ID NO: 89376 - DNA, 26 bp, Homo sapiens
atcttttcaacagaggcctggattgc

SEQ ID NO: 89377 - DNA, 26 bp, Homo sapiens
tcttttcaacagaggcctggattgct

SEQ ID NO: 89378 - DNA, 26 bp, Homo sapiens
cttttcaacagaggcctggattgcta

SEQ ID NO: 89379 - DNA, 26 bp, Homo sapiens
ttttcaacagaggcctggattgctaa

SEQ ID NO: 89380 - DNA, 26 bp, Homo sapiens
tttcaacagaggcctggattgctaaa

SEQ ID NO: 89381 - DNA, 26 bp, Homo sapiens
ttcaacagaggcctggattgctaaat

SEQ ID NO: 89382 - DNA, 26 bp, Homo sapiens
tcaacagaggcctggattgctaaatg

SEQ ID NO: 89383 - DNA, 26 bp, Homo sapiens
caacagaggcctggattgctaaatgg

SEQ ID NO: 89384 - DNA, 26 bp, Homo sapiens
aacagaggcctggattgctaaatgga

SEQ ID NO: 89385 - DNA, 26 bp, Homo sapiens
acagaggcctggattgctaaatggat

SEQ ID NO: 89386 - DNA, 26 bp, Homo sapiens
cagaggcctggattgctaaatggatt

SEQ ID NO: 89387 - DNA, 26 bp, Homo sapiens
agaggcctggattgctaaatggatta

SEQ ID NO: 89388 - DNA, 26 bp, Homo sapiens
gaggcctggattgctaaatggattat

SEQ ID NO: 89389 - DNA, 26 bp, Homo sapiens
aggcctggattgctaaatggattatg

SEQ ID NO: 89390 - DNA, 26 bp, Homo sapiens
ggcctggattgctaaatggattatga

SEQ ID NO: 89391 - DNA, 26 bp, Homo sapiens
gcctggattgctaaatggattatgaa

SEQ ID NO: 89392 - DNA, 26 bp, Homo sapiens
cctggattgctaaatggattatgaaa

SEQ ID NO: 89393 - DNA, 26 bp, Homo sapiens
ctggattgctaaatggattatgaaag

SEQ ID NO: 89394 - DNA, 26 bp, Homo sapiens
tggattgctaaatggattatgaaagc

SEQ ID NO: 89395 - DNA, 26 bp, Homo sapiens
ggattgctaaatggattatgaaagca

SEQ ID NO: 89396 - DNA, 26 bp, Homo sapiens
gattgctaaatggattatgaaagcaa

SEQ ID NO: 89397 - DNA, 26 bp, Homo sapiens
attgctaaatggattatgaaagcaaa

SEQ ID NO: 89398 - DNA, 26 bp, Homo sapiens
ttgctaaatggattatgaaagcaaat

SEQ ID NO: 89399 - DNA, 26 bp, Homo sapiens
tgctaaatggattatgaaagcaaatt

SEQ ID NO: 89400 - DNA, 26 bp, Homo sapiens
gctaaatggattatgaaagcaaattg

SEQ ID NO: 89401 - DNA, 26 bp, Homo sapiens
ctaaatggattatgaaagcaaattgc

SEQ ID NO: 89402 - DNA, 26 bp, Homo sapiens
taaatggattatgaaagcaaattgct

SEQ ID NO: 89403 - DNA, 26 bp, Homo sapiens
aaatggattatgaaagcaaattgcta

SEQ ID NO: 89404 - DNA, 26 bp, Homo sapiens
aatggattatgaaagcaaattgctac

SEQ ID NO: 89405 - DNA, 26 bp, Homo sapiens
atggattatgaaagcaaattgctact

SEQ ID NO: 89406 - DNA, 26 bp, Homo sapiens
tggattatgaaagcaaattgctactg

SEQ ID NO: 89407 - DNA, 26 bp, Homo sapiens
ggattatgaaagcaaattgctactgg

SEQ ID NO: 89408 - DNA, 26 bp, Homo sapiens
gattatgaaagcaaattgctactggg

SEQ ID NO: 89409 - DNA, 26 bp, Homo sapiens
attatgaaagcaaattgctactggga

SEQ ID NO: 89410 - DNA, 26 bp, Homo sapiens
ttatgaaagcaaattgctactgggag

SEQ ID NO: 89411 - DNA, 26 bp, Homo sapiens
tatgaaagcaaattgctactgggagg

SEQ ID NO: 89412 - DNA, 26 bp, Homo sapiens
atgaaagcaaattgctactgggaggt

SEQ ID NO: 89413 - DNA, 26 bp, Homo sapiens
tgaaagcaaattgctactgggaggtg

SEQ ID NO: 89414 - DNA, 26 bp, Homo sapiens
gaaagcaaattgctactgggaggtga

SEQ ID NO: 89415 - DNA, 26 bp, Homo sapiens
aaagcaaattgctactgggaggtgat

SEQ ID NO: 89416 - DNA, 26 bp, Homo sapiens
aagcaaattgctactgggaggtgatg

SEQ ID NO: 89417 - DNA, 26 bp, Homo sapiens
agcaaattgctactgggaggtgatgg

SEQ ID NO: 89418 - DNA, 26 bp, Homo sapiens
gcaaattgctactgggaggtgatggt

SEQ ID NO: 89419 - DNA, 26 bp, Homo sapiens
caaattgctactgggaggtgatggtc

SEQ ID NO: 89420 - DNA, 26 bp, Homo sapiens
aaattgctactgggaggtgatggtca

SEQ ID NO: 89421 - DNA, 26 bp, Homo sapiens
aattgctactgggaggtgatggtcaa

SEQ ID NO: 89422 - DNA, 26 bp, Homo sapiens
attgctactgggaggtgatggtcaaa

SEQ ID NO: 89423 - DNA, 26 bp, Homo sapiens
ttgctactgggaggtgatggtcaaaa

SEQ ID NO: 89424 - DNA, 26 bp, Homo sapiens
tgctactgggaggtgatggtcaaaag

SEQ ID NO: 89425 - DNA, 26 bp, Homo sapiens
gctactgggaggtgatggtcaaaagc

SEQ ID NO: 89426 - DNA, 26 bp, Homo sapiens
ctactgggaggtgatggtcaaaagca

SEQ ID NO: 89427 - DNA, 26 bp, Homo sapiens
tactgggaggtgatggtcaaaagcaa

SEQ ID NO: 89428 - DNA, 26 bp, Homo sapiens
actgggaggtgatggtcaaaagcaaa

SEQ ID NO: 89429 - DNA, 26 bp, Homo sapiens
ctgggaggtgatggtcaaaagcaaac

SEQ ID NO: 89430 - DNA, 26 bp, Homo sapiens
tgggaggtgatggtcaaaagcaaact

SEQ ID NO: 89431 - DNA, 26 bp, Homo sapiens
gggaggtgatggtcaaaagcaaactt

SEQ ID NO: 89432 - DNA, 26 bp, Homo sapiens
ggaggtgatggtcaaaagcaaactta

SEQ ID NO: 89433 - DNA, 26 bp, Homo sapiens
gaggtgatggtcaaaagcaaacttag

SEQ ID NO: 89434 - DNA, 26 bp, Homo sapiens
aggtgatggtcaaaagcaaacttaga

SEQ ID NO: 89435 - DNA, 26 bp, Homo sapiens
ggtgatggtcaaaagcaaacttagat

SEQ ID NO: 89436 - DNA, 26 bp, Homo sapiens
gtgatggtcaaaagcaaacttagatg

SEQ ID NO: 89437 - DNA, 26 bp, Homo sapiens
tgatggtcaaaagcaaacttagatgg

SEQ ID NO: 89438 - DNA, 26 bp, Homo sapiens
gatggtcaaaagcaaacttagatggt

SEQ ID NO: 89439 - DNA, 26 bp, Homo sapiens
atggtcaaaagcaaacttagatggtt

SEQ ID NO: 89440 - DNA, 26 bp, Homo sapiens
tggtcaaaagcaaacttagatggttt

SEQ ID NO: 89441 - DNA, 26 bp, Homo sapiens
ggtcaaaagcaaacttagatggtttt

SEQ ID NO: 89442 - DNA, 26 bp, Homo sapiens
gtcaaaagcaaacttagatggttttc

SEQ ID NO: 89443 - DNA, 26 bp, Homo sapiens
tcaaaagcaaacttagatggttttca

SEQ ID NO: 89444 - DNA, 26 bp, Homo sapiens
caaaagcaaacttagatggttttcac

SEQ ID NO: 89445 - DNA, 26 bp, Homo sapiens
aaaagcaaacttagatggttttcaca

SEQ ID NO: 89446 - DNA, 26 bp, Homo sapiens
aaagcaaacttagatggttttcacac

SEQ ID NO: 89447 - DNA, 26 bp, Homo sapiens
aagcaaacttagatggttttcacacc

SEQ ID NO: 89448 - DNA, 26 bp, Homo sapiens
agcaaacttagatggttttcacacca

SEQ ID NO: 89449 - DNA, 26 bp, Homo sapiens
gcaaacttagatggttttcacaccat

SEQ ID NO: 89450 - DNA, 26 bp, Homo sapiens
caaacttagatggttttcacaccatc

SEQ ID NO: 89451 - DNA, 26 bp, Homo sapiens
aaacttagatggttttcacaccatct

SEQ ID NO: 89452 - DNA, 26 bp, Homo sapiens
aacttagatggttttcacaccatctg

SEQ ID NO: 89453 - DNA, 26 bp, Homo sapiens
acttagatggttttcacaccatctgt

SEQ ID NO: 89454 - DNA, 26 bp, Homo sapiens
cttagatggttttcacaccatctgtc

SEQ ID NO: 89455 - DNA, 26 bp, Homo sapiens
ttagatggttttcacaccatctgtca

SEQ ID NO: 89456 - DNA, 26 bp, Homo sapiens
tagatggttttcacaccatctgtcat

SEQ ID NO: 89457 - DNA, 26 bp, Homo sapiens
agatggttttcacaccatctgtcatc

SEQ ID NO: 89458 - DNA, 26 bp, Homo sapiens
gatggttttcacaccatctgtcatca

SEQ ID NO: 89459 - DNA, 26 bp, Homo sapiens
atggttttcacaccatctgtcatcat

SEQ ID NO: 89460 - DNA, 26 bp, Homo sapiens
tggttttcacaccatctgtcatcatg

SEQ ID NO: 89461 - DNA, 26 bp, Homo sapiens
ggttttcacaccatctgtcatcatga

SEQ ID NO: 89462 - DNA, 26 bp, Homo sapiens
gttttcacaccatctgtcatcatgac

SEQ ID NO: 89463 - DNA, 26 bp, Homo sapiens
ttttcacaccatctgtcatcatgact

SEQ ID NO: 89464 - DNA, 26 bp, Homo sapiens
tttcacaccatctgtcatcatgactc

SEQ ID NO: 89465 - DNA, 26 bp, Homo sapiens
ttcacaccatctgtcatcatgactca

SEQ ID NO: 89466 - DNA, 26 bp, Homo sapiens
tcacaccatctgtcatcatgactcaa

SEQ ID NO: 89467 - DNA, 26 bp, Homo sapiens
cacaccatctgtcatcatgactcaaa

SEQ ID NO: 89468 - DNA, 26 bp, Homo sapiens
acaccatctgtcatcatgactcaaag

SEQ ID NO: 89469 - DNA, 26 bp, Homo sapiens
caccatctgtcatcatgactcaaagg

SEQ ID NO: 89470 - DNA, 26 bp, Homo sapiens
accatctgtcatcatgactcaaaggg

SEQ ID NO: 89471 - DNA, 26 bp, Homo sapiens
ccatctgtcatcatgactcaaaggga

SEQ ID NO: 89472 - DNA, 26 bp, Homo sapiens
catctgtcatcatgactcaaagggaa

SEQ ID NO: 89473 - DNA, 26 bp, Homo sapiens
atctgtcatcatgactcaaagggaaa

SEQ ID NO: 89474 - DNA, 26 bp, Homo sapiens
tctgtcatcatgactcaaagggaaat

SEQ ID NO: 89475 - DNA, 26 bp, Homo sapiens
ctgtcatcatgactcaaagggaaatg

SEQ ID NO: 89476 - DNA, 26 bp, Homo sapiens
tgtcatcatgactcaaagggaaatgc

SEQ ID NO: 89477 - DNA, 26 bp, Homo sapiens
gtcatcatgactcaaagggaaatgct

SEQ ID NO: 89478 - DNA, 26 bp, Homo sapiens
tcatcatgactcaaagggaaatgcta

SEQ ID NO: 89479 - DNA, 26 bp, Homo sapiens
catcatgactcaaagggaaatgctag

SEQ ID NO: 89480 - DNA, 26 bp, Homo sapiens
atcatgactcaaagggaaatgctagc

SEQ ID NO: 89481 - DNA, 26 bp, Homo sapiens
tcatgactcaaagggaaatgctagcc

SEQ ID NO: 89482 - DNA, 26 bp, Homo sapiens
catgactcaaagggaaatgctagcca

SEQ ID NO: 89483 - DNA, 26 bp, Homo sapiens
atgactcaaagggaaatgctagccac

SEQ ID NO: 89484 - DNA, 26 bp, Homo sapiens
tgactcaaagggaaatgctagccaca

SEQ ID NO: 89485 - DNA, 26 bp, Homo sapiens
gactcaaagggaaatgctagccacac

SEQ ID NO: 89486 - DNA, 26 bp, Homo sapiens
actcaaagggaaatgctagccacacc

SEQ ID NO: 89487 - DNA, 26 bp, Homo sapiens
ctcaaagggaaatgctagccacacca

SEQ ID NO: 89488 - DNA, 26 bp, Homo sapiens
tcaaagggaaatgctagccacaccat

SEQ ID NO: 89489 - DNA, 26 bp, Homo sapiens
caaagggaaatgctagccacaccatt

SEQ ID NO: 89490 - DNA, 26 bp, Homo sapiens
aaagggaaatgctagccacaccattt

SEQ ID NO: 89491 - DNA, 26 bp, Homo sapiens
aagggaaatgctagccacaccatttt

SEQ ID NO: 89492 - DNA, 26 bp, Homo sapiens
agggaaatgctagccacaccattttt

SEQ ID NO: 89493 - DNA, 26 bp, Homo sapiens
gggaaatgctagccacaccatttttc

SEQ ID NO: 89494 - DNA, 26 bp, Homo sapiens
ggaaatgctagccacaccatttttcc

SEQ ID NO: 89495 - DNA, 26 bp, Homo sapiens
gaaatgctagccacaccatttttcca

SEQ ID NO: 89496 - DNA, 26 bp, Homo sapiens
aaatgctagccacaccatttttccag

SEQ ID NO: 89497 - DNA, 26 bp, Homo sapiens
aatgctagccacaccatttttccagt

SEQ ID NO: 89498 - DNA, 26 bp, Homo sapiens
atgctagccacaccatttttccagtg

SEQ ID NO: 89499 - DNA, 26 bp, Homo sapiens
tgctagccacaccatttttccagtga

SEQ ID NO: 89500 - DNA, 26 bp, Homo sapiens
gctagccacaccatttttccagtgaa

SEQ ID NO: 89501 - DNA, 26 bp, Homo sapiens
ctagccacaccatttttccagtgaag

SEQ ID NO: 89502 - DNA, 26 bp, Homo sapiens
tagccacaccatttttccagtgaagc

SEQ ID NO: 89503 - DNA, 26 bp, Homo sapiens
agccacaccatttttccagtgaagcc

SEQ ID NO: 89504 - DNA, 26 bp, Homo sapiens
gccacaccatttttccagtgaagcca

SEQ ID NO: 89505 - DNA, 26 bp, Homo sapiens
ccacaccatttttccagtgaagccac

SEQ ID NO: 89506 - DNA, 26 bp, Homo sapiens
cacaccatttttccagtgaagccact

SEQ ID NO: 89507 - DNA, 26 bp, Homo sapiens
acaccatttttccagtgaagccactg

SEQ ID NO: 89508 - DNA, 26 bp, Homo sapiens
caccatttttccagtgaagccactgc

SEQ ID NO: 89509 - DNA, 26 bp, Homo sapiens
accatttttccagtgaagccactgct

SEQ ID NO: 89510 - DNA, 26 bp, Homo sapiens
ccatttttccagtgaagccactgctt

SEQ ID NO: 89511 - DNA, 26 bp, Homo sapiens
catttttccagtgaagccactgcttt

SEQ ID NO: 89512 - DNA, 26 bp, Homo sapiens
atttttccagtgaagccactgcttta

SEQ ID NO: 89513 - DNA, 26 bp, Homo sapiens
tttttccagtgaagccactgctttac

SEQ ID NO: 89514 - DNA, 26 bp, Homo sapiens
ttttccagtgaagccactgctttaca

SEQ ID NO: 89515 - DNA, 26 bp, Homo sapiens
tttccagtgaagccactgctttacac

SEQ ID NO: 89516 - DNA, 26 bp, Homo sapiens
ttccagtgaagccactgctttacaca

SEQ ID NO: 89517 - DNA, 26 bp, Homo sapiens
tccagtgaagccactgctttacacag

SEQ ID NO: 89518 - DNA, 26 bp, Homo sapiens
ccagtgaagccactgctttacacaga

SEQ ID NO: 89519 - DNA, 26 bp, Homo sapiens
cagtgaagccactgctttacacagaa

SEQ ID NO: 89520 - DNA, 26 bp, Homo sapiens
agtgaagccactgctttacacagaag

SEQ ID NO: 89521 - DNA, 26 bp, Homo sapiens
gtgaagccactgctttacacagaaga

SEQ ID NO: 89522 - DNA, 26 bp, Homo sapiens
tgaagccactgctttacacagaagat

SEQ ID NO: 89523 - DNA, 26 bp, Homo sapiens
gaagccactgctttacacagaagata

SEQ ID NO: 89524 - DNA, 26 bp, Homo sapiens
aagccactgctttacacagaagatac

SEQ ID NO: 89525 - DNA, 26 bp, Homo sapiens
agccactgctttacacagaagataca

SEQ ID NO: 89526 - DNA, 26 bp, Homo sapiens
gccactgctttacacagaagatacac

SEQ ID NO: 89527 - DNA, 26 bp, Homo sapiens
ccactgctttacacagaagatacaca

SEQ ID NO: 89528 - DNA, 26 bp, Homo sapiens
cactgctttacacagaagatacacat

SEQ ID NO: 89529 - DNA, 26 bp, Homo sapiens
actgctttacacagaagatacacata

SEQ ID NO: 89530 - DNA, 26 bp, Homo sapiens
ctgctttacacagaagatacacatag

SEQ ID NO: 89531 - DNA, 26 bp, Homo sapiens
tgctttacacagaagatacacatagc

SEQ ID NO: 89532 - DNA, 26 bp, Homo sapiens
gctttacacagaagatacacatagct

SEQ ID NO: 89533 - DNA, 26 bp, Homo sapiens
ctttacacagaagatacacatagctt

SEQ ID NO: 89534 - DNA, 26 bp, Homo sapiens
tttacacagaagatacacatagcttc

SEQ ID NO: 89535 - DNA, 26 bp, Homo sapiens
ttacacagaagatacacatagcttcc

SEQ ID NO: 89536 - DNA, 26 bp, Homo sapiens
tacacagaagatacacatagcttcct

SEQ ID NO: 89537 - DNA, 26 bp, Homo sapiens
acacagaagatacacatagcttccta

SEQ ID NO: 89538 - DNA, 26 bp, Homo sapiens
cacagaagatacacatagcttcctat

SEQ ID NO: 89539 - DNA, 26 bp, Homo sapiens
acagaagatacacatagcttcctatt

SEQ ID NO: 89540 - DNA, 26 bp, Homo sapiens
cagaagatacacatagcttcctattg

SEQ ID NO: 89541 - DNA, 26 bp, Homo sapiens
agaagatacacatagcttcctattgt

SEQ ID NO: 89542 - DNA, 26 bp, Homo sapiens
gaagatacacatagcttcctattgtt

SEQ ID NO: 89543 - DNA, 26 bp, Homo sapiens
aagatacacatagcttcctattgtta

SEQ ID NO: 89544 - DNA, 26 bp, Homo sapiens
agatacacatagcttcctattgttat

SEQ ID NO: 89545 - DNA, 26 bp, Homo sapiens
gatacacatagcttcctattgttatt

SEQ ID NO: 89546 - DNA, 26 bp, Homo sapiens
atacacatagcttcctattgttattt

SEQ ID NO: 89547 - DNA, 26 bp, Homo sapiens
tacacatagcttcctattgttatttt

SEQ ID NO: 89548 - DNA, 26 bp, Homo sapiens
acacatagcttcctattgttattttc

SEQ ID NO: 89549 - DNA, 26 bp, Homo sapiens
cacatagcttcctattgttattttct

SEQ ID NO: 89550 - DNA, 26 bp, Homo sapiens
acatagcttcctattgttattttctt

SEQ ID NO: 89551 - DNA, 26 bp, Homo sapiens
catagcttcctattgttattttcttt

SEQ ID NO: 89552 - DNA, 26 bp, Homo sapiens
atagcttcctattgttattttctttt

SEQ ID NO: 89553 - DNA, 26 bp, Homo sapiens
tagcttcctattgttattttcttttc

SEQ ID NO: 89554 - DNA, 26 bp, Homo sapiens
agcttcctattgttattttcttttct

SEQ ID NO: 89555 - DNA, 26 bp, Homo sapiens
gcttcctattgttattttcttttcta

SEQ ID NO: 89556 - DNA, 26 bp, Homo sapiens
cttcctattgttattttcttttctaa

SEQ ID NO: 89557 - DNA, 26 bp, Homo sapiens
ttcctattgttattttcttttctaat

SEQ ID NO: 89558 - DNA, 26 bp, Homo sapiens
tcctattgttattttcttttctaatt

SEQ ID NO: 89559 - DNA, 26 bp, Homo sapiens
cctattgttattttcttttctaatta

SEQ ID NO: 89560 - DNA, 26 bp, Homo sapiens
ctattgttattttcttttctaattat

SEQ ID NO: 89561 - DNA, 26 bp, Homo sapiens
tattgttattttcttttctaattatg

SEQ ID NO: 89562 - DNA, 26 bp, Homo sapiens
attgttattttcttttctaattatgt

SEQ ID NO: 89563 - DNA, 26 bp, Homo sapiens
ttgttattttcttttctaattatgta

SEQ ID NO: 89564 - DNA, 26 bp, Homo sapiens
tgttattttcttttctaattatgtac

SEQ ID NO: 89565 - DNA, 26 bp, Homo sapiens
gttattttcttttctaattatgtaca

SEQ ID NO: 89566 - DNA, 26 bp, Homo sapiens
ttattttcttttctaattatgtacat

SEQ ID NO: 89567 - DNA, 26 bp, Homo sapiens
tattttcttttctaattatgtacatt

SEQ ID NO: 89568 - DNA, 26 bp, Homo sapiens
attttcttttctaattatgtacattt

SEQ ID NO: 89569 - DNA, 26 bp, Homo sapiens
ttttcttttctaattatgtacattta

SEQ ID NO: 89570 - DNA, 26 bp, Homo sapiens
tttcttttctaattatgtacatttag

SEQ ID NO: 89571 - DNA, 26 bp, Homo sapiens
ttcttttctaattatgtacatttaga

SEQ ID NO: 89572 - DNA, 26 bp, Homo sapiens
tcttttctaattatgtacatttagaa

SEQ ID NO: 89573 - DNA, 26 bp, Homo sapiens
cttttctaattatgtacatttagaaa

SEQ ID NO: 89574 - DNA, 26 bp, Homo sapiens
ttttctaattatgtacatttagaaaa

SEQ ID NO: 89575 - DNA, 26 bp, Homo sapiens
tttctaattatgtacatttagaaaaa

SEQ ID NO: 89576 - DNA, 26 bp, Homo sapiens
ttctaattatgtacatttagaaaaaa

SEQ ID NO: 89577 - DNA, 26 bp, Homo sapiens
tctaattatgtacatttagaaaaaaa

SEQ ID NO: 89578 - DNA, 26 bp, Homo sapiens
ctaattatgtacatttagaaaaaaaa

SEQ ID NO: 89579 - DNA, 26 bp, Homo sapiens
taattatgtacatttagaaaaaaaat

SEQ ID NO: 89580 - DNA, 26 bp, Homo sapiens
aattatgtacatttagaaaaaaaata

SEQ ID NO: 89581 - DNA, 26 bp, Homo sapiens
attatgtacatttagaaaaaaaatac

SEQ ID NO: 89582 - DNA, 26 bp, Homo sapiens
ttatgtacatttagaaaaaaaataca

SEQ ID NO: 89583 - DNA, 26 bp, Homo sapiens
tatgtacatttagaaaaaaaatacaa

SEQ ID NO: 89584 - DNA, 26 bp, Homo sapiens
atgtacatttagaaaaaaaatacaac

SEQ ID NO: 89585 - DNA, 26 bp, Homo sapiens
tgtacatttagaaaaaaaatacaaca

SEQ ID NO: 89586 - DNA, 26 bp, Homo sapiens
gtacatttagaaaaaaaatacaacac

SEQ ID NO: 89587 - DNA, 26 bp, Homo sapiens
tacatttagaaaaaaaatacaacact

SEQ ID NO: 89588 - DNA, 26 bp, Homo sapiens
acatttagaaaaaaaatacaacactg

SEQ ID NO: 89589 - DNA, 26 bp, Homo sapiens
catttagaaaaaaaatacaacactgt

SEQ ID NO: 89590 - DNA, 26 bp, Homo sapiens
atttagaaaaaaaatacaacactgtg

SEQ ID NO: 89591 - DNA, 26 bp, Homo sapiens
tttagaaaaaaaatacaacactgtgt

SEQ ID NO: 89592 - DNA, 26 bp, Homo sapiens
ttagaaaaaaaatacaacactgtgtt

SEQ ID NO: 89593 - DNA, 26 bp, Homo sapiens
tagaaaaaaaatacaacactgtgtta

SEQ ID NO: 89594 - DNA, 26 bp, Homo sapiens
agaaaaaaaatacaacactgtgttaa

SEQ ID NO: 89595 - DNA, 26 bp, Homo sapiens
gaaaaaaaatacaacactgtgttaaa

SEQ ID NO: 89596 - DNA, 26 bp, Homo sapiens
aaaaaaaatacaacactgtgttaaac

SEQ ID NO: 89597 - DNA, 26 bp, Homo sapiens
aaaaaaatacaacactgtgttaaaca

SEQ ID NO: 89598 - DNA, 26 bp, Homo sapiens
aaaaaatacaacactgtgttaaacag

SEQ ID NO: 89599 - DNA, 26 bp, Homo sapiens
aaaaatacaacactgtgttaaacagc

SEQ ID NO: 89600 - DNA, 26 bp, Homo sapiens
aaaatacaacactgtgttaaacagca

SEQ ID NO: 89601 - DNA, 26 bp, Homo sapiens
aaatacaacactgtgttaaacagcag

SEQ ID NO: 89602 - DNA, 26 bp, Homo sapiens
aatacaacactgtgttaaacagcagg

SEQ ID NO: 89603 - DNA, 26 bp, Homo sapiens
atacaacactgtgttaaacagcagga

SEQ ID NO: 89604 - DNA, 26 bp, Homo sapiens
tacaacactgtgttaaacagcaggac

SEQ ID NO: 89605 - DNA, 26 bp, Homo sapiens
acaacactgtgttaaacagcaggaca

SEQ ID NO: 89606 - DNA, 26 bp, Homo sapiens
caacactgtgttaaacagcaggacag

SEQ ID NO: 89607 - DNA, 26 bp, Homo sapiens
aacactgtgttaaacagcaggacagc

SEQ ID NO: 89608 - DNA, 26 bp, Homo sapiens
acactgtgttaaacagcaggacagct

SEQ ID NO: 89609 - DNA, 26 bp, Homo sapiens
cactgtgttaaacagcaggacagcta

SEQ ID NO: 89610 - DNA, 26 bp, Homo sapiens
actgtgttaaacagcaggacagctag

SEQ ID NO: 89611 - DNA, 26 bp, Homo sapiens
ctgtgttaaacagcaggacagctagc

SEQ ID NO: 89612 - DNA, 26 bp, Homo sapiens
tgtgttaaacagcaggacagctagca

SEQ ID NO: 89613 - DNA, 26 bp, Homo sapiens
gtgttaaacagcaggacagctagcaa

SEQ ID NO: 89614 - DNA, 26 bp, Homo sapiens
tgttaaacagcaggacagctagcaat

SEQ ID NO: 89615 - DNA, 26 bp, Homo sapiens
gttaaacagcaggacagctagcaatg

SEQ ID NO: 89616 - DNA, 26 bp, Homo sapiens
ttaaacagcaggacagctagcaatgg

SEQ ID NO: 89617 - DNA, 26 bp, Homo sapiens
taaacagcaggacagctagcaatgga

SEQ ID NO: 89618 - DNA, 26 bp, Homo sapiens
aaacagcaggacagctagcaatggaa

SEQ ID NO: 89619 - DNA, 26 bp, Homo sapiens
aacagcaggacagctagcaatggaac

SEQ ID NO: 89620 - DNA, 26 bp, Homo sapiens
acagcaggacagctagcaatggaaca

SEQ ID NO: 89621 - DNA, 26 bp, Homo sapiens
cagcaggacagctagcaatggaacat

SEQ ID NO: 89622 - DNA, 26 bp, Homo sapiens
agcaggacagctagcaatggaacata

SEQ ID NO: 89623 - DNA, 26 bp, Homo sapiens
gcaggacagctagcaatggaacatac

SEQ ID NO: 89624 - DNA, 26 bp, Homo sapiens
caggacagctagcaatggaacataca

SEQ ID NO: 89625 - DNA, 26 bp, Homo sapiens
aggacagctagcaatggaacatacaa

SEQ ID NO: 89626 - DNA, 26 bp, Homo sapiens
ggacagctagcaatggaacatacaac

SEQ ID NO: 89627 - DNA, 26 bp, Homo sapiens
gacagctagcaatggaacatacaaca

SEQ ID NO: 89628 - DNA, 26 bp, Homo sapiens
acagctagcaatggaacatacaacac

SEQ ID NO: 89629 - DNA, 26 bp, Homo sapiens
cagctagcaatggaacatacaacact

SEQ ID NO: 89630 - DNA, 26 bp, Homo sapiens
agctagcaatggaacatacaacacta

SEQ ID NO: 89631 - DNA, 26 bp, Homo sapiens
gctagcaatggaacatacaacactat

SEQ ID NO: 89632 - DNA, 26 bp, Homo sapiens
ctagcaatggaacatacaacactatg

SEQ ID NO: 89633 - DNA, 26 bp, Homo sapiens
tagcaatggaacatacaacactatgc

SEQ ID NO: 89634 - DNA, 26 bp, Homo sapiens
agcaatggaacatacaacactatgct

SEQ ID NO: 89635 - DNA, 26 bp, Homo sapiens
gcaatggaacatacaacactatgctg

SEQ ID NO: 89636 - DNA, 26 bp, Homo sapiens
caatggaacatacaacactatgctga

SEQ ID NO: 89637 - DNA, 26 bp, Homo sapiens
aatggaacatacaacactatgctgaa

SEQ ID NO: 89638 - DNA, 26 bp, Homo sapiens
atggaacatacaacactatgctgaaa

SEQ ID NO: 89639 - DNA, 26 bp, Homo sapiens
tggaacatacaacactatgctgaaaa

SEQ ID NO: 89640 - DNA, 26 bp, Homo sapiens
ggaacatacaacactatgctgaaaaa

SEQ ID NO: 89641 - DNA, 26 bp, Homo sapiens
gaacatacaacactatgctgaaaaac

SEQ ID NO: 89642 - DNA, 26 bp, Homo sapiens
aacatacaacactatgctgaaaaacc

SEQ ID NO: 89643 - DNA, 26 bp, Homo sapiens
acatacaacactatgctgaaaaacca

SEQ ID NO: 89644 - DNA, 26 bp, Homo sapiens
catacaacactatgctgaaaaaccac

SEQ ID NO: 89645 - DNA, 26 bp, Homo sapiens
atacaacactatgctgaaaaaccaca

SEQ ID NO: 89646 - DNA, 26 bp, Homo sapiens
tacaacactatgctgaaaaaccacaa

SEQ ID NO: 89647 - DNA, 26 bp, Homo sapiens
acaacactatgctgaaaaaccacaac

SEQ ID NO: 89648 - DNA, 26 bp, Homo sapiens
caacactatgctgaaaaaccacaaca

SEQ ID NO: 89649 - DNA, 26 bp, Homo sapiens
aacactatgctgaaaaaccacaacag

SEQ ID NO: 89650 - DNA, 26 bp, Homo sapiens
acactatgctgaaaaaccacaacagc

SEQ ID NO: 89651 - DNA, 26 bp, Homo sapiens
cactatgctgaaaaaccacaacagct

SEQ ID NO: 89652 - DNA, 26 bp, Homo sapiens
actatgctgaaaaaccacaacagctt

SEQ ID NO: 89653 - DNA, 26 bp, Homo sapiens
ctatgctgaaaaaccacaacagcttg

SEQ ID NO: 89654 - DNA, 26 bp, Homo sapiens
tatgctgaaaaaccacaacagcttgg

SEQ ID NO: 89655 - DNA, 26 bp, Homo sapiens
atgctgaaaaaccacaacagcttggt

SEQ ID NO: 89656 - DNA, 26 bp, Homo sapiens
tgctgaaaaaccacaacagcttggtt

SEQ ID NO: 89657 - DNA, 26 bp, Homo sapiens
gctgaaaaaccacaacagcttggtta

SEQ ID NO: 89658 - DNA, 26 bp, Homo sapiens
ctgaaaaaccacaacagcttggttaa

SEQ ID NO: 89659 - DNA, 26 bp, Homo sapiens
tgaaaaaccacaacagcttggttaag

SEQ ID NO: 89660 - DNA, 26 bp, Homo sapiens
gaaaaaccacaacagcttggttaagc

SEQ ID NO: 89661 - DNA, 26 bp, Homo sapiens
aaaaaccacaacagcttggttaagcg

SEQ ID NO: 89662 - DNA, 26 bp, Homo sapiens
aaaaccacaacagcttggttaagcgg

SEQ ID NO: 89663 - DNA, 26 bp, Homo sapiens
aaaccacaacagcttggttaagcgga

SEQ ID NO: 89664 - DNA, 26 bp, Homo sapiens
aaccacaacagcttggttaagcggag

SEQ ID NO: 89665 - DNA, 26 bp, Homo sapiens
accacaacagcttggttaagcggagg

SEQ ID NO: 89666 - DNA, 26 bp, Homo sapiens
ccacaacagcttggttaagcggagga

SEQ ID NO: 89667 - DNA, 26 bp, Homo sapiens
cacaacagcttggttaagcggaggag

SEQ ID NO: 89668 - DNA, 26 bp, Homo sapiens
acaacagcttggttaagcggaggaga

SEQ ID NO: 89669 - DNA, 26 bp, Homo sapiens
caacagcttggttaagcggaggagag

SEQ ID NO: 89670 - DNA, 26 bp, Homo sapiens
aacagcttggttaagcggaggagaga

SEQ ID NO: 89671 - DNA, 26 bp, Homo sapiens
acagcttggttaagcggaggagagaa

SEQ ID NO: 89672 - DNA, 26 bp, Homo sapiens
cagcttggttaagcggaggagagaaa

SEQ ID NO: 89673 - DNA, 26 bp, Homo sapiens
agcttggttaagcggaggagagaaac

SEQ ID NO: 89674 - DNA, 26 bp, Homo sapiens
gcttggttaagcggaggagagaaaca

SEQ ID NO: 89675 - DNA, 26 bp, Homo sapiens
cttggttaagcggaggagagaaacag

SEQ ID NO: 89676 - DNA, 26 bp, Homo sapiens
ttggttaagcggaggagagaaacaga

SEQ ID NO: 89677 - DNA, 26 bp, Homo sapiens
tggttaagcggaggagagaaacagag

SEQ ID NO: 89678 - DNA, 26 bp, Homo sapiens
ggttaagcggaggagagaaacagaga

SEQ ID NO: 89679 - DNA, 26 bp, Homo sapiens
gttaagcggaggagagaaacagagat

SEQ ID NO: 89680 - DNA, 26 bp, Homo sapiens
ttaagcggaggagagaaacagagatg

SEQ ID NO: 89681 - DNA, 26 bp, Homo sapiens
taagcggaggagagaaacagagatgg

SEQ ID NO: 89682 - DNA, 26 bp, Homo sapiens
aagcggaggagagaaacagagatggc

SEQ ID NO: 89683 - DNA, 26 bp, Homo sapiens
agcggaggagagaaacagagatggcc

SEQ ID NO: 89684 - DNA, 26 bp, Homo sapiens
gcggaggagagaaacagagatggcct

SEQ ID NO: 89685 - DNA, 26 bp, Homo sapiens
cggaggagagaaacagagatggcctt

SEQ ID NO: 89686 - DNA, 26 bp, Homo sapiens
ggaggagagaaacagagatggccttc

SEQ ID NO: 89687 - DNA, 26 bp, Homo sapiens
gaggagagaaacagagatggccttca

SEQ ID NO: 89688 - DNA, 26 bp, Homo sapiens
aggagagaaacagagatggccttcat

SEQ ID NO: 89689 - DNA, 26 bp, Homo sapiens
ggagagaaacagagatggccttcatg

SEQ ID NO: 89690 - DNA, 26 bp, Homo sapiens
gagagaaacagagatggccttcatgg

SEQ ID NO: 89691 - DNA, 26 bp, Homo sapiens
agagaaacagagatggccttcatgga

SEQ ID NO: 89692 - DNA, 26 bp, Homo sapiens
gagaaacagagatggccttcatggag

SEQ ID NO: 89693 - DNA, 26 bp, Homo sapiens
agaaacagagatggccttcatggagt

SEQ ID NO: 89694 - DNA, 26 bp, Homo sapiens
gaaacagagatggccttcatggagtg

SEQ ID NO: 89695 - DNA, 26 bp, Homo sapiens
aaacagagatggccttcatggagtga

SEQ ID NO: 89696 - DNA, 26 bp, Homo sapiens
aacagagatggccttcatggagtgaa

SEQ ID NO: 89697 - DNA, 26 bp, Homo sapiens
acagagatggccttcatggagtgaag

SEQ ID NO: 89698 - DNA, 26 bp, Homo sapiens
cagagatggccttcatggagtgaagc

SEQ ID NO: 89699 - DNA, 26 bp, Homo sapiens
agagatggccttcatggagtgaagct

SEQ ID NO: 89700 - DNA, 26 bp, Homo sapiens
gagatggccttcatggagtgaagctg

SEQ ID NO: 89701 - DNA, 26 bp, Homo sapiens
agatggccttcatggagtgaagctgt

SEQ ID NO: 89702 - DNA, 26 bp, Homo sapiens
gatggccttcatggagtgaagctgtc

SEQ ID NO: 89703 - DNA, 26 bp, Homo sapiens
atggccttcatggagtgaagctgtca

SEQ ID NO: 89704 - DNA, 26 bp, Homo sapiens
tggccttcatggagtgaagctgtcaa

SEQ ID NO: 89705 - DNA, 26 bp, Homo sapiens
ggccttcatggagtgaagctgtcaat

SEQ ID NO: 89706 - DNA, 26 bp, Homo sapiens
gccttcatggagtgaagctgtcaatg

SEQ ID NO: 89707 - DNA, 26 bp, Homo sapiens
ccttcatggagtgaagctgtcaatgc

SEQ ID NO: 89708 - DNA, 26 bp, Homo sapiens
cttcatggagtgaagctgtcaatgcc

SEQ ID NO: 89709 - DNA, 26 bp, Homo sapiens
ttcatggagtgaagctgtcaatgcct

SEQ ID NO: 89710 - DNA, 26 bp, Homo sapiens
tcatggagtgaagctgtcaatgcctg

SEQ ID NO: 89711 - DNA, 26 bp, Homo sapiens
catggagtgaagctgtcaatgcctgc

SEQ ID NO: 89712 - DNA, 26 bp, Homo sapiens
atggagtgaagctgtcaatgcctgcc

SEQ ID NO: 89713 - DNA, 26 bp, Homo sapiens
tggagtgaagctgtcaatgcctgcca

SEQ ID NO: 89714 - DNA, 26 bp, Homo sapiens
ggagtgaagctgtcaatgcctgccat

SEQ ID NO: 89715 - DNA, 26 bp, Homo sapiens
gagtgaagctgtcaatgcctgccatc

SEQ ID NO: 89716 - DNA, 26 bp, Homo sapiens
agtgaagctgtcaatgcctgccatct

SEQ ID NO: 89717 - DNA, 26 bp, Homo sapiens
gtgaagctgtcaatgcctgccatctc

SEQ ID NO: 89718 - DNA, 26 bp, Homo sapiens
tgaagctgtcaatgcctgccatctcc

SEQ ID NO: 89719 - DNA, 26 bp, Homo sapiens
gaagctgtcaatgcctgccatctcct

SEQ ID NO: 89720 - DNA, 26 bp, Homo sapiens
aagctgtcaatgcctgccatctcctt

SEQ ID NO: 89721 - DNA, 26 bp, Homo sapiens
agctgtcaatgcctgccatctcctta

SEQ ID NO: 89722 - DNA, 26 bp, Homo sapiens
gctgtcaatgcctgccatctccttag

SEQ ID NO: 89723 - DNA, 26 bp, Homo sapiens
ctgtcaatgcctgccatctccttagt

SEQ ID NO: 89724 - DNA, 26 bp, Homo sapiens
tgtcaatgcctgccatctccttagtc

SEQ ID NO: 89725 - DNA, 26 bp, Homo sapiens
gtcaatgcctgccatctccttagtct

SEQ ID NO: 89726 - DNA, 26 bp, Homo sapiens
tcaatgcctgccatctccttagtctg

SEQ ID NO: 89727 - DNA, 26 bp, Homo sapiens
caatgcctgccatctccttagtctgt

SEQ ID NO: 89728 - DNA, 26 bp, Homo sapiens
aatgcctgccatctccttagtctgtg

SEQ ID NO: 89729 - DNA, 26 bp, Homo sapiens
atgcctgccatctccttagtctgtga

SEQ ID NO: 89730 - DNA, 26 bp, Homo sapiens
tgcctgccatctccttagtctgtgac

SEQ ID NO: 89731 - DNA, 26 bp, Homo sapiens
gcctgccatctccttagtctgtgacg

SEQ ID NO: 89732 - DNA, 26 bp, Homo sapiens
cctgccatctccttagtctgtgacgg

SEQ ID NO: 89733 - DNA, 26 bp, Homo sapiens
ctgccatctccttagtctgtgacgga

SEQ ID NO: 89734 - DNA, 26 bp, Homo sapiens
tgccatctccttagtctgtgacggat

SEQ ID NO: 89735 - DNA, 26 bp, Homo sapiens
gccatctccttagtctgtgacggatc

SEQ ID NO: 89736 - DNA, 26 bp, Homo sapiens
ccatctccttagtctgtgacggatct

SEQ ID NO: 89737 - DNA, 26 bp, Homo sapiens
catctccttagtctgtgacggatctg

SEQ ID NO: 89738 - DNA, 26 bp, Homo sapiens
atctccttagtctgtgacggatctgc

SEQ ID NO: 89739 - DNA, 26 bp, Homo sapiens
tctccttagtctgtgacggatctgca

SEQ ID NO: 89740 - DNA, 26 bp, Homo sapiens
ctccttagtctgtgacggatctgcac

SEQ ID NO: 89741 - DNA, 26 bp, Homo sapiens
tccttagtctgtgacggatctgcact

SEQ ID NO: 89742 - DNA, 26 bp, Homo sapiens
ccttagtctgtgacggatctgcactc

SEQ ID NO: 89743 - DNA, 26 bp, Homo sapiens
cttagtctgtgacggatctgcactct

SEQ ID NO: 89744 - DNA, 26 bp, Homo sapiens
ttagtctgtgacggatctgcactctg

SEQ ID NO: 89745 - DNA, 26 bp, Homo sapiens
tagtctgtgacggatctgcactctga

SEQ ID NO: 89746 - DNA, 26 bp, Homo sapiens
agtctgtgacggatctgcactctgag

SEQ ID NO: 89747 - DNA, 26 bp, Homo sapiens
gtctgtgacggatctgcactctgagg

SEQ ID NO: 89748 - DNA, 26 bp, Homo sapiens
tctgtgacggatctgcactctgaggg

SEQ ID NO: 89749 - DNA, 26 bp, Homo sapiens
ctgtgacggatctgcactctgagggc

SEQ ID NO: 89750 - DNA, 26 bp, Homo sapiens
tgtgacggatctgcactctgagggca

SEQ ID NO: 89751 - DNA, 26 bp, Homo sapiens
gtgacggatctgcactctgagggcag

SEQ ID NO: 89752 - DNA, 26 bp, Homo sapiens
tgacggatctgcactctgagggcagg

SEQ ID NO: 89753 - DNA, 26 bp, Homo sapiens
gacggatctgcactctgagggcaggc

SEQ ID NO: 89754 - DNA, 26 bp, Homo sapiens
acggatctgcactctgagggcaggcc

SEQ ID NO: 89755 - DNA, 26 bp, Homo sapiens
cggatctgcactctgagggcaggcct

SEQ ID NO: 89756 - DNA, 26 bp, Homo sapiens
ggatctgcactctgagggcaggcctt

SEQ ID NO: 89757 - DNA, 26 bp, Homo sapiens
gatctgcactctgagggcaggccttc

SEQ ID NO: 89758 - DNA, 26 bp, Homo sapiens
atctgcactctgagggcaggccttct

SEQ ID NO: 89759 - DNA, 26 bp, Homo sapiens
tctgcactctgagggcaggccttctg

SEQ ID NO: 89760 - DNA, 26 bp, Homo sapiens
ctgcactctgagggcaggccttctga

SEQ ID NO: 89761 - DNA, 26 bp, Homo sapiens
tgcactctgagggcaggccttctgag

SEQ ID NO: 89762 - DNA, 26 bp, Homo sapiens
gcactctgagggcaggccttctgagc

SEQ ID NO: 89763 - DNA, 26 bp, Homo sapiens
cactctgagggcaggccttctgagcg

SEQ ID NO: 89764 - DNA, 26 bp, Homo sapiens
actctgagggcaggccttctgagcgc

SEQ ID NO: 89765 - DNA, 26 bp, Homo sapiens
ctctgagggcaggccttctgagcgcc

SEQ ID NO: 89766 - DNA, 26 bp, Homo sapiens
tctgagggcaggccttctgagcgccg

SEQ ID NO: 89767 - DNA, 26 bp, Homo sapiens
ctgagggcaggccttctgagcgccgc

SEQ ID NO: 89768 - DNA, 26 bp, Homo sapiens
tgagggcaggccttctgagcgccgcc

SEQ ID NO: 89769 - DNA, 26 bp, Homo sapiens
gagggcaggccttctgagcgccgcca

SEQ ID NO: 89770 - DNA, 26 bp, Homo sapiens
agggcaggccttctgagcgccgccac

SEQ ID NO: 89771 - DNA, 26 bp, Homo sapiens
gggcaggccttctgagcgccgccact

SEQ ID NO: 89772 - DNA, 26 bp, Homo sapiens
ggcaggccttctgagcgccgccactt

SEQ ID NO: 89773 - DNA, 26 bp, Homo sapiens
gcaggccttctgagcgccgccacttt

SEQ ID NO: 89774 - DNA, 26 bp, Homo sapiens
caggccttctgagcgccgccactttg

SEQ ID NO: 89775 - DNA, 26 bp, Homo sapiens
aggccttctgagcgccgccactttgc

SEQ ID NO: 89776 - DNA, 26 bp, Homo sapiens
ggccttctgagcgccgccactttgcc

SEQ ID NO: 89777 - DNA, 26 bp, Homo sapiens
gccttctgagcgccgccactttgcca

SEQ ID NO: 89778 - DNA, 26 bp, Homo sapiens
ccttctgagcgccgccactttgccag

SEQ ID NO: 89779 - DNA, 26 bp, Homo sapiens
cttctgagcgccgccactttgccagg

SEQ ID NO: 89780 - DNA, 26 bp, Homo sapiens
ttctgagcgccgccactttgccaggc

SEQ ID NO: 89781 - DNA, 26 bp, Homo sapiens
tctgagcgccgccactttgccaggcg

SEQ ID NO: 89782 - DNA, 26 bp, Homo sapiens
ctgagcgccgccactttgccaggcgc

SEQ ID NO: 89783 - DNA, 26 bp, Homo sapiens
tgagcgccgccactttgccaggcgct

SEQ ID NO: 89784 - DNA, 26 bp, Homo sapiens
gagcgccgccactttgccaggcgctg

SEQ ID NO: 89785 - DNA, 26 bp, Homo sapiens
agcgccgccactttgccaggcgctgc

SEQ ID NO: 89786 - DNA, 26 bp, Homo sapiens
gcgccgccactttgccaggcgctgct

SEQ ID NO: 89787 - DNA, 26 bp, Homo sapiens
cgccgccactttgccaggcgctgctt

SEQ ID NO: 89788 - DNA, 26 bp, Homo sapiens
gccgccactttgccaggcgctgctta

SEQ ID NO: 89789 - DNA, 26 bp, Homo sapiens
ccgccactttgccaggcgctgcttaa

SEQ ID NO: 89790 - DNA, 26 bp, Homo sapiens
cgccactttgccaggcgctgcttaaa

SEQ ID NO: 89791 - DNA, 26 bp, Homo sapiens
gccactttgccaggcgctgcttaaac

SEQ ID NO: 89792 - DNA, 26 bp, Homo sapiens
ccactttgccaggcgctgcttaaacc

SEQ ID NO: 89793 - DNA, 26 bp, Homo sapiens
cactttgccaggcgctgcttaaacca

SEQ ID NO: 89794 - DNA, 26 bp, Homo sapiens
actttgccaggcgctgcttaaaccat

SEQ ID NO: 89795 - DNA, 26 bp, Homo sapiens
ctttgccaggcgctgcttaaaccatt

SEQ ID NO: 89796 - DNA, 26 bp, Homo sapiens
tttgccaggcgctgcttaaaccattt

SEQ ID NO: 89797 - DNA, 26 bp, Homo sapiens
ttgccaggcgctgcttaaaccatttc

SEQ ID NO: 89798 - DNA, 26 bp, Homo sapiens
tgccaggcgctgcttaaaccatttct

SEQ ID NO: 89799 - DNA, 26 bp, Homo sapiens
gccaggcgctgcttaaaccatttctg

SEQ ID NO: 89800 - DNA, 26 bp, Homo sapiens
ccaggcgctgcttaaaccatttctgg

SEQ ID NO: 89801 - DNA, 26 bp, Homo sapiens
caggcgctgcttaaaccatttctggg

SEQ ID NO: 89802 - DNA, 26 bp, Homo sapiens
aggcgctgcttaaaccatttctgggt

SEQ ID NO: 89803 - DNA, 26 bp, Homo sapiens
ggcgctgcttaaaccatttctgggtc

SEQ ID NO: 89804 - DNA, 26 bp, Homo sapiens
gcgctgcttaaaccatttctgggtct

SEQ ID NO: 89805 - DNA, 26 bp, Homo sapiens
cgctgcttaaaccatttctgggtctc

SEQ ID NO: 89806 - DNA, 26 bp, Homo sapiens
gctgcttaaaccatttctgggtctcc

SEQ ID NO: 89807 - DNA, 26 bp, Homo sapiens
ctgcttaaaccatttctgggtctcct

SEQ ID NO: 89808 - DNA, 26 bp, Homo sapiens
tgcttaaaccatttctgggtctcctc

SEQ ID NO: 89809 - DNA, 26 bp, Homo sapiens
gcttaaaccatttctgggtctcctcc

SEQ ID NO: 89810 - DNA, 26 bp, Homo sapiens
cttaaaccatttctgggtctcctcct

SEQ ID NO: 89811 - DNA, 26 bp, Homo sapiens
ttaaaccatttctgggtctcctcctc

SEQ ID NO: 89812 - DNA, 26 bp, Homo sapiens
taaaccatttctgggtctcctcctcg

SEQ ID NO: 89813 - DNA, 26 bp, Homo sapiens
aaaccatttctgggtctcctcctcgg

SEQ ID NO: 89814 - DNA, 26 bp, Homo sapiens
aaccatttctgggtctcctcctcgga

SEQ ID NO: 89815 - DNA, 26 bp, Homo sapiens
accatttctgggtctcctcctcggaa

SEQ ID NO: 89816 - DNA, 26 bp, Homo sapiens
ccatttctgggtctcctcctcggaaa

SEQ ID NO: 89817 - DNA, 26 bp, Homo sapiens
catttctgggtctcctcctcggaaag

SEQ ID NO: 89818 - DNA, 26 bp, Homo sapiens
atttctgggtctcctcctcggaaagg

SEQ ID NO: 89819 - DNA, 26 bp, Homo sapiens
tttctgggtctcctcctcggaaaggc

SEQ ID NO: 89820 - DNA, 26 bp, Homo sapiens
ttctgggtctcctcctcggaaaggcc

SEQ ID NO: 89821 - DNA, 26 bp, Homo sapiens
tctgggtctcctcctcggaaaggcct

SEQ ID NO: 89822 - DNA, 26 bp, Homo sapiens
ctgggtctcctcctcggaaaggcctg

SEQ ID NO: 89823 - DNA, 26 bp, Homo sapiens
tgggtctcctcctcggaaaggcctgc

SEQ ID NO: 89824 - DNA, 26 bp, Homo sapiens
gggtctcctcctcggaaaggcctgcc

SEQ ID NO: 89825 - DNA, 26 bp, Homo sapiens
ggtctcctcctcggaaaggcctgcct

SEQ ID NO: 89826 - DNA, 26 bp, Homo sapiens
gtctcctcctcggaaaggcctgcctc

SEQ ID NO: 89827 - DNA, 26 bp, Homo sapiens
tctcctcctcggaaaggcctgcctcg

SEQ ID NO: 89828 - DNA, 26 bp, Homo sapiens
ctcctcctcggaaaggcctgcctcgg

SEQ ID NO: 89829 - DNA, 26 bp, Homo sapiens
tcctcctcggaaaggcctgcctcggc

SEQ ID NO: 89830 - DNA, 26 bp, Homo sapiens
cctcctcggaaaggcctgcctcggcc

SEQ ID NO: 89831 - DNA, 26 bp, Homo sapiens
ctcctcggaaaggcctgcctcggccg

SEQ ID NO: 89832 - DNA, 26 bp, Homo sapiens
tcctcggaaaggcctgcctcggccgc

SEQ ID NO: 89833 - DNA, 26 bp, Homo sapiens
cctcggaaaggcctgcctcggccgcg

SEQ ID NO: 89834 - DNA, 26 bp, Homo sapiens
ctcggaaaggcctgcctcggccgcga

SEQ ID NO: 89835 - DNA, 26 bp, Homo sapiens
tcggaaaggcctgcctcggccgcgat

SEQ ID NO: 89836 - DNA, 26 bp, Homo sapiens
cggaaaggcctgcctcggccgcgatg

SEQ ID NO: 89837 - DNA, 26 bp, Homo sapiens
ggaaaggcctgcctcggccgcgatga

SEQ ID NO: 89838 - DNA, 26 bp, Homo sapiens
gaaaggcctgcctcggccgcgatgag

SEQ ID NO: 89839 - DNA, 26 bp, Homo sapiens
aaaggcctgcctcggccgcgatgagg

SEQ ID NO: 89840 - DNA, 26 bp, Homo sapiens
aaggcctgcctcggccgcgatgaggc

SEQ ID NO: 89841 - DNA, 26 bp, Homo sapiens
aggcctgcctcggccgcgatgaggca

SEQ ID NO: 89842 - DNA, 26 bp, Homo sapiens
ggcctgcctcggccgcgatgaggcac

SEQ ID NO: 89843 - DNA, 26 bp, Homo sapiens
gcctgcctcggccgcgatgaggcaca

SEQ ID NO: 89844 - DNA, 26 bp, Homo sapiens
cctgcctcggccgcgatgaggcacag

SEQ ID NO: 89845 - DNA, 26 bp, Homo sapiens
ctgcctcggccgcgatgaggcacagc

SEQ ID NO: 89846 - DNA, 26 bp, Homo sapiens
tgcctcggccgcgatgaggcacagcg

SEQ ID NO: 89847 - DNA, 26 bp, Homo sapiens
gcctcggccgcgatgaggcacagcgt

SEQ ID NO: 89848 - DNA, 26 bp, Homo sapiens
cctcggccgcgatgaggcacagcgtg

SEQ ID NO: 89849 - DNA, 26 bp, Homo sapiens
ctcggccgcgatgaggcacagcgtgg

SEQ ID NO: 89850 - DNA, 26 bp, Homo sapiens
tcggccgcgatgaggcacagcgtggt

SEQ ID NO: 89851 - DNA, 26 bp, Homo sapiens
cggccgcgatgaggcacagcgtggtg

SEQ ID NO: 89852 - DNA, 26 bp, Homo sapiens
ggccgcgatgaggcacagcgtggtgg

SEQ ID NO: 89853 - DNA, 26 bp, Homo sapiens
gccgcgatgaggcacagcgtggtgga

SEQ ID NO: 89854 - DNA, 26 bp, Homo sapiens
ccgcgatgaggcacagcgtggtggaa

SEQ ID NO: 89855 - DNA, 26 bp, Homo sapiens
cgcgatgaggcacagcgtggtggaat

SEQ ID NO: 89856 - DNA, 26 bp, Homo sapiens
gcgatgaggcacagcgtggtggaatc

SEQ ID NO: 89857 - DNA, 26 bp, Homo sapiens
cgatgaggcacagcgtggtggaatcc

SEQ ID NO: 89858 - DNA, 26 bp, Homo sapiens
gatgaggcacagcgtggtggaatccg

SEQ ID NO: 89859 - DNA, 26 bp, Homo sapiens
atgaggcacagcgtggtggaatccgg

SEQ ID NO: 89860 - DNA, 26 bp, Homo sapiens
tgaggcacagcgtggtggaatccggg

SEQ ID NO: 89861 - DNA, 26 bp, Homo sapiens
gaggcacagcgtggtggaatccgggt

SEQ ID NO: 89862 - DNA, 26 bp, Homo sapiens
aggcacagcgtggtggaatccgggtg

SEQ ID NO: 89863 - DNA, 26 bp, Homo sapiens
ggcacagcgtggtggaatccgggtgc

SEQ ID NO: 89864 - DNA, 26 bp, Homo sapiens
gcacagcgtggtggaatccgggtgct

SEQ ID NO: 89865 - DNA, 26 bp, Homo sapiens
cacagcgtggtggaatccgggtgctt

SEQ ID NO: 89866 - DNA, 26 bp, Homo sapiens
acagcgtggtggaatccgggtgcttg

SEQ ID NO: 89867 - DNA, 26 bp, Homo sapiens
cagcgtggtggaatccgggtgcttgt

SEQ ID NO: 89868 - DNA, 26 bp, Homo sapiens
agcgtggtggaatccgggtgcttgtc

SEQ ID NO: 89869 - DNA, 26 bp, Homo sapiens
gcgtggtggaatccgggtgcttgtcg

SEQ ID NO: 89870 - DNA, 26 bp, Homo sapiens
cgtggtggaatccgggtgcttgtcga

SEQ ID NO: 89871 - DNA, 26 bp, Homo sapiens
gtggtggaatccgggtgcttgtcgac

SEQ ID NO: 89872 - DNA, 26 bp, Homo sapiens
tggtggaatccgggtgcttgtcgacc

SEQ ID NO: 89873 - DNA, 26 bp, Homo sapiens
ggtggaatccgggtgcttgtcgacct

SEQ ID NO: 89874 - DNA, 26 bp, Homo sapiens
gtggaatccgggtgcttgtcgacctt

SEQ ID NO: 89875 - DNA, 26 bp, Homo sapiens
tggaatccgggtgcttgtcgaccttg

SEQ ID NO: 89876 - DNA, 26 bp, Homo sapiens
ggaatccgggtgcttgtcgaccttgt

SEQ ID NO: 89877 - DNA, 26 bp, Homo sapiens
gaatccgggtgcttgtcgaccttgtt

SEQ ID NO: 89878 - DNA, 26 bp, Homo sapiens
aatccgggtgcttgtcgaccttgttg

SEQ ID NO: 89879 - DNA, 26 bp, Homo sapiens
atccgggtgcttgtcgaccttgttga

SEQ ID NO: 89880 - DNA, 26 bp, Homo sapiens
tccgggtgcttgtcgaccttgttgaa

SEQ ID NO: 89881 - DNA, 26 bp, Homo sapiens
ccgggtgcttgtcgaccttgttgaag

SEQ ID NO: 89882 - DNA, 26 bp, Homo sapiens
cgggtgcttgtcgaccttgttgaagt

SEQ ID NO: 89883 - DNA, 26 bp, Homo sapiens
gggtgcttgtcgaccttgttgaagtt

SEQ ID NO: 89884 - DNA, 26 bp, Homo sapiens
ggtgcttgtcgaccttgttgaagttg

SEQ ID NO: 89885 - DNA, 26 bp, Homo sapiens
gtgcttgtcgaccttgttgaagttgt

SEQ ID NO: 89886 - DNA, 26 bp, Homo sapiens
tgcttgtcgaccttgttgaagttgta

SEQ ID NO: 89887 - DNA, 26 bp, Homo sapiens
gcttgtcgaccttgttgaagttgtac

SEQ ID NO: 89888 - DNA, 26 bp, Homo sapiens
cttgtcgaccttgttgaagttgtact

SEQ ID NO: 89889 - DNA, 26 bp, Homo sapiens
ttgtcgaccttgttgaagttgtactc

SEQ ID NO: 89890 - DNA, 26 bp, Homo sapiens
tgtcgaccttgttgaagttgtactcc

SEQ ID NO: 89891 - DNA, 26 bp, Homo sapiens
gtcgaccttgttgaagttgtactcca

SEQ ID NO: 89892 - DNA, 26 bp, Homo sapiens
tcgaccttgttgaagttgtactccag

SEQ ID NO: 89893 - DNA, 26 bp, Homo sapiens
cgaccttgttgaagttgtactccagg

SEQ ID NO: 89894 - DNA, 26 bp, Homo sapiens
gaccttgttgaagttgtactccagga

SEQ ID NO: 89895 - DNA, 26 bp, Homo sapiens
accttgttgaagttgtactccaggat

SEQ ID NO: 89896 - DNA, 26 bp, Homo sapiens
ccttgttgaagttgtactccaggatt

SEQ ID NO: 89897 - DNA, 26 bp, Homo sapiens
cttgttgaagttgtactccaggattt

SEQ ID NO: 89898 - DNA, 26 bp, Homo sapiens
ttgttgaagttgtactccaggatttc

SEQ ID NO: 89899 - DNA, 26 bp, Homo sapiens
tgttgaagttgtactccaggatttcc

SEQ ID NO: 89900 - DNA, 26 bp, Homo sapiens
gttgaagttgtactccaggatttcca

SEQ ID NO: 89901 - DNA, 26 bp, Homo sapiens
ttgaagttgtactccaggatttccac

SEQ ID NO: 89902 - DNA, 26 bp, Homo sapiens
tgaagttgtactccaggatttccacc

SEQ ID NO: 89903 - DNA, 26 bp, Homo sapiens
gaagttgtactccaggatttccacct

SEQ ID NO: 89904 - DNA, 26 bp, Homo sapiens
aagttgtactccaggatttccacctg

SEQ ID NO: 89905 - DNA, 26 bp, Homo sapiens
agttgtactccaggatttccacctgg

SEQ ID NO: 89906 - DNA, 26 bp, Homo sapiens
gttgtactccaggatttccacctggt

SEQ ID NO: 89907 - DNA, 26 bp, Homo sapiens
ttgtactccaggatttccacctggtc

SEQ ID NO: 89908 - DNA, 26 bp, Homo sapiens
tgtactccaggatttccacctggtcc

SEQ ID NO: 89909 - DNA, 26 bp, Homo sapiens
gtactccaggatttccacctggtcct

SEQ ID NO: 89910 - DNA, 26 bp, Homo sapiens
tactccaggatttccacctggtcctc

SEQ ID NO: 89911 - DNA, 26 bp, Homo sapiens
actccaggatttccacctggtcctct

SEQ ID NO: 89912 - DNA, 26 bp, Homo sapiens
ctccaggatttccacctggtcctctg

SEQ ID NO: 89913 - DNA, 26 bp, Homo sapiens
tccaggatttccacctggtcctctgt

SEQ ID NO: 89914 - DNA, 26 bp, Homo sapiens
ccaggatttccacctggtcctctgtg

SEQ ID NO: 89915 - DNA, 26 bp, Homo sapiens
caggatttccacctggtcctctgtgg

SEQ ID NO: 89916 - DNA, 26 bp, Homo sapiens
aggatttccacctggtcctctgtggg

SEQ ID NO: 89917 - DNA, 26 bp, Homo sapiens
ggatttccacctggtcctctgtgggg

SEQ ID NO: 89918 - DNA, 26 bp, Homo sapiens
gatttccacctggtcctctgtggggc

SEQ ID NO: 89919 - DNA, 26 bp, Homo sapiens
atttccacctggtcctctgtggggcc

SEQ ID NO: 89920 - DNA, 26 bp, Homo sapiens
tttccacctggtcctctgtggggccg

SEQ ID NO: 89921 - DNA, 26 bp, Homo sapiens
ttccacctggtcctctgtggggccgc

SEQ ID NO: 89922 - DNA, 26 bp, Homo sapiens
tccacctggtcctctgtggggccgct

SEQ ID NO: 89923 - DNA, 26 bp, Homo sapiens
ccacctggtcctctgtggggccgctc

SEQ ID NO: 89924 - DNA, 26 bp, Homo sapiens
cacctggtcctctgtggggccgctcg

SEQ ID NO: 89925 - DNA, 26 bp, Homo sapiens
acctggtcctctgtggggccgctcgc

SEQ ID NO: 89926 - DNA, 26 bp, Homo sapiens
cctggtcctctgtggggccgctcgcg

SEQ ID NO: 89927 - DNA, 26 bp, Homo sapiens
ctggtcctctgtggggccgctcgcgg

SEQ ID NO: 89928 - DNA, 26 bp, Homo sapiens
tggtcctctgtggggccgctcgcggt

SEQ ID NO: 89929 - DNA, 26 bp, Homo sapiens
ggtcctctgtggggccgctcgcggtc

SEQ ID NO: 89930 - DNA, 26 bp, Homo sapiens
gtcctctgtggggccgctcgcggtct

SEQ ID NO: 89931 - DNA, 26 bp, Homo sapiens
tcctctgtggggccgctcgcggtctc

SEQ ID NO: 89932 - DNA, 26 bp, Homo sapiens
cctctgtggggccgctcgcggtctcc

SEQ ID NO: 89933 - DNA, 26 bp, Homo sapiens
ctctgtggggccgctcgcggtctccg

SEQ ID NO: 89934 - DNA, 26 bp, Homo sapiens
tctgtggggccgctcgcggtctccgc

SEQ ID NO: 89935 - DNA, 26 bp, Homo sapiens
ctgtggggccgctcgcggtctccgcc

SEQ ID NO: 89936 - DNA, 26 bp, Homo sapiens
tgtggggccgctcgcggtctccgccg

SEQ ID NO: 89937 - DNA, 26 bp, Homo sapiens
gtggggccgctcgcggtctccgccga

SEQ ID NO: 89938 - DNA, 26 bp, Homo sapiens
tggggccgctcgcggtctccgccgac

SEQ ID NO: 89939 - DNA, 26 bp, Homo sapiens
ggggccgctcgcggtctccgccgaca

SEQ ID NO: 89940 - DNA, 26 bp, Homo sapiens
gggccgctcgcggtctccgccgacat

SEQ ID NO: 89941 - DNA, 26 bp, Homo sapiens
ggccgctcgcggtctccgccgacatg

SEQ ID NO: 89942 - DNA, 26 bp, Homo sapiens
gccgctcgcggtctccgccgacatgg

SEQ ID NO: 89943 - DNA, 26 bp, Homo sapiens
ccgctcgcggtctccgccgacatggt

SEQ ID NO: 89944 - DNA, 26 bp, Homo sapiens
cgctcgcggtctccgccgacatggtc

SEQ ID NO: 89945 - DNA, 26 bp, Homo sapiens
gctcgcggtctccgccgacatggtcc

SEQ ID NO: 89946 - DNA, 26 bp, Homo sapiens
ctcgcggtctccgccgacatggtccc

SEQ ID NO: 89947 - DNA, 26 bp, Homo sapiens
tcgcggtctccgccgacatggtccct

SEQ ID NO: 89948 - DNA, 26 bp, Homo sapiens
cgcggtctccgccgacatggtccctg

SEQ ID NO: 89949 - DNA, 26 bp, Homo sapiens
gcggtctccgccgacatggtccctgc

SEQ ID NO: 89950 - DNA, 26 bp, Homo sapiens
cggtctccgccgacatggtccctgcg

SEQ ID NO: 89951 - DNA, 26 bp, Homo sapiens
ggtctccgccgacatggtccctgcgc

SEQ ID NO: 89952 - DNA, 26 bp, Homo sapiens
gtctccgccgacatggtccctgcgcg

SEQ ID NO: 89953 - DNA, 26 bp, Homo sapiens
tctccgccgacatggtccctgcgcgc

SEQ ID NO: 89954 - DNA, 26 bp, Homo sapiens
ctccgccgacatggtccctgcgcgct

SEQ ID NO: 89955 - DNA, 26 bp, Homo sapiens
tccgccgacatggtccctgcgcgctc

SEQ ID NO: 89956 - DNA, 26 bp, Homo sapiens
ccgccgacatggtccctgcgcgctct

SEQ ID NO: 89957 - DNA, 26 bp, Homo sapiens
cgccgacatggtccctgcgcgctctt

SEQ ID NO: 89958 - DNA, 26 bp, Homo sapiens
gccgacatggtccctgcgcgctcttc

SEQ ID NO: 89959 - DNA, 26 bp, Homo sapiens
ccgacatggtccctgcgcgctcttcc

SEQ ID NO: 89960 - DNA, 26 bp, Homo sapiens
cgacatggtccctgcgcgctcttcca

SEQ ID NO: 89961 - DNA, 26 bp, Homo sapiens
gacatggtccctgcgcgctcttccag

SEQ ID NO: 89962 - DNA, 26 bp, Homo sapiens
acatggtccctgcgcgctcttccagt

SEQ ID NO: 89963 - DNA, 26 bp, Homo sapiens
catggtccctgcgcgctcttccagtc

SEQ ID NO: 89964 - DNA, 26 bp, Homo sapiens
atggtccctgcgcgctcttccagtct

SEQ ID NO: 89965 - DNA, 26 bp, Homo sapiens
tggtccctgcgcgctcttccagtctt

SEQ ID NO: 89966 - DNA, 26 bp, Homo sapiens
ggtccctgcgcgctcttccagtcttc

SEQ ID NO: 89967 - DNA, 26 bp, Homo sapiens
gtccctgcgcgctcttccagtcttct

SEQ ID NO: 89968 - DNA, 26 bp, Homo sapiens
tccctgcgcgctcttccagtcttctt

SEQ ID NO: 89969 - DNA, 26 bp, Homo sapiens
ccctgcgcgctcttccagtcttcttc

SEQ ID NO: 89970 - DNA, 26 bp, Homo sapiens
cctgcgcgctcttccagtcttcttct

SEQ ID NO: 89971 - DNA, 26 bp, Homo sapiens
ctgcgcgctcttccagtcttcttctg

SEQ ID NO: 89972 - DNA, 26 bp, Homo sapiens
tgcgcgctcttccagtcttcttctgt

SEQ ID NO: 89973 - DNA, 26 bp, Homo sapiens
gcgcgctcttccagtcttcttctgta

SEQ ID NO: 89974 - DNA, 26 bp, Homo sapiens
cgcgctcttccagtcttcttctgtaa

SEQ ID NO: 89975 - DNA, 26 bp, Homo sapiens
gcgctcttccagtcttcttctgtaac

SEQ ID NO: 89976 - DNA, 26 bp, Homo sapiens
cgctcttccagtcttcttctgtaaca

SEQ ID NO: 89977 - DNA, 26 bp, Homo sapiens
gctcttccagtcttcttctgtaacag

SEQ ID NO: 89978 - DNA, 26 bp, Homo sapiens
ctcttccagtcttcttctgtaacagc

SEQ ID NO: 89979 - DNA, 26 bp, Homo sapiens
tcttccagtcttcttctgtaacagcc

SEQ ID NO: 89980 - DNA, 26 bp, Homo sapiens
cttccagtcttcttctgtaacagccc

SEQ ID NO: 89981 - DNA, 26 bp, Homo sapiens
ttccagtcttcttctgtaacagccca

SEQ ID NO: 89982 - DNA, 26 bp, Homo sapiens
tccagtcttcttctgtaacagcccag

SEQ ID NO: 89983 - DNA, 26 bp, Homo sapiens
ccagtcttcttctgtaacagcccagg

SEQ ID NO: 89984 - DNA, 26 bp, Homo sapiens
cagtcttcttctgtaacagcccagga

SEQ ID NO: 89985 - DNA, 26 bp, Homo sapiens
agtcttcttctgtaacagcccaggaa

SEQ ID NO: 89986 - DNA, 26 bp, Homo sapiens
gtcttcttctgtaacagcccaggaaa

SEQ ID NO: 89987 - DNA, 26 bp, Homo sapiens
tcttcttctgtaacagcccaggaaaa

SEQ ID NO: 89988 - DNA, 26 bp, Homo sapiens
cttcttctgtaacagcccaggaaaat

SEQ ID NO: 89989 - DNA, 26 bp, Homo sapiens
ttcttctgtaacagcccaggaaaatg

SEQ ID NO: 89990 - DNA, 26 bp, Homo sapiens
tcttctgtaacagcccaggaaaatga

SEQ ID NO: 89991 - DNA, 26 bp, Homo sapiens
cttctgtaacagcccaggaaaatgag

SEQ ID NO: 89992 - DNA, 26 bp, Homo sapiens
ttctgtaacagcccaggaaaatgagc

SEQ ID NO: 89993 - DNA, 26 bp, Homo sapiens
tctgtaacagcccaggaaaatgagca

SEQ ID NO: 89994 - DNA, 26 bp, Homo sapiens
ctgtaacagcccaggaaaatgagcat

SEQ ID NO: 89995 - DNA, 26 bp, Homo sapiens
tgtaacagcccaggaaaatgagcata

SEQ ID NO: 89996 - DNA, 26 bp, Homo sapiens
gtaacagcccaggaaaatgagcatag

SEQ ID NO: 89997 - DNA, 26 bp, Homo sapiens
taacagcccaggaaaatgagcatagg

SEQ ID NO: 89998 - DNA, 26 bp, Homo sapiens
aacagcccaggaaaatgagcatagga

SEQ ID NO: 89999 - DNA, 26 bp, Homo sapiens
acagcccaggaaaatgagcataggaa

SEQ ID NO: 90000 - DNA, 26 bp, Homo sapiens
cagcccaggaaaatgagcataggaag

SEQ ID NO: 90001 - DNA, 26 bp, Homo sapiens
agcccaggaaaatgagcataggaaga

SEQ ID NO: 90002 - DNA, 26 bp, Homo sapiens
gcccaggaaaatgagcataggaagac

SEQ ID NO: 90003 - DNA, 26 bp, Homo sapiens
cccaggaaaatgagcataggaagact

SEQ ID NO: 90004 - DNA, 26 bp, Homo sapiens
ccaggaaaatgagcataggaagacta

SEQ ID NO: 90005 - DNA, 26 bp, Homo sapiens
caggaaaatgagcataggaagactaa

SEQ ID NO: 90006 - DNA, 26 bp, Homo sapiens
aggaaaatgagcataggaagactaac

SEQ ID NO: 90007 - DNA, 26 bp, Homo sapiens
ggaaaatgagcataggaagactaact

SEQ ID NO: 90008 - DNA, 26 bp, Homo sapiens
gaaaatgagcataggaagactaactt

SEQ ID NO: 90009 - DNA, 26 bp, Homo sapiens
aaaatgagcataggaagactaacttt

SEQ ID NO: 90010 - DNA, 26 bp, Homo sapiens
aaatgagcataggaagactaactttc

SEQ ID NO: 90011 - DNA, 26 bp, Homo sapiens
aatgagcataggaagactaactttct

SEQ ID NO: 90012 - DNA, 26 bp, Homo sapiens
atgagcataggaagactaactttctg

SEQ ID NO: 90013 - DNA, 26 bp, Homo sapiens
tgagcataggaagactaactttctga

SEQ ID NO: 90014 - DNA, 26 bp, Homo sapiens
gagcataggaagactaactttctgaa

SEQ ID NO: 90015 - DNA, 26 bp, Homo sapiens
agcataggaagactaactttctgaat

SEQ ID NO: 90016 - DNA, 26 bp, Homo sapiens
gcataggaagactaactttctgaatg

SEQ ID NO: 90017 - DNA, 26 bp, Homo sapiens
cataggaagactaactttctgaatgt

SEQ ID NO: 90018 - DNA, 26 bp, Homo sapiens
ataggaagactaactttctgaatgtt

SEQ ID NO: 90019 - DNA, 26 bp, Homo sapiens
taggaagactaactttctgaatgttg

SEQ ID NO: 90020 - DNA, 26 bp, Homo sapiens
aggaagactaactttctgaatgttgc

SEQ ID NO: 90021 - DNA, 26 bp, Homo sapiens
ggaagactaactttctgaatgttgcc

SEQ ID NO: 90022 - DNA, 26 bp, Homo sapiens
gaagactaactttctgaatgttgccc

SEQ ID NO: 90023 - DNA, 26 bp, Homo sapiens
aagactaactttctgaatgttgccca

SEQ ID NO: 90024 - DNA, 26 bp, Homo sapiens
agactaactttctgaatgttgcccag

SEQ ID NO: 90025 - DNA, 26 bp, Homo sapiens
gactaactttctgaatgttgcccagc

SEQ ID NO: 90026 - DNA, 26 bp, Homo sapiens
actaactttctgaatgttgcccagct

SEQ ID NO: 90027 - DNA, 26 bp, Homo sapiens
ctaactttctgaatgttgcccagctg

SEQ ID NO: 90028 - DNA, 26 bp, Homo sapiens
taactttctgaatgttgcccagctgg

SEQ ID NO: 90029 - DNA, 26 bp, Homo sapiens
aactttctgaatgttgcccagctggt

SEQ ID NO: 90030 - DNA, 26 bp, Homo sapiens
actttctgaatgttgcccagctggtg

SEQ ID NO: 90031 - DNA, 26 bp, Homo sapiens
ctttctgaatgttgcccagctggtga

SEQ ID NO: 90032 - DNA, 26 bp, Homo sapiens
tttctgaatgttgcccagctggtgac

SEQ ID NO: 90033 - DNA, 26 bp, Homo sapiens
ttctgaatgttgcccagctggtgacc

SEQ ID NO: 90034 - DNA, 26 bp, Homo sapiens
tctgaatgttgcccagctggtgacct

SEQ ID NO: 90035 - DNA, 26 bp, Homo sapiens
ctgaatgttgcccagctggtgacctg

SEQ ID NO: 90036 - DNA, 26 bp, Homo sapiens
tgaatgttgcccagctggtgacctgt

SEQ ID NO: 90037 - DNA, 26 bp, Homo sapiens
gaatgttgcccagctggtgacctgtg

SEQ ID NO: 90038 - DNA, 26 bp, Homo sapiens
aatgttgcccagctggtgacctgtgc

SEQ ID NO: 90039 - DNA, 26 bp, Homo sapiens
atgttgcccagctggtgacctgtgct

SEQ ID NO: 90040 - DNA, 26 bp, Homo sapiens
tgttgcccagctggtgacctgtgctc

SEQ ID NO: 90041 - DNA, 26 bp, Homo sapiens
gttgcccagctggtgacctgtgctcc

SEQ ID NO: 90042 - DNA, 26 bp, Homo sapiens
ttgcccagctggtgacctgtgctccg

SEQ ID NO: 90043 - DNA, 26 bp, Homo sapiens
tgcccagctggtgacctgtgctccgc

SEQ ID NO: 90044 - DNA, 26 bp, Homo sapiens
gcccagctggtgacctgtgctccgct

SEQ ID NO: 90045 - DNA, 26 bp, Homo sapiens
cccagctggtgacctgtgctccgcta

SEQ ID NO: 90046 - DNA, 26 bp, Homo sapiens
ccagctggtgacctgtgctccgctag

SEQ ID NO: 90047 - DNA, 26 bp, Homo sapiens
cagctggtgacctgtgctccgctaga

SEQ ID NO: 90048 - DNA, 26 bp, Homo sapiens
agctggtgacctgtgctccgctagac

SEQ ID NO: 90049 - DNA, 26 bp, Homo sapiens
gctggtgacctgtgctccgctagacc

SEQ ID NO: 90050 - DNA, 26 bp, Homo sapiens
ctggtgacctgtgctccgctagaccc

SEQ ID NO: 90051 - DNA, 26 bp, Homo sapiens
tggtgacctgtgctccgctagaccct

SEQ ID NO: 90052 - DNA, 26 bp, Homo sapiens
ggtgacctgtgctccgctagaccctt

SEQ ID NO: 90053 - DNA, 26 bp, Homo sapiens
gtgacctgtgctccgctagacccttc

SEQ ID NO: 90054 - DNA, 26 bp, Homo sapiens
tgacctgtgctccgctagacccttct

SEQ ID NO: 90055 - DNA, 26 bp, Homo sapiens
gacctgtgctccgctagacccttctc

SEQ ID NO: 90056 - DNA, 26 bp, Homo sapiens
acctgtgctccgctagacccttctca

SEQ ID NO: 90057 - DNA, 26 bp, Homo sapiens
cctgtgctccgctagacccttctcag

SEQ ID NO: 90058 - DNA, 26 bp, Homo sapiens
ctgtgctccgctagacccttctcagt

SEQ ID NO: 90059 - DNA, 26 bp, Homo sapiens
tgtgctccgctagacccttctcagtg

SEQ ID NO: 90060 - DNA, 26 bp, Homo sapiens
gtgctccgctagacccttctcagtgg

SEQ ID NO: 90061 - DNA, 26 bp, Homo sapiens
tgctccgctagacccttctcagtggg

SEQ ID NO: 90062 - DNA, 26 bp, Homo sapiens
gctccgctagacccttctcagtgggg

SEQ ID NO: 90063 - DNA, 26 bp, Homo sapiens
ctccgctagacccttctcagtggggc

SEQ ID NO: 90064 - DNA, 26 bp, Homo sapiens
tccgctagacccttctcagtggggca

SEQ ID NO: 90065 - DNA, 26 bp, Homo sapiens
ccgctagacccttctcagtggggcag

SEQ ID NO: 90066 - DNA, 26 bp, Homo sapiens
cgctagacccttctcagtggggcagt

SEQ ID NO: 90067 - DNA, 26 bp, Homo sapiens
gctagacccttctcagtggggcagtc

SEQ ID NO: 90068 - DNA, 26 bp, Homo sapiens
ctagacccttctcagtggggcagtct

SEQ ID NO: 90069 - DNA, 26 bp, Homo sapiens
tagacccttctcagtggggcagtctg

SEQ ID NO: 90070 - DNA, 26 bp, Homo sapiens
agacccttctcagtggggcagtctgt

SEQ ID NO: 90071 - DNA, 26 bp, Homo sapiens
gacccttctcagtggggcagtctgtc

SEQ ID NO: 90072 - DNA, 26 bp, Homo sapiens
acccttctcagtggggcagtctgtca

SEQ ID NO: 90073 - DNA, 26 bp, Homo sapiens
cccttctcagtggggcagtctgtcat

SEQ ID NO: 90074 - DNA, 26 bp, Homo sapiens
ccttctcagtggggcagtctgtcatt

SEQ ID NO: 90075 - DNA, 26 bp, Homo sapiens
cttctcagtggggcagtctgtcatta

SEQ ID NO: 90076 - DNA, 26 bp, Homo sapiens
ttctcagtggggcagtctgtcattag

SEQ ID NO: 90077 - DNA, 26 bp, Homo sapiens
tctcagtggggcagtctgtcattagt

SEQ ID NO: 90078 - DNA, 26 bp, Homo sapiens
ctcagtggggcagtctgtcattagtg

SEQ ID NO: 90079 - DNA, 26 bp, Homo sapiens
tcagtggggcagtctgtcattagtgt

SEQ ID NO: 90080 - DNA, 26 bp, Homo sapiens
cagtggggcagtctgtcattagtgtg

SEQ ID NO: 90081 - DNA, 26 bp, Homo sapiens
agtggggcagtctgtcattagtgtgg

SEQ ID NO: 90082 - DNA, 26 bp, Homo sapiens
gtggggcagtctgtcattagtgtgga

SEQ ID NO: 90083 - DNA, 26 bp, Homo sapiens
tggggcagtctgtcattagtgtggaa

SEQ ID NO: 90084 - DNA, 26 bp, Homo sapiens
ggggcagtctgtcattagtgtggaag

SEQ ID NO: 90085 - DNA, 26 bp, Homo sapiens
gggcagtctgtcattagtgtggaaga

SEQ ID NO: 90086 - DNA, 26 bp, Homo sapiens
ggcagtctgtcattagtgtggaagag

SEQ ID NO: 90087 - DNA, 26 bp, Homo sapiens
gcagtctgtcattagtgtggaagagg

SEQ ID NO: 90088 - DNA, 26 bp, Homo sapiens
cagtctgtcattagtgtggaagaggc

SEQ ID NO: 90089 - DNA, 26 bp, Homo sapiens
agtctgtcattagtgtggaagaggca

SEQ ID NO: 90090 - DNA, 26 bp, Homo sapiens
gtctgtcattagtgtggaagaggcaa

SEQ ID NO: 90091 - DNA, 26 bp, Homo sapiens
tctgtcattagtgtggaagaggcaaa

SEQ ID NO: 90092 - DNA, 26 bp, Homo sapiens
ctgtcattagtgtggaagaggcaaag

SEQ ID NO: 90093 - DNA, 26 bp, Homo sapiens
tgtcattagtgtggaagaggcaaagg

SEQ ID NO: 90094 - DNA, 26 bp, Homo sapiens
gtcattagtgtggaagaggcaaaggc

SEQ ID NO: 90095 - DNA, 26 bp, Homo sapiens
tcattagtgtggaagaggcaaaggca

SEQ ID NO: 90096 - DNA, 26 bp, Homo sapiens
cattagtgtggaagaggcaaaggcaa

SEQ ID NO: 90097 - DNA, 26 bp, Homo sapiens
attagtgtggaagaggcaaaggcaag

SEQ ID NO: 90098 - DNA, 26 bp, Homo sapiens
ttagtgtggaagaggcaaaggcaagc

SEQ ID NO: 90099 - DNA, 26 bp, Homo sapiens
tagtgtggaagaggcaaaggcaagcg

SEQ ID NO: 90100 - DNA, 26 bp, Homo sapiens
agtgtggaagaggcaaaggcaagcgc

SEQ ID NO: 90101 - DNA, 26 bp, Homo sapiens
gtgtggaagaggcaaaggcaagcgca

SEQ ID NO: 90102 - DNA, 26 bp, Homo sapiens
tgtggaagaggcaaaggcaagcgcaa

SEQ ID NO: 90103 - DNA, 26 bp, Homo sapiens
gtggaagaggcaaaggcaagcgcaag

SEQ ID NO: 90104 - DNA, 26 bp, Homo sapiens
tggaagaggcaaaggcaagcgcaagc

SEQ ID NO: 90105 - DNA, 26 bp, Homo sapiens
ggaagaggcaaaggcaagcgcaagcc

SEQ ID NO: 90106 - DNA, 26 bp, Homo sapiens
gaagaggcaaaggcaagcgcaagccc

SEQ ID NO: 90107 - DNA, 26 bp, Homo sapiens
aagaggcaaaggcaagcgcaagccct

SEQ ID NO: 90108 - DNA, 26 bp, Homo sapiens
agaggcaaaggcaagcgcaagccctg

SEQ ID NO: 90109 - DNA, 26 bp, Homo sapiens
gaggcaaaggcaagcgcaagccctgg

SEQ ID NO: 90110 - DNA, 26 bp, Homo sapiens
aggcaaaggcaagcgcaagccctggg

SEQ ID NO: 90111 - DNA, 26 bp, Homo sapiens
ggcaaaggcaagcgcaagccctgggt

SEQ ID NO: 90112 - DNA, 26 bp, Homo sapiens
gcaaaggcaagcgcaagccctgggtt

SEQ ID NO: 90113 - DNA, 26 bp, Homo sapiens
caaaggcaagcgcaagccctgggttt

SEQ ID NO: 90114 - DNA, 26 bp, Homo sapiens
aaaggcaagcgcaagccctgggtttg

SEQ ID NO: 90115 - DNA, 26 bp, Homo sapiens
aaggcaagcgcaagccctgggtttgg

SEQ ID NO: 90116 - DNA, 26 bp, Homo sapiens
aggcaagcgcaagccctgggtttgga

SEQ ID NO: 90117 - DNA, 26 bp, Homo sapiens
ggcaagcgcaagccctgggtttggaa

SEQ ID NO: 90118 - DNA, 26 bp, Homo sapiens
gcaagcgcaagccctgggtttggaag

SEQ ID NO: 90119 - DNA, 26 bp, Homo sapiens
tggaatcagtgacttttatttctcat

SEQ ID NO: 90120 - DNA, 26 bp, Homo sapiens
ggaatcagtgacttttatttctcata

SEQ ID NO: 90121 - DNA, 26 bp, Homo sapiens
gaatcagtgacttttatttctcataa

SEQ ID NO: 90122 - DNA, 26 bp, Homo sapiens
aatcagtgacttttatttctcataac

SEQ ID NO: 90123 - DNA, 26 bp, Homo sapiens
atcagtgacttttatttctcataaca

SEQ ID NO: 90124 - DNA, 26 bp, Homo sapiens
tcagtgacttttatttctcataacag

SEQ ID NO: 90125 - DNA, 26 bp, Homo sapiens
cagtgacttttatttctcataacaga

SEQ ID NO: 90126 - DNA, 26 bp, Homo sapiens
agtgacttttatttctcataacagag

SEQ ID NO: 90127 - DNA, 26 bp, Homo sapiens
gtgacttttatttctcataacagagg

SEQ ID NO: 90128 - DNA, 26 bp, Homo sapiens
tgacttttatttctcataacagaggt

SEQ ID NO: 90129 - DNA, 26 bp, Homo sapiens
gacttttatttctcataacagaggtc

SEQ ID NO: 90130 - DNA, 26 bp, Homo sapiens
acttttatttctcataacagaggtca

SEQ ID NO: 90131 - DNA, 26 bp, Homo sapiens
cttttatttctcataacagaggtcag

SEQ ID NO: 90132 - DNA, 26 bp, Homo sapiens
ttttatttctcataacagaggtcaga

SEQ ID NO: 90133 - DNA, 26 bp, Homo sapiens
tttatttctcataacagaggtcagaa

SEQ ID NO: 90134 - DNA, 26 bp, Homo sapiens
ttatttctcataacagaggtcagaat

SEQ ID NO: 90135 - DNA, 26 bp, Homo sapiens
tatttctcataacagaggtcagaata

SEQ ID NO: 90136 - DNA, 26 bp, Homo sapiens
atttctcataacagaggtcagaatag

SEQ ID NO: 90137 - DNA, 26 bp, Homo sapiens
tttctcataacagaggtcagaataga

SEQ ID NO: 90138 - DNA, 26 bp, Homo sapiens
ttctcataacagaggtcagaatagag

SEQ ID NO: 90139 - DNA, 26 bp, Homo sapiens
tctcataacagaggtcagaatagaga

SEQ ID NO: 90140 - DNA, 26 bp, Homo sapiens
ctcataacagaggtcagaatagagaa

SEQ ID NO: 90141 - DNA, 26 bp, Homo sapiens
tcataacagaggtcagaatagagaaa

SEQ ID NO: 90142 - DNA, 26 bp, Homo sapiens
cataacagaggtcagaatagagaaaa

SEQ ID NO: 90143 - DNA, 26 bp, Homo sapiens
ataacagaggtcagaatagagaaaat

SEQ ID NO: 90144 - DNA, 26 bp, Homo sapiens
taacagaggtcagaatagagaaaatg

SEQ ID NO: 90145 - DNA, 26 bp, Homo sapiens
aacagaggtcagaatagagaaaatgt

SEQ ID NO: 90146 - DNA, 26 bp, Homo sapiens
acagaggtcagaatagagaaaatgtg

SEQ ID NO: 90147 - DNA, 26 bp, Homo sapiens
cagaggtcagaatagagaaaatgtga

SEQ ID NO: 90148 - DNA, 26 bp, Homo sapiens
agaggtcagaatagagaaaatgtgat

SEQ ID NO: 90149 - DNA, 26 bp, Homo sapiens
gaggtcagaatagagaaaatgtgatg

SEQ ID NO: 90150 - DNA, 26 bp, Homo sapiens
aggtcagaatagagaaaatgtgatga

SEQ ID NO: 90151 - DNA, 26 bp, Homo sapiens
ggtcagaatagagaaaatgtgatgaa

SEQ ID NO: 90152 - DNA, 26 bp, Homo sapiens
gtcagaatagagaaaatgtgatgaaa

SEQ ID NO: 90153 - DNA, 26 bp, Homo sapiens
tcagaatagagaaaatgtgatgaaag

SEQ ID NO: 90154 - DNA, 26 bp, Homo sapiens
cagaatagagaaaatgtgatgaaagc

SEQ ID NO: 90155 - DNA, 26 bp, Homo sapiens
agaatagagaaaatgtgatgaaagca

SEQ ID NO: 90156 - DNA, 26 bp, Homo sapiens
gaatagagaaaatgtgatgaaagcac

SEQ ID NO: 90157 - DNA, 26 bp, Homo sapiens
aatagagaaaatgtgatgaaagcaca

SEQ ID NO: 90158 - DNA, 26 bp, Homo sapiens
atagagaaaatgtgatgaaagcacaa

SEQ ID NO: 90159 - DNA, 26 bp, Homo sapiens
tagagaaaatgtgatgaaagcacaaa

SEQ ID NO: 90160 - DNA, 26 bp, Homo sapiens
agagaaaatgtgatgaaagcacaaaa

SEQ ID NO: 90161 - DNA, 26 bp, Homo sapiens
gagaaaatgtgatgaaagcacaaaat

SEQ ID NO: 90162 - DNA, 26 bp, Homo sapiens
agaaaatgtgatgaaagcacaaaatt

SEQ ID NO: 90163 - DNA, 26 bp, Homo sapiens
gaaaatgtgatgaaagcacaaaattt

SEQ ID NO: 90164 - DNA, 26 bp, Homo sapiens
aaaatgtgatgaaagcacaaaattta

SEQ ID NO: 90165 - DNA, 26 bp, Homo sapiens
aaatgtgatgaaagcacaaaatttaa

SEQ ID NO: 90166 - DNA, 26 bp, Homo sapiens
aatgtgatgaaagcacaaaatttaac

SEQ ID NO: 90167 - DNA, 26 bp, Homo sapiens
atgtgatgaaagcacaaaatttaaca

SEQ ID NO: 90168 - DNA, 26 bp, Homo sapiens
tgtgatgaaagcacaaaatttaacaa

SEQ ID NO: 90169 - DNA, 26 bp, Homo sapiens
gtgatgaaagcacaaaatttaacaaa

SEQ ID NO: 90170 - DNA, 26 bp, Homo sapiens
tgatgaaagcacaaaatttaacaaag

SEQ ID NO: 90171 - DNA, 26 bp, Homo sapiens
gatgaaagcacaaaatttaacaaaga

SEQ ID NO: 90172 - DNA, 26 bp, Homo sapiens
atgaaagcacaaaatttaacaaagaa

SEQ ID NO: 90173 - DNA, 26 bp, Homo sapiens
tgaaagcacaaaatttaacaaagaaa

SEQ ID NO: 90174 - DNA, 26 bp, Homo sapiens
gaaagcacaaaatttaacaaagaaaa

SEQ ID NO: 90175 - DNA, 26 bp, Homo sapiens
aaagcacaaaatttaacaaagaaaag

SEQ ID NO: 90176 - DNA, 26 bp, Homo sapiens
aagcacaaaatttaacaaagaaaagg

SEQ ID NO: 90177 - DNA, 26 bp, Homo sapiens
agcacaaaatttaacaaagaaaaggg

SEQ ID NO: 90178 - DNA, 26 bp, Homo sapiens
gcacaaaatttaacaaagaaaagggg

SEQ ID NO: 90179 - DNA, 26 bp, Homo sapiens
cacaaaatttaacaaagaaaagggga

SEQ ID NO: 90180 - DNA, 26 bp, Homo sapiens
acaaaatttaacaaagaaaaggggag

SEQ ID NO: 90181 - DNA, 26 bp, Homo sapiens
caaaatttaacaaagaaaaggggagc

SEQ ID NO: 90182 - DNA, 26 bp, Homo sapiens
aaaatttaacaaagaaaaggggagca

SEQ ID NO: 90183 - DNA, 26 bp, Homo sapiens
aaatttaacaaagaaaaggggagcag

SEQ ID NO: 90184 - DNA, 26 bp, Homo sapiens
aatttaacaaagaaaaggggagcagc

SEQ ID NO: 90185 - DNA, 26 bp, Homo sapiens
atttaacaaagaaaaggggagcagcc

SEQ ID NO: 90186 - DNA, 26 bp, Homo sapiens
tttaacaaagaaaaggggagcagccc

SEQ ID NO: 90187 - DNA, 26 bp, Homo sapiens
ttaacaaagaaaaggggagcagccca

SEQ ID NO: 90188 - DNA, 26 bp, Homo sapiens
taacaaagaaaaggggagcagcccac

SEQ ID NO: 90189 - DNA, 26 bp, Homo sapiens
aacaaagaaaaggggagcagcccacc

SEQ ID NO: 90190 - DNA, 26 bp, Homo sapiens
acaaagaaaaggggagcagcccaccc

SEQ ID NO: 90191 - DNA, 26 bp, Homo sapiens
caaagaaaaggggagcagcccaccca

SEQ ID NO: 90192 - DNA, 26 bp, Homo sapiens
aaagaaaaggggagcagcccacccac

SEQ ID NO: 90193 - DNA, 26 bp, Homo sapiens
aagaaaaggggagcagcccacccacc

SEQ ID NO: 90194 - DNA, 26 bp, Homo sapiens
agaaaaggggagcagcccacccacca

SEQ ID NO: 90195 - DNA, 26 bp, Homo sapiens
gaaaaggggagcagcccacccaccat

SEQ ID NO: 90196 - DNA, 26 bp, Homo sapiens
aaaaggggagcagcccacccaccatc

SEQ ID NO: 90197 - DNA, 26 bp, Homo sapiens
aaaggggagcagcccacccaccatca

SEQ ID NO: 90198 - DNA, 26 bp, Homo sapiens
aaggggagcagcccacccaccatcaa

SEQ ID NO: 90199 - DNA, 26 bp, Homo sapiens
aggggagcagcccacccaccatcaag

SEQ ID NO: 90200 - DNA, 26 bp, Homo sapiens
ggggagcagcccacccaccatcaagg

SEQ ID NO: 90201 - DNA, 26 bp, Homo sapiens
gggagcagcccacccaccatcaaggt

SEQ ID NO: 90202 - DNA, 26 bp, Homo sapiens
ggagcagcccacccaccatcaaggtg

SEQ ID NO: 90203 - DNA, 26 bp, Homo sapiens
gagcagcccacccaccatcaaggtgg

SEQ ID NO: 90204 - DNA, 26 bp, Homo sapiens
agcagcccacccaccatcaaggtgga

SEQ ID NO: 90205 - DNA, 26 bp, Homo sapiens
gcagcccacccaccatcaaggtggag

SEQ ID NO: 90206 - DNA, 26 bp, Homo sapiens
cagcccacccaccatcaaggtggaga

SEQ ID NO: 90207 - DNA, 26 bp, Homo sapiens
agcccacccaccatcaaggtggagac

SEQ ID NO: 90208 - DNA, 26 bp, Homo sapiens
gcccacccaccatcaaggtggagaca

SEQ ID NO: 90209 - DNA, 26 bp, Homo sapiens
cccacccaccatcaaggtggagacag

SEQ ID NO: 90210 - DNA, 26 bp, Homo sapiens
ccacccaccatcaaggtggagacaga

SEQ ID NO: 90211 - DNA, 26 bp, Homo sapiens
cacccaccatcaaggtggagacagaa

SEQ ID NO: 90212 - DNA, 26 bp, Homo sapiens
acccaccatcaaggtggagacagaat

SEQ ID NO: 90213 - DNA, 26 bp, Homo sapiens
cccaccatcaaggtggagacagaatg

SEQ ID NO: 90214 - DNA, 26 bp, Homo sapiens
ccaccatcaaggtggagacagaatgt

SEQ ID NO: 90215 - DNA, 26 bp, Homo sapiens
caccatcaaggtggagacagaatgtc

SEQ ID NO: 90216 - DNA, 26 bp, Homo sapiens
accatcaaggtggagacagaatgtct

SEQ ID NO: 90217 - DNA, 26 bp, Homo sapiens
ccatcaaggtggagacagaatgtctg

SEQ ID NO: 90218 - DNA, 26 bp, Homo sapiens
catcaaggtggagacagaatgtctgt

SEQ ID NO: 90219 - DNA, 26 bp, Homo sapiens
atcaaggtggagacagaatgtctgtg

SEQ ID NO: 90220 - DNA, 26 bp, Homo sapiens
tcaaggtggagacagaatgtctgtgt

SEQ ID NO: 90221 - DNA, 26 bp, Homo sapiens
caaggtggagacagaatgtctgtgtt

SEQ ID NO: 90222 - DNA, 26 bp, Homo sapiens
aaggtggagacagaatgtctgtgttc

SEQ ID NO: 90223 - DNA, 26 bp, Homo sapiens
aggtggagacagaatgtctgtgttca

SEQ ID NO: 90224 - DNA, 26 bp, Homo sapiens
ggtggagacagaatgtctgtgttcac

SEQ ID NO: 90225 - DNA, 26 bp, Homo sapiens
gtggagacagaatgtctgtgttcacg

SEQ ID NO: 90226 - DNA, 26 bp, Homo sapiens
tggagacagaatgtctgtgttcacgt

SEQ ID NO: 90227 - DNA, 26 bp, Homo sapiens
ggagacagaatgtctgtgttcacgta

SEQ ID NO: 90228 - DNA, 26 bp, Homo sapiens
gagacagaatgtctgtgttcacgtag

SEQ ID NO: 90229 - DNA, 26 bp, Homo sapiens
agacagaatgtctgtgttcacgtagg

SEQ ID NO: 90230 - DNA, 26 bp, Homo sapiens
gacagaatgtctgtgttcacgtaggt

SEQ ID NO: 90231 - DNA, 26 bp, Homo sapiens
acagaatgtctgtgttcacgtaggtc

SEQ ID NO: 90232 - DNA, 26 bp, Homo sapiens
cagaatgtctgtgttcacgtaggtca

SEQ ID NO: 90233 - DNA, 26 bp, Homo sapiens
agaatgtctgtgttcacgtaggtcaa

SEQ ID NO: 90234 - DNA, 26 bp, Homo sapiens
gaatgtctgtgttcacgtaggtcaat

SEQ ID NO: 90235 - DNA, 26 bp, Homo sapiens
aatgtctgtgttcacgtaggtcaatg

SEQ ID NO: 90236 - DNA, 26 bp, Homo sapiens
atgtctgtgttcacgtaggtcaatgg

SEQ ID NO: 90237 - DNA, 26 bp, Homo sapiens
tgtctgtgttcacgtaggtcaatggt

SEQ ID NO: 90238 - DNA, 26 bp, Homo sapiens
gtctgtgttcacgtaggtcaatggta

SEQ ID NO: 90239 - DNA, 26 bp, Homo sapiens
tctgtgttcacgtaggtcaatggtag

SEQ ID NO: 90240 - DNA, 26 bp, Homo sapiens
ctgtgttcacgtaggtcaatggtagc

SEQ ID NO: 90241 - DNA, 26 bp, Homo sapiens
tgtgttcacgtaggtcaatggtagca

SEQ ID NO: 90242 - DNA, 26 bp, Homo sapiens
gtgttcacgtaggtcaatggtagcag

SEQ ID NO: 90243 - DNA, 26 bp, Homo sapiens
tgttcacgtaggtcaatggtagcagg

SEQ ID NO: 90244 - DNA, 26 bp, Homo sapiens
gttcacgtaggtcaatggtagcaggt

SEQ ID NO: 90245 - DNA, 26 bp, Homo sapiens
ttcacgtaggtcaatggtagcaggtg

SEQ ID NO: 90246 - DNA, 26 bp, Homo sapiens
tcacgtaggtcaatggtagcaggtgg

SEQ ID NO: 90247 - DNA, 26 bp, Homo sapiens
cacgtaggtcaatggtagcaggtggc

SEQ ID NO: 90248 - DNA, 26 bp, Homo sapiens
acgtaggtcaatggtagcaggtggca

SEQ ID NO: 90249 - DNA, 26 bp, Homo sapiens
cgtaggtcaatggtagcaggtggcag

SEQ ID NO: 90250 - DNA, 26 bp, Homo sapiens
gtaggtcaatggtagcaggtggcaga

SEQ ID NO: 90251 - DNA, 26 bp, Homo sapiens
taggtcaatggtagcaggtggcagat

SEQ ID NO: 90252 - DNA, 26 bp, Homo sapiens
aggtcaatggtagcaggtggcagatg

SEQ ID NO: 90253 - DNA, 26 bp, Homo sapiens
ggtcaatggtagcaggtggcagatgg

SEQ ID NO: 90254 - DNA, 26 bp, Homo sapiens
gtcaatggtagcaggtggcagatggc

SEQ ID NO: 90255 - DNA, 26 bp, Homo sapiens
tcaatggtagcaggtggcagatggca

SEQ ID NO: 90256 - DNA, 26 bp, Homo sapiens
caatggtagcaggtggcagatggcag

SEQ ID NO: 90257 - DNA, 26 bp, Homo sapiens
aatggtagcaggtggcagatggcagc

SEQ ID NO: 90258 - DNA, 26 bp, Homo sapiens
atggtagcaggtggcagatggcagct

SEQ ID NO: 90259 - DNA, 26 bp, Homo sapiens
tggtagcaggtggcagatggcagctg

SEQ ID NO: 90260 - DNA, 26 bp, Homo sapiens
ggtagcaggtggcagatggcagctgt

SEQ ID NO: 90261 - DNA, 26 bp, Homo sapiens
gtagcaggtggcagatggcagctgtt

SEQ ID NO: 90262 - DNA, 26 bp, Homo sapiens
tagcaggtggcagatggcagctgtta

SEQ ID NO: 90263 - DNA, 26 bp, Homo sapiens
agcaggtggcagatggcagctgttat

SEQ ID NO: 90264 - DNA, 26 bp, Homo sapiens
gcaggtggcagatggcagctgttatc

SEQ ID NO: 90265 - DNA, 26 bp, Homo sapiens
caggtggcagatggcagctgttatcc

SEQ ID NO: 90266 - DNA, 26 bp, Homo sapiens
aggtggcagatggcagctgttatccg

SEQ ID NO: 90267 - DNA, 26 bp, Homo sapiens
ggtggcagatggcagctgttatccga

SEQ ID NO: 90268 - DNA, 26 bp, Homo sapiens
gtggcagatggcagctgttatccgaa

SEQ ID NO: 90269 - DNA, 26 bp, Homo sapiens
tggcagatggcagctgttatccgaag

SEQ ID NO: 90270 - DNA, 26 bp, Homo sapiens
ggcagatggcagctgttatccgaagc

SEQ ID NO: 90271 - DNA, 26 bp, Homo sapiens
gcagatggcagctgttatccgaagcc

SEQ ID NO: 90272 - DNA, 26 bp, Homo sapiens
cagatggcagctgttatccgaagccc

SEQ ID NO: 90273 - DNA, 26 bp, Homo sapiens
agatggcagctgttatccgaagccct

SEQ ID NO: 90274 - DNA, 26 bp, Homo sapiens
gatggcagctgttatccgaagccctg

SEQ ID NO: 90275 - DNA, 26 bp, Homo sapiens
atggcagctgttatccgaagccctgg

SEQ ID NO: 90276 - DNA, 26 bp, Homo sapiens
tggcagctgttatccgaagccctgga

SEQ ID NO: 90277 - DNA, 26 bp, Homo sapiens
ggcagctgttatccgaagccctggac

SEQ ID NO: 90278 - DNA, 26 bp, Homo sapiens
gcagctgttatccgaagccctggact

SEQ ID NO: 90279 - DNA, 26 bp, Homo sapiens
cagctgttatccgaagccctggactc

SEQ ID NO: 90280 - DNA, 26 bp, Homo sapiens
agctgttatccgaagccctggactct

SEQ ID NO: 90281 - DNA, 26 bp, Homo sapiens
gctgttatccgaagccctggactctt

SEQ ID NO: 90282 - DNA, 26 bp, Homo sapiens
ctgttatccgaagccctggactctta

SEQ ID NO: 90283 - DNA, 26 bp, Homo sapiens
tgttatccgaagccctggactcttaa

SEQ ID NO: 90284 - DNA, 26 bp, Homo sapiens
gttatccgaagccctggactcttaaa

SEQ ID NO: 90285 - DNA, 26 bp, Homo sapiens
ttatccgaagccctggactcttaaag

SEQ ID NO: 90286 - DNA, 26 bp, Homo sapiens
tatccgaagccctggactcttaaagc

SEQ ID NO: 90287 - DNA, 26 bp, Homo sapiens
atccgaagccctggactcttaaagct

SEQ ID NO: 90288 - DNA, 26 bp, Homo sapiens
tccgaagccctggactcttaaagctg

SEQ ID NO: 90289 - DNA, 26 bp, Homo sapiens
ccgaagccctggactcttaaagctga

SEQ ID NO: 90290 - DNA, 26 bp, Homo sapiens
cgaagccctggactcttaaagctgag

SEQ ID NO: 90291 - DNA, 26 bp, Homo sapiens
gaagccctggactcttaaagctgagg

SEQ ID NO: 90292 - DNA, 26 bp, Homo sapiens
aagccctggactcttaaagctgagga

SEQ ID NO: 90293 - DNA, 26 bp, Homo sapiens
agccctggactcttaaagctgaggaa

SEQ ID NO: 90294 - DNA, 26 bp, Homo sapiens
gccctggactcttaaagctgaggaaa

SEQ ID NO: 90295 - DNA, 26 bp, Homo sapiens
ccctggactcttaaagctgaggaaaa

SEQ ID NO: 90296 - DNA, 26 bp, Homo sapiens
cctggactcttaaagctgaggaaaaa

SEQ ID NO: 90297 - DNA, 26 bp, Homo sapiens
ctggactcttaaagctgaggaaaaag

SEQ ID NO: 90298 - DNA, 26 bp, Homo sapiens
tggactcttaaagctgaggaaaaagt

SEQ ID NO: 90299 - DNA, 26 bp, Homo sapiens
ggactcttaaagctgaggaaaaagtt

SEQ ID NO: 90300 - DNA, 26 bp, Homo sapiens
gactcttaaagctgaggaaaaagttt

SEQ ID NO: 90301 - DNA, 26 bp, Homo sapiens
actcttaaagctgaggaaaaagtttt

SEQ ID NO: 90302 - DNA, 26 bp, Homo sapiens
ctcttaaagctgaggaaaaagttttg

SEQ ID NO: 90303 - DNA, 26 bp, Homo sapiens
tcttaaagctgaggaaaaagttttgt

SEQ ID NO: 90304 - DNA, 26 bp, Homo sapiens
cttaaagctgaggaaaaagttttgtt

SEQ ID NO: 90305 - DNA, 26 bp, Homo sapiens
ttaaagctgaggaaaaagttttgttc

SEQ ID NO: 90306 - DNA, 26 bp, Homo sapiens
taaagctgaggaaaaagttttgttct

SEQ ID NO: 90307 - DNA, 26 bp, Homo sapiens
aaagctgaggaaaaagttttgttctg

SEQ ID NO: 90308 - DNA, 26 bp, Homo sapiens
aagctgaggaaaaagttttgttctgt

SEQ ID NO: 90309 - DNA, 26 bp, Homo sapiens
agctgaggaaaaagttttgttctgtt

SEQ ID NO: 90310 - DNA, 26 bp, Homo sapiens
gctgaggaaaaagttttgttctgttc

SEQ ID NO: 90311 - DNA, 26 bp, Homo sapiens
ctgaggaaaaagttttgttctgttca

SEQ ID NO: 90312 - DNA, 26 bp, Homo sapiens
tgaggaaaaagttttgttctgttcag

SEQ ID NO: 90313 - DNA, 26 bp, Homo sapiens
gaggaaaaagttttgttctgttcagg

SEQ ID NO: 90314 - DNA, 26 bp, Homo sapiens
aggaaaaagttttgttctgttcaggt

SEQ ID NO: 90315 - DNA, 26 bp, Homo sapiens
ggaaaaagttttgttctgttcaggtg

SEQ ID NO: 90316 - DNA, 26 bp, Homo sapiens
gaaaaagttttgttctgttcaggtga

SEQ ID NO: 90317 - DNA, 26 bp, Homo sapiens
aaaaagttttgttctgttcaggtgat

SEQ ID NO: 90318 - DNA, 26 bp, Homo sapiens
aaaagttttgttctgttcaggtgatt

SEQ ID NO: 90319 - DNA, 26 bp, Homo sapiens
aaagttttgttctgttcaggtgatta

SEQ ID NO: 90320 - DNA, 26 bp, Homo sapiens
aagttttgttctgttcaggtgattat

SEQ ID NO: 90321 - DNA, 26 bp, Homo sapiens
agttttgttctgttcaggtgattatg

SEQ ID NO: 90322 - DNA, 26 bp, Homo sapiens
gttttgttctgttcaggtgattatga

SEQ ID NO: 90323 - DNA, 26 bp, Homo sapiens
ttttgttctgttcaggtgattatgat

SEQ ID NO: 90324 - DNA, 26 bp, Homo sapiens
tttgttctgttcaggtgattatgata

SEQ ID NO: 90325 - DNA, 26 bp, Homo sapiens
ttgttctgttcaggtgattatgatag

SEQ ID NO: 90326 - DNA, 26 bp, Homo sapiens
tgttctgttcaggtgattatgatagt

SEQ ID NO: 90327 - DNA, 26 bp, Homo sapiens
gttctgttcaggtgattatgatagta

SEQ ID NO: 90328 - DNA, 26 bp, Homo sapiens
ttctgttcaggtgattatgatagtag

SEQ ID NO: 90329 - DNA, 26 bp, Homo sapiens
tctgttcaggtgattatgatagtaga

SEQ ID NO: 90330 - DNA, 26 bp, Homo sapiens
ctgttcaggtgattatgatagtagac

SEQ ID NO: 90331 - DNA, 26 bp, Homo sapiens
tgttcaggtgattatgatagtagacc

SEQ ID NO: 90332 - DNA, 26 bp, Homo sapiens
gttcaggtgattatgatagtagacca

SEQ ID NO: 90333 - DNA, 26 bp, Homo sapiens
ttcaggtgattatgatagtagaccag

SEQ ID NO: 90334 - DNA, 26 bp, Homo sapiens
tcaggtgattatgatagtagaccagt

SEQ ID NO: 90335 - DNA, 26 bp, Homo sapiens
caggtgattatgatagtagaccagtc

SEQ ID NO: 90336 - DNA, 26 bp, Homo sapiens
aggtgattatgatagtagaccagtcg

SEQ ID NO: 90337 - DNA, 26 bp, Homo sapiens
ggtgattatgatagtagaccagtcga

SEQ ID NO: 90338 - DNA, 26 bp, Homo sapiens
gtgattatgatagtagaccagtcgag

SEQ ID NO: 90339 - DNA, 26 bp, Homo sapiens
tgattatgatagtagaccagtcgagg

SEQ ID NO: 90340 - DNA, 26 bp, Homo sapiens
gattatgatagtagaccagtcgaggt

SEQ ID NO: 90341 - DNA, 26 bp, Homo sapiens
attatgatagtagaccagtcgaggtt

SEQ ID NO: 90342 - DNA, 26 bp, Homo sapiens
ttatgatagtagaccagtcgaggtta

SEQ ID NO: 90343 - DNA, 26 bp, Homo sapiens
tatgatagtagaccagtcgaggttat

SEQ ID NO: 90344 - DNA, 26 bp, Homo sapiens
atgatagtagaccagtcgaggttatt

SEQ ID NO: 90345 - DNA, 26 bp, Homo sapiens
tgatagtagaccagtcgaggttattt

SEQ ID NO: 90346 - DNA, 26 bp, Homo sapiens
gatagtagaccagtcgaggttatttg

SEQ ID NO: 90347 - DNA, 26 bp, Homo sapiens
atagtagaccagtcgaggttatttgg

SEQ ID NO: 90348 - DNA, 26 bp, Homo sapiens
tagtagaccagtcgaggttatttgga

SEQ ID NO: 90349 - DNA, 26 bp, Homo sapiens
agtagaccagtcgaggttatttggat

SEQ ID NO: 90350 - DNA, 26 bp, Homo sapiens
gtagaccagtcgaggttatttggatt

SEQ ID NO: 90351 - DNA, 26 bp, Homo sapiens
tagaccagtcgaggttatttggattt

SEQ ID NO: 90352 - DNA, 26 bp, Homo sapiens
agaccagtcgaggttatttggatttg

SEQ ID NO: 90353 - DNA, 26 bp, Homo sapiens
gaccagtcgaggttatttggatttgg

SEQ ID NO: 90354 - DNA, 26 bp, Homo sapiens
accagtcgaggttatttggatttggt

SEQ ID NO: 90355 - DNA, 26 bp, Homo sapiens
ccagtcgaggttatttggatttggtt

SEQ ID NO: 90356 - DNA, 26 bp, Homo sapiens
cagtcgaggttatttggatttggttc

SEQ ID NO: 90357 - DNA, 26 bp, Homo sapiens
agtcgaggttatttggatttggttca

SEQ ID NO: 90358 - DNA, 26 bp, Homo sapiens
gtcgaggttatttggatttggttcac

SEQ ID NO: 90359 - DNA, 26 bp, Homo sapiens
tcgaggttatttggatttggttcaca

SEQ ID NO: 90360 - DNA, 26 bp, Homo sapiens
cgaggttatttggatttggttcacac

SEQ ID NO: 90361 - DNA, 26 bp, Homo sapiens
gaggttatttggatttggttcacacc

SEQ ID NO: 90362 - DNA, 26 bp, Homo sapiens
aggttatttggatttggttcacacct

SEQ ID NO: 90363 - DNA, 26 bp, Homo sapiens
ggttatttggatttggttcacacctg

SEQ ID NO: 90364 - DNA, 26 bp, Homo sapiens
gttatttggatttggttcacacctgt

SEQ ID NO: 90365 - DNA, 26 bp, Homo sapiens
ttatttggatttggttcacacctgtg

SEQ ID NO: 90366 - DNA, 26 bp, Homo sapiens
tatttggatttggttcacacctgtgt

SEQ ID NO: 90367 - DNA, 26 bp, Homo sapiens
atttggatttggttcacacctgtgta

SEQ ID NO: 90368 - DNA, 26 bp, Homo sapiens
tttggatttggttcacacctgtgtaa

SEQ ID NO: 90369 - DNA, 26 bp, Homo sapiens
ttggatttggttcacacctgtgtaac

SEQ ID NO: 90370 - DNA, 26 bp, Homo sapiens
tggatttggttcacacctgtgtaacg

SEQ ID NO: 90371 - DNA, 26 bp, Homo sapiens
ggatttggttcacacctgtgtaacgt

SEQ ID NO: 90372 - DNA, 26 bp, Homo sapiens
gatttggttcacacctgtgtaacgtt

SEQ ID NO: 90373 - DNA, 26 bp, Homo sapiens
atttggttcacacctgtgtaacgttt

SEQ ID NO: 90374 - DNA, 26 bp, Homo sapiens
tttggttcacacctgtgtaacgtttc

SEQ ID NO: 90375 - DNA, 26 bp, Homo sapiens
ttggttcacacctgtgtaacgtttca

SEQ ID NO: 90376 - DNA, 26 bp, Homo sapiens
tggttcacacctgtgtaacgtttcat

SEQ ID NO: 90377 - DNA, 26 bp, Homo sapiens
ggttcacacctgtgtaacgtttcatt

SEQ ID NO: 90378 - DNA, 26 bp, Homo sapiens
gttcacacctgtgtaacgtttcattt

SEQ ID NO: 90379 - DNA, 26 bp, Homo sapiens
ttcacacctgtgtaacgtttcattta

SEQ ID NO: 90380 - DNA, 26 bp, Homo sapiens
tcacacctgtgtaacgtttcatttat

SEQ ID NO: 90381 - DNA, 26 bp, Homo sapiens
cacacctgtgtaacgtttcatttatc

SEQ ID NO: 90382 - DNA, 26 bp, Homo sapiens
acacctgtgtaacgtttcatttatca

SEQ ID NO: 90383 - DNA, 26 bp, Homo sapiens
cacctgtgtaacgtttcatttatcag

SEQ ID NO: 90384 - DNA, 26 bp, Homo sapiens
acctgtgtaacgtttcatttatcagt

SEQ ID NO: 90385 - DNA, 26 bp, Homo sapiens
cctgtgtaacgtttcatttatcagta

SEQ ID NO: 90386 - DNA, 26 bp, Homo sapiens
ctgtgtaacgtttcatttatcagtag

SEQ ID NO: 90387 - DNA, 26 bp, Homo sapiens
tgtgtaacgtttcatttatcagtagc

SEQ ID NO: 90388 - DNA, 26 bp, Homo sapiens
gtgtaacgtttcatttatcagtagct

SEQ ID NO: 90389 - DNA, 26 bp, Homo sapiens
tgtaacgtttcatttatcagtagctg

SEQ ID NO: 90390 - DNA, 26 bp, Homo sapiens
gtaacgtttcatttatcagtagctga

SEQ ID NO: 90391 - DNA, 26 bp, Homo sapiens
taacgtttcatttatcagtagctgag

SEQ ID NO: 90392 - DNA, 26 bp, Homo sapiens
aacgtttcatttatcagtagctgagt

SEQ ID NO: 90393 - DNA, 26 bp, Homo sapiens
acgtttcatttatcagtagctgagtc

SEQ ID NO: 90394 - DNA, 26 bp, Homo sapiens
cgtttcatttatcagtagctgagtct

SEQ ID NO: 90395 - DNA, 26 bp, Homo sapiens
gtttcatttatcagtagctgagtctg

SEQ ID NO: 90396 - DNA, 26 bp, Homo sapiens
tttcatttatcagtagctgagtctga

SEQ ID NO: 90397 - DNA, 26 bp, Homo sapiens
ttcatttatcagtagctgagtctgaa

SEQ ID NO: 90398 - DNA, 26 bp, Homo sapiens
tcatttatcagtagctgagtctgaaa

SEQ ID NO: 90399 - DNA, 26 bp, Homo sapiens
catttatcagtagctgagtctgaaag

SEQ ID NO: 90400 - DNA, 26 bp, Homo sapiens
atttatcagtagctgagtctgaaaga

SEQ ID NO: 90401 - DNA, 26 bp, Homo sapiens
tttatcagtagctgagtctgaaagat

SEQ ID NO: 90402 - DNA, 26 bp, Homo sapiens
ttatcagtagctgagtctgaaagatt

SEQ ID NO: 90403 - DNA, 26 bp, Homo sapiens
tatcagtagctgagtctgaaagattt

SEQ ID NO: 90404 - DNA, 26 bp, Homo sapiens
atcagtagctgagtctgaaagattta

SEQ ID NO: 90405 - DNA, 26 bp, Homo sapiens
tcagtagctgagtctgaaagatttaa

SEQ ID NO: 90406 - DNA, 26 bp, Homo sapiens
cagtagctgagtctgaaagatttaaa

SEQ ID NO: 90407 - DNA, 26 bp, Homo sapiens
agtagctgagtctgaaagatttaaag

SEQ ID NO: 90408 - DNA, 26 bp, Homo sapiens
gtagctgagtctgaaagatttaaagt

SEQ ID NO: 90409 - DNA, 26 bp, Homo sapiens
tagctgagtctgaaagatttaaagta

SEQ ID NO: 90410 - DNA, 26 bp, Homo sapiens
agctgagtctgaaagatttaaagtac

SEQ ID NO: 90411 - DNA, 26 bp, Homo sapiens
gctgagtctgaaagatttaaagtaca

SEQ ID NO: 90412 - DNA, 26 bp, Homo sapiens
ctgagtctgaaagatttaaagtacag

SEQ ID NO: 90413 - DNA, 26 bp, Homo sapiens
tgagtctgaaagatttaaagtacagc

SEQ ID NO: 90414 - DNA, 26 bp, Homo sapiens
gagtctgaaagatttaaagtacagca

SEQ ID NO: 90415 - DNA, 26 bp, Homo sapiens
agtctgaaagatttaaagtacagcaa

SEQ ID NO: 90416 - DNA, 26 bp, Homo sapiens
gtctgaaagatttaaagtacagcaaa

SEQ ID NO: 90417 - DNA, 26 bp, Homo sapiens
tctgaaagatttaaagtacagcaaaa

SEQ ID NO: 90418 - DNA, 26 bp, Homo sapiens
ctgaaagatttaaagtacagcaaaat

SEQ ID NO: 90419 - DNA, 26 bp, Homo sapiens
tgaaagatttaaagtacagcaaaatt

SEQ ID NO: 90420 - DNA, 26 bp, Homo sapiens
gaaagatttaaagtacagcaaaattc

SEQ ID NO: 90421 - DNA, 26 bp, Homo sapiens
aaagatttaaagtacagcaaaattcc

SEQ ID NO: 90422 - DNA, 26 bp, Homo sapiens
aagatttaaagtacagcaaaattcca

SEQ ID NO: 90423 - DNA, 26 bp, Homo sapiens
agatttaaagtacagcaaaattccag

SEQ ID NO: 90424 - DNA, 26 bp, Homo sapiens
gatttaaagtacagcaaaattccaga

SEQ ID NO: 90425 - DNA, 26 bp, Homo sapiens
atttaaagtacagcaaaattccagat

SEQ ID NO: 90426 - DNA, 26 bp, Homo sapiens
tttaaagtacagcaaaattccagatg

SEQ ID NO: 90427 - DNA, 26 bp, Homo sapiens
ttaaagtacagcaaaattccagatga

SEQ ID NO: 90428 - DNA, 26 bp, Homo sapiens
taaagtacagcaaaattccagatgaa

SEQ ID NO: 90429 - DNA, 26 bp, Homo sapiens
aaagtacagcaaaattccagatgaac

SEQ ID NO: 90430 - DNA, 26 bp, Homo sapiens
aagtacagcaaaattccagatgaacc

SEQ ID NO: 90431 - DNA, 26 bp, Homo sapiens
agtacagcaaaattccagatgaacca

SEQ ID NO: 90432 - DNA, 26 bp, Homo sapiens
gtacagcaaaattccagatgaaccag

SEQ ID NO: 90433 - DNA, 26 bp, Homo sapiens
tacagcaaaattccagatgaaccaga

SEQ ID NO: 90434 - DNA, 26 bp, Homo sapiens
acagcaaaattccagatgaaccagaa

SEQ ID NO: 90435 - DNA, 26 bp, Homo sapiens
cagcaaaattccagatgaaccagaac

SEQ ID NO: 90436 - DNA, 26 bp, Homo sapiens
agcaaaattccagatgaaccagaaca

SEQ ID NO: 90437 - DNA, 26 bp, Homo sapiens
gcaaaattccagatgaaccagaacac

SEQ ID NO: 90438 - DNA, 26 bp, Homo sapiens
caaaattccagatgaaccagaacact

SEQ ID NO: 90439 - DNA, 26 bp, Homo sapiens
aaaattccagatgaaccagaacactg

SEQ ID NO: 90440 - DNA, 26 bp, Homo sapiens
aaattccagatgaaccagaacactgc

SEQ ID NO: 90441 - DNA, 26 bp, Homo sapiens
aattccagatgaaccagaacactgct

SEQ ID NO: 90442 - DNA, 26 bp, Homo sapiens
attccagatgaaccagaacactgctt

SEQ ID NO: 90443 - DNA, 26 bp, Homo sapiens
ttccagatgaaccagaacactgcttt

SEQ ID NO: 90444 - DNA, 26 bp, Homo sapiens
tccagatgaaccagaacactgcttta

SEQ ID NO: 90445 - DNA, 26 bp, Homo sapiens
ccagatgaaccagaacactgctttat

SEQ ID NO: 90446 - DNA, 26 bp, Homo sapiens
cagatgaaccagaacactgctttatg

SEQ ID NO: 90447 - DNA, 26 bp, Homo sapiens
agatgaaccagaacactgctttatgt

SEQ ID NO: 90448 - DNA, 26 bp, Homo sapiens
gatgaaccagaacactgctttatgtt

SEQ ID NO: 90449 - DNA, 26 bp, Homo sapiens
atgaaccagaacactgctttatgttt

SEQ ID NO: 90450 - DNA, 26 bp, Homo sapiens
tgaaccagaacactgctttatgtttt

SEQ ID NO: 90451 - DNA, 26 bp, Homo sapiens
gaaccagaacactgctttatgtttta

SEQ ID NO: 90452 - DNA, 26 bp, Homo sapiens
aaccagaacactgctttatgttttat

SEQ ID NO: 90453 - DNA, 26 bp, Homo sapiens
accagaacactgctttatgttttatc

SEQ ID NO: 90454 - DNA, 26 bp, Homo sapiens
ccagaacactgctttatgttttatca

SEQ ID NO: 90455 - DNA, 26 bp, Homo sapiens
cagaacactgctttatgttttatcat

SEQ ID NO: 90456 - DNA, 26 bp, Homo sapiens
agaacactgctttatgttttatcata

SEQ ID NO: 90457 - DNA, 26 bp, Homo sapiens
gaacactgctttatgttttatcatat

SEQ ID NO: 90458 - DNA, 26 bp, Homo sapiens
aacactgctttatgttttatcatatt

SEQ ID NO: 90459 - DNA, 26 bp, Homo sapiens
acactgctttatgttttatcatattt

SEQ ID NO: 90460 - DNA, 26 bp, Homo sapiens
cactgctttatgttttatcatattta

SEQ ID NO: 90461 - DNA, 26 bp, Homo sapiens
actgctttatgttttatcatatttag

SEQ ID NO: 90462 - DNA, 26 bp, Homo sapiens
ctgctttatgttttatcatatttagg

SEQ ID NO: 90463 - DNA, 26 bp, Homo sapiens
tgctttatgttttatcatatttaggt

SEQ ID NO: 90464 - DNA, 26 bp, Homo sapiens
gctttatgttttatcatatttaggtt

SEQ ID NO: 90465 - DNA, 26 bp, Homo sapiens
ctttatgttttatcatatttaggtta

SEQ ID NO: 90466 - DNA, 26 bp, Homo sapiens
tttatgttttatcatatttaggttat

SEQ ID NO: 90467 - DNA, 26 bp, Homo sapiens
ttatgttttatcatatttaggttatt

SEQ ID NO: 90468 - DNA, 26 bp, Homo sapiens
tatgttttatcatatttaggttattt

SEQ ID NO: 90469 - DNA, 26 bp, Homo sapiens
atgttttatcatatttaggttattta

SEQ ID NO: 90470 - DNA, 26 bp, Homo sapiens
tgttttatcatatttaggttatttat

SEQ ID NO: 90471 - DNA, 26 bp, Homo sapiens
gttttatcatatttaggttatttatt

SEQ ID NO: 90472 - DNA, 26 bp, Homo sapiens
ttttatcatatttaggttatttatta

SEQ ID NO: 90473 - DNA, 26 bp, Homo sapiens
tttatcatatttaggttatttattaa

SEQ ID NO: 90474 - DNA, 26 bp, Homo sapiens
ttatcatatttaggttatttattaat

SEQ ID NO: 90475 - DNA, 26 bp, Homo sapiens
tatcatatttaggttatttattaatg

SEQ ID NO: 90476 - DNA, 26 bp, Homo sapiens
atcatatttaggttatttattaatga

SEQ ID NO: 90477 - DNA, 26 bp, Homo sapiens
tcatatttaggttatttattaatgaa

SEQ ID NO: 90478 - DNA, 26 bp, Homo sapiens
catatttaggttatttattaatgaaa

SEQ ID NO: 90479 - DNA, 26 bp, Homo sapiens
atatttaggttatttattaatgaaaa

SEQ ID NO: 90480 - DNA, 26 bp, Homo sapiens
tatttaggttatttattaatgaaaat

SEQ ID NO: 90481 - DNA, 26 bp, Homo sapiens
atttaggttatttattaatgaaaata

SEQ ID NO: 90482 - DNA, 26 bp, Homo sapiens
tttaggttatttattaatgaaaatat

SEQ ID NO: 90483 - DNA, 26 bp, Homo sapiens
ttaggttatttattaatgaaaatata

SEQ ID NO: 90484 - DNA, 26 bp, Homo sapiens
taggttatttattaatgaaaatatat

SEQ ID NO: 90485 - DNA, 26 bp, Homo sapiens
aggttatttattaatgaaaatatatg

SEQ ID NO: 90486 - DNA, 26 bp, Homo sapiens
ggttatttattaatgaaaatatatga

SEQ ID NO: 90487 - DNA, 26 bp, Homo sapiens
gttatttattaatgaaaatatatgac

SEQ ID NO: 90488 - DNA, 26 bp, Homo sapiens
ttatttattaatgaaaatatatgaca

SEQ ID NO: 90489 - DNA, 26 bp, Homo sapiens
tatttattaatgaaaatatatgacat

SEQ ID NO: 90490 - DNA, 26 bp, Homo sapiens
atttattaatgaaaatatatgacatt

SEQ ID NO: 90491 - DNA, 26 bp, Homo sapiens
tttattaatgaaaatatatgacattt

SEQ ID NO: 90492 - DNA, 26 bp, Homo sapiens
ttattaatgaaaatatatgacatttt

SEQ ID NO: 90493 - DNA, 26 bp, Homo sapiens
tattaatgaaaatatatgacattttc

SEQ ID NO: 90494 - DNA, 26 bp, Homo sapiens
attaatgaaaatatatgacattttca

SEQ ID NO: 90495 - DNA, 26 bp, Homo sapiens
ttaatgaaaatatatgacattttcag

SEQ ID NO: 90496 - DNA, 26 bp, Homo sapiens
taatgaaaatatatgacattttcagg

SEQ ID NO: 90497 - DNA, 26 bp, Homo sapiens
aatgaaaatatatgacattttcagga

SEQ ID NO: 90498 - DNA, 26 bp, Homo sapiens
atgaaaatatatgacattttcaggaa

SEQ ID NO: 90499 - DNA, 26 bp, Homo sapiens
tgaaaatatatgacattttcaggaat

SEQ ID NO: 90500 - DNA, 26 bp, Homo sapiens
gaaaatatatgacattttcaggaata

SEQ ID NO: 90501 - DNA, 26 bp, Homo sapiens
aaaatatatgacattttcaggaatac

SEQ ID NO: 90502 - DNA, 26 bp, Homo sapiens
aaatatatgacattttcaggaataca

SEQ ID NO: 90503 - DNA, 26 bp, Homo sapiens
aatatatgacattttcaggaatacaa

SEQ ID NO: 90504 - DNA, 26 bp, Homo sapiens
atatatgacattttcaggaatacaaa

SEQ ID NO: 90505 - DNA, 26 bp, Homo sapiens
tatatgacattttcaggaatacaaat

SEQ ID NO: 90506 - DNA, 26 bp, Homo sapiens
atatgacattttcaggaatacaaatt

SEQ ID NO: 90507 - DNA, 26 bp, Homo sapiens
tatgacattttcaggaatacaaattt

SEQ ID NO: 90508 - DNA, 26 bp, Homo sapiens
atgacattttcaggaatacaaatttt

SEQ ID NO: 90509 - DNA, 26 bp, Homo sapiens
tgacattttcaggaatacaaattttg

SEQ ID NO: 90510 - DNA, 26 bp, Homo sapiens
gacattttcaggaatacaaattttgc

SEQ ID NO: 90511 - DNA, 26 bp, Homo sapiens
acattttcaggaatacaaattttgca

SEQ ID NO: 90512 - DNA, 26 bp, Homo sapiens
cattttcaggaatacaaattttgcac

SEQ ID NO: 90513 - DNA, 26 bp, Homo sapiens
attttcaggaatacaaattttgcacc

SEQ ID NO: 90514 - DNA, 26 bp, Homo sapiens
ttttcaggaatacaaattttgcaccc

SEQ ID NO: 90515 - DNA, 26 bp, Homo sapiens
tttcaggaatacaaattttgcaccct

SEQ ID NO: 90516 - DNA, 26 bp, Homo sapiens
ttcaggaatacaaattttgcaccctg

SEQ ID NO: 90517 - DNA, 26 bp, Homo sapiens
tcaggaatacaaattttgcaccctga

SEQ ID NO: 90518 - DNA, 26 bp, Homo sapiens
caggaatacaaattttgcaccctgat

SEQ ID NO: 90519 - DNA, 26 bp, Homo sapiens
aggaatacaaattttgcaccctgatg

SEQ ID NO: 90520 - DNA, 26 bp, Homo sapiens
ggaatacaaattttgcaccctgatga

SEQ ID NO: 90521 - DNA, 26 bp, Homo sapiens
gaatacaaattttgcaccctgatgac

SEQ ID NO: 90522 - DNA, 26 bp, Homo sapiens
aatacaaattttgcaccctgatgacc

SEQ ID NO: 90523 - DNA, 26 bp, Homo sapiens
atacaaattttgcaccctgatgacct

SEQ ID NO: 90524 - DNA, 26 bp, Homo sapiens
tacaaattttgcaccctgatgacctc

SEQ ID NO: 90525 - DNA, 26 bp, Homo sapiens
acaaattttgcaccctgatgacctca

SEQ ID NO: 90526 - DNA, 26 bp, Homo sapiens
caaattttgcaccctgatgacctcaa

SEQ ID NO: 90527 - DNA, 26 bp, Homo sapiens
aaattttgcaccctgatgacctcaaa

SEQ ID NO: 90528 - DNA, 26 bp, Homo sapiens
aattttgcaccctgatgacctcaaat

SEQ ID NO: 90529 - DNA, 26 bp, Homo sapiens
attttgcaccctgatgacctcaaatg

SEQ ID NO: 90530 - DNA, 26 bp, Homo sapiens
ttttgcaccctgatgacctcaaatgc

SEQ ID NO: 90531 - DNA, 26 bp, Homo sapiens
tttgcaccctgatgacctcaaatgcg

SEQ ID NO: 90532 - DNA, 26 bp, Homo sapiens
ttgcaccctgatgacctcaaatgcgt

SEQ ID NO: 90533 - DNA, 26 bp, Homo sapiens
tgcaccctgatgacctcaaatgcgtg

SEQ ID NO: 90534 - DNA, 26 bp, Homo sapiens
gcaccctgatgacctcaaatgcgtgc

SEQ ID NO: 90535 - DNA, 26 bp, Homo sapiens
caccctgatgacctcaaatgcgtgca

SEQ ID NO: 90536 - DNA, 26 bp, Homo sapiens
accctgatgacctcaaatgcgtgcaa

SEQ ID NO: 90537 - DNA, 26 bp, Homo sapiens
ccctgatgacctcaaatgcgtgcaac

SEQ ID NO: 90538 - DNA, 26 bp, Homo sapiens
cctgatgacctcaaatgcgtgcaaca

SEQ ID NO: 90539 - DNA, 26 bp, Homo sapiens
ctgatgacctcaaatgcgtgcaacaa

SEQ ID NO: 90540 - DNA, 26 bp, Homo sapiens
tgatgacctcaaatgcgtgcaacaag

SEQ ID NO: 90541 - DNA, 26 bp, Homo sapiens
gatgacctcaaatgcgtgcaacaaga

SEQ ID NO: 90542 - DNA, 26 bp, Homo sapiens
atgacctcaaatgcgtgcaacaagat

SEQ ID NO: 90543 - DNA, 26 bp, Homo sapiens
tgacctcaaatgcgtgcaacaagatg

SEQ ID NO: 90544 - DNA, 26 bp, Homo sapiens
gacctcaaatgcgtgcaacaagatgt

SEQ ID NO: 90545 - DNA, 26 bp, Homo sapiens
acctcaaatgcgtgcaacaagatgtt

SEQ ID NO: 90546 - DNA, 26 bp, Homo sapiens
cctcaaatgcgtgcaacaagatgttt

SEQ ID NO: 90547 - DNA, 26 bp, Homo sapiens
ctcaaatgcgtgcaacaagatgttta

SEQ ID NO: 90548 - DNA, 26 bp, Homo sapiens
tcaaatgcgtgcaacaagatgtttaa

SEQ ID NO: 90549 - DNA, 26 bp, Homo sapiens
caaatgcgtgcaacaagatgtttaat

SEQ ID NO: 90550 - DNA, 26 bp, Homo sapiens
aaatgcgtgcaacaagatgtttaata

SEQ ID NO: 90551 - DNA, 26 bp, Homo sapiens
aatgcgtgcaacaagatgtttaatac

SEQ ID NO: 90552 - DNA, 26 bp, Homo sapiens
atgcgtgcaacaagatgtttaataca

SEQ ID NO: 90553 - DNA, 26 bp, Homo sapiens
tgcgtgcaacaagatgtttaatacag

SEQ ID NO: 90554 - DNA, 26 bp, Homo sapiens
gcgtgcaacaagatgtttaatacaga

SEQ ID NO: 90555 - DNA, 26 bp, Homo sapiens
cgtgcaacaagatgtttaatacagaa

SEQ ID NO: 90556 - DNA, 26 bp, Homo sapiens
gtgcaacaagatgtttaatacagaaa

SEQ ID NO: 90557 - DNA, 26 bp, Homo sapiens
tgcaacaagatgtttaatacagaaaa

SEQ ID NO: 90558 - DNA, 26 bp, Homo sapiens
gcaacaagatgtttaatacagaaaat

SEQ ID NO: 90559 - DNA, 26 bp, Homo sapiens
caacaagatgtttaatacagaaaata

SEQ ID NO: 90560 - DNA, 26 bp, Homo sapiens
aacaagatgtttaatacagaaaataa

SEQ ID NO: 90561 - DNA, 26 bp, Homo sapiens
acaagatgtttaatacagaaaataac

SEQ ID NO: 90562 - DNA, 26 bp, Homo sapiens
caagatgtttaatacagaaaataaca

SEQ ID NO: 90563 - DNA, 26 bp, Homo sapiens
aagatgtttaatacagaaaataacac

SEQ ID NO: 90564 - DNA, 26 bp, Homo sapiens
agatgtttaatacagaaaataacaca

SEQ ID NO: 90565 - DNA, 26 bp, Homo sapiens
gatgtttaatacagaaaataacacaa

SEQ ID NO: 90566 - DNA, 26 bp, Homo sapiens
atgtttaatacagaaaataacacaaa

SEQ ID NO: 90567 - DNA, 26 bp, Homo sapiens
tgtttaatacagaaaataacacaaaa

SEQ ID NO: 90568 - DNA, 26 bp, Homo sapiens
gtttaatacagaaaataacacaaaaa

SEQ ID NO: 90569 - DNA, 26 bp, Homo sapiens
tttaatacagaaaataacacaaaaac

SEQ ID NO: 90570 - DNA, 26 bp, Homo sapiens
ttaatacagaaaataacacaaaaact

SEQ ID NO: 90571 - DNA, 26 bp, Homo sapiens
taatacagaaaataacacaaaaactg

SEQ ID NO: 90572 - DNA, 26 bp, Homo sapiens
aatacagaaaataacacaaaaactgt

SEQ ID NO: 90573 - DNA, 26 bp, Homo sapiens
atacagaaaataacacaaaaactgtt

SEQ ID NO: 90574 - DNA, 26 bp, Homo sapiens
tacagaaaataacacaaaaactgttg

SEQ ID NO: 90575 - DNA, 26 bp, Homo sapiens
acagaaaataacacaaaaactgttgt

SEQ ID NO: 90576 - DNA, 26 bp, Homo sapiens
cagaaaataacacaaaaactgttgtt

SEQ ID NO: 90577 - DNA, 26 bp, Homo sapiens
agaaaataacacaaaaactgttgtta

SEQ ID NO: 90578 - DNA, 26 bp, Homo sapiens
gaaaataacacaaaaactgttgttac

SEQ ID NO: 90579 - DNA, 26 bp, Homo sapiens
aaaataacacaaaaactgttgttaca

SEQ ID NO: 90580 - DNA, 26 bp, Homo sapiens
aaataacacaaaaactgttgttacag

SEQ ID NO: 90581 - DNA, 26 bp, Homo sapiens
aataacacaaaaactgttgttacagt

SEQ ID NO: 90582 - DNA, 26 bp, Homo sapiens
ataacacaaaaactgttgttacagtg

SEQ ID NO: 90583 - DNA, 26 bp, Homo sapiens
taacacaaaaactgttgttacagtgg

SEQ ID NO: 90584 - DNA, 26 bp, Homo sapiens
aacacaaaaactgttgttacagtggt

SEQ ID NO: 90585 - DNA, 26 bp, Homo sapiens
acacaaaaactgttgttacagtggtt

SEQ ID NO: 90586 - DNA, 26 bp, Homo sapiens
cacaaaaactgttgttacagtggtta

SEQ ID NO: 90587 - DNA, 26 bp, Homo sapiens
acaaaaactgttgttacagtggttag

SEQ ID NO: 90588 - DNA, 26 bp, Homo sapiens
caaaaactgttgttacagtggttaga

SEQ ID NO: 90589 - DNA, 26 bp, Homo sapiens
aaaaactgttgttacagtggttagaa

SEQ ID NO: 90590 - DNA, 26 bp, Homo sapiens
aaaactgttgttacagtggttagaat

SEQ ID NO: 90591 - DNA, 26 bp, Homo sapiens
aaactgttgttacagtggttagaatt

SEQ ID NO: 90592 - DNA, 26 bp, Homo sapiens
aactgttgttacagtggttagaattt

SEQ ID NO: 90593 - DNA, 26 bp, Homo sapiens
actgttgttacagtggttagaatttt

SEQ ID NO: 90594 - DNA, 26 bp, Homo sapiens
ctgttgttacagtggttagaattttt

SEQ ID NO: 90595 - DNA, 26 bp, Homo sapiens
tgttgttacagtggttagaattttta

SEQ ID NO: 90596 - DNA, 26 bp, Homo sapiens
gttgttacagtggttagaatttttaa

SEQ ID NO: 90597 - DNA, 26 bp, Homo sapiens
ttgttacagtggttagaatttttaac

SEQ ID NO: 90598 - DNA, 26 bp, Homo sapiens
tgttacagtggttagaatttttaact

SEQ ID NO: 90599 - DNA, 26 bp, Homo sapiens
gttacagtggttagaatttttaactt

SEQ ID NO: 90600 - DNA, 26 bp, Homo sapiens
ttacagtggttagaatttttaacttt

SEQ ID NO: 90601 - DNA, 26 bp, Homo sapiens
tacagtggttagaatttttaacttta

SEQ ID NO: 90602 - DNA, 26 bp, Homo sapiens
acagtggttagaatttttaactttaa

SEQ ID NO: 90603 - DNA, 26 bp, Homo sapiens
cagtggttagaatttttaactttaaa

SEQ ID NO: 90604 - DNA, 26 bp, Homo sapiens
agtggttagaatttttaactttaaaa

SEQ ID NO: 90605 - DNA, 26 bp, Homo sapiens
gtggttagaatttttaactttaaaaa

SEQ ID NO: 90606 - DNA, 26 bp, Homo sapiens
tggttagaatttttaactttaaaaaa

SEQ ID NO: 90607 - DNA, 26 bp, Homo sapiens
ggttagaatttttaactttaaaaaac

SEQ ID NO: 90608 - DNA, 26 bp, Homo sapiens
gttagaatttttaactttaaaaaacc

SEQ ID NO: 90609 - DNA, 26 bp, Homo sapiens
ttagaatttttaactttaaaaaacca

SEQ ID NO: 90610 - DNA, 26 bp, Homo sapiens
tagaatttttaactttaaaaaaccat

SEQ ID NO: 90611 - DNA, 26 bp, Homo sapiens
agaatttttaactttaaaaaaccatg

SEQ ID NO: 90612 - DNA, 26 bp, Homo sapiens
gaatttttaactttaaaaaaccatga

SEQ ID NO: 90613 - DNA, 26 bp, Homo sapiens
aatttttaactttaaaaaaccatgaa

SEQ ID NO: 90614 - DNA, 26 bp, Homo sapiens
atttttaactttaaaaaaccatgaat

SEQ ID NO: 90615 - DNA, 26 bp, Homo sapiens
tttttaactttaaaaaaccatgaatt

SEQ ID NO: 90616 - DNA, 26 bp, Homo sapiens
ttttaactttaaaaaaccatgaattt

SEQ ID NO: 90617 - DNA, 26 bp, Homo sapiens
tttaactttaaaaaaccatgaatttg

SEQ ID NO: 90618 - DNA, 26 bp, Homo sapiens
ttaactttaaaaaaccatgaatttgt

SEQ ID NO: 90619 - DNA, 26 bp, Homo sapiens
taactttaaaaaaccatgaatttgta

SEQ ID NO: 90620 - DNA, 26 bp, Homo sapiens
aactttaaaaaaccatgaatttgtat

SEQ ID NO: 90621 - DNA, 26 bp, Homo sapiens
actttaaaaaaccatgaatttgtatt

SEQ ID NO: 90622 - DNA, 26 bp, Homo sapiens
ctttaaaaaaccatgaatttgtattg

SEQ ID NO: 90623 - DNA, 26 bp, Homo sapiens
tttaaaaaaccatgaatttgtattgt

SEQ ID NO: 90624 - DNA, 26 bp, Homo sapiens
ttaaaaaaccatgaatttgtattgtt

SEQ ID NO: 90625 - DNA, 26 bp, Homo sapiens
taaaaaaccatgaatttgtattgttt

SEQ ID NO: 90626 - DNA, 26 bp, Homo sapiens
aaaaaaccatgaatttgtattgtttt

SEQ ID NO: 90627 - DNA, 26 bp, Homo sapiens
aaaaaccatgaatttgtattgtttta

SEQ ID NO: 90628 - DNA, 26 bp, Homo sapiens
aaaaccatgaatttgtattgttttaa

SEQ ID NO: 90629 - DNA, 26 bp, Homo sapiens
aaaccatgaatttgtattgttttaat

SEQ ID NO: 90630 - DNA, 26 bp, Homo sapiens
aaccatgaatttgtattgttttaatt

SEQ ID NO: 90631 - DNA, 26 bp, Homo sapiens
accatgaatttgtattgttttaattg

SEQ ID NO: 90632 - DNA, 26 bp, Homo sapiens
ccatgaatttgtattgttttaattgc

SEQ ID NO: 90633 - DNA, 26 bp, Homo sapiens
catgaatttgtattgttttaattgca

SEQ ID NO: 90634 - DNA, 26 bp, Homo sapiens
atgaatttgtattgttttaattgcac

SEQ ID NO: 90635 - DNA, 26 bp, Homo sapiens
tgaatttgtattgttttaattgcaca

SEQ ID NO: 90636 - DNA, 26 bp, Homo sapiens
gaatttgtattgttttaattgcacaa

SEQ ID NO: 90637 - DNA, 26 bp, Homo sapiens
aatttgtattgttttaattgcacaat

SEQ ID NO: 90638 - DNA, 26 bp, Homo sapiens
atttgtattgttttaattgcacaata

SEQ ID NO: 90639 - DNA, 26 bp, Homo sapiens
tttgtattgttttaattgcacaataa

SEQ ID NO: 90640 - DNA, 26 bp, Homo sapiens
ttgtattgttttaattgcacaataaa

SEQ ID NO: 90641 - DNA, 26 bp, Homo sapiens
tgtattgttttaattgcacaataaaa

SEQ ID NO: 90642 - DNA, 26 bp, Homo sapiens
gtattgttttaattgcacaataaaat

SEQ ID NO: 90643 - DNA, 26 bp, Homo sapiens
tattgttttaattgcacaataaaata

SEQ ID NO: 90644 - DNA, 26 bp, Homo sapiens
attgttttaattgcacaataaaataa

SEQ ID NO: 90645 - DNA, 26 bp, Homo sapiens
ttgttttaattgcacaataaaataat

SEQ ID NO: 90646 - DNA, 26 bp, Homo sapiens
tgttttaattgcacaataaaataatg

SEQ ID NO: 90647 - DNA, 26 bp, Homo sapiens
gttttaattgcacaataaaataatgt

SEQ ID NO: 90648 - DNA, 26 bp, Homo sapiens
ttttaattgcacaataaaataatgtt

SEQ ID NO: 90649 - DNA, 26 bp, Homo sapiens
tttaattgcacaataaaataatgttg

SEQ ID NO: 90650 - DNA, 26 bp, Homo sapiens
ttaattgcacaataaaataatgttga

SEQ ID NO: 90651 - DNA, 26 bp, Homo sapiens
taattgcacaataaaataatgttgat

SEQ ID NO: 90652 - DNA, 26 bp, Homo sapiens
aattgcacaataaaataatgttgata

SEQ ID NO: 90653 - DNA, 26 bp, Homo sapiens
attgcacaataaaataatgttgatat

SEQ ID NO: 90654 - DNA, 26 bp, Homo sapiens
ttgcacaataaaataatgttgatata

SEQ ID NO: 90655 - DNA, 26 bp, Homo sapiens
tgcacaataaaataatgttgatatat

SEQ ID NO: 90656 - DNA, 26 bp, Homo sapiens
gcacaataaaataatgttgatatata

SEQ ID NO: 90657 - DNA, 26 bp, Homo sapiens
cacaataaaataatgttgatatatac

SEQ ID NO: 90658 - DNA, 26 bp, Homo sapiens
acaataaaataatgttgatatatact

SEQ ID NO: 90659 - DNA, 26 bp, Homo sapiens
caataaaataatgttgatatatactt

SEQ ID NO: 90660 - DNA, 26 bp, Homo sapiens
aataaaataatgttgatatatactta

SEQ ID NO: 90661 - DNA, 26 bp, Homo sapiens
ataaaataatgttgatatatacttaa

SEQ ID NO: 90662 - DNA, 26 bp, Homo sapiens
taaaataatgttgatatatacttaag

SEQ ID NO: 90663 - DNA, 26 bp, Homo sapiens
aaaataatgttgatatatacttaagc

SEQ ID NO: 90664 - DNA, 26 bp, Homo sapiens
aaataatgttgatatatacttaagct

SEQ ID NO: 90665 - DNA, 26 bp, Homo sapiens
aataatgttgatatatacttaagctt

SEQ ID NO: 90666 - DNA, 26 bp, Homo sapiens
ataatgttgatatatacttaagctta

SEQ ID NO: 90667 - DNA, 26 bp, Homo sapiens
taatgttgatatatacttaagcttaa

SEQ ID NO: 90668 - DNA, 26 bp, Homo sapiens
aatgttgatatatacttaagcttaaa

SEQ ID NO: 90669 - DNA, 26 bp, Homo sapiens
atgttgatatatacttaagcttaaat

SEQ ID NO: 90670 - DNA, 26 bp, Homo sapiens
tgttgatatatacttaagcttaaatt

SEQ ID NO: 90671 - DNA, 26 bp, Homo sapiens
gttgatatatacttaagcttaaatta

SEQ ID NO: 90672 - DNA, 26 bp, Homo sapiens
ttgatatatacttaagcttaaattaa

SEQ ID NO: 90673 - DNA, 26 bp, Homo sapiens
tgatatatacttaagcttaaattaat

SEQ ID NO: 90674 - DNA, 26 bp, Homo sapiens
gatatatacttaagcttaaattaatt

SEQ ID NO: 90675 - DNA, 26 bp, Homo sapiens
atatatacttaagcttaaattaattc

SEQ ID NO: 90676 - DNA, 26 bp, Homo sapiens
tatatacttaagcttaaattaattcc

SEQ ID NO: 90677 - DNA, 26 bp, Homo sapiens
atatacttaagcttaaattaattcca

SEQ ID NO: 90678 - DNA, 26 bp, Homo sapiens
tatacttaagcttaaattaattccaa

SEQ ID NO: 90679 - DNA, 26 bp, Homo sapiens
atacttaagcttaaattaattccaac

SEQ ID NO: 90680 - DNA, 26 bp, Homo sapiens
tacttaagcttaaattaattccaaca

SEQ ID NO: 90681 - DNA, 26 bp, Homo sapiens
acttaagcttaaattaattccaacag

SEQ ID NO: 90682 - DNA, 26 bp, Homo sapiens
cttaagcttaaattaattccaacagg

SEQ ID NO: 90683 - DNA, 26 bp, Homo sapiens
ttaagcttaaattaattccaacaggc

SEQ ID NO: 90684 - DNA, 26 bp, Homo sapiens
taagcttaaattaattccaacaggca

SEQ ID NO: 90685 - DNA, 26 bp, Homo sapiens
aagcttaaattaattccaacaggcaa

SEQ ID NO: 90686 - DNA, 26 bp, Homo sapiens
agcttaaattaattccaacaggcaaa

SEQ ID NO: 90687 - DNA, 26 bp, Homo sapiens
gcttaaattaattccaacaggcaaac

SEQ ID NO: 90688 - DNA, 26 bp, Homo sapiens
cttaaattaattccaacaggcaaaca

SEQ ID NO: 90689 - DNA, 26 bp, Homo sapiens
ttaaattaattccaacaggcaaacat

SEQ ID NO: 90690 - DNA, 26 bp, Homo sapiens
taaattaattccaacaggcaaacatt

SEQ ID NO: 90691 - DNA, 26 bp, Homo sapiens
aaattaattccaacaggcaaacattt

SEQ ID NO: 90692 - DNA, 26 bp, Homo sapiens
aattaattccaacaggcaaacatttt

SEQ ID NO: 90693 - DNA, 26 bp, Homo sapiens
attaattccaacaggcaaacattttc

SEQ ID NO: 90694 - DNA, 26 bp, Homo sapiens
ttaattccaacaggcaaacattttcc

SEQ ID NO: 90695 - DNA, 26 bp, Homo sapiens
taattccaacaggcaaacattttcca

SEQ ID NO: 90696 - DNA, 26 bp, Homo sapiens
aattccaacaggcaaacattttccaa

SEQ ID NO: 90697 - DNA, 26 bp, Homo sapiens
attccaacaggcaaacattttccaac

SEQ ID NO: 90698 - DNA, 26 bp, Homo sapiens
ttccaacaggcaaacattttccaacc

SEQ ID NO: 90699 - DNA, 26 bp, Homo sapiens
tccaacaggcaaacattttccaaccc

SEQ ID NO: 90700 - DNA, 26 bp, Homo sapiens
ccaacaggcaaacattttccaaccca

SEQ ID NO: 90701 - DNA, 26 bp, Homo sapiens
caacaggcaaacattttccaacccag

SEQ ID NO: 90702 - DNA, 26 bp, Homo sapiens
aacaggcaaacattttccaacccaga

SEQ ID NO: 90703 - DNA, 26 bp, Homo sapiens
acaggcaaacattttccaacccagag

SEQ ID NO: 90704 - DNA, 26 bp, Homo sapiens
caggcaaacattttccaacccagagt

SEQ ID NO: 90705 - DNA, 26 bp, Homo sapiens
aggcaaacattttccaacccagagtg

SEQ ID NO: 90706 - DNA, 26 bp, Homo sapiens
ggcaaacattttccaacccagagtgt

SEQ ID NO: 90707 - DNA, 26 bp, Homo sapiens
gcaaacattttccaacccagagtgtg

SEQ ID NO: 90708 - DNA, 26 bp, Homo sapiens
caaacattttccaacccagagtgtgg

SEQ ID NO: 90709 - DNA, 26 bp, Homo sapiens
aaacattttccaacccagagtgtggc

SEQ ID NO: 90710 - DNA, 26 bp, Homo sapiens
aacattttccaacccagagtgtggct

SEQ ID NO: 90711 - DNA, 26 bp, Homo sapiens
acattttccaacccagagtgtggctg

SEQ ID NO: 90712 - DNA, 26 bp, Homo sapiens
cattttccaacccagagtgtggctga

SEQ ID NO: 90713 - DNA, 26 bp, Homo sapiens
attttccaacccagagtgtggctgat

SEQ ID NO: 90714 - DNA, 26 bp, Homo sapiens
ttttccaacccagagtgtggctgatg

SEQ ID NO: 90715 - DNA, 26 bp, Homo sapiens
tttccaacccagagtgtggctgatgc

SEQ ID NO: 90716 - DNA, 26 bp, Homo sapiens
ttccaacccagagtgtggctgatgct

SEQ ID NO: 90717 - DNA, 26 bp, Homo sapiens
tccaacccagagtgtggctgatgctg

SEQ ID NO: 90718 - DNA, 26 bp, Homo sapiens
ccaacccagagtgtggctgatgctgg

SEQ ID NO: 90719 - DNA, 26 bp, Homo sapiens
caacccagagtgtggctgatgctggg

SEQ ID NO: 90720 - DNA, 26 bp, Homo sapiens
aacccagagtgtggctgatgctgggt

SEQ ID NO: 90721 - DNA, 26 bp, Homo sapiens
acccagagtgtggctgatgctgggtc

SEQ ID NO: 90722 - DNA, 26 bp, Homo sapiens
cccagagtgtggctgatgctgggtca

SEQ ID NO: 90723 - DNA, 26 bp, Homo sapiens
ccagagtgtggctgatgctgggtcag

SEQ ID NO: 90724 - DNA, 26 bp, Homo sapiens
cagagtgtggctgatgctgggtcagc

SEQ ID NO: 90725 - DNA, 26 bp, Homo sapiens
agagtgtggctgatgctgggtcagct

SEQ ID NO: 90726 - DNA, 26 bp, Homo sapiens
gagtgtggctgatgctgggtcagctg

SEQ ID NO: 90727 - DNA, 26 bp, Homo sapiens
agtgtggctgatgctgggtcagctga

SEQ ID NO: 90728 - DNA, 26 bp, Homo sapiens
gtgtggctgatgctgggtcagctgac

SEQ ID NO: 90729 - DNA, 26 bp, Homo sapiens
tgtggctgatgctgggtcagctgact

SEQ ID NO: 90730 - DNA, 26 bp, Homo sapiens
gtggctgatgctgggtcagctgactc

SEQ ID NO: 90731 - DNA, 26 bp, Homo sapiens
tggctgatgctgggtcagctgactct

SEQ ID NO: 90732 - DNA, 26 bp, Homo sapiens
ggctgatgctgggtcagctgactcta

SEQ ID NO: 90733 - DNA, 26 bp, Homo sapiens
gctgatgctgggtcagctgactctat

SEQ ID NO: 90734 - DNA, 26 bp, Homo sapiens
ctgatgctgggtcagctgactctatt

SEQ ID NO: 90735 - DNA, 26 bp, Homo sapiens
tgatgctgggtcagctgactctattt

SEQ ID NO: 90736 - DNA, 26 bp, Homo sapiens
gatgctgggtcagctgactctatttt

SEQ ID NO: 90737 - DNA, 26 bp, Homo sapiens
atgctgggtcagctgactctattttg

SEQ ID NO: 90738 - DNA, 26 bp, Homo sapiens
tgctgggtcagctgactctattttgg

SEQ ID NO: 90739 - DNA, 26 bp, Homo sapiens
gctgggtcagctgactctattttggt

SEQ ID NO: 90740 - DNA, 26 bp, Homo sapiens
ctgggtcagctgactctattttggtt

SEQ ID NO: 90741 - DNA, 26 bp, Homo sapiens
tgggtcagctgactctattttggttc

SEQ ID NO: 90742 - DNA, 26 bp, Homo sapiens
gggtcagctgactctattttggttca

SEQ ID NO: 90743 - DNA, 26 bp, Homo sapiens
ggtcagctgactctattttggttcac

SEQ ID NO: 90744 - DNA, 26 bp, Homo sapiens
gtcagctgactctattttggttcaca

SEQ ID NO: 90745 - DNA, 26 bp, Homo sapiens
tcagctgactctattttggttcacac

SEQ ID NO: 90746 - DNA, 26 bp, Homo sapiens
cagctgactctattttggttcacacc

SEQ ID NO: 90747 - DNA, 26 bp, Homo sapiens
agctgactctattttggttcacacca

SEQ ID NO: 90748 - DNA, 26 bp, Homo sapiens
gctgactctattttggttcacaccaa

SEQ ID NO: 90749 - DNA, 26 bp, Homo sapiens
ctgactctattttggttcacaccaac

SEQ ID NO: 90750 - DNA, 26 bp, Homo sapiens
tgactctattttggttcacaccaact

SEQ ID NO: 90751 - DNA, 26 bp, Homo sapiens
gactctattttggttcacaccaactt

SEQ ID NO: 90752 - DNA, 26 bp, Homo sapiens
actctattttggttcacaccaacttt

SEQ ID NO: 90753 - DNA, 26 bp, Homo sapiens
ctctattttggttcacaccaactttg

SEQ ID NO: 90754 - DNA, 26 bp, Homo sapiens
tctattttggttcacaccaactttga

SEQ ID NO: 90755 - DNA, 26 bp, Homo sapiens
ctattttggttcacaccaactttgat

SEQ ID NO: 90756 - DNA, 26 bp, Homo sapiens
tattttggttcacaccaactttgatg

SEQ ID NO: 90757 - DNA, 26 bp, Homo sapiens
attttggttcacaccaactttgatgt

SEQ ID NO: 90758 - DNA, 26 bp, Homo sapiens
ttttggttcacaccaactttgatgtc

SEQ ID NO: 90759 - DNA, 26 bp, Homo sapiens
tttggttcacaccaactttgatgtct

SEQ ID NO: 90760 - DNA, 26 bp, Homo sapiens
ttggttcacaccaactttgatgtcta

SEQ ID NO: 90761 - DNA, 26 bp, Homo sapiens
tggttcacaccaactttgatgtctag

SEQ ID NO: 90762 - DNA, 26 bp, Homo sapiens
ggttcacaccaactttgatgtctagg

SEQ ID NO: 90763 - DNA, 26 bp, Homo sapiens
gttcacaccaactttgatgtctaggc

SEQ ID NO: 90764 - DNA, 26 bp, Homo sapiens
ttcacaccaactttgatgtctaggct

SEQ ID NO: 90765 - DNA, 26 bp, Homo sapiens
tcacaccaactttgatgtctaggcta

SEQ ID NO: 90766 - DNA, 26 bp, Homo sapiens
cacaccaactttgatgtctaggctat

SEQ ID NO: 90767 - DNA, 26 bp, Homo sapiens
acaccaactttgatgtctaggctatt

SEQ ID NO: 90768 - DNA, 26 bp, Homo sapiens
caccaactttgatgtctaggctattc

SEQ ID NO: 90769 - DNA, 26 bp, Homo sapiens
accaactttgatgtctaggctattca

SEQ ID NO: 90770 - DNA, 26 bp, Homo sapiens
ccaactttgatgtctaggctattcag

SEQ ID NO: 90771 - DNA, 26 bp, Homo sapiens
caactttgatgtctaggctattcagc

SEQ ID NO: 90772 - DNA, 26 bp, Homo sapiens
aactttgatgtctaggctattcagca

SEQ ID NO: 90773 - DNA, 26 bp, Homo sapiens
actttgatgtctaggctattcagcat

SEQ ID NO: 90774 - DNA, 26 bp, Homo sapiens
ctttgatgtctaggctattcagcatc

SEQ ID NO: 90775 - DNA, 26 bp, Homo sapiens
tttgatgtctaggctattcagcatct

SEQ ID NO: 90776 - DNA, 26 bp, Homo sapiens
ttgatgtctaggctattcagcatcta

SEQ ID NO: 90777 - DNA, 26 bp, Homo sapiens
tgatgtctaggctattcagcatctac

SEQ ID NO: 90778 - DNA, 26 bp, Homo sapiens
gatgtctaggctattcagcatctacc

SEQ ID NO: 90779 - DNA, 26 bp, Homo sapiens
atgtctaggctattcagcatctacct

SEQ ID NO: 90780 - DNA, 26 bp, Homo sapiens
tgtctaggctattcagcatctaccta

SEQ ID NO: 90781 - DNA, 26 bp, Homo sapiens
gtctaggctattcagcatctacctag

SEQ ID NO: 90782 - DNA, 26 bp, Homo sapiens
tctaggctattcagcatctacctaga

SEQ ID NO: 90783 - DNA, 26 bp, Homo sapiens
ctaggctattcagcatctacctagaa

SEQ ID NO: 90784 - DNA, 26 bp, Homo sapiens
taggctattcagcatctacctagaaa

SEQ ID NO: 90785 - DNA, 26 bp, Homo sapiens
aggctattcagcatctacctagaaaa

SEQ ID NO: 90786 - DNA, 26 bp, Homo sapiens
ggctattcagcatctacctagaaaat

SEQ ID NO: 90787 - DNA, 26 bp, Homo sapiens
gctattcagcatctacctagaaaatc

SEQ ID NO: 90788 - DNA, 26 bp, Homo sapiens
ctattcagcatctacctagaaaatct

SEQ ID NO: 90789 - DNA, 26 bp, Homo sapiens
tattcagcatctacctagaaaatctc

SEQ ID NO: 90790 - DNA, 26 bp, Homo sapiens
attcagcatctacctagaaaatctca

SEQ ID NO: 90791 - DNA, 26 bp, Homo sapiens
ttcagcatctacctagaaaatctcaa

SEQ ID NO: 90792 - DNA, 26 bp, Homo sapiens
tcagcatctacctagaaaatctcaat

SEQ ID NO: 90793 - DNA, 26 bp, Homo sapiens
cagcatctacctagaaaatctcaatc

SEQ ID NO: 90794 - DNA, 26 bp, Homo sapiens
agcatctacctagaaaatctcaatcg

SEQ ID NO: 90795 - DNA, 26 bp, Homo sapiens
gcatctacctagaaaatctcaatcgt

SEQ ID NO: 90796 - DNA, 26 bp, Homo sapiens
catctacctagaaaatctcaatcgtt

SEQ ID NO: 90797 - DNA, 26 bp, Homo sapiens
atctacctagaaaatctcaatcgttc

SEQ ID NO: 90798 - DNA, 26 bp, Homo sapiens
tctacctagaaaatctcaatcgttcc

SEQ ID NO: 90799 - DNA, 26 bp, Homo sapiens
ctacctagaaaatctcaatcgttcca

SEQ ID NO: 90800 - DNA, 26 bp, Homo sapiens
tacctagaaaatctcaatcgttccaa

SEQ ID NO: 90801 - DNA, 26 bp, Homo sapiens
acctagaaaatctcaatcgttccaag

SEQ ID NO: 90802 - DNA, 26 bp, Homo sapiens
cctagaaaatctcaatcgttccaagc

SEQ ID NO: 90803 - DNA, 26 bp, Homo sapiens
ctagaaaatctcaatcgttccaagca

SEQ ID NO: 90804 - DNA, 26 bp, Homo sapiens
tagaaaatctcaatcgttccaagcat

SEQ ID NO: 90805 - DNA, 26 bp, Homo sapiens
agaaaatctcaatcgttccaagcata

SEQ ID NO: 90806 - DNA, 26 bp, Homo sapiens
gaaaatctcaatcgttccaagcatac

SEQ ID NO: 90807 - DNA, 26 bp, Homo sapiens
aaaatctcaatcgttccaagcatacc

SEQ ID NO: 90808 - DNA, 26 bp, Homo sapiens
aaatctcaatcgttccaagcataccg

SEQ ID NO: 90809 - DNA, 26 bp, Homo sapiens
aatctcaatcgttccaagcataccgt

SEQ ID NO: 90810 - DNA, 26 bp, Homo sapiens
atctcaatcgttccaagcataccgtg

SEQ ID NO: 90811 - DNA, 26 bp, Homo sapiens
tctcaatcgttccaagcataccgtga

SEQ ID NO: 90812 - DNA, 26 bp, Homo sapiens
ctcaatcgttccaagcataccgtgaa

SEQ ID NO: 90813 - DNA, 26 bp, Homo sapiens
tcaatcgttccaagcataccgtgaat

SEQ ID NO: 90814 - DNA, 26 bp, Homo sapiens
caatcgttccaagcataccgtgaatt

SEQ ID NO: 90815 - DNA, 26 bp, Homo sapiens
aatcgttccaagcataccgtgaattt

SEQ ID NO: 90816 - DNA, 26 bp, Homo sapiens
atcgttccaagcataccgtgaatttt

SEQ ID NO: 90817 - DNA, 26 bp, Homo sapiens
tcgttccaagcataccgtgaattttg

SEQ ID NO: 90818 - DNA, 26 bp, Homo sapiens
cgttccaagcataccgtgaattttgt

SEQ ID NO: 90819 - DNA, 26 bp, Homo sapiens
gttccaagcataccgtgaattttgtg

SEQ ID NO: 90820 - DNA, 26 bp, Homo sapiens
ttccaagcataccgtgaattttgtga

SEQ ID NO: 90821 - DNA, 26 bp, Homo sapiens
tccaagcataccgtgaattttgtgat

SEQ ID NO: 90822 - DNA, 26 bp, Homo sapiens
ccaagcataccgtgaattttgtgatt

SEQ ID NO: 90823 - DNA, 26 bp, Homo sapiens
caagcataccgtgaattttgtgattt

SEQ ID NO: 90824 - DNA, 26 bp, Homo sapiens
aagcataccgtgaattttgtgatttc

SEQ ID NO: 90825 - DNA, 26 bp, Homo sapiens
agcataccgtgaattttgtgatttct

SEQ ID NO: 90826 - DNA, 26 bp, Homo sapiens
gcataccgtgaattttgtgatttctc

SEQ ID NO: 90827 - DNA, 26 bp, Homo sapiens
cataccgtgaattttgtgatttctca

SEQ ID NO: 90828 - DNA, 26 bp, Homo sapiens
ataccgtgaattttgtgatttctcag

SEQ ID NO: 90829 - DNA, 26 bp, Homo sapiens
taccgtgaattttgtgatttctcaga

SEQ ID NO: 90830 - DNA, 26 bp, Homo sapiens
accgtgaattttgtgatttctcagaa

SEQ ID NO: 90831 - DNA, 26 bp, Homo sapiens
ccgtgaattttgtgatttctcagaag

SEQ ID NO: 90832 - DNA, 26 bp, Homo sapiens
cgtgaattttgtgatttctcagaaga

SEQ ID NO: 90833 - DNA, 26 bp, Homo sapiens
gtgaattttgtgatttctcagaagat

SEQ ID NO: 90834 - DNA, 26 bp, Homo sapiens
tgaattttgtgatttctcagaagatt

SEQ ID NO: 90835 - DNA, 26 bp, Homo sapiens
gaattttgtgatttctcagaagattt

SEQ ID NO: 90836 - DNA, 26 bp, Homo sapiens
aattttgtgatttctcagaagatttt

SEQ ID NO: 90837 - DNA, 26 bp, Homo sapiens
attttgtgatttctcagaagattttc

SEQ ID NO: 90838 - DNA, 26 bp, Homo sapiens
ttttgtgatttctcagaagattttcg

SEQ ID NO: 90839 - DNA, 26 bp, Homo sapiens
tttgtgatttctcagaagattttcgg

SEQ ID NO: 90840 - DNA, 26 bp, Homo sapiens
ttgtgatttctcagaagattttcgga

SEQ ID NO: 90841 - DNA, 26 bp, Homo sapiens
tgtgatttctcagaagattttcggag

SEQ ID NO: 90842 - DNA, 26 bp, Homo sapiens
gtgatttctcagaagattttcggagt

SEQ ID NO: 90843 - DNA, 26 bp, Homo sapiens
tgatttctcagaagattttcggagtt

SEQ ID NO: 90844 - DNA, 26 bp, Homo sapiens
gatttctcagaagattttcggagtta

SEQ ID NO: 90845 - DNA, 26 bp, Homo sapiens
atttctcagaagattttcggagttaa

SEQ ID NO: 90846 - DNA, 26 bp, Homo sapiens
tttctcagaagattttcggagttaaa

SEQ ID NO: 90847 - DNA, 26 bp, Homo sapiens
ttctcagaagattttcggagttaaaa

SEQ ID NO: 90848 - DNA, 26 bp, Homo sapiens
tctcagaagattttcggagttaaaag

SEQ ID NO: 90849 - DNA, 26 bp, Homo sapiens
ctcagaagattttcggagttaaaaga

SEQ ID NO: 90850 - DNA, 26 bp, Homo sapiens
tcagaagattttcggagttaaaagaa

SEQ ID NO: 90851 - DNA, 26 bp, Homo sapiens
cagaagattttcggagttaaaagaag

SEQ ID NO: 90852 - DNA, 26 bp, Homo sapiens
agaagattttcggagttaaaagaagt

SEQ ID NO: 90853 - DNA, 26 bp, Homo sapiens
gaagattttcggagttaaaagaagtg

SEQ ID NO: 90854 - DNA, 26 bp, Homo sapiens
aagattttcggagttaaaagaagtgt

SEQ ID NO: 90855 - DNA, 26 bp, Homo sapiens
agattttcggagttaaaagaagtgtt

SEQ ID NO: 90856 - DNA, 26 bp, Homo sapiens
gattttcggagttaaaagaagtgttt

SEQ ID NO: 90857 - DNA, 26 bp, Homo sapiens
attttcggagttaaaagaagtgttta

SEQ ID NO: 90858 - DNA, 26 bp, Homo sapiens
ttttcggagttaaaagaagtgtttat

SEQ ID NO: 90859 - DNA, 26 bp, Homo sapiens
tttcggagttaaaagaagtgtttata

SEQ ID NO: 90860 - DNA, 26 bp, Homo sapiens
ttcggagttaaaagaagtgtttatat

SEQ ID NO: 90861 - DNA, 26 bp, Homo sapiens
tcggagttaaaagaagtgtttatatc

SEQ ID NO: 90862 - DNA, 26 bp, Homo sapiens
cggagttaaaagaagtgtttatatca

SEQ ID NO: 90863 - DNA, 26 bp, Homo sapiens
ggagttaaaagaagtgtttatatcac

SEQ ID NO: 90864 - DNA, 26 bp, Homo sapiens
gagttaaaagaagtgtttatatcact

SEQ ID NO: 90865 - DNA, 26 bp, Homo sapiens
agttaaaagaagtgtttatatcactt

SEQ ID NO: 90866 - DNA, 26 bp, Homo sapiens
gttaaaagaagtgtttatatcactta

SEQ ID NO: 90867 - DNA, 26 bp, Homo sapiens
ttaaaagaagtgtttatatcacttaa

SEQ ID NO: 90868 - DNA, 26 bp, Homo sapiens
taaaagaagtgtttatatcacttaat

SEQ ID NO: 90869 - DNA, 26 bp, Homo sapiens
aaaagaagtgtttatatcacttaata

SEQ ID NO: 90870 - DNA, 26 bp, Homo sapiens
aaagaagtgtttatatcacttaatat

SEQ ID NO: 90871 - DNA, 26 bp, Homo sapiens
aagaagtgtttatatcacttaatatc

SEQ ID NO: 90872 - DNA, 26 bp, Homo sapiens
agaagtgtttatatcacttaatatcc

SEQ ID NO: 90873 - DNA, 26 bp, Homo sapiens
gaagtgtttatatcacttaatatcca

SEQ ID NO: 90874 - DNA, 26 bp, Homo sapiens
aagtgtttatatcacttaatatccaa

SEQ ID NO: 90875 - DNA, 26 bp, Homo sapiens
agtgtttatatcacttaatatccaac

SEQ ID NO: 90876 - DNA, 26 bp, Homo sapiens
gtgtttatatcacttaatatccaaca

SEQ ID NO: 90877 - DNA, 26 bp, Homo sapiens
tgtttatatcacttaatatccaacat

SEQ ID NO: 90878 - DNA, 26 bp, Homo sapiens
gtttatatcacttaatatccaacatt

SEQ ID NO: 90879 - DNA, 26 bp, Homo sapiens
tttatatcacttaatatccaacattt

SEQ ID NO: 90880 - DNA, 26 bp, Homo sapiens
ttatatcacttaatatccaacatttc

SEQ ID NO: 90881 - DNA, 26 bp, Homo sapiens
tatatcacttaatatccaacatttct

SEQ ID NO: 90882 - DNA, 26 bp, Homo sapiens
atatcacttaatatccaacatttcta

SEQ ID NO: 90883 - DNA, 26 bp, Homo sapiens
tatcacttaatatccaacatttctaa

SEQ ID NO: 90884 - DNA, 26 bp, Homo sapiens
atcacttaatatccaacatttctaaa

SEQ ID NO: 90885 - DNA, 26 bp, Homo sapiens
tcacttaatatccaacatttctaaag

SEQ ID NO: 90886 - DNA, 26 bp, Homo sapiens
cacttaatatccaacatttctaaagg

SEQ ID NO: 90887 - DNA, 26 bp, Homo sapiens
acttaatatccaacatttctaaaggg

SEQ ID NO: 90888 - DNA, 26 bp, Homo sapiens
cttaatatccaacatttctaaagggg

SEQ ID NO: 90889 - DNA, 26 bp, Homo sapiens
ttaatatccaacatttctaaaggggg

SEQ ID NO: 90890 - DNA, 26 bp, Homo sapiens
taatatccaacatttctaaagggggg

SEQ ID NO: 90891 - DNA, 26 bp, Homo sapiens
aatatccaacatttctaaagggggga

SEQ ID NO: 90892 - DNA, 26 bp, Homo sapiens
atatccaacatttctaaaggggggaa

SEQ ID NO: 90893 - DNA, 26 bp, Homo sapiens
tatccaacatttctaaaggggggaaa

SEQ ID NO: 90894 - DNA, 26 bp, Homo sapiens
atccaacatttctaaaggggggaaaa

SEQ ID NO: 90895 - DNA, 26 bp, Homo sapiens
tccaacatttctaaaggggggaaaac

SEQ ID NO: 90896 - DNA, 26 bp, Homo sapiens
ccaacatttctaaaggggggaaaacc

SEQ ID NO: 90897 - DNA, 26 bp, Homo sapiens
caacatttctaaaggggggaaaaccc

SEQ ID NO: 90898 - DNA, 26 bp, Homo sapiens
aacatttctaaaggggggaaaacccc

SEQ ID NO: 90899 - DNA, 26 bp, Homo sapiens
acatttctaaaggggggaaaacccca

SEQ ID NO: 90900 - DNA, 26 bp, Homo sapiens
catttctaaaggggggaaaaccccac

SEQ ID NO: 90901 - DNA, 26 bp, Homo sapiens
atttctaaaggggggaaaaccccacc

SEQ ID NO: 90902 - DNA, 26 bp, Homo sapiens
tttctaaaggggggaaaaccccacca

SEQ ID NO: 90903 - DNA, 26 bp, Homo sapiens
ttctaaaggggggaaaaccccaccat

SEQ ID NO: 90904 - DNA, 26 bp, Homo sapiens
tctaaaggggggaaaaccccaccatc

SEQ ID NO: 90905 - DNA, 26 bp, Homo sapiens
ctaaaggggggaaaaccccaccatct

SEQ ID NO: 90906 - DNA, 26 bp, Homo sapiens
taaaggggggaaaaccccaccatcta

SEQ ID NO: 90907 - DNA, 26 bp, Homo sapiens
aaaggggggaaaaccccaccatctat

SEQ ID NO: 90908 - DNA, 26 bp, Homo sapiens
aaggggggaaaaccccaccatctatt

SEQ ID NO: 90909 - DNA, 26 bp, Homo sapiens
aggggggaaaaccccaccatctatta

SEQ ID NO: 90910 - DNA, 26 bp, Homo sapiens
ggggggaaaaccccaccatctattat

SEQ ID NO: 90911 - DNA, 26 bp, Homo sapiens
gggggaaaaccccaccatctattatc

SEQ ID NO: 90912 - DNA, 26 bp, Homo sapiens
ggggaaaaccccaccatctattatca

SEQ ID NO: 90913 - DNA, 26 bp, Homo sapiens
gggaaaaccccaccatctattatcaa

SEQ ID NO: 90914 - DNA, 26 bp, Homo sapiens
ggaaaaccccaccatctattatcaat

SEQ ID NO: 90915 - DNA, 26 bp, Homo sapiens
gaaaaccccaccatctattatcaatg

SEQ ID NO: 90916 - DNA, 26 bp, Homo sapiens
aaaaccccaccatctattatcaatga

SEQ ID NO: 90917 - DNA, 26 bp, Homo sapiens
aaaccccaccatctattatcaatgac

SEQ ID NO: 90918 - DNA, 26 bp, Homo sapiens
aaccccaccatctattatcaatgaca

SEQ ID NO: 90919 - DNA, 26 bp, Homo sapiens
accccaccatctattatcaatgacat

SEQ ID NO: 90920 - DNA, 26 bp, Homo sapiens
ccccaccatctattatcaatgacatt

SEQ ID NO: 90921 - DNA, 26 bp, Homo sapiens
cccaccatctattatcaatgacattt

SEQ ID NO: 90922 - DNA, 26 bp, Homo sapiens
ccaccatctattatcaatgacatttc

SEQ ID NO: 90923 - DNA, 26 bp, Homo sapiens
caccatctattatcaatgacatttcc

SEQ ID NO: 90924 - DNA, 26 bp, Homo sapiens
accatctattatcaatgacatttccc

SEQ ID NO: 90925 - DNA, 26 bp, Homo sapiens
ccatctattatcaatgacatttccca

SEQ ID NO: 90926 - DNA, 26 bp, Homo sapiens
catctattatcaatgacatttcccaa

SEQ ID NO: 90927 - DNA, 26 bp, Homo sapiens
atctattatcaatgacatttcccaag

SEQ ID NO: 90928 - DNA, 26 bp, Homo sapiens
tctattatcaatgacatttcccaagt

SEQ ID NO: 90929 - DNA, 26 bp, Homo sapiens
ctattatcaatgacatttcccaagtc

SEQ ID NO: 90930 - DNA, 26 bp, Homo sapiens
tattatcaatgacatttcccaagtcc

SEQ ID NO: 90931 - DNA, 26 bp, Homo sapiens
attatcaatgacatttcccaagtcct

SEQ ID NO: 90932 - DNA, 26 bp, Homo sapiens
ttatcaatgacatttcccaagtcctt

SEQ ID NO: 90933 - DNA, 26 bp, Homo sapiens
tatcaatgacatttcccaagtccttg

SEQ ID NO: 90934 - DNA, 26 bp, Homo sapiens
atcaatgacatttcccaagtccttgc

SEQ ID NO: 90935 - DNA, 26 bp, Homo sapiens
tcaatgacatttcccaagtccttgca

SEQ ID NO: 90936 - DNA, 26 bp, Homo sapiens
caatgacatttcccaagtccttgcac

SEQ ID NO: 90937 - DNA, 26 bp, Homo sapiens
aatgacatttcccaagtccttgcacc

SEQ ID NO: 90938 - DNA, 26 bp, Homo sapiens
atgacatttcccaagtccttgcacca

SEQ ID NO: 90939 - DNA, 26 bp, Homo sapiens
tgacatttcccaagtccttgcaccag

SEQ ID NO: 90940 - DNA, 26 bp, Homo sapiens
gacatttcccaagtccttgcaccagg

SEQ ID NO: 90941 - DNA, 26 bp, Homo sapiens
acatttcccaagtccttgcaccaggc

SEQ ID NO: 90942 - DNA, 26 bp, Homo sapiens
catttcccaagtccttgcaccaggcc

SEQ ID NO: 90943 - DNA, 26 bp, Homo sapiens
atttcccaagtccttgcaccaggccc

SEQ ID NO: 90944 - DNA, 26 bp, Homo sapiens
tttcccaagtccttgcaccaggccct

SEQ ID NO: 90945 - DNA, 26 bp, Homo sapiens
ttcccaagtccttgcaccaggccctt

SEQ ID NO: 90946 - DNA, 26 bp, Homo sapiens
tcccaagtccttgcaccaggccctta

SEQ ID NO: 90947 - DNA, 26 bp, Homo sapiens
cccaagtccttgcaccaggcccttag

SEQ ID NO: 90948 - DNA, 26 bp, Homo sapiens
ccaagtccttgcaccaggcccttagt

SEQ ID NO: 90949 - DNA, 26 bp, Homo sapiens
caagtccttgcaccaggcccttagtc

SEQ ID NO: 90950 - DNA, 26 bp, Homo sapiens
aagtccttgcaccaggcccttagtca

SEQ ID NO: 90951 - DNA, 26 bp, Homo sapiens
agtccttgcaccaggcccttagtcac

SEQ ID NO: 90952 - DNA, 26 bp, Homo sapiens
gtccttgcaccaggcccttagtcacc

SEQ ID NO: 90953 - DNA, 26 bp, Homo sapiens
tccttgcaccaggcccttagtcacca

SEQ ID NO: 90954 - DNA, 26 bp, Homo sapiens
ccttgcaccaggcccttagtcaccag

SEQ ID NO: 90955 - DNA, 26 bp, Homo sapiens
cttgcaccaggcccttagtcaccagg

SEQ ID NO: 90956 - DNA, 26 bp, Homo sapiens
ttgcaccaggcccttagtcaccaggt

SEQ ID NO: 90957 - DNA, 26 bp, Homo sapiens
tgcaccaggcccttagtcaccaggtt

SEQ ID NO: 90958 - DNA, 26 bp, Homo sapiens
gcaccaggcccttagtcaccaggttc

SEQ ID NO: 90959 - DNA, 26 bp, Homo sapiens
caccaggcccttagtcaccaggttcc

SEQ ID NO: 90960 - DNA, 26 bp, Homo sapiens
accaggcccttagtcaccaggttccc

SEQ ID NO: 90961 - DNA, 26 bp, Homo sapiens
ccaggcccttagtcaccaggttccca

SEQ ID NO: 90962 - DNA, 26 bp, Homo sapiens
caggcccttagtcaccaggttcccac

SEQ ID NO: 90963 - DNA, 26 bp, Homo sapiens
aggcccttagtcaccaggttcccacg

SEQ ID NO: 90964 - DNA, 26 bp, Homo sapiens
ggcccttagtcaccaggttcccacgt

SEQ ID NO: 90965 - DNA, 26 bp, Homo sapiens
gcccttagtcaccaggttcccacgtt

SEQ ID NO: 90966 - DNA, 26 bp, Homo sapiens
cccttagtcaccaggttcccacgttt

SEQ ID NO: 90967 - DNA, 26 bp, Homo sapiens
ccttagtcaccaggttcccacgtttt

SEQ ID NO: 90968 - DNA, 26 bp, Homo sapiens
cttagtcaccaggttcccacgttttg

SEQ ID NO: 90969 - DNA, 26 bp, Homo sapiens
ttagtcaccaggttcccacgttttgt

SEQ ID NO: 90970 - DNA, 26 bp, Homo sapiens
tagtcaccaggttcccacgttttgtt

SEQ ID NO: 90971 - DNA, 26 bp, Homo sapiens
agtcaccaggttcccacgttttgttg

SEQ ID NO: 90972 - DNA, 26 bp, Homo sapiens
gtcaccaggttcccacgttttgttgc

SEQ ID NO: 90973 - DNA, 26 bp, Homo sapiens
tcaccaggttcccacgttttgttgct

SEQ ID NO: 90974 - DNA, 26 bp, Homo sapiens
caccaggttcccacgttttgttgctt

SEQ ID NO: 90975 - DNA, 26 bp, Homo sapiens
accaggttcccacgttttgttgcttt

SEQ ID NO: 90976 - DNA, 26 bp, Homo sapiens
ccaggttcccacgttttgttgctttc

SEQ ID NO: 90977 - DNA, 26 bp, Homo sapiens
caggttcccacgttttgttgctttcc

SEQ ID NO: 90978 - DNA, 26 bp, Homo sapiens
aggttcccacgttttgttgctttcct

SEQ ID NO: 90979 - DNA, 26 bp, Homo sapiens
ggttcccacgttttgttgctttccta

SEQ ID NO: 90980 - DNA, 26 bp, Homo sapiens
gttcccacgttttgttgctttcctac

SEQ ID NO: 90981 - DNA, 26 bp, Homo sapiens
ttcccacgttttgttgctttcctacc

SEQ ID NO: 90982 - DNA, 26 bp, Homo sapiens
tcccacgttttgttgctttcctaccg

SEQ ID NO: 90983 - DNA, 26 bp, Homo sapiens
cccacgttttgttgctttcctaccgt

SEQ ID NO: 90984 - DNA, 26 bp, Homo sapiens
ccacgttttgttgctttcctaccgtc

SEQ ID NO: 90985 - DNA, 26 bp, Homo sapiens
cacgttttgttgctttcctaccgtct

SEQ ID NO: 90986 - DNA, 26 bp, Homo sapiens
acgttttgttgctttcctaccgtctc

SEQ ID NO: 90987 - DNA, 26 bp, Homo sapiens
cgttttgttgctttcctaccgtctca

SEQ ID NO: 90988 - DNA, 26 bp, Homo sapiens
gttttgttgctttcctaccgtctcaa

SEQ ID NO: 90989 - DNA, 26 bp, Homo sapiens
ttttgttgctttcctaccgtctcaaa

SEQ ID NO: 90990 - DNA, 26 bp, Homo sapiens
tttgttgctttcctaccgtctcaaac

SEQ ID NO: 90991 - DNA, 26 bp, Homo sapiens
ttgttgctttcctaccgtctcaaacc

SEQ ID NO: 90992 - DNA, 26 bp, Homo sapiens
tgttgctttcctaccgtctcaaacca

SEQ ID NO: 90993 - DNA, 26 bp, Homo sapiens
gttgctttcctaccgtctcaaaccag

SEQ ID NO: 90994 - DNA, 26 bp, Homo sapiens
ttgctttcctaccgtctcaaaccagg

SEQ ID NO: 90995 - DNA, 26 bp, Homo sapiens
tgctttcctaccgtctcaaaccaggt

SEQ ID NO: 90996 - DNA, 26 bp, Homo sapiens
gctttcctaccgtctcaaaccaggtt

SEQ ID NO: 90997 - DNA, 26 bp, Homo sapiens
ctttcctaccgtctcaaaccaggttc

SEQ ID NO: 90998 - DNA, 26 bp, Homo sapiens
tttcctaccgtctcaaaccaggttca

SEQ ID NO: 90999 - DNA, 26 bp, Homo sapiens
ttcctaccgtctcaaaccaggttcat

SEQ ID NO: 91000 - DNA, 26 bp, Homo sapiens
tcctaccgtctcaaaccaggttcatg

SEQ ID NO: 91001 - DNA, 26 bp, Homo sapiens
cctaccgtctcaaaccaggttcatga

SEQ ID NO: 91002 - DNA, 26 bp, Homo sapiens
ctaccgtctcaaaccaggttcatgaa

SEQ ID NO: 91003 - DNA, 26 bp, Homo sapiens
taccgtctcaaaccaggttcatgaaa

SEQ ID NO: 91004 - DNA, 26 bp, Homo sapiens
accgtctcaaaccaggttcatgaaag

SEQ ID NO: 91005 - DNA, 26 bp, Homo sapiens
ccgtctcaaaccaggttcatgaaagc

SEQ ID NO: 91006 - DNA, 26 bp, Homo sapiens
cgtctcaaaccaggttcatgaaagca

SEQ ID NO: 91007 - DNA, 26 bp, Homo sapiens
gtctcaaaccaggttcatgaaagcat

SEQ ID NO: 91008 - DNA, 26 bp, Homo sapiens
tctcaaaccaggttcatgaaagcatt

SEQ ID NO: 91009 - DNA, 26 bp, Homo sapiens
ctcaaaccaggttcatgaaagcattt

SEQ ID NO: 91010 - DNA, 26 bp, Homo sapiens
tcaaaccaggttcatgaaagcatttg

SEQ ID NO: 91011 - DNA, 26 bp, Homo sapiens
caaaccaggttcatgaaagcatttga

SEQ ID NO: 91012 - DNA, 26 bp, Homo sapiens
aaaccaggttcatgaaagcatttgaa

SEQ ID NO: 91013 - DNA, 26 bp, Homo sapiens
aaccaggttcatgaaagcatttgaac

SEQ ID NO: 91014 - DNA, 26 bp, Homo sapiens
accaggttcatgaaagcatttgaaca

SEQ ID NO: 91015 - DNA, 26 bp, Homo sapiens
ccaggttcatgaaagcatttgaacag

SEQ ID NO: 91016 - DNA, 26 bp, Homo sapiens
caggttcatgaaagcatttgaacaga

SEQ ID NO: 91017 - DNA, 26 bp, Homo sapiens
aggttcatgaaagcatttgaacagag

SEQ ID NO: 91018 - DNA, 26 bp, Homo sapiens
ggttcatgaaagcatttgaacagagt

SEQ ID NO: 91019 - DNA, 26 bp, Homo sapiens
gttcatgaaagcatttgaacagagtt

SEQ ID NO: 91020 - DNA, 26 bp, Homo sapiens
ttcatgaaagcatttgaacagagttc

SEQ ID NO: 91021 - DNA, 26 bp, Homo sapiens
tcatgaaagcatttgaacagagttca

SEQ ID NO: 91022 - DNA, 26 bp, Homo sapiens
catgaaagcatttgaacagagttcag

SEQ ID NO: 91023 - DNA, 26 bp, Homo sapiens
atgaaagcatttgaacagagttcagt

SEQ ID NO: 91024 - DNA, 26 bp, Homo sapiens
tgaaagcatttgaacagagttcagtc

SEQ ID NO: 91025 - DNA, 26 bp, Homo sapiens
gaaagcatttgaacagagttcagtct

SEQ ID NO: 91026 - DNA, 26 bp, Homo sapiens
aaagcatttgaacagagttcagtctt

SEQ ID NO: 91027 - DNA, 26 bp, Homo sapiens
aagcatttgaacagagttcagtcttc

SEQ ID NO: 91028 - DNA, 26 bp, Homo sapiens
agcatttgaacagagttcagtcttca

SEQ ID NO: 91029 - DNA, 26 bp, Homo sapiens
gcatttgaacagagttcagtcttcat

SEQ ID NO: 91030 - DNA, 26 bp, Homo sapiens
catttgaacagagttcagtcttcatt

SEQ ID NO: 91031 - DNA, 26 bp, Homo sapiens
atttgaacagagttcagtcttcattt

SEQ ID NO: 91032 - DNA, 26 bp, Homo sapiens
tttgaacagagttcagtcttcatttt

SEQ ID NO: 91033 - DNA, 26 bp, Homo sapiens
ttgaacagagttcagtcttcatttta

SEQ ID NO: 91034 - DNA, 26 bp, Homo sapiens
tgaacagagttcagtcttcattttac

SEQ ID NO: 91035 - DNA, 26 bp, Homo sapiens
gaacagagttcagtcttcattttaca

SEQ ID NO: 91036 - DNA, 26 bp, Homo sapiens
aacagagttcagtcttcattttacaa

SEQ ID NO: 91037 - DNA, 26 bp, Homo sapiens
acagagttcagtcttcattttacaaa

SEQ ID NO: 91038 - DNA, 26 bp, Homo sapiens
cagagttcagtcttcattttacaaaa

SEQ ID NO: 91039 - DNA, 26 bp, Homo sapiens
agagttcagtcttcattttacaaaaa

SEQ ID NO: 91040 - DNA, 26 bp, Homo sapiens
gagttcagtcttcattttacaaaaaa

SEQ ID NO: 91041 - DNA, 26 bp, Homo sapiens
agttcagtcttcattttacaaaaaaa

SEQ ID NO: 91042 - DNA, 26 bp, Homo sapiens
gttcagtcttcattttacaaaaaaaa

SEQ ID NO: 91043 - DNA, 26 bp, Homo sapiens
ttcagtcttcattttacaaaaaaaaa

SEQ ID NO: 91044 - DNA, 26 bp, Homo sapiens
tcagtcttcattttacaaaaaaaaaa

SEQ ID NO: 91045 - DNA, 26 bp, Homo sapiens
cagtcttcattttacaaaaaaaaaaa

SEQ ID NO: 91046 - DNA, 26 bp, Homo sapiens
agtcttcattttacaaaaaaaaaaaa

SEQ ID NO: 91047 - DNA, 26 bp, Homo sapiens
gtcttcattttacaaaaaaaaaaaat

SEQ ID NO: 91048 - DNA, 26 bp, Homo sapiens
tcttcattttacaaaaaaaaaaaatt

SEQ ID NO: 91049 - DNA, 26 bp, Homo sapiens
cttcattttacaaaaaaaaaaaattc

SEQ ID NO: 91050 - DNA, 26 bp, Homo sapiens
ttcattttacaaaaaaaaaaaattcc

SEQ ID NO: 91051 - DNA, 26 bp, Homo sapiens
tcattttacaaaaaaaaaaaattcct

SEQ ID NO: 91052 - DNA, 26 bp, Homo sapiens
cattttacaaaaaaaaaaaattccta

SEQ ID NO: 91053 - DNA, 26 bp, Homo sapiens
attttacaaaaaaaaaaaattcctaa

SEQ ID NO: 91054 - DNA, 26 bp, Homo sapiens
ttttacaaaaaaaaaaaattcctaat

SEQ ID NO: 91055 - DNA, 26 bp, Homo sapiens
tttacaaaaaaaaaaaattcctaata

SEQ ID NO: 91056 - DNA, 26 bp, Homo sapiens
ttacaaaaaaaaaaaattcctaatag

SEQ ID NO: 91057 - DNA, 26 bp, Homo sapiens
tacaaaaaaaaaaaattcctaatagt

SEQ ID NO: 91058 - DNA, 26 bp, Homo sapiens
acaaaaaaaaaaaattcctaatagtg

SEQ ID NO: 91059 - DNA, 26 bp, Homo sapiens
caaaaaaaaaaaattcctaatagtgg

SEQ ID NO: 91060 - DNA, 26 bp, Homo sapiens
aaaaaaaaaaaattcctaatagtggc

SEQ ID NO: 91061 - DNA, 26 bp, Homo sapiens
aaaaaaaaaaattcctaatagtggct

SEQ ID NO: 91062 - DNA, 26 bp, Homo sapiens
aaaaaaaaaattcctaatagtggcta

SEQ ID NO: 91063 - DNA, 26 bp, Homo sapiens
aaaaaaaaattcctaatagtggctaa

SEQ ID NO: 91064 - DNA, 26 bp, Homo sapiens
aaaaaaaattcctaatagtggctaaa

SEQ ID NO: 91065 - DNA, 26 bp, Homo sapiens
aaaaaaattcctaatagtggctaaaa

SEQ ID NO: 91066 - DNA, 26 bp, Homo sapiens
aaaaaattcctaatagtggctaaaat

SEQ ID NO: 91067 - DNA, 26 bp, Homo sapiens
aaaaattcctaatagtggctaaaata

SEQ ID NO: 91068 - DNA, 26 bp, Homo sapiens
aaaattcctaatagtggctaaaatac

SEQ ID NO: 91069 - DNA, 26 bp, Homo sapiens
aaattcctaatagtggctaaaatact

SEQ ID NO: 91070 - DNA, 26 bp, Homo sapiens
aattcctaatagtggctaaaatactg

SEQ ID NO: 91071 - DNA, 26 bp, Homo sapiens
attcctaatagtggctaaaatactgc

SEQ ID NO: 91072 - DNA, 26 bp, Homo sapiens
ttcctaatagtggctaaaatactgca

SEQ ID NO: 91073 - DNA, 26 bp, Homo sapiens
tcctaatagtggctaaaatactgcaa

SEQ ID NO: 91074 - DNA, 26 bp, Homo sapiens
cctaatagtggctaaaatactgcaaa

SEQ ID NO: 91075 - DNA, 26 bp, Homo sapiens
ctaatagtggctaaaatactgcaaat

SEQ ID NO: 91076 - DNA, 26 bp, Homo sapiens
taatagtggctaaaatactgcaaatt

SEQ ID NO: 91077 - DNA, 26 bp, Homo sapiens
aatagtggctaaaatactgcaaattt

SEQ ID NO: 91078 - DNA, 26 bp, Homo sapiens
atagtggctaaaatactgcaaatttc

SEQ ID NO: 91079 - DNA, 26 bp, Homo sapiens
tagtggctaaaatactgcaaatttct

SEQ ID NO: 91080 - DNA, 26 bp, Homo sapiens
agtggctaaaatactgcaaatttctc

SEQ ID NO: 91081 - DNA, 26 bp, Homo sapiens
gtggctaaaatactgcaaatttctcc

SEQ ID NO: 91082 - DNA, 26 bp, Homo sapiens
tggctaaaatactgcaaatttctcca

SEQ ID NO: 91083 - DNA, 26 bp, Homo sapiens
ggctaaaatactgcaaatttctccat

SEQ ID NO: 91084 - DNA, 26 bp, Homo sapiens
gctaaaatactgcaaatttctccatt

SEQ ID NO: 91085 - DNA, 26 bp, Homo sapiens
ctaaaatactgcaaatttctccattc

SEQ ID NO: 91086 - DNA, 26 bp, Homo sapiens
taaaatactgcaaatttctccattcg

SEQ ID NO: 91087 - DNA, 26 bp, Homo sapiens
aaaatactgcaaatttctccattcga

SEQ ID NO: 91088 - DNA, 26 bp, Homo sapiens
aaatactgcaaatttctccattcgat

SEQ ID NO: 91089 - DNA, 26 bp, Homo sapiens
aatactgcaaatttctccattcgatt

SEQ ID NO: 91090 - DNA, 26 bp, Homo sapiens
atactgcaaatttctccattcgatta

SEQ ID NO: 91091 - DNA, 26 bp, Homo sapiens
tactgcaaatttctccattcgattac

SEQ ID NO: 91092 - DNA, 26 bp, Homo sapiens
actgcaaatttctccattcgattaca

SEQ ID NO: 91093 - DNA, 26 bp, Homo sapiens
ctgcaaatttctccattcgattacaa

SEQ ID NO: 91094 - DNA, 26 bp, Homo sapiens
tgcaaatttctccattcgattacaat

SEQ ID NO: 91095 - DNA, 26 bp, Homo sapiens
gcaaatttctccattcgattacaatc

SEQ ID NO: 91096 - DNA, 26 bp, Homo sapiens
caaatttctccattcgattacaatct

SEQ ID NO: 91097 - DNA, 26 bp, Homo sapiens
aaatttctccattcgattacaatcta

SEQ ID NO: 91098 - DNA, 26 bp, Homo sapiens
aatttctccattcgattacaatctac

SEQ ID NO: 91099 - DNA, 26 bp, Homo sapiens
atttctccattcgattacaatctaca

SEQ ID NO: 91100 - DNA, 26 bp, Homo sapiens
tttctccattcgattacaatctacaa

SEQ ID NO: 91101 - DNA, 26 bp, Homo sapiens
ttctccattcgattacaatctacaaa

SEQ ID NO: 91102 - DNA, 26 bp, Homo sapiens
tctccattcgattacaatctacaaag

SEQ ID NO: 91103 - DNA, 26 bp, Homo sapiens
ctccattcgattacaatctacaaaga

SEQ ID NO: 91104 - DNA, 26 bp, Homo sapiens
tccattcgattacaatctacaaagat

SEQ ID NO: 91105 - DNA, 26 bp, Homo sapiens
ccattcgattacaatctacaaagata

SEQ ID NO: 91106 - DNA, 26 bp, Homo sapiens
cattcgattacaatctacaaagataa

SEQ ID NO: 91107 - DNA, 26 bp, Homo sapiens
attcgattacaatctacaaagataaa

SEQ ID NO: 91108 - DNA, 26 bp, Homo sapiens
ttcgattacaatctacaaagataaac

SEQ ID NO: 91109 - DNA, 26 bp, Homo sapiens
tcgattacaatctacaaagataaacc

SEQ ID NO: 91110 - DNA, 26 bp, Homo sapiens
cgattacaatctacaaagataaacca

SEQ ID NO: 91111 - DNA, 26 bp, Homo sapiens
gattacaatctacaaagataaaccag

SEQ ID NO: 91112 - DNA, 26 bp, Homo sapiens
attacaatctacaaagataaaccagc

SEQ ID NO: 91113 - DNA, 26 bp, Homo sapiens
ttacaatctacaaagataaaccagca

SEQ ID NO: 91114 - DNA, 26 bp, Homo sapiens
tacaatctacaaagataaaccagcat

SEQ ID NO: 91115 - DNA, 26 bp, Homo sapiens
acaatctacaaagataaaccagcatt

SEQ ID NO: 91116 - DNA, 26 bp, Homo sapiens
caatctacaaagataaaccagcattc

SEQ ID NO: 91117 - DNA, 26 bp, Homo sapiens
aatctacaaagataaaccagcattcc

SEQ ID NO: 91118 - DNA, 26 bp, Homo sapiens
atctacaaagataaaccagcattcct

SEQ ID NO: 91119 - DNA, 26 bp, Homo sapiens
tctacaaagataaaccagcattcctt

SEQ ID NO: 91120 - DNA, 26 bp, Homo sapiens
ctacaaagataaaccagcattccttt

SEQ ID NO: 91121 - DNA, 26 bp, Homo sapiens
tacaaagataaaccagcattcctttc

SEQ ID NO: 91122 - DNA, 26 bp, Homo sapiens
acaaagataaaccagcattcctttct

SEQ ID NO: 91123 - DNA, 26 bp, Homo sapiens
caaagataaaccagcattcctttctc

SEQ ID NO: 91124 - DNA, 26 bp, Homo sapiens
aaagataaaccagcattcctttctct

SEQ ID NO: 91125 - DNA, 26 bp, Homo sapiens
aagataaaccagcattcctttctctt

SEQ ID NO: 91126 - DNA, 26 bp, Homo sapiens
agataaaccagcattcctttctcttt

SEQ ID NO: 91127 - DNA, 26 bp, Homo sapiens
gataaaccagcattcctttctctttc

SEQ ID NO: 91128 - DNA, 26 bp, Homo sapiens
ataaaccagcattcctttctctttct

SEQ ID NO: 91129 - DNA, 26 bp, Homo sapiens
taaaccagcattcctttctctttctc

SEQ ID NO: 91130 - DNA, 26 bp, Homo sapiens
aaaccagcattcctttctctttctct

SEQ ID NO: 91131 - DNA, 26 bp, Homo sapiens
aaccagcattcctttctctttctctc

SEQ ID NO: 91132 - DNA, 26 bp, Homo sapiens
accagcattcctttctctttctctct

SEQ ID NO: 91133 - DNA, 26 bp, Homo sapiens
ccagcattcctttctctttctctctt

SEQ ID NO: 91134 - DNA, 26 bp, Homo sapiens
cagcattcctttctctttctctcttt

SEQ ID NO: 91135 - DNA, 26 bp, Homo sapiens
agcattcctttctctttctctctttt

SEQ ID NO: 91136 - DNA, 26 bp, Homo sapiens
gcattcctttctctttctctcttttg

SEQ ID NO: 91137 - DNA, 26 bp, Homo sapiens
cattcctttctctttctctcttttgg

SEQ ID NO: 91138 - DNA, 26 bp, Homo sapiens
attcctttctctttctctcttttggt

SEQ ID NO: 91139 - DNA, 26 bp, Homo sapiens
ttcctttctctttctctcttttggtt

SEQ ID NO: 91140 - DNA, 26 bp, Homo sapiens
tcctttctctttctctcttttggtta

SEQ ID NO: 91141 - DNA, 26 bp, Homo sapiens
cctttctctttctctcttttggttac

SEQ ID NO: 91142 - DNA, 26 bp, Homo sapiens
ctttctctttctctcttttggttact

SEQ ID NO: 91143 - DNA, 26 bp, Homo sapiens
tttctctttctctcttttggttactt

SEQ ID NO: 91144 - DNA, 26 bp, Homo sapiens
ttctctttctctcttttggttacttt

SEQ ID NO: 91145 - DNA, 26 bp, Homo sapiens
tctctttctctcttttggttactttt

SEQ ID NO: 91146 - DNA, 26 bp, Homo sapiens
ctctttctctcttttggttacttttc

SEQ ID NO: 91147 - DNA, 26 bp, Homo sapiens
tctttctctcttttggttacttttcc

SEQ ID NO: 91148 - DNA, 26 bp, Homo sapiens
ctttctctcttttggttacttttccc

SEQ ID NO: 91149 - DNA, 26 bp, Homo sapiens
tttctctcttttggttacttttcccc

SEQ ID NO: 91150 - DNA, 26 bp, Homo sapiens
ttctctcttttggttacttttcccct

SEQ ID NO: 91151 - DNA, 26 bp, Homo sapiens
tctctcttttggttacttttccccta

SEQ ID NO: 91152 - DNA, 26 bp, Homo sapiens
ctctcttttggttacttttcccctat

SEQ ID NO: 91153 - DNA, 26 bp, Homo sapiens
tctcttttggttacttttcccctatc

SEQ ID NO: 91154 - DNA, 26 bp, Homo sapiens
ctcttttggttacttttcccctatcc

SEQ ID NO: 91155 - DNA, 26 bp, Homo sapiens
tcttttggttacttttcccctatccc

SEQ ID NO: 91156 - DNA, 26 bp, Homo sapiens
cttttggttacttttcccctatccct

SEQ ID NO: 91157 - DNA, 26 bp, Homo sapiens
ttttggttacttttcccctatcccta

SEQ ID NO: 91158 - DNA, 26 bp, Homo sapiens
tttggttacttttcccctatccctac

SEQ ID NO: 91159 - DNA, 26 bp, Homo sapiens
ttggttacttttcccctatccctact

SEQ ID NO: 91160 - DNA, 26 bp, Homo sapiens
tggttacttttcccctatccctactg

SEQ ID NO: 91161 - DNA, 26 bp, Homo sapiens
ggttacttttcccctatccctactgg

SEQ ID NO: 91162 - DNA, 26 bp, Homo sapiens
gttacttttcccctatccctactggt

SEQ ID NO: 91163 - DNA, 26 bp, Homo sapiens
ttacttttcccctatccctactggtg

SEQ ID NO: 91164 - DNA, 26 bp, Homo sapiens
tacttttcccctatccctactggtgg

SEQ ID NO: 91165 - DNA, 26 bp, Homo sapiens
acttttcccctatccctactggtgga

SEQ ID NO: 91166 - DNA, 26 bp, Homo sapiens
cttttcccctatccctactggtggaa

SEQ ID NO: 91167 - DNA, 26 bp, Homo sapiens
ttttcccctatccctactggtggaac

SEQ ID NO: 91168 - DNA, 26 bp, Homo sapiens
tttcccctatccctactggtggaaca

SEQ ID NO: 91169 - DNA, 26 bp, Homo sapiens
ttcccctatccctactggtggaacat

SEQ ID NO: 91170 - DNA, 26 bp, Homo sapiens
tcccctatccctactggtggaacatt

SEQ ID NO: 91171 - DNA, 26 bp, Homo sapiens
cccctatccctactggtggaacattt

SEQ ID NO: 91172 - DNA, 26 bp, Homo sapiens
ccctatccctactggtggaacattta

SEQ ID NO: 91173 - DNA, 26 bp, Homo sapiens
cctatccctactggtggaacatttat

SEQ ID NO: 91174 - DNA, 26 bp, Homo sapiens
ctatccctactggtggaacatttatt

SEQ ID NO: 91175 - DNA, 26 bp, Homo sapiens
tatccctactggtggaacatttattt

SEQ ID NO: 91176 - DNA, 26 bp, Homo sapiens
atccctactggtggaacatttatttt

SEQ ID NO: 91177 - DNA, 26 bp, Homo sapiens
tccctactggtggaacatttattttt

SEQ ID NO: 91178 - DNA, 26 bp, Homo sapiens
ccctactggtggaacatttatttttt

SEQ ID NO: 91179 - DNA, 26 bp, Homo sapiens
cctactggtggaacatttattttttc

SEQ ID NO: 91180 - DNA, 26 bp, Homo sapiens
ctactggtggaacatttattttttca

SEQ ID NO: 91181 - DNA, 26 bp, Homo sapiens
tactggtggaacatttattttttcac

SEQ ID NO: 91182 - DNA, 26 bp, Homo sapiens
actggtggaacatttattttttcaca

SEQ ID NO: 91183 - DNA, 26 bp, Homo sapiens
ctggtggaacatttattttttcacac

SEQ ID NO: 91184 - DNA, 26 bp, Homo sapiens
tggtggaacatttattttttcacaca

SEQ ID NO: 91185 - DNA, 26 bp, Homo sapiens
ggtggaacatttattttttcacacag

SEQ ID NO: 91186 - DNA, 26 bp, Homo sapiens
gtggaacatttattttttcacacagg

SEQ ID NO: 91187 - DNA, 26 bp, Homo sapiens
tggaacatttattttttcacacaggt

SEQ ID NO: 91188 - DNA, 26 bp, Homo sapiens
ggaacatttattttttcacacaggtt

SEQ ID NO: 91189 - DNA, 26 bp, Homo sapiens
gaacatttattttttcacacaggttt

SEQ ID NO: 91190 - DNA, 26 bp, Homo sapiens
aacatttattttttcacacaggtttt

SEQ ID NO: 91191 - DNA, 26 bp, Homo sapiens
acatttattttttcacacaggtttta

SEQ ID NO: 91192 - DNA, 26 bp, Homo sapiens
catttattttttcacacaggttttaa

SEQ ID NO: 91193 - DNA, 26 bp, Homo sapiens
atttattttttcacacaggttttaaa

SEQ ID NO: 91194 - DNA, 26 bp, Homo sapiens
tttattttttcacacaggttttaaag

SEQ ID NO: 91195 - DNA, 26 bp, Homo sapiens
ttattttttcacacaggttttaaaga

SEQ ID NO: 91196 - DNA, 26 bp, Homo sapiens
tattttttcacacaggttttaaagaa

SEQ ID NO: 91197 - DNA, 26 bp, Homo sapiens
attttttcacacaggttttaaagaaa

SEQ ID NO: 91198 - DNA, 26 bp, Homo sapiens
ttttttcacacaggttttaaagaaat

SEQ ID NO: 91199 - DNA, 26 bp, Homo sapiens
tttttcacacaggttttaaagaaata

SEQ ID NO: 91200 - DNA, 26 bp, Homo sapiens
ttttcacacaggttttaaagaaatac

SEQ ID NO: 91201 - DNA, 26 bp, Homo sapiens
tttcacacaggttttaaagaaataca

SEQ ID NO: 91202 - DNA, 26 bp, Homo sapiens
ttcacacaggttttaaagaaatacat

SEQ ID NO: 91203 - DNA, 26 bp, Homo sapiens
tcacacaggttttaaagaaatacatt

SEQ ID NO: 91204 - DNA, 26 bp, Homo sapiens
cacacaggttttaaagaaatacatta

SEQ ID NO: 91205 - DNA, 26 bp, Homo sapiens
acacaggttttaaagaaatacattat

SEQ ID NO: 91206 - DNA, 26 bp, Homo sapiens
cacaggttttaaagaaatacattatg

SEQ ID NO: 91207 - DNA, 26 bp, Homo sapiens
acaggttttaaagaaatacattatgt

SEQ ID NO: 91208 - DNA, 26 bp, Homo sapiens
caggttttaaagaaatacattatgtt

SEQ ID NO: 91209 - DNA, 26 bp, Homo sapiens
aggttttaaagaaatacattatgttg

SEQ ID NO: 91210 - DNA, 26 bp, Homo sapiens
ggttttaaagaaatacattatgttgg

SEQ ID NO: 91211 - DNA, 26 bp, Homo sapiens
gttttaaagaaatacattatgttggt

SEQ ID NO: 91212 - DNA, 26 bp, Homo sapiens
ttttaaagaaatacattatgttggtt

SEQ ID NO: 91213 - DNA, 26 bp, Homo sapiens
tttaaagaaatacattatgttggttt

SEQ ID NO: 91214 - DNA, 26 bp, Homo sapiens
ttaaagaaatacattatgttggtttc

SEQ ID NO: 91215 - DNA, 26 bp, Homo sapiens
taaagaaatacattatgttggtttct

SEQ ID NO: 91216 - DNA, 26 bp, Homo sapiens
aaagaaatacattatgttggtttcta

SEQ ID NO: 91217 - DNA, 26 bp, Homo sapiens
aagaaatacattatgttggtttctag

SEQ ID NO: 91218 - DNA, 26 bp, Homo sapiens
agaaatacattatgttggtttctagt

SEQ ID NO: 91219 - DNA, 26 bp, Homo sapiens
gaaatacattatgttggtttctagtg

SEQ ID NO: 91220 - DNA, 26 bp, Homo sapiens
aaatacattatgttggtttctagtgt

SEQ ID NO: 91221 - DNA, 26 bp, Homo sapiens
aatacattatgttggtttctagtgta

SEQ ID NO: 91222 - DNA, 26 bp, Homo sapiens
atacattatgttggtttctagtgtat

SEQ ID NO: 91223 - DNA, 26 bp, Homo sapiens
tacattatgttggtttctagtgtatt

SEQ ID NO: 91224 - DNA, 26 bp, Homo sapiens
acattatgttggtttctagtgtattg

SEQ ID NO: 91225 - DNA, 26 bp, Homo sapiens
cattatgttggtttctagtgtattgt

SEQ ID NO: 91226 - DNA, 26 bp, Homo sapiens
attatgttggtttctagtgtattgta

SEQ ID NO: 91227 - DNA, 26 bp, Homo sapiens
ttatgttggtttctagtgtattgtac

SEQ ID NO: 91228 - DNA, 26 bp, Homo sapiens
tatgttggtttctagtgtattgtaca

SEQ ID NO: 91229 - DNA, 26 bp, Homo sapiens
atgttggtttctagtgtattgtacag

SEQ ID NO: 91230 - DNA, 26 bp, Homo sapiens
tgttggtttctagtgtattgtacaga

SEQ ID NO: 91231 - DNA, 26 bp, Homo sapiens
gttggtttctagtgtattgtacagaa

SEQ ID NO: 91232 - DNA, 26 bp, Homo sapiens
ttggtttctagtgtattgtacagaat

SEQ ID NO: 91233 - DNA, 26 bp, Homo sapiens
tggtttctagtgtattgtacagaatc

SEQ ID NO: 91234 - DNA, 26 bp, Homo sapiens
ggtttctagtgtattgtacagaatcc

SEQ ID NO: 91235 - DNA, 26 bp, Homo sapiens
gtttctagtgtattgtacagaatcca

SEQ ID NO: 91236 - DNA, 26 bp, Homo sapiens
tttctagtgtattgtacagaatccat

SEQ ID NO: 91237 - DNA, 26 bp, Homo sapiens
ttctagtgtattgtacagaatccatt

SEQ ID NO: 91238 - DNA, 26 bp, Homo sapiens
tctagtgtattgtacagaatccattc

SEQ ID NO: 91239 - DNA, 26 bp, Homo sapiens
ctagtgtattgtacagaatccattct

SEQ ID NO: 91240 - DNA, 26 bp, Homo sapiens
tagtgtattgtacagaatccattctc

SEQ ID NO: 91241 - DNA, 26 bp, Homo sapiens
agtgtattgtacagaatccattctca

SEQ ID NO: 91242 - DNA, 26 bp, Homo sapiens
gtgtattgtacagaatccattctcat

SEQ ID NO: 91243 - DNA, 26 bp, Homo sapiens
tgtattgtacagaatccattctcatt

SEQ ID NO: 91244 - DNA, 26 bp, Homo sapiens
gtattgtacagaatccattctcattc

SEQ ID NO: 91245 - DNA, 26 bp, Homo sapiens
tattgtacagaatccattctcattct

SEQ ID NO: 91246 - DNA, 26 bp, Homo sapiens
attgtacagaatccattctcattctt

SEQ ID NO: 91247 - DNA, 26 bp, Homo sapiens
ttgtacagaatccattctcattcttt

SEQ ID NO: 91248 - DNA, 26 bp, Homo sapiens
tgtacagaatccattctcattcttta

SEQ ID NO: 91249 - DNA, 26 bp, Homo sapiens
gtacagaatccattctcattctttac

SEQ ID NO: 91250 - DNA, 26 bp, Homo sapiens
tacagaatccattctcattctttact

SEQ ID NO: 91251 - DNA, 26 bp, Homo sapiens
acagaatccattctcattctttactt

SEQ ID NO: 91252 - DNA, 26 bp, Homo sapiens
cagaatccattctcattctttacttg

SEQ ID NO: 91253 - DNA, 26 bp, Homo sapiens
agaatccattctcattctttacttgc

SEQ ID NO: 91254 - DNA, 26 bp, Homo sapiens
gaatccattctcattctttacttgct

SEQ ID NO: 91255 - DNA, 26 bp, Homo sapiens
aatccattctcattctttacttgcta

SEQ ID NO: 91256 - DNA, 26 bp, Homo sapiens
atccattctcattctttacttgctac

SEQ ID NO: 91257 - DNA, 26 bp, Homo sapiens
tccattctcattctttacttgctaca

SEQ ID NO: 91258 - DNA, 26 bp, Homo sapiens
ccattctcattctttacttgctacat

SEQ ID NO: 91259 - DNA, 26 bp, Homo sapiens
cattctcattctttacttgctacatt

SEQ ID NO: 91260 - DNA, 26 bp, Homo sapiens
attctcattctttacttgctacatta

SEQ ID NO: 91261 - DNA, 26 bp, Homo sapiens
ttctcattctttacttgctacattat

SEQ ID NO: 91262 - DNA, 26 bp, Homo sapiens
tctcattctttacttgctacattatg

SEQ ID NO: 91263 - DNA, 26 bp, Homo sapiens
ctcattctttacttgctacattatga

SEQ ID NO: 91264 - DNA, 26 bp, Homo sapiens
tcattctttacttgctacattatgac

SEQ ID NO: 91265 - DNA, 26 bp, Homo sapiens
cattctttacttgctacattatgact

SEQ ID NO: 91266 - DNA, 26 bp, Homo sapiens
attctttacttgctacattatgacta

SEQ ID NO: 91267 - DNA, 26 bp, Homo sapiens
ttctttacttgctacattatgactat

SEQ ID NO: 91268 - DNA, 26 bp, Homo sapiens
tctttacttgctacattatgactatg

SEQ ID NO: 91269 - DNA, 26 bp, Homo sapiens
ctttacttgctacattatgactatga

SEQ ID NO: 91270 - DNA, 26 bp, Homo sapiens
tttacttgctacattatgactatgag

SEQ ID NO: 91271 - DNA, 26 bp, Homo sapiens
ttacttgctacattatgactatgagg

SEQ ID NO: 91272 - DNA, 26 bp, Homo sapiens
tacttgctacattatgactatgagga

SEQ ID NO: 91273 - DNA, 26 bp, Homo sapiens
acttgctacattatgactatgaggag

SEQ ID NO: 91274 - DNA, 26 bp, Homo sapiens
cttgctacattatgactatgaggagg

SEQ ID NO: 91275 - DNA, 26 bp, Homo sapiens
ttgctacattatgactatgaggaggg

SEQ ID NO: 91276 - DNA, 26 bp, Homo sapiens
tgctacattatgactatgaggagggc

SEQ ID NO: 91277 - DNA, 26 bp, Homo sapiens
gctacattatgactatgaggagggca

SEQ ID NO: 91278 - DNA, 26 bp, Homo sapiens
ctacattatgactatgaggagggcag

SEQ ID NO: 91279 - DNA, 26 bp, Homo sapiens
tacattatgactatgaggagggcaga

SEQ ID NO: 91280 - DNA, 26 bp, Homo sapiens
acattatgactatgaggagggcagag

SEQ ID NO: 91281 - DNA, 26 bp, Homo sapiens
cattatgactatgaggagggcagagt

SEQ ID NO: 91282 - DNA, 26 bp, Homo sapiens
attatgactatgaggagggcagagta

SEQ ID NO: 91283 - DNA, 26 bp, Homo sapiens
ttatgactatgaggagggcagagtag

SEQ ID NO: 91284 - DNA, 26 bp, Homo sapiens
tatgactatgaggagggcagagtaga

SEQ ID NO: 91285 - DNA, 26 bp, Homo sapiens
atgactatgaggagggcagagtagag

SEQ ID NO: 91286 - DNA, 26 bp, Homo sapiens
tgactatgaggagggcagagtagagg

SEQ ID NO: 91287 - DNA, 26 bp, Homo sapiens
gactatgaggagggcagagtagaggt

SEQ ID NO: 91288 - DNA, 26 bp, Homo sapiens
actatgaggagggcagagtagaggtg

SEQ ID NO: 91289 - DNA, 26 bp, Homo sapiens
ctatgaggagggcagagtagaggtga

SEQ ID NO: 91290 - DNA, 26 bp, Homo sapiens
tatgaggagggcagagtagaggtgaa

SEQ ID NO: 91291 - DNA, 26 bp, Homo sapiens
atgaggagggcagagtagaggtgaac

SEQ ID NO: 91292 - DNA, 26 bp, Homo sapiens
tgaggagggcagagtagaggtgaact

SEQ ID NO: 91293 - DNA, 26 bp, Homo sapiens
gaggagggcagagtagaggtgaactc

SEQ ID NO: 91294 - DNA, 26 bp, Homo sapiens
aggagggcagagtagaggtgaactct

SEQ ID NO: 91295 - DNA, 26 bp, Homo sapiens
ggagggcagagtagaggtgaactctc

SEQ ID NO: 91296 - DNA, 26 bp, Homo sapiens
gagggcagagtagaggtgaactctct

SEQ ID NO: 91297 - DNA, 26 bp, Homo sapiens
agggcagagtagaggtgaactctctg

SEQ ID NO: 91298 - DNA, 26 bp, Homo sapiens
gggcagagtagaggtgaactctctgt

SEQ ID NO: 91299 - DNA, 26 bp, Homo sapiens
ggcagagtagaggtgaactctctgta

SEQ ID NO: 91300 - DNA, 26 bp, Homo sapiens
gcagagtagaggtgaactctctgtat

SEQ ID NO: 91301 - DNA, 26 bp, Homo sapiens
cagagtagaggtgaactctctgtata

SEQ ID NO: 91302 - DNA, 26 bp, Homo sapiens
agagtagaggtgaactctctgtatac

SEQ ID NO: 91303 - DNA, 26 bp, Homo sapiens
gagtagaggtgaactctctgtatact

SEQ ID NO: 91304 - DNA, 26 bp, Homo sapiens
agtagaggtgaactctctgtatactt

SEQ ID NO: 91305 - DNA, 26 bp, Homo sapiens
gtagaggtgaactctctgtatacttg

SEQ ID NO: 91306 - DNA, 26 bp, Homo sapiens
tagaggtgaactctctgtatacttgc

SEQ ID NO: 91307 - DNA, 26 bp, Homo sapiens
agaggtgaactctctgtatacttgct

SEQ ID NO: 91308 - DNA, 26 bp, Homo sapiens
gaggtgaactctctgtatacttgctg

SEQ ID NO: 91309 - DNA, 26 bp, Homo sapiens
aggtgaactctctgtatacttgctga

SEQ ID NO: 91310 - DNA, 26 bp, Homo sapiens
ggtgaactctctgtatacttgctgaa

SEQ ID NO: 91311 - DNA, 26 bp, Homo sapiens
gtgaactctctgtatacttgctgaaa

SEQ ID NO: 91312 - DNA, 26 bp, Homo sapiens
tgaactctctgtatacttgctgaaag

SEQ ID NO: 91313 - DNA, 26 bp, Homo sapiens
gaactctctgtatacttgctgaaagt

SEQ ID NO: 91314 - DNA, 26 bp, Homo sapiens
aactctctgtatacttgctgaaagtc

SEQ ID NO: 91315 - DNA, 26 bp, Homo sapiens
actctctgtatacttgctgaaagtct

SEQ ID NO: 91316 - DNA, 26 bp, Homo sapiens
ctctctgtatacttgctgaaagtctt

SEQ ID NO: 91317 - DNA, 26 bp, Homo sapiens
tctctgtatacttgctgaaagtcttc

SEQ ID NO: 91318 - DNA, 26 bp, Homo sapiens
ctctgtatacttgctgaaagtcttct

SEQ ID NO: 91319 - DNA, 26 bp, Homo sapiens
tctgtatacttgctgaaagtcttctt

SEQ ID NO: 91320 - DNA, 26 bp, Homo sapiens
ctgtatacttgctgaaagtcttcttg

SEQ ID NO: 91321 - DNA, 26 bp, Homo sapiens
tgtatacttgctgaaagtcttcttgt

SEQ ID NO: 91322 - DNA, 26 bp, Homo sapiens
gtatacttgctgaaagtcttcttgta

SEQ ID NO: 91323 - DNA, 26 bp, Homo sapiens
tatacttgctgaaagtcttcttgtac

SEQ ID NO: 91324 - DNA, 26 bp, Homo sapiens
atacttgctgaaagtcttcttgtaca

SEQ ID NO: 91325 - DNA, 26 bp, Homo sapiens
tacttgctgaaagtcttcttgtacac

SEQ ID NO: 91326 - DNA, 26 bp, Homo sapiens
acttgctgaaagtcttcttgtacaca

SEQ ID NO: 91327 - DNA, 26 bp, Homo sapiens
cttgctgaaagtcttcttgtacacat

SEQ ID NO: 91328 - DNA, 26 bp, Homo sapiens
ttgctgaaagtcttcttgtacacatt

SEQ ID NO: 91329 - DNA, 26 bp, Homo sapiens
tgctgaaagtcttcttgtacacattg

SEQ ID NO: 91330 - DNA, 26 bp, Homo sapiens
gctgaaagtcttcttgtacacattgc

SEQ ID NO: 91331 - DNA, 26 bp, Homo sapiens
ctgaaagtcttcttgtacacattgct

SEQ ID NO: 91332 - DNA, 26 bp, Homo sapiens
tgaaagtcttcttgtacacattgctt

SEQ ID NO: 91333 - DNA, 26 bp, Homo sapiens
gaaagtcttcttgtacacattgcttt

SEQ ID NO: 91334 - DNA, 26 bp, Homo sapiens
aaagtcttcttgtacacattgctttt

SEQ ID NO: 91335 - DNA, 26 bp, Homo sapiens
aagtcttcttgtacacattgcttttt

SEQ ID NO: 91336 - DNA, 26 bp, Homo sapiens
agtcttcttgtacacattgctttttg

SEQ ID NO: 91337 - DNA, 26 bp, Homo sapiens
gtcttcttgtacacattgctttttgt

SEQ ID NO: 91338 - DNA, 26 bp, Homo sapiens
tcttcttgtacacattgctttttgta

SEQ ID NO: 91339 - DNA, 26 bp, Homo sapiens
cttcttgtacacattgctttttgtac

SEQ ID NO: 91340 - DNA, 26 bp, Homo sapiens
ttcttgtacacattgctttttgtacc

SEQ ID NO: 91341 - DNA, 26 bp, Homo sapiens
tcttgtacacattgctttttgtaccc

SEQ ID NO: 91342 - DNA, 26 bp, Homo sapiens
cttgtacacattgctttttgtacccg

SEQ ID NO: 91343 - DNA, 26 bp, Homo sapiens
ttgtacacattgctttttgtacccgt

SEQ ID NO: 91344 - DNA, 26 bp, Homo sapiens
tgtacacattgctttttgtacccgtc

SEQ ID NO: 91345 - DNA, 26 bp, Homo sapiens
gtacacattgctttttgtacccgtcg

SEQ ID NO: 91346 - DNA, 26 bp, Homo sapiens
tacacattgctttttgtacccgtcgc

SEQ ID NO: 91347 - DNA, 26 bp, Homo sapiens
acacattgctttttgtacccgtcgct

SEQ ID NO: 91348 - DNA, 26 bp, Homo sapiens
cacattgctttttgtacccgtcgctt

SEQ ID NO: 91349 - DNA, 26 bp, Homo sapiens
acattgctttttgtacccgtcgcttc

SEQ ID NO: 91350 - DNA, 26 bp, Homo sapiens
cattgctttttgtacccgtcgcttct

SEQ ID NO: 91351 - DNA, 26 bp, Homo sapiens
attgctttttgtacccgtcgcttcta

SEQ ID NO: 91352 - DNA, 26 bp, Homo sapiens
ttgctttttgtacccgtcgcttctag

SEQ ID NO: 91353 - DNA, 26 bp, Homo sapiens
tgctttttgtacccgtcgcttctagc

SEQ ID NO: 91354 - DNA, 26 bp, Homo sapiens
gctttttgtacccgtcgcttctagct

SEQ ID NO: 91355 - DNA, 26 bp, Homo sapiens
ctttttgtacccgtcgcttctagcta

SEQ ID NO: 91356 - DNA, 26 bp, Homo sapiens
tttttgtacccgtcgcttctagctat

SEQ ID NO: 91357 - DNA, 26 bp, Homo sapiens
ttttgtacccgtcgcttctagctatg

SEQ ID NO: 91358 - DNA, 26 bp, Homo sapiens
tttgtacccgtcgcttctagctatgt

SEQ ID NO: 91359 - DNA, 26 bp, Homo sapiens
ttgtacccgtcgcttctagctatgta

SEQ ID NO: 91360 - DNA, 26 bp, Homo sapiens
tgtacccgtcgcttctagctatgtat

SEQ ID NO: 91361 - DNA, 26 bp, Homo sapiens
gtacccgtcgcttctagctatgtatc

SEQ ID NO: 91362 - DNA, 26 bp, Homo sapiens
tacccgtcgcttctagctatgtatct

SEQ ID NO: 91363 - DNA, 26 bp, Homo sapiens
acccgtcgcttctagctatgtatctt

SEQ ID NO: 91364 - DNA, 26 bp, Homo sapiens
cccgtcgcttctagctatgtatcttc

SEQ ID NO: 91365 - DNA, 26 bp, Homo sapiens
ccgtcgcttctagctatgtatcttcc

SEQ ID NO: 91366 - DNA, 26 bp, Homo sapiens
cgtcgcttctagctatgtatcttcct

SEQ ID NO: 91367 - DNA, 26 bp, Homo sapiens
gtcgcttctagctatgtatcttcctg

SEQ ID NO: 91368 - DNA, 26 bp, Homo sapiens
tcgcttctagctatgtatcttcctgt

SEQ ID NO: 91369 - DNA, 26 bp, Homo sapiens
cgcttctagctatgtatcttcctgtt

SEQ ID NO: 91370 - DNA, 26 bp, Homo sapiens
gcttctagctatgtatcttcctgttc

SEQ ID NO: 91371 - DNA, 26 bp, Homo sapiens
cttctagctatgtatcttcctgttct

SEQ ID NO: 91372 - DNA, 26 bp, Homo sapiens
ttctagctatgtatcttcctgttctc

SEQ ID NO: 91373 - DNA, 26 bp, Homo sapiens
tctagctatgtatcttcctgttctct

SEQ ID NO: 91374 - DNA, 26 bp, Homo sapiens
ctagctatgtatcttcctgttctctg

SEQ ID NO: 91375 - DNA, 26 bp, Homo sapiens
tagctatgtatcttcctgttctctgc

SEQ ID NO: 91376 - DNA, 26 bp, Homo sapiens
agctatgtatcttcctgttctctgcc

SEQ ID NO: 91377 - DNA, 26 bp, Homo sapiens
gctatgtatcttcctgttctctgccc

SEQ ID NO: 91378 - DNA, 26 bp, Homo sapiens
ctatgtatcttcctgttctctgccct

SEQ ID NO: 91379 - DNA, 26 bp, Homo sapiens
tatgtatcttcctgttctctgccctc

SEQ ID NO: 91380 - DNA, 26 bp, Homo sapiens
atgtatcttcctgttctctgccctcg

SEQ ID NO: 91381 - DNA, 26 bp, Homo sapiens
tgtatcttcctgttctctgccctcgt

SEQ ID NO: 91382 - DNA, 26 bp, Homo sapiens
gtatcttcctgttctctgccctcgtc

SEQ ID NO: 91383 - DNA, 26 bp, Homo sapiens
tatcttcctgttctctgccctcgtct

SEQ ID NO: 91384 - DNA, 26 bp, Homo sapiens
atcttcctgttctctgccctcgtctc

SEQ ID NO: 91385 - DNA, 26 bp, Homo sapiens
tcttcctgttctctgccctcgtctca

SEQ ID NO: 91386 - DNA, 26 bp, Homo sapiens
cttcctgttctctgccctcgtctcaa

SEQ ID NO: 91387 - DNA, 26 bp, Homo sapiens
ttcctgttctctgccctcgtctcaaa

SEQ ID NO: 91388 - DNA, 26 bp, Homo sapiens
tcctgttctctgccctcgtctcaaac

SEQ ID NO: 91389 - DNA, 26 bp, Homo sapiens
cctgttctctgccctcgtctcaaact

SEQ ID NO: 91390 - DNA, 26 bp, Homo sapiens
ctgttctctgccctcgtctcaaacta

SEQ ID NO: 91391 - DNA, 26 bp, Homo sapiens
tgttctctgccctcgtctcaaactat

SEQ ID NO: 91392 - DNA, 26 bp, Homo sapiens
gttctctgccctcgtctcaaactatg

SEQ ID NO: 91393 - DNA, 26 bp, Homo sapiens
ttctctgccctcgtctcaaactatgt

SEQ ID NO: 91394 - DNA, 26 bp, Homo sapiens
tctctgccctcgtctcaaactatgtt

SEQ ID NO: 91395 - DNA, 26 bp, Homo sapiens
ctctgccctcgtctcaaactatgttg

SEQ ID NO: 91396 - DNA, 26 bp, Homo sapiens
tctgccctcgtctcaaactatgttgc

SEQ ID NO: 91397 - DNA, 26 bp, Homo sapiens
ctgccctcgtctcaaactatgttgcc

SEQ ID NO: 91398 - DNA, 26 bp, Homo sapiens
tgccctcgtctcaaactatgttgcca

SEQ ID NO: 91399 - DNA, 26 bp, Homo sapiens
gccctcgtctcaaactatgttgccac

SEQ ID NO: 91400 - DNA, 26 bp, Homo sapiens
ccctcgtctcaaactatgttgccacc

SEQ ID NO: 91401 - DNA, 26 bp, Homo sapiens
cctcgtctcaaactatgttgccacct

SEQ ID NO: 91402 - DNA, 26 bp, Homo sapiens
ctcgtctcaaactatgttgccacctc

SEQ ID NO: 91403 - DNA, 26 bp, Homo sapiens
tcgtctcaaactatgttgccacctca

SEQ ID NO: 91404 - DNA, 26 bp, Homo sapiens
cgtctcaaactatgttgccacctcaa

SEQ ID NO: 91405 - DNA, 26 bp, Homo sapiens
gtctcaaactatgttgccacctcaat

SEQ ID NO: 91406 - DNA, 26 bp, Homo sapiens
tctcaaactatgttgccacctcaatt

SEQ ID NO: 91407 - DNA, 26 bp, Homo sapiens
ctcaaactatgttgccacctcaatta

SEQ ID NO: 91408 - DNA, 26 bp, Homo sapiens
tcaaactatgttgccacctcaattaa

SEQ ID NO: 91409 - DNA, 26 bp, Homo sapiens
caaactatgttgccacctcaattaat

SEQ ID NO: 91410 - DNA, 26 bp, Homo sapiens
aaactatgttgccacctcaattaatc

SEQ ID NO: 91411 - DNA, 26 bp, Homo sapiens
aactatgttgccacctcaattaatca

SEQ ID NO: 91412 - DNA, 26 bp, Homo sapiens
actatgttgccacctcaattaatcag

SEQ ID NO: 91413 - DNA, 26 bp, Homo sapiens
ctatgttgccacctcaattaatcagg

SEQ ID NO: 91414 - DNA, 26 bp, Homo sapiens
tatgttgccacctcaattaatcaggc

SEQ ID NO: 91415 - DNA, 26 bp, Homo sapiens
atgttgccacctcaattaatcaggca

SEQ ID NO: 91416 - DNA, 26 bp, Homo sapiens
tgttgccacctcaattaatcaggcac

SEQ ID NO: 91417 - DNA, 26 bp, Homo sapiens
gttgccacctcaattaatcaggcact

SEQ ID NO: 91418 - DNA, 26 bp, Homo sapiens
ttgccacctcaattaatcaggcactt

SEQ ID NO: 91419 - DNA, 26 bp, Homo sapiens
tgccacctcaattaatcaggcacttg

SEQ ID NO: 91420 - DNA, 26 bp, Homo sapiens
gccacctcaattaatcaggcacttga

SEQ ID NO: 91421 - DNA, 26 bp, Homo sapiens
ccacctcaattaatcaggcacttgaa

SEQ ID NO: 91422 - DNA, 26 bp, Homo sapiens
cacctcaattaatcaggcacttgaat

SEQ ID NO: 91423 - DNA, 26 bp, Homo sapiens
acctcaattaatcaggcacttgaatt

SEQ ID NO: 91424 - DNA, 26 bp, Homo sapiens
cctcaattaatcaggcacttgaattc

SEQ ID NO: 91425 - DNA, 26 bp, Homo sapiens
ctcaattaatcaggcacttgaattca

SEQ ID NO: 91426 - DNA, 26 bp, Homo sapiens
tcaattaatcaggcacttgaattcac

SEQ ID NO: 91427 - DNA, 26 bp, Homo sapiens
caattaatcaggcacttgaattcaca

SEQ ID NO: 91428 - DNA, 26 bp, Homo sapiens
aattaatcaggcacttgaattcacat

SEQ ID NO: 91429 - DNA, 26 bp, Homo sapiens
attaatcaggcacttgaattcacatt

SEQ ID NO: 91430 - DNA, 26 bp, Homo sapiens
ttaatcaggcacttgaattcacattg

SEQ ID NO: 91431 - DNA, 26 bp, Homo sapiens
taatcaggcacttgaattcacattgt

SEQ ID NO: 91432 - DNA, 26 bp, Homo sapiens
aatcaggcacttgaattcacattgtg

SEQ ID NO: 91433 - DNA, 26 bp, Homo sapiens
atcaggcacttgaattcacattgtgt

SEQ ID NO: 91434 - DNA, 26 bp, Homo sapiens
tcaggcacttgaattcacattgtgta

SEQ ID NO: 91435 - DNA, 26 bp, Homo sapiens
caggcacttgaattcacattgtgtag

SEQ ID NO: 91436 - DNA, 26 bp, Homo sapiens
aggcacttgaattcacattgtgtaga

SEQ ID NO: 91437 - DNA, 26 bp, Homo sapiens
ggcacttgaattcacattgtgtagaa

SEQ ID NO: 91438 - DNA, 26 bp, Homo sapiens
gcacttgaattcacattgtgtagaat

SEQ ID NO: 91439 - DNA, 26 bp, Homo sapiens
cacttgaattcacattgtgtagaata

SEQ ID NO: 91440 - DNA, 26 bp, Homo sapiens
acttgaattcacattgtgtagaatac

SEQ ID NO: 91441 - DNA, 26 bp, Homo sapiens
cttgaattcacattgtgtagaatact

SEQ ID NO: 91442 - DNA, 26 bp, Homo sapiens
ttgaattcacattgtgtagaatactc

SEQ ID NO: 91443 - DNA, 26 bp, Homo sapiens
tgaattcacattgtgtagaatactca

SEQ ID NO: 91444 - DNA, 26 bp, Homo sapiens
gaattcacattgtgtagaatactcaa

SEQ ID NO: 91445 - DNA, 26 bp, Homo sapiens
aattcacattgtgtagaatactcaag

SEQ ID NO: 91446 - DNA, 26 bp, Homo sapiens
attcacattgtgtagaatactcaagg

SEQ ID NO: 91447 - DNA, 26 bp, Homo sapiens
ttcacattgtgtagaatactcaaggt

SEQ ID NO: 91448 - DNA, 26 bp, Homo sapiens
tcacattgtgtagaatactcaaggtt

SEQ ID NO: 91449 - DNA, 26 bp, Homo sapiens
cacattgtgtagaatactcaaggttg

SEQ ID NO: 91450 - DNA, 26 bp, Homo sapiens
acattgtgtagaatactcaaggttga

SEQ ID NO: 91451 - DNA, 26 bp, Homo sapiens
cattgtgtagaatactcaaggttgat

SEQ ID NO: 91452 - DNA, 26 bp, Homo sapiens
attgtgtagaatactcaaggttgatg

SEQ ID NO: 91453 - DNA, 26 bp, Homo sapiens
ttgtgtagaatactcaaggttgatga

SEQ ID NO: 91454 - DNA, 26 bp, Homo sapiens
tgtgtagaatactcaaggttgatgat

SEQ ID NO: 91455 - DNA, 26 bp, Homo sapiens
gtgtagaatactcaaggttgatgata

SEQ ID NO: 91456 - DNA, 26 bp, Homo sapiens
tgtagaatactcaaggttgatgatag

SEQ ID NO: 91457 - DNA, 26 bp, Homo sapiens
gtagaatactcaaggttgatgataga

SEQ ID NO: 91458 - DNA, 26 bp, Homo sapiens
tagaatactcaaggttgatgatagac

SEQ ID NO: 91459 - DNA, 26 bp, Homo sapiens
agaatactcaaggttgatgatagact

SEQ ID NO: 91460 - DNA, 26 bp, Homo sapiens
gaatactcaaggttgatgatagactg

SEQ ID NO: 91461 - DNA, 26 bp, Homo sapiens
aatactcaaggttgatgatagactgg

SEQ ID NO: 91462 - DNA, 26 bp, Homo sapiens
atactcaaggttgatgatagactggg

SEQ ID NO: 91463 - DNA, 26 bp, Homo sapiens
tactcaaggttgatgatagactggga

SEQ ID NO: 91464 - DNA, 26 bp, Homo sapiens
actcaaggttgatgatagactgggaa

SEQ ID NO: 91465 - DNA, 26 bp, Homo sapiens
ctcaaggttgatgatagactgggaag

SEQ ID NO: 91466 - DNA, 26 bp, Homo sapiens
tcaaggttgatgatagactgggaagg

SEQ ID NO: 91467 - DNA, 26 bp, Homo sapiens
caaggttgatgatagactgggaagga

SEQ ID NO: 91468 - DNA, 26 bp, Homo sapiens
aaggttgatgatagactgggaaggag

SEQ ID NO: 91469 - DNA, 26 bp, Homo sapiens
aggttgatgatagactgggaaggagg

SEQ ID NO: 91470 - DNA, 26 bp, Homo sapiens
ggttgatgatagactgggaaggagga

SEQ ID NO: 91471 - DNA, 26 bp, Homo sapiens
gttgatgatagactgggaaggaggag

SEQ ID NO: 91472 - DNA, 26 bp, Homo sapiens
ttgatgatagactgggaaggaggagg

SEQ ID NO: 91473 - DNA, 26 bp, Homo sapiens
tgatgatagactgggaaggaggagga

SEQ ID NO: 91474 - DNA, 26 bp, Homo sapiens
gatgatagactgggaaggaggaggaa

SEQ ID NO: 91475 - DNA, 26 bp, Homo sapiens
atgatagactgggaaggaggaggaag

SEQ ID NO: 91476 - DNA, 26 bp, Homo sapiens
tgatagactgggaaggaggaggaagg

SEQ ID NO: 91477 - DNA, 26 bp, Homo sapiens
gatagactgggaaggaggaggaagga

SEQ ID NO: 91478 - DNA, 26 bp, Homo sapiens
atagactgggaaggaggaggaaggag

SEQ ID NO: 91479 - DNA, 26 bp, Homo sapiens
tagactgggaaggaggaggaaggagg

SEQ ID NO: 91480 - DNA, 26 bp, Homo sapiens
agactgggaaggaggaggaaggaggc

SEQ ID NO: 91481 - DNA, 26 bp, Homo sapiens
gactgggaaggaggaggaaggaggca

SEQ ID NO: 91482 - DNA, 26 bp, Homo sapiens
actgggaaggaggaggaaggaggcag

SEQ ID NO: 91483 - DNA, 26 bp, Homo sapiens
ctgggaaggaggaggaaggaggcaga

SEQ ID NO: 91484 - DNA, 26 bp, Homo sapiens
tgggaaggaggaggaaggaggcagag

SEQ ID NO: 91485 - DNA, 26 bp, Homo sapiens
gggaaggaggaggaaggaggcagaga

SEQ ID NO: 91486 - DNA, 26 bp, Homo sapiens
ggaaggaggaggaaggaggcagagat

SEQ ID NO: 91487 - DNA, 26 bp, Homo sapiens
gaaggaggaggaaggaggcagagata

SEQ ID NO: 91488 - DNA, 26 bp, Homo sapiens
aaggaggaggaaggaggcagagataa

SEQ ID NO: 91489 - DNA, 26 bp, Homo sapiens
aggaggaggaaggaggcagagataag

SEQ ID NO: 91490 - DNA, 26 bp, Homo sapiens
ggaggaggaaggaggcagagataagc

SEQ ID NO: 91491 - DNA, 26 bp, Homo sapiens
gaggaggaaggaggcagagataagcg

SEQ ID NO: 91492 - DNA, 26 bp, Homo sapiens
aggaggaaggaggcagagataagcga

SEQ ID NO: 91493 - DNA, 26 bp, Homo sapiens
ggaggaaggaggcagagataagcgat

SEQ ID NO: 91494 - DNA, 26 bp, Homo sapiens
gaggaaggaggcagagataagcgatg

SEQ ID NO: 91495 - DNA, 26 bp, Homo sapiens
aggaaggaggcagagataagcgatgg

SEQ ID NO: 91496 - DNA, 26 bp, Homo sapiens
ggaaggaggcagagataagcgatggg

SEQ ID NO: 91497 - DNA, 26 bp, Homo sapiens
gaaggaggcagagataagcgatgggg

SEQ ID NO: 91498 - DNA, 26 bp, Homo sapiens
aaggaggcagagataagcgatggggg

SEQ ID NO: 91499 - DNA, 26 bp, Homo sapiens
aggaggcagagataagcgatggggga

SEQ ID NO: 91500 - DNA, 26 bp, Homo sapiens
ggaggcagagataagcgatgggggat

SEQ ID NO: 91501 - DNA, 26 bp, Homo sapiens
gaggcagagataagcgatgggggata

SEQ ID NO: 91502 - DNA, 26 bp, Homo sapiens
aggcagagataagcgatgggggatac

SEQ ID NO: 91503 - DNA, 26 bp, Homo sapiens
ggcagagataagcgatgggggatact

SEQ ID NO: 91504 - DNA, 26 bp, Homo sapiens
gcagagataagcgatgggggatactg

SEQ ID NO: 91505 - DNA, 26 bp, Homo sapiens
cagagataagcgatgggggatactga

SEQ ID NO: 91506 - DNA, 26 bp, Homo sapiens
agagataagcgatgggggatactgag

SEQ ID NO: 91507 - DNA, 26 bp, Homo sapiens
gagataagcgatgggggatactgagc

SEQ ID NO: 91508 - DNA, 26 bp, Homo sapiens
agataagcgatgggggatactgagcc

SEQ ID NO: 91509 - DNA, 26 bp, Homo sapiens
gataagcgatgggggatactgagccc

SEQ ID NO: 91510 - DNA, 26 bp, Homo sapiens
ataagcgatgggggatactgagccct

SEQ ID NO: 91511 - DNA, 26 bp, Homo sapiens
taagcgatgggggatactgagcccta

SEQ ID NO: 91512 - DNA, 26 bp, Homo sapiens
aagcgatgggggatactgagccctat

SEQ ID NO: 91513 - DNA, 26 bp, Homo sapiens
agcgatgggggatactgagccctatt

SEQ ID NO: 91514 - DNA, 26 bp, Homo sapiens
gcgatgggggatactgagccctattt

SEQ ID NO: 91515 - DNA, 26 bp, Homo sapiens
cgatgggggatactgagccctattta

SEQ ID NO: 91516 - DNA, 26 bp, Homo sapiens
gatgggggatactgagccctatttag

SEQ ID NO: 91517 - DNA, 26 bp, Homo sapiens
atgggggatactgagccctatttaga

SEQ ID NO: 91518 - DNA, 26 bp, Homo sapiens
tgggggatactgagccctatttagac

SEQ ID NO: 91519 - DNA, 26 bp, Homo sapiens
gggggatactgagccctatttagact

SEQ ID NO: 91520 - DNA, 26 bp, Homo sapiens
ggggatactgagccctatttagactt

SEQ ID NO: 91521 - DNA, 26 bp, Homo sapiens
gggatactgagccctatttagacttt

SEQ ID NO: 91522 - DNA, 26 bp, Homo sapiens
ggatactgagccctatttagactttg

SEQ ID NO: 91523 - DNA, 26 bp, Homo sapiens
gatactgagccctatttagactttgg

SEQ ID NO: 91524 - DNA, 26 bp, Homo sapiens
atactgagccctatttagactttggt

SEQ ID NO: 91525 - DNA, 26 bp, Homo sapiens
tactgagccctatttagactttggtc

SEQ ID NO: 91526 - DNA, 26 bp, Homo sapiens
actgagccctatttagactttggtcc

SEQ ID NO: 91527 - DNA, 26 bp, Homo sapiens
ctgagccctatttagactttggtccg

SEQ ID NO: 91528 - DNA, 26 bp, Homo sapiens
tgagccctatttagactttggtccgc

SEQ ID NO: 91529 - DNA, 26 bp, Homo sapiens
gagccctatttagactttggtccgcc

SEQ ID NO: 91530 - DNA, 26 bp, Homo sapiens
agccctatttagactttggtccgcca

SEQ ID NO: 91531 - DNA, 26 bp, Homo sapiens
gccctatttagactttggtccgccag

SEQ ID NO: 91532 - DNA, 26 bp, Homo sapiens
ccctatttagactttggtccgccagc

SEQ ID NO: 91533 - DNA, 26 bp, Homo sapiens
cctatttagactttggtccgccagct

SEQ ID NO: 91534 - DNA, 26 bp, Homo sapiens
ctatttagactttggtccgccagctt

SEQ ID NO: 91535 - DNA, 26 bp, Homo sapiens
tatttagactttggtccgccagcttt

SEQ ID NO: 91536 - DNA, 26 bp, Homo sapiens
atttagactttggtccgccagctttt

SEQ ID NO: 91537 - DNA, 26 bp, Homo sapiens
tttagactttggtccgccagcttttg

SEQ ID NO: 91538 - DNA, 26 bp, Homo sapiens
ttagactttggtccgccagcttttgg

SEQ ID NO: 91539 - DNA, 26 bp, Homo sapiens
tagactttggtccgccagcttttgga

SEQ ID NO: 91540 - DNA, 26 bp, Homo sapiens
agactttggtccgccagcttttggat

SEQ ID NO: 91541 - DNA, 26 bp, Homo sapiens
gactttggtccgccagcttttggatg

SEQ ID NO: 91542 - DNA, 26 bp, Homo sapiens
actttggtccgccagcttttggatga

SEQ ID NO: 91543 - DNA, 26 bp, Homo sapiens
ctttggtccgccagcttttggatgaa

SEQ ID NO: 91544 - DNA, 26 bp, Homo sapiens
tttggtccgccagcttttggatgaac

SEQ ID NO: 91545 - DNA, 26 bp, Homo sapiens
ttggtccgccagcttttggatgaact

SEQ ID NO: 91546 - DNA, 26 bp, Homo sapiens
tggtccgccagcttttggatgaactt

SEQ ID NO: 91547 - DNA, 26 bp, Homo sapiens
ggtccgccagcttttggatgaactta

SEQ ID NO: 91548 - DNA, 26 bp, Homo sapiens
gtccgccagcttttggatgaacttag

SEQ ID NO: 91549 - DNA, 26 bp, Homo sapiens
tccgccagcttttggatgaacttagc

SEQ ID NO: 91550 - DNA, 26 bp, Homo sapiens
ccgccagcttttggatgaacttagca

SEQ ID NO: 91551 - DNA, 26 bp, Homo sapiens
cgccagcttttggatgaacttagcac

SEQ ID NO: 91552 - DNA, 26 bp, Homo sapiens
gccagcttttggatgaacttagcaca

SEQ ID NO: 91553 - DNA, 26 bp, Homo sapiens
ccagcttttggatgaacttagcacat

SEQ ID NO: 91554 - DNA, 26 bp, Homo sapiens
cagcttttggatgaacttagcacatt

SEQ ID NO: 91555 - DNA, 26 bp, Homo sapiens
agcttttggatgaacttagcacatta

SEQ ID NO: 91556 - DNA, 26 bp, Homo sapiens
gcttttggatgaacttagcacattac

SEQ ID NO: 91557 - DNA, 26 bp, Homo sapiens
cttttggatgaacttagcacattact

SEQ ID NO: 91558 - DNA, 26 bp, Homo sapiens
ttttggatgaacttagcacattactg

SEQ ID NO: 91559 - DNA, 26 bp, Homo sapiens
tttggatgaacttagcacattactgg

SEQ ID NO: 91560 - DNA, 26 bp, Homo sapiens
ttggatgaacttagcacattactggc

SEQ ID NO: 91561 - DNA, 26 bp, Homo sapiens
tggatgaacttagcacattactggct

SEQ ID NO: 91562 - DNA, 26 bp, Homo sapiens
ggatgaacttagcacattactggcta

SEQ ID NO: 91563 - DNA, 26 bp, Homo sapiens
gatgaacttagcacattactggctat

SEQ ID NO: 91564 - DNA, 26 bp, Homo sapiens
atgaacttagcacattactggctatg

SEQ ID NO: 91565 - DNA, 26 bp, Homo sapiens
tgaacttagcacattactggctatgc

SEQ ID NO: 91566 - DNA, 26 bp, Homo sapiens
gaacttagcacattactggctatgca

SEQ ID NO: 91567 - DNA, 26 bp, Homo sapiens
aacttagcacattactggctatgcag

SEQ ID NO: 91568 - DNA, 26 bp, Homo sapiens
acttagcacattactggctatgcagg

SEQ ID NO: 91569 - DNA, 26 bp, Homo sapiens
cttagcacattactggctatgcagga

SEQ ID NO: 91570 - DNA, 26 bp, Homo sapiens
ttagcacattactggctatgcaggac

SEQ ID NO: 91571 - DNA, 26 bp, Homo sapiens
tagcacattactggctatgcaggact

SEQ ID NO: 91572 - DNA, 26 bp, Homo sapiens
agcacattactggctatgcaggacta

SEQ ID NO: 91573 - DNA, 26 bp, Homo sapiens
gcacattactggctatgcaggactaa

SEQ ID NO: 91574 - DNA, 26 bp, Homo sapiens
cacattactggctatgcaggactaac

SEQ ID NO: 91575 - DNA, 26 bp, Homo sapiens
acattactggctatgcaggactaacc

SEQ ID NO: 91576 - DNA, 26 bp, Homo sapiens
cattactggctatgcaggactaacct

SEQ ID NO: 91577 - DNA, 26 bp, Homo sapiens
attactggctatgcaggactaacctc

SEQ ID NO: 91578 - DNA, 26 bp, Homo sapiens
ttactggctatgcaggactaacctct

SEQ ID NO: 91579 - DNA, 26 bp, Homo sapiens
tactggctatgcaggactaacctcta

SEQ ID NO: 91580 - DNA, 26 bp, Homo sapiens
actggctatgcaggactaacctctat

SEQ ID NO: 91581 - DNA, 26 bp, Homo sapiens
ctggctatgcaggactaacctctatg

SEQ ID NO: 91582 - DNA, 26 bp, Homo sapiens
tggctatgcaggactaacctctatgg

SEQ ID NO: 91583 - DNA, 26 bp, Homo sapiens
ggctatgcaggactaacctctatggg

SEQ ID NO: 91584 - DNA, 26 bp, Homo sapiens
gctatgcaggactaacctctatggga

SEQ ID NO: 91585 - DNA, 26 bp, Homo sapiens
ctatgcaggactaacctctatgggat

SEQ ID NO: 91586 - DNA, 26 bp, Homo sapiens
tatgcaggactaacctctatgggatg

SEQ ID NO: 91587 - DNA, 26 bp, Homo sapiens
atgcaggactaacctctatgggatgc

SEQ ID NO: 91588 - DNA, 26 bp, Homo sapiens
tgcaggactaacctctatgggatgca

SEQ ID NO: 91589 - DNA, 26 bp, Homo sapiens
gcaggactaacctctatgggatgcaa

SEQ ID NO: 91590 - DNA, 26 bp, Homo sapiens
caggactaacctctatgggatgcaaa

SEQ ID NO: 91591 - DNA, 26 bp, Homo sapiens
aggactaacctctatgggatgcaaaa

SEQ ID NO: 91592 - DNA, 26 bp, Homo sapiens
ggactaacctctatgggatgcaaaat

SEQ ID NO: 91593 - DNA, 26 bp, Homo sapiens
gactaacctctatgggatgcaaaatg

SEQ ID NO: 91594 - DNA, 26 bp, Homo sapiens
actaacctctatgggatgcaaaatga

SEQ ID NO: 91595 - DNA, 26 bp, Homo sapiens
ctaacctctatgggatgcaaaatgac

SEQ ID NO: 91596 - DNA, 26 bp, Homo sapiens
taacctctatgggatgcaaaatgact

SEQ ID NO: 91597 - DNA, 26 bp, Homo sapiens
aacctctatgggatgcaaaatgactc

SEQ ID NO: 91598 - DNA, 26 bp, Homo sapiens
acctctatgggatgcaaaatgactcc

SEQ ID NO: 91599 - DNA, 26 bp, Homo sapiens
cctctatgggatgcaaaatgactcca

SEQ ID NO: 91600 - DNA, 26 bp, Homo sapiens
ctctatgggatgcaaaatgactccaa

SEQ ID NO: 91601 - DNA, 26 bp, Homo sapiens
tctatgggatgcaaaatgactccaag

SEQ ID NO: 91602 - DNA, 26 bp, Homo sapiens
ctatgggatgcaaaatgactccaagt

SEQ ID NO: 91603 - DNA, 26 bp, Homo sapiens
tatgggatgcaaaatgactccaagta

SEQ ID NO: 91604 - DNA, 26 bp, Homo sapiens
atgggatgcaaaatgactccaagtat

SEQ ID NO: 91605 - DNA, 26 bp, Homo sapiens
tgggatgcaaaatgactccaagtatg

SEQ ID NO: 91606 - DNA, 26 bp, Homo sapiens
gggatgcaaaatgactccaagtatgg

SEQ ID NO: 91607 - DNA, 26 bp, Homo sapiens
ggatgcaaaatgactccaagtatgga

SEQ ID NO: 91608 - DNA, 26 bp, Homo sapiens
gatgcaaaatgactccaagtatggaa

SEQ ID NO: 91609 - DNA, 26 bp, Homo sapiens
atgcaaaatgactccaagtatggaac

SEQ ID NO: 91610 - DNA, 26 bp, Homo sapiens
tgcaaaatgactccaagtatggaaca

SEQ ID NO: 91611 - DNA, 26 bp, Homo sapiens
gcaaaatgactccaagtatggaacaa

SEQ ID NO: 91612 - DNA, 26 bp, Homo sapiens
caaaatgactccaagtatggaacaac

SEQ ID NO: 91613 - DNA, 26 bp, Homo sapiens
aaaatgactccaagtatggaacaaca

SEQ ID NO: 91614 - DNA, 26 bp, Homo sapiens
aaatgactccaagtatggaacaacat

SEQ ID NO: 91615 - DNA, 26 bp, Homo sapiens
aatgactccaagtatggaacaacatt

SEQ ID NO: 91616 - DNA, 26 bp, Homo sapiens
atgactccaagtatggaacaacattg

SEQ ID NO: 91617 - DNA, 26 bp, Homo sapiens
tgactccaagtatggaacaacattgc

SEQ ID NO: 91618 - DNA, 26 bp, Homo sapiens
gactccaagtatggaacaacattgca

SEQ ID NO: 91619 - DNA, 26 bp, Homo sapiens
actccaagtatggaacaacattgcaa

SEQ ID NO: 91620 - DNA, 26 bp, Homo sapiens
ctccaagtatggaacaacattgcaaa

SEQ ID NO: 91621 - DNA, 26 bp, Homo sapiens
tccaagtatggaacaacattgcaaaa

SEQ ID NO: 91622 - DNA, 26 bp, Homo sapiens
ccaagtatggaacaacattgcaaaaa

SEQ ID NO: 91623 - DNA, 26 bp, Homo sapiens
caagtatggaacaacattgcaaaaat

SEQ ID NO: 91624 - DNA, 26 bp, Homo sapiens
aagtatggaacaacattgcaaaaatg

SEQ ID NO: 91625 - DNA, 26 bp, Homo sapiens
agtatggaacaacattgcaaaaatgg

SEQ ID NO: 91626 - DNA, 26 bp, Homo sapiens
gtatggaacaacattgcaaaaatgga

SEQ ID NO: 91627 - DNA, 26 bp, Homo sapiens
tatggaacaacattgcaaaaatggac

SEQ ID NO: 91628 - DNA, 26 bp, Homo sapiens
atggaacaacattgcaaaaatggact

SEQ ID NO: 91629 - DNA, 26 bp, Homo sapiens
tggaacaacattgcaaaaatggactt

SEQ ID NO: 91630 - DNA, 26 bp, Homo sapiens
ggaacaacattgcaaaaatggacttc

SEQ ID NO: 91631 - DNA, 26 bp, Homo sapiens
gaacaacattgcaaaaatggacttca

SEQ ID NO: 91632 - DNA, 26 bp, Homo sapiens
aacaacattgcaaaaatggacttcaa

SEQ ID NO: 91633 - DNA, 26 bp, Homo sapiens
acaacattgcaaaaatggacttcaat

SEQ ID NO: 91634 - DNA, 26 bp, Homo sapiens
caacattgcaaaaatggacttcaata

SEQ ID NO: 91635 - DNA, 26 bp, Homo sapiens
aacattgcaaaaatggacttcaatat

SEQ ID NO: 91636 - DNA, 26 bp, Homo sapiens
acattgcaaaaatggacttcaatatt

SEQ ID NO: 91637 - DNA, 26 bp, Homo sapiens
cattgcaaaaatggacttcaatatta

SEQ ID NO: 91638 - DNA, 26 bp, Homo sapiens
attgcaaaaatggacttcaatattac

SEQ ID NO: 91639 - DNA, 26 bp, Homo sapiens
ttgcaaaaatggacttcaatattaca

SEQ ID NO: 91640 - DNA, 26 bp, Homo sapiens
tgcaaaaatggacttcaatattacat

SEQ ID NO: 91641 - DNA, 26 bp, Homo sapiens
gcaaaaatggacttcaatattacatg

SEQ ID NO: 91642 - DNA, 26 bp, Homo sapiens
caaaaatggacttcaatattacatga

SEQ ID NO: 91643 - DNA, 26 bp, Homo sapiens
aaaaatggacttcaatattacatgaa

SEQ ID NO: 91644 - DNA, 26 bp, Homo sapiens
aaaatggacttcaatattacatgaag

SEQ ID NO: 91645 - DNA, 26 bp, Homo sapiens
aaatggacttcaatattacatgaagg

SEQ ID NO: 91646 - DNA, 26 bp, Homo sapiens
aatggacttcaatattacatgaagga

SEQ ID NO: 91647 - DNA, 26 bp, Homo sapiens
atggacttcaatattacatgaaggat

SEQ ID NO: 91648 - DNA, 26 bp, Homo sapiens
tggacttcaatattacatgaaggatt

SEQ ID NO: 91649 - DNA, 26 bp, Homo sapiens
ggacttcaatattacatgaaggattt

SEQ ID NO: 91650 - DNA, 26 bp, Homo sapiens
gacttcaatattacatgaaggatttg

SEQ ID NO: 91651 - DNA, 26 bp, Homo sapiens
acttcaatattacatgaaggatttgg

SEQ ID NO: 91652 - DNA, 26 bp, Homo sapiens
cttcaatattacatgaaggatttggc

SEQ ID NO: 91653 - DNA, 26 bp, Homo sapiens
ttcaatattacatgaaggatttggct

SEQ ID NO: 91654 - DNA, 26 bp, Homo sapiens
tcaatattacatgaaggatttggctg

SEQ ID NO: 91655 - DNA, 26 bp, Homo sapiens
caatattacatgaaggatttggctgc

SEQ ID NO: 91656 - DNA, 26 bp, Homo sapiens
aatattacatgaaggatttggctgct

SEQ ID NO: 91657 - DNA, 26 bp, Homo sapiens
atattacatgaaggatttggctgctt

SEQ ID NO: 91658 - DNA, 26 bp, Homo sapiens
tattacatgaaggatttggctgcttt

SEQ ID NO: 91659 - DNA, 26 bp, Homo sapiens
attacatgaaggatttggctgcttta

SEQ ID NO: 91660 - DNA, 26 bp, Homo sapiens
ttacatgaaggatttggctgctttat

SEQ ID NO: 91661 - DNA, 26 bp, Homo sapiens
tacatgaaggatttggctgctttata

SEQ ID NO: 91662 - DNA, 26 bp, Homo sapiens
acatgaaggatttggctgctttatat

SEQ ID NO: 91663 - DNA, 26 bp, Homo sapiens
catgaaggatttggctgctttatata

SEQ ID NO: 91664 - DNA, 26 bp, Homo sapiens
atgaaggatttggctgctttatataa

SEQ ID NO: 91665 - DNA, 26 bp, Homo sapiens
tgaaggatttggctgctttatataaa

SEQ ID NO: 91666 - DNA, 26 bp, Homo sapiens
gaaggatttggctgctttatataaat

SEQ ID NO: 91667 - DNA, 26 bp, Homo sapiens
aaggatttggctgctttatataaata

SEQ ID NO: 91668 - DNA, 26 bp, Homo sapiens
aggatttggctgctttatataaatat

SEQ ID NO: 91669 - DNA, 26 bp, Homo sapiens
ggatttggctgctttatataaatata

SEQ ID NO: 91670 - DNA, 26 bp, Homo sapiens
gatttggctgctttatataaatatag

SEQ ID NO: 91671 - DNA, 26 bp, Homo sapiens
atttggctgctttatataaatataga

SEQ ID NO: 91672 - DNA, 26 bp, Homo sapiens
tttggctgctttatataaatatagaa

SEQ ID NO: 91673 - DNA, 26 bp, Homo sapiens
ttggctgctttatataaatatagaaa

SEQ ID NO: 91674 - DNA, 26 bp, Homo sapiens
tggctgctttatataaatatagaaac

SEQ ID NO: 91675 - DNA, 26 bp, Homo sapiens
ggctgctttatataaatatagaaaca

SEQ ID NO: 91676 - DNA, 26 bp, Homo sapiens
gctgctttatataaatatagaaacaa

SEQ ID NO: 91677 - DNA, 26 bp, Homo sapiens
ctgctttatataaatatagaaacaag

SEQ ID NO: 91678 - DNA, 26 bp, Homo sapiens
tgctttatataaatatagaaacaagc

SEQ ID NO: 91679 - DNA, 26 bp, Homo sapiens
gctttatataaatatagaaacaagcc

SEQ ID NO: 91680 - DNA, 26 bp, Homo sapiens
ctttatataaatatagaaacaagccc

SEQ ID NO: 91681 - DNA, 26 bp, Homo sapiens
tttatataaatatagaaacaagccca

SEQ ID NO: 91682 - DNA, 26 bp, Homo sapiens
ttatataaatatagaaacaagcccag

SEQ ID NO: 91683 - DNA, 26 bp, Homo sapiens
tatataaatatagaaacaagcccagt

SEQ ID NO: 91684 - DNA, 26 bp, Homo sapiens
atataaatatagaaacaagcccagta

SEQ ID NO: 91685 - DNA, 26 bp, Homo sapiens
tataaatatagaaacaagcccagtag

SEQ ID NO: 91686 - DNA, 26 bp, Homo sapiens
ataaatatagaaacaagcccagtaga

SEQ ID NO: 91687 - DNA, 26 bp, Homo sapiens
taaatatagaaacaagcccagtagat

SEQ ID NO: 91688 - DNA, 26 bp, Homo sapiens
aaatatagaaacaagcccagtagatt

SEQ ID NO: 91689 - DNA, 26 bp, Homo sapiens
aatatagaaacaagcccagtagatta

SEQ ID NO: 91690 - DNA, 26 bp, Homo sapiens
atatagaaacaagcccagtagattac

SEQ ID NO: 91691 - DNA, 26 bp, Homo sapiens
tatagaaacaagcccagtagattact

SEQ ID NO: 91692 - DNA, 26 bp, Homo sapiens
atagaaacaagcccagtagattactc

SEQ ID NO: 91693 - DNA, 26 bp, Homo sapiens
tagaaacaagcccagtagattactcc

SEQ ID NO: 91694 - DNA, 26 bp, Homo sapiens
agaaacaagcccagtagattactcca

SEQ ID NO: 91695 - DNA, 26 bp, Homo sapiens
gaaacaagcccagtagattactccac

SEQ ID NO: 91696 - DNA, 26 bp, Homo sapiens
aaacaagcccagtagattactccact

SEQ ID NO: 91697 - DNA, 26 bp, Homo sapiens
aacaagcccagtagattactccacta

SEQ ID NO: 91698 - DNA, 26 bp, Homo sapiens
acaagcccagtagattactccactaa

SEQ ID NO: 91699 - DNA, 26 bp, Homo sapiens
caagcccagtagattactccactaaa

SEQ ID NO: 91700 - DNA, 26 bp, Homo sapiens
aagcccagtagattactccactaaag

SEQ ID NO: 91701 - DNA, 26 bp, Homo sapiens
agcccagtagattactccactaaagg

SEQ ID NO: 91702 - DNA, 26 bp, Homo sapiens
gcccagtagattactccactaaaggt

SEQ ID NO: 91703 - DNA, 26 bp, Homo sapiens
cccagtagattactccactaaaggtg

SEQ ID NO: 91704 - DNA, 26 bp, Homo sapiens
ccagtagattactccactaaaggtga

SEQ ID NO: 91705 - DNA, 26 bp, Homo sapiens
cagtagattactccactaaaggtgac

SEQ ID NO: 91706 - DNA, 26 bp, Homo sapiens
agtagattactccactaaaggtgact

SEQ ID NO: 91707 - DNA, 26 bp, Homo sapiens
gtagattactccactaaaggtgacta

SEQ ID NO: 91708 - DNA, 26 bp, Homo sapiens
tagattactccactaaaggtgactaa

SEQ ID NO: 91709 - DNA, 26 bp, Homo sapiens
agattactccactaaaggtgactaag

SEQ ID NO: 91710 - DNA, 26 bp, Homo sapiens
gattactccactaaaggtgactaagc

SEQ ID NO: 91711 - DNA, 26 bp, Homo sapiens
attactccactaaaggtgactaagca

SEQ ID NO: 91712 - DNA, 26 bp, Homo sapiens
ttactccactaaaggtgactaagcaa

SEQ ID NO: 91713 - DNA, 26 bp, Homo sapiens
tactccactaaaggtgactaagcaaa

SEQ ID NO: 91714 - DNA, 26 bp, Homo sapiens
actccactaaaggtgactaagcaaat

SEQ ID NO: 91715 - DNA, 26 bp, Homo sapiens
ctccactaaaggtgactaagcaaatg

SEQ ID NO: 91716 - DNA, 26 bp, Homo sapiens
tccactaaaggtgactaagcaaatgt

SEQ ID NO: 91717 - DNA, 26 bp, Homo sapiens
ccactaaaggtgactaagcaaatgtt

SEQ ID NO: 91718 - DNA, 26 bp, Homo sapiens
cactaaaggtgactaagcaaatgtta

SEQ ID NO: 91719 - DNA, 26 bp, Homo sapiens
actaaaggtgactaagcaaatgttac

SEQ ID NO: 91720 - DNA, 26 bp, Homo sapiens
ctaaaggtgactaagcaaatgttaca

SEQ ID NO: 91721 - DNA, 26 bp, Homo sapiens
taaaggtgactaagcaaatgttacag

SEQ ID NO: 91722 - DNA, 26 bp, Homo sapiens
aaaggtgactaagcaaatgttacagt

SEQ ID NO: 91723 - DNA, 26 bp, Homo sapiens
aaggtgactaagcaaatgttacagtt

SEQ ID NO: 91724 - DNA, 26 bp, Homo sapiens
aggtgactaagcaaatgttacagttc

SEQ ID NO: 91725 - DNA, 26 bp, Homo sapiens
ggtgactaagcaaatgttacagttca

SEQ ID NO: 91726 - DNA, 26 bp, Homo sapiens
gtgactaagcaaatgttacagttcaa

SEQ ID NO: 91727 - DNA, 26 bp, Homo sapiens
tgactaagcaaatgttacagttcaaa

SEQ ID NO: 91728 - DNA, 26 bp, Homo sapiens
gactaagcaaatgttacagttcaaat

SEQ ID NO: 91729 - DNA, 26 bp, Homo sapiens
actaagcaaatgttacagttcaaatt

SEQ ID NO: 91730 - DNA, 26 bp, Homo sapiens
ctaagcaaatgttacagttcaaattg

SEQ ID NO: 91731 - DNA, 26 bp, Homo sapiens
taagcaaatgttacagttcaaattgc

SEQ ID NO: 91732 - DNA, 26 bp, Homo sapiens
aagcaaatgttacagttcaaattgca

SEQ ID NO: 91733 - DNA, 26 bp, Homo sapiens
agcaaatgttacagttcaaattgcac

SEQ ID NO: 91734 - DNA, 26 bp, Homo sapiens
gcaaatgttacagttcaaattgcact

SEQ ID NO: 91735 - DNA, 26 bp, Homo sapiens
caaatgttacagttcaaattgcactc

SEQ ID NO: 91736 - DNA, 26 bp, Homo sapiens
aaatgttacagttcaaattgcactca

SEQ ID NO: 91737 - DNA, 26 bp, Homo sapiens
aatgttacagttcaaattgcactcaa

SEQ ID NO: 91738 - DNA, 26 bp, Homo sapiens
atgttacagttcaaattgcactcaag

SEQ ID NO: 91739 - DNA, 26 bp, Homo sapiens
tgttacagttcaaattgcactcaaga

SEQ ID NO: 91740 - DNA, 26 bp, Homo sapiens
gttacagttcaaattgcactcaagaa

SEQ ID NO: 91741 - DNA, 26 bp, Homo sapiens
ttacagttcaaattgcactcaagaag

SEQ ID NO: 91742 - DNA, 26 bp, Homo sapiens
tacagttcaaattgcactcaagaagt

SEQ ID NO: 91743 - DNA, 26 bp, Homo sapiens
acagttcaaattgcactcaagaagtc

SEQ ID NO: 91744 - DNA, 26 bp, Homo sapiens
cagttcaaattgcactcaagaagtca

SEQ ID NO: 91745 - DNA, 26 bp, Homo sapiens
agttcaaattgcactcaagaagtcaa

SEQ ID NO: 91746 - DNA, 26 bp, Homo sapiens
gttcaaattgcactcaagaagtcaat

SEQ ID NO: 91747 - DNA, 26 bp, Homo sapiens
ttcaaattgcactcaagaagtcaatc

SEQ ID NO: 91748 - DNA, 26 bp, Homo sapiens
tcaaattgcactcaagaagtcaatcg

SEQ ID NO: 91749 - DNA, 26 bp, Homo sapiens
caaattgcactcaagaagtcaatcga

SEQ ID NO: 91750 - DNA, 26 bp, Homo sapiens
aaattgcactcaagaagtcaatcgag

SEQ ID NO: 91751 - DNA, 26 bp, Homo sapiens
aattgcactcaagaagtcaatcgaga

SEQ ID NO: 91752 - DNA, 26 bp, Homo sapiens
attgcactcaagaagtcaatcgagaa

SEQ ID NO: 91753 - DNA, 26 bp, Homo sapiens
ttgcactcaagaagtcaatcgagaaa

SEQ ID NO: 91754 - DNA, 26 bp, Homo sapiens
tgcactcaagaagtcaatcgagaaat

SEQ ID NO: 91755 - DNA, 26 bp, Homo sapiens
gcactcaagaagtcaatcgagaaata

SEQ ID NO: 91756 - DNA, 26 bp, Homo sapiens
cactcaagaagtcaatcgagaaataa

SEQ ID NO: 91757 - DNA, 26 bp, Homo sapiens
actcaagaagtcaatcgagaaataat

SEQ ID NO: 91758 - DNA, 26 bp, Homo sapiens
ctcaagaagtcaatcgagaaataatt

SEQ ID NO: 91759 - DNA, 26 bp, Homo sapiens
tcaagaagtcaatcgagaaataattc

SEQ ID NO: 91760 - DNA, 26 bp, Homo sapiens
caagaagtcaatcgagaaataattct

SEQ ID NO: 91761 - DNA, 26 bp, Homo sapiens
aagaagtcaatcgagaaataattcta

SEQ ID NO: 91762 - DNA, 26 bp, Homo sapiens
agaagtcaatcgagaaataattctat

SEQ ID NO: 91763 - DNA, 26 bp, Homo sapiens
gaagtcaatcgagaaataattctatc

SEQ ID NO: 91764 - DNA, 26 bp, Homo sapiens
aagtcaatcgagaaataattctatca

SEQ ID NO: 91765 - DNA, 26 bp, Homo sapiens
agtcaatcgagaaataattctatcac

SEQ ID NO: 91766 - DNA, 26 bp, Homo sapiens
gtcaatcgagaaataattctatcacc

SEQ ID NO: 91767 - DNA, 26 bp, Homo sapiens
tcaatcgagaaataattctatcacca

SEQ ID NO: 91768 - DNA, 26 bp, Homo sapiens
caatcgagaaataattctatcaccaa

SEQ ID NO: 91769 - DNA, 26 bp, Homo sapiens
aatcgagaaataattctatcaccaag

SEQ ID NO: 91770 - DNA, 26 bp, Homo sapiens
atcgagaaataattctatcaccaagc

SEQ ID NO: 91771 - DNA, 26 bp, Homo sapiens
tcgagaaataattctatcaccaagcc

SEQ ID NO: 91772 - DNA, 26 bp, Homo sapiens
cgagaaataattctatcaccaagccc

SEQ ID NO: 91773 - DNA, 26 bp, Homo sapiens
gagaaataattctatcaccaagcccg

SEQ ID NO: 91774 - DNA, 26 bp, Homo sapiens
agaaataattctatcaccaagcccgt

SEQ ID NO: 91775 - DNA, 26 bp, Homo sapiens
gaaataattctatcaccaagcccgtg

SEQ ID NO: 91776 - DNA, 26 bp, Homo sapiens
aaataattctatcaccaagcccgtgg

SEQ ID NO: 91777 - DNA, 26 bp, Homo sapiens
aataattctatcaccaagcccgtgga

SEQ ID NO: 91778 - DNA, 26 bp, Homo sapiens
ataattctatcaccaagcccgtggac

SEQ ID NO: 91779 - DNA, 26 bp, Homo sapiens
taattctatcaccaagcccgtggacc

SEQ ID NO: 91780 - DNA, 26 bp, Homo sapiens
aattctatcaccaagcccgtggacct

SEQ ID NO: 91781 - DNA, 26 bp, Homo sapiens
attctatcaccaagcccgtggaccta

SEQ ID NO: 91782 - DNA, 26 bp, Homo sapiens
ttctatcaccaagcccgtggacctac

SEQ ID NO: 91783 - DNA, 26 bp, Homo sapiens
tctatcaccaagcccgtggacctacc

SEQ ID NO: 91784 - DNA, 26 bp, Homo sapiens
ctatcaccaagcccgtggacctaccc

SEQ ID NO: 91785 - DNA, 26 bp, Homo sapiens
tatcaccaagcccgtggacctacccc

SEQ ID NO: 91786 - DNA, 26 bp, Homo sapiens
atcaccaagcccgtggacctaccccc

SEQ ID NO: 91787 - DNA, 26 bp, Homo sapiens
tcaccaagcccgtggacctacccccc

SEQ ID NO: 91788 - DNA, 26 bp, Homo sapiens
caccaagcccgtggacctacccccca

SEQ ID NO: 91789 - DNA, 26 bp, Homo sapiens
accaagcccgtggacctaccccccaa

SEQ ID NO: 91790 - DNA, 26 bp, Homo sapiens
ccaagcccgtggacctaccccccaat

SEQ ID NO: 91791 - DNA, 26 bp, Homo sapiens
caagcccgtggacctaccccccaatc

SEQ ID NO: 91792 - DNA, 26 bp, Homo sapiens
aagcccgtggacctaccccccaatct

SEQ ID NO: 91793 - DNA, 26 bp, Homo sapiens
agcccgtggacctaccccccaatctg

SEQ ID NO: 91794 - DNA, 26 bp, Homo sapiens
gcccgtggacctaccccccaatctgg

SEQ ID NO: 91795 - DNA, 26 bp, Homo sapiens
cccgtggacctaccccccaatctggt

SEQ ID NO: 91796 - DNA, 26 bp, Homo sapiens
ccgtggacctaccccccaatctggtc

SEQ ID NO: 91797 - DNA, 26 bp, Homo sapiens
cgtggacctaccccccaatctggtcc

SEQ ID NO: 91798 - DNA, 26 bp, Homo sapiens
gtggacctaccccccaatctggtccc

SEQ ID NO: 91799 - DNA, 26 bp, Homo sapiens
tggacctaccccccaatctggtccct

SEQ ID NO: 91800 - DNA, 26 bp, Homo sapiens
ggacctaccccccaatctggtccctc

SEQ ID NO: 91801 - DNA, 26 bp, Homo sapiens
gacctaccccccaatctggtccctct

SEQ ID NO: 91802 - DNA, 26 bp, Homo sapiens
acctaccccccaatctggtccctctc

SEQ ID NO: 91803 - DNA, 26 bp, Homo sapiens
cctaccccccaatctggtccctctcc

SEQ ID NO: 91804 - DNA, 26 bp, Homo sapiens
ctaccccccaatctggtccctctccc

SEQ ID NO: 91805 - DNA, 26 bp, Homo sapiens
taccccccaatctggtccctctccca

SEQ ID NO: 91806 - DNA, 26 bp, Homo sapiens
accccccaatctggtccctctcccag

SEQ ID NO: 91807 - DNA, 26 bp, Homo sapiens
ccccccaatctggtccctctcccaga

SEQ ID NO: 91808 - DNA, 26 bp, Homo sapiens
cccccaatctggtccctctcccagaa

SEQ ID NO: 91809 - DNA, 26 bp, Homo sapiens
ccccaatctggtccctctcccagaac

SEQ ID NO: 91810 - DNA, 26 bp, Homo sapiens
cccaatctggtccctctcccagaact

SEQ ID NO: 91811 - DNA, 26 bp, Homo sapiens
ccaatctggtccctctcccagaactc

SEQ ID NO: 91812 - DNA, 26 bp, Homo sapiens
caatctggtccctctcccagaactcc

SEQ ID NO: 91813 - DNA, 26 bp, Homo sapiens
aatctggtccctctcccagaactcct

SEQ ID NO: 91814 - DNA, 26 bp, Homo sapiens
atctggtccctctcccagaactcctt

SEQ ID NO: 91815 - DNA, 26 bp, Homo sapiens
tctggtccctctcccagaactccttg

SEQ ID NO: 91816 - DNA, 26 bp, Homo sapiens
ctggtccctctcccagaactccttgg

SEQ ID NO: 91817 - DNA, 26 bp, Homo sapiens
tggtccctctcccagaactccttggg

SEQ ID NO: 91818 - DNA, 26 bp, Homo sapiens
ggtccctctcccagaactccttgggc

SEQ ID NO: 91819 - DNA, 26 bp, Homo sapiens
gtccctctcccagaactccttgggct

SEQ ID NO: 91820 - DNA, 26 bp, Homo sapiens
tccctctcccagaactccttgggctc

SEQ ID NO: 91821 - DNA, 26 bp, Homo sapiens
ccctctcccagaactccttgggctct

SEQ ID NO: 91822 - DNA, 26 bp, Homo sapiens
cctctcccagaactccttgggctctc

SEQ ID NO: 91823 - DNA, 26 bp, Homo sapiens
ctctcccagaactccttgggctctct

SEQ ID NO: 91824 - DNA, 26 bp, Homo sapiens
tctcccagaactccttgggctctctc

SEQ ID NO: 91825 - DNA, 26 bp, Homo sapiens
ctcccagaactccttgggctctctca

SEQ ID NO: 91826 - DNA, 26 bp, Homo sapiens
tcccagaactccttgggctctctcaa

SEQ ID NO: 91827 - DNA, 26 bp, Homo sapiens
cccagaactccttgggctctctcaag

SEQ ID NO: 91828 - DNA, 26 bp, Homo sapiens
ccagaactccttgggctctctcaaga

SEQ ID NO: 91829 - DNA, 26 bp, Homo sapiens
cagaactccttgggctctctcaagac

SEQ ID NO: 91830 - DNA, 26 bp, Homo sapiens
agaactccttgggctctctcaagacc

SEQ ID NO: 91831 - DNA, 26 bp, Homo sapiens
gaactccttgggctctctcaagaccc

SEQ ID NO: 91832 - DNA, 26 bp, Homo sapiens
aactccttgggctctctcaagaccca

SEQ ID NO: 91833 - DNA, 26 bp, Homo sapiens
actccttgggctctctcaagacccag

SEQ ID NO: 91834 - DNA, 26 bp, Homo sapiens
ctccttgggctctctcaagacccagc

SEQ ID NO: 91835 - DNA, 26 bp, Homo sapiens
tccttgggctctctcaagacccagca

SEQ ID NO: 91836 - DNA, 26 bp, Homo sapiens
ccttgggctctctcaagacccagcaa

SEQ ID NO: 91837 - DNA, 26 bp, Homo sapiens
cttgggctctctcaagacccagcaat

SEQ ID NO: 91838 - DNA, 26 bp, Homo sapiens
ttgggctctctcaagacccagcaatt

SEQ ID NO: 91839 - DNA, 26 bp, Homo sapiens
tgggctctctcaagacccagcaattc

SEQ ID NO: 91840 - DNA, 26 bp, Homo sapiens
gggctctctcaagacccagcaattca

SEQ ID NO: 91841 - DNA, 26 bp, Homo sapiens
ggctctctcaagacccagcaattcag

SEQ ID NO: 91842 - DNA, 26 bp, Homo sapiens
gctctctcaagacccagcaattcagg

SEQ ID NO: 91843 - DNA, 26 bp, Homo sapiens
ctctctcaagacccagcaattcaggt

SEQ ID NO: 91844 - DNA, 26 bp, Homo sapiens
tctctcaagacccagcaattcaggtg

SEQ ID NO: 91845 - DNA, 26 bp, Homo sapiens
ctctcaagacccagcaattcaggtgt

SEQ ID NO: 91846 - DNA, 26 bp, Homo sapiens
tctcaagacccagcaattcaggtgtt

SEQ ID NO: 91847 - DNA, 26 bp, Homo sapiens
ctcaagacccagcaattcaggtgtta

SEQ ID NO: 91848 - DNA, 26 bp, Homo sapiens
tcaagacccagcaattcaggtgttaa

SEQ ID NO: 91849 - DNA, 26 bp, Homo sapiens
caagacccagcaattcaggtgttaac

SEQ ID NO: 91850 - DNA, 26 bp, Homo sapiens
aagacccagcaattcaggtgttaaca

SEQ ID NO: 91851 - DNA, 26 bp, Homo sapiens
agacccagcaattcaggtgttaacat

SEQ ID NO: 91852 - DNA, 26 bp, Homo sapiens
gacccagcaattcaggtgttaacata

SEQ ID NO: 91853 - DNA, 26 bp, Homo sapiens
acccagcaattcaggtgttaacataa

SEQ ID NO: 91854 - DNA, 26 bp, Homo sapiens
cccagcaattcaggtgttaacataac

SEQ ID NO: 91855 - DNA, 26 bp, Homo sapiens
ccagcaattcaggtgttaacataacc

SEQ ID NO: 91856 - DNA, 26 bp, Homo sapiens
cagcaattcaggtgttaacataaccc

SEQ ID NO: 91857 - DNA, 26 bp, Homo sapiens
agcaattcaggtgttaacataaccct

SEQ ID NO: 91858 - DNA, 26 bp, Homo sapiens
gcaattcaggtgttaacataaccctg

SEQ ID NO: 91859 - DNA, 26 bp, Homo sapiens
caattcaggtgttaacataaccctgt

SEQ ID NO: 91860 - DNA, 26 bp, Homo sapiens
aattcaggtgttaacataaccctgtc

SEQ ID NO: 91861 - DNA, 26 bp, Homo sapiens
attcaggtgttaacataaccctgtcc

SEQ ID NO: 91862 - DNA, 26 bp, Homo sapiens
ttcaggtgttaacataaccctgtcca

SEQ ID NO: 91863 - DNA, 26 bp, Homo sapiens
tcaggtgttaacataaccctgtccag

SEQ ID NO: 91864 - DNA, 26 bp, Homo sapiens
caggtgttaacataaccctgtccagt

SEQ ID NO: 91865 - DNA, 26 bp, Homo sapiens
aggtgttaacataaccctgtccagtg

SEQ ID NO: 91866 - DNA, 26 bp, Homo sapiens
ggtgttaacataaccctgtccagtgg

SEQ ID NO: 91867 - DNA, 26 bp, Homo sapiens
gtgttaacataaccctgtccagtggt

SEQ ID NO: 91868 - DNA, 26 bp, Homo sapiens
tgttaacataaccctgtccagtggta

SEQ ID NO: 91869 - DNA, 26 bp, Homo sapiens
gttaacataaccctgtccagtggtat

SEQ ID NO: 91870 - DNA, 26 bp, Homo sapiens
ttaacataaccctgtccagtggtatg

SEQ ID NO: 91871 - DNA, 26 bp, Homo sapiens
taacataaccctgtccagtggtatgg

SEQ ID NO: 91872 - DNA, 26 bp, Homo sapiens
aacataaccctgtccagtggtatggc

SEQ ID NO: 91873 - DNA, 26 bp, Homo sapiens
acataaccctgtccagtggtatggcc

SEQ ID NO: 91874 - DNA, 26 bp, Homo sapiens
cataaccctgtccagtggtatggcca

SEQ ID NO: 91875 - DNA, 26 bp, Homo sapiens
ataaccctgtccagtggtatggccag

SEQ ID NO: 91876 - DNA, 26 bp, Homo sapiens
taaccctgtccagtggtatggccagt

SEQ ID NO: 91877 - DNA, 26 bp, Homo sapiens
aaccctgtccagtggtatggccagtg

SEQ ID NO: 91878 - DNA, 26 bp, Homo sapiens
accctgtccagtggtatggccagtgt

SEQ ID NO: 91879 - DNA, 26 bp, Homo sapiens
ccctgtccagtggtatggccagtgtc

SEQ ID NO: 91880 - DNA, 26 bp, Homo sapiens
cctgtccagtggtatggccagtgtct

SEQ ID NO: 91881 - DNA, 26 bp, Homo sapiens
ctgtccagtggtatggccagtgtctt

SEQ ID NO: 91882 - DNA, 26 bp, Homo sapiens
tgtccagtggtatggccagtgtctta

SEQ ID NO: 91883 - DNA, 26 bp, Homo sapiens
gtccagtggtatggccagtgtcttag

SEQ ID NO: 91884 - DNA, 26 bp, Homo sapiens
tccagtggtatggccagtgtcttagt

SEQ ID NO: 91885 - DNA, 26 bp, Homo sapiens
ccagtggtatggccagtgtcttagtc

SEQ ID NO: 91886 - DNA, 26 bp, Homo sapiens
cagtggtatggccagtgtcttagtcc

SEQ ID NO: 91887 - DNA, 26 bp, Homo sapiens
agtggtatggccagtgtcttagtcca

SEQ ID NO: 91888 - DNA, 26 bp, Homo sapiens
gtggtatggccagtgtcttagtccaa

SEQ ID NO: 91889 - DNA, 26 bp, Homo sapiens
tggtatggccagtgtcttagtccaat

SEQ ID NO: 91890 - DNA, 26 bp, Homo sapiens
ggtatggccagtgtcttagtccaatc

SEQ ID NO: 91891 - DNA, 26 bp, Homo sapiens
gtatggccagtgtcttagtccaatct

SEQ ID NO: 91892 - DNA, 26 bp, Homo sapiens
tatggccagtgtcttagtccaatctt

SEQ ID NO: 91893 - DNA, 26 bp, Homo sapiens
atggccagtgtcttagtccaatcttt

SEQ ID NO: 91894 - DNA, 26 bp, Homo sapiens
tggccagtgtcttagtccaatctttt

SEQ ID NO: 91895 - DNA, 26 bp, Homo sapiens
ggccagtgtcttagtccaatcttttg

SEQ ID NO: 91896 - DNA, 26 bp, Homo sapiens
gccagtgtcttagtccaatcttttgc

SEQ ID NO: 91897 - DNA, 26 bp, Homo sapiens
ccagtgtcttagtccaatcttttgcc

SEQ ID NO: 91898 - DNA, 26 bp, Homo sapiens
cagtgtcttagtccaatcttttgcca

SEQ ID NO: 91899 - DNA, 26 bp, Homo sapiens
agtgtcttagtccaatcttttgccat

SEQ ID NO: 91900 - DNA, 26 bp, Homo sapiens
gtgtcttagtccaatcttttgccata

SEQ ID NO: 91901 - DNA, 26 bp, Homo sapiens
tgtcttagtccaatcttttgccatac

SEQ ID NO: 91902 - DNA, 26 bp, Homo sapiens
gtcttagtccaatcttttgccatacc

SEQ ID NO: 91903 - DNA, 26 bp, Homo sapiens
tcttagtccaatcttttgccatacca

SEQ ID NO: 91904 - DNA, 26 bp, Homo sapiens
cttagtccaatcttttgccataccag

SEQ ID NO: 91905 - DNA, 26 bp, Homo sapiens
ttagtccaatcttttgccataccagt

SEQ ID NO: 91906 - DNA, 26 bp, Homo sapiens
tagtccaatcttttgccataccagtc

SEQ ID NO: 91907 - DNA, 26 bp, Homo sapiens
agtccaatcttttgccataccagtca

SEQ ID NO: 91908 - DNA, 26 bp, Homo sapiens
gtccaatcttttgccataccagtcat

SEQ ID NO: 91909 - DNA, 26 bp, Homo sapiens
tccaatcttttgccataccagtcatt

SEQ ID NO: 91910 - DNA, 26 bp, Homo sapiens
ccaatcttttgccataccagtcatta

SEQ ID NO: 91911 - DNA, 26 bp, Homo sapiens
caatcttttgccataccagtcattac

SEQ ID NO: 91912 - DNA, 26 bp, Homo sapiens
aatcttttgccataccagtcattaca

SEQ ID NO: 91913 - DNA, 26 bp, Homo sapiens
atcttttgccataccagtcattacat

SEQ ID NO: 91914 - DNA, 26 bp, Homo sapiens
tcttttgccataccagtcattacata

SEQ ID NO: 91915 - DNA, 26 bp, Homo sapiens
cttttgccataccagtcattacatat

SEQ ID NO: 91916 - DNA, 26 bp, Homo sapiens
ttttgccataccagtcattacatatt

SEQ ID NO: 91917 - DNA, 26 bp, Homo sapiens
tttgccataccagtcattacatattt

SEQ ID NO: 91918 - DNA, 26 bp, Homo sapiens
ttgccataccagtcattacatatttt

SEQ ID NO: 91919 - DNA, 26 bp, Homo sapiens
tgccataccagtcattacatattttg

SEQ ID NO: 91920 - DNA, 26 bp, Homo sapiens
gccataccagtcattacatattttga

SEQ ID NO: 91921 - DNA, 26 bp, Homo sapiens
ccataccagtcattacatattttgaa

SEQ ID NO: 91922 - DNA, 26 bp, Homo sapiens
cataccagtcattacatattttgaat

SEQ ID NO: 91923 - DNA, 26 bp, Homo sapiens
ataccagtcattacatattttgaata

SEQ ID NO: 91924 - DNA, 26 bp, Homo sapiens
taccagtcattacatattttgaatac

SEQ ID NO: 91925 - DNA, 26 bp, Homo sapiens
accagtcattacatattttgaatacc

SEQ ID NO: 91926 - DNA, 26 bp, Homo sapiens
ccagtcattacatattttgaatacca

SEQ ID NO: 91927 - DNA, 26 bp, Homo sapiens
cagtcattacatattttgaataccaa

SEQ ID NO: 91928 - DNA, 26 bp, Homo sapiens
agtcattacatattttgaataccaac

SEQ ID NO: 91929 - DNA, 26 bp, Homo sapiens
gtcattacatattttgaataccaact

SEQ ID NO: 91930 - DNA, 26 bp, Homo sapiens
tcattacatattttgaataccaactt

SEQ ID NO: 91931 - DNA, 26 bp, Homo sapiens
cattacatattttgaataccaacttg

SEQ ID NO: 91932 - DNA, 26 bp, Homo sapiens
attacatattttgaataccaacttgg

SEQ ID NO: 91933 - DNA, 26 bp, Homo sapiens
ttacatattttgaataccaacttggt

SEQ ID NO: 91934 - DNA, 26 bp, Homo sapiens
tacatattttgaataccaacttggtg

SEQ ID NO: 91935 - DNA, 26 bp, Homo sapiens
acatattttgaataccaacttggtgg

SEQ ID NO: 91936 - DNA, 26 bp, Homo sapiens
catattttgaataccaacttggtgga

SEQ ID NO: 91937 - DNA, 26 bp, Homo sapiens
atattttgaataccaacttggtggag

SEQ ID NO: 91938 - DNA, 26 bp, Homo sapiens
tattttgaataccaacttggtggagg

SEQ ID NO: 91939 - DNA, 26 bp, Homo sapiens
attttgaataccaacttggtggagga

SEQ ID NO: 91940 - DNA, 26 bp, Homo sapiens
ttttgaataccaacttggtggaggaa

SEQ ID NO: 91941 - DNA, 26 bp, Homo sapiens
tttgaataccaacttggtggaggaat

SEQ ID NO: 91942 - DNA, 26 bp, Homo sapiens
ttgaataccaacttggtggaggaatt

SEQ ID NO: 91943 - DNA, 26 bp, Homo sapiens
tgaataccaacttggtggaggaattt

SEQ ID NO: 91944 - DNA, 26 bp, Homo sapiens
gaataccaacttggtggaggaatttc

SEQ ID NO: 91945 - DNA, 26 bp, Homo sapiens
aataccaacttggtggaggaatttca

SEQ ID NO: 91946 - DNA, 26 bp, Homo sapiens
ataccaacttggtggaggaatttcag

SEQ ID NO: 91947 - DNA, 26 bp, Homo sapiens
taccaacttggtggaggaatttcagc

SEQ ID NO: 91948 - DNA, 26 bp, Homo sapiens
accaacttggtggaggaatttcagct

SEQ ID NO: 91949 - DNA, 26 bp, Homo sapiens
ccaacttggtggaggaatttcagctc

SEQ ID NO: 91950 - DNA, 26 bp, Homo sapiens
caacttggtggaggaatttcagctcc

SEQ ID NO: 91951 - DNA, 26 bp, Homo sapiens
aacttggtggaggaatttcagctccc

SEQ ID NO: 91952 - DNA, 26 bp, Homo sapiens
acttggtggaggaatttcagctccct

SEQ ID NO: 91953 - DNA, 26 bp, Homo sapiens
cttggtggaggaatttcagctccctt

SEQ ID NO: 91954 - DNA, 26 bp, Homo sapiens
ttggtggaggaatttcagctcccttt

SEQ ID NO: 91955 - DNA, 26 bp, Homo sapiens
tggtggaggaatttcagctccctttc

SEQ ID NO: 91956 - DNA, 26 bp, Homo sapiens
ggtggaggaatttcagctccctttca

SEQ ID NO: 91957 - DNA, 26 bp, Homo sapiens
gtggaggaatttcagctccctttcag

SEQ ID NO: 91958 - DNA, 26 bp, Homo sapiens
tggaggaatttcagctccctttcagc

SEQ ID NO: 91959 - DNA, 26 bp, Homo sapiens
ggaggaatttcagctccctttcagca

SEQ ID NO: 91960 - DNA, 26 bp, Homo sapiens
gaggaatttcagctccctttcagcag

SEQ ID NO: 91961 - DNA, 26 bp, Homo sapiens
aggaatttcagctccctttcagcagt

SEQ ID NO: 91962 - DNA, 26 bp, Homo sapiens
ggaatttcagctccctttcagcagta

SEQ ID NO: 91963 - DNA, 26 bp, Homo sapiens
gaatttcagctccctttcagcagtag

SEQ ID NO: 91964 - DNA, 26 bp, Homo sapiens
aatttcagctccctttcagcagtagc

SEQ ID NO: 91965 - DNA, 26 bp, Homo sapiens
atttcagctccctttcagcagtagcc

SEQ ID NO: 91966 - DNA, 26 bp, Homo sapiens
tttcagctccctttcagcagtagcct

SEQ ID NO: 91967 - DNA, 26 bp, Homo sapiens
ttcagctccctttcagcagtagccta

SEQ ID NO: 91968 - DNA, 26 bp, Homo sapiens
tcagctccctttcagcagtagcctag

SEQ ID NO: 91969 - DNA, 26 bp, Homo sapiens
cagctccctttcagcagtagcctagt

SEQ ID NO: 91970 - DNA, 26 bp, Homo sapiens
agctccctttcagcagtagcctagtg

SEQ ID NO: 91971 - DNA, 26 bp, Homo sapiens
gctccctttcagcagtagcctagtgg

SEQ ID NO: 91972 - DNA, 26 bp, Homo sapiens
ctccctttcagcagtagcctagtggg

SEQ ID NO: 91973 - DNA, 26 bp, Homo sapiens
tccctttcagcagtagcctagtgggc

SEQ ID NO: 91974 - DNA, 26 bp, Homo sapiens
ccctttcagcagtagcctagtgggca

SEQ ID NO: 91975 - DNA, 26 bp, Homo sapiens
cctttcagcagtagcctagtgggcac

SEQ ID NO: 91976 - DNA, 26 bp, Homo sapiens
ctttcagcagtagcctagtgggcacc

SEQ ID NO: 91977 - DNA, 26 bp, Homo sapiens
tttcagcagtagcctagtgggcacca

SEQ ID NO: 91978 - DNA, 26 bp, Homo sapiens
ttcagcagtagcctagtgggcaccac

SEQ ID NO: 91979 - DNA, 26 bp, Homo sapiens
tcagcagtagcctagtgggcaccaca

SEQ ID NO: 91980 - DNA, 26 bp, Homo sapiens
cagcagtagcctagtgggcaccacat

SEQ ID NO: 91981 - DNA, 26 bp, Homo sapiens
agcagtagcctagtgggcaccacatc

SEQ ID NO: 91982 - DNA, 26 bp, Homo sapiens
gcagtagcctagtgggcaccacatct

SEQ ID NO: 91983 - DNA, 26 bp, Homo sapiens
cagtagcctagtgggcaccacatctc

SEQ ID NO: 91984 - DNA, 26 bp, Homo sapiens
agtagcctagtgggcaccacatctct

SEQ ID NO: 91985 - DNA, 26 bp, Homo sapiens
gtagcctagtgggcaccacatctcta

SEQ ID NO: 91986 - DNA, 26 bp, Homo sapiens
tagcctagtgggcaccacatctctat

SEQ ID NO: 91987 - DNA, 26 bp, Homo sapiens
agcctagtgggcaccacatctctatt

SEQ ID NO: 91988 - DNA, 26 bp, Homo sapiens
gcctagtgggcaccacatctctattc

SEQ ID NO: 91989 - DNA, 26 bp, Homo sapiens
cctagtgggcaccacatctctattct

SEQ ID NO: 91990 - DNA, 26 bp, Homo sapiens
ctagtgggcaccacatctctattctt

SEQ ID NO: 91991 - DNA, 26 bp, Homo sapiens
tagtgggcaccacatctctattcttc

SEQ ID NO: 91992 - DNA, 26 bp, Homo sapiens
agtgggcaccacatctctattcttca

SEQ ID NO: 91993 - DNA, 26 bp, Homo sapiens
gtgggcaccacatctctattcttcat

SEQ ID NO: 91994 - DNA, 26 bp, Homo sapiens
tgggcaccacatctctattcttcatt

SEQ ID NO: 91995 - DNA, 26 bp, Homo sapiens
gggcaccacatctctattcttcattc

SEQ ID NO: 91996 - DNA, 26 bp, Homo sapiens
ggcaccacatctctattcttcattcc

SEQ ID NO: 91997 - DNA, 26 bp, Homo sapiens
gcaccacatctctattcttcattccc

SEQ ID NO: 91998 - DNA, 26 bp, Homo sapiens
caccacatctctattcttcattcccc

SEQ ID NO: 91999 - DNA, 26 bp, Homo sapiens
accacatctctattcttcattcccca

SEQ ID NO: 92000 - DNA, 26 bp, Homo sapiens
ccacatctctattcttcattccccat

SEQ ID NO: 92001 - DNA, 26 bp, Homo sapiens
cacatctctattcttcattccccatt

SEQ ID NO: 92002 - DNA, 26 bp, Homo sapiens
acatctctattcttcattccccattc

SEQ ID NO: 92003 - DNA, 26 bp, Homo sapiens
catctctattcttcattccccattcc

SEQ ID NO: 92004 - DNA, 26 bp, Homo sapiens
atctctattcttcattccccattcca

SEQ ID NO: 92005 - DNA, 26 bp, Homo sapiens
tctctattcttcattccccattccag

SEQ ID NO: 92006 - DNA, 26 bp, Homo sapiens
ctctattcttcattccccattccagc

SEQ ID NO: 92007 - DNA, 26 bp, Homo sapiens
tctattcttcattccccattccagct

SEQ ID NO: 92008 - DNA, 26 bp, Homo sapiens
ctattcttcattccccattccagctt

SEQ ID NO: 92009 - DNA, 26 bp, Homo sapiens
tattcttcattccccattccagcttg

SEQ ID NO: 92010 - DNA, 26 bp, Homo sapiens
attcttcattccccattccagcttga

SEQ ID NO: 92011 - DNA, 26 bp, Homo sapiens
ttcttcattccccattccagcttgat

SEQ ID NO: 92012 - DNA, 26 bp, Homo sapiens
tcttcattccccattccagcttgatg

SEQ ID NO: 92013 - DNA, 26 bp, Homo sapiens
cttcattccccattccagcttgatgc

SEQ ID NO: 92014 - DNA, 26 bp, Homo sapiens
ttcattccccattccagcttgatgct

SEQ ID NO: 92015 - DNA, 26 bp, Homo sapiens
tcattccccattccagcttgatgctg

SEQ ID NO: 92016 - DNA, 26 bp, Homo sapiens
cattccccattccagcttgatgctga

SEQ ID NO: 92017 - DNA, 26 bp, Homo sapiens
attccccattccagcttgatgctgaa

SEQ ID NO: 92018 - DNA, 26 bp, Homo sapiens
ttccccattccagcttgatgctgaag

SEQ ID NO: 92019 - DNA, 26 bp, Homo sapiens
tccccattccagcttgatgctgaagg

SEQ ID NO: 92020 - DNA, 26 bp, Homo sapiens
ccccattccagcttgatgctgaaggg

SEQ ID NO: 92021 - DNA, 26 bp, Homo sapiens
cccattccagcttgatgctgaaggga

SEQ ID NO: 92022 - DNA, 26 bp, Homo sapiens
ccattccagcttgatgctgaagggat

SEQ ID NO: 92023 - DNA, 26 bp, Homo sapiens
cattccagcttgatgctgaagggatg

SEQ ID NO: 92024 - DNA, 26 bp, Homo sapiens
attccagcttgatgctgaagggatga

SEQ ID NO: 92025 - DNA, 26 bp, Homo sapiens
ttccagcttgatgctgaagggatgag

SEQ ID NO: 92026 - DNA, 26 bp, Homo sapiens
tccagcttgatgctgaagggatgagg

SEQ ID NO: 92027 - DNA, 26 bp, Homo sapiens
ccagcttgatgctgaagggatgaggc

SEQ ID NO: 92028 - DNA, 26 bp, Homo sapiens
cagcttgatgctgaagggatgaggct

SEQ ID NO: 92029 - DNA, 26 bp, Homo sapiens
agcttgatgctgaagggatgaggctt

SEQ ID NO: 92030 - DNA, 26 bp, Homo sapiens
gcttgatgctgaagggatgaggcttc

SEQ ID NO: 92031 - DNA, 26 bp, Homo sapiens
cttgatgctgaagggatgaggcttcc

SEQ ID NO: 92032 - DNA, 26 bp, Homo sapiens
ttgatgctgaagggatgaggcttcca

SEQ ID NO: 92033 - DNA, 26 bp, Homo sapiens
tgatgctgaagggatgaggcttccag

SEQ ID NO: 92034 - DNA, 26 bp, Homo sapiens
gatgctgaagggatgaggcttccaga

SEQ ID NO: 92035 - DNA, 26 bp, Homo sapiens
atgctgaagggatgaggcttccagac

SEQ ID NO: 92036 - DNA, 26 bp, Homo sapiens
tgctgaagggatgaggcttccagact

SEQ ID NO: 92037 - DNA, 26 bp, Homo sapiens
gctgaagggatgaggcttccagactc

SEQ ID NO: 92038 - DNA, 26 bp, Homo sapiens
ctgaagggatgaggcttccagactcc

SEQ ID NO: 92039 - DNA, 26 bp, Homo sapiens
tgaagggatgaggcttccagactcca

SEQ ID NO: 92040 - DNA, 26 bp, Homo sapiens
gaagggatgaggcttccagactccaa

SEQ ID NO: 92041 - DNA, 26 bp, Homo sapiens
aagggatgaggcttccagactccaaa

SEQ ID NO: 92042 - DNA, 26 bp, Homo sapiens
agggatgaggcttccagactccaaac

SEQ ID NO: 92043 - DNA, 26 bp, Homo sapiens
gggatgaggcttccagactccaaacc

SEQ ID NO: 92044 - DNA, 26 bp, Homo sapiens
ggatgaggcttccagactccaaaccc

SEQ ID NO: 92045 - DNA, 26 bp, Homo sapiens
gatgaggcttccagactccaaacccc

SEQ ID NO: 92046 - DNA, 26 bp, Homo sapiens
atgaggcttccagactccaaacccct

SEQ ID NO: 92047 - DNA, 26 bp, Homo sapiens
tgaggcttccagactccaaacccctc

SEQ ID NO: 92048 - DNA, 26 bp, Homo sapiens
gaggcttccagactccaaacccctct

SEQ ID NO: 92049 - DNA, 26 bp, Homo sapiens
aggcttccagactccaaacccctctc

SEQ ID NO: 92050 - DNA, 26 bp, Homo sapiens
ggcttccagactccaaacccctctca

SEQ ID NO: 92051 - DNA, 26 bp, Homo sapiens
gcttccagactccaaacccctctcag

SEQ ID NO: 92052 - DNA, 26 bp, Homo sapiens
cttccagactccaaacccctctcaga

SEQ ID NO: 92053 - DNA, 26 bp, Homo sapiens
ttccagactccaaacccctctcagag

SEQ ID NO: 92054 - DNA, 26 bp, Homo sapiens
tccagactccaaacccctctcagagt

SEQ ID NO: 92055 - DNA, 26 bp, Homo sapiens
ccagactccaaacccctctcagagtc

SEQ ID NO: 92056 - DNA, 26 bp, Homo sapiens
cagactccaaacccctctcagagtct

SEQ ID NO: 92057 - DNA, 26 bp, Homo sapiens
agactccaaacccctctcagagtctt

SEQ ID NO: 92058 - DNA, 26 bp, Homo sapiens
gactccaaacccctctcagagtcttc

SEQ ID NO: 92059 - DNA, 26 bp, Homo sapiens
actccaaacccctctcagagtcttca

SEQ ID NO: 92060 - DNA, 26 bp, Homo sapiens
ctccaaacccctctcagagtcttcat

SEQ ID NO: 92061 - DNA, 26 bp, Homo sapiens
tccaaacccctctcagagtcttcatc

SEQ ID NO: 92062 - DNA, 26 bp, Homo sapiens
ccaaacccctctcagagtcttcatct

SEQ ID NO: 92063 - DNA, 26 bp, Homo sapiens
caaacccctctcagagtcttcatctg

SEQ ID NO: 92064 - DNA, 26 bp, Homo sapiens
aaacccctctcagagtcttcatctgc

SEQ ID NO: 92065 - DNA, 26 bp, Homo sapiens
aacccctctcagagtcttcatctgct

SEQ ID NO: 92066 - DNA, 26 bp, Homo sapiens
acccctctcagagtcttcatctgctt

SEQ ID NO: 92067 - DNA, 26 bp, Homo sapiens
cccctctcagagtcttcatctgcttg

SEQ ID NO: 92068 - DNA, 26 bp, Homo sapiens
ccctctcagagtcttcatctgcttgt

SEQ ID NO: 92069 - DNA, 26 bp, Homo sapiens
cctctcagagtcttcatctgcttgtt

SEQ ID NO: 92070 - DNA, 26 bp, Homo sapiens
ctctcagagtcttcatctgcttgttg

SEQ ID NO: 92071 - DNA, 26 bp, Homo sapiens
tctcagagtcttcatctgcttgttgc

SEQ ID NO: 92072 - DNA, 26 bp, Homo sapiens
ctcagagtcttcatctgcttgttgca

SEQ ID NO: 92073 - DNA, 26 bp, Homo sapiens
tcagagtcttcatctgcttgttgcat

SEQ ID NO: 92074 - DNA, 26 bp, Homo sapiens
cagagtcttcatctgcttgttgcatt

SEQ ID NO: 92075 - DNA, 26 bp, Homo sapiens
agagtcttcatctgcttgttgcattt

SEQ ID NO: 92076 - DNA, 26 bp, Homo sapiens
gagtcttcatctgcttgttgcatttt

SEQ ID NO: 92077 - DNA, 26 bp, Homo sapiens
agtcttcatctgcttgttgcattttt

SEQ ID NO: 92078 - DNA, 26 bp, Homo sapiens
gtcttcatctgcttgttgcatttttt

SEQ ID NO: 92079 - DNA, 26 bp, Homo sapiens
tcttcatctgcttgttgcattttttc

SEQ ID NO: 92080 - DNA, 26 bp, Homo sapiens
cttcatctgcttgttgcattttttca

SEQ ID NO: 92081 - DNA, 26 bp, Homo sapiens
ttcatctgcttgttgcattttttcat

SEQ ID NO: 92082 - DNA, 26 bp, Homo sapiens
tcatctgcttgttgcattttttcatt

SEQ ID NO: 92083 - DNA, 26 bp, Homo sapiens
catctgcttgttgcattttttcattc

SEQ ID NO: 92084 - DNA, 26 bp, Homo sapiens
atctgcttgttgcattttttcattca

SEQ ID NO: 92085 - DNA, 26 bp, Homo sapiens
tctgcttgttgcattttttcattcag

SEQ ID NO: 92086 - DNA, 26 bp, Homo sapiens
ctgcttgttgcattttttcattcagc

SEQ ID NO: 92087 - DNA, 26 bp, Homo sapiens
tgcttgttgcattttttcattcagct

SEQ ID NO: 92088 - DNA, 26 bp, Homo sapiens
gcttgttgcattttttcattcagctc

SEQ ID NO: 92089 - DNA, 26 bp, Homo sapiens
cttgttgcattttttcattcagctcc

SEQ ID NO: 92090 - DNA, 26 bp, Homo sapiens
ttgttgcattttttcattcagctcct

SEQ ID NO: 92091 - DNA, 26 bp, Homo sapiens
tgttgcattttttcattcagctcctg

SEQ ID NO: 92092 - DNA, 26 bp, Homo sapiens
gttgcattttttcattcagctcctga

SEQ ID NO: 92093 - DNA, 26 bp, Homo sapiens
ttgcattttttcattcagctcctgaa

SEQ ID NO: 92094 - DNA, 26 bp, Homo sapiens
tgcattttttcattcagctcctgaag

SEQ ID NO: 92095 - DNA, 26 bp, Homo sapiens
gcattttttcattcagctcctgaagg

SEQ ID NO: 92096 - DNA, 26 bp, Homo sapiens
cattttttcattcagctcctgaagga

SEQ ID NO: 92097 - DNA, 26 bp, Homo sapiens
attttttcattcagctcctgaaggaa

SEQ ID NO: 92098 - DNA, 26 bp, Homo sapiens
ttttttcattcagctcctgaaggaat

SEQ ID NO: 92099 - DNA, 26 bp, Homo sapiens
tttttcattcagctcctgaaggaatg

SEQ ID NO: 92100 - DNA, 26 bp, Homo sapiens
ttttcattcagctcctgaaggaatgc

SEQ ID NO: 92101 - DNA, 26 bp, Homo sapiens
tttcattcagctcctgaaggaatgcc

SEQ ID NO: 92102 - DNA, 26 bp, Homo sapiens
ttcattcagctcctgaaggaatgcca

SEQ ID NO: 92103 - DNA, 26 bp, Homo sapiens
tcattcagctcctgaaggaatgccaa

SEQ ID NO: 92104 - DNA, 26 bp, Homo sapiens
cattcagctcctgaaggaatgccaag

SEQ ID NO: 92105 - DNA, 26 bp, Homo sapiens
attcagctcctgaaggaatgccaaga

SEQ ID NO: 92106 - DNA, 26 bp, Homo sapiens
ttcagctcctgaaggaatgccaagac

SEQ ID NO: 92107 - DNA, 26 bp, Homo sapiens
tcagctcctgaaggaatgccaagaca

SEQ ID NO: 92108 - DNA, 26 bp, Homo sapiens
cagctcctgaaggaatgccaagacat

SEQ ID NO: 92109 - DNA, 26 bp, Homo sapiens
agctcctgaaggaatgccaagacatg

SEQ ID NO: 92110 - DNA, 26 bp, Homo sapiens
gctcctgaaggaatgccaagacatgc

SEQ ID NO: 92111 - DNA, 26 bp, Homo sapiens
ctcctgaaggaatgccaagacatgca

SEQ ID NO: 92112 - DNA, 26 bp, Homo sapiens
tcctgaaggaatgccaagacatgcaa

SEQ ID NO: 92113 - DNA, 26 bp, Homo sapiens
cctgaaggaatgccaagacatgcaaa

SEQ ID NO: 92114 - DNA, 26 bp, Homo sapiens
ctgaaggaatgccaagacatgcaaag

SEQ ID NO: 92115 - DNA, 26 bp, Homo sapiens
tgaaggaatgccaagacatgcaaagc

SEQ ID NO: 92116 - DNA, 26 bp, Homo sapiens
gaaggaatgccaagacatgcaaagcc

SEQ ID NO: 92117 - DNA, 26 bp, Homo sapiens
aaggaatgccaagacatgcaaagcct

SEQ ID NO: 92118 - DNA, 26 bp, Homo sapiens
aggaatgccaagacatgcaaagcctc

SEQ ID NO: 92119 - DNA, 26 bp, Homo sapiens
ggaatgccaagacatgcaaagcctca

SEQ ID NO: 92120 - DNA, 26 bp, Homo sapiens
gaatgccaagacatgcaaagcctcag

SEQ ID NO: 92121 - DNA, 26 bp, Homo sapiens
aatgccaagacatgcaaagcctcaga

SEQ ID NO: 92122 - DNA, 26 bp, Homo sapiens
atgccaagacatgcaaagcctcagaa

SEQ ID NO: 92123 - DNA, 26 bp, Homo sapiens
tgccaagacatgcaaagcctcagaat

SEQ ID NO: 92124 - DNA, 26 bp, Homo sapiens
gccaagacatgcaaagcctcagaatc

SEQ ID NO: 92125 - DNA, 26 bp, Homo sapiens
ccaagacatgcaaagcctcagaatct

SEQ ID NO: 92126 - DNA, 26 bp, Homo sapiens
caagacatgcaaagcctcagaatctg

SEQ ID NO: 92127 - DNA, 26 bp, Homo sapiens
aagacatgcaaagcctcagaatctgc

SEQ ID NO: 92128 - DNA, 26 bp, Homo sapiens
agacatgcaaagcctcagaatctgct

SEQ ID NO: 92129 - DNA, 26 bp, Homo sapiens
gacatgcaaagcctcagaatctgctc

SEQ ID NO: 92130 - DNA, 26 bp, Homo sapiens
acatgcaaagcctcagaatctgctcc

SEQ ID NO: 92131 - DNA, 26 bp, Homo sapiens
catgcaaagcctcagaatctgctcca

SEQ ID NO: 92132 - DNA, 26 bp, Homo sapiens
atgcaaagcctcagaatctgctccat

SEQ ID NO: 92133 - DNA, 26 bp, Homo sapiens
tgcaaagcctcagaatctgctccatt

SEQ ID NO: 92134 - DNA, 26 bp, Homo sapiens
gcaaagcctcagaatctgctccattt

SEQ ID NO: 92135 - DNA, 26 bp, Homo sapiens
caaagcctcagaatctgctccatttt

SEQ ID NO: 92136 - DNA, 26 bp, Homo sapiens
aaagcctcagaatctgctccattttt

SEQ ID NO: 92137 - DNA, 26 bp, Homo sapiens
aagcctcagaatctgctccattttta

SEQ ID NO: 92138 - DNA, 26 bp, Homo sapiens
agcctcagaatctgctccatttttag

SEQ ID NO: 92139 - DNA, 26 bp, Homo sapiens
gcctcagaatctgctccatttttaga

SEQ ID NO: 92140 - DNA, 26 bp, Homo sapiens
cctcagaatctgctccatttttagaa

SEQ ID NO: 92141 - DNA, 26 bp, Homo sapiens
ctcagaatctgctccatttttagaaa

SEQ ID NO: 92142 - DNA, 26 bp, Homo sapiens
tcagaatctgctccatttttagaaag

SEQ ID NO: 92143 - DNA, 26 bp, Homo sapiens
cagaatctgctccatttttagaaagt

SEQ ID NO: 92144 - DNA, 26 bp, Homo sapiens
agaatctgctccatttttagaaagtc

SEQ ID NO: 92145 - DNA, 26 bp, Homo sapiens
gaatctgctccatttttagaaagtcg

SEQ ID NO: 92146 - DNA, 26 bp, Homo sapiens
aatctgctccatttttagaaagtcgc

SEQ ID NO: 92147 - DNA, 26 bp, Homo sapiens
atctgctccatttttagaaagtcgca

SEQ ID NO: 92148 - DNA, 26 bp, Homo sapiens
tctgctccatttttagaaagtcgcat

SEQ ID NO: 92149 - DNA, 26 bp, Homo sapiens
ctgctccatttttagaaagtcgcatt

SEQ ID NO: 92150 - DNA, 26 bp, Homo sapiens
tgctccatttttagaaagtcgcattt

SEQ ID NO: 92151 - DNA, 26 bp, Homo sapiens
gctccatttttagaaagtcgcatttt

SEQ ID NO: 92152 - DNA, 26 bp, Homo sapiens
ctccatttttagaaagtcgcattttg

SEQ ID NO: 92153 - DNA, 26 bp, Homo sapiens
tccatttttagaaagtcgcattttgg

SEQ ID NO: 92154 - DNA, 26 bp, Homo sapiens
ccatttttagaaagtcgcattttggc

SEQ ID NO: 92155 - DNA, 26 bp, Homo sapiens
catttttagaaagtcgcattttggca

SEQ ID NO: 92156 - DNA, 26 bp, Homo sapiens
atttttagaaagtcgcattttggcaa

SEQ ID NO: 92157 - DNA, 26 bp, Homo sapiens
tttttagaaagtcgcattttggcaat

SEQ ID NO: 92158 - DNA, 26 bp, Homo sapiens
ttttagaaagtcgcattttggcaatt

SEQ ID NO: 92159 - DNA, 26 bp, Homo sapiens
tttagaaagtcgcattttggcaattt

SEQ ID NO: 92160 - DNA, 26 bp, Homo sapiens
ttagaaagtcgcattttggcaatttt

SEQ ID NO: 92161 - DNA, 26 bp, Homo sapiens
tagaaagtcgcattttggcaattttt

SEQ ID NO: 92162 - DNA, 26 bp, Homo sapiens
agaaagtcgcattttggcaatttttt

SEQ ID NO: 92163 - DNA, 26 bp, Homo sapiens
gaaagtcgcattttggcaattttttg

SEQ ID NO: 92164 - DNA, 26 bp, Homo sapiens
aaagtcgcattttggcaattttttgc

SEQ ID NO: 92165 - DNA, 26 bp, Homo sapiens
aagtcgcattttggcaattttttgca

SEQ ID NO: 92166 - DNA, 26 bp, Homo sapiens
agtcgcattttggcaattttttgcag

SEQ ID NO: 92167 - DNA, 26 bp, Homo sapiens
gtcgcattttggcaattttttgcagt

SEQ ID NO: 92168 - DNA, 26 bp, Homo sapiens
tcgcattttggcaattttttgcagtt

SEQ ID NO: 92169 - DNA, 26 bp, Homo sapiens
cgcattttggcaattttttgcagttt

SEQ ID NO: 92170 - DNA, 26 bp, Homo sapiens
gcattttggcaattttttgcagtttg

SEQ ID NO: 92171 - DNA, 26 bp, Homo sapiens
cattttggcaattttttgcagtttgt

SEQ ID NO: 92172 - DNA, 26 bp, Homo sapiens
attttggcaattttttgcagtttgtc

SEQ ID NO: 92173 - DNA, 26 bp, Homo sapiens
ttttggcaattttttgcagtttgtct

SEQ ID NO: 92174 - DNA, 26 bp, Homo sapiens
tttggcaattttttgcagtttgtctt

SEQ ID NO: 92175 - DNA, 26 bp, Homo sapiens
ttggcaattttttgcagtttgtcttt

SEQ ID NO: 92176 - DNA, 26 bp, Homo sapiens
tggcaattttttgcagtttgtctttc

SEQ ID NO: 92177 - DNA, 26 bp, Homo sapiens
ggcaattttttgcagtttgtctttca

SEQ ID NO: 92178 - DNA, 26 bp, Homo sapiens
gcaattttttgcagtttgtctttcat

SEQ ID NO: 92179 - DNA, 26 bp, Homo sapiens
caattttttgcagtttgtctttcatc

SEQ ID NO: 92180 - DNA, 26 bp, Homo sapiens
aattttttgcagtttgtctttcatct

SEQ ID NO: 92181 - DNA, 26 bp, Homo sapiens
attttttgcagtttgtctttcatctt

SEQ ID NO: 92182 - DNA, 26 bp, Homo sapiens
ttttttgcagtttgtctttcatcttt

SEQ ID NO: 92183 - DNA, 26 bp, Homo sapiens
tttttgcagtttgtctttcatctttt

SEQ ID NO: 92184 - DNA, 26 bp, Homo sapiens
ttttgcagtttgtctttcatcttttc

SEQ ID NO: 92185 - DNA, 26 bp, Homo sapiens
tttgcagtttgtctttcatcttttct

SEQ ID NO: 92186 - DNA, 26 bp, Homo sapiens
ttgcagtttgtctttcatcttttctt

SEQ ID NO: 92187 - DNA, 26 bp, Homo sapiens
tgcagtttgtctttcatcttttcttt

SEQ ID NO: 92188 - DNA, 26 bp, Homo sapiens
gcagtttgtctttcatcttttctttc

SEQ ID NO: 92189 - DNA, 26 bp, Homo sapiens
cagtttgtctttcatcttttctttct

SEQ ID NO: 92190 - DNA, 26 bp, Homo sapiens
agtttgtctttcatcttttctttctc

SEQ ID NO: 92191 - DNA, 26 bp, Homo sapiens
gtttgtctttcatcttttctttctcc

SEQ ID NO: 92192 - DNA, 26 bp, Homo sapiens
tttgtctttcatcttttctttctccc

SEQ ID NO: 92193 - DNA, 26 bp, Homo sapiens
ttgtctttcatcttttctttctccct

SEQ ID NO: 92194 - DNA, 26 bp, Homo sapiens
tgtctttcatcttttctttctccctt

SEQ ID NO: 92195 - DNA, 26 bp, Homo sapiens
gtctttcatcttttctttctcccttg

SEQ ID NO: 92196 - DNA, 26 bp, Homo sapiens
tctttcatcttttctttctcccttga

SEQ ID NO: 92197 - DNA, 26 bp, Homo sapiens
ctttcatcttttctttctcccttgat

SEQ ID NO: 92198 - DNA, 26 bp, Homo sapiens
tttcatcttttctttctcccttgatt

SEQ ID NO: 92199 - DNA, 26 bp, Homo sapiens
ttcatcttttctttctcccttgattt

SEQ ID NO: 92200 - DNA, 26 bp, Homo sapiens
tcatcttttctttctcccttgatttc

SEQ ID NO: 92201 - DNA, 26 bp, Homo sapiens
catcttttctttctcccttgatttct

SEQ ID NO: 92202 - DNA, 26 bp, Homo sapiens
atcttttctttctcccttgatttctg

SEQ ID NO: 92203 - DNA, 26 bp, Homo sapiens
tcttttctttctcccttgatttctgg

SEQ ID NO: 92204 - DNA, 26 bp, Homo sapiens
cttttctttctcccttgatttctggt

SEQ ID NO: 92205 - DNA, 26 bp, Homo sapiens
ttttctttctcccttgatttctggtt

SEQ ID NO: 92206 - DNA, 26 bp, Homo sapiens
tttctttctcccttgatttctggttt

SEQ ID NO: 92207 - DNA, 26 bp, Homo sapiens
ttctttctcccttgatttctggttta

SEQ ID NO: 92208 - DNA, 26 bp, Homo sapiens
tctttctcccttgatttctggtttat

SEQ ID NO: 92209 - DNA, 26 bp, Homo sapiens
ctttctcccttgatttctggtttatt

SEQ ID NO: 92210 - DNA, 26 bp, Homo sapiens
tttctcccttgatttctggtttattt

SEQ ID NO: 92211 - DNA, 26 bp, Homo sapiens
ttctcccttgatttctggtttatttt

SEQ ID NO: 92212 - DNA, 26 bp, Homo sapiens
tctcccttgatttctggtttattttt

SEQ ID NO: 92213 - DNA, 26 bp, Homo sapiens
ctcccttgatttctggtttattttta

SEQ ID NO: 92214 - DNA, 26 bp, Homo sapiens
tcccttgatttctggtttatttttac

SEQ ID NO: 92215 - DNA, 26 bp, Homo sapiens
cccttgatttctggtttatttttaca

SEQ ID NO: 92216 - DNA, 26 bp, Homo sapiens
ccttgatttctggtttatttttacac

SEQ ID NO: 92217 - DNA, 26 bp, Homo sapiens
cttgatttctggtttatttttacacc

SEQ ID NO: 92218 - DNA, 26 bp, Homo sapiens
ttgatttctggtttatttttacaccc

SEQ ID NO: 92219 - DNA, 26 bp, Homo sapiens
tgatttctggtttatttttacaccct

SEQ ID NO: 92220 - DNA, 26 bp, Homo sapiens
gatttctggtttatttttacaccctc

SEQ ID NO: 92221 - DNA, 26 bp, Homo sapiens
atttctggtttatttttacaccctct

SEQ ID NO: 92222 - DNA, 26 bp, Homo sapiens
tttctggtttatttttacaccctcta

SEQ ID NO: 92223 - DNA, 26 bp, Homo sapiens
ttctggtttatttttacaccctctat

SEQ ID NO: 92224 - DNA, 26 bp, Homo sapiens
tctggtttatttttacaccctctata

SEQ ID NO: 92225 - DNA, 26 bp, Homo sapiens
ctggtttatttttacaccctctataa

SEQ ID NO: 92226 - DNA, 26 bp, Homo sapiens
tggtttatttttacaccctctataaa

SEQ ID NO: 92227 - DNA, 26 bp, Homo sapiens
ggtttatttttacaccctctataaag

SEQ ID NO: 92228 - DNA, 26 bp, Homo sapiens
gtttatttttacaccctctataaagt

SEQ ID NO: 92229 - DNA, 26 bp, Homo sapiens
tttatttttacaccctctataaagtg

SEQ ID NO: 92230 - DNA, 26 bp, Homo sapiens
ttatttttacaccctctataaagtgg

SEQ ID NO: 92231 - DNA, 26 bp, Homo sapiens
tatttttacaccctctataaagtggt

SEQ ID NO: 92232 - DNA, 26 bp, Homo sapiens
atttttacaccctctataaagtggtg

SEQ ID NO: 92233 - DNA, 26 bp, Homo sapiens
tttttacaccctctataaagtggtgg

SEQ ID NO: 92234 - DNA, 26 bp, Homo sapiens
ttttacaccctctataaagtggtgga

SEQ ID NO: 92235 - DNA, 26 bp, Homo sapiens
tttacaccctctataaagtggtggat

SEQ ID NO: 92236 - DNA, 26 bp, Homo sapiens
ttacaccctctataaagtggtggatg

SEQ ID NO: 92237 - DNA, 26 bp, Homo sapiens
tacaccctctataaagtggtggatgg

SEQ ID NO: 92238 - DNA, 26 bp, Homo sapiens
acaccctctataaagtggtggatggc

SEQ ID NO: 92239 - DNA, 26 bp, Homo sapiens
caccctctataaagtggtggatggcc

SEQ ID NO: 92240 - DNA, 26 bp, Homo sapiens
accctctataaagtggtggatggcct

SEQ ID NO: 92241 - DNA, 26 bp, Homo sapiens
ccctctataaagtggtggatggcctt

SEQ ID NO: 92242 - DNA, 26 bp, Homo sapiens
cctctataaagtggtggatggccttg

SEQ ID NO: 92243 - DNA, 26 bp, Homo sapiens
ctctataaagtggtggatggccttgt

SEQ ID NO: 92244 - DNA, 26 bp, Homo sapiens
tctataaagtggtggatggccttgtc

SEQ ID NO: 92245 - DNA, 26 bp, Homo sapiens
ctataaagtggtggatggccttgtct

SEQ ID NO: 92246 - DNA, 26 bp, Homo sapiens
tataaagtggtggatggccttgtctt

SEQ ID NO: 92247 - DNA, 26 bp, Homo sapiens
ataaagtggtggatggccttgtcttc

SEQ ID NO: 92248 - DNA, 26 bp, Homo sapiens
taaagtggtggatggccttgtcttca

SEQ ID NO: 92249 - DNA, 26 bp, Homo sapiens
aaagtggtggatggccttgtcttcac

SEQ ID NO: 92250 - DNA, 26 bp, Homo sapiens
aagtggtggatggccttgtcttcaca

SEQ ID NO: 92251 - DNA, 26 bp, Homo sapiens
agtggtggatggccttgtcttcacac

SEQ ID NO: 92252 - DNA, 26 bp, Homo sapiens
gtggtggatggccttgtcttcacact

SEQ ID NO: 92253 - DNA, 26 bp, Homo sapiens
tggtggatggccttgtcttcacactt

SEQ ID NO: 92254 - DNA, 26 bp, Homo sapiens
ggtggatggccttgtcttcacacttc

SEQ ID NO: 92255 - DNA, 26 bp, Homo sapiens
gtggatggccttgtcttcacacttca

SEQ ID NO: 92256 - DNA, 26 bp, Homo sapiens
tggatggccttgtcttcacacttcat

SEQ ID NO: 92257 - DNA, 26 bp, Homo sapiens
ggatggccttgtcttcacacttcatt

SEQ ID NO: 92258 - DNA, 26 bp, Homo sapiens
gatggccttgtcttcacacttcattt

SEQ ID NO: 92259 - DNA, 26 bp, Homo sapiens
atggccttgtcttcacacttcatttg

SEQ ID NO: 92260 - DNA, 26 bp, Homo sapiens
tggccttgtcttcacacttcatttgg

SEQ ID NO: 92261 - DNA, 26 bp, Homo sapiens
ggccttgtcttcacacttcatttggt

SEQ ID NO: 92262 - DNA, 26 bp, Homo sapiens
gccttgtcttcacacttcatttggta

SEQ ID NO: 92263 - DNA, 26 bp, Homo sapiens
ccttgtcttcacacttcatttggtac

SEQ ID NO: 92264 - DNA, 26 bp, Homo sapiens
cttgtcttcacacttcatttggtaca

SEQ ID NO: 92265 - DNA, 26 bp, Homo sapiens
ttgtcttcacacttcatttggtacag

SEQ ID NO: 92266 - DNA, 26 bp, Homo sapiens
tgtcttcacacttcatttggtacagc

SEQ ID NO: 92267 - DNA, 26 bp, Homo sapiens
gtcttcacacttcatttggtacagct

SEQ ID NO: 92268 - DNA, 26 bp, Homo sapiens
tcttcacacttcatttggtacagctg

SEQ ID NO: 92269 - DNA, 26 bp, Homo sapiens
cttcacacttcatttggtacagctga

SEQ ID NO: 92270 - DNA, 26 bp, Homo sapiens
ttcacacttcatttggtacagctgaa

SEQ ID NO: 92271 - DNA, 26 bp, Homo sapiens
tcacacttcatttggtacagctgaaa

SEQ ID NO: 92272 - DNA, 26 bp, Homo sapiens
cacacttcatttggtacagctgaaag

SEQ ID NO: 92273 - DNA, 26 bp, Homo sapiens
acacttcatttggtacagctgaaagt

SEQ ID NO: 92274 - DNA, 26 bp, Homo sapiens
cacttcatttggtacagctgaaagtt

SEQ ID NO: 92275 - DNA, 26 bp, Homo sapiens
acttcatttggtacagctgaaagttg

SEQ ID NO: 92276 - DNA, 26 bp, Homo sapiens
cttcatttggtacagctgaaagttgc

SEQ ID NO: 92277 - DNA, 26 bp, Homo sapiens
ttcatttggtacagctgaaagttgcc

SEQ ID NO: 92278 - DNA, 26 bp, Homo sapiens
tcatttggtacagctgaaagttgcca

SEQ ID NO: 92279 - DNA, 26 bp, Homo sapiens
catttggtacagctgaaagttgccat

SEQ ID NO: 92280 - DNA, 26 bp, Homo sapiens
atttggtacagctgaaagttgccata

SEQ ID NO: 92281 - DNA, 26 bp, Homo sapiens
tttggtacagctgaaagttgccatac

SEQ ID NO: 92282 - DNA, 26 bp, Homo sapiens
ttggtacagctgaaagttgccatacc

SEQ ID NO: 92283 - DNA, 26 bp, Homo sapiens
tggtacagctgaaagttgccataccg

SEQ ID NO: 92284 - DNA, 26 bp, Homo sapiens
ggtacagctgaaagttgccataccgc

SEQ ID NO: 92285 - DNA, 26 bp, Homo sapiens
gtacagctgaaagttgccataccgca

SEQ ID NO: 92286 - DNA, 26 bp, Homo sapiens
tacagctgaaagttgccataccgcag

SEQ ID NO: 92287 - DNA, 26 bp, Homo sapiens
acagctgaaagttgccataccgcaga

SEQ ID NO: 92288 - DNA, 26 bp, Homo sapiens
cagctgaaagttgccataccgcagat

SEQ ID NO: 92289 - DNA, 26 bp, Homo sapiens
agctgaaagttgccataccgcagatg

SEQ ID NO: 92290 - DNA, 26 bp, Homo sapiens
gctgaaagttgccataccgcagatgg

SEQ ID NO: 92291 - DNA, 26 bp, Homo sapiens
ctgaaagttgccataccgcagatgga

SEQ ID NO: 92292 - DNA, 26 bp, Homo sapiens
tgaaagttgccataccgcagatggag

SEQ ID NO: 92293 - DNA, 26 bp, Homo sapiens
gaaagttgccataccgcagatggagc

SEQ ID NO: 92294 - DNA, 26 bp, Homo sapiens
aaagttgccataccgcagatggagca

SEQ ID NO: 92295 - DNA, 26 bp, Homo sapiens
aagttgccataccgcagatggagcag

SEQ ID NO: 92296 - DNA, 26 bp, Homo sapiens
agttgccataccgcagatggagcagt

SEQ ID NO: 92297 - DNA, 26 bp, Homo sapiens
gttgccataccgcagatggagcagtt

SEQ ID NO: 92298 - DNA, 26 bp, Homo sapiens
ttgccataccgcagatggagcagttg

SEQ ID NO: 92299 - DNA, 26 bp, Homo sapiens
tgccataccgcagatggagcagttgt

SEQ ID NO: 92300 - DNA, 26 bp, Homo sapiens
gccataccgcagatggagcagttgtt

SEQ ID NO: 92301 - DNA, 26 bp, Homo sapiens
ccataccgcagatggagcagttgttt

SEQ ID NO: 92302 - DNA, 26 bp, Homo sapiens
cataccgcagatggagcagttgtttc

SEQ ID NO: 92303 - DNA, 26 bp, Homo sapiens
ataccgcagatggagcagttgtttcg

SEQ ID NO: 92304 - DNA, 26 bp, Homo sapiens
taccgcagatggagcagttgtttcgc

SEQ ID NO: 92305 - DNA, 26 bp, Homo sapiens
accgcagatggagcagttgtttcgct

SEQ ID NO: 92306 - DNA, 26 bp, Homo sapiens
ccgcagatggagcagttgtttcgcta

SEQ ID NO: 92307 - DNA, 26 bp, Homo sapiens
cgcagatggagcagttgtttcgctac

SEQ ID NO: 92308 - DNA, 26 bp, Homo sapiens
gcagatggagcagttgtttcgctaca

SEQ ID NO: 92309 - DNA, 26 bp, Homo sapiens
cagatggagcagttgtttcgctacag

SEQ ID NO: 92310 - DNA, 26 bp, Homo sapiens
agatggagcagttgtttcgctacagg

SEQ ID NO: 92311 - DNA, 26 bp, Homo sapiens
gatggagcagttgtttcgctacagga

SEQ ID NO: 92312 - DNA, 26 bp, Homo sapiens
atggagcagttgtttcgctacaggag

SEQ ID NO: 92313 - DNA, 26 bp, Homo sapiens
tggagcagttgtttcgctacaggagt

SEQ ID NO: 92314 - DNA, 26 bp, Homo sapiens
ggagcagttgtttcgctacaggagta

SEQ ID NO: 92315 - DNA, 26 bp, Homo sapiens
gagcagttgtttcgctacaggagtaa

SEQ ID NO: 92316 - DNA, 26 bp, Homo sapiens
agcagttgtttcgctacaggagtaag

SEQ ID NO: 92317 - DNA, 26 bp, Homo sapiens
gcagttgtttcgctacaggagtaagc

SEQ ID NO: 92318 - DNA, 26 bp, Homo sapiens
cagttgtttcgctacaggagtaagct

SEQ ID NO: 92319 - DNA, 26 bp, Homo sapiens
agttgtttcgctacaggagtaagctc

SEQ ID NO: 92320 - DNA, 26 bp, Homo sapiens
gttgtttcgctacaggagtaagctct

SEQ ID NO: 92321 - DNA, 26 bp, Homo sapiens
ttgtttcgctacaggagtaagctctt

SEQ ID NO: 92322 - DNA, 26 bp, Homo sapiens
tgtttcgctacaggagtaagctcttt

SEQ ID NO: 92323 - DNA, 26 bp, Homo sapiens
gtttcgctacaggagtaagctcttta

SEQ ID NO: 92324 - DNA, 26 bp, Homo sapiens
tttcgctacaggagtaagctctttac

SEQ ID NO: 92325 - DNA, 26 bp, Homo sapiens
ttcgctacaggagtaagctctttact

SEQ ID NO: 92326 - DNA, 26 bp, Homo sapiens
tcgctacaggagtaagctctttactg

SEQ ID NO: 92327 - DNA, 26 bp, Homo sapiens
cgctacaggagtaagctctttactga

SEQ ID NO: 92328 - DNA, 26 bp, Homo sapiens
gctacaggagtaagctctttactgaa

SEQ ID NO: 92329 - DNA, 26 bp, Homo sapiens
ctacaggagtaagctctttactgaat

SEQ ID NO: 92330 - DNA, 26 bp, Homo sapiens
tacaggagtaagctctttactgaatt

SEQ ID NO: 92331 - DNA, 26 bp, Homo sapiens
acaggagtaagctctttactgaattc

SEQ ID NO: 92332 - DNA, 26 bp, Homo sapiens
caggagtaagctctttactgaattcc

SEQ ID NO: 92333 - DNA, 26 bp, Homo sapiens
aggagtaagctctttactgaattcct

SEQ ID NO: 92334 - DNA, 26 bp, Homo sapiens
ggagtaagctctttactgaattcctt

SEQ ID NO: 92335 - DNA, 26 bp, Homo sapiens
gagtaagctctttactgaattccttt

SEQ ID NO: 92336 - DNA, 26 bp, Homo sapiens
agtaagctctttactgaattcctttt

SEQ ID NO: 92337 - DNA, 26 bp, Homo sapiens
gtaagctctttactgaattccttttg

SEQ ID NO: 92338 - DNA, 26 bp, Homo sapiens
taagctctttactgaattccttttgg

SEQ ID NO: 92339 - DNA, 26 bp, Homo sapiens
aagctctttactgaattccttttgga

SEQ ID NO: 92340 - DNA, 26 bp, Homo sapiens
agctctttactgaattccttttggaa

SEQ ID NO: 92341 - DNA, 26 bp, Homo sapiens
gctctttactgaattccttttggaag

SEQ ID NO: 92342 - DNA, 26 bp, Homo sapiens
ctctttactgaattccttttggaagt

SEQ ID NO: 92343 - DNA, 26 bp, Homo sapiens
tctttactgaattccttttggaagta

SEQ ID NO: 92344 - DNA, 26 bp, Homo sapiens
ctttactgaattccttttggaagtaa

SEQ ID NO: 92345 - DNA, 26 bp, Homo sapiens
tttactgaattccttttggaagtaat

SEQ ID NO: 92346 - DNA, 26 bp, Homo sapiens
ttactgaattccttttggaagtaata

SEQ ID NO: 92347 - DNA, 26 bp, Homo sapiens
tactgaattccttttggaagtaatac

SEQ ID NO: 92348 - DNA, 26 bp, Homo sapiens
actgaattccttttggaagtaatact

SEQ ID NO: 92349 - DNA, 26 bp, Homo sapiens
ctgaattccttttggaagtaatactc

SEQ ID NO: 92350 - DNA, 26 bp, Homo sapiens
tgaattccttttggaagtaatactct

SEQ ID NO: 92351 - DNA, 26 bp, Homo sapiens
gaattccttttggaagtaatactctg

SEQ ID NO: 92352 - DNA, 26 bp, Homo sapiens
aattccttttggaagtaatactctgc

SEQ ID NO: 92353 - DNA, 26 bp, Homo sapiens
attccttttggaagtaatactctgcg

SEQ ID NO: 92354 - DNA, 26 bp, Homo sapiens
ttccttttggaagtaatactctgcgt

SEQ ID NO: 92355 - DNA, 26 bp, Homo sapiens
tccttttggaagtaatactctgcgtc

SEQ ID NO: 92356 - DNA, 26 bp, Homo sapiens
ccttttggaagtaatactctgcgtct

SEQ ID NO: 92357 - DNA, 26 bp, Homo sapiens
cttttggaagtaatactctgcgtctt

SEQ ID NO: 92358 - DNA, 26 bp, Homo sapiens
ttttggaagtaatactctgcgtcttc

SEQ ID NO: 92359 - DNA, 26 bp, Homo sapiens
tttggaagtaatactctgcgtcttca

SEQ ID NO: 92360 - DNA, 26 bp, Homo sapiens
ttggaagtaatactctgcgtcttcat

SEQ ID NO: 92361 - DNA, 26 bp, Homo sapiens
tggaagtaatactctgcgtcttcata

SEQ ID NO: 92362 - DNA, 26 bp, Homo sapiens
ggaagtaatactctgcgtcttcatac

SEQ ID NO: 92363 - DNA, 26 bp, Homo sapiens
gaagtaatactctgcgtcttcatact

SEQ ID NO: 92364 - DNA, 26 bp, Homo sapiens
aagtaatactctgcgtcttcatactg

SEQ ID NO: 92365 - DNA, 26 bp, Homo sapiens
agtaatactctgcgtcttcatactga

SEQ ID NO: 92366 - DNA, 26 bp, Homo sapiens
gtaatactctgcgtcttcatactgat

SEQ ID NO: 92367 - DNA, 26 bp, Homo sapiens
taatactctgcgtcttcatactgatc

SEQ ID NO: 92368 - DNA, 26 bp, Homo sapiens
aatactctgcgtcttcatactgatct

SEQ ID NO: 92369 - DNA, 26 bp, Homo sapiens
atactctgcgtcttcatactgatctg

SEQ ID NO: 92370 - DNA, 26 bp, Homo sapiens
tactctgcgtcttcatactgatctgc

SEQ ID NO: 92371 - DNA, 26 bp, Homo sapiens
actctgcgtcttcatactgatctgct

SEQ ID NO: 92372 - DNA, 26 bp, Homo sapiens
ctctgcgtcttcatactgatctgcta

SEQ ID NO: 92373 - DNA, 26 bp, Homo sapiens
tctgcgtcttcatactgatctgctag

SEQ ID NO: 92374 - DNA, 26 bp, Homo sapiens
ctgcgtcttcatactgatctgctaga

SEQ ID NO: 92375 - DNA, 26 bp, Homo sapiens
tgcgtcttcatactgatctgctagag

SEQ ID NO: 92376 - DNA, 26 bp, Homo sapiens
gcgtcttcatactgatctgctagagc

SEQ ID NO: 92377 - DNA, 26 bp, Homo sapiens
cgtcttcatactgatctgctagagca

SEQ ID NO: 92378 - DNA, 26 bp, Homo sapiens
gtcttcatactgatctgctagagcat

SEQ ID NO: 92379 - DNA, 26 bp, Homo sapiens
tcttcatactgatctgctagagcatg

SEQ ID NO: 92380 - DNA, 26 bp, Homo sapiens
cttcatactgatctgctagagcatgg

SEQ ID NO: 92381 - DNA, 26 bp, Homo sapiens
ttcatactgatctgctagagcatgga

SEQ ID NO: 92382 - DNA, 26 bp, Homo sapiens
tcatactgatctgctagagcatggag

SEQ ID NO: 92383 - DNA, 26 bp, Homo sapiens
catactgatctgctagagcatggagg

SEQ ID NO: 92384 - DNA, 26 bp, Homo sapiens
atactgatctgctagagcatggaggc

SEQ ID NO: 92385 - DNA, 26 bp, Homo sapiens
tactgatctgctagagcatggaggct

SEQ ID NO: 92386 - DNA, 26 bp, Homo sapiens
actgatctgctagagcatggaggctg

SEQ ID NO: 92387 - DNA, 26 bp, Homo sapiens
ctgatctgctagagcatggaggctgg

SEQ ID NO: 92388 - DNA, 26 bp, Homo sapiens
tgatctgctagagcatggaggctggc

SEQ ID NO: 92389 - DNA, 26 bp, Homo sapiens
gatctgctagagcatggaggctggca

SEQ ID NO: 92390 - DNA, 26 bp, Homo sapiens
atctgctagagcatggaggctggcaa

SEQ ID NO: 92391 - DNA, 26 bp, Homo sapiens
tctgctagagcatggaggctggcaag

SEQ ID NO: 92392 - DNA, 26 bp, Homo sapiens
ctgctagagcatggaggctggcaaga

SEQ ID NO: 92393 - DNA, 26 bp, Homo sapiens
tgctagagcatggaggctggcaagaa

SEQ ID NO: 92394 - DNA, 26 bp, Homo sapiens
gctagagcatggaggctggcaagaat

SEQ ID NO: 92395 - DNA, 26 bp, Homo sapiens
ctagagcatggaggctggcaagaatg

SEQ ID NO: 92396 - DNA, 26 bp, Homo sapiens
tagagcatggaggctggcaagaatgg

SEQ ID NO: 92397 - DNA, 26 bp, Homo sapiens
agagcatggaggctggcaagaatgga

SEQ ID NO: 92398 - DNA, 26 bp, Homo sapiens
gagcatggaggctggcaagaatggaa

SEQ ID NO: 92399 - DNA, 26 bp, Homo sapiens
agcatggaggctggcaagaatggaac

SEQ ID NO: 92400 - DNA, 26 bp, Homo sapiens
gcatggaggctggcaagaatggaaca

SEQ ID NO: 92401 - DNA, 26 bp, Homo sapiens
catggaggctggcaagaatggaacag

SEQ ID NO: 92402 - DNA, 26 bp, Homo sapiens
atggaggctggcaagaatggaacaga

SEQ ID NO: 92403 - DNA, 26 bp, Homo sapiens
tggaggctggcaagaatggaacagac

SEQ ID NO: 92404 - DNA, 26 bp, Homo sapiens
ggaggctggcaagaatggaacagaca

SEQ ID NO: 92405 - DNA, 26 bp, Homo sapiens
gaggctggcaagaatggaacagacac

SEQ ID NO: 92406 - DNA, 26 bp, Homo sapiens
aggctggcaagaatggaacagacacg

SEQ ID NO: 92407 - DNA, 26 bp, Homo sapiens
ggctggcaagaatggaacagacacgg

SEQ ID NO: 92408 - DNA, 26 bp, Homo sapiens
gctggcaagaatggaacagacacgga

SEQ ID NO: 92409 - DNA, 26 bp, Homo sapiens
ctggcaagaatggaacagacacggaa

SEQ ID NO: 92410 - DNA, 26 bp, Homo sapiens
tggcaagaatggaacagacacggaag

SEQ ID NO: 92411 - DNA, 26 bp, Homo sapiens
ggcaagaatggaacagacacggaaga

SEQ ID NO: 92412 - DNA, 26 bp, Homo sapiens
gcaagaatggaacagacacggaagag

SEQ ID NO: 92413 - DNA, 26 bp, Homo sapiens
caagaatggaacagacacggaagaga

SEQ ID NO: 92414 - DNA, 26 bp, Homo sapiens
aagaatggaacagacacggaagagat

SEQ ID NO: 92415 - DNA, 26 bp, Homo sapiens
agaatggaacagacacggaagagatt

SEQ ID NO: 92416 - DNA, 26 bp, Homo sapiens
gaatggaacagacacggaagagatta

SEQ ID NO: 92417 - DNA, 26 bp, Homo sapiens
aatggaacagacacggaagagattat

SEQ ID NO: 92418 - DNA, 26 bp, Homo sapiens
atggaacagacacggaagagattatc

SEQ ID NO: 92419 - DNA, 26 bp, Homo sapiens
tggaacagacacggaagagattatca

SEQ ID NO: 92420 - DNA, 26 bp, Homo sapiens
ggaacagacacggaagagattatcat

SEQ ID NO: 92421 - DNA, 26 bp, Homo sapiens
gaacagacacggaagagattatcatt

SEQ ID NO: 92422 - DNA, 26 bp, Homo sapiens
aacagacacggaagagattatcattg

SEQ ID NO: 92423 - DNA, 26 bp, Homo sapiens
acagacacggaagagattatcattgg

SEQ ID NO: 92424 - DNA, 26 bp, Homo sapiens
cagacacggaagagattatcattggc

SEQ ID NO: 92425 - DNA, 26 bp, Homo sapiens
agacacggaagagattatcattggcc

SEQ ID NO: 92426 - DNA, 26 bp, Homo sapiens
gacacggaagagattatcattggcct

SEQ ID NO: 92427 - DNA, 26 bp, Homo sapiens
acacggaagagattatcattggcctc

SEQ ID NO: 92428 - DNA, 26 bp, Homo sapiens
cacggaagagattatcattggcctca

SEQ ID NO: 92429 - DNA, 26 bp, Homo sapiens
acggaagagattatcattggcctcat

SEQ ID NO: 92430 - DNA, 26 bp, Homo sapiens
cggaagagattatcattggcctcatc

SEQ ID NO: 92431 - DNA, 26 bp, Homo sapiens
ggaagagattatcattggcctcatca

SEQ ID NO: 92432 - DNA, 26 bp, Homo sapiens
gaagagattatcattggcctcatcag

SEQ ID NO: 92433 - DNA, 26 bp, Homo sapiens
aagagattatcattggcctcatcagc

SEQ ID NO: 92434 - DNA, 26 bp, Homo sapiens
agagattatcattggcctcatcagct

SEQ ID NO: 92435 - DNA, 26 bp, Homo sapiens
gagattatcattggcctcatcagctt

SEQ ID NO: 92436 - DNA, 26 bp, Homo sapiens
agattatcattggcctcatcagcttt

SEQ ID NO: 92437 - DNA, 26 bp, Homo sapiens
gattatcattggcctcatcagctttc

SEQ ID NO: 92438 - DNA, 26 bp, Homo sapiens
attatcattggcctcatcagctttct

SEQ ID NO: 92439 - DNA, 26 bp, Homo sapiens
ttatcattggcctcatcagctttctt

SEQ ID NO: 92440 - DNA, 26 bp, Homo sapiens
tatcattggcctcatcagctttcttc

SEQ ID NO: 92441 - DNA, 26 bp, Homo sapiens
atcattggcctcatcagctttcttca

SEQ ID NO: 92442 - DNA, 26 bp, Homo sapiens
tcattggcctcatcagctttcttcag

SEQ ID NO: 92443 - DNA, 26 bp, Homo sapiens
cattggcctcatcagctttcttcaga

SEQ ID NO: 92444 - DNA, 26 bp, Homo sapiens
attggcctcatcagctttcttcagat

SEQ ID NO: 92445 - DNA, 26 bp, Homo sapiens
ttggcctcatcagctttcttcagatg

SEQ ID NO: 92446 - DNA, 26 bp, Homo sapiens
tggcctcatcagctttcttcagatga

SEQ ID NO: 92447 - DNA, 26 bp, Homo sapiens
ggcctcatcagctttcttcagatgag

SEQ ID NO: 92448 - DNA, 26 bp, Homo sapiens
gcctcatcagctttcttcagatgagc

SEQ ID NO: 92449 - DNA, 26 bp, Homo sapiens
cctcatcagctttcttcagatgagcc

SEQ ID NO: 92450 - DNA, 26 bp, Homo sapiens
ctcatcagctttcttcagatgagcca

SEQ ID NO: 92451 - DNA, 26 bp, Homo sapiens
tcatcagctttcttcagatgagccac

SEQ ID NO: 92452 - DNA, 26 bp, Homo sapiens
catcagctttcttcagatgagccaca

SEQ ID NO: 92453 - DNA, 26 bp, Homo sapiens
atcagctttcttcagatgagccacag

SEQ ID NO: 92454 - DNA, 26 bp, Homo sapiens
tcagctttcttcagatgagccacagc

SEQ ID NO: 92455 - DNA, 26 bp, Homo sapiens
cagctttcttcagatgagccacagcg

SEQ ID NO: 92456 - DNA, 26 bp, Homo sapiens
agctttcttcagatgagccacagcgt

SEQ ID NO: 92457 - DNA, 26 bp, Homo sapiens
gctttcttcagatgagccacagcgtg

SEQ ID NO: 92458 - DNA, 26 bp, Homo sapiens
ctttcttcagatgagccacagcgtgt

SEQ ID NO: 92459 - DNA, 26 bp, Homo sapiens
tttcttcagatgagccacagcgtgtc

SEQ ID NO: 92460 - DNA, 26 bp, Homo sapiens
ttcttcagatgagccacagcgtgtcc

SEQ ID NO: 92461 - DNA, 26 bp, Homo sapiens
tcttcagatgagccacagcgtgtcct

SEQ ID NO: 92462 - DNA, 26 bp, Homo sapiens
cttcagatgagccacagcgtgtccta

SEQ ID NO: 92463 - DNA, 26 bp, Homo sapiens
ttcagatgagccacagcgtgtcctat

SEQ ID NO: 92464 - DNA, 26 bp, Homo sapiens
tcagatgagccacagcgtgtcctatt

SEQ ID NO: 92465 - DNA, 26 bp, Homo sapiens
cagatgagccacagcgtgtcctatta

SEQ ID NO: 92466 - DNA, 26 bp, Homo sapiens
agatgagccacagcgtgtcctattag

SEQ ID NO: 92467 - DNA, 26 bp, Homo sapiens
gatgagccacagcgtgtcctattagt

SEQ ID NO: 92468 - DNA, 26 bp, Homo sapiens
atgagccacagcgtgtcctattagtt

SEQ ID NO: 92469 - DNA, 26 bp, Homo sapiens
tgagccacagcgtgtcctattagttc

SEQ ID NO: 92470 - DNA, 26 bp, Homo sapiens
gagccacagcgtgtcctattagttcc

SEQ ID NO: 92471 - DNA, 26 bp, Homo sapiens
agccacagcgtgtcctattagttcca

SEQ ID NO: 92472 - DNA, 26 bp, Homo sapiens
gccacagcgtgtcctattagttccag

SEQ ID NO: 92473 - DNA, 26 bp, Homo sapiens
ccacagcgtgtcctattagttccagt

SEQ ID NO: 92474 - DNA, 26 bp, Homo sapiens
cacagcgtgtcctattagttccagta

SEQ ID NO: 92475 - DNA, 26 bp, Homo sapiens
acagcgtgtcctattagttccagtaa

SEQ ID NO: 92476 - DNA, 26 bp, Homo sapiens
cagcgtgtcctattagttccagtaac

SEQ ID NO: 92477 - DNA, 26 bp, Homo sapiens
agcgtgtcctattagttccagtaact

SEQ ID NO: 92478 - DNA, 26 bp, Homo sapiens
gcgtgtcctattagttccagtaactt

SEQ ID NO: 92479 - DNA, 26 bp, Homo sapiens
cgtgtcctattagttccagtaacttt

SEQ ID NO: 92480 - DNA, 26 bp, Homo sapiens
gtgtcctattagttccagtaactttc

SEQ ID NO: 92481 - DNA, 26 bp, Homo sapiens
tgtcctattagttccagtaactttct

SEQ ID NO: 92482 - DNA, 26 bp, Homo sapiens
gtcctattagttccagtaactttctt

SEQ ID NO: 92483 - DNA, 26 bp, Homo sapiens
tcctattagttccagtaactttcttt

SEQ ID NO: 92484 - DNA, 26 bp, Homo sapiens
cctattagttccagtaactttctttt

SEQ ID NO: 92485 - DNA, 26 bp, Homo sapiens
ctattagttccagtaactttcttttc

SEQ ID NO: 92486 - DNA, 26 bp, Homo sapiens
tattagttccagtaactttcttttcc

SEQ ID NO: 92487 - DNA, 26 bp, Homo sapiens
attagttccagtaactttcttttccc

SEQ ID NO: 92488 - DNA, 26 bp, Homo sapiens
ttagttccagtaactttcttttccca

SEQ ID NO: 92489 - DNA, 26 bp, Homo sapiens
tagttccagtaactttcttttcccat

SEQ ID NO: 92490 - DNA, 26 bp, Homo sapiens
agttccagtaactttcttttcccata

SEQ ID NO: 92491 - DNA, 26 bp, Homo sapiens
gttccagtaactttcttttcccatac

SEQ ID NO: 92492 - DNA, 26 bp, Homo sapiens
ttccagtaactttcttttcccataca

SEQ ID NO: 92493 - DNA, 26 bp, Homo sapiens
tccagtaactttcttttcccatacat

SEQ ID NO: 92494 - DNA, 26 bp, Homo sapiens
ccagtaactttcttttcccatacatt

SEQ ID NO: 92495 - DNA, 26 bp, Homo sapiens
cagtaactttcttttcccatacattc

SEQ ID NO: 92496 - DNA, 26 bp, Homo sapiens
agtaactttcttttcccatacattcc

SEQ ID NO: 92497 - DNA, 26 bp, Homo sapiens
gtaactttcttttcccatacattcca

SEQ ID NO: 92498 - DNA, 26 bp, Homo sapiens
taactttcttttcccatacattccat

SEQ ID NO: 92499 - DNA, 26 bp, Homo sapiens
aactttcttttcccatacattccatt

SEQ ID NO: 92500 - DNA, 26 bp, Homo sapiens
actttcttttcccatacattccattc

SEQ ID NO: 92501 - DNA, 26 bp, Homo sapiens
ctttcttttcccatacattccattct

SEQ ID NO: 92502 - DNA, 26 bp, Homo sapiens
tttcttttcccatacattccattctc

SEQ ID NO: 92503 - DNA, 26 bp, Homo sapiens
ttcttttcccatacattccattctct

SEQ ID NO: 92504 - DNA, 26 bp, Homo sapiens
tcttttcccatacattccattctctc

SEQ ID NO: 92505 - DNA, 26 bp, Homo sapiens
cttttcccatacattccattctctct

SEQ ID NO: 92506 - DNA, 26 bp, Homo sapiens
ttttcccatacattccattctctctt

SEQ ID NO: 92507 - DNA, 26 bp, Homo sapiens
tttcccatacattccattctctctta

SEQ ID NO: 92508 - DNA, 26 bp, Homo sapiens
ttcccatacattccattctctcttag

SEQ ID NO: 92509 - DNA, 26 bp, Homo sapiens
tcccatacattccattctctcttaga

SEQ ID NO: 92510 - DNA, 26 bp, Homo sapiens
cccatacattccattctctcttagat

SEQ ID NO: 92511 - DNA, 26 bp, Homo sapiens
ccatacattccattctctcttagatt

SEQ ID NO: 92512 - DNA, 26 bp, Homo sapiens
catacattccattctctcttagattc

SEQ ID NO: 92513 - DNA, 26 bp, Homo sapiens
atacattccattctctcttagattca

SEQ ID NO: 92514 - DNA, 26 bp, Homo sapiens
tacattccattctctcttagattcat

SEQ ID NO: 92515 - DNA, 26 bp, Homo sapiens
acattccattctctcttagattcatt

SEQ ID NO: 92516 - DNA, 26 bp, Homo sapiens
cattccattctctcttagattcatta

SEQ ID NO: 92517 - DNA, 26 bp, Homo sapiens
attccattctctcttagattcattac

SEQ ID NO: 92518 - DNA, 26 bp, Homo sapiens
ttccattctctcttagattcattact

SEQ ID NO: 92519 - DNA, 26 bp, Homo sapiens
tccattctctcttagattcattactt

SEQ ID NO: 92520 - DNA, 26 bp, Homo sapiens
ccattctctcttagattcattacttg

SEQ ID NO: 92521 - DNA, 26 bp, Homo sapiens
cattctctcttagattcattacttgg

SEQ ID NO: 92522 - DNA, 26 bp, Homo sapiens
attctctcttagattcattacttgga

SEQ ID NO: 92523 - DNA, 26 bp, Homo sapiens
ttctctcttagattcattacttggaa

SEQ ID NO: 92524 - DNA, 26 bp, Homo sapiens
tctctcttagattcattacttggaag

SEQ ID NO: 92525 - DNA, 26 bp, Homo sapiens
ctctcttagattcattacttggaaga

SEQ ID NO: 92526 - DNA, 26 bp, Homo sapiens
tctcttagattcattacttggaagac

SEQ ID NO: 92527 - DNA, 26 bp, Homo sapiens
ctcttagattcattacttggaagact

SEQ ID NO: 92528 - DNA, 26 bp, Homo sapiens
tcttagattcattacttggaagactt

SEQ ID NO: 92529 - DNA, 26 bp, Homo sapiens
cttagattcattacttggaagacttt

SEQ ID NO: 92530 - DNA, 26 bp, Homo sapiens
ttagattcattacttggaagactttt

SEQ ID NO: 92531 - DNA, 26 bp, Homo sapiens
tagattcattacttggaagacttttg

SEQ ID NO: 92532 - DNA, 26 bp, Homo sapiens
agattcattacttggaagacttttgc

SEQ ID NO: 92533 - DNA, 26 bp, Homo sapiens
gattcattacttggaagacttttgcc

SEQ ID NO: 92534 - DNA, 26 bp, Homo sapiens
attcattacttggaagacttttgccc

SEQ ID NO: 92535 - DNA, 26 bp, Homo sapiens
ttcattacttggaagacttttgccct

SEQ ID NO: 92536 - DNA, 26 bp, Homo sapiens
tcattacttggaagacttttgcccta

SEQ ID NO: 92537 - DNA, 26 bp, Homo sapiens
cattacttggaagacttttgccctat

SEQ ID NO: 92538 - DNA, 26 bp, Homo sapiens
attacttggaagacttttgccctata

SEQ ID NO: 92539 - DNA, 26 bp, Homo sapiens
ttacttggaagacttttgccctatag

SEQ ID NO: 92540 - DNA, 26 bp, Homo sapiens
tacttggaagacttttgccctatagc

SEQ ID NO: 92541 - DNA, 26 bp, Homo sapiens
acttggaagacttttgccctatagca

SEQ ID NO: 92542 - DNA, 26 bp, Homo sapiens
cttggaagacttttgccctatagcag

SEQ ID NO: 92543 - DNA, 26 bp, Homo sapiens
ttggaagacttttgccctatagcagc

SEQ ID NO: 92544 - DNA, 26 bp, Homo sapiens
tggaagacttttgccctatagcagca

SEQ ID NO: 92545 - DNA, 26 bp, Homo sapiens
ggaagacttttgccctatagcagcac

SEQ ID NO: 92546 - DNA, 26 bp, Homo sapiens
gaagacttttgccctatagcagcacc

SEQ ID NO: 92547 - DNA, 26 bp, Homo sapiens
aagacttttgccctatagcagcaccc

SEQ ID NO: 92548 - DNA, 26 bp, Homo sapiens
agacttttgccctatagcagcaccca

SEQ ID NO: 92549 - DNA, 26 bp, Homo sapiens
gacttttgccctatagcagcacccaa

SEQ ID NO: 92550 - DNA, 26 bp, Homo sapiens
acttttgccctatagcagcacccaat

SEQ ID NO: 92551 - DNA, 26 bp, Homo sapiens
cttttgccctatagcagcacccaatt

SEQ ID NO: 92552 - DNA, 26 bp, Homo sapiens
ttttgccctatagcagcacccaattt

SEQ ID NO: 92553 - DNA, 26 bp, Homo sapiens
tttgccctatagcagcacccaatttg

SEQ ID NO: 92554 - DNA, 26 bp, Homo sapiens
ttgccctatagcagcacccaatttgg

SEQ ID NO: 92555 - DNA, 26 bp, Homo sapiens
tgccctatagcagcacccaatttggc

SEQ ID NO: 92556 - DNA, 26 bp, Homo sapiens
gccctatagcagcacccaatttggca

SEQ ID NO: 92557 - DNA, 26 bp, Homo sapiens
ccctatagcagcacccaatttggcaa

SEQ ID NO: 92558 - DNA, 26 bp, Homo sapiens
cctatagcagcacccaatttggcaat

SEQ ID NO: 92559 - DNA, 26 bp, Homo sapiens
ctatagcagcacccaatttggcaatg

SEQ ID NO: 92560 - DNA, 26 bp, Homo sapiens
tatagcagcacccaatttggcaatgc

SEQ ID NO: 92561 - DNA, 26 bp, Homo sapiens
atagcagcacccaatttggcaatgca

SEQ ID NO: 92562 - DNA, 26 bp, Homo sapiens
tagcagcacccaatttggcaatgcag

SEQ ID NO: 92563 - DNA, 26 bp, Homo sapiens
agcagcacccaatttggcaatgcagg

SEQ ID NO: 92564 - DNA, 26 bp, Homo sapiens
gcagcacccaatttggcaatgcaggt

SEQ ID NO: 92565 - DNA, 26 bp, Homo sapiens
cagcacccaatttggcaatgcaggta

SEQ ID NO: 92566 - DNA, 26 bp, Homo sapiens
agcacccaatttggcaatgcaggtag

SEQ ID NO: 92567 - DNA, 26 bp, Homo sapiens
gcacccaatttggcaatgcaggtagg

SEQ ID NO: 92568 - DNA, 26 bp, Homo sapiens
cacccaatttggcaatgcaggtaggc

SEQ ID NO: 92569 - DNA, 26 bp, Homo sapiens
acccaatttggcaatgcaggtaggca

SEQ ID NO: 92570 - DNA, 26 bp, Homo sapiens
cccaatttggcaatgcaggtaggcat

SEQ ID NO: 92571 - DNA, 26 bp, Homo sapiens
ccaatttggcaatgcaggtaggcatt

SEQ ID NO: 92572 - DNA, 26 bp, Homo sapiens
caatttggcaatgcaggtaggcattg

SEQ ID NO: 92573 - DNA, 26 bp, Homo sapiens
aatttggcaatgcaggtaggcattgt

SEQ ID NO: 92574 - DNA, 26 bp, Homo sapiens
atttggcaatgcaggtaggcattgtt

SEQ ID NO: 92575 - DNA, 26 bp, Homo sapiens
tttggcaatgcaggtaggcattgttt

SEQ ID NO: 92576 - DNA, 26 bp, Homo sapiens
ttggcaatgcaggtaggcattgtttg

SEQ ID NO: 92577 - DNA, 26 bp, Homo sapiens
tggcaatgcaggtaggcattgtttgg

SEQ ID NO: 92578 - DNA, 26 bp, Homo sapiens
ggcaatgcaggtaggcattgtttggt

SEQ ID NO: 92579 - DNA, 26 bp, Homo sapiens
gcaatgcaggtaggcattgtttggta

SEQ ID NO: 92580 - DNA, 26 bp, Homo sapiens
caatgcaggtaggcattgtttggtat

SEQ ID NO: 92581 - DNA, 26 bp, Homo sapiens
aatgcaggtaggcattgtttggtatg

SEQ ID NO: 92582 - DNA, 26 bp, Homo sapiens
atgcaggtaggcattgtttggtatgt

SEQ ID NO: 92583 - DNA, 26 bp, Homo sapiens
tgcaggtaggcattgtttggtatgta

SEQ ID NO: 92584 - DNA, 26 bp, Homo sapiens
gcaggtaggcattgtttggtatgtat

SEQ ID NO: 92585 - DNA, 26 bp, Homo sapiens
caggtaggcattgtttggtatgtatt

SEQ ID NO: 92586 - DNA, 26 bp, Homo sapiens
aggtaggcattgtttggtatgtattc

SEQ ID NO: 92587 - DNA, 26 bp, Homo sapiens
ggtaggcattgtttggtatgtattct

SEQ ID NO: 92588 - DNA, 26 bp, Homo sapiens
gtaggcattgtttggtatgtattcta

SEQ ID NO: 92589 - DNA, 26 bp, Homo sapiens
taggcattgtttggtatgtattctaa

SEQ ID NO: 92590 - DNA, 26 bp, Homo sapiens
aggcattgtttggtatgtattctaaa

SEQ ID NO: 92591 - DNA, 26 bp, Homo sapiens
ggcattgtttggtatgtattctaaag

SEQ ID NO: 92592 - DNA, 26 bp, Homo sapiens
gcattgtttggtatgtattctaaagc

SEQ ID NO: 92593 - DNA, 26 bp, Homo sapiens
cattgtttggtatgtattctaaagcc

SEQ ID NO: 92594 - DNA, 26 bp, Homo sapiens
attgtttggtatgtattctaaagcct

SEQ ID NO: 92595 - DNA, 26 bp, Homo sapiens
ttgtttggtatgtattctaaagcctt

SEQ ID NO: 92596 - DNA, 26 bp, Homo sapiens
tgtttggtatgtattctaaagccttt

SEQ ID NO: 92597 - DNA, 26 bp, Homo sapiens
gtttggtatgtattctaaagcctttt

SEQ ID NO: 92598 - DNA, 26 bp, Homo sapiens
tttggtatgtattctaaagccttttt

SEQ ID NO: 92599 - DNA, 26 bp, Homo sapiens
ttggtatgtattctaaagccttttta

SEQ ID NO: 92600 - DNA, 26 bp, Homo sapiens
tggtatgtattctaaagcctttttaa

SEQ ID NO: 92601 - DNA, 26 bp, Homo sapiens
ggtatgtattctaaagcctttttaag

SEQ ID NO: 92602 - DNA, 26 bp, Homo sapiens
gtatgtattctaaagcctttttaagc

SEQ ID NO: 92603 - DNA, 26 bp, Homo sapiens
tatgtattctaaagcctttttaagca

SEQ ID NO: 92604 - DNA, 26 bp, Homo sapiens
atgtattctaaagcctttttaagcag

SEQ ID NO: 92605 - DNA, 26 bp, Homo sapiens
tgtattctaaagcctttttaagcagt

SEQ ID NO: 92606 - DNA, 26 bp, Homo sapiens
gtattctaaagcctttttaagcagtt

SEQ ID NO: 92607 - DNA, 26 bp, Homo sapiens
tattctaaagcctttttaagcagttc

SEQ ID NO: 92608 - DNA, 26 bp, Homo sapiens
attctaaagcctttttaagcagttca

SEQ ID NO: 92609 - DNA, 26 bp, Homo sapiens
ttctaaagcctttttaagcagttcaa

SEQ ID NO: 92610 - DNA, 26 bp, Homo sapiens
tctaaagcctttttaagcagttcaat

SEQ ID NO: 92611 - DNA, 26 bp, Homo sapiens
ctaaagcctttttaagcagttcaatc

SEQ ID NO: 92612 - DNA, 26 bp, Homo sapiens
taaagcctttttaagcagttcaatcg

SEQ ID NO: 92613 - DNA, 26 bp, Homo sapiens
aaagcctttttaagcagttcaatcgc

SEQ ID NO: 92614 - DNA, 26 bp, Homo sapiens
aagcctttttaagcagttcaatcgct

SEQ ID NO: 92615 - DNA, 26 bp, Homo sapiens
agcctttttaagcagttcaatcgctt

SEQ ID NO: 92616 - DNA, 26 bp, Homo sapiens
gcctttttaagcagttcaatcgcttt

SEQ ID NO: 92617 - DNA, 26 bp, Homo sapiens
cctttttaagcagttcaatcgctttg

SEQ ID NO: 92618 - DNA, 26 bp, Homo sapiens
ctttttaagcagttcaatcgctttgt

SEQ ID NO: 92619 - DNA, 26 bp, Homo sapiens
tttttaagcagttcaatcgctttgtc

SEQ ID NO: 92620 - DNA, 26 bp, Homo sapiens
ttttaagcagttcaatcgctttgtct

SEQ ID NO: 92621 - DNA, 26 bp, Homo sapiens
tttaagcagttcaatcgctttgtctg

SEQ ID NO: 92622 - DNA, 26 bp, Homo sapiens
ttaagcagttcaatcgctttgtctgg

SEQ ID NO: 92623 - DNA, 26 bp, Homo sapiens
taagcagttcaatcgctttgtctggc

SEQ ID NO: 92624 - DNA, 26 bp, Homo sapiens
aagcagttcaatcgctttgtctggct

SEQ ID NO: 92625 - DNA, 26 bp, Homo sapiens
agcagttcaatcgctttgtctggctc

SEQ ID NO: 92626 - DNA, 26 bp, Homo sapiens
gcagttcaatcgctttgtctggctca

SEQ ID NO: 92627 - DNA, 26 bp, Homo sapiens
cagttcaatcgctttgtctggctcat

SEQ ID NO: 92628 - DNA, 26 bp, Homo sapiens
agttcaatcgctttgtctggctcatc

SEQ ID NO: 92629 - DNA, 26 bp, Homo sapiens
gttcaatcgctttgtctggctcatct

SEQ ID NO: 92630 - DNA, 26 bp, Homo sapiens
ttcaatcgctttgtctggctcatctt

SEQ ID NO: 92631 - DNA, 26 bp, Homo sapiens
tcaatcgctttgtctggctcatcttt

SEQ ID NO: 92632 - DNA, 26 bp, Homo sapiens
caatcgctttgtctggctcatctttt

SEQ ID NO: 92633 - DNA, 26 bp, Homo sapiens
aatcgctttgtctggctcatcttttc

SEQ ID NO: 92634 - DNA, 26 bp, Homo sapiens
atcgctttgtctggctcatcttttct

SEQ ID NO: 92635 - DNA, 26 bp, Homo sapiens
tcgctttgtctggctcatcttttctt

SEQ ID NO: 92636 - DNA, 26 bp, Homo sapiens
cgctttgtctggctcatcttttcttc

SEQ ID NO: 92637 - DNA, 26 bp, Homo sapiens
gctttgtctggctcatcttttcttcg

SEQ ID NO: 92638 - DNA, 26 bp, Homo sapiens
ctttgtctggctcatcttttcttcga

SEQ ID NO: 92639 - DNA, 26 bp, Homo sapiens
tttgtctggctcatcttttcttcgat

SEQ ID NO: 92640 - DNA, 26 bp, Homo sapiens
ttgtctggctcatcttttcttcgata

SEQ ID NO: 92641 - DNA, 26 bp, Homo sapiens
tgtctggctcatcttttcttcgataa

SEQ ID NO: 92642 - DNA, 26 bp, Homo sapiens
gtctggctcatcttttcttcgataaa

SEQ ID NO: 92643 - DNA, 26 bp, Homo sapiens
tctggctcatcttttcttcgataaaa

SEQ ID NO: 92644 - DNA, 26 bp, Homo sapiens
ctggctcatcttttcttcgataaaac

SEQ ID NO: 92645 - DNA, 26 bp, Homo sapiens
tggctcatcttttcttcgataaaact

SEQ ID NO: 92646 - DNA, 26 bp, Homo sapiens
ggctcatcttttcttcgataaaactt

SEQ ID NO: 92647 - DNA, 26 bp, Homo sapiens
gctcatcttttcttcgataaaacttg

SEQ ID NO: 92648 - DNA, 26 bp, Homo sapiens
ctcatcttttcttcgataaaacttgg

SEQ ID NO: 92649 - DNA, 26 bp, Homo sapiens
tcatcttttcttcgataaaacttggc

SEQ ID NO: 92650 - DNA, 26 bp, Homo sapiens
catcttttcttcgataaaacttggct

SEQ ID NO: 92651 - DNA, 26 bp, Homo sapiens
atcttttcttcgataaaacttggctg

SEQ ID NO: 92652 - DNA, 26 bp, Homo sapiens
tcttttcttcgataaaacttggctgc

SEQ ID NO: 92653 - DNA, 26 bp, Homo sapiens
cttttcttcgataaaacttggctgca

SEQ ID NO: 92654 - DNA, 26 bp, Homo sapiens
ttttcttcgataaaacttggctgcac

SEQ ID NO: 92655 - DNA, 26 bp, Homo sapiens
tttcttcgataaaacttggctgcact

SEQ ID NO: 92656 - DNA, 26 bp, Homo sapiens
ttcttcgataaaacttggctgcactg

SEQ ID NO: 92657 - DNA, 26 bp, Homo sapiens
tcttcgataaaacttggctgcactgc

SEQ ID NO: 92658 - DNA, 26 bp, Homo sapiens
cttcgataaaacttggctgcactgcg

SEQ ID NO: 92659 - DNA, 26 bp, Homo sapiens
ttcgataaaacttggctgcactgcga

SEQ ID NO: 92660 - DNA, 26 bp, Homo sapiens
tcgataaaacttggctgcactgcgaa

SEQ ID NO: 92661 - DNA, 26 bp, Homo sapiens
cgataaaacttggctgcactgcgaag

SEQ ID NO: 92662 - DNA, 26 bp, Homo sapiens
gataaaacttggctgcactgcgaaga

SEQ ID NO: 92663 - DNA, 26 bp, Homo sapiens
ataaaacttggctgcactgcgaagaa

SEQ ID NO: 92664 - DNA, 26 bp, Homo sapiens
taaaacttggctgcactgcgaagaac

SEQ ID NO: 92665 - DNA, 26 bp, Homo sapiens
aaaacttggctgcactgcgaagaaca

SEQ ID NO: 92666 - DNA, 26 bp, Homo sapiens
aaacttggctgcactgcgaagaacat

SEQ ID NO: 92667 - DNA, 26 bp, Homo sapiens
aacttggctgcactgcgaagaacatc

SEQ ID NO: 92668 - DNA, 26 bp, Homo sapiens
acttggctgcactgcgaagaacatct

SEQ ID NO: 92669 - DNA, 26 bp, Homo sapiens
cttggctgcactgcgaagaacatctg

SEQ ID NO: 92670 - DNA, 26 bp, Homo sapiens
ttggctgcactgcgaagaacatctgt

SEQ ID NO: 92671 - DNA, 26 bp, Homo sapiens
tggctgcactgcgaagaacatctgtt

SEQ ID NO: 92672 - DNA, 26 bp, Homo sapiens
ggctgcactgcgaagaacatctgtta

SEQ ID NO: 92673 - DNA, 26 bp, Homo sapiens
gctgcactgcgaagaacatctgttac

SEQ ID NO: 92674 - DNA, 26 bp, Homo sapiens
ctgcactgcgaagaacatctgttaca

SEQ ID NO: 92675 - DNA, 26 bp, Homo sapiens
tgcactgcgaagaacatctgttacac

SEQ ID NO: 92676 - DNA, 26 bp, Homo sapiens
gcactgcgaagaacatctgttacacc

SEQ ID NO: 92677 - DNA, 26 bp, Homo sapiens
cactgcgaagaacatctgttacacct

SEQ ID NO: 92678 - DNA, 26 bp, Homo sapiens
actgcgaagaacatctgttacacctg

SEQ ID NO: 92679 - DNA, 26 bp, Homo sapiens
ctgcgaagaacatctgttacacctgg

SEQ ID NO: 92680 - DNA, 26 bp, Homo sapiens
tgcgaagaacatctgttacacctggg

SEQ ID NO: 92681 - DNA, 26 bp, Homo sapiens
gcgaagaacatctgttacacctgggg

SEQ ID NO: 92682 - DNA, 26 bp, Homo sapiens
cgaagaacatctgttacacctggggc

SEQ ID NO: 92683 - DNA, 26 bp, Homo sapiens
gaagaacatctgttacacctggggct

SEQ ID NO: 92684 - DNA, 26 bp, Homo sapiens
aagaacatctgttacacctggggctt

SEQ ID NO: 92685 - DNA, 26 bp, Homo sapiens
agaacatctgttacacctggggcttt

SEQ ID NO: 92686 - DNA, 26 bp, Homo sapiens
gaacatctgttacacctggggctttc

SEQ ID NO: 92687 - DNA, 26 bp, Homo sapiens
aacatctgttacacctggggctttct

SEQ ID NO: 92688 - DNA, 26 bp, Homo sapiens
acatctgttacacctggggctttctc

SEQ ID NO: 92689 - DNA, 26 bp, Homo sapiens
catctgttacacctggggctttctcc

SEQ ID NO: 92690 - DNA, 26 bp, Homo sapiens
atctgttacacctggggctttctcca

SEQ ID NO: 92691 - DNA, 26 bp, Homo sapiens
tctgttacacctggggctttctccaa

SEQ ID NO: 92692 - DNA, 26 bp, Homo sapiens
ctgttacacctggggctttctccaag

SEQ ID NO: 92693 - DNA, 26 bp, Homo sapiens
tgttacacctggggctttctccaagg

SEQ ID NO: 92694 - DNA, 26 bp, Homo sapiens
gttacacctggggctttctccaaggc

SEQ ID NO: 92695 - DNA, 26 bp, Homo sapiens
ttacacctggggctttctccaaggct

SEQ ID NO: 92696 - DNA, 26 bp, Homo sapiens
tacacctggggctttctccaaggctt

SEQ ID NO: 92697 - DNA, 26 bp, Homo sapiens
acacctggggctttctccaaggcttc

SEQ ID NO: 92698 - DNA, 26 bp, Homo sapiens
cacctggggctttctccaaggcttct

SEQ ID NO: 92699 - DNA, 26 bp, Homo sapiens
acctggggctttctccaaggcttctt

SEQ ID NO: 92700 - DNA, 26 bp, Homo sapiens
cctggggctttctccaaggcttcttc

SEQ ID NO: 92701 - DNA, 26 bp, Homo sapiens
ctggggctttctccaaggcttcttca

SEQ ID NO: 92702 - DNA, 26 bp, Homo sapiens
tggggctttctccaaggcttcttcaa

SEQ ID NO: 92703 - DNA, 26 bp, Homo sapiens
ggggctttctccaaggcttcttcaac

SEQ ID NO: 92704 - DNA, 26 bp, Homo sapiens
gggctttctccaaggcttcttcaact

SEQ ID NO: 92705 - DNA, 26 bp, Homo sapiens
ggctttctccaaggcttcttcaacta

SEQ ID NO: 92706 - DNA, 26 bp, Homo sapiens
gctttctccaaggcttcttcaactaa

SEQ ID NO: 92707 - DNA, 26 bp, Homo sapiens
ctttctccaaggcttcttcaactaac

SEQ ID NO: 92708 - DNA, 26 bp, Homo sapiens
tttctccaaggcttcttcaactaact

SEQ ID NO: 92709 - DNA, 26 bp, Homo sapiens
ttctccaaggcttcttcaactaactt

SEQ ID NO: 92710 - DNA, 26 bp, Homo sapiens
tctccaaggcttcttcaactaacttc

SEQ ID NO: 92711 - DNA, 26 bp, Homo sapiens
ctccaaggcttcttcaactaacttct

SEQ ID NO: 92712 - DNA, 26 bp, Homo sapiens
tccaaggcttcttcaactaacttctc

SEQ ID NO: 92713 - DNA, 26 bp, Homo sapiens
ccaaggcttcttcaactaacttctct

SEQ ID NO: 92714 - DNA, 26 bp, Homo sapiens
caaggcttcttcaactaacttctctc

SEQ ID NO: 92715 - DNA, 26 bp, Homo sapiens
aaggcttcttcaactaacttctctcc

SEQ ID NO: 92716 - DNA, 26 bp, Homo sapiens
aggcttcttcaactaacttctctcct

SEQ ID NO: 92717 - DNA, 26 bp, Homo sapiens
ggcttcttcaactaacttctctcctt

SEQ ID NO: 92718 - DNA, 26 bp, Homo sapiens
gcttcttcaactaacttctctccttc

SEQ ID NO: 92719 - DNA, 26 bp, Homo sapiens
cttcttcaactaacttctctccttca

SEQ ID NO: 92720 - DNA, 26 bp, Homo sapiens
ttcttcaactaacttctctccttcac

SEQ ID NO: 92721 - DNA, 26 bp, Homo sapiens
tcttcaactaacttctctccttcacc

SEQ ID NO: 92722 - DNA, 26 bp, Homo sapiens
cttcaactaacttctctccttcacct

SEQ ID NO: 92723 - DNA, 26 bp, Homo sapiens
ttcaactaacttctctccttcacctt

SEQ ID NO: 92724 - DNA, 26 bp, Homo sapiens
tcaactaacttctctccttcaccttc

SEQ ID NO: 92725 - DNA, 26 bp, Homo sapiens
caactaacttctctccttcaccttcc

SEQ ID NO: 92726 - DNA, 26 bp, Homo sapiens
aactaacttctctccttcaccttcct

SEQ ID NO: 92727 - DNA, 26 bp, Homo sapiens
actaacttctctccttcaccttcctc

SEQ ID NO: 92728 - DNA, 26 bp, Homo sapiens
ctaacttctctccttcaccttcctct

SEQ ID NO: 92729 - DNA, 26 bp, Homo sapiens
taacttctctccttcaccttcctctt

SEQ ID NO: 92730 - DNA, 26 bp, Homo sapiens
aacttctctccttcaccttcctcttc

SEQ ID NO: 92731 - DNA, 26 bp, Homo sapiens
acttctctccttcaccttcctcttca

SEQ ID NO: 92732 - DNA, 26 bp, Homo sapiens
cttctctccttcaccttcctcttcac

SEQ ID NO: 92733 - DNA, 26 bp, Homo sapiens
ttctctccttcaccttcctcttcacc

SEQ ID NO: 92734 - DNA, 26 bp, Homo sapiens
tctctccttcaccttcctcttcacct

SEQ ID NO: 92735 - DNA, 26 bp, Homo sapiens
ctctccttcaccttcctcttcacctt

SEQ ID NO: 92736 - DNA, 26 bp, Homo sapiens
tctccttcaccttcctcttcaccttc

SEQ ID NO: 92737 - DNA, 26 bp, Homo sapiens
ctccttcaccttcctcttcaccttct

SEQ ID NO: 92738 - DNA, 26 bp, Homo sapiens
tccttcaccttcctcttcaccttctt

SEQ ID NO: 92739 - DNA, 26 bp, Homo sapiens
ccttcaccttcctcttcaccttcttc

SEQ ID NO: 92740 - DNA, 26 bp, Homo sapiens
cttcaccttcctcttcaccttcttca

SEQ ID NO: 92741 - DNA, 26 bp, Homo sapiens
ttcaccttcctcttcaccttcttcac

SEQ ID NO: 92742 - DNA, 26 bp, Homo sapiens
tcaccttcctcttcaccttcttcacg

SEQ ID NO: 92743 - DNA, 26 bp, Homo sapiens
caccttcctcttcaccttcttcacgc

SEQ ID NO: 92744 - DNA, 26 bp, Homo sapiens
accttcctcttcaccttcttcacgca

SEQ ID NO: 92745 - DNA, 26 bp, Homo sapiens
ccttcctcttcaccttcttcacgcat

SEQ ID NO: 92746 - DNA, 26 bp, Homo sapiens
cttcctcttcaccttcttcacgcatc

SEQ ID NO: 92747 - DNA, 26 bp, Homo sapiens
ttcctcttcaccttcttcacgcatct

SEQ ID NO: 92748 - DNA, 26 bp, Homo sapiens
tcctcttcaccttcttcacgcatctt

SEQ ID NO: 92749 - DNA, 26 bp, Homo sapiens
cctcttcaccttcttcacgcatctta

SEQ ID NO: 92750 - DNA, 26 bp, Homo sapiens
ctcttcaccttcttcacgcatcttat

SEQ ID NO: 92751 - DNA, 26 bp, Homo sapiens
tcttcaccttcttcacgcatcttatg

SEQ ID NO: 92752 - DNA, 26 bp, Homo sapiens
cttcaccttcttcacgcatcttatga

SEQ ID NO: 92753 - DNA, 26 bp, Homo sapiens
ttcaccttcttcacgcatcttatgaa

SEQ ID NO: 92754 - DNA, 26 bp, Homo sapiens
tcaccttcttcacgcatcttatgaag

SEQ ID NO: 92755 - DNA, 26 bp, Homo sapiens
caccttcttcacgcatcttatgaagc

SEQ ID NO: 92756 - DNA, 26 bp, Homo sapiens
accttcttcacgcatcttatgaagct

SEQ ID NO: 92757 - DNA, 26 bp, Homo sapiens
ccttcttcacgcatcttatgaagctt

SEQ ID NO: 92758 - DNA, 26 bp, Homo sapiens
cttcttcacgcatcttatgaagcttc

SEQ ID NO: 92759 - DNA, 26 bp, Homo sapiens
ttcttcacgcatcttatgaagcttca

SEQ ID NO: 92760 - DNA, 26 bp, Homo sapiens
tcttcacgcatcttatgaagcttcag

SEQ ID NO: 92761 - DNA, 26 bp, Homo sapiens
cttcacgcatcttatgaagcttcaga

SEQ ID NO: 92762 - DNA, 26 bp, Homo sapiens
ttcacgcatcttatgaagcttcagag

SEQ ID NO: 92763 - DNA, 26 bp, Homo sapiens
tcacgcatcttatgaagcttcagagc

SEQ ID NO: 92764 - DNA, 26 bp, Homo sapiens
cacgcatcttatgaagcttcagagcc

SEQ ID NO: 92765 - DNA, 26 bp, Homo sapiens
acgcatcttatgaagcttcagagcca

SEQ ID NO: 92766 - DNA, 26 bp, Homo sapiens
cgcatcttatgaagcttcagagccag

SEQ ID NO: 92767 - DNA, 26 bp, Homo sapiens
gcatcttatgaagcttcagagccagg

SEQ ID NO: 92768 - DNA, 26 bp, Homo sapiens
catcttatgaagcttcagagccagga

SEQ ID NO: 92769 - DNA, 26 bp, Homo sapiens
atcttatgaagcttcagagccaggag

SEQ ID NO: 92770 - DNA, 26 bp, Homo sapiens
tcttatgaagcttcagagccaggagg

SEQ ID NO: 92771 - DNA, 26 bp, Homo sapiens
cttatgaagcttcagagccaggagga

SEQ ID NO: 92772 - DNA, 26 bp, Homo sapiens
ttatgaagcttcagagccaggaggac

SEQ ID NO: 92773 - DNA, 26 bp, Homo sapiens
tatgaagcttcagagccaggaggact

SEQ ID NO: 92774 - DNA, 26 bp, Homo sapiens
atgaagcttcagagccaggaggactt

SEQ ID NO: 92775 - DNA, 26 bp, Homo sapiens
tgaagcttcagagccaggaggacttt

SEQ ID NO: 92776 - DNA, 26 bp, Homo sapiens
gaagcttcagagccaggaggacttta

SEQ ID NO: 92777 - DNA, 26 bp, Homo sapiens
aagcttcagagccaggaggactttaa

SEQ ID NO: 92778 - DNA, 26 bp, Homo sapiens
agcttcagagccaggaggactttaag

SEQ ID NO: 92779 - DNA, 26 bp, Homo sapiens
gcttcagagccaggaggactttaagg

SEQ ID NO: 92780 - DNA, 26 bp, Homo sapiens
cttcagagccaggaggactttaaggt

SEQ ID NO: 92781 - DNA, 26 bp, Homo sapiens
ttcagagccaggaggactttaaggta

SEQ ID NO: 92782 - DNA, 26 bp, Homo sapiens
tcagagccaggaggactttaaggtac

SEQ ID NO: 92783 - DNA, 26 bp, Homo sapiens
cagagccaggaggactttaaggtact

SEQ ID NO: 92784 - DNA, 26 bp, Homo sapiens
agagccaggaggactttaaggtactg

SEQ ID NO: 92785 - DNA, 26 bp, Homo sapiens
gagccaggaggactttaaggtactgg

SEQ ID NO: 92786 - DNA, 26 bp, Homo sapiens
agccaggaggactttaaggtactggt

SEQ ID NO: 92787 - DNA, 26 bp, Homo sapiens
gccaggaggactttaaggtactggtt

SEQ ID NO: 92788 - DNA, 26 bp, Homo sapiens
ccaggaggactttaaggtactggttg

SEQ ID NO: 92789 - DNA, 26 bp, Homo sapiens
caggaggactttaaggtactggttgt

SEQ ID NO: 92790 - DNA, 26 bp, Homo sapiens
aggaggactttaaggtactggttgtc

SEQ ID NO: 92791 - DNA, 26 bp, Homo sapiens
ggaggactttaaggtactggttgtca

SEQ ID NO: 92792 - DNA, 26 bp, Homo sapiens
gaggactttaaggtactggttgtcag

SEQ ID NO: 92793 - DNA, 26 bp, Homo sapiens
aggactttaaggtactggttgtcagg

SEQ ID NO: 92794 - DNA, 26 bp, Homo sapiens
ggactttaaggtactggttgtcagga

SEQ ID NO: 92795 - DNA, 26 bp, Homo sapiens
gactttaaggtactggttgtcaggat

SEQ ID NO: 92796 - DNA, 26 bp, Homo sapiens
actttaaggtactggttgtcaggatt

SEQ ID NO: 92797 - DNA, 26 bp, Homo sapiens
ctttaaggtactggttgtcaggattc

SEQ ID NO: 92798 - DNA, 26 bp, Homo sapiens
tttaaggtactggttgtcaggattca

SEQ ID NO: 92799 - DNA, 26 bp, Homo sapiens
ttaaggtactggttgtcaggattcag

SEQ ID NO: 92800 - DNA, 26 bp, Homo sapiens
taaggtactggttgtcaggattcagc

SEQ ID NO: 92801 - DNA, 26 bp, Homo sapiens
aaggtactggttgtcaggattcagcc

SEQ ID NO: 92802 - DNA, 26 bp, Homo sapiens
aggtactggttgtcaggattcagccg

SEQ ID NO: 92803 - DNA, 26 bp, Homo sapiens
ggtactggttgtcaggattcagccga

SEQ ID NO: 92804 - DNA, 26 bp, Homo sapiens
gtactggttgtcaggattcagccgaa

SEQ ID NO: 92805 - DNA, 26 bp, Homo sapiens
tactggttgtcaggattcagccgaat

SEQ ID NO: 92806 - DNA, 26 bp, Homo sapiens
actggttgtcaggattcagccgaatg

SEQ ID NO: 92807 - DNA, 26 bp, Homo sapiens
ctggttgtcaggattcagccgaatgg

SEQ ID NO: 92808 - DNA, 26 bp, Homo sapiens
tggttgtcaggattcagccgaatggc

SEQ ID NO: 92809 - DNA, 26 bp, Homo sapiens
ggttgtcaggattcagccgaatggct

SEQ ID NO: 92810 - DNA, 26 bp, Homo sapiens
gttgtcaggattcagccgaatggctt

SEQ ID NO: 92811 - DNA, 26 bp, Homo sapiens
ttgtcaggattcagccgaatggcttg

SEQ ID NO: 92812 - DNA, 26 bp, Homo sapiens
tgtcaggattcagccgaatggcttgc

SEQ ID NO: 92813 - DNA, 26 bp, Homo sapiens
gtcaggattcagccgaatggcttgcc

SEQ ID NO: 92814 - DNA, 26 bp, Homo sapiens
tcaggattcagccgaatggcttgcct

SEQ ID NO: 92815 - DNA, 26 bp, Homo sapiens
caggattcagccgaatggcttgcctc

SEQ ID NO: 92816 - DNA, 26 bp, Homo sapiens
aggattcagccgaatggcttgcctca

SEQ ID NO: 92817 - DNA, 26 bp, Homo sapiens
ggattcagccgaatggcttgcctcag

SEQ ID NO: 92818 - DNA, 26 bp, Homo sapiens
gattcagccgaatggcttgcctcaga

SEQ ID NO: 92819 - DNA, 26 bp, Homo sapiens
attcagccgaatggcttgcctcagag

SEQ ID NO: 92820 - DNA, 26 bp, Homo sapiens
ttcagccgaatggcttgcctcagagg

SEQ ID NO: 92821 - DNA, 26 bp, Homo sapiens
tcagccgaatggcttgcctcagaggg

SEQ ID NO: 92822 - DNA, 26 bp, Homo sapiens
cagccgaatggcttgcctcagagggt

SEQ ID NO: 92823 - DNA, 26 bp, Homo sapiens
agccgaatggcttgcctcagagggtc

SEQ ID NO: 92824 - DNA, 26 bp, Homo sapiens
gccgaatggcttgcctcagagggtca

SEQ ID NO: 92825 - DNA, 26 bp, Homo sapiens
ccgaatggcttgcctcagagggtcaa

SEQ ID NO: 92826 - DNA, 26 bp, Homo sapiens
cgaatggcttgcctcagagggtcaat

SEQ ID NO: 92827 - DNA, 26 bp, Homo sapiens
gaatggcttgcctcagagggtcaatg

SEQ ID NO: 92828 - DNA, 26 bp, Homo sapiens
aatggcttgcctcagagggtcaatgg

SEQ ID NO: 92829 - DNA, 26 bp, Homo sapiens
atggcttgcctcagagggtcaatggc

SEQ ID NO: 92830 - DNA, 26 bp, Homo sapiens
tggcttgcctcagagggtcaatggcg

SEQ ID NO: 92831 - DNA, 26 bp, Homo sapiens
ggcttgcctcagagggtcaatggcgt

SEQ ID NO: 92832 - DNA, 26 bp, Homo sapiens
gcttgcctcagagggtcaatggcgtt

SEQ ID NO: 92833 - DNA, 26 bp, Homo sapiens
cttgcctcagagggtcaatggcgttc

SEQ ID NO: 92834 - DNA, 26 bp, Homo sapiens
ttgcctcagagggtcaatggcgttct

SEQ ID NO: 92835 - DNA, 26 bp, Homo sapiens
tgcctcagagggtcaatggcgttctg

SEQ ID NO: 92836 - DNA, 26 bp, Homo sapiens
gcctcagagggtcaatggcgttctga

SEQ ID NO: 92837 - DNA, 26 bp, Homo sapiens
cctcagagggtcaatggcgttctgag

SEQ ID NO: 92838 - DNA, 26 bp, Homo sapiens
ctcagagggtcaatggcgttctgaga

SEQ ID NO: 92839 - DNA, 26 bp, Homo sapiens
tcagagggtcaatggcgttctgagat

SEQ ID NO: 92840 - DNA, 26 bp, Homo sapiens
cagagggtcaatggcgttctgagatg

SEQ ID NO: 92841 - DNA, 26 bp, Homo sapiens
agagggtcaatggcgttctgagatgg

SEQ ID NO: 92842 - DNA, 26 bp, Homo sapiens
gagggtcaatggcgttctgagatggt

SEQ ID NO: 92843 - DNA, 26 bp, Homo sapiens
agggtcaatggcgttctgagatggtg

SEQ ID NO: 92844 - DNA, 26 bp, Homo sapiens
gggtcaatggcgttctgagatggtgg

SEQ ID NO: 92845 - DNA, 26 bp, Homo sapiens
ggtcaatggcgttctgagatggtggc

SEQ ID NO: 92846 - DNA, 26 bp, Homo sapiens
gtcaatggcgttctgagatggtggcc

SEQ ID NO: 92847 - DNA, 26 bp, Homo sapiens
tcaatggcgttctgagatggtggcca

SEQ ID NO: 92848 - DNA, 26 bp, Homo sapiens
caatggcgttctgagatggtggccag

SEQ ID NO: 92849 - DNA, 26 bp, Homo sapiens
aatggcgttctgagatggtggccagt

SEQ ID NO: 92850 - DNA, 26 bp, Homo sapiens
atggcgttctgagatggtggccagtt

SEQ ID NO: 92851 - DNA, 26 bp, Homo sapiens
tggcgttctgagatggtggccagttg

SEQ ID NO: 92852 - DNA, 26 bp, Homo sapiens
ggcgttctgagatggtggccagttgt

SEQ ID NO: 92853 - DNA, 26 bp, Homo sapiens
gcgttctgagatggtggccagttgtc

SEQ ID NO: 92854 - DNA, 26 bp, Homo sapiens
cgttctgagatggtggccagttgtcc

SEQ ID NO: 92855 - DNA, 26 bp, Homo sapiens
gttctgagatggtggccagttgtcca

SEQ ID NO: 92856 - DNA, 26 bp, Homo sapiens
ttctgagatggtggccagttgtccag

SEQ ID NO: 92857 - DNA, 26 bp, Homo sapiens
tctgagatggtggccagttgtccaga

SEQ ID NO: 92858 - DNA, 26 bp, Homo sapiens
ctgagatggtggccagttgtccagac

SEQ ID NO: 92859 - DNA, 26 bp, Homo sapiens
tgagatggtggccagttgtccagacg

SEQ ID NO: 92860 - DNA, 26 bp, Homo sapiens
gagatggtggccagttgtccagacgg

SEQ ID NO: 92861 - DNA, 26 bp, Homo sapiens
agatggtggccagttgtccagacggt

SEQ ID NO: 92862 - DNA, 26 bp, Homo sapiens
gatggtggccagttgtccagacggta

SEQ ID NO: 92863 - DNA, 26 bp, Homo sapiens
atggtggccagttgtccagacggtag

SEQ ID NO: 92864 - DNA, 26 bp, Homo sapiens
tggtggccagttgtccagacggtagc

SEQ ID NO: 92865 - DNA, 26 bp, Homo sapiens
ggtggccagttgtccagacggtagct

SEQ ID NO: 92866 - DNA, 26 bp, Homo sapiens
gtggccagttgtccagacggtagctt

SEQ ID NO: 92867 - DNA, 26 bp, Homo sapiens
tggccagttgtccagacggtagcttg

SEQ ID NO: 92868 - DNA, 26 bp, Homo sapiens
ggccagttgtccagacggtagcttgc

SEQ ID NO: 92869 - DNA, 26 bp, Homo sapiens
gccagttgtccagacggtagcttgct

SEQ ID NO: 92870 - DNA, 26 bp, Homo sapiens
ccagttgtccagacggtagcttgcta

SEQ ID NO: 92871 - DNA, 26 bp, Homo sapiens
cagttgtccagacggtagcttgctat

SEQ ID NO: 92872 - DNA, 26 bp, Homo sapiens
agttgtccagacggtagcttgctatt

SEQ ID NO: 92873 - DNA, 26 bp, Homo sapiens
gttgtccagacggtagcttgctattg

SEQ ID NO: 92874 - DNA, 26 bp, Homo sapiens
ttgtccagacggtagcttgctattgc

SEQ ID NO: 92875 - DNA, 26 bp, Homo sapiens
tgtccagacggtagcttgctattgcc

SEQ ID NO: 92876 - DNA, 26 bp, Homo sapiens
gtccagacggtagcttgctattgcca

SEQ ID NO: 92877 - DNA, 26 bp, Homo sapiens
tccagacggtagcttgctattgccag

SEQ ID NO: 92878 - DNA, 26 bp, Homo sapiens
ccagacggtagcttgctattgccagt

SEQ ID NO: 92879 - DNA, 26 bp, Homo sapiens
cagacggtagcttgctattgccagtc

SEQ ID NO: 92880 - DNA, 26 bp, Homo sapiens
agacggtagcttgctattgccagtcc

SEQ ID NO: 92881 - DNA, 26 bp, Homo sapiens
gacggtagcttgctattgccagtcca

SEQ ID NO: 92882 - DNA, 26 bp, Homo sapiens
acggtagcttgctattgccagtccag

SEQ ID NO: 92883 - DNA, 26 bp, Homo sapiens
cggtagcttgctattgccagtccaga

SEQ ID NO: 92884 - DNA, 26 bp, Homo sapiens
ggtagcttgctattgccagtccagag

SEQ ID NO: 92885 - DNA, 26 bp, Homo sapiens
gtagcttgctattgccagtccagagg

SEQ ID NO: 92886 - DNA, 26 bp, Homo sapiens
tagcttgctattgccagtccagaggt

SEQ ID NO: 92887 - DNA, 26 bp, Homo sapiens
agcttgctattgccagtccagaggtg

SEQ ID NO: 92888 - DNA, 26 bp, Homo sapiens
gcttgctattgccagtccagaggtga

SEQ ID NO: 92889 - DNA, 26 bp, Homo sapiens
cttgctattgccagtccagaggtgaa

SEQ ID NO: 92890 - DNA, 26 bp, Homo sapiens
ttgctattgccagtccagaggtgaat

SEQ ID NO: 92891 - DNA, 26 bp, Homo sapiens
tgctattgccagtccagaggtgaatt

SEQ ID NO: 92892 - DNA, 26 bp, Homo sapiens
gctattgccagtccagaggtgaattc

SEQ ID NO: 92893 - DNA, 26 bp, Homo sapiens
ctattgccagtccagaggtgaattct

SEQ ID NO: 92894 - DNA, 26 bp, Homo sapiens
tattgccagtccagaggtgaattctg

SEQ ID NO: 92895 - DNA, 26 bp, Homo sapiens
attgccagtccagaggtgaattctgg

SEQ ID NO: 92896 - DNA, 26 bp, Homo sapiens
ttgccagtccagaggtgaattctggg

SEQ ID NO: 92897 - DNA, 26 bp, Homo sapiens
tgccagtccagaggtgaattctgggt

SEQ ID NO: 92898 - DNA, 26 bp, Homo sapiens
gccagtccagaggtgaattctgggtt

SEQ ID NO: 92899 - DNA, 26 bp, Homo sapiens
ccagtccagaggtgaattctgggttc

SEQ ID NO: 92900 - DNA, 26 bp, Homo sapiens
cagtccagaggtgaattctgggttct

SEQ ID NO: 92901 - DNA, 26 bp, Homo sapiens
agtccagaggtgaattctgggttctt

SEQ ID NO: 92902 - DNA, 26 bp, Homo sapiens
gtccagaggtgaattctgggttcttt

SEQ ID NO: 92903 - DNA, 26 bp, Homo sapiens
tccagaggtgaattctgggttctttg

SEQ ID NO: 92904 - DNA, 26 bp, Homo sapiens
ccagaggtgaattctgggttctttgg

SEQ ID NO: 92905 - DNA, 26 bp, Homo sapiens
cagaggtgaattctgggttctttggc

SEQ ID NO: 92906 - DNA, 26 bp, Homo sapiens
agaggtgaattctgggttctttggct

SEQ ID NO: 92907 - DNA, 26 bp, Homo sapiens
gaggtgaattctgggttctttggctt

SEQ ID NO: 92908 - DNA, 26 bp, Homo sapiens
aggtgaattctgggttctttggcttc

SEQ ID NO: 92909 - DNA, 26 bp, Homo sapiens
ggtgaattctgggttctttggcttct

SEQ ID NO: 92910 - DNA, 26 bp, Homo sapiens
gtgaattctgggttctttggcttctt

SEQ ID NO: 92911 - DNA, 26 bp, Homo sapiens
tgaattctgggttctttggcttcttt

SEQ ID NO: 92912 - DNA, 26 bp, Homo sapiens
gaattctgggttctttggcttctttt

SEQ ID NO: 92913 - DNA, 26 bp, Homo sapiens
aattctgggttctttggcttcttttc

SEQ ID NO: 92914 - DNA, 26 bp, Homo sapiens
attctgggttctttggcttcttttcc

SEQ ID NO: 92915 - DNA, 26 bp, Homo sapiens
ttctgggttctttggcttcttttcca

SEQ ID NO: 92916 - DNA, 26 bp, Homo sapiens
tctgggttctttggcttcttttccag

SEQ ID NO: 92917 - DNA, 26 bp, Homo sapiens
ctgggttctttggcttcttttccaga

SEQ ID NO: 92918 - DNA, 26 bp, Homo sapiens
tgggttctttggcttcttttccagag

SEQ ID NO: 92919 - DNA, 26 bp, Homo sapiens
gggttctttggcttcttttccagagc

SEQ ID NO: 92920 - DNA, 26 bp, Homo sapiens
ggttctttggcttcttttccagagcc

SEQ ID NO: 92921 - DNA, 26 bp, Homo sapiens
gttctttggcttcttttccagagcct

SEQ ID NO: 92922 - DNA, 26 bp, Homo sapiens
ttctttggcttcttttccagagcctt

SEQ ID NO: 92923 - DNA, 26 bp, Homo sapiens
tctttggcttcttttccagagccttc

SEQ ID NO: 92924 - DNA, 26 bp, Homo sapiens
ctttggcttcttttccagagccttct

SEQ ID NO: 92925 - DNA, 26 bp, Homo sapiens
tttggcttcttttccagagccttctc

SEQ ID NO: 92926 - DNA, 26 bp, Homo sapiens
ttggcttcttttccagagccttctca

SEQ ID NO: 92927 - DNA, 26 bp, Homo sapiens
tggcttcttttccagagccttctcaa

SEQ ID NO: 92928 - DNA, 26 bp, Homo sapiens
ggcttcttttccagagccttctcaaa

SEQ ID NO: 92929 - DNA, 26 bp, Homo sapiens
gcttcttttccagagccttctcaaag

SEQ ID NO: 92930 - DNA, 26 bp, Homo sapiens
cttcttttccagagccttctcaaagc

SEQ ID NO: 92931 - DNA, 26 bp, Homo sapiens
ttcttttccagagccttctcaaagca

SEQ ID NO: 92932 - DNA, 26 bp, Homo sapiens
tcttttccagagccttctcaaagcac

SEQ ID NO: 92933 - DNA, 26 bp, Homo sapiens
cttttccagagccttctcaaagcaca

SEQ ID NO: 92934 - DNA, 26 bp, Homo sapiens
ttttccagagccttctcaaagcacac

SEQ ID NO: 92935 - DNA, 26 bp, Homo sapiens
tttccagagccttctcaaagcacacc

SEQ ID NO: 92936 - DNA, 26 bp, Homo sapiens
ttccagagccttctcaaagcacacct

SEQ ID NO: 92937 - DNA, 26 bp, Homo sapiens
tccagagccttctcaaagcacacctt

SEQ ID NO: 92938 - DNA, 26 bp, Homo sapiens
ccagagccttctcaaagcacaccttc

SEQ ID NO: 92939 - DNA, 26 bp, Homo sapiens
cagagccttctcaaagcacaccttcg

SEQ ID NO: 92940 - DNA, 26 bp, Homo sapiens
agagccttctcaaagcacaccttcgc

SEQ ID NO: 92941 - DNA, 26 bp, Homo sapiens
gagccttctcaaagcacaccttcgct

SEQ ID NO: 92942 - DNA, 26 bp, Homo sapiens
agccttctcaaagcacaccttcgctc

SEQ ID NO: 92943 - DNA, 26 bp, Homo sapiens
gccttctcaaagcacaccttcgctct

SEQ ID NO: 92944 - DNA, 26 bp, Homo sapiens
ccttctcaaagcacaccttcgctctt

SEQ ID NO: 92945 - DNA, 26 bp, Homo sapiens
cttctcaaagcacaccttcgctcttt

SEQ ID NO: 92946 - DNA, 26 bp, Homo sapiens
ttctcaaagcacaccttcgctctttc

SEQ ID NO: 92947 - DNA, 26 bp, Homo sapiens
tctcaaagcacaccttcgctctttca

SEQ ID NO: 92948 - DNA, 26 bp, Homo sapiens
ctcaaagcacaccttcgctctttcat

SEQ ID NO: 92949 - DNA, 26 bp, Homo sapiens
tcaaagcacaccttcgctctttcatt

SEQ ID NO: 92950 - DNA, 26 bp, Homo sapiens
caaagcacaccttcgctctttcattt

SEQ ID NO: 92951 - DNA, 26 bp, Homo sapiens
aaagcacaccttcgctctttcatttt

SEQ ID NO: 92952 - DNA, 26 bp, Homo sapiens
aagcacaccttcgctctttcattttg

SEQ ID NO: 92953 - DNA, 26 bp, Homo sapiens
agcacaccttcgctctttcattttgg

SEQ ID NO: 92954 - DNA, 26 bp, Homo sapiens
gcacaccttcgctctttcattttggt

SEQ ID NO: 92955 - DNA, 26 bp, Homo sapiens
cacaccttcgctctttcattttggtt

SEQ ID NO: 92956 - DNA, 26 bp, Homo sapiens
acaccttcgctctttcattttggttt

SEQ ID NO: 92957 - DNA, 26 bp, Homo sapiens
caccttcgctctttcattttggtttc

SEQ ID NO: 92958 - DNA, 26 bp, Homo sapiens
accttcgctctttcattttggtttcc

SEQ ID NO: 92959 - DNA, 26 bp, Homo sapiens
ccttcgctctttcattttggtttcct

SEQ ID NO: 92960 - DNA, 26 bp, Homo sapiens
cttcgctctttcattttggtttcctc

SEQ ID NO: 92961 - DNA, 26 bp, Homo sapiens
ttcgctctttcattttggtttcctcc

SEQ ID NO: 92962 - DNA, 26 bp, Homo sapiens
tcgctctttcattttggtttcctcca

SEQ ID NO: 92963 - DNA, 26 bp, Homo sapiens
cgctctttcattttggtttcctccac

SEQ ID NO: 92964 - DNA, 26 bp, Homo sapiens
gctctttcattttggtttcctccaca

SEQ ID NO: 92965 - DNA, 26 bp, Homo sapiens
ctctttcattttggtttcctccacac

SEQ ID NO: 92966 - DNA, 26 bp, Homo sapiens
tctttcattttggtttcctccacact

SEQ ID NO: 92967 - DNA, 26 bp, Homo sapiens
ctttcattttggtttcctccacactt

SEQ ID NO: 92968 - DNA, 26 bp, Homo sapiens
tttcattttggtttcctccacacttt

SEQ ID NO: 92969 - DNA, 26 bp, Homo sapiens
ttcattttggtttcctccacacttta

SEQ ID NO: 92970 - DNA, 26 bp, Homo sapiens
tcattttggtttcctccacactttaa

SEQ ID NO: 92971 - DNA, 26 bp, Homo sapiens
cattttggtttcctccacactttaac

SEQ ID NO: 92972 - DNA, 26 bp, Homo sapiens
attttggtttcctccacactttaacc

SEQ ID NO: 92973 - DNA, 26 bp, Homo sapiens
ttttggtttcctccacactttaaccg

SEQ ID NO: 92974 - DNA, 26 bp, Homo sapiens
tttggtttcctccacactttaaccgt

SEQ ID NO: 92975 - DNA, 26 bp, Homo sapiens
ttggtttcctccacactttaaccgtg

SEQ ID NO: 92976 - DNA, 26 bp, Homo sapiens
tggtttcctccacactttaaccgtgt

SEQ ID NO: 92977 - DNA, 26 bp, Homo sapiens
ggtttcctccacactttaaccgtgtc

SEQ ID NO: 92978 - DNA, 26 bp, Homo sapiens
gtttcctccacactttaaccgtgtcc

SEQ ID NO: 92979 - DNA, 26 bp, Homo sapiens
tttcctccacactttaaccgtgtcca

SEQ ID NO: 92980 - DNA, 26 bp, Homo sapiens
ttcctccacactttaaccgtgtccac

SEQ ID NO: 92981 - DNA, 26 bp, Homo sapiens
tcctccacactttaaccgtgtccacc

SEQ ID NO: 92982 - DNA, 26 bp, Homo sapiens
cctccacactttaaccgtgtccaccc

SEQ ID NO: 92983 - DNA, 26 bp, Homo sapiens
ctccacactttaaccgtgtccaccct

SEQ ID NO: 92984 - DNA, 26 bp, Homo sapiens
tccacactttaaccgtgtccaccctt

SEQ ID NO: 92985 - DNA, 26 bp, Homo sapiens
ccacactttaaccgtgtccacccttc

SEQ ID NO: 92986 - DNA, 26 bp, Homo sapiens
cacactttaaccgtgtccacccttcc

SEQ ID NO: 92987 - DNA, 26 bp, Homo sapiens
acactttaaccgtgtccacccttcct

SEQ ID NO: 92988 - DNA, 26 bp, Homo sapiens
cactttaaccgtgtccacccttcctc

SEQ ID NO: 92989 - DNA, 26 bp, Homo sapiens
actttaaccgtgtccacccttcctca

SEQ ID NO: 92990 - DNA, 26 bp, Homo sapiens
ctttaaccgtgtccacccttcctcac

SEQ ID NO: 92991 - DNA, 26 bp, Homo sapiens
tttaaccgtgtccacccttcctcaca

SEQ ID NO: 92992 - DNA, 26 bp, Homo sapiens
ttaaccgtgtccacccttcctcacag

SEQ ID NO: 92993 - DNA, 26 bp, Homo sapiens
taaccgtgtccacccttcctcacagt

SEQ ID NO: 92994 - DNA, 26 bp, Homo sapiens
aaccgtgtccacccttcctcacagtc

SEQ ID NO: 92995 - DNA, 26 bp, Homo sapiens
accgtgtccacccttcctcacagtca

SEQ ID NO: 92996 - DNA, 26 bp, Homo sapiens
ccgtgtccacccttcctcacagtcaa

SEQ ID NO: 92997 - DNA, 26 bp, Homo sapiens
cgtgtccacccttcctcacagtcaag

SEQ ID NO: 92998 - DNA, 26 bp, Homo sapiens
gtgtccacccttcctcacagtcaagc

SEQ ID NO: 92999 - DNA, 26 bp, Homo sapiens
tgtccacccttcctcacagtcaagct

SEQ ID NO: 93000 - DNA, 26 bp, Homo sapiens
gtccacccttcctcacagtcaagctc

SEQ ID NO: 93001 - DNA, 26 bp, Homo sapiens
tccacccttcctcacagtcaagctct

SEQ ID NO: 93002 - DNA, 26 bp, Homo sapiens
ccacccttcctcacagtcaagctctg

SEQ ID NO: 93003 - DNA, 26 bp, Homo sapiens
cacccttcctcacagtcaagctctgg

SEQ ID NO: 93004 - DNA, 26 bp, Homo sapiens
acccttcctcacagtcaagctctgga

SEQ ID NO: 93005 - DNA, 26 bp, Homo sapiens
cccttcctcacagtcaagctctggac

SEQ ID NO: 93006 - DNA, 26 bp, Homo sapiens
ccttcctcacagtcaagctctggact

SEQ ID NO: 93007 - DNA, 26 bp, Homo sapiens
cttcctcacagtcaagctctggactc

SEQ ID NO: 93008 - DNA, 26 bp, Homo sapiens
ttcctcacagtcaagctctggactct

SEQ ID NO: 93009 - DNA, 26 bp, Homo sapiens
tcctcacagtcaagctctggactctc

SEQ ID NO: 93010 - DNA, 26 bp, Homo sapiens
cctcacagtcaagctctggactctca

SEQ ID NO: 93011 - DNA, 26 bp, Homo sapiens
ctcacagtcaagctctggactctcaa

SEQ ID NO: 93012 - DNA, 26 bp, Homo sapiens
tcacagtcaagctctggactctcaat

SEQ ID NO: 93013 - DNA, 26 bp, Homo sapiens
cacagtcaagctctggactctcaatt

SEQ ID NO: 93014 - DNA, 26 bp, Homo sapiens
acagtcaagctctggactctcaattc

SEQ ID NO: 93015 - DNA, 26 bp, Homo sapiens
cagtcaagctctggactctcaattct

SEQ ID NO: 93016 - DNA, 26 bp, Homo sapiens
agtcaagctctggactctcaattcta

SEQ ID NO: 93017 - DNA, 26 bp, Homo sapiens
gtcaagctctggactctcaattctat

SEQ ID NO: 93018 - DNA, 26 bp, Homo sapiens
tcaagctctggactctcaattctata

SEQ ID NO: 93019 - DNA, 26 bp, Homo sapiens
caagctctggactctcaattctatag

SEQ ID NO: 93020 - DNA, 26 bp, Homo sapiens
aagctctggactctcaattctatagg

SEQ ID NO: 93021 - DNA, 26 bp, Homo sapiens
agctctggactctcaattctataggg

SEQ ID NO: 93022 - DNA, 26 bp, Homo sapiens
gctctggactctcaattctataggga

SEQ ID NO: 93023 - DNA, 26 bp, Homo sapiens
ctctggactctcaattctatagggac

SEQ ID NO: 93024 - DNA, 26 bp, Homo sapiens
tctggactctcaattctatagggact

SEQ ID NO: 93025 - DNA, 26 bp, Homo sapiens
ctggactctcaattctatagggactg

SEQ ID NO: 93026 - DNA, 26 bp, Homo sapiens
tggactctcaattctatagggactgg

SEQ ID NO: 93027 - DNA, 26 bp, Homo sapiens
ggactctcaattctatagggactgga

SEQ ID NO: 93028 - DNA, 26 bp, Homo sapiens
gactctcaattctatagggactggaa

SEQ ID NO: 93029 - DNA, 26 bp, Homo sapiens
actctcaattctatagggactggaaa

SEQ ID NO: 93030 - DNA, 26 bp, Homo sapiens
ctctcaattctatagggactggaaaa

SEQ ID NO: 93031 - DNA, 26 bp, Homo sapiens
tctcaattctatagggactggaaaac

SEQ ID NO: 93032 - DNA, 26 bp, Homo sapiens
ctcaattctatagggactggaaaact

SEQ ID NO: 93033 - DNA, 26 bp, Homo sapiens
tcaattctatagggactggaaaactt

SEQ ID NO: 93034 - DNA, 26 bp, Homo sapiens
caattctatagggactggaaaacttc

SEQ ID NO: 93035 - DNA, 26 bp, Homo sapiens
aattctatagggactggaaaacttct

SEQ ID NO: 93036 - DNA, 26 bp, Homo sapiens
attctatagggactggaaaacttctc

SEQ ID NO: 93037 - DNA, 26 bp, Homo sapiens
ttctatagggactggaaaacttctca

SEQ ID NO: 93038 - DNA, 26 bp, Homo sapiens
tctatagggactggaaaacttctcac

SEQ ID NO: 93039 - DNA, 26 bp, Homo sapiens
ctatagggactggaaaacttctcaca

SEQ ID NO: 93040 - DNA, 26 bp, Homo sapiens
tatagggactggaaaacttctcacag

SEQ ID NO: 93041 - DNA, 26 bp, Homo sapiens
atagggactggaaaacttctcacaga

SEQ ID NO: 93042 - DNA, 26 bp, Homo sapiens
tagggactggaaaacttctcacagac

SEQ ID NO: 93043 - DNA, 26 bp, Homo sapiens
agggactggaaaacttctcacagaca

SEQ ID NO: 93044 - DNA, 26 bp, Homo sapiens
gggactggaaaacttctcacagacat

SEQ ID NO: 93045 - DNA, 26 bp, Homo sapiens
ggactggaaaacttctcacagacatg

SEQ ID NO: 93046 - DNA, 26 bp, Homo sapiens
gactggaaaacttctcacagacatgt

SEQ ID NO: 93047 - DNA, 26 bp, Homo sapiens
actggaaaacttctcacagacatgtt

SEQ ID NO: 93048 - DNA, 26 bp, Homo sapiens
ctggaaaacttctcacagacatgttt

SEQ ID NO: 93049 - DNA, 26 bp, Homo sapiens
tggaaaacttctcacagacatgtttc

SEQ ID NO: 93050 - DNA, 26 bp, Homo sapiens
ggaaaacttctcacagacatgtttca

SEQ ID NO: 93051 - DNA, 26 bp, Homo sapiens
gaaaacttctcacagacatgtttcac

SEQ ID NO: 93052 - DNA, 26 bp, Homo sapiens
aaaacttctcacagacatgtttcacc

SEQ ID NO: 93053 - DNA, 26 bp, Homo sapiens
aaacttctcacagacatgtttcacct

SEQ ID NO: 93054 - DNA, 26 bp, Homo sapiens
aacttctcacagacatgtttcacctt

SEQ ID NO: 93055 - DNA, 26 bp, Homo sapiens
acttctcacagacatgtttcaccttg

SEQ ID NO: 93056 - DNA, 26 bp, Homo sapiens
cttctcacagacatgtttcaccttgt

SEQ ID NO: 93057 - DNA, 26 bp, Homo sapiens
ttctcacagacatgtttcaccttgtc

SEQ ID NO: 93058 - DNA, 26 bp, Homo sapiens
tctcacagacatgtttcaccttgtct

SEQ ID NO: 93059 - DNA, 26 bp, Homo sapiens
ctcacagacatgtttcaccttgtcta

SEQ ID NO: 93060 - DNA, 26 bp, Homo sapiens
tcacagacatgtttcaccttgtctac

SEQ ID NO: 93061 - DNA, 26 bp, Homo sapiens
cacagacatgtttcaccttgtctaca

SEQ ID NO: 93062 - DNA, 26 bp, Homo sapiens
acagacatgtttcaccttgtctacat

SEQ ID NO: 93063 - DNA, 26 bp, Homo sapiens
cagacatgtttcaccttgtctacata

SEQ ID NO: 93064 - DNA, 26 bp, Homo sapiens
agacatgtttcaccttgtctacataa

SEQ ID NO: 93065 - DNA, 26 bp, Homo sapiens
gacatgtttcaccttgtctacataaa

SEQ ID NO: 93066 - DNA, 26 bp, Homo sapiens
acatgtttcaccttgtctacataaat

SEQ ID NO: 93067 - DNA, 26 bp, Homo sapiens
catgtttcaccttgtctacataaatc

SEQ ID NO: 93068 - DNA, 26 bp, Homo sapiens
atgtttcaccttgtctacataaatct

SEQ ID NO: 93069 - DNA, 26 bp, Homo sapiens
tgtttcaccttgtctacataaatctg

SEQ ID NO: 93070 - DNA, 26 bp, Homo sapiens
gtttcaccttgtctacataaatctga

SEQ ID NO: 93071 - DNA, 26 bp, Homo sapiens
tttcaccttgtctacataaatctgaa

SEQ ID NO: 93072 - DNA, 26 bp, Homo sapiens
ttcaccttgtctacataaatctgaac

SEQ ID NO: 93073 - DNA, 26 bp, Homo sapiens
tcaccttgtctacataaatctgaacg

SEQ ID NO: 93074 - DNA, 26 bp, Homo sapiens
caccttgtctacataaatctgaacgt

SEQ ID NO: 93075 - DNA, 26 bp, Homo sapiens
accttgtctacataaatctgaacgtc

SEQ ID NO: 93076 - DNA, 26 bp, Homo sapiens
ccttgtctacataaatctgaacgtct

SEQ ID NO: 93077 - DNA, 26 bp, Homo sapiens
cttgtctacataaatctgaacgtctg

SEQ ID NO: 93078 - DNA, 26 bp, Homo sapiens
ttgtctacataaatctgaacgtctga

SEQ ID NO: 93079 - DNA, 26 bp, Homo sapiens
tgtctacataaatctgaacgtctgag

SEQ ID NO: 93080 - DNA, 26 bp, Homo sapiens
gtctacataaatctgaacgtctgaga

SEQ ID NO: 93081 - DNA, 26 bp, Homo sapiens
tctacataaatctgaacgtctgagag

SEQ ID NO: 93082 - DNA, 26 bp, Homo sapiens
ctacataaatctgaacgtctgagagt

SEQ ID NO: 93083 - DNA, 26 bp, Homo sapiens
tacataaatctgaacgtctgagagtc

SEQ ID NO: 93084 - DNA, 26 bp, Homo sapiens
acataaatctgaacgtctgagagtcg

SEQ ID NO: 93085 - DNA, 26 bp, Homo sapiens
cataaatctgaacgtctgagagtcgg

SEQ ID NO: 93086 - DNA, 26 bp, Homo sapiens
ataaatctgaacgtctgagagtcggc

SEQ ID NO: 93087 - DNA, 26 bp, Homo sapiens
taaatctgaacgtctgagagtcggcc

SEQ ID NO: 93088 - DNA, 26 bp, Homo sapiens
aaatctgaacgtctgagagtcggccc

SEQ ID NO: 93089 - DNA, 26 bp, Homo sapiens
aatctgaacgtctgagagtcggccca

SEQ ID NO: 93090 - DNA, 26 bp, Homo sapiens
atctgaacgtctgagagtcggcccat

SEQ ID NO: 93091 - DNA, 26 bp, Homo sapiens
tctgaacgtctgagagtcggcccatg

SEQ ID NO: 93092 - DNA, 26 bp, Homo sapiens
ctgaacgtctgagagtcggcccatgt

SEQ ID NO: 93093 - DNA, 26 bp, Homo sapiens
tgaacgtctgagagtcggcccatgtg

SEQ ID NO: 93094 - DNA, 26 bp, Homo sapiens
gaacgtctgagagtcggcccatgtga

SEQ ID NO: 93095 - DNA, 26 bp, Homo sapiens
aacgtctgagagtcggcccatgtgat

SEQ ID NO: 93096 - DNA, 26 bp, Homo sapiens
acgtctgagagtcggcccatgtgata

SEQ ID NO: 93097 - DNA, 26 bp, Homo sapiens
cgtctgagagtcggcccatgtgatag

SEQ ID NO: 93098 - DNA, 26 bp, Homo sapiens
gtctgagagtcggcccatgtgatagt

SEQ ID NO: 93099 - DNA, 26 bp, Homo sapiens
tctgagagtcggcccatgtgatagta

SEQ ID NO: 93100 - DNA, 26 bp, Homo sapiens
ctgagagtcggcccatgtgatagtag

SEQ ID NO: 93101 - DNA, 26 bp, Homo sapiens
tgagagtcggcccatgtgatagtaga

SEQ ID NO: 93102 - DNA, 26 bp, Homo sapiens
gagagtcggcccatgtgatagtagac

SEQ ID NO: 93103 - DNA, 26 bp, Homo sapiens
agagtcggcccatgtgatagtagacc

SEQ ID NO: 93104 - DNA, 26 bp, Homo sapiens
gagtcggcccatgtgatagtagaccc

SEQ ID NO: 93105 - DNA, 26 bp, Homo sapiens
agtcggcccatgtgatagtagaccca

SEQ ID NO: 93106 - DNA, 26 bp, Homo sapiens
gtcggcccatgtgatagtagacccag

SEQ ID NO: 93107 - DNA, 26 bp, Homo sapiens
tcggcccatgtgatagtagacccagg

SEQ ID NO: 93108 - DNA, 26 bp, Homo sapiens
cggcccatgtgatagtagacccaggc

SEQ ID NO: 93109 - DNA, 26 bp, Homo sapiens
ggcccatgtgatagtagacccaggca

SEQ ID NO: 93110 - DNA, 26 bp, Homo sapiens
gcccatgtgatagtagacccaggcat

SEQ ID NO: 93111 - DNA, 26 bp, Homo sapiens
cccatgtgatagtagacccaggcata

SEQ ID NO: 93112 - DNA, 26 bp, Homo sapiens
ccatgtgatagtagacccaggcatag

SEQ ID NO: 93113 - DNA, 26 bp, Homo sapiens
catgtgatagtagacccaggcatagt

SEQ ID NO: 93114 - DNA, 26 bp, Homo sapiens
atgtgatagtagacccaggcatagtt

SEQ ID NO: 93115 - DNA, 26 bp, Homo sapiens
tgtgatagtagacccaggcatagttt

SEQ ID NO: 93116 - DNA, 26 bp, Homo sapiens
gtgatagtagacccaggcatagtttc

SEQ ID NO: 93117 - DNA, 26 bp, Homo sapiens
tgatagtagacccaggcatagtttcc

SEQ ID NO: 93118 - DNA, 26 bp, Homo sapiens
gatagtagacccaggcatagtttccc

SEQ ID NO: 93119 - DNA, 26 bp, Homo sapiens
atagtagacccaggcatagtttcccc

SEQ ID NO: 93120 - DNA, 26 bp, Homo sapiens
tagtagacccaggcatagtttcccca

SEQ ID NO: 93121 - DNA, 26 bp, Homo sapiens
agtagacccaggcatagtttccccag

SEQ ID NO: 93122 - DNA, 26 bp, Homo sapiens
gtagacccaggcatagtttccccagg

SEQ ID NO: 93123 - DNA, 26 bp, Homo sapiens
tagacccaggcatagtttccccaggt

SEQ ID NO: 93124 - DNA, 26 bp, Homo sapiens
agacccaggcatagtttccccaggtg

SEQ ID NO: 93125 - DNA, 26 bp, Homo sapiens
gacccaggcatagtttccccaggtga

SEQ ID NO: 93126 - DNA, 26 bp, Homo sapiens
acccaggcatagtttccccaggtgac

SEQ ID NO: 93127 - DNA, 26 bp, Homo sapiens
cccaggcatagtttccccaggtgacc

SEQ ID NO: 93128 - DNA, 26 bp, Homo sapiens
ccaggcatagtttccccaggtgacca

SEQ ID NO: 93129 - DNA, 26 bp, Homo sapiens
caggcatagtttccccaggtgaccag

SEQ ID NO: 93130 - DNA, 26 bp, Homo sapiens
aggcatagtttccccaggtgaccaga

SEQ ID NO: 93131 - DNA, 26 bp, Homo sapiens
ggcatagtttccccaggtgaccagac

SEQ ID NO: 93132 - DNA, 26 bp, Homo sapiens
gcatagtttccccaggtgaccagact

SEQ ID NO: 93133 - DNA, 26 bp, Homo sapiens
catagtttccccaggtgaccagactt

SEQ ID NO: 93134 - DNA, 26 bp, Homo sapiens
atagtttccccaggtgaccagacttc

SEQ ID NO: 93135 - DNA, 26 bp, Homo sapiens
tagtttccccaggtgaccagacttct

SEQ ID NO: 93136 - DNA, 26 bp, Homo sapiens
agtttccccaggtgaccagacttctg

SEQ ID NO: 93137 - DNA, 26 bp, Homo sapiens
gtttccccaggtgaccagacttctga

SEQ ID NO: 93138 - DNA, 26 bp, Homo sapiens
tttccccaggtgaccagacttctgat

SEQ ID NO: 93139 - DNA, 26 bp, Homo sapiens
ttccccaggtgaccagacttctgatt

SEQ ID NO: 93140 - DNA, 26 bp, Homo sapiens
tccccaggtgaccagacttctgattt

SEQ ID NO: 93141 - DNA, 26 bp, Homo sapiens
ccccaggtgaccagacttctgatttc

SEQ ID NO: 93142 - DNA, 26 bp, Homo sapiens
cccaggtgaccagacttctgatttct

SEQ ID NO: 93143 - DNA, 26 bp, Homo sapiens
ccaggtgaccagacttctgatttctg

SEQ ID NO: 93144 - DNA, 26 bp, Homo sapiens
caggtgaccagacttctgatttctgc

SEQ ID NO: 93145 - DNA, 26 bp, Homo sapiens
aggtgaccagacttctgatttctgcc

SEQ ID NO: 93146 - DNA, 26 bp, Homo sapiens
ggtgaccagacttctgatttctgcct

SEQ ID NO: 93147 - DNA, 26 bp, Homo sapiens
gtgaccagacttctgatttctgcctg

SEQ ID NO: 93148 - DNA, 26 bp, Homo sapiens
tgaccagacttctgatttctgcctgg

SEQ ID NO: 93149 - DNA, 26 bp, Homo sapiens
gaccagacttctgatttctgcctggt

SEQ ID NO: 93150 - DNA, 26 bp, Homo sapiens
accagacttctgatttctgcctggtc

SEQ ID NO: 93151 - DNA, 26 bp, Homo sapiens
ccagacttctgatttctgcctggtca

SEQ ID NO: 93152 - DNA, 26 bp, Homo sapiens
cagacttctgatttctgcctggtcag

SEQ ID NO: 93153 - DNA, 26 bp, Homo sapiens
agacttctgatttctgcctggtcagc

SEQ ID NO: 93154 - DNA, 26 bp, Homo sapiens
gacttctgatttctgcctggtcagca

SEQ ID NO: 93155 - DNA, 26 bp, Homo sapiens
acttctgatttctgcctggtcagcat

SEQ ID NO: 93156 - DNA, 26 bp, Homo sapiens
cttctgatttctgcctggtcagcatg

SEQ ID NO: 93157 - DNA, 26 bp, Homo sapiens
ttctgatttctgcctggtcagcatgc

SEQ ID NO: 93158 - DNA, 26 bp, Homo sapiens
tctgatttctgcctggtcagcatgct

SEQ ID NO: 93159 - DNA, 26 bp, Homo sapiens
ctgatttctgcctggtcagcatgctc

SEQ ID NO: 93160 - DNA, 26 bp, Homo sapiens
tgatttctgcctggtcagcatgctct

SEQ ID NO: 93161 - DNA, 26 bp, Homo sapiens
gatttctgcctggtcagcatgctctt

SEQ ID NO: 93162 - DNA, 26 bp, Homo sapiens
atttctgcctggtcagcatgctcttg

SEQ ID NO: 93163 - DNA, 26 bp, Homo sapiens
tttctgcctggtcagcatgctcttgc

SEQ ID NO: 93164 - DNA, 26 bp, Homo sapiens
ttctgcctggtcagcatgctcttgct

SEQ ID NO: 93165 - DNA, 26 bp, Homo sapiens
tctgcctggtcagcatgctcttgctg

SEQ ID NO: 93166 - DNA, 26 bp, Homo sapiens
ctgcctggtcagcatgctcttgctgg

SEQ ID NO: 93167 - DNA, 26 bp, Homo sapiens
tgcctggtcagcatgctcttgctgga

SEQ ID NO: 93168 - DNA, 26 bp, Homo sapiens
gcctggtcagcatgctcttgctggat

SEQ ID NO: 93169 - DNA, 26 bp, Homo sapiens
cctggtcagcatgctcttgctggatt

SEQ ID NO: 93170 - DNA, 26 bp, Homo sapiens
ctggtcagcatgctcttgctggatta

SEQ ID NO: 93171 - DNA, 26 bp, Homo sapiens
tggtcagcatgctcttgctggattaa

SEQ ID NO: 93172 - DNA, 26 bp, Homo sapiens
ggtcagcatgctcttgctggattaac

SEQ ID NO: 93173 - DNA, 26 bp, Homo sapiens
gtcagcatgctcttgctggattaact

SEQ ID NO: 93174 - DNA, 26 bp, Homo sapiens
tcagcatgctcttgctggattaactc

SEQ ID NO: 93175 - DNA, 26 bp, Homo sapiens
cagcatgctcttgctggattaactct

SEQ ID NO: 93176 - DNA, 26 bp, Homo sapiens
agcatgctcttgctggattaactctt

SEQ ID NO: 93177 - DNA, 26 bp, Homo sapiens
gcatgctcttgctggattaactcttc

SEQ ID NO: 93178 - DNA, 26 bp, Homo sapiens
catgctcttgctggattaactcttca

SEQ ID NO: 93179 - DNA, 26 bp, Homo sapiens
atgctcttgctggattaactcttcag

SEQ ID NO: 93180 - DNA, 26 bp, Homo sapiens
tgctcttgctggattaactcttcagc

SEQ ID NO: 93181 - DNA, 26 bp, Homo sapiens
gctcttgctggattaactcttcagct

SEQ ID NO: 93182 - DNA, 26 bp, Homo sapiens
ctcttgctggattaactcttcagctt

SEQ ID NO: 93183 - DNA, 26 bp, Homo sapiens
tcttgctggattaactcttcagcttt

SEQ ID NO: 93184 - DNA, 26 bp, Homo sapiens
cttgctggattaactcttcagcttta

SEQ ID NO: 93185 - DNA, 26 bp, Homo sapiens
ttgctggattaactcttcagctttac

SEQ ID NO: 93186 - DNA, 26 bp, Homo sapiens
tgctggattaactcttcagctttacg

SEQ ID NO: 93187 - DNA, 26 bp, Homo sapiens
gctggattaactcttcagctttacgt

SEQ ID NO: 93188 - DNA, 26 bp, Homo sapiens
ctggattaactcttcagctttacgta

SEQ ID NO: 93189 - DNA, 26 bp, Homo sapiens
tggattaactcttcagctttacgtaa

SEQ ID NO: 93190 - DNA, 26 bp, Homo sapiens
ggattaactcttcagctttacgtaag

SEQ ID NO: 93191 - DNA, 26 bp, Homo sapiens
gattaactcttcagctttacgtaagc

SEQ ID NO: 93192 - DNA, 26 bp, Homo sapiens
attaactcttcagctttacgtaagca

SEQ ID NO: 93193 - DNA, 26 bp, Homo sapiens
ttaactcttcagctttacgtaagcat

SEQ ID NO: 93194 - DNA, 26 bp, Homo sapiens
taactcttcagctttacgtaagcatt

SEQ ID NO: 93195 - DNA, 26 bp, Homo sapiens
aactcttcagctttacgtaagcattc

SEQ ID NO: 93196 - DNA, 26 bp, Homo sapiens
actcttcagctttacgtaagcattcc

SEQ ID NO: 93197 - DNA, 26 bp, Homo sapiens
ctcttcagctttacgtaagcattcca

SEQ ID NO: 93198 - DNA, 26 bp, Homo sapiens
tcttcagctttacgtaagcattccag

SEQ ID NO: 93199 - DNA, 26 bp, Homo sapiens
cttcagctttacgtaagcattccagg

SEQ ID NO: 93200 - DNA, 26 bp, Homo sapiens
ttcagctttacgtaagcattccaggg

SEQ ID NO: 93201 - DNA, 26 bp, Homo sapiens
tcagctttacgtaagcattccagggc

SEQ ID NO: 93202 - DNA, 26 bp, Homo sapiens
cagctttacgtaagcattccagggct

SEQ ID NO: 93203 - DNA, 26 bp, Homo sapiens
agctttacgtaagcattccagggctg

SEQ ID NO: 93204 - DNA, 26 bp, Homo sapiens
gctttacgtaagcattccagggctgc

SEQ ID NO: 93205 - DNA, 26 bp, Homo sapiens
ctttacgtaagcattccagggctgcc

SEQ ID NO: 93206 - DNA, 26 bp, Homo sapiens
tttacgtaagcattccagggctgcct

SEQ ID NO: 93207 - DNA, 26 bp, Homo sapiens
ttacgtaagcattccagggctgcctc

SEQ ID NO: 93208 - DNA, 26 bp, Homo sapiens
tacgtaagcattccagggctgcctcg

SEQ ID NO: 93209 - DNA, 26 bp, Homo sapiens
acgtaagcattccagggctgcctcgt

SEQ ID NO: 93210 - DNA, 26 bp, Homo sapiens
cgtaagcattccagggctgcctcgtt

SEQ ID NO: 93211 - DNA, 26 bp, Homo sapiens
gtaagcattccagggctgcctcgttt

SEQ ID NO: 93212 - DNA, 26 bp, Homo sapiens
taagcattccagggctgcctcgtttt

SEQ ID NO: 93213 - DNA, 26 bp, Homo sapiens
aagcattccagggctgcctcgttttg

SEQ ID NO: 93214 - DNA, 26 bp, Homo sapiens
agcattccagggctgcctcgttttgc

SEQ ID NO: 93215 - DNA, 26 bp, Homo sapiens
gcattccagggctgcctcgttttgcc

SEQ ID NO: 93216 - DNA, 26 bp, Homo sapiens
cattccagggctgcctcgttttgccc

SEQ ID NO: 93217 - DNA, 26 bp, Homo sapiens
attccagggctgcctcgttttgccct

SEQ ID NO: 93218 - DNA, 26 bp, Homo sapiens
ttccagggctgcctcgttttgccctt

SEQ ID NO: 93219 - DNA, 26 bp, Homo sapiens
tccagggctgcctcgttttgcccttt

SEQ ID NO: 93220 - DNA, 26 bp, Homo sapiens
ccagggctgcctcgttttgccctttg

SEQ ID NO: 93221 - DNA, 26 bp, Homo sapiens
cagggctgcctcgttttgccctttga

SEQ ID NO: 93222 - DNA, 26 bp, Homo sapiens
agggctgcctcgttttgccctttgag

SEQ ID NO: 93223 - DNA, 26 bp, Homo sapiens
gggctgcctcgttttgccctttgagg

SEQ ID NO: 93224 - DNA, 26 bp, Homo sapiens
ggctgcctcgttttgccctttgaggt

SEQ ID NO: 93225 - DNA, 26 bp, Homo sapiens
gctgcctcgttttgccctttgaggtg

SEQ ID NO: 93226 - DNA, 26 bp, Homo sapiens
ctgcctcgttttgccctttgaggtgc

SEQ ID NO: 93227 - DNA, 26 bp, Homo sapiens
tgcctcgttttgccctttgaggtgct

SEQ ID NO: 93228 - DNA, 26 bp, Homo sapiens
gcctcgttttgccctttgaggtgctt

SEQ ID NO: 93229 - DNA, 26 bp, Homo sapiens
cctcgttttgccctttgaggtgcttt

SEQ ID NO: 93230 - DNA, 26 bp, Homo sapiens
ctcgttttgccctttgaggtgcttta

SEQ ID NO: 93231 - DNA, 26 bp, Homo sapiens
tcgttttgccctttgaggtgctttag

SEQ ID NO: 93232 - DNA, 26 bp, Homo sapiens
cgttttgccctttgaggtgctttaga

SEQ ID NO: 93233 - DNA, 26 bp, Homo sapiens
gttttgccctttgaggtgctttagat

SEQ ID NO: 93234 - DNA, 26 bp, Homo sapiens
ttttgccctttgaggtgctttagata

SEQ ID NO: 93235 - DNA, 26 bp, Homo sapiens
tttgccctttgaggtgctttagatag

SEQ ID NO: 93236 - DNA, 26 bp, Homo sapiens
ttgccctttgaggtgctttagatagg

SEQ ID NO: 93237 - DNA, 26 bp, Homo sapiens
tgccctttgaggtgctttagataggc

SEQ ID NO: 93238 - DNA, 26 bp, Homo sapiens
gccctttgaggtgctttagataggcc

SEQ ID NO: 93239 - DNA, 26 bp, Homo sapiens
ccctttgaggtgctttagataggcca

SEQ ID NO: 93240 - DNA, 26 bp, Homo sapiens
cctttgaggtgctttagataggccag

SEQ ID NO: 93241 - DNA, 26 bp, Homo sapiens
ctttgaggtgctttagataggccagt

SEQ ID NO: 93242 - DNA, 26 bp, Homo sapiens
tttgaggtgctttagataggccagta

SEQ ID NO: 93243 - DNA, 26 bp, Homo sapiens
ttgaggtgctttagataggccagtag

SEQ ID NO: 93244 - DNA, 26 bp, Homo sapiens
tgaggtgctttagataggccagtagg

SEQ ID NO: 93245 - DNA, 26 bp, Homo sapiens
gaggtgctttagataggccagtaggt

SEQ ID NO: 93246 - DNA, 26 bp, Homo sapiens
aggtgctttagataggccagtaggtt

SEQ ID NO: 93247 - DNA, 26 bp, Homo sapiens
ggtgctttagataggccagtaggttg

SEQ ID NO: 93248 - DNA, 26 bp, Homo sapiens
gtgctttagataggccagtaggttgc

SEQ ID NO: 93249 - DNA, 26 bp, Homo sapiens
tgctttagataggccagtaggttgca

SEQ ID NO: 93250 - DNA, 26 bp, Homo sapiens
gctttagataggccagtaggttgcac

SEQ ID NO: 93251 - DNA, 26 bp, Homo sapiens
ctttagataggccagtaggttgcaca

SEQ ID NO: 93252 - DNA, 26 bp, Homo sapiens
tttagataggccagtaggttgcacat

SEQ ID NO: 93253 - DNA, 26 bp, Homo sapiens
ttagataggccagtaggttgcacatt

SEQ ID NO: 93254 - DNA, 26 bp, Homo sapiens
tagataggccagtaggttgcacattg

SEQ ID NO: 93255 - DNA, 26 bp, Homo sapiens
agataggccagtaggttgcacattgt

SEQ ID NO: 93256 - DNA, 26 bp, Homo sapiens
gataggccagtaggttgcacattgtg

SEQ ID NO: 93257 - DNA, 26 bp, Homo sapiens
ataggccagtaggttgcacattgtgg

SEQ ID NO: 93258 - DNA, 26 bp, Homo sapiens
taggccagtaggttgcacattgtggc

SEQ ID NO: 93259 - DNA, 26 bp, Homo sapiens
aggccagtaggttgcacattgtggct

SEQ ID NO: 93260 - DNA, 26 bp, Homo sapiens
ggccagtaggttgcacattgtggctt

SEQ ID NO: 93261 - DNA, 26 bp, Homo sapiens
gccagtaggttgcacattgtggcttt

SEQ ID NO: 93262 - DNA, 26 bp, Homo sapiens
ccagtaggttgcacattgtggctttg

SEQ ID NO: 93263 - DNA, 26 bp, Homo sapiens
cagtaggttgcacattgtggctttga

SEQ ID NO: 93264 - DNA, 26 bp, Homo sapiens
agtaggttgcacattgtggctttgaa

SEQ ID NO: 93265 - DNA, 26 bp, Homo sapiens
gtaggttgcacattgtggctttgaat

SEQ ID NO: 93266 - DNA, 26 bp, Homo sapiens
taggttgcacattgtggctttgaatt

SEQ ID NO: 93267 - DNA, 26 bp, Homo sapiens
aggttgcacattgtggctttgaattc

SEQ ID NO: 93268 - DNA, 26 bp, Homo sapiens
ggttgcacattgtggctttgaattca

SEQ ID NO: 93269 - DNA, 26 bp, Homo sapiens
gttgcacattgtggctttgaattcac

SEQ ID NO: 93270 - DNA, 26 bp, Homo sapiens
ttgcacattgtggctttgaattcacg

SEQ ID NO: 93271 - DNA, 26 bp, Homo sapiens
tgcacattgtggctttgaattcacga

SEQ ID NO: 93272 - DNA, 26 bp, Homo sapiens
gcacattgtggctttgaattcacgat

SEQ ID NO: 93273 - DNA, 26 bp, Homo sapiens
cacattgtggctttgaattcacgatt

SEQ ID NO: 93274 - DNA, 26 bp, Homo sapiens
acattgtggctttgaattcacgattc

SEQ ID NO: 93275 - DNA, 26 bp, Homo sapiens
cattgtggctttgaattcacgattct

SEQ ID NO: 93276 - DNA, 26 bp, Homo sapiens
attgtggctttgaattcacgattctg

SEQ ID NO: 93277 - DNA, 26 bp, Homo sapiens
ttgtggctttgaattcacgattctga

SEQ ID NO: 93278 - DNA, 26 bp, Homo sapiens
tgtggctttgaattcacgattctgaa

SEQ ID NO: 93279 - DNA, 26 bp, Homo sapiens
gtggctttgaattcacgattctgaaa

SEQ ID NO: 93280 - DNA, 26 bp, Homo sapiens
tggctttgaattcacgattctgaaac

SEQ ID NO: 93281 - DNA, 26 bp, Homo sapiens
ggctttgaattcacgattctgaaact

SEQ ID NO: 93282 - DNA, 26 bp, Homo sapiens
gctttgaattcacgattctgaaactc

SEQ ID NO: 93283 - DNA, 26 bp, Homo sapiens
ctttgaattcacgattctgaaactca

SEQ ID NO: 93284 - DNA, 26 bp, Homo sapiens
tttgaattcacgattctgaaactcag

SEQ ID NO: 93285 - DNA, 26 bp, Homo sapiens
ttgaattcacgattctgaaactcagt

SEQ ID NO: 93286 - DNA, 26 bp, Homo sapiens
tgaattcacgattctgaaactcagtc

SEQ ID NO: 93287 - DNA, 26 bp, Homo sapiens
gaattcacgattctgaaactcagtcc

SEQ ID NO: 93288 - DNA, 26 bp, Homo sapiens
aattcacgattctgaaactcagtccg

SEQ ID NO: 93289 - DNA, 26 bp, Homo sapiens
attcacgattctgaaactcagtccgg

SEQ ID NO: 93290 - DNA, 26 bp, Homo sapiens
ttcacgattctgaaactcagtccggt

SEQ ID NO: 93291 - DNA, 26 bp, Homo sapiens
tcacgattctgaaactcagtccggta

SEQ ID NO: 93292 - DNA, 26 bp, Homo sapiens
cacgattctgaaactcagtccggtaa

SEQ ID NO: 93293 - DNA, 26 bp, Homo sapiens
acgattctgaaactcagtccggtaaa

SEQ ID NO: 93294 - DNA, 26 bp, Homo sapiens
cgattctgaaactcagtccggtaaaa

SEQ ID NO: 93295 - DNA, 26 bp, Homo sapiens
gattctgaaactcagtccggtaaaat

SEQ ID NO: 93296 - DNA, 26 bp, Homo sapiens
attctgaaactcagtccggtaaaata

SEQ ID NO: 93297 - DNA, 26 bp, Homo sapiens
ttctgaaactcagtccggtaaaatac

SEQ ID NO: 93298 - DNA, 26 bp, Homo sapiens
tctgaaactcagtccggtaaaatact

SEQ ID NO: 93299 - DNA, 26 bp, Homo sapiens
ctgaaactcagtccggtaaaatactt

SEQ ID NO: 93300 - DNA, 26 bp, Homo sapiens
tgaaactcagtccggtaaaatacttt

SEQ ID NO: 93301 - DNA, 26 bp, Homo sapiens
gaaactcagtccggtaaaatactttg

SEQ ID NO: 93302 - DNA, 26 bp, Homo sapiens
aaactcagtccggtaaaatactttgt

SEQ ID NO: 93303 - DNA, 26 bp, Homo sapiens
aactcagtccggtaaaatactttgtc

SEQ ID NO: 93304 - DNA, 26 bp, Homo sapiens
actcagtccggtaaaatactttgtct

SEQ ID NO: 93305 - DNA, 26 bp, Homo sapiens
ctcagtccggtaaaatactttgtctt

SEQ ID NO: 93306 - DNA, 26 bp, Homo sapiens
tcagtccggtaaaatactttgtcttc

SEQ ID NO: 93307 - DNA, 26 bp, Homo sapiens
cagtccggtaaaatactttgtcttca

SEQ ID NO: 93308 - DNA, 26 bp, Homo sapiens
agtccggtaaaatactttgtcttcaa

SEQ ID NO: 93309 - DNA, 26 bp, Homo sapiens
gtccggtaaaatactttgtcttcaaa

SEQ ID NO: 93310 - DNA, 26 bp, Homo sapiens
tccggtaaaatactttgtcttcaaaa

SEQ ID NO: 93311 - DNA, 26 bp, Homo sapiens
ccggtaaaatactttgtcttcaaaat

SEQ ID NO: 93312 - DNA, 26 bp, Homo sapiens
cggtaaaatactttgtcttcaaaatc

SEQ ID NO: 93313 - DNA, 26 bp, Homo sapiens
ggtaaaatactttgtcttcaaaatca

SEQ ID NO: 93314 - DNA, 26 bp, Homo sapiens
gtaaaatactttgtcttcaaaatcat

SEQ ID NO: 93315 - DNA, 26 bp, Homo sapiens
taaaatactttgtcttcaaaatcatc

SEQ ID NO: 93316 - DNA, 26 bp, Homo sapiens
aaaatactttgtcttcaaaatcatcc

SEQ ID NO: 93317 - DNA, 26 bp, Homo sapiens
aaatactttgtcttcaaaatcatcca

SEQ ID NO: 93318 - DNA, 26 bp, Homo sapiens
aatactttgtcttcaaaatcatccaa

SEQ ID NO: 93319 - DNA, 26 bp, Homo sapiens
atactttgtcttcaaaatcatccaag

SEQ ID NO: 93320 - DNA, 26 bp, Homo sapiens
tactttgtcttcaaaatcatccaagg

SEQ ID NO: 93321 - DNA, 26 bp, Homo sapiens
actttgtcttcaaaatcatccaagga

SEQ ID NO: 93322 - DNA, 26 bp, Homo sapiens
ctttgtcttcaaaatcatccaaggag

SEQ ID NO: 93323 - DNA, 26 bp, Homo sapiens
tttgtcttcaaaatcatccaaggagt

SEQ ID NO: 93324 - DNA, 26 bp, Homo sapiens
ttgtcttcaaaatcatccaaggagtt

SEQ ID NO: 93325 - DNA, 26 bp, Homo sapiens
tgtcttcaaaatcatccaaggagttt

SEQ ID NO: 93326 - DNA, 26 bp, Homo sapiens
gtcttcaaaatcatccaaggagtttt

SEQ ID NO: 93327 - DNA, 26 bp, Homo sapiens
tcttcaaaatcatccaaggagttttc

SEQ ID NO: 93328 - DNA, 26 bp, Homo sapiens
cttcaaaatcatccaaggagttttct

SEQ ID NO: 93329 - DNA, 26 bp, Homo sapiens
ttcaaaatcatccaaggagttttctc

SEQ ID NO: 93330 - DNA, 26 bp, Homo sapiens
tcaaaatcatccaaggagttttctcc

SEQ ID NO: 93331 - DNA, 26 bp, Homo sapiens
caaaatcatccaaggagttttctccc

SEQ ID NO: 93332 - DNA, 26 bp, Homo sapiens
aaaatcatccaaggagttttctccct

SEQ ID NO: 93333 - DNA, 26 bp, Homo sapiens
aaatcatccaaggagttttctccctc

SEQ ID NO: 93334 - DNA, 26 bp, Homo sapiens
aatcatccaaggagttttctccctcc

SEQ ID NO: 93335 - DNA, 26 bp, Homo sapiens
atcatccaaggagttttctccctcca

SEQ ID NO: 93336 - DNA, 26 bp, Homo sapiens
tcatccaaggagttttctccctccat

SEQ ID NO: 93337 - DNA, 26 bp, Homo sapiens
catccaaggagttttctccctccatc

SEQ ID NO: 93338 - DNA, 26 bp, Homo sapiens
atccaaggagttttctccctccatca

SEQ ID NO: 93339 - DNA, 26 bp, Homo sapiens
tccaaggagttttctccctccatcaa

SEQ ID NO: 93340 - DNA, 26 bp, Homo sapiens
ccaaggagttttctccctccatcaag

SEQ ID NO: 93341 - DNA, 26 bp, Homo sapiens
caaggagttttctccctccatcaagt

SEQ ID NO: 93342 - DNA, 26 bp, Homo sapiens
aaggagttttctccctccatcaagtt

SEQ ID NO: 93343 - DNA, 26 bp, Homo sapiens
aggagttttctccctccatcaagttc

SEQ ID NO: 93344 - DNA, 26 bp, Homo sapiens
ggagttttctccctccatcaagttcc

SEQ ID NO: 93345 - DNA, 26 bp, Homo sapiens
gagttttctccctccatcaagttcca

SEQ ID NO: 93346 - DNA, 26 bp, Homo sapiens
agttttctccctccatcaagttccag

SEQ ID NO: 93347 - DNA, 26 bp, Homo sapiens
gttttctccctccatcaagttccagg

SEQ ID NO: 93348 - DNA, 26 bp, Homo sapiens
ttttctccctccatcaagttccaggt

SEQ ID NO: 93349 - DNA, 26 bp, Homo sapiens
tttctccctccatcaagttccaggtg

SEQ ID NO: 93350 - DNA, 26 bp, Homo sapiens
ttctccctccatcaagttccaggtga

SEQ ID NO: 93351 - DNA, 26 bp, Homo sapiens
tctccctccatcaagttccaggtgaa

SEQ ID NO: 93352 - DNA, 26 bp, Homo sapiens
ctccctccatcaagttccaggtgaaa

SEQ ID NO: 93353 - DNA, 26 bp, Homo sapiens
tccctccatcaagttccaggtgaaat

SEQ ID NO: 93354 - DNA, 26 bp, Homo sapiens
ccctccatcaagttccaggtgaaatg

SEQ ID NO: 93355 - DNA, 26 bp, Homo sapiens
cctccatcaagttccaggtgaaatgg

SEQ ID NO: 93356 - DNA, 26 bp, Homo sapiens
ctccatcaagttccaggtgaaatggc

SEQ ID NO: 93357 - DNA, 26 bp, Homo sapiens
tccatcaagttccaggtgaaatggca

SEQ ID NO: 93358 - DNA, 26 bp, Homo sapiens
ccatcaagttccaggtgaaatggcat

SEQ ID NO: 93359 - DNA, 26 bp, Homo sapiens
catcaagttccaggtgaaatggcatt

SEQ ID NO: 93360 - DNA, 26 bp, Homo sapiens
atcaagttccaggtgaaatggcattt

SEQ ID NO: 93361 - DNA, 26 bp, Homo sapiens
tcaagttccaggtgaaatggcatttt

SEQ ID NO: 93362 - DNA, 26 bp, Homo sapiens
caagttccaggtgaaatggcatttta

SEQ ID NO: 93363 - DNA, 26 bp, Homo sapiens
aagttccaggtgaaatggcattttag

SEQ ID NO: 93364 - DNA, 26 bp, Homo sapiens
agttccaggtgaaatggcattttagt

SEQ ID NO: 93365 - DNA, 26 bp, Homo sapiens
gttccaggtgaaatggcattttagtt

SEQ ID NO: 93366 - DNA, 26 bp, Homo sapiens
ttccaggtgaaatggcattttagttg

SEQ ID NO: 93367 - DNA, 26 bp, Homo sapiens
tccaggtgaaatggcattttagttgc

SEQ ID NO: 93368 - DNA, 26 bp, Homo sapiens
ccaggtgaaatggcattttagttgcc

SEQ ID NO: 93369 - DNA, 26 bp, Homo sapiens
caggtgaaatggcattttagttgccg

SEQ ID NO: 93370 - DNA, 26 bp, Homo sapiens
aggtgaaatggcattttagttgccgt

SEQ ID NO: 93371 - DNA, 26 bp, Homo sapiens
ggtgaaatggcattttagttgccgta

SEQ ID NO: 93372 - DNA, 26 bp, Homo sapiens
gtgaaatggcattttagttgccgtag

SEQ ID NO: 93373 - DNA, 26 bp, Homo sapiens
tgaaatggcattttagttgccgtagg

SEQ ID NO: 93374 - DNA, 26 bp, Homo sapiens
gaaatggcattttagttgccgtaggc

SEQ ID NO: 93375 - DNA, 26 bp, Homo sapiens
aaatggcattttagttgccgtaggct

SEQ ID NO: 93376 - DNA, 26 bp, Homo sapiens
aatggcattttagttgccgtaggctg

SEQ ID NO: 93377 - DNA, 26 bp, Homo sapiens
atggcattttagttgccgtaggctgc

SEQ ID NO: 93378 - DNA, 26 bp, Homo sapiens
tggcattttagttgccgtaggctgct

SEQ ID NO: 93379 - DNA, 26 bp, Homo sapiens
ggcattttagttgccgtaggctgctc

SEQ ID NO: 93380 - DNA, 26 bp, Homo sapiens
gcattttagttgccgtaggctgctct

SEQ ID NO: 93381 - DNA, 26 bp, Homo sapiens
cattttagttgccgtaggctgctctc

SEQ ID NO: 93382 - DNA, 26 bp, Homo sapiens
attttagttgccgtaggctgctctcc

SEQ ID NO: 93383 - DNA, 26 bp, Homo sapiens
ttttagttgccgtaggctgctctcca

SEQ ID NO: 93384 - DNA, 26 bp, Homo sapiens
tttagttgccgtaggctgctctccaa

SEQ ID NO: 93385 - DNA, 26 bp, Homo sapiens
ttagttgccgtaggctgctctccaag

SEQ ID NO: 93386 - DNA, 26 bp, Homo sapiens
tagttgccgtaggctgctctccaagg

SEQ ID NO: 93387 - DNA, 26 bp, Homo sapiens
agttgccgtaggctgctctccaagga

SEQ ID NO: 93388 - DNA, 26 bp, Homo sapiens
gttgccgtaggctgctctccaaggaa

SEQ ID NO: 93389 - DNA, 26 bp, Homo sapiens
ttgccgtaggctgctctccaaggaat

SEQ ID NO: 93390 - DNA, 26 bp, Homo sapiens
tgccgtaggctgctctccaaggaatt

SEQ ID NO: 93391 - DNA, 26 bp, Homo sapiens
gccgtaggctgctctccaaggaattc

SEQ ID NO: 93392 - DNA, 26 bp, Homo sapiens
ccgtaggctgctctccaaggaattct

SEQ ID NO: 93393 - DNA, 26 bp, Homo sapiens
cgtaggctgctctccaaggaattctt

SEQ ID NO: 93394 - DNA, 26 bp, Homo sapiens
gtaggctgctctccaaggaattctta

SEQ ID NO: 93395 - DNA, 26 bp, Homo sapiens
taggctgctctccaaggaattcttat

SEQ ID NO: 93396 - DNA, 26 bp, Homo sapiens
aggctgctctccaaggaattcttatt

SEQ ID NO: 93397 - DNA, 26 bp, Homo sapiens
ggctgctctccaaggaattcttattg

SEQ ID NO: 93398 - DNA, 26 bp, Homo sapiens
gctgctctccaaggaattcttattgt

SEQ ID NO: 93399 - DNA, 26 bp, Homo sapiens
ctgctctccaaggaattcttattgtt

SEQ ID NO: 93400 - DNA, 26 bp, Homo sapiens
tgctctccaaggaattcttattgttc

SEQ ID NO: 93401 - DNA, 26 bp, Homo sapiens
gctctccaaggaattcttattgttct

SEQ ID NO: 93402 - DNA, 26 bp, Homo sapiens
ctctccaaggaattcttattgttctc

SEQ ID NO: 93403 - DNA, 26 bp, Homo sapiens
tctccaaggaattcttattgttctca

SEQ ID NO: 93404 - DNA, 26 bp, Homo sapiens
ctccaaggaattcttattgttctcac

SEQ ID NO: 93405 - DNA, 26 bp, Homo sapiens
tccaaggaattcttattgttctcact

SEQ ID NO: 93406 - DNA, 26 bp, Homo sapiens
ccaaggaattcttattgttctcactc

SEQ ID NO: 93407 - DNA, 26 bp, Homo sapiens
caaggaattcttattgttctcactca

SEQ ID NO: 93408 - DNA, 26 bp, Homo sapiens
aaggaattcttattgttctcactcat

SEQ ID NO: 93409 - DNA, 26 bp, Homo sapiens
aggaattcttattgttctcactcatg

SEQ ID NO: 93410 - DNA, 26 bp, Homo sapiens
ggaattcttattgttctcactcatgg

SEQ ID NO: 93411 - DNA, 26 bp, Homo sapiens
gaattcttattgttctcactcatggt

SEQ ID NO: 93412 - DNA, 26 bp, Homo sapiens
aattcttattgttctcactcatggtt

SEQ ID NO: 93413 - DNA, 26 bp, Homo sapiens
attcttattgttctcactcatggttg

SEQ ID NO: 93414 - DNA, 26 bp, Homo sapiens
ttcttattgttctcactcatggttgc

SEQ ID NO: 93415 - DNA, 26 bp, Homo sapiens
tcttattgttctcactcatggttgca

SEQ ID NO: 93416 - DNA, 26 bp, Homo sapiens
cttattgttctcactcatggttgcag

SEQ ID NO: 93417 - DNA, 26 bp, Homo sapiens
ttattgttctcactcatggttgcagt

SEQ ID NO: 93418 - DNA, 26 bp, Homo sapiens
tattgttctcactcatggttgcagtg

SEQ ID NO: 93419 - DNA, 26 bp, Homo sapiens
attgttctcactcatggttgcagtgc

SEQ ID NO: 93420 - DNA, 26 bp, Homo sapiens
ttgttctcactcatggttgcagtgca

SEQ ID NO: 93421 - DNA, 26 bp, Homo sapiens
tgttctcactcatggttgcagtgcaa

SEQ ID NO: 93422 - DNA, 26 bp, Homo sapiens
gttctcactcatggttgcagtgcaat

SEQ ID NO: 93423 - DNA, 26 bp, Homo sapiens
ttctcactcatggttgcagtgcaatt

SEQ ID NO: 93424 - DNA, 26 bp, Homo sapiens
tctcactcatggttgcagtgcaattc

SEQ ID NO: 93425 - DNA, 26 bp, Homo sapiens
ctcactcatggttgcagtgcaattct

SEQ ID NO: 93426 - DNA, 26 bp, Homo sapiens
tcactcatggttgcagtgcaattctc

SEQ ID NO: 93427 - DNA, 26 bp, Homo sapiens
cactcatggttgcagtgcaattctca

SEQ ID NO: 93428 - DNA, 26 bp, Homo sapiens
actcatggttgcagtgcaattctcag

SEQ ID NO: 93429 - DNA, 26 bp, Homo sapiens
ctcatggttgcagtgcaattctcagc

SEQ ID NO: 93430 - DNA, 26 bp, Homo sapiens
tcatggttgcagtgcaattctcagct

SEQ ID NO: 93431 - DNA, 26 bp, Homo sapiens
catggttgcagtgcaattctcagctg

SEQ ID NO: 93432 - DNA, 26 bp, Homo sapiens
atggttgcagtgcaattctcagctgt

SEQ ID NO: 93433 - DNA, 26 bp, Homo sapiens
tggttgcagtgcaattctcagctgtt

SEQ ID NO: 93434 - DNA, 26 bp, Homo sapiens
ggttgcagtgcaattctcagctgttc

SEQ ID NO: 93435 - DNA, 26 bp, Homo sapiens
gttgcagtgcaattctcagctgttcg

SEQ ID NO: 93436 - DNA, 26 bp, Homo sapiens
ttgcagtgcaattctcagctgttcgg

SEQ ID NO: 93437 - DNA, 26 bp, Homo sapiens
tgcagtgcaattctcagctgttcggc

SEQ ID NO: 93438 - DNA, 26 bp, Homo sapiens
gcagtgcaattctcagctgttcggca

SEQ ID NO: 93439 - DNA, 26 bp, Homo sapiens
cagtgcaattctcagctgttcggcag

SEQ ID NO: 93440 - DNA, 26 bp, Homo sapiens
agtgcaattctcagctgttcggcagg

SEQ ID NO: 93441 - DNA, 26 bp, Homo sapiens
gtgcaattctcagctgttcggcaggg

SEQ ID NO: 93442 - DNA, 26 bp, Homo sapiens
tgcaattctcagctgttcggcagggc

SEQ ID NO: 93443 - DNA, 26 bp, Homo sapiens
gcaattctcagctgttcggcagggct

SEQ ID NO: 93444 - DNA, 26 bp, Homo sapiens
caattctcagctgttcggcagggctc

SEQ ID NO: 93445 - DNA, 26 bp, Homo sapiens
aattctcagctgttcggcagggctcg

SEQ ID NO: 93446 - DNA, 26 bp, Homo sapiens
attctcagctgttcggcagggctcgg

SEQ ID NO: 93447 - DNA, 26 bp, Homo sapiens
ttctcagctgttcggcagggctcggt

SEQ ID NO: 93448 - DNA, 26 bp, Homo sapiens
tctcagctgttcggcagggctcggtt

SEQ ID NO: 93449 - DNA, 26 bp, Homo sapiens
ctcagctgttcggcagggctcggttc

SEQ ID NO: 93450 - DNA, 26 bp, Homo sapiens
tcagctgttcggcagggctcggttca

SEQ ID NO: 93451 - DNA, 26 bp, Homo sapiens
cagctgttcggcagggctcggttcag

SEQ ID NO: 93452 - DNA, 26 bp, Homo sapiens
agctgttcggcagggctcggttcagg

SEQ ID NO: 93453 - DNA, 26 bp, Homo sapiens
gctgttcggcagggctcggttcaggc

SEQ ID NO: 93454 - DNA, 26 bp, Homo sapiens
ctgttcggcagggctcggttcaggca

SEQ ID NO: 93455 - DNA, 26 bp, Homo sapiens
tgttcggcagggctcggttcaggcag

SEQ ID NO: 93456 - DNA, 26 bp, Homo sapiens
gttcggcagggctcggttcaggcagc

SEQ ID NO: 93457 - DNA, 26 bp, Homo sapiens
ttcggcagggctcggttcaggcagct

SEQ ID NO: 93458 - DNA, 26 bp, Homo sapiens
tcggcagggctcggttcaggcagctg

SEQ ID NO: 93459 - DNA, 26 bp, Homo sapiens
cggcagggctcggttcaggcagctgc

SEQ ID NO: 93460 - DNA, 26 bp, Homo sapiens
ggcagggctcggttcaggcagctgca

SEQ ID NO: 93461 - DNA, 26 bp, Homo sapiens
gcagggctcggttcaggcagctgcac

SEQ ID NO: 93462 - DNA, 26 bp, Homo sapiens
cagggctcggttcaggcagctgcact

SEQ ID NO: 93463 - DNA, 26 bp, Homo sapiens
agggctcggttcaggcagctgcactc

SEQ ID NO: 93464 - DNA, 26 bp, Homo sapiens
gggctcggttcaggcagctgcactct

SEQ ID NO: 93465 - DNA, 26 bp, Homo sapiens
ggctcggttcaggcagctgcactctt

SEQ ID NO: 93466 - DNA, 26 bp, Homo sapiens
gctcggttcaggcagctgcactcttc

SEQ ID NO: 93467 - DNA, 26 bp, Homo sapiens
ctcggttcaggcagctgcactcttca

SEQ ID NO: 93468 - DNA, 26 bp, Homo sapiens
tcggttcaggcagctgcactcttcag

SEQ ID NO: 93469 - DNA, 26 bp, Homo sapiens
cggttcaggcagctgcactcttcaga

SEQ ID NO: 93470 - DNA, 26 bp, Homo sapiens
ggttcaggcagctgcactcttcagaa

SEQ ID NO: 93471 - DNA, 26 bp, Homo sapiens
gttcaggcagctgcactcttcagaaa

SEQ ID NO: 93472 - DNA, 26 bp, Homo sapiens
ttcaggcagctgcactcttcagaaat

SEQ ID NO: 93473 - DNA, 26 bp, Homo sapiens
tcaggcagctgcactcttcagaaatc

SEQ ID NO: 93474 - DNA, 26 bp, Homo sapiens
caggcagctgcactcttcagaaatct

SEQ ID NO: 93475 - DNA, 26 bp, Homo sapiens
aggcagctgcactcttcagaaatctt

SEQ ID NO: 93476 - DNA, 26 bp, Homo sapiens
ggcagctgcactcttcagaaatcttc

SEQ ID NO: 93477 - DNA, 26 bp, Homo sapiens
gcagctgcactcttcagaaatcttcc

SEQ ID NO: 93478 - DNA, 26 bp, Homo sapiens
cagctgcactcttcagaaatcttcct

SEQ ID NO: 93479 - DNA, 26 bp, Homo sapiens
agctgcactcttcagaaatcttcctc

SEQ ID NO: 93480 - DNA, 26 bp, Homo sapiens
gctgcactcttcagaaatcttcctct

SEQ ID NO: 93481 - DNA, 26 bp, Homo sapiens
ctgcactcttcagaaatcttcctctt

SEQ ID NO: 93482 - DNA, 26 bp, Homo sapiens
tgcactcttcagaaatcttcctcttc

SEQ ID NO: 93483 - DNA, 26 bp, Homo sapiens
gcactcttcagaaatcttcctcttct

SEQ ID NO: 93484 - DNA, 26 bp, Homo sapiens
cactcttcagaaatcttcctcttctg

SEQ ID NO: 93485 - DNA, 26 bp, Homo sapiens
actcttcagaaatcttcctcttctgc

SEQ ID NO: 93486 - DNA, 26 bp, Homo sapiens
ttttgatgggctcaagcaaggataat

SEQ ID NO: 93487 - DNA, 26 bp, Homo sapiens
tttgatgggctcaagcaaggataatg

SEQ ID NO: 93488 - DNA, 26 bp, Homo sapiens
ttgatgggctcaagcaaggataatga

SEQ ID NO: 93489 - DNA, 26 bp, Homo sapiens
tgatgggctcaagcaaggataatgaa

SEQ ID NO: 93490 - DNA, 26 bp, Homo sapiens
gatgggctcaagcaaggataatgaaa

SEQ ID NO: 93491 - DNA, 26 bp, Homo sapiens
atgggctcaagcaaggataatgaaaa

SEQ ID NO: 93492 - DNA, 26 bp, Homo sapiens
tgggctcaagcaaggataatgaaaag

SEQ ID NO: 93493 - DNA, 26 bp, Homo sapiens
gggctcaagcaaggataatgaaaaga

SEQ ID NO: 93494 - DNA, 26 bp, Homo sapiens
ggctcaagcaaggataatgaaaagaa

SEQ ID NO: 93495 - DNA, 26 bp, Homo sapiens
gctcaagcaaggataatgaaaagaaa

SEQ ID NO: 93496 - DNA, 26 bp, Homo sapiens
ctcaagcaaggataatgaaaagaaac

SEQ ID NO: 93497 - DNA, 26 bp, Homo sapiens
tcaagcaaggataatgaaaagaaaca

SEQ ID NO: 93498 - DNA, 26 bp, Homo sapiens
caagcaaggataatgaaaagaaacat

SEQ ID NO: 93499 - DNA, 26 bp, Homo sapiens
aagcaaggataatgaaaagaaacatt

SEQ ID NO: 93500 - DNA, 26 bp, Homo sapiens
agcaaggataatgaaaagaaacattt

SEQ ID NO: 93501 - DNA, 26 bp, Homo sapiens
gcaaggataatgaaaagaaacattta

SEQ ID NO: 93502 - DNA, 26 bp, Homo sapiens
caaggataatgaaaagaaacatttat

SEQ ID NO: 93503 - DNA, 26 bp, Homo sapiens
aaggataatgaaaagaaacatttatt

SEQ ID NO: 93504 - DNA, 26 bp, Homo sapiens
aggataatgaaaagaaacatttattt

SEQ ID NO: 93505 - DNA, 26 bp, Homo sapiens
ggataatgaaaagaaacatttattta

SEQ ID NO: 93506 - DNA, 26 bp, Homo sapiens
gataatgaaaagaaacatttatttac

SEQ ID NO: 93507 - DNA, 26 bp, Homo sapiens
ataatgaaaagaaacatttatttaca

SEQ ID NO: 93508 - DNA, 26 bp, Homo sapiens
taatgaaaagaaacatttatttacac

SEQ ID NO: 93509 - DNA, 26 bp, Homo sapiens
aatgaaaagaaacatttatttacact

SEQ ID NO: 93510 - DNA, 26 bp, Homo sapiens
atgaaaagaaacatttatttacactt

SEQ ID NO: 93511 - DNA, 26 bp, Homo sapiens
tgaaaagaaacatttatttacacttt

SEQ ID NO: 93512 - DNA, 26 bp, Homo sapiens
gaaaagaaacatttatttacactttg

SEQ ID NO: 93513 - DNA, 26 bp, Homo sapiens
aaaagaaacatttatttacactttgt

SEQ ID NO: 93514 - DNA, 26 bp, Homo sapiens
aaagaaacatttatttacactttgta

SEQ ID NO: 93515 - DNA, 26 bp, Homo sapiens
aagaaacatttatttacactttgtac

SEQ ID NO: 93516 - DNA, 26 bp, Homo sapiens
agaaacatttatttacactttgtaca

SEQ ID NO: 93517 - DNA, 26 bp, Homo sapiens
gaaacatttatttacactttgtacat

SEQ ID NO: 93518 - DNA, 26 bp, Homo sapiens
aaacatttatttacactttgtacata

SEQ ID NO: 93519 - DNA, 26 bp, Homo sapiens
aacatttatttacactttgtacatat

SEQ ID NO: 93520 - DNA, 26 bp, Homo sapiens
acatttatttacactttgtacatatc

SEQ ID NO: 93521 - DNA, 26 bp, Homo sapiens
catttatttacactttgtacatatcg

SEQ ID NO: 93522 - DNA, 26 bp, Homo sapiens
atttatttacactttgtacatatcga

SEQ ID NO: 93523 - DNA, 26 bp, Homo sapiens
tttatttacactttgtacatatcgat

SEQ ID NO: 93524 - DNA, 26 bp, Homo sapiens
ttatttacactttgtacatatcgatt

SEQ ID NO: 93525 - DNA, 26 bp, Homo sapiens
tatttacactttgtacatatcgattc

SEQ ID NO: 93526 - DNA, 26 bp, Homo sapiens
atttacactttgtacatatcgattcc

SEQ ID NO: 93527 - DNA, 26 bp, Homo sapiens
tttacactttgtacatatcgattcca

SEQ ID NO: 93528 - DNA, 26 bp, Homo sapiens
ttacactttgtacatatcgattccaa

SEQ ID NO: 93529 - DNA, 26 bp, Homo sapiens
tacactttgtacatatcgattccaac

SEQ ID NO: 93530 - DNA, 26 bp, Homo sapiens
acactttgtacatatcgattccaaca

SEQ ID NO: 93531 - DNA, 26 bp, Homo sapiens
cactttgtacatatcgattccaacaa

SEQ ID NO: 93532 - DNA, 26 bp, Homo sapiens
actttgtacatatcgattccaacaaa

SEQ ID NO: 93533 - DNA, 26 bp, Homo sapiens
ctttgtacatatcgattccaacaaac

SEQ ID NO: 93534 - DNA, 26 bp, Homo sapiens
tttgtacatatcgattccaacaaaca

SEQ ID NO: 93535 - DNA, 26 bp, Homo sapiens
ttgtacatatcgattccaacaaacaa

SEQ ID NO: 93536 - DNA, 26 bp, Homo sapiens
tgtacatatcgattccaacaaacaat

SEQ ID NO: 93537 - DNA, 26 bp, Homo sapiens
gtacatatcgattccaacaaacaata

SEQ ID NO: 93538 - DNA, 26 bp, Homo sapiens
tacatatcgattccaacaaacaataa

SEQ ID NO: 93539 - DNA, 26 bp, Homo sapiens
acatatcgattccaacaaacaataaa

SEQ ID NO: 93540 - DNA, 26 bp, Homo sapiens
catatcgattccaacaaacaataaaa

SEQ ID NO: 93541 - DNA, 26 bp, Homo sapiens
atatcgattccaacaaacaataaaag

SEQ ID NO: 93542 - DNA, 26 bp, Homo sapiens
tatcgattccaacaaacaataaaagg

SEQ ID NO: 93543 - DNA, 26 bp, Homo sapiens
atcgattccaacaaacaataaaaggc

SEQ ID NO: 93544 - DNA, 26 bp, Homo sapiens
tcgattccaacaaacaataaaaggcc

SEQ ID NO: 93545 - DNA, 26 bp, Homo sapiens
cgattccaacaaacaataaaaggcct

SEQ ID NO: 93546 - DNA, 26 bp, Homo sapiens
gattccaacaaacaataaaaggccta

SEQ ID NO: 93547 - DNA, 26 bp, Homo sapiens
attccaacaaacaataaaaggcctac

SEQ ID NO: 93548 - DNA, 26 bp, Homo sapiens
ttccaacaaacaataaaaggcctaca

SEQ ID NO: 93549 - DNA, 26 bp, Homo sapiens
tccaacaaacaataaaaggcctacac

SEQ ID NO: 93550 - DNA, 26 bp, Homo sapiens
ccaacaaacaataaaaggcctacaca

SEQ ID NO: 93551 - DNA, 26 bp, Homo sapiens
caacaaacaataaaaggcctacacat

SEQ ID NO: 93552 - DNA, 26 bp, Homo sapiens
aacaaacaataaaaggcctacacatc

SEQ ID NO: 93553 - DNA, 26 bp, Homo sapiens
acaaacaataaaaggcctacacatca

SEQ ID NO: 93554 - DNA, 26 bp, Homo sapiens
caaacaataaaaggcctacacatcag

SEQ ID NO: 93555 - DNA, 26 bp, Homo sapiens
aaacaataaaaggcctacacatcagt

SEQ ID NO: 93556 - DNA, 26 bp, Homo sapiens
aacaataaaaggcctacacatcagtg

SEQ ID NO: 93557 - DNA, 26 bp, Homo sapiens
acaataaaaggcctacacatcagtgt

SEQ ID NO: 93558 - DNA, 26 bp, Homo sapiens
caataaaaggcctacacatcagtgta

SEQ ID NO: 93559 - DNA, 26 bp, Homo sapiens
aataaaaggcctacacatcagtgtaa

SEQ ID NO: 93560 - DNA, 26 bp, Homo sapiens
ataaaaggcctacacatcagtgtaat

SEQ ID NO: 93561 - DNA, 26 bp, Homo sapiens
taaaaggcctacacatcagtgtaatc

SEQ ID NO: 93562 - DNA, 26 bp, Homo sapiens
aaaaggcctacacatcagtgtaatca

SEQ ID NO: 93563 - DNA, 26 bp, Homo sapiens
aaaggcctacacatcagtgtaatcat

SEQ ID NO: 93564 - DNA, 26 bp, Homo sapiens
aaggcctacacatcagtgtaatcata

SEQ ID NO: 93565 - DNA, 26 bp, Homo sapiens
aggcctacacatcagtgtaatcataa

SEQ ID NO: 93566 - DNA, 26 bp, Homo sapiens
ggcctacacatcagtgtaatcataat

SEQ ID NO: 93567 - DNA, 26 bp, Homo sapiens
gcctacacatcagtgtaatcataata

SEQ ID NO: 93568 - DNA, 26 bp, Homo sapiens
cctacacatcagtgtaatcataatat

SEQ ID NO: 93569 - DNA, 26 bp, Homo sapiens
ctacacatcagtgtaatcataatata

SEQ ID NO: 93570 - DNA, 26 bp, Homo sapiens
tacacatcagtgtaatcataatatat

SEQ ID NO: 93571 - DNA, 26 bp, Homo sapiens
acacatcagtgtaatcataatatatg

SEQ ID NO: 93572 - DNA, 26 bp, Homo sapiens
cacatcagtgtaatcataatatatgc

SEQ ID NO: 93573 - DNA, 26 bp, Homo sapiens
acatcagtgtaatcataatatatgcg

SEQ ID NO: 93574 - DNA, 26 bp, Homo sapiens
catcagtgtaatcataatatatgcga

SEQ ID NO: 93575 - DNA, 26 bp, Homo sapiens
atcagtgtaatcataatatatgcgaa

SEQ ID NO: 93576 - DNA, 26 bp, Homo sapiens
tcagtgtaatcataatatatgcgaac

SEQ ID NO: 93577 - DNA, 26 bp, Homo sapiens
cagtgtaatcataatatatgcgaact

SEQ ID NO: 93578 - DNA, 26 bp, Homo sapiens
agtgtaatcataatatatgcgaactt

SEQ ID NO: 93579 - DNA, 26 bp, Homo sapiens
gtgtaatcataatatatgcgaacttc

SEQ ID NO: 93580 - DNA, 26 bp, Homo sapiens
tgtaatcataatatatgcgaacttcc

SEQ ID NO: 93581 - DNA, 26 bp, Homo sapiens
gtaatcataatatatgcgaacttccg

SEQ ID NO: 93582 - DNA, 26 bp, Homo sapiens
taatcataatatatgcgaacttccga

SEQ ID NO: 93583 - DNA, 26 bp, Homo sapiens
aatcataatatatgcgaacttccgat

SEQ ID NO: 93584 - DNA, 26 bp, Homo sapiens
atcataatatatgcgaacttccgatc

SEQ ID NO: 93585 - DNA, 26 bp, Homo sapiens
tcataatatatgcgaacttccgatct

SEQ ID NO: 93586 - DNA, 26 bp, Homo sapiens
cataatatatgcgaacttccgatctt

SEQ ID NO: 93587 - DNA, 26 bp, Homo sapiens
ataatatatgcgaacttccgatcttc

SEQ ID NO: 93588 - DNA, 26 bp, Homo sapiens
taatatatgcgaacttccgatcttct

SEQ ID NO: 93589 - DNA, 26 bp, Homo sapiens
aatatatgcgaacttccgatcttctc

SEQ ID NO: 93590 - DNA, 26 bp, Homo sapiens
atatatgcgaacttccgatcttctca

SEQ ID NO: 93591 - DNA, 26 bp, Homo sapiens
tatatgcgaacttccgatcttctcac

SEQ ID NO: 93592 - DNA, 26 bp, Homo sapiens
atatgcgaacttccgatcttctcaca

SEQ ID NO: 93593 - DNA, 26 bp, Homo sapiens
tatgcgaacttccgatcttctcacac

SEQ ID NO: 93594 - DNA, 26 bp, Homo sapiens
atgcgaacttccgatcttctcacact

SEQ ID NO: 93595 - DNA, 26 bp, Homo sapiens
tgcgaacttccgatcttctcacactt

SEQ ID NO: 93596 - DNA, 26 bp, Homo sapiens
gcgaacttccgatcttctcacacttt

SEQ ID NO: 93597 - DNA, 26 bp, Homo sapiens
cgaacttccgatcttctcacactttg

SEQ ID NO: 93598 - DNA, 26 bp, Homo sapiens
gaacttccgatcttctcacactttgc

SEQ ID NO: 93599 - DNA, 26 bp, Homo sapiens
aacttccgatcttctcacactttgca

SEQ ID NO: 93600 - DNA, 26 bp, Homo sapiens
acttccgatcttctcacactttgcag

SEQ ID NO: 93601 - DNA, 26 bp, Homo sapiens
cttccgatcttctcacactttgcagt

SEQ ID NO: 93602 - DNA, 26 bp, Homo sapiens
ttccgatcttctcacactttgcagtg

SEQ ID NO: 93603 - DNA, 26 bp, Homo sapiens
tccgatcttctcacactttgcagtga

SEQ ID NO: 93604 - DNA, 26 bp, Homo sapiens
ccgatcttctcacactttgcagtgat

SEQ ID NO: 93605 - DNA, 26 bp, Homo sapiens
cgatcttctcacactttgcagtgatc

SEQ ID NO: 93606 - DNA, 26 bp, Homo sapiens
gatcttctcacactttgcagtgatct

SEQ ID NO: 93607 - DNA, 26 bp, Homo sapiens
atcttctcacactttgcagtgatctg

SEQ ID NO: 93608 - DNA, 26 bp, Homo sapiens
tcttctcacactttgcagtgatctga

SEQ ID NO: 93609 - DNA, 26 bp, Homo sapiens
cttctcacactttgcagtgatctgat

SEQ ID NO: 93610 - DNA, 26 bp, Homo sapiens
ttctcacactttgcagtgatctgatg

SEQ ID NO: 93611 - DNA, 26 bp, Homo sapiens
tctcacactttgcagtgatctgatgc

SEQ ID NO: 93612 - DNA, 26 bp, Homo sapiens
ctcacactttgcagtgatctgatgct

SEQ ID NO: 93613 - DNA, 26 bp, Homo sapiens
tcacactttgcagtgatctgatgctt

SEQ ID NO: 93614 - DNA, 26 bp, Homo sapiens
cacactttgcagtgatctgatgcttt

SEQ ID NO: 93615 - DNA, 26 bp, Homo sapiens
acactttgcagtgatctgatgctttc

SEQ ID NO: 93616 - DNA, 26 bp, Homo sapiens
cactttgcagtgatctgatgctttca

SEQ ID NO: 93617 - DNA, 26 bp, Homo sapiens
actttgcagtgatctgatgctttcac

SEQ ID NO: 93618 - DNA, 26 bp, Homo sapiens
ctttgcagtgatctgatgctttcact

SEQ ID NO: 93619 - DNA, 26 bp, Homo sapiens
tttgcagtgatctgatgctttcactc

SEQ ID NO: 93620 - DNA, 26 bp, Homo sapiens
ttgcagtgatctgatgctttcactcc

SEQ ID NO: 93621 - DNA, 26 bp, Homo sapiens
tgcagtgatctgatgctttcactcct

SEQ ID NO: 93622 - DNA, 26 bp, Homo sapiens
gcagtgatctgatgctttcactcctg

SEQ ID NO: 93623 - DNA, 26 bp, Homo sapiens
cagtgatctgatgctttcactcctgg

SEQ ID NO: 93624 - DNA, 26 bp, Homo sapiens
agtgatctgatgctttcactcctggt

SEQ ID NO: 93625 - DNA, 26 bp, Homo sapiens
gtgatctgatgctttcactcctggtt

SEQ ID NO: 93626 - DNA, 26 bp, Homo sapiens
tgatctgatgctttcactcctggttc

SEQ ID NO: 93627 - DNA, 26 bp, Homo sapiens
gatctgatgctttcactcctggttct

SEQ ID NO: 93628 - DNA, 26 bp, Homo sapiens
atctgatgctttcactcctggttctg

SEQ ID NO: 93629 - DNA, 26 bp, Homo sapiens
tctgatgctttcactcctggttctga

SEQ ID NO: 93630 - DNA, 26 bp, Homo sapiens
ctgatgctttcactcctggttctgat

SEQ ID NO: 93631 - DNA, 26 bp, Homo sapiens
tgatgctttcactcctggttctgata

SEQ ID NO: 93632 - DNA, 26 bp, Homo sapiens
gatgctttcactcctggttctgatat

SEQ ID NO: 93633 - DNA, 26 bp, Homo sapiens
atgctttcactcctggttctgatatt

SEQ ID NO: 93634 - DNA, 26 bp, Homo sapiens
tgctttcactcctggttctgatattt

SEQ ID NO: 93635 - DNA, 26 bp, Homo sapiens
gctttcactcctggttctgatatttg

SEQ ID NO: 93636 - DNA, 26 bp, Homo sapiens
ctttcactcctggttctgatatttga

SEQ ID NO: 93637 - DNA, 26 bp, Homo sapiens
tttcactcctggttctgatatttgat

SEQ ID NO: 93638 - DNA, 26 bp, Homo sapiens
ttcactcctggttctgatatttgatt

SEQ ID NO: 93639 - DNA, 26 bp, Homo sapiens
tcactcctggttctgatatttgattt

SEQ ID NO: 93640 - DNA, 26 bp, Homo sapiens
cactcctggttctgatatttgatttt

SEQ ID NO: 93641 - DNA, 26 bp, Homo sapiens
actcctggttctgatatttgattttt

SEQ ID NO: 93642 - DNA, 26 bp, Homo sapiens
ctcctggttctgatatttgatttttt

SEQ ID NO: 93643 - DNA, 26 bp, Homo sapiens
tcctggttctgatatttgattttttg

SEQ ID NO: 93644 - DNA, 26 bp, Homo sapiens
cctggttctgatatttgattttttga

SEQ ID NO: 93645 - DNA, 26 bp, Homo sapiens
ctggttctgatatttgattttttgaa

SEQ ID NO: 93646 - DNA, 26 bp, Homo sapiens
tggttctgatatttgattttttgaac

SEQ ID NO: 93647 - DNA, 26 bp, Homo sapiens
ggttctgatatttgattttttgaaca

SEQ ID NO: 93648 - DNA, 26 bp, Homo sapiens
gttctgatatttgattttttgaacag

SEQ ID NO: 93649 - DNA, 26 bp, Homo sapiens
ttctgatatttgattttttgaacagc

SEQ ID NO: 93650 - DNA, 26 bp, Homo sapiens
tctgatatttgattttttgaacagcc

SEQ ID NO: 93651 - DNA, 26 bp, Homo sapiens
ctgatatttgattttttgaacagcct

SEQ ID NO: 93652 - DNA, 26 bp, Homo sapiens
tgatatttgattttttgaacagcctt

SEQ ID NO: 93653 - DNA, 26 bp, Homo sapiens
gatatttgattttttgaacagccttc

SEQ ID NO: 93654 - DNA, 26 bp, Homo sapiens
atatttgattttttgaacagccttct

SEQ ID NO: 93655 - DNA, 26 bp, Homo sapiens
tatttgattttttgaacagccttctt

SEQ ID NO: 93656 - DNA, 26 bp, Homo sapiens
atttgattttttgaacagccttcttg

SEQ ID NO: 93657 - DNA, 26 bp, Homo sapiens
tttgattttttgaacagccttcttga

SEQ ID NO: 93658 - DNA, 26 bp, Homo sapiens
ttgattttttgaacagccttcttgaa

SEQ ID NO: 93659 - DNA, 26 bp, Homo sapiens
tgattttttgaacagccttcttgaaa

SEQ ID NO: 93660 - DNA, 26 bp, Homo sapiens
gattttttgaacagccttcttgaaaa

SEQ ID NO: 93661 - DNA, 26 bp, Homo sapiens
attttttgaacagccttcttgaaaat

SEQ ID NO: 93662 - DNA, 26 bp, Homo sapiens
ttttttgaacagccttcttgaaaatg

SEQ ID NO: 93663 - DNA, 26 bp, Homo sapiens
tttttgaacagccttcttgaaaatga

SEQ ID NO: 93664 - DNA, 26 bp, Homo sapiens
ttttgaacagccttcttgaaaatgac

SEQ ID NO: 93665 - DNA, 26 bp, Homo sapiens
tttgaacagccttcttgaaaatgacc

SEQ ID NO: 93666 - DNA, 26 bp, Homo sapiens
ttgaacagccttcttgaaaatgacct

SEQ ID NO: 93667 - DNA, 26 bp, Homo sapiens
tgaacagccttcttgaaaatgaccta

SEQ ID NO: 93668 - DNA, 26 bp, Homo sapiens
gaacagccttcttgaaaatgacctac

SEQ ID NO: 93669 - DNA, 26 bp, Homo sapiens
aacagccttcttgaaaatgacctaca

SEQ ID NO: 93670 - DNA, 26 bp, Homo sapiens
acagccttcttgaaaatgacctacac

SEQ ID NO: 93671 - DNA, 26 bp, Homo sapiens
cagccttcttgaaaatgacctacaca

SEQ ID NO: 93672 - DNA, 26 bp, Homo sapiens
agccttcttgaaaatgacctacacat

SEQ ID NO: 93673 - DNA, 26 bp, Homo sapiens
gccttcttgaaaatgacctacacatg

SEQ ID NO: 93674 - DNA, 26 bp, Homo sapiens
ccttcttgaaaatgacctacacatga

SEQ ID NO: 93675 - DNA, 26 bp, Homo sapiens
cttcttgaaaatgacctacacatgaa

SEQ ID NO: 93676 - DNA, 26 bp, Homo sapiens
ttcttgaaaatgacctacacatgaaa

SEQ ID NO: 93677 - DNA, 26 bp, Homo sapiens
tcttgaaaatgacctacacatgaaaa

SEQ ID NO: 93678 - DNA, 26 bp, Homo sapiens
cttgaaaatgacctacacatgaaaaa

SEQ ID NO: 93679 - DNA, 26 bp, Homo sapiens
ttgaaaatgacctacacatgaaaaag

SEQ ID NO: 93680 - DNA, 26 bp, Homo sapiens
tgaaaatgacctacacatgaaaaagt

SEQ ID NO: 93681 - DNA, 26 bp, Homo sapiens
gaaaatgacctacacatgaaaaagta

SEQ ID NO: 93682 - DNA, 26 bp, Homo sapiens
aaaatgacctacacatgaaaaagtaa

SEQ ID NO: 93683 - DNA, 26 bp, Homo sapiens
aaatgacctacacatgaaaaagtaaa

SEQ ID NO: 93684 - DNA, 26 bp, Homo sapiens
aatgacctacacatgaaaaagtaaat

SEQ ID NO: 93685 - DNA, 26 bp, Homo sapiens
atgacctacacatgaaaaagtaaatt

SEQ ID NO: 93686 - DNA, 26 bp, Homo sapiens
tgacctacacatgaaaaagtaaatta

SEQ ID NO: 93687 - DNA, 26 bp, Homo sapiens
gacctacacatgaaaaagtaaattat

SEQ ID NO: 93688 - DNA, 26 bp, Homo sapiens
acctacacatgaaaaagtaaattatt

SEQ ID NO: 93689 - DNA, 26 bp, Homo sapiens
cctacacatgaaaaagtaaattattg

SEQ ID NO: 93690 - DNA, 26 bp, Homo sapiens
ctacacatgaaaaagtaaattattgg

SEQ ID NO: 93691 - DNA, 26 bp, Homo sapiens
tacacatgaaaaagtaaattattgga

SEQ ID NO: 93692 - DNA, 26 bp, Homo sapiens
acacatgaaaaagtaaattattggat

SEQ ID NO: 93693 - DNA, 26 bp, Homo sapiens
cacatgaaaaagtaaattattggatc

SEQ ID NO: 93694 - DNA, 26 bp, Homo sapiens
acatgaaaaagtaaattattggatcc

SEQ ID NO: 93695 - DNA, 26 bp, Homo sapiens
catgaaaaagtaaattattggatcca

SEQ ID NO: 93696 - DNA, 26 bp, Homo sapiens
atgaaaaagtaaattattggatccag

SEQ ID NO: 93697 - DNA, 26 bp, Homo sapiens
tgaaaaagtaaattattggatccagg

SEQ ID NO: 93698 - DNA, 26 bp, Homo sapiens
gaaaaagtaaattattggatccaggc

SEQ ID NO: 93699 - DNA, 26 bp, Homo sapiens
aaaaagtaaattattggatccaggca

SEQ ID NO: 93700 - DNA, 26 bp, Homo sapiens
aaaagtaaattattggatccaggcaa

SEQ ID NO: 93701 - DNA, 26 bp, Homo sapiens
aaagtaaattattggatccaggcaaa

SEQ ID NO: 93702 - DNA, 26 bp, Homo sapiens
aagtaaattattggatccaggcaaac

SEQ ID NO: 93703 - DNA, 26 bp, Homo sapiens
agtaaattattggatccaggcaaaca

SEQ ID NO: 93704 - DNA, 26 bp, Homo sapiens
gtaaattattggatccaggcaaacat

SEQ ID NO: 93705 - DNA, 26 bp, Homo sapiens
taaattattggatccaggcaaacatt

SEQ ID NO: 93706 - DNA, 26 bp, Homo sapiens
aaattattggatccaggcaaacatta

SEQ ID NO: 93707 - DNA, 26 bp, Homo sapiens
aattattggatccaggcaaacattac

SEQ ID NO: 93708 - DNA, 26 bp, Homo sapiens
attattggatccaggcaaacattaca

SEQ ID NO: 93709 - DNA, 26 bp, Homo sapiens
ttattggatccaggcaaacattacac

SEQ ID NO: 93710 - DNA, 26 bp, Homo sapiens
tattggatccaggcaaacattacacg

SEQ ID NO: 93711 - DNA, 26 bp, Homo sapiens
attggatccaggcaaacattacacgc

SEQ ID NO: 93712 - DNA, 26 bp, Homo sapiens
ttggatccaggcaaacattacacgca

SEQ ID NO: 93713 - DNA, 26 bp, Homo sapiens
tggatccaggcaaacattacacgcag

SEQ ID NO: 93714 - DNA, 26 bp, Homo sapiens
ggatccaggcaaacattacacgcaga

SEQ ID NO: 93715 - DNA, 26 bp, Homo sapiens
gatccaggcaaacattacacgcagac

SEQ ID NO: 93716 - DNA, 26 bp, Homo sapiens
atccaggcaaacattacacgcagaca

SEQ ID NO: 93717 - DNA, 26 bp, Homo sapiens
tccaggcaaacattacacgcagacaa

SEQ ID NO: 93718 - DNA, 26 bp, Homo sapiens
ccaggcaaacattacacgcagacaag

SEQ ID NO: 93719 - DNA, 26 bp, Homo sapiens
caggcaaacattacacgcagacaaga

SEQ ID NO: 93720 - DNA, 26 bp, Homo sapiens
aggcaaacattacacgcagacaagaa

SEQ ID NO: 93721 - DNA, 26 bp, Homo sapiens
ggcaaacattacacgcagacaagaaa

SEQ ID NO: 93722 - DNA, 26 bp, Homo sapiens
gcaaacattacacgcagacaagaaaa

SEQ ID NO: 93723 - DNA, 26 bp, Homo sapiens
caaacattacacgcagacaagaaaag

SEQ ID NO: 93724 - DNA, 26 bp, Homo sapiens
aaacattacacgcagacaagaaaagt

SEQ ID NO: 93725 - DNA, 26 bp, Homo sapiens
aacattacacgcagacaagaaaagtg

SEQ ID NO: 93726 - DNA, 26 bp, Homo sapiens
acattacacgcagacaagaaaagtgt

SEQ ID NO: 93727 - DNA, 26 bp, Homo sapiens
cattacacgcagacaagaaaagtgta

SEQ ID NO: 93728 - DNA, 26 bp, Homo sapiens
attacacgcagacaagaaaagtgtaa

SEQ ID NO: 93729 - DNA, 26 bp, Homo sapiens
ttacacgcagacaagaaaagtgtaat

SEQ ID NO: 93730 - DNA, 26 bp, Homo sapiens
tacacgcagacaagaaaagtgtaatt

SEQ ID NO: 93731 - DNA, 26 bp, Homo sapiens
acacgcagacaagaaaagtgtaattt

SEQ ID NO: 93732 - DNA, 26 bp, Homo sapiens
cacgcagacaagaaaagtgtaatttc

SEQ ID NO: 93733 - DNA, 26 bp, Homo sapiens
acgcagacaagaaaagtgtaatttct

SEQ ID NO: 93734 - DNA, 26 bp, Homo sapiens
cgcagacaagaaaagtgtaatttctt

SEQ ID NO: 93735 - DNA, 26 bp, Homo sapiens
gcagacaagaaaagtgtaatttcttt

SEQ ID NO: 93736 - DNA, 26 bp, Homo sapiens
cagacaagaaaagtgtaatttctttg

SEQ ID NO: 93737 - DNA, 26 bp, Homo sapiens
agacaagaaaagtgtaatttctttgc

SEQ ID NO: 93738 - DNA, 26 bp, Homo sapiens
gacaagaaaagtgtaatttctttgca

SEQ ID NO: 93739 - DNA, 26 bp, Homo sapiens
acaagaaaagtgtaatttctttgcag

SEQ ID NO: 93740 - DNA, 26 bp, Homo sapiens
caagaaaagtgtaatttctttgcagt

SEQ ID NO: 93741 - DNA, 26 bp, Homo sapiens
aagaaaagtgtaatttctttgcagta

SEQ ID NO: 93742 - DNA, 26 bp, Homo sapiens
agaaaagtgtaatttctttgcagtaa

SEQ ID NO: 93743 - DNA, 26 bp, Homo sapiens
gaaaagtgtaatttctttgcagtaat

SEQ ID NO: 93744 - DNA, 26 bp, Homo sapiens
aaaagtgtaatttctttgcagtaata

SEQ ID NO: 93745 - DNA, 26 bp, Homo sapiens
aaagtgtaatttctttgcagtaatat

SEQ ID NO: 93746 - DNA, 26 bp, Homo sapiens
aagtgtaatttctttgcagtaatata

SEQ ID NO: 93747 - DNA, 26 bp, Homo sapiens
agtgtaatttctttgcagtaatatag

SEQ ID NO: 93748 - DNA, 26 bp, Homo sapiens
gtgtaatttctttgcagtaatatagg

SEQ ID NO: 93749 - DNA, 26 bp, Homo sapiens
tgtaatttctttgcagtaatatagga

SEQ ID NO: 93750 - DNA, 26 bp, Homo sapiens
gtaatttctttgcagtaatataggat

SEQ ID NO: 93751 - DNA, 26 bp, Homo sapiens
taatttctttgcagtaatataggatt

SEQ ID NO: 93752 - DNA, 26 bp, Homo sapiens
aatttctttgcagtaatataggattt

SEQ ID NO: 93753 - DNA, 26 bp, Homo sapiens
atttctttgcagtaatataggatttt

SEQ ID NO: 93754 - DNA, 26 bp, Homo sapiens
tttctttgcagtaatataggattttt

SEQ ID NO: 93755 - DNA, 26 bp, Homo sapiens
ttctttgcagtaatataggatttttt

SEQ ID NO: 93756 - DNA, 26 bp, Homo sapiens
tctttgcagtaatataggattttttg

SEQ ID NO: 93757 - DNA, 26 bp, Homo sapiens
ctttgcagtaatataggattttttgt

SEQ ID NO: 93758 - DNA, 26 bp, Homo sapiens
tttgcagtaatataggattttttgtg

SEQ ID NO: 93759 - DNA, 26 bp, Homo sapiens
ttgcagtaatataggattttttgtgc

SEQ ID NO: 93760 - DNA, 26 bp, Homo sapiens
tgcagtaatataggattttttgtgca

SEQ ID NO: 93761 - DNA, 26 bp, Homo sapiens
gcagtaatataggattttttgtgcag

SEQ ID NO: 93762 - DNA, 26 bp, Homo sapiens
cagtaatataggattttttgtgcaga

SEQ ID NO: 93763 - DNA, 26 bp, Homo sapiens
agtaatataggattttttgtgcagat

SEQ ID NO: 93764 - DNA, 26 bp, Homo sapiens
gtaatataggattttttgtgcagatt

SEQ ID NO: 93765 - DNA, 26 bp, Homo sapiens
taatataggattttttgtgcagattc

SEQ ID NO: 93766 - DNA, 26 bp, Homo sapiens
aatataggattttttgtgcagattca

SEQ ID NO: 93767 - DNA, 26 bp, Homo sapiens
atataggattttttgtgcagattcat

SEQ ID NO: 93768 - DNA, 26 bp, Homo sapiens
tataggattttttgtgcagattcatc

SEQ ID NO: 93769 - DNA, 26 bp, Homo sapiens
ataggattttttgtgcagattcatct

SEQ ID NO: 93770 - DNA, 26 bp, Homo sapiens
taggattttttgtgcagattcatcta

SEQ ID NO: 93771 - DNA, 26 bp, Homo sapiens
aggattttttgtgcagattcatctaa

SEQ ID NO: 93772 - DNA, 26 bp, Homo sapiens
ggattttttgtgcagattcatctaaa

SEQ ID NO: 93773 - DNA, 26 bp, Homo sapiens
gattttttgtgcagattcatctaaaa

SEQ ID NO: 93774 - DNA, 26 bp, Homo sapiens
attttttgtgcagattcatctaaaag

SEQ ID NO: 93775 - DNA, 26 bp, Homo sapiens
ttttttgtgcagattcatctaaaagc

SEQ ID NO: 93776 - DNA, 26 bp, Homo sapiens
tttttgtgcagattcatctaaaagcc

SEQ ID NO: 93777 - DNA, 26 bp, Homo sapiens
ttttgtgcagattcatctaaaagcct

SEQ ID NO: 93778 - DNA, 26 bp, Homo sapiens
tttgtgcagattcatctaaaagcctg

SEQ ID NO: 93779 - DNA, 26 bp, Homo sapiens
ttgtgcagattcatctaaaagcctgt

SEQ ID NO: 93780 - DNA, 26 bp, Homo sapiens
tgtgcagattcatctaaaagcctgtc

SEQ ID NO: 93781 - DNA, 26 bp, Homo sapiens
gtgcagattcatctaaaagcctgtct

SEQ ID NO: 93782 - DNA, 26 bp, Homo sapiens
tgcagattcatctaaaagcctgtcta

SEQ ID NO: 93783 - DNA, 26 bp, Homo sapiens
gcagattcatctaaaagcctgtctaa

SEQ ID NO: 93784 - DNA, 26 bp, Homo sapiens
cagattcatctaaaagcctgtctaag

SEQ ID NO: 93785 - DNA, 26 bp, Homo sapiens
agattcatctaaaagcctgtctaagt

SEQ ID NO: 93786 - DNA, 26 bp, Homo sapiens
gattcatctaaaagcctgtctaagtg

SEQ ID NO: 93787 - DNA, 26 bp, Homo sapiens
attcatctaaaagcctgtctaagtga

SEQ ID NO: 93788 - DNA, 26 bp, Homo sapiens
ttcatctaaaagcctgtctaagtgac

SEQ ID NO: 93789 - DNA, 26 bp, Homo sapiens
tcatctaaaagcctgtctaagtgact

SEQ ID NO: 93790 - DNA, 26 bp, Homo sapiens
catctaaaagcctgtctaagtgacta

SEQ ID NO: 93791 - DNA, 26 bp, Homo sapiens
atctaaaagcctgtctaagtgactaa

SEQ ID NO: 93792 - DNA, 26 bp, Homo sapiens
tctaaaagcctgtctaagtgactaaa

SEQ ID NO: 93793 - DNA, 26 bp, Homo sapiens
ctaaaagcctgtctaagtgactaaaa

SEQ ID NO: 93794 - DNA, 26 bp, Homo sapiens
taaaagcctgtctaagtgactaaaag

SEQ ID NO: 93795 - DNA, 26 bp, Homo sapiens
aaaagcctgtctaagtgactaaaagt

SEQ ID NO: 93796 - DNA, 26 bp, Homo sapiens
aaagcctgtctaagtgactaaaagta

SEQ ID NO: 93797 - DNA, 26 bp, Homo sapiens
aagcctgtctaagtgactaaaagtaa

SEQ ID NO: 93798 - DNA, 26 bp, Homo sapiens
agcctgtctaagtgactaaaagtaaa

SEQ ID NO: 93799 - DNA, 26 bp, Homo sapiens
gcctgtctaagtgactaaaagtaaaa

SEQ ID NO: 93800 - DNA, 26 bp, Homo sapiens
cctgtctaagtgactaaaagtaaaag

SEQ ID NO: 93801 - DNA, 26 bp, Homo sapiens
ctgtctaagtgactaaaagtaaaagg

SEQ ID NO: 93802 - DNA, 26 bp, Homo sapiens
tgtctaagtgactaaaagtaaaagga

SEQ ID NO: 93803 - DNA, 26 bp, Homo sapiens
gtctaagtgactaaaagtaaaaggaa

SEQ ID NO: 93804 - DNA, 26 bp, Homo sapiens
tctaagtgactaaaagtaaaaggaat

SEQ ID NO: 93805 - DNA, 26 bp, Homo sapiens
ctaagtgactaaaagtaaaaggaatt

SEQ ID NO: 93806 - DNA, 26 bp, Homo sapiens
taagtgactaaaagtaaaaggaattc

SEQ ID NO: 93807 - DNA, 26 bp, Homo sapiens
aagtgactaaaagtaaaaggaattct

SEQ ID NO: 93808 - DNA, 26 bp, Homo sapiens
agtgactaaaagtaaaaggaattctg

SEQ ID NO: 93809 - DNA, 26 bp, Homo sapiens
gtgactaaaagtaaaaggaattctgc

SEQ ID NO: 93810 - DNA, 26 bp, Homo sapiens
tgactaaaagtaaaaggaattctgca

SEQ ID NO: 93811 - DNA, 26 bp, Homo sapiens
gactaaaagtaaaaggaattctgcac

SEQ ID NO: 93812 - DNA, 26 bp, Homo sapiens
actaaaagtaaaaggaattctgcaca

SEQ ID NO: 93813 - DNA, 26 bp, Homo sapiens
ctaaaagtaaaaggaattctgcacaa

SEQ ID NO: 93814 - DNA, 26 bp, Homo sapiens
taaaagtaaaaggaattctgcacaag

SEQ ID NO: 93815 - DNA, 26 bp, Homo sapiens
aaaagtaaaaggaattctgcacaagt

SEQ ID NO: 93816 - DNA, 26 bp, Homo sapiens
aaagtaaaaggaattctgcacaagtg

SEQ ID NO: 93817 - DNA, 26 bp, Homo sapiens
aagtaaaaggaattctgcacaagtga

SEQ ID NO: 93818 - DNA, 26 bp, Homo sapiens
agtaaaaggaattctgcacaagtgat

SEQ ID NO: 93819 - DNA, 26 bp, Homo sapiens
gtaaaaggaattctgcacaagtgata

SEQ ID NO: 93820 - DNA, 26 bp, Homo sapiens
taaaaggaattctgcacaagtgatat

SEQ ID NO: 93821 - DNA, 26 bp, Homo sapiens
aaaaggaattctgcacaagtgatatg

SEQ ID NO: 93822 - DNA, 26 bp, Homo sapiens
aaaggaattctgcacaagtgatatgg

SEQ ID NO: 93823 - DNA, 26 bp, Homo sapiens
aaggaattctgcacaagtgatatggt

SEQ ID NO: 93824 - DNA, 26 bp, Homo sapiens
aggaattctgcacaagtgatatggta

SEQ ID NO: 93825 - DNA, 26 bp, Homo sapiens
ggaattctgcacaagtgatatggtag

SEQ ID NO: 93826 - DNA, 26 bp, Homo sapiens
gaattctgcacaagtgatatggtaga

SEQ ID NO: 93827 - DNA, 26 bp, Homo sapiens
aattctgcacaagtgatatggtagaa

SEQ ID NO: 93828 - DNA, 26 bp, Homo sapiens
attctgcacaagtgatatggtagaaa

SEQ ID NO: 93829 - DNA, 26 bp, Homo sapiens
ttctgcacaagtgatatggtagaaag

SEQ ID NO: 93830 - DNA, 26 bp, Homo sapiens
tctgcacaagtgatatggtagaaagc

SEQ ID NO: 93831 - DNA, 26 bp, Homo sapiens
ctgcacaagtgatatggtagaaagca

SEQ ID NO: 93832 - DNA, 26 bp, Homo sapiens
tgcacaagtgatatggtagaaagcag

SEQ ID NO: 93833 - DNA, 26 bp, Homo sapiens
gcacaagtgatatggtagaaagcagg

SEQ ID NO: 93834 - DNA, 26 bp, Homo sapiens
cacaagtgatatggtagaaagcaggt

SEQ ID NO: 93835 - DNA, 26 bp, Homo sapiens
acaagtgatatggtagaaagcaggta

SEQ ID NO: 93836 - DNA, 26 bp, Homo sapiens
caagtgatatggtagaaagcaggtaa

SEQ ID NO: 93837 - DNA, 26 bp, Homo sapiens
aagtgatatggtagaaagcaggtaaa

SEQ ID NO: 93838 - DNA, 26 bp, Homo sapiens
agtgatatggtagaaagcaggtaaaa

SEQ ID NO: 93839 - DNA, 26 bp, Homo sapiens
gtgatatggtagaaagcaggtaaaaa

SEQ ID NO: 93840 - DNA, 26 bp, Homo sapiens
tgatatggtagaaagcaggtaaaaaa

SEQ ID NO: 93841 - DNA, 26 bp, Homo sapiens
gatatggtagaaagcaggtaaaaaac

SEQ ID NO: 93842 - DNA, 26 bp, Homo sapiens
atatggtagaaagcaggtaaaaaaca

SEQ ID NO: 93843 - DNA, 26 bp, Homo sapiens
tatggtagaaagcaggtaaaaaacac

SEQ ID NO: 93844 - DNA, 26 bp, Homo sapiens
atggtagaaagcaggtaaaaaacaca

SEQ ID NO: 93845 - DNA, 26 bp, Homo sapiens
tggtagaaagcaggtaaaaaacacag

SEQ ID NO: 93846 - DNA, 26 bp, Homo sapiens
ggtagaaagcaggtaaaaaacacagc

SEQ ID NO: 93847 - DNA, 26 bp, Homo sapiens
gtagaaagcaggtaaaaaacacagcc

SEQ ID NO: 93848 - DNA, 26 bp, Homo sapiens
tagaaagcaggtaaaaaacacagcca

SEQ ID NO: 93849 - DNA, 26 bp, Homo sapiens
agaaagcaggtaaaaaacacagccac

SEQ ID NO: 93850 - DNA, 26 bp, Homo sapiens
gaaagcaggtaaaaaacacagccaca

SEQ ID NO: 93851 - DNA, 26 bp, Homo sapiens
aaagcaggtaaaaaacacagccacaa

SEQ ID NO: 93852 - DNA, 26 bp, Homo sapiens
aagcaggtaaaaaacacagccacaac

SEQ ID NO: 93853 - DNA, 26 bp, Homo sapiens
agcaggtaaaaaacacagccacaaca

SEQ ID NO: 93854 - DNA, 26 bp, Homo sapiens
gcaggtaaaaaacacagccacaacaa

SEQ ID NO: 93855 - DNA, 26 bp, Homo sapiens
caggtaaaaaacacagccacaacaac

SEQ ID NO: 93856 - DNA, 26 bp, Homo sapiens
aggtaaaaaacacagccacaacaacc

SEQ ID NO: 93857 - DNA, 26 bp, Homo sapiens
ggtaaaaaacacagccacaacaaccc

SEQ ID NO: 93858 - DNA, 26 bp, Homo sapiens
gtaaaaaacacagccacaacaaccct

SEQ ID NO: 93859 - DNA, 26 bp, Homo sapiens
taaaaaacacagccacaacaaccctg

SEQ ID NO: 93860 - DNA, 26 bp, Homo sapiens
aaaaaacacagccacaacaaccctga

SEQ ID NO: 93861 - DNA, 26 bp, Homo sapiens
aaaaacacagccacaacaaccctgat

SEQ ID NO: 93862 - DNA, 26 bp, Homo sapiens
aaaacacagccacaacaaccctgatg

SEQ ID NO: 93863 - DNA, 26 bp, Homo sapiens
aaacacagccacaacaaccctgatgc

SEQ ID NO: 93864 - DNA, 26 bp, Homo sapiens
aacacagccacaacaaccctgatgct

SEQ ID NO: 93865 - DNA, 26 bp, Homo sapiens
acacagccacaacaaccctgatgctc

SEQ ID NO: 93866 - DNA, 26 bp, Homo sapiens
cacagccacaacaaccctgatgctct

SEQ ID NO: 93867 - DNA, 26 bp, Homo sapiens
acagccacaacaaccctgatgctctg

SEQ ID NO: 93868 - DNA, 26 bp, Homo sapiens
cagccacaacaaccctgatgctctgg

SEQ ID NO: 93869 - DNA, 26 bp, Homo sapiens
agccacaacaaccctgatgctctggt

SEQ ID NO: 93870 - DNA, 26 bp, Homo sapiens
gccacaacaaccctgatgctctggtt

SEQ ID NO: 93871 - DNA, 26 bp, Homo sapiens
ccacaacaaccctgatgctctggtta

SEQ ID NO: 93872 - DNA, 26 bp, Homo sapiens
cacaacaaccctgatgctctggttat

SEQ ID NO: 93873 - DNA, 26 bp, Homo sapiens
acaacaaccctgatgctctggttatg

SEQ ID NO: 93874 - DNA, 26 bp, Homo sapiens
caacaaccctgatgctctggttatgt

SEQ ID NO: 93875 - DNA, 26 bp, Homo sapiens
aacaaccctgatgctctggttatgtt

SEQ ID NO: 93876 - DNA, 26 bp, Homo sapiens
acaaccctgatgctctggttatgttt

SEQ ID NO: 93877 - DNA, 26 bp, Homo sapiens
caaccctgatgctctggttatgtttt

SEQ ID NO: 93878 - DNA, 26 bp, Homo sapiens
aaccctgatgctctggttatgttttc

SEQ ID NO: 93879 - DNA, 26 bp, Homo sapiens
accctgatgctctggttatgttttcg

SEQ ID NO: 93880 - DNA, 26 bp, Homo sapiens
ccctgatgctctggttatgttttcgc

SEQ ID NO: 93881 - DNA, 26 bp, Homo sapiens
cctgatgctctggttatgttttcgct

SEQ ID NO: 93882 - DNA, 26 bp, Homo sapiens
ctgatgctctggttatgttttcgctt

SEQ ID NO: 93883 - DNA, 26 bp, Homo sapiens
tgatgctctggttatgttttcgcttt

SEQ ID NO: 93884 - DNA, 26 bp, Homo sapiens
gatgctctggttatgttttcgctttc

SEQ ID NO: 93885 - DNA, 26 bp, Homo sapiens
atgctctggttatgttttcgctttcg

SEQ ID NO: 93886 - DNA, 26 bp, Homo sapiens
tgctctggttatgttttcgctttcgg

SEQ ID NO: 93887 - DNA, 26 bp, Homo sapiens
gctctggttatgttttcgctttcggc

SEQ ID NO: 93888 - DNA, 26 bp, Homo sapiens
ctctggttatgttttcgctttcggct

SEQ ID NO: 93889 - DNA, 26 bp, Homo sapiens
tctggttatgttttcgctttcggctt

SEQ ID NO: 93890 - DNA, 26 bp, Homo sapiens
ctggttatgttttcgctttcggcttg

SEQ ID NO: 93891 - DNA, 26 bp, Homo sapiens
tggttatgttttcgctttcggcttga

SEQ ID NO: 93892 - DNA, 26 bp, Homo sapiens
ggttatgttttcgctttcggcttgac

SEQ ID NO: 93893 - DNA, 26 bp, Homo sapiens
gttatgttttcgctttcggcttgact

SEQ ID NO: 93894 - DNA, 26 bp, Homo sapiens
ttatgttttcgctttcggcttgactg

SEQ ID NO: 93895 - DNA, 26 bp, Homo sapiens
tatgttttcgctttcggcttgactga

SEQ ID NO: 93896 - DNA, 26 bp, Homo sapiens
atgttttcgctttcggcttgactgac

SEQ ID NO: 93897 - DNA, 26 bp, Homo sapiens
tgttttcgctttcggcttgactgact

SEQ ID NO: 93898 - DNA, 26 bp, Homo sapiens
gttttcgctttcggcttgactgactt

SEQ ID NO: 93899 - DNA, 26 bp, Homo sapiens
ttttcgctttcggcttgactgactta

SEQ ID NO: 93900 - DNA, 26 bp, Homo sapiens
tttcgctttcggcttgactgacttat

SEQ ID NO: 93901 - DNA, 26 bp, Homo sapiens
ttcgctttcggcttgactgacttatg

SEQ ID NO: 93902 - DNA, 26 bp, Homo sapiens
tcgctttcggcttgactgacttatga

SEQ ID NO: 93903 - DNA, 26 bp, Homo sapiens
cgctttcggcttgactgacttatgaa

SEQ ID NO: 93904 - DNA, 26 bp, Homo sapiens
gctttcggcttgactgacttatgaat

SEQ ID NO: 93905 - DNA, 26 bp, Homo sapiens
ctttcggcttgactgacttatgaatt

SEQ ID NO: 93906 - DNA, 26 bp, Homo sapiens
tttcggcttgactgacttatgaattg

SEQ ID NO: 93907 - DNA, 26 bp, Homo sapiens
ttcggcttgactgacttatgaattgc

SEQ ID NO: 93908 - DNA, 26 bp, Homo sapiens
tcggcttgactgacttatgaattgcc

SEQ ID NO: 93909 - DNA, 26 bp, Homo sapiens
cggcttgactgacttatgaattgcct

SEQ ID NO: 93910 - DNA, 26 bp, Homo sapiens
ggcttgactgacttatgaattgcctg

SEQ ID NO: 93911 - DNA, 26 bp, Homo sapiens
gcttgactgacttatgaattgcctgc

SEQ ID NO: 93912 - DNA, 26 bp, Homo sapiens
cttgactgacttatgaattgcctgct

SEQ ID NO: 93913 - DNA, 26 bp, Homo sapiens
ttgactgacttatgaattgcctgctg

SEQ ID NO: 93914 - DNA, 26 bp, Homo sapiens
tgactgacttatgaattgcctgctgg

SEQ ID NO: 93915 - DNA, 26 bp, Homo sapiens
gactgacttatgaattgcctgctgga

SEQ ID NO: 93916 - DNA, 26 bp, Homo sapiens
actgacttatgaattgcctgctggat

SEQ ID NO: 93917 - DNA, 26 bp, Homo sapiens
ctgacttatgaattgcctgctggatt

SEQ ID NO: 93918 - DNA, 26 bp, Homo sapiens
tgacttatgaattgcctgctggattt

SEQ ID NO: 93919 - DNA, 26 bp, Homo sapiens
gacttatgaattgcctgctggatttg

SEQ ID NO: 93920 - DNA, 26 bp, Homo sapiens
acttatgaattgcctgctggatttgt

SEQ ID NO: 93921 - DNA, 26 bp, Homo sapiens
cttatgaattgcctgctggatttgtg

SEQ ID NO: 93922 - DNA, 26 bp, Homo sapiens
ttatgaattgcctgctggatttgtgg

SEQ ID NO: 93923 - DNA, 26 bp, Homo sapiens
tatgaattgcctgctggatttgtgga

SEQ ID NO: 93924 - DNA, 26 bp, Homo sapiens
atgaattgcctgctggatttgtggat

SEQ ID NO: 93925 - DNA, 26 bp, Homo sapiens
tgaattgcctgctggatttgtggatg

SEQ ID NO: 93926 - DNA, 26 bp, Homo sapiens
gaattgcctgctggatttgtggatgt

SEQ ID NO: 93927 - DNA, 26 bp, Homo sapiens
aattgcctgctggatttgtggatgta

SEQ ID NO: 93928 - DNA, 26 bp, Homo sapiens
attgcctgctggatttgtggatgtac

SEQ ID NO: 93929 - DNA, 26 bp, Homo sapiens
ttgcctgctggatttgtggatgtacc

SEQ ID NO: 93930 - DNA, 26 bp, Homo sapiens
tgcctgctggatttgtggatgtacct

SEQ ID NO: 93931 - DNA, 26 bp, Homo sapiens
gcctgctggatttgtggatgtacctg

SEQ ID NO: 93932 - DNA, 26 bp, Homo sapiens
cctgctggatttgtggatgtacctgg

SEQ ID NO: 93933 - DNA, 26 bp, Homo sapiens
ctgctggatttgtggatgtacctgga

SEQ ID NO: 93934 - DNA, 26 bp, Homo sapiens
tgctggatttgtggatgtacctggat

SEQ ID NO: 93935 - DNA, 26 bp, Homo sapiens
gctggatttgtggatgtacctggata

SEQ ID NO: 93936 - DNA, 26 bp, Homo sapiens
ctggatttgtggatgtacctggatat

SEQ ID NO: 93937 - DNA, 26 bp, Homo sapiens
tggatttgtggatgtacctggatatg

SEQ ID NO: 93938 - DNA, 26 bp, Homo sapiens
ggatttgtggatgtacctggatatgg

SEQ ID NO: 93939 - DNA, 26 bp, Homo sapiens
gatttgtggatgtacctggatatggc

SEQ ID NO: 93940 - DNA, 26 bp, Homo sapiens
atttgtggatgtacctggatatggct

SEQ ID NO: 93941 - DNA, 26 bp, Homo sapiens
tttgtggatgtacctggatatggcta

SEQ ID NO: 93942 - DNA, 26 bp, Homo sapiens
ttgtggatgtacctggatatggctat

SEQ ID NO: 93943 - DNA, 26 bp, Homo sapiens
tgtggatgtacctggatatggctatg

SEQ ID NO: 93944 - DNA, 26 bp, Homo sapiens
gtggatgtacctggatatggctatgt

SEQ ID NO: 93945 - DNA, 26 bp, Homo sapiens
tggatgtacctggatatggctatgta

SEQ ID NO: 93946 - DNA, 26 bp, Homo sapiens
ggatgtacctggatatggctatgtaa

SEQ ID NO: 93947 - DNA, 26 bp, Homo sapiens
gatgtacctggatatggctatgtaac

SEQ ID NO: 93948 - DNA, 26 bp, Homo sapiens
atgtacctggatatggctatgtaaca

SEQ ID NO: 93949 - DNA, 26 bp, Homo sapiens
tgtacctggatatggctatgtaacat

SEQ ID NO: 93950 - DNA, 26 bp, Homo sapiens
gtacctggatatggctatgtaacatc

SEQ ID NO: 93951 - DNA, 26 bp, Homo sapiens
tacctggatatggctatgtaacatcc

SEQ ID NO: 93952 - DNA, 26 bp, Homo sapiens
acctggatatggctatgtaacatccg

SEQ ID NO: 93953 - DNA, 26 bp, Homo sapiens
cctggatatggctatgtaacatccga

SEQ ID NO: 93954 - DNA, 26 bp, Homo sapiens
ctggatatggctatgtaacatccgat

SEQ ID NO: 93955 - DNA, 26 bp, Homo sapiens
tggatatggctatgtaacatccgatc

SEQ ID NO: 93956 - DNA, 26 bp, Homo sapiens
ggatatggctatgtaacatccgatca

SEQ ID NO: 93957 - DNA, 26 bp, Homo sapiens
gatatggctatgtaacatccgatcag

SEQ ID NO: 93958 - DNA, 26 bp, Homo sapiens
atatggctatgtaacatccgatcaga

SEQ ID NO: 93959 - DNA, 26 bp, Homo sapiens
tatggctatgtaacatccgatcagaa

SEQ ID NO: 93960 - DNA, 26 bp, Homo sapiens
atggctatgtaacatccgatcagaat

SEQ ID NO: 93961 - DNA, 26 bp, Homo sapiens
tggctatgtaacatccgatcagaatc

SEQ ID NO: 93962 - DNA, 26 bp, Homo sapiens
ggctatgtaacatccgatcagaatca

SEQ ID NO: 93963 - DNA, 26 bp, Homo sapiens
gctatgtaacatccgatcagaatcac

SEQ ID NO: 93964 - DNA, 26 bp, Homo sapiens
ctatgtaacatccgatcagaatcacc

SEQ ID NO: 93965 - DNA, 26 bp, Homo sapiens
tatgtaacatccgatcagaatcacca

SEQ ID NO: 93966 - DNA, 26 bp, Homo sapiens
atgtaacatccgatcagaatcaccag

SEQ ID NO: 93967 - DNA, 26 bp, Homo sapiens
tgtaacatccgatcagaatcaccagc

SEQ ID NO: 93968 - DNA, 26 bp, Homo sapiens
gtaacatccgatcagaatcaccagca

SEQ ID NO: 93969 - DNA, 26 bp, Homo sapiens
taacatccgatcagaatcaccagcac

SEQ ID NO: 93970 - DNA, 26 bp, Homo sapiens
aacatccgatcagaatcaccagcacg

SEQ ID NO: 93971 - DNA, 26 bp, Homo sapiens
acatccgatcagaatcaccagcacgg

SEQ ID NO: 93972 - DNA, 26 bp, Homo sapiens
catccgatcagaatcaccagcacggc

SEQ ID NO: 93973 - DNA, 26 bp, Homo sapiens
atccgatcagaatcaccagcacggcc

SEQ ID NO: 93974 - DNA, 26 bp, Homo sapiens
tccgatcagaatcaccagcacggcca

SEQ ID NO: 93975 - DNA, 26 bp, Homo sapiens
ccgatcagaatcaccagcacggccac

SEQ ID NO: 93976 - DNA, 26 bp, Homo sapiens
cgatcagaatcaccagcacggccaca

SEQ ID NO: 93977 - DNA, 26 bp, Homo sapiens
gatcagaatcaccagcacggccacaa

SEQ ID NO: 93978 - DNA, 26 bp, Homo sapiens
atcagaatcaccagcacggccacaaa

SEQ ID NO: 93979 - DNA, 26 bp, Homo sapiens
tcagaatcaccagcacggccacaaac

SEQ ID NO: 93980 - DNA, 26 bp, Homo sapiens
cagaatcaccagcacggccacaaaca

SEQ ID NO: 93981 - DNA, 26 bp, Homo sapiens
agaatcaccagcacggccacaaacaa

SEQ ID NO: 93982 - DNA, 26 bp, Homo sapiens
gaatcaccagcacggccacaaacaag

SEQ ID NO: 93983 - DNA, 26 bp, Homo sapiens
aatcaccagcacggccacaaacaagc

SEQ ID NO: 93984 - DNA, 26 bp, Homo sapiens
atcaccagcacggccacaaacaagca

SEQ ID NO: 93985 - DNA, 26 bp, Homo sapiens
tcaccagcacggccacaaacaagcag

SEQ ID NO: 93986 - DNA, 26 bp, Homo sapiens
caccagcacggccacaaacaagcagc

SEQ ID NO: 93987 - DNA, 26 bp, Homo sapiens
accagcacggccacaaacaagcagct

SEQ ID NO: 93988 - DNA, 26 bp, Homo sapiens
ccagcacggccacaaacaagcagctg

SEQ ID NO: 93989 - DNA, 26 bp, Homo sapiens
cagcacggccacaaacaagcagctgt

SEQ ID NO: 93990 - DNA, 26 bp, Homo sapiens
agcacggccacaaacaagcagctgtt

SEQ ID NO: 93991 - DNA, 26 bp, Homo sapiens
gcacggccacaaacaagcagctgttc

SEQ ID NO: 93992 - DNA, 26 bp, Homo sapiens
cacggccacaaacaagcagctgttca

SEQ ID NO: 93993 - DNA, 26 bp, Homo sapiens
acggccacaaacaagcagctgttcac

SEQ ID NO: 93994 - DNA, 26 bp, Homo sapiens
cggccacaaacaagcagctgttcaca

SEQ ID NO: 93995 - DNA, 26 bp, Homo sapiens
ggccacaaacaagcagctgttcacat

SEQ ID NO: 93996 - DNA, 26 bp, Homo sapiens
gccacaaacaagcagctgttcacata

SEQ ID NO: 93997 - DNA, 26 bp, Homo sapiens
ccacaaacaagcagctgttcacatag

SEQ ID NO: 93998 - DNA, 26 bp, Homo sapiens
cacaaacaagcagctgttcacatagg

SEQ ID NO: 93999 - DNA, 26 bp, Homo sapiens
acaaacaagcagctgttcacataggt

SEQ ID NO: 94000 - DNA, 26 bp, Homo sapiens
caaacaagcagctgttcacataggtg

SEQ ID NO: 94001 - DNA, 26 bp, Homo sapiens
aaacaagcagctgttcacataggtga

SEQ ID NO: 94002 - DNA, 26 bp, Homo sapiens
aacaagcagctgttcacataggtgac

SEQ ID NO: 94003 - DNA, 26 bp, Homo sapiens
acaagcagctgttcacataggtgact

SEQ ID NO: 94004 - DNA, 26 bp, Homo sapiens
caagcagctgttcacataggtgactg

SEQ ID NO: 94005 - DNA, 26 bp, Homo sapiens
aagcagctgttcacataggtgactgc

SEQ ID NO: 94006 - DNA, 26 bp, Homo sapiens
agcagctgttcacataggtgactgcc

SEQ ID NO: 94007 - DNA, 26 bp, Homo sapiens
gcagctgttcacataggtgactgccg

SEQ ID NO: 94008 - DNA, 26 bp, Homo sapiens
cagctgttcacataggtgactgccgt

SEQ ID NO: 94009 - DNA, 26 bp, Homo sapiens
agctgttcacataggtgactgccgta

SEQ ID NO: 94010 - DNA, 26 bp, Homo sapiens
gctgttcacataggtgactgccgtat

SEQ ID NO: 94011 - DNA, 26 bp, Homo sapiens
ctgttcacataggtgactgccgtatg

SEQ ID NO: 94012 - DNA, 26 bp, Homo sapiens
tgttcacataggtgactgccgtatgc

SEQ ID NO: 94013 - DNA, 26 bp, Homo sapiens
gttcacataggtgactgccgtatgcc

SEQ ID NO: 94014 - DNA, 26 bp, Homo sapiens
ttcacataggtgactgccgtatgcca

SEQ ID NO: 94015 - DNA, 26 bp, Homo sapiens
tcacataggtgactgccgtatgccat

SEQ ID NO: 94016 - DNA, 26 bp, Homo sapiens
cacataggtgactgccgtatgccatt

SEQ ID NO: 94017 - DNA, 26 bp, Homo sapiens
acataggtgactgccgtatgccattt

SEQ ID NO: 94018 - DNA, 26 bp, Homo sapiens
cataggtgactgccgtatgccatttg

SEQ ID NO: 94019 - DNA, 26 bp, Homo sapiens
ataggtgactgccgtatgccatttga

SEQ ID NO: 94020 - DNA, 26 bp, Homo sapiens
taggtgactgccgtatgccatttgac

SEQ ID NO: 94021 - DNA, 26 bp, Homo sapiens
aggtgactgccgtatgccatttgacc

SEQ ID NO: 94022 - DNA, 26 bp, Homo sapiens
ggtgactgccgtatgccatttgaccc

SEQ ID NO: 94023 - DNA, 26 bp, Homo sapiens
gtgactgccgtatgccatttgacccc

SEQ ID NO: 94024 - DNA, 26 bp, Homo sapiens
tgactgccgtatgccatttgaccccc

SEQ ID NO: 94025 - DNA, 26 bp, Homo sapiens
gactgccgtatgccatttgaccccca

SEQ ID NO: 94026 - DNA, 26 bp, Homo sapiens
actgccgtatgccatttgacccccaa

SEQ ID NO: 94027 - DNA, 26 bp, Homo sapiens
ctgccgtatgccatttgacccccaaa

SEQ ID NO: 94028 - DNA, 26 bp, Homo sapiens
tgccgtatgccatttgacccccaaag

SEQ ID NO: 94029 - DNA, 26 bp, Homo sapiens
gccgtatgccatttgacccccaaagg

SEQ ID NO: 94030 - DNA, 26 bp, Homo sapiens
ccgtatgccatttgacccccaaagga

SEQ ID NO: 94031 - DNA, 26 bp, Homo sapiens
cgtatgccatttgacccccaaaggac

SEQ ID NO: 94032 - DNA, 26 bp, Homo sapiens
gtatgccatttgacccccaaaggact

SEQ ID NO: 94033 - DNA, 26 bp, Homo sapiens
tatgccatttgacccccaaaggactt

SEQ ID NO: 94034 - DNA, 26 bp, Homo sapiens
atgccatttgacccccaaaggacttt

SEQ ID NO: 94035 - DNA, 26 bp, Homo sapiens
tgccatttgacccccaaaggactttt

SEQ ID NO: 94036 - DNA, 26 bp, Homo sapiens
gccatttgacccccaaaggactttta

SEQ ID NO: 94037 - DNA, 26 bp, Homo sapiens
ccatttgacccccaaaggacttttaa

SEQ ID NO: 94038 - DNA, 26 bp, Homo sapiens
catttgacccccaaaggacttttaag

SEQ ID NO: 94039 - DNA, 26 bp, Homo sapiens
atttgacccccaaaggacttttaagt

SEQ ID NO: 94040 - DNA, 26 bp, Homo sapiens
tttgacccccaaaggacttttaagtt

SEQ ID NO: 94041 - DNA, 26 bp, Homo sapiens
ttgacccccaaaggacttttaagttt

SEQ ID NO: 94042 - DNA, 26 bp, Homo sapiens
tgacccccaaaggacttttaagtttt

SEQ ID NO: 94043 - DNA, 26 bp, Homo sapiens
gacccccaaaggacttttaagttttg

SEQ ID NO: 94044 - DNA, 26 bp, Homo sapiens
acccccaaaggacttttaagttttga

SEQ ID NO: 94045 - DNA, 26 bp, Homo sapiens
cccccaaaggacttttaagttttgag

SEQ ID NO: 94046 - DNA, 26 bp, Homo sapiens
ccccaaaggacttttaagttttgagc

SEQ ID NO: 94047 - DNA, 26 bp, Homo sapiens
cccaaaggacttttaagttttgagca

SEQ ID NO: 94048 - DNA, 26 bp, Homo sapiens
ccaaaggacttttaagttttgagcag

SEQ ID NO: 94049 - DNA, 26 bp, Homo sapiens
caaaggacttttaagttttgagcagt

SEQ ID NO: 94050 - DNA, 26 bp, Homo sapiens
aaaggacttttaagttttgagcagtc

SEQ ID NO: 94051 - DNA, 26 bp, Homo sapiens
aaggacttttaagttttgagcagtca

SEQ ID NO: 94052 - DNA, 26 bp, Homo sapiens
aggacttttaagttttgagcagtcat

SEQ ID NO: 94053 - DNA, 26 bp, Homo sapiens
ggacttttaagttttgagcagtcatg

SEQ ID NO: 94054 - DNA, 26 bp, Homo sapiens
gacttttaagttttgagcagtcatgg

SEQ ID NO: 94055 - DNA, 26 bp, Homo sapiens
acttttaagttttgagcagtcatgga

SEQ ID NO: 94056 - DNA, 26 bp, Homo sapiens
cttttaagttttgagcagtcatggat

SEQ ID NO: 94057 - DNA, 26 bp, Homo sapiens
ttttaagttttgagcagtcatggata

SEQ ID NO: 94058 - DNA, 26 bp, Homo sapiens
tttaagttttgagcagtcatggatat

SEQ ID NO: 94059 - DNA, 26 bp, Homo sapiens
ttaagttttgagcagtcatggatatt

SEQ ID NO: 94060 - DNA, 26 bp, Homo sapiens
taagttttgagcagtcatggatattg

SEQ ID NO: 94061 - DNA, 26 bp, Homo sapiens
aagttttgagcagtcatggatattgt

SEQ ID NO: 94062 - DNA, 26 bp, Homo sapiens
agttttgagcagtcatggatattgtc

SEQ ID NO: 94063 - DNA, 26 bp, Homo sapiens
gttttgagcagtcatggatattgtcc

SEQ ID NO: 94064 - DNA, 26 bp, Homo sapiens
ttttgagcagtcatggatattgtcct

SEQ ID NO: 94065 - DNA, 26 bp, Homo sapiens
tttgagcagtcatggatattgtcctc

SEQ ID NO: 94066 - DNA, 26 bp, Homo sapiens
ttgagcagtcatggatattgtcctct

SEQ ID NO: 94067 - DNA, 26 bp, Homo sapiens
tgagcagtcatggatattgtcctctg

SEQ ID NO: 94068 - DNA, 26 bp, Homo sapiens
gagcagtcatggatattgtcctctgt

SEQ ID NO: 94069 - DNA, 26 bp, Homo sapiens
agcagtcatggatattgtcctctgtt

SEQ ID NO: 94070 - DNA, 26 bp, Homo sapiens
gcagtcatggatattgtcctctgttg

SEQ ID NO: 94071 - DNA, 26 bp, Homo sapiens
cagtcatggatattgtcctctgttgg

SEQ ID NO: 94072 - DNA, 26 bp, Homo sapiens
agtcatggatattgtcctctgttggc

SEQ ID NO: 94073 - DNA, 26 bp, Homo sapiens
gtcatggatattgtcctctgttggct

SEQ ID NO: 94074 - DNA, 26 bp, Homo sapiens
tcatggatattgtcctctgttggctg

SEQ ID NO: 94075 - DNA, 26 bp, Homo sapiens
catggatattgtcctctgttggctga

SEQ ID NO: 94076 - DNA, 26 bp, Homo sapiens
atggatattgtcctctgttggctgac

SEQ ID NO: 94077 - DNA, 26 bp, Homo sapiens
tggatattgtcctctgttggctgacc

SEQ ID NO: 94078 - DNA, 26 bp, Homo sapiens
ggatattgtcctctgttggctgacca

SEQ ID NO: 94079 - DNA, 26 bp, Homo sapiens
gatattgtcctctgttggctgaccat

SEQ ID NO: 94080 - DNA, 26 bp, Homo sapiens
atattgtcctctgttggctgaccatt

SEQ ID NO: 94081 - DNA, 26 bp, Homo sapiens
tattgtcctctgttggctgaccattt

SEQ ID NO: 94082 - DNA, 26 bp, Homo sapiens
attgtcctctgttggctgaccatttg

SEQ ID NO: 94083 - DNA, 26 bp, Homo sapiens
ttgtcctctgttggctgaccatttgt

SEQ ID NO: 94084 - DNA, 26 bp, Homo sapiens
tgtcctctgttggctgaccatttgtt

SEQ ID NO: 94085 - DNA, 26 bp, Homo sapiens
gtcctctgttggctgaccatttgtta

SEQ ID NO: 94086 - DNA, 26 bp, Homo sapiens
tcctctgttggctgaccatttgttag

SEQ ID NO: 94087 - DNA, 26 bp, Homo sapiens
cctctgttggctgaccatttgttagg

SEQ ID NO: 94088 - DNA, 26 bp, Homo sapiens
ctctgttggctgaccatttgttagga

SEQ ID NO: 94089 - DNA, 26 bp, Homo sapiens
tctgttggctgaccatttgttaggat

SEQ ID NO: 94090 - DNA, 26 bp, Homo sapiens
ctgttggctgaccatttgttaggatg

SEQ ID NO: 94091 - DNA, 26 bp, Homo sapiens
tgttggctgaccatttgttaggatga

SEQ ID NO: 94092 - DNA, 26 bp, Homo sapiens
gttggctgaccatttgttaggatgat

SEQ ID NO: 94093 - DNA, 26 bp, Homo sapiens
ttggctgaccatttgttaggatgatg

SEQ ID NO: 94094 - DNA, 26 bp, Homo sapiens
tggctgaccatttgttaggatgatgt

SEQ ID NO: 94095 - DNA, 26 bp, Homo sapiens
ggctgaccatttgttaggatgatgtt

SEQ ID NO: 94096 - DNA, 26 bp, Homo sapiens
gctgaccatttgttaggatgatgttt

SEQ ID NO: 94097 - DNA, 26 bp, Homo sapiens
ctgaccatttgttaggatgatgtttg

SEQ ID NO: 94098 - DNA, 26 bp, Homo sapiens
tgaccatttgttaggatgatgtttgg

SEQ ID NO: 94099 - DNA, 26 bp, Homo sapiens
gaccatttgttaggatgatgtttggc

SEQ ID NO: 94100 - DNA, 26 bp, Homo sapiens
accatttgttaggatgatgtttggca

SEQ ID NO: 94101 - DNA, 26 bp, Homo sapiens
ccatttgttaggatgatgtttggcaa

SEQ ID NO: 94102 - DNA, 26 bp, Homo sapiens
catttgttaggatgatgtttggcaaa

SEQ ID NO: 94103 - DNA, 26 bp, Homo sapiens
atttgttaggatgatgtttggcaaag

SEQ ID NO: 94104 - DNA, 26 bp, Homo sapiens
tttgttaggatgatgtttggcaaaga

SEQ ID NO: 94105 - DNA, 26 bp, Homo sapiens
ttgttaggatgatgtttggcaaagac

SEQ ID NO: 94106 - DNA, 26 bp, Homo sapiens
tgttaggatgatgtttggcaaagaca

SEQ ID NO: 94107 - DNA, 26 bp, Homo sapiens
gttaggatgatgtttggcaaagacaa

SEQ ID NO: 94108 - DNA, 26 bp, Homo sapiens
ttaggatgatgtttggcaaagacaaa

SEQ ID NO: 94109 - DNA, 26 bp, Homo sapiens
taggatgatgtttggcaaagacaaaa

SEQ ID NO: 94110 - DNA, 26 bp, Homo sapiens
aggatgatgtttggcaaagacaaaac

SEQ ID NO: 94111 - DNA, 26 bp, Homo sapiens
ggatgatgtttggcaaagacaaaaca

SEQ ID NO: 94112 - DNA, 26 bp, Homo sapiens
gatgatgtttggcaaagacaaaacag

SEQ ID NO: 94113 - DNA, 26 bp, Homo sapiens
atgatgtttggcaaagacaaaacagc

SEQ ID NO: 94114 - DNA, 26 bp, Homo sapiens
tgatgtttggcaaagacaaaacagcc

SEQ ID NO: 94115 - DNA, 26 bp, Homo sapiens
gatgtttggcaaagacaaaacagcca

SEQ ID NO: 94116 - DNA, 26 bp, Homo sapiens
atgtttggcaaagacaaaacagccat

SEQ ID NO: 94117 - DNA, 26 bp, Homo sapiens
tgtttggcaaagacaaaacagccatg

SEQ ID NO: 94118 - DNA, 26 bp, Homo sapiens
gtttggcaaagacaaaacagccatga

SEQ ID NO: 94119 - DNA, 26 bp, Homo sapiens
tttggcaaagacaaaacagccatgat

SEQ ID NO: 94120 - DNA, 26 bp, Homo sapiens
ttggcaaagacaaaacagccatgatc

SEQ ID NO: 94121 - DNA, 26 bp, Homo sapiens
tggcaaagacaaaacagccatgatca

SEQ ID NO: 94122 - DNA, 26 bp, Homo sapiens
ggcaaagacaaaacagccatgatcac

SEQ ID NO: 94123 - DNA, 26 bp, Homo sapiens
gcaaagacaaaacagccatgatcacc

SEQ ID NO: 94124 - DNA, 26 bp, Homo sapiens
caaagacaaaacagccatgatcaccc

SEQ ID NO: 94125 - DNA, 26 bp, Homo sapiens
aaagacaaaacagccatgatcaccca

SEQ ID NO: 94126 - DNA, 26 bp, Homo sapiens
aagacaaaacagccatgatcacccaa

SEQ ID NO: 94127 - DNA, 26 bp, Homo sapiens
agacaaaacagccatgatcacccaaa

SEQ ID NO: 94128 - DNA, 26 bp, Homo sapiens
gacaaaacagccatgatcacccaaac

SEQ ID NO: 94129 - DNA, 26 bp, Homo sapiens
acaaaacagccatgatcacccaaaca

SEQ ID NO: 94130 - DNA, 26 bp, Homo sapiens
caaaacagccatgatcacccaaacac

SEQ ID NO: 94131 - DNA, 26 bp, Homo sapiens
aaaacagccatgatcacccaaacaca

SEQ ID NO: 94132 - DNA, 26 bp, Homo sapiens
aaacagccatgatcacccaaacacaa

SEQ ID NO: 94133 - DNA, 26 bp, Homo sapiens
aacagccatgatcacccaaacacaaa

SEQ ID NO: 94134 - DNA, 26 bp, Homo sapiens
acagccatgatcacccaaacacaaac

SEQ ID NO: 94135 - DNA, 26 bp, Homo sapiens
cagccatgatcacccaaacacaaaca

SEQ ID NO: 94136 - DNA, 26 bp, Homo sapiens
agccatgatcacccaaacacaaacag

SEQ ID NO: 94137 - DNA, 26 bp, Homo sapiens
gccatgatcacccaaacacaaacaga

SEQ ID NO: 94138 - DNA, 26 bp, Homo sapiens
ccatgatcacccaaacacaaacagat

SEQ ID NO: 94139 - DNA, 26 bp, Homo sapiens
catgatcacccaaacacaaacagata

SEQ ID NO: 94140 - DNA, 26 bp, Homo sapiens
atgatcacccaaacacaaacagataa

SEQ ID NO: 94141 - DNA, 26 bp, Homo sapiens
tgatcacccaaacacaaacagataaa

SEQ ID NO: 94142 - DNA, 26 bp, Homo sapiens
gatcacccaaacacaaacagataaaa

SEQ ID NO: 94143 - DNA, 26 bp, Homo sapiens
atcacccaaacacaaacagataaaac

SEQ ID NO: 94144 - DNA, 26 bp, Homo sapiens
tcacccaaacacaaacagataaaacc

SEQ ID NO: 94145 - DNA, 26 bp, Homo sapiens
cacccaaacacaaacagataaaacct

SEQ ID NO: 94146 - DNA, 26 bp, Homo sapiens
acccaaacacaaacagataaaacctt

SEQ ID NO: 94147 - DNA, 26 bp, Homo sapiens
cccaaacacaaacagataaaaccttc

SEQ ID NO: 94148 - DNA, 26 bp, Homo sapiens
ccaaacacaaacagataaaaccttcg

SEQ ID NO: 94149 - DNA, 26 bp, Homo sapiens
caaacacaaacagataaaaccttcgt

SEQ ID NO: 94150 - DNA, 26 bp, Homo sapiens
aaacacaaacagataaaaccttcgtg

SEQ ID NO: 94151 - DNA, 26 bp, Homo sapiens
aacacaaacagataaaaccttcgtga

SEQ ID NO: 94152 - DNA, 26 bp, Homo sapiens
acacaaacagataaaaccttcgtgaa

SEQ ID NO: 94153 - DNA, 26 bp, Homo sapiens
cacaaacagataaaaccttcgtgaag

SEQ ID NO: 94154 - DNA, 26 bp, Homo sapiens
acaaacagataaaaccttcgtgaagg

SEQ ID NO: 94155 - DNA, 26 bp, Homo sapiens
caaacagataaaaccttcgtgaaggt

SEQ ID NO: 94156 - DNA, 26 bp, Homo sapiens
aaacagataaaaccttcgtgaaggtt

SEQ ID NO: 94157 - DNA, 26 bp, Homo sapiens
aacagataaaaccttcgtgaaggtta

SEQ ID NO: 94158 - DNA, 26 bp, Homo sapiens
acagataaaaccttcgtgaaggttat

SEQ ID NO: 94159 - DNA, 26 bp, Homo sapiens
cagataaaaccttcgtgaaggttatg

SEQ ID NO: 94160 - DNA, 26 bp, Homo sapiens
agataaaaccttcgtgaaggttatgc

SEQ ID NO: 94161 - DNA, 26 bp, Homo sapiens
gataaaaccttcgtgaaggttatgct

SEQ ID NO: 94162 - DNA, 26 bp, Homo sapiens
ataaaaccttcgtgaaggttatgctg

SEQ ID NO: 94163 - DNA, 26 bp, Homo sapiens
taaaaccttcgtgaaggttatgctgt

SEQ ID NO: 94164 - DNA, 26 bp, Homo sapiens
aaaaccttcgtgaaggttatgctgta

SEQ ID NO: 94165 - DNA, 26 bp, Homo sapiens
aaaccttcgtgaaggttatgctgtac

SEQ ID NO: 94166 - DNA, 26 bp, Homo sapiens
aaccttcgtgaaggttatgctgtaca

SEQ ID NO: 94167 - DNA, 26 bp, Homo sapiens
accttcgtgaaggttatgctgtacat

SEQ ID NO: 94168 - DNA, 26 bp, Homo sapiens
ccttcgtgaaggttatgctgtacatc

SEQ ID NO: 94169 - DNA, 26 bp, Homo sapiens
cttcgtgaaggttatgctgtacatcc

SEQ ID NO: 94170 - DNA, 26 bp, Homo sapiens
ttcgtgaaggttatgctgtacatccg

SEQ ID NO: 94171 - DNA, 26 bp, Homo sapiens
tcgtgaaggttatgctgtacatccga

SEQ ID NO: 94172 - DNA, 26 bp, Homo sapiens
cgtgaaggttatgctgtacatccgag

SEQ ID NO: 94173 - DNA, 26 bp, Homo sapiens
gtgaaggttatgctgtacatccgaga

SEQ ID NO: 94174 - DNA, 26 bp, Homo sapiens
tgaaggttatgctgtacatccgagag

SEQ ID NO: 94175 - DNA, 26 bp, Homo sapiens
gaaggttatgctgtacatccgagagt

SEQ ID NO: 94176 - DNA, 26 bp, Homo sapiens
aaggttatgctgtacatccgagagtc

SEQ ID NO: 94177 - DNA, 26 bp, Homo sapiens
aggttatgctgtacatccgagagtcc

SEQ ID NO: 94178 - DNA, 26 bp, Homo sapiens
ggttatgctgtacatccgagagtccc

SEQ ID NO: 94179 - DNA, 26 bp, Homo sapiens
gttatgctgtacatccgagagtcccc

SEQ ID NO: 94180 - DNA, 26 bp, Homo sapiens
ttatgctgtacatccgagagtcccca

SEQ ID NO: 94181 - DNA, 26 bp, Homo sapiens
tatgctgtacatccgagagtccccaa

SEQ ID NO: 94182 - DNA, 26 bp, Homo sapiens
atgctgtacatccgagagtccccaaa

SEQ ID NO: 94183 - DNA, 26 bp, Homo sapiens
tgctgtacatccgagagtccccaaat

SEQ ID NO: 94184 - DNA, 26 bp, Homo sapiens
gctgtacatccgagagtccccaaatg

SEQ ID NO: 94185 - DNA, 26 bp, Homo sapiens
ctgtacatccgagagtccccaaatgg

SEQ ID NO: 94186 - DNA, 26 bp, Homo sapiens
tgtacatccgagagtccccaaatggc

SEQ ID NO: 94187 - DNA, 26 bp, Homo sapiens
gtacatccgagagtccccaaatggct

SEQ ID NO: 94188 - DNA, 26 bp, Homo sapiens
tacatccgagagtccccaaatggctt

SEQ ID NO: 94189 - DNA, 26 bp, Homo sapiens
acatccgagagtccccaaatggcttg

SEQ ID NO: 94190 - DNA, 26 bp, Homo sapiens
catccgagagtccccaaatggcttga

SEQ ID NO: 94191 - DNA, 26 bp, Homo sapiens
atccgagagtccccaaatggcttgac

SEQ ID NO: 94192 - DNA, 26 bp, Homo sapiens
tccgagagtccccaaatggcttgacc

SEQ ID NO: 94193 - DNA, 26 bp, Homo sapiens
ccgagagtccccaaatggcttgacca

SEQ ID NO: 94194 - DNA, 26 bp, Homo sapiens
cgagagtccccaaatggcttgaccac

SEQ ID NO: 94195 - DNA, 26 bp, Homo sapiens
gagagtccccaaatggcttgaccacc

SEQ ID NO: 94196 - DNA, 26 bp, Homo sapiens
agagtccccaaatggcttgaccacct

SEQ ID NO: 94197 - DNA, 26 bp, Homo sapiens
gagtccccaaatggcttgaccacctt

SEQ ID NO: 94198 - DNA, 26 bp, Homo sapiens
agtccccaaatggcttgaccaccttc

SEQ ID NO: 94199 - DNA, 26 bp, Homo sapiens
gtccccaaatggcttgaccaccttca

SEQ ID NO: 94200 - DNA, 26 bp, Homo sapiens
tccccaaatggcttgaccaccttcag

SEQ ID NO: 94201 - DNA, 26 bp, Homo sapiens
ccccaaatggcttgaccaccttcaga

SEQ ID NO: 94202 - DNA, 26 bp, Homo sapiens
cccaaatggcttgaccaccttcagat

SEQ ID NO: 94203 - DNA, 26 bp, Homo sapiens
ccaaatggcttgaccaccttcagata

SEQ ID NO: 94204 - DNA, 26 bp, Homo sapiens
caaatggcttgaccaccttcagatag

SEQ ID NO: 94205 - DNA, 26 bp, Homo sapiens
aaatggcttgaccaccttcagatagc

SEQ ID NO: 94206 - DNA, 26 bp, Homo sapiens
aatggcttgaccaccttcagatagcg

SEQ ID NO: 94207 - DNA, 26 bp, Homo sapiens
atggcttgaccaccttcagatagcga

SEQ ID NO: 94208 - DNA, 26 bp, Homo sapiens
tggcttgaccaccttcagatagcgat

SEQ ID NO: 94209 - DNA, 26 bp, Homo sapiens
ggcttgaccaccttcagatagcgatc

SEQ ID NO: 94210 - DNA, 26 bp, Homo sapiens
gcttgaccaccttcagatagcgatca

SEQ ID NO: 94211 - DNA, 26 bp, Homo sapiens
cttgaccaccttcagatagcgatcaa

SEQ ID NO: 94212 - DNA, 26 bp, Homo sapiens
ttgaccaccttcagatagcgatcaat

SEQ ID NO: 94213 - DNA, 26 bp, Homo sapiens
tgaccaccttcagatagcgatcaatg

SEQ ID NO: 94214 - DNA, 26 bp, Homo sapiens
gaccaccttcagatagcgatcaatgc

SEQ ID NO: 94215 - DNA, 26 bp, Homo sapiens
accaccttcagatagcgatcaatgct

SEQ ID NO: 94216 - DNA, 26 bp, Homo sapiens
ccaccttcagatagcgatcaatgctt

SEQ ID NO: 94217 - DNA, 26 bp, Homo sapiens
caccttcagatagcgatcaatgctta

SEQ ID NO: 94218 - DNA, 26 bp, Homo sapiens
accttcagatagcgatcaatgcttat

SEQ ID NO: 94219 - DNA, 26 bp, Homo sapiens
ccttcagatagcgatcaatgcttatc

SEQ ID NO: 94220 - DNA, 26 bp, Homo sapiens
cttcagatagcgatcaatgcttatca

SEQ ID NO: 94221 - DNA, 26 bp, Homo sapiens
ttcagatagcgatcaatgcttatcag

SEQ ID NO: 94222 - DNA, 26 bp, Homo sapiens
tcagatagcgatcaatgcttatcagc

SEQ ID NO: 94223 - DNA, 26 bp, Homo sapiens
cagatagcgatcaatgcttatcagcc

SEQ ID NO: 94224 - DNA, 26 bp, Homo sapiens
agatagcgatcaatgcttatcagccc

SEQ ID NO: 94225 - DNA, 26 bp, Homo sapiens
gatagcgatcaatgcttatcagccca

SEQ ID NO: 94226 - DNA, 26 bp, Homo sapiens
atagcgatcaatgcttatcagcccaa

SEQ ID NO: 94227 - DNA, 26 bp, Homo sapiens
tagcgatcaatgcttatcagcccaag

SEQ ID NO: 94228 - DNA, 26 bp, Homo sapiens
agcgatcaatgcttatcagcccaagg

SEQ ID NO: 94229 - DNA, 26 bp, Homo sapiens
gcgatcaatgcttatcagcccaagga

SEQ ID NO: 94230 - DNA, 26 bp, Homo sapiens
cgatcaatgcttatcagcccaaggaa

SEQ ID NO: 94231 - DNA, 26 bp, Homo sapiens
gatcaatgcttatcagcccaaggaac

SEQ ID NO: 94232 - DNA, 26 bp, Homo sapiens
atcaatgcttatcagcccaaggaaca

SEQ ID NO: 94233 - DNA, 26 bp, Homo sapiens
tcaatgcttatcagcccaaggaacac

SEQ ID NO: 94234 - DNA, 26 bp, Homo sapiens
caatgcttatcagcccaaggaacacg

SEQ ID NO: 94235 - DNA, 26 bp, Homo sapiens
aatgcttatcagcccaaggaacacga

SEQ ID NO: 94236 - DNA, 26 bp, Homo sapiens
atgcttatcagcccaaggaacacgat

SEQ ID NO: 94237 - DNA, 26 bp, Homo sapiens
tgcttatcagcccaaggaacacgatg

SEQ ID NO: 94238 - DNA, 26 bp, Homo sapiens
gcttatcagcccaaggaacacgatgg

SEQ ID NO: 94239 - DNA, 26 bp, Homo sapiens
cttatcagcccaaggaacacgatgga

SEQ ID NO: 94240 - DNA, 26 bp, Homo sapiens
ttatcagcccaaggaacacgatggaa

SEQ ID NO: 94241 - DNA, 26 bp, Homo sapiens
tatcagcccaaggaacacgatggaag

SEQ ID NO: 94242 - DNA, 26 bp, Homo sapiens
atcagcccaaggaacacgatggaagt

SEQ ID NO: 94243 - DNA, 26 bp, Homo sapiens
tcagcccaaggaacacgatggaagta

SEQ ID NO: 94244 - DNA, 26 bp, Homo sapiens
cagcccaaggaacacgatggaagtat

SEQ ID NO: 94245 - DNA, 26 bp, Homo sapiens
agcccaaggaacacgatggaagtata

SEQ ID NO: 94246 - DNA, 26 bp, Homo sapiens
gcccaaggaacacgatggaagtatac

SEQ ID NO: 94247 - DNA, 26 bp, Homo sapiens
cccaaggaacacgatggaagtataca

SEQ ID NO: 94248 - DNA, 26 bp, Homo sapiens
ccaaggaacacgatggaagtatacat

SEQ ID NO: 94249 - DNA, 26 bp, Homo sapiens
caaggaacacgatggaagtatacatg

SEQ ID NO: 94250 - DNA, 26 bp, Homo sapiens
aaggaacacgatggaagtatacatgt

SEQ ID NO: 94251 - DNA, 26 bp, Homo sapiens
aggaacacgatggaagtatacatgtt

SEQ ID NO: 94252 - DNA, 26 bp, Homo sapiens
ggaacacgatggaagtatacatgttt

SEQ ID NO: 94253 - DNA, 26 bp, Homo sapiens
gaacacgatggaagtatacatgtttg

SEQ ID NO: 94254 - DNA, 26 bp, Homo sapiens
aacacgatggaagtatacatgtttgc

SEQ ID NO: 94255 - DNA, 26 bp, Homo sapiens
acacgatggaagtatacatgtttgca

SEQ ID NO: 94256 - DNA, 26 bp, Homo sapiens
cacgatggaagtatacatgtttgcat

SEQ ID NO: 94257 - DNA, 26 bp, Homo sapiens
acgatggaagtatacatgtttgcata

SEQ ID NO: 94258 - DNA, 26 bp, Homo sapiens
cgatggaagtatacatgtttgcataa

SEQ ID NO: 94259 - DNA, 26 bp, Homo sapiens
gatggaagtatacatgtttgcataaa

SEQ ID NO: 94260 - DNA, 26 bp, Homo sapiens
atggaagtatacatgtttgcataaaa

SEQ ID NO: 94261 - DNA, 26 bp, Homo sapiens
tggaagtatacatgtttgcataaaac

SEQ ID NO: 94262 - DNA, 26 bp, Homo sapiens
ggaagtatacatgtttgcataaaaca

SEQ ID NO: 94263 - DNA, 26 bp, Homo sapiens
gaagtatacatgtttgcataaaacaa

SEQ ID NO: 94264 - DNA, 26 bp, Homo sapiens
aagtatacatgtttgcataaaacaaa

SEQ ID NO: 94265 - DNA, 26 bp, Homo sapiens
agtatacatgtttgcataaaacaaaa

SEQ ID NO: 94266 - DNA, 26 bp, Homo sapiens
gtatacatgtttgcataaaacaaaac

SEQ ID NO: 94267 - DNA, 26 bp, Homo sapiens
tatacatgtttgcataaaacaaaact

SEQ ID NO: 94268 - DNA, 26 bp, Homo sapiens
atacatgtttgcataaaacaaaactg

SEQ ID NO: 94269 - DNA, 26 bp, Homo sapiens
tacatgtttgcataaaacaaaactga

SEQ ID NO: 94270 - DNA, 26 bp, Homo sapiens
acatgtttgcataaaacaaaactgaa

SEQ ID NO: 94271 - DNA, 26 bp, Homo sapiens
catgtttgcataaaacaaaactgaag

SEQ ID NO: 94272 - DNA, 26 bp, Homo sapiens
atgtttgcataaaacaaaactgaagt

SEQ ID NO: 94273 - DNA, 26 bp, Homo sapiens
tgtttgcataaaacaaaactgaagtg

SEQ ID NO: 94274 - DNA, 26 bp, Homo sapiens
gtttgcataaaacaaaactgaagtgt

SEQ ID NO: 94275 - DNA, 26 bp, Homo sapiens
tttgcataaaacaaaactgaagtgta

SEQ ID NO: 94276 - DNA, 26 bp, Homo sapiens
ttgcataaaacaaaactgaagtgtat

SEQ ID NO: 94277 - DNA, 26 bp, Homo sapiens
tgcataaaacaaaactgaagtgtatc

SEQ ID NO: 94278 - DNA, 26 bp, Homo sapiens
gcataaaacaaaactgaagtgtatct

SEQ ID NO: 94279 - DNA, 26 bp, Homo sapiens
cataaaacaaaactgaagtgtatctg

SEQ ID NO: 94280 - DNA, 26 bp, Homo sapiens
ataaaacaaaactgaagtgtatctgc

SEQ ID NO: 94281 - DNA, 26 bp, Homo sapiens
taaaacaaaactgaagtgtatctgca

SEQ ID NO: 94282 - DNA, 26 bp, Homo sapiens
aaaacaaaactgaagtgtatctgcag

SEQ ID NO: 94283 - DNA, 26 bp, Homo sapiens
aaacaaaactgaagtgtatctgcaga

SEQ ID NO: 94284 - DNA, 26 bp, Homo sapiens
aacaaaactgaagtgtatctgcagag

SEQ ID NO: 94285 - DNA, 26 bp, Homo sapiens
acaaaactgaagtgtatctgcagaga

SEQ ID NO: 94286 - DNA, 26 bp, Homo sapiens
caaaactgaagtgtatctgcagagaa

SEQ ID NO: 94287 - DNA, 26 bp, Homo sapiens
aaaactgaagtgtatctgcagagaat

SEQ ID NO: 94288 - DNA, 26 bp, Homo sapiens
aaactgaagtgtatctgcagagaata

SEQ ID NO: 94289 - DNA, 26 bp, Homo sapiens
aactgaagtgtatctgcagagaataa

SEQ ID NO: 94290 - DNA, 26 bp, Homo sapiens
actgaagtgtatctgcagagaataaa

SEQ ID NO: 94291 - DNA, 26 bp, Homo sapiens
ctgaagtgtatctgcagagaataaac

SEQ ID NO: 94292 - DNA, 26 bp, Homo sapiens
tgaagtgtatctgcagagaataaact

SEQ ID NO: 94293 - DNA, 26 bp, Homo sapiens
gaagtgtatctgcagagaataaactt

SEQ ID NO: 94294 - DNA, 26 bp, Homo sapiens
aagtgtatctgcagagaataaacttg

SEQ ID NO: 94295 - DNA, 26 bp, Homo sapiens
agtgtatctgcagagaataaacttga

SEQ ID NO: 94296 - DNA, 26 bp, Homo sapiens
gtgtatctgcagagaataaacttgaa

SEQ ID NO: 94297 - DNA, 26 bp, Homo sapiens
tgtatctgcagagaataaacttgaag

SEQ ID NO: 94298 - DNA, 26 bp, Homo sapiens
gtatctgcagagaataaacttgaagt

SEQ ID NO: 94299 - DNA, 26 bp, Homo sapiens
tatctgcagagaataaacttgaagta

SEQ ID NO: 94300 - DNA, 26 bp, Homo sapiens
atctgcagagaataaacttgaagtac

SEQ ID NO: 94301 - DNA, 26 bp, Homo sapiens
tctgcagagaataaacttgaagtacc

SEQ ID NO: 94302 - DNA, 26 bp, Homo sapiens
ctgcagagaataaacttgaagtacca

SEQ ID NO: 94303 - DNA, 26 bp, Homo sapiens
tgcagagaataaacttgaagtaccaa

SEQ ID NO: 94304 - DNA, 26 bp, Homo sapiens
gcagagaataaacttgaagtaccaag

SEQ ID NO: 94305 - DNA, 26 bp, Homo sapiens
cagagaataaacttgaagtaccaagg

SEQ ID NO: 94306 - DNA, 26 bp, Homo sapiens
agagaataaacttgaagtaccaaggt

SEQ ID NO: 94307 - DNA, 26 bp, Homo sapiens
gagaataaacttgaagtaccaaggtc

SEQ ID NO: 94308 - DNA, 26 bp, Homo sapiens
agaataaacttgaagtaccaaggtcc

SEQ ID NO: 94309 - DNA, 26 bp, Homo sapiens
gaataaacttgaagtaccaaggtcca

SEQ ID NO: 94310 - DNA, 26 bp, Homo sapiens
aataaacttgaagtaccaaggtccaa

SEQ ID NO: 94311 - DNA, 26 bp, Homo sapiens
ataaacttgaagtaccaaggtccaaa

SEQ ID NO: 94312 - DNA, 26 bp, Homo sapiens
taaacttgaagtaccaaggtccaaat

SEQ ID NO: 94313 - DNA, 26 bp, Homo sapiens
aaacttgaagtaccaaggtccaaatc

SEQ ID NO: 94314 - DNA, 26 bp, Homo sapiens
aacttgaagtaccaaggtccaaatcc

SEQ ID NO: 94315 - DNA, 26 bp, Homo sapiens
acttgaagtaccaaggtccaaatcct

SEQ ID NO: 94316 - DNA, 26 bp, Homo sapiens
cttgaagtaccaaggtccaaatcctg

SEQ ID NO: 94317 - DNA, 26 bp, Homo sapiens
ttgaagtaccaaggtccaaatcctgc

SEQ ID NO: 94318 - DNA, 26 bp, Homo sapiens
tgaagtaccaaggtccaaatcctgca

SEQ ID NO: 94319 - DNA, 26 bp, Homo sapiens
gaagtaccaaggtccaaatcctgcat

SEQ ID NO: 94320 - DNA, 26 bp, Homo sapiens
aagtaccaaggtccaaatcctgcatc

SEQ ID NO: 94321 - DNA, 26 bp, Homo sapiens
agtaccaaggtccaaatcctgcatca

SEQ ID NO: 94322 - DNA, 26 bp, Homo sapiens
gtaccaaggtccaaatcctgcatcat

SEQ ID NO: 94323 - DNA, 26 bp, Homo sapiens
taccaaggtccaaatcctgcatcatg

SEQ ID NO: 94324 - DNA, 26 bp, Homo sapiens
accaaggtccaaatcctgcatcatgg

SEQ ID NO: 94325 - DNA, 26 bp, Homo sapiens
ccaaggtccaaatcctgcatcatgga

SEQ ID NO: 94326 - DNA, 26 bp, Homo sapiens
caaggtccaaatcctgcatcatggac

SEQ ID NO: 94327 - DNA, 26 bp, Homo sapiens
aaggtccaaatcctgcatcatggact

SEQ ID NO: 94328 - DNA, 26 bp, Homo sapiens
aggtccaaatcctgcatcatggacta

SEQ ID NO: 94329 - DNA, 26 bp, Homo sapiens
ggtccaaatcctgcatcatggactat

SEQ ID NO: 94330 - DNA, 26 bp, Homo sapiens
gtccaaatcctgcatcatggactatt

SEQ ID NO: 94331 - DNA, 26 bp, Homo sapiens
tccaaatcctgcatcatggactattc

SEQ ID NO: 94332 - DNA, 26 bp, Homo sapiens
ccaaatcctgcatcatggactattcg

SEQ ID NO: 94333 - DNA, 26 bp, Homo sapiens
caaatcctgcatcatggactattcga

SEQ ID NO: 94334 - DNA, 26 bp, Homo sapiens
aaatcctgcatcatggactattcgaa

SEQ ID NO: 94335 - DNA, 26 bp, Homo sapiens
aatcctgcatcatggactattcgaaa

SEQ ID NO: 94336 - DNA, 26 bp, Homo sapiens
atcctgcatcatggactattcgaaat

SEQ ID NO: 94337 - DNA, 26 bp, Homo sapiens
tcctgcatcatggactattcgaaatg

SEQ ID NO: 94338 - DNA, 26 bp, Homo sapiens
cctgcatcatggactattcgaaatgg

SEQ ID NO: 94339 - DNA, 26 bp, Homo sapiens
ctgcatcatggactattcgaaatgga

SEQ ID NO: 94340 - DNA, 26 bp, Homo sapiens
tgcatcatggactattcgaaatggaa

SEQ ID NO: 94341 - DNA, 26 bp, Homo sapiens
gcatcatggactattcgaaatggaaa

SEQ ID NO: 94342 - DNA, 26 bp, Homo sapiens
catcatggactattcgaaatggaaat

SEQ ID NO: 94343 - DNA, 26 bp, Homo sapiens
atcatggactattcgaaatggaaatg

SEQ ID NO: 94344 - DNA, 26 bp, Homo sapiens
tcatggactattcgaaatggaaatgt

SEQ ID NO: 94345 - DNA, 26 bp, Homo sapiens
catggactattcgaaatggaaatgtc

SEQ ID NO: 94346 - DNA, 26 bp, Homo sapiens
atggactattcgaaatggaaatgtca

SEQ ID NO: 94347 - DNA, 26 bp, Homo sapiens
tggactattcgaaatggaaatgtcag

SEQ ID NO: 94348 - DNA, 26 bp, Homo sapiens
ggactattcgaaatggaaatgtcagc

SEQ ID NO: 94349 - DNA, 26 bp, Homo sapiens
gactattcgaaatggaaatgtcagcg

SEQ ID NO: 94350 - DNA, 26 bp, Homo sapiens
actattcgaaatggaaatgtcagcgt

SEQ ID NO: 94351 - DNA, 26 bp, Homo sapiens
ctattcgaaatggaaatgtcagcgtc

SEQ ID NO: 94352 - DNA, 26 bp, Homo sapiens
tattcgaaatggaaatgtcagcgtca

SEQ ID NO: 94353 - DNA, 26 bp, Homo sapiens
attcgaaatggaaatgtcagcgtcat

SEQ ID NO: 94354 - DNA, 26 bp, Homo sapiens
ttcgaaatggaaatgtcagcgtcatt

SEQ ID NO: 94355 - DNA, 26 bp, Homo sapiens
tcgaaatggaaatgtcagcgtcatta

SEQ ID NO: 94356 - DNA, 26 bp, Homo sapiens
cgaaatggaaatgtcagcgtcattat

SEQ ID NO: 94357 - DNA, 26 bp, Homo sapiens
gaaatggaaatgtcagcgtcattatg

SEQ ID NO: 94358 - DNA, 26 bp, Homo sapiens
aaatggaaatgtcagcgtcattatga

SEQ ID NO: 94359 - DNA, 26 bp, Homo sapiens
aatggaaatgtcagcgtcattatgag

SEQ ID NO: 94360 - DNA, 26 bp, Homo sapiens
atggaaatgtcagcgtcattatgagg

SEQ ID NO: 94361 - DNA, 26 bp, Homo sapiens
tggaaatgtcagcgtcattatgaggt

SEQ ID NO: 94362 - DNA, 26 bp, Homo sapiens
ggaaatgtcagcgtcattatgaggtc

SEQ ID NO: 94363 - DNA, 26 bp, Homo sapiens
gaaatgtcagcgtcattatgaggtct

SEQ ID NO: 94364 - DNA, 26 bp, Homo sapiens
aaatgtcagcgtcattatgaggtctg

SEQ ID NO: 94365 - DNA, 26 bp, Homo sapiens
aatgtcagcgtcattatgaggtctgc

SEQ ID NO: 94366 - DNA, 26 bp, Homo sapiens
atgtcagcgtcattatgaggtctgca

SEQ ID NO: 94367 - DNA, 26 bp, Homo sapiens
tgtcagcgtcattatgaggtctgcaa

SEQ ID NO: 94368 - DNA, 26 bp, Homo sapiens
gtcagcgtcattatgaggtctgcaac

SEQ ID NO: 94369 - DNA, 26 bp, Homo sapiens
tcagcgtcattatgaggtctgcaacc

SEQ ID NO: 94370 - DNA, 26 bp, Homo sapiens
cagcgtcattatgaggtctgcaacca

SEQ ID NO: 94371 - DNA, 26 bp, Homo sapiens
agcgtcattatgaggtctgcaaccac

SEQ ID NO: 94372 - DNA, 26 bp, Homo sapiens
gcgtcattatgaggtctgcaaccact

SEQ ID NO: 94373 - DNA, 26 bp, Homo sapiens
cgtcattatgaggtctgcaaccacta

SEQ ID NO: 94374 - DNA, 26 bp, Homo sapiens
gtcattatgaggtctgcaaccactat

SEQ ID NO: 94375 - DNA, 26 bp, Homo sapiens
tcattatgaggtctgcaaccactatg

SEQ ID NO: 94376 - DNA, 26 bp, Homo sapiens
cattatgaggtctgcaaccactatgt

SEQ ID NO: 94377 - DNA, 26 bp, Homo sapiens
attatgaggtctgcaaccactatgtt

SEQ ID NO: 94378 - DNA, 26 bp, Homo sapiens
ttatgaggtctgcaaccactatgttt

SEQ ID NO: 94379 - DNA, 26 bp, Homo sapiens
tatgaggtctgcaaccactatgtttt

SEQ ID NO: 94380 - DNA, 26 bp, Homo sapiens
atgaggtctgcaaccactatgttttt

SEQ ID NO: 94381 - DNA, 26 bp, Homo sapiens
tgaggtctgcaaccactatgtttttg

SEQ ID NO: 94382 - DNA, 26 bp, Homo sapiens
gaggtctgcaaccactatgtttttga

SEQ ID NO: 94383 - DNA, 26 bp, Homo sapiens
aggtctgcaaccactatgtttttgag

SEQ ID NO: 94384 - DNA, 26 bp, Homo sapiens
ggtctgcaaccactatgtttttgaga

SEQ ID NO: 94385 - DNA, 26 bp, Homo sapiens
gtctgcaaccactatgtttttgagat

SEQ ID NO: 94386 - DNA, 26 bp, Homo sapiens
tctgcaaccactatgtttttgagata

SEQ ID NO: 94387 - DNA, 26 bp, Homo sapiens
ctgcaaccactatgtttttgagatag

SEQ ID NO: 94388 - DNA, 26 bp, Homo sapiens
tgcaaccactatgtttttgagataga

SEQ ID NO: 94389 - DNA, 26 bp, Homo sapiens
gcaaccactatgtttttgagatagaa

SEQ ID NO: 94390 - DNA, 26 bp, Homo sapiens
caaccactatgtttttgagatagaat

SEQ ID NO: 94391 - DNA, 26 bp, Homo sapiens
aaccactatgtttttgagatagaata

SEQ ID NO: 94392 - DNA, 26 bp, Homo sapiens
accactatgtttttgagatagaatat

SEQ ID NO: 94393 - DNA, 26 bp, Homo sapiens
ccactatgtttttgagatagaatatg

SEQ ID NO: 94394 - DNA, 26 bp, Homo sapiens
cactatgtttttgagatagaatatga

SEQ ID NO: 94395 - DNA, 26 bp, Homo sapiens
actatgtttttgagatagaatatgaa

SEQ ID NO: 94396 - DNA, 26 bp, Homo sapiens
ctatgtttttgagatagaatatgaag

SEQ ID NO: 94397 - DNA, 26 bp, Homo sapiens
tatgtttttgagatagaatatgaagc

SEQ ID NO: 94398 - DNA, 26 bp, Homo sapiens
atgtttttgagatagaatatgaagct

SEQ ID NO: 94399 - DNA, 26 bp, Homo sapiens
tgtttttgagatagaatatgaagctg

SEQ ID NO: 94400 - DNA, 26 bp, Homo sapiens
gtttttgagatagaatatgaagctgg

SEQ ID NO: 94401 - DNA, 26 bp, Homo sapiens
tttttgagatagaatatgaagctggt

SEQ ID NO: 94402 - DNA, 26 bp, Homo sapiens
ttttgagatagaatatgaagctggtt

SEQ ID NO: 94403 - DNA, 26 bp, Homo sapiens
tttgagatagaatatgaagctggttt

SEQ ID NO: 94404 - DNA, 26 bp, Homo sapiens
ttgagatagaatatgaagctggtttt

SEQ ID NO: 94405 - DNA, 26 bp, Homo sapiens
tgagatagaatatgaagctggtttta

SEQ ID NO: 94406 - DNA, 26 bp, Homo sapiens
gagatagaatatgaagctggttttat

SEQ ID NO: 94407 - DNA, 26 bp, Homo sapiens
agatagaatatgaagctggttttatt

SEQ ID NO: 94408 - DNA, 26 bp, Homo sapiens
gatagaatatgaagctggttttattc

SEQ ID NO: 94409 - DNA, 26 bp, Homo sapiens
atagaatatgaagctggttttattcc

SEQ ID NO: 94410 - DNA, 26 bp, Homo sapiens
tagaatatgaagctggttttattcct

SEQ ID NO: 94411 - DNA, 26 bp, Homo sapiens
agaatatgaagctggttttattccta

SEQ ID NO: 94412 - DNA, 26 bp, Homo sapiens
gaatatgaagctggttttattcctaa

SEQ ID NO: 94413 - DNA, 26 bp, Homo sapiens
aatatgaagctggttttattcctaat

SEQ ID NO: 94414 - DNA, 26 bp, Homo sapiens
atatgaagctggttttattcctaatg

SEQ ID NO: 94415 - DNA, 26 bp, Homo sapiens
tatgaagctggttttattcctaatgt

SEQ ID NO: 94416 - DNA, 26 bp, Homo sapiens
atgaagctggttttattcctaatgtg

SEQ ID NO: 94417 - DNA, 26 bp, Homo sapiens
tgaagctggttttattcctaatgtgg

SEQ ID NO: 94418 - DNA, 26 bp, Homo sapiens
gaagctggttttattcctaatgtgga

SEQ ID NO: 94419 - DNA, 26 bp, Homo sapiens
aagctggttttattcctaatgtggaa

SEQ ID NO: 94420 - DNA, 26 bp, Homo sapiens
agctggttttattcctaatgtggaag

SEQ ID NO: 94421 - DNA, 26 bp, Homo sapiens
gctggttttattcctaatgtggaaga

SEQ ID NO: 94422 - DNA, 26 bp, Homo sapiens
ctggttttattcctaatgtggaagaa

SEQ ID NO: 94423 - DNA, 26 bp, Homo sapiens
tggttttattcctaatgtggaagaag

SEQ ID NO: 94424 - DNA, 26 bp, Homo sapiens
ggttttattcctaatgtggaagaaga

SEQ ID NO: 94425 - DNA, 26 bp, Homo sapiens
gttttattcctaatgtggaagaagat

SEQ ID NO: 94426 - DNA, 26 bp, Homo sapiens
ttttattcctaatgtggaagaagatc

SEQ ID NO: 94427 - DNA, 26 bp, Homo sapiens
tttattcctaatgtggaagaagatcc

SEQ ID NO: 94428 - DNA, 26 bp, Homo sapiens
ttattcctaatgtggaagaagatcca

SEQ ID NO: 94429 - DNA, 26 bp, Homo sapiens
tattcctaatgtggaagaagatccac

SEQ ID NO: 94430 - DNA, 26 bp, Homo sapiens
attcctaatgtggaagaagatccaca

SEQ ID NO: 94431 - DNA, 26 bp, Homo sapiens
ttcctaatgtggaagaagatccacac

SEQ ID NO: 94432 - DNA, 26 bp, Homo sapiens
tcctaatgtggaagaagatccacact

SEQ ID NO: 94433 - DNA, 26 bp, Homo sapiens
cctaatgtggaagaagatccacactg

SEQ ID NO: 94434 - DNA, 26 bp, Homo sapiens
ctaatgtggaagaagatccacactgc

SEQ ID NO: 94435 - DNA, 26 bp, Homo sapiens
taatgtggaagaagatccacactgct

SEQ ID NO: 94436 - DNA, 26 bp, Homo sapiens
aatgtggaagaagatccacactgcta

SEQ ID NO: 94437 - DNA, 26 bp, Homo sapiens
atgtggaagaagatccacactgctaa

SEQ ID NO: 94438 - DNA, 26 bp, Homo sapiens
tgtggaagaagatccacactgctaaa

SEQ ID NO: 94439 - DNA, 26 bp, Homo sapiens
gtggaagaagatccacactgctaaac

SEQ ID NO: 94440 - DNA, 26 bp, Homo sapiens
tggaagaagatccacactgctaaacc

SEQ ID NO: 94441 - DNA, 26 bp, Homo sapiens
ggaagaagatccacactgctaaacca

SEQ ID NO: 94442 - DNA, 26 bp, Homo sapiens
gaagaagatccacactgctaaaccat

SEQ ID NO: 94443 - DNA, 26 bp, Homo sapiens
aagaagatccacactgctaaaccatt

SEQ ID NO: 94444 - DNA, 26 bp, Homo sapiens
agaagatccacactgctaaaccattc

SEQ ID NO: 94445 - DNA, 26 bp, Homo sapiens
gaagatccacactgctaaaccattca

SEQ ID NO: 94446 - DNA, 26 bp, Homo sapiens
aagatccacactgctaaaccattcag

SEQ ID NO: 94447 - DNA, 26 bp, Homo sapiens
agatccacactgctaaaccattcagc

SEQ ID NO: 94448 - DNA, 26 bp, Homo sapiens
gatccacactgctaaaccattcagca

SEQ ID NO: 94449 - DNA, 26 bp, Homo sapiens
atccacactgctaaaccattcagcaa

SEQ ID NO: 94450 - DNA, 26 bp, Homo sapiens
tccacactgctaaaccattcagcaag

SEQ ID NO: 94451 - DNA, 26 bp, Homo sapiens
ccacactgctaaaccattcagcaaga

SEQ ID NO: 94452 - DNA, 26 bp, Homo sapiens
cacactgctaaaccattcagcaagat

SEQ ID NO: 94453 - DNA, 26 bp, Homo sapiens
acactgctaaaccattcagcaagatg

SEQ ID NO: 94454 - DNA, 26 bp, Homo sapiens
cactgctaaaccattcagcaagatgc

SEQ ID NO: 94455 - DNA, 26 bp, Homo sapiens
actgctaaaccattcagcaagatgct

SEQ ID NO: 94456 - DNA, 26 bp, Homo sapiens
ctgctaaaccattcagcaagatgctt

SEQ ID NO: 94457 - DNA, 26 bp, Homo sapiens
tgctaaaccattcagcaagatgcttg

SEQ ID NO: 94458 - DNA, 26 bp, Homo sapiens
gctaaaccattcagcaagatgcttgc

SEQ ID NO: 94459 - DNA, 26 bp, Homo sapiens
ctaaaccattcagcaagatgcttgcc

SEQ ID NO: 94460 - DNA, 26 bp, Homo sapiens
taaaccattcagcaagatgcttgcca

SEQ ID NO: 94461 - DNA, 26 bp, Homo sapiens
aaaccattcagcaagatgcttgccac

SEQ ID NO: 94462 - DNA, 26 bp, Homo sapiens
aaccattcagcaagatgcttgccaca

SEQ ID NO: 94463 - DNA, 26 bp, Homo sapiens
accattcagcaagatgcttgccacaa

SEQ ID NO: 94464 - DNA, 26 bp, Homo sapiens
ccattcagcaagatgcttgccacaaa

SEQ ID NO: 94465 - DNA, 26 bp, Homo sapiens
cattcagcaagatgcttgccacaaat

SEQ ID NO: 94466 - DNA, 26 bp, Homo sapiens
attcagcaagatgcttgccacaaata

SEQ ID NO: 94467 - DNA, 26 bp, Homo sapiens
ttcagcaagatgcttgccacaaatat

SEQ ID NO: 94468 - DNA, 26 bp, Homo sapiens
tcagcaagatgcttgccacaaatata

SEQ ID NO: 94469 - DNA, 26 bp, Homo sapiens
cagcaagatgcttgccacaaatataa

SEQ ID NO: 94470 - DNA, 26 bp, Homo sapiens
agcaagatgcttgccacaaatataat

SEQ ID NO: 94471 - DNA, 26 bp, Homo sapiens
gcaagatgcttgccacaaatataatg

SEQ ID NO: 94472 - DNA, 26 bp, Homo sapiens
caagatgcttgccacaaatataatga

SEQ ID NO: 94473 - DNA, 26 bp, Homo sapiens
aagatgcttgccacaaatataatgag

SEQ ID NO: 94474 - DNA, 26 bp, Homo sapiens
agatgcttgccacaaatataatgaga

SEQ ID NO: 94475 - DNA, 26 bp, Homo sapiens
gatgcttgccacaaatataatgagat

SEQ ID NO: 94476 - DNA, 26 bp, Homo sapiens
atgcttgccacaaatataatgagata

SEQ ID NO: 94477 - DNA, 26 bp, Homo sapiens
tgcttgccacaaatataatgagataa

SEQ ID NO: 94478 - DNA, 26 bp, Homo sapiens
gcttgccacaaatataatgagataaa

SEQ ID NO: 94479 - DNA, 26 bp, Homo sapiens
cttgccacaaatataatgagataaag

SEQ ID NO: 94480 - DNA, 26 bp, Homo sapiens
ttgccacaaatataatgagataaagc

SEQ ID NO: 94481 - DNA, 26 bp, Homo sapiens
tgccacaaatataatgagataaagca

SEQ ID NO: 94482 - DNA, 26 bp, Homo sapiens
gccacaaatataatgagataaagcac

SEQ ID NO: 94483 - DNA, 26 bp, Homo sapiens
ccacaaatataatgagataaagcacc

SEQ ID NO: 94484 - DNA, 26 bp, Homo sapiens
cacaaatataatgagataaagcaccg

SEQ ID NO: 94485 - DNA, 26 bp, Homo sapiens
acaaatataatgagataaagcaccgg

SEQ ID NO: 94486 - DNA, 26 bp, Homo sapiens
caaatataatgagataaagcaccggc

SEQ ID NO: 94487 - DNA, 26 bp, Homo sapiens
aaatataatgagataaagcaccggca

SEQ ID NO: 94488 - DNA, 26 bp, Homo sapiens
aatataatgagataaagcaccggcaa

SEQ ID NO: 94489 - DNA, 26 bp, Homo sapiens
atataatgagataaagcaccggcaag

SEQ ID NO: 94490 - DNA, 26 bp, Homo sapiens
tataatgagataaagcaccggcaaga

SEQ ID NO: 94491 - DNA, 26 bp, Homo sapiens
ataatgagataaagcaccggcaagac

SEQ ID NO: 94492 - DNA, 26 bp, Homo sapiens
taatgagataaagcaccggcaagaca

SEQ ID NO: 94493 - DNA, 26 bp, Homo sapiens
aatgagataaagcaccggcaagacaa

SEQ ID NO: 94494 - DNA, 26 bp, Homo sapiens
atgagataaagcaccggcaagacaat

SEQ ID NO: 94495 - DNA, 26 bp, Homo sapiens
tgagataaagcaccggcaagacaatt

SEQ ID NO: 94496 - DNA, 26 bp, Homo sapiens
gagataaagcaccggcaagacaattg

SEQ ID NO: 94497 - DNA, 26 bp, Homo sapiens
agataaagcaccggcaagacaattgt

SEQ ID NO: 94498 - DNA, 26 bp, Homo sapiens
gataaagcaccggcaagacaattgtg

SEQ ID NO: 94499 - DNA, 26 bp, Homo sapiens
ataaagcaccggcaagacaattgtgt

SEQ ID NO: 94500 - DNA, 26 bp, Homo sapiens
taaagcaccggcaagacaattgtgtc

SEQ ID NO: 94501 - DNA, 26 bp, Homo sapiens
aaagcaccggcaagacaattgtgtca

SEQ ID NO: 94502 - DNA, 26 bp, Homo sapiens
aagcaccggcaagacaattgtgtcaa

SEQ ID NO: 94503 - DNA, 26 bp, Homo sapiens
agcaccggcaagacaattgtgtcaaa

SEQ ID NO: 94504 - DNA, 26 bp, Homo sapiens
gcaccggcaagacaattgtgtcaaat

SEQ ID NO: 94505 - DNA, 26 bp, Homo sapiens
caccggcaagacaattgtgtcaaatt

SEQ ID NO: 94506 - DNA, 26 bp, Homo sapiens
accggcaagacaattgtgtcaaattc

SEQ ID NO: 94507 - DNA, 26 bp, Homo sapiens
ccggcaagacaattgtgtcaaattca

SEQ ID NO: 94508 - DNA, 26 bp, Homo sapiens
cggcaagacaattgtgtcaaattcat

SEQ ID NO: 94509 - DNA, 26 bp, Homo sapiens
ggcaagacaattgtgtcaaattcatt

SEQ ID NO: 94510 - DNA, 26 bp, Homo sapiens
gcaagacaattgtgtcaaattcattg

SEQ ID NO: 94511 - DNA, 26 bp, Homo sapiens
caagacaattgtgtcaaattcattgt

SEQ ID NO: 94512 - DNA, 26 bp, Homo sapiens
aagacaattgtgtcaaattcattgtg

SEQ ID NO: 94513 - DNA, 26 bp, Homo sapiens
agacaattgtgtcaaattcattgtga

SEQ ID NO: 94514 - DNA, 26 bp, Homo sapiens
gacaattgtgtcaaattcattgtgaa

SEQ ID NO: 94515 - DNA, 26 bp, Homo sapiens
acaattgtgtcaaattcattgtgaag

SEQ ID NO: 94516 - DNA, 26 bp, Homo sapiens
caattgtgtcaaattcattgtgaagg

SEQ ID NO: 94517 - DNA, 26 bp, Homo sapiens
aattgtgtcaaattcattgtgaaggg

SEQ ID NO: 94518 - DNA, 26 bp, Homo sapiens
attgtgtcaaattcattgtgaagggt

SEQ ID NO: 94519 - DNA, 26 bp, Homo sapiens
ttgtgtcaaattcattgtgaagggtg

SEQ ID NO: 94520 - DNA, 26 bp, Homo sapiens
tgtgtcaaattcattgtgaagggtgg

SEQ ID NO: 94521 - DNA, 26 bp, Homo sapiens
gtgtcaaattcattgtgaagggtggt

SEQ ID NO: 94522 - DNA, 26 bp, Homo sapiens
tgtcaaattcattgtgaagggtggtg

SEQ ID NO: 94523 - DNA, 26 bp, Homo sapiens
gtcaaattcattgtgaagggtggtgt

SEQ ID NO: 94524 - DNA, 26 bp, Homo sapiens
tcaaattcattgtgaagggtggtgtt

SEQ ID NO: 94525 - DNA, 26 bp, Homo sapiens
caaattcattgtgaagggtggtgttc

SEQ ID NO: 94526 - DNA, 26 bp, Homo sapiens
aaattcattgtgaagggtggtgttct

SEQ ID NO: 94527 - DNA, 26 bp, Homo sapiens
aattcattgtgaagggtggtgttctt

SEQ ID NO: 94528 - DNA, 26 bp, Homo sapiens
attcattgtgaagggtggtgttcttt

SEQ ID NO: 94529 - DNA, 26 bp, Homo sapiens
ttcattgtgaagggtggtgttctttc

SEQ ID NO: 94530 - DNA, 26 bp, Homo sapiens
tcattgtgaagggtggtgttctttcc

SEQ ID NO: 94531 - DNA, 26 bp, Homo sapiens
cattgtgaagggtggtgttctttcct

SEQ ID NO: 94532 - DNA, 26 bp, Homo sapiens
attgtgaagggtggtgttctttcctg

SEQ ID NO: 94533 - DNA, 26 bp, Homo sapiens
ttgtgaagggtggtgttctttcctgg

SEQ ID NO: 94534 - DNA, 26 bp, Homo sapiens
tgtgaagggtggtgttctttcctggc

SEQ ID NO: 94535 - DNA, 26 bp, Homo sapiens
gtgaagggtggtgttctttcctggcc

SEQ ID NO: 94536 - DNA, 26 bp, Homo sapiens
tgaagggtggtgttctttcctggccc

SEQ ID NO: 94537 - DNA, 26 bp, Homo sapiens
gaagggtggtgttctttcctggcccg

SEQ ID NO: 94538 - DNA, 26 bp, Homo sapiens
aagggtggtgttctttcctggcccgt

SEQ ID NO: 94539 - DNA, 26 bp, Homo sapiens
agggtggtgttctttcctggcccgtc

SEQ ID NO: 94540 - DNA, 26 bp, Homo sapiens
gggtggtgttctttcctggcccgtcg

SEQ ID NO: 94541 - DNA, 26 bp, Homo sapiens
ggtggtgttctttcctggcccgtcgc

SEQ ID NO: 94542 - DNA, 26 bp, Homo sapiens
gtggtgttctttcctggcccgtcgct

SEQ ID NO: 94543 - DNA, 26 bp, Homo sapiens
tggtgttctttcctggcccgtcgctc

SEQ ID NO: 94544 - DNA, 26 bp, Homo sapiens
ggtgttctttcctggcccgtcgctcc

SEQ ID NO: 94545 - DNA, 26 bp, Homo sapiens
gtgttctttcctggcccgtcgctcct

SEQ ID NO: 94546 - DNA, 26 bp, Homo sapiens
tgttctttcctggcccgtcgctcctg

SEQ ID NO: 94547 - DNA, 26 bp, Homo sapiens
gttctttcctggcccgtcgctcctgt

SEQ ID NO: 94548 - DNA, 26 bp, Homo sapiens
ttctttcctggcccgtcgctcctgtt

SEQ ID NO: 94549 - DNA, 26 bp, Homo sapiens
tctttcctggcccgtcgctcctgttg

SEQ ID NO: 94550 - DNA, 26 bp, Homo sapiens
ctttcctggcccgtcgctcctgttgc

SEQ ID NO: 94551 - DNA, 26 bp, Homo sapiens
tttcctggcccgtcgctcctgttgcc

SEQ ID NO: 94552 - DNA, 26 bp, Homo sapiens
ttcctggcccgtcgctcctgttgcct

SEQ ID NO: 94553 - DNA, 26 bp, Homo sapiens
tcctggcccgtcgctcctgttgcctg

SEQ ID NO: 94554 - DNA, 26 bp, Homo sapiens
cctggcccgtcgctcctgttgcctga

SEQ ID NO: 94555 - DNA, 26 bp, Homo sapiens
ctggcccgtcgctcctgttgcctgaa

SEQ ID NO: 94556 - DNA, 26 bp, Homo sapiens
tggcccgtcgctcctgttgcctgaat

SEQ ID NO: 94557 - DNA, 26 bp, Homo sapiens
ggcccgtcgctcctgttgcctgaatt

SEQ ID NO: 94558 - DNA, 26 bp, Homo sapiens
gcccgtcgctcctgttgcctgaattg

SEQ ID NO: 94559 - DNA, 26 bp, Homo sapiens
cccgtcgctcctgttgcctgaattgt

SEQ ID NO: 94560 - DNA, 26 bp, Homo sapiens
ccgtcgctcctgttgcctgaattgtg

SEQ ID NO: 94561 - DNA, 26 bp, Homo sapiens
cgtcgctcctgttgcctgaattgtga

SEQ ID NO: 94562 - DNA, 26 bp, Homo sapiens
gtcgctcctgttgcctgaattgtgac

SEQ ID NO: 94563 - DNA, 26 bp, Homo sapiens
tcgctcctgttgcctgaattgtgact

SEQ ID NO: 94564 - DNA, 26 bp, Homo sapiens
cgctcctgttgcctgaattgtgactc

SEQ ID NO: 94565 - DNA, 26 bp, Homo sapiens
gctcctgttgcctgaattgtgactct

SEQ ID NO: 94566 - DNA, 26 bp, Homo sapiens
ctcctgttgcctgaattgtgactctc

SEQ ID NO: 94567 - DNA, 26 bp, Homo sapiens
tcctgttgcctgaattgtgactctct

SEQ ID NO: 94568 - DNA, 26 bp, Homo sapiens
cctgttgcctgaattgtgactctctt

SEQ ID NO: 94569 - DNA, 26 bp, Homo sapiens
ctgttgcctgaattgtgactctcttg

SEQ ID NO: 94570 - DNA, 26 bp, Homo sapiens
tgttgcctgaattgtgactctcttgg

SEQ ID NO: 94571 - DNA, 26 bp, Homo sapiens
gttgcctgaattgtgactctcttggc

SEQ ID NO: 94572 - DNA, 26 bp, Homo sapiens
ttgcctgaattgtgactctcttggcc

SEQ ID NO: 94573 - DNA, 26 bp, Homo sapiens
tgcctgaattgtgactctcttggccg

SEQ ID NO: 94574 - DNA, 26 bp, Homo sapiens
gcctgaattgtgactctcttggccgt

SEQ ID NO: 94575 - DNA, 26 bp, Homo sapiens
cctgaattgtgactctcttggccgtg

SEQ ID NO: 94576 - DNA, 26 bp, Homo sapiens
ctgaattgtgactctcttggccgtgc

SEQ ID NO: 94577 - DNA, 26 bp, Homo sapiens
tgaattgtgactctcttggccgtgca

SEQ ID NO: 94578 - DNA, 26 bp, Homo sapiens
gaattgtgactctcttggccgtgcag

SEQ ID NO: 94579 - DNA, 26 bp, Homo sapiens
aattgtgactctcttggccgtgcagc

SEQ ID NO: 94580 - DNA, 26 bp, Homo sapiens
attgtgactctcttggccgtgcagct

SEQ ID NO: 94581 - DNA, 26 bp, Homo sapiens
ttgtgactctcttggccgtgcagctc

SEQ ID NO: 94582 - DNA, 26 bp, Homo sapiens
tgtgactctcttggccgtgcagctcg

SEQ ID NO: 94583 - DNA, 26 bp, Homo sapiens
gtgactctcttggccgtgcagctcgt

SEQ ID NO: 94584 - DNA, 26 bp, Homo sapiens
tgactctcttggccgtgcagctcgtt

SEQ ID NO: 94585 - DNA, 26 bp, Homo sapiens
gactctcttggccgtgcagctcgtta

SEQ ID NO: 94586 - DNA, 26 bp, Homo sapiens
actctcttggccgtgcagctcgttat

SEQ ID NO: 94587 - DNA, 26 bp, Homo sapiens
ctctcttggccgtgcagctcgttatt

SEQ ID NO: 94588 - DNA, 26 bp, Homo sapiens
tctcttggccgtgcagctcgttattt

SEQ ID NO: 94589 - DNA, 26 bp, Homo sapiens
ctcttggccgtgcagctcgttatttg

SEQ ID NO: 94590 - DNA, 26 bp, Homo sapiens
tcttggccgtgcagctcgttatttgg

SEQ ID NO: 94591 - DNA, 26 bp, Homo sapiens
cttggccgtgcagctcgttatttggt

SEQ ID NO: 94592 - DNA, 26 bp, Homo sapiens
ttggccgtgcagctcgttatttggta

SEQ ID NO: 94593 - DNA, 26 bp, Homo sapiens
tggccgtgcagctcgttatttggtaa

SEQ ID NO: 94594 - DNA, 26 bp, Homo sapiens
ggccgtgcagctcgttatttggtaat

SEQ ID NO: 94595 - DNA, 26 bp, Homo sapiens
gccgtgcagctcgttatttggtaatt

SEQ ID NO: 94596 - DNA, 26 bp, Homo sapiens
ccgtgcagctcgttatttggtaattt

SEQ ID NO: 94597 - DNA, 26 bp, Homo sapiens
cgtgcagctcgttatttggtaatttt

SEQ ID NO: 94598 - DNA, 26 bp, Homo sapiens
gtgcagctcgttatttggtaattttg

SEQ ID NO: 94599 - DNA, 26 bp, Homo sapiens
tgcagctcgttatttggtaattttgc

SEQ ID NO: 94600 - DNA, 26 bp, Homo sapiens
gcagctcgttatttggtaattttgca

SEQ ID NO: 94601 - DNA, 26 bp, Homo sapiens
cagctcgttatttggtaattttgcaa

SEQ ID NO: 94602 - DNA, 26 bp, Homo sapiens
agctcgttatttggtaattttgcaag

SEQ ID NO: 94603 - DNA, 26 bp, Homo sapiens
gctcgttatttggtaattttgcaagc

SEQ ID NO: 94604 - DNA, 26 bp, Homo sapiens
ctcgttatttggtaattttgcaagcg

SEQ ID NO: 94605 - DNA, 26 bp, Homo sapiens
tcgttatttggtaattttgcaagcgt

SEQ ID NO: 94606 - DNA, 26 bp, Homo sapiens
cgttatttggtaattttgcaagcgtc

SEQ ID NO: 94607 - DNA, 26 bp, Homo sapiens
gttatttggtaattttgcaagcgtca

SEQ ID NO: 94608 - DNA, 26 bp, Homo sapiens
ttatttggtaattttgcaagcgtcaa

SEQ ID NO: 94609 - DNA, 26 bp, Homo sapiens
tatttggtaattttgcaagcgtcaag

SEQ ID NO: 94610 - DNA, 26 bp, Homo sapiens
atttggtaattttgcaagcgtcaagt

SEQ ID NO: 94611 - DNA, 26 bp, Homo sapiens
tttggtaattttgcaagcgtcaagtt

SEQ ID NO: 94612 - DNA, 26 bp, Homo sapiens
ttggtaattttgcaagcgtcaagttg

SEQ ID NO: 94613 - DNA, 26 bp, Homo sapiens
tggtaattttgcaagcgtcaagttga

SEQ ID NO: 94614 - DNA, 26 bp, Homo sapiens
ggtaattttgcaagcgtcaagttgaa

SEQ ID NO: 94615 - DNA, 26 bp, Homo sapiens
gtaattttgcaagcgtcaagttgaac

SEQ ID NO: 94616 - DNA, 26 bp, Homo sapiens
taattttgcaagcgtcaagttgaacc

SEQ ID NO: 94617 - DNA, 26 bp, Homo sapiens
aattttgcaagcgtcaagttgaaccc

SEQ ID NO: 94618 - DNA, 26 bp, Homo sapiens
attttgcaagcgtcaagttgaacccc

SEQ ID NO: 94619 - DNA, 26 bp, Homo sapiens
ttttgcaagcgtcaagttgaacccca

SEQ ID NO: 94620 - DNA, 26 bp, Homo sapiens
tttgcaagcgtcaagttgaaccccat

SEQ ID NO: 94621 - DNA, 26 bp, Homo sapiens
ttgcaagcgtcaagttgaaccccatt

SEQ ID NO: 94622 - DNA, 26 bp, Homo sapiens
tgcaagcgtcaagttgaaccccattc

SEQ ID NO: 94623 - DNA, 26 bp, Homo sapiens
gcaagcgtcaagttgaaccccattct

SEQ ID NO: 94624 - DNA, 26 bp, Homo sapiens
caagcgtcaagttgaaccccattctt

SEQ ID NO: 94625 - DNA, 26 bp, Homo sapiens
aagcgtcaagttgaaccccattcttc

SEQ ID NO: 94626 - DNA, 26 bp, Homo sapiens
agcgtcaagttgaaccccattcttca

SEQ ID NO: 94627 - DNA, 26 bp, Homo sapiens
gcgtcaagttgaaccccattcttcag

SEQ ID NO: 94628 - DNA, 26 bp, Homo sapiens
cgtcaagttgaaccccattcttcagt

SEQ ID NO: 94629 - DNA, 26 bp, Homo sapiens
gtcaagttgaaccccattcttcagtt

SEQ ID NO: 94630 - DNA, 26 bp, Homo sapiens
tcaagttgaaccccattcttcagttg

SEQ ID NO: 94631 - DNA, 26 bp, Homo sapiens
caagttgaaccccattcttcagttgt

SEQ ID NO: 94632 - DNA, 26 bp, Homo sapiens
aagttgaaccccattcttcagttgtg

SEQ ID NO: 94633 - DNA, 26 bp, Homo sapiens
agttgaaccccattcttcagttgtga

SEQ ID NO: 94634 - DNA, 26 bp, Homo sapiens
gttgaaccccattcttcagttgtgat

SEQ ID NO: 94635 - DNA, 26 bp, Homo sapiens
ttgaaccccattcttcagttgtgatg

SEQ ID NO: 94636 - DNA, 26 bp, Homo sapiens
tgaaccccattcttcagttgtgatgc

SEQ ID NO: 94637 - DNA, 26 bp, Homo sapiens
gaaccccattcttcagttgtgatgca

SEQ ID NO: 94638 - DNA, 26 bp, Homo sapiens
aaccccattcttcagttgtgatgcac

SEQ ID NO: 94639 - DNA, 26 bp, Homo sapiens
accccattcttcagttgtgatgcact

SEQ ID NO: 94640 - DNA, 26 bp, Homo sapiens
ccccattcttcagttgtgatgcactg

SEQ ID NO: 94641 - DNA, 26 bp, Homo sapiens
cccattcttcagttgtgatgcactgt

SEQ ID NO: 94642 - DNA, 26 bp, Homo sapiens
ccattcttcagttgtgatgcactgta

SEQ ID NO: 94643 - DNA, 26 bp, Homo sapiens
cattcttcagttgtgatgcactgtaa

SEQ ID NO: 94644 - DNA, 26 bp, Homo sapiens
attcttcagttgtgatgcactgtaag

SEQ ID NO: 94645 - DNA, 26 bp, Homo sapiens
ttcttcagttgtgatgcactgtaagc

SEQ ID NO: 94646 - DNA, 26 bp, Homo sapiens
tcttcagttgtgatgcactgtaagca

SEQ ID NO: 94647 - DNA, 26 bp, Homo sapiens
cttcagttgtgatgcactgtaagcaa

SEQ ID NO: 94648 - DNA, 26 bp, Homo sapiens
ttcagttgtgatgcactgtaagcaaa

SEQ ID NO: 94649 - DNA, 26 bp, Homo sapiens
tcagttgtgatgcactgtaagcaaag

SEQ ID NO: 94650 - DNA, 26 bp, Homo sapiens
cagttgtgatgcactgtaagcaaaga

SEQ ID NO: 94651 - DNA, 26 bp, Homo sapiens
agttgtgatgcactgtaagcaaagat

SEQ ID NO: 94652 - DNA, 26 bp, Homo sapiens
gttgtgatgcactgtaagcaaagatg

SEQ ID NO: 94653 - DNA, 26 bp, Homo sapiens
ttgtgatgcactgtaagcaaagatgc

SEQ ID NO: 94654 - DNA, 26 bp, Homo sapiens
tgtgatgcactgtaagcaaagatgcg

SEQ ID NO: 94655 - DNA, 26 bp, Homo sapiens
gtgatgcactgtaagcaaagatgcgt

SEQ ID NO: 94656 - DNA, 26 bp, Homo sapiens
tgatgcactgtaagcaaagatgcgtg

SEQ ID NO: 94657 - DNA, 26 bp, Homo sapiens
gatgcactgtaagcaaagatgcgtgt

SEQ ID NO: 94658 - DNA, 26 bp, Homo sapiens
atgcactgtaagcaaagatgcgtgtc

SEQ ID NO: 94659 - DNA, 26 bp, Homo sapiens
tgcactgtaagcaaagatgcgtgtca

SEQ ID NO: 94660 - DNA, 26 bp, Homo sapiens
gcactgtaagcaaagatgcgtgtcag

SEQ ID NO: 94661 - DNA, 26 bp, Homo sapiens
cactgtaagcaaagatgcgtgtcagg

SEQ ID NO: 94662 - DNA, 26 bp, Homo sapiens
actgtaagcaaagatgcgtgtcagga

SEQ ID NO: 94663 - DNA, 26 bp, Homo sapiens
ctgtaagcaaagatgcgtgtcaggaa

SEQ ID NO: 94664 - DNA, 26 bp, Homo sapiens
tgtaagcaaagatgcgtgtcaggaaa

SEQ ID NO: 94665 - DNA, 26 bp, Homo sapiens
gtaagcaaagatgcgtgtcaggaaac

SEQ ID NO: 94666 - DNA, 26 bp, Homo sapiens
taagcaaagatgcgtgtcaggaaaca

SEQ ID NO: 94667 - DNA, 26 bp, Homo sapiens
aagcaaagatgcgtgtcaggaaacac

SEQ ID NO: 94668 - DNA, 26 bp, Homo sapiens
agcaaagatgcgtgtcaggaaacact

SEQ ID NO: 94669 - DNA, 26 bp, Homo sapiens
gcaaagatgcgtgtcaggaaacactt

SEQ ID NO: 94670 - DNA, 26 bp, Homo sapiens
caaagatgcgtgtcaggaaacacttg

SEQ ID NO: 94671 - DNA, 26 bp, Homo sapiens
aaagatgcgtgtcaggaaacacttgg

SEQ ID NO: 94672 - DNA, 26 bp, Homo sapiens
aagatgcgtgtcaggaaacacttggg

SEQ ID NO: 94673 - DNA, 26 bp, Homo sapiens
agatgcgtgtcaggaaacacttgggg

SEQ ID NO: 94674 - DNA, 26 bp, Homo sapiens
gatgcgtgtcaggaaacacttgggga

SEQ ID NO: 94675 - DNA, 26 bp, Homo sapiens
atgcgtgtcaggaaacacttggggac

SEQ ID NO: 94676 - DNA, 26 bp, Homo sapiens
tgcgtgtcaggaaacacttggggacg

SEQ ID NO: 94677 - DNA, 26 bp, Homo sapiens
gcgtgtcaggaaacacttggggacga

SEQ ID NO: 94678 - DNA, 26 bp, Homo sapiens
cgtgtcaggaaacacttggggacgat

SEQ ID NO: 94679 - DNA, 26 bp, Homo sapiens
gtgtcaggaaacacttggggacgatt

SEQ ID NO: 94680 - DNA, 26 bp, Homo sapiens
tgtcaggaaacacttggggacgattg

SEQ ID NO: 94681 - DNA, 26 bp, Homo sapiens
gtcaggaaacacttggggacgattga

SEQ ID NO: 94682 - DNA, 26 bp, Homo sapiens
tcaggaaacacttggggacgattgag

SEQ ID NO: 94683 - DNA, 26 bp, Homo sapiens
caggaaacacttggggacgattgagg

SEQ ID NO: 94684 - DNA, 26 bp, Homo sapiens
aggaaacacttggggacgattgaggc

SEQ ID NO: 94685 - DNA, 26 bp, Homo sapiens
ggaaacacttggggacgattgaggcg

SEQ ID NO: 94686 - DNA, 26 bp, Homo sapiens
gaaacacttggggacgattgaggcgt

SEQ ID NO: 94687 - DNA, 26 bp, Homo sapiens
aaacacttggggacgattgaggcgtg

SEQ ID NO: 94688 - DNA, 26 bp, Homo sapiens
aacacttggggacgattgaggcgtgg

SEQ ID NO: 94689 - DNA, 26 bp, Homo sapiens
acacttggggacgattgaggcgtggg

SEQ ID NO: 94690 - DNA, 26 bp, Homo sapiens
cacttggggacgattgaggcgtgggt

SEQ ID NO: 94691 - DNA, 26 bp, Homo sapiens
acttggggacgattgaggcgtgggtt

SEQ ID NO: 94692 - DNA, 26 bp, Homo sapiens
cttggggacgattgaggcgtgggttc

SEQ ID NO: 94693 - DNA, 26 bp, Homo sapiens
ttggggacgattgaggcgtgggttca

SEQ ID NO: 94694 - DNA, 26 bp, Homo sapiens
tggggacgattgaggcgtgggttcag

SEQ ID NO: 94695 - DNA, 26 bp, Homo sapiens
ggggacgattgaggcgtgggttcagc

SEQ ID NO: 94696 - DNA, 26 bp, Homo sapiens
gggacgattgaggcgtgggttcagca

SEQ ID NO: 94697 - DNA, 26 bp, Homo sapiens
ggacgattgaggcgtgggttcagcat

SEQ ID NO: 94698 - DNA, 26 bp, Homo sapiens
gacgattgaggcgtgggttcagcata

SEQ ID NO: 94699 - DNA, 26 bp, Homo sapiens
acgattgaggcgtgggttcagcatag

SEQ ID NO: 94700 - DNA, 26 bp, Homo sapiens
cgattgaggcgtgggttcagcatagg

SEQ ID NO: 94701 - DNA, 26 bp, Homo sapiens
gattgaggcgtgggttcagcataggt

SEQ ID NO: 94702 - DNA, 26 bp, Homo sapiens
attgaggcgtgggttcagcataggtt

SEQ ID NO: 94703 - DNA, 26 bp, Homo sapiens
ttgaggcgtgggttcagcataggtta

SEQ ID NO: 94704 - DNA, 26 bp, Homo sapiens
tgaggcgtgggttcagcataggttat

SEQ ID NO: 94705 - DNA, 26 bp, Homo sapiens
gaggcgtgggttcagcataggttatt

SEQ ID NO: 94706 - DNA, 26 bp, Homo sapiens
aggcgtgggttcagcataggttattc

SEQ ID NO: 94707 - DNA, 26 bp, Homo sapiens
ggcgtgggttcagcataggttattcc

SEQ ID NO: 94708 - DNA, 26 bp, Homo sapiens
gcgtgggttcagcataggttattcct

SEQ ID NO: 94709 - DNA, 26 bp, Homo sapiens
cgtgggttcagcataggttattcctg

SEQ ID NO: 94710 - DNA, 26 bp, Homo sapiens
gtgggttcagcataggttattcctgg

SEQ ID NO: 94711 - DNA, 26 bp, Homo sapiens
tgggttcagcataggttattcctggt

SEQ ID NO: 94712 - DNA, 26 bp, Homo sapiens
gggttcagcataggttattcctggtt

SEQ ID NO: 94713 - DNA, 26 bp, Homo sapiens
ggttcagcataggttattcctggttt

SEQ ID NO: 94714 - DNA, 26 bp, Homo sapiens
gttcagcataggttattcctggtttg

SEQ ID NO: 94715 - DNA, 26 bp, Homo sapiens
ttcagcataggttattcctggtttga

SEQ ID NO: 94716 - DNA, 26 bp, Homo sapiens
tcagcataggttattcctggtttgat

SEQ ID NO: 94717 - DNA, 26 bp, Homo sapiens
cagcataggttattcctggtttgatt

SEQ ID NO: 94718 - DNA, 26 bp, Homo sapiens
agcataggttattcctggtttgattt

SEQ ID NO: 94719 - DNA, 26 bp, Homo sapiens
gcataggttattcctggtttgatttc

SEQ ID NO: 94720 - DNA, 26 bp, Homo sapiens
cataggttattcctggtttgatttct

SEQ ID NO: 94721 - DNA, 26 bp, Homo sapiens
ataggttattcctggtttgatttctt

SEQ ID NO: 94722 - DNA, 26 bp, Homo sapiens
taggttattcctggtttgatttcttt

SEQ ID NO: 94723 - DNA, 26 bp, Homo sapiens
aggttattcctggtttgatttctttc

SEQ ID NO: 94724 - DNA, 26 bp, Homo sapiens
ggttattcctggtttgatttctttca

SEQ ID NO: 94725 - DNA, 26 bp, Homo sapiens
gttattcctggtttgatttctttcat

SEQ ID NO: 94726 - DNA, 26 bp, Homo sapiens
ttattcctggtttgatttctttcatt

SEQ ID NO: 94727 - DNA, 26 bp, Homo sapiens
tattcctggtttgatttctttcattg

SEQ ID NO: 94728 - DNA, 26 bp, Homo sapiens
attcctggtttgatttctttcattgt

SEQ ID NO: 94729 - DNA, 26 bp, Homo sapiens
ttcctggtttgatttctttcattgtg

SEQ ID NO: 94730 - DNA, 26 bp, Homo sapiens
tcctggtttgatttctttcattgtgg

SEQ ID NO: 94731 - DNA, 26 bp, Homo sapiens
cctggtttgatttctttcattgtggt

SEQ ID NO: 94732 - DNA, 26 bp, Homo sapiens
ctggtttgatttctttcattgtggtg

SEQ ID NO: 94733 - DNA, 26 bp, Homo sapiens
tggtttgatttctttcattgtggtgg

SEQ ID NO: 94734 - DNA, 26 bp, Homo sapiens
ggtttgatttctttcattgtggtggc

SEQ ID NO: 94735 - DNA, 26 bp, Homo sapiens
gtttgatttctttcattgtggtggct

SEQ ID NO: 94736 - DNA, 26 bp, Homo sapiens
tttgatttctttcattgtggtggctg

SEQ ID NO: 94737 - DNA, 26 bp, Homo sapiens
ttgatttctttcattgtggtggctgg

SEQ ID NO: 94738 - DNA, 26 bp, Homo sapiens
tgatttctttcattgtggtggctggc

SEQ ID NO: 94739 - DNA, 26 bp, Homo sapiens
gatttctttcattgtggtggctggct

SEQ ID NO: 94740 - DNA, 26 bp, Homo sapiens
atttctttcattgtggtggctggctg

SEQ ID NO: 94741 - DNA, 26 bp, Homo sapiens
tttctttcattgtggtggctggctgt

SEQ ID NO: 94742 - DNA, 26 bp, Homo sapiens
ttctttcattgtggtggctggctgtc

SEQ ID NO: 94743 - DNA, 26 bp, Homo sapiens
tctttcattgtggtggctggctgtcc

SEQ ID NO: 94744 - DNA, 26 bp, Homo sapiens
ctttcattgtggtggctggctgtcca

SEQ ID NO: 94745 - DNA, 26 bp, Homo sapiens
tttcattgtggtggctggctgtccat

SEQ ID NO: 94746 - DNA, 26 bp, Homo sapiens
ttcattgtggtggctggctgtccatt

SEQ ID NO: 94747 - DNA, 26 bp, Homo sapiens
tcattgtggtggctggctgtccattc

SEQ ID NO: 94748 - DNA, 26 bp, Homo sapiens
cattgtggtggctggctgtccattca

SEQ ID NO: 94749 - DNA, 26 bp, Homo sapiens
attgtggtggctggctgtccattcac

SEQ ID NO: 94750 - DNA, 26 bp, Homo sapiens
ttgtggtggctggctgtccattcacc

SEQ ID NO: 94751 - DNA, 26 bp, Homo sapiens
tgtggtggctggctgtccattcacct

SEQ ID NO: 94752 - DNA, 26 bp, Homo sapiens
gtggtggctggctgtccattcacctc

SEQ ID NO: 94753 - DNA, 26 bp, Homo sapiens
tggtggctggctgtccattcacctca

SEQ ID NO: 94754 - DNA, 26 bp, Homo sapiens
ggtggctggctgtccattcacctcat

SEQ ID NO: 94755 - DNA, 26 bp, Homo sapiens
gtggctggctgtccattcacctcata

SEQ ID NO: 94756 - DNA, 26 bp, Homo sapiens
tggctggctgtccattcacctcatac

SEQ ID NO: 94757 - DNA, 26 bp, Homo sapiens
ggctggctgtccattcacctcatacg

SEQ ID NO: 94758 - DNA, 26 bp, Homo sapiens
gctggctgtccattcacctcatacgg

SEQ ID NO: 94759 - DNA, 26 bp, Homo sapiens
ctggctgtccattcacctcatacggt

SEQ ID NO: 94760 - DNA, 26 bp, Homo sapiens
tggctgtccattcacctcatacggtg

SEQ ID NO: 94761 - DNA, 26 bp, Homo sapiens
ggctgtccattcacctcatacggtgt

SEQ ID NO: 94762 - DNA, 26 bp, Homo sapiens
gctgtccattcacctcatacggtgtc

SEQ ID NO: 94763 - DNA, 26 bp, Homo sapiens
ctgtccattcacctcatacggtgtct

SEQ ID NO: 94764 - DNA, 26 bp, Homo sapiens
tgtccattcacctcatacggtgtctt

SEQ ID NO: 94765 - DNA, 26 bp, Homo sapiens
gtccattcacctcatacggtgtcttc

SEQ ID NO: 94766 - DNA, 26 bp, Homo sapiens
tccattcacctcatacggtgtcttca

SEQ ID NO: 94767 - DNA, 26 bp, Homo sapiens
ccattcacctcatacggtgtcttcaa

SEQ ID NO: 94768 - DNA, 26 bp, Homo sapiens
cattcacctcatacggtgtcttcaag

SEQ ID NO: 94769 - DNA, 26 bp, Homo sapiens
attcacctcatacggtgtcttcaagt

SEQ ID NO: 94770 - DNA, 26 bp, Homo sapiens
ttcacctcatacggtgtcttcaagtt

SEQ ID NO: 94771 - DNA, 26 bp, Homo sapiens
tcacctcatacggtgtcttcaagttg

SEQ ID NO: 94772 - DNA, 26 bp, Homo sapiens
cacctcatacggtgtcttcaagttga

SEQ ID NO: 94773 - DNA, 26 bp, Homo sapiens
acctcatacggtgtcttcaagttgaa

SEQ ID NO: 94774 - DNA, 26 bp, Homo sapiens
cctcatacggtgtcttcaagttgaaa

SEQ ID NO: 94775 - DNA, 26 bp, Homo sapiens
ctcatacggtgtcttcaagttgaaac

SEQ ID NO: 94776 - DNA, 26 bp, Homo sapiens
tcatacggtgtcttcaagttgaaaca

SEQ ID NO: 94777 - DNA, 26 bp, Homo sapiens
catacggtgtcttcaagttgaaacag

SEQ ID NO: 94778 - DNA, 26 bp, Homo sapiens
atacggtgtcttcaagttgaaacagg

SEQ ID NO: 94779 - DNA, 26 bp, Homo sapiens
tacggtgtcttcaagttgaaacaggt

SEQ ID NO: 94780 - DNA, 26 bp, Homo sapiens
acggtgtcttcaagttgaaacaggtt

SEQ ID NO: 94781 - DNA, 26 bp, Homo sapiens
cggtgtcttcaagttgaaacaggttt

SEQ ID NO: 94782 - DNA, 26 bp, Homo sapiens
ggtgtcttcaagttgaaacaggtttc

SEQ ID NO: 94783 - DNA, 26 bp, Homo sapiens
gtgtcttcaagttgaaacaggtttct

SEQ ID NO: 94784 - DNA, 26 bp, Homo sapiens
tgtcttcaagttgaaacaggtttctt

SEQ ID NO: 94785 - DNA, 26 bp, Homo sapiens
gtcttcaagttgaaacaggtttcttg

SEQ ID NO: 94786 - DNA, 26 bp, Homo sapiens
tcttcaagttgaaacaggtttcttgt

SEQ ID NO: 94787 - DNA, 26 bp, Homo sapiens
cttcaagttgaaacaggtttcttgtc

SEQ ID NO: 94788 - DNA, 26 bp, Homo sapiens
ttcaagttgaaacaggtttcttgtct

SEQ ID NO: 94789 - DNA, 26 bp, Homo sapiens
tcaagttgaaacaggtttcttgtctc

SEQ ID NO: 94790 - DNA, 26 bp, Homo sapiens
caagttgaaacaggtttcttgtctct

SEQ ID NO: 94791 - DNA, 26 bp, Homo sapiens
aagttgaaacaggtttcttgtctcta

SEQ ID NO: 94792 - DNA, 26 bp, Homo sapiens
agttgaaacaggtttcttgtctctaa

SEQ ID NO: 94793 - DNA, 26 bp, Homo sapiens
gttgaaacaggtttcttgtctctaat

SEQ ID NO: 94794 - DNA, 26 bp, Homo sapiens
ttgaaacaggtttcttgtctctaatt

SEQ ID NO: 94795 - DNA, 26 bp, Homo sapiens
tgaaacaggtttcttgtctctaatta

SEQ ID NO: 94796 - DNA, 26 bp, Homo sapiens
gaaacaggtttcttgtctctaattaa

SEQ ID NO: 94797 - DNA, 26 bp, Homo sapiens
aaacaggtttcttgtctctaattaag

SEQ ID NO: 94798 - DNA, 26 bp, Homo sapiens
aacaggtttcttgtctctaattaaga

SEQ ID NO: 94799 - DNA, 26 bp, Homo sapiens
acaggtttcttgtctctaattaagaa

SEQ ID NO: 94800 - DNA, 26 bp, Homo sapiens
caggtttcttgtctctaattaagaat

SEQ ID NO: 94801 - DNA, 26 bp, Homo sapiens
aggtttcttgtctctaattaagaata

SEQ ID NO: 94802 - DNA, 26 bp, Homo sapiens
ggtttcttgtctctaattaagaataa

SEQ ID NO: 94803 - DNA, 26 bp, Homo sapiens
gtttcttgtctctaattaagaataag

SEQ ID NO: 94804 - DNA, 26 bp, Homo sapiens
tttcttgtctctaattaagaataagc

SEQ ID NO: 94805 - DNA, 26 bp, Homo sapiens
ttcttgtctctaattaagaataagct

SEQ ID NO: 94806 - DNA, 26 bp, Homo sapiens
tcttgtctctaattaagaataagctt

SEQ ID NO: 94807 - DNA, 26 bp, Homo sapiens
cttgtctctaattaagaataagcttt

SEQ ID NO: 94808 - DNA, 26 bp, Homo sapiens
ttgtctctaattaagaataagctttg

SEQ ID NO: 94809 - DNA, 26 bp, Homo sapiens
tgtctctaattaagaataagctttga

SEQ ID NO: 94810 - DNA, 26 bp, Homo sapiens
gtctctaattaagaataagctttgaa

SEQ ID NO: 94811 - DNA, 26 bp, Homo sapiens
tctctaattaagaataagctttgaaa

SEQ ID NO: 94812 - DNA, 26 bp, Homo sapiens
ctctaattaagaataagctttgaaac

SEQ ID NO: 94813 - DNA, 26 bp, Homo sapiens
tctaattaagaataagctttgaaact

SEQ ID NO: 94814 - DNA, 26 bp, Homo sapiens
ctaattaagaataagctttgaaacta

SEQ ID NO: 94815 - DNA, 26 bp, Homo sapiens
taattaagaataagctttgaaactaa

SEQ ID NO: 94816 - DNA, 26 bp, Homo sapiens
aattaagaataagctttgaaactaag

SEQ ID NO: 94817 - DNA, 26 bp, Homo sapiens
attaagaataagctttgaaactaagg

SEQ ID NO: 94818 - DNA, 26 bp, Homo sapiens
ttaagaataagctttgaaactaaggt

SEQ ID NO: 94819 - DNA, 26 bp, Homo sapiens
taagaataagctttgaaactaaggtc

SEQ ID NO: 94820 - DNA, 26 bp, Homo sapiens
aagaataagctttgaaactaaggtcg

SEQ ID NO: 94821 - DNA, 26 bp, Homo sapiens
agaataagctttgaaactaaggtcgg

SEQ ID NO: 94822 - DNA, 26 bp, Homo sapiens
gaataagctttgaaactaaggtcggc

SEQ ID NO: 94823 - DNA, 26 bp, Homo sapiens
aataagctttgaaactaaggtcggca

SEQ ID NO: 94824 - DNA, 26 bp, Homo sapiens
ataagctttgaaactaaggtcggcag

SEQ ID NO: 94825 - DNA, 26 bp, Homo sapiens
taagctttgaaactaaggtcggcagg

SEQ ID NO: 94826 - DNA, 26 bp, Homo sapiens
aagctttgaaactaaggtcggcaggg

SEQ ID NO: 94827 - DNA, 26 bp, Homo sapiens
agctttgaaactaaggtcggcaggga

SEQ ID NO: 94828 - DNA, 26 bp, Homo sapiens
gctttgaaactaaggtcggcagggaa

SEQ ID NO: 94829 - DNA, 26 bp, Homo sapiens
ctttgaaactaaggtcggcagggaag

SEQ ID NO: 94830 - DNA, 26 bp, Homo sapiens
tttgaaactaaggtcggcagggaagt

SEQ ID NO: 94831 - DNA, 26 bp, Homo sapiens
ttgaaactaaggtcggcagggaagtg

SEQ ID NO: 94832 - DNA, 26 bp, Homo sapiens
tgaaactaaggtcggcagggaagtgg

SEQ ID NO: 94833 - DNA, 26 bp, Homo sapiens
gaaactaaggtcggcagggaagtgga

SEQ ID NO: 94834 - DNA, 26 bp, Homo sapiens
aaactaaggtcggcagggaagtggat

SEQ ID NO: 94835 - DNA, 26 bp, Homo sapiens
aactaaggtcggcagggaagtggatt

SEQ ID NO: 94836 - DNA, 26 bp, Homo sapiens
actaaggtcggcagggaagtggattt

SEQ ID NO: 94837 - DNA, 26 bp, Homo sapiens
ctaaggtcggcagggaagtggatttt

SEQ ID NO: 94838 - DNA, 26 bp, Homo sapiens
taaggtcggcagggaagtggattttc

SEQ ID NO: 94839 - DNA, 26 bp, Homo sapiens
aaggtcggcagggaagtggattttct

SEQ ID NO: 94840 - DNA, 26 bp, Homo sapiens
aggtcggcagggaagtggattttctg

SEQ ID NO: 94841 - DNA, 26 bp, Homo sapiens
ggtcggcagggaagtggattttctgg

SEQ ID NO: 94842 - DNA, 26 bp, Homo sapiens
gtcggcagggaagtggattttctggt

SEQ ID NO: 94843 - DNA, 26 bp, Homo sapiens
tcggcagggaagtggattttctggta

SEQ ID NO: 94844 - DNA, 26 bp, Homo sapiens
cggcagggaagtggattttctggtaa

SEQ ID NO: 94845 - DNA, 26 bp, Homo sapiens
ggcagggaagtggattttctggtaaa

SEQ ID NO: 94846 - DNA, 26 bp, Homo sapiens
gcagggaagtggattttctggtaaag

SEQ ID NO: 94847 - DNA, 26 bp, Homo sapiens
cagggaagtggattttctggtaaagc

SEQ ID NO: 94848 - DNA, 26 bp, Homo sapiens
agggaagtggattttctggtaaagca

SEQ ID NO: 94849 - DNA, 26 bp, Homo sapiens
gggaagtggattttctggtaaagcat

SEQ ID NO: 94850 - DNA, 26 bp, Homo sapiens
ggaagtggattttctggtaaagcatg

SEQ ID NO: 94851 - DNA, 26 bp, Homo sapiens
gaagtggattttctggtaaagcatga

SEQ ID NO: 94852 - DNA, 26 bp, Homo sapiens
aagtggattttctggtaaagcatgaa

SEQ ID NO: 94853 - DNA, 26 bp, Homo sapiens
agtggattttctggtaaagcatgaaa

SEQ ID NO: 94854 - DNA, 26 bp, Homo sapiens
gtggattttctggtaaagcatgaaaa

SEQ ID NO: 94855 - DNA, 26 bp, Homo sapiens
tggattttctggtaaagcatgaaaac

SEQ ID NO: 94856 - DNA, 26 bp, Homo sapiens
ggattttctggtaaagcatgaaaacg

SEQ ID NO: 94857 - DNA, 26 bp, Homo sapiens
gattttctggtaaagcatgaaaacga

SEQ ID NO: 94858 - DNA, 26 bp, Homo sapiens
attttctggtaaagcatgaaaacgaa

SEQ ID NO: 94859 - DNA, 26 bp, Homo sapiens
ttttctggtaaagcatgaaaacgaaa

SEQ ID NO: 94860 - DNA, 26 bp, Homo sapiens
tttctggtaaagcatgaaaacgaaac

SEQ ID NO: 94861 - DNA, 26 bp, Homo sapiens
ttctggtaaagcatgaaaacgaaaca

SEQ ID NO: 94862 - DNA, 26 bp, Homo sapiens
tctggtaaagcatgaaaacgaaacat

SEQ ID NO: 94863 - DNA, 26 bp, Homo sapiens
ctggtaaagcatgaaaacgaaacatc

SEQ ID NO: 94864 - DNA, 26 bp, Homo sapiens
tggtaaagcatgaaaacgaaacatct

SEQ ID NO: 94865 - DNA, 26 bp, Homo sapiens
ggtaaagcatgaaaacgaaacatctc

SEQ ID NO: 94866 - DNA, 26 bp, Homo sapiens
gtaaagcatgaaaacgaaacatctcc

SEQ ID NO: 94867 - DNA, 26 bp, Homo sapiens
taaagcatgaaaacgaaacatctccc

SEQ ID NO: 94868 - DNA, 26 bp, Homo sapiens
aaagcatgaaaacgaaacatctcccc

SEQ ID NO: 94869 - DNA, 26 bp, Homo sapiens
aagcatgaaaacgaaacatctcccct

SEQ ID NO: 94870 - DNA, 26 bp, Homo sapiens
agcatgaaaacgaaacatctccccta

SEQ ID NO: 94871 - DNA, 26 bp, Homo sapiens
gcatgaaaacgaaacatctcccctac

SEQ ID NO: 94872 - DNA, 26 bp, Homo sapiens
catgaaaacgaaacatctcccctacc

SEQ ID NO: 94873 - DNA, 26 bp, Homo sapiens
atgaaaacgaaacatctcccctacca

SEQ ID NO: 94874 - DNA, 26 bp, Homo sapiens
tgaaaacgaaacatctcccctaccag

SEQ ID NO: 94875 - DNA, 26 bp, Homo sapiens
gaaaacgaaacatctcccctaccaga

SEQ ID NO: 94876 - DNA, 26 bp, Homo sapiens
aaaacgaaacatctcccctaccagac

SEQ ID NO: 94877 - DNA, 26 bp, Homo sapiens
aaacgaaacatctcccctaccagaca

SEQ ID NO: 94878 - DNA, 26 bp, Homo sapiens
aacgaaacatctcccctaccagacaa

SEQ ID NO: 94879 - DNA, 26 bp, Homo sapiens
acgaaacatctcccctaccagacaag

SEQ ID NO: 94880 - DNA, 26 bp, Homo sapiens
cgaaacatctcccctaccagacaagg

SEQ ID NO: 94881 - DNA, 26 bp, Homo sapiens
gaaacatctcccctaccagacaaggt

SEQ ID NO: 94882 - DNA, 26 bp, Homo sapiens
aaacatctcccctaccagacaaggta

SEQ ID NO: 94883 - DNA, 26 bp, Homo sapiens
aacatctcccctaccagacaaggtag

SEQ ID NO: 94884 - DNA, 26 bp, Homo sapiens
acatctcccctaccagacaaggtagg

SEQ ID NO: 94885 - DNA, 26 bp, Homo sapiens
catctcccctaccagacaaggtaggt

SEQ ID NO: 94886 - DNA, 26 bp, Homo sapiens
atctcccctaccagacaaggtaggta

SEQ ID NO: 94887 - DNA, 26 bp, Homo sapiens
tctcccctaccagacaaggtaggtat

SEQ ID NO: 94888 - DNA, 26 bp, Homo sapiens
ctcccctaccagacaaggtaggtatc

SEQ ID NO: 94889 - DNA, 26 bp, Homo sapiens
tcccctaccagacaaggtaggtatct

SEQ ID NO: 94890 - DNA, 26 bp, Homo sapiens
cccctaccagacaaggtaggtatctc

SEQ ID NO: 94891 - DNA, 26 bp, Homo sapiens
ccctaccagacaaggtaggtatctcc

SEQ ID NO: 94892 - DNA, 26 bp, Homo sapiens
cctaccagacaaggtaggtatctccc

SEQ ID NO: 94893 - DNA, 26 bp, Homo sapiens
ctaccagacaaggtaggtatctccct

SEQ ID NO: 94894 - DNA, 26 bp, Homo sapiens
taccagacaaggtaggtatctccctt

SEQ ID NO: 94895 - DNA, 26 bp, Homo sapiens
accagacaaggtaggtatctccctta

SEQ ID NO: 94896 - DNA, 26 bp, Homo sapiens
ccagacaaggtaggtatctcccttac

SEQ ID NO: 94897 - DNA, 26 bp, Homo sapiens
cagacaaggtaggtatctcccttacc

SEQ ID NO: 94898 - DNA, 26 bp, Homo sapiens
agacaaggtaggtatctcccttaccc

SEQ ID NO: 94899 - DNA, 26 bp, Homo sapiens
gacaaggtaggtatctcccttacccc

SEQ ID NO: 94900 - DNA, 26 bp, Homo sapiens
acaaggtaggtatctcccttacccct

SEQ ID NO: 94901 - DNA, 26 bp, Homo sapiens
caaggtaggtatctcccttacccctt

SEQ ID NO: 94902 - DNA, 26 bp, Homo sapiens
aaggtaggtatctcccttaccccttt

SEQ ID NO: 94903 - DNA, 26 bp, Homo sapiens
aggtaggtatctcccttaccccttta

SEQ ID NO: 94904 - DNA, 26 bp, Homo sapiens
ggtaggtatctcccttacccctttag

SEQ ID NO: 94905 - DNA, 26 bp, Homo sapiens
gtaggtatctcccttacccctttaga

SEQ ID NO: 94906 - DNA, 26 bp, Homo sapiens
taggtatctcccttacccctttagag

SEQ ID NO: 94907 - DNA, 26 bp, Homo sapiens
aggtatctcccttacccctttagaga

SEQ ID NO: 94908 - DNA, 26 bp, Homo sapiens
ggtatctcccttacccctttagagat

SEQ ID NO: 94909 - DNA, 26 bp, Homo sapiens
gtatctcccttacccctttagagatt

SEQ ID NO: 94910 - DNA, 26 bp, Homo sapiens
tatctcccttacccctttagagattg

SEQ ID NO: 94911 - DNA, 26 bp, Homo sapiens
atctcccttacccctttagagattgt

SEQ ID NO: 94912 - DNA, 26 bp, Homo sapiens
tctcccttacccctttagagattgtc

SEQ ID NO: 94913 - DNA, 26 bp, Homo sapiens
ctcccttacccctttagagattgtcc

SEQ ID NO: 94914 - DNA, 26 bp, Homo sapiens
tcccttacccctttagagattgtcct

SEQ ID NO: 94915 - DNA, 26 bp, Homo sapiens
cccttacccctttagagattgtcctt

SEQ ID NO: 94916 - DNA, 26 bp, Homo sapiens
ccttacccctttagagattgtccttt

SEQ ID NO: 94917 - DNA, 26 bp, Homo sapiens
cttacccctttagagattgtcctttg

SEQ ID NO: 94918 - DNA, 26 bp, Homo sapiens
ttacccctttagagattgtcctttgg

SEQ ID NO: 94919 - DNA, 26 bp, Homo sapiens
tacccctttagagattgtcctttggg

SEQ ID NO: 94920 - DNA, 26 bp, Homo sapiens
acccctttagagattgtcctttgggg

SEQ ID NO: 94921 - DNA, 26 bp, Homo sapiens
cccctttagagattgtcctttggggc

SEQ ID NO: 94922 - DNA, 26 bp, Homo sapiens
ccctttagagattgtcctttggggca

SEQ ID NO: 94923 - DNA, 26 bp, Homo sapiens
cctttagagattgtcctttggggcac

SEQ ID NO: 94924 - DNA, 26 bp, Homo sapiens
ctttagagattgtcctttggggcacc

SEQ ID NO: 94925 - DNA, 26 bp, Homo sapiens
tttagagattgtcctttggggcaccc

SEQ ID NO: 94926 - DNA, 26 bp, Homo sapiens
ttagagattgtcctttggggcaccct

SEQ ID NO: 94927 - DNA, 26 bp, Homo sapiens
tagagattgtcctttggggcaccctt

SEQ ID NO: 94928 - DNA, 26 bp, Homo sapiens
agagattgtcctttggggcacccttt

SEQ ID NO: 94929 - DNA, 26 bp, Homo sapiens
gagattgtcctttggggcaccctttc

SEQ ID NO: 94930 - DNA, 26 bp, Homo sapiens
agattgtcctttggggcaccctttca

SEQ ID NO: 94931 - DNA, 26 bp, Homo sapiens
gattgtcctttggggcaccctttcaa

SEQ ID NO: 94932 - DNA, 26 bp, Homo sapiens
attgtcctttggggcaccctttcaaa

SEQ ID NO: 94933 - DNA, 26 bp, Homo sapiens
ttgtcctttggggcaccctttcaaat

SEQ ID NO: 94934 - DNA, 26 bp, Homo sapiens
tgtcctttggggcaccctttcaaatt

SEQ ID NO: 94935 - DNA, 26 bp, Homo sapiens
gtcctttggggcaccctttcaaattc

SEQ ID NO: 94936 - DNA, 26 bp, Homo sapiens
tcctttggggcaccctttcaaattct

SEQ ID NO: 94937 - DNA, 26 bp, Homo sapiens
cctttggggcaccctttcaaattctc

SEQ ID NO: 94938 - DNA, 26 bp, Homo sapiens
ctttggggcaccctttcaaattctcc

SEQ ID NO: 94939 - DNA, 26 bp, Homo sapiens
tttggggcaccctttcaaattctcct

SEQ ID NO: 94940 - DNA, 26 bp, Homo sapiens
ttggggcaccctttcaaattctcctg

SEQ ID NO: 94941 - DNA, 26 bp, Homo sapiens
tggggcaccctttcaaattctcctgc

SEQ ID NO: 94942 - DNA, 26 bp, Homo sapiens
ggggcaccctttcaaattctcctgcc

SEQ ID NO: 94943 - DNA, 26 bp, Homo sapiens
gggcaccctttcaaattctcctgcca

SEQ ID NO: 94944 - DNA, 26 bp, Homo sapiens
ggcaccctttcaaattctcctgccag

SEQ ID NO: 94945 - DNA, 26 bp, Homo sapiens
gcaccctttcaaattctcctgccagg

SEQ ID NO: 94946 - DNA, 26 bp, Homo sapiens
caccctttcaaattctcctgccaggc

SEQ ID NO: 94947 - DNA, 26 bp, Homo sapiens
accctttcaaattctcctgccaggcg

SEQ ID NO: 94948 - DNA, 26 bp, Homo sapiens
ccctttcaaattctcctgccaggcga

SEQ ID NO: 94949 - DNA, 26 bp, Homo sapiens
cctttcaaattctcctgccaggcgac

SEQ ID NO: 94950 - DNA, 26 bp, Homo sapiens
ctttcaaattctcctgccaggcgact

SEQ ID NO: 94951 - DNA, 26 bp, Homo sapiens
tttcaaattctcctgccaggcgacta

SEQ ID NO: 94952 - DNA, 26 bp, Homo sapiens
ttcaaattctcctgccaggcgactac

SEQ ID NO: 94953 - DNA, 26 bp, Homo sapiens
tcaaattctcctgccaggcgactact

SEQ ID NO: 94954 - DNA, 26 bp, Homo sapiens
ttattgtaccaagatgagttgtttaa

SEQ ID NO: 94955 - DNA, 26 bp, Homo sapiens
tattgtaccaagatgagttgtttaat

SEQ ID NO: 94956 - DNA, 26 bp, Homo sapiens
attgtaccaagatgagttgtttaata

SEQ ID NO: 94957 - DNA, 26 bp, Homo sapiens
ttgtaccaagatgagttgtttaatat

SEQ ID NO: 94958 - DNA, 26 bp, Homo sapiens
tgtaccaagatgagttgtttaatatg

SEQ ID NO: 94959 - DNA, 26 bp, Homo sapiens
gtaccaagatgagttgtttaatatga

SEQ ID NO: 94960 - DNA, 26 bp, Homo sapiens
taccaagatgagttgtttaatatgaa

SEQ ID NO: 94961 - DNA, 26 bp, Homo sapiens
accaagatgagttgtttaatatgaaa

SEQ ID NO: 94962 - DNA, 26 bp, Homo sapiens
ccaagatgagttgtttaatatgaaag

SEQ ID NO: 94963 - DNA, 26 bp, Homo sapiens
caagatgagttgtttaatatgaaaga

SEQ ID NO: 94964 - DNA, 26 bp, Homo sapiens
aagatgagttgtttaatatgaaagag

SEQ ID NO: 94965 - DNA, 26 bp, Homo sapiens
agatgagttgtttaatatgaaagaga

SEQ ID NO: 94966 - DNA, 26 bp, Homo sapiens
gatgagttgtttaatatgaaagagac

SEQ ID NO: 94967 - DNA, 26 bp, Homo sapiens
atgagttgtttaatatgaaagagact

SEQ ID NO: 94968 - DNA, 26 bp, Homo sapiens
tgagttgtttaatatgaaagagactg

SEQ ID NO: 94969 - DNA, 26 bp, Homo sapiens
gagttgtttaatatgaaagagactgg

SEQ ID NO: 94970 - DNA, 26 bp, Homo sapiens
agttgtttaatatgaaagagactgga

SEQ ID NO: 94971 - DNA, 26 bp, Homo sapiens
gttgtttaatatgaaagagactggat

SEQ ID NO: 94972 - DNA, 26 bp, Homo sapiens
ttgtttaatatgaaagagactggata

SEQ ID NO: 94973 - DNA, 26 bp, Homo sapiens
tgtttaatatgaaagagactggatac

SEQ ID NO: 94974 - DNA, 26 bp, Homo sapiens
gtttaatatgaaagagactggataca

SEQ ID NO: 94975 - DNA, 26 bp, Homo sapiens
tttaatatgaaagagactggatacaa

SEQ ID NO: 94976 - DNA, 26 bp, Homo sapiens
ttaatatgaaagagactggatacaac

SEQ ID NO: 94977 - DNA, 26 bp, Homo sapiens
taatatgaaagagactggatacaact

SEQ ID NO: 94978 - DNA, 26 bp, Homo sapiens
aatatgaaagagactggatacaactg

SEQ ID NO: 94979 - DNA, 26 bp, Homo sapiens
atatgaaagagactggatacaactgt

SEQ ID NO: 94980 - DNA, 26 bp, Homo sapiens
tatgaaagagactggatacaactgtt

SEQ ID NO: 94981 - DNA, 26 bp, Homo sapiens
atgaaagagactggatacaactgttt

SEQ ID NO: 94982 - DNA, 26 bp, Homo sapiens
tgaaagagactggatacaactgtttc

SEQ ID NO: 94983 - DNA, 26 bp, Homo sapiens
gaaagagactggatacaactgtttca

SEQ ID NO: 94984 - DNA, 26 bp, Homo sapiens
aaagagactggatacaactgtttcac

SEQ ID NO: 94985 - DNA, 26 bp, Homo sapiens
aagagactggatacaactgtttcaca

SEQ ID NO: 94986 - DNA, 26 bp, Homo sapiens
agagactggatacaactgtttcacaa

SEQ ID NO: 94987 - DNA, 26 bp, Homo sapiens
gagactggatacaactgtttcacaaa

SEQ ID NO: 94988 - DNA, 26 bp, Homo sapiens
agactggatacaactgtttcacaaaa

SEQ ID NO: 94989 - DNA, 26 bp, Homo sapiens
gactggatacaactgtttcacaaaaa

SEQ ID NO: 94990 - DNA, 26 bp, Homo sapiens
actggatacaactgtttcacaaaaag

SEQ ID NO: 94991 - DNA, 26 bp, Homo sapiens
ctggatacaactgtttcacaaaaaga

SEQ ID NO: 94992 - DNA, 26 bp, Homo sapiens
tggatacaactgtttcacaaaaagat

SEQ ID NO: 94993 - DNA, 26 bp, Homo sapiens
ggatacaactgtttcacaaaaagatg

SEQ ID NO: 94994 - DNA, 26 bp, Homo sapiens
gatacaactgtttcacaaaaagatgt

SEQ ID NO: 94995 - DNA, 26 bp, Homo sapiens
atacaactgtttcacaaaaagatgta

SEQ ID NO: 94996 - DNA, 26 bp, Homo sapiens
tacaactgtttcacaaaaagatgtat

SEQ ID NO: 94997 - DNA, 26 bp, Homo sapiens
acaactgtttcacaaaaagatgtatt

SEQ ID NO: 94998 - DNA, 26 bp, Homo sapiens
caactgtttcacaaaaagatgtattt

SEQ ID NO: 94999 - DNA, 26 bp, Homo sapiens
aactgtttcacaaaaagatgtatttt

SEQ ID NO: 95000 - DNA, 26 bp, Homo sapiens
actgtttcacaaaaagatgtattttc

SEQ ID NO: 95001 - DNA, 26 bp, Homo sapiens
ctgtttcacaaaaagatgtattttca

SEQ ID NO: 95002 - DNA, 26 bp, Homo sapiens
tgtttcacaaaaagatgtattttcat

SEQ ID NO: 95003 - DNA, 26 bp, Homo sapiens
gtttcacaaaaagatgtattttcatt

SEQ ID NO: 95004 - DNA, 26 bp, Homo sapiens
tttcacaaaaagatgtattttcattc

SEQ ID NO: 95005 - DNA, 26 bp, Homo sapiens
ttcacaaaaagatgtattttcattca

SEQ ID NO: 95006 - DNA, 26 bp, Homo sapiens
tcacaaaaagatgtattttcattcat

SEQ ID NO: 95007 - DNA, 26 bp, Homo sapiens
cacaaaaagatgtattttcattcatg

SEQ ID NO: 95008 - DNA, 26 bp, Homo sapiens
acaaaaagatgtattttcattcatga

SEQ ID NO: 95009 - DNA, 26 bp, Homo sapiens
caaaaagatgtattttcattcatgag

SEQ ID NO: 95010 - DNA, 26 bp, Homo sapiens
aaaaagatgtattttcattcatgagt

SEQ ID NO: 95011 - DNA, 26 bp, Homo sapiens
aaaagatgtattttcattcatgagta

SEQ ID NO: 95012 - DNA, 26 bp, Homo sapiens
aaagatgtattttcattcatgagtat

SEQ ID NO: 95013 - DNA, 26 bp, Homo sapiens
aagatgtattttcattcatgagtatt

SEQ ID NO: 95014 - DNA, 26 bp, Homo sapiens
agatgtattttcattcatgagtattt

SEQ ID NO: 95015 - DNA, 26 bp, Homo sapiens
gatgtattttcattcatgagtattta

SEQ ID NO: 95016 - DNA, 26 bp, Homo sapiens
atgtattttcattcatgagtatttac

SEQ ID NO: 95017 - DNA, 26 bp, Homo sapiens
tgtattttcattcatgagtatttaca

SEQ ID NO: 95018 - DNA, 26 bp, Homo sapiens
gtattttcattcatgagtatttacat

SEQ ID NO: 95019 - DNA, 26 bp, Homo sapiens
tattttcattcatgagtatttacatt

SEQ ID NO: 95020 - DNA, 26 bp, Homo sapiens
attttcattcatgagtatttacattt

SEQ ID NO: 95021 - DNA, 26 bp, Homo sapiens
ttttcattcatgagtatttacatttt

SEQ ID NO: 95022 - DNA, 26 bp, Homo sapiens
tttcattcatgagtatttacattttt

SEQ ID NO: 95023 - DNA, 26 bp, Homo sapiens
ttcattcatgagtatttacatttttc

SEQ ID NO: 95024 - DNA, 26 bp, Homo sapiens
tcattcatgagtatttacatttttca

SEQ ID NO: 95025 - DNA, 26 bp, Homo sapiens
cattcatgagtatttacatttttcat

SEQ ID NO: 95026 - DNA, 26 bp, Homo sapiens
attcatgagtatttacatttttcata

SEQ ID NO: 95027 - DNA, 26 bp, Homo sapiens
ttcatgagtatttacatttttcatat

SEQ ID NO: 95028 - DNA, 26 bp, Homo sapiens
tcatgagtatttacatttttcatatt

SEQ ID NO: 95029 - DNA, 26 bp, Homo sapiens
catgagtatttacatttttcatattt

SEQ ID NO: 95030 - DNA, 26 bp, Homo sapiens
atgagtatttacatttttcatatttg

SEQ ID NO: 95031 - DNA, 26 bp, Homo sapiens
tgagtatttacatttttcatatttgt

SEQ ID NO: 95032 - DNA, 26 bp, Homo sapiens
gagtatttacatttttcatatttgtt

SEQ ID NO: 95033 - DNA, 26 bp, Homo sapiens
agtatttacatttttcatatttgttt

SEQ ID NO: 95034 - DNA, 26 bp, Homo sapiens
gtatttacatttttcatatttgttta

SEQ ID NO: 95035 - DNA, 26 bp, Homo sapiens
tatttacatttttcatatttgtttaa

SEQ ID NO: 95036 - DNA, 26 bp, Homo sapiens
atttacatttttcatatttgtttaaa

SEQ ID NO: 95037 - DNA, 26 bp, Homo sapiens
tttacatttttcatatttgtttaaag

SEQ ID NO: 95038 - DNA, 26 bp, Homo sapiens
ttacatttttcatatttgtttaaaga

SEQ ID NO: 95039 - DNA, 26 bp, Homo sapiens
tacatttttcatatttgtttaaagaa

SEQ ID NO: 95040 - DNA, 26 bp, Homo sapiens
acatttttcatatttgtttaaagaat

SEQ ID NO: 95041 - DNA, 26 bp, Homo sapiens
catttttcatatttgtttaaagaata

SEQ ID NO: 95042 - DNA, 26 bp, Homo sapiens
atttttcatatttgtttaaagaatat

SEQ ID NO: 95043 - DNA, 26 bp, Homo sapiens
tttttcatatttgtttaaagaatatc

SEQ ID NO: 95044 - DNA, 26 bp, Homo sapiens
ttttcatatttgtttaaagaatatca

SEQ ID NO: 95045 - DNA, 26 bp, Homo sapiens
tttcatatttgtttaaagaatatcat

SEQ ID NO: 95046 - DNA, 26 bp, Homo sapiens
ttcatatttgtttaaagaatatcata

SEQ ID NO: 95047 - DNA, 26 bp, Homo sapiens
tcatatttgtttaaagaatatcatat

SEQ ID NO: 95048 - DNA, 26 bp, Homo sapiens
catatttgtttaaagaatatcatata

SEQ ID NO: 95049 - DNA, 26 bp, Homo sapiens
atatttgtttaaagaatatcatataa

SEQ ID NO: 95050 - DNA, 26 bp, Homo sapiens
tatttgtttaaagaatatcatataac

SEQ ID NO: 95051 - DNA, 26 bp, Homo sapiens
atttgtttaaagaatatcatataact

SEQ ID NO: 95052 - DNA, 26 bp, Homo sapiens
tttgtttaaagaatatcatataactg

SEQ ID NO: 95053 - DNA, 26 bp, Homo sapiens
ttgtttaaagaatatcatataactga

SEQ ID NO: 95054 - DNA, 26 bp, Homo sapiens
tgtttaaagaatatcatataactgat

SEQ ID NO: 95055 - DNA, 26 bp, Homo sapiens
gtttaaagaatatcatataactgata

SEQ ID NO: 95056 - DNA, 26 bp, Homo sapiens
tttaaagaatatcatataactgatac

SEQ ID NO: 95057 - DNA, 26 bp, Homo sapiens
ttaaagaatatcatataactgatacc

SEQ ID NO: 95058 - DNA, 26 bp, Homo sapiens
taaagaatatcatataactgatacct

SEQ ID NO: 95059 - DNA, 26 bp, Homo sapiens
aaagaatatcatataactgatacctt

SEQ ID NO: 95060 - DNA, 26 bp, Homo sapiens
aagaatatcatataactgataccttc

SEQ ID NO: 95061 - DNA, 26 bp, Homo sapiens
agaatatcatataactgataccttct

SEQ ID NO: 95062 - DNA, 26 bp, Homo sapiens
gaatatcatataactgataccttctg

SEQ ID NO: 95063 - DNA, 26 bp, Homo sapiens
aatatcatataactgataccttctga

SEQ ID NO: 95064 - DNA, 26 bp, Homo sapiens
atatcatataactgataccttctgaa

SEQ ID NO: 95065 - DNA, 26 bp, Homo sapiens
tatcatataactgataccttctgaaa

SEQ ID NO: 95066 - DNA, 26 bp, Homo sapiens
atcatataactgataccttctgaaat

SEQ ID NO: 95067 - DNA, 26 bp, Homo sapiens
tcatataactgataccttctgaaatg

SEQ ID NO: 95068 - DNA, 26 bp, Homo sapiens
catataactgataccttctgaaatgt

SEQ ID NO: 95069 - DNA, 26 bp, Homo sapiens
atataactgataccttctgaaatgtt

SEQ ID NO: 95070 - DNA, 26 bp, Homo sapiens
tataactgataccttctgaaatgttt

SEQ ID NO: 95071 - DNA, 26 bp, Homo sapiens
ataactgataccttctgaaatgtttc

SEQ ID NO: 95072 - DNA, 26 bp, Homo sapiens
taactgataccttctgaaatgtttca

SEQ ID NO: 95073 - DNA, 26 bp, Homo sapiens
aactgataccttctgaaatgtttcat

SEQ ID NO: 95074 - DNA, 26 bp, Homo sapiens
actgataccttctgaaatgtttcatg

SEQ ID NO: 95075 - DNA, 26 bp, Homo sapiens
ctgataccttctgaaatgtttcatgc

SEQ ID NO: 95076 - DNA, 26 bp, Homo sapiens
tgataccttctgaaatgtttcatgct

SEQ ID NO: 95077 - DNA, 26 bp, Homo sapiens
gataccttctgaaatgtttcatgctt

SEQ ID NO: 95078 - DNA, 26 bp, Homo sapiens
ataccttctgaaatgtttcatgcttt

SEQ ID NO: 95079 - DNA, 26 bp, Homo sapiens
taccttctgaaatgtttcatgctttt

SEQ ID NO: 95080 - DNA, 26 bp, Homo sapiens
accttctgaaatgtttcatgctttta

SEQ ID NO: 95081 - DNA, 26 bp, Homo sapiens
ccttctgaaatgtttcatgcttttaa

SEQ ID NO: 95082 - DNA, 26 bp, Homo sapiens
cttctgaaatgtttcatgcttttaaa

SEQ ID NO: 95083 - DNA, 26 bp, Homo sapiens
ttctgaaatgtttcatgcttttaaac

SEQ ID NO: 95084 - DNA, 26 bp, Homo sapiens
tctgaaatgtttcatgcttttaaact

SEQ ID NO: 95085 - DNA, 26 bp, Homo sapiens
ctgaaatgtttcatgcttttaaactc

SEQ ID NO: 95086 - DNA, 26 bp, Homo sapiens
tgaaatgtttcatgcttttaaactct

SEQ ID NO: 95087 - DNA, 26 bp, Homo sapiens
gaaatgtttcatgcttttaaactctt

SEQ ID NO: 95088 - DNA, 26 bp, Homo sapiens
aaatgtttcatgcttttaaactcttc

SEQ ID NO: 95089 - DNA, 26 bp, Homo sapiens
aatgtttcatgcttttaaactcttct

SEQ ID NO: 95090 - DNA, 26 bp, Homo sapiens
atgtttcatgcttttaaactcttcta

SEQ ID NO: 95091 - DNA, 26 bp, Homo sapiens
tgtttcatgcttttaaactcttctat

SEQ ID NO: 95092 - DNA, 26 bp, Homo sapiens
gtttcatgcttttaaactcttctatt

SEQ ID NO: 95093 - DNA, 26 bp, Homo sapiens
tttcatgcttttaaactcttctattt

SEQ ID NO: 95094 - DNA, 26 bp, Homo sapiens
ttcatgcttttaaactcttctattta

SEQ ID NO: 95095 - DNA, 26 bp, Homo sapiens
tcatgcttttaaactcttctatttac

SEQ ID NO: 95096 - DNA, 26 bp, Homo sapiens
catgcttttaaactcttctatttaca

SEQ ID NO: 95097 - DNA, 26 bp, Homo sapiens
atgcttttaaactcttctatttacac

SEQ ID NO: 95098 - DNA, 26 bp, Homo sapiens
tgcttttaaactcttctatttacact

SEQ ID NO: 95099 - DNA, 26 bp, Homo sapiens
gcttttaaactcttctatttacactt

SEQ ID NO: 95100 - DNA, 26 bp, Homo sapiens
cttttaaactcttctatttacactta

SEQ ID NO: 95101 - DNA, 26 bp, Homo sapiens
ttttaaactcttctatttacacttat

SEQ ID NO: 95102 - DNA, 26 bp, Homo sapiens
tttaaactcttctatttacacttatc

SEQ ID NO: 95103 - DNA, 26 bp, Homo sapiens
ttaaactcttctatttacacttatct

SEQ ID NO: 95104 - DNA, 26 bp, Homo sapiens
taaactcttctatttacacttatctg

SEQ ID NO: 95105 - DNA, 26 bp, Homo sapiens
aaactcttctatttacacttatctga

SEQ ID NO: 95106 - DNA, 26 bp, Homo sapiens
aactcttctatttacacttatctgac

SEQ ID NO: 95107 - DNA, 26 bp, Homo sapiens
actcttctatttacacttatctgaca

SEQ ID NO: 95108 - DNA, 26 bp, Homo sapiens
ctcttctatttacacttatctgacat

SEQ ID NO: 95109 - DNA, 26 bp, Homo sapiens
tcttctatttacacttatctgacatg

SEQ ID NO: 95110 - DNA, 26 bp, Homo sapiens
cttctatttacacttatctgacatgg

SEQ ID NO: 95111 - DNA, 26 bp, Homo sapiens
ttctatttacacttatctgacatgga

SEQ ID NO: 95112 - DNA, 26 bp, Homo sapiens
tctatttacacttatctgacatggaa

SEQ ID NO: 95113 - DNA, 26 bp, Homo sapiens
ctatttacacttatctgacatggaat

SEQ ID NO: 95114 - DNA, 26 bp, Homo sapiens
tatttacacttatctgacatggaatt

SEQ ID NO: 95115 - DNA, 26 bp, Homo sapiens
atttacacttatctgacatggaatta

SEQ ID NO: 95116 - DNA, 26 bp, Homo sapiens
tttacacttatctgacatggaattaa

SEQ ID NO: 95117 - DNA, 26 bp, Homo sapiens
ttacacttatctgacatggaattaaa

SEQ ID NO: 95118 - DNA, 26 bp, Homo sapiens
tacacttatctgacatggaattaaaa

SEQ ID NO: 95119 - DNA, 26 bp, Homo sapiens
acacttatctgacatggaattaaaac

SEQ ID NO: 95120 - DNA, 26 bp, Homo sapiens
cacttatctgacatggaattaaaact

SEQ ID NO: 95121 - DNA, 26 bp, Homo sapiens
acttatctgacatggaattaaaacta

SEQ ID NO: 95122 - DNA, 26 bp, Homo sapiens
cttatctgacatggaattaaaactaa

SEQ ID NO: 95123 - DNA, 26 bp, Homo sapiens
ttatctgacatggaattaaaactaaa

SEQ ID NO: 95124 - DNA, 26 bp, Homo sapiens
tatctgacatggaattaaaactaaaa

SEQ ID NO: 95125 - DNA, 26 bp, Homo sapiens
atctgacatggaattaaaactaaaat

SEQ ID NO: 95126 - DNA, 26 bp, Homo sapiens
tctgacatggaattaaaactaaaatg

SEQ ID NO: 95127 - DNA, 26 bp, Homo sapiens
ctgacatggaattaaaactaaaatgg

SEQ ID NO: 95128 - DNA, 26 bp, Homo sapiens
tgacatggaattaaaactaaaatggt

SEQ ID NO: 95129 - DNA, 26 bp, Homo sapiens
gacatggaattaaaactaaaatggtc

SEQ ID NO: 95130 - DNA, 26 bp, Homo sapiens
acatggaattaaaactaaaatggtca

SEQ ID NO: 95131 - DNA, 26 bp, Homo sapiens
catggaattaaaactaaaatggtcaa

SEQ ID NO: 95132 - DNA, 26 bp, Homo sapiens
atggaattaaaactaaaatggtcaaa

SEQ ID NO: 95133 - DNA, 26 bp, Homo sapiens
tggaattaaaactaaaatggtcaaat

SEQ ID NO: 95134 - DNA, 26 bp, Homo sapiens
ggaattaaaactaaaatggtcaaata

SEQ ID NO: 95135 - DNA, 26 bp, Homo sapiens
gaattaaaactaaaatggtcaaatac

SEQ ID NO: 95136 - DNA, 26 bp, Homo sapiens
aattaaaactaaaatggtcaaatacc

SEQ ID NO: 95137 - DNA, 26 bp, Homo sapiens
attaaaactaaaatggtcaaatacca

SEQ ID NO: 95138 - DNA, 26 bp, Homo sapiens
ttaaaactaaaatggtcaaataccat

SEQ ID NO: 95139 - DNA, 26 bp, Homo sapiens
taaaactaaaatggtcaaataccatg

SEQ ID NO: 95140 - DNA, 26 bp, Homo sapiens
aaaactaaaatggtcaaataccatga

SEQ ID NO: 95141 - DNA, 26 bp, Homo sapiens
aaactaaaatggtcaaataccatgat

SEQ ID NO: 95142 - DNA, 26 bp, Homo sapiens
aactaaaatggtcaaataccatgata

SEQ ID NO: 95143 - DNA, 26 bp, Homo sapiens
actaaaatggtcaaataccatgataa

SEQ ID NO: 95144 - DNA, 26 bp, Homo sapiens
ctaaaatggtcaaataccatgataat

SEQ ID NO: 95145 - DNA, 26 bp, Homo sapiens
taaaatggtcaaataccatgataata

SEQ ID NO: 95146 - DNA, 26 bp, Homo sapiens
aaaatggtcaaataccatgataatag

SEQ ID NO: 95147 - DNA, 26 bp, Homo sapiens
aaatggtcaaataccatgataataga

SEQ ID NO: 95148 - DNA, 26 bp, Homo sapiens
aatggtcaaataccatgataatagaa

SEQ ID NO: 95149 - DNA, 26 bp, Homo sapiens
atggtcaaataccatgataatagaaa

SEQ ID NO: 95150 - DNA, 26 bp, Homo sapiens
tggtcaaataccatgataatagaaag

SEQ ID NO: 95151 - DNA, 26 bp, Homo sapiens
ggtcaaataccatgataatagaaagc

SEQ ID NO: 95152 - DNA, 26 bp, Homo sapiens
gtcaaataccatgataatagaaagca

SEQ ID NO: 95153 - DNA, 26 bp, Homo sapiens
tcaaataccatgataatagaaagcaa

SEQ ID NO: 95154 - DNA, 26 bp, Homo sapiens
caaataccatgataatagaaagcaac

SEQ ID NO: 95155 - DNA, 26 bp, Homo sapiens
aaataccatgataatagaaagcaacc

SEQ ID NO: 95156 - DNA, 26 bp, Homo sapiens
aataccatgataatagaaagcaacca

SEQ ID NO: 95157 - DNA, 26 bp, Homo sapiens
ataccatgataatagaaagcaaccag

SEQ ID NO: 95158 - DNA, 26 bp, Homo sapiens
taccatgataatagaaagcaaccagc

SEQ ID NO: 95159 - DNA, 26 bp, Homo sapiens
accatgataatagaaagcaaccagcc

SEQ ID NO: 95160 - DNA, 26 bp, Homo sapiens
ccatgataatagaaagcaaccagcca

SEQ ID NO: 95161 - DNA, 26 bp, Homo sapiens
catgataatagaaagcaaccagccaa

SEQ ID NO: 95162 - DNA, 26 bp, Homo sapiens
atgataatagaaagcaaccagccaac

SEQ ID NO: 95163 - DNA, 26 bp, Homo sapiens
tgataatagaaagcaaccagccaaca

SEQ ID NO: 95164 - DNA, 26 bp, Homo sapiens
gataatagaaagcaaccagccaacat

SEQ ID NO: 95165 - DNA, 26 bp, Homo sapiens
ataatagaaagcaaccagccaacata

SEQ ID NO: 95166 - DNA, 26 bp, Homo sapiens
taatagaaagcaaccagccaacatag

SEQ ID NO: 95167 - DNA, 26 bp, Homo sapiens
aatagaaagcaaccagccaacatagc

SEQ ID NO: 95168 - DNA, 26 bp, Homo sapiens
atagaaagcaaccagccaacatagct

SEQ ID NO: 95169 - DNA, 26 bp, Homo sapiens
tagaaagcaaccagccaacatagcta

SEQ ID NO: 95170 - DNA, 26 bp, Homo sapiens
agaaagcaaccagccaacatagctag

SEQ ID NO: 95171 - DNA, 26 bp, Homo sapiens
gaaagcaaccagccaacatagctagg

SEQ ID NO: 95172 - DNA, 26 bp, Homo sapiens
aaagcaaccagccaacatagctaggt

SEQ ID NO: 95173 - DNA, 26 bp, Homo sapiens
aagcaaccagccaacatagctaggtc

SEQ ID NO: 95174 - DNA, 26 bp, Homo sapiens
agcaaccagccaacatagctaggtct

SEQ ID NO: 95175 - DNA, 26 bp, Homo sapiens
gcaaccagccaacatagctaggtctt

SEQ ID NO: 95176 - DNA, 26 bp, Homo sapiens
caaccagccaacatagctaggtcttc

SEQ ID NO: 95177 - DNA, 26 bp, Homo sapiens
aaccagccaacatagctaggtcttct

SEQ ID NO: 95178 - DNA, 26 bp, Homo sapiens
accagccaacatagctaggtcttctc

SEQ ID NO: 95179 - DNA, 26 bp, Homo sapiens
ccagccaacatagctaggtcttctct

SEQ ID NO: 95180 - DNA, 26 bp, Homo sapiens
cagccaacatagctaggtcttctctt

SEQ ID NO: 95181 - DNA, 26 bp, Homo sapiens
agccaacatagctaggtcttctctta

SEQ ID NO: 95182 - DNA, 26 bp, Homo sapiens
gccaacatagctaggtcttctcttaa

SEQ ID NO: 95183 - DNA, 26 bp, Homo sapiens
ccaacatagctaggtcttctcttaaa

SEQ ID NO: 95184 - DNA, 26 bp, Homo sapiens
caacatagctaggtcttctcttaaat

SEQ ID NO: 95185 - DNA, 26 bp, Homo sapiens
aacatagctaggtcttctcttaaatt

SEQ ID NO: 95186 - DNA, 26 bp, Homo sapiens
acatagctaggtcttctcttaaattt

SEQ ID NO: 95187 - DNA, 26 bp, Homo sapiens
catagctaggtcttctcttaaatttg

SEQ ID NO: 95188 - DNA, 26 bp, Homo sapiens
atagctaggtcttctcttaaatttgc

SEQ ID NO: 95189 - DNA, 26 bp, Homo sapiens
tagctaggtcttctcttaaatttgct

SEQ ID NO: 95190 - DNA, 26 bp, Homo sapiens
agctaggtcttctcttaaatttgctg

SEQ ID NO: 95191 - DNA, 26 bp, Homo sapiens
gctaggtcttctcttaaatttgctga

SEQ ID NO: 95192 - DNA, 26 bp, Homo sapiens
ctaggtcttctcttaaatttgctgat

SEQ ID NO: 95193 - DNA, 26 bp, Homo sapiens
taggtcttctcttaaatttgctgatc

SEQ ID NO: 95194 - DNA, 26 bp, Homo sapiens
aggtcttctcttaaatttgctgatca

SEQ ID NO: 95195 - DNA, 26 bp, Homo sapiens
ggtcttctcttaaatttgctgatcaa

SEQ ID NO: 95196 - DNA, 26 bp, Homo sapiens
gtcttctcttaaatttgctgatcaac

SEQ ID NO: 95197 - DNA, 26 bp, Homo sapiens
tcttctcttaaatttgctgatcaaca

SEQ ID NO: 95198 - DNA, 26 bp, Homo sapiens
cttctcttaaatttgctgatcaacat

SEQ ID NO: 95199 - DNA, 26 bp, Homo sapiens
ttctcttaaatttgctgatcaacatt

SEQ ID NO: 95200 - DNA, 26 bp, Homo sapiens
tctcttaaatttgctgatcaacatta

SEQ ID NO: 95201 - DNA, 26 bp, Homo sapiens
ctcttaaatttgctgatcaacattag

SEQ ID NO: 95202 - DNA, 26 bp, Homo sapiens
tcttaaatttgctgatcaacattagc

SEQ ID NO: 95203 - DNA, 26 bp, Homo sapiens
cttaaatttgctgatcaacattagca

SEQ ID NO: 95204 - DNA, 26 bp, Homo sapiens
ttaaatttgctgatcaacattagcag

SEQ ID NO: 95205 - DNA, 26 bp, Homo sapiens
taaatttgctgatcaacattagcagt

SEQ ID NO: 95206 - DNA, 26 bp, Homo sapiens
aaatttgctgatcaacattagcagta

SEQ ID NO: 95207 - DNA, 26 bp, Homo sapiens
aatttgctgatcaacattagcagtag

SEQ ID NO: 95208 - DNA, 26 bp, Homo sapiens
atttgctgatcaacattagcagtagt

SEQ ID NO: 95209 - DNA, 26 bp, Homo sapiens
tttgctgatcaacattagcagtagtt

SEQ ID NO: 95210 - DNA, 26 bp, Homo sapiens
ttgctgatcaacattagcagtagtta

SEQ ID NO: 95211 - DNA, 26 bp, Homo sapiens
tgctgatcaacattagcagtagttac

SEQ ID NO: 95212 - DNA, 26 bp, Homo sapiens
gctgatcaacattagcagtagttacc

SEQ ID NO: 95213 - DNA, 26 bp, Homo sapiens
ctgatcaacattagcagtagttacct

SEQ ID NO: 95214 - DNA, 26 bp, Homo sapiens
tgatcaacattagcagtagttacctt

SEQ ID NO: 95215 - DNA, 26 bp, Homo sapiens
gatcaacattagcagtagttacctta

SEQ ID NO: 95216 - DNA, 26 bp, Homo sapiens
atcaacattagcagtagttaccttaa

SEQ ID NO: 95217 - DNA, 26 bp, Homo sapiens
tcaacattagcagtagttaccttaat

SEQ ID NO: 95218 - DNA, 26 bp, Homo sapiens
caacattagcagtagttaccttaata

SEQ ID NO: 95219 - DNA, 26 bp, Homo sapiens
aacattagcagtagttaccttaataa

SEQ ID NO: 95220 - DNA, 26 bp, Homo sapiens
acattagcagtagttaccttaataat

SEQ ID NO: 95221 - DNA, 26 bp, Homo sapiens
cattagcagtagttaccttaataata

SEQ ID NO: 95222 - DNA, 26 bp, Homo sapiens
attagcagtagttaccttaataataa

SEQ ID NO: 95223 - DNA, 26 bp, Homo sapiens
ttagcagtagttaccttaataataaa

SEQ ID NO: 95224 - DNA, 26 bp, Homo sapiens
tagcagtagttaccttaataataaat

SEQ ID NO: 95225 - DNA, 26 bp, Homo sapiens
agcagtagttaccttaataataaatt

SEQ ID NO: 95226 - DNA, 26 bp, Homo sapiens
gcagtagttaccttaataataaatta

SEQ ID NO: 95227 - DNA, 26 bp, Homo sapiens
cagtagttaccttaataataaattat

SEQ ID NO: 95228 - DNA, 26 bp, Homo sapiens
agtagttaccttaataataaattatt

SEQ ID NO: 95229 - DNA, 26 bp, Homo sapiens
gtagttaccttaataataaattattc

SEQ ID NO: 95230 - DNA, 26 bp, Homo sapiens
tagttaccttaataataaattattca

SEQ ID NO: 95231 - DNA, 26 bp, Homo sapiens
agttaccttaataataaattattcat

SEQ ID NO: 95232 - DNA, 26 bp, Homo sapiens
gttaccttaataataaattattcatt

SEQ ID NO: 95233 - DNA, 26 bp, Homo sapiens
ttaccttaataataaattattcattt

SEQ ID NO: 95234 - DNA, 26 bp, Homo sapiens
taccttaataataaattattcatttt

SEQ ID NO: 95235 - DNA, 26 bp, Homo sapiens
accttaataataaattattcatttta

SEQ ID NO: 95236 - DNA, 26 bp, Homo sapiens
ccttaataataaattattcattttaa

SEQ ID NO: 95237 - DNA, 26 bp, Homo sapiens
cttaataataaattattcattttaaa

SEQ ID NO: 95238 - DNA, 26 bp, Homo sapiens
ttaataataaattattcattttaaaa

SEQ ID NO: 95239 - DNA, 26 bp, Homo sapiens
taataataaattattcattttaaaat

SEQ ID NO: 95240 - DNA, 26 bp, Homo sapiens
aataataaattattcattttaaaatc

SEQ ID NO: 95241 - DNA, 26 bp, Homo sapiens
ataataaattattcattttaaaatca

SEQ ID NO: 95242 - DNA, 26 bp, Homo sapiens
taataaattattcattttaaaatcag

SEQ ID NO: 95243 - DNA, 26 bp, Homo sapiens
aataaattattcattttaaaatcagt

SEQ ID NO: 95244 - DNA, 26 bp, Homo sapiens
ataaattattcattttaaaatcagta

SEQ ID NO: 95245 - DNA, 26 bp, Homo sapiens
taaattattcattttaaaatcagtag

SEQ ID NO: 95246 - DNA, 26 bp, Homo sapiens
aaattattcattttaaaatcagtagt

SEQ ID NO: 95247 - DNA, 26 bp, Homo sapiens
aattattcattttaaaatcagtagta

SEQ ID NO: 95248 - DNA, 26 bp, Homo sapiens
attattcattttaaaatcagtagtaa

SEQ ID NO: 95249 - DNA, 26 bp, Homo sapiens
ttattcattttaaaatcagtagtaac

SEQ ID NO: 95250 - DNA, 26 bp, Homo sapiens
tattcattttaaaatcagtagtaact

SEQ ID NO: 95251 - DNA, 26 bp, Homo sapiens
attcattttaaaatcagtagtaactt

SEQ ID NO: 95252 - DNA, 26 bp, Homo sapiens
ttcattttaaaatcagtagtaacttt

SEQ ID NO: 95253 - DNA, 26 bp, Homo sapiens
tcattttaaaatcagtagtaacttta

SEQ ID NO: 95254 - DNA, 26 bp, Homo sapiens
cattttaaaatcagtagtaactttag

SEQ ID NO: 95255 - DNA, 26 bp, Homo sapiens
attttaaaatcagtagtaactttaga

SEQ ID NO: 95256 - DNA, 26 bp, Homo sapiens
ttttaaaatcagtagtaactttagac

SEQ ID NO: 95257 - DNA, 26 bp, Homo sapiens
tttaaaatcagtagtaactttagaca

SEQ ID NO: 95258 - DNA, 26 bp, Homo sapiens
ttaaaatcagtagtaactttagacaa

SEQ ID NO: 95259 - DNA, 26 bp, Homo sapiens
taaaatcagtagtaactttagacaat

SEQ ID NO: 95260 - DNA, 26 bp, Homo sapiens
aaaatcagtagtaactttagacaatt

SEQ ID NO: 95261 - DNA, 26 bp, Homo sapiens
aaatcagtagtaactttagacaattc

SEQ ID NO: 95262 - DNA, 26 bp, Homo sapiens
aatcagtagtaactttagacaattca

SEQ ID NO: 95263 - DNA, 26 bp, Homo sapiens
atcagtagtaactttagacaattcat

SEQ ID NO: 95264 - DNA, 26 bp, Homo sapiens
tcagtagtaactttagacaattcata

SEQ ID NO: 95265 - DNA, 26 bp, Homo sapiens
cagtagtaactttagacaattcataa

SEQ ID NO: 95266 - DNA, 26 bp, Homo sapiens
agtagtaactttagacaattcataaa

SEQ ID NO: 95267 - DNA, 26 bp, Homo sapiens
gtagtaactttagacaattcataaat

SEQ ID NO: 95268 - DNA, 26 bp, Homo sapiens
tagtaactttagacaattcataaata

SEQ ID NO: 95269 - DNA, 26 bp, Homo sapiens
agtaactttagacaattcataaataa

SEQ ID NO: 95270 - DNA, 26 bp, Homo sapiens
gtaactttagacaattcataaataag

SEQ ID NO: 95271 - DNA, 26 bp, Homo sapiens
taactttagacaattcataaataagt

SEQ ID NO: 95272 - DNA, 26 bp, Homo sapiens
aactttagacaattcataaataagtg

SEQ ID NO: 95273 - DNA, 26 bp, Homo sapiens
actttagacaattcataaataagtgt

SEQ ID NO: 95274 - DNA, 26 bp, Homo sapiens
ctttagacaattcataaataagtgtg

SEQ ID NO: 95275 - DNA, 26 bp, Homo sapiens
tttagacaattcataaataagtgtgc

SEQ ID NO: 95276 - DNA, 26 bp, Homo sapiens
ttagacaattcataaataagtgtgct

SEQ ID NO: 95277 - DNA, 26 bp, Homo sapiens
tagacaattcataaataagtgtgctc

SEQ ID NO: 95278 - DNA, 26 bp, Homo sapiens
agacaattcataaataagtgtgctct

SEQ ID NO: 95279 - DNA, 26 bp, Homo sapiens
gacaattcataaataagtgtgctctg

SEQ ID NO: 95280 - DNA, 26 bp, Homo sapiens
acaattcataaataagtgtgctctgt

SEQ ID NO: 95281 - DNA, 26 bp, Homo sapiens
caattcataaataagtgtgctctgtg

SEQ ID NO: 95282 - DNA, 26 bp, Homo sapiens
aattcataaataagtgtgctctgtgc

SEQ ID NO: 95283 - DNA, 26 bp, Homo sapiens
attcataaataagtgtgctctgtgca

SEQ ID NO: 95284 - DNA, 26 bp, Homo sapiens
ttcataaataagtgtgctctgtgcaa

SEQ ID NO: 95285 - DNA, 26 bp, Homo sapiens
tcataaataagtgtgctctgtgcaat

SEQ ID NO: 95286 - DNA, 26 bp, Homo sapiens
cataaataagtgtgctctgtgcaatt

SEQ ID NO: 95287 - DNA, 26 bp, Homo sapiens
ataaataagtgtgctctgtgcaattt

SEQ ID NO: 95288 - DNA, 26 bp, Homo sapiens
taaataagtgtgctctgtgcaattta

SEQ ID NO: 95289 - DNA, 26 bp, Homo sapiens
aaataagtgtgctctgtgcaatttac

SEQ ID NO: 95290 - DNA, 26 bp, Homo sapiens
aataagtgtgctctgtgcaatttaca

SEQ ID NO: 95291 - DNA, 26 bp, Homo sapiens
ataagtgtgctctgtgcaatttacac

SEQ ID NO: 95292 - DNA, 26 bp, Homo sapiens
taagtgtgctctgtgcaatttacacg

SEQ ID NO: 95293 - DNA, 26 bp, Homo sapiens
aagtgtgctctgtgcaatttacacgt

SEQ ID NO: 95294 - DNA, 26 bp, Homo sapiens
agtgtgctctgtgcaatttacacgtt

SEQ ID NO: 95295 - DNA, 26 bp, Homo sapiens
gtgtgctctgtgcaatttacacgttt

SEQ ID NO: 95296 - DNA, 26 bp, Homo sapiens
tgtgctctgtgcaatttacacgttta

SEQ ID NO: 95297 - DNA, 26 bp, Homo sapiens
gtgctctgtgcaatttacacgtttaa

SEQ ID NO: 95298 - DNA, 26 bp, Homo sapiens
tgctctgtgcaatttacacgtttaat

SEQ ID NO: 95299 - DNA, 26 bp, Homo sapiens
gctctgtgcaatttacacgtttaata

SEQ ID NO: 95300 - DNA, 26 bp, Homo sapiens
ctctgtgcaatttacacgtttaatat

SEQ ID NO: 95301 - DNA, 26 bp, Homo sapiens
tctgtgcaatttacacgtttaatatc

SEQ ID NO: 95302 - DNA, 26 bp, Homo sapiens
ctgtgcaatttacacgtttaatatcc

SEQ ID NO: 95303 - DNA, 26 bp, Homo sapiens
tgtgcaatttacacgtttaatatcct

SEQ ID NO: 95304 - DNA, 26 bp, Homo sapiens
gtgcaatttacacgtttaatatcctg

SEQ ID NO: 95305 - DNA, 26 bp, Homo sapiens
tgcaatttacacgtttaatatcctgt

SEQ ID NO: 95306 - DNA, 26 bp, Homo sapiens
gcaatttacacgtttaatatcctgtg

SEQ ID NO: 95307 - DNA, 26 bp, Homo sapiens
caatttacacgtttaatatcctgtgg

SEQ ID NO: 95308 - DNA, 26 bp, Homo sapiens
aatttacacgtttaatatcctgtgga

SEQ ID NO: 95309 - DNA, 26 bp, Homo sapiens
atttacacgtttaatatcctgtggat

SEQ ID NO: 95310 - DNA, 26 bp, Homo sapiens
tttacacgtttaatatcctgtggata

SEQ ID NO: 95311 - DNA, 26 bp, Homo sapiens
ttacacgtttaatatcctgtggatac

SEQ ID NO: 95312 - DNA, 26 bp, Homo sapiens
tacacgtttaatatcctgtggatact

SEQ ID NO: 95313 - DNA, 26 bp, Homo sapiens
acacgtttaatatcctgtggatacta

SEQ ID NO: 95314 - DNA, 26 bp, Homo sapiens
cacgtttaatatcctgtggatactaa

SEQ ID NO: 95315 - DNA, 26 bp, Homo sapiens
acgtttaatatcctgtggatactaaa

SEQ ID NO: 95316 - DNA, 26 bp, Homo sapiens
cgtttaatatcctgtggatactaaaa

SEQ ID NO: 95317 - DNA, 26 bp, Homo sapiens
gtttaatatcctgtggatactaaaag

SEQ ID NO: 95318 - DNA, 26 bp, Homo sapiens
tttaatatcctgtggatactaaaagc

SEQ ID NO: 95319 - DNA, 26 bp, Homo sapiens
ttaatatcctgtggatactaaaagct

SEQ ID NO: 95320 - DNA, 26 bp, Homo sapiens
taatatcctgtggatactaaaagctt

SEQ ID NO: 95321 - DNA, 26 bp, Homo sapiens
aatatcctgtggatactaaaagcttg

SEQ ID NO: 95322 - DNA, 26 bp, Homo sapiens
atatcctgtggatactaaaagcttgt

SEQ ID NO: 95323 - DNA, 26 bp, Homo sapiens
tatcctgtggatactaaaagcttgta

SEQ ID NO: 95324 - DNA, 26 bp, Homo sapiens
atcctgtggatactaaaagcttgtat

SEQ ID NO: 95325 - DNA, 26 bp, Homo sapiens
tcctgtggatactaaaagcttgtata

SEQ ID NO: 95326 - DNA, 26 bp, Homo sapiens
cctgtggatactaaaagcttgtatat

SEQ ID NO: 95327 - DNA, 26 bp, Homo sapiens
ctgtggatactaaaagcttgtatatt

SEQ ID NO: 95328 - DNA, 26 bp, Homo sapiens
tgtggatactaaaagcttgtatattg

SEQ ID NO: 95329 - DNA, 26 bp, Homo sapiens
gtggatactaaaagcttgtatattgt

SEQ ID NO: 95330 - DNA, 26 bp, Homo sapiens
tggatactaaaagcttgtatattgtc

SEQ ID NO: 95331 - DNA, 26 bp, Homo sapiens
ggatactaaaagcttgtatattgtca

SEQ ID NO: 95332 - DNA, 26 bp, Homo sapiens
gatactaaaagcttgtatattgtcag

SEQ ID NO: 95333 - DNA, 26 bp, Homo sapiens
atactaaaagcttgtatattgtcaga

SEQ ID NO: 95334 - DNA, 26 bp, Homo sapiens
tactaaaagcttgtatattgtcagat

SEQ ID NO: 95335 - DNA, 26 bp, Homo sapiens
actaaaagcttgtatattgtcagatt

SEQ ID NO: 95336 - DNA, 26 bp, Homo sapiens
ctaaaagcttgtatattgtcagattt

SEQ ID NO: 95337 - DNA, 26 bp, Homo sapiens
taaaagcttgtatattgtcagatttg

SEQ ID NO: 95338 - DNA, 26 bp, Homo sapiens
aaaagcttgtatattgtcagatttgc

SEQ ID NO: 95339 - DNA, 26 bp, Homo sapiens
aaagcttgtatattgtcagatttgca

SEQ ID NO: 95340 - DNA, 26 bp, Homo sapiens
aagcttgtatattgtcagatttgcac

SEQ ID NO: 95341 - DNA, 26 bp, Homo sapiens
agcttgtatattgtcagatttgcaca

SEQ ID NO: 95342 - DNA, 26 bp, Homo sapiens
gcttgtatattgtcagatttgcacat

SEQ ID NO: 95343 - DNA, 26 bp, Homo sapiens
cttgtatattgtcagatttgcacatt

SEQ ID NO: 95344 - DNA, 26 bp, Homo sapiens
ttgtatattgtcagatttgcacatta

SEQ ID NO: 95345 - DNA, 26 bp, Homo sapiens
tgtatattgtcagatttgcacattat

SEQ ID NO: 95346 - DNA, 26 bp, Homo sapiens
gtatattgtcagatttgcacattatt

SEQ ID NO: 95347 - DNA, 26 bp, Homo sapiens
tatattgtcagatttgcacattatta

SEQ ID NO: 95348 - DNA, 26 bp, Homo sapiens
atattgtcagatttgcacattattac

SEQ ID NO: 95349 - DNA, 26 bp, Homo sapiens
tattgtcagatttgcacattattact

SEQ ID NO: 95350 - DNA, 26 bp, Homo sapiens
attgtcagatttgcacattattactt

SEQ ID NO: 95351 - DNA, 26 bp, Homo sapiens
ttgtcagatttgcacattattacttt

SEQ ID NO: 95352 - DNA, 26 bp, Homo sapiens
tgtcagatttgcacattattacttta

SEQ ID NO: 95353 - DNA, 26 bp, Homo sapiens
gtcagatttgcacattattactttat

SEQ ID NO: 95354 - DNA, 26 bp, Homo sapiens
tcagatttgcacattattactttatc

SEQ ID NO: 95355 - DNA, 26 bp, Homo sapiens
cagatttgcacattattactttatca

SEQ ID NO: 95356 - DNA, 26 bp, Homo sapiens
agatttgcacattattactttatcaa

SEQ ID NO: 95357 - DNA, 26 bp, Homo sapiens
gatttgcacattattactttatcaaa

SEQ ID NO: 95358 - DNA, 26 bp, Homo sapiens
atttgcacattattactttatcaaaa

SEQ ID NO: 95359 - DNA, 26 bp, Homo sapiens
tttgcacattattactttatcaaaaa

SEQ ID NO: 95360 - DNA, 26 bp, Homo sapiens
ttgcacattattactttatcaaaaac

SEQ ID NO: 95361 - DNA, 26 bp, Homo sapiens
tgcacattattactttatcaaaaaca

SEQ ID NO: 95362 - DNA, 26 bp, Homo sapiens
gcacattattactttatcaaaaacag

SEQ ID NO: 95363 - DNA, 26 bp, Homo sapiens
cacattattactttatcaaaaacagt

SEQ ID NO: 95364 - DNA, 26 bp, Homo sapiens
acattattactttatcaaaaacagta

SEQ ID NO: 95365 - DNA, 26 bp, Homo sapiens
cattattactttatcaaaaacagtaa

SEQ ID NO: 95366 - DNA, 26 bp, Homo sapiens
attattactttatcaaaaacagtaag

SEQ ID NO: 95367 - DNA, 26 bp, Homo sapiens
ttattactttatcaaaaacagtaagc

SEQ ID NO: 95368 - DNA, 26 bp, Homo sapiens
tattactttatcaaaaacagtaagct

SEQ ID NO: 95369 - DNA, 26 bp, Homo sapiens
attactttatcaaaaacagtaagctt

SEQ ID NO: 95370 - DNA, 26 bp, Homo sapiens
ttactttatcaaaaacagtaagcttt

SEQ ID NO: 95371 - DNA, 26 bp, Homo sapiens
tactttatcaaaaacagtaagctttc

SEQ ID NO: 95372 - DNA, 26 bp, Homo sapiens
actttatcaaaaacagtaagctttcc

SEQ ID NO: 95373 - DNA, 26 bp, Homo sapiens
ctttatcaaaaacagtaagctttccc

SEQ ID NO: 95374 - DNA, 26 bp, Homo sapiens
tttatcaaaaacagtaagctttccca

SEQ ID NO: 95375 - DNA, 26 bp, Homo sapiens
ttatcaaaaacagtaagctttcccaa

SEQ ID NO: 95376 - DNA, 26 bp, Homo sapiens
tatcaaaaacagtaagctttcccaaa

SEQ ID NO: 95377 - DNA, 26 bp, Homo sapiens
atcaaaaacagtaagctttcccaaag

SEQ ID NO: 95378 - DNA, 26 bp, Homo sapiens
tcaaaaacagtaagctttcccaaaga

SEQ ID NO: 95379 - DNA, 26 bp, Homo sapiens
caaaaacagtaagctttcccaaagat

SEQ ID NO: 95380 - DNA, 26 bp, Homo sapiens
aaaaacagtaagctttcccaaagatg

SEQ ID NO: 95381 - DNA, 26 bp, Homo sapiens
aaaacagtaagctttcccaaagatga

SEQ ID NO: 95382 - DNA, 26 bp, Homo sapiens
aaacagtaagctttcccaaagatgaa

SEQ ID NO: 95383 - DNA, 26 bp, Homo sapiens
aacagtaagctttcccaaagatgaag

SEQ ID NO: 95384 - DNA, 26 bp, Homo sapiens
acagtaagctttcccaaagatgaagc

SEQ ID NO: 95385 - DNA, 26 bp, Homo sapiens
cagtaagctttcccaaagatgaagct

SEQ ID NO: 95386 - DNA, 26 bp, Homo sapiens
agtaagctttcccaaagatgaagctg

SEQ ID NO: 95387 - DNA, 26 bp, Homo sapiens
gtaagctttcccaaagatgaagctgg

SEQ ID NO: 95388 - DNA, 26 bp, Homo sapiens
taagctttcccaaagatgaagctggg

SEQ ID NO: 95389 - DNA, 26 bp, Homo sapiens
aagctttcccaaagatgaagctgggg

SEQ ID NO: 95390 - DNA, 26 bp, Homo sapiens
agctttcccaaagatgaagctgggga

SEQ ID NO: 95391 - DNA, 26 bp, Homo sapiens
gctttcccaaagatgaagctggggaa

SEQ ID NO: 95392 - DNA, 26 bp, Homo sapiens
ctttcccaaagatgaagctggggaaa

SEQ ID NO: 95393 - DNA, 26 bp, Homo sapiens
tttcccaaagatgaagctggggaaac

SEQ ID NO: 95394 - DNA, 26 bp, Homo sapiens
ttcccaaagatgaagctggggaaact

SEQ ID NO: 95395 - DNA, 26 bp, Homo sapiens
tcccaaagatgaagctggggaaactt

SEQ ID NO: 95396 - DNA, 26 bp, Homo sapiens
cccaaagatgaagctggggaaacttg

SEQ ID NO: 95397 - DNA, 26 bp, Homo sapiens
ccaaagatgaagctggggaaacttga

SEQ ID NO: 95398 - DNA, 26 bp, Homo sapiens
caaagatgaagctggggaaacttgaa

SEQ ID NO: 95399 - DNA, 26 bp, Homo sapiens
aaagatgaagctggggaaacttgaaa

SEQ ID NO: 95400 - DNA, 26 bp, Homo sapiens
aagatgaagctggggaaacttgaaaa

SEQ ID NO: 95401 - DNA, 26 bp, Homo sapiens
agatgaagctggggaaacttgaaaag

SEQ ID NO: 95402 - DNA, 26 bp, Homo sapiens
gatgaagctggggaaacttgaaaaga

SEQ ID NO: 95403 - DNA, 26 bp, Homo sapiens
atgaagctggggaaacttgaaaagat

SEQ ID NO: 95404 - DNA, 26 bp, Homo sapiens
tgaagctggggaaacttgaaaagata

SEQ ID NO: 95405 - DNA, 26 bp, Homo sapiens
gaagctggggaaacttgaaaagatat

SEQ ID NO: 95406 - DNA, 26 bp, Homo sapiens
aagctggggaaacttgaaaagatatt

SEQ ID NO: 95407 - DNA, 26 bp, Homo sapiens
agctggggaaacttgaaaagatattc

SEQ ID NO: 95408 - DNA, 26 bp, Homo sapiens
gctggggaaacttgaaaagatattct

SEQ ID NO: 95409 - DNA, 26 bp, Homo sapiens
ctggggaaacttgaaaagatattcta

SEQ ID NO: 95410 - DNA, 26 bp, Homo sapiens
tggggaaacttgaaaagatattctaa

SEQ ID NO: 95411 - DNA, 26 bp, Homo sapiens
ggggaaacttgaaaagatattctaaa

SEQ ID NO: 95412 - DNA, 26 bp, Homo sapiens
gggaaacttgaaaagatattctaaag

SEQ ID NO: 95413 - DNA, 26 bp, Homo sapiens
ggaaacttgaaaagatattctaaagg

SEQ ID NO: 95414 - DNA, 26 bp, Homo sapiens
gaaacttgaaaagatattctaaaggt

SEQ ID NO: 95415 - DNA, 26 bp, Homo sapiens
aaacttgaaaagatattctaaaggtt

SEQ ID NO: 95416 - DNA, 26 bp, Homo sapiens
aacttgaaaagatattctaaaggttc

SEQ ID NO: 95417 - DNA, 26 bp, Homo sapiens
acttgaaaagatattctaaaggttct

SEQ ID NO: 95418 - DNA, 26 bp, Homo sapiens
cttgaaaagatattctaaaggttctc

SEQ ID NO: 95419 - DNA, 26 bp, Homo sapiens
ttgaaaagatattctaaaggttctct

SEQ ID NO: 95420 - DNA, 26 bp, Homo sapiens
tgaaaagatattctaaaggttctctg

SEQ ID NO: 95421 - DNA, 26 bp, Homo sapiens
gaaaagatattctaaaggttctctgg

SEQ ID NO: 95422 - DNA, 26 bp, Homo sapiens
aaaagatattctaaaggttctctgga

SEQ ID NO: 95423 - DNA, 26 bp, Homo sapiens
aaagatattctaaaggttctctggag

SEQ ID NO: 95424 - DNA, 26 bp, Homo sapiens
aagatattctaaaggttctctggaga

SEQ ID NO: 95425 - DNA, 26 bp, Homo sapiens
agatattctaaaggttctctggagag

SEQ ID NO: 95426 - DNA, 26 bp, Homo sapiens
gatattctaaaggttctctggagagt

SEQ ID NO: 95427 - DNA, 26 bp, Homo sapiens
atattctaaaggttctctggagagtt

SEQ ID NO: 95428 - DNA, 26 bp, Homo sapiens
tattctaaaggttctctggagagtta

SEQ ID NO: 95429 - DNA, 26 bp, Homo sapiens
attctaaaggttctctggagagttat

SEQ ID NO: 95430 - DNA, 26 bp, Homo sapiens
ttctaaaggttctctggagagttatc

SEQ ID NO: 95431 - DNA, 26 bp, Homo sapiens
tctaaaggttctctggagagttatca

SEQ ID NO: 95432 - DNA, 26 bp, Homo sapiens
ctaaaggttctctggagagttatcaa

SEQ ID NO: 95433 - DNA, 26 bp, Homo sapiens
taaaggttctctggagagttatcaaa

SEQ ID NO: 95434 - DNA, 26 bp, Homo sapiens
aaaggttctctggagagttatcaaag

SEQ ID NO: 95435 - DNA, 26 bp, Homo sapiens
aaggttctctggagagttatcaaagc

SEQ ID NO: 95436 - DNA, 26 bp, Homo sapiens
aggttctctggagagttatcaaagct

SEQ ID NO: 95437 - DNA, 26 bp, Homo sapiens
ggttctctggagagttatcaaagctc

SEQ ID NO: 95438 - DNA, 26 bp, Homo sapiens
gttctctggagagttatcaaagctct

SEQ ID NO: 95439 - DNA, 26 bp, Homo sapiens
ttctctggagagttatcaaagctctg

SEQ ID NO: 95440 - DNA, 26 bp, Homo sapiens
tctctggagagttatcaaagctctgc

SEQ ID NO: 95441 - DNA, 26 bp, Homo sapiens
ctctggagagttatcaaagctctgcc

SEQ ID NO: 95442 - DNA, 26 bp, Homo sapiens
tctggagagttatcaaagctctgcct

SEQ ID NO: 95443 - DNA, 26 bp, Homo sapiens
ctggagagttatcaaagctctgcctg

SEQ ID NO: 95444 - DNA, 26 bp, Homo sapiens
tggagagttatcaaagctctgcctgc

SEQ ID NO: 95445 - DNA, 26 bp, Homo sapiens
ggagagttatcaaagctctgcctgct

SEQ ID NO: 95446 - DNA, 26 bp, Homo sapiens
gagagttatcaaagctctgcctgctt

SEQ ID NO: 95447 - DNA, 26 bp, Homo sapiens
agagttatcaaagctctgcctgcttt

SEQ ID NO: 95448 - DNA, 26 bp, Homo sapiens
gagttatcaaagctctgcctgcttta

SEQ ID NO: 95449 - DNA, 26 bp, Homo sapiens
agttatcaaagctctgcctgctttac

SEQ ID NO: 95450 - DNA, 26 bp, Homo sapiens
gttatcaaagctctgcctgctttaca

SEQ ID NO: 95451 - DNA, 26 bp, Homo sapiens
ttatcaaagctctgcctgctttacag

SEQ ID NO: 95452 - DNA, 26 bp, Homo sapiens
tatcaaagctctgcctgctttacagg

SEQ ID NO: 95453 - DNA, 26 bp, Homo sapiens
atcaaagctctgcctgctttacagga

SEQ ID NO: 95454 - DNA, 26 bp, Homo sapiens
tcaaagctctgcctgctttacaggag

SEQ ID NO: 95455 - DNA, 26 bp, Homo sapiens
caaagctctgcctgctttacaggagg

SEQ ID NO: 95456 - DNA, 26 bp, Homo sapiens
aaagctctgcctgctttacaggagga

SEQ ID NO: 95457 - DNA, 26 bp, Homo sapiens
aagctctgcctgctttacaggaggag

SEQ ID NO: 95458 - DNA, 26 bp, Homo sapiens
agctctgcctgctttacaggaggagg

SEQ ID NO: 95459 - DNA, 26 bp, Homo sapiens
gctctgcctgctttacaggaggaggt

SEQ ID NO: 95460 - DNA, 26 bp, Homo sapiens
ctctgcctgctttacaggaggaggtt

SEQ ID NO: 95461 - DNA, 26 bp, Homo sapiens
tctgcctgctttacaggaggaggttc

SEQ ID NO: 95462 - DNA, 26 bp, Homo sapiens
ctgcctgctttacaggaggaggttcc

SEQ ID NO: 95463 - DNA, 26 bp, Homo sapiens
tgcctgctttacaggaggaggttcca

SEQ ID NO: 95464 - DNA, 26 bp, Homo sapiens
gcctgctttacaggaggaggttccaa

SEQ ID NO: 95465 - DNA, 26 bp, Homo sapiens
cctgctttacaggaggaggttccaat

SEQ ID NO: 95466 - DNA, 26 bp, Homo sapiens
ctgctttacaggaggaggttccaatt

SEQ ID NO: 95467 - DNA, 26 bp, Homo sapiens
tgctttacaggaggaggttccaattt

SEQ ID NO: 95468 - DNA, 26 bp, Homo sapiens
gctttacaggaggaggttccaattta

SEQ ID NO: 95469 - DNA, 26 bp, Homo sapiens
ctttacaggaggaggttccaatttac

SEQ ID NO: 95470 - DNA, 26 bp, Homo sapiens
tttacaggaggaggttccaatttacg

SEQ ID NO: 95471 - DNA, 26 bp, Homo sapiens
ttacaggaggaggttccaatttacgc

SEQ ID NO: 95472 - DNA, 26 bp, Homo sapiens
tacaggaggaggttccaatttacgcg

SEQ ID NO: 95473 - DNA, 26 bp, Homo sapiens
acaggaggaggttccaatttacgcga

SEQ ID NO: 95474 - DNA, 26 bp, Homo sapiens
caggaggaggttccaatttacgcgag

SEQ ID NO: 95475 - DNA, 26 bp, Homo sapiens
aggaggaggttccaatttacgcgaga

SEQ ID NO: 95476 - DNA, 26 bp, Homo sapiens
ggaggaggttccaatttacgcgagag

SEQ ID NO: 95477 - DNA, 26 bp, Homo sapiens
gaggaggttccaatttacgcgagagg

SEQ ID NO: 95478 - DNA, 26 bp, Homo sapiens
aggaggttccaatttacgcgagaggg

SEQ ID NO: 95479 - DNA, 26 bp, Homo sapiens
ggaggttccaatttacgcgagagggc

SEQ ID NO: 95480 - DNA, 26 bp, Homo sapiens
gaggttccaatttacgcgagagggca

SEQ ID NO: 95481 - DNA, 26 bp, Homo sapiens
aggttccaatttacgcgagagggcag

SEQ ID NO: 95482 - DNA, 26 bp, Homo sapiens
ggttccaatttacgcgagagggcagt

SEQ ID NO: 95483 - DNA, 26 bp, Homo sapiens
gttccaatttacgcgagagggcagtt

SEQ ID NO: 95484 - DNA, 26 bp, Homo sapiens
ttccaatttacgcgagagggcagtta

SEQ ID NO: 95485 - DNA, 26 bp, Homo sapiens
tccaatttacgcgagagggcagttaa

SEQ ID NO: 95486 - DNA, 26 bp, Homo sapiens
ccaatttacgcgagagggcagttaaa

SEQ ID NO: 95487 - DNA, 26 bp, Homo sapiens
caatttacgcgagagggcagttaaaa

SEQ ID NO: 95488 - DNA, 26 bp, Homo sapiens
aatttacgcgagagggcagttaaaat

SEQ ID NO: 95489 - DNA, 26 bp, Homo sapiens
atttacgcgagagggcagttaaaatc

SEQ ID NO: 95490 - DNA, 26 bp, Homo sapiens
tttacgcgagagggcagttaaaatct

SEQ ID NO: 95491 - DNA, 26 bp, Homo sapiens
ttacgcgagagggcagttaaaatctg

SEQ ID NO: 95492 - DNA, 26 bp, Homo sapiens
tacgcgagagggcagttaaaatctgg

SEQ ID NO: 95493 - DNA, 26 bp, Homo sapiens
acgcgagagggcagttaaaatctggt

SEQ ID NO: 95494 - DNA, 26 bp, Homo sapiens
cgcgagagggcagttaaaatctggtt

SEQ ID NO: 95495 - DNA, 26 bp, Homo sapiens
gcgagagggcagttaaaatctggttg

SEQ ID NO: 95496 - DNA, 26 bp, Homo sapiens
cgagagggcagttaaaatctggttga

SEQ ID NO: 95497 - DNA, 26 bp, Homo sapiens
gagagggcagttaaaatctggttgaa

SEQ ID NO: 95498 - DNA, 26 bp, Homo sapiens
agagggcagttaaaatctggttgaat

SEQ ID NO: 95499 - DNA, 26 bp, Homo sapiens
gagggcagttaaaatctggttgaatt

SEQ ID NO: 95500 - DNA, 26 bp, Homo sapiens
agggcagttaaaatctggttgaattt

SEQ ID NO: 95501 - DNA, 26 bp, Homo sapiens
gggcagttaaaatctggttgaatttc

SEQ ID NO: 95502 - DNA, 26 bp, Homo sapiens
ggcagttaaaatctggttgaatttct

SEQ ID NO: 95503 - DNA, 26 bp, Homo sapiens
gcagttaaaatctggttgaatttctc

SEQ ID NO: 95504 - DNA, 26 bp, Homo sapiens
cagttaaaatctggttgaatttctca

SEQ ID NO: 95505 - DNA, 26 bp, Homo sapiens
agttaaaatctggttgaatttctcat

SEQ ID NO: 95506 - DNA, 26 bp, Homo sapiens
gttaaaatctggttgaatttctcata

SEQ ID NO: 95507 - DNA, 26 bp, Homo sapiens
ttaaaatctggttgaatttctcatat

SEQ ID NO: 95508 - DNA, 26 bp, Homo sapiens
taaaatctggttgaatttctcatatc

SEQ ID NO: 95509 - DNA, 26 bp, Homo sapiens
aaaatctggttgaatttctcatatct

SEQ ID NO: 95510 - DNA, 26 bp, Homo sapiens
aaatctggttgaatttctcatatctc

SEQ ID NO: 95511 - DNA, 26 bp, Homo sapiens
aatctggttgaatttctcatatctct

SEQ ID NO: 95512 - DNA, 26 bp, Homo sapiens
atctggttgaatttctcatatctctc

SEQ ID NO: 95513 - DNA, 26 bp, Homo sapiens
tctggttgaatttctcatatctctct

SEQ ID NO: 95514 - DNA, 26 bp, Homo sapiens
ctggttgaatttctcatatctctctg

SEQ ID NO: 95515 - DNA, 26 bp, Homo sapiens
tggttgaatttctcatatctctctgt

SEQ ID NO: 95516 - DNA, 26 bp, Homo sapiens
ggttgaatttctcatatctctctgtc

SEQ ID NO: 95517 - DNA, 26 bp, Homo sapiens
gttgaatttctcatatctctctgtct

SEQ ID NO: 95518 - DNA, 26 bp, Homo sapiens
ttgaatttctcatatctctctgtctg

SEQ ID NO: 95519 - DNA, 26 bp, Homo sapiens
tgaatttctcatatctctctgtctga

SEQ ID NO: 95520 - DNA, 26 bp, Homo sapiens
gaatttctcatatctctctgtctgat

SEQ ID NO: 95521 - DNA, 26 bp, Homo sapiens
aatttctcatatctctctgtctgatt

SEQ ID NO: 95522 - DNA, 26 bp, Homo sapiens
atttctcatatctctctgtctgattg

SEQ ID NO: 95523 - DNA, 26 bp, Homo sapiens
tttctcatatctctctgtctgattga

SEQ ID NO: 95524 - DNA, 26 bp, Homo sapiens
ttctcatatctctctgtctgattgac

SEQ ID NO: 95525 - DNA, 26 bp, Homo sapiens
tctcatatctctctgtctgattgact

SEQ ID NO: 95526 - DNA, 26 bp, Homo sapiens
ctcatatctctctgtctgattgactt

SEQ ID NO: 95527 - DNA, 26 bp, Homo sapiens
tcatatctctctgtctgattgacttg

SEQ ID NO: 95528 - DNA, 26 bp, Homo sapiens
catatctctctgtctgattgacttgt

SEQ ID NO: 95529 - DNA, 26 bp, Homo sapiens
atatctctctgtctgattgacttgtg

SEQ ID NO: 95530 - DNA, 26 bp, Homo sapiens
tatctctctgtctgattgacttgtgc

SEQ ID NO: 95531 - DNA, 26 bp, Homo sapiens
atctctctgtctgattgacttgtgca

SEQ ID NO: 95532 - DNA, 26 bp, Homo sapiens
tctctctgtctgattgacttgtgcac

SEQ ID NO: 95533 - DNA, 26 bp, Homo sapiens
ctctctgtctgattgacttgtgcacc

SEQ ID NO: 95534 - DNA, 26 bp, Homo sapiens
tctctgtctgattgacttgtgcacct

SEQ ID NO: 95535 - DNA, 26 bp, Homo sapiens
ctctgtctgattgacttgtgcacctt

SEQ ID NO: 95536 - DNA, 26 bp, Homo sapiens
tctgtctgattgacttgtgcaccttt

SEQ ID NO: 95537 - DNA, 26 bp, Homo sapiens
ctgtctgattgacttgtgcacctttg

SEQ ID NO: 95538 - DNA, 26 bp, Homo sapiens
tgtctgattgacttgtgcacctttgc

SEQ ID NO: 95539 - DNA, 26 bp, Homo sapiens
gtctgattgacttgtgcacctttgct

SEQ ID NO: 95540 - DNA, 26 bp, Homo sapiens
tctgattgacttgtgcacctttgctg

SEQ ID NO: 95541 - DNA, 26 bp, Homo sapiens
ctgattgacttgtgcacctttgctgc

SEQ ID NO: 95542 - DNA, 26 bp, Homo sapiens
tgattgacttgtgcacctttgctgcc

SEQ ID NO: 95543 - DNA, 26 bp, Homo sapiens
gattgacttgtgcacctttgctgccc

SEQ ID NO: 95544 - DNA, 26 bp, Homo sapiens
attgacttgtgcacctttgctgcccc

SEQ ID NO: 95545 - DNA, 26 bp, Homo sapiens
ttgacttgtgcacctttgctgcccca

SEQ ID NO: 95546 - DNA, 26 bp, Homo sapiens
tgacttgtgcacctttgctgccccat

SEQ ID NO: 95547 - DNA, 26 bp, Homo sapiens
gacttgtgcacctttgctgccccata

SEQ ID NO: 95548 - DNA, 26 bp, Homo sapiens
acttgtgcacctttgctgccccatag

SEQ ID NO: 95549 - DNA, 26 bp, Homo sapiens
cttgtgcacctttgctgccccatagc

SEQ ID NO: 95550 - DNA, 26 bp, Homo sapiens
ttgtgcacctttgctgccccatagca

SEQ ID NO: 95551 - DNA, 26 bp, Homo sapiens
tgtgcacctttgctgccccatagcaa

SEQ ID NO: 95552 - DNA, 26 bp, Homo sapiens
gtgcacctttgctgccccatagcaat

SEQ ID NO: 95553 - DNA, 26 bp, Homo sapiens
tgcacctttgctgccccatagcaatc

SEQ ID NO: 95554 - DNA, 26 bp, Homo sapiens
gcacctttgctgccccatagcaatcg

SEQ ID NO: 95555 - DNA, 26 bp, Homo sapiens
cacctttgctgccccatagcaatcgc

SEQ ID NO: 95556 - DNA, 26 bp, Homo sapiens
acctttgctgccccatagcaatcgca

SEQ ID NO: 95557 - DNA, 26 bp, Homo sapiens
cctttgctgccccatagcaatcgcat

SEQ ID NO: 95558 - DNA, 26 bp, Homo sapiens
ctttgctgccccatagcaatcgcatt

SEQ ID NO: 95559 - DNA, 26 bp, Homo sapiens
tttgctgccccatagcaatcgcattt

SEQ ID NO: 95560 - DNA, 26 bp, Homo sapiens
ttgctgccccatagcaatcgcatttg

SEQ ID NO: 95561 - DNA, 26 bp, Homo sapiens
tgctgccccatagcaatcgcatttga

SEQ ID NO: 95562 - DNA, 26 bp, Homo sapiens
gctgccccatagcaatcgcatttgaa

SEQ ID NO: 95563 - DNA, 26 bp, Homo sapiens
ctgccccatagcaatcgcatttgaaa

SEQ ID NO: 95564 - DNA, 26 bp, Homo sapiens
tgccccatagcaatcgcatttgaaat

SEQ ID NO: 95565 - DNA, 26 bp, Homo sapiens
gccccatagcaatcgcatttgaaatt

SEQ ID NO: 95566 - DNA, 26 bp, Homo sapiens
ccccatagcaatcgcatttgaaattc

SEQ ID NO: 95567 - DNA, 26 bp, Homo sapiens
cccatagcaatcgcatttgaaattca

SEQ ID NO: 95568 - DNA, 26 bp, Homo sapiens
ccatagcaatcgcatttgaaattcag

SEQ ID NO: 95569 - DNA, 26 bp, Homo sapiens
catagcaatcgcatttgaaattcagt

SEQ ID NO: 95570 - DNA, 26 bp, Homo sapiens
atagcaatcgcatttgaaattcagtc

SEQ ID NO: 95571 - DNA, 26 bp, Homo sapiens
tagcaatcgcatttgaaattcagtct

SEQ ID NO: 95572 - DNA, 26 bp, Homo sapiens
agcaatcgcatttgaaattcagtctt

SEQ ID NO: 95573 - DNA, 26 bp, Homo sapiens
gcaatcgcatttgaaattcagtcttg

SEQ ID NO: 95574 - DNA, 26 bp, Homo sapiens
caatcgcatttgaaattcagtcttgc

SEQ ID NO: 95575 - DNA, 26 bp, Homo sapiens
aatcgcatttgaaattcagtcttgca

SEQ ID NO: 95576 - DNA, 26 bp, Homo sapiens
atcgcatttgaaattcagtcttgcag

SEQ ID NO: 95577 - DNA, 26 bp, Homo sapiens
tcgcatttgaaattcagtcttgcaga

SEQ ID NO: 95578 - DNA, 26 bp, Homo sapiens
cgcatttgaaattcagtcttgcagat

SEQ ID NO: 95579 - DNA, 26 bp, Homo sapiens
gcatttgaaattcagtcttgcagatt

SEQ ID NO: 95580 - DNA, 26 bp, Homo sapiens
catttgaaattcagtcttgcagattt

SEQ ID NO: 95581 - DNA, 26 bp, Homo sapiens
atttgaaattcagtcttgcagatttc

SEQ ID NO: 95582 - DNA, 26 bp, Homo sapiens
tttgaaattcagtcttgcagatttca

SEQ ID NO: 95583 - DNA, 26 bp, Homo sapiens
ttgaaattcagtcttgcagatttcat

SEQ ID NO: 95584 - DNA, 26 bp, Homo sapiens
tgaaattcagtcttgcagatttcatt

SEQ ID NO: 95585 - DNA, 26 bp, Homo sapiens
gaaattcagtcttgcagatttcattc

SEQ ID NO: 95586 - DNA, 26 bp, Homo sapiens
aaattcagtcttgcagatttcattca

SEQ ID NO: 95587 - DNA, 26 bp, Homo sapiens
aattcagtcttgcagatttcattcat

SEQ ID NO: 95588 - DNA, 26 bp, Homo sapiens
attcagtcttgcagatttcattcatt

SEQ ID NO: 95589 - DNA, 26 bp, Homo sapiens
ttcagtcttgcagatttcattcattt

SEQ ID NO: 95590 - DNA, 26 bp, Homo sapiens
tcagtcttgcagatttcattcatttc

SEQ ID NO: 95591 - DNA, 26 bp, Homo sapiens
cagtcttgcagatttcattcatttct

SEQ ID NO: 95592 - DNA, 26 bp, Homo sapiens
agtcttgcagatttcattcatttctt

SEQ ID NO: 95593 - DNA, 26 bp, Homo sapiens
gtcttgcagatttcattcatttcttc

SEQ ID NO: 95594 - DNA, 26 bp, Homo sapiens
tcttgcagatttcattcatttcttca

SEQ ID NO: 95595 - DNA, 26 bp, Homo sapiens
cttgcagatttcattcatttcttcat

SEQ ID NO: 95596 - DNA, 26 bp, Homo sapiens
ttgcagatttcattcatttcttcatc

SEQ ID NO: 95597 - DNA, 26 bp, Homo sapiens
tgcagatttcattcatttcttcatct

SEQ ID NO: 95598 - DNA, 26 bp, Homo sapiens
gcagatttcattcatttcttcatctg

SEQ ID NO: 95599 - DNA, 26 bp, Homo sapiens
cagatttcattcatttcttcatctgg

SEQ ID NO: 95600 - DNA, 26 bp, Homo sapiens
agatttcattcatttcttcatctggt

SEQ ID NO: 95601 - DNA, 26 bp, Homo sapiens
gatttcattcatttcttcatctggtt

SEQ ID NO: 95602 - DNA, 26 bp, Homo sapiens
atttcattcatttcttcatctggttg

SEQ ID NO: 95603 - DNA, 26 bp, Homo sapiens
tttcattcatttcttcatctggttga

SEQ ID NO: 95604 - DNA, 26 bp, Homo sapiens
ttcattcatttcttcatctggttgaa

SEQ ID NO: 95605 - DNA, 26 bp, Homo sapiens
tcattcatttcttcatctggttgaaa

SEQ ID NO: 95606 - DNA, 26 bp, Homo sapiens
cattcatttcttcatctggttgaaaa

SEQ ID NO: 95607 - DNA, 26 bp, Homo sapiens
attcatttcttcatctggttgaaaac

SEQ ID NO: 95608 - DNA, 26 bp, Homo sapiens
ttcatttcttcatctggttgaaaacc

SEQ ID NO: 95609 - DNA, 26 bp, Homo sapiens
tcatttcttcatctggttgaaaacct

SEQ ID NO: 95610 - DNA, 26 bp, Homo sapiens
catttcttcatctggttgaaaacctg

SEQ ID NO: 95611 - DNA, 26 bp, Homo sapiens
atttcttcatctggttgaaaacctgc

SEQ ID NO: 95612 - DNA, 26 bp, Homo sapiens
tttcttcatctggttgaaaacctgcc

SEQ ID NO: 95613 - DNA, 26 bp, Homo sapiens
ttcttcatctggttgaaaacctgcca

SEQ ID NO: 95614 - DNA, 26 bp, Homo sapiens
tcttcatctggttgaaaacctgccag

SEQ ID NO: 95615 - DNA, 26 bp, Homo sapiens
cttcatctggttgaaaacctgccagg

SEQ ID NO: 95616 - DNA, 26 bp, Homo sapiens
ttcatctggttgaaaacctgccagga

SEQ ID NO: 95617 - DNA, 26 bp, Homo sapiens
tcatctggttgaaaacctgccaggat

SEQ ID NO: 95618 - DNA, 26 bp, Homo sapiens
catctggttgaaaacctgccaggatc

SEQ ID NO: 95619 - DNA, 26 bp, Homo sapiens
atctggttgaaaacctgccaggatcc

SEQ ID NO: 95620 - DNA, 26 bp, Homo sapiens
tctggttgaaaacctgccaggatcct

SEQ ID NO: 95621 - DNA, 26 bp, Homo sapiens
ctggttgaaaacctgccaggatcctc

SEQ ID NO: 95622 - DNA, 26 bp, Homo sapiens
tggttgaaaacctgccaggatcctct

SEQ ID NO: 95623 - DNA, 26 bp, Homo sapiens
ggttgaaaacctgccaggatcctctc

SEQ ID NO: 95624 - DNA, 26 bp, Homo sapiens
gttgaaaacctgccaggatcctctca

SEQ ID NO: 95625 - DNA, 26 bp, Homo sapiens
ttgaaaacctgccaggatcctctcag

SEQ ID NO: 95626 - DNA, 26 bp, Homo sapiens
tgaaaacctgccaggatcctctcagc

SEQ ID NO: 95627 - DNA, 26 bp, Homo sapiens
gaaaacctgccaggatcctctcagca

SEQ ID NO: 95628 - DNA, 26 bp, Homo sapiens
aaaacctgccaggatcctctcagcat

SEQ ID NO: 95629 - DNA, 26 bp, Homo sapiens
aaacctgccaggatcctctcagcatt

SEQ ID NO: 95630 - DNA, 26 bp, Homo sapiens
aacctgccaggatcctctcagcattc

SEQ ID NO: 95631 - DNA, 26 bp, Homo sapiens
acctgccaggatcctctcagcattca

SEQ ID NO: 95632 - DNA, 26 bp, Homo sapiens
cctgccaggatcctctcagcattcat

SEQ ID NO: 95633 - DNA, 26 bp, Homo sapiens
ctgccaggatcctctcagcattcatc

SEQ ID NO: 95634 - DNA, 26 bp, Homo sapiens
tgccaggatcctctcagcattcatcc

SEQ ID NO: 95635 - DNA, 26 bp, Homo sapiens
gccaggatcctctcagcattcatccg

SEQ ID NO: 95636 - DNA, 26 bp, Homo sapiens
ccaggatcctctcagcattcatccgg

SEQ ID NO: 95637 - DNA, 26 bp, Homo sapiens
caggatcctctcagcattcatccggt

SEQ ID NO: 95638 - DNA, 26 bp, Homo sapiens
aggatcctctcagcattcatccggta

SEQ ID NO: 95639 - DNA, 26 bp, Homo sapiens
ggatcctctcagcattcatccggtag

SEQ ID NO: 95640 - DNA, 26 bp, Homo sapiens
gatcctctcagcattcatccggtagc

SEQ ID NO: 95641 - DNA, 26 bp, Homo sapiens
atcctctcagcattcatccggtagct

SEQ ID NO: 95642 - DNA, 26 bp, Homo sapiens
tcctctcagcattcatccggtagctg

SEQ ID NO: 95643 - DNA, 26 bp, Homo sapiens
cctctcagcattcatccggtagctgt

SEQ ID NO: 95644 - DNA, 26 bp, Homo sapiens
ctctcagcattcatccggtagctgtc

SEQ ID NO: 95645 - DNA, 26 bp, Homo sapiens
tctcagcattcatccggtagctgtct

SEQ ID NO: 95646 - DNA, 26 bp, Homo sapiens
ctcagcattcatccggtagctgtctg

SEQ ID NO: 95647 - DNA, 26 bp, Homo sapiens
tcagcattcatccggtagctgtctgc

SEQ ID NO: 95648 - DNA, 26 bp, Homo sapiens
cagcattcatccggtagctgtctgca

SEQ ID NO: 95649 - DNA, 26 bp, Homo sapiens
agcattcatccggtagctgtctgcag

SEQ ID NO: 95650 - DNA, 26 bp, Homo sapiens
gcattcatccggtagctgtctgcagc

SEQ ID NO: 95651 - DNA, 26 bp, Homo sapiens
cattcatccggtagctgtctgcagcc

SEQ ID NO: 95652 - DNA, 26 bp, Homo sapiens
attcatccggtagctgtctgcagcct

SEQ ID NO: 95653 - DNA, 26 bp, Homo sapiens
ttcatccggtagctgtctgcagcctc

SEQ ID NO: 95654 - DNA, 26 bp, Homo sapiens
tcatccggtagctgtctgcagcctcg

SEQ ID NO: 95655 - DNA, 26 bp, Homo sapiens
catccggtagctgtctgcagcctcgg

SEQ ID NO: 95656 - DNA, 26 bp, Homo sapiens
atccggtagctgtctgcagcctcggc

SEQ ID NO: 95657 - DNA, 26 bp, Homo sapiens
tccggtagctgtctgcagcctcggcc

SEQ ID NO: 95658 - DNA, 26 bp, Homo sapiens
ccggtagctgtctgcagcctcggcca

SEQ ID NO: 95659 - DNA, 26 bp, Homo sapiens
cggtagctgtctgcagcctcggccat

SEQ ID NO: 95660 - DNA, 26 bp, Homo sapiens
ggtagctgtctgcagcctcggccatg

SEQ ID NO: 95661 - DNA, 26 bp, Homo sapiens
gtagctgtctgcagcctcggccatga

SEQ ID NO: 95662 - DNA, 26 bp, Homo sapiens
tagctgtctgcagcctcggccatgaa

SEQ ID NO: 95663 - DNA, 26 bp, Homo sapiens
agctgtctgcagcctcggccatgaat

SEQ ID NO: 95664 - DNA, 26 bp, Homo sapiens
gctgtctgcagcctcggccatgaatc

SEQ ID NO: 95665 - DNA, 26 bp, Homo sapiens
ctgtctgcagcctcggccatgaatcg

SEQ ID NO: 95666 - DNA, 26 bp, Homo sapiens
tgtctgcagcctcggccatgaatcgc

SEQ ID NO: 95667 - DNA, 26 bp, Homo sapiens
gtctgcagcctcggccatgaatcgcg

SEQ ID NO: 95668 - DNA, 26 bp, Homo sapiens
tctgcagcctcggccatgaatcgcgc

SEQ ID NO: 95669 - DNA, 26 bp, Homo sapiens
ctgcagcctcggccatgaatcgcgct

SEQ ID NO: 95670 - DNA, 26 bp, Homo sapiens
tgcagcctcggccatgaatcgcgctg

SEQ ID NO: 95671 - DNA, 26 bp, Homo sapiens
gcagcctcggccatgaatcgcgctgt

SEQ ID NO: 95672 - DNA, 26 bp, Homo sapiens
cagcctcggccatgaatcgcgctgtt

SEQ ID NO: 95673 - DNA, 26 bp, Homo sapiens
agcctcggccatgaatcgcgctgttg

SEQ ID NO: 95674 - DNA, 26 bp, Homo sapiens
gcctcggccatgaatcgcgctgttgc

SEQ ID NO: 95675 - DNA, 26 bp, Homo sapiens
cctcggccatgaatcgcgctgttgcc

SEQ ID NO: 95676 - DNA, 26 bp, Homo sapiens
ctcggccatgaatcgcgctgttgcca

SEQ ID NO: 95677 - DNA, 26 bp, Homo sapiens
tcggccatgaatcgcgctgttgccaa

SEQ ID NO: 95678 - DNA, 26 bp, Homo sapiens
cggccatgaatcgcgctgttgccaaa

SEQ ID NO: 95679 - DNA, 26 bp, Homo sapiens
ggccatgaatcgcgctgttgccaaat

SEQ ID NO: 95680 - DNA, 26 bp, Homo sapiens
gccatgaatcgcgctgttgccaaatg

SEQ ID NO: 95681 - DNA, 26 bp, Homo sapiens
ccatgaatcgcgctgttgccaaatgg

SEQ ID NO: 95682 - DNA, 26 bp, Homo sapiens
catgaatcgcgctgttgccaaatggt

SEQ ID NO: 95683 - DNA, 26 bp, Homo sapiens
atgaatcgcgctgttgccaaatggtt

SEQ ID NO: 95684 - DNA, 26 bp, Homo sapiens
tgaatcgcgctgttgccaaatggttc

SEQ ID NO: 95685 - DNA, 26 bp, Homo sapiens
gaatcgcgctgttgccaaatggttca

SEQ ID NO: 95686 - DNA, 26 bp, Homo sapiens
aatcgcgctgttgccaaatggttcag

SEQ ID NO: 95687 - DNA, 26 bp, Homo sapiens
atcgcgctgttgccaaatggttcagc

SEQ ID NO: 95688 - DNA, 26 bp, Homo sapiens
tcgcgctgttgccaaatggttcagca

SEQ ID NO: 95689 - DNA, 26 bp, Homo sapiens
cgcgctgttgccaaatggttcagcat

SEQ ID NO: 95690 - DNA, 26 bp, Homo sapiens
gcgctgttgccaaatggttcagcatg

SEQ ID NO: 95691 - DNA, 26 bp, Homo sapiens
cgctgttgccaaatggttcagcatga

SEQ ID NO: 95692 - DNA, 26 bp, Homo sapiens
gctgttgccaaatggttcagcatgat

SEQ ID NO: 95693 - DNA, 26 bp, Homo sapiens
ctgttgccaaatggttcagcatgatt

SEQ ID NO: 95694 - DNA, 26 bp, Homo sapiens
tgttgccaaatggttcagcatgattt

SEQ ID NO: 95695 - DNA, 26 bp, Homo sapiens
gttgccaaatggttcagcatgatttc

SEQ ID NO: 95696 - DNA, 26 bp, Homo sapiens
ttgccaaatggttcagcatgatttca

SEQ ID NO: 95697 - DNA, 26 bp, Homo sapiens
tgccaaatggttcagcatgatttcac

SEQ ID NO: 95698 - DNA, 26 bp, Homo sapiens
gccaaatggttcagcatgatttcaca

SEQ ID NO: 95699 - DNA, 26 bp, Homo sapiens
ccaaatggttcagcatgatttcacag

SEQ ID NO: 95700 - DNA, 26 bp, Homo sapiens
caaatggttcagcatgatttcacagc

SEQ ID NO: 95701 - DNA, 26 bp, Homo sapiens
aaatggttcagcatgatttcacagct

SEQ ID NO: 95702 - DNA, 26 bp, Homo sapiens
aatggttcagcatgatttcacagctc

SEQ ID NO: 95703 - DNA, 26 bp, Homo sapiens
atggttcagcatgatttcacagctct

SEQ ID NO: 95704 - DNA, 26 bp, Homo sapiens
tggttcagcatgatttcacagctctg

SEQ ID NO: 95705 - DNA, 26 bp, Homo sapiens
ggttcagcatgatttcacagctctgg

SEQ ID NO: 95706 - DNA, 26 bp, Homo sapiens
gttcagcatgatttcacagctctggt

SEQ ID NO: 95707 - DNA, 26 bp, Homo sapiens
ttcagcatgatttcacagctctggtc

SEQ ID NO: 95708 - DNA, 26 bp, Homo sapiens
tcagcatgatttcacagctctggtcg

SEQ ID NO: 95709 - DNA, 26 bp, Homo sapiens
cagcatgatttcacagctctggtcgt

SEQ ID NO: 95710 - DNA, 26 bp, Homo sapiens
agcatgatttcacagctctggtcgtt

SEQ ID NO: 95711 - DNA, 26 bp, Homo sapiens
gcatgatttcacagctctggtcgttt

SEQ ID NO: 95712 - DNA, 26 bp, Homo sapiens
catgatttcacagctctggtcgtttt

SEQ ID NO: 95713 - DNA, 26 bp, Homo sapiens
atgatttcacagctctggtcgttttt

SEQ ID NO: 95714 - DNA, 26 bp, Homo sapiens
tgatttcacagctctggtcgtttttt

SEQ ID NO: 95715 - DNA, 26 bp, Homo sapiens
gatttcacagctctggtcgttttttt

SEQ ID NO: 95716 - DNA, 26 bp, Homo sapiens
atttcacagctctggtcgtttttttc

SEQ ID NO: 95717 - DNA, 26 bp, Homo sapiens
tttcacagctctggtcgtttttttcc

SEQ ID NO: 95718 - DNA, 26 bp, Homo sapiens
ttcacagctctggtcgtttttttccc

SEQ ID NO: 95719 - DNA, 26 bp, Homo sapiens
tcacagctctggtcgtttttttccca

SEQ ID NO: 95720 - DNA, 26 bp, Homo sapiens
cacagctctggtcgtttttttcccac

SEQ ID NO: 95721 - DNA, 26 bp, Homo sapiens
acagctctggtcgtttttttcccaca

SEQ ID NO: 95722 - DNA, 26 bp, Homo sapiens
cagctctggtcgtttttttcccacat

SEQ ID NO: 95723 - DNA, 26 bp, Homo sapiens
agctctggtcgtttttttcccacatg

SEQ ID NO: 95724 - DNA, 26 bp, Homo sapiens
gctctggtcgtttttttcccacatgt

SEQ ID NO: 95725 - DNA, 26 bp, Homo sapiens
ctctggtcgtttttttcccacatgtc

SEQ ID NO: 95726 - DNA, 26 bp, Homo sapiens
tctggtcgtttttttcccacatgtcg

SEQ ID NO: 95727 - DNA, 26 bp, Homo sapiens
ctggtcgtttttttcccacatgtcgg

SEQ ID NO: 95728 - DNA, 26 bp, Homo sapiens
tggtcgtttttttcccacatgtcggt

SEQ ID NO: 95729 - DNA, 26 bp, Homo sapiens
ggtcgtttttttcccacatgtcggtt

SEQ ID NO: 95730 - DNA, 26 bp, Homo sapiens
gtcgtttttttcccacatgtcggttc

SEQ ID NO: 95731 - DNA, 26 bp, Homo sapiens
tcgtttttttcccacatgtcggttcc

SEQ ID NO: 95732 - DNA, 26 bp, Homo sapiens
cgtttttttcccacatgtcggttcct

SEQ ID NO: 95733 - DNA, 26 bp, Homo sapiens
gtttttttcccacatgtcggttcctt

SEQ ID NO: 95734 - DNA, 26 bp, Homo sapiens
tttttttcccacatgtcggttccttc

SEQ ID NO: 95735 - DNA, 26 bp, Homo sapiens
ttttttcccacatgtcggttccttca

SEQ ID NO: 95736 - DNA, 26 bp, Homo sapiens
tttttcccacatgtcggttccttcaa

SEQ ID NO: 95737 - DNA, 26 bp, Homo sapiens
ttttcccacatgtcggttccttcaaa

SEQ ID NO: 95738 - DNA, 26 bp, Homo sapiens
tttcccacatgtcggttccttcaaaa

SEQ ID NO: 95739 - DNA, 26 bp, Homo sapiens
ttcccacatgtcggttccttcaaaag

SEQ ID NO: 95740 - DNA, 26 bp, Homo sapiens
tcccacatgtcggttccttcaaaagt

SEQ ID NO: 95741 - DNA, 26 bp, Homo sapiens
cccacatgtcggttccttcaaaagtc

SEQ ID NO: 95742 - DNA, 26 bp, Homo sapiens
ccacatgtcggttccttcaaaagtca

SEQ ID NO: 95743 - DNA, 26 bp, Homo sapiens
cacatgtcggttccttcaaaagtcac

SEQ ID NO: 95744 - DNA, 26 bp, Homo sapiens
acatgtcggttccttcaaaagtcaca

SEQ ID NO: 95745 - DNA, 26 bp, Homo sapiens
catgtcggttccttcaaaagtcacag

SEQ ID NO: 95746 - DNA, 26 bp, Homo sapiens
atgtcggttccttcaaaagtcacagc

SEQ ID NO: 95747 - DNA, 26 bp, Homo sapiens
tgtcggttccttcaaaagtcacagcc

SEQ ID NO: 95748 - DNA, 26 bp, Homo sapiens
gtcggttccttcaaaagtcacagcct

SEQ ID NO: 95749 - DNA, 26 bp, Homo sapiens
tcggttccttcaaaagtcacagcctg

SEQ ID NO: 95750 - DNA, 26 bp, Homo sapiens
cggttccttcaaaagtcacagcctgg

SEQ ID NO: 95751 - DNA, 26 bp, Homo sapiens
ggttccttcaaaagtcacagcctggc

SEQ ID NO: 95752 - DNA, 26 bp, Homo sapiens
gttccttcaaaagtcacagcctggcg

SEQ ID NO: 95753 - DNA, 26 bp, Homo sapiens
ttccttcaaaagtcacagcctggcgc

SEQ ID NO: 95754 - DNA, 26 bp, Homo sapiens
tccttcaaaagtcacagcctggcgct

SEQ ID NO: 95755 - DNA, 26 bp, Homo sapiens
ccttcaaaagtcacagcctggcgctc

SEQ ID NO: 95756 - DNA, 26 bp, Homo sapiens
cttcaaaagtcacagcctggcgctcc

SEQ ID NO: 95757 - DNA, 26 bp, Homo sapiens
ttcaaaagtcacagcctggcgctcca

SEQ ID NO: 95758 - DNA, 26 bp, Homo sapiens
tcaaaagtcacagcctggcgctccat

SEQ ID NO: 95759 - DNA, 26 bp, Homo sapiens
caaaagtcacagcctggcgctccatt

SEQ ID NO: 95760 - DNA, 26 bp, Homo sapiens
aaaagtcacagcctggcgctccatta

SEQ ID NO: 95761 - DNA, 26 bp, Homo sapiens
aaagtcacagcctggcgctccattaa

SEQ ID NO: 95762 - DNA, 26 bp, Homo sapiens
aagtcacagcctggcgctccattaac

SEQ ID NO: 95763 - DNA, 26 bp, Homo sapiens
agtcacagcctggcgctccattaacg

SEQ ID NO: 95764 - DNA, 26 bp, Homo sapiens
gtcacagcctggcgctccattaacgt

SEQ ID NO: 95765 - DNA, 26 bp, Homo sapiens
tcacagcctggcgctccattaacgtc

SEQ ID NO: 95766 - DNA, 26 bp, Homo sapiens
cacagcctggcgctccattaacgtca

SEQ ID NO: 95767 - DNA, 26 bp, Homo sapiens
acagcctggcgctccattaacgtcac

SEQ ID NO: 95768 - DNA, 26 bp, Homo sapiens
cagcctggcgctccattaacgtcaca

SEQ ID NO: 95769 - DNA, 26 bp, Homo sapiens
agcctggcgctccattaacgtcacaa

SEQ ID NO: 95770 - DNA, 26 bp, Homo sapiens
gcctggcgctccattaacgtcacaag

SEQ ID NO: 95771 - DNA, 26 bp, Homo sapiens
cctggcgctccattaacgtcacaagc

SEQ ID NO: 95772 - DNA, 26 bp, Homo sapiens
ctggcgctccattaacgtcacaagcg

SEQ ID NO: 95773 - DNA, 26 bp, Homo sapiens
tggcgctccattaacgtcacaagcgg

SEQ ID NO: 95774 - DNA, 26 bp, Homo sapiens
ggcgctccattaacgtcacaagcggc

SEQ ID NO: 95775 - DNA, 26 bp, Homo sapiens
gcgctccattaacgtcacaagcggca

SEQ ID NO: 95776 - DNA, 26 bp, Homo sapiens
cgctccattaacgtcacaagcggcat

SEQ ID NO: 95777 - DNA, 26 bp, Homo sapiens
gctccattaacgtcacaagcggcatc

SEQ ID NO: 95778 - DNA, 26 bp, Homo sapiens
ctccattaacgtcacaagcggcatca

SEQ ID NO: 95779 - DNA, 26 bp, Homo sapiens
tccattaacgtcacaagcggcatcag

SEQ ID NO: 95780 - DNA, 26 bp, Homo sapiens
ccattaacgtcacaagcggcatcagc

SEQ ID NO: 95781 - DNA, 26 bp, Homo sapiens
cattaacgtcacaagcggcatcagca

SEQ ID NO: 95782 - DNA, 26 bp, Homo sapiens
attaacgtcacaagcggcatcagcag

SEQ ID NO: 95783 - DNA, 26 bp, Homo sapiens
ttaacgtcacaagcggcatcagcagt

SEQ ID NO: 95784 - DNA, 26 bp, Homo sapiens
taacgtcacaagcggcatcagcagtg

SEQ ID NO: 95785 - DNA, 26 bp, Homo sapiens
aacgtcacaagcggcatcagcagtgg

SEQ ID NO: 95786 - DNA, 26 bp, Homo sapiens
acgtcacaagcggcatcagcagtggg

SEQ ID NO: 95787 - DNA, 26 bp, Homo sapiens
cgtcacaagcggcatcagcagtggga

SEQ ID NO: 95788 - DNA, 26 bp, Homo sapiens
gtcacaagcggcatcagcagtgggac

SEQ ID NO: 95789 - DNA, 26 bp, Homo sapiens
tcacaagcggcatcagcagtgggact

SEQ ID NO: 95790 - DNA, 26 bp, Homo sapiens
cacaagcggcatcagcagtgggactg

SEQ ID NO: 95791 - DNA, 26 bp, Homo sapiens
acaagcggcatcagcagtgggactga

SEQ ID NO: 95792 - DNA, 26 bp, Homo sapiens
caagcggcatcagcagtgggactgat

SEQ ID NO: 95793 - DNA, 26 bp, Homo sapiens
aagcggcatcagcagtgggactgata

SEQ ID NO: 95794 - DNA, 26 bp, Homo sapiens
agcggcatcagcagtgggactgatac

SEQ ID NO: 95795 - DNA, 26 bp, Homo sapiens
gcggcatcagcagtgggactgataca

SEQ ID NO: 95796 - DNA, 26 bp, Homo sapiens
cggcatcagcagtgggactgatacat

SEQ ID NO: 95797 - DNA, 26 bp, Homo sapiens
ggcatcagcagtgggactgatacatt

SEQ ID NO: 95798 - DNA, 26 bp, Homo sapiens
gcatcagcagtgggactgatacattg

SEQ ID NO: 95799 - DNA, 26 bp, Homo sapiens
catcagcagtgggactgatacattgt

SEQ ID NO: 95800 - DNA, 26 bp, Homo sapiens
atcagcagtgggactgatacattgtt

SEQ ID NO: 95801 - DNA, 26 bp, Homo sapiens
tcagcagtgggactgatacattgttt

SEQ ID NO: 95802 - DNA, 26 bp, Homo sapiens
cagcagtgggactgatacattgtttg

SEQ ID NO: 95803 - DNA, 26 bp, Homo sapiens
agcagtgggactgatacattgtttgg

SEQ ID NO: 95804 - DNA, 26 bp, Homo sapiens
gcagtgggactgatacattgtttggg

SEQ ID NO: 95805 - DNA, 26 bp, Homo sapiens
cagtgggactgatacattgtttgggg

SEQ ID NO: 95806 - DNA, 26 bp, Homo sapiens
agtgggactgatacattgtttggggg

SEQ ID NO: 95807 - DNA, 26 bp, Homo sapiens
gtgggactgatacattgtttggggga

SEQ ID NO: 95808 - DNA, 26 bp, Homo sapiens
tgggactgatacattgtttgggggaa

SEQ ID NO: 95809 - DNA, 26 bp, Homo sapiens
gggactgatacattgtttgggggaac

SEQ ID NO: 95810 - DNA, 26 bp, Homo sapiens
ggactgatacattgtttgggggaaca

SEQ ID NO: 95811 - DNA, 26 bp, Homo sapiens
gactgatacattgtttgggggaacac

SEQ ID NO: 95812 - DNA, 26 bp, Homo sapiens
actgatacattgtttgggggaacaca

SEQ ID NO: 95813 - DNA, 26 bp, Homo sapiens
ctgatacattgtttgggggaacacat

SEQ ID NO: 95814 - DNA, 26 bp, Homo sapiens
tgatacattgtttgggggaacacatg

SEQ ID NO: 95815 - DNA, 26 bp, Homo sapiens
gatacattgtttgggggaacacatgt

SEQ ID NO: 95816 - DNA, 26 bp, Homo sapiens
atacattgtttgggggaacacatgtg

SEQ ID NO: 95817 - DNA, 26 bp, Homo sapiens
tacattgtttgggggaacacatgtgg

SEQ ID NO: 95818 - DNA, 26 bp, Homo sapiens
acattgtttgggggaacacatgtgga

SEQ ID NO: 95819 - DNA, 26 bp, Homo sapiens
cattgtttgggggaacacatgtggac

SEQ ID NO: 95820 - DNA, 26 bp, Homo sapiens
attgtttgggggaacacatgtggact

SEQ ID NO: 95821 - DNA, 26 bp, Homo sapiens
ttgtttgggggaacacatgtggactc

SEQ ID NO: 95822 - DNA, 26 bp, Homo sapiens
tgtttgggggaacacatgtggactct

SEQ ID NO: 95823 - DNA, 26 bp, Homo sapiens
gtttgggggaacacatgtggactctc

SEQ ID NO: 95824 - DNA, 26 bp, Homo sapiens
tttgggggaacacatgtggactctct

SEQ ID NO: 95825 - DNA, 26 bp, Homo sapiens
ttgggggaacacatgtggactctctg

SEQ ID NO: 95826 - DNA, 26 bp, Homo sapiens
tgggggaacacatgtggactctctgc

SEQ ID NO: 95827 - DNA, 26 bp, Homo sapiens
gggggaacacatgtggactctctgcc

SEQ ID NO: 95828 - DNA, 26 bp, Homo sapiens
ggggaacacatgtggactctctgcct

SEQ ID NO: 95829 - DNA, 26 bp, Homo sapiens
gggaacacatgtggactctctgcctt

SEQ ID NO: 95830 - DNA, 26 bp, Homo sapiens
ggaacacatgtggactctctgccttc

SEQ ID NO: 95831 - DNA, 26 bp, Homo sapiens
gaacacatgtggactctctgccttca

SEQ ID NO: 95832 - DNA, 26 bp, Homo sapiens
aacacatgtggactctctgccttcat

SEQ ID NO: 95833 - DNA, 26 bp, Homo sapiens
acacatgtggactctctgccttcatg

SEQ ID NO: 95834 - DNA, 26 bp, Homo sapiens
cacatgtggactctctgccttcatgc

SEQ ID NO: 95835 - DNA, 26 bp, Homo sapiens
acatgtggactctctgccttcatgca

SEQ ID NO: 95836 - DNA, 26 bp, Homo sapiens
catgtggactctctgccttcatgcag

SEQ ID NO: 95837 - DNA, 26 bp, Homo sapiens
atgtggactctctgccttcatgcagg

SEQ ID NO: 95838 - DNA, 26 bp, Homo sapiens
tgtggactctctgccttcatgcagga

SEQ ID NO: 95839 - DNA, 26 bp, Homo sapiens
gtggactctctgccttcatgcaggag

SEQ ID NO: 95840 - DNA, 26 bp, Homo sapiens
tggactctctgccttcatgcaggagt

SEQ ID NO: 95841 - DNA, 26 bp, Homo sapiens
ggactctctgccttcatgcaggagtt

SEQ ID NO: 95842 - DNA, 26 bp, Homo sapiens
gactctctgccttcatgcaggagttt

SEQ ID NO: 95843 - DNA, 26 bp, Homo sapiens
actctctgccttcatgcaggagtttg

SEQ ID NO: 95844 - DNA, 26 bp, Homo sapiens
ctctctgccttcatgcaggagtttgc

SEQ ID NO: 95845 - DNA, 26 bp, Homo sapiens
tctctgccttcatgcaggagtttgct

SEQ ID NO: 95846 - DNA, 26 bp, Homo sapiens
ctctgccttcatgcaggagtttgctg

SEQ ID NO: 95847 - DNA, 26 bp, Homo sapiens
tctgccttcatgcaggagtttgctga

SEQ ID NO: 95848 - DNA, 26 bp, Homo sapiens
ctgccttcatgcaggagtttgctgaa

SEQ ID NO: 95849 - DNA, 26 bp, Homo sapiens
tgccttcatgcaggagtttgctgaag

SEQ ID NO: 95850 - DNA, 26 bp, Homo sapiens
gccttcatgcaggagtttgctgaagg

SEQ ID NO: 95851 - DNA, 26 bp, Homo sapiens
ccttcatgcaggagtttgctgaaggg

SEQ ID NO: 95852 - DNA, 26 bp, Homo sapiens
cttcatgcaggagtttgctgaagggc

SEQ ID NO: 95853 - DNA, 26 bp, Homo sapiens
ttcatgcaggagtttgctgaagggct

SEQ ID NO: 95854 - DNA, 26 bp, Homo sapiens
tcatgcaggagtttgctgaagggctt

SEQ ID NO: 95855 - DNA, 26 bp, Homo sapiens
catgcaggagtttgctgaagggcttc

SEQ ID NO: 95856 - DNA, 26 bp, Homo sapiens
atgcaggagtttgctgaagggcttca

SEQ ID NO: 95857 - DNA, 26 bp, Homo sapiens
tgcaggagtttgctgaagggcttcag

SEQ ID NO: 95858 - DNA, 26 bp, Homo sapiens
gcaggagtttgctgaagggcttcagc

SEQ ID NO: 95859 - DNA, 26 bp, Homo sapiens
caggagtttgctgaagggcttcagct

SEQ ID NO: 95860 - DNA, 26 bp, Homo sapiens
aggagtttgctgaagggcttcagctg

SEQ ID NO: 95861 - DNA, 26 bp, Homo sapiens
ggagtttgctgaagggcttcagctgt

SEQ ID NO: 95862 - DNA, 26 bp, Homo sapiens
gagtttgctgaagggcttcagctgtt

SEQ ID NO: 95863 - DNA, 26 bp, Homo sapiens
agtttgctgaagggcttcagctgttt

SEQ ID NO: 95864 - DNA, 26 bp, Homo sapiens
gtttgctgaagggcttcagctgtttc

SEQ ID NO: 95865 - DNA, 26 bp, Homo sapiens
tttgctgaagggcttcagctgtttct

SEQ ID NO: 95866 - DNA, 26 bp, Homo sapiens
ttgctgaagggcttcagctgtttctc

SEQ ID NO: 95867 - DNA, 26 bp, Homo sapiens
tgctgaagggcttcagctgtttctca

SEQ ID NO: 95868 - DNA, 26 bp, Homo sapiens
gctgaagggcttcagctgtttctcat

SEQ ID NO: 95869 - DNA, 26 bp, Homo sapiens
ctgaagggcttcagctgtttctcata

SEQ ID NO: 95870 - DNA, 26 bp, Homo sapiens
tgaagggcttcagctgtttctcatag

SEQ ID NO: 95871 - DNA, 26 bp, Homo sapiens
gaagggcttcagctgtttctcataga

SEQ ID NO: 95872 - DNA, 26 bp, Homo sapiens
aagggcttcagctgtttctcatagag

SEQ ID NO: 95873 - DNA, 26 bp, Homo sapiens
agggcttcagctgtttctcatagaga

SEQ ID NO: 95874 - DNA, 26 bp, Homo sapiens
gggcttcagctgtttctcatagagaa

SEQ ID NO: 95875 - DNA, 26 bp, Homo sapiens
ggcttcagctgtttctcatagagaat

SEQ ID NO: 95876 - DNA, 26 bp, Homo sapiens
gcttcagctgtttctcatagagaatg

SEQ ID NO: 95877 - DNA, 26 bp, Homo sapiens
cttcagctgtttctcatagagaatgg

SEQ ID NO: 95878 - DNA, 26 bp, Homo sapiens
ttcagctgtttctcatagagaatggc

SEQ ID NO: 95879 - DNA, 26 bp, Homo sapiens
tcagctgtttctcatagagaatggca

SEQ ID NO: 95880 - DNA, 26 bp, Homo sapiens
cagctgtttctcatagagaatggcag

SEQ ID NO: 95881 - DNA, 26 bp, Homo sapiens
agctgtttctcatagagaatggcagt

SEQ ID NO: 95882 - DNA, 26 bp, Homo sapiens
gctgtttctcatagagaatggcagtt

SEQ ID NO: 95883 - DNA, 26 bp, Homo sapiens
ctgtttctcatagagaatggcagttt

SEQ ID NO: 95884 - DNA, 26 bp, Homo sapiens
tgtttctcatagagaatggcagtttg

SEQ ID NO: 95885 - DNA, 26 bp, Homo sapiens
gtttctcatagagaatggcagtttgg

SEQ ID NO: 95886 - DNA, 26 bp, Homo sapiens
tttctcatagagaatggcagtttggg

SEQ ID NO: 95887 - DNA, 26 bp, Homo sapiens
ttctcatagagaatggcagtttgggt

SEQ ID NO: 95888 - DNA, 26 bp, Homo sapiens
tctcatagagaatggcagtttgggtg

SEQ ID NO: 95889 - DNA, 26 bp, Homo sapiens
ctcatagagaatggcagtttgggtgt

SEQ ID NO: 95890 - DNA, 26 bp, Homo sapiens
tcatagagaatggcagtttgggtgta

SEQ ID NO: 95891 - DNA, 26 bp, Homo sapiens
catagagaatggcagtttgggtgtac

SEQ ID NO: 95892 - DNA, 26 bp, Homo sapiens
atagagaatggcagtttgggtgtact

SEQ ID NO: 95893 - DNA, 26 bp, Homo sapiens
tagagaatggcagtttgggtgtactg

SEQ ID NO: 95894 - DNA, 26 bp, Homo sapiens
agagaatggcagtttgggtgtactgg

SEQ ID NO: 95895 - DNA, 26 bp, Homo sapiens
gagaatggcagtttgggtgtactggt

SEQ ID NO: 95896 - DNA, 26 bp, Homo sapiens
agaatggcagtttgggtgtactggtg

SEQ ID NO: 95897 - DNA, 26 bp, Homo sapiens
gaatggcagtttgggtgtactggtgc

SEQ ID NO: 95898 - DNA, 26 bp, Homo sapiens
aatggcagtttgggtgtactggtgcc

SEQ ID NO: 95899 - DNA, 26 bp, Homo sapiens
atggcagtttgggtgtactggtgccg

SEQ ID NO: 95900 - DNA, 26 bp, Homo sapiens
tggcagtttgggtgtactggtgccgc

SEQ ID NO: 95901 - DNA, 26 bp, Homo sapiens
ggcagtttgggtgtactggtgccgca

SEQ ID NO: 95902 - DNA, 26 bp, Homo sapiens
gcagtttgggtgtactggtgccgcag

SEQ ID NO: 95903 - DNA, 26 bp, Homo sapiens
cagtttgggtgtactggtgccgcaga

SEQ ID NO: 95904 - DNA, 26 bp, Homo sapiens
agtttgggtgtactggtgccgcagag

SEQ ID NO: 95905 - DNA, 26 bp, Homo sapiens
gtttgggtgtactggtgccgcagagc

SEQ ID NO: 95906 - DNA, 26 bp, Homo sapiens
tttgggtgtactggtgccgcagagca

SEQ ID NO: 95907 - DNA, 26 bp, Homo sapiens
ttgggtgtactggtgccgcagagcag

SEQ ID NO: 95908 - DNA, 26 bp, Homo sapiens
tgggtgtactggtgccgcagagcagt

SEQ ID NO: 95909 - DNA, 26 bp, Homo sapiens
gggtgtactggtgccgcagagcagtc

SEQ ID NO: 95910 - DNA, 26 bp, Homo sapiens
ggtgtactggtgccgcagagcagtcc

SEQ ID NO: 95911 - DNA, 26 bp, Homo sapiens
gtgtactggtgccgcagagcagtcca

SEQ ID NO: 95912 - DNA, 26 bp, Homo sapiens
tgtactggtgccgcagagcagtccac

SEQ ID NO: 95913 - DNA, 26 bp, Homo sapiens
gtactggtgccgcagagcagtccacg

SEQ ID NO: 95914 - DNA, 26 bp, Homo sapiens
tactggtgccgcagagcagtccacgt

SEQ ID NO: 95915 - DNA, 26 bp, Homo sapiens
actggtgccgcagagcagtccacgtc

SEQ ID NO: 95916 - DNA, 26 bp, Homo sapiens
ctggtgccgcagagcagtccacgtct

SEQ ID NO: 95917 - DNA, 26 bp, Homo sapiens
tggtgccgcagagcagtccacgtctt

SEQ ID NO: 95918 - DNA, 26 bp, Homo sapiens
ggtgccgcagagcagtccacgtcttt

SEQ ID NO: 95919 - DNA, 26 bp, Homo sapiens
gtgccgcagagcagtccacgtctttt

SEQ ID NO: 95920 - DNA, 26 bp, Homo sapiens
tgccgcagagcagtccacgtcttttc

SEQ ID NO: 95921 - DNA, 26 bp, Homo sapiens
gccgcagagcagtccacgtcttttct

SEQ ID NO: 95922 - DNA, 26 bp, Homo sapiens
ccgcagagcagtccacgtcttttcta

SEQ ID NO: 95923 - DNA, 26 bp, Homo sapiens
cgcagagcagtccacgtcttttctaa

SEQ ID NO: 95924 - DNA, 26 bp, Homo sapiens
gcagagcagtccacgtcttttctaac

SEQ ID NO: 95925 - DNA, 26 bp, Homo sapiens
cagagcagtccacgtcttttctaacc

SEQ ID NO: 95926 - DNA, 26 bp, Homo sapiens
agagcagtccacgtcttttctaacct

SEQ ID NO: 95927 - DNA, 26 bp, Homo sapiens
gagcagtccacgtcttttctaacctt

SEQ ID NO: 95928 - DNA, 26 bp, Homo sapiens
agcagtccacgtcttttctaaccttg

SEQ ID NO: 95929 - DNA, 26 bp, Homo sapiens
gcagtccacgtcttttctaaccttgt

SEQ ID NO: 95930 - DNA, 26 bp, Homo sapiens
cagtccacgtcttttctaaccttgtg

SEQ ID NO: 95931 - DNA, 26 bp, Homo sapiens
agtccacgtcttttctaaccttgtga

SEQ ID NO: 95932 - DNA, 26 bp, Homo sapiens
gtccacgtcttttctaaccttgtgat

SEQ ID NO: 95933 - DNA, 26 bp, Homo sapiens
tccacgtcttttctaaccttgtgatc

SEQ ID NO: 95934 - DNA, 26 bp, Homo sapiens
ccacgtcttttctaaccttgtgatct

SEQ ID NO: 95935 - DNA, 26 bp, Homo sapiens
cacgtcttttctaaccttgtgatctg

SEQ ID NO: 95936 - DNA, 26 bp, Homo sapiens
acgtcttttctaaccttgtgatctgt

SEQ ID NO: 95937 - DNA, 26 bp, Homo sapiens
cgtcttttctaaccttgtgatctgtg

SEQ ID NO: 95938 - DNA, 26 bp, Homo sapiens
gtcttttctaaccttgtgatctgtgg

SEQ ID NO: 95939 - DNA, 26 bp, Homo sapiens
tcttttctaaccttgtgatctgtggc

SEQ ID NO: 95940 - DNA, 26 bp, Homo sapiens
cttttctaaccttgtgatctgtggca

SEQ ID NO: 95941 - DNA, 26 bp, Homo sapiens
ttttctaaccttgtgatctgtggcat

SEQ ID NO: 95942 - DNA, 26 bp, Homo sapiens
tttctaaccttgtgatctgtggcatt

SEQ ID NO: 95943 - DNA, 26 bp, Homo sapiens
ttctaaccttgtgatctgtggcattt

SEQ ID NO: 95944 - DNA, 26 bp, Homo sapiens
tctaaccttgtgatctgtggcatttc

SEQ ID NO: 95945 - DNA, 26 bp, Homo sapiens
ctaaccttgtgatctgtggcatttcc

SEQ ID NO: 95946 - DNA, 26 bp, Homo sapiens
taaccttgtgatctgtggcatttcca

SEQ ID NO: 95947 - DNA, 26 bp, Homo sapiens
aaccttgtgatctgtggcatttccag

SEQ ID NO: 95948 - DNA, 26 bp, Homo sapiens
accttgtgatctgtggcatttccagg

SEQ ID NO: 95949 - DNA, 26 bp, Homo sapiens
ccttgtgatctgtggcatttccaggg

SEQ ID NO: 95950 - DNA, 26 bp, Homo sapiens
cttgtgatctgtggcatttccagggc

SEQ ID NO: 95951 - DNA, 26 bp, Homo sapiens
ttgtgatctgtggcatttccagggct

SEQ ID NO: 95952 - DNA, 26 bp, Homo sapiens
tgtgatctgtggcatttccagggctt

SEQ ID NO: 95953 - DNA, 26 bp, Homo sapiens
gtgatctgtggcatttccagggcttt

SEQ ID NO: 95954 - DNA, 26 bp, Homo sapiens
tgatctgtggcatttccagggctttc

SEQ ID NO: 95955 - DNA, 26 bp, Homo sapiens
gatctgtggcatttccagggctttca

SEQ ID NO: 95956 - DNA, 26 bp, Homo sapiens
atctgtggcatttccagggctttcat

SEQ ID NO: 95957 - DNA, 26 bp, Homo sapiens
tctgtggcatttccagggctttcatg

SEQ ID NO: 95958 - DNA, 26 bp, Homo sapiens
ctgtggcatttccagggctttcatga

SEQ ID NO: 95959 - DNA, 26 bp, Homo sapiens
tgtggcatttccagggctttcatgag

SEQ ID NO: 95960 - DNA, 26 bp, Homo sapiens
gtggcatttccagggctttcatgaga

SEQ ID NO: 95961 - DNA, 26 bp, Homo sapiens
tggcatttccagggctttcatgagag

SEQ ID NO: 95962 - DNA, 26 bp, Homo sapiens
ggcatttccagggctttcatgagagc

SEQ ID NO: 95963 - DNA, 26 bp, Homo sapiens
gcatttccagggctttcatgagagct

SEQ ID NO: 95964 - DNA, 26 bp, Homo sapiens
catttccagggctttcatgagagctg

SEQ ID NO: 95965 - DNA, 26 bp, Homo sapiens
atttccagggctttcatgagagctga

SEQ ID NO: 95966 - DNA, 26 bp, Homo sapiens
tttccagggctttcatgagagctgag

SEQ ID NO: 95967 - DNA, 26 bp, Homo sapiens
ttccagggctttcatgagagctgaga

SEQ ID NO: 95968 - DNA, 26 bp, Homo sapiens
tccagggctttcatgagagctgagaa

SEQ ID NO: 95969 - DNA, 26 bp, Homo sapiens
ccagggctttcatgagagctgagaag

SEQ ID NO: 95970 - DNA, 26 bp, Homo sapiens
cagggctttcatgagagctgagaagg

SEQ ID NO: 95971 - DNA, 26 bp, Homo sapiens
agggctttcatgagagctgagaagga

SEQ ID NO: 95972 - DNA, 26 bp, Homo sapiens
gggctttcatgagagctgagaaggaa

SEQ ID NO: 95973 - DNA, 26 bp, Homo sapiens
ggctttcatgagagctgagaaggaat

SEQ ID NO: 95974 - DNA, 26 bp, Homo sapiens
gctttcatgagagctgagaaggaata

SEQ ID NO: 95975 - DNA, 26 bp, Homo sapiens
ctttcatgagagctgagaaggaatag

SEQ ID NO: 95976 - DNA, 26 bp, Homo sapiens
tttcatgagagctgagaaggaataga

SEQ ID NO: 95977 - DNA, 26 bp, Homo sapiens
ttcatgagagctgagaaggaatagag

SEQ ID NO: 95978 - DNA, 26 bp, Homo sapiens
tcatgagagctgagaaggaatagagg

SEQ ID NO: 95979 - DNA, 26 bp, Homo sapiens
catgagagctgagaaggaatagaggt

SEQ ID NO: 95980 - DNA, 26 bp, Homo sapiens
atgagagctgagaaggaatagaggtc

SEQ ID NO: 95981 - DNA, 26 bp, Homo sapiens
tgagagctgagaaggaatagaggtcc

SEQ ID NO: 95982 - DNA, 26 bp, Homo sapiens
gagagctgagaaggaatagaggtccc

SEQ ID NO: 95983 - DNA, 26 bp, Homo sapiens
agagctgagaaggaatagaggtcccc

SEQ ID NO: 95984 - DNA, 26 bp, Homo sapiens
gagctgagaaggaatagaggtccccc

SEQ ID NO: 95985 - DNA, 26 bp, Homo sapiens
agctgagaaggaatagaggtccccca

SEQ ID NO: 95986 - DNA, 26 bp, Homo sapiens
gctgagaaggaatagaggtcccccat

SEQ ID NO: 95987 - DNA, 26 bp, Homo sapiens
ctgagaaggaatagaggtcccccatg

SEQ ID NO: 95988 - DNA, 26 bp, Homo sapiens
tgagaaggaatagaggtcccccatgg

SEQ ID NO: 95989 - DNA, 26 bp, Homo sapiens
gagaaggaatagaggtcccccatgga

SEQ ID NO: 95990 - DNA, 26 bp, Homo sapiens
agaaggaatagaggtcccccatggaa

SEQ ID NO: 95991 - DNA, 26 bp, Homo sapiens
gaaggaatagaggtcccccatggaat

SEQ ID NO: 95992 - DNA, 26 bp, Homo sapiens
aaggaatagaggtcccccatggaatc

SEQ ID NO: 95993 - DNA, 26 bp, Homo sapiens
aggaatagaggtcccccatggaatcc

SEQ ID NO: 95994 - DNA, 26 bp, Homo sapiens
ggaatagaggtcccccatggaatcct

SEQ ID NO: 95995 - DNA, 26 bp, Homo sapiens
gaatagaggtcccccatggaatcctt

SEQ ID NO: 95996 - DNA, 26 bp, Homo sapiens
aatagaggtcccccatggaatccttc

SEQ ID NO: 95997 - DNA, 26 bp, Homo sapiens
atagaggtcccccatggaatccttca

SEQ ID NO: 95998 - DNA, 26 bp, Homo sapiens
tagaggtcccccatggaatccttcag

SEQ ID NO: 95999 - DNA, 26 bp, Homo sapiens
agaggtcccccatggaatccttcagt

SEQ ID NO: 96000 - DNA, 26 bp, Homo sapiens
gaggtcccccatggaatccttcagtt

SEQ ID NO: 96001 - DNA, 26 bp, Homo sapiens
aggtcccccatggaatccttcagttc

SEQ ID NO: 96002 - DNA, 26 bp, Homo sapiens
ggtcccccatggaatccttcagttcc

SEQ ID NO: 96003 - DNA, 26 bp, Homo sapiens
gtcccccatggaatccttcagttcca

SEQ ID NO: 96004 - DNA, 26 bp, Homo sapiens
tcccccatggaatccttcagttccac

SEQ ID NO: 96005 - DNA, 26 bp, Homo sapiens
cccccatggaatccttcagttccacc

SEQ ID NO: 96006 - DNA, 26 bp, Homo sapiens
ccccatggaatccttcagttccaccg

SEQ ID NO: 96007 - DNA, 26 bp, Homo sapiens
cccatggaatccttcagttccaccgc

SEQ ID NO: 96008 - DNA, 26 bp, Homo sapiens
ccatggaatccttcagttccaccgcc

SEQ ID NO: 96009 - DNA, 26 bp, Homo sapiens
catggaatccttcagttccaccgcca

SEQ ID NO: 96010 - DNA, 26 bp, Homo sapiens
atggaatccttcagttccaccgccac

SEQ ID NO: 96011 - DNA, 26 bp, Homo sapiens
tggaatccttcagttccaccgccacc

SEQ ID NO: 96012 - DNA, 26 bp, Homo sapiens
ggaatccttcagttccaccgccacct

SEQ ID NO: 96013 - DNA, 26 bp, Homo sapiens
gaatccttcagttccaccgccacctg

SEQ ID NO: 96014 - DNA, 26 bp, Homo sapiens
aatccttcagttccaccgccacctgg

SEQ ID NO: 96015 - DNA, 26 bp, Homo sapiens
atccttcagttccaccgccacctgga

SEQ ID NO: 96016 - DNA, 26 bp, Homo sapiens
tccttcagttccaccgccacctggat

SEQ ID NO: 96017 - DNA, 26 bp, Homo sapiens
ccttcagttccaccgccacctggatg

SEQ ID NO: 96018 - DNA, 26 bp, Homo sapiens
cttcagttccaccgccacctggatga

SEQ ID NO: 96019 - DNA, 26 bp, Homo sapiens
ttcagttccaccgccacctggatgat

SEQ ID NO: 96020 - DNA, 26 bp, Homo sapiens
tcagttccaccgccacctggatgatc

SEQ ID NO: 96021 - DNA, 26 bp, Homo sapiens
cagttccaccgccacctggatgatct

SEQ ID NO: 96022 - DNA, 26 bp, Homo sapiens
agttccaccgccacctggatgatctt

SEQ ID NO: 96023 - DNA, 26 bp, Homo sapiens
gttccaccgccacctggatgatctta

SEQ ID NO: 96024 - DNA, 26 bp, Homo sapiens
ttccaccgccacctggatgatcttac

SEQ ID NO: 96025 - DNA, 26 bp, Homo sapiens
tccaccgccacctggatgatcttact

SEQ ID NO: 96026 - DNA, 26 bp, Homo sapiens
ccaccgccacctggatgatcttactc

SEQ ID NO: 96027 - DNA, 26 bp, Homo sapiens
caccgccacctggatgatcttactca

SEQ ID NO: 96028 - DNA, 26 bp, Homo sapiens
accgccacctggatgatcttactcag

SEQ ID NO: 96029 - DNA, 26 bp, Homo sapiens
ccgccacctggatgatcttactcaga

SEQ ID NO: 96030 - DNA, 26 bp, Homo sapiens
cgccacctggatgatcttactcagag

SEQ ID NO: 96031 - DNA, 26 bp, Homo sapiens
gccacctggatgatcttactcagagt

SEQ ID NO: 96032 - DNA, 26 bp, Homo sapiens
ccacctggatgatcttactcagagtg

SEQ ID NO: 96033 - DNA, 26 bp, Homo sapiens
cacctggatgatcttactcagagtgg

SEQ ID NO: 96034 - DNA, 26 bp, Homo sapiens
acctggatgatcttactcagagtggc

SEQ ID NO: 96035 - DNA, 26 bp, Homo sapiens
cctggatgatcttactcagagtggcc

SEQ ID NO: 96036 - DNA, 26 bp, Homo sapiens
ctggatgatcttactcagagtggccg

SEQ ID NO: 96037 - DNA, 26 bp, Homo sapiens
tggatgatcttactcagagtggccgc

SEQ ID NO: 96038 - DNA, 26 bp, Homo sapiens
ggatgatcttactcagagtggccgct

SEQ ID NO: 96039 - DNA, 26 bp, Homo sapiens
gatgatcttactcagagtggccgctc

SEQ ID NO: 96040 - DNA, 26 bp, Homo sapiens
atgatcttactcagagtggccgctcg

SEQ ID NO: 96041 - DNA, 26 bp, Homo sapiens
tgatcttactcagagtggccgctcgg

SEQ ID NO: 96042 - DNA, 26 bp, Homo sapiens
gatcttactcagagtggccgctcggt

SEQ ID NO: 96043 - DNA, 26 bp, Homo sapiens
atcttactcagagtggccgctcggtc

SEQ ID NO: 96044 - DNA, 26 bp, Homo sapiens
tcttactcagagtggccgctcggtcc

SEQ ID NO: 96045 - DNA, 26 bp, Homo sapiens
cttactcagagtggccgctcggtcct

SEQ ID NO: 96046 - DNA, 26 bp, Homo sapiens
ttactcagagtggccgctcggtcctc

SEQ ID NO: 96047 - DNA, 26 bp, Homo sapiens
tactcagagtggccgctcggtcctcc

SEQ ID NO: 96048 - DNA, 26 bp, Homo sapiens
actcagagtggccgctcggtcctcca

SEQ ID NO: 96049 - DNA, 26 bp, Homo sapiens
ctcagagtggccgctcggtcctccaa

SEQ ID NO: 96050 - DNA, 26 bp, Homo sapiens
tcagagtggccgctcggtcctccaaa

SEQ ID NO: 96051 - DNA, 26 bp, Homo sapiens
cagagtggccgctcggtcctccaaag

SEQ ID NO: 96052 - DNA, 26 bp, Homo sapiens
agagtggccgctcggtcctccaaagt

SEQ ID NO: 96053 - DNA, 26 bp, Homo sapiens
gagtggccgctcggtcctccaaagtg

SEQ ID NO: 96054 - DNA, 26 bp, Homo sapiens
agtggccgctcggtcctccaaagtgc

SEQ ID NO: 96055 - DNA, 26 bp, Homo sapiens
gtggccgctcggtcctccaaagtgcc

SEQ ID NO: 96056 - DNA, 26 bp, Homo sapiens
tggccgctcggtcctccaaagtgccc

SEQ ID NO: 96057 - DNA, 26 bp, Homo sapiens
ggccgctcggtcctccaaagtgcccg

SEQ ID NO: 96058 - DNA, 26 bp, Homo sapiens
gccgctcggtcctccaaagtgcccgt

SEQ ID NO: 96059 - DNA, 26 bp, Homo sapiens
ccgctcggtcctccaaagtgcccgtg

SEQ ID NO: 96060 - DNA, 26 bp, Homo sapiens
cgctcggtcctccaaagtgcccgtgc

SEQ ID NO: 96061 - DNA, 26 bp, Homo sapiens
gctcggtcctccaaagtgcccgtgca

SEQ ID NO: 96062 - DNA, 26 bp, Homo sapiens
ctcggtcctccaaagtgcccgtgcat

SEQ ID NO: 96063 - DNA, 26 bp, Homo sapiens
tcggtcctccaaagtgcccgtgcatc

SEQ ID NO: 96064 - DNA, 26 bp, Homo sapiens
cggtcctccaaagtgcccgtgcatcc

SEQ ID NO: 96065 - DNA, 26 bp, Homo sapiens
ggtcctccaaagtgcccgtgcatccc

SEQ ID NO: 96066 - DNA, 26 bp, Homo sapiens
gtcctccaaagtgcccgtgcatccca

SEQ ID NO: 96067 - DNA, 26 bp, Homo sapiens
tcctccaaagtgcccgtgcatcccag

SEQ ID NO: 96068 - DNA, 26 bp, Homo sapiens
cctccaaagtgcccgtgcatcccaga

SEQ ID NO: 96069 - DNA, 26 bp, Homo sapiens
ctccaaagtgcccgtgcatcccagaa

SEQ ID NO: 96070 - DNA, 26 bp, Homo sapiens
tccaaagtgcccgtgcatcccagaat

SEQ ID NO: 96071 - DNA, 26 bp, Homo sapiens
ccaaagtgcccgtgcatcccagaatg

SEQ ID NO: 96072 - DNA, 26 bp, Homo sapiens
caaagtgcccgtgcatcccagaatgt

SEQ ID NO: 96073 - DNA, 26 bp, Homo sapiens
aaagtgcccgtgcatcccagaatgtc

SEQ ID NO: 96074 - DNA, 26 bp, Homo sapiens
aagtgcccgtgcatcccagaatgtcc

SEQ ID NO: 96075 - DNA, 26 bp, Homo sapiens
agtgcccgtgcatcccagaatgtcca

SEQ ID NO: 96076 - DNA, 26 bp, Homo sapiens
gtgcccgtgcatcccagaatgtccac

SEQ ID NO: 96077 - DNA, 26 bp, Homo sapiens
tgcccgtgcatcccagaatgtccact

SEQ ID NO: 96078 - DNA, 26 bp, Homo sapiens
gcccgtgcatcccagaatgtccactg

SEQ ID NO: 96079 - DNA, 26 bp, Homo sapiens
cccgtgcatcccagaatgtccactgc

SEQ ID NO: 96080 - DNA, 26 bp, Homo sapiens
ccgtgcatcccagaatgtccactgca

SEQ ID NO: 96081 - DNA, 26 bp, Homo sapiens
cgtgcatcccagaatgtccactgcaa

SEQ ID NO: 96082 - DNA, 26 bp, Homo sapiens
gtgcatcccagaatgtccactgcaat

SEQ ID NO: 96083 - DNA, 26 bp, Homo sapiens
tgcatcccagaatgtccactgcaatg

SEQ ID NO: 96084 - DNA, 26 bp, Homo sapiens
gcatcccagaatgtccactgcaatgc

SEQ ID NO: 96085 - DNA, 26 bp, Homo sapiens
catcccagaatgtccactgcaatgcc

SEQ ID NO: 96086 - DNA, 26 bp, Homo sapiens
atcccagaatgtccactgcaatgccg

SEQ ID NO: 96087 - DNA, 26 bp, Homo sapiens
tcccagaatgtccactgcaatgccga

SEQ ID NO: 96088 - DNA, 26 bp, Homo sapiens
cccagaatgtccactgcaatgccgat

SEQ ID NO: 96089 - DNA, 26 bp, Homo sapiens
ccagaatgtccactgcaatgccgatg

SEQ ID NO: 96090 - DNA, 26 bp, Homo sapiens
cagaatgtccactgcaatgccgatgg

SEQ ID NO: 96091 - DNA, 26 bp, Homo sapiens
agaatgtccactgcaatgccgatggc

SEQ ID NO: 96092 - DNA, 26 bp, Homo sapiens
gaatgtccactgcaatgccgatggcc

SEQ ID NO: 96093 - DNA, 26 bp, Homo sapiens
aatgtccactgcaatgccgatggcca

SEQ ID NO: 96094 - DNA, 26 bp, Homo sapiens
atgtccactgcaatgccgatggccat

SEQ ID NO: 96095 - DNA, 26 bp, Homo sapiens
tgtccactgcaatgccgatggccatt

SEQ ID NO: 96096 - DNA, 26 bp, Homo sapiens
gtccactgcaatgccgatggccattg

SEQ ID NO: 96097 - DNA, 26 bp, Homo sapiens
tccactgcaatgccgatggccattgt

SEQ ID NO: 96098 - DNA, 26 bp, Homo sapiens
ccactgcaatgccgatggccattgtg

SEQ ID NO: 96099 - DNA, 26 bp, Homo sapiens
cactgcaatgccgatggccattgtgt

SEQ ID NO: 96100 - DNA, 26 bp, Homo sapiens
actgcaatgccgatggccattgtgtt

SEQ ID NO: 96101 - DNA, 26 bp, Homo sapiens
ctgcaatgccgatggccattgtgttg

SEQ ID NO: 96102 - DNA, 26 bp, Homo sapiens
tgcaatgccgatggccattgtgttgt

SEQ ID NO: 96103 - DNA, 26 bp, Homo sapiens
gcaatgccgatggccattgtgttgtg

SEQ ID NO: 96104 - DNA, 26 bp, Homo sapiens
caatgccgatggccattgtgttgtgt

SEQ ID NO: 96105 - DNA, 26 bp, Homo sapiens
aatgccgatggccattgtgttgtgtc

SEQ ID NO: 96106 - DNA, 26 bp, Homo sapiens
atgccgatggccattgtgttgtgtct

SEQ ID NO: 96107 - DNA, 26 bp, Homo sapiens
tgccgatggccattgtgttgtgtctt

SEQ ID NO: 96108 - DNA, 26 bp, Homo sapiens
gccgatggccattgtgttgtgtcttt

SEQ ID NO: 96109 - DNA, 26 bp, Homo sapiens
ccgatggccattgtgttgtgtctttc

SEQ ID NO: 96110 - DNA, 26 bp, Homo sapiens
cgatggccattgtgttgtgtctttca

SEQ ID NO: 96111 - DNA, 26 bp, Homo sapiens
gatggccattgtgttgtgtctttcaa

SEQ ID NO: 96112 - DNA, 26 bp, Homo sapiens
atggccattgtgttgtgtctttcaat

SEQ ID NO: 96113 - DNA, 26 bp, Homo sapiens
tggccattgtgttgtgtctttcaatt

SEQ ID NO: 96114 - DNA, 26 bp, Homo sapiens
ggccattgtgttgtgtctttcaatta

SEQ ID NO: 96115 - DNA, 26 bp, Homo sapiens
gccattgtgttgtgtctttcaattat

SEQ ID NO: 96116 - DNA, 26 bp, Homo sapiens
ccattgtgttgtgtctttcaattatg

SEQ ID NO: 96117 - DNA, 26 bp, Homo sapiens
cattgtgttgtgtctttcaattatgt

SEQ ID NO: 96118 - DNA, 26 bp, Homo sapiens
attgtgttgtgtctttcaattatgtc

SEQ ID NO: 96119 - DNA, 26 bp, Homo sapiens
ttgtgttgtgtctttcaattatgtcc

SEQ ID NO: 96120 - DNA, 26 bp, Homo sapiens
tgtgttgtgtctttcaattatgtcca

SEQ ID NO: 96121 - DNA, 26 bp, Homo sapiens
gtgttgtgtctttcaattatgtccag

SEQ ID NO: 96122 - DNA, 26 bp, Homo sapiens
tgttgtgtctttcaattatgtccagg

SEQ ID NO: 96123 - DNA, 26 bp, Homo sapiens
gttgtgtctttcaattatgtccaggc

SEQ ID NO: 96124 - DNA, 26 bp, Homo sapiens
ttgtgtctttcaattatgtccaggcg

SEQ ID NO: 96125 - DNA, 26 bp, Homo sapiens
tgtgtctttcaattatgtccaggcgc

SEQ ID NO: 96126 - DNA, 26 bp, Homo sapiens
gtgtctttcaattatgtccaggcgca

SEQ ID NO: 96127 - DNA, 26 bp, Homo sapiens
tgtctttcaattatgtccaggcgcag

SEQ ID NO: 96128 - DNA, 26 bp, Homo sapiens
gtctttcaattatgtccaggcgcagc

SEQ ID NO: 96129 - DNA, 26 bp, Homo sapiens
tctttcaattatgtccaggcgcagct

SEQ ID NO: 96130 - DNA, 26 bp, Homo sapiens
ctttcaattatgtccaggcgcagctg

SEQ ID NO: 96131 - DNA, 26 bp, Homo sapiens
tttcaattatgtccaggcgcagctgg

SEQ ID NO: 96132 - DNA, 26 bp, Homo sapiens
ttcaattatgtccaggcgcagctggt

SEQ ID NO: 96133 - DNA, 26 bp, Homo sapiens
tcaattatgtccaggcgcagctggtg

SEQ ID NO: 96134 - DNA, 26 bp, Homo sapiens
caattatgtccaggcgcagctggtgt

SEQ ID NO: 96135 - DNA, 26 bp, Homo sapiens
aattatgtccaggcgcagctggtgtc

SEQ ID NO: 96136 - DNA, 26 bp, Homo sapiens
attatgtccaggcgcagctggtgtcc

SEQ ID NO: 96137 - DNA, 26 bp, Homo sapiens
ttatgtccaggcgcagctggtgtccg

SEQ ID NO: 96138 - DNA, 26 bp, Homo sapiens
tatgtccaggcgcagctggtgtccgt

SEQ ID NO: 96139 - DNA, 26 bp, Homo sapiens
atgtccaggcgcagctggtgtccgtg

SEQ ID NO: 96140 - DNA, 26 bp, Homo sapiens
tgtccaggcgcagctggtgtccgtga

SEQ ID NO: 96141 - DNA, 26 bp, Homo sapiens
gtccaggcgcagctggtgtccgtgag

SEQ ID NO: 96142 - DNA, 26 bp, Homo sapiens
tccaggcgcagctggtgtccgtgagg

SEQ ID NO: 96143 - DNA, 26 bp, Homo sapiens
ccaggcgcagctggtgtccgtgaggc

SEQ ID NO: 96144 - DNA, 26 bp, Homo sapiens
caggcgcagctggtgtccgtgaggca

SEQ ID NO: 96145 - DNA, 26 bp, Homo sapiens
aggcgcagctggtgtccgtgaggcaa

SEQ ID NO: 96146 - DNA, 26 bp, Homo sapiens
ggcgcagctggtgtccgtgaggcaag

SEQ ID NO: 96147 - DNA, 26 bp, Homo sapiens
gcgcagctggtgtccgtgaggcaagg

SEQ ID NO: 96148 - DNA, 26 bp, Homo sapiens
cgcagctggtgtccgtgaggcaaggt

SEQ ID NO: 96149 - DNA, 26 bp, Homo sapiens
gcagctggtgtccgtgaggcaaggta

SEQ ID NO: 96150 - DNA, 26 bp, Homo sapiens
cagctggtgtccgtgaggcaaggtaa

SEQ ID NO: 96151 - DNA, 26 bp, Homo sapiens
agctggtgtccgtgaggcaaggtaat

SEQ ID NO: 96152 - DNA, 26 bp, Homo sapiens
gctggtgtccgtgaggcaaggtaatg

SEQ ID NO: 96153 - DNA, 26 bp, Homo sapiens
ctggtgtccgtgaggcaaggtaatga

SEQ ID NO: 96154 - DNA, 26 bp, Homo sapiens
tggtgtccgtgaggcaaggtaatgag

SEQ ID NO: 96155 - DNA, 26 bp, Homo sapiens
ggtgtccgtgaggcaaggtaatgagt

SEQ ID NO: 96156 - DNA, 26 bp, Homo sapiens
gtgtccgtgaggcaaggtaatgagtt

SEQ ID NO: 96157 - DNA, 26 bp, Homo sapiens
tgtccgtgaggcaaggtaatgagttc

SEQ ID NO: 96158 - DNA, 26 bp, Homo sapiens
gtccgtgaggcaaggtaatgagttcc

SEQ ID NO: 96159 - DNA, 26 bp, Homo sapiens
tccgtgaggcaaggtaatgagttcca

SEQ ID NO: 96160 - DNA, 26 bp, Homo sapiens
ccgtgaggcaaggtaatgagttccag

SEQ ID NO: 96161 - DNA, 26 bp, Homo sapiens
cgtgaggcaaggtaatgagttccagg

SEQ ID NO: 96162 - DNA, 26 bp, Homo sapiens
gtgaggcaaggtaatgagttccaggc

SEQ ID NO: 96163 - DNA, 26 bp, Homo sapiens
tgaggcaaggtaatgagttccaggcc

SEQ ID NO: 96164 - DNA, 26 bp, Homo sapiens
gaggcaaggtaatgagttccaggcct

SEQ ID NO: 96165 - DNA, 26 bp, Homo sapiens
aggcaaggtaatgagttccaggcctg

SEQ ID NO: 96166 - DNA, 26 bp, Homo sapiens
ggcaaggtaatgagttccaggcctga

SEQ ID NO: 96167 - DNA, 26 bp, Homo sapiens
gcaaggtaatgagttccaggcctgag

SEQ ID NO: 96168 - DNA, 26 bp, Homo sapiens
caaggtaatgagttccaggcctgagc

SEQ ID NO: 96169 - DNA, 26 bp, Homo sapiens
aaggtaatgagttccaggcctgagct

SEQ ID NO: 96170 - DNA, 26 bp, Homo sapiens
aggtaatgagttccaggcctgagctc

SEQ ID NO: 96171 - DNA, 26 bp, Homo sapiens
ggtaatgagttccaggcctgagctca

SEQ ID NO: 96172 - DNA, 26 bp, Homo sapiens
gtaatgagttccaggcctgagctcac

SEQ ID NO: 96173 - DNA, 26 bp, Homo sapiens
taatgagttccaggcctgagctcacc

SEQ ID NO: 96174 - DNA, 26 bp, Homo sapiens
aatgagttccaggcctgagctcaccc

SEQ ID NO: 96175 - DNA, 26 bp, Homo sapiens
atgagttccaggcctgagctcacccc

SEQ ID NO: 96176 - DNA, 26 bp, Homo sapiens
tgagttccaggcctgagctcaccccc

SEQ ID NO: 96177 - DNA, 26 bp, Homo sapiens
gagttccaggcctgagctcaccccca

SEQ ID NO: 96178 - DNA, 26 bp, Homo sapiens
agttccaggcctgagctcacccccat

SEQ ID NO: 96179 - DNA, 26 bp, Homo sapiens
gttccaggcctgagctcacccccatg

SEQ ID NO: 96180 - DNA, 26 bp, Homo sapiens
ttccaggcctgagctcacccccatgt

SEQ ID NO: 96181 - DNA, 26 bp, Homo sapiens
tccaggcctgagctcacccccatgtt

SEQ ID NO: 96182 - DNA, 26 bp, Homo sapiens
ccaggcctgagctcacccccatgttc

SEQ ID NO: 96183 - DNA, 26 bp, Homo sapiens
caggcctgagctcacccccatgttcc

SEQ ID NO: 96184 - DNA, 26 bp, Homo sapiens
aggcctgagctcacccccatgttcct

SEQ ID NO: 96185 - DNA, 26 bp, Homo sapiens
ggcctgagctcacccccatgttcctc

SEQ ID NO: 96186 - DNA, 26 bp, Homo sapiens
gcctgagctcacccccatgttcctcc

SEQ ID NO: 96187 - DNA, 26 bp, Homo sapiens
cctgagctcacccccatgttcctcct

SEQ ID NO: 96188 - DNA, 26 bp, Homo sapiens
ctgagctcacccccatgttcctcctc

SEQ ID NO: 96189 - DNA, 26 bp, Homo sapiens
tgagctcacccccatgttcctcctca

SEQ ID NO: 96190 - DNA, 26 bp, Homo sapiens
gagctcacccccatgttcctcctcat

SEQ ID NO: 96191 - DNA, 26 bp, Homo sapiens
agctcacccccatgttcctcctcatc

SEQ ID NO: 96192 - DNA, 26 bp, Homo sapiens
gctcacccccatgttcctcctcatct

SEQ ID NO: 96193 - DNA, 26 bp, Homo sapiens
ctcacccccatgttcctcctcatctc

SEQ ID NO: 96194 - DNA, 26 bp, Homo sapiens
tcacccccatgttcctcctcatctct

SEQ ID NO: 96195 - DNA, 26 bp, Homo sapiens
cacccccatgttcctcctcatctctt

SEQ ID NO: 96196 - DNA, 26 bp, Homo sapiens
acccccatgttcctcctcatctcttc

SEQ ID NO: 96197 - DNA, 26 bp, Homo sapiens
cccccatgttcctcctcatctcttca

SEQ ID NO: 96198 - DNA, 26 bp, Homo sapiens
ccccatgttcctcctcatctcttcag

SEQ ID NO: 96199 - DNA, 26 bp, Homo sapiens
cccatgttcctcctcatctcttcaga

SEQ ID NO: 96200 - DNA, 26 bp, Homo sapiens
ccatgttcctcctcatctcttcagag

SEQ ID NO: 96201 - DNA, 26 bp, Homo sapiens
catgttcctcctcatctcttcagaga

SEQ ID NO: 96202 - DNA, 26 bp, Homo sapiens
atgttcctcctcatctcttcagagac

SEQ ID NO: 96203 - DNA, 26 bp, Homo sapiens
tgttcctcctcatctcttcagagact

SEQ ID NO: 96204 - DNA, 26 bp, Homo sapiens
gttcctcctcatctcttcagagactc

SEQ ID NO: 96205 - DNA, 26 bp, Homo sapiens
ttcctcctcatctcttcagagactcc

SEQ ID NO: 96206 - DNA, 26 bp, Homo sapiens
tcctcctcatctcttcagagactcca

SEQ ID NO: 96207 - DNA, 26 bp, Homo sapiens
cctcctcatctcttcagagactccaa

SEQ ID NO: 96208 - DNA, 26 bp, Homo sapiens
ctcctcatctcttcagagactccaag

SEQ ID NO: 96209 - DNA, 26 bp, Homo sapiens
tcctcatctcttcagagactccaagt

SEQ ID NO: 96210 - DNA, 26 bp, Homo sapiens
cctcatctcttcagagactccaagta

SEQ ID NO: 96211 - DNA, 26 bp, Homo sapiens
ctcatctcttcagagactccaagtat

SEQ ID NO: 96212 - DNA, 26 bp, Homo sapiens
tcatctcttcagagactccaagtatc

SEQ ID NO: 96213 - DNA, 26 bp, Homo sapiens
catctcttcagagactccaagtatcc

SEQ ID NO: 96214 - DNA, 26 bp, Homo sapiens
atctcttcagagactccaagtatcct

SEQ ID NO: 96215 - DNA, 26 bp, Homo sapiens
tctcttcagagactccaagtatccta

SEQ ID NO: 96216 - DNA, 26 bp, Homo sapiens
ctcttcagagactccaagtatcctag

SEQ ID NO: 96217 - DNA, 26 bp, Homo sapiens
tcttcagagactccaagtatcctagc

SEQ ID NO: 96218 - DNA, 26 bp, Homo sapiens
cttcagagactccaagtatcctagca

SEQ ID NO: 96219 - DNA, 26 bp, Homo sapiens
ttcagagactccaagtatcctagcaa

SEQ ID NO: 96220 - DNA, 26 bp, Homo sapiens
tcagagactccaagtatcctagcaac

SEQ ID NO: 96221 - DNA, 26 bp, Homo sapiens
cagagactccaagtatcctagcaacc

SEQ ID NO: 96222 - DNA, 26 bp, Homo sapiens
agagactccaagtatcctagcaaccc

SEQ ID NO: 96223 - DNA, 26 bp, Homo sapiens
gagactccaagtatcctagcaaccct

SEQ ID NO: 96224 - DNA, 26 bp, Homo sapiens
agactccaagtatcctagcaaccctg

SEQ ID NO: 96225 - DNA, 26 bp, Homo sapiens
gactccaagtatcctagcaaccctgc

SEQ ID NO: 96226 - DNA, 26 bp, Homo sapiens
actccaagtatcctagcaaccctgca

SEQ ID NO: 96227 - DNA, 26 bp, Homo sapiens
ctccaagtatcctagcaaccctgcag

SEQ ID NO: 96228 - DNA, 26 bp, Homo sapiens
tccaagtatcctagcaaccctgcagt

SEQ ID NO: 96229 - DNA, 26 bp, Homo sapiens
ccaagtatcctagcaaccctgcagtc

SEQ ID NO: 96230 - DNA, 26 bp, Homo sapiens
caagtatcctagcaaccctgcagtcc

SEQ ID NO: 96231 - DNA, 26 bp, Homo sapiens
aagtatcctagcaaccctgcagtcca

SEQ ID NO: 96232 - DNA, 26 bp, Homo sapiens
agtatcctagcaaccctgcagtccat

SEQ ID NO: 96233 - DNA, 26 bp, Homo sapiens
gtatcctagcaaccctgcagtccatg

SEQ ID NO: 96234 - DNA, 26 bp, Homo sapiens
tatcctagcaaccctgcagtccatgc

SEQ ID NO: 96235 - DNA, 26 bp, Homo sapiens
atcctagcaaccctgcagtccatgct

SEQ ID NO: 96236 - DNA, 26 bp, Homo sapiens
tcctagcaaccctgcagtccatgctc

SEQ ID NO: 96237 - DNA, 26 bp, Homo sapiens
cctagcaaccctgcagtccatgctca

SEQ ID NO: 96238 - DNA, 26 bp, Homo sapiens
ctagcaaccctgcagtccatgctcag

SEQ ID NO: 96239 - DNA, 26 bp, Homo sapiens
tagcaaccctgcagtccatgctcagt

SEQ ID NO: 96240 - DNA, 26 bp, Homo sapiens
agcaaccctgcagtccatgctcagta

SEQ ID NO: 96241 - DNA, 26 bp, Homo sapiens
gcaaccctgcagtccatgctcagtac

SEQ ID NO: 96242 - DNA, 26 bp, Homo sapiens
caaccctgcagtccatgctcagtacg

SEQ ID NO: 96243 - DNA, 26 bp, Homo sapiens
aaccctgcagtccatgctcagtacgt

SEQ ID NO: 96244 - DNA, 26 bp, Homo sapiens
accctgcagtccatgctcagtacgtg

SEQ ID NO: 96245 - DNA, 26 bp, Homo sapiens
ccctgcagtccatgctcagtacgtgc

SEQ ID NO: 96246 - DNA, 26 bp, Homo sapiens
cctgcagtccatgctcagtacgtgct

SEQ ID NO: 96247 - DNA, 26 bp, Homo sapiens
ctgcagtccatgctcagtacgtgctg

SEQ ID NO: 96248 - DNA, 26 bp, Homo sapiens
tgcagtccatgctcagtacgtgctgg

SEQ ID NO: 96249 - DNA, 26 bp, Homo sapiens
gcagtccatgctcagtacgtgctggg

SEQ ID NO: 96250 - DNA, 26 bp, Homo sapiens
cagtccatgctcagtacgtgctgggc

SEQ ID NO: 96251 - DNA, 26 bp, Homo sapiens
agtccatgctcagtacgtgctgggcg

SEQ ID NO: 96252 - DNA, 26 bp, Homo sapiens
gtccatgctcagtacgtgctgggcga

SEQ ID NO: 96253 - DNA, 26 bp, Homo sapiens
tccatgctcagtacgtgctgggcgat

SEQ ID NO: 96254 - DNA, 26 bp, Homo sapiens
ccatgctcagtacgtgctgggcgatg

SEQ ID NO: 96255 - DNA, 26 bp, Homo sapiens
catgctcagtacgtgctgggcgatga

SEQ ID NO: 96256 - DNA, 26 bp, Homo sapiens
atgctcagtacgtgctgggcgatgac

SEQ ID NO: 96257 - DNA, 26 bp, Homo sapiens
tgctcagtacgtgctgggcgatgacc

SEQ ID NO: 96258 - DNA, 26 bp, Homo sapiens
gctcagtacgtgctgggcgatgacct

SEQ ID NO: 96259 - DNA, 26 bp, Homo sapiens
ctcagtacgtgctgggcgatgacctt

SEQ ID NO: 96260 - DNA, 26 bp, Homo sapiens
tcagtacgtgctgggcgatgaccttg

SEQ ID NO: 96261 - DNA, 26 bp, Homo sapiens
cagtacgtgctgggcgatgaccttgg

SEQ ID NO: 96262 - DNA, 26 bp, Homo sapiens
agtacgtgctgggcgatgaccttggg

SEQ ID NO: 96263 - DNA, 26 bp, Homo sapiens
gtacgtgctgggcgatgaccttgggg

SEQ ID NO: 96264 - DNA, 26 bp, Homo sapiens
tacgtgctgggcgatgaccttggggt

SEQ ID NO: 96265 - DNA, 26 bp, Homo sapiens
acgtgctgggcgatgaccttggggtc

SEQ ID NO: 96266 - DNA, 26 bp, Homo sapiens
cgtgctgggcgatgaccttggggtcg

SEQ ID NO: 96267 - DNA, 26 bp, Homo sapiens
gtgctgggcgatgaccttggggtcgt

SEQ ID NO: 96268 - DNA, 26 bp, Homo sapiens
tgctgggcgatgaccttggggtcgtt

SEQ ID NO: 96269 - DNA, 26 bp, Homo sapiens
gctgggcgatgaccttggggtcgttg

SEQ ID NO: 96270 - DNA, 26 bp, Homo sapiens
ctgggcgatgaccttggggtcgttgt

SEQ ID NO: 96271 - DNA, 26 bp, Homo sapiens
tgggcgatgaccttggggtcgttgtt

SEQ ID NO: 96272 - DNA, 26 bp, Homo sapiens
gggcgatgaccttggggtcgttgttg

SEQ ID NO: 96273 - DNA, 26 bp, Homo sapiens
ggcgatgaccttggggtcgttgttgg

SEQ ID NO: 96274 - DNA, 26 bp, Homo sapiens
gcgatgaccttggggtcgttgttggt

SEQ ID NO: 96275 - DNA, 26 bp, Homo sapiens
cgatgaccttggggtcgttgttggtg

SEQ ID NO: 96276 - DNA, 26 bp, Homo sapiens
gatgaccttggggtcgttgttggtga

SEQ ID NO: 96277 - DNA, 26 bp, Homo sapiens
atgaccttggggtcgttgttggtgaa

SEQ ID NO: 96278 - DNA, 26 bp, Homo sapiens
tgaccttggggtcgttgttggtgaac

SEQ ID NO: 96279 - DNA, 26 bp, Homo sapiens
gaccttggggtcgttgttggtgaaca

SEQ ID NO: 96280 - DNA, 26 bp, Homo sapiens
accttggggtcgttgttggtgaacag

SEQ ID NO: 96281 - DNA, 26 bp, Homo sapiens
ccttggggtcgttgttggtgaacagt

SEQ ID NO: 96282 - DNA, 26 bp, Homo sapiens
cttggggtcgttgttggtgaacagtt

SEQ ID NO: 96283 - DNA, 26 bp, Homo sapiens
ttggggtcgttgttggtgaacagttc

SEQ ID NO: 96284 - DNA, 26 bp, Homo sapiens
tggggtcgttgttggtgaacagttct

SEQ ID NO: 96285 - DNA, 26 bp, Homo sapiens
ggggtcgttgttggtgaacagttctt

SEQ ID NO: 96286 - DNA, 26 bp, Homo sapiens
gggtcgttgttggtgaacagttcttt

SEQ ID NO: 96287 - DNA, 26 bp, Homo sapiens
ggtcgttgttggtgaacagttctttt

SEQ ID NO: 96288 - DNA, 26 bp, Homo sapiens
gtcgttgttggtgaacagttcttttg

SEQ ID NO: 96289 - DNA, 26 bp, Homo sapiens
tcgttgttggtgaacagttcttttgc

SEQ ID NO: 96290 - DNA, 26 bp, Homo sapiens
cgttgttggtgaacagttcttttgca

SEQ ID NO: 96291 - DNA, 26 bp, Homo sapiens
gttgttggtgaacagttcttttgcac

SEQ ID NO: 96292 - DNA, 26 bp, Homo sapiens
ttgttggtgaacagttcttttgcacg

SEQ ID NO: 96293 - DNA, 26 bp, Homo sapiens
tgttggtgaacagttcttttgcacgt

SEQ ID NO: 96294 - DNA, 26 bp, Homo sapiens
gttggtgaacagttcttttgcacgtt

SEQ ID NO: 96295 - DNA, 26 bp, Homo sapiens
ttggtgaacagttcttttgcacgttt

SEQ ID NO: 96296 - DNA, 26 bp, Homo sapiens
tggtgaacagttcttttgcacgtttc

SEQ ID NO: 96297 - DNA, 26 bp, Homo sapiens
ggtgaacagttcttttgcacgtttca

SEQ ID NO: 96298 - DNA, 26 bp, Homo sapiens
gtgaacagttcttttgcacgtttcaa

SEQ ID NO: 96299 - DNA, 26 bp, Homo sapiens
tgaacagttcttttgcacgtttcaac

SEQ ID NO: 96300 - DNA, 26 bp, Homo sapiens
gaacagttcttttgcacgtttcaaca

SEQ ID NO: 96301 - DNA, 26 bp, Homo sapiens
aacagttcttttgcacgtttcaacat

SEQ ID NO: 96302 - DNA, 26 bp, Homo sapiens
acagttcttttgcacgtttcaacatt

SEQ ID NO: 96303 - DNA, 26 bp, Homo sapiens
cagttcttttgcacgtttcaacattg

SEQ ID NO: 96304 - DNA, 26 bp, Homo sapiens
agttcttttgcacgtttcaacattgc

SEQ ID NO: 96305 - DNA, 26 bp, Homo sapiens
gttcttttgcacgtttcaacattgct

SEQ ID NO: 96306 - DNA, 26 bp, Homo sapiens
ttcttttgcacgtttcaacattgctg

SEQ ID NO: 96307 - DNA, 26 bp, Homo sapiens
tcttttgcacgtttcaacattgctgt

SEQ ID NO: 96308 - DNA, 26 bp, Homo sapiens
cttttgcacgtttcaacattgctgtt

SEQ ID NO: 96309 - DNA, 26 bp, Homo sapiens
ttttgcacgtttcaacattgctgttt

SEQ ID NO: 96310 - DNA, 26 bp, Homo sapiens
tttgcacgtttcaacattgctgtttc

SEQ ID NO: 96311 - DNA, 26 bp, Homo sapiens
ttgcacgtttcaacattgctgtttcc

SEQ ID NO: 96312 - DNA, 26 bp, Homo sapiens
tgcacgtttcaacattgctgtttcca

SEQ ID NO: 96313 - DNA, 26 bp, Homo sapiens
gcacgtttcaacattgctgtttccag

SEQ ID NO: 96314 - DNA, 26 bp, Homo sapiens
cacgtttcaacattgctgtttccagg

SEQ ID NO: 96315 - DNA, 26 bp, Homo sapiens
acgtttcaacattgctgtttccaggg

SEQ ID NO: 96316 - DNA, 26 bp, Homo sapiens
cgtttcaacattgctgtttccagggg

SEQ ID NO: 96317 - DNA, 26 bp, Homo sapiens
gtttcaacattgctgtttccaggggc

SEQ ID NO: 96318 - DNA, 26 bp, Homo sapiens
tttcaacattgctgtttccaggggct

SEQ ID NO: 96319 - DNA, 26 bp, Homo sapiens
ttcaacattgctgtttccaggggctt

SEQ ID NO: 96320 - DNA, 26 bp, Homo sapiens
tcaacattgctgtttccaggggctta

SEQ ID NO: 96321 - DNA, 26 bp, Homo sapiens
caacattgctgtttccaggggcttat

SEQ ID NO: 96322 - DNA, 26 bp, Homo sapiens
aacattgctgtttccaggggcttatt

SEQ ID NO: 96323 - DNA, 26 bp, Homo sapiens
acattgctgtttccaggggcttattc

SEQ ID NO: 96324 - DNA, 26 bp, Homo sapiens
cattgctgtttccaggggcttattct

SEQ ID NO: 96325 - DNA, 26 bp, Homo sapiens
attgctgtttccaggggcttattctc

SEQ ID NO: 96326 - DNA, 26 bp, Homo sapiens
ttgctgtttccaggggcttattctca

SEQ ID NO: 96327 - DNA, 26 bp, Homo sapiens
tgctgtttccaggggcttattctcag

SEQ ID NO: 96328 - DNA, 26 bp, Homo sapiens
gctgtttccaggggcttattctcagg

SEQ ID NO: 96329 - DNA, 26 bp, Homo sapiens
ctgtttccaggggcttattctcaggg

SEQ ID NO: 96330 - DNA, 26 bp, Homo sapiens
tgtttccaggggcttattctcagggg

SEQ ID NO: 96331 - DNA, 26 bp, Homo sapiens
gtttccaggggcttattctcaggggg

SEQ ID NO: 96332 - DNA, 26 bp, Homo sapiens
tttccaggggcttattctcaggggga

SEQ ID NO: 96333 - DNA, 26 bp, Homo sapiens
ttccaggggcttattctcagggggaa

SEQ ID NO: 96334 - DNA, 26 bp, Homo sapiens
tccaggggcttattctcagggggaag

SEQ ID NO: 96335 - DNA, 26 bp, Homo sapiens
ccaggggcttattctcagggggaagg

SEQ ID NO: 96336 - DNA, 26 bp, Homo sapiens
caggggcttattctcagggggaagga

SEQ ID NO: 96337 - DNA, 26 bp, Homo sapiens
aggggcttattctcagggggaaggaa

SEQ ID NO: 96338 - DNA, 26 bp, Homo sapiens
ggggcttattctcagggggaaggaac

SEQ ID NO: 96339 - DNA, 26 bp, Homo sapiens
gggcttattctcagggggaaggaact

SEQ ID NO: 96340 - DNA, 26 bp, Homo sapiens
ggcttattctcagggggaaggaactt

SEQ ID NO: 96341 - DNA, 26 bp, Homo sapiens
gcttattctcagggggaaggaacttt

SEQ ID NO: 96342 - DNA, 26 bp, Homo sapiens
cttattctcagggggaaggaactttg

SEQ ID NO: 96343 - DNA, 26 bp, Homo sapiens
ttattctcagggggaaggaactttga

SEQ ID NO: 96344 - DNA, 26 bp, Homo sapiens
tattctcagggggaaggaactttgac

SEQ ID NO: 96345 - DNA, 26 bp, Homo sapiens
attctcagggggaaggaactttgact

SEQ ID NO: 96346 - DNA, 26 bp, Homo sapiens
ttctcagggggaaggaactttgactc

SEQ ID NO: 96347 - DNA, 26 bp, Homo sapiens
tctcagggggaaggaactttgactca

SEQ ID NO: 96348 - DNA, 26 bp, Homo sapiens
ctcagggggaaggaactttgactcaa

SEQ ID NO: 96349 - DNA, 26 bp, Homo sapiens
tcagggggaaggaactttgactcaaa

SEQ ID NO: 96350 - DNA, 26 bp, Homo sapiens
cagggggaaggaactttgactcaaac

SEQ ID NO: 96351 - DNA, 26 bp, Homo sapiens
agggggaaggaactttgactcaaact

SEQ ID NO: 96352 - DNA, 26 bp, Homo sapiens
gggggaaggaactttgactcaaactc

SEQ ID NO: 96353 - DNA, 26 bp, Homo sapiens
ggggaaggaactttgactcaaactcg

SEQ ID NO: 96354 - DNA, 26 bp, Homo sapiens
gggaaggaactttgactcaaactcgt

SEQ ID NO: 96355 - DNA, 26 bp, Homo sapiens
ggaaggaactttgactcaaactcgtt

SEQ ID NO: 96356 - DNA, 26 bp, Homo sapiens
gaaggaactttgactcaaactcgttg

SEQ ID NO: 96357 - DNA, 26 bp, Homo sapiens
aaggaactttgactcaaactcgttgg

SEQ ID NO: 96358 - DNA, 26 bp, Homo sapiens
aggaactttgactcaaactcgttggg

SEQ ID NO: 96359 - DNA, 26 bp, Homo sapiens
ggaactttgactcaaactcgttgggc

SEQ ID NO: 96360 - DNA, 26 bp, Homo sapiens
gaactttgactcaaactcgttgggcc

SEQ ID NO: 96361 - DNA, 26 bp, Homo sapiens
aactttgactcaaactcgttgggcct

SEQ ID NO: 96362 - DNA, 26 bp, Homo sapiens
actttgactcaaactcgttgggcctg

SEQ ID NO: 96363 - DNA, 26 bp, Homo sapiens
ctttgactcaaactcgttgggcctga

SEQ ID NO: 96364 - DNA, 26 bp, Homo sapiens
tttgactcaaactcgttgggcctgaa

SEQ ID NO: 96365 - DNA, 26 bp, Homo sapiens
ttgactcaaactcgttgggcctgaag

SEQ ID NO: 96366 - DNA, 26 bp, Homo sapiens
tgactcaaactcgttgggcctgaagg

SEQ ID NO: 96367 - DNA, 26 bp, Homo sapiens
gactcaaactcgttgggcctgaagga

SEQ ID NO: 96368 - DNA, 26 bp, Homo sapiens
actcaaactcgttgggcctgaaggag

SEQ ID NO: 96369 - DNA, 26 bp, Homo sapiens
ctcaaactcgttgggcctgaaggagg

SEQ ID NO: 96370 - DNA, 26 bp, Homo sapiens
tcaaactcgttgggcctgaaggagga

SEQ ID NO: 96371 - DNA, 26 bp, Homo sapiens
caaactcgttgggcctgaaggaggag

SEQ ID NO: 96372 - DNA, 26 bp, Homo sapiens
aaactcgttgggcctgaaggaggaga

SEQ ID NO: 96373 - DNA, 26 bp, Homo sapiens
aactcgttgggcctgaaggaggagac

SEQ ID NO: 96374 - DNA, 26 bp, Homo sapiens
actcgttgggcctgaaggaggagaca

SEQ ID NO: 96375 - DNA, 26 bp, Homo sapiens
ctcgttgggcctgaaggaggagacag

SEQ ID NO: 96376 - DNA, 26 bp, Homo sapiens
tcgttgggcctgaaggaggagacagt

SEQ ID NO: 96377 - DNA, 26 bp, Homo sapiens
cgttgggcctgaaggaggagacagtc

SEQ ID NO: 96378 - DNA, 26 bp, Homo sapiens
gttgggcctgaaggaggagacagtct

SEQ ID NO: 96379 - DNA, 26 bp, Homo sapiens
ttgggcctgaaggaggagacagtctc

SEQ ID NO: 96380 - DNA, 26 bp, Homo sapiens
tgggcctgaaggaggagacagtctcc

SEQ ID NO: 96381 - DNA, 26 bp, Homo sapiens
gggcctgaaggaggagacagtctcca

SEQ ID NO: 96382 - DNA, 26 bp, Homo sapiens
ggcctgaaggaggagacagtctccag

SEQ ID NO: 96383 - DNA, 26 bp, Homo sapiens
gcctgaaggaggagacagtctccagg

SEQ ID NO: 96384 - DNA, 26 bp, Homo sapiens
cctgaaggaggagacagtctccagga

SEQ ID NO: 96385 - DNA, 26 bp, Homo sapiens
ctgaaggaggagacagtctccaggag

SEQ ID NO: 96386 - DNA, 26 bp, Homo sapiens
tgaaggaggagacagtctccaggagg

SEQ ID NO: 96387 - DNA, 26 bp, Homo sapiens
gaaggaggagacagtctccaggaggg

SEQ ID NO: 96388 - DNA, 26 bp, Homo sapiens
aaggaggagacagtctccaggagggg

SEQ ID NO: 96389 - DNA, 26 bp, Homo sapiens
aggaggagacagtctccaggaggggc

SEQ ID NO: 96390 - DNA, 26 bp, Homo sapiens
ggaggagacagtctccaggaggggcg

SEQ ID NO: 96391 - DNA, 26 bp, Homo sapiens
gaggagacagtctccaggaggggcgt

SEQ ID NO: 96392 - DNA, 26 bp, Homo sapiens
aggagacagtctccaggaggggcgtc

SEQ ID NO: 96393 - DNA, 26 bp, Homo sapiens
ggagacagtctccaggaggggcgtca

SEQ ID NO: 96394 - DNA, 26 bp, Homo sapiens
gagacagtctccaggaggggcgtcac

SEQ ID NO: 96395 - DNA, 26 bp, Homo sapiens
agacagtctccaggaggggcgtcaca

SEQ ID NO: 96396 - DNA, 26 bp, Homo sapiens
gacagtctccaggaggggcgtcacaa

SEQ ID NO: 96397 - DNA, 26 bp, Homo sapiens
acagtctccaggaggggcgtcacaaa

SEQ ID NO: 96398 - DNA, 26 bp, Homo sapiens
cagtctccaggaggggcgtcacaaac

SEQ ID NO: 96399 - DNA, 26 bp, Homo sapiens
agtctccaggaggggcgtcacaaact

SEQ ID NO: 96400 - DNA, 26 bp, Homo sapiens
gtctccaggaggggcgtcacaaactc

SEQ ID NO: 96401 - DNA, 26 bp, Homo sapiens
tctccaggaggggcgtcacaaactcg

SEQ ID NO: 96402 - DNA, 26 bp, Homo sapiens
ctccaggaggggcgtcacaaactcgc

SEQ ID NO: 96403 - DNA, 26 bp, Homo sapiens
tccaggaggggcgtcacaaactcgcc

SEQ ID NO: 96404 - DNA, 26 bp, Homo sapiens
ccaggaggggcgtcacaaactcgccc

SEQ ID NO: 96405 - DNA, 26 bp, Homo sapiens
caggaggggcgtcacaaactcgccct

SEQ ID NO: 96406 - DNA, 26 bp, Homo sapiens
aggaggggcgtcacaaactcgccctt

SEQ ID NO: 96407 - DNA, 26 bp, Homo sapiens
ggaggggcgtcacaaactcgcccttg

SEQ ID NO: 96408 - DNA, 26 bp, Homo sapiens
gaggggcgtcacaaactcgcccttgt

SEQ ID NO: 96409 - DNA, 26 bp, Homo sapiens
aggggcgtcacaaactcgcccttgtc

SEQ ID NO: 96410 - DNA, 26 bp, Homo sapiens
ggggcgtcacaaactcgcccttgtcc

SEQ ID NO: 96411 - DNA, 26 bp, Homo sapiens
gggcgtcacaaactcgcccttgtccc

SEQ ID NO: 96412 - DNA, 26 bp, Homo sapiens
ggcgtcacaaactcgcccttgtccca

SEQ ID NO: 96413 - DNA, 26 bp, Homo sapiens
gcgtcacaaactcgcccttgtcccac

SEQ ID NO: 96414 - DNA, 26 bp, Homo sapiens
cgtcacaaactcgcccttgtcccact

SEQ ID NO: 96415 - DNA, 26 bp, Homo sapiens
gtcacaaactcgcccttgtcccactg

SEQ ID NO: 96416 - DNA, 26 bp, Homo sapiens
tcacaaactcgcccttgtcccactgc

SEQ ID NO: 96417 - DNA, 26 bp, Homo sapiens
cacaaactcgcccttgtcccactgcc

SEQ ID NO: 96418 - DNA, 26 bp, Homo sapiens
acaaactcgcccttgtcccactgccc

SEQ ID NO: 96419 - DNA, 26 bp, Homo sapiens
caaactcgcccttgtcccactgcccc

SEQ ID NO: 96420 - DNA, 26 bp, Homo sapiens
aaactcgcccttgtcccactgcccct

SEQ ID NO: 96421 - DNA, 26 bp, Homo sapiens
aactcgcccttgtcccactgcccctt

SEQ ID NO: 96422 - DNA, 26 bp, Homo sapiens
actcgcccttgtcccactgccccttc

SEQ ID NO: 96423 - DNA, 26 bp, Homo sapiens
ctcgcccttgtcccactgccccttct

SEQ ID NO: 96424 - DNA, 26 bp, Homo sapiens
tcgcccttgtcccactgccccttctc

SEQ ID NO: 96425 - DNA, 26 bp, Homo sapiens
cgcccttgtcccactgccccttctcc

SEQ ID NO: 96426 - DNA, 26 bp, Homo sapiens
gcccttgtcccactgccccttctcca

SEQ ID NO: 96427 - DNA, 26 bp, Homo sapiens
cccttgtcccactgccccttctccat

SEQ ID NO: 96428 - DNA, 26 bp, Homo sapiens
ccttgtcccactgccccttctccatc

SEQ ID NO: 96429 - DNA, 26 bp, Homo sapiens
cttgtcccactgccccttctccatct

SEQ ID NO: 96430 - DNA, 26 bp, Homo sapiens
ttgtcccactgccccttctccatctg

SEQ ID NO: 96431 - DNA, 26 bp, Homo sapiens
tgtcccactgccccttctccatctga

SEQ ID NO: 96432 - DNA, 26 bp, Homo sapiens
gtcccactgccccttctccatctgag

SEQ ID NO: 96433 - DNA, 26 bp, Homo sapiens
tcccactgccccttctccatctgagc

SEQ ID NO: 96434 - DNA, 26 bp, Homo sapiens
cccactgccccttctccatctgagct

SEQ ID NO: 96435 - DNA, 26 bp, Homo sapiens
ccactgccccttctccatctgagctg

SEQ ID NO: 96436 - DNA, 26 bp, Homo sapiens
cactgccccttctccatctgagctgc

SEQ ID NO: 96437 - DNA, 26 bp, Homo sapiens
actgccccttctccatctgagctgcc

SEQ ID NO: 96438 - DNA, 26 bp, Homo sapiens
ctgccccttctccatctgagctgccg

SEQ ID NO: 96439 - DNA, 26 bp, Homo sapiens
tgccccttctccatctgagctgccgc

SEQ ID NO: 96440 - DNA, 26 bp, Homo sapiens
gccccttctccatctgagctgccgca

SEQ ID NO: 96441 - DNA, 26 bp, Homo sapiens
ccccttctccatctgagctgccgcag

SEQ ID NO: 96442 - DNA, 26 bp, Homo sapiens
cccttctccatctgagctgccgcagg

SEQ ID NO: 96443 - DNA, 26 bp, Homo sapiens
ccttctccatctgagctgccgcaggt

SEQ ID NO: 96444 - DNA, 26 bp, Homo sapiens
cttctccatctgagctgccgcaggtt

SEQ ID NO: 96445 - DNA, 26 bp, Homo sapiens
ttctccatctgagctgccgcaggttc

SEQ ID NO: 96446 - DNA, 26 bp, Homo sapiens
tctccatctgagctgccgcaggttcc

SEQ ID NO: 96447 - DNA, 26 bp, Homo sapiens
ctccatctgagctgccgcaggttccc

SEQ ID NO: 96448 - DNA, 26 bp, Homo sapiens
tccatctgagctgccgcaggttccca

SEQ ID NO: 96449 - DNA, 26 bp, Homo sapiens
ccatctgagctgccgcaggttcccaa

SEQ ID NO: 96450 - DNA, 26 bp, Homo sapiens
catctgagctgccgcaggttcccaag

SEQ ID NO: 96451 - DNA, 26 bp, Homo sapiens
atctgagctgccgcaggttcccaagg

SEQ ID NO: 96452 - DNA, 26 bp, Homo sapiens
tctgagctgccgcaggttcccaaggt

SEQ ID NO: 96453 - DNA, 26 bp, Homo sapiens
ctgagctgccgcaggttcccaaggtc

SEQ ID NO: 96454 - DNA, 26 bp, Homo sapiens
tgagctgccgcaggttcccaaggtct

SEQ ID NO: 96455 - DNA, 26 bp, Homo sapiens
gagctgccgcaggttcccaaggtctt

SEQ ID NO: 96456 - DNA, 26 bp, Homo sapiens
agctgccgcaggttcccaaggtcttt

SEQ ID NO: 96457 - DNA, 26 bp, Homo sapiens
gctgccgcaggttcccaaggtctttc

SEQ ID NO: 96458 - DNA, 26 bp, Homo sapiens
ctgccgcaggttcccaaggtctttcc

SEQ ID NO: 96459 - DNA, 26 bp, Homo sapiens
tgccgcaggttcccaaggtctttccc

SEQ ID NO: 96460 - DNA, 26 bp, Homo sapiens
gccgcaggttcccaaggtctttccct

SEQ ID NO: 96461 - DNA, 26 bp, Homo sapiens
ccgcaggttcccaaggtctttccctg

SEQ ID NO: 96462 - DNA, 26 bp, Homo sapiens
cgcaggttcccaaggtctttccctgt

SEQ ID NO: 96463 - DNA, 26 bp, Homo sapiens
gcaggttcccaaggtctttccctgtc

SEQ ID NO: 96464 - DNA, 26 bp, Homo sapiens
caggttcccaaggtctttccctgtca

SEQ ID NO: 96465 - DNA, 26 bp, Homo sapiens
aggttcccaaggtctttccctgtcat

SEQ ID NO: 96466 - DNA, 26 bp, Homo sapiens
ggttcccaaggtctttccctgtcatc

SEQ ID NO: 96467 - DNA, 26 bp, Homo sapiens
gttcccaaggtctttccctgtcatca

SEQ ID NO: 96468 - DNA, 26 bp, Homo sapiens
ttcccaaggtctttccctgtcatcat

SEQ ID NO: 96469 - DNA, 26 bp, Homo sapiens
tcccaaggtctttccctgtcatcatc

SEQ ID NO: 96470 - DNA, 26 bp, Homo sapiens
cccaaggtctttccctgtcatcatca

SEQ ID NO: 96471 - DNA, 26 bp, Homo sapiens
ccaaggtctttccctgtcatcatcat

SEQ ID NO: 96472 - DNA, 26 bp, Homo sapiens
caaggtctttccctgtcatcatcatc

SEQ ID NO: 96473 - DNA, 26 bp, Homo sapiens
aaggtctttccctgtcatcatcatca

SEQ ID NO: 96474 - DNA, 26 bp, Homo sapiens
aggtctttccctgtcatcatcatcaa

SEQ ID NO: 96475 - DNA, 26 bp, Homo sapiens
ggtctttccctgtcatcatcatcaag

SEQ ID NO: 96476 - DNA, 26 bp, Homo sapiens
gtctttccctgtcatcatcatcaagg

SEQ ID NO: 96477 - DNA, 26 bp, Homo sapiens
tctttccctgtcatcatcatcaagga

SEQ ID NO: 96478 - DNA, 26 bp, Homo sapiens
ctttccctgtcatcatcatcaaggat

SEQ ID NO: 96479 - DNA, 26 bp, Homo sapiens
tttccctgtcatcatcatcaaggatc

SEQ ID NO: 96480 - DNA, 26 bp, Homo sapiens
ttccctgtcatcatcatcaaggatca

SEQ ID NO: 96481 - DNA, 26 bp, Homo sapiens
tccctgtcatcatcatcaaggatcaa

SEQ ID NO: 96482 - DNA, 26 bp, Homo sapiens
ccctgtcatcatcatcaaggatcaag

SEQ ID NO: 96483 - DNA, 26 bp, Homo sapiens
cctgtcatcatcatcaaggatcaagt

SEQ ID NO: 96484 - DNA, 26 bp, Homo sapiens
ctgtcatcatcatcaaggatcaagta

SEQ ID NO: 96485 - DNA, 26 bp, Homo sapiens
tgtcatcatcatcaaggatcaagtag

SEQ ID NO: 96486 - DNA, 26 bp, Homo sapiens
gtcatcatcatcaaggatcaagtagt

SEQ ID NO: 96487 - DNA, 26 bp, Homo sapiens
tcatcatcatcaaggatcaagtagtt

SEQ ID NO: 96488 - DNA, 26 bp, Homo sapiens
catcatcatcaaggatcaagtagttg

SEQ ID NO: 96489 - DNA, 26 bp, Homo sapiens
atcatcatcaaggatcaagtagttga

SEQ ID NO: 96490 - DNA, 26 bp, Homo sapiens
tcatcatcaaggatcaagtagttgac

SEQ ID NO: 96491 - DNA, 26 bp, Homo sapiens
catcatcaaggatcaagtagttgacg

SEQ ID NO: 96492 - DNA, 26 bp, Homo sapiens
atcatcaaggatcaagtagttgacgc

SEQ ID NO: 96493 - DNA, 26 bp, Homo sapiens
tcatcaaggatcaagtagttgacgcc

SEQ ID NO: 96494 - DNA, 26 bp, Homo sapiens
catcaaggatcaagtagttgacgcca

SEQ ID NO: 96495 - DNA, 26 bp, Homo sapiens
atcaaggatcaagtagttgacgccag

SEQ ID NO: 96496 - DNA, 26 bp, Homo sapiens
tcaaggatcaagtagttgacgccaga

SEQ ID NO: 96497 - DNA, 26 bp, Homo sapiens
caaggatcaagtagttgacgccagag

SEQ ID NO: 96498 - DNA, 26 bp, Homo sapiens
aaggatcaagtagttgacgccagagt

SEQ ID NO: 96499 - DNA, 26 bp, Homo sapiens
aggatcaagtagttgacgccagagtt

SEQ ID NO: 96500 - DNA, 26 bp, Homo sapiens
ggatcaagtagttgacgccagagttc

SEQ ID NO: 96501 - DNA, 26 bp, Homo sapiens
gatcaagtagttgacgccagagttcc

SEQ ID NO: 96502 - DNA, 26 bp, Homo sapiens
atcaagtagttgacgccagagttccg

SEQ ID NO: 96503 - DNA, 26 bp, Homo sapiens
tcaagtagttgacgccagagttccgg

SEQ ID NO: 96504 - DNA, 26 bp, Homo sapiens
caagtagttgacgccagagttccggg

SEQ ID NO: 96505 - DNA, 26 bp, Homo sapiens
aagtagttgacgccagagttccgggg

SEQ ID NO: 96506 - DNA, 26 bp, Homo sapiens
agtagttgacgccagagttccgggga

SEQ ID NO: 96507 - DNA, 26 bp, Homo sapiens
gtagttgacgccagagttccggggac

SEQ ID NO: 96508 - DNA, 26 bp, Homo sapiens
tagttgacgccagagttccggggacc

SEQ ID NO: 96509 - DNA, 26 bp, Homo sapiens
agttgacgccagagttccggggacct

SEQ ID NO: 96510 - DNA, 26 bp, Homo sapiens
gttgacgccagagttccggggacctg

SEQ ID NO: 96511 - DNA, 26 bp, Homo sapiens
ttgacgccagagttccggggacctgg

SEQ ID NO: 96512 - DNA, 26 bp, Homo sapiens
tgacgccagagttccggggacctggc

SEQ ID NO: 96513 - DNA, 26 bp, Homo sapiens
gacgccagagttccggggacctggcg

SEQ ID NO: 96514 - DNA, 26 bp, Homo sapiens
acgccagagttccggggacctggcgc

SEQ ID NO: 96515 - DNA, 26 bp, Homo sapiens
cgccagagttccggggacctggcgcc

SEQ ID NO: 96516 - DNA, 26 bp, Homo sapiens
gccagagttccggggacctggcgcct

SEQ ID NO: 96517 - DNA, 26 bp, Homo sapiens
ccagagttccggggacctggcgcctc

SEQ ID NO: 96518 - DNA, 26 bp, Homo sapiens
cagagttccggggacctggcgcctca

SEQ ID NO: 96519 - DNA, 26 bp, Homo sapiens
agagttccggggacctggcgcctcat

SEQ ID NO: 96520 - DNA, 26 bp, Homo sapiens
gagttccggggacctggcgcctcatt

SEQ ID NO: 96521 - DNA, 26 bp, Homo sapiens
agttccggggacctggcgcctcattc

SEQ ID NO: 96522 - DNA, 26 bp, Homo sapiens
gttccggggacctggcgcctcattct

SEQ ID NO: 96523 - DNA, 26 bp, Homo sapiens
ttccggggacctggcgcctcattctg

SEQ ID NO: 96524 - DNA, 26 bp, Homo sapiens
tccggggacctggcgcctcattctgc

SEQ ID NO: 96525 - DNA, 26 bp, Homo sapiens
ccggggacctggcgcctcattctgct

SEQ ID NO: 96526 - DNA, 26 bp, Homo sapiens
cggggacctggcgcctcattctgctt

SEQ ID NO: 96527 - DNA, 26 bp, Homo sapiens
ggggacctggcgcctcattctgcttg

SEQ ID NO: 96528 - DNA, 26 bp, Homo sapiens
gggacctggcgcctcattctgcttgg

SEQ ID NO: 96529 - DNA, 26 bp, Homo sapiens
ggacctggcgcctcattctgcttggc

SEQ ID NO: 96530 - DNA, 26 bp, Homo sapiens
gacctggcgcctcattctgcttggct

SEQ ID NO: 96531 - DNA, 26 bp, Homo sapiens
acctggcgcctcattctgcttggctg

SEQ ID NO: 96532 - DNA, 26 bp, Homo sapiens
cctggcgcctcattctgcttggctgt

SEQ ID NO: 96533 - DNA, 26 bp, Homo sapiens
ctggcgcctcattctgcttggctgtg

SEQ ID NO: 96534 - DNA, 26 bp, Homo sapiens
tggcgcctcattctgcttggctgtga

SEQ ID NO: 96535 - DNA, 26 bp, Homo sapiens
ggcgcctcattctgcttggctgtgag

SEQ ID NO: 96536 - DNA, 26 bp, Homo sapiens
gcgcctcattctgcttggctgtgagc

SEQ ID NO: 96537 - DNA, 26 bp, Homo sapiens
cgcctcattctgcttggctgtgagca

SEQ ID NO: 96538 - DNA, 26 bp, Homo sapiens
gcctcattctgcttggctgtgagcag

SEQ ID NO: 96539 - DNA, 26 bp, Homo sapiens
cctcattctgcttggctgtgagcagt

SEQ ID NO: 96540 - DNA, 26 bp, Homo sapiens
ctcattctgcttggctgtgagcagtt

SEQ ID NO: 96541 - DNA, 26 bp, Homo sapiens
tcattctgcttggctgtgagcagttc

SEQ ID NO: 96542 - DNA, 26 bp, Homo sapiens
cattctgcttggctgtgagcagttct

SEQ ID NO: 96543 - DNA, 26 bp, Homo sapiens
attctgcttggctgtgagcagttctg

SEQ ID NO: 96544 - DNA, 26 bp, Homo sapiens
ttctgcttggctgtgagcagttctgt

SEQ ID NO: 96545 - DNA, 26 bp, Homo sapiens
tctgcttggctgtgagcagttctgtg

SEQ ID NO: 96546 - DNA, 26 bp, Homo sapiens
ctgcttggctgtgagcagttctgtgt

SEQ ID NO: 96547 - DNA, 26 bp, Homo sapiens
tgcttggctgtgagcagttctgtgtg

SEQ ID NO: 96548 - DNA, 26 bp, Homo sapiens
gcttggctgtgagcagttctgtgtgg

SEQ ID NO: 96549 - DNA, 26 bp, Homo sapiens
cttggctgtgagcagttctgtgtggc

SEQ ID NO: 96550 - DNA, 26 bp, Homo sapiens
ttggctgtgagcagttctgtgtggct

SEQ ID NO: 96551 - DNA, 26 bp, Homo sapiens
tggctgtgagcagttctgtgtggctt

SEQ ID NO: 96552 - DNA, 26 bp, Homo sapiens
ggctgtgagcagttctgtgtggcttc

SEQ ID NO: 96553 - DNA, 26 bp, Homo sapiens
gctgtgagcagttctgtgtggcttcc

SEQ ID NO: 96554 - DNA, 26 bp, Homo sapiens
ctgtgagcagttctgtgtggcttccc

SEQ ID NO: 96555 - DNA, 26 bp, Homo sapiens
tgtgagcagttctgtgtggcttccct

SEQ ID NO: 96556 - DNA, 26 bp, Homo sapiens
gtgagcagttctgtgtggcttccctg

SEQ ID NO: 96557 - DNA, 26 bp, Homo sapiens
tgagcagttctgtgtggcttccctgg

SEQ ID NO: 96558 - DNA, 26 bp, Homo sapiens
gagcagttctgtgtggcttccctggg

SEQ ID NO: 96559 - DNA, 26 bp, Homo sapiens
agcagttctgtgtggcttccctgggc

SEQ ID NO: 96560 - DNA, 26 bp, Homo sapiens
gcagttctgtgtggcttccctgggca

SEQ ID NO: 96561 - DNA, 26 bp, Homo sapiens
cagttctgtgtggcttccctgggcac

SEQ ID NO: 96562 - DNA, 26 bp, Homo sapiens
agttctgtgtggcttccctgggcaca

SEQ ID NO: 96563 - DNA, 26 bp, Homo sapiens
gttctgtgtggcttccctgggcacat

SEQ ID NO: 96564 - DNA, 26 bp, Homo sapiens
ttctgtgtggcttccctgggcacatg

SEQ ID NO: 96565 - DNA, 26 bp, Homo sapiens
tctgtgtggcttccctgggcacatga

SEQ ID NO: 96566 - DNA, 26 bp, Homo sapiens
ctgtgtggcttccctgggcacatgag

SEQ ID NO: 96567 - DNA, 26 bp, Homo sapiens
tgtgtggcttccctgggcacatgagg

SEQ ID NO: 96568 - DNA, 26 bp, Homo sapiens
gtgtggcttccctgggcacatgaggg

SEQ ID NO: 96569 - DNA, 26 bp, Homo sapiens
tgtggcttccctgggcacatgagggt

SEQ ID NO: 96570 - DNA, 26 bp, Homo sapiens
gtggcttccctgggcacatgagggta

SEQ ID NO: 96571 - DNA, 26 bp, Homo sapiens
tggcttccctgggcacatgagggtag

SEQ ID NO: 96572 - DNA, 26 bp, Homo sapiens
ggcttccctgggcacatgagggtagc

SEQ ID NO: 96573 - DNA, 26 bp, Homo sapiens
gcttccctgggcacatgagggtagct

SEQ ID NO: 96574 - DNA, 26 bp, Homo sapiens
cttccctgggcacatgagggtagctt

SEQ ID NO: 96575 - DNA, 26 bp, Homo sapiens
ttccctgggcacatgagggtagcttt

SEQ ID NO: 96576 - DNA, 26 bp, Homo sapiens
tccctgggcacatgagggtagctttg

SEQ ID NO: 96577 - DNA, 26 bp, Homo sapiens
ccctgggcacatgagggtagctttgc

SEQ ID NO: 96578 - DNA, 26 bp, Homo sapiens
cctgggcacatgagggtagctttgct

SEQ ID NO: 96579 - DNA, 26 bp, Homo sapiens
ctgggcacatgagggtagctttgctc

SEQ ID NO: 96580 - DNA, 26 bp, Homo sapiens
tgggcacatgagggtagctttgctcc

SEQ ID NO: 96581 - DNA, 26 bp, Homo sapiens
gggcacatgagggtagctttgctccc

SEQ ID NO: 96582 - DNA, 26 bp, Homo sapiens
ggcacatgagggtagctttgctcccc

SEQ ID NO: 96583 - DNA, 26 bp, Homo sapiens
gcacatgagggtagctttgctcccct

SEQ ID NO: 96584 - DNA, 26 bp, Homo sapiens
cacatgagggtagctttgctcccctg

SEQ ID NO: 96585 - DNA, 26 bp, Homo sapiens
acatgagggtagctttgctcccctgc

SEQ ID NO: 96586 - DNA, 26 bp, Homo sapiens
catgagggtagctttgctcccctgcc

SEQ ID NO: 96587 - DNA, 26 bp, Homo sapiens
atgagggtagctttgctcccctgccg

SEQ ID NO: 96588 - DNA, 26 bp, Homo sapiens
tgagggtagctttgctcccctgccgc

SEQ ID NO: 96589 - DNA, 26 bp, Homo sapiens
gagggtagctttgctcccctgccgca

SEQ ID NO: 96590 - DNA, 26 bp, Homo sapiens
agggtagctttgctcccctgccgcag

SEQ ID NO: 96591 - DNA, 26 bp, Homo sapiens
gggtagctttgctcccctgccgcagc

SEQ ID NO: 96592 - DNA, 26 bp, Homo sapiens
ggtagctttgctcccctgccgcagcc

SEQ ID NO: 96593 - DNA, 26 bp, Homo sapiens
gtagctttgctcccctgccgcagcct

SEQ ID NO: 96594 - DNA, 26 bp, Homo sapiens
tagctttgctcccctgccgcagcctg

SEQ ID NO: 96595 - DNA, 26 bp, Homo sapiens
agctttgctcccctgccgcagcctgt

SEQ ID NO: 96596 - DNA, 26 bp, Homo sapiens
gctttgctcccctgccgcagcctgtg

SEQ ID NO: 96597 - DNA, 26 bp, Homo sapiens
ctttgctcccctgccgcagcctgtgg

SEQ ID NO: 96598 - DNA, 26 bp, Homo sapiens
tttgctcccctgccgcagcctgtggc

SEQ ID NO: 96599 - DNA, 26 bp, Homo sapiens
ttgctcccctgccgcagcctgtggca

SEQ ID NO: 96600 - DNA, 26 bp, Homo sapiens
tgctcccctgccgcagcctgtggcaa

SEQ ID NO: 96601 - DNA, 26 bp, Homo sapiens
gctcccctgccgcagcctgtggcaaa

SEQ ID NO: 96602 - DNA, 26 bp, Homo sapiens
ctcccctgccgcagcctgtggcaaac

SEQ ID NO: 96603 - DNA, 26 bp, Homo sapiens
tcccctgccgcagcctgtggcaaacg

SEQ ID NO: 96604 - DNA, 26 bp, Homo sapiens
cccctgccgcagcctgtggcaaacgc

SEQ ID NO: 96605 - DNA, 26 bp, Homo sapiens
ccctgccgcagcctgtggcaaacgct

SEQ ID NO: 96606 - DNA, 26 bp, Homo sapiens
cctgccgcagcctgtggcaaacgctg

SEQ ID NO: 96607 - DNA, 26 bp, Homo sapiens
ctgccgcagcctgtggcaaacgctgg

SEQ ID NO: 96608 - DNA, 26 bp, Homo sapiens
tgccgcagcctgtggcaaacgctggg

SEQ ID NO: 96609 - DNA, 26 bp, Homo sapiens
gccgcagcctgtggcaaacgctgggt

SEQ ID NO: 96610 - DNA, 26 bp, Homo sapiens
ccgcagcctgtggcaaacgctgggtt

SEQ ID NO: 96611 - DNA, 26 bp, Homo sapiens
cgcagcctgtggcaaacgctgggttc

SEQ ID NO: 96612 - DNA, 26 bp, Homo sapiens
gcagcctgtggcaaacgctgggttca

SEQ ID NO: 96613 - DNA, 26 bp, Homo sapiens
cagcctgtggcaaacgctgggttcag

SEQ ID NO: 96614 - DNA, 26 bp, Homo sapiens
agcctgtggcaaacgctgggttcagt

SEQ ID NO: 96615 - DNA, 26 bp, Homo sapiens
gcctgtggcaaacgctgggttcagtt

SEQ ID NO: 96616 - DNA, 26 bp, Homo sapiens
cctgtggcaaacgctgggttcagttc

SEQ ID NO: 96617 - DNA, 26 bp, Homo sapiens
ctgtggcaaacgctgggttcagttca

SEQ ID NO: 96618 - DNA, 26 bp, Homo sapiens
tgtggcaaacgctgggttcagttcac

SEQ ID NO: 96619 - DNA, 26 bp, Homo sapiens
gtggcaaacgctgggttcagttcaca

SEQ ID NO: 96620 - DNA, 26 bp, Homo sapiens
tggcaaacgctgggttcagttcacag

SEQ ID NO: 96621 - DNA, 26 bp, Homo sapiens
ggcaaacgctgggttcagttcacagt

SEQ ID NO: 96622 - DNA, 26 bp, Homo sapiens
gcaaacgctgggttcagttcacagta

SEQ ID NO: 96623 - DNA, 26 bp, Homo sapiens
caaacgctgggttcagttcacagtag

SEQ ID NO: 96624 - DNA, 26 bp, Homo sapiens
aaacgctgggttcagttcacagtagt

SEQ ID NO: 96625 - DNA, 26 bp, Homo sapiens
aacgctgggttcagttcacagtagtt

SEQ ID NO: 96626 - DNA, 26 bp, Homo sapiens
acgctgggttcagttcacagtagttg

SEQ ID NO: 96627 - DNA, 26 bp, Homo sapiens
cgctgggttcagttcacagtagttgg

SEQ ID NO: 96628 - DNA, 26 bp, Homo sapiens
gctgggttcagttcacagtagttggc

SEQ ID NO: 96629 - DNA, 26 bp, Homo sapiens
ctgggttcagttcacagtagttggcc

SEQ ID NO: 96630 - DNA, 26 bp, Homo sapiens
tgggttcagttcacagtagttggcct

SEQ ID NO: 96631 - DNA, 26 bp, Homo sapiens
gggttcagttcacagtagttggcctc

SEQ ID NO: 96632 - DNA, 26 bp, Homo sapiens
ggttcagttcacagtagttggcctct

SEQ ID NO: 96633 - DNA, 26 bp, Homo sapiens
gttcagttcacagtagttggcctctg

SEQ ID NO: 96634 - DNA, 26 bp, Homo sapiens
ttcagttcacagtagttggcctctga

SEQ ID NO: 96635 - DNA, 26 bp, Homo sapiens
tcagttcacagtagttggcctctgag

SEQ ID NO: 96636 - DNA, 26 bp, Homo sapiens
cagttcacagtagttggcctctgagt

SEQ ID NO: 96637 - DNA, 26 bp, Homo sapiens
agttcacagtagttggcctctgagtt

SEQ ID NO: 96638 - DNA, 26 bp, Homo sapiens
gttcacagtagttggcctctgagttg

SEQ ID NO: 96639 - DNA, 26 bp, Homo sapiens
ttcacagtagttggcctctgagttga

SEQ ID NO: 96640 - DNA, 26 bp, Homo sapiens
tcacagtagttggcctctgagttgag

SEQ ID NO: 96641 - DNA, 26 bp, Homo sapiens
cacagtagttggcctctgagttgagc

SEQ ID NO: 96642 - DNA, 26 bp, Homo sapiens
acagtagttggcctctgagttgagcc

SEQ ID NO: 96643 - DNA, 26 bp, Homo sapiens
cagtagttggcctctgagttgagcca

SEQ ID NO: 96644 - DNA, 26 bp, Homo sapiens
agtagttggcctctgagttgagccag

SEQ ID NO: 96645 - DNA, 26 bp, Homo sapiens
gtagttggcctctgagttgagccagg

SEQ ID NO: 96646 - DNA, 26 bp, Homo sapiens
tagttggcctctgagttgagccaggc

SEQ ID NO: 96647 - DNA, 26 bp, Homo sapiens
agttggcctctgagttgagccaggca

SEQ ID NO: 96648 - DNA, 26 bp, Homo sapiens
gttggcctctgagttgagccaggcag

SEQ ID NO: 96649 - DNA, 26 bp, Homo sapiens
ttggcctctgagttgagccaggcaga

SEQ ID NO: 96650 - DNA, 26 bp, Homo sapiens
tggcctctgagttgagccaggcagag

SEQ ID NO: 96651 - DNA, 26 bp, Homo sapiens
ggcctctgagttgagccaggcagagg

SEQ ID NO: 96652 - DNA, 26 bp, Homo sapiens
gcctctgagttgagccaggcagaggg

SEQ ID NO: 96653 - DNA, 26 bp, Homo sapiens
cctctgagttgagccaggcagaggga

SEQ ID NO: 96654 - DNA, 26 bp, Homo sapiens
ctctgagttgagccaggcagagggag

SEQ ID NO: 96655 - DNA, 26 bp, Homo sapiens
tctgagttgagccaggcagagggaga

SEQ ID NO: 96656 - DNA, 26 bp, Homo sapiens
ctgagttgagccaggcagagggagac

SEQ ID NO: 96657 - DNA, 26 bp, Homo sapiens
tgagttgagccaggcagagggagacg

SEQ ID NO: 96658 - DNA, 26 bp, Homo sapiens
gagttgagccaggcagagggagacga

SEQ ID NO: 96659 - DNA, 26 bp, Homo sapiens
agttgagccaggcagagggagacgag

SEQ ID NO: 96660 - DNA, 26 bp, Homo sapiens
gttgagccaggcagagggagacgagg

SEQ ID NO: 96661 - DNA, 26 bp, Homo sapiens
ttgagccaggcagagggagacgaggg

SEQ ID NO: 96662 - DNA, 26 bp, Homo sapiens
tgagccaggcagagggagacgaggga

SEQ ID NO: 96663 - DNA, 26 bp, Homo sapiens
gagccaggcagagggagacgagggaa

SEQ ID NO: 96664 - DNA, 26 bp, Homo sapiens
agccaggcagagggagacgagggaac

SEQ ID NO: 96665 - DNA, 26 bp, Homo sapiens
gccaggcagagggagacgagggaacc

SEQ ID NO: 96666 - DNA, 26 bp, Homo sapiens
ccaggcagagggagacgagggaacct

SEQ ID NO: 96667 - DNA, 26 bp, Homo sapiens
caggcagagggagacgagggaacctt

SEQ ID NO: 96668 - DNA, 26 bp, Homo sapiens
aggcagagggagacgagggaaccttg

SEQ ID NO: 96669 - DNA, 26 bp, Homo sapiens
ggcagagggagacgagggaaccttga

SEQ ID NO: 96670 - DNA, 26 bp, Homo sapiens
gcagagggagacgagggaaccttgag

SEQ ID NO: 96671 - DNA, 26 bp, Homo sapiens
cagagggagacgagggaaccttgagg

SEQ ID NO: 96672 - DNA, 26 bp, Homo sapiens
agagggagacgagggaaccttgagga

SEQ ID NO: 96673 - DNA, 26 bp, Homo sapiens
gagggagacgagggaaccttgaggaa

SEQ ID NO: 96674 - DNA, 26 bp, Homo sapiens
agggagacgagggaaccttgaggaac

SEQ ID NO: 96675 - DNA, 26 bp, Homo sapiens
gggagacgagggaaccttgaggaacg

SEQ ID NO: 96676 - DNA, 26 bp, Homo sapiens
ggagacgagggaaccttgaggaacgg

SEQ ID NO: 96677 - DNA, 26 bp, Homo sapiens
gagacgagggaaccttgaggaacggc

SEQ ID NO: 96678 - DNA, 26 bp, Homo sapiens
agacgagggaaccttgaggaacggca

SEQ ID NO: 96679 - DNA, 26 bp, Homo sapiens
gacgagggaaccttgaggaacggcac

SEQ ID NO: 96680 - DNA, 26 bp, Homo sapiens
acgagggaaccttgaggaacggcacc

SEQ ID NO: 96681 - DNA, 26 bp, Homo sapiens
cgagggaaccttgaggaacggcacct

SEQ ID NO: 96682 - DNA, 26 bp, Homo sapiens
gagggaaccttgaggaacggcacctt

SEQ ID NO: 96683 - DNA, 26 bp, Homo sapiens
agggaaccttgaggaacggcaccttg

SEQ ID NO: 96684 - DNA, 26 bp, Homo sapiens
gggaaccttgaggaacggcaccttgc

SEQ ID NO: 96685 - DNA, 26 bp, Homo sapiens
ggaaccttgaggaacggcaccttgca

SEQ ID NO: 96686 - DNA, 26 bp, Homo sapiens
gaaccttgaggaacggcaccttgcag

SEQ ID NO: 96687 - DNA, 26 bp, Homo sapiens
aaccttgaggaacggcaccttgcagg

SEQ ID NO: 96688 - DNA, 26 bp, Homo sapiens
accttgaggaacggcaccttgcaggg

SEQ ID NO: 96689 - DNA, 26 bp, Homo sapiens
ccttgaggaacggcaccttgcagggc

SEQ ID NO: 96690 - DNA, 26 bp, Homo sapiens
cttgaggaacggcaccttgcagggct

SEQ ID NO: 96691 - DNA, 26 bp, Homo sapiens
ttgaggaacggcaccttgcagggctt

SEQ ID NO: 96692 - DNA, 26 bp, Homo sapiens
tgaggaacggcaccttgcagggctta

SEQ ID NO: 96693 - DNA, 26 bp, Homo sapiens
gaggaacggcaccttgcagggcttag

SEQ ID NO: 96694 - DNA, 26 bp, Homo sapiens
aggaacggcaccttgcagggcttagg

SEQ ID NO: 96695 - DNA, 26 bp, Homo sapiens
ggaacggcaccttgcagggcttaggc

SEQ ID NO: 96696 - DNA, 26 bp, Homo sapiens
gaacggcaccttgcagggcttaggcg

SEQ ID NO: 96697 - DNA, 26 bp, Homo sapiens
aacggcaccttgcagggcttaggcgg

SEQ ID NO: 96698 - DNA, 26 bp, Homo sapiens
acggcaccttgcagggcttaggcggg

SEQ ID NO: 96699 - DNA, 26 bp, Homo sapiens
cggcaccttgcagggcttaggcgggg

SEQ ID NO: 96700 - DNA, 26 bp, Homo sapiens
ggcaccttgcagggcttaggcggggg

SEQ ID NO: 96701 - DNA, 26 bp, Homo sapiens
gcaccttgcagggcttaggcgggggc

SEQ ID NO: 96702 - DNA, 26 bp, Homo sapiens
caccttgcagggcttaggcgggggct

SEQ ID NO: 96703 - DNA, 26 bp, Homo sapiens
accttgcagggcttaggcgggggctt

SEQ ID NO: 96704 - DNA, 26 bp, Homo sapiens
ccttgcagggcttaggcgggggctta

SEQ ID NO: 96705 - DNA, 26 bp, Homo sapiens
cttgcagggcttaggcgggggcttag

SEQ ID NO: 96706 - DNA, 26 bp, Homo sapiens
ttgcagggcttaggcgggggcttagg

SEQ ID NO: 96707 - DNA, 26 bp, Homo sapiens
tgcagggcttaggcgggggcttaggg

SEQ ID NO: 96708 - DNA, 26 bp, Homo sapiens
gcagggcttaggcgggggcttagggc

SEQ ID NO: 96709 - DNA, 26 bp, Homo sapiens
cagggcttaggcgggggcttagggca

SEQ ID NO: 96710 - DNA, 26 bp, Homo sapiens
agggcttaggcgggggcttagggcac

SEQ ID NO: 96711 - DNA, 26 bp, Homo sapiens
gggcttaggcgggggcttagggcaca

SEQ ID NO: 96712 - DNA, 26 bp, Homo sapiens
ggcttaggcgggggcttagggcacag

SEQ ID NO: 96713 - DNA, 26 bp, Homo sapiens
gcttaggcgggggcttagggcacagt

SEQ ID NO: 96714 - DNA, 26 bp, Homo sapiens
cttaggcgggggcttagggcacagtt

SEQ ID NO: 96715 - DNA, 26 bp, Homo sapiens
ttaggcgggggcttagggcacagttg

SEQ ID NO: 96716 - DNA, 26 bp, Homo sapiens
taggcgggggcttagggcacagttga

SEQ ID NO: 96717 - DNA, 26 bp, Homo sapiens
aggcgggggcttagggcacagttgac

SEQ ID NO: 96718 - DNA, 26 bp, Homo sapiens
ggcgggggcttagggcacagttgact

SEQ ID NO: 96719 - DNA, 26 bp, Homo sapiens
gcgggggcttagggcacagttgactg

SEQ ID NO: 96720 - DNA, 26 bp, Homo sapiens
cgggggcttagggcacagttgactgt

SEQ ID NO: 96721 - DNA, 26 bp, Homo sapiens
gggggcttagggcacagttgactgtc

SEQ ID NO: 96722 - DNA, 26 bp, Homo sapiens
ggggcttagggcacagttgactgtct

SEQ ID NO: 96723 - DNA, 26 bp, Homo sapiens
gggcttagggcacagttgactgtctg

SEQ ID NO: 96724 - DNA, 26 bp, Homo sapiens
ggcttagggcacagttgactgtctga

SEQ ID NO: 96725 - DNA, 26 bp, Homo sapiens
gcttagggcacagttgactgtctgat

SEQ ID NO: 96726 - DNA, 26 bp, Homo sapiens
cttagggcacagttgactgtctgatc

SEQ ID NO: 96727 - DNA, 26 bp, Homo sapiens
ttagggcacagttgactgtctgatcc

SEQ ID NO: 96728 - DNA, 26 bp, Homo sapiens
tagggcacagttgactgtctgatccc

SEQ ID NO: 96729 - DNA, 26 bp, Homo sapiens
agggcacagttgactgtctgatcccc

SEQ ID NO: 96730 - DNA, 26 bp, Homo sapiens
gggcacagttgactgtctgatcccct

SEQ ID NO: 96731 - DNA, 26 bp, Homo sapiens
ggcacagttgactgtctgatcccctc

SEQ ID NO: 96732 - DNA, 26 bp, Homo sapiens
gcacagttgactgtctgatcccctca

SEQ ID NO: 96733 - DNA, 26 bp, Homo sapiens
cacagttgactgtctgatcccctcag

SEQ ID NO: 96734 - DNA, 26 bp, Homo sapiens
acagttgactgtctgatcccctcagc

SEQ ID NO: 96735 - DNA, 26 bp, Homo sapiens
cagttgactgtctgatcccctcagcg

SEQ ID NO: 96736 - DNA, 26 bp, Homo sapiens
agttgactgtctgatcccctcagcgc

SEQ ID NO: 96737 - DNA, 26 bp, Homo sapiens
gttgactgtctgatcccctcagcgcc

SEQ ID NO: 96738 - DNA, 26 bp, Homo sapiens
ttgactgtctgatcccctcagcgcct

SEQ ID NO: 96739 - DNA, 26 bp, Homo sapiens
tgactgtctgatcccctcagcgcctc

SEQ ID NO: 96740 - DNA, 26 bp, Homo sapiens
gactgtctgatcccctcagcgcctcc

SEQ ID NO: 96741 - DNA, 26 bp, Homo sapiens
actgtctgatcccctcagcgcctccc

SEQ ID NO: 96742 - DNA, 26 bp, Homo sapiens
ctgtctgatcccctcagcgcctcccc

SEQ ID NO: 96743 - DNA, 26 bp, Homo sapiens
tgtctgatcccctcagcgcctcccca

SEQ ID NO: 96744 - DNA, 26 bp, Homo sapiens
gtctgatcccctcagcgcctccccag

SEQ ID NO: 96745 - DNA, 26 bp, Homo sapiens
tctgatcccctcagcgcctccccagc

SEQ ID NO: 96746 - DNA, 26 bp, Homo sapiens
ctgatcccctcagcgcctccccagcc

SEQ ID NO: 96747 - DNA, 26 bp, Homo sapiens
tgatcccctcagcgcctccccagccc

SEQ ID NO: 96748 - DNA, 26 bp, Homo sapiens
gatcccctcagcgcctccccagccct

SEQ ID NO: 96749 - DNA, 26 bp, Homo sapiens
atcccctcagcgcctccccagccctg

SEQ ID NO: 96750 - DNA, 26 bp, Homo sapiens
tcccctcagcgcctccccagccctgg

SEQ ID NO: 96751 - DNA, 26 bp, Homo sapiens
cccctcagcgcctccccagccctggc

SEQ ID NO: 96752 - DNA, 26 bp, Homo sapiens
ccctcagcgcctccccagccctggcg

SEQ ID NO: 96753 - DNA, 26 bp, Homo sapiens
cctcagcgcctccccagccctggcgt

SEQ ID NO: 96754 - DNA, 26 bp, Homo sapiens
ctcagcgcctccccagccctggcgtc

SEQ ID NO: 96755 - DNA, 26 bp, Homo sapiens
tcagcgcctccccagccctggcgtct

SEQ ID NO: 96756 - DNA, 26 bp, Homo sapiens
cagcgcctccccagccctggcgtctg

SEQ ID NO: 96757 - DNA, 26 bp, Homo sapiens
agcgcctccccagccctggcgtctga

SEQ ID NO: 96758 - DNA, 26 bp, Homo sapiens
gcgcctccccagccctggcgtctgag

SEQ ID NO: 96759 - DNA, 26 bp, Homo sapiens
cgcctccccagccctggcgtctgagg

SEQ ID NO: 96760 - DNA, 26 bp, Homo sapiens
gcctccccagccctggcgtctgagga

SEQ ID NO: 96761 - DNA, 26 bp, Homo sapiens
cctccccagccctggcgtctgaggag

SEQ ID NO: 96762 - DNA, 26 bp, Homo sapiens
ctccccagccctggcgtctgaggaga

SEQ ID NO: 96763 - DNA, 26 bp, Homo sapiens
tccccagccctggcgtctgaggagac

SEQ ID NO: 96764 - DNA, 26 bp, Homo sapiens
ccccagccctggcgtctgaggagacc

SEQ ID NO: 96765 - DNA, 26 bp, Homo sapiens
cccagccctggcgtctgaggagaccc

SEQ ID NO: 96766 - DNA, 26 bp, Homo sapiens
ccagccctggcgtctgaggagaccct

SEQ ID NO: 96767 - DNA, 26 bp, Homo sapiens
cagccctggcgtctgaggagaccctc

SEQ ID NO: 96768 - DNA, 26 bp, Homo sapiens
agccctggcgtctgaggagaccctcc

SEQ ID NO: 96769 - DNA, 26 bp, Homo sapiens
gccctggcgtctgaggagaccctccg

SEQ ID NO: 96770 - DNA, 26 bp, Homo sapiens
ccctggcgtctgaggagaccctccga

SEQ ID NO: 96771 - DNA, 26 bp, Homo sapiens
cctggcgtctgaggagaccctccgaa

SEQ ID NO: 96772 - DNA, 26 bp, Homo sapiens
ctggcgtctgaggagaccctccgaac

SEQ ID NO: 96773 - DNA, 26 bp, Homo sapiens
tggcgtctgaggagaccctccgaacc

SEQ ID NO: 96774 - DNA, 26 bp, Homo sapiens
ggcgtctgaggagaccctccgaacca

SEQ ID NO: 96775 - DNA, 26 bp, Homo sapiens
gcgtctgaggagaccctccgaaccac

SEQ ID NO: 96776 - DNA, 26 bp, Homo sapiens
cgtctgaggagaccctccgaaccact

SEQ ID NO: 96777 - DNA, 26 bp, Homo sapiens
gtctgaggagaccctccgaaccactg

SEQ ID NO: 96778 - DNA, 26 bp, Homo sapiens
tctgaggagaccctccgaaccactgc

SEQ ID NO: 96779 - DNA, 26 bp, Homo sapiens
ctgaggagaccctccgaaccactgct

SEQ ID NO: 96780 - DNA, 26 bp, Homo sapiens
tgaggagaccctccgaaccactgctg

SEQ ID NO: 96781 - DNA, 26 bp, Homo sapiens
gaggagaccctccgaaccactgctgg

SEQ ID NO: 96782 - DNA, 26 bp, Homo sapiens
aggagaccctccgaaccactgctggg

SEQ ID NO: 96783 - DNA, 26 bp, Homo sapiens
ggagaccctccgaaccactgctgggc

SEQ ID NO: 96784 - DNA, 26 bp, Homo sapiens
gagaccctccgaaccactgctgggct

SEQ ID NO: 96785 - DNA, 26 bp, Homo sapiens
agaccctccgaaccactgctgggctc

SEQ ID NO: 96786 - DNA, 26 bp, Homo sapiens
gaccctccgaaccactgctgggctca

SEQ ID NO: 96787 - DNA, 26 bp, Homo sapiens
accctccgaaccactgctgggctcag

SEQ ID NO: 96788 - DNA, 26 bp, Homo sapiens
ccctccgaaccactgctgggctcagg

SEQ ID NO: 96789 - DNA, 26 bp, Homo sapiens
cctccgaaccactgctgggctcaggg

SEQ ID NO: 96790 - DNA, 26 bp, Homo sapiens
ctccgaaccactgctgggctcagggc

SEQ ID NO: 96791 - DNA, 26 bp, Homo sapiens
tccgaaccactgctgggctcagggca

SEQ ID NO: 96792 - DNA, 26 bp, Homo sapiens
ccgaaccactgctgggctcagggcag

SEQ ID NO: 96793 - DNA, 26 bp, Homo sapiens
cgaaccactgctgggctcagggcagg

SEQ ID NO: 96794 - DNA, 26 bp, Homo sapiens
gaaccactgctgggctcagggcaggc

SEQ ID NO: 96795 - DNA, 26 bp, Homo sapiens
aaccactgctgggctcagggcaggct

SEQ ID NO: 96796 - DNA, 26 bp, Homo sapiens
accactgctgggctcagggcaggctc

SEQ ID NO: 96797 - DNA, 26 bp, Homo sapiens
ccactgctgggctcagggcaggctcg

SEQ ID NO: 96798 - DNA, 26 bp, Homo sapiens
cactgctgggctcagggcaggctcgc

SEQ ID NO: 96799 - DNA, 26 bp, Homo sapiens
actgctgggctcagggcaggctcgct

SEQ ID NO: 96800 - DNA, 26 bp, Homo sapiens
ctgctgggctcagggcaggctcgctt

SEQ ID NO: 96801 - DNA, 26 bp, Homo sapiens
tgctgggctcagggcaggctcgcttc

SEQ ID NO: 96802 - DNA, 26 bp, Homo sapiens
gctgggctcagggcaggctcgcttcc

SEQ ID NO: 96803 - DNA, 26 bp, Homo sapiens
ctgggctcagggcaggctcgcttccc

SEQ ID NO: 96804 - DNA, 26 bp, Homo sapiens
tgggctcagggcaggctcgcttcccg

SEQ ID NO: 96805 - DNA, 26 bp, Homo sapiens
gggctcagggcaggctcgcttcccgt

SEQ ID NO: 96806 - DNA, 26 bp, Homo sapiens
ggctcagggcaggctcgcttcccgtc

SEQ ID NO: 96807 - DNA, 26 bp, Homo sapiens
gctcagggcaggctcgcttcccgtcc

SEQ ID NO: 96808 - DNA, 26 bp, Homo sapiens
ctcagggcaggctcgcttcccgtcct

SEQ ID NO: 96809 - DNA, 26 bp, Homo sapiens
tcagggcaggctcgcttcccgtcctg

SEQ ID NO: 96810 - DNA, 26 bp, Homo sapiens
cagggcaggctcgcttcccgtcctga

SEQ ID NO: 96811 - DNA, 26 bp, Homo sapiens
agggcaggctcgcttcccgtcctgaa

SEQ ID NO: 96812 - DNA, 26 bp, Homo sapiens
gggcaggctcgcttcccgtcctgaac

SEQ ID NO: 96813 - DNA, 26 bp, Homo sapiens
ggcaggctcgcttcccgtcctgaaca

SEQ ID NO: 96814 - DNA, 26 bp, Homo sapiens
gcaggctcgcttcccgtcctgaacac

SEQ ID NO: 96815 - DNA, 26 bp, Homo sapiens
caggctcgcttcccgtcctgaacaca

SEQ ID NO: 96816 - DNA, 26 bp, Homo sapiens
aggctcgcttcccgtcctgaacacag

SEQ ID NO: 96817 - DNA, 26 bp, Homo sapiens
ggctcgcttcccgtcctgaacacagg

SEQ ID NO: 96818 - DNA, 26 bp, Homo sapiens
gctcgcttcccgtcctgaacacaggt

SEQ ID NO: 96819 - DNA, 26 bp, Homo sapiens
ctcgcttcccgtcctgaacacaggtg

SEQ ID NO: 96820 - DNA, 26 bp, Homo sapiens
tcgcttcccgtcctgaacacaggtga

SEQ ID NO: 96821 - DNA, 26 bp, Homo sapiens
cgcttcccgtcctgaacacaggtgag

SEQ ID NO: 96822 - DNA, 26 bp, Homo sapiens
gcttcccgtcctgaacacaggtgagt

SEQ ID NO: 96823 - DNA, 26 bp, Homo sapiens
cttcccgtcctgaacacaggtgagtt

SEQ ID NO: 96824 - DNA, 26 bp, Homo sapiens
ttcccgtcctgaacacaggtgagttt

SEQ ID NO: 96825 - DNA, 26 bp, Homo sapiens
tcccgtcctgaacacaggtgagtttg

SEQ ID NO: 96826 - DNA, 26 bp, Homo sapiens
cccgtcctgaacacaggtgagtttgg

SEQ ID NO: 96827 - DNA, 26 bp, Homo sapiens
ccgtcctgaacacaggtgagtttggg

SEQ ID NO: 96828 - DNA, 26 bp, Homo sapiens
cgtcctgaacacaggtgagtttgggc

SEQ ID NO: 96829 - DNA, 26 bp, Homo sapiens
gtcctgaacacaggtgagtttgggca

SEQ ID NO: 96830 - DNA, 26 bp, Homo sapiens
tcctgaacacaggtgagtttgggcag

SEQ ID NO: 96831 - DNA, 26 bp, Homo sapiens
cctgaacacaggtgagtttgggcagg

SEQ ID NO: 96832 - DNA, 26 bp, Homo sapiens
ctgaacacaggtgagtttgggcaggg

SEQ ID NO: 96833 - DNA, 26 bp, Homo sapiens
tgaacacaggtgagtttgggcagggg

SEQ ID NO: 96834 - DNA, 26 bp, Homo sapiens
gaacacaggtgagtttgggcaggggc

SEQ ID NO: 96835 - DNA, 26 bp, Homo sapiens
aacacaggtgagtttgggcaggggct

SEQ ID NO: 96836 - DNA, 26 bp, Homo sapiens
acacaggtgagtttgggcaggggctt

SEQ ID NO: 96837 - DNA, 26 bp, Homo sapiens
cacaggtgagtttgggcaggggcttg

SEQ ID NO: 96838 - DNA, 26 bp, Homo sapiens
acaggtgagtttgggcaggggcttgt

SEQ ID NO: 96839 - DNA, 26 bp, Homo sapiens
caggtgagtttgggcaggggcttgtg

SEQ ID NO: 96840 - DNA, 26 bp, Homo sapiens
aggtgagtttgggcaggggcttgtgt

SEQ ID NO: 96841 - DNA, 26 bp, Homo sapiens
ggtgagtttgggcaggggcttgtgtc

SEQ ID NO: 96842 - DNA, 26 bp, Homo sapiens
gtgagtttgggcaggggcttgtgtcc

SEQ ID NO: 96843 - DNA, 26 bp, Homo sapiens
tgagtttgggcaggggcttgtgtcca

SEQ ID NO: 96844 - DNA, 26 bp, Homo sapiens
gagtttgggcaggggcttgtgtccac

SEQ ID NO: 96845 - DNA, 26 bp, Homo sapiens
agtttgggcaggggcttgtgtccaca

SEQ ID NO: 96846 - DNA, 26 bp, Homo sapiens
gtttgggcaggggcttgtgtccacac

SEQ ID NO: 96847 - DNA, 26 bp, Homo sapiens
tttgggcaggggcttgtgtccacacc

SEQ ID NO: 96848 - DNA, 26 bp, Homo sapiens
ttgggcaggggcttgtgtccacaccc

SEQ ID NO: 96849 - DNA, 26 bp, Homo sapiens
tgggcaggggcttgtgtccacacccg

SEQ ID NO: 96850 - DNA, 26 bp, Homo sapiens
gggcaggggcttgtgtccacacccga

SEQ ID NO: 96851 - DNA, 26 bp, Homo sapiens
ggcaggggcttgtgtccacacccgag

SEQ ID NO: 96852 - DNA, 26 bp, Homo sapiens
gcaggggcttgtgtccacacccgagg

SEQ ID NO: 96853 - DNA, 26 bp, Homo sapiens
caggggcttgtgtccacacccgagga

SEQ ID NO: 96854 - DNA, 26 bp, Homo sapiens
aggggcttgtgtccacacccgaggac

SEQ ID NO: 96855 - DNA, 26 bp, Homo sapiens
ggggcttgtgtccacacccgaggact

SEQ ID NO: 96856 - DNA, 26 bp, Homo sapiens
gggcttgtgtccacacccgaggactg

SEQ ID NO: 96857 - DNA, 26 bp, Homo sapiens
ggcttgtgtccacacccgaggactga

SEQ ID NO: 96858 - DNA, 26 bp, Homo sapiens
gcttgtgtccacacccgaggactgag

SEQ ID NO: 96859 - DNA, 26 bp, Homo sapiens
cttgtgtccacacccgaggactgagg

SEQ ID NO: 96860 - DNA, 26 bp, Homo sapiens
ttgtgtccacacccgaggactgaggt

SEQ ID NO: 96861 - DNA, 26 bp, Homo sapiens
tgtgtccacacccgaggactgaggtg

SEQ ID NO: 96862 - DNA, 26 bp, Homo sapiens
gtgtccacacccgaggactgaggtgg

SEQ ID NO: 96863 - DNA, 26 bp, Homo sapiens
tgtccacacccgaggactgaggtggc

SEQ ID NO: 96864 - DNA, 26 bp, Homo sapiens
gtccacacccgaggactgaggtggca

SEQ ID NO: 96865 - DNA, 26 bp, Homo sapiens
tccacacccgaggactgaggtggcag

SEQ ID NO: 96866 - DNA, 26 bp, Homo sapiens
ccacacccgaggactgaggtggcagc

SEQ ID NO: 96867 - DNA, 26 bp, Homo sapiens
cacacccgaggactgaggtggcagct

SEQ ID NO: 96868 - DNA, 26 bp, Homo sapiens
acacccgaggactgaggtggcagctt

SEQ ID NO: 96869 - DNA, 26 bp, Homo sapiens
cacccgaggactgaggtggcagcttg

SEQ ID NO: 96870 - DNA, 26 bp, Homo sapiens
acccgaggactgaggtggcagcttgc

SEQ ID NO: 96871 - DNA, 26 bp, Homo sapiens
cccgaggactgaggtggcagcttgca

SEQ ID NO: 96872 - DNA, 26 bp, Homo sapiens
ccgaggactgaggtggcagcttgcag

SEQ ID NO: 96873 - DNA, 26 bp, Homo sapiens
cgaggactgaggtggcagcttgcagc

SEQ ID NO: 96874 - DNA, 26 bp, Homo sapiens
gaggactgaggtggcagcttgcagcc

SEQ ID NO: 96875 - DNA, 26 bp, Homo sapiens
aggactgaggtggcagcttgcagcca

SEQ ID NO: 96876 - DNA, 26 bp, Homo sapiens
ggactgaggtggcagcttgcagccaa

SEQ ID NO: 96877 - DNA, 26 bp, Homo sapiens
gactgaggtggcagcttgcagccaat

SEQ ID NO: 96878 - DNA, 26 bp, Homo sapiens
actgaggtggcagcttgcagccaatc

SEQ ID NO: 96879 - DNA, 26 bp, Homo sapiens
ctgaggtggcagcttgcagccaatcg

SEQ ID NO: 96880 - DNA, 26 bp, Homo sapiens
tgaggtggcagcttgcagccaatcgg

SEQ ID NO: 96881 - DNA, 26 bp, Homo sapiens
gaggtggcagcttgcagccaatcggc

SEQ ID NO: 96882 - DNA, 26 bp, Homo sapiens
aggtggcagcttgcagccaatcggca

SEQ ID NO: 96883 - DNA, 26 bp, Homo sapiens
ggtggcagcttgcagccaatcggcag

SEQ ID NO: 96884 - DNA, 26 bp, Homo sapiens
gtggcagcttgcagccaatcggcagg

SEQ ID NO: 96885 - DNA, 26 bp, Homo sapiens
tggcagcttgcagccaatcggcaggt

SEQ ID NO: 96886 - DNA, 26 bp, Homo sapiens
ggcagcttgcagccaatcggcaggta

SEQ ID NO: 96887 - DNA, 26 bp, Homo sapiens
gcagcttgcagccaatcggcaggtag

SEQ ID NO: 96888 - DNA, 26 bp, Homo sapiens
cagcttgcagccaatcggcaggtagc

SEQ ID NO: 96889 - DNA, 26 bp, Homo sapiens
agcttgcagccaatcggcaggtagct

SEQ ID NO: 96890 - DNA, 26 bp, Homo sapiens
gcttgcagccaatcggcaggtagctc

SEQ ID NO: 96891 - DNA, 26 bp, Homo sapiens
cttgcagccaatcggcaggtagctct

SEQ ID NO: 96892 - DNA, 26 bp, Homo sapiens
ttgcagccaatcggcaggtagctctc

SEQ ID NO: 96893 - DNA, 26 bp, Homo sapiens
tgcagccaatcggcaggtagctctct

SEQ ID NO: 96894 - DNA, 26 bp, Homo sapiens
gcagccaatcggcaggtagctctctg

SEQ ID NO: 96895 - DNA, 26 bp, Homo sapiens
cagccaatcggcaggtagctctctga

SEQ ID NO: 96896 - DNA, 26 bp, Homo sapiens
agccaatcggcaggtagctctctgac

SEQ ID NO: 96897 - DNA, 26 bp, Homo sapiens
gccaatcggcaggtagctctctgact

SEQ ID NO: 96898 - DNA, 26 bp, Homo sapiens
ccaatcggcaggtagctctctgactg

SEQ ID NO: 96899 - DNA, 26 bp, Homo sapiens
caatcggcaggtagctctctgactgg

SEQ ID NO: 96900 - DNA, 26 bp, Homo sapiens
aatcggcaggtagctctctgactggt

SEQ ID NO: 96901 - DNA, 26 bp, Homo sapiens
atcggcaggtagctctctgactggtg

SEQ ID NO: 96902 - DNA, 26 bp, Homo sapiens
tcggcaggtagctctctgactggtgg

SEQ ID NO: 96903 - DNA, 26 bp, Homo sapiens
cggcaggtagctctctgactggtggg

SEQ ID NO: 96904 - DNA, 26 bp, Homo sapiens
ggcaggtagctctctgactggtgggc

SEQ ID NO: 96905 - DNA, 26 bp, Homo sapiens
gcaggtagctctctgactggtgggct

SEQ ID NO: 96906 - DNA, 26 bp, Homo sapiens
caggtagctctctgactggtgggctt

SEQ ID NO: 96907 - DNA, 26 bp, Homo sapiens
aggtagctctctgactggtgggcttt

SEQ ID NO: 96908 - DNA, 26 bp, Homo sapiens
ggtagctctctgactggtgggctttg

SEQ ID NO: 96909 - DNA, 26 bp, Homo sapiens
gtagctctctgactggtgggctttga

SEQ ID NO: 96910 - DNA, 26 bp, Homo sapiens
tagctctctgactggtgggctttgag

SEQ ID NO: 96911 - DNA, 26 bp, Homo sapiens
agctctctgactggtgggctttgagg

SEQ ID NO: 96912 - DNA, 26 bp, Homo sapiens
gctctctgactggtgggctttgaggg

SEQ ID NO: 96913 - DNA, 26 bp, Homo sapiens
ctctctgactggtgggctttgaggga

SEQ ID NO: 96914 - DNA, 26 bp, Homo sapiens
tctctgactggtgggctttgagggac

SEQ ID NO: 96915 - DNA, 26 bp, Homo sapiens
ctctgactggtgggctttgagggaca

SEQ ID NO: 96916 - DNA, 26 bp, Homo sapiens
tctgactggtgggctttgagggacaa

SEQ ID NO: 96917 - DNA, 26 bp, Homo sapiens
ctgactggtgggctttgagggacaag

SEQ ID NO: 96918 - DNA, 26 bp, Homo sapiens
tgactggtgggctttgagggacaagg

SEQ ID NO: 96919 - DNA, 26 bp, Homo sapiens
gactggtgggctttgagggacaaggc

SEQ ID NO: 96920 - DNA, 26 bp, Homo sapiens
actggtgggctttgagggacaaggct

SEQ ID NO: 96921 - DNA, 26 bp, Homo sapiens
ctggtgggctttgagggacaaggctc

SEQ ID NO: 96922 - DNA, 26 bp, Homo sapiens
tggtgggctttgagggacaaggctct

SEQ ID NO: 96923 - DNA, 26 bp, Homo sapiens
ggtgggctttgagggacaaggctctt

SEQ ID NO: 96924 - DNA, 26 bp, Homo sapiens
gtgggctttgagggacaaggctcttc

SEQ ID NO: 96925 - DNA, 26 bp, Homo sapiens
tgggctttgagggacaaggctcttct

SEQ ID NO: 96926 - DNA, 26 bp, Homo sapiens
gggctttgagggacaaggctcttctg

SEQ ID NO: 96927 - DNA, 26 bp, Homo sapiens
ggctttgagggacaaggctcttctgt

SEQ ID NO: 96928 - DNA, 26 bp, Homo sapiens
gctttgagggacaaggctcttctgtc

SEQ ID NO: 96929 - DNA, 26 bp, Homo sapiens
ctttgagggacaaggctcttctgtcc

SEQ ID NO: 96930 - DNA, 26 bp, Homo sapiens
tttgagggacaaggctcttctgtcct

SEQ ID NO: 96931 - DNA, 26 bp, Homo sapiens
ttgagggacaaggctcttctgtcctg

SEQ ID NO: 96932 - DNA, 26 bp, Homo sapiens
tgagggacaaggctcttctgtcctgc

SEQ ID NO: 96933 - DNA, 26 bp, Homo sapiens
gagggacaaggctcttctgtcctgca

SEQ ID NO: 96934 - DNA, 26 bp, Homo sapiens
agggacaaggctcttctgtcctgcat

SEQ ID NO: 96935 - DNA, 26 bp, Homo sapiens
gggacaaggctcttctgtcctgcatg

SEQ ID NO: 96936 - DNA, 26 bp, Homo sapiens
ggacaaggctcttctgtcctgcatgt

SEQ ID NO: 96937 - DNA, 26 bp, Homo sapiens
gacaaggctcttctgtcctgcatgtg

SEQ ID NO: 96938 - DNA, 26 bp, Homo sapiens
acaaggctcttctgtcctgcatgtga

SEQ ID NO: 96939 - DNA, 26 bp, Homo sapiens
caaggctcttctgtcctgcatgtgat

SEQ ID NO: 96940 - DNA, 26 bp, Homo sapiens
aaggctcttctgtcctgcatgtgatc

SEQ ID NO: 96941 - DNA, 26 bp, Homo sapiens
aggctcttctgtcctgcatgtgatcc

SEQ ID NO: 96942 - DNA, 26 bp, Homo sapiens
ggctcttctgtcctgcatgtgatcca

SEQ ID NO: 96943 - DNA, 26 bp, Homo sapiens
gctcttctgtcctgcatgtgatccag

SEQ ID NO: 96944 - DNA, 26 bp, Homo sapiens
ctcttctgtcctgcatgtgatccagg

SEQ ID NO: 96945 - DNA, 26 bp, Homo sapiens
tcttctgtcctgcatgtgatccaggc

SEQ ID NO: 96946 - DNA, 26 bp, Homo sapiens
cttctgtcctgcatgtgatccaggca

SEQ ID NO: 96947 - DNA, 26 bp, Homo sapiens
ttctgtcctgcatgtgatccaggcag

SEQ ID NO: 96948 - DNA, 26 bp, Homo sapiens
tctgtcctgcatgtgatccaggcagg

SEQ ID NO: 96949 - DNA, 26 bp, Homo sapiens
ctgtcctgcatgtgatccaggcaggc

SEQ ID NO: 96950 - DNA, 26 bp, Homo sapiens
tgtcctgcatgtgatccaggcaggcg

SEQ ID NO: 96951 - DNA, 26 bp, Homo sapiens
gtcctgcatgtgatccaggcaggcgg

SEQ ID NO: 96952 - DNA, 26 bp, Homo sapiens
tcctgcatgtgatccaggcaggcggg

SEQ ID NO: 96953 - DNA, 26 bp, Homo sapiens
cctgcatgtgatccaggcaggcgggc

SEQ ID NO: 96954 - DNA, 26 bp, Homo sapiens
ctgcatgtgatccaggcaggcgggct

SEQ ID NO: 96955 - DNA, 26 bp, Homo sapiens
tgcatgtgatccaggcaggcgggctg

SEQ ID NO: 96956 - DNA, 26 bp, Homo sapiens
gcatgtgatccaggcaggcgggctgg

SEQ ID NO: 96957 - DNA, 26 bp, Homo sapiens
catgtgatccaggcaggcgggctggc

SEQ ID NO: 96958 - DNA, 26 bp, Homo sapiens
atgtgatccaggcaggcgggctggct

SEQ ID NO: 96959 - DNA, 26 bp, Homo sapiens
tgtgatccaggcaggcgggctggcta

SEQ ID NO: 96960 - DNA, 26 bp, Homo sapiens
gtgatccaggcaggcgggctggctac

SEQ ID NO: 96961 - DNA, 26 bp, Homo sapiens
tgatccaggcaggcgggctggctacc

SEQ ID NO: 96962 - DNA, 26 bp, Homo sapiens
gatccaggcaggcgggctggctacca

SEQ ID NO: 96963 - DNA, 26 bp, Homo sapiens
atccaggcaggcgggctggctaccac

SEQ ID NO: 96964 - DNA, 26 bp, Homo sapiens
tccaggcaggcgggctggctaccact

SEQ ID NO: 96965 - DNA, 26 bp, Homo sapiens
ccaggcaggcgggctggctaccactc

SEQ ID NO: 96966 - DNA, 26 bp, Homo sapiens
caggcaggcgggctggctaccactct

SEQ ID NO: 96967 - DNA, 26 bp, Homo sapiens
aggcaggcgggctggctaccactctt

SEQ ID NO: 96968 - DNA, 26 bp, Homo sapiens
ggcaggcgggctggctaccactcttt

SEQ ID NO: 96969 - DNA, 26 bp, Homo sapiens
gcaggcgggctggctaccactctttt

SEQ ID NO: 96970 - DNA, 26 bp, Homo sapiens
caggcgggctggctaccactcttttc

SEQ ID NO: 96971 - DNA, 26 bp, Homo sapiens
aggcgggctggctaccactcttttct

SEQ ID NO: 96972 - DNA, 26 bp, Homo sapiens
ggcgggctggctaccactcttttctt

SEQ ID NO: 96973 - DNA, 26 bp, Homo sapiens
gcgggctggctaccactcttttcttt

SEQ ID NO: 96974 - DNA, 26 bp, Homo sapiens
cgggctggctaccactcttttctttg

SEQ ID NO: 96975 - DNA, 26 bp, Homo sapiens
gggctggctaccactcttttctttgt

SEQ ID NO: 96976 - DNA, 26 bp, Homo sapiens
ggctggctaccactcttttctttgtt

SEQ ID NO: 96977 - DNA, 26 bp, Homo sapiens
gctggctaccactcttttctttgttt

SEQ ID NO: 96978 - DNA, 26 bp, Homo sapiens
ctggctaccactcttttctttgtttc

SEQ ID NO: 96979 - DNA, 26 bp, Homo sapiens
tggctaccactcttttctttgtttct

SEQ ID NO: 96980 - DNA, 26 bp, Homo sapiens
ggctaccactcttttctttgtttctg

SEQ ID NO: 96981 - DNA, 26 bp, Homo sapiens
gctaccactcttttctttgtttctga

SEQ ID NO: 96982 - DNA, 26 bp, Homo sapiens
ctaccactcttttctttgtttctgag

SEQ ID NO: 96983 - DNA, 26 bp, Homo sapiens
taccactcttttctttgtttctgagg

SEQ ID NO: 96984 - DNA, 26 bp, Homo sapiens
accactcttttctttgtttctgagga

SEQ ID NO: 96985 - DNA, 26 bp, Homo sapiens
ccactcttttctttgtttctgaggag

SEQ ID NO: 96986 - DNA, 26 bp, Homo sapiens
cactcttttctttgtttctgaggagg

SEQ ID NO: 96987 - DNA, 26 bp, Homo sapiens
actcttttctttgtttctgaggaggt

SEQ ID NO: 96988 - DNA, 26 bp, Homo sapiens
ctcttttctttgtttctgaggaggtt

SEQ ID NO: 96989 - DNA, 26 bp, Homo sapiens
tcttttctttgtttctgaggaggttt

SEQ ID NO: 96990 - DNA, 26 bp, Homo sapiens
cttttctttgtttctgaggaggtttc

SEQ ID NO: 96991 - DNA, 26 bp, Homo sapiens
ttttctttgtttctgaggaggtttcc

SEQ ID NO: 96992 - DNA, 26 bp, Homo sapiens
tttctttgtttctgaggaggtttccc

SEQ ID NO: 96993 - DNA, 26 bp, Homo sapiens
ttctttgtttctgaggaggtttcccc

SEQ ID NO: 96994 - DNA, 26 bp, Homo sapiens
tctttgtttctgaggaggtttcccct

SEQ ID NO: 96995 - DNA, 26 bp, Homo sapiens
ctttgtttctgaggaggtttcccctg

SEQ ID NO: 96996 - DNA, 26 bp, Homo sapiens
tttgtttctgaggaggtttcccctgg

SEQ ID NO: 96997 - DNA, 26 bp, Homo sapiens
ttgtttctgaggaggtttcccctggg

SEQ ID NO: 96998 - DNA, 26 bp, Homo sapiens
tgtttctgaggaggtttcccctgggc

SEQ ID NO: 96999 - DNA, 26 bp, Homo sapiens
gtttctgaggaggtttcccctgggca

SEQ ID NO: 97000 - DNA, 26 bp, Homo sapiens
tttctgaggaggtttcccctgggcaa

SEQ ID NO: 97001 - DNA, 26 bp, Homo sapiens
ttctgaggaggtttcccctgggcaaa

SEQ ID NO: 97002 - DNA, 26 bp, Homo sapiens
tctgaggaggtttcccctgggcaaat

SEQ ID NO: 97003 - DNA, 26 bp, Homo sapiens
ctgaggaggtttcccctgggcaaatt

SEQ ID NO: 97004 - DNA, 26 bp, Homo sapiens
tgaggaggtttcccctgggcaaattc

SEQ ID NO: 97005 - DNA, 26 bp, Homo sapiens
gaggaggtttcccctgggcaaattct

SEQ ID NO: 97006 - DNA, 26 bp, Homo sapiens
aggaggtttcccctgggcaaattctg

SEQ ID NO: 97007 - DNA, 26 bp, Homo sapiens
ggaggtttcccctgggcaaattctgc

SEQ ID NO: 97008 - DNA, 26 bp, Homo sapiens
gaggtttcccctgggcaaattctgct

SEQ ID NO: 97009 - DNA, 26 bp, Homo sapiens
aggtttcccctgggcaaattctgctc

SEQ ID NO: 97010 - DNA, 26 bp, Homo sapiens
ggtttcccctgggcaaattctgctct

SEQ ID NO: 97011 - DNA, 26 bp, Homo sapiens
gtttcccctgggcaaattctgctctc

SEQ ID NO: 97012 - DNA, 26 bp, Homo sapiens
tttcccctgggcaaattctgctctcg

SEQ ID NO: 97013 - DNA, 26 bp, Homo sapiens
ttcccctgggcaaattctgctctcgg

SEQ ID NO: 97014 - DNA, 26 bp, Homo sapiens
tcccctgggcaaattctgctctcggg

SEQ ID NO: 97015 - DNA, 26 bp, Homo sapiens
cccctgggcaaattctgctctcgggc

SEQ ID NO: 97016 - DNA, 26 bp, Homo sapiens
ccctgggcaaattctgctctcgggcc

SEQ ID NO: 97017 - DNA, 26 bp, Homo sapiens
cctgggcaaattctgctctcgggcct

SEQ ID NO: 97018 - DNA, 26 bp, Homo sapiens
ctgggcaaattctgctctcgggcctg

SEQ ID NO: 97019 - DNA, 26 bp, Homo sapiens
tgggcaaattctgctctcgggcctgg

SEQ ID NO: 97020 - DNA, 26 bp, Homo sapiens
gggcaaattctgctctcgggcctgga

SEQ ID NO: 97021 - DNA, 26 bp, Homo sapiens
ggcaaattctgctctcgggcctggac

SEQ ID NO: 97022 - DNA, 26 bp, Homo sapiens
gcaaattctgctctcgggcctggacg

SEQ ID NO: 97023 - DNA, 26 bp, Homo sapiens
caaattctgctctcgggcctggacgc

SEQ ID NO: 97024 - DNA, 26 bp, Homo sapiens
aaattctgctctcgggcctggacgcc

SEQ ID NO: 97025 - DNA, 26 bp, Homo sapiens
aattctgctctcgggcctggacgcca

SEQ ID NO: 97026 - DNA, 26 bp, Homo sapiens
attctgctctcgggcctggacgccac

SEQ ID NO: 97027 - DNA, 26 bp, Homo sapiens
ttctgctctcgggcctggacgccacc

SEQ ID NO: 97028 - DNA, 26 bp, Homo sapiens
tctgctctcgggcctggacgccaccc

SEQ ID NO: 97029 - DNA, 26 bp, Homo sapiens
ctgctctcgggcctggacgccaccca

SEQ ID NO: 97030 - DNA, 26 bp, Homo sapiens
tgctctcgggcctggacgccacccat

SEQ ID NO: 97031 - DNA, 26 bp, Homo sapiens
gctctcgggcctggacgccacccatg

SEQ ID NO: 97032 - DNA, 26 bp, Homo sapiens
ctctcgggcctggacgccacccatgg

SEQ ID NO: 97033 - DNA, 26 bp, Homo sapiens
tctcgggcctggacgccacccatggt

SEQ ID NO: 97034 - DNA, 26 bp, Homo sapiens
ctcgggcctggacgccacccatggtg

SEQ ID NO: 97035 - DNA, 26 bp, Homo sapiens
tcgggcctggacgccacccatggtga

SEQ ID NO: 97036 - DNA, 26 bp, Homo sapiens
cgggcctggacgccacccatggtgag

SEQ ID NO: 97037 - DNA, 26 bp, Homo sapiens
gggcctggacgccacccatggtgagg

SEQ ID NO: 97038 - DNA, 26 bp, Homo sapiens
ggcctggacgccacccatggtgaggc

SEQ ID NO: 97039 - DNA, 26 bp, Homo sapiens
gcctggacgccacccatggtgaggct

SEQ ID NO: 97040 - DNA, 26 bp, Homo sapiens
cctggacgccacccatggtgaggctc

SEQ ID NO: 97041 - DNA, 26 bp, Homo sapiens
ctggacgccacccatggtgaggctca

SEQ ID NO: 97042 - DNA, 26 bp, Homo sapiens
tggacgccacccatggtgaggctcag

SEQ ID NO: 97043 - DNA, 26 bp, Homo sapiens
ggacgccacccatggtgaggctcagc

SEQ ID NO: 97044 - DNA, 26 bp, Homo sapiens
gacgccacccatggtgaggctcagcc

SEQ ID NO: 97045 - DNA, 26 bp, Homo sapiens
acgccacccatggtgaggctcagcct

SEQ ID NO: 97046 - DNA, 26 bp, Homo sapiens
cgccacccatggtgaggctcagcctc

SEQ ID NO: 97047 - DNA, 26 bp, Homo sapiens
gccacccatggtgaggctcagcctct

SEQ ID NO: 97048 - DNA, 26 bp, Homo sapiens
ccacccatggtgaggctcagcctctt

SEQ ID NO: 97049 - DNA, 26 bp, Homo sapiens
cacccatggtgaggctcagcctcttg

SEQ ID NO: 97050 - DNA, 26 bp, Homo sapiens
acccatggtgaggctcagcctcttgg

SEQ ID NO: 97051 - DNA, 26 bp, Homo sapiens
cccatggtgaggctcagcctcttggc

SEQ ID NO: 97052 - DNA, 26 bp, Homo sapiens
ccatggtgaggctcagcctcttggcc

SEQ ID NO: 97053 - DNA, 26 bp, Homo sapiens
catggtgaggctcagcctcttggcca

SEQ ID NO: 97054 - DNA, 26 bp, Homo sapiens
atggtgaggctcagcctcttggccac

SEQ ID NO: 97055 - DNA, 26 bp, Homo sapiens
tggtgaggctcagcctcttggccaca

SEQ ID NO: 97056 - DNA, 26 bp, Homo sapiens
ggtgaggctcagcctcttggccacat

SEQ ID NO: 97057 - DNA, 26 bp, Homo sapiens
gtgaggctcagcctcttggccacatc

SEQ ID NO: 97058 - DNA, 26 bp, Homo sapiens
tgaggctcagcctcttggccacatcc

SEQ ID NO: 97059 - DNA, 26 bp, Homo sapiens
gaggctcagcctcttggccacatccg

SEQ ID NO: 97060 - DNA, 26 bp, Homo sapiens
aggctcagcctcttggccacatccgg

SEQ ID NO: 97061 - DNA, 26 bp, Homo sapiens
ggctcagcctcttggccacatccggc

SEQ ID NO: 97062 - DNA, 26 bp, Homo sapiens
gctcagcctcttggccacatccggcc

SEQ ID NO: 97063 - DNA, 26 bp, Homo sapiens
ctcagcctcttggccacatccggcct

SEQ ID NO: 97064 - DNA, 26 bp, Homo sapiens
tcagcctcttggccacatccggcctt

SEQ ID NO: 97065 - DNA, 26 bp, Homo sapiens
cagcctcttggccacatccggccttc

SEQ ID NO: 97066 - DNA, 26 bp, Homo sapiens
agcctcttggccacatccggccttcc

SEQ ID NO: 97067 - DNA, 26 bp, Homo sapiens
gcctcttggccacatccggccttccc

SEQ ID NO: 97068 - DNA, 26 bp, Homo sapiens
cctcttggccacatccggccttccct

SEQ ID NO: 97069 - DNA, 26 bp, Homo sapiens
ctcttggccacatccggccttccctt

SEQ ID NO: 97070 - DNA, 26 bp, Homo sapiens
tcttggccacatccggccttcccttg

SEQ ID NO: 97071 - DNA, 26 bp, Homo sapiens
cttggccacatccggccttcccttgg

SEQ ID NO: 97072 - DNA, 26 bp, Homo sapiens
ttggccacatccggccttcccttggt

SEQ ID NO: 97073 - DNA, 26 bp, Homo sapiens
tggccacatccggccttcccttggtg

SEQ ID NO: 97074 - DNA, 26 bp, Homo sapiens
ggccacatccggccttcccttggtga

SEQ ID NO: 97075 - DNA, 26 bp, Homo sapiens
gccacatccggccttcccttggtgag

SEQ ID NO: 97076 - DNA, 26 bp, Homo sapiens
ccacatccggccttcccttggtgagg

SEQ ID NO: 97077 - DNA, 26 bp, Homo sapiens
cacatccggccttcccttggtgaggc

SEQ ID NO: 97078 - DNA, 26 bp, Homo sapiens
acatccggccttcccttggtgaggct

SEQ ID NO: 97079 - DNA, 26 bp, Homo sapiens
catccggccttcccttggtgaggctg

SEQ ID NO: 97080 - DNA, 26 bp, Homo sapiens
atccggccttcccttggtgaggctgc

SEQ ID NO: 97081 - DNA, 26 bp, Homo sapiens
tccggccttcccttggtgaggctgcc

SEQ ID NO: 97082 - DNA, 26 bp, Homo sapiens
ccggccttcccttggtgaggctgccc

SEQ ID NO: 97083 - DNA, 26 bp, Homo sapiens
cggccttcccttggtgaggctgccct

SEQ ID NO: 97084 - DNA, 26 bp, Homo sapiens
ggccttcccttggtgaggctgccctc

SEQ ID NO: 97085 - DNA, 26 bp, Homo sapiens
gccttcccttggtgaggctgccctcc

SEQ ID NO: 97086 - DNA, 26 bp, Homo sapiens
ccttcccttggtgaggctgccctccc

SEQ ID NO: 97087 - DNA, 26 bp, Homo sapiens
cttcccttggtgaggctgccctcccg

SEQ ID NO: 97088 - DNA, 26 bp, Homo sapiens
ttcccttggtgaggctgccctcccgg

SEQ ID NO: 97089 - DNA, 26 bp, Homo sapiens
tcccttggtgaggctgccctcccggg

SEQ ID NO: 97090 - DNA, 26 bp, Homo sapiens
cccttggtgaggctgccctcccgggc

SEQ ID NO: 97091 - DNA, 26 bp, Homo sapiens
ccttggtgaggctgccctcccgggcc

SEQ ID NO: 97092 - DNA, 26 bp, Homo sapiens
cttggtgaggctgccctcccgggcct

SEQ ID NO: 97093 - DNA, 26 bp, Homo sapiens
ttggtgaggctgccctcccgggcctg

SEQ ID NO: 97094 - DNA, 26 bp, Homo sapiens
tggtgaggctgccctcccgggcctgg

SEQ ID NO: 97095 - DNA, 26 bp, Homo sapiens
ggtgaggctgccctcccgggcctggc

SEQ ID NO: 97096 - DNA, 26 bp, Homo sapiens
gtgaggctgccctcccgggcctggcc

SEQ ID NO: 97097 - DNA, 26 bp, Homo sapiens
tgaggctgccctcccgggcctggcct

SEQ ID NO: 97098 - DNA, 26 bp, Homo sapiens
gaggctgccctcccgggcctggcctg

SEQ ID NO: 97099 - DNA, 26 bp, Homo sapiens
aggctgccctcccgggcctggcctgg

SEQ ID NO: 97100 - DNA, 26 bp, Homo sapiens
ggctgccctcccgggcctggcctggg

SEQ ID NO: 97101 - DNA, 26 bp, Homo sapiens
gctgccctcccgggcctggcctgggg

SEQ ID NO: 97102 - DNA, 26 bp, Homo sapiens
ctgccctcccgggcctggcctgggga

SEQ ID NO: 97103 - DNA, 26 bp, Homo sapiens
tgccctcccgggcctggcctggggag

SEQ ID NO: 97104 - DNA, 26 bp, Homo sapiens
gccctcccgggcctggcctggggagg

SEQ ID NO: 97105 - DNA, 26 bp, Homo sapiens
ccctcccgggcctggcctggggaggt

SEQ ID NO: 97106 - DNA, 26 bp, Homo sapiens
cctcccgggcctggcctggggaggtg

SEQ ID NO: 97107 - DNA, 26 bp, Homo sapiens
ctcccgggcctggcctggggaggtgc

SEQ ID NO: 97108 - DNA, 26 bp, Homo sapiens
tcccgggcctggcctggggaggtgcc

SEQ ID NO: 97109 - DNA, 26 bp, Homo sapiens
cccgggcctggcctggggaggtgcca

SEQ ID NO: 97110 - DNA, 26 bp, Homo sapiens
ccgggcctggcctggggaggtgccat

SEQ ID NO: 97111 - DNA, 26 bp, Homo sapiens
cgggcctggcctggggaggtgccata

SEQ ID NO: 97112 - DNA, 26 bp, Homo sapiens
gggcctggcctggggaggtgccataa

SEQ ID NO: 97113 - DNA, 26 bp, Homo sapiens
ggcctggcctggggaggtgccataat

SEQ ID NO: 97114 - DNA, 26 bp, Homo sapiens
gcctggcctggggaggtgccataatg

SEQ ID NO: 97115 - DNA, 26 bp, Homo sapiens
cctggcctggggaggtgccataatgc

SEQ ID NO: 97116 - DNA, 26 bp, Homo sapiens
ctggcctggggaggtgccataatgct

SEQ ID NO: 97117 - DNA, 26 bp, Homo sapiens
tggcctggggaggtgccataatgctc

SEQ ID NO: 97118 - DNA, 26 bp, Homo sapiens
ggcctggggaggtgccataatgctcc

SEQ ID NO: 97119 - DNA, 26 bp, Homo sapiens
gcctggggaggtgccataatgctcct

SEQ ID NO: 97120 - DNA, 26 bp, Homo sapiens
cctggggaggtgccataatgctcctc

SEQ ID NO: 97121 - DNA, 26 bp, Homo sapiens
ctggggaggtgccataatgctcctcc

SEQ ID NO: 97122 - DNA, 26 bp, Homo sapiens
tggggaggtgccataatgctcctcca

SEQ ID NO: 97123 - DNA, 26 bp, Homo sapiens
ggggaggtgccataatgctcctccag

SEQ ID NO: 97124 - DNA, 26 bp, Homo sapiens
gggaggtgccataatgctcctccagg

SEQ ID NO: 97125 - DNA, 26 bp, Homo sapiens
ggaggtgccataatgctcctccaggc

SEQ ID NO: 97126 - DNA, 26 bp, Homo sapiens
gaggtgccataatgctcctccaggca

SEQ ID NO: 97127 - DNA, 26 bp, Homo sapiens
aggtgccataatgctcctccaggcac

SEQ ID NO: 97128 - DNA, 26 bp, Homo sapiens
ggtgccataatgctcctccaggcacc

SEQ ID NO: 97129 - DNA, 26 bp, Homo sapiens
gtgccataatgctcctccaggcaccg

SEQ ID NO: 97130 - DNA, 26 bp, Homo sapiens
tgccataatgctcctccaggcaccgc

SEQ ID NO: 97131 - DNA, 26 bp, Homo sapiens
gccataatgctcctccaggcaccgca

SEQ ID NO: 97132 - DNA, 26 bp, Homo sapiens
ccataatgctcctccaggcaccgcag

SEQ ID NO: 97133 - DNA, 26 bp, Homo sapiens
cataatgctcctccaggcaccgcaga

SEQ ID NO: 97134 - DNA, 26 bp, Homo sapiens
ataatgctcctccaggcaccgcagag

SEQ ID NO: 97135 - DNA, 26 bp, Homo sapiens
taatgctcctccaggcaccgcagagg

SEQ ID NO: 97136 - DNA, 26 bp, Homo sapiens
aatgctcctccaggcaccgcagaggc

SEQ ID NO: 97137 - DNA, 26 bp, Homo sapiens
atgctcctccaggcaccgcagaggca

SEQ ID NO: 97138 - DNA, 26 bp, Homo sapiens
tgctcctccaggcaccgcagaggcac

SEQ ID NO: 97139 - DNA, 26 bp, Homo sapiens
gctcctccaggcaccgcagaggcacc

SEQ ID NO: 97140 - DNA, 26 bp, Homo sapiens
ctcctccaggcaccgcagaggcaccg

SEQ ID NO: 97141 - DNA, 26 bp, Homo sapiens
tcctccaggcaccgcagaggcaccgt

SEQ ID NO: 97142 - DNA, 26 bp, Homo sapiens
cctccaggcaccgcagaggcaccgtc

SEQ ID NO: 97143 - DNA, 26 bp, Homo sapiens
ctccaggcaccgcagaggcaccgtcc

SEQ ID NO: 97144 - DNA, 26 bp, Homo sapiens
tccaggcaccgcagaggcaccgtcct

SEQ ID NO: 97145 - DNA, 26 bp, Homo sapiens
ccaggcaccgcagaggcaccgtcctg

SEQ ID NO: 97146 - DNA, 26 bp, Homo sapiens
caggcaccgcagaggcaccgtcctgt

SEQ ID NO: 97147 - DNA, 26 bp, Homo sapiens
aggcaccgcagaggcaccgtcctgtt

SEQ ID NO: 97148 - DNA, 26 bp, Homo sapiens
ggcaccgcagaggcaccgtcctgttg

SEQ ID NO: 97149 - DNA, 26 bp, Homo sapiens
gcaccgcagaggcaccgtcctgttga

SEQ ID NO: 97150 - DNA, 26 bp, Homo sapiens
caccgcagaggcaccgtcctgttgat

SEQ ID NO: 97151 - DNA, 26 bp, Homo sapiens
accgcagaggcaccgtcctgttgatg

SEQ ID NO: 97152 - DNA, 26 bp, Homo sapiens
ccgcagaggcaccgtcctgttgatgg

SEQ ID NO: 97153 - DNA, 26 bp, Homo sapiens
cgcagaggcaccgtcctgttgatggg

SEQ ID NO: 97154 - DNA, 26 bp, Homo sapiens
gcagaggcaccgtcctgttgatgggc

SEQ ID NO: 97155 - DNA, 26 bp, Homo sapiens
cagaggcaccgtcctgttgatgggct

SEQ ID NO: 97156 - DNA, 26 bp, Homo sapiens
agaggcaccgtcctgttgatgggctg

SEQ ID NO: 97157 - DNA, 26 bp, Homo sapiens
gaggcaccgtcctgttgatgggctgg

SEQ ID NO: 97158 - DNA, 26 bp, Homo sapiens
aggcaccgtcctgttgatgggctgga

SEQ ID NO: 97159 - DNA, 26 bp, Homo sapiens
ggcaccgtcctgttgatgggctggaa

SEQ ID NO: 97160 - DNA, 26 bp, Homo sapiens
gcaccgtcctgttgatgggctggaag

SEQ ID NO: 97161 - DNA, 26 bp, Homo sapiens
caccgtcctgttgatgggctggaaga

SEQ ID NO: 97162 - DNA, 26 bp, Homo sapiens
accgtcctgttgatgggctggaagat

SEQ ID NO: 97163 - DNA, 26 bp, Homo sapiens
ccgtcctgttgatgggctggaagatg

SEQ ID NO: 97164 - DNA, 26 bp, Homo sapiens
cgtcctgttgatgggctggaagatga

SEQ ID NO: 97165 - DNA, 26 bp, Homo sapiens
gtcctgttgatgggctggaagatgat

SEQ ID NO: 97166 - DNA, 26 bp, Homo sapiens
tcctgttgatgggctggaagatgatg

SEQ ID NO: 97167 - DNA, 26 bp, Homo sapiens
cctgttgatgggctggaagatgatgg

SEQ ID NO: 97168 - DNA, 26 bp, Homo sapiens
ctgttgatgggctggaagatgatggc

SEQ ID NO: 97169 - DNA, 26 bp, Homo sapiens
tgttgatgggctggaagatgatggcg

SEQ ID NO: 97170 - DNA, 26 bp, Homo sapiens
gttgatgggctggaagatgatggcgc

SEQ ID NO: 97171 - DNA, 26 bp, Homo sapiens
ttgatgggctggaagatgatggcgcc

SEQ ID NO: 97172 - DNA, 26 bp, Homo sapiens
tgatgggctggaagatgatggcgcca

SEQ ID NO: 97173 - DNA, 26 bp, Homo sapiens
gatgggctggaagatgatggcgccac

SEQ ID NO: 97174 - DNA, 26 bp, Homo sapiens
atgggctggaagatgatggcgccact

SEQ ID NO: 97175 - DNA, 26 bp, Homo sapiens
tgggctggaagatgatggcgccactc

SEQ ID NO: 97176 - DNA, 26 bp, Homo sapiens
gggctggaagatgatggcgccactct

SEQ ID NO: 97177 - DNA, 26 bp, Homo sapiens
ggctggaagatgatggcgccactctg

SEQ ID NO: 97178 - DNA, 26 bp, Homo sapiens
gctggaagatgatggcgccactctgc

SEQ ID NO: 97179 - DNA, 26 bp, Homo sapiens
ctggaagatgatggcgccactctgct

SEQ ID NO: 97180 - DNA, 26 bp, Homo sapiens
tggaagatgatggcgccactctgctg

SEQ ID NO: 97181 - DNA, 26 bp, Homo sapiens
ggaagatgatggcgccactctgctgg

SEQ ID NO: 97182 - DNA, 26 bp, Homo sapiens
gaagatgatggcgccactctgctggg

SEQ ID NO: 97183 - DNA, 26 bp, Homo sapiens
aagatgatggcgccactctgctggga

SEQ ID NO: 97184 - DNA, 26 bp, Homo sapiens
agatgatggcgccactctgctgggag

SEQ ID NO: 97185 - DNA, 26 bp, Homo sapiens
gatgatggcgccactctgctgggaga

SEQ ID NO: 97186 - DNA, 26 bp, Homo sapiens
atgatggcgccactctgctgggagat

SEQ ID NO: 97187 - DNA, 26 bp, Homo sapiens
tgatggcgccactctgctgggagatg

SEQ ID NO: 97188 - DNA, 26 bp, Homo sapiens
gatggcgccactctgctgggagatgg

SEQ ID NO: 97189 - DNA, 26 bp, Homo sapiens
atggcgccactctgctgggagatggg

SEQ ID NO: 97190 - DNA, 26 bp, Homo sapiens
tggcgccactctgctgggagatgggc

SEQ ID NO: 97191 - DNA, 26 bp, Homo sapiens
ggcgccactctgctgggagatgggcc

SEQ ID NO: 97192 - DNA, 26 bp, Homo sapiens
gcgccactctgctgggagatgggccg

SEQ ID NO: 97193 - DNA, 26 bp, Homo sapiens
cgccactctgctgggagatgggccgg

SEQ ID NO: 97194 - DNA, 26 bp, Homo sapiens
gccactctgctgggagatgggccggc

SEQ ID NO: 97195 - DNA, 26 bp, Homo sapiens
ccactctgctgggagatgggccggcg

SEQ ID NO: 97196 - DNA, 26 bp, Homo sapiens
cactctgctgggagatgggccggcgg

SEQ ID NO: 97197 - DNA, 26 bp, Homo sapiens
actctgctgggagatgggccggcggt

SEQ ID NO: 97198 - DNA, 26 bp, Homo sapiens
ctctgctgggagatgggccggcggtt

SEQ ID NO: 97199 - DNA, 26 bp, Homo sapiens
tctgctgggagatgggccggcggttg

SEQ ID NO: 97200 - DNA, 26 bp, Homo sapiens
ctgctgggagatgggccggcggttgc

SEQ ID NO: 97201 - DNA, 26 bp, Homo sapiens
tgctgggagatgggccggcggttgcc

SEQ ID NO: 97202 - DNA, 26 bp, Homo sapiens
gctgggagatgggccggcggttgccc

SEQ ID NO: 97203 - DNA, 26 bp, Homo sapiens
ctgggagatgggccggcggttgccca

SEQ ID NO: 97204 - DNA, 26 bp, Homo sapiens
tgggagatgggccggcggttgcccac

SEQ ID NO: 97205 - DNA, 26 bp, Homo sapiens
gggagatgggccggcggttgcccacg

SEQ ID NO: 97206 - DNA, 26 bp, Homo sapiens
ggagatgggccggcggttgcccacgt

SEQ ID NO: 97207 - DNA, 26 bp, Homo sapiens
gagatgggccggcggttgcccacgta

SEQ ID NO: 97208 - DNA, 26 bp, Homo sapiens
agatgggccggcggttgcccacgtag

SEQ ID NO: 97209 - DNA, 26 bp, Homo sapiens
gatgggccggcggttgcccacgtagc

SEQ ID NO: 97210 - DNA, 26 bp, Homo sapiens
atgggccggcggttgcccacgtagca

SEQ ID NO: 97211 - DNA, 26 bp, Homo sapiens
tgggccggcggttgcccacgtagcag

SEQ ID NO: 97212 - DNA, 26 bp, Homo sapiens
gggccggcggttgcccacgtagcagc

SEQ ID NO: 97213 - DNA, 26 bp, Homo sapiens
ggccggcggttgcccacgtagcagcg

SEQ ID NO: 97214 - DNA, 26 bp, Homo sapiens
gccggcggttgcccacgtagcagcgc

SEQ ID NO: 97215 - DNA, 26 bp, Homo sapiens
ccggcggttgcccacgtagcagcgca

SEQ ID NO: 97216 - DNA, 26 bp, Homo sapiens
cggcggttgcccacgtagcagcgcac

SEQ ID NO: 97217 - DNA, 26 bp, Homo sapiens
ggcggttgcccacgtagcagcgcacc

SEQ ID NO: 97218 - DNA, 26 bp, Homo sapiens
gcggttgcccacgtagcagcgcacca

SEQ ID NO: 97219 - DNA, 26 bp, Homo sapiens
cggttgcccacgtagcagcgcaccag

SEQ ID NO: 97220 - DNA, 26 bp, Homo sapiens
ggttgcccacgtagcagcgcaccagg

SEQ ID NO: 97221 - DNA, 26 bp, Homo sapiens
gttgcccacgtagcagcgcaccaggc

SEQ ID NO: 97222 - DNA, 26 bp, Homo sapiens
ttgcccacgtagcagcgcaccaggcc

SEQ ID NO: 97223 - DNA, 26 bp, Homo sapiens
tgcccacgtagcagcgcaccaggccg

SEQ ID NO: 97224 - DNA, 26 bp, Homo sapiens
gcccacgtagcagcgcaccaggccgg

SEQ ID NO: 97225 - DNA, 26 bp, Homo sapiens
cccacgtagcagcgcaccaggccggg

SEQ ID NO: 97226 - DNA, 26 bp, Homo sapiens
ccacgtagcagcgcaccaggccgggg

SEQ ID NO: 97227 - DNA, 26 bp, Homo sapiens
cacgtagcagcgcaccaggccgggga

SEQ ID NO: 97228 - DNA, 26 bp, Homo sapiens
acgtagcagcgcaccaggccggggat

SEQ ID NO: 97229 - DNA, 26 bp, Homo sapiens
cgtagcagcgcaccaggccggggatg

SEQ ID NO: 97230 - DNA, 26 bp, Homo sapiens
gtagcagcgcaccaggccggggatgg

SEQ ID NO: 97231 - DNA, 26 bp, Homo sapiens
tagcagcgcaccaggccggggatgga

SEQ ID NO: 97232 - DNA, 26 bp, Homo sapiens
agcagcgcaccaggccggggatggag

SEQ ID NO: 97233 - DNA, 26 bp, Homo sapiens
gcagcgcaccaggccggggatggagt

SEQ ID NO: 97234 - DNA, 26 bp, Homo sapiens
cagcgcaccaggccggggatggagtc

SEQ ID NO: 97235 - DNA, 26 bp, Homo sapiens
agcgcaccaggccggggatggagtcg

SEQ ID NO: 97236 - DNA, 26 bp, Homo sapiens
gcgcaccaggccggggatggagtcga

SEQ ID NO: 97237 - DNA, 26 bp, Homo sapiens
cgcaccaggccggggatggagtcgaa

SEQ ID NO: 97238 - DNA, 26 bp, Homo sapiens
gcaccaggccggggatggagtcgaag

SEQ ID NO: 97239 - DNA, 26 bp, Homo sapiens
caccaggccggggatggagtcgaagc

SEQ ID NO: 97240 - DNA, 26 bp, Homo sapiens
accaggccggggatggagtcgaagct

SEQ ID NO: 97241 - DNA, 26 bp, Homo sapiens
ccaggccggggatggagtcgaagctc

SEQ ID NO: 97242 - DNA, 26 bp, Homo sapiens
caggccggggatggagtcgaagctct

SEQ ID NO: 97243 - DNA, 26 bp, Homo sapiens
aggccggggatggagtcgaagctctc

SEQ ID NO: 97244 - DNA, 26 bp, Homo sapiens
ggccggggatggagtcgaagctctcc

SEQ ID NO: 97245 - DNA, 26 bp, Homo sapiens
gccggggatggagtcgaagctctcca

SEQ ID NO: 97246 - DNA, 26 bp, Homo sapiens
ccggggatggagtcgaagctctccat

SEQ ID NO: 97247 - DNA, 26 bp, Homo sapiens
cggggatggagtcgaagctctccatc

SEQ ID NO: 97248 - DNA, 26 bp, Homo sapiens
ggggatggagtcgaagctctccatct

SEQ ID NO: 97249 - DNA, 26 bp, Homo sapiens
gggatggagtcgaagctctccatctc

SEQ ID NO: 97250 - DNA, 26 bp, Homo sapiens
ggatggagtcgaagctctccatctcg

SEQ ID NO: 97251 - DNA, 26 bp, Homo sapiens
gatggagtcgaagctctccatctcga

SEQ ID NO: 97252 - DNA, 26 bp, Homo sapiens
atggagtcgaagctctccatctcgaa

SEQ ID NO: 97253 - DNA, 26 bp, Homo sapiens
tggagtcgaagctctccatctcgaac

SEQ ID NO: 97254 - DNA, 26 bp, Homo sapiens
ggagtcgaagctctccatctcgaact

SEQ ID NO: 97255 - DNA, 26 bp, Homo sapiens
gagtcgaagctctccatctcgaactg

SEQ ID NO: 97256 - DNA, 26 bp, Homo sapiens
agtcgaagctctccatctcgaactgg

SEQ ID NO: 97257 - DNA, 26 bp, Homo sapiens
gtcgaagctctccatctcgaactggt

SEQ ID NO: 97258 - DNA, 26 bp, Homo sapiens
tcgaagctctccatctcgaactggta

SEQ ID NO: 97259 - DNA, 26 bp, Homo sapiens
cgaagctctccatctcgaactggtac

SEQ ID NO: 97260 - DNA, 26 bp, Homo sapiens
gaagctctccatctcgaactggtact

SEQ ID NO: 97261 - DNA, 26 bp, Homo sapiens
aagctctccatctcgaactggtactg

SEQ ID NO: 97262 - DNA, 26 bp, Homo sapiens
agctctccatctcgaactggtactgc

SEQ ID NO: 97263 - DNA, 26 bp, Homo sapiens
gctctccatctcgaactggtactgca

SEQ ID NO: 97264 - DNA, 26 bp, Homo sapiens
ctctccatctcgaactggtactgcac

SEQ ID NO: 97265 - DNA, 26 bp, Homo sapiens
tctccatctcgaactggtactgcacg

SEQ ID NO: 97266 - DNA, 26 bp, Homo sapiens
ctccatctcgaactggtactgcacgc

SEQ ID NO: 97267 - DNA, 26 bp, Homo sapiens
tccatctcgaactggtactgcacgcg

SEQ ID NO: 97268 - DNA, 26 bp, Homo sapiens
ccatctcgaactggtactgcacgcgg

SEQ ID NO: 97269 - DNA, 26 bp, Homo sapiens
catctcgaactggtactgcacgcggc

SEQ ID NO: 97270 - DNA, 26 bp, Homo sapiens
atctcgaactggtactgcacgcggct

SEQ ID NO: 97271 - DNA, 26 bp, Homo sapiens
tctcgaactggtactgcacgcggctg

SEQ ID NO: 97272 - DNA, 26 bp, Homo sapiens
ctcgaactggtactgcacgcggctgt

SEQ ID NO: 97273 - DNA, 26 bp, Homo sapiens
tcgaactggtactgcacgcggctgta

SEQ ID NO: 97274 - DNA, 26 bp, Homo sapiens
cgaactggtactgcacgcggctgtag

SEQ ID NO: 97275 - DNA, 26 bp, Homo sapiens
gaactggtactgcacgcggctgtagg

SEQ ID NO: 97276 - DNA, 26 bp, Homo sapiens
aactggtactgcacgcggctgtaggc

SEQ ID NO: 97277 - DNA, 26 bp, Homo sapiens
actggtactgcacgcggctgtaggcc

SEQ ID NO: 97278 - DNA, 26 bp, Homo sapiens
ctggtactgcacgcggctgtaggcct

SEQ ID NO: 97279 - DNA, 26 bp, Homo sapiens
tggtactgcacgcggctgtaggcctc

SEQ ID NO: 97280 - DNA, 26 bp, Homo sapiens
ggtactgcacgcggctgtaggcctcg

SEQ ID NO: 97281 - DNA, 26 bp, Homo sapiens
gtactgcacgcggctgtaggcctcgc

SEQ ID NO: 97282 - DNA, 26 bp, Homo sapiens
tactgcacgcggctgtaggcctcgct

SEQ ID NO: 97283 - DNA, 26 bp, Homo sapiens
actgcacgcggctgtaggcctcgctg

SEQ ID NO: 97284 - DNA, 26 bp, Homo sapiens
ctgcacgcggctgtaggcctcgctga

SEQ ID NO: 97285 - DNA, 26 bp, Homo sapiens
tgcacgcggctgtaggcctcgctgag

SEQ ID NO: 97286 - DNA, 26 bp, Homo sapiens
gcacgcggctgtaggcctcgctgagt

SEQ ID NO: 97287 - DNA, 26 bp, Homo sapiens
cacgcggctgtaggcctcgctgagtc

SEQ ID NO: 97288 - DNA, 26 bp, Homo sapiens
acgcggctgtaggcctcgctgagtcg

SEQ ID NO: 97289 - DNA, 26 bp, Homo sapiens
cgcggctgtaggcctcgctgagtcgc

SEQ ID NO: 97290 - DNA, 26 bp, Homo sapiens
gcggctgtaggcctcgctgagtcgca

SEQ ID NO: 97291 - DNA, 26 bp, Homo sapiens
cggctgtaggcctcgctgagtcgcag

SEQ ID NO: 97292 - DNA, 26 bp, Homo sapiens
ggctgtaggcctcgctgagtcgcaga

SEQ ID NO: 97293 - DNA, 26 bp, Homo sapiens
gctgtaggcctcgctgagtcgcagaa

SEQ ID NO: 97294 - DNA, 26 bp, Homo sapiens
ctgtaggcctcgctgagtcgcagaac

SEQ ID NO: 97295 - DNA, 26 bp, Homo sapiens
tgtaggcctcgctgagtcgcagaact

SEQ ID NO: 97296 - DNA, 26 bp, Homo sapiens
gtaggcctcgctgagtcgcagaactg

SEQ ID NO: 97297 - DNA, 26 bp, Homo sapiens
taggcctcgctgagtcgcagaactgt

SEQ ID NO: 97298 - DNA, 26 bp, Homo sapiens
aggcctcgctgagtcgcagaactgtc

SEQ ID NO: 97299 - DNA, 26 bp, Homo sapiens
ggcctcgctgagtcgcagaactgtcc

SEQ ID NO: 97300 - DNA, 26 bp, Homo sapiens
gcctcgctgagtcgcagaactgtccg

SEQ ID NO: 97301 - DNA, 26 bp, Homo sapiens
cctcgctgagtcgcagaactgtccgg

SEQ ID NO: 97302 - DNA, 26 bp, Homo sapiens
ctcgctgagtcgcagaactgtccggt

SEQ ID NO: 97303 - DNA, 26 bp, Homo sapiens
tcgctgagtcgcagaactgtccggtt

SEQ ID NO: 97304 - DNA, 26 bp, Homo sapiens
cgctgagtcgcagaactgtccggttg

SEQ ID NO: 97305 - DNA, 26 bp, Homo sapiens
gctgagtcgcagaactgtccggttga

SEQ ID NO: 97306 - DNA, 26 bp, Homo sapiens
ctgagtcgcagaactgtccggttgat

SEQ ID NO: 97307 - DNA, 26 bp, Homo sapiens
tgagtcgcagaactgtccggttgatt

SEQ ID NO: 97308 - DNA, 26 bp, Homo sapiens
gagtcgcagaactgtccggttgattt

SEQ ID NO: 97309 - DNA, 26 bp, Homo sapiens
agtcgcagaactgtccggttgatttt

SEQ ID NO: 97310 - DNA, 26 bp, Homo sapiens
gtcgcagaactgtccggttgattttg

SEQ ID NO: 97311 - DNA, 26 bp, Homo sapiens
tcgcagaactgtccggttgattttga

SEQ ID NO: 97312 - DNA, 26 bp, Homo sapiens
cgcagaactgtccggttgattttgaa

SEQ ID NO: 97313 - DNA, 26 bp, Homo sapiens
gcagaactgtccggttgattttgaag

SEQ ID NO: 97314 - DNA, 26 bp, Homo sapiens
cagaactgtccggttgattttgaagt

SEQ ID NO: 97315 - DNA, 26 bp, Homo sapiens
agaactgtccggttgattttgaagtg

SEQ ID NO: 97316 - DNA, 26 bp, Homo sapiens
gaactgtccggttgattttgaagtgc

SEQ ID NO: 97317 - DNA, 26 bp, Homo sapiens
aactgtccggttgattttgaagtgct

SEQ ID NO: 97318 - DNA, 26 bp, Homo sapiens
actgtccggttgattttgaagtgctg

SEQ ID NO: 97319 - DNA, 26 bp, Homo sapiens
ctgtccggttgattttgaagtgctga

SEQ ID NO: 97320 - DNA, 26 bp, Homo sapiens
tgtccggttgattttgaagtgctgag

SEQ ID NO: 97321 - DNA, 26 bp, Homo sapiens
gtccggttgattttgaagtgctgagc

SEQ ID NO: 97322 - DNA, 26 bp, Homo sapiens
tccggttgattttgaagtgctgagcg

SEQ ID NO: 97323 - DNA, 26 bp, Homo sapiens
ccggttgattttgaagtgctgagcga

SEQ ID NO: 97324 - DNA, 26 bp, Homo sapiens
cggttgattttgaagtgctgagcgag

SEQ ID NO: 97325 - DNA, 26 bp, Homo sapiens
ggttgattttgaagtgctgagcgagg

SEQ ID NO: 97326 - DNA, 26 bp, Homo sapiens
gttgattttgaagtgctgagcgaggt

SEQ ID NO: 97327 - DNA, 26 bp, Homo sapiens
ttgattttgaagtgctgagcgaggtt

SEQ ID NO: 97328 - DNA, 26 bp, Homo sapiens
tgattttgaagtgctgagcgaggttc

SEQ ID NO: 97329 - DNA, 26 bp, Homo sapiens
gattttgaagtgctgagcgaggttct

SEQ ID NO: 97330 - DNA, 26 bp, Homo sapiens
attttgaagtgctgagcgaggttctt

SEQ ID NO: 97331 - DNA, 26 bp, Homo sapiens
ttttgaagtgctgagcgaggttcttc

SEQ ID NO: 97332 - DNA, 26 bp, Homo sapiens
tttgaagtgctgagcgaggttcttcc

SEQ ID NO: 97333 - DNA, 26 bp, Homo sapiens
ttgaagtgctgagcgaggttcttcca

SEQ ID NO: 97334 - DNA, 26 bp, Homo sapiens
tgaagtgctgagcgaggttcttccac

SEQ ID NO: 97335 - DNA, 26 bp, Homo sapiens
gaagtgctgagcgaggttcttccact

SEQ ID NO: 97336 - DNA, 26 bp, Homo sapiens
aagtgctgagcgaggttcttccactg

SEQ ID NO: 97337 - DNA, 26 bp, Homo sapiens
agtgctgagcgaggttcttccactga

SEQ ID NO: 97338 - DNA, 26 bp, Homo sapiens
gtgctgagcgaggttcttccactgac

SEQ ID NO: 97339 - DNA, 26 bp, Homo sapiens
tgctgagcgaggttcttccactgaca

SEQ ID NO: 97340 - DNA, 26 bp, Homo sapiens
gctgagcgaggttcttccactgacag

SEQ ID NO: 97341 - DNA, 26 bp, Homo sapiens
ctgagcgaggttcttccactgacagg

SEQ ID NO: 97342 - DNA, 26 bp, Homo sapiens
tgagcgaggttcttccactgacaggt

SEQ ID NO: 97343 - DNA, 26 bp, Homo sapiens
gagcgaggttcttccactgacaggtc

SEQ ID NO: 97344 - DNA, 26 bp, Homo sapiens
agcgaggttcttccactgacaggtca

SEQ ID NO: 97345 - DNA, 26 bp, Homo sapiens
gcgaggttcttccactgacaggtcag

SEQ ID NO: 97346 - DNA, 26 bp, Homo sapiens
cgaggttcttccactgacaggtcagg

SEQ ID NO: 97347 - DNA, 26 bp, Homo sapiens
gaggttcttccactgacaggtcagga

SEQ ID NO: 97348 - DNA, 26 bp, Homo sapiens
aggttcttccactgacaggtcaggac

SEQ ID NO: 97349 - DNA, 26 bp, Homo sapiens
ggttcttccactgacaggtcaggaca

SEQ ID NO: 97350 - DNA, 26 bp, Homo sapiens
gttcttccactgacaggtcaggacaa

SEQ ID NO: 97351 - DNA, 26 bp, Homo sapiens
ttcttccactgacaggtcaggacaaa

SEQ ID NO: 97352 - DNA, 26 bp, Homo sapiens
tcttccactgacaggtcaggacaaag

SEQ ID NO: 97353 - DNA, 26 bp, Homo sapiens
cttccactgacaggtcaggacaaagt

SEQ ID NO: 97354 - DNA, 26 bp, Homo sapiens
ttccactgacaggtcaggacaaagtt

SEQ ID NO: 97355 - DNA, 26 bp, Homo sapiens
tccactgacaggtcaggacaaagttc

SEQ ID NO: 97356 - DNA, 26 bp, Homo sapiens
ccactgacaggtcaggacaaagttcc

SEQ ID NO: 97357 - DNA, 26 bp, Homo sapiens
cactgacaggtcaggacaaagttccc

SEQ ID NO: 97358 - DNA, 26 bp, Homo sapiens
actgacaggtcaggacaaagttccca

SEQ ID NO: 97359 - DNA, 26 bp, Homo sapiens
ctgacaggtcaggacaaagttcccag

SEQ ID NO: 97360 - DNA, 26 bp, Homo sapiens
tgacaggtcaggacaaagttcccagg

SEQ ID NO: 97361 - DNA, 26 bp, Homo sapiens
gacaggtcaggacaaagttcccaggg

SEQ ID NO: 97362 - DNA, 26 bp, Homo sapiens
acaggtcaggacaaagttcccagggc

SEQ ID NO: 97363 - DNA, 26 bp, Homo sapiens
caggtcaggacaaagttcccagggct

SEQ ID NO: 97364 - DNA, 26 bp, Homo sapiens
aggtcaggacaaagttcccagggctg

SEQ ID NO: 97365 - DNA, 26 bp, Homo sapiens
ggtcaggacaaagttcccagggctgg

SEQ ID NO: 97366 - DNA, 26 bp, Homo sapiens
gtcaggacaaagttcccagggctgga

SEQ ID NO: 97367 - DNA, 26 bp, Homo sapiens
tcaggacaaagttcccagggctggac

SEQ ID NO: 97368 - DNA, 26 bp, Homo sapiens
caggacaaagttcccagggctggaca

SEQ ID NO: 97369 - DNA, 26 bp, Homo sapiens
aggacaaagttcccagggctggacag

SEQ ID NO: 97370 - DNA, 26 bp, Homo sapiens
ggacaaagttcccagggctggacaga

SEQ ID NO: 97371 - DNA, 26 bp, Homo sapiens
gacaaagttcccagggctggacagag

SEQ ID NO: 97372 - DNA, 26 bp, Homo sapiens
acaaagttcccagggctggacagaga

SEQ ID NO: 97373 - DNA, 26 bp, Homo sapiens
caaagttcccagggctggacagagag

SEQ ID NO: 97374 - DNA, 26 bp, Homo sapiens
aaagttcccagggctggacagagagt

SEQ ID NO: 97375 - DNA, 26 bp, Homo sapiens
aagttcccagggctggacagagagtc

SEQ ID NO: 97376 - DNA, 26 bp, Homo sapiens
agttcccagggctggacagagagtca

SEQ ID NO: 97377 - DNA, 26 bp, Homo sapiens
gttcccagggctggacagagagtcac

SEQ ID NO: 97378 - DNA, 26 bp, Homo sapiens
ttcccagggctggacagagagtcacg

SEQ ID NO: 97379 - DNA, 26 bp, Homo sapiens
tcccagggctggacagagagtcacga

SEQ ID NO: 97380 - DNA, 26 bp, Homo sapiens
cccagggctggacagagagtcacgaa

SEQ ID NO: 97381 - DNA, 26 bp, Homo sapiens
ccagggctggacagagagtcacgaac

SEQ ID NO: 97382 - DNA, 26 bp, Homo sapiens
cagggctggacagagagtcacgaact

SEQ ID NO: 97383 - DNA, 26 bp, Homo sapiens
agggctggacagagagtcacgaacta

SEQ ID NO: 97384 - DNA, 26 bp, Homo sapiens
gggctggacagagagtcacgaactag

SEQ ID NO: 97385 - DNA, 26 bp, Homo sapiens
ggctggacagagagtcacgaactagg

SEQ ID NO: 97386 - DNA, 26 bp, Homo sapiens
gctggacagagagtcacgaactagga

SEQ ID NO: 97387 - DNA, 26 bp, Homo sapiens
ctggacagagagtcacgaactaggaa

SEQ ID NO: 97388 - DNA, 26 bp, Homo sapiens
tggacagagagtcacgaactaggaag

SEQ ID NO: 97389 - DNA, 26 bp, Homo sapiens
ggacagagagtcacgaactaggaagt

SEQ ID NO: 97390 - DNA, 26 bp, Homo sapiens
gacagagagtcacgaactaggaagtc

SEQ ID NO: 97391 - DNA, 26 bp, Homo sapiens
acagagagtcacgaactaggaagtca

SEQ ID NO: 97392 - DNA, 26 bp, Homo sapiens
cagagagtcacgaactaggaagtcac

SEQ ID NO: 97393 - DNA, 26 bp, Homo sapiens
agagagtcacgaactaggaagtcacc

SEQ ID NO: 97394 - DNA, 26 bp, Homo sapiens
gagagtcacgaactaggaagtcacca

SEQ ID NO: 97395 - DNA, 26 bp, Homo sapiens
agagtcacgaactaggaagtcaccat

SEQ ID NO: 97396 - DNA, 26 bp, Homo sapiens
gagtcacgaactaggaagtcaccatc

SEQ ID NO: 97397 - DNA, 26 bp, Homo sapiens
agtcacgaactaggaagtcaccatct

SEQ ID NO: 97398 - DNA, 26 bp, Homo sapiens
gtcacgaactaggaagtcaccatctc

SEQ ID NO: 97399 - DNA, 26 bp, Homo sapiens
tcacgaactaggaagtcaccatctcg

SEQ ID NO: 97400 - DNA, 26 bp, Homo sapiens
cacgaactaggaagtcaccatctcgc

SEQ ID NO: 97401 - DNA, 26 bp, Homo sapiens
acgaactaggaagtcaccatctcgct

SEQ ID NO: 97402 - DNA, 26 bp, Homo sapiens
cgaactaggaagtcaccatctcgctg

SEQ ID NO: 97403 - DNA, 26 bp, Homo sapiens
gaactaggaagtcaccatctcgctgc

SEQ ID NO: 97404 - DNA, 26 bp, Homo sapiens
aactaggaagtcaccatctcgctgca

SEQ ID NO: 97405 - DNA, 26 bp, Homo sapiens
actaggaagtcaccatctcgctgcac

SEQ ID NO: 97406 - DNA, 26 bp, Homo sapiens
ctaggaagtcaccatctcgctgcaca

SEQ ID NO: 97407 - DNA, 26 bp, Homo sapiens
taggaagtcaccatctcgctgcacaa

SEQ ID NO: 97408 - DNA, 26 bp, Homo sapiens
aggaagtcaccatctcgctgcacaag

SEQ ID NO: 97409 - DNA, 26 bp, Homo sapiens
ggaagtcaccatctcgctgcacaagg

SEQ ID NO: 97410 - DNA, 26 bp, Homo sapiens
gaagtcaccatctcgctgcacaaggt

SEQ ID NO: 97411 - DNA, 26 bp, Homo sapiens
aagtcaccatctcgctgcacaaggtt

SEQ ID NO: 97412 - DNA, 26 bp, Homo sapiens
agtcaccatctcgctgcacaaggttt

SEQ ID NO: 97413 - DNA, 26 bp, Homo sapiens
gtcaccatctcgctgcacaaggtttt

SEQ ID NO: 97414 - DNA, 26 bp, Homo sapiens
tcaccatctcgctgcacaaggttttc

SEQ ID NO: 97415 - DNA, 26 bp, Homo sapiens
caccatctcgctgcacaaggttttca

SEQ ID NO: 97416 - DNA, 26 bp, Homo sapiens
accatctcgctgcacaaggttttcag

SEQ ID NO: 97417 - DNA, 26 bp, Homo sapiens
ccatctcgctgcacaaggttttcaga

SEQ ID NO: 97418 - DNA, 26 bp, Homo sapiens
catctcgctgcacaaggttttcagac

SEQ ID NO: 97419 - DNA, 26 bp, Homo sapiens
atctcgctgcacaaggttttcagaca

SEQ ID NO: 97420 - DNA, 26 bp, Homo sapiens
tctcgctgcacaaggttttcagacac

SEQ ID NO: 97421 - DNA, 26 bp, Homo sapiens
ctcgctgcacaaggttttcagacacc

SEQ ID NO: 97422 - DNA, 26 bp, Homo sapiens
tcgctgcacaaggttttcagacacct

SEQ ID NO: 97423 - DNA, 26 bp, Homo sapiens
cgctgcacaaggttttcagacacctg

SEQ ID NO: 97424 - DNA, 26 bp, Homo sapiens
gctgcacaaggttttcagacacctgt

SEQ ID NO: 97425 - DNA, 26 bp, Homo sapiens
ctgcacaaggttttcagacacctgtc

SEQ ID NO: 97426 - DNA, 26 bp, Homo sapiens
tgcacaaggttttcagacacctgtcg

SEQ ID NO: 97427 - DNA, 26 bp, Homo sapiens
gcacaaggttttcagacacctgtcgg

SEQ ID NO: 97428 - DNA, 26 bp, Homo sapiens
cacaaggttttcagacacctgtcggg

SEQ ID NO: 97429 - DNA, 26 bp, Homo sapiens
acaaggttttcagacacctgtcgggg

SEQ ID NO: 97430 - DNA, 26 bp, Homo sapiens
caaggttttcagacacctgtcggggg

SEQ ID NO: 97431 - DNA, 26 bp, Homo sapiens
aaggttttcagacacctgtcggggga

SEQ ID NO: 97432 - DNA, 26 bp, Homo sapiens
aggttttcagacacctgtcgggggat

SEQ ID NO: 97433 - DNA, 26 bp, Homo sapiens
ggttttcagacacctgtcgggggatg

SEQ ID NO: 97434 - DNA, 26 bp, Homo sapiens
gttttcagacacctgtcgggggatgc

SEQ ID NO: 97435 - DNA, 26 bp, Homo sapiens
ttttcagacacctgtcgggggatgcg

SEQ ID NO: 97436 - DNA, 26 bp, Homo sapiens
tttcagacacctgtcgggggatgcgg

SEQ ID NO: 97437 - DNA, 26 bp, Homo sapiens
ttcagacacctgtcgggggatgcggc

SEQ ID NO: 97438 - DNA, 26 bp, Homo sapiens
tcagacacctgtcgggggatgcggcc

SEQ ID NO: 97439 - DNA, 26 bp, Homo sapiens
cagacacctgtcgggggatgcggccg

SEQ ID NO: 97440 - DNA, 26 bp, Homo sapiens
agacacctgtcgggggatgcggccgt

SEQ ID NO: 97441 - DNA, 26 bp, Homo sapiens
gacacctgtcgggggatgcggccgtg

SEQ ID NO: 97442 - DNA, 26 bp, Homo sapiens
acacctgtcgggggatgcggccgtgg

SEQ ID NO: 97443 - DNA, 26 bp, Homo sapiens
cacctgtcgggggatgcggccgtggt

SEQ ID NO: 97444 - DNA, 26 bp, Homo sapiens
acctgtcgggggatgcggccgtggta

SEQ ID NO: 97445 - DNA, 26 bp, Homo sapiens
cctgtcgggggatgcggccgtggtac

SEQ ID NO: 97446 - DNA, 26 bp, Homo sapiens
ctgtcgggggatgcggccgtggtacc

SEQ ID NO: 97447 - DNA, 26 bp, Homo sapiens
tgtcgggggatgcggccgtggtacca

SEQ ID NO: 97448 - DNA, 26 bp, Homo sapiens
gtcgggggatgcggccgtggtaccag

SEQ ID NO: 97449 - DNA, 26 bp, Homo sapiens
tcgggggatgcggccgtggtaccagg

SEQ ID NO: 97450 - DNA, 26 bp, Homo sapiens
cgggggatgcggccgtggtaccaggc

SEQ ID NO: 97451 - DNA, 26 bp, Homo sapiens
gggggatgcggccgtggtaccaggca

SEQ ID NO: 97452 - DNA, 26 bp, Homo sapiens
ggggatgcggccgtggtaccaggcat

SEQ ID NO: 97453 - DNA, 26 bp, Homo sapiens
gggatgcggccgtggtaccaggcatg

SEQ ID NO: 97454 - DNA, 26 bp, Homo sapiens
ggatgcggccgtggtaccaggcatgg

SEQ ID NO: 97455 - DNA, 26 bp, Homo sapiens
gatgcggccgtggtaccaggcatggc

SEQ ID NO: 97456 - DNA, 26 bp, Homo sapiens
atgcggccgtggtaccaggcatggct

SEQ ID NO: 97457 - DNA, 26 bp, Homo sapiens
tgcggccgtggtaccaggcatggctg

SEQ ID NO: 97458 - DNA, 26 bp, Homo sapiens
gcggccgtggtaccaggcatggctgc

SEQ ID NO: 97459 - DNA, 26 bp, Homo sapiens
cggccgtggtaccaggcatggctgcg

SEQ ID NO: 97460 - DNA, 26 bp, Homo sapiens
ggccgtggtaccaggcatggctgcgc

SEQ ID NO: 97461 - DNA, 26 bp, Homo sapiens
gccgtggtaccaggcatggctgcgca

SEQ ID NO: 97462 - DNA, 26 bp, Homo sapiens
ccgtggtaccaggcatggctgcgcag

SEQ ID NO: 97463 - DNA, 26 bp, Homo sapiens
cgtggtaccaggcatggctgcgcagg

SEQ ID NO: 97464 - DNA, 26 bp, Homo sapiens
gtggtaccaggcatggctgcgcaggt

SEQ ID NO: 97465 - DNA, 26 bp, Homo sapiens
tggtaccaggcatggctgcgcaggtc

SEQ ID NO: 97466 - DNA, 26 bp, Homo sapiens
ggtaccaggcatggctgcgcaggtcc

SEQ ID NO: 97467 - DNA, 26 bp, Homo sapiens
gtaccaggcatggctgcgcaggtcct

SEQ ID NO: 97468 - DNA, 26 bp, Homo sapiens
taccaggcatggctgcgcaggtcctc

SEQ ID NO: 97469 - DNA, 26 bp, Homo sapiens
accaggcatggctgcgcaggtcctcg

SEQ ID NO: 97470 - DNA, 26 bp, Homo sapiens
ccaggcatggctgcgcaggtcctcgc

SEQ ID NO: 97471 - DNA, 26 bp, Homo sapiens
caggcatggctgcgcaggtcctcgct

SEQ ID NO: 97472 - DNA, 26 bp, Homo sapiens
aggcatggctgcgcaggtcctcgctg

SEQ ID NO: 97473 - DNA, 26 bp, Homo sapiens
ggcatggctgcgcaggtcctcgctgc

SEQ ID NO: 97474 - DNA, 26 bp, Homo sapiens
gcatggctgcgcaggtcctcgctgct

SEQ ID NO: 97475 - DNA, 26 bp, Homo sapiens
catggctgcgcaggtcctcgctgctc

SEQ ID NO: 97476 - DNA, 26 bp, Homo sapiens
atggctgcgcaggtcctcgctgctca

SEQ ID NO: 97477 - DNA, 26 bp, Homo sapiens
tggctgcgcaggtcctcgctgctcag

SEQ ID NO: 97478 - DNA, 26 bp, Homo sapiens
ggctgcgcaggtcctcgctgctcagg

SEQ ID NO: 97479 - DNA, 26 bp, Homo sapiens
gctgcgcaggtcctcgctgctcagga

SEQ ID NO: 97480 - DNA, 26 bp, Homo sapiens
ctgcgcaggtcctcgctgctcaggag

SEQ ID NO: 97481 - DNA, 26 bp, Homo sapiens
tgcgcaggtcctcgctgctcaggagc

SEQ ID NO: 97482 - DNA, 26 bp, Homo sapiens
gcgcaggtcctcgctgctcaggagca

SEQ ID NO: 97483 - DNA, 26 bp, Homo sapiens
cgcaggtcctcgctgctcaggagcag

SEQ ID NO: 97484 - DNA, 26 bp, Homo sapiens
gcaggtcctcgctgctcaggagcagc

SEQ ID NO: 97485 - DNA, 26 bp, Homo sapiens
caggtcctcgctgctcaggagcagct

SEQ ID NO: 97486 - DNA, 26 bp, Homo sapiens
aggtcctcgctgctcaggagcagctc

SEQ ID NO: 97487 - DNA, 26 bp, Homo sapiens
ggtcctcgctgctcaggagcagctcc

SEQ ID NO: 97488 - DNA, 26 bp, Homo sapiens
gtcctcgctgctcaggagcagctcct

SEQ ID NO: 97489 - DNA, 26 bp, Homo sapiens
tcctcgctgctcaggagcagctcctc

SEQ ID NO: 97490 - DNA, 26 bp, Homo sapiens
cctcgctgctcaggagcagctcctcc

SEQ ID NO: 97491 - DNA, 26 bp, Homo sapiens
ctcgctgctcaggagcagctcctcct

SEQ ID NO: 97492 - DNA, 26 bp, Homo sapiens
tcgctgctcaggagcagctcctcctc

SEQ ID NO: 97493 - DNA, 26 bp, Homo sapiens
cgctgctcaggagcagctcctcctcc

SEQ ID NO: 97494 - DNA, 26 bp, Homo sapiens
gctgctcaggagcagctcctcctcca

SEQ ID NO: 97495 - DNA, 26 bp, Homo sapiens
ctgctcaggagcagctcctcctccag

SEQ ID NO: 97496 - DNA, 26 bp, Homo sapiens
tgctcaggagcagctcctcctccagc

SEQ ID NO: 97497 - DNA, 26 bp, Homo sapiens
gctcaggagcagctcctcctccagct

SEQ ID NO: 97498 - DNA, 26 bp, Homo sapiens
ctcaggagcagctcctcctccagctc

SEQ ID NO: 97499 - DNA, 26 bp, Homo sapiens
tcaggagcagctcctcctccagctcc

SEQ ID NO: 97500 - DNA, 26 bp, Homo sapiens
caggagcagctcctcctccagctcct

SEQ ID NO: 97501 - DNA, 26 bp, Homo sapiens
aggagcagctcctcctccagctcctt

SEQ ID NO: 97502 - DNA, 26 bp, Homo sapiens
ggagcagctcctcctccagctccttc

SEQ ID NO: 97503 - DNA, 26 bp, Homo sapiens
gagcagctcctcctccagctccttct

SEQ ID NO: 97504 - DNA, 26 bp, Homo sapiens
agcagctcctcctccagctccttctt

SEQ ID NO: 97505 - DNA, 26 bp, Homo sapiens
gcagctcctcctccagctccttcttc

SEQ ID NO: 97506 - DNA, 26 bp, Homo sapiens
cagctcctcctccagctccttcttca

SEQ ID NO: 97507 - DNA, 26 bp, Homo sapiens
agctcctcctccagctccttcttcag

SEQ ID NO: 97508 - DNA, 26 bp, Homo sapiens
gctcctcctccagctccttcttcagt

SEQ ID NO: 97509 - DNA, 26 bp, Homo sapiens
ctcctcctccagctccttcttcagtt

SEQ ID NO: 97510 - DNA, 26 bp, Homo sapiens
tcctcctccagctccttcttcagttt

SEQ ID NO: 97511 - DNA, 26 bp, Homo sapiens
cctcctccagctccttcttcagtttc

SEQ ID NO: 97512 - DNA, 26 bp, Homo sapiens
ctcctccagctccttcttcagtttct

SEQ ID NO: 97513 - DNA, 26 bp, Homo sapiens
tcctccagctccttcttcagtttctc

SEQ ID NO: 97514 - DNA, 26 bp, Homo sapiens
cctccagctccttcttcagtttctcg

SEQ ID NO: 97515 - DNA, 26 bp, Homo sapiens
ctccagctccttcttcagtttctcgg

SEQ ID NO: 97516 - DNA, 26 bp, Homo sapiens
tccagctccttcttcagtttctcggg

SEQ ID NO: 97517 - DNA, 26 bp, Homo sapiens
ccagctccttcttcagtttctcgggg

SEQ ID NO: 97518 - DNA, 26 bp, Homo sapiens
cagctccttcttcagtttctcggggg

SEQ ID NO: 97519 - DNA, 26 bp, Homo sapiens
agctccttcttcagtttctcgggggt

SEQ ID NO: 97520 - DNA, 26 bp, Homo sapiens
gctccttcttcagtttctcgggggtc

SEQ ID NO: 97521 - DNA, 26 bp, Homo sapiens
ctccttcttcagtttctcgggggtcc

SEQ ID NO: 97522 - DNA, 26 bp, Homo sapiens
tccttcttcagtttctcgggggtcct

SEQ ID NO: 97523 - DNA, 26 bp, Homo sapiens
ccttcttcagtttctcgggggtcctg

SEQ ID NO: 97524 - DNA, 26 bp, Homo sapiens
cttcttcagtttctcgggggtcctgt

SEQ ID NO: 97525 - DNA, 26 bp, Homo sapiens
ttcttcagtttctcgggggtcctgtc

SEQ ID NO: 97526 - DNA, 26 bp, Homo sapiens
tcttcagtttctcgggggtcctgtcc

SEQ ID NO: 97527 - DNA, 26 bp, Homo sapiens
cttcagtttctcgggggtcctgtcca

SEQ ID NO: 97528 - DNA, 26 bp, Homo sapiens
ttcagtttctcgggggtcctgtccat

SEQ ID NO: 97529 - DNA, 26 bp, Homo sapiens
tcagtttctcgggggtcctgtccatg

SEQ ID NO: 97530 - DNA, 26 bp, Homo sapiens
cagtttctcgggggtcctgtccatga

SEQ ID NO: 97531 - DNA, 26 bp, Homo sapiens
agtttctcgggggtcctgtccatgat

SEQ ID NO: 97532 - DNA, 26 bp, Homo sapiens
gtttctcgggggtcctgtccatgatg

SEQ ID NO: 97533 - DNA, 26 bp, Homo sapiens
tttctcgggggtcctgtccatgatgt

SEQ ID NO: 97534 - DNA, 26 bp, Homo sapiens
ttctcgggggtcctgtccatgatgtg

SEQ ID NO: 97535 - DNA, 26 bp, Homo sapiens
tctcgggggtcctgtccatgatgtgc

SEQ ID NO: 97536 - DNA, 26 bp, Homo sapiens
ctcgggggtcctgtccatgatgtgcc

SEQ ID NO: 97537 - DNA, 26 bp, Homo sapiens
tcgggggtcctgtccatgatgtgcct

SEQ ID NO: 97538 - DNA, 26 bp, Homo sapiens
cgggggtcctgtccatgatgtgcctc

SEQ ID NO: 97539 - DNA, 26 bp, Homo sapiens
gggggtcctgtccatgatgtgcctct

SEQ ID NO: 97540 - DNA, 26 bp, Homo sapiens
ggggtcctgtccatgatgtgcctctc

SEQ ID NO: 97541 - DNA, 26 bp, Homo sapiens
gggtcctgtccatgatgtgcctctcc

SEQ ID NO: 97542 - DNA, 26 bp, Homo sapiens
ggtcctgtccatgatgtgcctctcct

SEQ ID NO: 97543 - DNA, 26 bp, Homo sapiens
gtcctgtccatgatgtgcctctcctt

SEQ ID NO: 97544 - DNA, 26 bp, Homo sapiens
tcctgtccatgatgtgcctctccttg

SEQ ID NO: 97545 - DNA, 26 bp, Homo sapiens
cctgtccatgatgtgcctctccttgg

SEQ ID NO: 97546 - DNA, 26 bp, Homo sapiens
ctgtccatgatgtgcctctccttgga

SEQ ID NO: 97547 - DNA, 26 bp, Homo sapiens
tgtccatgatgtgcctctccttggag

SEQ ID NO: 97548 - DNA, 26 bp, Homo sapiens
gtccatgatgtgcctctccttggaga

SEQ ID NO: 97549 - DNA, 26 bp, Homo sapiens
tccatgatgtgcctctccttggagaa

SEQ ID NO: 97550 - DNA, 26 bp, Homo sapiens
ccatgatgtgcctctccttggagaac

SEQ ID NO: 97551 - DNA, 26 bp, Homo sapiens
catgatgtgcctctccttggagaact

SEQ ID NO: 97552 - DNA, 26 bp, Homo sapiens
atgatgtgcctctccttggagaactt

SEQ ID NO: 97553 - DNA, 26 bp, Homo sapiens
tgatgtgcctctccttggagaacttc

SEQ ID NO: 97554 - DNA, 26 bp, Homo sapiens
gatgtgcctctccttggagaacttca

SEQ ID NO: 97555 - DNA, 26 bp, Homo sapiens
atgtgcctctccttggagaacttcac

SEQ ID NO: 97556 - DNA, 26 bp, Homo sapiens
tgtgcctctccttggagaacttcaca

SEQ ID NO: 97557 - DNA, 26 bp, Homo sapiens
gtgcctctccttggagaacttcacat

SEQ ID NO: 97558 - DNA, 26 bp, Homo sapiens
tgcctctccttggagaacttcacata

SEQ ID NO: 97559 - DNA, 26 bp, Homo sapiens
gcctctccttggagaacttcacatat

SEQ ID NO: 97560 - DNA, 26 bp, Homo sapiens
cctctccttggagaacttcacatatt

SEQ ID NO: 97561 - DNA, 26 bp, Homo sapiens
ctctccttggagaacttcacatattc

SEQ ID NO: 97562 - DNA, 26 bp, Homo sapiens
tctccttggagaacttcacatattcc

SEQ ID NO: 97563 - DNA, 26 bp, Homo sapiens
ctccttggagaacttcacatattcca

SEQ ID NO: 97564 - DNA, 26 bp, Homo sapiens
tccttggagaacttcacatattccac

SEQ ID NO: 97565 - DNA, 26 bp, Homo sapiens
ccttggagaacttcacatattccaca

SEQ ID NO: 97566 - DNA, 26 bp, Homo sapiens
cttggagaacttcacatattccacag

SEQ ID NO: 97567 - DNA, 26 bp, Homo sapiens
ttggagaacttcacatattccacagt

SEQ ID NO: 97568 - DNA, 26 bp, Homo sapiens
tggagaacttcacatattccacagtt

SEQ ID NO: 97569 - DNA, 26 bp, Homo sapiens
ggagaacttcacatattccacagttg

SEQ ID NO: 97570 - DNA, 26 bp, Homo sapiens
gagaacttcacatattccacagttgg

SEQ ID NO: 97571 - DNA, 26 bp, Homo sapiens
agaacttcacatattccacagttggg

SEQ ID NO: 97572 - DNA, 26 bp, Homo sapiens
gaacttcacatattccacagttgggt

SEQ ID NO: 97573 - DNA, 26 bp, Homo sapiens
aacttcacatattccacagttgggtc

SEQ ID NO: 97574 - DNA, 26 bp, Homo sapiens
acttcacatattccacagttgggtcc

SEQ ID NO: 97575 - DNA, 26 bp, Homo sapiens
cttcacatattccacagttgggtcca

SEQ ID NO: 97576 - DNA, 26 bp, Homo sapiens
ttcacatattccacagttgggtccag

SEQ ID NO: 97577 - DNA, 26 bp, Homo sapiens
tcacatattccacagttgggtccaga

SEQ ID NO: 97578 - DNA, 26 bp, Homo sapiens
cacatattccacagttgggtccagaa

SEQ ID NO: 97579 - DNA, 26 bp, Homo sapiens
acatattccacagttgggtccagaag

SEQ ID NO: 97580 - DNA, 26 bp, Homo sapiens
catattccacagttgggtccagaaga

SEQ ID NO: 97581 - DNA, 26 bp, Homo sapiens
atattccacagttgggtccagaagat

SEQ ID NO: 97582 - DNA, 26 bp, Homo sapiens
tattccacagttgggtccagaagatg

SEQ ID NO: 97583 - DNA, 26 bp, Homo sapiens
attccacagttgggtccagaagatgt

SEQ ID NO: 97584 - DNA, 26 bp, Homo sapiens
ttccacagttgggtccagaagatgtg

SEQ ID NO: 97585 - DNA, 26 bp, Homo sapiens
tccacagttgggtccagaagatgtgg

SEQ ID NO: 97586 - DNA, 26 bp, Homo sapiens
ccacagttgggtccagaagatgtgga

SEQ ID NO: 97587 - DNA, 26 bp, Homo sapiens
cacagttgggtccagaagatgtggat

SEQ ID NO: 97588 - DNA, 26 bp, Homo sapiens
acagttgggtccagaagatgtggatc

SEQ ID NO: 97589 - DNA, 26 bp, Homo sapiens
cagttgggtccagaagatgtggatcc

SEQ ID NO: 97590 - DNA, 26 bp, Homo sapiens
agttgggtccagaagatgtggatccc

SEQ ID NO: 97591 - DNA, 26 bp, Homo sapiens
gttgggtccagaagatgtggatccct

SEQ ID NO: 97592 - DNA, 26 bp, Homo sapiens
ttgggtccagaagatgtggatccctg

SEQ ID NO: 97593 - DNA, 26 bp, Homo sapiens
tgggtccagaagatgtggatccctga

SEQ ID NO: 97594 - DNA, 26 bp, Homo sapiens
gggtccagaagatgtggatccctgaa

SEQ ID NO: 97595 - DNA, 26 bp, Homo sapiens
ggtccagaagatgtggatccctgaag

SEQ ID NO: 97596 - DNA, 26 bp, Homo sapiens
gtccagaagatgtggatccctgaagg

SEQ ID NO: 97597 - DNA, 26 bp, Homo sapiens
tccagaagatgtggatccctgaaggt

SEQ ID NO: 97598 - DNA, 26 bp, Homo sapiens
ccagaagatgtggatccctgaaggtg

SEQ ID NO: 97599 - DNA, 26 bp, Homo sapiens
cagaagatgtggatccctgaaggtga

SEQ ID NO: 97600 - DNA, 26 bp, Homo sapiens
agaagatgtggatccctgaaggtgaa

SEQ ID NO: 97601 - DNA, 26 bp, Homo sapiens
gaagatgtggatccctgaaggtgaag

SEQ ID NO: 97602 - DNA, 26 bp, Homo sapiens
aagatgtggatccctgaaggtgaagg

SEQ ID NO: 97603 - DNA, 26 bp, Homo sapiens
agatgtggatccctgaaggtgaaggt

SEQ ID NO: 97604 - DNA, 26 bp, Homo sapiens
gatgtggatccctgaaggtgaaggtt

SEQ ID NO: 97605 - DNA, 26 bp, Homo sapiens
atgtggatccctgaaggtgaaggttt

SEQ ID NO: 97606 - DNA, 26 bp, Homo sapiens
tgtggatccctgaaggtgaaggtttc

SEQ ID NO: 97607 - DNA, 26 bp, Homo sapiens
gtggatccctgaaggtgaaggtttcg

SEQ ID NO: 97608 - DNA, 26 bp, Homo sapiens
tggatccctgaaggtgaaggtttcgc

SEQ ID NO: 97609 - DNA, 26 bp, Homo sapiens
ggatccctgaaggtgaaggtttcgcc

SEQ ID NO: 97610 - DNA, 26 bp, Homo sapiens
gatccctgaaggtgaaggtttcgccg

SEQ ID NO: 97611 - DNA, 26 bp, Homo sapiens
atccctgaaggtgaaggtttcgccgt

SEQ ID NO: 97612 - DNA, 26 bp, Homo sapiens
tccctgaaggtgaaggtttcgccgtg

SEQ ID NO: 97613 - DNA, 26 bp, Homo sapiens
ccctgaaggtgaaggtttcgccgtgc

SEQ ID NO: 97614 - DNA, 26 bp, Homo sapiens
cctgaaggtgaaggtttcgccgtgcc

SEQ ID NO: 97615 - DNA, 26 bp, Homo sapiens
ctgaaggtgaaggtttcgccgtgccg

SEQ ID NO: 97616 - DNA, 26 bp, Homo sapiens
tgaaggtgaaggtttcgccgtgccgg

SEQ ID NO: 97617 - DNA, 26 bp, Homo sapiens
gaaggtgaaggtttcgccgtgccggt

SEQ ID NO: 97618 - DNA, 26 bp, Homo sapiens
aaggtgaaggtttcgccgtgccggtc

SEQ ID NO: 97619 - DNA, 26 bp, Homo sapiens
aggtgaaggtttcgccgtgccggtcc

SEQ ID NO: 97620 - DNA, 26 bp, Homo sapiens
ggtgaaggtttcgccgtgccggtcct

SEQ ID NO: 97621 - DNA, 26 bp, Homo sapiens
gtgaaggtttcgccgtgccggtcctg

SEQ ID NO: 97622 - DNA, 26 bp, Homo sapiens
tgaaggtttcgccgtgccggtcctgc

SEQ ID NO: 97623 - DNA, 26 bp, Homo sapiens
gaaggtttcgccgtgccggtcctgcc

SEQ ID NO: 97624 - DNA, 26 bp, Homo sapiens
aaggtttcgccgtgccggtcctgcca

SEQ ID NO: 97625 - DNA, 26 bp, Homo sapiens
aggtttcgccgtgccggtcctgccat

SEQ ID NO: 97626 - DNA, 26 bp, Homo sapiens
ggtttcgccgtgccggtcctgccatg

SEQ ID NO: 97627 - DNA, 26 bp, Homo sapiens
gtttcgccgtgccggtcctgccatgg

SEQ ID NO: 97628 - DNA, 26 bp, Homo sapiens
tttcgccgtgccggtcctgccatggg

SEQ ID NO: 97629 - DNA, 26 bp, Homo sapiens
ttcgccgtgccggtcctgccatgggc

SEQ ID NO: 97630 - DNA, 26 bp, Homo sapiens
tcgccgtgccggtcctgccatgggct

SEQ ID NO: 97631 - DNA, 26 bp, Homo sapiens
cgccgtgccggtcctgccatgggctc

SEQ ID NO: 97632 - DNA, 26 bp, Homo sapiens
gccgtgccggtcctgccatgggctct

SEQ ID NO: 97633 - DNA, 26 bp, Homo sapiens
ccgtgccggtcctgccatgggctctc

SEQ ID NO: 97634 - DNA, 26 bp, Homo sapiens
cgtgccggtcctgccatgggctctcc

SEQ ID NO: 97635 - DNA, 26 bp, Homo sapiens
gtgccggtcctgccatgggctctcct

SEQ ID NO: 97636 - DNA, 26 bp, Homo sapiens
tgccggtcctgccatgggctctcctg

SEQ ID NO: 97637 - DNA, 26 bp, Homo sapiens
gccggtcctgccatgggctctcctgg

SEQ ID NO: 97638 - DNA, 26 bp, Homo sapiens
ccggtcctgccatgggctctcctgga

SEQ ID NO: 97639 - DNA, 26 bp, Homo sapiens
cggtcctgccatgggctctcctggat

SEQ ID NO: 97640 - DNA, 26 bp, Homo sapiens
ggtcctgccatgggctctcctggatg

SEQ ID NO: 97641 - DNA, 26 bp, Homo sapiens
gtcctgccatgggctctcctggatgc

SEQ ID NO: 97642 - DNA, 26 bp, Homo sapiens
tcctgccatgggctctcctggatgcc

SEQ ID NO: 97643 - DNA, 26 bp, Homo sapiens
cctgccatgggctctcctggatgcca

SEQ ID NO: 97644 - DNA, 26 bp, Homo sapiens
ctgccatgggctctcctggatgccat

SEQ ID NO: 97645 - DNA, 26 bp, Homo sapiens
tgccatgggctctcctggatgccatc

SEQ ID NO: 97646 - DNA, 26 bp, Homo sapiens
gccatgggctctcctggatgccatcc

SEQ ID NO: 97647 - DNA, 26 bp, Homo sapiens
ccatgggctctcctggatgccatcct

SEQ ID NO: 97648 - DNA, 26 bp, Homo sapiens
catgggctctcctggatgccatcctg

SEQ ID NO: 97649 - DNA, 26 bp, Homo sapiens
atgggctctcctggatgccatcctgg

SEQ ID NO: 97650 - DNA, 26 bp, Homo sapiens
tgggctctcctggatgccatcctggg

SEQ ID NO: 97651 - DNA, 26 bp, Homo sapiens
gggctctcctggatgccatcctgggt

SEQ ID NO: 97652 - DNA, 26 bp, Homo sapiens
ggctctcctggatgccatcctgggtc

SEQ ID NO: 97653 - DNA, 26 bp, Homo sapiens
gctctcctggatgccatcctgggtca

SEQ ID NO: 97654 - DNA, 26 bp, Homo sapiens
ctctcctggatgccatcctgggtcac

SEQ ID NO: 97655 - DNA, 26 bp, Homo sapiens
tctcctggatgccatcctgggtcaca

SEQ ID NO: 97656 - DNA, 26 bp, Homo sapiens
ctcctggatgccatcctgggtcacag

SEQ ID NO: 97657 - DNA, 26 bp, Homo sapiens
tcctggatgccatcctgggtcacagg

SEQ ID NO: 97658 - DNA, 26 bp, Homo sapiens
cctggatgccatcctgggtcacaggc

SEQ ID NO: 97659 - DNA, 26 bp, Homo sapiens
ctggatgccatcctgggtcacaggcg

SEQ ID NO: 97660 - DNA, 26 bp, Homo sapiens
tggatgccatcctgggtcacaggcga

SEQ ID NO: 97661 - DNA, 26 bp, Homo sapiens
ggatgccatcctgggtcacaggcgag

SEQ ID NO: 97662 - DNA, 26 bp, Homo sapiens
gatgccatcctgggtcacaggcgagt

SEQ ID NO: 97663 - DNA, 26 bp, Homo sapiens
atgccatcctgggtcacaggcgagtt

SEQ ID NO: 97664 - DNA, 26 bp, Homo sapiens
tgccatcctgggtcacaggcgagttc

SEQ ID NO: 97665 - DNA, 26 bp, Homo sapiens
gccatcctgggtcacaggcgagttct

SEQ ID NO: 97666 - DNA, 26 bp, Homo sapiens
ccatcctgggtcacaggcgagttctg

SEQ ID NO: 97667 - DNA, 26 bp, Homo sapiens
catcctgggtcacaggcgagttctgc

SEQ ID NO: 97668 - DNA, 26 bp, Homo sapiens
atcctgggtcacaggcgagttctgcc

SEQ ID NO: 97669 - DNA, 26 bp, Homo sapiens
tcctgggtcacaggcgagttctgccg

SEQ ID NO: 97670 - DNA, 26 bp, Homo sapiens
cctgggtcacaggcgagttctgccgt

SEQ ID NO: 97671 - DNA, 26 bp, Homo sapiens
ctgggtcacaggcgagttctgccgtg

SEQ ID NO: 97672 - DNA, 26 bp, Homo sapiens
tgggtcacaggcgagttctgccgtgg

SEQ ID NO: 97673 - DNA, 26 bp, Homo sapiens
gggtcacaggcgagttctgccgtggg

SEQ ID NO: 97674 - DNA, 26 bp, Homo sapiens
ggtcacaggcgagttctgccgtgggg

SEQ ID NO: 97675 - DNA, 26 bp, Homo sapiens
gtcacaggcgagttctgccgtgggga

SEQ ID NO: 97676 - DNA, 26 bp, Homo sapiens
tcacaggcgagttctgccgtggggat

SEQ ID NO: 97677 - DNA, 26 bp, Homo sapiens
cacaggcgagttctgccgtggggatt

SEQ ID NO: 97678 - DNA, 26 bp, Homo sapiens
acaggcgagttctgccgtggggattt

SEQ ID NO: 97679 - DNA, 26 bp, Homo sapiens
caggcgagttctgccgtggggatttg

SEQ ID NO: 97680 - DNA, 26 bp, Homo sapiens
aggcgagttctgccgtggggatttgg

SEQ ID NO: 97681 - DNA, 26 bp, Homo sapiens
ggcgagttctgccgtggggatttgga

SEQ ID NO: 97682 - DNA, 26 bp, Homo sapiens
gcgagttctgccgtggggatttggag

SEQ ID NO: 97683 - DNA, 26 bp, Homo sapiens
cgagttctgccgtggggatttggagt

SEQ ID NO: 97684 - DNA, 26 bp, Homo sapiens
gagttctgccgtggggatttggagtg

SEQ ID NO: 97685 - DNA, 26 bp, Homo sapiens
agttctgccgtggggatttggagtgg

SEQ ID NO: 97686 - DNA, 26 bp, Homo sapiens
gttctgccgtggggatttggagtggg

SEQ ID NO: 97687 - DNA, 26 bp, Homo sapiens
ttctgccgtggggatttggagtgggg

SEQ ID NO: 97688 - DNA, 26 bp, Homo sapiens
tctgccgtggggatttggagtggggg

SEQ ID NO: 97689 - DNA, 26 bp, Homo sapiens
ctgccgtggggatttggagtggggga

SEQ ID NO: 97690 - DNA, 26 bp, Homo sapiens
tgccgtggggatttggagtgggggag

SEQ ID NO: 97691 - DNA, 26 bp, Homo sapiens
gccgtggggatttggagtgggggagg

SEQ ID NO: 97692 - DNA, 26 bp, Homo sapiens
ccgtggggatttggagtgggggaggg

SEQ ID NO: 97693 - DNA, 26 bp, Homo sapiens
cgtggggatttggagtgggggagggt

SEQ ID NO: 97694 - DNA, 26 bp, Homo sapiens
gtggggatttggagtgggggagggtg

SEQ ID NO: 97695 - DNA, 26 bp, Homo sapiens
tggggatttggagtgggggagggtgc

SEQ ID NO: 97696 - DNA, 26 bp, Homo sapiens
ggggatttggagtgggggagggtgcc

SEQ ID NO: 97697 - DNA, 26 bp, Homo sapiens
gggatttggagtgggggagggtgccc

SEQ ID NO: 97698 - DNA, 26 bp, Homo sapiens
ggatttggagtgggggagggtgccca

SEQ ID NO: 97699 - DNA, 26 bp, Homo sapiens
gatttggagtgggggagggtgcccat

SEQ ID NO: 97700 - DNA, 26 bp, Homo sapiens
atttggagtgggggagggtgcccatg

SEQ ID NO: 97701 - DNA, 26 bp, Homo sapiens
tttggagtgggggagggtgcccatgt

SEQ ID NO: 97702 - DNA, 26 bp, Homo sapiens
ttggagtgggggagggtgcccatgtg

SEQ ID NO: 97703 - DNA, 26 bp, Homo sapiens
tggagtgggggagggtgcccatgtga

SEQ ID NO: 97704 - DNA, 26 bp, Homo sapiens
ggagtgggggagggtgcccatgtgac

SEQ ID NO: 97705 - DNA, 26 bp, Homo sapiens
gagtgggggagggtgcccatgtgact

SEQ ID NO: 97706 - DNA, 26 bp, Homo sapiens
agtgggggagggtgcccatgtgactg

SEQ ID NO: 97707 - DNA, 26 bp, Homo sapiens
gtgggggagggtgcccatgtgactga

SEQ ID NO: 97708 - DNA, 26 bp, Homo sapiens
tgggggagggtgcccatgtgactgaa

SEQ ID NO: 97709 - DNA, 26 bp, Homo sapiens
gggggagggtgcccatgtgactgaag

SEQ ID NO: 97710 - DNA, 26 bp, Homo sapiens
ggggagggtgcccatgtgactgaagt

SEQ ID NO: 97711 - DNA, 26 bp, Homo sapiens
gggagggtgcccatgtgactgaagtc

SEQ ID NO: 97712 - DNA, 26 bp, Homo sapiens
ggagggtgcccatgtgactgaagtca

SEQ ID NO: 97713 - DNA, 26 bp, Homo sapiens
gagggtgcccatgtgactgaagtcat

SEQ ID NO: 97714 - DNA, 26 bp, Homo sapiens
agggtgcccatgtgactgaagtcatc

SEQ ID NO: 97715 - DNA, 26 bp, Homo sapiens
gggtgcccatgtgactgaagtcatca

SEQ ID NO: 97716 - DNA, 26 bp, Homo sapiens
ggtgcccatgtgactgaagtcatcac

SEQ ID NO: 97717 - DNA, 26 bp, Homo sapiens
gtgcccatgtgactgaagtcatcaca

SEQ ID NO: 97718 - DNA, 26 bp, Homo sapiens
tgcccatgtgactgaagtcatcacag

SEQ ID NO: 97719 - DNA, 26 bp, Homo sapiens
gcccatgtgactgaagtcatcacagg

SEQ ID NO: 97720 - DNA, 26 bp, Homo sapiens
cccatgtgactgaagtcatcacagga

SEQ ID NO: 97721 - DNA, 26 bp, Homo sapiens
ccatgtgactgaagtcatcacaggac

SEQ ID NO: 97722 - DNA, 26 bp, Homo sapiens
catgtgactgaagtcatcacaggacc

SEQ ID NO: 97723 - DNA, 26 bp, Homo sapiens
atgtgactgaagtcatcacaggacct

SEQ ID NO: 97724 - DNA, 26 bp, Homo sapiens
tgtgactgaagtcatcacaggacctt

SEQ ID NO: 97725 - DNA, 26 bp, Homo sapiens
gtgactgaagtcatcacaggacctta

SEQ ID NO: 97726 - DNA, 26 bp, Homo sapiens
tgactgaagtcatcacaggaccttat

SEQ ID NO: 97727 - DNA, 26 bp, Homo sapiens
gactgaagtcatcacaggaccttatg

SEQ ID NO: 97728 - DNA, 26 bp, Homo sapiens
actgaagtcatcacaggaccttatgg

SEQ ID NO: 97729 - DNA, 26 bp, Homo sapiens
ctgaagtcatcacaggaccttatggg

SEQ ID NO: 97730 - DNA, 26 bp, Homo sapiens
tgaagtcatcacaggaccttatggga

SEQ ID NO: 97731 - DNA, 26 bp, Homo sapiens
gaagtcatcacaggaccttatgggag

SEQ ID NO: 97732 - DNA, 26 bp, Homo sapiens
aagtcatcacaggaccttatgggagg

SEQ ID NO: 97733 - DNA, 26 bp, Homo sapiens
agtcatcacaggaccttatgggagga

SEQ ID NO: 97734 - DNA, 26 bp, Homo sapiens
gtcatcacaggaccttatgggaggag

SEQ ID NO: 97735 - DNA, 26 bp, Homo sapiens
tcatcacaggaccttatgggaggagg

SEQ ID NO: 97736 - DNA, 26 bp, Homo sapiens
catcacaggaccttatgggaggagga

SEQ ID NO: 97737 - DNA, 26 bp, Homo sapiens
atcacaggaccttatgggaggaggac

SEQ ID NO: 97738 - DNA, 26 bp, Homo sapiens
tcacaggaccttatgggaggaggacc

SEQ ID NO: 97739 - DNA, 26 bp, Homo sapiens
cacaggaccttatgggaggaggacct

SEQ ID NO: 97740 - DNA, 26 bp, Homo sapiens
acaggaccttatgggaggaggacctt

SEQ ID NO: 97741 - DNA, 26 bp, Homo sapiens
caggaccttatgggaggaggaccttt

SEQ ID NO: 97742 - DNA, 26 bp, Homo sapiens
aggaccttatgggaggaggacctttt

SEQ ID NO: 97743 - DNA, 26 bp, Homo sapiens
ggaccttatgggaggaggaccttttt

SEQ ID NO: 97744 - DNA, 26 bp, Homo sapiens
gaccttatgggaggaggacctttttt

SEQ ID NO: 97745 - DNA, 26 bp, Homo sapiens
accttatgggaggaggaccttttttc

SEQ ID NO: 97746 - DNA, 26 bp, Homo sapiens
ccttatgggaggaggaccttttttct

SEQ ID NO: 97747 - DNA, 26 bp, Homo sapiens
cttatgggaggaggaccttttttctt

SEQ ID NO: 97748 - DNA, 26 bp, Homo sapiens
ttatgggaggaggaccttttttcttc

SEQ ID NO: 97749 - DNA, 26 bp, Homo sapiens
tatgggaggaggaccttttttcttcc

SEQ ID NO: 97750 - DNA, 26 bp, Homo sapiens
atgggaggaggaccttttttcttccg

SEQ ID NO: 97751 - DNA, 26 bp, Homo sapiens
tgggaggaggaccttttttcttccgt

SEQ ID NO: 97752 - DNA, 26 bp, Homo sapiens
gggaggaggaccttttttcttccgtg

SEQ ID NO: 97753 - DNA, 26 bp, Homo sapiens
ggaggaggaccttttttcttccgtgg

SEQ ID NO: 97754 - DNA, 26 bp, Homo sapiens
gaggaggaccttttttcttccgtgga

SEQ ID NO: 97755 - DNA, 26 bp, Homo sapiens
aggaggaccttttttcttccgtggaa

SEQ ID NO: 97756 - DNA, 26 bp, Homo sapiens
ggaggaccttttttcttccgtggaag

SEQ ID NO: 97757 - DNA, 26 bp, Homo sapiens
gaggaccttttttcttccgtggaagg

SEQ ID NO: 97758 - DNA, 26 bp, Homo sapiens
aggaccttttttcttccgtggaaggg

SEQ ID NO: 97759 - DNA, 26 bp, Homo sapiens
ggaccttttttcttccgtggaagggt

SEQ ID NO: 97760 - DNA, 26 bp, Homo sapiens
gaccttttttcttccgtggaagggtg

SEQ ID NO: 97761 - DNA, 26 bp, Homo sapiens
accttttttcttccgtggaagggtgc

SEQ ID NO: 97762 - DNA, 26 bp, Homo sapiens
ccttttttcttccgtggaagggtgcc

SEQ ID NO: 97763 - DNA, 26 bp, Homo sapiens
cttttttcttccgtggaagggtgcca

SEQ ID NO: 97764 - DNA, 26 bp, Homo sapiens
ttttttcttccgtggaagggtgccat

SEQ ID NO: 97765 - DNA, 26 bp, Homo sapiens
tttttcttccgtggaagggtgccatg

SEQ ID NO: 97766 - DNA, 26 bp, Homo sapiens
ttttcttccgtggaagggtgccatgt

SEQ ID NO: 97767 - DNA, 26 bp, Homo sapiens
tttcttccgtggaagggtgccatgta

SEQ ID NO: 97768 - DNA, 26 bp, Homo sapiens
ttcttccgtggaagggtgccatgtat

SEQ ID NO: 97769 - DNA, 26 bp, Homo sapiens
tcttccgtggaagggtgccatgtata

SEQ ID NO: 97770 - DNA, 26 bp, Homo sapiens
cttccgtggaagggtgccatgtatag

SEQ ID NO: 97771 - DNA, 26 bp, Homo sapiens
ttccgtggaagggtgccatgtataga

SEQ ID NO: 97772 - DNA, 26 bp, Homo sapiens
tccgtggaagggtgccatgtatagac

SEQ ID NO: 97773 - DNA, 26 bp, Homo sapiens
ccgtggaagggtgccatgtatagaca

SEQ ID NO: 97774 - DNA, 26 bp, Homo sapiens
cgtggaagggtgccatgtatagacac

SEQ ID NO: 97775 - DNA, 26 bp, Homo sapiens
gtggaagggtgccatgtatagacaca

SEQ ID NO: 97776 - DNA, 26 bp, Homo sapiens
tggaagggtgccatgtatagacacat

SEQ ID NO: 97777 - DNA, 26 bp, Homo sapiens
ggaagggtgccatgtatagacacatc

SEQ ID NO: 97778 - DNA, 26 bp, Homo sapiens
gaagggtgccatgtatagacacatct

SEQ ID NO: 97779 - DNA, 26 bp, Homo sapiens
aagggtgccatgtatagacacatctt

SEQ ID NO: 97780 - DNA, 26 bp, Homo sapiens
agggtgccatgtatagacacatcttg

SEQ ID NO: 97781 - DNA, 26 bp, Homo sapiens
gggtgccatgtatagacacatcttga

SEQ ID NO: 97782 - DNA, 26 bp, Homo sapiens
ggtgccatgtatagacacatcttgat

SEQ ID NO: 97783 - DNA, 26 bp, Homo sapiens
gtgccatgtatagacacatcttgata

SEQ ID NO: 97784 - DNA, 26 bp, Homo sapiens
tgccatgtatagacacatcttgatag

SEQ ID NO: 97785 - DNA, 26 bp, Homo sapiens
gccatgtatagacacatcttgatagg

SEQ ID NO: 97786 - DNA, 26 bp, Homo sapiens
ccatgtatagacacatcttgataggc

SEQ ID NO: 97787 - DNA, 26 bp, Homo sapiens
catgtatagacacatcttgataggca

SEQ ID NO: 97788 - DNA, 26 bp, Homo sapiens
atgtatagacacatcttgataggcat

SEQ ID NO: 97789 - DNA, 26 bp, Homo sapiens
tgtatagacacatcttgataggcatc

SEQ ID NO: 97790 - DNA, 26 bp, Homo sapiens
gtatagacacatcttgataggcatct

SEQ ID NO: 97791 - DNA, 26 bp, Homo sapiens
tatagacacatcttgataggcatctg

SEQ ID NO: 97792 - DNA, 26 bp, Homo sapiens
atagacacatcttgataggcatctgg

SEQ ID NO: 97793 - DNA, 26 bp, Homo sapiens
tagacacatcttgataggcatctggg

SEQ ID NO: 97794 - DNA, 26 bp, Homo sapiens
agacacatcttgataggcatctgggc

SEQ ID NO: 97795 - DNA, 26 bp, Homo sapiens
gacacatcttgataggcatctgggcg

SEQ ID NO: 97796 - DNA, 26 bp, Homo sapiens
acacatcttgataggcatctgggcga

SEQ ID NO: 97797 - DNA, 26 bp, Homo sapiens
cacatcttgataggcatctgggcgat

SEQ ID NO: 97798 - DNA, 26 bp, Homo sapiens
acatcttgataggcatctgggcgatg

SEQ ID NO: 97799 - DNA, 26 bp, Homo sapiens
catcttgataggcatctgggcgatgc

SEQ ID NO: 97800 - DNA, 26 bp, Homo sapiens
atcttgataggcatctgggcgatgct

SEQ ID NO: 97801 - DNA, 26 bp, Homo sapiens
tcttgataggcatctgggcgatgctc

SEQ ID NO: 97802 - DNA, 26 bp, Homo sapiens
cttgataggcatctgggcgatgctca

SEQ ID NO: 97803 - DNA, 26 bp, Homo sapiens
ttgataggcatctgggcgatgctcag

SEQ ID NO: 97804 - DNA, 26 bp, Homo sapiens
tgataggcatctgggcgatgctcagc

SEQ ID NO: 97805 - DNA, 26 bp, Homo sapiens
gataggcatctgggcgatgctcagcg

SEQ ID NO: 97806 - DNA, 26 bp, Homo sapiens
ataggcatctgggcgatgctcagcga

SEQ ID NO: 97807 - DNA, 26 bp, Homo sapiens
taggcatctgggcgatgctcagcgag

SEQ ID NO: 97808 - DNA, 26 bp, Homo sapiens
aggcatctgggcgatgctcagcgaga

SEQ ID NO: 97809 - DNA, 26 bp, Homo sapiens
ggcatctgggcgatgctcagcgagag

SEQ ID NO: 97810 - DNA, 26 bp, Homo sapiens
gcatctgggcgatgctcagcgagagg

SEQ ID NO: 97811 - DNA, 26 bp, Homo sapiens
catctgggcgatgctcagcgagaggg

SEQ ID NO: 97812 - DNA, 26 bp, Homo sapiens
atctgggcgatgctcagcgagagggg

SEQ ID NO: 97813 - DNA, 26 bp, Homo sapiens
tctgggcgatgctcagcgagagggga

SEQ ID NO: 97814 - DNA, 26 bp, Homo sapiens
ctgggcgatgctcagcgagaggggac

SEQ ID NO: 97815 - DNA, 26 bp, Homo sapiens
tgggcgatgctcagcgagaggggacc

SEQ ID NO: 97816 - DNA, 26 bp, Homo sapiens
gggcgatgctcagcgagaggggacct

SEQ ID NO: 97817 - DNA, 26 bp, Homo sapiens
ggcgatgctcagcgagaggggacctg

SEQ ID NO: 97818 - DNA, 26 bp, Homo sapiens
gcgatgctcagcgagaggggacctgc

SEQ ID NO: 97819 - DNA, 26 bp, Homo sapiens
cgatgctcagcgagaggggacctgct

SEQ ID NO: 97820 - DNA, 26 bp, Homo sapiens
gatgctcagcgagaggggacctgctg

SEQ ID NO: 97821 - DNA, 26 bp, Homo sapiens
atgctcagcgagaggggacctgctgc

SEQ ID NO: 97822 - DNA, 26 bp, Homo sapiens
tgctcagcgagaggggacctgctgct

SEQ ID NO: 97823 - DNA, 26 bp, Homo sapiens
gctcagcgagaggggacctgctgctc

SEQ ID NO: 97824 - DNA, 26 bp, Homo sapiens
ctcagcgagaggggacctgctgctca

SEQ ID NO: 97825 - DNA, 26 bp, Homo sapiens
tcagcgagaggggacctgctgctcag

SEQ ID NO: 97826 - DNA, 26 bp, Homo sapiens
cagcgagaggggacctgctgctcaga

SEQ ID NO: 97827 - DNA, 26 bp, Homo sapiens
agcgagaggggacctgctgctcagaa

SEQ ID NO: 97828 - DNA, 26 bp, Homo sapiens
gcgagaggggacctgctgctcagaag

SEQ ID NO: 97829 - DNA, 26 bp, Homo sapiens
cgagaggggacctgctgctcagaagg

SEQ ID NO: 97830 - DNA, 26 bp, Homo sapiens
gagaggggacctgctgctcagaaggt

SEQ ID NO: 97831 - DNA, 26 bp, Homo sapiens
agaggggacctgctgctcagaaggtc

SEQ ID NO: 97832 - DNA, 26 bp, Homo sapiens
gaggggacctgctgctcagaaggtcc

SEQ ID NO: 97833 - DNA, 26 bp, Homo sapiens
aggggacctgctgctcagaaggtcca

SEQ ID NO: 97834 - DNA, 26 bp, Homo sapiens
ggggacctgctgctcagaaggtccat

SEQ ID NO: 97835 - DNA, 26 bp, Homo sapiens
gggacctgctgctcagaaggtccatg

SEQ ID NO: 97836 - DNA, 26 bp, Homo sapiens
ggacctgctgctcagaaggtccatgg

SEQ ID NO: 97837 - DNA, 26 bp, Homo sapiens
gacctgctgctcagaaggtccatgga

SEQ ID NO: 97838 - DNA, 26 bp, Homo sapiens
acctgctgctcagaaggtccatggat

SEQ ID NO: 97839 - DNA, 26 bp, Homo sapiens
cctgctgctcagaaggtccatggatg

SEQ ID NO: 97840 - DNA, 26 bp, Homo sapiens
ctgctgctcagaaggtccatggatga

SEQ ID NO: 97841 - DNA, 26 bp, Homo sapiens
tgctgctcagaaggtccatggatgag

SEQ ID NO: 97842 - DNA, 26 bp, Homo sapiens
gctgctcagaaggtccatggatgagg

SEQ ID NO: 97843 - DNA, 26 bp, Homo sapiens
ctgctcagaaggtccatggatgaggc

SEQ ID NO: 97844 - DNA, 26 bp, Homo sapiens
tgctcagaaggtccatggatgaggcc

SEQ ID NO: 97845 - DNA, 26 bp, Homo sapiens
gctcagaaggtccatggatgaggcca

SEQ ID NO: 97846 - DNA, 26 bp, Homo sapiens
ctcagaaggtccatggatgaggccag

SEQ ID NO: 97847 - DNA, 26 bp, Homo sapiens
tcagaaggtccatggatgaggccagg

SEQ ID NO: 97848 - DNA, 26 bp, Homo sapiens
cagaaggtccatggatgaggccaggg

SEQ ID NO: 97849 - DNA, 26 bp, Homo sapiens
agaaggtccatggatgaggccagggg

SEQ ID NO: 97850 - DNA, 26 bp, Homo sapiens
gaaggtccatggatgaggccaggggg

SEQ ID NO: 97851 - DNA, 26 bp, Homo sapiens
aaggtccatggatgaggccaggggga

SEQ ID NO: 97852 - DNA, 26 bp, Homo sapiens
aggtccatggatgaggccagggggaa

SEQ ID NO: 97853 - DNA, 26 bp, Homo sapiens
ggtccatggatgaggccagggggaac

SEQ ID NO: 97854 - DNA, 26 bp, Homo sapiens
gtccatggatgaggccagggggaact

SEQ ID NO: 97855 - DNA, 26 bp, Homo sapiens
tccatggatgaggccagggggaactg

SEQ ID NO: 97856 - DNA, 26 bp, Homo sapiens
ccatggatgaggccagggggaactgg

SEQ ID NO: 97857 - DNA, 26 bp, Homo sapiens
catggatgaggccagggggaactggt

SEQ ID NO: 97858 - DNA, 26 bp, Homo sapiens
atggatgaggccagggggaactggtg

SEQ ID NO: 97859 - DNA, 26 bp, Homo sapiens
tggatgaggccagggggaactggtga

SEQ ID NO: 97860 - DNA, 26 bp, Homo sapiens
ggatgaggccagggggaactggtgat

SEQ ID NO: 97861 - DNA, 26 bp, Homo sapiens
gatgaggccagggggaactggtgatt

SEQ ID NO: 97862 - DNA, 26 bp, Homo sapiens
atgaggccagggggaactggtgattc

SEQ ID NO: 97863 - DNA, 26 bp, Homo sapiens
tgaggccagggggaactggtgattca

SEQ ID NO: 97864 - DNA, 26 bp, Homo sapiens
gaggccagggggaactggtgattcac

SEQ ID NO: 97865 - DNA, 26 bp, Homo sapiens
aggccagggggaactggtgattcacc

SEQ ID NO: 97866 - DNA, 26 bp, Homo sapiens
ggccagggggaactggtgattcaccg

SEQ ID NO: 97867 - DNA, 26 bp, Homo sapiens
gccagggggaactggtgattcaccgg

SEQ ID NO: 97868 - DNA, 26 bp, Homo sapiens
ccagggggaactggtgattcaccggc

SEQ ID NO: 97869 - DNA, 26 bp, Homo sapiens
cagggggaactggtgattcaccggca

SEQ ID NO: 97870 - DNA, 26 bp, Homo sapiens
agggggaactggtgattcaccggcat

SEQ ID NO: 97871 - DNA, 26 bp, Homo sapiens
gggggaactggtgattcaccggcatg

SEQ ID NO: 97872 - DNA, 26 bp, Homo sapiens
ggggaactggtgattcaccggcatgt

SEQ ID NO: 97873 - DNA, 26 bp, Homo sapiens
gggaactggtgattcaccggcatgtt

SEQ ID NO: 97874 - DNA, 26 bp, Homo sapiens
ggaactggtgattcaccggcatgttt

SEQ ID NO: 97875 - DNA, 26 bp, Homo sapiens
gaactggtgattcaccggcatgtttc

SEQ ID NO: 97876 - DNA, 26 bp, Homo sapiens
aactggtgattcaccggcatgtttct

SEQ ID NO: 97877 - DNA, 26 bp, Homo sapiens
actggtgattcaccggcatgtttctg

SEQ ID NO: 97878 - DNA, 26 bp, Homo sapiens
ctggtgattcaccggcatgtttctgg

SEQ ID NO: 97879 - DNA, 26 bp, Homo sapiens
tggtgattcaccggcatgtttctggg

SEQ ID NO: 97880 - DNA, 26 bp, Homo sapiens
ggtgattcaccggcatgtttctggga

SEQ ID NO: 97881 - DNA, 26 bp, Homo sapiens
gtgattcaccggcatgtttctgggaa

SEQ ID NO: 97882 - DNA, 26 bp, Homo sapiens
tgattcaccggcatgtttctgggaag

SEQ ID NO: 97883 - DNA, 26 bp, Homo sapiens
gattcaccggcatgtttctgggaagg

SEQ ID NO: 97884 - DNA, 26 bp, Homo sapiens
attcaccggcatgtttctgggaaggc

SEQ ID NO: 97885 - DNA, 26 bp, Homo sapiens
ttcaccggcatgtttctgggaaggct

SEQ ID NO: 97886 - DNA, 26 bp, Homo sapiens
tcaccggcatgtttctgggaaggctt

SEQ ID NO: 97887 - DNA, 26 bp, Homo sapiens
caccggcatgtttctgggaaggcttg

SEQ ID NO: 97888 - DNA, 26 bp, Homo sapiens
accggcatgtttctgggaaggcttgc

SEQ ID NO: 97889 - DNA, 26 bp, Homo sapiens
ccggcatgtttctgggaaggcttgca

SEQ ID NO: 97890 - DNA, 26 bp, Homo sapiens
cggcatgtttctgggaaggcttgcaa

SEQ ID NO: 97891 - DNA, 26 bp, Homo sapiens
ggcatgtttctgggaaggcttgcaaa

SEQ ID NO: 97892 - DNA, 26 bp, Homo sapiens
gcatgtttctgggaaggcttgcaaat

SEQ ID NO: 97893 - DNA, 26 bp, Homo sapiens
catgtttctgggaaggcttgcaaatt

SEQ ID NO: 97894 - DNA, 26 bp, Homo sapiens
atgtttctgggaaggcttgcaaattt

SEQ ID NO: 97895 - DNA, 26 bp, Homo sapiens
tgtttctgggaaggcttgcaaatttt

SEQ ID NO: 97896 - DNA, 26 bp, Homo sapiens
gtttctgggaaggcttgcaaattttc

SEQ ID NO: 97897 - DNA, 26 bp, Homo sapiens
tttctgggaaggcttgcaaattttcc

SEQ ID NO: 97898 - DNA, 26 bp, Homo sapiens
ttctgggaaggcttgcaaattttcct

SEQ ID NO: 97899 - DNA, 26 bp, Homo sapiens
tctgggaaggcttgcaaattttcctg

SEQ ID NO: 97900 - DNA, 26 bp, Homo sapiens
ctgggaaggcttgcaaattttcctgc

SEQ ID NO: 97901 - DNA, 26 bp, Homo sapiens
tgggaaggcttgcaaattttcctgca

SEQ ID NO: 97902 - DNA, 26 bp, Homo sapiens
gggaaggcttgcaaattttcctgcag

SEQ ID NO: 97903 - DNA, 26 bp, Homo sapiens
ggaaggcttgcaaattttcctgcagc

SEQ ID NO: 97904 - DNA, 26 bp, Homo sapiens
gaaggcttgcaaattttcctgcagcc

SEQ ID NO: 97905 - DNA, 26 bp, Homo sapiens
aaggcttgcaaattttcctgcagcca

SEQ ID NO: 97906 - DNA, 26 bp, Homo sapiens
aggcttgcaaattttcctgcagccat

SEQ ID NO: 97907 - DNA, 26 bp, Homo sapiens
ggcttgcaaattttcctgcagccata

SEQ ID NO: 97908 - DNA, 26 bp, Homo sapiens
gcttgcaaattttcctgcagccataa

SEQ ID NO: 97909 - DNA, 26 bp, Homo sapiens
cttgcaaattttcctgcagccataat

SEQ ID NO: 97910 - DNA, 26 bp, Homo sapiens
ttgcaaattttcctgcagccataatt

SEQ ID NO: 97911 - DNA, 26 bp, Homo sapiens
tgcaaattttcctgcagccataattc

SEQ ID NO: 97912 - DNA, 26 bp, Homo sapiens
gcaaattttcctgcagccataattct

SEQ ID NO: 97913 - DNA, 26 bp, Homo sapiens
caaattttcctgcagccataattctc

SEQ ID NO: 97914 - DNA, 26 bp, Homo sapiens
aaattttcctgcagccataattctca

SEQ ID NO: 97915 - DNA, 26 bp, Homo sapiens
aattttcctgcagccataattctcaa

SEQ ID NO: 97916 - DNA, 26 bp, Homo sapiens
attttcctgcagccataattctcaac

SEQ ID NO: 97917 - DNA, 26 bp, Homo sapiens
ttttcctgcagccataattctcaact

SEQ ID NO: 97918 - DNA, 26 bp, Homo sapiens
tttcctgcagccataattctcaactc

SEQ ID NO: 97919 - DNA, 26 bp, Homo sapiens
ttcctgcagccataattctcaactct

SEQ ID NO: 97920 - DNA, 26 bp, Homo sapiens
tcctgcagccataattctcaactctt

SEQ ID NO: 97921 - DNA, 26 bp, Homo sapiens
cctgcagccataattctcaactcttg

SEQ ID NO: 97922 - DNA, 26 bp, Homo sapiens
ctgcagccataattctcaactcttgc

SEQ ID NO: 97923 - DNA, 26 bp, Homo sapiens
tgcagccataattctcaactcttgcc

SEQ ID NO: 97924 - DNA, 26 bp, Homo sapiens
gcagccataattctcaactcttgcct

SEQ ID NO: 97925 - DNA, 26 bp, Homo sapiens
cagccataattctcaactcttgcctc

SEQ ID NO: 97926 - DNA, 26 bp, Homo sapiens
agccataattctcaactcttgcctct

SEQ ID NO: 97927 - DNA, 26 bp, Homo sapiens
gccataattctcaactcttgcctctt

SEQ ID NO: 97928 - DNA, 26 bp, Homo sapiens
ccataattctcaactcttgcctcttc

SEQ ID NO: 97929 - DNA, 26 bp, Homo sapiens
cataattctcaactcttgcctcttcc

SEQ ID NO: 97930 - DNA, 26 bp, Homo sapiens
ataattctcaactcttgcctcttcct

SEQ ID NO: 97931 - DNA, 26 bp, Homo sapiens
taattctcaactcttgcctcttcctc

SEQ ID NO: 97932 - DNA, 26 bp, Homo sapiens
aattctcaactcttgcctcttcctcc

SEQ ID NO: 97933 - DNA, 26 bp, Homo sapiens
attctcaactcttgcctcttcctcct

SEQ ID NO: 97934 - DNA, 26 bp, Homo sapiens
ttctcaactcttgcctcttcctcctt

SEQ ID NO: 97935 - DNA, 26 bp, Homo sapiens
tctcaactcttgcctcttcctccttt

SEQ ID NO: 97936 - DNA, 26 bp, Homo sapiens
ctcaactcttgcctcttcctcctttc

SEQ ID NO: 97937 - DNA, 26 bp, Homo sapiens
tcaactcttgcctcttcctcctttct

SEQ ID NO: 97938 - DNA, 26 bp, Homo sapiens
caactcttgcctcttcctcctttctc

SEQ ID NO: 97939 - DNA, 26 bp, Homo sapiens
aactcttgcctcttcctcctttctcc

SEQ ID NO: 97940 - DNA, 26 bp, Homo sapiens
actcttgcctcttcctcctttctcca

SEQ ID NO: 97941 - DNA, 26 bp, Homo sapiens
ctcttgcctcttcctcctttctccag

SEQ ID NO: 97942 - DNA, 26 bp, Homo sapiens
tcttgcctcttcctcctttctccagg

SEQ ID NO: 97943 - DNA, 26 bp, Homo sapiens
cttgcctcttcctcctttctccaggc

SEQ ID NO: 97944 - DNA, 26 bp, Homo sapiens
ttgcctcttcctcctttctccaggcc

SEQ ID NO: 97945 - DNA, 26 bp, Homo sapiens
tgcctcttcctcctttctccaggcca

SEQ ID NO: 97946 - DNA, 26 bp, Homo sapiens
gcctcttcctcctttctccaggccag

SEQ ID NO: 97947 - DNA, 26 bp, Homo sapiens
cctcttcctcctttctccaggccagc

SEQ ID NO: 97948 - DNA, 26 bp, Homo sapiens
ctcttcctcctttctccaggccagct

SEQ ID NO: 97949 - DNA, 26 bp, Homo sapiens
tcttcctcctttctccaggccagctt

SEQ ID NO: 97950 - DNA, 26 bp, Homo sapiens
cttcctcctttctccaggccagcttg

SEQ ID NO: 97951 - DNA, 26 bp, Homo sapiens
ttcctcctttctccaggccagcttgg

SEQ ID NO: 97952 - DNA, 26 bp, Homo sapiens
tcctcctttctccaggccagcttggg

SEQ ID NO: 97953 - DNA, 26 bp, Homo sapiens
cctcctttctccaggccagcttgggt

SEQ ID NO: 97954 - DNA, 26 bp, Homo sapiens
ctcctttctccaggccagcttgggtc

SEQ ID NO: 97955 - DNA, 26 bp, Homo sapiens
tcctttctccaggccagcttgggtca

SEQ ID NO: 97956 - DNA, 26 bp, Homo sapiens
cctttctccaggccagcttgggtcag

SEQ ID NO: 97957 - DNA, 26 bp, Homo sapiens
ctttctccaggccagcttgggtcaga

SEQ ID NO: 97958 - DNA, 26 bp, Homo sapiens
tttctccaggccagcttgggtcagat

SEQ ID NO: 97959 - DNA, 26 bp, Homo sapiens
ttctccaggccagcttgggtcagatg

SEQ ID NO: 97960 - DNA, 26 bp, Homo sapiens
tctccaggccagcttgggtcagatga

SEQ ID NO: 97961 - DNA, 26 bp, Homo sapiens
ctccaggccagcttgggtcagatgaa

SEQ ID NO: 97962 - DNA, 26 bp, Homo sapiens
tccaggccagcttgggtcagatgaag

SEQ ID NO: 97963 - DNA, 26 bp, Homo sapiens
ccaggccagcttgggtcagatgaagc

SEQ ID NO: 97964 - DNA, 26 bp, Homo sapiens
caggccagcttgggtcagatgaagca

SEQ ID NO: 97965 - DNA, 26 bp, Homo sapiens
aggccagcttgggtcagatgaagcag

SEQ ID NO: 97966 - DNA, 26 bp, Homo sapiens
ggccagcttgggtcagatgaagcagc

SEQ ID NO: 97967 - DNA, 26 bp, Homo sapiens
gccagcttgggtcagatgaagcagct

SEQ ID NO: 97968 - DNA, 26 bp, Homo sapiens
ccagcttgggtcagatgaagcagctc

SEQ ID NO: 97969 - DNA, 26 bp, Homo sapiens
cagcttgggtcagatgaagcagctct

SEQ ID NO: 97970 - DNA, 26 bp, Homo sapiens
agcttgggtcagatgaagcagctctg

SEQ ID NO: 97971 - DNA, 26 bp, Homo sapiens
gcttgggtcagatgaagcagctctgt

SEQ ID NO: 97972 - DNA, 26 bp, Homo sapiens
cttgggtcagatgaagcagctctgtt

SEQ ID NO: 97973 - DNA, 26 bp, Homo sapiens
ttgggtcagatgaagcagctctgttt

SEQ ID NO: 97974 - DNA, 26 bp, Homo sapiens
tgggtcagatgaagcagctctgtttg

SEQ ID NO: 97975 - DNA, 26 bp, Homo sapiens
gggtcagatgaagcagctctgtttgg

SEQ ID NO: 97976 - DNA, 26 bp, Homo sapiens
ggtcagatgaagcagctctgtttgga

SEQ ID NO: 97977 - DNA, 26 bp, Homo sapiens
gtcagatgaagcagctctgtttggag

SEQ ID NO: 97978 - DNA, 26 bp, Homo sapiens
tcagatgaagcagctctgtttggaga

SEQ ID NO: 97979 - DNA, 26 bp, Homo sapiens
cagatgaagcagctctgtttggagaa

SEQ ID NO: 97980 - DNA, 26 bp, Homo sapiens
agatgaagcagctctgtttggagaag

SEQ ID NO: 97981 - DNA, 26 bp, Homo sapiens
gatgaagcagctctgtttggagaagc

SEQ ID NO: 97982 - DNA, 26 bp, Homo sapiens
atgaagcagctctgtttggagaagcg

SEQ ID NO: 97983 - DNA, 26 bp, Homo sapiens
tgaagcagctctgtttggagaagcga

SEQ ID NO: 97984 - DNA, 26 bp, Homo sapiens
gaagcagctctgtttggagaagcgat

SEQ ID NO: 97985 - DNA, 26 bp, Homo sapiens
aagcagctctgtttggagaagcgatt

SEQ ID NO: 97986 - DNA, 26 bp, Homo sapiens
agcagctctgtttggagaagcgattc

SEQ ID NO: 97987 - DNA, 26 bp, Homo sapiens
gcagctctgtttggagaagcgattca

SEQ ID NO: 97988 - DNA, 26 bp, Homo sapiens
cagctctgtttggagaagcgattcac

SEQ ID NO: 97989 - DNA, 26 bp, Homo sapiens
agctctgtttggagaagcgattcaca

SEQ ID NO: 97990 - DNA, 26 bp, Homo sapiens
gctctgtttggagaagcgattcacaa

SEQ ID NO: 97991 - DNA, 26 bp, Homo sapiens
ctctgtttggagaagcgattcacaat

SEQ ID NO: 97992 - DNA, 26 bp, Homo sapiens
tctgtttggagaagcgattcacaatt

SEQ ID NO: 97993 - DNA, 26 bp, Homo sapiens
ctgtttggagaagcgattcacaattc

SEQ ID NO: 97994 - DNA, 26 bp, Homo sapiens
tgtttggagaagcgattcacaattcg

SEQ ID NO: 97995 - DNA, 26 bp, Homo sapiens
gtttggagaagcgattcacaattcgc

SEQ ID NO: 97996 - DNA, 26 bp, Homo sapiens
tttggagaagcgattcacaattcgca

SEQ ID NO: 97997 - DNA, 26 bp, Homo sapiens
ttggagaagcgattcacaattcgcat

SEQ ID NO: 97998 - DNA, 26 bp, Homo sapiens
tggagaagcgattcacaattcgcatc

SEQ ID NO: 97999 - DNA, 26 bp, Homo sapiens
ggagaagcgattcacaattcgcatcc

SEQ ID NO: 98000 - DNA, 26 bp, Homo sapiens
gagaagcgattcacaattcgcatcct

SEQ ID NO: 98001 - DNA, 26 bp, Homo sapiens
agaagcgattcacaattcgcatcctt

SEQ ID NO: 98002 - DNA, 26 bp, Homo sapiens
gaagcgattcacaattcgcatccttg

SEQ ID NO: 98003 - DNA, 26 bp, Homo sapiens
aagcgattcacaattcgcatccttgc

SEQ ID NO: 98004 - DNA, 26 bp, Homo sapiens
agcgattcacaattcgcatccttgca

SEQ ID NO: 98005 - DNA, 26 bp, Homo sapiens
gcgattcacaattcgcatccttgcac

SEQ ID NO: 98006 - DNA, 26 bp, Homo sapiens
cgattcacaattcgcatccttgcacg

SEQ ID NO: 98007 - DNA, 26 bp, Homo sapiens
gattcacaattcgcatccttgcacgt

SEQ ID NO: 98008 - DNA, 26 bp, Homo sapiens
attcacaattcgcatccttgcacgtt

SEQ ID NO: 98009 - DNA, 26 bp, Homo sapiens
ttcacaattcgcatccttgcacgttc

SEQ ID NO: 98010 - DNA, 26 bp, Homo sapiens
tcacaattcgcatccttgcacgttct

SEQ ID NO: 98011 - DNA, 26 bp, Homo sapiens
cacaattcgcatccttgcacgttctt

SEQ ID NO: 98012 - DNA, 26 bp, Homo sapiens
acaattcgcatccttgcacgttcttc

SEQ ID NO: 98013 - DNA, 26 bp, Homo sapiens
caattcgcatccttgcacgttcttcc

SEQ ID NO: 98014 - DNA, 26 bp, Homo sapiens
aattcgcatccttgcacgttcttcct

SEQ ID NO: 98015 - DNA, 26 bp, Homo sapiens
attcgcatccttgcacgttcttccta

SEQ ID NO: 98016 - DNA, 26 bp, Homo sapiens
ttcgcatccttgcacgttcttcctag

SEQ ID NO: 98017 - DNA, 26 bp, Homo sapiens
tcgcatccttgcacgttcttcctaga

SEQ ID NO: 98018 - DNA, 26 bp, Homo sapiens
cgcatccttgcacgttcttcctagat

SEQ ID NO: 98019 - DNA, 26 bp, Homo sapiens
gcatccttgcacgttcttcctagatg

SEQ ID NO: 98020 - DNA, 26 bp, Homo sapiens
catccttgcacgttcttcctagatgt

SEQ ID NO: 98021 - DNA, 26 bp, Homo sapiens
atccttgcacgttcttcctagatgtg

SEQ ID NO: 98022 - DNA, 26 bp, Homo sapiens
tccttgcacgttcttcctagatgtgc

SEQ ID NO: 98023 - DNA, 26 bp, Homo sapiens
ccttgcacgttcttcctagatgtgcc

SEQ ID NO: 98024 - DNA, 26 bp, Homo sapiens
cttgcacgttcttcctagatgtgcca

SEQ ID NO: 98025 - DNA, 26 bp, Homo sapiens
ttgcacgttcttcctagatgtgccaa

SEQ ID NO: 98026 - DNA, 26 bp, Homo sapiens
tgcacgttcttcctagatgtgccaag

SEQ ID NO: 98027 - DNA, 26 bp, Homo sapiens
gcacgttcttcctagatgtgccaaga

SEQ ID NO: 98028 - DNA, 26 bp, Homo sapiens
cacgttcttcctagatgtgccaagaa

SEQ ID NO: 98029 - DNA, 26 bp, Homo sapiens
acgttcttcctagatgtgccaagaat

SEQ ID NO: 98030 - DNA, 26 bp, Homo sapiens
cgttcttcctagatgtgccaagaatg

SEQ ID NO: 98031 - DNA, 26 bp, Homo sapiens
gttcttcctagatgtgccaagaatgc

SEQ ID NO: 98032 - DNA, 26 bp, Homo sapiens
ttcttcctagatgtgccaagaatgca

SEQ ID NO: 98033 - DNA, 26 bp, Homo sapiens
tcttcctagatgtgccaagaatgcaa

SEQ ID NO: 98034 - DNA, 26 bp, Homo sapiens
cttcctagatgtgccaagaatgcaag

SEQ ID NO: 98035 - DNA, 26 bp, Homo sapiens
ttcctagatgtgccaagaatgcaaga

SEQ ID NO: 98036 - DNA, 26 bp, Homo sapiens
tcctagatgtgccaagaatgcaagac

SEQ ID NO: 98037 - DNA, 26 bp, Homo sapiens
cctagatgtgccaagaatgcaagacc

SEQ ID NO: 98038 - DNA, 26 bp, Homo sapiens
ctagatgtgccaagaatgcaagaccc

SEQ ID NO: 98039 - DNA, 26 bp, Homo sapiens
tagatgtgccaagaatgcaagaccct

SEQ ID NO: 98040 - DNA, 26 bp, Homo sapiens
agatgtgccaagaatgcaagaccctg

SEQ ID NO: 98041 - DNA, 26 bp, Homo sapiens
gatgtgccaagaatgcaagaccctga

SEQ ID NO: 98042 - DNA, 26 bp, Homo sapiens
atgtgccaagaatgcaagaccctgat

SEQ ID NO: 98043 - DNA, 26 bp, Homo sapiens
tgtgccaagaatgcaagaccctgatc

SEQ ID NO: 98044 - DNA, 26 bp, Homo sapiens
gtgccaagaatgcaagaccctgatca

SEQ ID NO: 98045 - DNA, 26 bp, Homo sapiens
tgccaagaatgcaagaccctgatcac

SEQ ID NO: 98046 - DNA, 26 bp, Homo sapiens
gccaagaatgcaagaccctgatcacg

SEQ ID NO: 98047 - DNA, 26 bp, Homo sapiens
ccaagaatgcaagaccctgatcacgc

SEQ ID NO: 98048 - DNA, 26 bp, Homo sapiens
caagaatgcaagaccctgatcacgct

SEQ ID NO: 98049 - DNA, 26 bp, Homo sapiens
aagaatgcaagaccctgatcacgctt

SEQ ID NO: 98050 - DNA, 26 bp, Homo sapiens
agaatgcaagaccctgatcacgcttt

SEQ ID NO: 98051 - DNA, 26 bp, Homo sapiens
gaatgcaagaccctgatcacgcttta

SEQ ID NO: 98052 - DNA, 26 bp, Homo sapiens
aatgcaagaccctgatcacgctttac

SEQ ID NO: 98053 - DNA, 26 bp, Homo sapiens
atgcaagaccctgatcacgctttact

SEQ ID NO: 98054 - DNA, 26 bp, Homo sapiens
tgcaagaccctgatcacgctttactt

SEQ ID NO: 98055 - DNA, 26 bp, Homo sapiens
gcaagaccctgatcacgctttacttg

SEQ ID NO: 98056 - DNA, 26 bp, Homo sapiens
caagaccctgatcacgctttacttgg

SEQ ID NO: 98057 - DNA, 26 bp, Homo sapiens
aagaccctgatcacgctttacttggg

SEQ ID NO: 98058 - DNA, 26 bp, Homo sapiens
agaccctgatcacgctttacttgggc

SEQ ID NO: 98059 - DNA, 26 bp, Homo sapiens
gaccctgatcacgctttacttgggcc

SEQ ID NO: 98060 - DNA, 26 bp, Homo sapiens
accctgatcacgctttacttgggcca

SEQ ID NO: 98061 - DNA, 26 bp, Homo sapiens
ccctgatcacgctttacttgggccat

SEQ ID NO: 98062 - DNA, 26 bp, Homo sapiens
cctgatcacgctttacttgggccatt

SEQ ID NO: 98063 - DNA, 26 bp, Homo sapiens
ctgatcacgctttacttgggccattt

SEQ ID NO: 98064 - DNA, 26 bp, Homo sapiens
tgatcacgctttacttgggccatttc

SEQ ID NO: 98065 - DNA, 26 bp, Homo sapiens
gatcacgctttacttgggccatttct

SEQ ID NO: 98066 - DNA, 26 bp, Homo sapiens
atcacgctttacttgggccatttctc

SEQ ID NO: 98067 - DNA, 26 bp, Homo sapiens
tcacgctttacttgggccatttctca

SEQ ID NO: 98068 - DNA, 26 bp, Homo sapiens
cacgctttacttgggccatttctcag

SEQ ID NO: 98069 - DNA, 26 bp, Homo sapiens
acgctttacttgggccatttctcagc

SEQ ID NO: 98070 - DNA, 26 bp, Homo sapiens
cgctttacttgggccatttctcagcg

SEQ ID NO: 98071 - DNA, 26 bp, Homo sapiens
gctttacttgggccatttctcagcgt

SEQ ID NO: 98072 - DNA, 26 bp, Homo sapiens
ctttacttgggccatttctcagcgtt

SEQ ID NO: 98073 - DNA, 26 bp, Homo sapiens
tttacttgggccatttctcagcgttg

SEQ ID NO: 98074 - DNA, 26 bp, Homo sapiens
ttacttgggccatttctcagcgttgt

SEQ ID NO: 98075 - DNA, 26 bp, Homo sapiens
tacttgggccatttctcagcgttgtg

SEQ ID NO: 98076 - DNA, 26 bp, Homo sapiens
acttgggccatttctcagcgttgtgt

SEQ ID NO: 98077 - DNA, 26 bp, Homo sapiens
cttgggccatttctcagcgttgtgtt

SEQ ID NO: 98078 - DNA, 26 bp, Homo sapiens
ttgggccatttctcagcgttgtgttt

SEQ ID NO: 98079 - DNA, 26 bp, Homo sapiens
tgggccatttctcagcgttgtgtttg

SEQ ID NO: 98080 - DNA, 26 bp, Homo sapiens
gggccatttctcagcgttgtgtttgc

SEQ ID NO: 98081 - DNA, 26 bp, Homo sapiens
ggccatttctcagcgttgtgtttgca

SEQ ID NO: 98082 - DNA, 26 bp, Homo sapiens
gccatttctcagcgttgtgtttgcag

SEQ ID NO: 98083 - DNA, 26 bp, Homo sapiens
ccatttctcagcgttgtgtttgcagc

SEQ ID NO: 98084 - DNA, 26 bp, Homo sapiens
catttctcagcgttgtgtttgcagcg

SEQ ID NO: 98085 - DNA, 26 bp, Homo sapiens
atttctcagcgttgtgtttgcagcga

SEQ ID NO: 98086 - DNA, 26 bp, Homo sapiens
tttctcagcgttgtgtttgcagcgag

SEQ ID NO: 98087 - DNA, 26 bp, Homo sapiens
ttctcagcgttgtgtttgcagcgagc

SEQ ID NO: 98088 - DNA, 26 bp, Homo sapiens
tctcagcgttgtgtttgcagcgagca

SEQ ID NO: 98089 - DNA, 26 bp, Homo sapiens
ctcagcgttgtgtttgcagcgagcaa

SEQ ID NO: 98090 - DNA, 26 bp, Homo sapiens
tcagcgttgtgtttgcagcgagcaat

SEQ ID NO: 98091 - DNA, 26 bp, Homo sapiens
cagcgttgtgtttgcagcgagcaatc

SEQ ID NO: 98092 - DNA, 26 bp, Homo sapiens
agcgttgtgtttgcagcgagcaatct

SEQ ID NO: 98093 - DNA, 26 bp, Homo sapiens
gcgttgtgtttgcagcgagcaatctt

SEQ ID NO: 98094 - DNA, 26 bp, Homo sapiens
cgttgtgtttgcagcgagcaatcttg

SEQ ID NO: 98095 - DNA, 26 bp, Homo sapiens
gttgtgtttgcagcgagcaatcttga

SEQ ID NO: 98096 - DNA, 26 bp, Homo sapiens
ttgtgtttgcagcgagcaatcttgag

SEQ ID NO: 98097 - DNA, 26 bp, Homo sapiens
tgtgtttgcagcgagcaatcttgagg

SEQ ID NO: 98098 - DNA, 26 bp, Homo sapiens
gtgtttgcagcgagcaatcttgaggg

SEQ ID NO: 98099 - DNA, 26 bp, Homo sapiens
tgtttgcagcgagcaatcttgaggga

SEQ ID NO: 98100 - DNA, 26 bp, Homo sapiens
gtttgcagcgagcaatcttgagggat

SEQ ID NO: 98101 - DNA, 26 bp, Homo sapiens
tttgcagcgagcaatcttgagggatg

SEQ ID NO: 98102 - DNA, 26 bp, Homo sapiens
ttgcagcgagcaatcttgagggatga

SEQ ID NO: 98103 - DNA, 26 bp, Homo sapiens
tgcagcgagcaatcttgagggatgag

SEQ ID NO: 98104 - DNA, 26 bp, Homo sapiens
gcagcgagcaatcttgagggatgagg

SEQ ID NO: 98105 - DNA, 26 bp, Homo sapiens
cagcgagcaatcttgagggatgaggt

SEQ ID NO: 98106 - DNA, 26 bp, Homo sapiens
agcgagcaatcttgagggatgaggta

SEQ ID NO: 98107 - DNA, 26 bp, Homo sapiens
gcgagcaatcttgagggatgaggtaa

SEQ ID NO: 98108 - DNA, 26 bp, Homo sapiens
cgagcaatcttgagggatgaggtaat

SEQ ID NO: 98109 - DNA, 26 bp, Homo sapiens
gagcaatcttgagggatgaggtaatg

SEQ ID NO: 98110 - DNA, 26 bp, Homo sapiens
agcaatcttgagggatgaggtaatgt

SEQ ID NO: 98111 - DNA, 26 bp, Homo sapiens
gcaatcttgagggatgaggtaatgtc

SEQ ID NO: 98112 - DNA, 26 bp, Homo sapiens
caatcttgagggatgaggtaatgtct

SEQ ID NO: 98113 - DNA, 26 bp, Homo sapiens
aatcttgagggatgaggtaatgtctc

SEQ ID NO: 98114 - DNA, 26 bp, Homo sapiens
atcttgagggatgaggtaatgtctcc

SEQ ID NO: 98115 - DNA, 26 bp, Homo sapiens
tcttgagggatgaggtaatgtctccg

SEQ ID NO: 98116 - DNA, 26 bp, Homo sapiens
cttgagggatgaggtaatgtctccgt

SEQ ID NO: 98117 - DNA, 26 bp, Homo sapiens
ttgagggatgaggtaatgtctccgtc

SEQ ID NO: 98118 - DNA, 26 bp, Homo sapiens
tgagggatgaggtaatgtctccgtct

SEQ ID NO: 98119 - DNA, 26 bp, Homo sapiens
gagggatgaggtaatgtctccgtctc

SEQ ID NO: 98120 - DNA, 26 bp, Homo sapiens
agggatgaggtaatgtctccgtctcg

SEQ ID NO: 98121 - DNA, 26 bp, Homo sapiens
gggatgaggtaatgtctccgtctcgc

SEQ ID NO: 98122 - DNA, 26 bp, Homo sapiens
ggatgaggtaatgtctccgtctcgca

SEQ ID NO: 98123 - DNA, 26 bp, Homo sapiens
gatgaggtaatgtctccgtctcgcag

SEQ ID NO: 98124 - DNA, 26 bp, Homo sapiens
atgaggtaatgtctccgtctcgcagc

SEQ ID NO: 98125 - DNA, 26 bp, Homo sapiens
tgaggtaatgtctccgtctcgcagcc

SEQ ID NO: 98126 - DNA, 26 bp, Homo sapiens
gaggtaatgtctccgtctcgcagccc

SEQ ID NO: 98127 - DNA, 26 bp, Homo sapiens
aggtaatgtctccgtctcgcagcccg

SEQ ID NO: 98128 - DNA, 26 bp, Homo sapiens
ggtaatgtctccgtctcgcagcccga

SEQ ID NO: 98129 - DNA, 26 bp, Homo sapiens
gtaatgtctccgtctcgcagcccgag

SEQ ID NO: 98130 - DNA, 26 bp, Homo sapiens
taatgtctccgtctcgcagcccgagg

SEQ ID NO: 98131 - DNA, 26 bp, Homo sapiens
aatgtctccgtctcgcagcccgaggg

SEQ ID NO: 98132 - DNA, 26 bp, Homo sapiens
atgtctccgtctcgcagcccgagggg

SEQ ID NO: 98133 - DNA, 26 bp, Homo sapiens
tgtctccgtctcgcagcccgagggga

SEQ ID NO: 98134 - DNA, 26 bp, Homo sapiens
gtctccgtctcgcagcccgaggggag

SEQ ID NO: 98135 - DNA, 26 bp, Homo sapiens
tctccgtctcgcagcccgaggggagg

SEQ ID NO: 98136 - DNA, 26 bp, Homo sapiens
ctccgtctcgcagcccgaggggaggc

SEQ ID NO: 98137 - DNA, 26 bp, Homo sapiens
tccgtctcgcagcccgaggggaggcc

SEQ ID NO: 98138 - DNA, 26 bp, Homo sapiens
ccgtctcgcagcccgaggggaggccg

SEQ ID NO: 98139 - DNA, 26 bp, Homo sapiens
cgtctcgcagcccgaggggaggccgc

SEQ ID NO: 98140 - DNA, 26 bp, Homo sapiens
gtctcgcagcccgaggggaggccgct

SEQ ID NO: 98141 - DNA, 26 bp, Homo sapiens
tctcgcagcccgaggggaggccgctc

SEQ ID NO: 98142 - DNA, 26 bp, Homo sapiens
ctcgcagcccgaggggaggccgctcg

SEQ ID NO: 98143 - DNA, 26 bp, Homo sapiens
tcgcagcccgaggggaggccgctcgg

SEQ ID NO: 98144 - DNA, 26 bp, Homo sapiens
cgcagcccgaggggaggccgctcggc

SEQ ID NO: 98145 - DNA, 26 bp, Homo sapiens
gcagcccgaggggaggccgctcggcc

SEQ ID NO: 98146 - DNA, 26 bp, Homo sapiens
cagcccgaggggaggccgctcggcct

SEQ ID NO: 98147 - DNA, 26 bp, Homo sapiens
agcccgaggggaggccgctcggcctc

SEQ ID NO: 98148 - DNA, 26 bp, Homo sapiens
gcccgaggggaggccgctcggcctcg

SEQ ID NO: 98149 - DNA, 26 bp, Homo sapiens
cccgaggggaggccgctcggcctcgg

SEQ ID NO: 98150 - DNA, 26 bp, Homo sapiens
ccgaggggaggccgctcggcctcggc

SEQ ID NO: 98151 - DNA, 26 bp, Homo sapiens
cgaggggaggccgctcggcctcggcc

SEQ ID NO: 98152 - DNA, 26 bp, Homo sapiens
gaggggaggccgctcggcctcggccg

SEQ ID NO: 98153 - DNA, 26 bp, Homo sapiens
aggggaggccgctcggcctcggccgc

SEQ ID NO: 98154 - DNA, 26 bp, Homo sapiens
ggggaggccgctcggcctcggccgct

SEQ ID NO: 98155 - DNA, 26 bp, Homo sapiens
gggaggccgctcggcctcggccgctc

SEQ ID NO: 98156 - DNA, 26 bp, Homo sapiens
ggaggccgctcggcctcggccgctca

SEQ ID NO: 98157 - DNA, 26 bp, Homo sapiens
gaggccgctcggcctcggccgctcac

SEQ ID NO: 98158 - DNA, 26 bp, Homo sapiens
aggccgctcggcctcggccgctcaca

SEQ ID NO: 98159 - DNA, 26 bp, Homo sapiens
ggccgctcggcctcggccgctcacag

SEQ ID NO: 98160 - DNA, 26 bp, Homo sapiens
gccgctcggcctcggccgctcacagg

SEQ ID NO: 98161 - DNA, 26 bp, Homo sapiens
ccgctcggcctcggccgctcacaggc

SEQ ID NO: 98162 - DNA, 26 bp, Homo sapiens
cgctcggcctcggccgctcacaggcg

SEQ ID NO: 98163 - DNA, 26 bp, Homo sapiens
gctcggcctcggccgctcacaggcgc

SEQ ID NO: 98164 - DNA, 26 bp, Homo sapiens
ctcggcctcggccgctcacaggcgcg

SEQ ID NO: 98165 - DNA, 26 bp, Homo sapiens
tcggcctcggccgctcacaggcgcga

SEQ ID NO: 98166 - DNA, 26 bp, Homo sapiens
cggcctcggccgctcacaggcgcgac

SEQ ID NO: 98167 - DNA, 26 bp, Homo sapiens
ggcctcggccgctcacaggcgcgacg

SEQ ID NO: 98168 - DNA, 26 bp, Homo sapiens
gcctcggccgctcacaggcgcgacgt

SEQ ID NO: 98169 - DNA, 26 bp, Homo sapiens
cctcggccgctcacaggcgcgacgta

SEQ ID NO: 98170 - DNA, 26 bp, Homo sapiens
ctcggccgctcacaggcgcgacgtaa

SEQ ID NO: 98171 - DNA, 26 bp, Homo sapiens
tcggccgctcacaggcgcgacgtaaa

SEQ ID NO: 98172 - DNA, 26 bp, Homo sapiens
cggccgctcacaggcgcgacgtaaag

SEQ ID NO: 98173 - DNA, 26 bp, Homo sapiens
ggccgctcacaggcgcgacgtaaagg

SEQ ID NO: 98174 - DNA, 26 bp, Homo sapiens
gccgctcacaggcgcgacgtaaaggc

SEQ ID NO: 98175 - DNA, 26 bp, Homo sapiens
ccgctcacaggcgcgacgtaaaggcc

SEQ ID NO: 98176 - DNA, 26 bp, Homo sapiens
cgctcacaggcgcgacgtaaaggccc

SEQ ID NO: 98177 - DNA, 26 bp, Homo sapiens
gctcacaggcgcgacgtaaaggcccg

SEQ ID NO: 98178 - DNA, 26 bp, Homo sapiens
ctcacaggcgcgacgtaaaggcccgg

SEQ ID NO: 98179 - DNA, 26 bp, Homo sapiens
tcacaggcgcgacgtaaaggcccggc

SEQ ID NO: 98180 - DNA, 26 bp, Homo sapiens
cacaggcgcgacgtaaaggcccggcg

SEQ ID NO: 98181 - DNA, 26 bp, Homo sapiens
acaggcgcgacgtaaaggcccggcgt

SEQ ID NO: 98182 - DNA, 26 bp, Homo sapiens
caggcgcgacgtaaaggcccggcgtc

SEQ ID NO: 98183 - DNA, 26 bp, Homo sapiens
aggcgcgacgtaaaggcccggcgtca

SEQ ID NO: 98184 - DNA, 26 bp, Homo sapiens
ggcgcgacgtaaaggcccggcgtcac

SEQ ID NO: 98185 - DNA, 26 bp, Homo sapiens
gcgcgacgtaaaggcccggcgtcacc

SEQ ID NO: 98186 - DNA, 26 bp, Homo sapiens
cgcgacgtaaaggcccggcgtcaccg

SEQ ID NO: 98187 - DNA, 26 bp, Homo sapiens
gcgacgtaaaggcccggcgtcaccgg

SEQ ID NO: 98188 - DNA, 26 bp, Homo sapiens
cgacgtaaaggcccggcgtcaccggc

SEQ ID NO: 98189 - DNA, 26 bp, Homo sapiens
gacgtaaaggcccggcgtcaccggcc

SEQ ID NO: 98190 - DNA, 26 bp, Homo sapiens
acgtaaaggcccggcgtcaccggccc

SEQ ID NO: 98191 - DNA, 26 bp, Homo sapiens
cgtaaaggcccggcgtcaccggcccg

SEQ ID NO: 98192 - DNA, 26 bp, Homo sapiens
gtaaaggcccggcgtcaccggcccgg

SEQ ID NO: 98193 - DNA, 26 bp, Homo sapiens
taaaggcccggcgtcaccggcccggc

SEQ ID NO: 98194 - DNA, 26 bp, Homo sapiens
aaaggcccggcgtcaccggcccggct

SEQ ID NO: 98195 - DNA, 26 bp, Homo sapiens
aaggcccggcgtcaccggcccggctt

SEQ ID NO: 98196 - DNA, 26 bp, Homo sapiens
aggcccggcgtcaccggcccggctta

SEQ ID NO: 98197 - DNA, 26 bp, Homo sapiens
ggcccggcgtcaccggcccggcttaa

SEQ ID NO: 98198 - DNA, 26 bp, Homo sapiens
gcccggcgtcaccggcccggcttaac

SEQ ID NO: 98199 - DNA, 26 bp, Homo sapiens
cccggcgtcaccggcccggcttaacg

SEQ ID NO: 98200 - DNA, 26 bp, Homo sapiens
ccggcgtcaccggcccggcttaacgg

SEQ ID NO: 98201 - DNA, 26 bp, Homo sapiens
cggcgtcaccggcccggcttaacggt

SEQ ID NO: 98202 - DNA, 26 bp, Homo sapiens
ggcgtcaccggcccggcttaacggtg

SEQ ID NO: 98203 - DNA, 26 bp, Homo sapiens
gcgtcaccggcccggcttaacggtgc

SEQ ID NO: 98204 - DNA, 26 bp, Homo sapiens
cgtcaccggcccggcttaacggtgca

SEQ ID NO: 98205 - DNA, 26 bp, Homo sapiens
gtcaccggcccggcttaacggtgcaa

SEQ ID NO: 98206 - DNA, 26 bp, Homo sapiens
tcaccggcccggcttaacggtgcaac

SEQ ID NO: 98207 - DNA, 26 bp, Homo sapiens
caccggcccggcttaacggtgcaacg

SEQ ID NO: 98208 - DNA, 26 bp, Homo sapiens
accggcccggcttaacggtgcaacgg

SEQ ID NO: 98209 - DNA, 26 bp, Homo sapiens
ccggcccggcttaacggtgcaacggc

SEQ ID NO: 98210 - DNA, 26 bp, Homo sapiens
cggcccggcttaacggtgcaacggct

SEQ ID NO: 98211 - DNA, 26 bp, Homo sapiens
ggcccggcttaacggtgcaacggctg

SEQ ID NO: 98212 - DNA, 26 bp, Homo sapiens
gcccggcttaacggtgcaacggctgg

SEQ ID NO: 98213 - DNA, 26 bp, Homo sapiens
cccggcttaacggtgcaacggctggc

SEQ ID NO: 98214 - DNA, 26 bp, Homo sapiens
ccggcttaacggtgcaacggctggcc

SEQ ID NO: 98215 - DNA, 26 bp, Homo sapiens
cggcttaacggtgcaacggctggcct

SEQ ID NO: 98216 - DNA, 26 bp, Homo sapiens
ggcttaacggtgcaacggctggcctg

SEQ ID NO: 98217 - DNA, 26 bp, Homo sapiens
gcttaacggtgcaacggctggcctgg

SEQ ID NO: 98218 - DNA, 26 bp, Homo sapiens
cttaacggtgcaacggctggcctggg

SEQ ID NO: 98219 - DNA, 26 bp, Homo sapiens
ttaacggtgcaacggctggcctgggc

SEQ ID NO: 98220 - DNA, 26 bp, Homo sapiens
taacggtgcaacggctggcctgggcc

SEQ ID NO: 98221 - DNA, 26 bp, Homo sapiens
aacggtgcaacggctggcctgggcct

SEQ ID NO: 98222 - DNA, 26 bp, Homo sapiens
acggtgcaacggctggcctgggcctg

SEQ ID NO: 98223 - DNA, 26 bp, Homo sapiens
cggtgcaacggctggcctgggcctgc

SEQ ID NO: 98224 - DNA, 26 bp, Homo sapiens
ggtgcaacggctggcctgggcctgca

SEQ ID NO: 98225 - DNA, 26 bp, Homo sapiens
gtgcaacggctggcctgggcctgcaa

SEQ ID NO: 98226 - DNA, 26 bp, Homo sapiens
tgcaacggctggcctgggcctgcaac

SEQ ID NO: 98227 - DNA, 26 bp, Homo sapiens
gcaacggctggcctgggcctgcaact

SEQ ID NO: 98228 - DNA, 26 bp, Homo sapiens
caacggctggcctgggcctgcaactc

SEQ ID NO: 98229 - DNA, 26 bp, Homo sapiens
aacggctggcctgggcctgcaactct

SEQ ID NO: 98230 - DNA, 26 bp, Homo sapiens
acggctggcctgggcctgcaactctg

SEQ ID NO: 98231 - DNA, 26 bp, Homo sapiens
cggctggcctgggcctgcaactctgg

SEQ ID NO: 98232 - DNA, 26 bp, Homo sapiens
ggctggcctgggcctgcaactctggg

SEQ ID NO: 98233 - DNA, 26 bp, Homo sapiens
gctggcctgggcctgcaactctgggg

SEQ ID NO: 98234 - DNA, 26 bp, Homo sapiens
ctggcctgggcctgcaactctggggt

SEQ ID NO: 98235 - DNA, 26 bp, Homo sapiens
tggcctgggcctgcaactctggggtc

SEQ ID NO: 98236 - DNA, 26 bp, Homo sapiens
ggcctgggcctgcaactctggggtcc

SEQ ID NO: 98237 - DNA, 26 bp, Homo sapiens
gcctgggcctgcaactctggggtccc

SEQ ID NO: 98238 - DNA, 26 bp, Homo sapiens
cctgggcctgcaactctggggtcccg

SEQ ID NO: 98239 - DNA, 26 bp, Homo sapiens
ctgggcctgcaactctggggtcccgg

SEQ ID NO: 98240 - DNA, 26 bp, Homo sapiens
tgggcctgcaactctggggtcccggc

SEQ ID NO: 98241 - DNA, 26 bp, Homo sapiens
gggcctgcaactctggggtcccggcc

SEQ ID NO: 98242 - DNA, 26 bp, Homo sapiens
ggcctgcaactctggggtcccggccg

SEQ ID NO: 98243 - DNA, 26 bp, Homo sapiens
gcctgcaactctggggtcccggccgg

SEQ ID NO: 98244 - DNA, 26 bp, Homo sapiens
cctgcaactctggggtcccggccggg

SEQ ID NO: 98245 - DNA, 26 bp, Homo sapiens
ctgcaactctggggtcccggccgggc

SEQ ID NO: 98246 - DNA, 26 bp, Homo sapiens
tgcaactctggggtcccggccgggct

SEQ ID NO: 98247 - DNA, 26 bp, Homo sapiens
gcaactctggggtcccggccgggctg

SEQ ID NO: 98248 - DNA, 26 bp, Homo sapiens
caactctggggtcccggccgggctgg

SEQ ID NO: 98249 - DNA, 26 bp, Homo sapiens
aactctggggtcccggccgggctgga

SEQ ID NO: 98250 - DNA, 26 bp, Homo sapiens
actctggggtcccggccgggctggag

SEQ ID NO: 98251 - DNA, 26 bp, Homo sapiens
ctctggggtcccggccgggctggagc

SEQ ID NO: 98252 - DNA, 26 bp, Homo sapiens
tctggggtcccggccgggctggagcg

SEQ ID NO: 98253 - DNA, 26 bp, Homo sapiens
ctggggtcccggccgggctggagcgg

SEQ ID NO: 98254 - DNA, 26 bp, Homo sapiens
tggggtcccggccgggctggagcggc

SEQ ID NO: 98255 - DNA, 26 bp, Homo sapiens
ggggtcccggccgggctggagcggcc

SEQ ID NO: 98256 - DNA, 26 bp, Homo sapiens
gggtcccggccgggctggagcggccg

SEQ ID NO: 98257 - DNA, 26 bp, Homo sapiens
ggtcccggccgggctggagcggccgc

SEQ ID NO: 98258 - DNA, 26 bp, Homo sapiens
gtcccggccgggctggagcggccgcc

SEQ ID NO: 98259 - DNA, 26 bp, Homo sapiens
tcccggccgggctggagcggccgccg

SEQ ID NO: 98260 - DNA, 26 bp, Homo sapiens
cccggccgggctggagcggccgccgg

SEQ ID NO: 98261 - DNA, 26 bp, Homo sapiens
ccggccgggctggagcggccgccgga

SEQ ID NO: 98262 - DNA, 26 bp, Homo sapiens
cggccgggctggagcggccgccggag

SEQ ID NO: 98263 - DNA, 26 bp, Homo sapiens
ggccgggctggagcggccgccggaga

SEQ ID NO: 98264 - DNA, 26 bp, Homo sapiens
gccgggctggagcggccgccggagag

SEQ ID NO: 98265 - DNA, 25 bp, Homo sapiens
ccgggctggagcggccgccggagag

SEQ ID NO: 98266 - DNA, 24 bp, Homo sapiens
cgggctggagcggccgccggagag

SEQ ID NO: 98267 - DNA, 23 bp, Homo sapiens
gggctggagcggccgccggagag

SEQ ID NO: 98268 - DNA, 26 bp, Homo sapiens
taagactttagtcctttactacaaag

SEQ ID NO: 98269 - DNA, 26 bp, Homo sapiens
aagactttagtcctttactacaaagc

SEQ ID NO: 98270 - DNA, 26 bp, Homo sapiens
agactttagtcctttactacaaagcc

SEQ ID NO: 98271 - DNA, 26 bp, Homo sapiens
gactttagtcctttactacaaagcca

SEQ ID NO: 98272 - DNA, 26 bp, Homo sapiens
actttagtcctttactacaaagccac

SEQ ID NO: 98273 - DNA, 26 bp, Homo sapiens
ctttagtcctttactacaaagccact

SEQ ID NO: 98274 - DNA, 26 bp, Homo sapiens
tttagtcctttactacaaagccacta

SEQ ID NO: 98275 - DNA, 26 bp, Homo sapiens
ttagtcctttactacaaagccactat

SEQ ID NO: 98276 - DNA, 26 bp, Homo sapiens
tagtcctttactacaaagccactata

SEQ ID NO: 98277 - DNA, 26 bp, Homo sapiens
agtcctttactacaaagccactataa

SEQ ID NO: 98278 - DNA, 26 bp, Homo sapiens
gtcctttactacaaagccactataaa

SEQ ID NO: 98279 - DNA, 26 bp, Homo sapiens
tcctttactacaaagccactataaat

SEQ ID NO: 98280 - DNA, 26 bp, Homo sapiens
cctttactacaaagccactataaatg

SEQ ID NO: 98281 - DNA, 26 bp, Homo sapiens
ctttactacaaagccactataaatgt

SEQ ID NO: 98282 - DNA, 26 bp, Homo sapiens
tttactacaaagccactataaatgtg

SEQ ID NO: 98283 - DNA, 26 bp, Homo sapiens
ttactacaaagccactataaatgtgg

SEQ ID NO: 98284 - DNA, 26 bp, Homo sapiens
tactacaaagccactataaatgtggc

SEQ ID NO: 98285 - DNA, 26 bp, Homo sapiens
actacaaagccactataaatgtggca

SEQ ID NO: 98286 - DNA, 26 bp, Homo sapiens
ctacaaagccactataaatgtggcac

SEQ ID NO: 98287 - DNA, 26 bp, Homo sapiens
tacaaagccactataaatgtggcacc

SEQ ID NO: 98288 - DNA, 26 bp, Homo sapiens
acaaagccactataaatgtggcacct

SEQ ID NO: 98289 - DNA, 26 bp, Homo sapiens
caaagccactataaatgtggcacctt

SEQ ID NO: 98290 - DNA, 26 bp, Homo sapiens
aaagccactataaatgtggcaccttt

SEQ ID NO: 98291 - DNA, 26 bp, Homo sapiens
aagccactataaatgtggcacctttg

SEQ ID NO: 98292 - DNA, 26 bp, Homo sapiens
agccactataaatgtggcacctttgg

SEQ ID NO: 98293 - DNA, 26 bp, Homo sapiens
gccactataaatgtggcacctttggt

SEQ ID NO: 98294 - DNA, 26 bp, Homo sapiens
ccactataaatgtggcacctttggta

SEQ ID NO: 98295 - DNA, 26 bp, Homo sapiens
cactataaatgtggcacctttggtag

SEQ ID NO: 98296 - DNA, 26 bp, Homo sapiens
actataaatgtggcacctttggtaga

SEQ ID NO: 98297 - DNA, 26 bp, Homo sapiens
ctataaatgtggcacctttggtagac

SEQ ID NO: 98298 - DNA, 26 bp, Homo sapiens
tataaatgtggcacctttggtagaca

SEQ ID NO: 98299 - DNA, 26 bp, Homo sapiens
ataaatgtggcacctttggtagacaa

SEQ ID NO: 98300 - DNA, 26 bp, Homo sapiens
taaatgtggcacctttggtagacaac

SEQ ID NO: 98301 - DNA, 26 bp, Homo sapiens
aaatgtggcacctttggtagacaact

SEQ ID NO: 98302 - DNA, 26 bp, Homo sapiens
aatgtggcacctttggtagacaactg

SEQ ID NO: 98303 - DNA, 26 bp, Homo sapiens
atgtggcacctttggtagacaactga

SEQ ID NO: 98304 - DNA, 26 bp, Homo sapiens
tgtggcacctttggtagacaactgag

SEQ ID NO: 98305 - DNA, 26 bp, Homo sapiens
gtggcacctttggtagacaactgagg

SEQ ID NO: 98306 - DNA, 26 bp, Homo sapiens
tggcacctttggtagacaactgaggc

SEQ ID NO: 98307 - DNA, 26 bp, Homo sapiens
ggcacctttggtagacaactgaggca

SEQ ID NO: 98308 - DNA, 26 bp, Homo sapiens
gcacctttggtagacaactgaggcaa

SEQ ID NO: 98309 - DNA, 26 bp, Homo sapiens
cacctttggtagacaactgaggcaaa

SEQ ID NO: 98310 - DNA, 26 bp, Homo sapiens
acctttggtagacaactgaggcaaag

SEQ ID NO: 98311 - DNA, 26 bp, Homo sapiens
cctttggtagacaactgaggcaaaga

SEQ ID NO: 98312 - DNA, 26 bp, Homo sapiens
ctttggtagacaactgaggcaaagaa

SEQ ID NO: 98313 - DNA, 26 bp, Homo sapiens
tttggtagacaactgaggcaaagaac

SEQ ID NO: 98314 - DNA, 26 bp, Homo sapiens
ttggtagacaactgaggcaaagaaca

SEQ ID NO: 98315 - DNA, 26 bp, Homo sapiens
tggtagacaactgaggcaaagaacag

SEQ ID NO: 98316 - DNA, 26 bp, Homo sapiens
ggtagacaactgaggcaaagaacaga

SEQ ID NO: 98317 - DNA, 26 bp, Homo sapiens
gtagacaactgaggcaaagaacagag

SEQ ID NO: 98318 - DNA, 26 bp, Homo sapiens
tagacaactgaggcaaagaacagagt

SEQ ID NO: 98319 - DNA, 26 bp, Homo sapiens
agacaactgaggcaaagaacagagtc

SEQ ID NO: 98320 - DNA, 26 bp, Homo sapiens
gacaactgaggcaaagaacagagtcc

SEQ ID NO: 98321 - DNA, 26 bp, Homo sapiens
acaactgaggcaaagaacagagtccc

SEQ ID NO: 98322 - DNA, 26 bp, Homo sapiens
caactgaggcaaagaacagagtccct

SEQ ID NO: 98323 - DNA, 26 bp, Homo sapiens
aactgaggcaaagaacagagtccctc

SEQ ID NO: 98324 - DNA, 26 bp, Homo sapiens
actgaggcaaagaacagagtccctca

SEQ ID NO: 98325 - DNA, 26 bp, Homo sapiens
ctgaggcaaagaacagagtccctcaa

SEQ ID NO: 98326 - DNA, 26 bp, Homo sapiens
tgaggcaaagaacagagtccctcaaa

SEQ ID NO: 98327 - DNA, 26 bp, Homo sapiens
gaggcaaagaacagagtccctcaaaa

SEQ ID NO: 98328 - DNA, 26 bp, Homo sapiens
aggcaaagaacagagtccctcaaaaa

SEQ ID NO: 98329 - DNA, 26 bp, Homo sapiens
ggcaaagaacagagtccctcaaaaag

SEQ ID NO: 98330 - DNA, 26 bp, Homo sapiens
gcaaagaacagagtccctcaaaaaga

SEQ ID NO: 98331 - DNA, 26 bp, Homo sapiens
caaagaacagagtccctcaaaaagac

SEQ ID NO: 98332 - DNA, 26 bp, Homo sapiens
aaagaacagagtccctcaaaaagaca

SEQ ID NO: 98333 - DNA, 26 bp, Homo sapiens
aagaacagagtccctcaaaaagacac

SEQ ID NO: 98334 - DNA, 26 bp, Homo sapiens
agaacagagtccctcaaaaagacaca

SEQ ID NO: 98335 - DNA, 26 bp, Homo sapiens
gaacagagtccctcaaaaagacacag

SEQ ID NO: 98336 - DNA, 26 bp, Homo sapiens
aacagagtccctcaaaaagacacagc

SEQ ID NO: 98337 - DNA, 26 bp, Homo sapiens
acagagtccctcaaaaagacacagcc

SEQ ID NO: 98338 - DNA, 26 bp, Homo sapiens
cagagtccctcaaaaagacacagcca

SEQ ID NO: 98339 - DNA, 26 bp, Homo sapiens
agagtccctcaaaaagacacagccac

SEQ ID NO: 98340 - DNA, 26 bp, Homo sapiens
gagtccctcaaaaagacacagccact

SEQ ID NO: 98341 - DNA, 26 bp, Homo sapiens
agtccctcaaaaagacacagccactt

SEQ ID NO: 98342 - DNA, 26 bp, Homo sapiens
gtccctcaaaaagacacagccacttc

SEQ ID NO: 98343 - DNA, 26 bp, Homo sapiens
tccctcaaaaagacacagccacttcc

SEQ ID NO: 98344 - DNA, 26 bp, Homo sapiens
ccctcaaaaagacacagccacttcca

SEQ ID NO: 98345 - DNA, 26 bp, Homo sapiens
cctcaaaaagacacagccacttccat

SEQ ID NO: 98346 - DNA, 26 bp, Homo sapiens
ctcaaaaagacacagccacttccata

SEQ ID NO: 98347 - DNA, 26 bp, Homo sapiens
tcaaaaagacacagccacttccataa

SEQ ID NO: 98348 - DNA, 26 bp, Homo sapiens
caaaaagacacagccacttccataag

SEQ ID NO: 98349 - DNA, 26 bp, Homo sapiens
aaaaagacacagccacttccataaga

SEQ ID NO: 98350 - DNA, 26 bp, Homo sapiens
aaaagacacagccacttccataagag

SEQ ID NO: 98351 - DNA, 26 bp, Homo sapiens
aaagacacagccacttccataagaga

SEQ ID NO: 98352 - DNA, 26 bp, Homo sapiens
aagacacagccacttccataagagaa

SEQ ID NO: 98353 - DNA, 26 bp, Homo sapiens
agacacagccacttccataagagaag

SEQ ID NO: 98354 - DNA, 26 bp, Homo sapiens
gacacagccacttccataagagaaga

SEQ ID NO: 98355 - DNA, 26 bp, Homo sapiens
acacagccacttccataagagaagac

SEQ ID NO: 98356 - DNA, 26 bp, Homo sapiens
cacagccacttccataagagaagacg

SEQ ID NO: 98357 - DNA, 26 bp, Homo sapiens
acagccacttccataagagaagacgt

SEQ ID NO: 98358 - DNA, 26 bp, Homo sapiens
cagccacttccataagagaagacgta

SEQ ID NO: 98359 - DNA, 26 bp, Homo sapiens
agccacttccataagagaagacgtac

SEQ ID NO: 98360 - DNA, 26 bp, Homo sapiens
gccacttccataagagaagacgtacg

SEQ ID NO: 98361 - DNA, 26 bp, Homo sapiens
ccacttccataagagaagacgtacgg

SEQ ID NO: 98362 - DNA, 26 bp, Homo sapiens
cacttccataagagaagacgtacgga

SEQ ID NO: 98363 - DNA, 26 bp, Homo sapiens
acttccataagagaagacgtacggag

SEQ ID NO: 98364 - DNA, 26 bp, Homo sapiens
cttccataagagaagacgtacggagt

SEQ ID NO: 98365 - DNA, 26 bp, Homo sapiens
ttccataagagaagacgtacggagtt

SEQ ID NO: 98366 - DNA, 26 bp, Homo sapiens
tccataagagaagacgtacggagttt

SEQ ID NO: 98367 - DNA, 26 bp, Homo sapiens
ccataagagaagacgtacggagtttg

SEQ ID NO: 98368 - DNA, 26 bp, Homo sapiens
cataagagaagacgtacggagtttgt

SEQ ID NO: 98369 - DNA, 26 bp, Homo sapiens
ataagagaagacgtacggagtttgtg

SEQ ID NO: 98370 - DNA, 26 bp, Homo sapiens
taagagaagacgtacggagtttgtgt

SEQ ID NO: 98371 - DNA, 26 bp, Homo sapiens
aagagaagacgtacggagtttgtgtt

SEQ ID NO: 98372 - DNA, 26 bp, Homo sapiens
agagaagacgtacggagtttgtgttt

SEQ ID NO: 98373 - DNA, 26 bp, Homo sapiens
gagaagacgtacggagtttgtgtttg

SEQ ID NO: 98374 - DNA, 26 bp, Homo sapiens
agaagacgtacggagtttgtgtttga

SEQ ID NO: 98375 - DNA, 26 bp, Homo sapiens
gaagacgtacggagtttgtgtttgaa

SEQ ID NO: 98376 - DNA, 26 bp, Homo sapiens
aagacgtacggagtttgtgtttgaat

SEQ ID NO: 98377 - DNA, 26 bp, Homo sapiens
agacgtacggagtttgtgtttgaatt

SEQ ID NO: 98378 - DNA, 26 bp, Homo sapiens
gacgtacggagtttgtgtttgaatta

SEQ ID NO: 98379 - DNA, 26 bp, Homo sapiens
acgtacggagtttgtgtttgaattat

SEQ ID NO: 98380 - DNA, 26 bp, Homo sapiens
cgtacggagtttgtgtttgaattatt

SEQ ID NO: 98381 - DNA, 26 bp, Homo sapiens
gtacggagtttgtgtttgaattattt

SEQ ID NO: 98382 - DNA, 26 bp, Homo sapiens
tacggagtttgtgtttgaattatttc

SEQ ID NO: 98383 - DNA, 26 bp, Homo sapiens
acggagtttgtgtttgaattatttca

SEQ ID NO: 98384 - DNA, 26 bp, Homo sapiens
cggagtttgtgtttgaattatttcat

SEQ ID NO: 98385 - DNA, 26 bp, Homo sapiens
ggagtttgtgtttgaattatttcatt

SEQ ID NO: 98386 - DNA, 26 bp, Homo sapiens
gagtttgtgtttgaattatttcattc

SEQ ID NO: 98387 - DNA, 26 bp, Homo sapiens
agtttgtgtttgaattatttcattcc

SEQ ID NO: 98388 - DNA, 26 bp, Homo sapiens
gtttgtgtttgaattatttcattcca

SEQ ID NO: 98389 - DNA, 26 bp, Homo sapiens
tttgtgtttgaattatttcattccat

SEQ ID NO: 98390 - DNA, 26 bp, Homo sapiens
ttgtgtttgaattatttcattccatt

SEQ ID NO: 98391 - DNA, 26 bp, Homo sapiens
tgtgtttgaattatttcattccattt

SEQ ID NO: 98392 - DNA, 26 bp, Homo sapiens
gtgtttgaattatttcattccattta

SEQ ID NO: 98393 - DNA, 26 bp, Homo sapiens
tgtttgaattatttcattccatttat

SEQ ID NO: 98394 - DNA, 26 bp, Homo sapiens
gtttgaattatttcattccatttatt

SEQ ID NO: 98395 - DNA, 26 bp, Homo sapiens
tttgaattatttcattccatttattt

SEQ ID NO: 98396 - DNA, 26 bp, Homo sapiens
ttgaattatttcattccatttatttc

SEQ ID NO: 98397 - DNA, 26 bp, Homo sapiens
tgaattatttcattccatttatttca

SEQ ID NO: 98398 - DNA, 26 bp, Homo sapiens
gaattatttcattccatttatttcac

SEQ ID NO: 98399 - DNA, 26 bp, Homo sapiens
aattatttcattccatttatttcact

SEQ ID NO: 98400 - DNA, 26 bp, Homo sapiens
attatttcattccatttatttcactt

SEQ ID NO: 98401 - DNA, 26 bp, Homo sapiens
ttatttcattccatttatttcacttg

SEQ ID NO: 98402 - DNA, 26 bp, Homo sapiens
tatttcattccatttatttcacttgg

SEQ ID NO: 98403 - DNA, 26 bp, Homo sapiens
atttcattccatttatttcacttggg

SEQ ID NO: 98404 - DNA, 26 bp, Homo sapiens
tttcattccatttatttcacttggga

SEQ ID NO: 98405 - DNA, 26 bp, Homo sapiens
ttcattccatttatttcacttgggat

SEQ ID NO: 98406 - DNA, 26 bp, Homo sapiens
tcattccatttatttcacttgggata

SEQ ID NO: 98407 - DNA, 26 bp, Homo sapiens
cattccatttatttcacttgggatag

SEQ ID NO: 98408 - DNA, 26 bp, Homo sapiens
attccatttatttcacttgggatagg

SEQ ID NO: 98409 - DNA, 26 bp, Homo sapiens
ttccatttatttcacttgggatagga

SEQ ID NO: 98410 - DNA, 26 bp, Homo sapiens
tccatttatttcacttgggataggat

SEQ ID NO: 98411 - DNA, 26 bp, Homo sapiens
ccatttatttcacttgggataggatt

SEQ ID NO: 98412 - DNA, 26 bp, Homo sapiens
catttatttcacttgggataggattg

SEQ ID NO: 98413 - DNA, 26 bp, Homo sapiens
atttatttcacttgggataggattga

SEQ ID NO: 98414 - DNA, 26 bp, Homo sapiens
tttatttcacttgggataggattgaa

SEQ ID NO: 98415 - DNA, 26 bp, Homo sapiens
ttatttcacttgggataggattgaaa

SEQ ID NO: 98416 - DNA, 26 bp, Homo sapiens
tatttcacttgggataggattgaaag

SEQ ID NO: 98417 - DNA, 26 bp, Homo sapiens
atttcacttgggataggattgaaagt

SEQ ID NO: 98418 - DNA, 26 bp, Homo sapiens
tttcacttgggataggattgaaagtc

SEQ ID NO: 98419 - DNA, 26 bp, Homo sapiens
ttcacttgggataggattgaaagtct

SEQ ID NO: 98420 - DNA, 26 bp, Homo sapiens
tcacttgggataggattgaaagtctt

SEQ ID NO: 98421 - DNA, 26 bp, Homo sapiens
cacttgggataggattgaaagtcttg

SEQ ID NO: 98422 - DNA, 26 bp, Homo sapiens
acttgggataggattgaaagtcttga

SEQ ID NO: 98423 - DNA, 26 bp, Homo sapiens
cttgggataggattgaaagtcttgat

SEQ ID NO: 98424 - DNA, 26 bp, Homo sapiens
ttgggataggattgaaagtcttgatg

SEQ ID NO: 98425 - DNA, 26 bp, Homo sapiens
tgggataggattgaaagtcttgatga

SEQ ID NO: 98426 - DNA, 26 bp, Homo sapiens
gggataggattgaaagtcttgatgat

SEQ ID NO: 98427 - DNA, 26 bp, Homo sapiens
ggataggattgaaagtcttgatgatg

SEQ ID NO: 98428 - DNA, 26 bp, Homo sapiens
gataggattgaaagtcttgatgatga

SEQ ID NO: 98429 - DNA, 26 bp, Homo sapiens
ataggattgaaagtcttgatgatgag

SEQ ID NO: 98430 - DNA, 26 bp, Homo sapiens
taggattgaaagtcttgatgatgagg

SEQ ID NO: 98431 - DNA, 26 bp, Homo sapiens
aggattgaaagtcttgatgatgaggc

SEQ ID NO: 98432 - DNA, 26 bp, Homo sapiens
ggattgaaagtcttgatgatgaggcc

SEQ ID NO: 98433 - DNA, 26 bp, Homo sapiens
gattgaaagtcttgatgatgaggcca

SEQ ID NO: 98434 - DNA, 26 bp, Homo sapiens
attgaaagtcttgatgatgaggccat

SEQ ID NO: 98435 - DNA, 26 bp, Homo sapiens
ttgaaagtcttgatgatgaggccata

SEQ ID NO: 98436 - DNA, 26 bp, Homo sapiens
tgaaagtcttgatgatgaggccatag

SEQ ID NO: 98437 - DNA, 26 bp, Homo sapiens
gaaagtcttgatgatgaggccatagc

SEQ ID NO: 98438 - DNA, 26 bp, Homo sapiens
aaagtcttgatgatgaggccatagca

SEQ ID NO: 98439 - DNA, 26 bp, Homo sapiens
aagtcttgatgatgaggccatagcac

SEQ ID NO: 98440 - DNA, 26 bp, Homo sapiens
agtcttgatgatgaggccatagcaca

SEQ ID NO: 98441 - DNA, 26 bp, Homo sapiens
gtcttgatgatgaggccatagcacag

SEQ ID NO: 98442 - DNA, 26 bp, Homo sapiens
tcttgatgatgaggccatagcacagt

SEQ ID NO: 98443 - DNA, 26 bp, Homo sapiens
cttgatgatgaggccatagcacagtc

SEQ ID NO: 98444 - DNA, 26 bp, Homo sapiens
ttgatgatgaggccatagcacagtca

SEQ ID NO: 98445 - DNA, 26 bp, Homo sapiens
tgatgatgaggccatagcacagtcag

SEQ ID NO: 98446 - DNA, 26 bp, Homo sapiens
gatgatgaggccatagcacagtcaga

SEQ ID NO: 98447 - DNA, 26 bp, Homo sapiens
atgatgaggccatagcacagtcagac

SEQ ID NO: 98448 - DNA, 26 bp, Homo sapiens
tgatgaggccatagcacagtcagacc

SEQ ID NO: 98449 - DNA, 26 bp, Homo sapiens
gatgaggccatagcacagtcagacca

SEQ ID NO: 98450 - DNA, 26 bp, Homo sapiens
atgaggccatagcacagtcagaccat

SEQ ID NO: 98451 - DNA, 26 bp, Homo sapiens
tgaggccatagcacagtcagaccatc

SEQ ID NO: 98452 - DNA, 26 bp, Homo sapiens
gaggccatagcacagtcagaccatct

SEQ ID NO: 98453 - DNA, 26 bp, Homo sapiens
aggccatagcacagtcagaccatctg

SEQ ID NO: 98454 - DNA, 26 bp, Homo sapiens
ggccatagcacagtcagaccatctgc

SEQ ID NO: 98455 - DNA, 26 bp, Homo sapiens
gccatagcacagtcagaccatctgct

SEQ ID NO: 98456 - DNA, 26 bp, Homo sapiens
ccatagcacagtcagaccatctgctt

SEQ ID NO: 98457 - DNA, 26 bp, Homo sapiens
catagcacagtcagaccatctgcttt

SEQ ID NO: 98458 - DNA, 26 bp, Homo sapiens
atagcacagtcagaccatctgctttt

SEQ ID NO: 98459 - DNA, 26 bp, Homo sapiens
tagcacagtcagaccatctgcttttc

SEQ ID NO: 98460 - DNA, 26 bp, Homo sapiens
agcacagtcagaccatctgcttttcc

SEQ ID NO: 98461 - DNA, 26 bp, Homo sapiens
gcacagtcagaccatctgcttttcca

SEQ ID NO: 98462 - DNA, 26 bp, Homo sapiens
cacagtcagaccatctgcttttccag

SEQ ID NO: 98463 - DNA, 26 bp, Homo sapiens
acagtcagaccatctgcttttccagt

SEQ ID NO: 98464 - DNA, 26 bp, Homo sapiens
cagtcagaccatctgcttttccagtt

SEQ ID NO: 98465 - DNA, 26 bp, Homo sapiens
agtcagaccatctgcttttccagttc

SEQ ID NO: 98466 - DNA, 26 bp, Homo sapiens
gtcagaccatctgcttttccagttct

SEQ ID NO: 98467 - DNA, 26 bp, Homo sapiens
tcagaccatctgcttttccagttctg

SEQ ID NO: 98468 - DNA, 26 bp, Homo sapiens
cagaccatctgcttttccagttctgt

SEQ ID NO: 98469 - DNA, 26 bp, Homo sapiens
agaccatctgcttttccagttctgtg

SEQ ID NO: 98470 - DNA, 26 bp, Homo sapiens
gaccatctgcttttccagttctgtgt

SEQ ID NO: 98471 - DNA, 26 bp, Homo sapiens
accatctgcttttccagttctgtgtt

SEQ ID NO: 98472 - DNA, 26 bp, Homo sapiens
ccatctgcttttccagttctgtgttt

SEQ ID NO: 98473 - DNA, 26 bp, Homo sapiens
catctgcttttccagttctgtgtttg

SEQ ID NO: 98474 - DNA, 26 bp, Homo sapiens
atctgcttttccagttctgtgtttgc

SEQ ID NO: 98475 - DNA, 26 bp, Homo sapiens
tctgcttttccagttctgtgtttgca

SEQ ID NO: 98476 - DNA, 26 bp, Homo sapiens
ctgcttttccagttctgtgtttgcac

SEQ ID NO: 98477 - DNA, 26 bp, Homo sapiens
tgcttttccagttctgtgtttgcacc

SEQ ID NO: 98478 - DNA, 26 bp, Homo sapiens
gcttttccagttctgtgtttgcaccg

SEQ ID NO: 98479 - DNA, 26 bp, Homo sapiens
cttttccagttctgtgtttgcaccgt

SEQ ID NO: 98480 - DNA, 26 bp, Homo sapiens
ttttccagttctgtgtttgcaccgtc

SEQ ID NO: 98481 - DNA, 26 bp, Homo sapiens
tttccagttctgtgtttgcaccgtct

SEQ ID NO: 98482 - DNA, 26 bp, Homo sapiens
ttccagttctgtgtttgcaccgtctg

SEQ ID NO: 98483 - DNA, 26 bp, Homo sapiens
tccagttctgtgtttgcaccgtctgt

SEQ ID NO: 98484 - DNA, 26 bp, Homo sapiens
ccagttctgtgtttgcaccgtctgtg

SEQ ID NO: 98485 - DNA, 26 bp, Homo sapiens
cagttctgtgtttgcaccgtctgtgc

SEQ ID NO: 98486 - DNA, 26 bp, Homo sapiens
agttctgtgtttgcaccgtctgtgca

SEQ ID NO: 98487 - DNA, 26 bp, Homo sapiens
gttctgtgtttgcaccgtctgtgcat

SEQ ID NO: 98488 - DNA, 26 bp, Homo sapiens
ttctgtgtttgcaccgtctgtgcatc

SEQ ID NO: 98489 - DNA, 26 bp, Homo sapiens
tctgtgtttgcaccgtctgtgcatcc

SEQ ID NO: 98490 - DNA, 26 bp, Homo sapiens
ctgtgtttgcaccgtctgtgcatcca

SEQ ID NO: 98491 - DNA, 26 bp, Homo sapiens
tgtgtttgcaccgtctgtgcatccat

SEQ ID NO: 98492 - DNA, 26 bp, Homo sapiens
gtgtttgcaccgtctgtgcatccata

SEQ ID NO: 98493 - DNA, 26 bp, Homo sapiens
tgtttgcaccgtctgtgcatccatat

SEQ ID NO: 98494 - DNA, 26 bp, Homo sapiens
gtttgcaccgtctgtgcatccatatt

SEQ ID NO: 98495 - DNA, 26 bp, Homo sapiens
tttgcaccgtctgtgcatccatattc

SEQ ID NO: 98496 - DNA, 26 bp, Homo sapiens
ttgcaccgtctgtgcatccatattcc

SEQ ID NO: 98497 - DNA, 26 bp, Homo sapiens
tgcaccgtctgtgcatccatattccc

SEQ ID NO: 98498 - DNA, 26 bp, Homo sapiens
gcaccgtctgtgcatccatattcccc

SEQ ID NO: 98499 - DNA, 26 bp, Homo sapiens
caccgtctgtgcatccatattccccc

SEQ ID NO: 98500 - DNA, 26 bp, Homo sapiens
accgtctgtgcatccatattcccccc

SEQ ID NO: 98501 - DNA, 26 bp, Homo sapiens
ccgtctgtgcatccatattcccccca

SEQ ID NO: 98502 - DNA, 26 bp, Homo sapiens
cgtctgtgcatccatattccccccaa

SEQ ID NO: 98503 - DNA, 26 bp, Homo sapiens
gtctgtgcatccatattccccccaaa

SEQ ID NO: 98504 - DNA, 26 bp, Homo sapiens
tctgtgcatccatattccccccaaaa

SEQ ID NO: 98505 - DNA, 26 bp, Homo sapiens
ctgtgcatccatattccccccaaaac

SEQ ID NO: 98506 - DNA, 26 bp, Homo sapiens
tgtgcatccatattccccccaaaacc

SEQ ID NO: 98507 - DNA, 26 bp, Homo sapiens
gtgcatccatattccccccaaaacca

SEQ ID NO: 98508 - DNA, 26 bp, Homo sapiens
tgcatccatattccccccaaaaccaa

SEQ ID NO: 98509 - DNA, 26 bp, Homo sapiens
gcatccatattccccccaaaaccaag

SEQ ID NO: 98510 - DNA, 26 bp, Homo sapiens
catccatattccccccaaaaccaaga

SEQ ID NO: 98511 - DNA, 26 bp, Homo sapiens
atccatattccccccaaaaccaagaa

SEQ ID NO: 98512 - DNA, 26 bp, Homo sapiens
tccatattccccccaaaaccaagaag

SEQ ID NO: 98513 - DNA, 26 bp, Homo sapiens
ccatattccccccaaaaccaagaagg

SEQ ID NO: 98514 - DNA, 26 bp, Homo sapiens
catattccccccaaaaccaagaaggc

SEQ ID NO: 98515 - DNA, 26 bp, Homo sapiens
atattccccccaaaaccaagaaggcc

SEQ ID NO: 98516 - DNA, 26 bp, Homo sapiens
tattccccccaaaaccaagaaggcca

SEQ ID NO: 98517 - DNA, 26 bp, Homo sapiens
attccccccaaaaccaagaaggccag

SEQ ID NO: 98518 - DNA, 26 bp, Homo sapiens
ttccccccaaaaccaagaaggccagt

SEQ ID NO: 98519 - DNA, 26 bp, Homo sapiens
tccccccaaaaccaagaaggccagtg

SEQ ID NO: 98520 - DNA, 26 bp, Homo sapiens
ccccccaaaaccaagaaggccagtga

SEQ ID NO: 98521 - DNA, 26 bp, Homo sapiens
cccccaaaaccaagaaggccagtgaa

SEQ ID NO: 98522 - DNA, 26 bp, Homo sapiens
ccccaaaaccaagaaggccagtgaaa

SEQ ID NO: 98523 - DNA, 26 bp, Homo sapiens
cccaaaaccaagaaggccagtgaaag

SEQ ID NO: 98524 - DNA, 26 bp, Homo sapiens
ccaaaaccaagaaggccagtgaaagt

SEQ ID NO: 98525 - DNA, 26 bp, Homo sapiens
caaaaccaagaaggccagtgaaagtg

SEQ ID NO: 98526 - DNA, 26 bp, Homo sapiens
aaaaccaagaaggccagtgaaagtgg

SEQ ID NO: 98527 - DNA, 26 bp, Homo sapiens
aaaccaagaaggccagtgaaagtggg

SEQ ID NO: 98528 - DNA, 26 bp, Homo sapiens
aaccaagaaggccagtgaaagtgggg

SEQ ID NO: 98529 - DNA, 26 bp, Homo sapiens
accaagaaggccagtgaaagtggggc

SEQ ID NO: 98530 - DNA, 26 bp, Homo sapiens
ccaagaaggccagtgaaagtggggcc

SEQ ID NO: 98531 - DNA, 26 bp, Homo sapiens
caagaaggccagtgaaagtggggcca

SEQ ID NO: 98532 - DNA, 26 bp, Homo sapiens
aagaaggccagtgaaagtggggccag

SEQ ID NO: 98533 - DNA, 26 bp, Homo sapiens
agaaggccagtgaaagtggggccagc

SEQ ID NO: 98534 - DNA, 26 bp, Homo sapiens
gaaggccagtgaaagtggggccagca

SEQ ID NO: 98535 - DNA, 26 bp, Homo sapiens
aaggccagtgaaagtggggccagcac

SEQ ID NO: 98536 - DNA, 26 bp, Homo sapiens
aggccagtgaaagtggggccagcaca

SEQ ID NO: 98537 - DNA, 26 bp, Homo sapiens
ggccagtgaaagtggggccagcacaa

SEQ ID NO: 98538 - DNA, 26 bp, Homo sapiens
gccagtgaaagtggggccagcacaat

SEQ ID NO: 98539 - DNA, 26 bp, Homo sapiens
ccagtgaaagtggggccagcacaatg

SEQ ID NO: 98540 - DNA, 26 bp, Homo sapiens
cagtgaaagtggggccagcacaatgc

SEQ ID NO: 98541 - DNA, 26 bp, Homo sapiens
agtgaaagtggggccagcacaatgcc

SEQ ID NO: 98542 - DNA, 26 bp, Homo sapiens
gtgaaagtggggccagcacaatgccc

SEQ ID NO: 98543 - DNA, 26 bp, Homo sapiens
tgaaagtggggccagcacaatgcccc

SEQ ID NO: 98544 - DNA, 26 bp, Homo sapiens
gaaagtggggccagcacaatgcccca

SEQ ID NO: 98545 - DNA, 26 bp, Homo sapiens
aaagtggggccagcacaatgccccag

SEQ ID NO: 98546 - DNA, 26 bp, Homo sapiens
aagtggggccagcacaatgccccagg

SEQ ID NO: 98547 - DNA, 26 bp, Homo sapiens
agtggggccagcacaatgccccagga

SEQ ID NO: 98548 - DNA, 26 bp, Homo sapiens
gtggggccagcacaatgccccaggag

SEQ ID NO: 98549 - DNA, 26 bp, Homo sapiens
tggggccagcacaatgccccaggaga

SEQ ID NO: 98550 - DNA, 26 bp, Homo sapiens
ggggccagcacaatgccccaggagaa

SEQ ID NO: 98551 - DNA, 26 bp, Homo sapiens
gggccagcacaatgccccaggagaac

SEQ ID NO: 98552 - DNA, 26 bp, Homo sapiens
ggccagcacaatgccccaggagaacg

SEQ ID NO: 98553 - DNA, 26 bp, Homo sapiens
gccagcacaatgccccaggagaacgt

SEQ ID NO: 98554 - DNA, 26 bp, Homo sapiens
ccagcacaatgccccaggagaacgtg

SEQ ID NO: 98555 - DNA, 26 bp, Homo sapiens
cagcacaatgccccaggagaacgtgg

SEQ ID NO: 98556 - DNA, 26 bp, Homo sapiens
agcacaatgccccaggagaacgtgga

SEQ ID NO: 98557 - DNA, 26 bp, Homo sapiens
gcacaatgccccaggagaacgtggag

SEQ ID NO: 98558 - DNA, 26 bp, Homo sapiens
cacaatgccccaggagaacgtggagg

SEQ ID NO: 98559 - DNA, 26 bp, Homo sapiens
acaatgccccaggagaacgtggagga

SEQ ID NO: 98560 - DNA, 26 bp, Homo sapiens
caatgccccaggagaacgtggaggag

SEQ ID NO: 98561 - DNA, 26 bp, Homo sapiens
aatgccccaggagaacgtggaggagg

SEQ ID NO: 98562 - DNA, 26 bp, Homo sapiens
atgccccaggagaacgtggaggaggc

SEQ ID NO: 98563 - DNA, 26 bp, Homo sapiens
tgccccaggagaacgtggaggaggct

SEQ ID NO: 98564 - DNA, 26 bp, Homo sapiens
gccccaggagaacgtggaggaggctt

SEQ ID NO: 98565 - DNA, 26 bp, Homo sapiens
ccccaggagaacgtggaggaggcttc

SEQ ID NO: 98566 - DNA, 26 bp, Homo sapiens
cccaggagaacgtggaggaggcttcc

SEQ ID NO: 98567 - DNA, 26 bp, Homo sapiens
ccaggagaacgtggaggaggcttcct

SEQ ID NO: 98568 - DNA, 26 bp, Homo sapiens
caggagaacgtggaggaggcttcctt

SEQ ID NO: 98569 - DNA, 26 bp, Homo sapiens
aggagaacgtggaggaggcttccttg

SEQ ID NO: 98570 - DNA, 26 bp, Homo sapiens
ggagaacgtggaggaggcttccttga

SEQ ID NO: 98571 - DNA, 26 bp, Homo sapiens
gagaacgtggaggaggcttccttgac

SEQ ID NO: 98572 - DNA, 26 bp, Homo sapiens
agaacgtggaggaggcttccttgact

SEQ ID NO: 98573 - DNA, 26 bp, Homo sapiens
gaacgtggaggaggcttccttgactg

SEQ ID NO: 98574 - DNA, 26 bp, Homo sapiens
aacgtggaggaggcttccttgactgt

SEQ ID NO: 98575 - DNA, 26 bp, Homo sapiens
acgtggaggaggcttccttgactgtg

SEQ ID NO: 98576 - DNA, 26 bp, Homo sapiens
cgtggaggaggcttccttgactgtgg

SEQ ID NO: 98577 - DNA, 26 bp, Homo sapiens
gtggaggaggcttccttgactgtggt

SEQ ID NO: 98578 - DNA, 26 bp, Homo sapiens
tggaggaggcttccttgactgtggtg

SEQ ID NO: 98579 - DNA, 26 bp, Homo sapiens
ggaggaggcttccttgactgtggtgc

SEQ ID NO: 98580 - DNA, 26 bp, Homo sapiens
gaggaggcttccttgactgtggtgcg

SEQ ID NO: 98581 - DNA, 26 bp, Homo sapiens
aggaggcttccttgactgtggtgcgt

SEQ ID NO: 98582 - DNA, 26 bp, Homo sapiens
ggaggcttccttgactgtggtgcgta

SEQ ID NO: 98583 - DNA, 26 bp, Homo sapiens
gaggcttccttgactgtggtgcgtag

SEQ ID NO: 98584 - DNA, 26 bp, Homo sapiens
aggcttccttgactgtggtgcgtagt

SEQ ID NO: 98585 - DNA, 26 bp, Homo sapiens
ggcttccttgactgtggtgcgtagtg

SEQ ID NO: 98586 - DNA, 26 bp, Homo sapiens
gcttccttgactgtggtgcgtagtgt

SEQ ID NO: 98587 - DNA, 26 bp, Homo sapiens
cttccttgactgtggtgcgtagtgtc

SEQ ID NO: 98588 - DNA, 26 bp, Homo sapiens
ttccttgactgtggtgcgtagtgtct

SEQ ID NO: 98589 - DNA, 26 bp, Homo sapiens
tccttgactgtggtgcgtagtgtctg

SEQ ID NO: 98590 - DNA, 26 bp, Homo sapiens
ccttgactgtggtgcgtagtgtctga

SEQ ID NO: 98591 - DNA, 26 bp, Homo sapiens
cttgactgtggtgcgtagtgtctgaa

SEQ ID NO: 98592 - DNA, 26 bp, Homo sapiens
ttgactgtggtgcgtagtgtctgaaa

SEQ ID NO: 98593 - DNA, 26 bp, Homo sapiens
tgactgtggtgcgtagtgtctgaaaa

SEQ ID NO: 98594 - DNA, 26 bp, Homo sapiens
gactgtggtgcgtagtgtctgaaaac

SEQ ID NO: 98595 - DNA, 26 bp, Homo sapiens
actgtggtgcgtagtgtctgaaaact

SEQ ID NO: 98596 - DNA, 26 bp, Homo sapiens
ctgtggtgcgtagtgtctgaaaactc

SEQ ID NO: 98597 - DNA, 26 bp, Homo sapiens
tgtggtgcgtagtgtctgaaaactca

SEQ ID NO: 98598 - DNA, 26 bp, Homo sapiens
gtggtgcgtagtgtctgaaaactcag

SEQ ID NO: 98599 - DNA, 26 bp, Homo sapiens
tggtgcgtagtgtctgaaaactcagg

SEQ ID NO: 98600 - DNA, 26 bp, Homo sapiens
ggtgcgtagtgtctgaaaactcaggg

SEQ ID NO: 98601 - DNA, 26 bp, Homo sapiens
gtgcgtagtgtctgaaaactcagggt

SEQ ID NO: 98602 - DNA, 26 bp, Homo sapiens
tgcgtagtgtctgaaaactcagggta

SEQ ID NO: 98603 - DNA, 26 bp, Homo sapiens
gcgtagtgtctgaaaactcagggtat

SEQ ID NO: 98604 - DNA, 26 bp, Homo sapiens
cgtagtgtctgaaaactcagggtatt

SEQ ID NO: 98605 - DNA, 26 bp, Homo sapiens
gtagtgtctgaaaactcagggtatta

SEQ ID NO: 98606 - DNA, 26 bp, Homo sapiens
tagtgtctgaaaactcagggtattat

SEQ ID NO: 98607 - DNA, 26 bp, Homo sapiens
agtgtctgaaaactcagggtattatg

SEQ ID NO: 98608 - DNA, 26 bp, Homo sapiens
gtgtctgaaaactcagggtattatgg

SEQ ID NO: 98609 - DNA, 26 bp, Homo sapiens
tgtctgaaaactcagggtattatgga

SEQ ID NO: 98610 - DNA, 26 bp, Homo sapiens
gtctgaaaactcagggtattatggac

SEQ ID NO: 98611 - DNA, 26 bp, Homo sapiens
tctgaaaactcagggtattatggaca

SEQ ID NO: 98612 - DNA, 26 bp, Homo sapiens
ctgaaaactcagggtattatggacaa

SEQ ID NO: 98613 - DNA, 26 bp, Homo sapiens
tgaaaactcagggtattatggacaac

SEQ ID NO: 98614 - DNA, 26 bp, Homo sapiens
gaaaactcagggtattatggacaaca

SEQ ID NO: 98615 - DNA, 26 bp, Homo sapiens
aaaactcagggtattatggacaacac

SEQ ID NO: 98616 - DNA, 26 bp, Homo sapiens
aaactcagggtattatggacaacaca

SEQ ID NO: 98617 - DNA, 26 bp, Homo sapiens
aactcagggtattatggacaacacat

SEQ ID NO: 98618 - DNA, 26 bp, Homo sapiens
actcagggtattatggacaacacatt

SEQ ID NO: 98619 - DNA, 26 bp, Homo sapiens
ctcagggtattatggacaacacattt

SEQ ID NO: 98620 - DNA, 26 bp, Homo sapiens
tcagggtattatggacaacacattta

SEQ ID NO: 98621 - DNA, 26 bp, Homo sapiens
cagggtattatggacaacacatttaa

SEQ ID NO: 98622 - DNA, 26 bp, Homo sapiens
agggtattatggacaacacatttaaa

SEQ ID NO: 98623 - DNA, 26 bp, Homo sapiens
gggtattatggacaacacatttaaaa

SEQ ID NO: 98624 - DNA, 26 bp, Homo sapiens
ggtattatggacaacacatttaaaat

SEQ ID NO: 98625 - DNA, 26 bp, Homo sapiens
gtattatggacaacacatttaaaatc

SEQ ID NO: 98626 - DNA, 26 bp, Homo sapiens
tattatggacaacacatttaaaatcc

SEQ ID NO: 98627 - DNA, 26 bp, Homo sapiens
attatggacaacacatttaaaatcca

SEQ ID NO: 98628 - DNA, 26 bp, Homo sapiens
ttatggacaacacatttaaaatccat

SEQ ID NO: 98629 - DNA, 26 bp, Homo sapiens
tatggacaacacatttaaaatccatg

SEQ ID NO: 98630 - DNA, 26 bp, Homo sapiens
atggacaacacatttaaaatccatgt

SEQ ID NO: 98631 - DNA, 26 bp, Homo sapiens
tggacaacacatttaaaatccatgtg

SEQ ID NO: 98632 - DNA, 26 bp, Homo sapiens
ggacaacacatttaaaatccatgtgc

SEQ ID NO: 98633 - DNA, 26 bp, Homo sapiens
gacaacacatttaaaatccatgtgca

SEQ ID NO: 98634 - DNA, 26 bp, Homo sapiens
acaacacatttaaaatccatgtgcaa

SEQ ID NO: 98635 - DNA, 26 bp, Homo sapiens
caacacatttaaaatccatgtgcaaa

SEQ ID NO: 98636 - DNA, 26 bp, Homo sapiens
aacacatttaaaatccatgtgcaaat

SEQ ID NO: 98637 - DNA, 26 bp, Homo sapiens
acacatttaaaatccatgtgcaaatc

SEQ ID NO: 98638 - DNA, 26 bp, Homo sapiens
cacatttaaaatccatgtgcaaatcc

SEQ ID NO: 98639 - DNA, 26 bp, Homo sapiens
acatttaaaatccatgtgcaaatcct

SEQ ID NO: 98640 - DNA, 26 bp, Homo sapiens
catttaaaatccatgtgcaaatcctc

SEQ ID NO: 98641 - DNA, 26 bp, Homo sapiens
atttaaaatccatgtgcaaatcctct

SEQ ID NO: 98642 - DNA, 26 bp, Homo sapiens
tttaaaatccatgtgcaaatcctctc

SEQ ID NO: 98643 - DNA, 26 bp, Homo sapiens
ttaaaatccatgtgcaaatcctctct

SEQ ID NO: 98644 - DNA, 26 bp, Homo sapiens
taaaatccatgtgcaaatcctctctt

SEQ ID NO: 98645 - DNA, 26 bp, Homo sapiens
aaaatccatgtgcaaatcctctcttg

SEQ ID NO: 98646 - DNA, 26 bp, Homo sapiens
aaatccatgtgcaaatcctctcttgt

SEQ ID NO: 98647 - DNA, 26 bp, Homo sapiens
aatccatgtgcaaatcctctcttgtg

SEQ ID NO: 98648 - DNA, 26 bp, Homo sapiens
atccatgtgcaaatcctctcttgtga

SEQ ID NO: 98649 - DNA, 26 bp, Homo sapiens
tccatgtgcaaatcctctcttgtgac

SEQ ID NO: 98650 - DNA, 26 bp, Homo sapiens
ccatgtgcaaatcctctcttgtgaca

SEQ ID NO: 98651 - DNA, 26 bp, Homo sapiens
catgtgcaaatcctctcttgtgacag

SEQ ID NO: 98652 - DNA, 26 bp, Homo sapiens
atgtgcaaatcctctcttgtgacagg

SEQ ID NO: 98653 - DNA, 26 bp, Homo sapiens
tgtgcaaatcctctcttgtgacagga

SEQ ID NO: 98654 - DNA, 26 bp, Homo sapiens
gtgcaaatcctctcttgtgacaggat

SEQ ID NO: 98655 - DNA, 26 bp, Homo sapiens
tgcaaatcctctcttgtgacaggatc

SEQ ID NO: 98656 - DNA, 26 bp, Homo sapiens
gcaaatcctctcttgtgacaggatca

SEQ ID NO: 98657 - DNA, 26 bp, Homo sapiens
caaatcctctcttgtgacaggatcaa

SEQ ID NO: 98658 - DNA, 26 bp, Homo sapiens
aaatcctctcttgtgacaggatcaaa

SEQ ID NO: 98659 - DNA, 26 bp, Homo sapiens
aatcctctcttgtgacaggatcaaaa

SEQ ID NO: 98660 - DNA, 26 bp, Homo sapiens
atcctctcttgtgacaggatcaaaaa

SEQ ID NO: 98661 - DNA, 26 bp, Homo sapiens
tcctctcttgtgacaggatcaaaaat

SEQ ID NO: 98662 - DNA, 26 bp, Homo sapiens
cctctcttgtgacaggatcaaaaatc

SEQ ID NO: 98663 - DNA, 26 bp, Homo sapiens
ctctcttgtgacaggatcaaaaatca

SEQ ID NO: 98664 - DNA, 26 bp, Homo sapiens
tctcttgtgacaggatcaaaaatcaa

SEQ ID NO: 98665 - DNA, 26 bp, Homo sapiens
ctcttgtgacaggatcaaaaatcaat

SEQ ID NO: 98666 - DNA, 26 bp, Homo sapiens
tcttgtgacaggatcaaaaatcaatg

SEQ ID NO: 98667 - DNA, 26 bp, Homo sapiens
cttgtgacaggatcaaaaatcaatgg

SEQ ID NO: 98668 - DNA, 26 bp, Homo sapiens
ttgtgacaggatcaaaaatcaatggc

SEQ ID NO: 98669 - DNA, 26 bp, Homo sapiens
tgtgacaggatcaaaaatcaatggca

SEQ ID NO: 98670 - DNA, 26 bp, Homo sapiens
gtgacaggatcaaaaatcaatggcac

SEQ ID NO: 98671 - DNA, 26 bp, Homo sapiens
tgacaggatcaaaaatcaatggcact

SEQ ID NO: 98672 - DNA, 26 bp, Homo sapiens
gacaggatcaaaaatcaatggcactt

SEQ ID NO: 98673 - DNA, 26 bp, Homo sapiens
acaggatcaaaaatcaatggcacttc

SEQ ID NO: 98674 - DNA, 26 bp, Homo sapiens
caggatcaaaaatcaatggcacttca

SEQ ID NO: 98675 - DNA, 26 bp, Homo sapiens
aggatcaaaaatcaatggcacttcaa

SEQ ID NO: 98676 - DNA, 26 bp, Homo sapiens
ggatcaaaaatcaatggcacttcaat

SEQ ID NO: 98677 - DNA, 26 bp, Homo sapiens
gatcaaaaatcaatggcacttcaatg

SEQ ID NO: 98678 - DNA, 26 bp, Homo sapiens
atcaaaaatcaatggcacttcaatgt

SEQ ID NO: 98679 - DNA, 26 bp, Homo sapiens
tcaaaaatcaatggcacttcaatgta

SEQ ID NO: 98680 - DNA, 26 bp, Homo sapiens
caaaaatcaatggcacttcaatgtag

SEQ ID NO: 98681 - DNA, 26 bp, Homo sapiens
aaaaatcaatggcacttcaatgtagt

SEQ ID NO: 98682 - DNA, 26 bp, Homo sapiens
aaaatcaatggcacttcaatgtagtt

SEQ ID NO: 98683 - DNA, 26 bp, Homo sapiens
aaatcaatggcacttcaatgtagttc

SEQ ID NO: 98684 - DNA, 26 bp, Homo sapiens
aatcaatggcacttcaatgtagttct

SEQ ID NO: 98685 - DNA, 26 bp, Homo sapiens
atcaatggcacttcaatgtagttctc

SEQ ID NO: 98686 - DNA, 26 bp, Homo sapiens
tcaatggcacttcaatgtagttctca

SEQ ID NO: 98687 - DNA, 26 bp, Homo sapiens
caatggcacttcaatgtagttctcat

SEQ ID NO: 98688 - DNA, 26 bp, Homo sapiens
aatggcacttcaatgtagttctcatt

SEQ ID NO: 98689 - DNA, 26 bp, Homo sapiens
atggcacttcaatgtagttctcatta

SEQ ID NO: 98690 - DNA, 26 bp, Homo sapiens
tggcacttcaatgtagttctcattat

SEQ ID NO: 98691 - DNA, 26 bp, Homo sapiens
ggcacttcaatgtagttctcattatt

SEQ ID NO: 98692 - DNA, 26 bp, Homo sapiens
gcacttcaatgtagttctcattattt

SEQ ID NO: 98693 - DNA, 26 bp, Homo sapiens
cacttcaatgtagttctcattatttt

SEQ ID NO: 98694 - DNA, 26 bp, Homo sapiens
acttcaatgtagttctcattattttc

SEQ ID NO: 98695 - DNA, 26 bp, Homo sapiens
cttcaatgtagttctcattattttct

SEQ ID NO: 98696 - DNA, 26 bp, Homo sapiens
ttcaatgtagttctcattattttctg

SEQ ID NO: 98697 - DNA, 26 bp, Homo sapiens
tcaatgtagttctcattattttctga

SEQ ID NO: 98698 - DNA, 26 bp, Homo sapiens
caatgtagttctcattattttctgaa

SEQ ID NO: 98699 - DNA, 26 bp, Homo sapiens
aatgtagttctcattattttctgaat

SEQ ID NO: 98700 - DNA, 26 bp, Homo sapiens
atgtagttctcattattttctgaata

SEQ ID NO: 98701 - DNA, 26 bp, Homo sapiens
tgtagttctcattattttctgaatat

SEQ ID NO: 98702 - DNA, 26 bp, Homo sapiens
gtagttctcattattttctgaatatt

SEQ ID NO: 98703 - DNA, 26 bp, Homo sapiens
tagttctcattattttctgaatattc

SEQ ID NO: 98704 - DNA, 26 bp, Homo sapiens
agttctcattattttctgaatattcc

SEQ ID NO: 98705 - DNA, 26 bp, Homo sapiens
gttctcattattttctgaatattcct

SEQ ID NO: 98706 - DNA, 26 bp, Homo sapiens
ttctcattattttctgaatattcctg

SEQ ID NO: 98707 - DNA, 26 bp, Homo sapiens
tctcattattttctgaatattcctgg

SEQ ID NO: 98708 - DNA, 26 bp, Homo sapiens
ctcattattttctgaatattcctggc

SEQ ID NO: 98709 - DNA, 26 bp, Homo sapiens
tcattattttctgaatattcctggcg

SEQ ID NO: 98710 - DNA, 26 bp, Homo sapiens
cattattttctgaatattcctggcgt

SEQ ID NO: 98711 - DNA, 26 bp, Homo sapiens
attattttctgaatattcctggcgtg

SEQ ID NO: 98712 - DNA, 26 bp, Homo sapiens
ttattttctgaatattcctggcgtgg

SEQ ID NO: 98713 - DNA, 26 bp, Homo sapiens
tattttctgaatattcctggcgtggc

SEQ ID NO: 98714 - DNA, 26 bp, Homo sapiens
attttctgaatattcctggcgtggcc

SEQ ID NO: 98715 - DNA, 26 bp, Homo sapiens
ttttctgaatattcctggcgtggccc

SEQ ID NO: 98716 - DNA, 26 bp, Homo sapiens
tttctgaatattcctggcgtggcccc

SEQ ID NO: 98717 - DNA, 26 bp, Homo sapiens
ttctgaatattcctggcgtggcccct

SEQ ID NO: 98718 - DNA, 26 bp, Homo sapiens
tctgaatattcctggcgtggcccctc

SEQ ID NO: 98719 - DNA, 26 bp, Homo sapiens
ctgaatattcctggcgtggcccctcg

SEQ ID NO: 98720 - DNA, 26 bp, Homo sapiens
tgaatattcctggcgtggcccctcgg

SEQ ID NO: 98721 - DNA, 26 bp, Homo sapiens
gaatattcctggcgtggcccctcggt

SEQ ID NO: 98722 - DNA, 26 bp, Homo sapiens
aatattcctggcgtggcccctcggtc

SEQ ID NO: 98723 - DNA, 26 bp, Homo sapiens
atattcctggcgtggcccctcggtca

SEQ ID NO: 98724 - DNA, 26 bp, Homo sapiens
tattcctggcgtggcccctcggtcac

SEQ ID NO: 98725 - DNA, 26 bp, Homo sapiens
attcctggcgtggcccctcggtcacg

SEQ ID NO: 98726 - DNA, 26 bp, Homo sapiens
ttcctggcgtggcccctcggtcacgc

SEQ ID NO: 98727 - DNA, 26 bp, Homo sapiens
tcctggcgtggcccctcggtcacgcg

SEQ ID NO: 98728 - DNA, 26 bp, Homo sapiens
cctggcgtggcccctcggtcacgcgg

SEQ ID NO: 98729 - DNA, 26 bp, Homo sapiens
ctggcgtggcccctcggtcacgcggc

SEQ ID NO: 98730 - DNA, 26 bp, Homo sapiens
tggcgtggcccctcggtcacgcggcc

SEQ ID NO: 98731 - DNA, 26 bp, Homo sapiens
ggcgtggcccctcggtcacgcggcct

SEQ ID NO: 98732 - DNA, 26 bp, Homo sapiens
gcgtggcccctcggtcacgcggcctc

SEQ ID NO: 98733 - DNA, 26 bp, Homo sapiens
cgtggcccctcggtcacgcggcctcc

SEQ ID NO: 98734 - DNA, 26 bp, Homo sapiens
gtggcccctcggtcacgcggcctccc

SEQ ID NO: 98735 - DNA, 26 bp, Homo sapiens
tggcccctcggtcacgcggcctcccg

SEQ ID NO: 98736 - DNA, 26 bp, Homo sapiens
ggcccctcggtcacgcggcctcccgg

SEQ ID NO: 98737 - DNA, 26 bp, Homo sapiens
gcccctcggtcacgcggcctcccggg

SEQ ID NO: 98738 - DNA, 26 bp, Homo sapiens
cccctcggtcacgcggcctcccgggt

SEQ ID NO: 98739 - DNA, 26 bp, Homo sapiens
ccctcggtcacgcggcctcccgggta

SEQ ID NO: 98740 - DNA, 26 bp, Homo sapiens
cctcggtcacgcggcctcccgggtag

SEQ ID NO: 98741 - DNA, 26 bp, Homo sapiens
ctcggtcacgcggcctcccgggtagg

SEQ ID NO: 98742 - DNA, 26 bp, Homo sapiens
tcggtcacgcggcctcccgggtaggc

SEQ ID NO: 98743 - DNA, 26 bp, Homo sapiens
cggtcacgcggcctcccgggtaggcg

SEQ ID NO: 98744 - DNA, 26 bp, Homo sapiens
ggtcacgcggcctcccgggtaggcgc

SEQ ID NO: 98745 - DNA, 26 bp, Homo sapiens
gtcacgcggcctcccgggtaggcgct

SEQ ID NO: 98746 - DNA, 26 bp, Homo sapiens
tcacgcggcctcccgggtaggcgctc

SEQ ID NO: 98747 - DNA, 26 bp, Homo sapiens
cacgcggcctcccgggtaggcgctct

SEQ ID NO: 98748 - DNA, 26 bp, Homo sapiens
acgcggcctcccgggtaggcgctctc

SEQ ID NO: 98749 - DNA, 26 bp, Homo sapiens
cgcggcctcccgggtaggcgctctct

SEQ ID NO: 98750 - DNA, 26 bp, Homo sapiens
gcggcctcccgggtaggcgctctcta

SEQ ID NO: 98751 - DNA, 26 bp, Homo sapiens
cggcctcccgggtaggcgctctctat

SEQ ID NO: 98752 - DNA, 26 bp, Homo sapiens
ggcctcccgggtaggcgctctctatg

SEQ ID NO: 98753 - DNA, 26 bp, Homo sapiens
gcctcccgggtaggcgctctctatgt

SEQ ID NO: 98754 - DNA, 26 bp, Homo sapiens
cctcccgggtaggcgctctctatgtg

SEQ ID NO: 98755 - DNA, 26 bp, Homo sapiens
ctcccgggtaggcgctctctatgtgg

SEQ ID NO: 98756 - DNA, 26 bp, Homo sapiens
tcccgggtaggcgctctctatgtggg

SEQ ID NO: 98757 - DNA, 26 bp, Homo sapiens
cccgggtaggcgctctctatgtgggt

SEQ ID NO: 98758 - DNA, 26 bp, Homo sapiens
ccgggtaggcgctctctatgtgggtg

SEQ ID NO: 98759 - DNA, 26 bp, Homo sapiens
cgggtaggcgctctctatgtgggtgt

SEQ ID NO: 98760 - DNA, 26 bp, Homo sapiens
gggtaggcgctctctatgtgggtgtc

SEQ ID NO: 98761 - DNA, 26 bp, Homo sapiens
ggtaggcgctctctatgtgggtgtca

SEQ ID NO: 98762 - DNA, 26 bp, Homo sapiens
gtaggcgctctctatgtgggtgtcat

SEQ ID NO: 98763 - DNA, 26 bp, Homo sapiens
taggcgctctctatgtgggtgtcatt

SEQ ID NO: 98764 - DNA, 26 bp, Homo sapiens
aggcgctctctatgtgggtgtcattg

SEQ ID NO: 98765 - DNA, 26 bp, Homo sapiens
ggcgctctctatgtgggtgtcattgg

SEQ ID NO: 98766 - DNA, 26 bp, Homo sapiens
gcgctctctatgtgggtgtcattggc

SEQ ID NO: 98767 - DNA, 26 bp, Homo sapiens
cgctctctatgtgggtgtcattggcc

SEQ ID NO: 98768 - DNA, 26 bp, Homo sapiens
gctctctatgtgggtgtcattggccg

SEQ ID NO: 98769 - DNA, 26 bp, Homo sapiens
ctctctatgtgggtgtcattggccgt

SEQ ID NO: 98770 - DNA, 26 bp, Homo sapiens
tctctatgtgggtgtcattggccgtc

SEQ ID NO: 98771 - DNA, 26 bp, Homo sapiens
ctctatgtgggtgtcattggccgtcc

SEQ ID NO: 98772 - DNA, 26 bp, Homo sapiens
tctatgtgggtgtcattggccgtcca

SEQ ID NO: 98773 - DNA, 26 bp, Homo sapiens
ctatgtgggtgtcattggccgtccac

SEQ ID NO: 98774 - DNA, 26 bp, Homo sapiens
tatgtgggtgtcattggccgtccacc

SEQ ID NO: 98775 - DNA, 26 bp, Homo sapiens
atgtgggtgtcattggccgtccacca

SEQ ID NO: 98776 - DNA, 26 bp, Homo sapiens
tgtgggtgtcattggccgtccaccac

SEQ ID NO: 98777 - DNA, 26 bp, Homo sapiens
gtgggtgtcattggccgtccaccaca

SEQ ID NO: 98778 - DNA, 26 bp, Homo sapiens
tgggtgtcattggccgtccaccacag

SEQ ID NO: 98779 - DNA, 26 bp, Homo sapiens
gggtgtcattggccgtccaccacagc

SEQ ID NO: 98780 - DNA, 26 bp, Homo sapiens
ggtgtcattggccgtccaccacagca

SEQ ID NO: 98781 - DNA, 26 bp, Homo sapiens
gtgtcattggccgtccaccacagcat

SEQ ID NO: 98782 - DNA, 26 bp, Homo sapiens
tgtcattggccgtccaccacagcatg

SEQ ID NO: 98783 - DNA, 26 bp, Homo sapiens
gtcattggccgtccaccacagcatgg

SEQ ID NO: 98784 - DNA, 26 bp, Homo sapiens
tcattggccgtccaccacagcatggt

SEQ ID NO: 98785 - DNA, 26 bp, Homo sapiens
cattggccgtccaccacagcatggtg

SEQ ID NO: 98786 - DNA, 26 bp, Homo sapiens
attggccgtccaccacagcatggtgg

SEQ ID NO: 98787 - DNA, 26 bp, Homo sapiens
ttggccgtccaccacagcatggtggt

SEQ ID NO: 98788 - DNA, 26 bp, Homo sapiens
tggccgtccaccacagcatggtggtt

SEQ ID NO: 98789 - DNA, 26 bp, Homo sapiens
ggccgtccaccacagcatggtggtta

SEQ ID NO: 98790 - DNA, 26 bp, Homo sapiens
gccgtccaccacagcatggtggttaa

SEQ ID NO: 98791 - DNA, 26 bp, Homo sapiens
ccgtccaccacagcatggtggttaag

SEQ ID NO: 98792 - DNA, 26 bp, Homo sapiens
cgtccaccacagcatggtggttaagg

SEQ ID NO: 98793 - DNA, 26 bp, Homo sapiens
gtccaccacagcatggtggttaaggg

SEQ ID NO: 98794 - DNA, 26 bp, Homo sapiens
tccaccacagcatggtggttaagggt

SEQ ID NO: 98795 - DNA, 26 bp, Homo sapiens
ccaccacagcatggtggttaagggtg

SEQ ID NO: 98796 - DNA, 26 bp, Homo sapiens
caccacagcatggtggttaagggtgt

SEQ ID NO: 98797 - DNA, 26 bp, Homo sapiens
accacagcatggtggttaagggtgtg

SEQ ID NO: 98798 - DNA, 26 bp, Homo sapiens
ccacagcatggtggttaagggtgtgc

SEQ ID NO: 98799 - DNA, 26 bp, Homo sapiens
cacagcatggtggttaagggtgtgcc

SEQ ID NO: 98800 - DNA, 26 bp, Homo sapiens
acagcatggtggttaagggtgtgccg

SEQ ID NO: 98801 - DNA, 26 bp, Homo sapiens
cagcatggtggttaagggtgtgccgg

SEQ ID NO: 98802 - DNA, 26 bp, Homo sapiens
agcatggtggttaagggtgtgccggt

SEQ ID NO: 98803 - DNA, 26 bp, Homo sapiens
gcatggtggttaagggtgtgccggtt

SEQ ID NO: 98804 - DNA, 26 bp, Homo sapiens
catggtggttaagggtgtgccggttc

SEQ ID NO: 98805 - DNA, 26 bp, Homo sapiens
atggtggttaagggtgtgccggttcc

SEQ ID NO: 98806 - DNA, 26 bp, Homo sapiens
tggtggttaagggtgtgccggttccc

SEQ ID NO: 98807 - DNA, 26 bp, Homo sapiens
ggtggttaagggtgtgccggttccca

SEQ ID NO: 98808 - DNA, 26 bp, Homo sapiens
gtggttaagggtgtgccggttcccag

SEQ ID NO: 98809 - DNA, 26 bp, Homo sapiens
tggttaagggtgtgccggttcccaga

SEQ ID NO: 98810 - DNA, 26 bp, Homo sapiens
ggttaagggtgtgccggttcccagaa

SEQ ID NO: 98811 - DNA, 26 bp, Homo sapiens
gttaagggtgtgccggttcccagaaa

SEQ ID NO: 98812 - DNA, 26 bp, Homo sapiens
ttaagggtgtgccggttcccagaaac

SEQ ID NO: 98813 - DNA, 26 bp, Homo sapiens
taagggtgtgccggttcccagaaaca

SEQ ID NO: 98814 - DNA, 26 bp, Homo sapiens
aagggtgtgccggttcccagaaacac

SEQ ID NO: 98815 - DNA, 26 bp, Homo sapiens
agggtgtgccggttcccagaaacacc

SEQ ID NO: 98816 - DNA, 26 bp, Homo sapiens
gggtgtgccggttcccagaaacacct

SEQ ID NO: 98817 - DNA, 26 bp, Homo sapiens
ggtgtgccggttcccagaaacacctt

SEQ ID NO: 98818 - DNA, 26 bp, Homo sapiens
gtgtgccggttcccagaaacacctta

SEQ ID NO: 98819 - DNA, 26 bp, Homo sapiens
tgtgccggttcccagaaacaccttac

SEQ ID NO: 98820 - DNA, 26 bp, Homo sapiens
gtgccggttcccagaaacaccttaca

SEQ ID NO: 98821 - DNA, 26 bp, Homo sapiens
tgccggttcccagaaacaccttacac

SEQ ID NO: 98822 - DNA, 26 bp, Homo sapiens
gccggttcccagaaacaccttacacg

SEQ ID NO: 98823 - DNA, 26 bp, Homo sapiens
ccggttcccagaaacaccttacacgg

SEQ ID NO: 98824 - DNA, 26 bp, Homo sapiens
cggttcccagaaacaccttacacggg

SEQ ID NO: 98825 - DNA, 26 bp, Homo sapiens
ggttcccagaaacaccttacacggga

SEQ ID NO: 98826 - DNA, 26 bp, Homo sapiens
gttcccagaaacaccttacacgggat

SEQ ID NO: 98827 - DNA, 26 bp, Homo sapiens
ttcccagaaacaccttacacgggatt

SEQ ID NO: 98828 - DNA, 26 bp, Homo sapiens
tcccagaaacaccttacacgggattg

SEQ ID NO: 98829 - DNA, 26 bp, Homo sapiens
cccagaaacaccttacacgggattgt

SEQ ID NO: 98830 - DNA, 26 bp, Homo sapiens
ccagaaacaccttacacgggattgtc

SEQ ID NO: 98831 - DNA, 26 bp, Homo sapiens
cagaaacaccttacacgggattgtca

SEQ ID NO: 98832 - DNA, 26 bp, Homo sapiens
agaaacaccttacacgggattgtcag

SEQ ID NO: 98833 - DNA, 26 bp, Homo sapiens
gaaacaccttacacgggattgtcagt

SEQ ID NO: 98834 - DNA, 26 bp, Homo sapiens
aaacaccttacacgggattgtcagtc

SEQ ID NO: 98835 - DNA, 26 bp, Homo sapiens
aacaccttacacgggattgtcagtct

SEQ ID NO: 98836 - DNA, 26 bp, Homo sapiens
acaccttacacgggattgtcagtctt

SEQ ID NO: 98837 - DNA, 26 bp, Homo sapiens
caccttacacgggattgtcagtcttg

SEQ ID NO: 98838 - DNA, 26 bp, Homo sapiens
accttacacgggattgtcagtcttga

SEQ ID NO: 98839 - DNA, 26 bp, Homo sapiens
ccttacacgggattgtcagtcttgac

SEQ ID NO: 98840 - DNA, 26 bp, Homo sapiens
cttacacgggattgtcagtcttgacc

SEQ ID NO: 98841 - DNA, 26 bp, Homo sapiens
ttacacgggattgtcagtcttgaccc

SEQ ID NO: 98842 - DNA, 26 bp, Homo sapiens
tacacgggattgtcagtcttgacccc

SEQ ID NO: 98843 - DNA, 26 bp, Homo sapiens
acacgggattgtcagtcttgacccca

SEQ ID NO: 98844 - DNA, 26 bp, Homo sapiens
cacgggattgtcagtcttgaccccag

SEQ ID NO: 98845 - DNA, 26 bp, Homo sapiens
acgggattgtcagtcttgaccccaga

SEQ ID NO: 98846 - DNA, 26 bp, Homo sapiens
cgggattgtcagtcttgaccccagag

SEQ ID NO: 98847 - DNA, 26 bp, Homo sapiens
gggattgtcagtcttgaccccagaga

SEQ ID NO: 98848 - DNA, 26 bp, Homo sapiens
ggattgtcagtcttgaccccagagaa

SEQ ID NO: 98849 - DNA, 26 bp, Homo sapiens
gattgtcagtcttgaccccagagaag

SEQ ID NO: 98850 - DNA, 26 bp, Homo sapiens
attgtcagtcttgaccccagagaagc

SEQ ID NO: 98851 - DNA, 26 bp, Homo sapiens
ttgtcagtcttgaccccagagaagct

SEQ ID NO: 98852 - DNA, 26 bp, Homo sapiens
tgtcagtcttgaccccagagaagctg

SEQ ID NO: 98853 - DNA, 26 bp, Homo sapiens
gtcagtcttgaccccagagaagctga

SEQ ID NO: 98854 - DNA, 26 bp, Homo sapiens
tcagtcttgaccccagagaagctgat

SEQ ID NO: 98855 - DNA, 26 bp, Homo sapiens
cagtcttgaccccagagaagctgata

SEQ ID NO: 98856 - DNA, 26 bp, Homo sapiens
agtcttgaccccagagaagctgatat

SEQ ID NO: 98857 - DNA, 26 bp, Homo sapiens
gtcttgaccccagagaagctgatatg

SEQ ID NO: 98858 - DNA, 26 bp, Homo sapiens
tcttgaccccagagaagctgatatgg

SEQ ID NO: 98859 - DNA, 26 bp, Homo sapiens
cttgaccccagagaagctgatatggt

SEQ ID NO: 98860 - DNA, 26 bp, Homo sapiens
ttgaccccagagaagctgatatggtc

SEQ ID NO: 98861 - DNA, 26 bp, Homo sapiens
tgaccccagagaagctgatatggtct

SEQ ID NO: 98862 - DNA, 26 bp, Homo sapiens
gaccccagagaagctgatatggtctt

SEQ ID NO: 98863 - DNA, 26 bp, Homo sapiens
accccagagaagctgatatggtcttg

SEQ ID NO: 98864 - DNA, 26 bp, Homo sapiens
ccccagagaagctgatatggtcttga

SEQ ID NO: 98865 - DNA, 26 bp, Homo sapiens
cccagagaagctgatatggtcttgag

SEQ ID NO: 98866 - DNA, 26 bp, Homo sapiens
ccagagaagctgatatggtcttgagg

SEQ ID NO: 98867 - DNA, 26 bp, Homo sapiens
cagagaagctgatatggtcttgaggg

SEQ ID NO: 98868 - DNA, 26 bp, Homo sapiens
agagaagctgatatggtcttgagggg

SEQ ID NO: 98869 - DNA, 26 bp, Homo sapiens
gagaagctgatatggtcttgaggggg

SEQ ID NO: 98870 - DNA, 26 bp, Homo sapiens
agaagctgatatggtcttgagggggg

SEQ ID NO: 98871 - DNA, 26 bp, Homo sapiens
gaagctgatatggtcttgagggggga

SEQ ID NO: 98872 - DNA, 26 bp, Homo sapiens
aagctgatatggtcttgaggggggaa

SEQ ID NO: 98873 - DNA, 26 bp, Homo sapiens
agctgatatggtcttgaggggggaaa

SEQ ID NO: 98874 - DNA, 26 bp, Homo sapiens
gctgatatggtcttgaggggggaaat

SEQ ID NO: 98875 - DNA, 26 bp, Homo sapiens
ctgatatggtcttgaggggggaaatg

SEQ ID NO: 98876 - DNA, 26 bp, Homo sapiens
tgatatggtcttgaggggggaaatga

SEQ ID NO: 98877 - DNA, 26 bp, Homo sapiens
gatatggtcttgaggggggaaatgat

SEQ ID NO: 98878 - DNA, 26 bp, Homo sapiens
atatggtcttgaggggggaaatgatc

SEQ ID NO: 98879 - DNA, 26 bp, Homo sapiens
tatggtcttgaggggggaaatgatca

SEQ ID NO: 98880 - DNA, 26 bp, Homo sapiens
atggtcttgaggggggaaatgatcac

SEQ ID NO: 98881 - DNA, 26 bp, Homo sapiens
tggtcttgaggggggaaatgatcaca

SEQ ID NO: 98882 - DNA, 26 bp, Homo sapiens
ggtcttgaggggggaaatgatcacag

SEQ ID NO: 98883 - DNA, 26 bp, Homo sapiens
gtcttgaggggggaaatgatcacagg

SEQ ID NO: 98884 - DNA, 26 bp, Homo sapiens
tcttgaggggggaaatgatcacagga

SEQ ID NO: 98885 - DNA, 26 bp, Homo sapiens
cttgaggggggaaatgatcacaggaa

SEQ ID NO: 98886 - DNA, 26 bp, Homo sapiens
ttgaggggggaaatgatcacaggaat

SEQ ID NO: 98887 - DNA, 26 bp, Homo sapiens
tgaggggggaaatgatcacaggaatg

SEQ ID NO: 98888 - DNA, 26 bp, Homo sapiens
gaggggggaaatgatcacaggaatgg

SEQ ID NO: 98889 - DNA, 26 bp, Homo sapiens
aggggggaaatgatcacaggaatggt

SEQ ID NO: 98890 - DNA, 26 bp, Homo sapiens
ggggggaaatgatcacaggaatggtc

SEQ ID NO: 98891 - DNA, 26 bp, Homo sapiens
gggggaaatgatcacaggaatggtct

SEQ ID NO: 98892 - DNA, 26 bp, Homo sapiens
ggggaaatgatcacaggaatggtctc

SEQ ID NO: 98893 - DNA, 26 bp, Homo sapiens
gggaaatgatcacaggaatggtctct

SEQ ID NO: 98894 - DNA, 26 bp, Homo sapiens
ggaaatgatcacaggaatggtctctt

SEQ ID NO: 98895 - DNA, 26 bp, Homo sapiens
gaaatgatcacaggaatggtctcttc

SEQ ID NO: 98896 - DNA, 26 bp, Homo sapiens
aaatgatcacaggaatggtctcttct

SEQ ID NO: 98897 - DNA, 26 bp, Homo sapiens
aatgatcacaggaatggtctcttctt

SEQ ID NO: 98898 - DNA, 26 bp, Homo sapiens
atgatcacaggaatggtctcttcttt

SEQ ID NO: 98899 - DNA, 26 bp, Homo sapiens
tgatcacaggaatggtctcttctttt

SEQ ID NO: 98900 - DNA, 26 bp, Homo sapiens
gatcacaggaatggtctcttcttttt

SEQ ID NO: 98901 - DNA, 26 bp, Homo sapiens
atcacaggaatggtctcttctttttt

SEQ ID NO: 98902 - DNA, 26 bp, Homo sapiens
tcacaggaatggtctcttcttttttt

SEQ ID NO: 98903 - DNA, 26 bp, Homo sapiens
cacaggaatggtctcttctttttttt

SEQ ID NO: 98904 - DNA, 26 bp, Homo sapiens
acaggaatggtctcttcttttttttt

SEQ ID NO: 98905 - DNA, 26 bp, Homo sapiens
caggaatggtctcttctttttttttc

SEQ ID NO: 98906 - DNA, 26 bp, Homo sapiens
aggaatggtctcttctttttttttct

SEQ ID NO: 98907 - DNA, 26 bp, Homo sapiens
ggaatggtctcttctttttttttctt

SEQ ID NO: 98908 - DNA, 26 bp, Homo sapiens
gaatggtctcttctttttttttcttg

SEQ ID NO: 98909 - DNA, 26 bp, Homo sapiens
aatggtctcttctttttttttcttga

SEQ ID NO: 98910 - DNA, 26 bp, Homo sapiens
atggtctcttctttttttttcttgat

SEQ ID NO: 98911 - DNA, 26 bp, Homo sapiens
tggtctcttctttttttttcttgatg

SEQ ID NO: 98912 - DNA, 26 bp, Homo sapiens
ggtctcttctttttttttcttgatgc

SEQ ID NO: 98913 - DNA, 26 bp, Homo sapiens
gtctcttctttttttttcttgatgcg

SEQ ID NO: 98914 - DNA, 26 bp, Homo sapiens
tctcttctttttttttcttgatgcgt

SEQ ID NO: 98915 - DNA, 26 bp, Homo sapiens
ctcttctttttttttcttgatgcgta

SEQ ID NO: 98916 - DNA, 26 bp, Homo sapiens
tcttctttttttttcttgatgcgtag

SEQ ID NO: 98917 - DNA, 26 bp, Homo sapiens
cttctttttttttcttgatgcgtagc

SEQ ID NO: 98918 - DNA, 26 bp, Homo sapiens
ttctttttttttcttgatgcgtagct

SEQ ID NO: 98919 - DNA, 26 bp, Homo sapiens
tctttttttttcttgatgcgtagctc

SEQ ID NO: 98920 - DNA, 26 bp, Homo sapiens
ctttttttttcttgatgcgtagctca

SEQ ID NO: 98921 - DNA, 26 bp, Homo sapiens
tttttttttcttgatgcgtagctcaa

SEQ ID NO: 98922 - DNA, 26 bp, Homo sapiens
ttttttttcttgatgcgtagctcaat

SEQ ID NO: 98923 - DNA, 26 bp, Homo sapiens
tttttttcttgatgcgtagctcaata

SEQ ID NO: 98924 - DNA, 26 bp, Homo sapiens
ttttttcttgatgcgtagctcaatac

SEQ ID NO: 98925 - DNA, 26 bp, Homo sapiens
tttttcttgatgcgtagctcaatact

SEQ ID NO: 98926 - DNA, 26 bp, Homo sapiens
ttttcttgatgcgtagctcaatactc

SEQ ID NO: 98927 - DNA, 26 bp, Homo sapiens
tttcttgatgcgtagctcaatactcc

SEQ ID NO: 98928 - DNA, 26 bp, Homo sapiens
ttcttgatgcgtagctcaatactcct

SEQ ID NO: 98929 - DNA, 26 bp, Homo sapiens
tcttgatgcgtagctcaatactccta

SEQ ID NO: 98930 - DNA, 26 bp, Homo sapiens
cttgatgcgtagctcaatactcctag

SEQ ID NO: 98931 - DNA, 26 bp, Homo sapiens
ttgatgcgtagctcaatactcctagt

SEQ ID NO: 98932 - DNA, 26 bp, Homo sapiens
tgatgcgtagctcaatactcctagtg

SEQ ID NO: 98933 - DNA, 26 bp, Homo sapiens
gatgcgtagctcaatactcctagtga

SEQ ID NO: 98934 - DNA, 26 bp, Homo sapiens
atgcgtagctcaatactcctagtgat

SEQ ID NO: 98935 - DNA, 26 bp, Homo sapiens
tgcgtagctcaatactcctagtgatg

SEQ ID NO: 98936 - DNA, 26 bp, Homo sapiens
gcgtagctcaatactcctagtgatgt

SEQ ID NO: 98937 - DNA, 26 bp, Homo sapiens
cgtagctcaatactcctagtgatgtt

SEQ ID NO: 98938 - DNA, 26 bp, Homo sapiens
gtagctcaatactcctagtgatgttg

SEQ ID NO: 98939 - DNA, 26 bp, Homo sapiens
tagctcaatactcctagtgatgttgt

SEQ ID NO: 98940 - DNA, 26 bp, Homo sapiens
agctcaatactcctagtgatgttgta

SEQ ID NO: 98941 - DNA, 26 bp, Homo sapiens
gctcaatactcctagtgatgttgtat

SEQ ID NO: 98942 - DNA, 26 bp, Homo sapiens
ctcaatactcctagtgatgttgtatt

SEQ ID NO: 98943 - DNA, 26 bp, Homo sapiens
tcaatactcctagtgatgttgtattg

SEQ ID NO: 98944 - DNA, 26 bp, Homo sapiens
caatactcctagtgatgttgtattgc

SEQ ID NO: 98945 - DNA, 26 bp, Homo sapiens
aatactcctagtgatgttgtattgct

SEQ ID NO: 98946 - DNA, 26 bp, Homo sapiens
atactcctagtgatgttgtattgctg

SEQ ID NO: 98947 - DNA, 26 bp, Homo sapiens
tactcctagtgatgttgtattgctgg

SEQ ID NO: 98948 - DNA, 26 bp, Homo sapiens
actcctagtgatgttgtattgctggc

SEQ ID NO: 98949 - DNA, 26 bp, Homo sapiens
ctcctagtgatgttgtattgctggcc

SEQ ID NO: 98950 - DNA, 26 bp, Homo sapiens
tcctagtgatgttgtattgctggcct

SEQ ID NO: 98951 - DNA, 26 bp, Homo sapiens
cctagtgatgttgtattgctggcctt

SEQ ID NO: 98952 - DNA, 26 bp, Homo sapiens
ctagtgatgttgtattgctggccttc

SEQ ID NO: 98953 - DNA, 26 bp, Homo sapiens
tagtgatgttgtattgctggccttca

SEQ ID NO: 98954 - DNA, 26 bp, Homo sapiens
agtgatgttgtattgctggccttcat

SEQ ID NO: 98955 - DNA, 26 bp, Homo sapiens
gtgatgttgtattgctggccttcatg

SEQ ID NO: 98956 - DNA, 26 bp, Homo sapiens
tgatgttgtattgctggccttcatgg

SEQ ID NO: 98957 - DNA, 26 bp, Homo sapiens
gatgttgtattgctggccttcatggg

SEQ ID NO: 98958 - DNA, 26 bp, Homo sapiens
atgttgtattgctggccttcatgggc

SEQ ID NO: 98959 - DNA, 26 bp, Homo sapiens
tgttgtattgctggccttcatgggca

SEQ ID NO: 98960 - DNA, 26 bp, Homo sapiens
gttgtattgctggccttcatgggcaa

SEQ ID NO: 98961 - DNA, 26 bp, Homo sapiens
ttgtattgctggccttcatgggcaaa

SEQ ID NO: 98962 - DNA, 26 bp, Homo sapiens
tgtattgctggccttcatgggcaaat

SEQ ID NO: 98963 - DNA, 26 bp, Homo sapiens
gtattgctggccttcatgggcaaatg

SEQ ID NO: 98964 - DNA, 26 bp, Homo sapiens
tattgctggccttcatgggcaaatgt

SEQ ID NO: 98965 - DNA, 26 bp, Homo sapiens
attgctggccttcatgggcaaatgtc

SEQ ID NO: 98966 - DNA, 26 bp, Homo sapiens
ttgctggccttcatgggcaaatgtca

SEQ ID NO: 98967 - DNA, 26 bp, Homo sapiens
tgctggccttcatgggcaaatgtcag

SEQ ID NO: 98968 - DNA, 26 bp, Homo sapiens
gctggccttcatgggcaaatgtcagg

SEQ ID NO: 98969 - DNA, 26 bp, Homo sapiens
ctggccttcatgggcaaatgtcagga

SEQ ID NO: 98970 - DNA, 26 bp, Homo sapiens
tggccttcatgggcaaatgtcaggac

SEQ ID NO: 98971 - DNA, 26 bp, Homo sapiens
ggccttcatgggcaaatgtcaggaca

SEQ ID NO: 98972 - DNA, 26 bp, Homo sapiens
gccttcatgggcaaatgtcaggacac

SEQ ID NO: 98973 - DNA, 26 bp, Homo sapiens
ccttcatgggcaaatgtcaggacaca

SEQ ID NO: 98974 - DNA, 26 bp, Homo sapiens
cttcatgggcaaatgtcaggacacag

SEQ ID NO: 98975 - DNA, 26 bp, Homo sapiens
ttcatgggcaaatgtcaggacacagc

SEQ ID NO: 98976 - DNA, 26 bp, Homo sapiens
tcatgggcaaatgtcaggacacagcg

SEQ ID NO: 98977 - DNA, 26 bp, Homo sapiens
catgggcaaatgtcaggacacagcgg

SEQ ID NO: 98978 - DNA, 26 bp, Homo sapiens
atgggcaaatgtcaggacacagcggt

SEQ ID NO: 98979 - DNA, 26 bp, Homo sapiens
tgggcaaatgtcaggacacagcggta

SEQ ID NO: 98980 - DNA, 26 bp, Homo sapiens
gggcaaatgtcaggacacagcggtaa

SEQ ID NO: 98981 - DNA, 26 bp, Homo sapiens
ggcaaatgtcaggacacagcggtaat

SEQ ID NO: 98982 - DNA, 26 bp, Homo sapiens
gcaaatgtcaggacacagcggtaata

SEQ ID NO: 98983 - DNA, 26 bp, Homo sapiens
caaatgtcaggacacagcggtaatag

SEQ ID NO: 98984 - DNA, 26 bp, Homo sapiens
aaatgtcaggacacagcggtaatagc

SEQ ID NO: 98985 - DNA, 26 bp, Homo sapiens
aatgtcaggacacagcggtaatagcc

SEQ ID NO: 98986 - DNA, 26 bp, Homo sapiens
atgtcaggacacagcggtaatagcca

SEQ ID NO: 98987 - DNA, 26 bp, Homo sapiens
tgtcaggacacagcggtaatagccag

SEQ ID NO: 98988 - DNA, 26 bp, Homo sapiens
gtcaggacacagcggtaatagccagc

SEQ ID NO: 98989 - DNA, 26 bp, Homo sapiens
tcaggacacagcggtaatagccagca

SEQ ID NO: 98990 - DNA, 26 bp, Homo sapiens
caggacacagcggtaatagccagcat

SEQ ID NO: 98991 - DNA, 26 bp, Homo sapiens
aggacacagcggtaatagccagcatc

SEQ ID NO: 98992 - DNA, 26 bp, Homo sapiens
ggacacagcggtaatagccagcatct

SEQ ID NO: 98993 - DNA, 26 bp, Homo sapiens
gacacagcggtaatagccagcatctt

SEQ ID NO: 98994 - DNA, 26 bp, Homo sapiens
acacagcggtaatagccagcatcttc

SEQ ID NO: 98995 - DNA, 26 bp, Homo sapiens
cacagcggtaatagccagcatcttcc

SEQ ID NO: 98996 - DNA, 26 bp, Homo sapiens
acagcggtaatagccagcatcttcca

SEQ ID NO: 98997 - DNA, 26 bp, Homo sapiens
cagcggtaatagccagcatcttccag

SEQ ID NO: 98998 - DNA, 26 bp, Homo sapiens
agcggtaatagccagcatcttccagg

SEQ ID NO: 98999 - DNA, 26 bp, Homo sapiens
gcggtaatagccagcatcttccaggg

SEQ ID NO: 99000 - DNA, 26 bp, Homo sapiens
cggtaatagccagcatcttccagggc

SEQ ID NO: 99001 - DNA, 26 bp, Homo sapiens
ggtaatagccagcatcttccagggcc

SEQ ID NO: 99002 - DNA, 26 bp, Homo sapiens
gtaatagccagcatcttccagggcca

SEQ ID NO: 99003 - DNA, 26 bp, Homo sapiens
taatagccagcatcttccagggccac

SEQ ID NO: 99004 - DNA, 26 bp, Homo sapiens
aatagccagcatcttccagggccaca

SEQ ID NO: 99005 - DNA, 26 bp, Homo sapiens
atagccagcatcttccagggccacat

SEQ ID NO: 99006 - DNA, 26 bp, Homo sapiens
tagccagcatcttccagggccacatc

SEQ ID NO: 99007 - DNA, 26 bp, Homo sapiens
agccagcatcttccagggccacatcg

SEQ ID NO: 99008 - DNA, 26 bp, Homo sapiens
gccagcatcttccagggccacatcgt

SEQ ID NO: 99009 - DNA, 26 bp, Homo sapiens
ccagcatcttccagggccacatcgtg

SEQ ID NO: 99010 - DNA, 26 bp, Homo sapiens
cagcatcttccagggccacatcgtgt

SEQ ID NO: 99011 - DNA, 26 bp, Homo sapiens
agcatcttccagggccacatcgtgta

SEQ ID NO: 99012 - DNA, 26 bp, Homo sapiens
gcatcttccagggccacatcgtgtac

SEQ ID NO: 99013 - DNA, 26 bp, Homo sapiens
catcttccagggccacatcgtgtacg

SEQ ID NO: 99014 - DNA, 26 bp, Homo sapiens
atcttccagggccacatcgtgtacga

SEQ ID NO: 99015 - DNA, 26 bp, Homo sapiens
tcttccagggccacatcgtgtacgag

SEQ ID NO: 99016 - DNA, 26 bp, Homo sapiens
cttccagggccacatcgtgtacgagt

SEQ ID NO: 99017 - DNA, 26 bp, Homo sapiens
ttccagggccacatcgtgtacgagta

SEQ ID NO: 99018 - DNA, 26 bp, Homo sapiens
tccagggccacatcgtgtacgagtaa

SEQ ID NO: 99019 - DNA, 26 bp, Homo sapiens
ccagggccacatcgtgtacgagtaag

SEQ ID NO: 99020 - DNA, 26 bp, Homo sapiens
cagggccacatcgtgtacgagtaagt

SEQ ID NO: 99021 - DNA, 26 bp, Homo sapiens
agggccacatcgtgtacgagtaagtg

SEQ ID NO: 99022 - DNA, 26 bp, Homo sapiens
gggccacatcgtgtacgagtaagtga

SEQ ID NO: 99023 - DNA, 26 bp, Homo sapiens
ggccacatcgtgtacgagtaagtgag

SEQ ID NO: 99024 - DNA, 26 bp, Homo sapiens
gccacatcgtgtacgagtaagtgagt

SEQ ID NO: 99025 - DNA, 26 bp, Homo sapiens
ccacatcgtgtacgagtaagtgagtg

SEQ ID NO: 99026 - DNA, 26 bp, Homo sapiens
cacatcgtgtacgagtaagtgagtgg

SEQ ID NO: 99027 - DNA, 26 bp, Homo sapiens
acatcgtgtacgagtaagtgagtggt

SEQ ID NO: 99028 - DNA, 26 bp, Homo sapiens
catcgtgtacgagtaagtgagtggtc

SEQ ID NO: 99029 - DNA, 26 bp, Homo sapiens
atcgtgtacgagtaagtgagtggtcc

SEQ ID NO: 99030 - DNA, 26 bp, Homo sapiens
tcgtgtacgagtaagtgagtggtccc

SEQ ID NO: 99031 - DNA, 26 bp, Homo sapiens
cgtgtacgagtaagtgagtggtcccc

SEQ ID NO: 99032 - DNA, 26 bp, Homo sapiens
gtgtacgagtaagtgagtggtccccc

SEQ ID NO: 99033 - DNA, 26 bp, Homo sapiens
tgtacgagtaagtgagtggtccccct

SEQ ID NO: 99034 - DNA, 26 bp, Homo sapiens
gtacgagtaagtgagtggtccccctc

SEQ ID NO: 99035 - DNA, 26 bp, Homo sapiens
tacgagtaagtgagtggtccccctca

SEQ ID NO: 99036 - DNA, 26 bp, Homo sapiens
acgagtaagtgagtggtccccctcac

SEQ ID NO: 99037 - DNA, 26 bp, Homo sapiens
cgagtaagtgagtggtccccctcaca

SEQ ID NO: 99038 - DNA, 26 bp, Homo sapiens
gagtaagtgagtggtccccctcacac

SEQ ID NO: 99039 - DNA, 26 bp, Homo sapiens
agtaagtgagtggtccccctcacact

SEQ ID NO: 99040 - DNA, 26 bp, Homo sapiens
gtaagtgagtggtccccctcacactt

SEQ ID NO: 99041 - DNA, 26 bp, Homo sapiens
taagtgagtggtccccctcacactta

SEQ ID NO: 99042 - DNA, 26 bp, Homo sapiens
aagtgagtggtccccctcacacttag

SEQ ID NO: 99043 - DNA, 26 bp, Homo sapiens
agtgagtggtccccctcacacttaga

SEQ ID NO: 99044 - DNA, 26 bp, Homo sapiens
gtgagtggtccccctcacacttagaa

SEQ ID NO: 99045 - DNA, 26 bp, Homo sapiens
tgagtggtccccctcacacttagaaa

SEQ ID NO: 99046 - DNA, 26 bp, Homo sapiens
gagtggtccccctcacacttagaaat

SEQ ID NO: 99047 - DNA, 26 bp, Homo sapiens
agtggtccccctcacacttagaaatt

SEQ ID NO: 99048 - DNA, 26 bp, Homo sapiens
gtggtccccctcacacttagaaattt

SEQ ID NO: 99049 - DNA, 26 bp, Homo sapiens
tggtccccctcacacttagaaatttc

SEQ ID NO: 99050 - DNA, 26 bp, Homo sapiens
ggtccccctcacacttagaaatttct

SEQ ID NO: 99051 - DNA, 26 bp, Homo sapiens
gtccccctcacacttagaaatttctc

SEQ ID NO: 99052 - DNA, 26 bp, Homo sapiens
tccccctcacacttagaaatttctca

SEQ ID NO: 99053 - DNA, 26 bp, Homo sapiens
ccccctcacacttagaaatttctcat

SEQ ID NO: 99054 - DNA, 26 bp, Homo sapiens
cccctcacacttagaaatttctcatt

SEQ ID NO: 99055 - DNA, 26 bp, Homo sapiens
ccctcacacttagaaatttctcattg

SEQ ID NO: 99056 - DNA, 26 bp, Homo sapiens
cctcacacttagaaatttctcattgt

SEQ ID NO: 99057 - DNA, 26 bp, Homo sapiens
ctcacacttagaaatttctcattgtc

SEQ ID NO: 99058 - DNA, 26 bp, Homo sapiens
tcacacttagaaatttctcattgtct

SEQ ID NO: 99059 - DNA, 26 bp, Homo sapiens
cacacttagaaatttctcattgtctt

SEQ ID NO: 99060 - DNA, 26 bp, Homo sapiens
acacttagaaatttctcattgtcttt

SEQ ID NO: 99061 - DNA, 26 bp, Homo sapiens
cacttagaaatttctcattgtcttta

SEQ ID NO: 99062 - DNA, 26 bp, Homo sapiens
acttagaaatttctcattgtctttat

SEQ ID NO: 99063 - DNA, 26 bp, Homo sapiens
cttagaaatttctcattgtctttatc

SEQ ID NO: 99064 - DNA, 26 bp, Homo sapiens
ttagaaatttctcattgtctttatcc

SEQ ID NO: 99065 - DNA, 26 bp, Homo sapiens
tagaaatttctcattgtctttatcca

SEQ ID NO: 99066 - DNA, 26 bp, Homo sapiens
agaaatttctcattgtctttatccaa

SEQ ID NO: 99067 - DNA, 26 bp, Homo sapiens
gaaatttctcattgtctttatccaaa

SEQ ID NO: 99068 - DNA, 26 bp, Homo sapiens
aaatttctcattgtctttatccaaaa

SEQ ID NO: 99069 - DNA, 26 bp, Homo sapiens
aatttctcattgtctttatccaaaag

SEQ ID NO: 99070 - DNA, 26 bp, Homo sapiens
atttctcattgtctttatccaaaaga

SEQ ID NO: 99071 - DNA, 26 bp, Homo sapiens
tttctcattgtctttatccaaaagaa

SEQ ID NO: 99072 - DNA, 26 bp, Homo sapiens
ttctcattgtctttatccaaaagaag

SEQ ID NO: 99073 - DNA, 26 bp, Homo sapiens
tctcattgtctttatccaaaagaaga

SEQ ID NO: 99074 - DNA, 26 bp, Homo sapiens
ctcattgtctttatccaaaagaagag

SEQ ID NO: 99075 - DNA, 26 bp, Homo sapiens
tcattgtctttatccaaaagaagaga

SEQ ID NO: 99076 - DNA, 26 bp, Homo sapiens
cattgtctttatccaaaagaagagaa

SEQ ID NO: 99077 - DNA, 26 bp, Homo sapiens
attgtctttatccaaaagaagagaat

SEQ ID NO: 99078 - DNA, 26 bp, Homo sapiens
ttgtctttatccaaaagaagagaatc

SEQ ID NO: 99079 - DNA, 26 bp, Homo sapiens
tgtctttatccaaaagaagagaatcc

SEQ ID NO: 99080 - DNA, 26 bp, Homo sapiens
gtctttatccaaaagaagagaatcct

SEQ ID NO: 99081 - DNA, 26 bp, Homo sapiens
tctttatccaaaagaagagaatcctt

SEQ ID NO: 99082 - DNA, 26 bp, Homo sapiens
ctttatccaaaagaagagaatccttg

SEQ ID NO: 99083 - DNA, 26 bp, Homo sapiens
tttatccaaaagaagagaatccttgt

SEQ ID NO: 99084 - DNA, 26 bp, Homo sapiens
ttatccaaaagaagagaatccttgta

SEQ ID NO: 99085 - DNA, 26 bp, Homo sapiens
tatccaaaagaagagaatccttgtac

SEQ ID NO: 99086 - DNA, 26 bp, Homo sapiens
atccaaaagaagagaatccttgtacc

SEQ ID NO: 99087 - DNA, 26 bp, Homo sapiens
tccaaaagaagagaatccttgtacca

SEQ ID NO: 99088 - DNA, 26 bp, Homo sapiens
ccaaaagaagagaatccttgtaccat

SEQ ID NO: 99089 - DNA, 26 bp, Homo sapiens
caaaagaagagaatccttgtaccatt

SEQ ID NO: 99090 - DNA, 26 bp, Homo sapiens
aaaagaagagaatccttgtaccattg

SEQ ID NO: 99091 - DNA, 26 bp, Homo sapiens
aaagaagagaatccttgtaccattga

SEQ ID NO: 99092 - DNA, 26 bp, Homo sapiens
aagaagagaatccttgtaccattgaa

SEQ ID NO: 99093 - DNA, 26 bp, Homo sapiens
agaagagaatccttgtaccattgaat

SEQ ID NO: 99094 - DNA, 26 bp, Homo sapiens
gaagagaatccttgtaccattgaatc

SEQ ID NO: 99095 - DNA, 26 bp, Homo sapiens
aagagaatccttgtaccattgaatct

SEQ ID NO: 99096 - DNA, 26 bp, Homo sapiens
agagaatccttgtaccattgaatctt

SEQ ID NO: 99097 - DNA, 26 bp, Homo sapiens
gagaatccttgtaccattgaatcttc

SEQ ID NO: 99098 - DNA, 26 bp, Homo sapiens
agaatccttgtaccattgaatcttca

SEQ ID NO: 99099 - DNA, 26 bp, Homo sapiens
gaatccttgtaccattgaatcttcac

SEQ ID NO: 99100 - DNA, 26 bp, Homo sapiens
aatccttgtaccattgaatcttcacg

SEQ ID NO: 99101 - DNA, 26 bp, Homo sapiens
atccttgtaccattgaatcttcacgt

SEQ ID NO: 99102 - DNA, 26 bp, Homo sapiens
tccttgtaccattgaatcttcacgtc

SEQ ID NO: 99103 - DNA, 26 bp, Homo sapiens
ccttgtaccattgaatcttcacgtca

SEQ ID NO: 99104 - DNA, 26 bp, Homo sapiens
cttgtaccattgaatcttcacgtcag

SEQ ID NO: 99105 - DNA, 26 bp, Homo sapiens
ttgtaccattgaatcttcacgtcagt

SEQ ID NO: 99106 - DNA, 26 bp, Homo sapiens
tgtaccattgaatcttcacgtcagtt

SEQ ID NO: 99107 - DNA, 26 bp, Homo sapiens
gtaccattgaatcttcacgtcagttt

SEQ ID NO: 99108 - DNA, 26 bp, Homo sapiens
taccattgaatcttcacgtcagtttt

SEQ ID NO: 99109 - DNA, 26 bp, Homo sapiens
accattgaatcttcacgtcagttttg

SEQ ID NO: 99110 - DNA, 26 bp, Homo sapiens
ccattgaatcttcacgtcagttttgt

SEQ ID NO: 99111 - DNA, 26 bp, Homo sapiens
cattgaatcttcacgtcagttttgtc

SEQ ID NO: 99112 - DNA, 26 bp, Homo sapiens
attgaatcttcacgtcagttttgtca

SEQ ID NO: 99113 - DNA, 26 bp, Homo sapiens
ttgaatcttcacgtcagttttgtcac

SEQ ID NO: 99114 - DNA, 26 bp, Homo sapiens
tgaatcttcacgtcagttttgtcacg

SEQ ID NO: 99115 - DNA, 26 bp, Homo sapiens
gaatcttcacgtcagttttgtcacgg

SEQ ID NO: 99116 - DNA, 26 bp, Homo sapiens
aatcttcacgtcagttttgtcacggg

SEQ ID NO: 99117 - DNA, 26 bp, Homo sapiens
atcttcacgtcagttttgtcacgggt

SEQ ID NO: 99118 - DNA, 26 bp, Homo sapiens
tcttcacgtcagttttgtcacgggtg

SEQ ID NO: 99119 - DNA, 26 bp, Homo sapiens
cttcacgtcagttttgtcacgggtga

SEQ ID NO: 99120 - DNA, 26 bp, Homo sapiens
ttcacgtcagttttgtcacgggtgaa

SEQ ID NO: 99121 - DNA, 26 bp, Homo sapiens
tcacgtcagttttgtcacgggtgaat

SEQ ID NO: 99122 - DNA, 26 bp, Homo sapiens
cacgtcagttttgtcacgggtgaatt

SEQ ID NO: 99123 - DNA, 26 bp, Homo sapiens
acgtcagttttgtcacgggtgaattc

SEQ ID NO: 99124 - DNA, 26 bp, Homo sapiens
cgtcagttttgtcacgggtgaattca

SEQ ID NO: 99125 - DNA, 26 bp, Homo sapiens
gtcagttttgtcacgggtgaattcac

SEQ ID NO: 99126 - DNA, 26 bp, Homo sapiens
tcagttttgtcacgggtgaattcact

SEQ ID NO: 99127 - DNA, 26 bp, Homo sapiens
cagttttgtcacgggtgaattcactc

SEQ ID NO: 99128 - DNA, 26 bp, Homo sapiens
agttttgtcacgggtgaattcactca

SEQ ID NO: 99129 - DNA, 26 bp, Homo sapiens
gttttgtcacgggtgaattcactcag

SEQ ID NO: 99130 - DNA, 26 bp, Homo sapiens
ttttgtcacgggtgaattcactcagg

SEQ ID NO: 99131 - DNA, 26 bp, Homo sapiens
tttgtcacgggtgaattcactcaggt

SEQ ID NO: 99132 - DNA, 26 bp, Homo sapiens
ttgtcacgggtgaattcactcaggtc

SEQ ID NO: 99133 - DNA, 26 bp, Homo sapiens
tgtcacgggtgaattcactcaggtca

SEQ ID NO: 99134 - DNA, 26 bp, Homo sapiens
gtcacgggtgaattcactcaggtcag

SEQ ID NO: 99135 - DNA, 26 bp, Homo sapiens
tcacgggtgaattcactcaggtcagg

SEQ ID NO: 99136 - DNA, 26 bp, Homo sapiens
cacgggtgaattcactcaggtcaggg

SEQ ID NO: 99137 - DNA, 26 bp, Homo sapiens
acgggtgaattcactcaggtcagggc

SEQ ID NO: 99138 - DNA, 26 bp, Homo sapiens
cgggtgaattcactcaggtcagggca

SEQ ID NO: 99139 - DNA, 26 bp, Homo sapiens
gggtgaattcactcaggtcagggcat

SEQ ID NO: 99140 - DNA, 26 bp, Homo sapiens
ggtgaattcactcaggtcagggcata

SEQ ID NO: 99141 - DNA, 26 bp, Homo sapiens
gtgaattcactcaggtcagggcatac

SEQ ID NO: 99142 - DNA, 26 bp, Homo sapiens
tgaattcactcaggtcagggcatact

SEQ ID NO: 99143 - DNA, 26 bp, Homo sapiens
gaattcactcaggtcagggcatacta

SEQ ID NO: 99144 - DNA, 26 bp, Homo sapiens
aattcactcaggtcagggcatactaa

SEQ ID NO: 99145 - DNA, 26 bp, Homo sapiens
attcactcaggtcagggcatactaat

SEQ ID NO: 99146 - DNA, 26 bp, Homo sapiens
ttcactcaggtcagggcatactaata

SEQ ID NO: 99147 - DNA, 26 bp, Homo sapiens
tcactcaggtcagggcatactaatac

SEQ ID NO: 99148 - DNA, 26 bp, Homo sapiens
cactcaggtcagggcatactaatacc

SEQ ID NO: 99149 - DNA, 26 bp, Homo sapiens
actcaggtcagggcatactaataccc

SEQ ID NO: 99150 - DNA, 26 bp, Homo sapiens
ctcaggtcagggcatactaatacccc

SEQ ID NO: 99151 - DNA, 26 bp, Homo sapiens
tcaggtcagggcatactaatacccca

SEQ ID NO: 99152 - DNA, 26 bp, Homo sapiens
caggtcagggcatactaataccccag

SEQ ID NO: 99153 - DNA, 26 bp, Homo sapiens
aggtcagggcatactaataccccaga

SEQ ID NO: 99154 - DNA, 26 bp, Homo sapiens
ggtcagggcatactaataccccagag

SEQ ID NO: 99155 - DNA, 26 bp, Homo sapiens
gtcagggcatactaataccccagagg

SEQ ID NO: 99156 - DNA, 26 bp, Homo sapiens
tcagggcatactaataccccagaggt

SEQ ID NO: 99157 - DNA, 26 bp, Homo sapiens
cagggcatactaataccccagaggtt

SEQ ID NO: 99158 - DNA, 26 bp, Homo sapiens
agggcatactaataccccagaggttg

SEQ ID NO: 99159 - DNA, 26 bp, Homo sapiens
gggcatactaataccccagaggttga

SEQ ID NO: 99160 - DNA, 26 bp, Homo sapiens
ggcatactaataccccagaggttgac

SEQ ID NO: 99161 - DNA, 26 bp, Homo sapiens
gcatactaataccccagaggttgaca

SEQ ID NO: 99162 - DNA, 26 bp, Homo sapiens
catactaataccccagaggttgacaa

SEQ ID NO: 99163 - DNA, 26 bp, Homo sapiens
atactaataccccagaggttgacaag

SEQ ID NO: 99164 - DNA, 26 bp, Homo sapiens
tactaataccccagaggttgacaagg

SEQ ID NO: 99165 - DNA, 26 bp, Homo sapiens
actaataccccagaggttgacaaggt

SEQ ID NO: 99166 - DNA, 26 bp, Homo sapiens
ctaataccccagaggttgacaaggtt

SEQ ID NO: 99167 - DNA, 26 bp, Homo sapiens
taataccccagaggttgacaaggtta

SEQ ID NO: 99168 - DNA, 26 bp, Homo sapiens
aataccccagaggttgacaaggttaa

SEQ ID NO: 99169 - DNA, 26 bp, Homo sapiens
ataccccagaggttgacaaggttaaa

SEQ ID NO: 99170 - DNA, 26 bp, Homo sapiens
taccccagaggttgacaaggttaaaa

SEQ ID NO: 99171 - DNA, 26 bp, Homo sapiens
accccagaggttgacaaggttaaaat

SEQ ID NO: 99172 - DNA, 26 bp, Homo sapiens
ccccagaggttgacaaggttaaaatt

SEQ ID NO: 99173 - DNA, 26 bp, Homo sapiens
cccagaggttgacaaggttaaaattt

SEQ ID NO: 99174 - DNA, 26 bp, Homo sapiens
ccagaggttgacaaggttaaaatttg

SEQ ID NO: 99175 - DNA, 26 bp, Homo sapiens
cagaggttgacaaggttaaaatttgc

SEQ ID NO: 99176 - DNA, 26 bp, Homo sapiens
agaggttgacaaggttaaaatttgcg

SEQ ID NO: 99177 - DNA, 26 bp, Homo sapiens
gaggttgacaaggttaaaatttgcgg

SEQ ID NO: 99178 - DNA, 26 bp, Homo sapiens
aggttgacaaggttaaaatttgcggg

SEQ ID NO: 99179 - DNA, 26 bp, Homo sapiens
ggttgacaaggttaaaatttgcgggt

SEQ ID NO: 99180 - DNA, 26 bp, Homo sapiens
gttgacaaggttaaaatttgcgggta

SEQ ID NO: 99181 - DNA, 26 bp, Homo sapiens
ttgacaaggttaaaatttgcgggtat

SEQ ID NO: 99182 - DNA, 26 bp, Homo sapiens
tgacaaggttaaaatttgcgggtatg

SEQ ID NO: 99183 - DNA, 26 bp, Homo sapiens
gacaaggttaaaatttgcgggtatga

SEQ ID NO: 99184 - DNA, 26 bp, Homo sapiens
acaaggttaaaatttgcgggtatgag

SEQ ID NO: 99185 - DNA, 26 bp, Homo sapiens
caaggttaaaatttgcgggtatgaga

SEQ ID NO: 99186 - DNA, 26 bp, Homo sapiens
aaggttaaaatttgcgggtatgagat

SEQ ID NO: 99187 - DNA, 26 bp, Homo sapiens
aggttaaaatttgcgggtatgagatg

SEQ ID NO: 99188 - DNA, 26 bp, Homo sapiens
ggttaaaatttgcgggtatgagatga

SEQ ID NO: 99189 - DNA, 26 bp, Homo sapiens
gttaaaatttgcgggtatgagatgaa

SEQ ID NO: 99190 - DNA, 26 bp, Homo sapiens
ttaaaatttgcgggtatgagatgaac

SEQ ID NO: 99191 - DNA, 26 bp, Homo sapiens
taaaatttgcgggtatgagatgaacg

SEQ ID NO: 99192 - DNA, 26 bp, Homo sapiens
aaaatttgcgggtatgagatgaacgg

SEQ ID NO: 99193 - DNA, 26 bp, Homo sapiens
aaatttgcgggtatgagatgaacggc

SEQ ID NO: 99194 - DNA, 26 bp, Homo sapiens
aatttgcgggtatgagatgaacggca

SEQ ID NO: 99195 - DNA, 26 bp, Homo sapiens
atttgcgggtatgagatgaacggcag

SEQ ID NO: 99196 - DNA, 26 bp, Homo sapiens
tttgcgggtatgagatgaacggcagg

SEQ ID NO: 99197 - DNA, 26 bp, Homo sapiens
ttgcgggtatgagatgaacggcagga

SEQ ID NO: 99198 - DNA, 26 bp, Homo sapiens
tgcgggtatgagatgaacggcaggaa

SEQ ID NO: 99199 - DNA, 26 bp, Homo sapiens
gcgggtatgagatgaacggcaggaaa

SEQ ID NO: 99200 - DNA, 26 bp, Homo sapiens
cgggtatgagatgaacggcaggaaag

SEQ ID NO: 99201 - DNA, 26 bp, Homo sapiens
gggtatgagatgaacggcaggaaagc

SEQ ID NO: 99202 - DNA, 26 bp, Homo sapiens
ggtatgagatgaacggcaggaaagca

SEQ ID NO: 99203 - DNA, 26 bp, Homo sapiens
gtatgagatgaacggcaggaaagcat

SEQ ID NO: 99204 - DNA, 26 bp, Homo sapiens
tatgagatgaacggcaggaaagcatc

SEQ ID NO: 99205 - DNA, 26 bp, Homo sapiens
atgagatgaacggcaggaaagcatct

SEQ ID NO: 99206 - DNA, 26 bp, Homo sapiens
tgagatgaacggcaggaaagcatctg

SEQ ID NO: 99207 - DNA, 26 bp, Homo sapiens
gagatgaacggcaggaaagcatctgt

SEQ ID NO: 99208 - DNA, 26 bp, Homo sapiens
agatgaacggcaggaaagcatctgta

SEQ ID NO: 99209 - DNA, 26 bp, Homo sapiens
gatgaacggcaggaaagcatctgtat

SEQ ID NO: 99210 - DNA, 26 bp, Homo sapiens
atgaacggcaggaaagcatctgtatt

SEQ ID NO: 99211 - DNA, 26 bp, Homo sapiens
tgaacggcaggaaagcatctgtattc

SEQ ID NO: 99212 - DNA, 26 bp, Homo sapiens
gaacggcaggaaagcatctgtattct

SEQ ID NO: 99213 - DNA, 26 bp, Homo sapiens
aacggcaggaaagcatctgtattctc

SEQ ID NO: 99214 - DNA, 26 bp, Homo sapiens
acggcaggaaagcatctgtattctca

SEQ ID NO: 99215 - DNA, 26 bp, Homo sapiens
cggcaggaaagcatctgtattctcaa

SEQ ID NO: 99216 - DNA, 26 bp, Homo sapiens
ggcaggaaagcatctgtattctcaaa

SEQ ID NO: 99217 - DNA, 26 bp, Homo sapiens
gcaggaaagcatctgtattctcaaaa

SEQ ID NO: 99218 - DNA, 26 bp, Homo sapiens
caggaaagcatctgtattctcaaaaa

SEQ ID NO: 99219 - DNA, 26 bp, Homo sapiens
aggaaagcatctgtattctcaaaaac

SEQ ID NO: 99220 - DNA, 26 bp, Homo sapiens
ggaaagcatctgtattctcaaaaact

SEQ ID NO: 99221 - DNA, 26 bp, Homo sapiens
gaaagcatctgtattctcaaaaactc

SEQ ID NO: 99222 - DNA, 26 bp, Homo sapiens
aaagcatctgtattctcaaaaactct

SEQ ID NO: 99223 - DNA, 26 bp, Homo sapiens
aagcatctgtattctcaaaaactctg

SEQ ID NO: 99224 - DNA, 26 bp, Homo sapiens
agcatctgtattctcaaaaactctga

SEQ ID NO: 99225 - DNA, 26 bp, Homo sapiens
gcatctgtattctcaaaaactctgag

SEQ ID NO: 99226 - DNA, 26 bp, Homo sapiens
catctgtattctcaaaaactctgagc

SEQ ID NO: 99227 - DNA, 26 bp, Homo sapiens
atctgtattctcaaaaactctgagct

SEQ ID NO: 99228 - DNA, 26 bp, Homo sapiens
tctgtattctcaaaaactctgagctc

SEQ ID NO: 99229 - DNA, 26 bp, Homo sapiens
ctgtattctcaaaaactctgagctca

SEQ ID NO: 99230 - DNA, 26 bp, Homo sapiens
tgtattctcaaaaactctgagctcaa

SEQ ID NO: 99231 - DNA, 26 bp, Homo sapiens
gtattctcaaaaactctgagctcaat

SEQ ID NO: 99232 - DNA, 26 bp, Homo sapiens
tattctcaaaaactctgagctcaatg

SEQ ID NO: 99233 - DNA, 26 bp, Homo sapiens
attctcaaaaactctgagctcaatgg

SEQ ID NO: 99234 - DNA, 26 bp, Homo sapiens
ttctcaaaaactctgagctcaatgga

SEQ ID NO: 99235 - DNA, 26 bp, Homo sapiens
tctcaaaaactctgagctcaatggac

SEQ ID NO: 99236 - DNA, 26 bp, Homo sapiens
ctcaaaaactctgagctcaatggaca

SEQ ID NO: 99237 - DNA, 26 bp, Homo sapiens
tcaaaaactctgagctcaatggacat

SEQ ID NO: 99238 - DNA, 26 bp, Homo sapiens
caaaaactctgagctcaatggacatt

SEQ ID NO: 99239 - DNA, 26 bp, Homo sapiens
aaaaactctgagctcaatggacattt

SEQ ID NO: 99240 - DNA, 26 bp, Homo sapiens
aaaactctgagctcaatggacatttt

SEQ ID NO: 99241 - DNA, 26 bp, Homo sapiens
aaactctgagctcaatggacattttg

SEQ ID NO: 99242 - DNA, 26 bp, Homo sapiens
aactctgagctcaatggacattttgt

SEQ ID NO: 99243 - DNA, 26 bp, Homo sapiens
actctgagctcaatggacattttgtc

SEQ ID NO: 99244 - DNA, 26 bp, Homo sapiens
ctctgagctcaatggacattttgtca

SEQ ID NO: 99245 - DNA, 26 bp, Homo sapiens
tctgagctcaatggacattttgtcac

SEQ ID NO: 99246 - DNA, 26 bp, Homo sapiens
ctgagctcaatggacattttgtcaca

SEQ ID NO: 99247 - DNA, 26 bp, Homo sapiens
tgagctcaatggacattttgtcacag

SEQ ID NO: 99248 - DNA, 26 bp, Homo sapiens
gagctcaatggacattttgtcacagt

SEQ ID NO: 99249 - DNA, 26 bp, Homo sapiens
agctcaatggacattttgtcacagta

SEQ ID NO: 99250 - DNA, 26 bp, Homo sapiens
gctcaatggacattttgtcacagtaa

SEQ ID NO: 99251 - DNA, 26 bp, Homo sapiens
ctcaatggacattttgtcacagtaag

SEQ ID NO: 99252 - DNA, 26 bp, Homo sapiens
tcaatggacattttgtcacagtaaga

SEQ ID NO: 99253 - DNA, 26 bp, Homo sapiens
caatggacattttgtcacagtaagaa

SEQ ID NO: 99254 - DNA, 26 bp, Homo sapiens
aatggacattttgtcacagtaagaag

SEQ ID NO: 99255 - DNA, 26 bp, Homo sapiens
atggacattttgtcacagtaagaagc

SEQ ID NO: 99256 - DNA, 26 bp, Homo sapiens
tggacattttgtcacagtaagaagca

SEQ ID NO: 99257 - DNA, 26 bp, Homo sapiens
ggacattttgtcacagtaagaagcat

SEQ ID NO: 99258 - DNA, 26 bp, Homo sapiens
gacattttgtcacagtaagaagcatt

SEQ ID NO: 99259 - DNA, 26 bp, Homo sapiens
acattttgtcacagtaagaagcattt

SEQ ID NO: 99260 - DNA, 26 bp, Homo sapiens
cattttgtcacagtaagaagcatttc

SEQ ID NO: 99261 - DNA, 26 bp, Homo sapiens
attttgtcacagtaagaagcatttct

SEQ ID NO: 99262 - DNA, 26 bp, Homo sapiens
ttttgtcacagtaagaagcatttcta

SEQ ID NO: 99263 - DNA, 26 bp, Homo sapiens
tttgtcacagtaagaagcatttctag

SEQ ID NO: 99264 - DNA, 26 bp, Homo sapiens
ttgtcacagtaagaagcatttctagt

SEQ ID NO: 99265 - DNA, 26 bp, Homo sapiens
tgtcacagtaagaagcatttctagta

SEQ ID NO: 99266 - DNA, 26 bp, Homo sapiens
gtcacagtaagaagcatttctagtag

SEQ ID NO: 99267 - DNA, 26 bp, Homo sapiens
tcacagtaagaagcatttctagtagt

SEQ ID NO: 99268 - DNA, 26 bp, Homo sapiens
cacagtaagaagcatttctagtagtg

SEQ ID NO: 99269 - DNA, 26 bp, Homo sapiens
acagtaagaagcatttctagtagtgc

SEQ ID NO: 99270 - DNA, 26 bp, Homo sapiens
cagtaagaagcatttctagtagtgca

SEQ ID NO: 99271 - DNA, 26 bp, Homo sapiens
agtaagaagcatttctagtagtgcag

SEQ ID NO: 99272 - DNA, 26 bp, Homo sapiens
gtaagaagcatttctagtagtgcaga

SEQ ID NO: 99273 - DNA, 26 bp, Homo sapiens
taagaagcatttctagtagtgcagac

SEQ ID NO: 99274 - DNA, 26 bp, Homo sapiens
aagaagcatttctagtagtgcagacg

SEQ ID NO: 99275 - DNA, 26 bp, Homo sapiens
agaagcatttctagtagtgcagacgt

SEQ ID NO: 99276 - DNA, 26 bp, Homo sapiens
gaagcatttctagtagtgcagacgta

SEQ ID NO: 99277 - DNA, 26 bp, Homo sapiens
aagcatttctagtagtgcagacgtag

SEQ ID NO: 99278 - DNA, 26 bp, Homo sapiens
agcatttctagtagtgcagacgtagg

SEQ ID NO: 99279 - DNA, 26 bp, Homo sapiens
gcatttctagtagtgcagacgtaggt

SEQ ID NO: 99280 - DNA, 26 bp, Homo sapiens
catttctagtagtgcagacgtaggtg

SEQ ID NO: 99281 - DNA, 26 bp, Homo sapiens
atttctagtagtgcagacgtaggtgc

SEQ ID NO: 99282 - DNA, 26 bp, Homo sapiens
tttctagtagtgcagacgtaggtgcc

SEQ ID NO: 99283 - DNA, 26 bp, Homo sapiens
ttctagtagtgcagacgtaggtgcca

SEQ ID NO: 99284 - DNA, 26 bp, Homo sapiens
tctagtagtgcagacgtaggtgccag

SEQ ID NO: 99285 - DNA, 26 bp, Homo sapiens
ctagtagtgcagacgtaggtgccaga

SEQ ID NO: 99286 - DNA, 26 bp, Homo sapiens
tagtagtgcagacgtaggtgccagag

SEQ ID NO: 99287 - DNA, 26 bp, Homo sapiens
agtagtgcagacgtaggtgccagagt

SEQ ID NO: 99288 - DNA, 26 bp, Homo sapiens
gtagtgcagacgtaggtgccagagtc

SEQ ID NO: 99289 - DNA, 26 bp, Homo sapiens
tagtgcagacgtaggtgccagagtcc

SEQ ID NO: 99290 - DNA, 26 bp, Homo sapiens
agtgcagacgtaggtgccagagtcct

SEQ ID NO: 99291 - DNA, 26 bp, Homo sapiens
gtgcagacgtaggtgccagagtcctc

SEQ ID NO: 99292 - DNA, 26 bp, Homo sapiens
tgcagacgtaggtgccagagtcctcc

SEQ ID NO: 99293 - DNA, 26 bp, Homo sapiens
gcagacgtaggtgccagagtcctcct

SEQ ID NO: 99294 - DNA, 26 bp, Homo sapiens
cagacgtaggtgccagagtcctcctg

SEQ ID NO: 99295 - DNA, 26 bp, Homo sapiens
agacgtaggtgccagagtcctcctgc

SEQ ID NO: 99296 - DNA, 26 bp, Homo sapiens
gacgtaggtgccagagtcctcctgca

SEQ ID NO: 99297 - DNA, 26 bp, Homo sapiens
acgtaggtgccagagtcctcctgcaa

SEQ ID NO: 99298 - DNA, 26 bp, Homo sapiens
cgtaggtgccagagtcctcctgcaag

SEQ ID NO: 99299 - DNA, 26 bp, Homo sapiens
gtaggtgccagagtcctcctgcaagg

SEQ ID NO: 99300 - DNA, 26 bp, Homo sapiens
taggtgccagagtcctcctgcaaggc

SEQ ID NO: 99301 - DNA, 26 bp, Homo sapiens
aggtgccagagtcctcctgcaaggct

SEQ ID NO: 99302 - DNA, 26 bp, Homo sapiens
ggtgccagagtcctcctgcaaggctg

SEQ ID NO: 99303 - DNA, 26 bp, Homo sapiens
gtgccagagtcctcctgcaaggctgg

SEQ ID NO: 99304 - DNA, 26 bp, Homo sapiens
tgccagagtcctcctgcaaggctggc

SEQ ID NO: 99305 - DNA, 26 bp, Homo sapiens
gccagagtcctcctgcaaggctggca

SEQ ID NO: 99306 - DNA, 26 bp, Homo sapiens
ccagagtcctcctgcaaggctggcag

SEQ ID NO: 99307 - DNA, 26 bp, Homo sapiens
cagagtcctcctgcaaggctggcaga

SEQ ID NO: 99308 - DNA, 26 bp, Homo sapiens
agagtcctcctgcaaggctggcagaa

SEQ ID NO: 99309 - DNA, 26 bp, Homo sapiens
gagtcctcctgcaaggctggcagaag

SEQ ID NO: 99310 - DNA, 26 bp, Homo sapiens
agtcctcctgcaaggctggcagaagc

SEQ ID NO: 99311 - DNA, 26 bp, Homo sapiens
gtcctcctgcaaggctggcagaagcc

SEQ ID NO: 99312 - DNA, 26 bp, Homo sapiens
tcctcctgcaaggctggcagaagcca

SEQ ID NO: 99313 - DNA, 26 bp, Homo sapiens
cctcctgcaaggctggcagaagccac

SEQ ID NO: 99314 - DNA, 26 bp, Homo sapiens
ctcctgcaaggctggcagaagccaca

SEQ ID NO: 99315 - DNA, 26 bp, Homo sapiens
tcctgcaaggctggcagaagccacag

SEQ ID NO: 99316 - DNA, 26 bp, Homo sapiens
cctgcaaggctggcagaagccacaga

SEQ ID NO: 99317 - DNA, 26 bp, Homo sapiens
ctgcaaggctggcagaagccacagag

SEQ ID NO: 99318 - DNA, 26 bp, Homo sapiens
tgcaaggctggcagaagccacagagc

SEQ ID NO: 99319 - DNA, 26 bp, Homo sapiens
gcaaggctggcagaagccacagagca

SEQ ID NO: 99320 - DNA, 26 bp, Homo sapiens
caaggctggcagaagccacagagcac

SEQ ID NO: 99321 - DNA, 26 bp, Homo sapiens
aaggctggcagaagccacagagcacc

SEQ ID NO: 99322 - DNA, 26 bp, Homo sapiens
aggctggcagaagccacagagcaccg

SEQ ID NO: 99323 - DNA, 26 bp, Homo sapiens
ggctggcagaagccacagagcaccgt

SEQ ID NO: 99324 - DNA, 26 bp, Homo sapiens
gctggcagaagccacagagcaccgtc

SEQ ID NO: 99325 - DNA, 26 bp, Homo sapiens
ctggcagaagccacagagcaccgtcc

SEQ ID NO: 99326 - DNA, 26 bp, Homo sapiens
tggcagaagccacagagcaccgtcct

SEQ ID NO: 99327 - DNA, 26 bp, Homo sapiens
ggcagaagccacagagcaccgtcctg

SEQ ID NO: 99328 - DNA, 26 bp, Homo sapiens
gcagaagccacagagcaccgtcctgg

SEQ ID NO: 99329 - DNA, 26 bp, Homo sapiens
cagaagccacagagcaccgtcctggg

SEQ ID NO: 99330 - DNA, 26 bp, Homo sapiens
agaagccacagagcaccgtcctgggc

SEQ ID NO: 99331 - DNA, 26 bp, Homo sapiens
gaagccacagagcaccgtcctgggcc

SEQ ID NO: 99332 - DNA, 26 bp, Homo sapiens
aagccacagagcaccgtcctgggccc

SEQ ID NO: 99333 - DNA, 26 bp, Homo sapiens
agccacagagcaccgtcctgggccca

SEQ ID NO: 99334 - DNA, 26 bp, Homo sapiens
gccacagagcaccgtcctgggcccac

SEQ ID NO: 99335 - DNA, 26 bp, Homo sapiens
ccacagagcaccgtcctgggcccaca

SEQ ID NO: 99336 - DNA, 26 bp, Homo sapiens
cacagagcaccgtcctgggcccacat

SEQ ID NO: 99337 - DNA, 26 bp, Homo sapiens
acagagcaccgtcctgggcccacatc

SEQ ID NO: 99338 - DNA, 26 bp, Homo sapiens
cagagcaccgtcctgggcccacatcc

SEQ ID NO: 99339 - DNA, 26 bp, Homo sapiens
agagcaccgtcctgggcccacatccg

SEQ ID NO: 99340 - DNA, 26 bp, Homo sapiens
gagcaccgtcctgggcccacatccgt

SEQ ID NO: 99341 - DNA, 26 bp, Homo sapiens
agcaccgtcctgggcccacatccgtg

SEQ ID NO: 99342 - DNA, 26 bp, Homo sapiens
gcaccgtcctgggcccacatccgtgt

SEQ ID NO: 99343 - DNA, 26 bp, Homo sapiens
caccgtcctgggcccacatccgtgtc

SEQ ID NO: 99344 - DNA, 26 bp, Homo sapiens
accgtcctgggcccacatccgtgtct

SEQ ID NO: 99345 - DNA, 26 bp, Homo sapiens
ccgtcctgggcccacatccgtgtctc

SEQ ID NO: 99346 - DNA, 26 bp, Homo sapiens
cgtcctgggcccacatccgtgtctct

SEQ ID NO: 99347 - DNA, 26 bp, Homo sapiens
gtcctgggcccacatccgtgtctctt

SEQ ID NO: 99348 - DNA, 26 bp, Homo sapiens
tcctgggcccacatccgtgtctcttc

SEQ ID NO: 99349 - DNA, 26 bp, Homo sapiens
cctgggcccacatccgtgtctcttct

SEQ ID NO: 99350 - DNA, 26 bp, Homo sapiens
ctgggcccacatccgtgtctcttctt

SEQ ID NO: 99351 - DNA, 26 bp, Homo sapiens
tgggcccacatccgtgtctcttcttc

SEQ ID NO: 99352 - DNA, 26 bp, Homo sapiens
gggcccacatccgtgtctcttcttct

SEQ ID NO: 99353 - DNA, 26 bp, Homo sapiens
ggcccacatccgtgtctcttcttctc

SEQ ID NO: 99354 - DNA, 26 bp, Homo sapiens
gcccacatccgtgtctcttcttctcc

SEQ ID NO: 99355 - DNA, 26 bp, Homo sapiens
cccacatccgtgtctcttcttctcct

SEQ ID NO: 99356 - DNA, 26 bp, Homo sapiens
ccacatccgtgtctcttcttctcctg

SEQ ID NO: 99357 - DNA, 26 bp, Homo sapiens
cacatccgtgtctcttcttctcctgg

SEQ ID NO: 99358 - DNA, 26 bp, Homo sapiens
acatccgtgtctcttcttctcctggg

SEQ ID NO: 99359 - DNA, 26 bp, Homo sapiens
catccgtgtctcttcttctcctggga

SEQ ID NO: 99360 - DNA, 26 bp, Homo sapiens
atccgtgtctcttcttctcctgggac

SEQ ID NO: 99361 - DNA, 26 bp, Homo sapiens
tccgtgtctcttcttctcctgggacc

SEQ ID NO: 99362 - DNA, 26 bp, Homo sapiens
ccgtgtctcttcttctcctgggaccg

SEQ ID NO: 99363 - DNA, 26 bp, Homo sapiens
cgtgtctcttcttctcctgggaccgt

SEQ ID NO: 99364 - DNA, 26 bp, Homo sapiens
gtgtctcttcttctcctgggaccgtc

SEQ ID NO: 99365 - DNA, 26 bp, Homo sapiens
tgtctcttcttctcctgggaccgtcc

SEQ ID NO: 99366 - DNA, 26 bp, Homo sapiens
gtctcttcttctcctgggaccgtcct

SEQ ID NO: 99367 - DNA, 26 bp, Homo sapiens
tctcttcttctcctgggaccgtccta

SEQ ID NO: 99368 - DNA, 26 bp, Homo sapiens
ctcttcttctcctgggaccgtcctag

SEQ ID NO: 99369 - DNA, 26 bp, Homo sapiens
tcttcttctcctgggaccgtcctagc

SEQ ID NO: 99370 - DNA, 26 bp, Homo sapiens
cttcttctcctgggaccgtcctagca

SEQ ID NO: 99371 - DNA, 26 bp, Homo sapiens
ttcttctcctgggaccgtcctagcag

SEQ ID NO: 99372 - DNA, 26 bp, Homo sapiens
tcttctcctgggaccgtcctagcaga

SEQ ID NO: 99373 - DNA, 26 bp, Homo sapiens
cttctcctgggaccgtcctagcagag

SEQ ID NO: 99374 - DNA, 26 bp, Homo sapiens
ttctcctgggaccgtcctagcagagt

SEQ ID NO: 99375 - DNA, 26 bp, Homo sapiens
tctcctgggaccgtcctagcagagtc

SEQ ID NO: 99376 - DNA, 26 bp, Homo sapiens
ctcctgggaccgtcctagcagagtca

SEQ ID NO: 99377 - DNA, 26 bp, Homo sapiens
tcctgggaccgtcctagcagagtcat

SEQ ID NO: 99378 - DNA, 26 bp, Homo sapiens
cctgggaccgtcctagcagagtcatt

SEQ ID NO: 99379 - DNA, 26 bp, Homo sapiens
ctgggaccgtcctagcagagtcattt

SEQ ID NO: 99380 - DNA, 26 bp, Homo sapiens
tgggaccgtcctagcagagtcatttt

SEQ ID NO: 99381 - DNA, 26 bp, Homo sapiens
gggaccgtcctagcagagtcattttt

SEQ ID NO: 99382 - DNA, 26 bp, Homo sapiens
ggaccgtcctagcagagtcattttta

SEQ ID NO: 99383 - DNA, 26 bp, Homo sapiens
gaccgtcctagcagagtcatttttat

SEQ ID NO: 99384 - DNA, 26 bp, Homo sapiens
accgtcctagcagagtcatttttatg

SEQ ID NO: 99385 - DNA, 26 bp, Homo sapiens
ccgtcctagcagagtcatttttatgc

SEQ ID NO: 99386 - DNA, 26 bp, Homo sapiens
cgtcctagcagagtcatttttatgcc

SEQ ID NO: 99387 - DNA, 26 bp, Homo sapiens
gtcctagcagagtcatttttatgcca

SEQ ID NO: 99388 - DNA, 26 bp, Homo sapiens
tcctagcagagtcatttttatgccat

SEQ ID NO: 99389 - DNA, 26 bp, Homo sapiens
cctagcagagtcatttttatgccatg

SEQ ID NO: 99390 - DNA, 26 bp, Homo sapiens
ctagcagagtcatttttatgccatgt

SEQ ID NO: 99391 - DNA, 26 bp, Homo sapiens
tagcagagtcatttttatgccatgtc

SEQ ID NO: 99392 - DNA, 26 bp, Homo sapiens
agcagagtcatttttatgccatgtca

SEQ ID NO: 99393 - DNA, 26 bp, Homo sapiens
gcagagtcatttttatgccatgtcag

SEQ ID NO: 99394 - DNA, 26 bp, Homo sapiens
cagagtcatttttatgccatgtcagg

SEQ ID NO: 99395 - DNA, 26 bp, Homo sapiens
agagtcatttttatgccatgtcaggt

SEQ ID NO: 99396 - DNA, 26 bp, Homo sapiens
gagtcatttttatgccatgtcaggtt

SEQ ID NO: 99397 - DNA, 26 bp, Homo sapiens
agtcatttttatgccatgtcaggttg

SEQ ID NO: 99398 - DNA, 26 bp, Homo sapiens
gtcatttttatgccatgtcaggttga

SEQ ID NO: 99399 - DNA, 26 bp, Homo sapiens
tcatttttatgccatgtcaggttgat

SEQ ID NO: 99400 - DNA, 26 bp, Homo sapiens
catttttatgccatgtcaggttgatg

SEQ ID NO: 99401 - DNA, 26 bp, Homo sapiens
atttttatgccatgtcaggttgatgc

SEQ ID NO: 99402 - DNA, 26 bp, Homo sapiens
tttttatgccatgtcaggttgatgcg

SEQ ID NO: 99403 - DNA, 26 bp, Homo sapiens
ttttatgccatgtcaggttgatgcgg

SEQ ID NO: 99404 - DNA, 26 bp, Homo sapiens
tttatgccatgtcaggttgatgcggg

SEQ ID NO: 99405 - DNA, 26 bp, Homo sapiens
ttatgccatgtcaggttgatgcgggg

SEQ ID NO: 99406 - DNA, 26 bp, Homo sapiens
tatgccatgtcaggttgatgcggggg

SEQ ID NO: 99407 - DNA, 26 bp, Homo sapiens
atgccatgtcaggttgatgcgggggc

SEQ ID NO: 99408 - DNA, 26 bp, Homo sapiens
tgccatgtcaggttgatgcgggggct

SEQ ID NO: 99409 - DNA, 26 bp, Homo sapiens
gccatgtcaggttgatgcgggggctg

SEQ ID NO: 99410 - DNA, 26 bp, Homo sapiens
ccatgtcaggttgatgcgggggctga

SEQ ID NO: 99411 - DNA, 26 bp, Homo sapiens
catgtcaggttgatgcgggggctgac

SEQ ID NO: 99412 - DNA, 26 bp, Homo sapiens
atgtcaggttgatgcgggggctgaca

SEQ ID NO: 99413 - DNA, 26 bp, Homo sapiens
tgtcaggttgatgcgggggctgacag

SEQ ID NO: 99414 - DNA, 26 bp, Homo sapiens
gtcaggttgatgcgggggctgacaga

SEQ ID NO: 99415 - DNA, 26 bp, Homo sapiens
tcaggttgatgcgggggctgacagag

SEQ ID NO: 99416 - DNA, 26 bp, Homo sapiens
caggttgatgcgggggctgacagagg

SEQ ID NO: 99417 - DNA, 26 bp, Homo sapiens
aggttgatgcgggggctgacagaggc

SEQ ID NO: 99418 - DNA, 26 bp, Homo sapiens
ggttgatgcgggggctgacagaggcc

SEQ ID NO: 99419 - DNA, 26 bp, Homo sapiens
gttgatgcgggggctgacagaggccc

SEQ ID NO: 99420 - DNA, 26 bp, Homo sapiens
ttgatgcgggggctgacagaggccca

SEQ ID NO: 99421 - DNA, 26 bp, Homo sapiens
tgatgcgggggctgacagaggcccac

SEQ ID NO: 99422 - DNA, 26 bp, Homo sapiens
gatgcgggggctgacagaggcccaca

SEQ ID NO: 99423 - DNA, 26 bp, Homo sapiens
atgcgggggctgacagaggcccacaa

SEQ ID NO: 99424 - DNA, 26 bp, Homo sapiens
tgcgggggctgacagaggcccacaac

SEQ ID NO: 99425 - DNA, 26 bp, Homo sapiens
gcgggggctgacagaggcccacaacc

SEQ ID NO: 99426 - DNA, 26 bp, Homo sapiens
cgggggctgacagaggcccacaacca

SEQ ID NO: 99427 - DNA, 26 bp, Homo sapiens
gggggctgacagaggcccacaaccag

SEQ ID NO: 99428 - DNA, 26 bp, Homo sapiens
ggggctgacagaggcccacaaccagt

SEQ ID NO: 99429 - DNA, 26 bp, Homo sapiens
gggctgacagaggcccacaaccagta

SEQ ID NO: 99430 - DNA, 26 bp, Homo sapiens
ggctgacagaggcccacaaccagtag

SEQ ID NO: 99431 - DNA, 26 bp, Homo sapiens
gctgacagaggcccacaaccagtagg

SEQ ID NO: 99432 - DNA, 26 bp, Homo sapiens
ctgacagaggcccacaaccagtaggg

SEQ ID NO: 99433 - DNA, 26 bp, Homo sapiens
tgacagaggcccacaaccagtagggc

SEQ ID NO: 99434 - DNA, 26 bp, Homo sapiens
gacagaggcccacaaccagtagggca

SEQ ID NO: 99435 - DNA, 26 bp, Homo sapiens
acagaggcccacaaccagtagggcac

SEQ ID NO: 99436 - DNA, 26 bp, Homo sapiens
cagaggcccacaaccagtagggcacc

SEQ ID NO: 99437 - DNA, 26 bp, Homo sapiens
agaggcccacaaccagtagggcacct

SEQ ID NO: 99438 - DNA, 26 bp, Homo sapiens
gaggcccacaaccagtagggcacctg

SEQ ID NO: 99439 - DNA, 26 bp, Homo sapiens
aggcccacaaccagtagggcacctgg

SEQ ID NO: 99440 - DNA, 26 bp, Homo sapiens
ggcccacaaccagtagggcacctggg

SEQ ID NO: 99441 - DNA, 26 bp, Homo sapiens
gcccacaaccagtagggcacctgggg

SEQ ID NO: 99442 - DNA, 26 bp, Homo sapiens
cccacaaccagtagggcacctggggg

SEQ ID NO: 99443 - DNA, 26 bp, Homo sapiens
ccacaaccagtagggcacctgggggc

SEQ ID NO: 99444 - DNA, 26 bp, Homo sapiens
cacaaccagtagggcacctgggggca

SEQ ID NO: 99445 - DNA, 26 bp, Homo sapiens
acaaccagtagggcacctgggggcac

SEQ ID NO: 99446 - DNA, 26 bp, Homo sapiens
caaccagtagggcacctgggggcacc

SEQ ID NO: 99447 - DNA, 26 bp, Homo sapiens
aaccagtagggcacctgggggcacct

SEQ ID NO: 99448 - DNA, 26 bp, Homo sapiens
accagtagggcacctgggggcacctc

SEQ ID NO: 99449 - DNA, 26 bp, Homo sapiens
ccagtagggcacctgggggcacctca

SEQ ID NO: 99450 - DNA, 26 bp, Homo sapiens
cagtagggcacctgggggcacctcag

SEQ ID NO: 99451 - DNA, 26 bp, Homo sapiens
agtagggcacctgggggcacctcagg

SEQ ID NO: 99452 - DNA, 26 bp, Homo sapiens
gtagggcacctgggggcacctcaggg

SEQ ID NO: 99453 - DNA, 26 bp, Homo sapiens
tagggcacctgggggcacctcagggc

SEQ ID NO: 99454 - DNA, 26 bp, Homo sapiens
agggcacctgggggcacctcagggct

SEQ ID NO: 99455 - DNA, 26 bp, Homo sapiens
gggcacctgggggcacctcagggcta

SEQ ID NO: 99456 - DNA, 26 bp, Homo sapiens
ggcacctgggggcacctcagggctac

SEQ ID NO: 99457 - DNA, 26 bp, Homo sapiens
gcacctgggggcacctcagggctaca

SEQ ID NO: 99458 - DNA, 26 bp, Homo sapiens
cacctgggggcacctcagggctacag

SEQ ID NO: 99459 - DNA, 26 bp, Homo sapiens
acctgggggcacctcagggctacagg

SEQ ID NO: 99460 - DNA, 26 bp, Homo sapiens
cctgggggcacctcagggctacaggc

SEQ ID NO: 99461 - DNA, 26 bp, Homo sapiens
ctgggggcacctcagggctacaggct

SEQ ID NO: 99462 - DNA, 26 bp, Homo sapiens
tgggggcacctcagggctacaggctc

SEQ ID NO: 99463 - DNA, 26 bp, Homo sapiens
gggggcacctcagggctacaggctcc

SEQ ID NO: 99464 - DNA, 26 bp, Homo sapiens
ggggcacctcagggctacaggctccc

SEQ ID NO: 99465 - DNA, 26 bp, Homo sapiens
gggcacctcagggctacaggctcccc

SEQ ID NO: 99466 - DNA, 26 bp, Homo sapiens
ggcacctcagggctacaggctcccct

SEQ ID NO: 99467 - DNA, 26 bp, Homo sapiens
gcacctcagggctacaggctcccctt

SEQ ID NO: 99468 - DNA, 26 bp, Homo sapiens
cacctcagggctacaggctccccttc

SEQ ID NO: 99469 - DNA, 26 bp, Homo sapiens
acctcagggctacaggctccccttcc

SEQ ID NO: 99470 - DNA, 26 bp, Homo sapiens
cctcagggctacaggctccccttcca

SEQ ID NO: 99471 - DNA, 26 bp, Homo sapiens
ctcagggctacaggctccccttccag

SEQ ID NO: 99472 - DNA, 26 bp, Homo sapiens
tcagggctacaggctccccttccagc

SEQ ID NO: 99473 - DNA, 26 bp, Homo sapiens
cagggctacaggctccccttccagcc

SEQ ID NO: 99474 - DNA, 26 bp, Homo sapiens
agggctacaggctccccttccagcct

SEQ ID NO: 99475 - DNA, 26 bp, Homo sapiens
gggctacaggctccccttccagcctg

SEQ ID NO: 99476 - DNA, 26 bp, Homo sapiens
ggctacaggctccccttccagcctga

SEQ ID NO: 99477 - DNA, 26 bp, Homo sapiens
gctacaggctccccttccagcctgaa

SEQ ID NO: 99478 - DNA, 26 bp, Homo sapiens
ctacaggctccccttccagcctgaac

SEQ ID NO: 99479 - DNA, 26 bp, Homo sapiens
tacaggctccccttccagcctgaact

SEQ ID NO: 99480 - DNA, 26 bp, Homo sapiens
acaggctccccttccagcctgaactc

SEQ ID NO: 99481 - DNA, 26 bp, Homo sapiens
caggctccccttccagcctgaactcc

SEQ ID NO: 99482 - DNA, 26 bp, Homo sapiens
aggctccccttccagcctgaactccc

SEQ ID NO: 99483 - DNA, 26 bp, Homo sapiens
ggctccccttccagcctgaactcccg

SEQ ID NO: 99484 - DNA, 26 bp, Homo sapiens
gctccccttccagcctgaactcccgc

SEQ ID NO: 99485 - DNA, 26 bp, Homo sapiens
ctccccttccagcctgaactcccgct

SEQ ID NO: 99486 - DNA, 26 bp, Homo sapiens
tccccttccagcctgaactcccgctt

SEQ ID NO: 99487 - DNA, 26 bp, Homo sapiens
ccccttccagcctgaactcccgcttg

SEQ ID NO: 99488 - DNA, 26 bp, Homo sapiens
cccttccagcctgaactcccgcttgt

SEQ ID NO: 99489 - DNA, 26 bp, Homo sapiens
ccttccagcctgaactcccgcttgta

SEQ ID NO: 99490 - DNA, 26 bp, Homo sapiens
cttccagcctgaactcccgcttgtaa

SEQ ID NO: 99491 - DNA, 26 bp, Homo sapiens
ttccagcctgaactcccgcttgtaat

SEQ ID NO: 99492 - DNA, 26 bp, Homo sapiens
tccagcctgaactcccgcttgtaatg

SEQ ID NO: 99493 - DNA, 26 bp, Homo sapiens
ccagcctgaactcccgcttgtaatgc

SEQ ID NO: 99494 - DNA, 26 bp, Homo sapiens
cagcctgaactcccgcttgtaatgcc

SEQ ID NO: 99495 - DNA, 26 bp, Homo sapiens
agcctgaactcccgcttgtaatgcct

SEQ ID NO: 99496 - DNA, 26 bp, Homo sapiens
gcctgaactcccgcttgtaatgcctc

SEQ ID NO: 99497 - DNA, 26 bp, Homo sapiens
cctgaactcccgcttgtaatgcctcc

SEQ ID NO: 99498 - DNA, 26 bp, Homo sapiens
ctgaactcccgcttgtaatgcctccc

SEQ ID NO: 99499 - DNA, 26 bp, Homo sapiens
tgaactcccgcttgtaatgcctccca

SEQ ID NO: 99500 - DNA, 26 bp, Homo sapiens
gaactcccgcttgtaatgcctcccac

SEQ ID NO: 99501 - DNA, 26 bp, Homo sapiens
aactcccgcttgtaatgcctcccacg

SEQ ID NO: 99502 - DNA, 26 bp, Homo sapiens
actcccgcttgtaatgcctcccacga

SEQ ID NO: 99503 - DNA, 26 bp, Homo sapiens
ctcccgcttgtaatgcctcccacgaa

SEQ ID NO: 99504 - DNA, 26 bp, Homo sapiens
tcccgcttgtaatgcctcccacgaaa

SEQ ID NO: 99505 - DNA, 26 bp, Homo sapiens
cccgcttgtaatgcctcccacgaaac

SEQ ID NO: 99506 - DNA, 26 bp, Homo sapiens
ccgcttgtaatgcctcccacgaaacc

SEQ ID NO: 99507 - DNA, 26 bp, Homo sapiens
cgcttgtaatgcctcccacgaaaccg

SEQ ID NO: 99508 - DNA, 26 bp, Homo sapiens
gcttgtaatgcctcccacgaaaccgg

SEQ ID NO: 99509 - DNA, 26 bp, Homo sapiens
cttgtaatgcctcccacgaaaccggc

SEQ ID NO: 99510 - DNA, 26 bp, Homo sapiens
ttgtaatgcctcccacgaaaccggca

SEQ ID NO: 99511 - DNA, 26 bp, Homo sapiens
tgtaatgcctcccacgaaaccggcag

SEQ ID NO: 99512 - DNA, 26 bp, Homo sapiens
gtaatgcctcccacgaaaccggcagc

SEQ ID NO: 99513 - DNA, 26 bp, Homo sapiens
taatgcctcccacgaaaccggcagct

SEQ ID NO: 99514 - DNA, 26 bp, Homo sapiens
aatgcctcccacgaaaccggcagctt

SEQ ID NO: 99515 - DNA, 26 bp, Homo sapiens
atgcctcccacgaaaccggcagcttc

SEQ ID NO: 99516 - DNA, 26 bp, Homo sapiens
tgcctcccacgaaaccggcagcttct

SEQ ID NO: 99517 - DNA, 26 bp, Homo sapiens
gcctcccacgaaaccggcagcttctg

SEQ ID NO: 99518 - DNA, 26 bp, Homo sapiens
cctcccacgaaaccggcagcttctgg

SEQ ID NO: 99519 - DNA, 26 bp, Homo sapiens
ctcccacgaaaccggcagcttctggc

SEQ ID NO: 99520 - DNA, 26 bp, Homo sapiens
tcccacgaaaccggcagcttctggca

SEQ ID NO: 99521 - DNA, 26 bp, Homo sapiens
cccacgaaaccggcagcttctggcag

SEQ ID NO: 99522 - DNA, 26 bp, Homo sapiens
ccacgaaaccggcagcttctggcagc

SEQ ID NO: 99523 - DNA, 26 bp, Homo sapiens
cacgaaaccggcagcttctggcagcc

SEQ ID NO: 99524 - DNA, 26 bp, Homo sapiens
acgaaaccggcagcttctggcagccc

SEQ ID NO: 99525 - DNA, 26 bp, Homo sapiens
cgaaaccggcagcttctggcagcccc

SEQ ID NO: 99526 - DNA, 26 bp, Homo sapiens
gaaaccggcagcttctggcagcccct

SEQ ID NO: 99527 - DNA, 26 bp, Homo sapiens
aaaccggcagcttctggcagcccctg

SEQ ID NO: 99528 - DNA, 26 bp, Homo sapiens
aaccggcagcttctggcagcccctgt

SEQ ID NO: 99529 - DNA, 26 bp, Homo sapiens
accggcagcttctggcagcccctgtg

SEQ ID NO: 99530 - DNA, 26 bp, Homo sapiens
ccggcagcttctggcagcccctgtgt

SEQ ID NO: 99531 - DNA, 26 bp, Homo sapiens
cggcagcttctggcagcccctgtgtg

SEQ ID NO: 99532 - DNA, 26 bp, Homo sapiens
ggcagcttctggcagcccctgtgtgt

SEQ ID NO: 99533 - DNA, 26 bp, Homo sapiens
gcagcttctggcagcccctgtgtgtg

SEQ ID NO: 99534 - DNA, 26 bp, Homo sapiens
cagcttctggcagcccctgtgtgtgc

SEQ ID NO: 99535 - DNA, 26 bp, Homo sapiens
agcttctggcagcccctgtgtgtgcc

SEQ ID NO: 99536 - DNA, 26 bp, Homo sapiens
gcttctggcagcccctgtgtgtgccg

SEQ ID NO: 99537 - DNA, 26 bp, Homo sapiens
cttctggcagcccctgtgtgtgccgc

SEQ ID NO: 99538 - DNA, 26 bp, Homo sapiens
ttctggcagcccctgtgtgtgccgca

SEQ ID NO: 99539 - DNA, 26 bp, Homo sapiens
tctggcagcccctgtgtgtgccgcag

SEQ ID NO: 99540 - DNA, 26 bp, Homo sapiens
ctggcagcccctgtgtgtgccgcagg

SEQ ID NO: 99541 - DNA, 26 bp, Homo sapiens
tggcagcccctgtgtgtgccgcaggc

SEQ ID NO: 99542 - DNA, 26 bp, Homo sapiens
ggcagcccctgtgtgtgccgcaggct

SEQ ID NO: 99543 - DNA, 26 bp, Homo sapiens
gcagcccctgtgtgtgccgcaggctg

SEQ ID NO: 99544 - DNA, 26 bp, Homo sapiens
cagcccctgtgtgtgccgcaggctga

SEQ ID NO: 99545 - DNA, 26 bp, Homo sapiens
agcccctgtgtgtgccgcaggctgaa

SEQ ID NO: 99546 - DNA, 26 bp, Homo sapiens
gcccctgtgtgtgccgcaggctgaag

SEQ ID NO: 99547 - DNA, 26 bp, Homo sapiens
cccctgtgtgtgccgcaggctgaagg

SEQ ID NO: 99548 - DNA, 26 bp, Homo sapiens
ccctgtgtgtgccgcaggctgaaggg

SEQ ID NO: 99549 - DNA, 26 bp, Homo sapiens
cctgtgtgtgccgcaggctgaagggt

SEQ ID NO: 99550 - DNA, 26 bp, Homo sapiens
ctgtgtgtgccgcaggctgaagggtg

SEQ ID NO: 99551 - DNA, 26 bp, Homo sapiens
tgtgtgtgccgcaggctgaagggtga

SEQ ID NO: 99552 - DNA, 26 bp, Homo sapiens
gtgtgtgccgcaggctgaagggtgaa

SEQ ID NO: 99553 - DNA, 26 bp, Homo sapiens
tgtgtgccgcaggctgaagggtgaag

SEQ ID NO: 99554 - DNA, 26 bp, Homo sapiens
gtgtgccgcaggctgaagggtgaagg

SEQ ID NO: 99555 - DNA, 26 bp, Homo sapiens
tgtgccgcaggctgaagggtgaaggc

SEQ ID NO: 99556 - DNA, 26 bp, Homo sapiens
gtgccgcaggctgaagggtgaaggca

SEQ ID NO: 99557 - DNA, 26 bp, Homo sapiens
tgccgcaggctgaagggtgaaggcag

SEQ ID NO: 99558 - DNA, 26 bp, Homo sapiens
gccgcaggctgaagggtgaaggcaga

SEQ ID NO: 99559 - DNA, 26 bp, Homo sapiens
ccgcaggctgaagggtgaaggcagaa

SEQ ID NO: 99560 - DNA, 26 bp, Homo sapiens
cgcaggctgaagggtgaaggcagaaa

SEQ ID NO: 99561 - DNA, 26 bp, Homo sapiens
gcaggctgaagggtgaaggcagaaac

SEQ ID NO: 99562 - DNA, 26 bp, Homo sapiens
caggctgaagggtgaaggcagaaact

SEQ ID NO: 99563 - DNA, 26 bp, Homo sapiens
aggctgaagggtgaaggcagaaactc

SEQ ID NO: 99564 - DNA, 26 bp, Homo sapiens
ggctgaagggtgaaggcagaaactcc

SEQ ID NO: 99565 - DNA, 26 bp, Homo sapiens
gctgaagggtgaaggcagaaactccc

SEQ ID NO: 99566 - DNA, 26 bp, Homo sapiens
ctgaagggtgaaggcagaaactccca

SEQ ID NO: 99567 - DNA, 26 bp, Homo sapiens
tgaagggtgaaggcagaaactcccat

SEQ ID NO: 99568 - DNA, 26 bp, Homo sapiens
gaagggtgaaggcagaaactcccatt

SEQ ID NO: 99569 - DNA, 26 bp, Homo sapiens
aagggtgaaggcagaaactcccatta

SEQ ID NO: 99570 - DNA, 26 bp, Homo sapiens
agggtgaaggcagaaactcccattac

SEQ ID NO: 99571 - DNA, 26 bp, Homo sapiens
gggtgaaggcagaaactcccattacc

SEQ ID NO: 99572 - DNA, 26 bp, Homo sapiens
ggtgaaggcagaaactcccattacca

SEQ ID NO: 99573 - DNA, 26 bp, Homo sapiens
gtgaaggcagaaactcccattaccaa

SEQ ID NO: 99574 - DNA, 26 bp, Homo sapiens
tgaaggcagaaactcccattaccaac

SEQ ID NO: 99575 - DNA, 26 bp, Homo sapiens
gaaggcagaaactcccattaccaaca

SEQ ID NO: 99576 - DNA, 26 bp, Homo sapiens
aaggcagaaactcccattaccaacac

SEQ ID NO: 99577 - DNA, 26 bp, Homo sapiens
aggcagaaactcccattaccaacacg

SEQ ID NO: 99578 - DNA, 26 bp, Homo sapiens
ggcagaaactcccattaccaacacgt

SEQ ID NO: 99579 - DNA, 26 bp, Homo sapiens
gcagaaactcccattaccaacacgta

SEQ ID NO: 99580 - DNA, 26 bp, Homo sapiens
cagaaactcccattaccaacacgtac

SEQ ID NO: 99581 - DNA, 26 bp, Homo sapiens
agaaactcccattaccaacacgtaca

SEQ ID NO: 99582 - DNA, 26 bp, Homo sapiens
gaaactcccattaccaacacgtacaa

SEQ ID NO: 99583 - DNA, 26 bp, Homo sapiens
aaactcccattaccaacacgtacaag

SEQ ID NO: 99584 - DNA, 26 bp, Homo sapiens
aactcccattaccaacacgtacaagc

SEQ ID NO: 99585 - DNA, 26 bp, Homo sapiens
actcccattaccaacacgtacaagcg

SEQ ID NO: 99586 - DNA, 26 bp, Homo sapiens
ctcccattaccaacacgtacaagcgc

SEQ ID NO: 99587 - DNA, 26 bp, Homo sapiens
tcccattaccaacacgtacaagcgca

SEQ ID NO: 99588 - DNA, 26 bp, Homo sapiens
cccattaccaacacgtacaagcgcaa

SEQ ID NO: 99589 - DNA, 26 bp, Homo sapiens
ccattaccaacacgtacaagcgcaac

SEQ ID NO: 99590 - DNA, 26 bp, Homo sapiens
cattaccaacacgtacaagcgcaaca

SEQ ID NO: 99591 - DNA, 26 bp, Homo sapiens
attaccaacacgtacaagcgcaacat

SEQ ID NO: 99592 - DNA, 26 bp, Homo sapiens
ttaccaacacgtacaagcgcaacatt

SEQ ID NO: 99593 - DNA, 26 bp, Homo sapiens
taccaacacgtacaagcgcaacattg

SEQ ID NO: 99594 - DNA, 26 bp, Homo sapiens
accaacacgtacaagcgcaacattgc

SEQ ID NO: 99595 - DNA, 26 bp, Homo sapiens
ccaacacgtacaagcgcaacattgct

SEQ ID NO: 99596 - DNA, 26 bp, Homo sapiens
caacacgtacaagcgcaacattgctc

SEQ ID NO: 99597 - DNA, 26 bp, Homo sapiens
aacacgtacaagcgcaacattgctcc

SEQ ID NO: 99598 - DNA, 26 bp, Homo sapiens
acacgtacaagcgcaacattgctcct

SEQ ID NO: 99599 - DNA, 26 bp, Homo sapiens
cacgtacaagcgcaacattgctcctg

SEQ ID NO: 99600 - DNA, 26 bp, Homo sapiens
acgtacaagcgcaacattgctcctga

SEQ ID NO: 99601 - DNA, 26 bp, Homo sapiens
cgtacaagcgcaacattgctcctgac

SEQ ID NO: 99602 - DNA, 26 bp, Homo sapiens
gtacaagcgcaacattgctcctgaca

SEQ ID NO: 99603 - DNA, 26 bp, Homo sapiens
tacaagcgcaacattgctcctgacaa

SEQ ID NO: 99604 - DNA, 26 bp, Homo sapiens
acaagcgcaacattgctcctgacaac

SEQ ID NO: 99605 - DNA, 26 bp, Homo sapiens
caagcgcaacattgctcctgacaact

SEQ ID NO: 99606 - DNA, 26 bp, Homo sapiens
aagcgcaacattgctcctgacaactt

SEQ ID NO: 99607 - DNA, 26 bp, Homo sapiens
agcgcaacattgctcctgacaacttc

SEQ ID NO: 99608 - DNA, 26 bp, Homo sapiens
gcgcaacattgctcctgacaacttcc

SEQ ID NO: 99609 - DNA, 26 bp, Homo sapiens
cgcaacattgctcctgacaacttcca

SEQ ID NO: 99610 - DNA, 26 bp, Homo sapiens
gcaacattgctcctgacaacttccag

SEQ ID NO: 99611 - DNA, 26 bp, Homo sapiens
caacattgctcctgacaacttccaga

SEQ ID NO: 99612 - DNA, 26 bp, Homo sapiens
aacattgctcctgacaacttccagag

SEQ ID NO: 99613 - DNA, 26 bp, Homo sapiens
acattgctcctgacaacttccagagg

SEQ ID NO: 99614 - DNA, 26 bp, Homo sapiens
cattgctcctgacaacttccagagga

SEQ ID NO: 99615 - DNA, 26 bp, Homo sapiens
attgctcctgacaacttccagaggac

SEQ ID NO: 99616 - DNA, 26 bp, Homo sapiens
ttgctcctgacaacttccagaggaca

SEQ ID NO: 99617 - DNA, 26 bp, Homo sapiens
tgctcctgacaacttccagaggacac

SEQ ID NO: 99618 - DNA, 26 bp, Homo sapiens
gctcctgacaacttccagaggacacg

SEQ ID NO: 99619 - DNA, 26 bp, Homo sapiens
ctcctgacaacttccagaggacacgg

SEQ ID NO: 99620 - DNA, 26 bp, Homo sapiens
tcctgacaacttccagaggacacggg

SEQ ID NO: 99621 - DNA, 26 bp, Homo sapiens
cctgacaacttccagaggacacggga

SEQ ID NO: 99622 - DNA, 26 bp, Homo sapiens
ctgacaacttccagaggacacgggaa

SEQ ID NO: 99623 - DNA, 26 bp, Homo sapiens
tgacaacttccagaggacacgggaag

SEQ ID NO: 99624 - DNA, 26 bp, Homo sapiens
gacaacttccagaggacacgggaagt

SEQ ID NO: 99625 - DNA, 26 bp, Homo sapiens
acaacttccagaggacacgggaagtg

SEQ ID NO: 99626 - DNA, 26 bp, Homo sapiens
caacttccagaggacacgggaagtgg

SEQ ID NO: 99627 - DNA, 26 bp, Homo sapiens
aacttccagaggacacgggaagtgga

SEQ ID NO: 99628 - DNA, 26 bp, Homo sapiens
acttccagaggacacgggaagtggag

SEQ ID NO: 99629 - DNA, 26 bp, Homo sapiens
cttccagaggacacgggaagtggagg

SEQ ID NO: 99630 - DNA, 26 bp, Homo sapiens
ttccagaggacacgggaagtggagga

SEQ ID NO: 99631 - DNA, 26 bp, Homo sapiens
tccagaggacacgggaagtggaggac

SEQ ID NO: 99632 - DNA, 26 bp, Homo sapiens
ccagaggacacgggaagtggaggact

SEQ ID NO: 99633 - DNA, 26 bp, Homo sapiens
cagaggacacgggaagtggaggactg

SEQ ID NO: 99634 - DNA, 26 bp, Homo sapiens
agaggacacgggaagtggaggactga

SEQ ID NO: 99635 - DNA, 26 bp, Homo sapiens
gaggacacgggaagtggaggactgag

SEQ ID NO: 99636 - DNA, 26 bp, Homo sapiens
aggacacgggaagtggaggactgaga

SEQ ID NO: 99637 - DNA, 26 bp, Homo sapiens
ggacacgggaagtggaggactgagac

SEQ ID NO: 99638 - DNA, 26 bp, Homo sapiens
gacacgggaagtggaggactgagacc

SEQ ID NO: 99639 - DNA, 26 bp, Homo sapiens
acacgggaagtggaggactgagaccc

SEQ ID NO: 99640 - DNA, 26 bp, Homo sapiens
cacgggaagtggaggactgagaccca

SEQ ID NO: 99641 - DNA, 26 bp, Homo sapiens
acgggaagtggaggactgagacccag

SEQ ID NO: 99642 - DNA, 26 bp, Homo sapiens
cgggaagtggaggactgagacccagc

SEQ ID NO: 99643 - DNA, 26 bp, Homo sapiens
gggaagtggaggactgagacccagca

SEQ ID NO: 99644 - DNA, 26 bp, Homo sapiens
ggaagtggaggactgagacccagcag

SEQ ID NO: 99645 - DNA, 26 bp, Homo sapiens
gaagtggaggactgagacccagcagc

SEQ ID NO: 99646 - DNA, 26 bp, Homo sapiens
aagtggaggactgagacccagcagca

SEQ ID NO: 99647 - DNA, 26 bp, Homo sapiens
agtggaggactgagacccagcagcac

SEQ ID NO: 99648 - DNA, 26 bp, Homo sapiens
gtggaggactgagacccagcagcacg

SEQ ID NO: 99649 - DNA, 26 bp, Homo sapiens
tggaggactgagacccagcagcacgt

SEQ ID NO: 99650 - DNA, 26 bp, Homo sapiens
ggaggactgagacccagcagcacgtg

SEQ ID NO: 99651 - DNA, 26 bp, Homo sapiens
gaggactgagacccagcagcacgtgg

SEQ ID NO: 99652 - DNA, 26 bp, Homo sapiens
aggactgagacccagcagcacgtggc

SEQ ID NO: 99653 - DNA, 26 bp, Homo sapiens
ggactgagacccagcagcacgtggcc

SEQ ID NO: 99654 - DNA, 26 bp, Homo sapiens
gactgagacccagcagcacgtggcct

SEQ ID NO: 99655 - DNA, 26 bp, Homo sapiens
actgagacccagcagcacgtggcctt

SEQ ID NO: 99656 - DNA, 26 bp, Homo sapiens
ctgagacccagcagcacgtggccttg

SEQ ID NO: 99657 - DNA, 26 bp, Homo sapiens
tgagacccagcagcacgtggccttgt

SEQ ID NO: 99658 - DNA, 26 bp, Homo sapiens
gagacccagcagcacgtggccttgtt

SEQ ID NO: 99659 - DNA, 26 bp, Homo sapiens
agacccagcagcacgtggccttgttg

SEQ ID NO: 99660 - DNA, 26 bp, Homo sapiens
gacccagcagcacgtggccttgttgc

SEQ ID NO: 99661 - DNA, 26 bp, Homo sapiens
acccagcagcacgtggccttgttgct

SEQ ID NO: 99662 - DNA, 26 bp, Homo sapiens
cccagcagcacgtggccttgttgctg

SEQ ID NO: 99663 - DNA, 26 bp, Homo sapiens
ccagcagcacgtggccttgttgctgc

SEQ ID NO: 99664 - DNA, 26 bp, Homo sapiens
cagcagcacgtggccttgttgctgct

SEQ ID NO: 99665 - DNA, 26 bp, Homo sapiens
agcagcacgtggccttgttgctgctc

SEQ ID NO: 99666 - DNA, 26 bp, Homo sapiens
gcagcacgtggccttgttgctgctca

SEQ ID NO: 99667 - DNA, 26 bp, Homo sapiens
cagcacgtggccttgttgctgctcac

SEQ ID NO: 99668 - DNA, 26 bp, Homo sapiens
agcacgtggccttgttgctgctcacc

SEQ ID NO: 99669 - DNA, 26 bp, Homo sapiens
gcacgtggccttgttgctgctcacct

SEQ ID NO: 99670 - DNA, 26 bp, Homo sapiens
cacgtggccttgttgctgctcacctg

SEQ ID NO: 99671 - DNA, 26 bp, Homo sapiens
acgtggccttgttgctgctcacctgg

SEQ ID NO: 99672 - DNA, 26 bp, Homo sapiens
cgtggccttgttgctgctcacctggg

SEQ ID NO: 99673 - DNA, 26 bp, Homo sapiens
gtggccttgttgctgctcacctgggg

SEQ ID NO: 99674 - DNA, 26 bp, Homo sapiens
tggccttgttgctgctcacctgggga

SEQ ID NO: 99675 - DNA, 26 bp, Homo sapiens
ggccttgttgctgctcacctggggaa

SEQ ID NO: 99676 - DNA, 26 bp, Homo sapiens
gccttgttgctgctcacctggggaag

SEQ ID NO: 99677 - DNA, 26 bp, Homo sapiens
ccttgttgctgctcacctggggaagg

SEQ ID NO: 99678 - DNA, 26 bp, Homo sapiens
cttgttgctgctcacctggggaaggc

SEQ ID NO: 99679 - DNA, 26 bp, Homo sapiens
ttgttgctgctcacctggggaaggct

SEQ ID NO: 99680 - DNA, 26 bp, Homo sapiens
tgttgctgctcacctggggaaggctg

SEQ ID NO: 99681 - DNA, 26 bp, Homo sapiens
gttgctgctcacctggggaaggctgc

SEQ ID NO: 99682 - DNA, 26 bp, Homo sapiens
ttgctgctcacctggggaaggctgcc

SEQ ID NO: 99683 - DNA, 26 bp, Homo sapiens
tgctgctcacctggggaaggctgcca

SEQ ID NO: 99684 - DNA, 26 bp, Homo sapiens
gctgctcacctggggaaggctgccag

SEQ ID NO: 99685 - DNA, 26 bp, Homo sapiens
ctgctcacctggggaaggctgccagg

SEQ ID NO: 99686 - DNA, 26 bp, Homo sapiens
tgctcacctggggaaggctgccaggc

SEQ ID NO: 99687 - DNA, 26 bp, Homo sapiens
gctcacctggggaaggctgccaggcc

SEQ ID NO: 99688 - DNA, 26 bp, Homo sapiens
ctcacctggggaaggctgccaggcca

SEQ ID NO: 99689 - DNA, 26 bp, Homo sapiens
tcacctggggaaggctgccaggccag

SEQ ID NO: 99690 - DNA, 26 bp, Homo sapiens
cacctggggaaggctgccaggccaga

SEQ ID NO: 99691 - DNA, 26 bp, Homo sapiens
acctggggaaggctgccaggccagac

SEQ ID NO: 99692 - DNA, 26 bp, Homo sapiens
cctggggaaggctgccaggccagact

SEQ ID NO: 99693 - DNA, 26 bp, Homo sapiens
ctggggaaggctgccaggccagactt

SEQ ID NO: 99694 - DNA, 26 bp, Homo sapiens
tggggaaggctgccaggccagacttt

SEQ ID NO: 99695 - DNA, 26 bp, Homo sapiens
ggggaaggctgccaggccagactttc

SEQ ID NO: 99696 - DNA, 26 bp, Homo sapiens
gggaaggctgccaggccagactttca

SEQ ID NO: 99697 - DNA, 26 bp, Homo sapiens
ggaaggctgccaggccagactttcac

SEQ ID NO: 99698 - DNA, 26 bp, Homo sapiens
gaaggctgccaggccagactttcacc

SEQ ID NO: 99699 - DNA, 26 bp, Homo sapiens
aaggctgccaggccagactttcacct

SEQ ID NO: 99700 - DNA, 26 bp, Homo sapiens
aggctgccaggccagactttcacctc

SEQ ID NO: 99701 - DNA, 26 bp, Homo sapiens
ggctgccaggccagactttcacctcc

SEQ ID NO: 99702 - DNA, 26 bp, Homo sapiens
gctgccaggccagactttcacctcca

SEQ ID NO: 99703 - DNA, 26 bp, Homo sapiens
ctgccaggccagactttcacctccag

SEQ ID NO: 99704 - DNA, 26 bp, Homo sapiens
tgccaggccagactttcacctccagc

SEQ ID NO: 99705 - DNA, 26 bp, Homo sapiens
aatgtttgacttatcttttaatattt

SEQ ID NO: 99706 - DNA, 26 bp, Homo sapiens
atgtttgacttatcttttaatattta

SEQ ID NO: 99707 - DNA, 26 bp, Homo sapiens
tgtttgacttatcttttaatatttag

SEQ ID NO: 99708 - DNA, 26 bp, Homo sapiens
gtttgacttatcttttaatatttaga

SEQ ID NO: 99709 - DNA, 26 bp, Homo sapiens
tttgacttatcttttaatatttagat

SEQ ID NO: 99710 - DNA, 26 bp, Homo sapiens
ttgacttatcttttaatatttagata

SEQ ID NO: 99711 - DNA, 26 bp, Homo sapiens
tgacttatcttttaatatttagataa

SEQ ID NO: 99712 - DNA, 26 bp, Homo sapiens
gacttatcttttaatatttagataag

SEQ ID NO: 99713 - DNA, 26 bp, Homo sapiens
acttatcttttaatatttagataaga

SEQ ID NO: 99714 - DNA, 26 bp, Homo sapiens
cttatcttttaatatttagataagag

SEQ ID NO: 99715 - DNA, 26 bp, Homo sapiens
ttatcttttaatatttagataagaga

SEQ ID NO: 99716 - DNA, 26 bp, Homo sapiens
tatcttttaatatttagataagagat

SEQ ID NO: 99717 - DNA, 26 bp, Homo sapiens
atcttttaatatttagataagagatg

SEQ ID NO: 99718 - DNA, 26 bp, Homo sapiens
tcttttaatatttagataagagatga

SEQ ID NO: 99719 - DNA, 26 bp, Homo sapiens
cttttaatatttagataagagatgat

SEQ ID NO: 99720 - DNA, 26 bp, Homo sapiens
ttttaatatttagataagagatgata

SEQ ID NO: 99721 - DNA, 26 bp, Homo sapiens
tttaatatttagataagagatgatac

SEQ ID NO: 99722 - DNA, 26 bp, Homo sapiens
ttaatatttagataagagatgatact

SEQ ID NO: 99723 - DNA, 26 bp, Homo sapiens
taatatttagataagagatgatactt

SEQ ID NO: 99724 - DNA, 26 bp, Homo sapiens
aatatttagataagagatgatactta

SEQ ID NO: 99725 - DNA, 26 bp, Homo sapiens
atatttagataagagatgatacttaa

SEQ ID NO: 99726 - DNA, 26 bp, Homo sapiens
tatttagataagagatgatacttaac

SEQ ID NO: 99727 - DNA, 26 bp, Homo sapiens
atttagataagagatgatacttaaca

SEQ ID NO: 99728 - DNA, 26 bp, Homo sapiens
tttagataagagatgatacttaacat

SEQ ID NO: 99729 - DNA, 26 bp, Homo sapiens
ttagataagagatgatacttaacatt

SEQ ID NO: 99730 - DNA, 26 bp, Homo sapiens
tagataagagatgatacttaacattc

SEQ ID NO: 99731 - DNA, 26 bp, Homo sapiens
agataagagatgatacttaacattca

SEQ ID NO: 99732 - DNA, 26 bp, Homo sapiens
gataagagatgatacttaacattcac

SEQ ID NO: 99733 - DNA, 26 bp, Homo sapiens
ataagagatgatacttaacattcaca

SEQ ID NO: 99734 - DNA, 26 bp, Homo sapiens
taagagatgatacttaacattcacaa

SEQ ID NO: 99735 - DNA, 26 bp, Homo sapiens
aagagatgatacttaacattcacaag

SEQ ID NO: 99736 - DNA, 26 bp, Homo sapiens
agagatgatacttaacattcacaagt

SEQ ID NO: 99737 - DNA, 26 bp, Homo sapiens
gagatgatacttaacattcacaagtt

SEQ ID NO: 99738 - DNA, 26 bp, Homo sapiens
agatgatacttaacattcacaagtta

SEQ ID NO: 99739 - DNA, 26 bp, Homo sapiens
gatgatacttaacattcacaagttac

SEQ ID NO: 99740 - DNA, 26 bp, Homo sapiens
atgatacttaacattcacaagttact

SEQ ID NO: 99741 - DNA, 26 bp, Homo sapiens
tgatacttaacattcacaagttactg

SEQ ID NO: 99742 - DNA, 26 bp, Homo sapiens
gatacttaacattcacaagttactgt

SEQ ID NO: 99743 - DNA, 26 bp, Homo sapiens
atacttaacattcacaagttactgta

SEQ ID NO: 99744 - DNA, 26 bp, Homo sapiens
tacttaacattcacaagttactgtaa

SEQ ID NO: 99745 - DNA, 26 bp, Homo sapiens
acttaacattcacaagttactgtaaa

SEQ ID NO: 99746 - DNA, 26 bp, Homo sapiens
cttaacattcacaagttactgtaaat

SEQ ID NO: 99747 - DNA, 26 bp, Homo sapiens
ttaacattcacaagttactgtaaatg

SEQ ID NO: 99748 - DNA, 26 bp, Homo sapiens
taacattcacaagttactgtaaatgc

SEQ ID NO: 99749 - DNA, 26 bp, Homo sapiens
aacattcacaagttactgtaaatgct

SEQ ID NO: 99750 - DNA, 26 bp, Homo sapiens
acattcacaagttactgtaaatgctg

SEQ ID NO: 99751 - DNA, 26 bp, Homo sapiens
cattcacaagttactgtaaatgctgg

SEQ ID NO: 99752 - DNA, 26 bp, Homo sapiens
attcacaagttactgtaaatgctggg

SEQ ID NO: 99753 - DNA, 26 bp, Homo sapiens
ttcacaagttactgtaaatgctgggg

SEQ ID NO: 99754 - DNA, 26 bp, Homo sapiens
tcacaagttactgtaaatgctgggga

SEQ ID NO: 99755 - DNA, 26 bp, Homo sapiens
cacaagttactgtaaatgctggggac

SEQ ID NO: 99756 - DNA, 26 bp, Homo sapiens
acaagttactgtaaatgctggggacc

SEQ ID NO: 99757 - DNA, 26 bp, Homo sapiens
caagttactgtaaatgctggggacca

SEQ ID NO: 99758 - DNA, 26 bp, Homo sapiens
aagttactgtaaatgctggggaccat

SEQ ID NO: 99759 - DNA, 26 bp, Homo sapiens
agttactgtaaatgctggggaccata

SEQ ID NO: 99760 - DNA, 26 bp, Homo sapiens
gttactgtaaatgctggggaccataa

SEQ ID NO: 99761 - DNA, 26 bp, Homo sapiens
ttactgtaaatgctggggaccataag

SEQ ID NO: 99762 - DNA, 26 bp, Homo sapiens
tactgtaaatgctggggaccataagc

SEQ ID NO: 99763 - DNA, 26 bp, Homo sapiens
actgtaaatgctggggaccataagca

SEQ ID NO: 99764 - DNA, 26 bp, Homo sapiens
ctgtaaatgctggggaccataagcat

SEQ ID NO: 99765 - DNA, 26 bp, Homo sapiens
tgtaaatgctggggaccataagcatg

SEQ ID NO: 99766 - DNA, 26 bp, Homo sapiens
gtaaatgctggggaccataagcatgg

SEQ ID NO: 99767 - DNA, 26 bp, Homo sapiens
taaatgctggggaccataagcatggg

SEQ ID NO: 99768 - DNA, 26 bp, Homo sapiens
aaatgctggggaccataagcatgggg

SEQ ID NO: 99769 - DNA, 26 bp, Homo sapiens
aatgctggggaccataagcatggggc

SEQ ID NO: 99770 - DNA, 26 bp, Homo sapiens
atgctggggaccataagcatggggca

SEQ ID NO: 99771 - DNA, 26 bp, Homo sapiens
tgctggggaccataagcatggggcag

SEQ ID NO: 99772 - DNA, 26 bp, Homo sapiens
gctggggaccataagcatggggcagg

SEQ ID NO: 99773 - DNA, 26 bp, Homo sapiens
ctggggaccataagcatggggcaggc

SEQ ID NO: 99774 - DNA, 26 bp, Homo sapiens
tggggaccataagcatggggcaggcc

SEQ ID NO: 99775 - DNA, 26 bp, Homo sapiens
ggggaccataagcatggggcaggcca

SEQ ID NO: 99776 - DNA, 26 bp, Homo sapiens
gggaccataagcatggggcaggccac

SEQ ID NO: 99777 - DNA, 26 bp, Homo sapiens
ggaccataagcatggggcaggccacg

SEQ ID NO: 99778 - DNA, 26 bp, Homo sapiens
gaccataagcatggggcaggccacgg

SEQ ID NO: 99779 - DNA, 26 bp, Homo sapiens
accataagcatggggcaggccacggt

SEQ ID NO: 99780 - DNA, 26 bp, Homo sapiens
ccataagcatggggcaggccacggta

SEQ ID NO: 99781 - DNA, 26 bp, Homo sapiens
cataagcatggggcaggccacggtaa

SEQ ID NO: 99782 - DNA, 26 bp, Homo sapiens
ataagcatggggcaggccacggtaaa

SEQ ID NO: 99783 - DNA, 26 bp, Homo sapiens
taagcatggggcaggccacggtaaag

SEQ ID NO: 99784 - DNA, 26 bp, Homo sapiens
aagcatggggcaggccacggtaaaga

SEQ ID NO: 99785 - DNA, 26 bp, Homo sapiens
agcatggggcaggccacggtaaagat

SEQ ID NO: 99786 - DNA, 26 bp, Homo sapiens
gcatggggcaggccacggtaaagatc

SEQ ID NO: 99787 - DNA, 26 bp, Homo sapiens
catggggcaggccacggtaaagatca

SEQ ID NO: 99788 - DNA, 26 bp, Homo sapiens
atggggcaggccacggtaaagatcat

SEQ ID NO: 99789 - DNA, 26 bp, Homo sapiens
tggggcaggccacggtaaagatcatt

SEQ ID NO: 99790 - DNA, 26 bp, Homo sapiens
ggggcaggccacggtaaagatcattt

SEQ ID NO: 99791 - DNA, 26 bp, Homo sapiens
gggcaggccacggtaaagatcatttt

SEQ ID NO: 99792 - DNA, 26 bp, Homo sapiens
ggcaggccacggtaaagatcattttg

SEQ ID NO: 99793 - DNA, 26 bp, Homo sapiens
gcaggccacggtaaagatcattttga

SEQ ID NO: 99794 - DNA, 26 bp, Homo sapiens
caggccacggtaaagatcattttgaa

SEQ ID NO: 99795 - DNA, 26 bp, Homo sapiens
aggccacggtaaagatcattttgaat

SEQ ID NO: 99796 - DNA, 26 bp, Homo sapiens
ggccacggtaaagatcattttgaatg

SEQ ID NO: 99797 - DNA, 26 bp, Homo sapiens
gccacggtaaagatcattttgaatgg

SEQ ID NO: 99798 - DNA, 26 bp, Homo sapiens
ccacggtaaagatcattttgaatggg

SEQ ID NO: 99799 - DNA, 26 bp, Homo sapiens
cacggtaaagatcattttgaatgggc

SEQ ID NO: 99800 - DNA, 26 bp, Homo sapiens
acggtaaagatcattttgaatgggca

SEQ ID NO: 99801 - DNA, 26 bp, Homo sapiens
cggtaaagatcattttgaatgggcaa

SEQ ID NO: 99802 - DNA, 26 bp, Homo sapiens
ggtaaagatcattttgaatgggcaag

SEQ ID NO: 99803 - DNA, 26 bp, Homo sapiens
gtaaagatcattttgaatgggcaagt

SEQ ID NO: 99804 - DNA, 26 bp, Homo sapiens
taaagatcattttgaatgggcaagtc

SEQ ID NO: 99805 - DNA, 26 bp, Homo sapiens
aaagatcattttgaatgggcaagtct

SEQ ID NO: 99806 - DNA, 26 bp, Homo sapiens
aagatcattttgaatgggcaagtctt

SEQ ID NO: 99807 - DNA, 26 bp, Homo sapiens
agatcattttgaatgggcaagtcttt

SEQ ID NO: 99808 - DNA, 26 bp, Homo sapiens
gatcattttgaatgggcaagtctttc

SEQ ID NO: 99809 - DNA, 26 bp, Homo sapiens
atcattttgaatgggcaagtctttca

SEQ ID NO: 99810 - DNA, 26 bp, Homo sapiens
tcattttgaatgggcaagtctttcaa

SEQ ID NO: 99811 - DNA, 26 bp, Homo sapiens
cattttgaatgggcaagtctttcaat

SEQ ID NO: 99812 - DNA, 26 bp, Homo sapiens
attttgaatgggcaagtctttcaatt

SEQ ID NO: 99813 - DNA, 26 bp, Homo sapiens
ttttgaatgggcaagtctttcaattt

SEQ ID NO: 99814 - DNA, 26 bp, Homo sapiens
tttgaatgggcaagtctttcaatttc

SEQ ID NO: 99815 - DNA, 26 bp, Homo sapiens
ttgaatgggcaagtctttcaatttcc

SEQ ID NO: 99816 - DNA, 26 bp, Homo sapiens
tgaatgggcaagtctttcaatttccc

SEQ ID NO: 99817 - DNA, 26 bp, Homo sapiens
gaatgggcaagtctttcaatttccct

SEQ ID NO: 99818 - DNA, 26 bp, Homo sapiens
aatgggcaagtctttcaatttccctt

SEQ ID NO: 99819 - DNA, 26 bp, Homo sapiens
atgggcaagtctttcaatttccctta

SEQ ID NO: 99820 - DNA, 26 bp, Homo sapiens
tgggcaagtctttcaatttcccttac

SEQ ID NO: 99821 - DNA, 26 bp, Homo sapiens
gggcaagtctttcaatttcccttaca

SEQ ID NO: 99822 - DNA, 26 bp, Homo sapiens
ggcaagtctttcaatttcccttacat

SEQ ID NO: 99823 - DNA, 26 bp, Homo sapiens
gcaagtctttcaatttcccttacatc

SEQ ID NO: 99824 - DNA, 26 bp, Homo sapiens
caagtctttcaatttcccttacatca

SEQ ID NO: 99825 - DNA, 26 bp, Homo sapiens
aagtctttcaatttcccttacatcac

SEQ ID NO: 99826 - DNA, 26 bp, Homo sapiens
agtctttcaatttcccttacatcaca

SEQ ID NO: 99827 - DNA, 26 bp, Homo sapiens
gtctttcaatttcccttacatcacac

SEQ ID NO: 99828 - DNA, 26 bp, Homo sapiens
tctttcaatttcccttacatcacacc

SEQ ID NO: 99829 - DNA, 26 bp, Homo sapiens
ctttcaatttcccttacatcacacca

SEQ ID NO: 99830 - DNA, 26 bp, Homo sapiens
tttcaatttcccttacatcacaccaa

SEQ ID NO: 99831 - DNA, 26 bp, Homo sapiens
ttcaatttcccttacatcacaccaag

SEQ ID NO: 99832 - DNA, 26 bp, Homo sapiens
tcaatttcccttacatcacaccaagc

SEQ ID NO: 99833 - DNA, 26 bp, Homo sapiens
caatttcccttacatcacaccaagca

SEQ ID NO: 99834 - DNA, 26 bp, Homo sapiens
aatttcccttacatcacaccaagcag

SEQ ID NO: 99835 - DNA, 26 bp, Homo sapiens
atttcccttacatcacaccaagcagg

SEQ ID NO: 99836 - DNA, 26 bp, Homo sapiens
tttcccttacatcacaccaagcaggc

SEQ ID NO: 99837 - DNA, 26 bp, Homo sapiens
ttcccttacatcacaccaagcaggca

SEQ ID NO: 99838 - DNA, 26 bp, Homo sapiens
tcccttacatcacaccaagcaggcaa

SEQ ID NO: 99839 - DNA, 26 bp, Homo sapiens
cccttacatcacaccaagcaggcaaa

SEQ ID NO: 99840 - DNA, 26 bp, Homo sapiens
ccttacatcacaccaagcaggcaaag

SEQ ID NO: 99841 - DNA, 26 bp, Homo sapiens
cttacatcacaccaagcaggcaaagc

SEQ ID NO: 99842 - DNA, 26 bp, Homo sapiens
ttacatcacaccaagcaggcaaagcc

SEQ ID NO: 99843 - DNA, 26 bp, Homo sapiens
tacatcacaccaagcaggcaaagcct

SEQ ID NO: 99844 - DNA, 26 bp, Homo sapiens
acatcacaccaagcaggcaaagccta

SEQ ID NO: 99845 - DNA, 26 bp, Homo sapiens
catcacaccaagcaggcaaagcctaa

SEQ ID NO: 99846 - DNA, 26 bp, Homo sapiens
atcacaccaagcaggcaaagcctaaa

SEQ ID NO: 99847 - DNA, 26 bp, Homo sapiens
tcacaccaagcaggcaaagcctaaat

SEQ ID NO: 99848 - DNA, 26 bp, Homo sapiens
cacaccaagcaggcaaagcctaaata

SEQ ID NO: 99849 - DNA, 26 bp, Homo sapiens
acaccaagcaggcaaagcctaaatac

SEQ ID NO: 99850 - DNA, 26 bp, Homo sapiens
caccaagcaggcaaagcctaaataca

SEQ ID NO: 99851 - DNA, 26 bp, Homo sapiens
accaagcaggcaaagcctaaatacag

SEQ ID NO: 99852 - DNA, 26 bp, Homo sapiens
ccaagcaggcaaagcctaaatacagg

SEQ ID NO: 99853 - DNA, 26 bp, Homo sapiens
caagcaggcaaagcctaaatacaggg

SEQ ID NO: 99854 - DNA, 26 bp, Homo sapiens
aagcaggcaaagcctaaatacagggc

SEQ ID NO: 99855 - DNA, 26 bp, Homo sapiens
agcaggcaaagcctaaatacagggca

SEQ ID NO: 99856 - DNA, 26 bp, Homo sapiens
gcaggcaaagcctaaatacagggcag

SEQ ID NO: 99857 - DNA, 26 bp, Homo sapiens
caggcaaagcctaaatacagggcagg

SEQ ID NO: 99858 - DNA, 26 bp, Homo sapiens
aggcaaagcctaaatacagggcagga

SEQ ID NO: 99859 - DNA, 26 bp, Homo sapiens
ggcaaagcctaaatacagggcaggac

SEQ ID NO: 99860 - DNA, 26 bp, Homo sapiens
gcaaagcctaaatacagggcaggact

SEQ ID NO: 99861 - DNA, 26 bp, Homo sapiens
caaagcctaaatacagggcaggactt

SEQ ID NO: 99862 - DNA, 26 bp, Homo sapiens
aaagcctaaatacagggcaggacttg

SEQ ID NO: 99863 - DNA, 26 bp, Homo sapiens
aagcctaaatacagggcaggacttgc

SEQ ID NO: 99864 - DNA, 26 bp, Homo sapiens
agcctaaatacagggcaggacttgcc

SEQ ID NO: 99865 - DNA, 26 bp, Homo sapiens
gcctaaatacagggcaggacttgcct

SEQ ID NO: 99866 - DNA, 26 bp, Homo sapiens
cctaaatacagggcaggacttgccta

SEQ ID NO: 99867 - DNA, 26 bp, Homo sapiens
ctaaatacagggcaggacttgcctat

SEQ ID NO: 99868 - DNA, 26 bp, Homo sapiens
taaatacagggcaggacttgcctatg

SEQ ID NO: 99869 - DNA, 26 bp, Homo sapiens
aaatacagggcaggacttgcctatgt

SEQ ID NO: 99870 - DNA, 26 bp, Homo sapiens
aatacagggcaggacttgcctatgtg

SEQ ID NO: 99871 - DNA, 26 bp, Homo sapiens
atacagggcaggacttgcctatgtga

SEQ ID NO: 99872 - DNA, 26 bp, Homo sapiens
tacagggcaggacttgcctatgtgat

SEQ ID NO: 99873 - DNA, 26 bp, Homo sapiens
acagggcaggacttgcctatgtgatg

SEQ ID NO: 99874 - DNA, 26 bp, Homo sapiens
cagggcaggacttgcctatgtgatgt

SEQ ID NO: 99875 - DNA, 26 bp, Homo sapiens
agggcaggacttgcctatgtgatgta

SEQ ID NO: 99876 - DNA, 26 bp, Homo sapiens
gggcaggacttgcctatgtgatgtac

SEQ ID NO: 99877 - DNA, 26 bp, Homo sapiens
ggcaggacttgcctatgtgatgtacc

SEQ ID NO: 99878 - DNA, 26 bp, Homo sapiens
gcaggacttgcctatgtgatgtacca

SEQ ID NO: 99879 - DNA, 26 bp, Homo sapiens
caggacttgcctatgtgatgtaccat

SEQ ID NO: 99880 - DNA, 26 bp, Homo sapiens
aggacttgcctatgtgatgtaccatt

SEQ ID NO: 99881 - DNA, 26 bp, Homo sapiens
ggacttgcctatgtgatgtaccattc

SEQ ID NO: 99882 - DNA, 26 bp, Homo sapiens
gacttgcctatgtgatgtaccattcc

SEQ ID NO: 99883 - DNA, 26 bp, Homo sapiens
acttgcctatgtgatgtaccattcca

SEQ ID NO: 99884 - DNA, 26 bp, Homo sapiens
cttgcctatgtgatgtaccattccag

SEQ ID NO: 99885 - DNA, 26 bp, Homo sapiens
ttgcctatgtgatgtaccattccagc

SEQ ID NO: 99886 - DNA, 26 bp, Homo sapiens
tgcctatgtgatgtaccattccagcc

SEQ ID NO: 99887 - DNA, 26 bp, Homo sapiens
gcctatgtgatgtaccattccagccc

SEQ ID NO: 99888 - DNA, 26 bp, Homo sapiens
cctatgtgatgtaccattccagccct

SEQ ID NO: 99889 - DNA, 26 bp, Homo sapiens
ctatgtgatgtaccattccagccctc

SEQ ID NO: 99890 - DNA, 26 bp, Homo sapiens
tatgtgatgtaccattccagccctcc

SEQ ID NO: 99891 - DNA, 26 bp, Homo sapiens
atgtgatgtaccattccagccctcct

SEQ ID NO: 99892 - DNA, 26 bp, Homo sapiens
tgtgatgtaccattccagccctcctt

SEQ ID NO: 99893 - DNA, 26 bp, Homo sapiens
gtgatgtaccattccagccctccttt

SEQ ID NO: 99894 - DNA, 26 bp, Homo sapiens
tgatgtaccattccagccctcctttt

SEQ ID NO: 99895 - DNA, 26 bp, Homo sapiens
gatgtaccattccagccctccttttc

SEQ ID NO: 99896 - DNA, 26 bp, Homo sapiens
atgtaccattccagccctccttttca

SEQ ID NO: 99897 - DNA, 26 bp, Homo sapiens
tgtaccattccagccctccttttcaa

SEQ ID NO: 99898 - DNA, 26 bp, Homo sapiens
gtaccattccagccctccttttcaaa

SEQ ID NO: 99899 - DNA, 26 bp, Homo sapiens
taccattccagccctccttttcaaag

SEQ ID NO: 99900 - DNA, 26 bp, Homo sapiens
accattccagccctccttttcaaaga

SEQ ID NO: 99901 - DNA, 26 bp, Homo sapiens
ccattccagccctccttttcaaagaa

SEQ ID NO: 99902 - DNA, 26 bp, Homo sapiens
cattccagccctccttttcaaagaaa

SEQ ID NO: 99903 - DNA, 26 bp, Homo sapiens
attccagccctccttttcaaagaaaa

SEQ ID NO: 99904 - DNA, 26 bp, Homo sapiens
ttccagccctccttttcaaagaaaac

SEQ ID NO: 99905 - DNA, 26 bp, Homo sapiens
tccagccctccttttcaaagaaaact

SEQ ID NO: 99906 - DNA, 26 bp, Homo sapiens
ccagccctccttttcaaagaaaactt

SEQ ID NO: 99907 - DNA, 26 bp, Homo sapiens
cagccctccttttcaaagaaaacttg

SEQ ID NO: 99908 - DNA, 26 bp, Homo sapiens
agccctccttttcaaagaaaacttga

SEQ ID NO: 99909 - DNA, 26 bp, Homo sapiens
gccctccttttcaaagaaaacttgag

SEQ ID NO: 99910 - DNA, 26 bp, Homo sapiens
ccctccttttcaaagaaaacttgagc

SEQ ID NO: 99911 - DNA, 26 bp, Homo sapiens
cctccttttcaaagaaaacttgagca

SEQ ID NO: 99912 - DNA, 26 bp, Homo sapiens
ctccttttcaaagaaaacttgagcag

SEQ ID NO: 99913 - DNA, 26 bp, Homo sapiens
tccttttcaaagaaaacttgagcagg

SEQ ID NO: 99914 - DNA, 26 bp, Homo sapiens
ccttttcaaagaaaacttgagcaggg

SEQ ID NO: 99915 - DNA, 26 bp, Homo sapiens
cttttcaaagaaaacttgagcaggga

SEQ ID NO: 99916 - DNA, 26 bp, Homo sapiens
ttttcaaagaaaacttgagcagggac

SEQ ID NO: 99917 - DNA, 26 bp, Homo sapiens
tttcaaagaaaacttgagcagggacc

SEQ ID NO: 99918 - DNA, 26 bp, Homo sapiens
ttcaaagaaaacttgagcagggaccc

SEQ ID NO: 99919 - DNA, 26 bp, Homo sapiens
tcaaagaaaacttgagcagggaccct

SEQ ID NO: 99920 - DNA, 26 bp, Homo sapiens
caaagaaaacttgagcagggaccctg

SEQ ID NO: 99921 - DNA, 26 bp, Homo sapiens
aaagaaaacttgagcagggaccctgg

SEQ ID NO: 99922 - DNA, 26 bp, Homo sapiens
aagaaaacttgagcagggaccctggg

SEQ ID NO: 99923 - DNA, 26 bp, Homo sapiens
agaaaacttgagcagggaccctggga

SEQ ID NO: 99924 - DNA, 26 bp, Homo sapiens
gaaaacttgagcagggaccctgggat

SEQ ID NO: 99925 - DNA, 26 bp, Homo sapiens
aaaacttgagcagggaccctgggata

SEQ ID NO: 99926 - DNA, 26 bp, Homo sapiens
aaacttgagcagggaccctgggatac

SEQ ID NO: 99927 - DNA, 26 bp, Homo sapiens
aacttgagcagggaccctgggatacc

SEQ ID NO: 99928 - DNA, 26 bp, Homo sapiens
acttgagcagggaccctgggatacca

SEQ ID NO: 99929 - DNA, 26 bp, Homo sapiens
cttgagcagggaccctgggataccac

SEQ ID NO: 99930 - DNA, 26 bp, Homo sapiens
ttgagcagggaccctgggataccacc

SEQ ID NO: 99931 - DNA, 26 bp, Homo sapiens
tgagcagggaccctgggataccacca

SEQ ID NO: 99932 - DNA, 26 bp, Homo sapiens
gagcagggaccctgggataccaccag

SEQ ID NO: 99933 - DNA, 26 bp, Homo sapiens
agcagggaccctgggataccaccagc

SEQ ID NO: 99934 - DNA, 26 bp, Homo sapiens
gcagggaccctgggataccaccagcg

SEQ ID NO: 99935 - DNA, 26 bp, Homo sapiens
cagggaccctgggataccaccagcga

SEQ ID NO: 99936 - DNA, 26 bp, Homo sapiens
agggaccctgggataccaccagcgat

SEQ ID NO: 99937 - DNA, 26 bp, Homo sapiens
gggaccctgggataccaccagcgatg

SEQ ID NO: 99938 - DNA, 26 bp, Homo sapiens
ggaccctgggataccaccagcgatgg

SEQ ID NO: 99939 - DNA, 26 bp, Homo sapiens
gaccctgggataccaccagcgatggt

SEQ ID NO: 99940 - DNA, 26 bp, Homo sapiens
accctgggataccaccagcgatggtg

SEQ ID NO: 99941 - DNA, 26 bp, Homo sapiens
ccctgggataccaccagcgatggtgg

SEQ ID NO: 99942 - DNA, 26 bp, Homo sapiens
cctgggataccaccagcgatggtggg

SEQ ID NO: 99943 - DNA, 26 bp, Homo sapiens
ctgggataccaccagcgatggtggga

SEQ ID NO: 99944 - DNA, 26 bp, Homo sapiens
tgggataccaccagcgatggtgggac

SEQ ID NO: 99945 - DNA, 26 bp, Homo sapiens
gggataccaccagcgatggtgggact

SEQ ID NO: 99946 - DNA, 26 bp, Homo sapiens
ggataccaccagcgatggtgggactc

SEQ ID NO: 99947 - DNA, 26 bp, Homo sapiens
gataccaccagcgatggtgggactcc

SEQ ID NO: 99948 - DNA, 26 bp, Homo sapiens
ataccaccagcgatggtgggactccc

SEQ ID NO: 99949 - DNA, 26 bp, Homo sapiens
taccaccagcgatggtgggactccct

SEQ ID NO: 99950 - DNA, 26 bp, Homo sapiens
accaccagcgatggtgggactccctt

SEQ ID NO: 99951 - DNA, 26 bp, Homo sapiens
ccaccagcgatggtgggactcccttt

SEQ ID NO: 99952 - DNA, 26 bp, Homo sapiens
caccagcgatggtgggactccctttt

SEQ ID NO: 99953 - DNA, 26 bp, Homo sapiens
accagcgatggtgggactcccttttg

SEQ ID NO: 99954 - DNA, 26 bp, Homo sapiens
ccagcgatggtgggactcccttttgc

SEQ ID NO: 99955 - DNA, 26 bp, Homo sapiens
cagcgatggtgggactcccttttgca

SEQ ID NO: 99956 - DNA, 26 bp, Homo sapiens
agcgatggtgggactcccttttgcaa

SEQ ID NO: 99957 - DNA, 26 bp, Homo sapiens
gcgatggtgggactcccttttgcaat

SEQ ID NO: 99958 - DNA, 26 bp, Homo sapiens
cgatggtgggactcccttttgcaatc

SEQ ID NO: 99959 - DNA, 26 bp, Homo sapiens
gatggtgggactcccttttgcaatcc

SEQ ID NO: 99960 - DNA, 26 bp, Homo sapiens
atggtgggactcccttttgcaatcca

SEQ ID NO: 99961 - DNA, 26 bp, Homo sapiens
tggtgggactcccttttgcaatccaa

SEQ ID NO: 99962 - DNA, 26 bp, Homo sapiens
ggtgggactcccttttgcaatccaaa

SEQ ID NO: 99963 - DNA, 26 bp, Homo sapiens
gtgggactcccttttgcaatccaaat

SEQ ID NO: 99964 - DNA, 26 bp, Homo sapiens
tgggactcccttttgcaatccaaata

SEQ ID NO: 99965 - DNA, 26 bp, Homo sapiens
gggactcccttttgcaatccaaataa

SEQ ID NO: 99966 - DNA, 26 bp, Homo sapiens
ggactcccttttgcaatccaaataag

SEQ ID NO: 99967 - DNA, 26 bp, Homo sapiens
gactcccttttgcaatccaaataagc

SEQ ID NO: 99968 - DNA, 26 bp, Homo sapiens
actcccttttgcaatccaaataagca

SEQ ID NO: 99969 - DNA, 26 bp, Homo sapiens
ctcccttttgcaatccaaataagcac

SEQ ID NO: 99970 - DNA, 26 bp, Homo sapiens
tcccttttgcaatccaaataagcacg

SEQ ID NO: 99971 - DNA, 26 bp, Homo sapiens
cccttttgcaatccaaataagcacga

SEQ ID NO: 99972 - DNA, 26 bp, Homo sapiens
ccttttgcaatccaaataagcacgat

SEQ ID NO: 99973 - DNA, 26 bp, Homo sapiens
cttttgcaatccaaataagcacgatc

SEQ ID NO: 99974 - DNA, 26 bp, Homo sapiens
ttttgcaatccaaataagcacgatct

SEQ ID NO: 99975 - DNA, 26 bp, Homo sapiens
tttgcaatccaaataagcacgatcta

SEQ ID NO: 99976 - DNA, 26 bp, Homo sapiens
ttgcaatccaaataagcacgatctaa

SEQ ID NO: 99977 - DNA, 26 bp, Homo sapiens
tgcaatccaaataagcacgatctaaa

SEQ ID NO: 99978 - DNA, 26 bp, Homo sapiens
gcaatccaaataagcacgatctaaat

SEQ ID NO: 99979 - DNA, 26 bp, Homo sapiens
caatccaaataagcacgatctaaatg

SEQ ID NO: 99980 - DNA, 26 bp, Homo sapiens
aatccaaataagcacgatctaaatga

SEQ ID NO: 99981 - DNA, 26 bp, Homo sapiens
atccaaataagcacgatctaaatgag

SEQ ID NO: 99982 - DNA, 26 bp, Homo sapiens
tccaaataagcacgatctaaatgagt

SEQ ID NO: 99983 - DNA, 26 bp, Homo sapiens
ccaaataagcacgatctaaatgagtc

SEQ ID NO: 99984 - DNA, 26 bp, Homo sapiens
caaataagcacgatctaaatgagtcc

SEQ ID NO: 99985 - DNA, 26 bp, Homo sapiens
aaataagcacgatctaaatgagtcca

SEQ ID NO: 99986 - DNA, 26 bp, Homo sapiens
aataagcacgatctaaatgagtccag

SEQ ID NO: 99987 - DNA, 26 bp, Homo sapiens
ataagcacgatctaaatgagtccagg

SEQ ID NO: 99988 - DNA, 26 bp, Homo sapiens
taagcacgatctaaatgagtccaggt

SEQ ID NO: 99989 - DNA, 26 bp, Homo sapiens
aagcacgatctaaatgagtccaggtt

SEQ ID NO: 99990 - DNA, 26 bp, Homo sapiens
agcacgatctaaatgagtccaggttg

SEQ ID NO: 99991 - DNA, 26 bp, Homo sapiens
gcacgatctaaatgagtccaggttgg

SEQ ID NO: 99992 - DNA, 26 bp, Homo sapiens
cacgatctaaatgagtccaggttgga

SEQ ID NO: 99993 - DNA, 26 bp, Homo sapiens
acgatctaaatgagtccaggttggag

SEQ ID NO: 99994 - DNA, 26 bp, Homo sapiens
cgatctaaatgagtccaggttggagc

SEQ ID NO: 99995 - DNA, 26 bp, Homo sapiens
gatctaaatgagtccaggttggagca

SEQ ID NO: 99996 - DNA, 26 bp, Homo sapiens
atctaaatgagtccaggttggagcag

SEQ ID NO: 99997 - DNA, 26 bp, Homo sapiens
tctaaatgagtccaggttggagcaga

SEQ ID NO: 99998 - DNA, 26 bp, Homo sapiens
ctaaatgagtccaggttggagcagat

SEQ ID NO: 99999 - DNA, 26 bp, Homo sapiens
taaatgagtccaggttggagcagata

SEQ ID NO: 100000 - DNA, 26 bp, Homo sapiens
aaatgagtccaggttggagcagataa

SEQ ID NO: 100001 - DNA, 26 bp, Homo sapiens
aatgagtccaggttggagcagataag

SEQ ID NO: 100002 - DNA, 26 bp, Homo sapiens
atgagtccaggttggagcagataagg

SEQ ID NO: 100003 - DNA, 26 bp, Homo sapiens
tgagtccaggttggagcagataagga

SEQ ID NO: 100004 - DNA, 26 bp, Homo sapiens
gagtccaggttggagcagataaggaa

SEQ ID NO: 100005 - DNA, 26 bp, Homo sapiens
agtccaggttggagcagataaggaat

SEQ ID NO: 100006 - DNA, 26 bp, Homo sapiens
gtccaggttggagcagataaggaatg

SEQ ID NO: 100007 - DNA, 26 bp, Homo sapiens
tccaggttggagcagataaggaatgg

SEQ ID NO: 100008 - DNA, 26 bp, Homo sapiens
ccaggttggagcagataaggaatggg

SEQ ID NO: 100009 - DNA, 26 bp, Homo sapiens
caggttggagcagataaggaatgggg

SEQ ID NO: 100010 - DNA, 26 bp, Homo sapiens
aggttggagcagataaggaatggggt

SEQ ID NO: 100011 - DNA, 26 bp, Homo sapiens
ggttggagcagataaggaatggggtt

SEQ ID NO: 100012 - DNA, 26 bp, Homo sapiens
gttggagcagataaggaatggggttg

SEQ ID NO: 100013 - DNA, 26 bp, Homo sapiens
ttggagcagataaggaatggggttga

SEQ ID NO: 100014 - DNA, 26 bp, Homo sapiens
tggagcagataaggaatggggttgaa

SEQ ID NO: 100015 - DNA, 26 bp, Homo sapiens
ggagcagataaggaatggggttgaaa

SEQ ID NO: 100016 - DNA, 26 bp, Homo sapiens
gagcagataaggaatggggttgaaaa

SEQ ID NO: 100017 - DNA, 26 bp, Homo sapiens
agcagataaggaatggggttgaaaag

SEQ ID NO: 100018 - DNA, 26 bp, Homo sapiens
gcagataaggaatggggttgaaaagg

SEQ ID NO: 100019 - DNA, 26 bp, Homo sapiens
cagataaggaatggggttgaaaagga

SEQ ID NO: 100020 - DNA, 26 bp, Homo sapiens
agataaggaatggggttgaaaaggag

SEQ ID NO: 100021 - DNA, 26 bp, Homo sapiens
gataaggaatggggttgaaaaggaga

SEQ ID NO: 100022 - DNA, 26 bp, Homo sapiens
ataaggaatggggttgaaaaggagat

SEQ ID NO: 100023 - DNA, 26 bp, Homo sapiens
taaggaatggggttgaaaaggagatg

SEQ ID NO: 100024 - DNA, 26 bp, Homo sapiens
aaggaatggggttgaaaaggagatgt

SEQ ID NO: 100025 - DNA, 26 bp, Homo sapiens
aggaatggggttgaaaaggagatgtg

SEQ ID NO: 100026 - DNA, 26 bp, Homo sapiens
ggaatggggttgaaaaggagatgtgt

SEQ ID NO: 100027 - DNA, 26 bp, Homo sapiens
gaatggggttgaaaaggagatgtgtt

SEQ ID NO: 100028 - DNA, 26 bp, Homo sapiens
aatggggttgaaaaggagatgtgttc

SEQ ID NO: 100029 - DNA, 26 bp, Homo sapiens
atggggttgaaaaggagatgtgttct

SEQ ID NO: 100030 - DNA, 26 bp, Homo sapiens
tggggttgaaaaggagatgtgttctt

SEQ ID NO: 100031 - DNA, 26 bp, Homo sapiens
ggggttgaaaaggagatgtgttcttg

SEQ ID NO: 100032 - DNA, 26 bp, Homo sapiens
gggttgaaaaggagatgtgttcttga

SEQ ID NO: 100033 - DNA, 26 bp, Homo sapiens
ggttgaaaaggagatgtgttcttgaa

SEQ ID NO: 100034 - DNA, 26 bp, Homo sapiens
gttgaaaaggagatgtgttcttgaaa

SEQ ID NO: 100035 - DNA, 26 bp, Homo sapiens
ttgaaaaggagatgtgttcttgaaat

SEQ ID NO: 100036 - DNA, 26 bp, Homo sapiens
tgaaaaggagatgtgttcttgaaatc

SEQ ID NO: 100037 - DNA, 26 bp, Homo sapiens
gaaaaggagatgtgttcttgaaatcg

SEQ ID NO: 100038 - DNA, 26 bp, Homo sapiens
aaaaggagatgtgttcttgaaatcgg

SEQ ID NO: 100039 - DNA, 26 bp, Homo sapiens
aaaggagatgtgttcttgaaatcggc

SEQ ID NO: 100040 - DNA, 26 bp, Homo sapiens
aaggagatgtgttcttgaaatcggcc

SEQ ID NO: 100041 - DNA, 26 bp, Homo sapiens
aggagatgtgttcttgaaatcggcca

SEQ ID NO: 100042 - DNA, 26 bp, Homo sapiens
ggagatgtgttcttgaaatcggccaa

SEQ ID NO: 100043 - DNA, 26 bp, Homo sapiens
gagatgtgttcttgaaatcggccaat

SEQ ID NO: 100044 - DNA, 26 bp, Homo sapiens
agatgtgttcttgaaatcggccaatt

SEQ ID NO: 100045 - DNA, 26 bp, Homo sapiens
gatgtgttcttgaaatcggccaattt

SEQ ID NO: 100046 - DNA, 26 bp, Homo sapiens
atgtgttcttgaaatcggccaatttc

SEQ ID NO: 100047 - DNA, 26 bp, Homo sapiens
tgtgttcttgaaatcggccaatttca

SEQ ID NO: 100048 - DNA, 26 bp, Homo sapiens
gtgttcttgaaatcggccaatttcat

SEQ ID NO: 100049 - DNA, 26 bp, Homo sapiens
tgttcttgaaatcggccaatttcata

SEQ ID NO: 100050 - DNA, 26 bp, Homo sapiens
gttcttgaaatcggccaatttcatag

SEQ ID NO: 100051 - DNA, 26 bp, Homo sapiens
ttcttgaaatcggccaatttcatagc

SEQ ID NO: 100052 - DNA, 26 bp, Homo sapiens
tcttgaaatcggccaatttcatagcc

SEQ ID NO: 100053 - DNA, 26 bp, Homo sapiens
cttgaaatcggccaatttcatagcct

SEQ ID NO: 100054 - DNA, 26 bp, Homo sapiens
ttgaaatcggccaatttcatagcctg

SEQ ID NO: 100055 - DNA, 26 bp, Homo sapiens
tgaaatcggccaatttcatagcctgg

SEQ ID NO: 100056 - DNA, 26 bp, Homo sapiens
gaaatcggccaatttcatagcctgga

SEQ ID NO: 100057 - DNA, 26 bp, Homo sapiens
aaatcggccaatttcatagcctggag

SEQ ID NO: 100058 - DNA, 26 bp, Homo sapiens
aatcggccaatttcatagcctggagg

SEQ ID NO: 100059 - DNA, 26 bp, Homo sapiens
atcggccaatttcatagcctggagga

SEQ ID NO: 100060 - DNA, 26 bp, Homo sapiens
tcggccaatttcatagcctggaggag

SEQ ID NO: 100061 - DNA, 26 bp, Homo sapiens
cggccaatttcatagcctggaggaga

SEQ ID NO: 100062 - DNA, 26 bp, Homo sapiens
ggccaatttcatagcctggaggagac

SEQ ID NO: 100063 - DNA, 26 bp, Homo sapiens
gccaatttcatagcctggaggagaca

SEQ ID NO: 100064 - DNA, 26 bp, Homo sapiens
ccaatttcatagcctggaggagacat

SEQ ID NO: 100065 - DNA, 26 bp, Homo sapiens
caatttcatagcctggaggagacatt

SEQ ID NO: 100066 - DNA, 26 bp, Homo sapiens
aatttcatagcctggaggagacattt

SEQ ID NO: 100067 - DNA, 26 bp, Homo sapiens
atttcatagcctggaggagacatttg

SEQ ID NO: 100068 - DNA, 26 bp, Homo sapiens
tttcatagcctggaggagacatttgt

SEQ ID NO: 100069 - DNA, 26 bp, Homo sapiens
ttcatagcctggaggagacatttgtg

SEQ ID NO: 100070 - DNA, 26 bp, Homo sapiens
tcatagcctggaggagacatttgtgg

SEQ ID NO: 100071 - DNA, 26 bp, Homo sapiens
catagcctggaggagacatttgtggt

SEQ ID NO: 100072 - DNA, 26 bp, Homo sapiens
atagcctggaggagacatttgtggtt

SEQ ID NO: 100073 - DNA, 26 bp, Homo sapiens
tagcctggaggagacatttgtggtta

SEQ ID NO: 100074 - DNA, 26 bp, Homo sapiens
agcctggaggagacatttgtggttag

SEQ ID NO: 100075 - DNA, 26 bp, Homo sapiens
gcctggaggagacatttgtggttagc

SEQ ID NO: 100076 - DNA, 26 bp, Homo sapiens
cctggaggagacatttgtggttagct

SEQ ID NO: 100077 - DNA, 26 bp, Homo sapiens
ctggaggagacatttgtggttagctg

SEQ ID NO: 100078 - DNA, 26 bp, Homo sapiens
tggaggagacatttgtggttagctga

SEQ ID NO: 100079 - DNA, 26 bp, Homo sapiens
ggaggagacatttgtggttagctgag

SEQ ID NO: 100080 - DNA, 26 bp, Homo sapiens
gaggagacatttgtggttagctgagt

SEQ ID NO: 100081 - DNA, 26 bp, Homo sapiens
aggagacatttgtggttagctgagtc

SEQ ID NO: 100082 - DNA, 26 bp, Homo sapiens
ggagacatttgtggttagctgagtca

SEQ ID NO: 100083 - DNA, 26 bp, Homo sapiens
gagacatttgtggttagctgagtcac

SEQ ID NO: 100084 - DNA, 26 bp, Homo sapiens
agacatttgtggttagctgagtcaca

SEQ ID NO: 100085 - DNA, 26 bp, Homo sapiens
gacatttgtggttagctgagtcacac

SEQ ID NO: 100086 - DNA, 26 bp, Homo sapiens
acatttgtggttagctgagtcacact

SEQ ID NO: 100087 - DNA, 26 bp, Homo sapiens
catttgtggttagctgagtcacactg

SEQ ID NO: 100088 - DNA, 26 bp, Homo sapiens
atttgtggttagctgagtcacactgc

SEQ ID NO: 100089 - DNA, 26 bp, Homo sapiens
tttgtggttagctgagtcacactgcc

SEQ ID NO: 100090 - DNA, 26 bp, Homo sapiens
ttgtggttagctgagtcacactgcct

SEQ ID NO: 100091 - DNA, 26 bp, Homo sapiens
tgtggttagctgagtcacactgcctt

SEQ ID NO: 100092 - DNA, 26 bp, Homo sapiens
gtggttagctgagtcacactgccttg

SEQ ID NO: 100093 - DNA, 26 bp, Homo sapiens
tggttagctgagtcacactgccttgg

SEQ ID NO: 100094 - DNA, 26 bp, Homo sapiens
ggttagctgagtcacactgccttggg

SEQ ID NO: 100095 - DNA, 26 bp, Homo sapiens
gttagctgagtcacactgccttggga

SEQ ID NO: 100096 - DNA, 26 bp, Homo sapiens
ttagctgagtcacactgccttgggat

SEQ ID NO: 100097 - DNA, 26 bp, Homo sapiens
tagctgagtcacactgccttgggatt

SEQ ID NO: 100098 - DNA, 26 bp, Homo sapiens
agctgagtcacactgccttgggatta

SEQ ID NO: 100099 - DNA, 26 bp, Homo sapiens
gctgagtcacactgccttgggattag

SEQ ID NO: 100100 - DNA, 26 bp, Homo sapiens
ctgagtcacactgccttgggattagc

SEQ ID NO: 100101 - DNA, 26 bp, Homo sapiens
tgagtcacactgccttgggattagcc

SEQ ID NO: 100102 - DNA, 26 bp, Homo sapiens
gagtcacactgccttgggattagcca

SEQ ID NO: 100103 - DNA, 26 bp, Homo sapiens
agtcacactgccttgggattagccag

SEQ ID NO: 100104 - DNA, 26 bp, Homo sapiens
gtcacactgccttgggattagccagc

SEQ ID NO: 100105 - DNA, 26 bp, Homo sapiens
tcacactgccttgggattagccagct

SEQ ID NO: 100106 - DNA, 26 bp, Homo sapiens
cacactgccttgggattagccagctc

SEQ ID NO: 100107 - DNA, 26 bp, Homo sapiens
acactgccttgggattagccagctct

SEQ ID NO: 100108 - DNA, 26 bp, Homo sapiens
cactgccttgggattagccagctctg

SEQ ID NO: 100109 - DNA, 26 bp, Homo sapiens
actgccttgggattagccagctctgc

SEQ ID NO: 100110 - DNA, 26 bp, Homo sapiens
ctgccttgggattagccagctctgct

SEQ ID NO: 100111 - DNA, 26 bp, Homo sapiens
tgccttgggattagccagctctgctt

SEQ ID NO: 100112 - DNA, 26 bp, Homo sapiens
gccttgggattagccagctctgcttt

SEQ ID NO: 100113 - DNA, 26 bp, Homo sapiens
ccttgggattagccagctctgctttc

SEQ ID NO: 100114 - DNA, 26 bp, Homo sapiens
cttgggattagccagctctgctttct

SEQ ID NO: 100115 - DNA, 26 bp, Homo sapiens
ttgggattagccagctctgctttctg

SEQ ID NO: 100116 - DNA, 26 bp, Homo sapiens
tgggattagccagctctgctttctgt

SEQ ID NO: 100117 - DNA, 26 bp, Homo sapiens
gggattagccagctctgctttctgtt

SEQ ID NO: 100118 - DNA, 26 bp, Homo sapiens
ggattagccagctctgctttctgttt

SEQ ID NO: 100119 - DNA, 26 bp, Homo sapiens
gattagccagctctgctttctgtttc

SEQ ID NO: 100120 - DNA, 26 bp, Homo sapiens
attagccagctctgctttctgtttca

SEQ ID NO: 100121 - DNA, 26 bp, Homo sapiens
ttagccagctctgctttctgtttcaa

SEQ ID NO: 100122 - DNA, 26 bp, Homo sapiens
tagccagctctgctttctgtttcaac

SEQ ID NO: 100123 - DNA, 26 bp, Homo sapiens
agccagctctgctttctgtttcaaca

SEQ ID NO: 100124 - DNA, 26 bp, Homo sapiens
gccagctctgctttctgtttcaacaa

SEQ ID NO: 100125 - DNA, 26 bp, Homo sapiens
ccagctctgctttctgtttcaacaat

SEQ ID NO: 100126 - DNA, 26 bp, Homo sapiens
cagctctgctttctgtttcaacaata

SEQ ID NO: 100127 - DNA, 26 bp, Homo sapiens
agctctgctttctgtttcaacaataa

SEQ ID NO: 100128 - DNA, 26 bp, Homo sapiens
gctctgctttctgtttcaacaataaa

SEQ ID NO: 100129 - DNA, 26 bp, Homo sapiens
ctctgctttctgtttcaacaataaaa

SEQ ID NO: 100130 - DNA, 26 bp, Homo sapiens
tctgctttctgtttcaacaataaaaa

SEQ ID NO: 100131 - DNA, 26 bp, Homo sapiens
ctgctttctgtttcaacaataaaaag

SEQ ID NO: 100132 - DNA, 26 bp, Homo sapiens
tgctttctgtttcaacaataaaaagt

SEQ ID NO: 100133 - DNA, 26 bp, Homo sapiens
gctttctgtttcaacaataaaaagtc

SEQ ID NO: 100134 - DNA, 26 bp, Homo sapiens
ctttctgtttcaacaataaaaagtct

SEQ ID NO: 100135 - DNA, 26 bp, Homo sapiens
tttctgtttcaacaataaaaagtctt

SEQ ID NO: 100136 - DNA, 26 bp, Homo sapiens
ttctgtttcaacaataaaaagtcttg

SEQ ID NO: 100137 - DNA, 26 bp, Homo sapiens
tctgtttcaacaataaaaagtcttgc

SEQ ID NO: 100138 - DNA, 26 bp, Homo sapiens
ctgtttcaacaataaaaagtcttgca

SEQ ID NO: 100139 - DNA, 26 bp, Homo sapiens
tgtttcaacaataaaaagtcttgcaa

SEQ ID NO: 100140 - DNA, 26 bp, Homo sapiens
gtttcaacaataaaaagtcttgcaaa

SEQ ID NO: 100141 - DNA, 26 bp, Homo sapiens
tttcaacaataaaaagtcttgcaaag

SEQ ID NO: 100142 - DNA, 26 bp, Homo sapiens
ttcaacaataaaaagtcttgcaaagc

SEQ ID NO: 100143 - DNA, 26 bp, Homo sapiens
tcaacaataaaaagtcttgcaaagct

SEQ ID NO: 100144 - DNA, 26 bp, Homo sapiens
caacaataaaaagtcttgcaaagctg

SEQ ID NO: 100145 - DNA, 26 bp, Homo sapiens
aacaataaaaagtcttgcaaagctgc

SEQ ID NO: 100146 - DNA, 26 bp, Homo sapiens
acaataaaaagtcttgcaaagctgct

SEQ ID NO: 100147 - DNA, 26 bp, Homo sapiens
caataaaaagtcttgcaaagctgctg

SEQ ID NO: 100148 - DNA, 26 bp, Homo sapiens
aataaaaagtcttgcaaagctgctgg

SEQ ID NO: 100149 - DNA, 26 bp, Homo sapiens
ataaaaagtcttgcaaagctgctggc

SEQ ID NO: 100150 - DNA, 26 bp, Homo sapiens
taaaaagtcttgcaaagctgctggca

SEQ ID NO: 100151 - DNA, 26 bp, Homo sapiens
aaaaagtcttgcaaagctgctggcat

SEQ ID NO: 100152 - DNA, 26 bp, Homo sapiens
aaaagtcttgcaaagctgctggcatg

SEQ ID NO: 100153 - DNA, 26 bp, Homo sapiens
aaagtcttgcaaagctgctggcatgt

SEQ ID NO: 100154 - DNA, 26 bp, Homo sapiens
aagtcttgcaaagctgctggcatgtg

SEQ ID NO: 100155 - DNA, 26 bp, Homo sapiens
agtcttgcaaagctgctggcatgtga

SEQ ID NO: 100156 - DNA, 26 bp, Homo sapiens
gtcttgcaaagctgctggcatgtgag

SEQ ID NO: 100157 - DNA, 26 bp, Homo sapiens
tcttgcaaagctgctggcatgtgaga

SEQ ID NO: 100158 - DNA, 26 bp, Homo sapiens
cttgcaaagctgctggcatgtgagac

SEQ ID NO: 100159 - DNA, 26 bp, Homo sapiens
ttgcaaagctgctggcatgtgagaca

SEQ ID NO: 100160 - DNA, 26 bp, Homo sapiens
tgcaaagctgctggcatgtgagacag

SEQ ID NO: 100161 - DNA, 26 bp, Homo sapiens
gcaaagctgctggcatgtgagacaga

SEQ ID NO: 100162 - DNA, 26 bp, Homo sapiens
caaagctgctggcatgtgagacagag

SEQ ID NO: 100163 - DNA, 26 bp, Homo sapiens
aaagctgctggcatgtgagacagagg

SEQ ID NO: 100164 - DNA, 26 bp, Homo sapiens
aagctgctggcatgtgagacagaggt

SEQ ID NO: 100165 - DNA, 26 bp, Homo sapiens
agctgctggcatgtgagacagaggta

SEQ ID NO: 100166 - DNA, 26 bp, Homo sapiens
gctgctggcatgtgagacagaggtat

SEQ ID NO: 100167 - DNA, 26 bp, Homo sapiens
ctgctggcatgtgagacagaggtatc

SEQ ID NO: 100168 - DNA, 26 bp, Homo sapiens
tgctggcatgtgagacagaggtatcc

SEQ ID NO: 100169 - DNA, 26 bp, Homo sapiens
gctggcatgtgagacagaggtatcca

SEQ ID NO: 100170 - DNA, 26 bp, Homo sapiens
ctggcatgtgagacagaggtatccag

SEQ ID NO: 100171 - DNA, 26 bp, Homo sapiens
tggcatgtgagacagaggtatccaga

SEQ ID NO: 100172 - DNA, 26 bp, Homo sapiens
ggcatgtgagacagaggtatccagaa

SEQ ID NO: 100173 - DNA, 26 bp, Homo sapiens
gcatgtgagacagaggtatccagaaa

SEQ ID NO: 100174 - DNA, 26 bp, Homo sapiens
catgtgagacagaggtatccagaaaa

SEQ ID NO: 100175 - DNA, 26 bp, Homo sapiens
atgtgagacagaggtatccagaaaat

SEQ ID NO: 100176 - DNA, 26 bp, Homo sapiens
tgtgagacagaggtatccagaaaatt

SEQ ID NO: 100177 - DNA, 26 bp, Homo sapiens
gtgagacagaggtatccagaaaattt

SEQ ID NO: 100178 - DNA, 26 bp, Homo sapiens
tgagacagaggtatccagaaaatttt

SEQ ID NO: 100179 - DNA, 26 bp, Homo sapiens
gagacagaggtatccagaaaattttg

SEQ ID NO: 100180 - DNA, 26 bp, Homo sapiens
agacagaggtatccagaaaattttgg

SEQ ID NO: 100181 - DNA, 26 bp, Homo sapiens
gacagaggtatccagaaaattttggc

SEQ ID NO: 100182 - DNA, 26 bp, Homo sapiens
acagaggtatccagaaaattttggca

SEQ ID NO: 100183 - DNA, 26 bp, Homo sapiens
cagaggtatccagaaaattttggcat

SEQ ID NO: 100184 - DNA, 26 bp, Homo sapiens
agaggtatccagaaaattttggcatc

SEQ ID NO: 100185 - DNA, 26 bp, Homo sapiens
gaggtatccagaaaattttggcatct

SEQ ID NO: 100186 - DNA, 26 bp, Homo sapiens
aggtatccagaaaattttggcatctt

SEQ ID NO: 100187 - DNA, 26 bp, Homo sapiens
ggtatccagaaaattttggcatcttt

SEQ ID NO: 100188 - DNA, 26 bp, Homo sapiens
gtatccagaaaattttggcatctttt

SEQ ID NO: 100189 - DNA, 26 bp, Homo sapiens
tatccagaaaattttggcatcttttc

SEQ ID NO: 100190 - DNA, 26 bp, Homo sapiens
atccagaaaattttggcatcttttcc

SEQ ID NO: 100191 - DNA, 26 bp, Homo sapiens
tccagaaaattttggcatcttttcca

SEQ ID NO: 100192 - DNA, 26 bp, Homo sapiens
ccagaaaattttggcatcttttccag

SEQ ID NO: 100193 - DNA, 26 bp, Homo sapiens
cagaaaattttggcatcttttccagc

SEQ ID NO: 100194 - DNA, 26 bp, Homo sapiens
agaaaattttggcatcttttccagcg

SEQ ID NO: 100195 - DNA, 26 bp, Homo sapiens
gaaaattttggcatcttttccagcgg

SEQ ID NO: 100196 - DNA, 26 bp, Homo sapiens
aaaattttggcatcttttccagcggc

SEQ ID NO: 100197 - DNA, 26 bp, Homo sapiens
aaattttggcatcttttccagcggca

SEQ ID NO: 100198 - DNA, 26 bp, Homo sapiens
aattttggcatcttttccagcggcat

SEQ ID NO: 100199 - DNA, 26 bp, Homo sapiens
attttggcatcttttccagcggcata

SEQ ID NO: 100200 - DNA, 26 bp, Homo sapiens
ttttggcatcttttccagcggcataa

SEQ ID NO: 100201 - DNA, 26 bp, Homo sapiens
tttggcatcttttccagcggcataat

SEQ ID NO: 100202 - DNA, 26 bp, Homo sapiens
ttggcatcttttccagcggcataatg

SEQ ID NO: 100203 - DNA, 26 bp, Homo sapiens
tggcatcttttccagcggcataatga

SEQ ID NO: 100204 - DNA, 26 bp, Homo sapiens
ggcatcttttccagcggcataatgag

SEQ ID NO: 100205 - DNA, 26 bp, Homo sapiens
gcatcttttccagcggcataatgagt

SEQ ID NO: 100206 - DNA, 26 bp, Homo sapiens
catcttttccagcggcataatgagtc

SEQ ID NO: 100207 - DNA, 26 bp, Homo sapiens
atcttttccagcggcataatgagtct

SEQ ID NO: 100208 - DNA, 26 bp, Homo sapiens
tcttttccagcggcataatgagtctt

SEQ ID NO: 100209 - DNA, 26 bp, Homo sapiens
cttttccagcggcataatgagtctta

SEQ ID NO: 100210 - DNA, 26 bp, Homo sapiens
ttttccagcggcataatgagtcttag

SEQ ID NO: 100211 - DNA, 26 bp, Homo sapiens
tttccagcggcataatgagtcttagg

SEQ ID NO: 100212 - DNA, 26 bp, Homo sapiens
ttccagcggcataatgagtcttaggg

SEQ ID NO: 100213 - DNA, 26 bp, Homo sapiens
tccagcggcataatgagtcttaggga

SEQ ID NO: 100214 - DNA, 26 bp, Homo sapiens
ccagcggcataatgagtcttagggaa

SEQ ID NO: 100215 - DNA, 26 bp, Homo sapiens
cagcggcataatgagtcttagggaag

SEQ ID NO: 100216 - DNA, 26 bp, Homo sapiens
agcggcataatgagtcttagggaaga

SEQ ID NO: 100217 - DNA, 26 bp, Homo sapiens
gcggcataatgagtcttagggaagag

SEQ ID NO: 100218 - DNA, 26 bp, Homo sapiens
cggcataatgagtcttagggaagaga

SEQ ID NO: 100219 - DNA, 26 bp, Homo sapiens
ggcataatgagtcttagggaagagac

SEQ ID NO: 100220 - DNA, 26 bp, Homo sapiens
gcataatgagtcttagggaagagact

SEQ ID NO: 100221 - DNA, 26 bp, Homo sapiens
cataatgagtcttagggaagagactt

SEQ ID NO: 100222 - DNA, 26 bp, Homo sapiens
ataatgagtcttagggaagagacttg

SEQ ID NO: 100223 - DNA, 26 bp, Homo sapiens
taatgagtcttagggaagagacttgt

SEQ ID NO: 100224 - DNA, 26 bp, Homo sapiens
aatgagtcttagggaagagacttgtt

SEQ ID NO: 100225 - DNA, 26 bp, Homo sapiens
atgagtcttagggaagagacttgtta

SEQ ID NO: 100226 - DNA, 26 bp, Homo sapiens
tgagtcttagggaagagacttgttag

SEQ ID NO: 100227 - DNA, 26 bp, Homo sapiens
gagtcttagggaagagacttgttaga

SEQ ID NO: 100228 - DNA, 26 bp, Homo sapiens
agtcttagggaagagacttgttagag

SEQ ID NO: 100229 - DNA, 26 bp, Homo sapiens
gtcttagggaagagacttgttagagc

SEQ ID NO: 100230 - DNA, 26 bp, Homo sapiens
tcttagggaagagacttgttagagcg

SEQ ID NO: 100231 - DNA, 26 bp, Homo sapiens
cttagggaagagacttgttagagcgt

SEQ ID NO: 100232 - DNA, 26 bp, Homo sapiens
ttagggaagagacttgttagagcgtg

SEQ ID NO: 100233 - DNA, 26 bp, Homo sapiens
tagggaagagacttgttagagcgtgg

SEQ ID NO: 100234 - DNA, 26 bp, Homo sapiens
agggaagagacttgttagagcgtggt

SEQ ID NO: 100235 - DNA, 26 bp, Homo sapiens
gggaagagacttgttagagcgtggtc

SEQ ID NO: 100236 - DNA, 26 bp, Homo sapiens
ggaagagacttgttagagcgtggtcc

SEQ ID NO: 100237 - DNA, 26 bp, Homo sapiens
gaagagacttgttagagcgtggtcca

SEQ ID NO: 100238 - DNA, 26 bp, Homo sapiens
aagagacttgttagagcgtggtccat

SEQ ID NO: 100239 - DNA, 26 bp, Homo sapiens
agagacttgttagagcgtggtccatg

SEQ ID NO: 100240 - DNA, 26 bp, Homo sapiens
gagacttgttagagcgtggtccatgc

SEQ ID NO: 100241 - DNA, 26 bp, Homo sapiens
agacttgttagagcgtggtccatgca

SEQ ID NO: 100242 - DNA, 26 bp, Homo sapiens
gacttgttagagcgtggtccatgcac

SEQ ID NO: 100243 - DNA, 26 bp, Homo sapiens
acttgttagagcgtggtccatgcact

SEQ ID NO: 100244 - DNA, 26 bp, Homo sapiens
cttgttagagcgtggtccatgcactc

SEQ ID NO: 100245 - DNA, 26 bp, Homo sapiens
ttgttagagcgtggtccatgcactct

SEQ ID NO: 100246 - DNA, 26 bp, Homo sapiens
tgttagagcgtggtccatgcactcta

SEQ ID NO: 100247 - DNA, 26 bp, Homo sapiens
gttagagcgtggtccatgcactctac

SEQ ID NO: 100248 - DNA, 26 bp, Homo sapiens
ttagagcgtggtccatgcactctacc

SEQ ID NO: 100249 - DNA, 26 bp, Homo sapiens
tagagcgtggtccatgcactctacca

SEQ ID NO: 100250 - DNA, 26 bp, Homo sapiens
agagcgtggtccatgcactctaccac

SEQ ID NO: 100251 - DNA, 26 bp, Homo sapiens
gagcgtggtccatgcactctaccacc

SEQ ID NO: 100252 - DNA, 26 bp, Homo sapiens
agcgtggtccatgcactctaccaccg

SEQ ID NO: 100253 - DNA, 26 bp, Homo sapiens
gcgtggtccatgcactctaccaccgg

SEQ ID NO: 100254 - DNA, 26 bp, Homo sapiens
cgtggtccatgcactctaccaccgga

SEQ ID NO: 100255 - DNA, 26 bp, Homo sapiens
gtggtccatgcactctaccaccggag

SEQ ID NO: 100256 - DNA, 26 bp, Homo sapiens
tggtccatgcactctaccaccggaga

SEQ ID NO: 100257 - DNA, 26 bp, Homo sapiens
ggtccatgcactctaccaccggagag

SEQ ID NO: 100258 - DNA, 26 bp, Homo sapiens
gtccatgcactctaccaccggagaga

SEQ ID NO: 100259 - DNA, 26 bp, Homo sapiens
tccatgcactctaccaccggagagag

SEQ ID NO: 100260 - DNA, 26 bp, Homo sapiens
ccatgcactctaccaccggagagagg

SEQ ID NO: 100261 - DNA, 26 bp, Homo sapiens
catgcactctaccaccggagagaggt

SEQ ID NO: 100262 - DNA, 26 bp, Homo sapiens
atgcactctaccaccggagagaggtc

SEQ ID NO: 100263 - DNA, 26 bp, Homo sapiens
tgcactctaccaccggagagaggtcc

SEQ ID NO: 100264 - DNA, 26 bp, Homo sapiens
gcactctaccaccggagagaggtcca

SEQ ID NO: 100265 - DNA, 26 bp, Homo sapiens
cactctaccaccggagagaggtccat

SEQ ID NO: 100266 - DNA, 26 bp, Homo sapiens
actctaccaccggagagaggtccatg

SEQ ID NO: 100267 - DNA, 26 bp, Homo sapiens
ctctaccaccggagagaggtccatgt

SEQ ID NO: 100268 - DNA, 26 bp, Homo sapiens
tctaccaccggagagaggtccatgtt

SEQ ID NO: 100269 - DNA, 26 bp, Homo sapiens
ctaccaccggagagaggtccatgttc

SEQ ID NO: 100270 - DNA, 26 bp, Homo sapiens
taccaccggagagaggtccatgttca

SEQ ID NO: 100271 - DNA, 26 bp, Homo sapiens
accaccggagagaggtccatgttcac

SEQ ID NO: 100272 - DNA, 26 bp, Homo sapiens
ccaccggagagaggtccatgttcaca

SEQ ID NO: 100273 - DNA, 26 bp, Homo sapiens
caccggagagaggtccatgttcacat

SEQ ID NO: 100274 - DNA, 26 bp, Homo sapiens
accggagagaggtccatgttcacata

SEQ ID NO: 100275 - DNA, 26 bp, Homo sapiens
ccggagagaggtccatgttcacatag

SEQ ID NO: 100276 - DNA, 26 bp, Homo sapiens
cggagagaggtccatgttcacatagg

SEQ ID NO: 100277 - DNA, 26 bp, Homo sapiens
ggagagaggtccatgttcacatagga

SEQ ID NO: 100278 - DNA, 26 bp, Homo sapiens
gagagaggtccatgttcacataggat

SEQ ID NO: 100279 - DNA, 26 bp, Homo sapiens
agagaggtccatgttcacataggatt

SEQ ID NO: 100280 - DNA, 26 bp, Homo sapiens
gagaggtccatgttcacataggattt

SEQ ID NO: 100281 - DNA, 26 bp, Homo sapiens
agaggtccatgttcacataggattta

SEQ ID NO: 100282 - DNA, 26 bp, Homo sapiens
gaggtccatgttcacataggatttat

SEQ ID NO: 100283 - DNA, 26 bp, Homo sapiens
aggtccatgttcacataggatttatt

SEQ ID NO: 100284 - DNA, 26 bp, Homo sapiens
ggtccatgttcacataggatttattg

SEQ ID NO: 100285 - DNA, 26 bp, Homo sapiens
gtccatgttcacataggatttattgc

SEQ ID NO: 100286 - DNA, 26 bp, Homo sapiens
tccatgttcacataggatttattgcc

SEQ ID NO: 100287 - DNA, 26 bp, Homo sapiens
ccatgttcacataggatttattgcct

SEQ ID NO: 100288 - DNA, 26 bp, Homo sapiens
catgttcacataggatttattgcctt

SEQ ID NO: 100289 - DNA, 26 bp, Homo sapiens
atgttcacataggatttattgccttt

SEQ ID NO: 100290 - DNA, 26 bp, Homo sapiens
tgttcacataggatttattgcctttc

SEQ ID NO: 100291 - DNA, 26 bp, Homo sapiens
gttcacataggatttattgcctttca

SEQ ID NO: 100292 - DNA, 26 bp, Homo sapiens
ttcacataggatttattgcctttcag

SEQ ID NO: 100293 - DNA, 26 bp, Homo sapiens
tcacataggatttattgcctttcagt

SEQ ID NO: 100294 - DNA, 26 bp, Homo sapiens
cacataggatttattgcctttcagtt

SEQ ID NO: 100295 - DNA, 26 bp, Homo sapiens
acataggatttattgcctttcagttt

SEQ ID NO: 100296 - DNA, 26 bp, Homo sapiens
cataggatttattgcctttcagtttg

SEQ ID NO: 100297 - DNA, 26 bp, Homo sapiens
ataggatttattgcctttcagtttgt

SEQ ID NO: 100298 - DNA, 26 bp, Homo sapiens
taggatttattgcctttcagtttgtc

SEQ ID NO: 100299 - DNA, 26 bp, Homo sapiens
aggatttattgcctttcagtttgtct

SEQ ID NO: 100300 - DNA, 26 bp, Homo sapiens
ggatttattgcctttcagtttgtcta

SEQ ID NO: 100301 - DNA, 26 bp, Homo sapiens
gatttattgcctttcagtttgtctag

SEQ ID NO: 100302 - DNA, 26 bp, Homo sapiens
atttattgcctttcagtttgtctaga

SEQ ID NO: 100303 - DNA, 26 bp, Homo sapiens
tttattgcctttcagtttgtctagac

SEQ ID NO: 100304 - DNA, 26 bp, Homo sapiens
ttattgcctttcagtttgtctagact

SEQ ID NO: 100305 - DNA, 26 bp, Homo sapiens
tattgcctttcagtttgtctagactt

SEQ ID NO: 100306 - DNA, 26 bp, Homo sapiens
attgcctttcagtttgtctagacttt

SEQ ID NO: 100307 - DNA, 26 bp, Homo sapiens
ttgcctttcagtttgtctagactttt

SEQ ID NO: 100308 - DNA, 26 bp, Homo sapiens
tgcctttcagtttgtctagacttttt

SEQ ID NO: 100309 - DNA, 26 bp, Homo sapiens
gcctttcagtttgtctagactttttt

SEQ ID NO: 100310 - DNA, 26 bp, Homo sapiens
cctttcagtttgtctagacttttttc

SEQ ID NO: 100311 - DNA, 26 bp, Homo sapiens
ctttcagtttgtctagacttttttca

SEQ ID NO: 100312 - DNA, 26 bp, Homo sapiens
tttcagtttgtctagacttttttcaa

SEQ ID NO: 100313 - DNA, 26 bp, Homo sapiens
ttcagtttgtctagacttttttcaat

SEQ ID NO: 100314 - DNA, 26 bp, Homo sapiens
tcagtttgtctagacttttttcaatg

SEQ ID NO: 100315 - DNA, 26 bp, Homo sapiens
cagtttgtctagacttttttcaatgt

SEQ ID NO: 100316 - DNA, 26 bp, Homo sapiens
agtttgtctagacttttttcaatgta

SEQ ID NO: 100317 - DNA, 26 bp, Homo sapiens
gtttgtctagacttttttcaatgtaa

SEQ ID NO: 100318 - DNA, 26 bp, Homo sapiens
tttgtctagacttttttcaatgtaac

SEQ ID NO: 100319 - DNA, 26 bp, Homo sapiens
ttgtctagacttttttcaatgtaacc

SEQ ID NO: 100320 - DNA, 26 bp, Homo sapiens
tgtctagacttttttcaatgtaacct

SEQ ID NO: 100321 - DNA, 26 bp, Homo sapiens
gtctagacttttttcaatgtaacctt

SEQ ID NO: 100322 - DNA, 26 bp, Homo sapiens
tctagacttttttcaatgtaaccttc

SEQ ID NO: 100323 - DNA, 26 bp, Homo sapiens
ctagacttttttcaatgtaaccttct

SEQ ID NO: 100324 - DNA, 26 bp, Homo sapiens
tagacttttttcaatgtaaccttctc

SEQ ID NO: 100325 - DNA, 26 bp, Homo sapiens
agacttttttcaatgtaaccttctcc

SEQ ID NO: 100326 - DNA, 26 bp, Homo sapiens
gacttttttcaatgtaaccttctcca

SEQ ID NO: 100327 - DNA, 26 bp, Homo sapiens
acttttttcaatgtaaccttctccat

SEQ ID NO: 100328 - DNA, 26 bp, Homo sapiens
cttttttcaatgtaaccttctccata

SEQ ID NO: 100329 - DNA, 26 bp, Homo sapiens
ttttttcaatgtaaccttctccatat

SEQ ID NO: 100330 - DNA, 26 bp, Homo sapiens
tttttcaatgtaaccttctccatatt

SEQ ID NO: 100331 - DNA, 26 bp, Homo sapiens
ttttcaatgtaaccttctccatattg

SEQ ID NO: 100332 - DNA, 26 bp, Homo sapiens
tttcaatgtaaccttctccatattgt

SEQ ID NO: 100333 - DNA, 26 bp, Homo sapiens
ttcaatgtaaccttctccatattgtt

SEQ ID NO: 100334 - DNA, 26 bp, Homo sapiens
tcaatgtaaccttctccatattgttg

SEQ ID NO: 100335 - DNA, 26 bp, Homo sapiens
caatgtaaccttctccatattgttgt

SEQ ID NO: 100336 - DNA, 26 bp, Homo sapiens
aatgtaaccttctccatattgttgtt

SEQ ID NO: 100337 - DNA, 26 bp, Homo sapiens
atgtaaccttctccatattgttgttt

SEQ ID NO: 100338 - DNA, 26 bp, Homo sapiens
tgtaaccttctccatattgttgtttg

SEQ ID NO: 100339 - DNA, 26 bp, Homo sapiens
gtaaccttctccatattgttgtttga

SEQ ID NO: 100340 - DNA, 26 bp, Homo sapiens
taaccttctccatattgttgtttgat

SEQ ID NO: 100341 - DNA, 26 bp, Homo sapiens
aaccttctccatattgttgtttgatg

SEQ ID NO: 100342 - DNA, 26 bp, Homo sapiens
accttctccatattgttgtttgatgt

SEQ ID NO: 100343 - DNA, 26 bp, Homo sapiens
ccttctccatattgttgtttgatgtc

SEQ ID NO: 100344 - DNA, 26 bp, Homo sapiens
cttctccatattgttgtttgatgtct

SEQ ID NO: 100345 - DNA, 26 bp, Homo sapiens
ttctccatattgttgtttgatgtctg

SEQ ID NO: 100346 - DNA, 26 bp, Homo sapiens
tctccatattgttgtttgatgtctgg

SEQ ID NO: 100347 - DNA, 26 bp, Homo sapiens
ctccatattgttgtttgatgtctgga

SEQ ID NO: 100348 - DNA, 26 bp, Homo sapiens
tccatattgttgtttgatgtctggag

SEQ ID NO: 100349 - DNA, 26 bp, Homo sapiens
ccatattgttgtttgatgtctggaga

SEQ ID NO: 100350 - DNA, 26 bp, Homo sapiens
catattgttgtttgatgtctggagac

SEQ ID NO: 100351 - DNA, 26 bp, Homo sapiens
atattgttgtttgatgtctggagaca

SEQ ID NO: 100352 - DNA, 26 bp, Homo sapiens
tattgttgtttgatgtctggagacag

SEQ ID NO: 100353 - DNA, 26 bp, Homo sapiens
attgttgtttgatgtctggagacagc

SEQ ID NO: 100354 - DNA, 26 bp, Homo sapiens
ttgttgtttgatgtctggagacagct

SEQ ID NO: 100355 - DNA, 26 bp, Homo sapiens
tgttgtttgatgtctggagacagctg

SEQ ID NO: 100356 - DNA, 26 bp, Homo sapiens
gttgtttgatgtctggagacagctgc

SEQ ID NO: 100357 - DNA, 26 bp, Homo sapiens
ttgtttgatgtctggagacagctgct

SEQ ID NO: 100358 - DNA, 26 bp, Homo sapiens
tgtttgatgtctggagacagctgctc

SEQ ID NO: 100359 - DNA, 26 bp, Homo sapiens
gtttgatgtctggagacagctgctcc

SEQ ID NO: 100360 - DNA, 26 bp, Homo sapiens
tttgatgtctggagacagctgctccc

SEQ ID NO: 100361 - DNA, 26 bp, Homo sapiens
ttgatgtctggagacagctgctccca

SEQ ID NO: 100362 - DNA, 26 bp, Homo sapiens
tgatgtctggagacagctgctcccaa

SEQ ID NO: 100363 - DNA, 26 bp, Homo sapiens
gatgtctggagacagctgctcccaaa

SEQ ID NO: 100364 - DNA, 26 bp, Homo sapiens
atgtctggagacagctgctcccaaat

SEQ ID NO: 100365 - DNA, 26 bp, Homo sapiens
tgtctggagacagctgctcccaaatg

SEQ ID NO: 100366 - DNA, 26 bp, Homo sapiens
gtctggagacagctgctcccaaatgg

SEQ ID NO: 100367 - DNA, 26 bp, Homo sapiens
tctggagacagctgctcccaaatggc

SEQ ID NO: 100368 - DNA, 26 bp, Homo sapiens
ctggagacagctgctcccaaatggcg

SEQ ID NO: 100369 - DNA, 26 bp, Homo sapiens
tggagacagctgctcccaaatggcga

SEQ ID NO: 100370 - DNA, 26 bp, Homo sapiens
ggagacagctgctcccaaatggcgag

SEQ ID NO: 100371 - DNA, 26 bp, Homo sapiens
gagacagctgctcccaaatggcgagt

SEQ ID NO: 100372 - DNA, 26 bp, Homo sapiens
agacagctgctcccaaatggcgagtt

SEQ ID NO: 100373 - DNA, 26 bp, Homo sapiens
gacagctgctcccaaatggcgagttt

SEQ ID NO: 100374 - DNA, 26 bp, Homo sapiens
acagctgctcccaaatggcgagtttt

SEQ ID NO: 100375 - DNA, 26 bp, Homo sapiens
cagctgctcccaaatggcgagttttt

SEQ ID NO: 100376 - DNA, 26 bp, Homo sapiens
agctgctcccaaatggcgagtttttt

SEQ ID NO: 100377 - DNA, 26 bp, Homo sapiens
gctgctcccaaatggcgagttttttt

SEQ ID NO: 100378 - DNA, 26 bp, Homo sapiens
ctgctcccaaatggcgagtttttttt

SEQ ID NO: 100379 - DNA, 26 bp, Homo sapiens
tgctcccaaatggcgagttttttttc

SEQ ID NO: 100380 - DNA, 26 bp, Homo sapiens
gctcccaaatggcgagttttttttca

SEQ ID NO: 100381 - DNA, 26 bp, Homo sapiens
ctcccaaatggcgagttttttttcaa

SEQ ID NO: 100382 - DNA, 26 bp, Homo sapiens
tcccaaatggcgagttttttttcaat

SEQ ID NO: 100383 - DNA, 26 bp, Homo sapiens
cccaaatggcgagttttttttcaatt

SEQ ID NO: 100384 - DNA, 26 bp, Homo sapiens
ccaaatggcgagttttttttcaatta

SEQ ID NO: 100385 - DNA, 26 bp, Homo sapiens
caaatggcgagttttttttcaattac

SEQ ID NO: 100386 - DNA, 26 bp, Homo sapiens
aaatggcgagttttttttcaattacc

SEQ ID NO: 100387 - DNA, 26 bp, Homo sapiens
aatggcgagttttttttcaattacct

SEQ ID NO: 100388 - DNA, 26 bp, Homo sapiens
atggcgagttttttttcaattacctt

SEQ ID NO: 100389 - DNA, 26 bp, Homo sapiens
tggcgagttttttttcaattaccttt

SEQ ID NO: 100390 - DNA, 26 bp, Homo sapiens
ggcgagttttttttcaattaccttta

SEQ ID NO: 100391 - DNA, 26 bp, Homo sapiens
gcgagttttttttcaattacctttac

SEQ ID NO: 100392 - DNA, 26 bp, Homo sapiens
cgagttttttttcaattacctttact

SEQ ID NO: 100393 - DNA, 26 bp, Homo sapiens
gagttttttttcaattacctttactg

SEQ ID NO: 100394 - DNA, 26 bp, Homo sapiens
agttttttttcaattacctttactgg

SEQ ID NO: 100395 - DNA, 26 bp, Homo sapiens
gttttttttcaattacctttactgga

SEQ ID NO: 100396 - DNA, 26 bp, Homo sapiens
ttttttttcaattacctttactggat

SEQ ID NO: 100397 - DNA, 26 bp, Homo sapiens
tttttttcaattacctttactggatc

SEQ ID NO: 100398 - DNA, 26 bp, Homo sapiens
ttttttcaattacctttactggatct

SEQ ID NO: 100399 - DNA, 26 bp, Homo sapiens
tttttcaattacctttactggatctg

SEQ ID NO: 100400 - DNA, 26 bp, Homo sapiens
ttttcaattacctttactggatctgc

SEQ ID NO: 100401 - DNA, 26 bp, Homo sapiens
tttcaattacctttactggatctgcc

SEQ ID NO: 100402 - DNA, 26 bp, Homo sapiens
ttcaattacctttactggatctgcca

SEQ ID NO: 100403 - DNA, 26 bp, Homo sapiens
tcaattacctttactggatctgccaa

SEQ ID NO: 100404 - DNA, 26 bp, Homo sapiens
caattacctttactggatctgccaag

SEQ ID NO: 100405 - DNA, 26 bp, Homo sapiens
aattacctttactggatctgccaagt

SEQ ID NO: 100406 - DNA, 26 bp, Homo sapiens
attacctttactggatctgccaagtt

SEQ ID NO: 100407 - DNA, 26 bp, Homo sapiens
ttacctttactggatctgccaagttt

SEQ ID NO: 100408 - DNA, 26 bp, Homo sapiens
tacctttactggatctgccaagtttg

SEQ ID NO: 100409 - DNA, 26 bp, Homo sapiens
acctttactggatctgccaagtttgt

SEQ ID NO: 100410 - DNA, 26 bp, Homo sapiens
cctttactggatctgccaagtttgtt

SEQ ID NO: 100411 - DNA, 26 bp, Homo sapiens
ctttactggatctgccaagtttgttt

SEQ ID NO: 100412 - DNA, 26 bp, Homo sapiens
tttactggatctgccaagtttgtttt

SEQ ID NO: 100413 - DNA, 26 bp, Homo sapiens
ttactggatctgccaagtttgttttg

SEQ ID NO: 100414 - DNA, 26 bp, Homo sapiens
tactggatctgccaagtttgttttga

SEQ ID NO: 100415 - DNA, 26 bp, Homo sapiens
actggatctgccaagtttgttttgaa

SEQ ID NO: 100416 - DNA, 26 bp, Homo sapiens
ctggatctgccaagtttgttttgaac

SEQ ID NO: 100417 - DNA, 26 bp, Homo sapiens
tggatctgccaagtttgttttgaaca

SEQ ID NO: 100418 - DNA, 26 bp, Homo sapiens
ggatctgccaagtttgttttgaacaa

SEQ ID NO: 100419 - DNA, 26 bp, Homo sapiens
gatctgccaagtttgttttgaacaat

SEQ ID NO: 100420 - DNA, 26 bp, Homo sapiens
atctgccaagtttgttttgaacaatc

SEQ ID NO: 100421 - DNA, 26 bp, Homo sapiens
tctgccaagtttgttttgaacaatcc

SEQ ID NO: 100422 - DNA, 26 bp, Homo sapiens
ctgccaagtttgttttgaacaatcct

SEQ ID NO: 100423 - DNA, 26 bp, Homo sapiens
tgccaagtttgttttgaacaatcctg

SEQ ID NO: 100424 - DNA, 26 bp, Homo sapiens
gccaagtttgttttgaacaatcctgg

SEQ ID NO: 100425 - DNA, 26 bp, Homo sapiens
ccaagtttgttttgaacaatcctggt

SEQ ID NO: 100426 - DNA, 26 bp, Homo sapiens
caagtttgttttgaacaatcctggtt

SEQ ID NO: 100427 - DNA, 26 bp, Homo sapiens
aagtttgttttgaacaatcctggttc

SEQ ID NO: 100428 - DNA, 26 bp, Homo sapiens
agtttgttttgaacaatcctggttca

SEQ ID NO: 100429 - DNA, 26 bp, Homo sapiens
gtttgttttgaacaatcctggttcaa

SEQ ID NO: 100430 - DNA, 26 bp, Homo sapiens
tttgttttgaacaatcctggttcaat

SEQ ID NO: 100431 - DNA, 26 bp, Homo sapiens
ttgttttgaacaatcctggttcaatg

SEQ ID NO: 100432 - DNA, 26 bp, Homo sapiens
tgttttgaacaatcctggttcaatgc

SEQ ID NO: 100433 - DNA, 26 bp, Homo sapiens
gttttgaacaatcctggttcaatgca

SEQ ID NO: 100434 - DNA, 26 bp, Homo sapiens
ttttgaacaatcctggttcaatgcat

SEQ ID NO: 100435 - DNA, 26 bp, Homo sapiens
tttgaacaatcctggttcaatgcatg

SEQ ID NO: 100436 - DNA, 26 bp, Homo sapiens
ttgaacaatcctggttcaatgcatga

SEQ ID NO: 100437 - DNA, 26 bp, Homo sapiens
tgaacaatcctggttcaatgcatgag

SEQ ID NO: 100438 - DNA, 26 bp, Homo sapiens
gaacaatcctggttcaatgcatgaga

SEQ ID NO: 100439 - DNA, 26 bp, Homo sapiens
aacaatcctggttcaatgcatgagac

SEQ ID NO: 100440 - DNA, 26 bp, Homo sapiens
acaatcctggttcaatgcatgagacg

SEQ ID NO: 100441 - DNA, 26 bp, Homo sapiens
caatcctggttcaatgcatgagacgt

SEQ ID NO: 100442 - DNA, 26 bp, Homo sapiens
aatcctggttcaatgcatgagacgtg

SEQ ID NO: 100443 - DNA, 26 bp, Homo sapiens
atcctggttcaatgcatgagacgtgc

SEQ ID NO: 100444 - DNA, 26 bp, Homo sapiens
tcctggttcaatgcatgagacgtgca

SEQ ID NO: 100445 - DNA, 26 bp, Homo sapiens
cctggttcaatgcatgagacgtgcac

SEQ ID NO: 100446 - DNA, 26 bp, Homo sapiens
ctggttcaatgcatgagacgtgcaca

SEQ ID NO: 100447 - DNA, 26 bp, Homo sapiens
tggttcaatgcatgagacgtgcacac

SEQ ID NO: 100448 - DNA, 26 bp, Homo sapiens
ggttcaatgcatgagacgtgcacacc

SEQ ID NO: 100449 - DNA, 26 bp, Homo sapiens
gttcaatgcatgagacgtgcacacca

SEQ ID NO: 100450 - DNA, 26 bp, Homo sapiens
ttcaatgcatgagacgtgcacaccaa

SEQ ID NO: 100451 - DNA, 26 bp, Homo sapiens
tcaatgcatgagacgtgcacaccaaa

SEQ ID NO: 100452 - DNA, 26 bp, Homo sapiens
caatgcatgagacgtgcacaccaaaa

SEQ ID NO: 100453 - DNA, 26 bp, Homo sapiens
aatgcatgagacgtgcacaccaaaag

SEQ ID NO: 100454 - DNA, 26 bp, Homo sapiens
atgcatgagacgtgcacaccaaaagc

SEQ ID NO: 100455 - DNA, 26 bp, Homo sapiens
tgcatgagacgtgcacaccaaaagct

SEQ ID NO: 100456 - DNA, 26 bp, Homo sapiens
gcatgagacgtgcacaccaaaagctt

SEQ ID NO: 100457 - DNA, 26 bp, Homo sapiens
catgagacgtgcacaccaaaagcttt

SEQ ID NO: 100458 - DNA, 26 bp, Homo sapiens
atgagacgtgcacaccaaaagctttc

SEQ ID NO: 100459 - DNA, 26 bp, Homo sapiens
tgagacgtgcacaccaaaagctttca

SEQ ID NO: 100460 - DNA, 26 bp, Homo sapiens
gagacgtgcacaccaaaagctttcat

SEQ ID NO: 100461 - DNA, 26 bp, Homo sapiens
agacgtgcacaccaaaagctttcatg

SEQ ID NO: 100462 - DNA, 26 bp, Homo sapiens
gacgtgcacaccaaaagctttcatgt

SEQ ID NO: 100463 - DNA, 26 bp, Homo sapiens
acgtgcacaccaaaagctttcatgtc

SEQ ID NO: 100464 - DNA, 26 bp, Homo sapiens
cgtgcacaccaaaagctttcatgtcc

SEQ ID NO: 100465 - DNA, 26 bp, Homo sapiens
gtgcacaccaaaagctttcatgtccc

SEQ ID NO: 100466 - DNA, 26 bp, Homo sapiens
tgcacaccaaaagctttcatgtcccg

SEQ ID NO: 100467 - DNA, 26 bp, Homo sapiens
gcacaccaaaagctttcatgtcccgt

SEQ ID NO: 100468 - DNA, 26 bp, Homo sapiens
cacaccaaaagctttcatgtcccgtc

SEQ ID NO: 100469 - DNA, 26 bp, Homo sapiens
acaccaaaagctttcatgtcccgtct

SEQ ID NO: 100470 - DNA, 26 bp, Homo sapiens
caccaaaagctttcatgtcccgtctt

SEQ ID NO: 100471 - DNA, 26 bp, Homo sapiens
accaaaagctttcatgtcccgtctta

SEQ ID NO: 100472 - DNA, 26 bp, Homo sapiens
ccaaaagctttcatgtcccgtcttaa

SEQ ID NO: 100473 - DNA, 26 bp, Homo sapiens
caaaagctttcatgtcccgtcttaag

SEQ ID NO: 100474 - DNA, 26 bp, Homo sapiens
aaaagctttcatgtcccgtcttaagc

SEQ ID NO: 100475 - DNA, 26 bp, Homo sapiens
aaagctttcatgtcccgtcttaagct

SEQ ID NO: 100476 - DNA, 26 bp, Homo sapiens
aagctttcatgtcccgtcttaagctg

SEQ ID NO: 100477 - DNA, 26 bp, Homo sapiens
agctttcatgtcccgtcttaagctgt

SEQ ID NO: 100478 - DNA, 26 bp, Homo sapiens
gctttcatgtcccgtcttaagctgtc

SEQ ID NO: 100479 - DNA, 26 bp, Homo sapiens
ctttcatgtcccgtcttaagctgtca

SEQ ID NO: 100480 - DNA, 26 bp, Homo sapiens
tttcatgtcccgtcttaagctgtcat

SEQ ID NO: 100481 - DNA, 26 bp, Homo sapiens
ttcatgtcccgtcttaagctgtcatt

SEQ ID NO: 100482 - DNA, 26 bp, Homo sapiens
tcatgtcccgtcttaagctgtcattg

SEQ ID NO: 100483 - DNA, 26 bp, Homo sapiens
catgtcccgtcttaagctgtcattga

SEQ ID NO: 100484 - DNA, 26 bp, Homo sapiens
atgtcccgtcttaagctgtcattgaa

SEQ ID NO: 100485 - DNA, 26 bp, Homo sapiens
tgtcccgtcttaagctgtcattgaaa

SEQ ID NO: 100486 - DNA, 26 bp, Homo sapiens
gtcccgtcttaagctgtcattgaaac

SEQ ID NO: 100487 - DNA, 26 bp, Homo sapiens
tcccgtcttaagctgtcattgaaacc

SEQ ID NO: 100488 - DNA, 26 bp, Homo sapiens
cccgtcttaagctgtcattgaaacct

SEQ ID NO: 100489 - DNA, 26 bp, Homo sapiens
ccgtcttaagctgtcattgaaacctt

SEQ ID NO: 100490 - DNA, 26 bp, Homo sapiens
cgtcttaagctgtcattgaaaccttc

SEQ ID NO: 100491 - DNA, 26 bp, Homo sapiens
gtcttaagctgtcattgaaaccttcc

SEQ ID NO: 100492 - DNA, 26 bp, Homo sapiens
tcttaagctgtcattgaaaccttcca

SEQ ID NO: 100493 - DNA, 26 bp, Homo sapiens
cttaagctgtcattgaaaccttccac

SEQ ID NO: 100494 - DNA, 26 bp, Homo sapiens
ttaagctgtcattgaaaccttccact

SEQ ID NO: 100495 - DNA, 26 bp, Homo sapiens
taagctgtcattgaaaccttccactg

SEQ ID NO: 100496 - DNA, 26 bp, Homo sapiens
aagctgtcattgaaaccttccactgc

SEQ ID NO: 100497 - DNA, 26 bp, Homo sapiens
agctgtcattgaaaccttccactgca

SEQ ID NO: 100498 - DNA, 26 bp, Homo sapiens
gctgtcattgaaaccttccactgcat

SEQ ID NO: 100499 - DNA, 26 bp, Homo sapiens
ctgtcattgaaaccttccactgcata

SEQ ID NO: 100500 - DNA, 26 bp, Homo sapiens
tgtcattgaaaccttccactgcatat

SEQ ID NO: 100501 - DNA, 26 bp, Homo sapiens
gtcattgaaaccttccactgcatatt

SEQ ID NO: 100502 - DNA, 26 bp, Homo sapiens
tcattgaaaccttccactgcatattt

SEQ ID NO: 100503 - DNA, 26 bp, Homo sapiens
cattgaaaccttccactgcatatttg

SEQ ID NO: 100504 - DNA, 26 bp, Homo sapiens
attgaaaccttccactgcatatttgg

SEQ ID NO: 100505 - DNA, 26 bp, Homo sapiens
ttgaaaccttccactgcatatttgga

SEQ ID NO: 100506 - DNA, 26 bp, Homo sapiens
tgaaaccttccactgcatatttggat

SEQ ID NO: 100507 - DNA, 26 bp, Homo sapiens
gaaaccttccactgcatatttggatg

SEQ ID NO: 100508 - DNA, 26 bp, Homo sapiens
aaaccttccactgcatatttggatgg

SEQ ID NO: 100509 - DNA, 26 bp, Homo sapiens
aaccttccactgcatatttggatgga

SEQ ID NO: 100510 - DNA, 26 bp, Homo sapiens
accttccactgcatatttggatggag

SEQ ID NO: 100511 - DNA, 26 bp, Homo sapiens
ccttccactgcatatttggatggagt

SEQ ID NO: 100512 - DNA, 26 bp, Homo sapiens
cttccactgcatatttggatggagta

SEQ ID NO: 100513 - DNA, 26 bp, Homo sapiens
ttccactgcatatttggatggagtat

SEQ ID NO: 100514 - DNA, 26 bp, Homo sapiens
tccactgcatatttggatggagtata

SEQ ID NO: 100515 - DNA, 26 bp, Homo sapiens
ccactgcatatttggatggagtatag

SEQ ID NO: 100516 - DNA, 26 bp, Homo sapiens
cactgcatatttggatggagtatagc

SEQ ID NO: 100517 - DNA, 26 bp, Homo sapiens
actgcatatttggatggagtatagcc

SEQ ID NO: 100518 - DNA, 26 bp, Homo sapiens
ctgcatatttggatggagtatagccc

SEQ ID NO: 100519 - DNA, 26 bp, Homo sapiens
tgcatatttggatggagtatagcccc

SEQ ID NO: 100520 - DNA, 26 bp, Homo sapiens
gcatatttggatggagtatagccccc

SEQ ID NO: 100521 - DNA, 26 bp, Homo sapiens
catatttggatggagtatagccccct

SEQ ID NO: 100522 - DNA, 26 bp, Homo sapiens
atatttggatggagtatagccccctc

SEQ ID NO: 100523 - DNA, 26 bp, Homo sapiens
tatttggatggagtatagccccctcc

SEQ ID NO: 100524 - DNA, 26 bp, Homo sapiens
atttggatggagtatagccccctcca

SEQ ID NO: 100525 - DNA, 26 bp, Homo sapiens
tttggatggagtatagccccctccaa

SEQ ID NO: 100526 - DNA, 26 bp, Homo sapiens
ttggatggagtatagccccctccaac

SEQ ID NO: 100527 - DNA, 26 bp, Homo sapiens
tggatggagtatagccccctccaacg

SEQ ID NO: 100528 - DNA, 26 bp, Homo sapiens
ggatggagtatagccccctccaacga

SEQ ID NO: 100529 - DNA, 26 bp, Homo sapiens
gatggagtatagccccctccaacgat

SEQ ID NO: 100530 - DNA, 26 bp, Homo sapiens
atggagtatagccccctccaacgatt

SEQ ID NO: 100531 - DNA, 26 bp, Homo sapiens
tggagtatagccccctccaacgattg

SEQ ID NO: 100532 - DNA, 26 bp, Homo sapiens
ggagtatagccccctccaacgattgc

SEQ ID NO: 100533 - DNA, 26 bp, Homo sapiens
gagtatagccccctccaacgattgca

SEQ ID NO: 100534 - DNA, 26 bp, Homo sapiens
agtatagccccctccaacgattgcaa

SEQ ID NO: 100535 - DNA, 26 bp, Homo sapiens
gtatagccccctccaacgattgcaag

SEQ ID NO: 100536 - DNA, 26 bp, Homo sapiens
tatagccccctccaacgattgcaagg

SEQ ID NO: 100537 - DNA, 26 bp, Homo sapiens
atagccccctccaacgattgcaaggc

SEQ ID NO: 100538 - DNA, 26 bp, Homo sapiens
tagccccctccaacgattgcaaggcg

SEQ ID NO: 100539 - DNA, 26 bp, Homo sapiens
agccccctccaacgattgcaaggcga

SEQ ID NO: 100540 - DNA, 26 bp, Homo sapiens
gccccctccaacgattgcaaggcgac

SEQ ID NO: 100541 - DNA, 26 bp, Homo sapiens
ccccctccaacgattgcaaggcgacc

SEQ ID NO: 100542 - DNA, 26 bp, Homo sapiens
cccctccaacgattgcaaggcgacct

SEQ ID NO: 100543 - DNA, 26 bp, Homo sapiens
ccctccaacgattgcaaggcgacctc

SEQ ID NO: 100544 - DNA, 26 bp, Homo sapiens
cctccaacgattgcaaggcgacctcc

SEQ ID NO: 100545 - DNA, 26 bp, Homo sapiens
ctccaacgattgcaaggcgacctcca

SEQ ID NO: 100546 - DNA, 26 bp, Homo sapiens
tccaacgattgcaaggcgacctccaa

SEQ ID NO: 100547 - DNA, 26 bp, Homo sapiens
ccaacgattgcaaggcgacctccaac

SEQ ID NO: 100548 - DNA, 26 bp, Homo sapiens
caacgattgcaaggcgacctccaaca

SEQ ID NO: 100549 - DNA, 26 bp, Homo sapiens
aacgattgcaaggcgacctccaacac

SEQ ID NO: 100550 - DNA, 26 bp, Homo sapiens
acgattgcaaggcgacctccaacact

SEQ ID NO: 100551 - DNA, 26 bp, Homo sapiens
cgattgcaaggcgacctccaacactg

SEQ ID NO: 100552 - DNA, 26 bp, Homo sapiens
gattgcaaggcgacctccaacactgg

SEQ ID NO: 100553 - DNA, 26 bp, Homo sapiens
attgcaaggcgacctccaacactgga

SEQ ID NO: 100554 - DNA, 26 bp, Homo sapiens
ttgcaaggcgacctccaacactggag

SEQ ID NO: 100555 - DNA, 26 bp, Homo sapiens
tgcaaggcgacctccaacactggaga

SEQ ID NO: 100556 - DNA, 26 bp, Homo sapiens
gcaaggcgacctccaacactggagac

SEQ ID NO: 100557 - DNA, 26 bp, Homo sapiens
caaggcgacctccaacactggagaca

SEQ ID NO: 100558 - DNA, 26 bp, Homo sapiens
aaggcgacctccaacactggagacat

SEQ ID NO: 100559 - DNA, 26 bp, Homo sapiens
aggcgacctccaacactggagacatt

SEQ ID NO: 100560 - DNA, 26 bp, Homo sapiens
ggcgacctccaacactggagacatta

SEQ ID NO: 100561 - DNA, 26 bp, Homo sapiens
gcgacctccaacactggagacattaa

SEQ ID NO: 100562 - DNA, 26 bp, Homo sapiens
cgacctccaacactggagacattaat

SEQ ID NO: 100563 - DNA, 26 bp, Homo sapiens
gacctccaacactggagacattaata

SEQ ID NO: 100564 - DNA, 26 bp, Homo sapiens
acctccaacactggagacattaataa

SEQ ID NO: 100565 - DNA, 26 bp, Homo sapiens
cctccaacactggagacattaataac

SEQ ID NO: 100566 - DNA, 26 bp, Homo sapiens
ctccaacactggagacattaataact

SEQ ID NO: 100567 - DNA, 26 bp, Homo sapiens
tccaacactggagacattaataactc

SEQ ID NO: 100568 - DNA, 26 bp, Homo sapiens
ccaacactggagacattaataactct

SEQ ID NO: 100569 - DNA, 26 bp, Homo sapiens
caacactggagacattaataactctc

SEQ ID NO: 100570 - DNA, 26 bp, Homo sapiens
aacactggagacattaataactctcc

SEQ ID NO: 100571 - DNA, 26 bp, Homo sapiens
acactggagacattaataactctccc

SEQ ID NO: 100572 - DNA, 26 bp, Homo sapiens
cactggagacattaataactctccct

SEQ ID NO: 100573 - DNA, 26 bp, Homo sapiens
actggagacattaataactctccctt

SEQ ID NO: 100574 - DNA, 26 bp, Homo sapiens
ctggagacattaataactctcccttg

SEQ ID NO: 100575 - DNA, 26 bp, Homo sapiens
tggagacattaataactctcccttga

SEQ ID NO: 100576 - DNA, 26 bp, Homo sapiens
ggagacattaataactctcccttgag

SEQ ID NO: 100577 - DNA, 26 bp, Homo sapiens
gagacattaataactctcccttgagc

SEQ ID NO: 100578 - DNA, 26 bp, Homo sapiens
agacattaataactctcccttgagct

SEQ ID NO: 100579 - DNA, 26 bp, Homo sapiens
gacattaataactctcccttgagctt

SEQ ID NO: 100580 - DNA, 26 bp, Homo sapiens
acattaataactctcccttgagcttt

SEQ ID NO: 100581 - DNA, 26 bp, Homo sapiens
cattaataactctcccttgagctttc

SEQ ID NO: 100582 - DNA, 26 bp, Homo sapiens
attaataactctcccttgagctttct

SEQ ID NO: 100583 - DNA, 26 bp, Homo sapiens
ttaataactctcccttgagctttctt

SEQ ID NO: 100584 - DNA, 26 bp, Homo sapiens
taataactctcccttgagctttcttg

SEQ ID NO: 100585 - DNA, 26 bp, Homo sapiens
aataactctcccttgagctttcttga

SEQ ID NO: 100586 - DNA, 26 bp, Homo sapiens
ataactctcccttgagctttcttgac

SEQ ID NO: 100587 - DNA, 26 bp, Homo sapiens
taactctcccttgagctttcttgacc

SEQ ID NO: 100588 - DNA, 26 bp, Homo sapiens
aactctcccttgagctttcttgacca

SEQ ID NO: 100589 - DNA, 26 bp, Homo sapiens
actctcccttgagctttcttgaccaa

SEQ ID NO: 100590 - DNA, 26 bp, Homo sapiens
ctctcccttgagctttcttgaccaaa

SEQ ID NO: 100591 - DNA, 26 bp, Homo sapiens
tctcccttgagctttcttgaccaaag

SEQ ID NO: 100592 - DNA, 26 bp, Homo sapiens
ctcccttgagctttcttgaccaaagg

SEQ ID NO: 100593 - DNA, 26 bp, Homo sapiens
tcccttgagctttcttgaccaaagga

SEQ ID NO: 100594 - DNA, 26 bp, Homo sapiens
cccttgagctttcttgaccaaaggaa

SEQ ID NO: 100595 - DNA, 26 bp, Homo sapiens
ccttgagctttcttgaccaaaggaag

SEQ ID NO: 100596 - DNA, 26 bp, Homo sapiens
cttgagctttcttgaccaaaggaagc

SEQ ID NO: 100597 - DNA, 26 bp, Homo sapiens
ttgagctttcttgaccaaaggaagca

SEQ ID NO: 100598 - DNA, 26 bp, Homo sapiens
tgagctttcttgaccaaaggaagcat

SEQ ID NO: 100599 - DNA, 26 bp, Homo sapiens
gagctttcttgaccaaaggaagcata

SEQ ID NO: 100600 - DNA, 26 bp, Homo sapiens
agctttcttgaccaaaggaagcatat

SEQ ID NO: 100601 - DNA, 26 bp, Homo sapiens
gctttcttgaccaaaggaagcatatt

SEQ ID NO: 100602 - DNA, 26 bp, Homo sapiens
ctttcttgaccaaaggaagcatattt

SEQ ID NO: 100603 - DNA, 26 bp, Homo sapiens
tttcttgaccaaaggaagcatattta

SEQ ID NO: 100604 - DNA, 26 bp, Homo sapiens
ttcttgaccaaaggaagcatatttag

SEQ ID NO: 100605 - DNA, 26 bp, Homo sapiens
tcttgaccaaaggaagcatatttagt

SEQ ID NO: 100606 - DNA, 26 bp, Homo sapiens
cttgaccaaaggaagcatatttagtg

SEQ ID NO: 100607 - DNA, 26 bp, Homo sapiens
ttgaccaaaggaagcatatttagtgt

SEQ ID NO: 100608 - DNA, 26 bp, Homo sapiens
tgaccaaaggaagcatatttagtgtc

SEQ ID NO: 100609 - DNA, 26 bp, Homo sapiens
gaccaaaggaagcatatttagtgtca

SEQ ID NO: 100610 - DNA, 26 bp, Homo sapiens
accaaaggaagcatatttagtgtcac

SEQ ID NO: 100611 - DNA, 26 bp, Homo sapiens
ccaaaggaagcatatttagtgtcaca

SEQ ID NO: 100612 - DNA, 26 bp, Homo sapiens
caaaggaagcatatttagtgtcacac

SEQ ID NO: 100613 - DNA, 26 bp, Homo sapiens
aaaggaagcatatttagtgtcacact

SEQ ID NO: 100614 - DNA, 26 bp, Homo sapiens
aaggaagcatatttagtgtcacactg

SEQ ID NO: 100615 - DNA, 26 bp, Homo sapiens
aggaagcatatttagtgtcacactga

SEQ ID NO: 100616 - DNA, 26 bp, Homo sapiens
ggaagcatatttagtgtcacactgat

SEQ ID NO: 100617 - DNA, 26 bp, Homo sapiens
gaagcatatttagtgtcacactgatg

SEQ ID NO: 100618 - DNA, 26 bp, Homo sapiens
aagcatatttagtgtcacactgatga

SEQ ID NO: 100619 - DNA, 26 bp, Homo sapiens
agcatatttagtgtcacactgatgag

SEQ ID NO: 100620 - DNA, 26 bp, Homo sapiens
gcatatttagtgtcacactgatgagt

SEQ ID NO: 100621 - DNA, 26 bp, Homo sapiens
catatttagtgtcacactgatgagtc

SEQ ID NO: 100622 - DNA, 26 bp, Homo sapiens
atatttagtgtcacactgatgagtcc

SEQ ID NO: 100623 - DNA, 26 bp, Homo sapiens
tatttagtgtcacactgatgagtcca

SEQ ID NO: 100624 - DNA, 26 bp, Homo sapiens
atttagtgtcacactgatgagtccaa

SEQ ID NO: 100625 - DNA, 26 bp, Homo sapiens
tttagtgtcacactgatgagtccaaa

SEQ ID NO: 100626 - DNA, 26 bp, Homo sapiens
ttagtgtcacactgatgagtccaaac

SEQ ID NO: 100627 - DNA, 26 bp, Homo sapiens
tagtgtcacactgatgagtccaaaca

SEQ ID NO: 100628 - DNA, 26 bp, Homo sapiens
agtgtcacactgatgagtccaaacag

SEQ ID NO: 100629 - DNA, 26 bp, Homo sapiens
gtgtcacactgatgagtccaaacagg

SEQ ID NO: 100630 - DNA, 26 bp, Homo sapiens
tgtcacactgatgagtccaaacaggt

SEQ ID NO: 100631 - DNA, 26 bp, Homo sapiens
gtcacactgatgagtccaaacaggtt

SEQ ID NO: 100632 - DNA, 26 bp, Homo sapiens
tcacactgatgagtccaaacaggttc

SEQ ID NO: 100633 - DNA, 26 bp, Homo sapiens
cacactgatgagtccaaacaggttca

SEQ ID NO: 100634 - DNA, 26 bp, Homo sapiens
acactgatgagtccaaacaggttcac

SEQ ID NO: 100635 - DNA, 26 bp, Homo sapiens
cactgatgagtccaaacaggttcact

SEQ ID NO: 100636 - DNA, 26 bp, Homo sapiens
actgatgagtccaaacaggttcactt

SEQ ID NO: 100637 - DNA, 26 bp, Homo sapiens
ctgatgagtccaaacaggttcacttc

SEQ ID NO: 100638 - DNA, 26 bp, Homo sapiens
tgatgagtccaaacaggttcacttca

SEQ ID NO: 100639 - DNA, 26 bp, Homo sapiens
gatgagtccaaacaggttcacttcaa

SEQ ID NO: 100640 - DNA, 26 bp, Homo sapiens
atgagtccaaacaggttcacttcaat

SEQ ID NO: 100641 - DNA, 26 bp, Homo sapiens
tgagtccaaacaggttcacttcaata

SEQ ID NO: 100642 - DNA, 26 bp, Homo sapiens
gagtccaaacaggttcacttcaatag

SEQ ID NO: 100643 - DNA, 26 bp, Homo sapiens
agtccaaacaggttcacttcaatagg

SEQ ID NO: 100644 - DNA, 26 bp, Homo sapiens
gtccaaacaggttcacttcaataggt

SEQ ID NO: 100645 - DNA, 26 bp, Homo sapiens
tccaaacaggttcacttcaataggtt

SEQ ID NO: 100646 - DNA, 26 bp, Homo sapiens
ccaaacaggttcacttcaataggttc

SEQ ID NO: 100647 - DNA, 26 bp, Homo sapiens
caaacaggttcacttcaataggttct

SEQ ID NO: 100648 - DNA, 26 bp, Homo sapiens
aaacaggttcacttcaataggttctc

SEQ ID NO: 100649 - DNA, 26 bp, Homo sapiens
aacaggttcacttcaataggttctct

SEQ ID NO: 100650 - DNA, 26 bp, Homo sapiens
acaggttcacttcaataggttctctg

SEQ ID NO: 100651 - DNA, 26 bp, Homo sapiens
caggttcacttcaataggttctctgt

SEQ ID NO: 100652 - DNA, 26 bp, Homo sapiens
aggttcacttcaataggttctctgta

SEQ ID NO: 100653 - DNA, 26 bp, Homo sapiens
ggttcacttcaataggttctctgtag

SEQ ID NO: 100654 - DNA, 26 bp, Homo sapiens
gttcacttcaataggttctctgtagt

SEQ ID NO: 100655 - DNA, 26 bp, Homo sapiens
ttcacttcaataggttctctgtagtc

SEQ ID NO: 100656 - DNA, 26 bp, Homo sapiens
tcacttcaataggttctctgtagtcc

SEQ ID NO: 100657 - DNA, 26 bp, Homo sapiens
cacttcaataggttctctgtagtcct

SEQ ID NO: 100658 - DNA, 26 bp, Homo sapiens
acttcaataggttctctgtagtcctc

SEQ ID NO: 100659 - DNA, 26 bp, Homo sapiens
cttcaataggttctctgtagtcctct

SEQ ID NO: 100660 - DNA, 26 bp, Homo sapiens
ttcaataggttctctgtagtcctcta

SEQ ID NO: 100661 - DNA, 26 bp, Homo sapiens
tcaataggttctctgtagtcctctag

SEQ ID NO: 100662 - DNA, 26 bp, Homo sapiens
caataggttctctgtagtcctctagt

SEQ ID NO: 100663 - DNA, 26 bp, Homo sapiens
aataggttctctgtagtcctctagtg

SEQ ID NO: 100664 - DNA, 26 bp, Homo sapiens
ataggttctctgtagtcctctagtgt

SEQ ID NO: 100665 - DNA, 26 bp, Homo sapiens
taggttctctgtagtcctctagtgtc

SEQ ID NO: 100666 - DNA, 26 bp, Homo sapiens
aggttctctgtagtcctctagtgtca

SEQ ID NO: 100667 - DNA, 26 bp, Homo sapiens
ggttctctgtagtcctctagtgtcag

SEQ ID NO: 100668 - DNA, 26 bp, Homo sapiens
gttctctgtagtcctctagtgtcagc

SEQ ID NO: 100669 - DNA, 26 bp, Homo sapiens
ttctctgtagtcctctagtgtcagcc

SEQ ID NO: 100670 - DNA, 26 bp, Homo sapiens
tctctgtagtcctctagtgtcagcca

SEQ ID NO: 100671 - DNA, 26 bp, Homo sapiens
ctctgtagtcctctagtgtcagccag

SEQ ID NO: 100672 - DNA, 26 bp, Homo sapiens
tctgtagtcctctagtgtcagccagt

SEQ ID NO: 100673 - DNA, 26 bp, Homo sapiens
ctgtagtcctctagtgtcagccagtc

SEQ ID NO: 100674 - DNA, 26 bp, Homo sapiens
tgtagtcctctagtgtcagccagtca

SEQ ID NO: 100675 - DNA, 26 bp, Homo sapiens
gtagtcctctagtgtcagccagtcag

SEQ ID NO: 100676 - DNA, 26 bp, Homo sapiens
tagtcctctagtgtcagccagtcagt

SEQ ID NO: 100677 - DNA, 26 bp, Homo sapiens
agtcctctagtgtcagccagtcagtg

SEQ ID NO: 100678 - DNA, 26 bp, Homo sapiens
gtcctctagtgtcagccagtcagtgg

SEQ ID NO: 100679 - DNA, 26 bp, Homo sapiens
tcctctagtgtcagccagtcagtggg

SEQ ID NO: 100680 - DNA, 26 bp, Homo sapiens
cctctagtgtcagccagtcagtggga

SEQ ID NO: 100681 - DNA, 26 bp, Homo sapiens
ctctagtgtcagccagtcagtgggag

SEQ ID NO: 100682 - DNA, 26 bp, Homo sapiens
tctagtgtcagccagtcagtgggagc

SEQ ID NO: 100683 - DNA, 26 bp, Homo sapiens
ctagtgtcagccagtcagtgggagcc

SEQ ID NO: 100684 - DNA, 26 bp, Homo sapiens
tagtgtcagccagtcagtgggagcca

SEQ ID NO: 100685 - DNA, 26 bp, Homo sapiens
agtgtcagccagtcagtgggagccag

SEQ ID NO: 100686 - DNA, 26 bp, Homo sapiens
gtgtcagccagtcagtgggagccagc

SEQ ID NO: 100687 - DNA, 26 bp, Homo sapiens
tgtcagccagtcagtgggagccagca

SEQ ID NO: 100688 - DNA, 26 bp, Homo sapiens
gtcagccagtcagtgggagccagcac

SEQ ID NO: 100689 - DNA, 26 bp, Homo sapiens
tcagccagtcagtgggagccagcacg

SEQ ID NO: 100690 - DNA, 26 bp, Homo sapiens
cagccagtcagtgggagccagcacgc

SEQ ID NO: 100691 - DNA, 26 bp, Homo sapiens
agccagtcagtgggagccagcacgcc

SEQ ID NO: 100692 - DNA, 26 bp, Homo sapiens
gccagtcagtgggagccagcacgccg

SEQ ID NO: 100693 - DNA, 26 bp, Homo sapiens
ccagtcagtgggagccagcacgccgg

SEQ ID NO: 100694 - DNA, 26 bp, Homo sapiens
cagtcagtgggagccagcacgccggg

SEQ ID NO: 100695 - DNA, 26 bp, Homo sapiens
agtcagtgggagccagcacgccggga

SEQ ID NO: 100696 - DNA, 26 bp, Homo sapiens
gtcagtgggagccagcacgccgggaa

SEQ ID NO: 100697 - DNA, 26 bp, Homo sapiens
tcagtgggagccagcacgccgggaac

SEQ ID NO: 100698 - DNA, 26 bp, Homo sapiens
cagtgggagccagcacgccgggaaca

SEQ ID NO: 100699 - DNA, 26 bp, Homo sapiens
agtgggagccagcacgccgggaacac

SEQ ID NO: 100700 - DNA, 26 bp, Homo sapiens
gtgggagccagcacgccgggaacacc

SEQ ID NO: 100701 - DNA, 26 bp, Homo sapiens
tgggagccagcacgccgggaacacca

SEQ ID NO: 100702 - DNA, 26 bp, Homo sapiens
gggagccagcacgccgggaacaccag

SEQ ID NO: 100703 - DNA, 26 bp, Homo sapiens
ggagccagcacgccgggaacaccagc

SEQ ID NO: 100704 - DNA, 26 bp, Homo sapiens
gagccagcacgccgggaacaccagca

SEQ ID NO: 100705 - DNA, 26 bp, Homo sapiens
agccagcacgccgggaacaccagcat

SEQ ID NO: 100706 - DNA, 26 bp, Homo sapiens
gccagcacgccgggaacaccagcatt

SEQ ID NO: 100707 - DNA, 26 bp, Homo sapiens
ccagcacgccgggaacaccagcatta

SEQ ID NO: 100708 - DNA, 26 bp, Homo sapiens
cagcacgccgggaacaccagcattat

SEQ ID NO: 100709 - DNA, 26 bp, Homo sapiens
agcacgccgggaacaccagcattatt

SEQ ID NO: 100710 - DNA, 26 bp, Homo sapiens
gcacgccgggaacaccagcattattg

SEQ ID NO: 100711 - DNA, 26 bp, Homo sapiens
cacgccgggaacaccagcattattga

SEQ ID NO: 100712 - DNA, 26 bp, Homo sapiens
acgccgggaacaccagcattattgat

SEQ ID NO: 100713 - DNA, 26 bp, Homo sapiens
cgccgggaacaccagcattattgatc

SEQ ID NO: 100714 - DNA, 26 bp, Homo sapiens
gccgggaacaccagcattattgatca

SEQ ID NO: 100715 - DNA, 26 bp, Homo sapiens
ccgggaacaccagcattattgatcag

SEQ ID NO: 100716 - DNA, 26 bp, Homo sapiens
cgggaacaccagcattattgatcaga

SEQ ID NO: 100717 - DNA, 26 bp, Homo sapiens
gggaacaccagcattattgatcagac

SEQ ID NO: 100718 - DNA, 26 bp, Homo sapiens
ggaacaccagcattattgatcagacc

SEQ ID NO: 100719 - DNA, 26 bp, Homo sapiens
gaacaccagcattattgatcagaccc

SEQ ID NO: 100720 - DNA, 26 bp, Homo sapiens
aacaccagcattattgatcagacccc

SEQ ID NO: 100721 - DNA, 26 bp, Homo sapiens
acaccagcattattgatcagacccca

SEQ ID NO: 100722 - DNA, 26 bp, Homo sapiens
caccagcattattgatcagaccccag

SEQ ID NO: 100723 - DNA, 26 bp, Homo sapiens
accagcattattgatcagaccccaga

SEQ ID NO: 100724 - DNA, 26 bp, Homo sapiens
ccagcattattgatcagaccccagag

SEQ ID NO: 100725 - DNA, 26 bp, Homo sapiens
cagcattattgatcagaccccagaga

SEQ ID NO: 100726 - DNA, 26 bp, Homo sapiens
agcattattgatcagaccccagagac

SEQ ID NO: 100727 - DNA, 26 bp, Homo sapiens
gcattattgatcagaccccagagacc

SEQ ID NO: 100728 - DNA, 26 bp, Homo sapiens
cattattgatcagaccccagagacct

SEQ ID NO: 100729 - DNA, 26 bp, Homo sapiens
attattgatcagaccccagagacctt

SEQ ID NO: 100730 - DNA, 26 bp, Homo sapiens
ttattgatcagaccccagagaccttt

SEQ ID NO: 100731 - DNA, 26 bp, Homo sapiens
tattgatcagaccccagagacctttc

SEQ ID NO: 100732 - DNA, 26 bp, Homo sapiens
attgatcagaccccagagacctttct

SEQ ID NO: 100733 - DNA, 26 bp, Homo sapiens
ttgatcagaccccagagacctttctc

SEQ ID NO: 100734 - DNA, 26 bp, Homo sapiens
tgatcagaccccagagacctttctcc

SEQ ID NO: 100735 - DNA, 26 bp, Homo sapiens
gatcagaccccagagacctttctccc

SEQ ID NO: 100736 - DNA, 26 bp, Homo sapiens
atcagaccccagagacctttctcccc

SEQ ID NO: 100737 - DNA, 26 bp, Homo sapiens
tcagaccccagagacctttctcccca

SEQ ID NO: 100738 - DNA, 26 bp, Homo sapiens
cagaccccagagacctttctccccaa

SEQ ID NO: 100739 - DNA, 26 bp, Homo sapiens
agaccccagagacctttctccccaac

SEQ ID NO: 100740 - DNA, 26 bp, Homo sapiens
gaccccagagacctttctccccaact

SEQ ID NO: 100741 - DNA, 26 bp, Homo sapiens
accccagagacctttctccccaactt

SEQ ID NO: 100742 - DNA, 26 bp, Homo sapiens
ccccagagacctttctccccaacttg

SEQ ID NO: 100743 - DNA, 26 bp, Homo sapiens
cccagagacctttctccccaacttgg

SEQ ID NO: 100744 - DNA, 26 bp, Homo sapiens
ccagagacctttctccccaacttggt

SEQ ID NO: 100745 - DNA, 26 bp, Homo sapiens
cagagacctttctccccaacttggtt

SEQ ID NO: 100746 - DNA, 26 bp, Homo sapiens
agagacctttctccccaacttggttc

SEQ ID NO: 100747 - DNA, 26 bp, Homo sapiens
gagacctttctccccaacttggttct

SEQ ID NO: 100748 - DNA, 26 bp, Homo sapiens
agacctttctccccaacttggttctt

SEQ ID NO: 100749 - DNA, 26 bp, Homo sapiens
gacctttctccccaacttggttcttc

SEQ ID NO: 100750 - DNA, 26 bp, Homo sapiens
acctttctccccaacttggttcttca

SEQ ID NO: 100751 - DNA, 26 bp, Homo sapiens
cctttctccccaacttggttcttcac

SEQ ID NO: 100752 - DNA, 26 bp, Homo sapiens
ctttctccccaacttggttcttcacc

SEQ ID NO: 100753 - DNA, 26 bp, Homo sapiens
tttctccccaacttggttcttcaccc

SEQ ID NO: 100754 - DNA, 26 bp, Homo sapiens
ttctccccaacttggttcttcaccca

SEQ ID NO: 100755 - DNA, 26 bp, Homo sapiens
tctccccaacttggttcttcacccac

SEQ ID NO: 100756 - DNA, 26 bp, Homo sapiens
ctccccaacttggttcttcacccact

SEQ ID NO: 100757 - DNA, 26 bp, Homo sapiens
tccccaacttggttcttcacccactg

SEQ ID NO: 100758 - DNA, 26 bp, Homo sapiens
ccccaacttggttcttcacccactgg

SEQ ID NO: 100759 - DNA, 26 bp, Homo sapiens
cccaacttggttcttcacccactggg

SEQ ID NO: 100760 - DNA, 26 bp, Homo sapiens
ccaacttggttcttcacccactgggc

SEQ ID NO: 100761 - DNA, 26 bp, Homo sapiens
caacttggttcttcacccactgggca

SEQ ID NO: 100762 - DNA, 26 bp, Homo sapiens
aacttggttcttcacccactgggcag

SEQ ID NO: 100763 - DNA, 26 bp, Homo sapiens
acttggttcttcacccactgggcagt

SEQ ID NO: 100764 - DNA, 26 bp, Homo sapiens
cttggttcttcacccactgggcagtc

SEQ ID NO: 100765 - DNA, 26 bp, Homo sapiens
ttggttcttcacccactgggcagtcc

SEQ ID NO: 100766 - DNA, 26 bp, Homo sapiens
tggttcttcacccactgggcagtcct

SEQ ID NO: 100767 - DNA, 26 bp, Homo sapiens
ggttcttcacccactgggcagtcctc

SEQ ID NO: 100768 - DNA, 26 bp, Homo sapiens
gttcttcacccactgggcagtcctct

SEQ ID NO: 100769 - DNA, 26 bp, Homo sapiens
ttcttcacccactgggcagtcctctt

SEQ ID NO: 100770 - DNA, 26 bp, Homo sapiens
tcttcacccactgggcagtcctcttg

SEQ ID NO: 100771 - DNA, 26 bp, Homo sapiens
cttcacccactgggcagtcctcttga

SEQ ID NO: 100772 - DNA, 26 bp, Homo sapiens
ttcacccactgggcagtcctcttgac

SEQ ID NO: 100773 - DNA, 26 bp, Homo sapiens
tcacccactgggcagtcctcttgaca

SEQ ID NO: 100774 - DNA, 26 bp, Homo sapiens
cacccactgggcagtcctcttgacat

SEQ ID NO: 100775 - DNA, 26 bp, Homo sapiens
acccactgggcagtcctcttgacatt

SEQ ID NO: 100776 - DNA, 26 bp, Homo sapiens
cccactgggcagtcctcttgacattc

SEQ ID NO: 100777 - DNA, 26 bp, Homo sapiens
ccactgggcagtcctcttgacattct

SEQ ID NO: 100778 - DNA, 26 bp, Homo sapiens
cactgggcagtcctcttgacattctc

SEQ ID NO: 100779 - DNA, 26 bp, Homo sapiens
actgggcagtcctcttgacattctct

SEQ ID NO: 100780 - DNA, 26 bp, Homo sapiens
ctgggcagtcctcttgacattctctg

SEQ ID NO: 100781 - DNA, 26 bp, Homo sapiens
tgggcagtcctcttgacattctctgg

SEQ ID NO: 100782 - DNA, 26 bp, Homo sapiens
gggcagtcctcttgacattctctggg

SEQ ID NO: 100783 - DNA, 26 bp, Homo sapiens
ggcagtcctcttgacattctctgggt

SEQ ID NO: 100784 - DNA, 26 bp, Homo sapiens
gcagtcctcttgacattctctgggtc

SEQ ID NO: 100785 - DNA, 26 bp, Homo sapiens
cagtcctcttgacattctctgggtcg

SEQ ID NO: 100786 - DNA, 26 bp, Homo sapiens
agtcctcttgacattctctgggtcgg

SEQ ID NO: 100787 - DNA, 26 bp, Homo sapiens
gtcctcttgacattctctgggtcggt

SEQ ID NO: 100788 - DNA, 26 bp, Homo sapiens
tcctcttgacattctctgggtcggtc

SEQ ID NO: 100789 - DNA, 26 bp, Homo sapiens
cctcttgacattctctgggtcggtca

SEQ ID NO: 100790 - DNA, 26 bp, Homo sapiens
ctcttgacattctctgggtcggtcac

SEQ ID NO: 100791 - DNA, 26 bp, Homo sapiens
tcttgacattctctgggtcggtcaca

SEQ ID NO: 100792 - DNA, 26 bp, Homo sapiens
cttgacattctctgggtcggtcacat

SEQ ID NO: 100793 - DNA, 26 bp, Homo sapiens
ttgacattctctgggtcggtcacatc

SEQ ID NO: 100794 - DNA, 26 bp, Homo sapiens
tgacattctctgggtcggtcacatcc

SEQ ID NO: 100795 - DNA, 26 bp, Homo sapiens
gacattctctgggtcggtcacatcca

SEQ ID NO: 100796 - DNA, 26 bp, Homo sapiens
acattctctgggtcggtcacatccag

SEQ ID NO: 100797 - DNA, 26 bp, Homo sapiens
cattctctgggtcggtcacatccaga

SEQ ID NO: 100798 - DNA, 26 bp, Homo sapiens
attctctgggtcggtcacatccagaa

SEQ ID NO: 100799 - DNA, 26 bp, Homo sapiens
ttctctgggtcggtcacatccagaag

SEQ ID NO: 100800 - DNA, 26 bp, Homo sapiens
tctctgggtcggtcacatccagaagc

SEQ ID NO: 100801 - DNA, 26 bp, Homo sapiens
ctctgggtcggtcacatccagaagca

SEQ ID NO: 100802 - DNA, 26 bp, Homo sapiens
tctgggtcggtcacatccagaagcac

SEQ ID NO: 100803 - DNA, 26 bp, Homo sapiens
ctgggtcggtcacatccagaagcaca

SEQ ID NO: 100804 - DNA, 26 bp, Homo sapiens
tgggtcggtcacatccagaagcacag

SEQ ID NO: 100805 - DNA, 26 bp, Homo sapiens
gggtcggtcacatccagaagcacagt

SEQ ID NO: 100806 - DNA, 26 bp, Homo sapiens
ggtcggtcacatccagaagcacagta

SEQ ID NO: 100807 - DNA, 26 bp, Homo sapiens
gtcggtcacatccagaagcacagtac

SEQ ID NO: 100808 - DNA, 26 bp, Homo sapiens
tcggtcacatccagaagcacagtacg

SEQ ID NO: 100809 - DNA, 26 bp, Homo sapiens
cggtcacatccagaagcacagtacga

SEQ ID NO: 100810 - DNA, 26 bp, Homo sapiens
ggtcacatccagaagcacagtacgaa

SEQ ID NO: 100811 - DNA, 26 bp, Homo sapiens
gtcacatccagaagcacagtacgaag

SEQ ID NO: 100812 - DNA, 26 bp, Homo sapiens
tcacatccagaagcacagtacgaagt

SEQ ID NO: 100813 - DNA, 26 bp, Homo sapiens
cacatccagaagcacagtacgaagtc

SEQ ID NO: 100814 - DNA, 26 bp, Homo sapiens
acatccagaagcacagtacgaagtct

SEQ ID NO: 100815 - DNA, 26 bp, Homo sapiens
catccagaagcacagtacgaagtctc

SEQ ID NO: 100816 - DNA, 26 bp, Homo sapiens
atccagaagcacagtacgaagtctct

SEQ ID NO: 100817 - DNA, 26 bp, Homo sapiens
tccagaagcacagtacgaagtctctc

SEQ ID NO: 100818 - DNA, 26 bp, Homo sapiens
ccagaagcacagtacgaagtctctct

SEQ ID NO: 100819 - DNA, 26 bp, Homo sapiens
cagaagcacagtacgaagtctctctg

SEQ ID NO: 100820 - DNA, 26 bp, Homo sapiens
agaagcacagtacgaagtctctctga

SEQ ID NO: 100821 - DNA, 26 bp, Homo sapiens
gaagcacagtacgaagtctctctgag

SEQ ID NO: 100822 - DNA, 26 bp, Homo sapiens
aagcacagtacgaagtctctctgagg

SEQ ID NO: 100823 - DNA, 26 bp, Homo sapiens
agcacagtacgaagtctctctgaggt

SEQ ID NO: 100824 - DNA, 26 bp, Homo sapiens
gcacagtacgaagtctctctgaggtt

SEQ ID NO: 100825 - DNA, 26 bp, Homo sapiens
cacagtacgaagtctctctgaggttt

SEQ ID NO: 100826 - DNA, 26 bp, Homo sapiens
acagtacgaagtctctctgaggtttc

SEQ ID NO: 100827 - DNA, 26 bp, Homo sapiens
cagtacgaagtctctctgaggtttct

SEQ ID NO: 100828 - DNA, 26 bp, Homo sapiens
agtacgaagtctctctgaggtttctg

SEQ ID NO: 100829 - DNA, 26 bp, Homo sapiens
gtacgaagtctctctgaggtttctgc

SEQ ID NO: 100830 - DNA, 26 bp, Homo sapiens
tacgaagtctctctgaggtttctgcc

SEQ ID NO: 100831 - DNA, 26 bp, Homo sapiens
acgaagtctctctgaggtttctgcct

SEQ ID NO: 100832 - DNA, 26 bp, Homo sapiens
cgaagtctctctgaggtttctgcctt

SEQ ID NO: 100833 - DNA, 26 bp, Homo sapiens
gaagtctctctgaggtttctgccttt

SEQ ID NO: 100834 - DNA, 26 bp, Homo sapiens
aagtctctctgaggtttctgccttta

SEQ ID NO: 100835 - DNA, 26 bp, Homo sapiens
agtctctctgaggtttctgcctttaa

SEQ ID NO: 100836 - DNA, 26 bp, Homo sapiens
gtctctctgaggtttctgcctttaaa

SEQ ID NO: 100837 - DNA, 26 bp, Homo sapiens
tctctctgaggtttctgcctttaaag

SEQ ID NO: 100838 - DNA, 26 bp, Homo sapiens
ctctctgaggtttctgcctttaaagc

SEQ ID NO: 100839 - DNA, 26 bp, Homo sapiens
tctctgaggtttctgcctttaaagct

SEQ ID NO: 100840 - DNA, 26 bp, Homo sapiens
ctctgaggtttctgcctttaaagctg

SEQ ID NO: 100841 - DNA, 26 bp, Homo sapiens
tctgaggtttctgcctttaaagctgt

SEQ ID NO: 100842 - DNA, 26 bp, Homo sapiens
ctgaggtttctgcctttaaagctgtt

SEQ ID NO: 100843 - DNA, 26 bp, Homo sapiens
tgaggtttctgcctttaaagctgttg

SEQ ID NO: 100844 - DNA, 26 bp, Homo sapiens
gaggtttctgcctttaaagctgttga

SEQ ID NO: 100845 - DNA, 26 bp, Homo sapiens
aggtttctgcctttaaagctgttgat

SEQ ID NO: 100846 - DNA, 26 bp, Homo sapiens
ggtttctgcctttaaagctgttgatc

SEQ ID NO: 100847 - DNA, 26 bp, Homo sapiens
gtttctgcctttaaagctgttgatcc

SEQ ID NO: 100848 - DNA, 26 bp, Homo sapiens
tttctgcctttaaagctgttgatcct

SEQ ID NO: 100849 - DNA, 26 bp, Homo sapiens
ttctgcctttaaagctgttgatcctg

SEQ ID NO: 100850 - DNA, 26 bp, Homo sapiens
tctgcctttaaagctgttgatcctga

SEQ ID NO: 100851 - DNA, 26 bp, Homo sapiens
ctgcctttaaagctgttgatcctgat

SEQ ID NO: 100852 - DNA, 26 bp, Homo sapiens
tgcctttaaagctgttgatcctgatt

SEQ ID NO: 100853 - DNA, 26 bp, Homo sapiens
gcctttaaagctgttgatcctgattc

SEQ ID NO: 100854 - DNA, 26 bp, Homo sapiens
cctttaaagctgttgatcctgattca

SEQ ID NO: 100855 - DNA, 26 bp, Homo sapiens
ctttaaagctgttgatcctgattcag

SEQ ID NO: 100856 - DNA, 26 bp, Homo sapiens
tttaaagctgttgatcctgattcagt

SEQ ID NO: 100857 - DNA, 26 bp, Homo sapiens
ttaaagctgttgatcctgattcagtc

SEQ ID NO: 100858 - DNA, 26 bp, Homo sapiens
taaagctgttgatcctgattcagtca

SEQ ID NO: 100859 - DNA, 26 bp, Homo sapiens
aaagctgttgatcctgattcagtcag

SEQ ID NO: 100860 - DNA, 26 bp, Homo sapiens
aagctgttgatcctgattcagtcaga

SEQ ID NO: 100861 - DNA, 26 bp, Homo sapiens
agctgttgatcctgattcagtcagac

SEQ ID NO: 100862 - DNA, 26 bp, Homo sapiens
gctgttgatcctgattcagtcagaca

SEQ ID NO: 100863 - DNA, 26 bp, Homo sapiens
ctgttgatcctgattcagtcagacag

SEQ ID NO: 100864 - DNA, 26 bp, Homo sapiens
tgttgatcctgattcagtcagacagg

SEQ ID NO: 100865 - DNA, 26 bp, Homo sapiens
gttgatcctgattcagtcagacaggc

SEQ ID NO: 100866 - DNA, 26 bp, Homo sapiens
ttgatcctgattcagtcagacaggca

SEQ ID NO: 100867 - DNA, 26 bp, Homo sapiens
tgatcctgattcagtcagacaggcag

SEQ ID NO: 100868 - DNA, 26 bp, Homo sapiens
gatcctgattcagtcagacaggcagc

SEQ ID NO: 100869 - DNA, 26 bp, Homo sapiens
atcctgattcagtcagacaggcagcg

SEQ ID NO: 100870 - DNA, 26 bp, Homo sapiens
tcctgattcagtcagacaggcagcga

SEQ ID NO: 100871 - DNA, 26 bp, Homo sapiens
cctgattcagtcagacaggcagcgat

SEQ ID NO: 100872 - DNA, 26 bp, Homo sapiens
ctgattcagtcagacaggcagcgatt

SEQ ID NO: 100873 - DNA, 26 bp, Homo sapiens
tgattcagtcagacaggcagcgatta

SEQ ID NO: 100874 - DNA, 26 bp, Homo sapiens
gattcagtcagacaggcagcgattac

SEQ ID NO: 100875 - DNA, 26 bp, Homo sapiens
attcagtcagacaggcagcgattaca

SEQ ID NO: 100876 - DNA, 26 bp, Homo sapiens
ttcagtcagacaggcagcgattacat

SEQ ID NO: 100877 - DNA, 26 bp, Homo sapiens
tcagtcagacaggcagcgattacatg

SEQ ID NO: 100878 - DNA, 26 bp, Homo sapiens
cagtcagacaggcagcgattacatga

SEQ ID NO: 100879 - DNA, 26 bp, Homo sapiens
agtcagacaggcagcgattacatgaa

SEQ ID NO: 100880 - DNA, 26 bp, Homo sapiens
gtcagacaggcagcgattacatgaaa

SEQ ID NO: 100881 - DNA, 26 bp, Homo sapiens
tcagacaggcagcgattacatgaaat

SEQ ID NO: 100882 - DNA, 26 bp, Homo sapiens
cagacaggcagcgattacatgaaatc

SEQ ID NO: 100883 - DNA, 26 bp, Homo sapiens
agacaggcagcgattacatgaaatcc

SEQ ID NO: 100884 - DNA, 26 bp, Homo sapiens
gacaggcagcgattacatgaaatccc

SEQ ID NO: 100885 - DNA, 26 bp, Homo sapiens
acaggcagcgattacatgaaatccct

SEQ ID NO: 100886 - DNA, 26 bp, Homo sapiens
caggcagcgattacatgaaatccctt

SEQ ID NO: 100887 - DNA, 26 bp, Homo sapiens
aggcagcgattacatgaaatcccttt

SEQ ID NO: 100888 - DNA, 26 bp, Homo sapiens
ggcagcgattacatgaaatccctttt

SEQ ID NO: 100889 - DNA, 26 bp, Homo sapiens
gcagcgattacatgaaatcccttttt

SEQ ID NO: 100890 - DNA, 26 bp, Homo sapiens
cagcgattacatgaaatcccttttta

SEQ ID NO: 100891 - DNA, 26 bp, Homo sapiens
agcgattacatgaaatccctttttat

SEQ ID NO: 100892 - DNA, 26 bp, Homo sapiens
gcgattacatgaaatccctttttatc

SEQ ID NO: 100893 - DNA, 26 bp, Homo sapiens
cgattacatgaaatccctttttatca

SEQ ID NO: 100894 - DNA, 26 bp, Homo sapiens
gattacatgaaatccctttttatcaa

SEQ ID NO: 100895 - DNA, 26 bp, Homo sapiens
attacatgaaatccctttttatcaaa

SEQ ID NO: 100896 - DNA, 26 bp, Homo sapiens
ttacatgaaatccctttttatcaaaa

SEQ ID NO: 100897 - DNA, 26 bp, Homo sapiens
tacatgaaatccctttttatcaaaag

SEQ ID NO: 100898 - DNA, 26 bp, Homo sapiens
acatgaaatccctttttatcaaaagt

SEQ ID NO: 100899 - DNA, 26 bp, Homo sapiens
catgaaatccctttttatcaaaagtt

SEQ ID NO: 100900 - DNA, 26 bp, Homo sapiens
atgaaatccctttttatcaaaagttc

SEQ ID NO: 100901 - DNA, 26 bp, Homo sapiens
tgaaatccctttttatcaaaagttct

SEQ ID NO: 100902 - DNA, 26 bp, Homo sapiens
gaaatccctttttatcaaaagttctg

SEQ ID NO: 100903 - DNA, 26 bp, Homo sapiens
aaatccctttttatcaaaagttctgg

SEQ ID NO: 100904 - DNA, 26 bp, Homo sapiens
aatccctttttatcaaaagttctggc

SEQ ID NO: 100905 - DNA, 26 bp, Homo sapiens
atccctttttatcaaaagttctggct

SEQ ID NO: 100906 - DNA, 26 bp, Homo sapiens
tccctttttatcaaaagttctggctg

SEQ ID NO: 100907 - DNA, 26 bp, Homo sapiens
ccctttttatcaaaagttctggctgc

SEQ ID NO: 100908 - DNA, 26 bp, Homo sapiens
cctttttatcaaaagttctggctgcc

SEQ ID NO: 100909 - DNA, 26 bp, Homo sapiens
ctttttatcaaaagttctggctgcca

SEQ ID NO: 100910 - DNA, 26 bp, Homo sapiens
tttttatcaaaagttctggctgccaa

SEQ ID NO: 100911 - DNA, 26 bp, Homo sapiens
ttttatcaaaagttctggctgccaag

SEQ ID NO: 100912 - DNA, 26 bp, Homo sapiens
tttatcaaaagttctggctgccaagt

SEQ ID NO: 100913 - DNA, 26 bp, Homo sapiens
ttatcaaaagttctggctgccaagtt

SEQ ID NO: 100914 - DNA, 26 bp, Homo sapiens
tatcaaaagttctggctgccaagttt

SEQ ID NO: 100915 - DNA, 26 bp, Homo sapiens
atcaaaagttctggctgccaagtttc

SEQ ID NO: 100916 - DNA, 26 bp, Homo sapiens
tcaaaagttctggctgccaagtttcc

SEQ ID NO: 100917 - DNA, 26 bp, Homo sapiens
caaaagttctggctgccaagtttcca

SEQ ID NO: 100918 - DNA, 26 bp, Homo sapiens
aaaagttctggctgccaagtttccaa

SEQ ID NO: 100919 - DNA, 26 bp, Homo sapiens
aaagttctggctgccaagtttccaaa

SEQ ID NO: 100920 - DNA, 26 bp, Homo sapiens
aagttctggctgccaagtttccaaag

SEQ ID NO: 100921 - DNA, 26 bp, Homo sapiens
agttctggctgccaagtttccaaagc

SEQ ID NO: 100922 - DNA, 26 bp, Homo sapiens
gttctggctgccaagtttccaaagcc

SEQ ID NO: 100923 - DNA, 26 bp, Homo sapiens
ttctggctgccaagtttccaaagccc

SEQ ID NO: 100924 - DNA, 26 bp, Homo sapiens
tctggctgccaagtttccaaagcccg

SEQ ID NO: 100925 - DNA, 26 bp, Homo sapiens
ctggctgccaagtttccaaagcccga

SEQ ID NO: 100926 - DNA, 26 bp, Homo sapiens
tggctgccaagtttccaaagcccgag

SEQ ID NO: 100927 - DNA, 26 bp, Homo sapiens
ggctgccaagtttccaaagcccgagt

SEQ ID NO: 100928 - DNA, 26 bp, Homo sapiens
gctgccaagtttccaaagcccgagtc

SEQ ID NO: 100929 - DNA, 26 bp, Homo sapiens
ctgccaagtttccaaagcccgagtca

SEQ ID NO: 100930 - DNA, 26 bp, Homo sapiens
tgccaagtttccaaagcccgagtcac

SEQ ID NO: 100931 - DNA, 26 bp, Homo sapiens
gccaagtttccaaagcccgagtcaca

SEQ ID NO: 100932 - DNA, 26 bp, Homo sapiens
ccaagtttccaaagcccgagtcacat

SEQ ID NO: 100933 - DNA, 26 bp, Homo sapiens
caagtttccaaagcccgagtcacatc

SEQ ID NO: 100934 - DNA, 26 bp, Homo sapiens
aagtttccaaagcccgagtcacatcc

SEQ ID NO: 100935 - DNA, 26 bp, Homo sapiens
agtttccaaagcccgagtcacatcca

SEQ ID NO: 100936 - DNA, 26 bp, Homo sapiens
gtttccaaagcccgagtcacatccag

SEQ ID NO: 100937 - DNA, 26 bp, Homo sapiens
tttccaaagcccgagtcacatccagt

SEQ ID NO: 100938 - DNA, 26 bp, Homo sapiens
ttccaaagcccgagtcacatccagtg

SEQ ID NO: 100939 - DNA, 26 bp, Homo sapiens
tccaaagcccgagtcacatccagtga

SEQ ID NO: 100940 - DNA, 26 bp, Homo sapiens
ccaaagcccgagtcacatccagtgat

SEQ ID NO: 100941 - DNA, 26 bp, Homo sapiens
caaagcccgagtcacatccagtgata

SEQ ID NO: 100942 - DNA, 26 bp, Homo sapiens
aaagcccgagtcacatccagtgataa

SEQ ID NO: 100943 - DNA, 26 bp, Homo sapiens
aagcccgagtcacatccagtgataaa

SEQ ID NO: 100944 - DNA, 26 bp, Homo sapiens
agcccgagtcacatccagtgataaaa

SEQ ID NO: 100945 - DNA, 26 bp, Homo sapiens
gcccgagtcacatccagtgataaaaa

SEQ ID NO: 100946 - DNA, 26 bp, Homo sapiens
cccgagtcacatccagtgataaaaat

SEQ ID NO: 100947 - DNA, 26 bp, Homo sapiens
ccgagtcacatccagtgataaaaatg

SEQ ID NO: 100948 - DNA, 26 bp, Homo sapiens
cgagtcacatccagtgataaaaatgt

SEQ ID NO: 100949 - DNA, 26 bp, Homo sapiens
gagtcacatccagtgataaaaatgta

SEQ ID NO: 100950 - DNA, 26 bp, Homo sapiens
agtcacatccagtgataaaaatgtac

SEQ ID NO: 100951 - DNA, 26 bp, Homo sapiens
gtcacatccagtgataaaaatgtact

SEQ ID NO: 100952 - DNA, 26 bp, Homo sapiens
tcacatccagtgataaaaatgtactt

SEQ ID NO: 100953 - DNA, 26 bp, Homo sapiens
cacatccagtgataaaaatgtactta

SEQ ID NO: 100954 - DNA, 26 bp, Homo sapiens
acatccagtgataaaaatgtacttat

SEQ ID NO: 100955 - DNA, 26 bp, Homo sapiens
catccagtgataaaaatgtacttatc

SEQ ID NO: 100956 - DNA, 26 bp, Homo sapiens
atccagtgataaaaatgtacttatca

SEQ ID NO: 100957 - DNA, 26 bp, Homo sapiens
tccagtgataaaaatgtacttatcag

SEQ ID NO: 100958 - DNA, 26 bp, Homo sapiens
ccagtgataaaaatgtacttatcagt

SEQ ID NO: 100959 - DNA, 26 bp, Homo sapiens
cagtgataaaaatgtacttatcagtg

SEQ ID NO: 100960 - DNA, 26 bp, Homo sapiens
agtgataaaaatgtacttatcagtga

SEQ ID NO: 100961 - DNA, 26 bp, Homo sapiens
gtgataaaaatgtacttatcagtgat

SEQ ID NO: 100962 - DNA, 26 bp, Homo sapiens
tgataaaaatgtacttatcagtgatg

SEQ ID NO: 100963 - DNA, 26 bp, Homo sapiens
gataaaaatgtacttatcagtgatgt

SEQ ID NO: 100964 - DNA, 26 bp, Homo sapiens
ataaaaatgtacttatcagtgatgtc

SEQ ID NO: 100965 - DNA, 26 bp, Homo sapiens
taaaaatgtacttatcagtgatgtct

SEQ ID NO: 100966 - DNA, 26 bp, Homo sapiens
aaaaatgtacttatcagtgatgtctt

SEQ ID NO: 100967 - DNA, 26 bp, Homo sapiens
aaaatgtacttatcagtgatgtcttc

SEQ ID NO: 100968 - DNA, 26 bp, Homo sapiens
aaatgtacttatcagtgatgtcttca

SEQ ID NO: 100969 - DNA, 26 bp, Homo sapiens
aatgtacttatcagtgatgtcttcaa

SEQ ID NO: 100970 - DNA, 26 bp, Homo sapiens
atgtacttatcagtgatgtcttcaat

SEQ ID NO: 100971 - DNA, 26 bp, Homo sapiens
tgtacttatcagtgatgtcttcaatc

SEQ ID NO: 100972 - DNA, 26 bp, Homo sapiens
gtacttatcagtgatgtcttcaatct

SEQ ID NO: 100973 - DNA, 26 bp, Homo sapiens
tacttatcagtgatgtcttcaatctt

SEQ ID NO: 100974 - DNA, 26 bp, Homo sapiens
acttatcagtgatgtcttcaatcttt

SEQ ID NO: 100975 - DNA, 26 bp, Homo sapiens
cttatcagtgatgtcttcaatcttta

SEQ ID NO: 100976 - DNA, 26 bp, Homo sapiens
ttatcagtgatgtcttcaatctttag

SEQ ID NO: 100977 - DNA, 26 bp, Homo sapiens
tatcagtgatgtcttcaatctttagt

SEQ ID NO: 100978 - DNA, 26 bp, Homo sapiens
atcagtgatgtcttcaatctttagtt

SEQ ID NO: 100979 - DNA, 26 bp, Homo sapiens
tcagtgatgtcttcaatctttagttt

SEQ ID NO: 100980 - DNA, 26 bp, Homo sapiens
cagtgatgtcttcaatctttagtttt

SEQ ID NO: 100981 - DNA, 26 bp, Homo sapiens
agtgatgtcttcaatctttagttttc

SEQ ID NO: 100982 - DNA, 26 bp, Homo sapiens
gtgatgtcttcaatctttagttttcc

SEQ ID NO: 100983 - DNA, 26 bp, Homo sapiens
tgatgtcttcaatctttagttttcct

SEQ ID NO: 100984 - DNA, 26 bp, Homo sapiens
gatgtcttcaatctttagttttcctt

SEQ ID NO: 100985 - DNA, 26 bp, Homo sapiens
atgtcttcaatctttagttttccttt

SEQ ID NO: 100986 - DNA, 26 bp, Homo sapiens
tgtcttcaatctttagttttccttta

SEQ ID NO: 100987 - DNA, 26 bp, Homo sapiens
gtcttcaatctttagttttcctttac

SEQ ID NO: 100988 - DNA, 26 bp, Homo sapiens
tcttcaatctttagttttcctttacg

SEQ ID NO: 100989 - DNA, 26 bp, Homo sapiens
cttcaatctttagttttcctttacga

SEQ ID NO: 100990 - DNA, 26 bp, Homo sapiens
ttcaatctttagttttcctttacgag

SEQ ID NO: 100991 - DNA, 26 bp, Homo sapiens
tcaatctttagttttcctttacgagt

SEQ ID NO: 100992 - DNA, 26 bp, Homo sapiens
caatctttagttttcctttacgagtc

SEQ ID NO: 100993 - DNA, 26 bp, Homo sapiens
aatctttagttttcctttacgagtcc

SEQ ID NO: 100994 - DNA, 26 bp, Homo sapiens
atctttagttttcctttacgagtcca

SEQ ID NO: 100995 - DNA, 26 bp, Homo sapiens
tctttagttttcctttacgagtccac

SEQ ID NO: 100996 - DNA, 26 bp, Homo sapiens
ctttagttttcctttacgagtccaca

SEQ ID NO: 100997 - DNA, 26 bp, Homo sapiens
tttagttttcctttacgagtccacag

SEQ ID NO: 100998 - DNA, 26 bp, Homo sapiens
ttagttttcctttacgagtccacaga

SEQ ID NO: 100999 - DNA, 26 bp, Homo sapiens
tagttttcctttacgagtccacagaa

SEQ ID NO: 101000 - DNA, 26 bp, Homo sapiens
agttttcctttacgagtccacagaaa

SEQ ID NO: 101001 - DNA, 26 bp, Homo sapiens
gttttcctttacgagtccacagaaaa

SEQ ID NO: 101002 - DNA, 26 bp, Homo sapiens
ttttcctttacgagtccacagaaaac

SEQ ID NO: 101003 - DNA, 26 bp, Homo sapiens
tttcctttacgagtccacagaaaacc

SEQ ID NO: 101004 - DNA, 26 bp, Homo sapiens
ttcctttacgagtccacagaaaacca

SEQ ID NO: 101005 - DNA, 26 bp, Homo sapiens
tcctttacgagtccacagaaaaccac

SEQ ID NO: 101006 - DNA, 26 bp, Homo sapiens
cctttacgagtccacagaaaaccaca

SEQ ID NO: 101007 - DNA, 26 bp, Homo sapiens
ctttacgagtccacagaaaaccacag

SEQ ID NO: 101008 - DNA, 26 bp, Homo sapiens
tttacgagtccacagaaaaccacaga

SEQ ID NO: 101009 - DNA, 26 bp, Homo sapiens
ttacgagtccacagaaaaccacagag

SEQ ID NO: 101010 - DNA, 26 bp, Homo sapiens
tacgagtccacagaaaaccacagagg

SEQ ID NO: 101011 - DNA, 26 bp, Homo sapiens
acgagtccacagaaaaccacagagga

SEQ ID NO: 101012 - DNA, 26 bp, Homo sapiens
cgagtccacagaaaaccacagaggat

SEQ ID NO: 101013 - DNA, 26 bp, Homo sapiens
gagtccacagaaaaccacagaggatt

SEQ ID NO: 101014 - DNA, 26 bp, Homo sapiens
agtccacagaaaaccacagaggatta

SEQ ID NO: 101015 - DNA, 26 bp, Homo sapiens
gtccacagaaaaccacagaggattag

SEQ ID NO: 101016 - DNA, 26 bp, Homo sapiens
tccacagaaaaccacagaggattagg

SEQ ID NO: 101017 - DNA, 26 bp, Homo sapiens
ccacagaaaaccacagaggattagga

SEQ ID NO: 101018 - DNA, 26 bp, Homo sapiens
cacagaaaaccacagaggattaggag

SEQ ID NO: 101019 - DNA, 26 bp, Homo sapiens
acagaaaaccacagaggattaggagg

SEQ ID NO: 101020 - DNA, 26 bp, Homo sapiens
cagaaaaccacagaggattaggaggc

SEQ ID NO: 101021 - DNA, 26 bp, Homo sapiens
agaaaaccacagaggattaggaggcc

SEQ ID NO: 101022 - DNA, 26 bp, Homo sapiens
gaaaaccacagaggattaggaggcct

SEQ ID NO: 101023 - DNA, 26 bp, Homo sapiens
aaaaccacagaggattaggaggccta

SEQ ID NO: 101024 - DNA, 26 bp, Homo sapiens
aaaccacagaggattaggaggcctag

SEQ ID NO: 101025 - DNA, 26 bp, Homo sapiens
aaccacagaggattaggaggcctagc

SEQ ID NO: 101026 - DNA, 26 bp, Homo sapiens
accacagaggattaggaggcctagca

SEQ ID NO: 101027 - DNA, 26 bp, Homo sapiens
ccacagaggattaggaggcctagcac

SEQ ID NO: 101028 - DNA, 26 bp, Homo sapiens
cacagaggattaggaggcctagcacc

SEQ ID NO: 101029 - DNA, 26 bp, Homo sapiens
acagaggattaggaggcctagcaccc

SEQ ID NO: 101030 - DNA, 26 bp, Homo sapiens
cagaggattaggaggcctagcaccca

SEQ ID NO: 101031 - DNA, 26 bp, Homo sapiens
agaggattaggaggcctagcacccaa

SEQ ID NO: 101032 - DNA, 26 bp, Homo sapiens
gaggattaggaggcctagcacccaaa

SEQ ID NO: 101033 - DNA, 26 bp, Homo sapiens
aggattaggaggcctagcacccaaaa

SEQ ID NO: 101034 - DNA, 26 bp, Homo sapiens
ggattaggaggcctagcacccaaaag

SEQ ID NO: 101035 - DNA, 26 bp, Homo sapiens
gattaggaggcctagcacccaaaaga

SEQ ID NO: 101036 - DNA, 26 bp, Homo sapiens
attaggaggcctagcacccaaaagag

SEQ ID NO: 101037 - DNA, 26 bp, Homo sapiens
ttaggaggcctagcacccaaaagagc

SEQ ID NO: 101038 - DNA, 26 bp, Homo sapiens
taggaggcctagcacccaaaagagca

SEQ ID NO: 101039 - DNA, 26 bp, Homo sapiens
aggaggcctagcacccaaaagagcat

SEQ ID NO: 101040 - DNA, 26 bp, Homo sapiens
ggaggcctagcacccaaaagagcatt

SEQ ID NO: 101041 - DNA, 26 bp, Homo sapiens
gaggcctagcacccaaaagagcattt

SEQ ID NO: 101042 - DNA, 26 bp, Homo sapiens
aggcctagcacccaaaagagcatttt

SEQ ID NO: 101043 - DNA, 26 bp, Homo sapiens
ggcctagcacccaaaagagcattttt

SEQ ID NO: 101044 - DNA, 26 bp, Homo sapiens
gcctagcacccaaaagagcatttttc

SEQ ID NO: 101045 - DNA, 26 bp, Homo sapiens
cctagcacccaaaagagcatttttcc

SEQ ID NO: 101046 - DNA, 26 bp, Homo sapiens
ctagcacccaaaagagcatttttccc

SEQ ID NO: 101047 - DNA, 26 bp, Homo sapiens
tagcacccaaaagagcatttttcccc

SEQ ID NO: 101048 - DNA, 26 bp, Homo sapiens
agcacccaaaagagcatttttccccc

SEQ ID NO: 101049 - DNA, 26 bp, Homo sapiens
gcacccaaaagagcatttttccccct

SEQ ID NO: 101050 - DNA, 26 bp, Homo sapiens
cacccaaaagagcatttttccccctg

SEQ ID NO: 101051 - DNA, 26 bp, Homo sapiens
acccaaaagagcatttttccccctgt

SEQ ID NO: 101052 - DNA, 26 bp, Homo sapiens
cccaaaagagcatttttccccctgtg

SEQ ID NO: 101053 - DNA, 26 bp, Homo sapiens
ccaaaagagcatttttccccctgtgt

SEQ ID NO: 101054 - DNA, 26 bp, Homo sapiens
caaaagagcatttttccccctgtgtg

SEQ ID NO: 101055 - DNA, 26 bp, Homo sapiens
aaaagagcatttttccccctgtgtgt

SEQ ID NO: 101056 - DNA, 26 bp, Homo sapiens
aaagagcatttttccccctgtgtgtg

SEQ ID NO: 101057 - DNA, 26 bp, Homo sapiens
aagagcatttttccccctgtgtgtga

SEQ ID NO: 101058 - DNA, 26 bp, Homo sapiens
agagcatttttccccctgtgtgtgat

SEQ ID NO: 101059 - DNA, 26 bp, Homo sapiens
gagcatttttccccctgtgtgtgata

SEQ ID NO: 101060 - DNA, 26 bp, Homo sapiens
agcatttttccccctgtgtgtgatag

SEQ ID NO: 101061 - DNA, 26 bp, Homo sapiens
gcatttttccccctgtgtgtgatagg

SEQ ID NO: 101062 - DNA, 26 bp, Homo sapiens
catttttccccctgtgtgtgataggt

SEQ ID NO: 101063 - DNA, 26 bp, Homo sapiens
atttttccccctgtgtgtgataggta

SEQ ID NO: 101064 - DNA, 26 bp, Homo sapiens
tttttccccctgtgtgtgataggtac

SEQ ID NO: 101065 - DNA, 26 bp, Homo sapiens
ttttccccctgtgtgtgataggtaca

SEQ ID NO: 101066 - DNA, 26 bp, Homo sapiens
tttccccctgtgtgtgataggtacac

SEQ ID NO: 101067 - DNA, 26 bp, Homo sapiens
ttccccctgtgtgtgataggtacact

SEQ ID NO: 101068 - DNA, 26 bp, Homo sapiens
tccccctgtgtgtgataggtacactc

SEQ ID NO: 101069 - DNA, 26 bp, Homo sapiens
ccccctgtgtgtgataggtacactcc

SEQ ID NO: 101070 - DNA, 26 bp, Homo sapiens
cccctgtgtgtgataggtacactcct

SEQ ID NO: 101071 - DNA, 26 bp, Homo sapiens
ccctgtgtgtgataggtacactcctt

SEQ ID NO: 101072 - DNA, 26 bp, Homo sapiens
cctgtgtgtgataggtacactccttt

SEQ ID NO: 101073 - DNA, 26 bp, Homo sapiens
ctgtgtgtgataggtacactcctttc

SEQ ID NO: 101074 - DNA, 26 bp, Homo sapiens
tgtgtgtgataggtacactcctttct

SEQ ID NO: 101075 - DNA, 26 bp, Homo sapiens
gtgtgtgataggtacactcctttctt

SEQ ID NO: 101076 - DNA, 26 bp, Homo sapiens
tgtgtgataggtacactcctttcttg

SEQ ID NO: 101077 - DNA, 26 bp, Homo sapiens
gtgtgataggtacactcctttcttgt

SEQ ID NO: 101078 - DNA, 26 bp, Homo sapiens
tgtgataggtacactcctttcttgta

SEQ ID NO: 101079 - DNA, 26 bp, Homo sapiens
gtgataggtacactcctttcttgtat

SEQ ID NO: 101080 - DNA, 26 bp, Homo sapiens
tgataggtacactcctttcttgtata

SEQ ID NO: 101081 - DNA, 26 bp, Homo sapiens
gataggtacactcctttcttgtataa

SEQ ID NO: 101082 - DNA, 26 bp, Homo sapiens
ataggtacactcctttcttgtataat

SEQ ID NO: 101083 - DNA, 26 bp, Homo sapiens
taggtacactcctttcttgtataata

SEQ ID NO: 101084 - DNA, 26 bp, Homo sapiens
aggtacactcctttcttgtataatac

SEQ ID NO: 101085 - DNA, 26 bp, Homo sapiens
ggtacactcctttcttgtataataca

SEQ ID NO: 101086 - DNA, 26 bp, Homo sapiens
gtacactcctttcttgtataatacaa

SEQ ID NO: 101087 - DNA, 26 bp, Homo sapiens
tacactcctttcttgtataatacaag

SEQ ID NO: 101088 - DNA, 26 bp, Homo sapiens
acactcctttcttgtataatacaaga

SEQ ID NO: 101089 - DNA, 26 bp, Homo sapiens
cactcctttcttgtataatacaagaa

SEQ ID NO: 101090 - DNA, 26 bp, Homo sapiens
actcctttcttgtataatacaagaag

SEQ ID NO: 101091 - DNA, 26 bp, Homo sapiens
ctcctttcttgtataatacaagaaga

SEQ ID NO: 101092 - DNA, 26 bp, Homo sapiens
tcctttcttgtataatacaagaagat

SEQ ID NO: 101093 - DNA, 26 bp, Homo sapiens
cctttcttgtataatacaagaagatg

SEQ ID NO: 101094 - DNA, 26 bp, Homo sapiens
ctttcttgtataatacaagaagatgg

SEQ ID NO: 101095 - DNA, 26 bp, Homo sapiens
tttcttgtataatacaagaagatggt

SEQ ID NO: 101096 - DNA, 26 bp, Homo sapiens
ttcttgtataatacaagaagatggtg

SEQ ID NO: 101097 - DNA, 26 bp, Homo sapiens
tcttgtataatacaagaagatggtgt

SEQ ID NO: 101098 - DNA, 26 bp, Homo sapiens
cttgtataatacaagaagatggtgtc

SEQ ID NO: 101099 - DNA, 26 bp, Homo sapiens
ttgtataatacaagaagatggtgtcc

SEQ ID NO: 101100 - DNA, 26 bp, Homo sapiens
tgtataatacaagaagatggtgtcct

SEQ ID NO: 101101 - DNA, 26 bp, Homo sapiens
gtataatacaagaagatggtgtcctg

SEQ ID NO: 101102 - DNA, 26 bp, Homo sapiens
tataatacaagaagatggtgtcctgg

SEQ ID NO: 101103 - DNA, 26 bp, Homo sapiens
ataatacaagaagatggtgtcctggt

SEQ ID NO: 101104 - DNA, 26 bp, Homo sapiens
taatacaagaagatggtgtcctggtt

SEQ ID NO: 101105 - DNA, 26 bp, Homo sapiens
aatacaagaagatggtgtcctggttg

SEQ ID NO: 101106 - DNA, 26 bp, Homo sapiens
atacaagaagatggtgtcctggttgc

SEQ ID NO: 101107 - DNA, 26 bp, Homo sapiens
tacaagaagatggtgtcctggttgct

SEQ ID NO: 101108 - DNA, 26 bp, Homo sapiens
acaagaagatggtgtcctggttgctt

SEQ ID NO: 101109 - DNA, 26 bp, Homo sapiens
caagaagatggtgtcctggttgcttg

SEQ ID NO: 101110 - DNA, 26 bp, Homo sapiens
aagaagatggtgtcctggttgcttga

SEQ ID NO: 101111 - DNA, 26 bp, Homo sapiens
agaagatggtgtcctggttgcttgag

SEQ ID NO: 101112 - DNA, 26 bp, Homo sapiens
gaagatggtgtcctggttgcttgagt

SEQ ID NO: 101113 - DNA, 26 bp, Homo sapiens
aagatggtgtcctggttgcttgagtt

SEQ ID NO: 101114 - DNA, 26 bp, Homo sapiens
agatggtgtcctggttgcttgagttg

SEQ ID NO: 101115 - DNA, 26 bp, Homo sapiens
gatggtgtcctggttgcttgagttgt

SEQ ID NO: 101116 - DNA, 26 bp, Homo sapiens
atggtgtcctggttgcttgagttgtt

SEQ ID NO: 101117 - DNA, 26 bp, Homo sapiens
tggtgtcctggttgcttgagttgttt

SEQ ID NO: 101118 - DNA, 26 bp, Homo sapiens
ggtgtcctggttgcttgagttgtttg

SEQ ID NO: 101119 - DNA, 26 bp, Homo sapiens
gtgtcctggttgcttgagttgtttgc

SEQ ID NO: 101120 - DNA, 26 bp, Homo sapiens
tgtcctggttgcttgagttgtttgct

SEQ ID NO: 101121 - DNA, 26 bp, Homo sapiens
gtcctggttgcttgagttgtttgctt

SEQ ID NO: 101122 - DNA, 26 bp, Homo sapiens
tcctggttgcttgagttgtttgctta

SEQ ID NO: 101123 - DNA, 26 bp, Homo sapiens
cctggttgcttgagttgtttgcttat

SEQ ID NO: 101124 - DNA, 26 bp, Homo sapiens
ctggttgcttgagttgtttgcttatc

SEQ ID NO: 101125 - DNA, 26 bp, Homo sapiens
tggttgcttgagttgtttgcttatct

SEQ ID NO: 101126 - DNA, 26 bp, Homo sapiens
ggttgcttgagttgtttgcttatctg

SEQ ID NO: 101127 - DNA, 26 bp, Homo sapiens
gttgcttgagttgtttgcttatctgc

SEQ ID NO: 101128 - DNA, 26 bp, Homo sapiens
ttgcttgagttgtttgcttatctgct

SEQ ID NO: 101129 - DNA, 26 bp, Homo sapiens
tgcttgagttgtttgcttatctgctg

SEQ ID NO: 101130 - DNA, 26 bp, Homo sapiens
gcttgagttgtttgcttatctgctgt

SEQ ID NO: 101131 - DNA, 26 bp, Homo sapiens
cttgagttgtttgcttatctgctgtg

SEQ ID NO: 101132 - DNA, 26 bp, Homo sapiens
ttgagttgtttgcttatctgctgtgt

SEQ ID NO: 101133 - DNA, 26 bp, Homo sapiens
tgagttgtttgcttatctgctgtgtc

SEQ ID NO: 101134 - DNA, 26 bp, Homo sapiens
gagttgtttgcttatctgctgtgtct

SEQ ID NO: 101135 - DNA, 26 bp, Homo sapiens
agttgtttgcttatctgctgtgtctt

SEQ ID NO: 101136 - DNA, 26 bp, Homo sapiens
gttgtttgcttatctgctgtgtcttc

SEQ ID NO: 101137 - DNA, 26 bp, Homo sapiens
ttgtttgcttatctgctgtgtcttcc

SEQ ID NO: 101138 - DNA, 26 bp, Homo sapiens
tgtttgcttatctgctgtgtcttcca

SEQ ID NO: 101139 - DNA, 26 bp, Homo sapiens
gtttgcttatctgctgtgtcttccaa

SEQ ID NO: 101140 - DNA, 26 bp, Homo sapiens
tttgcttatctgctgtgtcttccaat

SEQ ID NO: 101141 - DNA, 26 bp, Homo sapiens
ttgcttatctgctgtgtcttccaatt

SEQ ID NO: 101142 - DNA, 26 bp, Homo sapiens
tgcttatctgctgtgtcttccaattt

SEQ ID NO: 101143 - DNA, 26 bp, Homo sapiens
gcttatctgctgtgtcttccaattta

SEQ ID NO: 101144 - DNA, 26 bp, Homo sapiens
cttatctgctgtgtcttccaatttat

SEQ ID NO: 101145 - DNA, 26 bp, Homo sapiens
ttatctgctgtgtcttccaatttatc

SEQ ID NO: 101146 - DNA, 26 bp, Homo sapiens
tatctgctgtgtcttccaatttatcg

SEQ ID NO: 101147 - DNA, 26 bp, Homo sapiens
atctgctgtgtcttccaatttatcgc

SEQ ID NO: 101148 - DNA, 26 bp, Homo sapiens
tctgctgtgtcttccaatttatcgca

SEQ ID NO: 101149 - DNA, 26 bp, Homo sapiens
ctgctgtgtcttccaatttatcgcac

SEQ ID NO: 101150 - DNA, 26 bp, Homo sapiens
tgctgtgtcttccaatttatcgcaca

SEQ ID NO: 101151 - DNA, 26 bp, Homo sapiens
gctgtgtcttccaatttatcgcacaa

SEQ ID NO: 101152 - DNA, 26 bp, Homo sapiens
ctgtgtcttccaatttatcgcacaac

SEQ ID NO: 101153 - DNA, 26 bp, Homo sapiens
tgtgtcttccaatttatcgcacaaca

SEQ ID NO: 101154 - DNA, 26 bp, Homo sapiens
gtgtcttccaatttatcgcacaacaa

SEQ ID NO: 101155 - DNA, 26 bp, Homo sapiens
tgtcttccaatttatcgcacaacaaa

SEQ ID NO: 101156 - DNA, 26 bp, Homo sapiens
gtcttccaatttatcgcacaacaaat

SEQ ID NO: 101157 - DNA, 26 bp, Homo sapiens
tcttccaatttatcgcacaacaaatt

SEQ ID NO: 101158 - DNA, 26 bp, Homo sapiens
cttccaatttatcgcacaacaaattg

SEQ ID NO: 101159 - DNA, 26 bp, Homo sapiens
ttccaatttatcgcacaacaaattgc

SEQ ID NO: 101160 - DNA, 26 bp, Homo sapiens
tccaatttatcgcacaacaaattgct

SEQ ID NO: 101161 - DNA, 26 bp, Homo sapiens
ccaatttatcgcacaacaaattgctt

SEQ ID NO: 101162 - DNA, 26 bp, Homo sapiens
caatttatcgcacaacaaattgctta

SEQ ID NO: 101163 - DNA, 26 bp, Homo sapiens
aatttatcgcacaacaaattgcttaa

SEQ ID NO: 101164 - DNA, 26 bp, Homo sapiens
atttatcgcacaacaaattgcttaat

SEQ ID NO: 101165 - DNA, 26 bp, Homo sapiens
tttatcgcacaacaaattgcttaata

SEQ ID NO: 101166 - DNA, 26 bp, Homo sapiens
ttatcgcacaacaaattgcttaatag

SEQ ID NO: 101167 - DNA, 26 bp, Homo sapiens
tatcgcacaacaaattgcttaatagg

SEQ ID NO: 101168 - DNA, 26 bp, Homo sapiens
atcgcacaacaaattgcttaataggg

SEQ ID NO: 101169 - DNA, 26 bp, Homo sapiens
tcgcacaacaaattgcttaatagggc

SEQ ID NO: 101170 - DNA, 26 bp, Homo sapiens
cgcacaacaaattgcttaatagggcg

SEQ ID NO: 101171 - DNA, 26 bp, Homo sapiens
gcacaacaaattgcttaatagggcgt

SEQ ID NO: 101172 - DNA, 26 bp, Homo sapiens
cacaacaaattgcttaatagggcgta

SEQ ID NO: 101173 - DNA, 26 bp, Homo sapiens
acaacaaattgcttaatagggcgtaa

SEQ ID NO: 101174 - DNA, 26 bp, Homo sapiens
caacaaattgcttaatagggcgtaaa

SEQ ID NO: 101175 - DNA, 26 bp, Homo sapiens
aacaaattgcttaatagggcgtaaat

SEQ ID NO: 101176 - DNA, 26 bp, Homo sapiens
acaaattgcttaatagggcgtaaatc

SEQ ID NO: 101177 - DNA, 26 bp, Homo sapiens
caaattgcttaatagggcgtaaatct

SEQ ID NO: 101178 - DNA, 26 bp, Homo sapiens
aaattgcttaatagggcgtaaatctc

SEQ ID NO: 101179 - DNA, 26 bp, Homo sapiens
aattgcttaatagggcgtaaatctct

SEQ ID NO: 101180 - DNA, 26 bp, Homo sapiens
attgcttaatagggcgtaaatctctt

SEQ ID NO: 101181 - DNA, 26 bp, Homo sapiens
ttgcttaatagggcgtaaatctcttg

SEQ ID NO: 101182 - DNA, 26 bp, Homo sapiens
tgcttaatagggcgtaaatctcttgg

SEQ ID NO: 101183 - DNA, 26 bp, Homo sapiens
gcttaatagggcgtaaatctcttggc

SEQ ID NO: 101184 - DNA, 26 bp, Homo sapiens
cttaatagggcgtaaatctcttggct

SEQ ID NO: 101185 - DNA, 26 bp, Homo sapiens
ttaatagggcgtaaatctcttggctc

SEQ ID NO: 101186 - DNA, 26 bp, Homo sapiens
taatagggcgtaaatctcttggctcg

SEQ ID NO: 101187 - DNA, 26 bp, Homo sapiens
aatagggcgtaaatctcttggctcga

SEQ ID NO: 101188 - DNA, 26 bp, Homo sapiens
atagggcgtaaatctcttggctcgag

SEQ ID NO: 101189 - DNA, 26 bp, Homo sapiens
tagggcgtaaatctcttggctcgagg

SEQ ID NO: 101190 - DNA, 26 bp, Homo sapiens
agggcgtaaatctcttggctcgaggc

SEQ ID NO: 101191 - DNA, 26 bp, Homo sapiens
gggcgtaaatctcttggctcgaggca

SEQ ID NO: 101192 - DNA, 26 bp, Homo sapiens
ggcgtaaatctcttggctcgaggcag

SEQ ID NO: 101193 - DNA, 26 bp, Homo sapiens
gcgtaaatctcttggctcgaggcagt

SEQ ID NO: 101194 - DNA, 26 bp, Homo sapiens
cgtaaatctcttggctcgaggcagta

SEQ ID NO: 101195 - DNA, 26 bp, Homo sapiens
gtaaatctcttggctcgaggcagtag

SEQ ID NO: 101196 - DNA, 26 bp, Homo sapiens
taaatctcttggctcgaggcagtaga

SEQ ID NO: 101197 - DNA, 26 bp, Homo sapiens
aaatctcttggctcgaggcagtagag

SEQ ID NO: 101198 - DNA, 26 bp, Homo sapiens
aatctcttggctcgaggcagtagagc

SEQ ID NO: 101199 - DNA, 26 bp, Homo sapiens
atctcttggctcgaggcagtagagca

SEQ ID NO: 101200 - DNA, 26 bp, Homo sapiens
tctcttggctcgaggcagtagagcag

SEQ ID NO: 101201 - DNA, 26 bp, Homo sapiens
ctcttggctcgaggcagtagagcagt

SEQ ID NO: 101202 - DNA, 26 bp, Homo sapiens
tcttggctcgaggcagtagagcagta

SEQ ID NO: 101203 - DNA, 26 bp, Homo sapiens
cttggctcgaggcagtagagcagtag

SEQ ID NO: 101204 - DNA, 26 bp, Homo sapiens
ttggctcgaggcagtagagcagtagt

SEQ ID NO: 101205 - DNA, 26 bp, Homo sapiens
tggctcgaggcagtagagcagtagtt

SEQ ID NO: 101206 - DNA, 26 bp, Homo sapiens
ggctcgaggcagtagagcagtagtta

SEQ ID NO: 101207 - DNA, 26 bp, Homo sapiens
gctcgaggcagtagagcagtagttag

SEQ ID NO: 101208 - DNA, 26 bp, Homo sapiens
ctcgaggcagtagagcagtagttagg

SEQ ID NO: 101209 - DNA, 26 bp, Homo sapiens
tcgaggcagtagagcagtagttagga

SEQ ID NO: 101210 - DNA, 26 bp, Homo sapiens
cgaggcagtagagcagtagttaggag

SEQ ID NO: 101211 - DNA, 26 bp, Homo sapiens
gaggcagtagagcagtagttaggagc

SEQ ID NO: 101212 - DNA, 26 bp, Homo sapiens
aggcagtagagcagtagttaggagcc

SEQ ID NO: 101213 - DNA, 26 bp, Homo sapiens
ggcagtagagcagtagttaggagccc

SEQ ID NO: 101214 - DNA, 26 bp, Homo sapiens
gcagtagagcagtagttaggagccca

SEQ ID NO: 101215 - DNA, 26 bp, Homo sapiens
cagtagagcagtagttaggagcccag

SEQ ID NO: 101216 - DNA, 26 bp, Homo sapiens
agtagagcagtagttaggagcccaga

SEQ ID NO: 101217 - DNA, 26 bp, Homo sapiens
gtagagcagtagttaggagcccagac

SEQ ID NO: 101218 - DNA, 26 bp, Homo sapiens
tagagcagtagttaggagcccagacc

SEQ ID NO: 101219 - DNA, 26 bp, Homo sapiens
agagcagtagttaggagcccagacct

SEQ ID NO: 101220 - DNA, 26 bp, Homo sapiens
gagcagtagttaggagcccagacctc

SEQ ID NO: 101221 - DNA, 26 bp, Homo sapiens
agcagtagttaggagcccagacctca

SEQ ID NO: 101222 - DNA, 26 bp, Homo sapiens
gcagtagttaggagcccagacctcag

SEQ ID NO: 101223 - DNA, 26 bp, Homo sapiens
cagtagttaggagcccagacctcaga

SEQ ID NO: 101224 - DNA, 26 bp, Homo sapiens
agtagttaggagcccagacctcagaa

SEQ ID NO: 101225 - DNA, 26 bp, Homo sapiens
gtagttaggagcccagacctcagaag

SEQ ID NO: 101226 - DNA, 26 bp, Homo sapiens
tagttaggagcccagacctcagaagc

SEQ ID NO: 101227 - DNA, 26 bp, Homo sapiens
agttaggagcccagacctcagaagca

SEQ ID NO: 101228 - DNA, 26 bp, Homo sapiens
gttaggagcccagacctcagaagcaa

SEQ ID NO: 101229 - DNA, 26 bp, Homo sapiens
ttaggagcccagacctcagaagcaag

SEQ ID NO: 101230 - DNA, 26 bp, Homo sapiens
taggagcccagacctcagaagcaagc

SEQ ID NO: 101231 - DNA, 26 bp, Homo sapiens
aggagcccagacctcagaagcaagca

SEQ ID NO: 101232 - DNA, 26 bp, Homo sapiens
ggagcccagacctcagaagcaagcag

SEQ ID NO: 101233 - DNA, 26 bp, Homo sapiens
gagcccagacctcagaagcaagcagg

SEQ ID NO: 101234 - DNA, 26 bp, Homo sapiens
agcccagacctcagaagcaagcaggc

SEQ ID NO: 101235 - DNA, 26 bp, Homo sapiens
gcccagacctcagaagcaagcaggca

SEQ ID NO: 101236 - DNA, 26 bp, Homo sapiens
cccagacctcagaagcaagcaggcag

SEQ ID NO: 101237 - DNA, 26 bp, Homo sapiens
ccagacctcagaagcaagcaggcaga

SEQ ID NO: 101238 - DNA, 26 bp, Homo sapiens
cagacctcagaagcaagcaggcagag

SEQ ID NO: 101239 - DNA, 26 bp, Homo sapiens
agacctcagaagcaagcaggcagagg

SEQ ID NO: 101240 - DNA, 26 bp, Homo sapiens
gacctcagaagcaagcaggcagaggt

SEQ ID NO: 101241 - DNA, 26 bp, Homo sapiens
acctcagaagcaagcaggcagaggtt

SEQ ID NO: 101242 - DNA, 26 bp, Homo sapiens
cctcagaagcaagcaggcagaggttc

SEQ ID NO: 101243 - DNA, 26 bp, Homo sapiens
ctcagaagcaagcaggcagaggttcc

SEQ ID NO: 101244 - DNA, 26 bp, Homo sapiens
tcagaagcaagcaggcagaggttcca

SEQ ID NO: 101245 - DNA, 26 bp, Homo sapiens
cagaagcaagcaggcagaggttccat

SEQ ID NO: 101246 - DNA, 26 bp, Homo sapiens
agaagcaagcaggcagaggttccatc

SEQ ID NO: 101247 - DNA, 26 bp, Homo sapiens
gaagcaagcaggcagaggttccatcc

SEQ ID NO: 101248 - DNA, 26 bp, Homo sapiens
aagcaagcaggcagaggttccatccc

SEQ ID NO: 101249 - DNA, 26 bp, Homo sapiens
agcaagcaggcagaggttccatccca

SEQ ID NO: 101250 - DNA, 26 bp, Homo sapiens
gcaagcaggcagaggttccatcccag

SEQ ID NO: 101251 - DNA, 26 bp, Homo sapiens
caagcaggcagaggttccatcccagt

SEQ ID NO: 101252 - DNA, 26 bp, Homo sapiens
aagcaggcagaggttccatcccagtt

SEQ ID NO: 101253 - DNA, 26 bp, Homo sapiens
agcaggcagaggttccatcccagttt

SEQ ID NO: 101254 - DNA, 26 bp, Homo sapiens
gcaggcagaggttccatcccagtttc

SEQ ID NO: 101255 - DNA, 26 bp, Homo sapiens
caggcagaggttccatcccagtttca

SEQ ID NO: 101256 - DNA, 26 bp, Homo sapiens
aggcagaggttccatcccagtttcac

SEQ ID NO: 101257 - DNA, 26 bp, Homo sapiens
ggcagaggttccatcccagtttcact

SEQ ID NO: 101258 - DNA, 26 bp, Homo sapiens
gcagaggttccatcccagtttcacta

SEQ ID NO: 101259 - DNA, 26 bp, Homo sapiens
cagaggttccatcccagtttcactat

SEQ ID NO: 101260 - DNA, 26 bp, Homo sapiens
agaggttccatcccagtttcactatc

SEQ ID NO: 101261 - DNA, 26 bp, Homo sapiens
gaggttccatcccagtttcactatca

SEQ ID NO: 101262 - DNA, 26 bp, Homo sapiens
aggttccatcccagtttcactatcat

SEQ ID NO: 101263 - DNA, 26 bp, Homo sapiens
ggttccatcccagtttcactatcatc

SEQ ID NO: 101264 - DNA, 26 bp, Homo sapiens
gttccatcccagtttcactatcatca

SEQ ID NO: 101265 - DNA, 26 bp, Homo sapiens
ttccatcccagtttcactatcatcag

SEQ ID NO: 101266 - DNA, 26 bp, Homo sapiens
tccatcccagtttcactatcatcaga

SEQ ID NO: 101267 - DNA, 26 bp, Homo sapiens
ccatcccagtttcactatcatcagag

SEQ ID NO: 101268 - DNA, 26 bp, Homo sapiens
catcccagtttcactatcatcagagg

SEQ ID NO: 101269 - DNA, 26 bp, Homo sapiens
atcccagtttcactatcatcagaggg

SEQ ID NO: 101270 - DNA, 26 bp, Homo sapiens
tcccagtttcactatcatcagagggc

SEQ ID NO: 101271 - DNA, 26 bp, Homo sapiens
cccagtttcactatcatcagagggcc

SEQ ID NO: 101272 - DNA, 26 bp, Homo sapiens
ccagtttcactatcatcagagggccc

SEQ ID NO: 101273 - DNA, 26 bp, Homo sapiens
cagtttcactatcatcagagggccct

SEQ ID NO: 101274 - DNA, 26 bp, Homo sapiens
agtttcactatcatcagagggccctc

SEQ ID NO: 101275 - DNA, 26 bp, Homo sapiens
gtttcactatcatcagagggccctcg

SEQ ID NO: 101276 - DNA, 26 bp, Homo sapiens
tttcactatcatcagagggccctcgg

SEQ ID NO: 101277 - DNA, 26 bp, Homo sapiens
ttcactatcatcagagggccctcgga

SEQ ID NO: 101278 - DNA, 26 bp, Homo sapiens
tcactatcatcagagggccctcggac

SEQ ID NO: 101279 - DNA, 26 bp, Homo sapiens
cactatcatcagagggccctcggaca

SEQ ID NO: 101280 - DNA, 26 bp, Homo sapiens
actatcatcagagggccctcggacaa

SEQ ID NO: 101281 - DNA, 26 bp, Homo sapiens
ctatcatcagagggccctcggacaaa

SEQ ID NO: 101282 - DNA, 26 bp, Homo sapiens
tatcatcagagggccctcggacaaat

SEQ ID NO: 101283 - DNA, 26 bp, Homo sapiens
atcatcagagggccctcggacaaatt

SEQ ID NO: 101284 - DNA, 26 bp, Homo sapiens
tcatcagagggccctcggacaaatta

SEQ ID NO: 101285 - DNA, 26 bp, Homo sapiens
catcagagggccctcggacaaattaa

SEQ ID NO: 101286 - DNA, 26 bp, Homo sapiens
atcagagggccctcggacaaattaac

SEQ ID NO: 101287 - DNA, 26 bp, Homo sapiens
tcagagggccctcggacaaattaact

SEQ ID NO: 101288 - DNA, 26 bp, Homo sapiens
cagagggccctcggacaaattaactt

SEQ ID NO: 101289 - DNA, 26 bp, Homo sapiens
agagggccctcggacaaattaacttt

SEQ ID NO: 101290 - DNA, 26 bp, Homo sapiens
gagggccctcggacaaattaactttt

SEQ ID NO: 101291 - DNA, 26 bp, Homo sapiens
agggccctcggacaaattaacttttc

SEQ ID NO: 101292 - DNA, 26 bp, Homo sapiens
gggccctcggacaaattaacttttct

SEQ ID NO: 101293 - DNA, 26 bp, Homo sapiens
ggccctcggacaaattaacttttctt

SEQ ID NO: 101294 - DNA, 26 bp, Homo sapiens
gccctcggacaaattaacttttctta

SEQ ID NO: 101295 - DNA, 26 bp, Homo sapiens
ccctcggacaaattaacttttcttag

SEQ ID NO: 101296 - DNA, 26 bp, Homo sapiens
cctcggacaaattaacttttcttagc

SEQ ID NO: 101297 - DNA, 26 bp, Homo sapiens
ctcggacaaattaacttttcttagcc

SEQ ID NO: 101298 - DNA, 26 bp, Homo sapiens
tcggacaaattaacttttcttagcct

SEQ ID NO: 101299 - DNA, 26 bp, Homo sapiens
cggacaaattaacttttcttagcctc

SEQ ID NO: 101300 - DNA, 26 bp, Homo sapiens
ggacaaattaacttttcttagcctcc

SEQ ID NO: 101301 - DNA, 26 bp, Homo sapiens
gacaaattaacttttcttagcctcca

SEQ ID NO: 101302 - DNA, 26 bp, Homo sapiens
acaaattaacttttcttagcctccat

SEQ ID NO: 101303 - DNA, 26 bp, Homo sapiens
caaattaacttttcttagcctccatt

SEQ ID NO: 101304 - DNA, 26 bp, Homo sapiens
aaattaacttttcttagcctccattt

SEQ ID NO: 101305 - DNA, 26 bp, Homo sapiens
aattaacttttcttagcctccatttt

SEQ ID NO: 101306 - DNA, 26 bp, Homo sapiens
attaacttttcttagcctccattttc

SEQ ID NO: 101307 - DNA, 26 bp, Homo sapiens
ttaacttttcttagcctccattttcc

SEQ ID NO: 101308 - DNA, 26 bp, Homo sapiens
taacttttcttagcctccattttcct

SEQ ID NO: 101309 - DNA, 26 bp, Homo sapiens
aacttttcttagcctccattttccta

SEQ ID NO: 101310 - DNA, 26 bp, Homo sapiens
acttttcttagcctccattttcctac

SEQ ID NO: 101311 - DNA, 26 bp, Homo sapiens
cttttcttagcctccattttcctacc

SEQ ID NO: 101312 - DNA, 26 bp, Homo sapiens
ttttcttagcctccattttcctacct

SEQ ID NO: 101313 - DNA, 26 bp, Homo sapiens
tttcttagcctccattttcctacctt

SEQ ID NO: 101314 - DNA, 26 bp, Homo sapiens
ttcttagcctccattttcctacctta

SEQ ID NO: 101315 - DNA, 26 bp, Homo sapiens
tcttagcctccattttcctaccttat

SEQ ID NO: 101316 - DNA, 26 bp, Homo sapiens
cttagcctccattttcctaccttatt

SEQ ID NO: 101317 - DNA, 26 bp, Homo sapiens
ttagcctccattttcctaccttatta

SEQ ID NO: 101318 - DNA, 26 bp, Homo sapiens
tagcctccattttcctaccttattaa

SEQ ID NO: 101319 - DNA, 26 bp, Homo sapiens
agcctccattttcctaccttattaaa

SEQ ID NO: 101320 - DNA, 26 bp, Homo sapiens
gcctccattttcctaccttattaaag

SEQ ID NO: 101321 - DNA, 26 bp, Homo sapiens
cctccattttcctaccttattaaaga

SEQ ID NO: 101322 - DNA, 26 bp, Homo sapiens
ctccattttcctaccttattaaagat

SEQ ID NO: 101323 - DNA, 26 bp, Homo sapiens
tccattttcctaccttattaaagatg

SEQ ID NO: 101324 - DNA, 26 bp, Homo sapiens
ccattttcctaccttattaaagatga

SEQ ID NO: 101325 - DNA, 26 bp, Homo sapiens
cattttcctaccttattaaagatgaa

SEQ ID NO: 101326 - DNA, 26 bp, Homo sapiens
attttcctaccttattaaagatgaag

SEQ ID NO: 101327 - DNA, 26 bp, Homo sapiens
ttttcctaccttattaaagatgaagt

SEQ ID NO: 101328 - DNA, 26 bp, Homo sapiens
tttcctaccttattaaagatgaagtg

SEQ ID NO: 101329 - DNA, 26 bp, Homo sapiens
ttcctaccttattaaagatgaagtgg

SEQ ID NO: 101330 - DNA, 26 bp, Homo sapiens
tcctaccttattaaagatgaagtggg

SEQ ID NO: 101331 - DNA, 26 bp, Homo sapiens
cctaccttattaaagatgaagtggga

SEQ ID NO: 101332 - DNA, 26 bp, Homo sapiens
ctaccttattaaagatgaagtgggac

SEQ ID NO: 101333 - DNA, 26 bp, Homo sapiens
taccttattaaagatgaagtgggaca

SEQ ID NO: 101334 - DNA, 26 bp, Homo sapiens
accttattaaagatgaagtgggacac

SEQ ID NO: 101335 - DNA, 26 bp, Homo sapiens
ccttattaaagatgaagtgggacaca

SEQ ID NO: 101336 - DNA, 26 bp, Homo sapiens
cttattaaagatgaagtgggacacag

SEQ ID NO: 101337 - DNA, 26 bp, Homo sapiens
ttattaaagatgaagtgggacacaga

SEQ ID NO: 101338 - DNA, 26 bp, Homo sapiens
tattaaagatgaagtgggacacagaa

SEQ ID NO: 101339 - DNA, 26 bp, Homo sapiens
attaaagatgaagtgggacacagaaa

SEQ ID NO: 101340 - DNA, 26 bp, Homo sapiens
ttaaagatgaagtgggacacagaaac

SEQ ID NO: 101341 - DNA, 26 bp, Homo sapiens
taaagatgaagtgggacacagaaact

SEQ ID NO: 101342 - DNA, 26 bp, Homo sapiens
aaagatgaagtgggacacagaaactg

SEQ ID NO: 101343 - DNA, 26 bp, Homo sapiens
aagatgaagtgggacacagaaactgt

SEQ ID NO: 101344 - DNA, 26 bp, Homo sapiens
agatgaagtgggacacagaaactgtt

SEQ ID NO: 101345 - DNA, 26 bp, Homo sapiens
gatgaagtgggacacagaaactgttg

SEQ ID NO: 101346 - DNA, 26 bp, Homo sapiens
atgaagtgggacacagaaactgttgg

SEQ ID NO: 101347 - DNA, 26 bp, Homo sapiens
tgaagtgggacacagaaactgttggt

SEQ ID NO: 101348 - DNA, 26 bp, Homo sapiens
gaagtgggacacagaaactgttggtg

SEQ ID NO: 101349 - DNA, 26 bp, Homo sapiens
aagtgggacacagaaactgttggtgg

SEQ ID NO: 101350 - DNA, 26 bp, Homo sapiens
agtgggacacagaaactgttggtgga

SEQ ID NO: 101351 - DNA, 26 bp, Homo sapiens
gtgggacacagaaactgttggtggac

SEQ ID NO: 101352 - DNA, 26 bp, Homo sapiens
tgggacacagaaactgttggtggact

SEQ ID NO: 101353 - DNA, 26 bp, Homo sapiens
gggacacagaaactgttggtggactt

SEQ ID NO: 101354 - DNA, 26 bp, Homo sapiens
ggacacagaaactgttggtggacttg

SEQ ID NO: 101355 - DNA, 26 bp, Homo sapiens
gacacagaaactgttggtggacttgc

SEQ ID NO: 101356 - DNA, 26 bp, Homo sapiens
acacagaaactgttggtggacttgct

SEQ ID NO: 101357 - DNA, 26 bp, Homo sapiens
cacagaaactgttggtggacttgctc

SEQ ID NO: 101358 - DNA, 26 bp, Homo sapiens
acagaaactgttggtggacttgctca

SEQ ID NO: 101359 - DNA, 26 bp, Homo sapiens
cagaaactgttggtggacttgctcag

SEQ ID NO: 101360 - DNA, 26 bp, Homo sapiens
agaaactgttggtggacttgctcagc

SEQ ID NO: 101361 - DNA, 26 bp, Homo sapiens
gaaactgttggtggacttgctcagct

SEQ ID NO: 101362 - DNA, 26 bp, Homo sapiens
aaactgttggtggacttgctcagctg

SEQ ID NO: 101363 - DNA, 26 bp, Homo sapiens
aactgttggtggacttgctcagctga

SEQ ID NO: 101364 - DNA, 26 bp, Homo sapiens
actgttggtggacttgctcagctgat

SEQ ID NO: 101365 - DNA, 26 bp, Homo sapiens
ctgttggtggacttgctcagctgatg

SEQ ID NO: 101366 - DNA, 26 bp, Homo sapiens
tgttggtggacttgctcagctgatgg

SEQ ID NO: 101367 - DNA, 26 bp, Homo sapiens
gttggtggacttgctcagctgatggc

SEQ ID NO: 101368 - DNA, 26 bp, Homo sapiens
ttggtggacttgctcagctgatggca

SEQ ID NO: 101369 - DNA, 26 bp, Homo sapiens
tggtggacttgctcagctgatggcag

SEQ ID NO: 101370 - DNA, 26 bp, Homo sapiens
ggtggacttgctcagctgatggcagc

SEQ ID NO: 101371 - DNA, 26 bp, Homo sapiens
gtggacttgctcagctgatggcagct

SEQ ID NO: 101372 - DNA, 26 bp, Homo sapiens
tggacttgctcagctgatggcagctt

SEQ ID NO: 101373 - DNA, 26 bp, Homo sapiens
ggacttgctcagctgatggcagcttt

SEQ ID NO: 101374 - DNA, 26 bp, Homo sapiens
gacttgctcagctgatggcagctttc

SEQ ID NO: 101375 - DNA, 26 bp, Homo sapiens
acttgctcagctgatggcagctttcc

SEQ ID NO: 101376 - DNA, 26 bp, Homo sapiens
cttgctcagctgatggcagctttcct

SEQ ID NO: 101377 - DNA, 26 bp, Homo sapiens
ttgctcagctgatggcagctttcctg

SEQ ID NO: 101378 - DNA, 26 bp, Homo sapiens
tgctcagctgatggcagctttcctgc

SEQ ID NO: 101379 - DNA, 26 bp, Homo sapiens
gctcagctgatggcagctttcctgct

SEQ ID NO: 101380 - DNA, 26 bp, Homo sapiens
ctcagctgatggcagctttcctgctg

SEQ ID NO: 101381 - DNA, 26 bp, Homo sapiens
tcagctgatggcagctttcctgctgt

SEQ ID NO: 101382 - DNA, 26 bp, Homo sapiens
cagctgatggcagctttcctgctgtg

SEQ ID NO: 101383 - DNA, 26 bp, Homo sapiens
agctgatggcagctttcctgctgtgc

SEQ ID NO: 101384 - DNA, 26 bp, Homo sapiens
gctgatggcagctttcctgctgtgca

SEQ ID NO: 101385 - DNA, 26 bp, Homo sapiens
ctgatggcagctttcctgctgtgcac

SEQ ID NO: 101386 - DNA, 26 bp, Homo sapiens
tgatggcagctttcctgctgtgcacg

SEQ ID NO: 101387 - DNA, 26 bp, Homo sapiens
gatggcagctttcctgctgtgcacgg

SEQ ID NO: 101388 - DNA, 26 bp, Homo sapiens
atggcagctttcctgctgtgcacggg

SEQ ID NO: 101389 - DNA, 26 bp, Homo sapiens
tggcagctttcctgctgtgcacgggg

SEQ ID NO: 101390 - DNA, 26 bp, Homo sapiens
ggcagctttcctgctgtgcacgggga

SEQ ID NO: 101391 - DNA, 26 bp, Homo sapiens
gcagctttcctgctgtgcacggggaa

SEQ ID NO: 101392 - DNA, 26 bp, Homo sapiens
cagctttcctgctgtgcacggggaag

SEQ ID NO: 101393 - DNA, 26 bp, Homo sapiens
agctttcctgctgtgcacggggaagg

SEQ ID NO: 101394 - DNA, 26 bp, Homo sapiens
gctttcctgctgtgcacggggaagga

SEQ ID NO: 101395 - DNA, 26 bp, Homo sapiens
ctttcctgctgtgcacggggaaggaa

SEQ ID NO: 101396 - DNA, 26 bp, Homo sapiens
tttcctgctgtgcacggggaaggaag

SEQ ID NO: 101397 - DNA, 26 bp, Homo sapiens
ttcctgctgtgcacggggaaggaaga

SEQ ID NO: 101398 - DNA, 26 bp, Homo sapiens
tcctgctgtgcacggggaaggaagag

SEQ ID NO: 101399 - DNA, 26 bp, Homo sapiens
cctgctgtgcacggggaaggaagagt

SEQ ID NO: 101400 - DNA, 26 bp, Homo sapiens
ctgctgtgcacggggaaggaagagtt

SEQ ID NO: 101401 - DNA, 26 bp, Homo sapiens
tgctgtgcacggggaaggaagagttg

SEQ ID NO: 101402 - DNA, 26 bp, Homo sapiens
gctgtgcacggggaaggaagagttgt

SEQ ID NO: 101403 - DNA, 26 bp, Homo sapiens
ctgtgcacggggaaggaagagttgtg

SEQ ID NO: 101404 - DNA, 26 bp, Homo sapiens
tgtgcacggggaaggaagagttgtgc

SEQ ID NO: 101405 - DNA, 26 bp, Homo sapiens
gtgcacggggaaggaagagttgtgcc

SEQ ID NO: 101406 - DNA, 26 bp, Homo sapiens
tgcacggggaaggaagagttgtgcca

SEQ ID NO: 101407 - DNA, 26 bp, Homo sapiens
gcacggggaaggaagagttgtgccac

SEQ ID NO: 101408 - DNA, 26 bp, Homo sapiens
cacggggaaggaagagttgtgccacc

SEQ ID NO: 101409 - DNA, 26 bp, Homo sapiens
acggggaaggaagagttgtgccaccc

SEQ ID NO: 101410 - DNA, 26 bp, Homo sapiens
cggggaaggaagagttgtgccaccct

SEQ ID NO: 101411 - DNA, 26 bp, Homo sapiens
ggggaaggaagagttgtgccaccctg

SEQ ID NO: 101412 - DNA, 26 bp, Homo sapiens
gggaaggaagagttgtgccaccctgg

SEQ ID NO: 101413 - DNA, 26 bp, Homo sapiens
ggaaggaagagttgtgccaccctggc

SEQ ID NO: 101414 - DNA, 26 bp, Homo sapiens
gaaggaagagttgtgccaccctggcc

SEQ ID NO: 101415 - DNA, 26 bp, Homo sapiens
aaggaagagttgtgccaccctggcca

SEQ ID NO: 101416 - DNA, 26 bp, Homo sapiens
aggaagagttgtgccaccctggccag

SEQ ID NO: 101417 - DNA, 26 bp, Homo sapiens
ggaagagttgtgccaccctggccagg

SEQ ID NO: 101418 - DNA, 26 bp, Homo sapiens
gaagagttgtgccaccctggccaggc

SEQ ID NO: 101419 - DNA, 26 bp, Homo sapiens
aagagttgtgccaccctggccaggct

SEQ ID NO: 101420 - DNA, 26 bp, Homo sapiens
agagttgtgccaccctggccaggctg

SEQ ID NO: 101421 - DNA, 26 bp, Homo sapiens
gagttgtgccaccctggccaggctga

SEQ ID NO: 101422 - DNA, 26 bp, Homo sapiens
agttgtgccaccctggccaggctgat

SEQ ID NO: 101423 - DNA, 26 bp, Homo sapiens
gttgtgccaccctggccaggctgatc

SEQ ID NO: 101424 - DNA, 26 bp, Homo sapiens
ttgtgccaccctggccaggctgatcc

SEQ ID NO: 101425 - DNA, 26 bp, Homo sapiens
tgtgccaccctggccaggctgatcct

SEQ ID NO: 101426 - DNA, 26 bp, Homo sapiens
gtgccaccctggccaggctgatcctc

SEQ ID NO: 101427 - DNA, 26 bp, Homo sapiens
tgccaccctggccaggctgatcctct

SEQ ID NO: 101428 - DNA, 26 bp, Homo sapiens
gccaccctggccaggctgatcctctt

SEQ ID NO: 101429 - DNA, 26 bp, Homo sapiens
ccaccctggccaggctgatcctcttg

SEQ ID NO: 101430 - DNA, 26 bp, Homo sapiens
caccctggccaggctgatcctcttga

SEQ ID NO: 101431 - DNA, 26 bp, Homo sapiens
accctggccaggctgatcctcttgag

SEQ ID NO: 101432 - DNA, 26 bp, Homo sapiens
ccctggccaggctgatcctcttgagg

SEQ ID NO: 101433 - DNA, 26 bp, Homo sapiens
cctggccaggctgatcctcttgaggt

SEQ ID NO: 101434 - DNA, 26 bp, Homo sapiens
ctggccaggctgatcctcttgaggtc

SEQ ID NO: 101435 - DNA, 26 bp, Homo sapiens
tggccaggctgatcctcttgaggtcg

SEQ ID NO: 101436 - DNA, 26 bp, Homo sapiens
ggccaggctgatcctcttgaggtcga

SEQ ID NO: 101437 - DNA, 26 bp, Homo sapiens
gccaggctgatcctcttgaggtcgag

SEQ ID NO: 101438 - DNA, 26 bp, Homo sapiens
ccaggctgatcctcttgaggtcgagg

SEQ ID NO: 101439 - DNA, 26 bp, Homo sapiens
caggctgatcctcttgaggtcgaggt

SEQ ID NO: 101440 - DNA, 26 bp, Homo sapiens
aggctgatcctcttgaggtcgaggtg

SEQ ID NO: 101441 - DNA, 26 bp, Homo sapiens
ggctgatcctcttgaggtcgaggtgc

SEQ ID NO: 101442 - DNA, 26 bp, Homo sapiens
gctgatcctcttgaggtcgaggtgcc

SEQ ID NO: 101443 - DNA, 26 bp, Homo sapiens
ctgatcctcttgaggtcgaggtgcct

SEQ ID NO: 101444 - DNA, 26 bp, Homo sapiens
tgatcctcttgaggtcgaggtgcctg

SEQ ID NO: 101445 - DNA, 26 bp, Homo sapiens
gatcctcttgaggtcgaggtgcctgg

SEQ ID NO: 101446 - DNA, 26 bp, Homo sapiens
atcctcttgaggtcgaggtgcctggg

SEQ ID NO: 101447 - DNA, 26 bp, Homo sapiens
tcctcttgaggtcgaggtgcctgggt

SEQ ID NO: 101448 - DNA, 26 bp, Homo sapiens
cctcttgaggtcgaggtgcctgggtt

SEQ ID NO: 101449 - DNA, 26 bp, Homo sapiens
ctcttgaggtcgaggtgcctgggttt

SEQ ID NO: 101450 - DNA, 26 bp, Homo sapiens
tcttgaggtcgaggtgcctgggtttc

SEQ ID NO: 101451 - DNA, 26 bp, Homo sapiens
cttgaggtcgaggtgcctgggtttcc

SEQ ID NO: 101452 - DNA, 26 bp, Homo sapiens
ttgaggtcgaggtgcctgggtttccg

SEQ ID NO: 101453 - DNA, 26 bp, Homo sapiens
tgaggtcgaggtgcctgggtttccgt

SEQ ID NO: 101454 - DNA, 26 bp, Homo sapiens
gaggtcgaggtgcctgggtttccgta

SEQ ID NO: 101455 - DNA, 26 bp, Homo sapiens
aggtcgaggtgcctgggtttccgtag

SEQ ID NO: 101456 - DNA, 26 bp, Homo sapiens
ggtcgaggtgcctgggtttccgtaga

SEQ ID NO: 101457 - DNA, 26 bp, Homo sapiens
gtcgaggtgcctgggtttccgtagag

SEQ ID NO: 101458 - DNA, 26 bp, Homo sapiens
tcgaggtgcctgggtttccgtagagc

SEQ ID NO: 101459 - DNA, 26 bp, Homo sapiens
cgaggtgcctgggtttccgtagagct

SEQ ID NO: 101460 - DNA, 26 bp, Homo sapiens
gaggtgcctgggtttccgtagagctc

SEQ ID NO: 101461 - DNA, 26 bp, Homo sapiens
aggtgcctgggtttccgtagagctct

SEQ ID NO: 101462 - DNA, 26 bp, Homo sapiens
ggtgcctgggtttccgtagagctctg

SEQ ID NO: 101463 - DNA, 26 bp, Homo sapiens
gtgcctgggtttccgtagagctctga

SEQ ID NO: 101464 - DNA, 26 bp, Homo sapiens
tgcctgggtttccgtagagctctgag

SEQ ID NO: 101465 - DNA, 26 bp, Homo sapiens
gcctgggtttccgtagagctctgagt

SEQ ID NO: 101466 - DNA, 26 bp, Homo sapiens
cctgggtttccgtagagctctgagta

SEQ ID NO: 101467 - DNA, 26 bp, Homo sapiens
ctgggtttccgtagagctctgagtac

SEQ ID NO: 101468 - DNA, 26 bp, Homo sapiens
tgggtttccgtagagctctgagtact

SEQ ID NO: 101469 - DNA, 26 bp, Homo sapiens
gggtttccgtagagctctgagtacta

SEQ ID NO: 101470 - DNA, 26 bp, Homo sapiens
ggtttccgtagagctctgagtactac

SEQ ID NO: 101471 - DNA, 26 bp, Homo sapiens
gtttccgtagagctctgagtactaca

SEQ ID NO: 101472 - DNA, 26 bp, Homo sapiens
tttccgtagagctctgagtactacat

SEQ ID NO: 101473 - DNA, 26 bp, Homo sapiens
ttccgtagagctctgagtactacatg

SEQ ID NO: 101474 - DNA, 26 bp, Homo sapiens
tccgtagagctctgagtactacatgt

SEQ ID NO: 101475 - DNA, 26 bp, Homo sapiens
ccgtagagctctgagtactacatgtg

SEQ ID NO: 101476 - DNA, 26 bp, Homo sapiens
cgtagagctctgagtactacatgtgt

SEQ ID NO: 101477 - DNA, 26 bp, Homo sapiens
gtagagctctgagtactacatgtgtg

SEQ ID NO: 101478 - DNA, 26 bp, Homo sapiens
tagagctctgagtactacatgtgtga

SEQ ID NO: 101479 - DNA, 26 bp, Homo sapiens
agagctctgagtactacatgtgtgag

SEQ ID NO: 101480 - DNA, 26 bp, Homo sapiens
gagctctgagtactacatgtgtgagg

SEQ ID NO: 101481 - DNA, 26 bp, Homo sapiens
agctctgagtactacatgtgtgagga

SEQ ID NO: 101482 - DNA, 26 bp, Homo sapiens
gctctgagtactacatgtgtgaggaa

SEQ ID NO: 101483 - DNA, 26 bp, Homo sapiens
ctctgagtactacatgtgtgaggaat

SEQ ID NO: 101484 - DNA, 26 bp, Homo sapiens
tctgagtactacatgtgtgaggaatc

SEQ ID NO: 101485 - DNA, 26 bp, Homo sapiens
ctgagtactacatgtgtgaggaatcc

SEQ ID NO: 101486 - DNA, 26 bp, Homo sapiens
tgagtactacatgtgtgaggaatcct

SEQ ID NO: 101487 - DNA, 26 bp, Homo sapiens
gagtactacatgtgtgaggaatcctc

SEQ ID NO: 101488 - DNA, 26 bp, Homo sapiens
agtactacatgtgtgaggaatcctca

SEQ ID NO: 101489 - DNA, 26 bp, Homo sapiens
gtactacatgtgtgaggaatcctcag

SEQ ID NO: 101490 - DNA, 26 bp, Homo sapiens
tactacatgtgtgaggaatcctcagg

SEQ ID NO: 101491 - DNA, 26 bp, Homo sapiens
actacatgtgtgaggaatcctcaggt

SEQ ID NO: 101492 - DNA, 26 bp, Homo sapiens
ctacatgtgtgaggaatcctcaggtt

SEQ ID NO: 101493 - DNA, 26 bp, Homo sapiens
tacatgtgtgaggaatcctcaggttc

SEQ ID NO: 101494 - DNA, 26 bp, Homo sapiens
acatgtgtgaggaatcctcaggttct

SEQ ID NO: 101495 - DNA, 26 bp, Homo sapiens
catgtgtgaggaatcctcaggttctc

SEQ ID NO: 101496 - DNA, 26 bp, Homo sapiens
atgtgtgaggaatcctcaggttctct

SEQ ID NO: 101497 - DNA, 26 bp, Homo sapiens
tgtgtgaggaatcctcaggttctctc

SEQ ID NO: 101498 - DNA, 26 bp, Homo sapiens
gtgtgaggaatcctcaggttctctcc

SEQ ID NO: 101499 - DNA, 26 bp, Homo sapiens
tgtgaggaatcctcaggttctctcct

SEQ ID NO: 101500 - DNA, 26 bp, Homo sapiens
gtgaggaatcctcaggttctctcctt

SEQ ID NO: 101501 - DNA, 26 bp, Homo sapiens
tgaggaatcctcaggttctctccttg

SEQ ID NO: 101502 - DNA, 26 bp, Homo sapiens
gaggaatcctcaggttctctccttgc

SEQ ID NO: 101503 - DNA, 26 bp, Homo sapiens
aggaatcctcaggttctctccttgct

SEQ ID NO: 101504 - DNA, 26 bp, Homo sapiens
ggaatcctcaggttctctccttgctc

SEQ ID NO: 101505 - DNA, 26 bp, Homo sapiens
gaatcctcaggttctctccttgctct

SEQ ID NO: 101506 - DNA, 26 bp, Homo sapiens
aatcctcaggttctctccttgctctg

SEQ ID NO: 101507 - DNA, 26 bp, Homo sapiens
atcctcaggttctctccttgctctgt

SEQ ID NO: 101508 - DNA, 26 bp, Homo sapiens
tcctcaggttctctccttgctctgtg

SEQ ID NO: 101509 - DNA, 26 bp, Homo sapiens
cctcaggttctctccttgctctgtga

SEQ ID NO: 101510 - DNA, 26 bp, Homo sapiens
ctcaggttctctccttgctctgtgag

SEQ ID NO: 101511 - DNA, 26 bp, Homo sapiens
tcaggttctctccttgctctgtgagt

SEQ ID NO: 101512 - DNA, 26 bp, Homo sapiens
caggttctctccttgctctgtgagtc

SEQ ID NO: 101513 - DNA, 26 bp, Homo sapiens
aggttctctccttgctctgtgagtca

SEQ ID NO: 101514 - DNA, 26 bp, Homo sapiens
ggttctctccttgctctgtgagtcac

SEQ ID NO: 101515 - DNA, 26 bp, Homo sapiens
gttctctccttgctctgtgagtcact

SEQ ID NO: 101516 - DNA, 26 bp, Homo sapiens
ttctctccttgctctgtgagtcactc

SEQ ID NO: 101517 - DNA, 26 bp, Homo sapiens
tctctccttgctctgtgagtcactcc

SEQ ID NO: 101518 - DNA, 26 bp, Homo sapiens
ctctccttgctctgtgagtcactccc

SEQ ID NO: 101519 - DNA, 26 bp, Homo sapiens
tctccttgctctgtgagtcactccca

SEQ ID NO: 101520 - DNA, 26 bp, Homo sapiens
ctccttgctctgtgagtcactcccat

SEQ ID NO: 101521 - DNA, 26 bp, Homo sapiens
tccttgctctgtgagtcactcccatt

SEQ ID NO: 101522 - DNA, 26 bp, Homo sapiens
ccttgctctgtgagtcactcccattg

SEQ ID NO: 101523 - DNA, 26 bp, Homo sapiens
cttgctctgtgagtcactcccattgt

SEQ ID NO: 101524 - DNA, 26 bp, Homo sapiens
ttgctctgtgagtcactcccattgtg

SEQ ID NO: 101525 - DNA, 26 bp, Homo sapiens
tgctctgtgagtcactcccattgtga

SEQ ID NO: 101526 - DNA, 26 bp, Homo sapiens
gctctgtgagtcactcccattgtgac

SEQ ID NO: 101527 - DNA, 26 bp, Homo sapiens
ctctgtgagtcactcccattgtgaca

SEQ ID NO: 101528 - DNA, 26 bp, Homo sapiens
tctgtgagtcactcccattgtgacac

SEQ ID NO: 101529 - DNA, 26 bp, Homo sapiens
ctgtgagtcactcccattgtgacaca

SEQ ID NO: 101530 - DNA, 26 bp, Homo sapiens
tgtgagtcactcccattgtgacacaa

SEQ ID NO: 101531 - DNA, 26 bp, Homo sapiens
gtgagtcactcccattgtgacacaac

SEQ ID NO: 101532 - DNA, 26 bp, Homo sapiens
tgagtcactcccattgtgacacaacg

SEQ ID NO: 101533 - DNA, 26 bp, Homo sapiens
gagtcactcccattgtgacacaacgt

SEQ ID NO: 101534 - DNA, 26 bp, Homo sapiens
agtcactcccattgtgacacaacgtg

SEQ ID NO: 101535 - DNA, 26 bp, Homo sapiens
gtcactcccattgtgacacaacgtga

SEQ ID NO: 101536 - DNA, 26 bp, Homo sapiens
tcactcccattgtgacacaacgtgat

SEQ ID NO: 101537 - DNA, 26 bp, Homo sapiens
cactcccattgtgacacaacgtgatg

SEQ ID NO: 101538 - DNA, 26 bp, Homo sapiens
actcccattgtgacacaacgtgatga

SEQ ID NO: 101539 - DNA, 26 bp, Homo sapiens
ctcccattgtgacacaacgtgatgac

SEQ ID NO: 101540 - DNA, 26 bp, Homo sapiens
tcccattgtgacacaacgtgatgact

SEQ ID NO: 101541 - DNA, 26 bp, Homo sapiens
cccattgtgacacaacgtgatgacta

SEQ ID NO: 101542 - DNA, 26 bp, Homo sapiens
ccattgtgacacaacgtgatgactaa

SEQ ID NO: 101543 - DNA, 26 bp, Homo sapiens
cattgtgacacaacgtgatgactaaa

SEQ ID NO: 101544 - DNA, 26 bp, Homo sapiens
attgtgacacaacgtgatgactaaat

SEQ ID NO: 101545 - DNA, 26 bp, Homo sapiens
ttgtgacacaacgtgatgactaaata

SEQ ID NO: 101546 - DNA, 26 bp, Homo sapiens
tgtgacacaacgtgatgactaaatat

SEQ ID NO: 101547 - DNA, 26 bp, Homo sapiens
gtgacacaacgtgatgactaaatatc

SEQ ID NO: 101548 - DNA, 26 bp, Homo sapiens
tgacacaacgtgatgactaaatatct

SEQ ID NO: 101549 - DNA, 26 bp, Homo sapiens
gacacaacgtgatgactaaatatctc

SEQ ID NO: 101550 - DNA, 26 bp, Homo sapiens
acacaacgtgatgactaaatatctct

SEQ ID NO: 101551 - DNA, 26 bp, Homo sapiens
cacaacgtgatgactaaatatctctt

SEQ ID NO: 101552 - DNA, 26 bp, Homo sapiens
acaacgtgatgactaaatatctcttg

SEQ ID NO: 101553 - DNA, 26 bp, Homo sapiens
caacgtgatgactaaatatctcttga

SEQ ID NO: 101554 - DNA, 26 bp, Homo sapiens
aacgtgatgactaaatatctcttgaa

SEQ ID NO: 101555 - DNA, 26 bp, Homo sapiens
acgtgatgactaaatatctcttgaat

SEQ ID NO: 101556 - DNA, 26 bp, Homo sapiens
cgtgatgactaaatatctcttgaata

SEQ ID NO: 101557 - DNA, 26 bp, Homo sapiens
gtgatgactaaatatctcttgaatag

SEQ ID NO: 101558 - DNA, 26 bp, Homo sapiens
tgatgactaaatatctcttgaatagc

SEQ ID NO: 101559 - DNA, 26 bp, Homo sapiens
gatgactaaatatctcttgaatagct

SEQ ID NO: 101560 - DNA, 26 bp, Homo sapiens
atgactaaatatctcttgaatagctc

SEQ ID NO: 101561 - DNA, 26 bp, Homo sapiens
tgactaaatatctcttgaatagctca

SEQ ID NO: 101562 - DNA, 26 bp, Homo sapiens
gactaaatatctcttgaatagctcat

SEQ ID NO: 101563 - DNA, 26 bp, Homo sapiens
actaaatatctcttgaatagctcata

SEQ ID NO: 101564 - DNA, 26 bp, Homo sapiens
ctaaatatctcttgaatagctcataa

SEQ ID NO: 101565 - DNA, 26 bp, Homo sapiens
taaatatctcttgaatagctcataaa

SEQ ID NO: 101566 - DNA, 26 bp, Homo sapiens
aaatatctcttgaatagctcataaaa

SEQ ID NO: 101567 - DNA, 26 bp, Homo sapiens
aatatctcttgaatagctcataaaag

SEQ ID NO: 101568 - DNA, 26 bp, Homo sapiens
atatctcttgaatagctcataaaagc

SEQ ID NO: 101569 - DNA, 26 bp, Homo sapiens
tatctcttgaatagctcataaaagcc

SEQ ID NO: 101570 - DNA, 26 bp, Homo sapiens
atctcttgaatagctcataaaagcca

SEQ ID NO: 101571 - DNA, 26 bp, Homo sapiens
tctcttgaatagctcataaaagccaa

SEQ ID NO: 101572 - DNA, 26 bp, Homo sapiens
ctcttgaatagctcataaaagccaag

SEQ ID NO: 101573 - DNA, 26 bp, Homo sapiens
tcttgaatagctcataaaagccaaga

SEQ ID NO: 101574 - DNA, 26 bp, Homo sapiens
cttgaatagctcataaaagccaagaa

SEQ ID NO: 101575 - DNA, 26 bp, Homo sapiens
ttgaatagctcataaaagccaagaag

SEQ ID NO: 101576 - DNA, 26 bp, Homo sapiens
tgaatagctcataaaagccaagaagt

SEQ ID NO: 101577 - DNA, 26 bp, Homo sapiens
gaatagctcataaaagccaagaagtc

SEQ ID NO: 101578 - DNA, 26 bp, Homo sapiens
aatagctcataaaagccaagaagtcc

SEQ ID NO: 101579 - DNA, 26 bp, Homo sapiens
atagctcataaaagccaagaagtcca

SEQ ID NO: 101580 - DNA, 26 bp, Homo sapiens
tagctcataaaagccaagaagtccag

SEQ ID NO: 101581 - DNA, 26 bp, Homo sapiens
agctcataaaagccaagaagtccagt

SEQ ID NO: 101582 - DNA, 26 bp, Homo sapiens
gctcataaaagccaagaagtccagtg

SEQ ID NO: 101583 - DNA, 26 bp, Homo sapiens
ctcataaaagccaagaagtccagtgt

SEQ ID NO: 101584 - DNA, 26 bp, Homo sapiens
tcataaaagccaagaagtccagtgtg

SEQ ID NO: 101585 - DNA, 26 bp, Homo sapiens
cataaaagccaagaagtccagtgtgc

SEQ ID NO: 101586 - DNA, 26 bp, Homo sapiens
ataaaagccaagaagtccagtgtgca

SEQ ID NO: 101587 - DNA, 26 bp, Homo sapiens
taaaagccaagaagtccagtgtgcag

SEQ ID NO: 101588 - DNA, 26 bp, Homo sapiens
aaaagccaagaagtccagtgtgcagg

SEQ ID NO: 101589 - DNA, 26 bp, Homo sapiens
aaagccaagaagtccagtgtgcaggc

SEQ ID NO: 101590 - DNA, 26 bp, Homo sapiens
aagccaagaagtccagtgtgcaggct

SEQ ID NO: 101591 - DNA, 26 bp, Homo sapiens
agccaagaagtccagtgtgcaggctg

SEQ ID NO: 101592 - DNA, 26 bp, Homo sapiens
gccaagaagtccagtgtgcaggctgt

SEQ ID NO: 101593 - DNA, 26 bp, Homo sapiens
ccaagaagtccagtgtgcaggctgtg

SEQ ID NO: 101594 - DNA, 26 bp, Homo sapiens
caagaagtccagtgtgcaggctgtgg

SEQ ID NO: 101595 - DNA, 26 bp, Homo sapiens
aagaagtccagtgtgcaggctgtggt

SEQ ID NO: 101596 - DNA, 26 bp, Homo sapiens
agaagtccagtgtgcaggctgtggtg

SEQ ID NO: 101597 - DNA, 26 bp, Homo sapiens
gaagtccagtgtgcaggctgtggtgg

SEQ ID NO: 101598 - DNA, 26 bp, Homo sapiens
aagtccagtgtgcaggctgtggtggg

SEQ ID NO: 101599 - DNA, 26 bp, Homo sapiens
agtccagtgtgcaggctgtggtgggt

SEQ ID NO: 101600 - DNA, 26 bp, Homo sapiens
gtccagtgtgcaggctgtggtgggtc

SEQ ID NO: 101601 - DNA, 26 bp, Homo sapiens
tccagtgtgcaggctgtggtgggtcc

SEQ ID NO: 101602 - DNA, 26 bp, Homo sapiens
ccagtgtgcaggctgtggtgggtcca

SEQ ID NO: 101603 - DNA, 26 bp, Homo sapiens
cagtgtgcaggctgtggtgggtccaa

SEQ ID NO: 101604 - DNA, 26 bp, Homo sapiens
agtgtgcaggctgtggtgggtccaac

SEQ ID NO: 101605 - DNA, 26 bp, Homo sapiens
gtgtgcaggctgtggtgggtccaact

SEQ ID NO: 101606 - DNA, 26 bp, Homo sapiens
tgtgcaggctgtggtgggtccaactt

SEQ ID NO: 101607 - DNA, 26 bp, Homo sapiens
gtgcaggctgtggtgggtccaacttc

SEQ ID NO: 101608 - DNA, 26 bp, Homo sapiens
tgcaggctgtggtgggtccaacttct

SEQ ID NO: 101609 - DNA, 26 bp, Homo sapiens
gcaggctgtggtgggtccaacttctg

SEQ ID NO: 101610 - DNA, 26 bp, Homo sapiens
caggctgtggtgggtccaacttctgg

SEQ ID NO: 101611 - DNA, 26 bp, Homo sapiens
aggctgtggtgggtccaacttctgga

SEQ ID NO: 101612 - DNA, 26 bp, Homo sapiens
ggctgtggtgggtccaacttctggag

SEQ ID NO: 101613 - DNA, 26 bp, Homo sapiens
gctgtggtgggtccaacttctggagt

SEQ ID NO: 101614 - DNA, 26 bp, Homo sapiens
ctgtggtgggtccaacttctggagta

SEQ ID NO: 101615 - DNA, 26 bp, Homo sapiens
tgtggtgggtccaacttctggagtat

SEQ ID NO: 101616 - DNA, 26 bp, Homo sapiens
gtggtgggtccaacttctggagtata

SEQ ID NO: 101617 - DNA, 26 bp, Homo sapiens
tggtgggtccaacttctggagtatat

SEQ ID NO: 101618 - DNA, 26 bp, Homo sapiens
ggtgggtccaacttctggagtatatc

SEQ ID NO: 101619 - DNA, 26 bp, Homo sapiens
gtgggtccaacttctggagtatatcc

SEQ ID NO: 101620 - DNA, 26 bp, Homo sapiens
tgggtccaacttctggagtatatcca

SEQ ID NO: 101621 - DNA, 26 bp, Homo sapiens
gggtccaacttctggagtatatccag

SEQ ID NO: 101622 - DNA, 26 bp, Homo sapiens
ggtccaacttctggagtatatccagt

SEQ ID NO: 101623 - DNA, 26 bp, Homo sapiens
gtccaacttctggagtatatccagtg

SEQ ID NO: 101624 - DNA, 26 bp, Homo sapiens
tccaacttctggagtatatccagtgt

SEQ ID NO: 101625 - DNA, 26 bp, Homo sapiens
ccaacttctggagtatatccagtgtc

SEQ ID NO: 101626 - DNA, 26 bp, Homo sapiens
caacttctggagtatatccagtgtca

SEQ ID NO: 101627 - DNA, 26 bp, Homo sapiens
aacttctggagtatatccagtgtcac

SEQ ID NO: 101628 - DNA, 26 bp, Homo sapiens
acttctggagtatatccagtgtcact

SEQ ID NO: 101629 - DNA, 26 bp, Homo sapiens
cttctggagtatatccagtgtcactc

SEQ ID NO: 101630 - DNA, 26 bp, Homo sapiens
ttctggagtatatccagtgtcactct

SEQ ID NO: 101631 - DNA, 26 bp, Homo sapiens
tctggagtatatccagtgtcactctt

SEQ ID NO: 101632 - DNA, 26 bp, Homo sapiens
ctggagtatatccagtgtcactcttg

SEQ ID NO: 101633 - DNA, 26 bp, Homo sapiens
tggagtatatccagtgtcactcttgt

SEQ ID NO: 101634 - DNA, 26 bp, Homo sapiens
ggagtatatccagtgtcactcttgta

SEQ ID NO: 101635 - DNA, 26 bp, Homo sapiens
gagtatatccagtgtcactcttgtaa

SEQ ID NO: 101636 - DNA, 26 bp, Homo sapiens
agtatatccagtgtcactcttgtaag

SEQ ID NO: 101637 - DNA, 26 bp, Homo sapiens
gtatatccagtgtcactcttgtaagg

SEQ ID NO: 101638 - DNA, 26 bp, Homo sapiens
tatatccagtgtcactcttgtaaggc

SEQ ID NO: 101639 - DNA, 26 bp, Homo sapiens
atatccagtgtcactcttgtaaggct

SEQ ID NO: 101640 - DNA, 26 bp, Homo sapiens
tatccagtgtcactcttgtaaggctg

SEQ ID NO: 101641 - DNA, 26 bp, Homo sapiens
atccagtgtcactcttgtaaggctga

SEQ ID NO: 101642 - DNA, 26 bp, Homo sapiens
tccagtgtcactcttgtaaggctgac

SEQ ID NO: 101643 - DNA, 26 bp, Homo sapiens
ccagtgtcactcttgtaaggctgacc

SEQ ID NO: 101644 - DNA, 26 bp, Homo sapiens
cagtgtcactcttgtaaggctgacca

SEQ ID NO: 101645 - DNA, 26 bp, Homo sapiens
agtgtcactcttgtaaggctgaccag

SEQ ID NO: 101646 - DNA, 26 bp, Homo sapiens
gtgtcactcttgtaaggctgaccagg

SEQ ID NO: 101647 - DNA, 26 bp, Homo sapiens
tgtcactcttgtaaggctgaccagga

SEQ ID NO: 101648 - DNA, 26 bp, Homo sapiens
gtcactcttgtaaggctgaccaggag

SEQ ID NO: 101649 - DNA, 26 bp, Homo sapiens
tcactcttgtaaggctgaccaggagg

SEQ ID NO: 101650 - DNA, 26 bp, Homo sapiens
cactcttgtaaggctgaccaggaggg

SEQ ID NO: 101651 - DNA, 26 bp, Homo sapiens
actcttgtaaggctgaccaggagggt

SEQ ID NO: 101652 - DNA, 26 bp, Homo sapiens
ctcttgtaaggctgaccaggagggtg

SEQ ID NO: 101653 - DNA, 26 bp, Homo sapiens
tcttgtaaggctgaccaggagggtga

SEQ ID NO: 101654 - DNA, 26 bp, Homo sapiens
cttgtaaggctgaccaggagggtgag

SEQ ID NO: 101655 - DNA, 26 bp, Homo sapiens
ttgtaaggctgaccaggagggtgagg

SEQ ID NO: 101656 - DNA, 26 bp, Homo sapiens
tgtaaggctgaccaggagggtgaggc

SEQ ID NO: 101657 - DNA, 26 bp, Homo sapiens
gtaaggctgaccaggagggtgaggct

SEQ ID NO: 101658 - DNA, 26 bp, Homo sapiens
taaggctgaccaggagggtgaggctg

SEQ ID NO: 101659 - DNA, 26 bp, Homo sapiens
aaggctgaccaggagggtgaggctgg

SEQ ID NO: 101660 - DNA, 26 bp, Homo sapiens
aggctgaccaggagggtgaggctggt

SEQ ID NO: 101661 - DNA, 26 bp, Homo sapiens
ggctgaccaggagggtgaggctggtg

SEQ ID NO: 101662 - DNA, 26 bp, Homo sapiens
gctgaccaggagggtgaggctggtga

SEQ ID NO: 101663 - DNA, 26 bp, Homo sapiens
ctgaccaggagggtgaggctggtgat

SEQ ID NO: 101664 - DNA, 26 bp, Homo sapiens
tgaccaggagggtgaggctggtgata

SEQ ID NO: 101665 - DNA, 26 bp, Homo sapiens
gaccaggagggtgaggctggtgatag

SEQ ID NO: 101666 - DNA, 26 bp, Homo sapiens
accaggagggtgaggctggtgataga

SEQ ID NO: 101667 - DNA, 26 bp, Homo sapiens
ccaggagggtgaggctggtgatagag

SEQ ID NO: 101668 - DNA, 26 bp, Homo sapiens
caggagggtgaggctggtgatagagc

SEQ ID NO: 101669 - DNA, 26 bp, Homo sapiens
aggagggtgaggctggtgatagagca

SEQ ID NO: 101670 - DNA, 26 bp, Homo sapiens
ggagggtgaggctggtgatagagcat

SEQ ID NO: 101671 - DNA, 26 bp, Homo sapiens
gagggtgaggctggtgatagagcatg

SEQ ID NO: 101672 - DNA, 26 bp, Homo sapiens
agggtgaggctggtgatagagcatgc

SEQ ID NO: 101673 - DNA, 26 bp, Homo sapiens
gggtgaggctggtgatagagcatgca

SEQ ID NO: 101674 - DNA, 26 bp, Homo sapiens
ggtgaggctggtgatagagcatgcac

SEQ ID NO: 101675 - DNA, 26 bp, Homo sapiens
gtgaggctggtgatagagcatgcaca

SEQ ID NO: 101676 - DNA, 26 bp, Homo sapiens
tgaggctggtgatagagcatgcacag

SEQ ID NO: 101677 - DNA, 26 bp, Homo sapiens
gaggctggtgatagagcatgcacagt

SEQ ID NO: 101678 - DNA, 26 bp, Homo sapiens
aggctggtgatagagcatgcacagtg

SEQ ID NO: 101679 - DNA, 26 bp, Homo sapiens
ggctggtgatagagcatgcacagtgg

SEQ ID NO: 101680 - DNA, 26 bp, Homo sapiens
gctggtgatagagcatgcacagtggc

SEQ ID NO: 101681 - DNA, 26 bp, Homo sapiens
ctggtgatagagcatgcacagtggct

SEQ ID NO: 101682 - DNA, 26 bp, Homo sapiens
tggtgatagagcatgcacagtggctt

SEQ ID NO: 101683 - DNA, 26 bp, Homo sapiens
ggtgatagagcatgcacagtggcttc

SEQ ID NO: 101684 - DNA, 26 bp, Homo sapiens
gtgatagagcatgcacagtggcttct

SEQ ID NO: 101685 - DNA, 26 bp, Homo sapiens
tgatagagcatgcacagtggcttctt

SEQ ID NO: 101686 - DNA, 26 bp, Homo sapiens
gatagagcatgcacagtggcttcttc

SEQ ID NO: 101687 - DNA, 26 bp, Homo sapiens
atagagcatgcacagtggcttcttcc

SEQ ID NO: 101688 - DNA, 26 bp, Homo sapiens
tagagcatgcacagtggcttcttcct

SEQ ID NO: 101689 - DNA, 26 bp, Homo sapiens
agagcatgcacagtggcttcttcctt

SEQ ID NO: 101690 - DNA, 26 bp, Homo sapiens
gagcatgcacagtggcttcttccttc

SEQ ID NO: 101691 - DNA, 26 bp, Homo sapiens
agcatgcacagtggcttcttccttct

SEQ ID NO: 101692 - DNA, 26 bp, Homo sapiens
gcatgcacagtggcttcttccttctg

SEQ ID NO: 101693 - DNA, 26 bp, Homo sapiens
catgcacagtggcttcttccttctgg

SEQ ID NO: 101694 - DNA, 26 bp, Homo sapiens
atgcacagtggcttcttccttctggc

SEQ ID NO: 101695 - DNA, 26 bp, Homo sapiens
tgcacagtggcttcttccttctggca

SEQ ID NO: 101696 - DNA, 26 bp, Homo sapiens
gcacagtggcttcttccttctggcat

SEQ ID NO: 101697 - DNA, 26 bp, Homo sapiens
cacagtggcttcttccttctggcata

SEQ ID NO: 101698 - DNA, 26 bp, Homo sapiens
acagtggcttcttccttctggcataa

SEQ ID NO: 101699 - DNA, 26 bp, Homo sapiens
cagtggcttcttccttctggcataat

SEQ ID NO: 101700 - DNA, 26 bp, Homo sapiens
agtggcttcttccttctggcataatg

SEQ ID NO: 101701 - DNA, 26 bp, Homo sapiens
gtggcttcttccttctggcataatga

SEQ ID NO: 101702 - DNA, 26 bp, Homo sapiens
tggcttcttccttctggcataatgat

SEQ ID NO: 101703 - DNA, 26 bp, Homo sapiens
ggcttcttccttctggcataatgatg

SEQ ID NO: 101704 - DNA, 26 bp, Homo sapiens
gcttcttccttctggcataatgatgt

SEQ ID NO: 101705 - DNA, 26 bp, Homo sapiens
cttcttccttctggcataatgatgta

SEQ ID NO: 101706 - DNA, 26 bp, Homo sapiens
ttcttccttctggcataatgatgtaa

SEQ ID NO: 101707 - DNA, 26 bp, Homo sapiens
tcttccttctggcataatgatgtaat

SEQ ID NO: 101708 - DNA, 26 bp, Homo sapiens
cttccttctggcataatgatgtaatc

SEQ ID NO: 101709 - DNA, 26 bp, Homo sapiens
ttccttctggcataatgatgtaatcc

SEQ ID NO: 101710 - DNA, 26 bp, Homo sapiens
tccttctggcataatgatgtaatcct

SEQ ID NO: 101711 - DNA, 26 bp, Homo sapiens
ccttctggcataatgatgtaatcctc

SEQ ID NO: 101712 - DNA, 26 bp, Homo sapiens
cttctggcataatgatgtaatcctct

SEQ ID NO: 101713 - DNA, 26 bp, Homo sapiens
ttctggcataatgatgtaatcctctc

SEQ ID NO: 101714 - DNA, 26 bp, Homo sapiens
tctggcataatgatgtaatcctctct

SEQ ID NO: 101715 - DNA, 26 bp, Homo sapiens
ctggcataatgatgtaatcctctctc

SEQ ID NO: 101716 - DNA, 26 bp, Homo sapiens
tggcataatgatgtaatcctctctct

SEQ ID NO: 101717 - DNA, 26 bp, Homo sapiens
ggcataatgatgtaatcctctctctc

SEQ ID NO: 101718 - DNA, 26 bp, Homo sapiens
gcataatgatgtaatcctctctctca

SEQ ID NO: 101719 - DNA, 26 bp, Homo sapiens
cataatgatgtaatcctctctctcaa

SEQ ID NO: 101720 - DNA, 26 bp, Homo sapiens
ataatgatgtaatcctctctctcaag

SEQ ID NO: 101721 - DNA, 26 bp, Homo sapiens
taatgatgtaatcctctctctcaagt

SEQ ID NO: 101722 - DNA, 26 bp, Homo sapiens
aatgatgtaatcctctctctcaagtc

SEQ ID NO: 101723 - DNA, 26 bp, Homo sapiens
atgatgtaatcctctctctcaagtca

SEQ ID NO: 101724 - DNA, 26 bp, Homo sapiens
tgatgtaatcctctctctcaagtcat

SEQ ID NO: 101725 - DNA, 26 bp, Homo sapiens
gatgtaatcctctctctcaagtcatt

SEQ ID NO: 101726 - DNA, 26 bp, Homo sapiens
atgtaatcctctctctcaagtcattc

SEQ ID NO: 101727 - DNA, 26 bp, Homo sapiens
tgtaatcctctctctcaagtcattct

SEQ ID NO: 101728 - DNA, 26 bp, Homo sapiens
gtaatcctctctctcaagtcattctc

SEQ ID NO: 101729 - DNA, 26 bp, Homo sapiens
taatcctctctctcaagtcattctca

SEQ ID NO: 101730 - DNA, 26 bp, Homo sapiens
aatcctctctctcaagtcattctcag

SEQ ID NO: 101731 - DNA, 26 bp, Homo sapiens
atcctctctctcaagtcattctcagt

SEQ ID NO: 101732 - DNA, 26 bp, Homo sapiens
tcctctctctcaagtcattctcagtg

SEQ ID NO: 101733 - DNA, 26 bp, Homo sapiens
cctctctctcaagtcattctcagtgg

SEQ ID NO: 101734 - DNA, 26 bp, Homo sapiens
ctctctctcaagtcattctcagtgga

SEQ ID NO: 101735 - DNA, 26 bp, Homo sapiens
tctctctcaagtcattctcagtggaa

SEQ ID NO: 101736 - DNA, 26 bp, Homo sapiens
ctctctcaagtcattctcagtggaac

SEQ ID NO: 101737 - DNA, 26 bp, Homo sapiens
tctctcaagtcattctcagtggaaca

SEQ ID NO: 101738 - DNA, 26 bp, Homo sapiens
ctctcaagtcattctcagtggaacat

SEQ ID NO: 101739 - DNA, 26 bp, Homo sapiens
tctcaagtcattctcagtggaacatg

SEQ ID NO: 101740 - DNA, 26 bp, Homo sapiens
ctcaagtcattctcagtggaacatgt

SEQ ID NO: 101741 - DNA, 26 bp, Homo sapiens
tcaagtcattctcagtggaacatgtt

SEQ ID NO: 101742 - DNA, 26 bp, Homo sapiens
caagtcattctcagtggaacatgttt

SEQ ID NO: 101743 - DNA, 26 bp, Homo sapiens
aagtcattctcagtggaacatgtttc

SEQ ID NO: 101744 - DNA, 26 bp, Homo sapiens
agtcattctcagtggaacatgtttct

SEQ ID NO: 101745 - DNA, 26 bp, Homo sapiens
gtcattctcagtggaacatgtttctc

SEQ ID NO: 101746 - DNA, 26 bp, Homo sapiens
tcattctcagtggaacatgtttctct

SEQ ID NO: 101747 - DNA, 26 bp, Homo sapiens
cattctcagtggaacatgtttctctg

SEQ ID NO: 101748 - DNA, 26 bp, Homo sapiens
attctcagtggaacatgtttctctga

SEQ ID NO: 101749 - DNA, 26 bp, Homo sapiens
ttctcagtggaacatgtttctctgaa

SEQ ID NO: 101750 - DNA, 26 bp, Homo sapiens
tctcagtggaacatgtttctctgaac

SEQ ID NO: 101751 - DNA, 26 bp, Homo sapiens
ctcagtggaacatgtttctctgaacg

SEQ ID NO: 101752 - DNA, 26 bp, Homo sapiens
tcagtggaacatgtttctctgaacga

SEQ ID NO: 101753 - DNA, 26 bp, Homo sapiens
cagtggaacatgtttctctgaacgac

SEQ ID NO: 101754 - DNA, 26 bp, Homo sapiens
agtggaacatgtttctctgaacgact

SEQ ID NO: 101755 - DNA, 26 bp, Homo sapiens
gaccccaagcacagctttattgacac

SEQ ID NO: 101756 - DNA, 26 bp, Homo sapiens
accccaagcacagctttattgacacc

SEQ ID NO: 101757 - DNA, 26 bp, Homo sapiens
ccccaagcacagctttattgacaccc

SEQ ID NO: 101758 - DNA, 26 bp, Homo sapiens
cccaagcacagctttattgacacccc

SEQ ID NO: 101759 - DNA, 26 bp, Homo sapiens
ccaagcacagctttattgacacccca

SEQ ID NO: 101760 - DNA, 26 bp, Homo sapiens
caagcacagctttattgacaccccag

SEQ ID NO: 101761 - DNA, 26 bp, Homo sapiens
aagcacagctttattgacaccccagc

SEQ ID NO: 101762 - DNA, 26 bp, Homo sapiens
agcacagctttattgacaccccagcc

SEQ ID NO: 101763 - DNA, 26 bp, Homo sapiens
gcacagctttattgacaccccagcca

SEQ ID NO: 101764 - DNA, 26 bp, Homo sapiens
cacagctttattgacaccccagccaa

SEQ ID NO: 101765 - DNA, 26 bp, Homo sapiens
acagctttattgacaccccagccaac

SEQ ID NO: 101766 - DNA, 26 bp, Homo sapiens
cagctttattgacaccccagccaaca

SEQ ID NO: 101767 - DNA, 26 bp, Homo sapiens
agctttattgacaccccagccaacac

SEQ ID NO: 101768 - DNA, 26 bp, Homo sapiens
gctttattgacaccccagccaacacc

SEQ ID NO: 101769 - DNA, 26 bp, Homo sapiens
ctttattgacaccccagccaacacca

SEQ ID NO: 101770 - DNA, 26 bp, Homo sapiens
tttattgacaccccagccaacaccaa

SEQ ID NO: 101771 - DNA, 26 bp, Homo sapiens
ttattgacaccccagccaacaccaac

SEQ ID NO: 101772 - DNA, 26 bp, Homo sapiens
tattgacaccccagccaacaccaaca

SEQ ID NO: 101773 - DNA, 26 bp, Homo sapiens
attgacaccccagccaacaccaacac

SEQ ID NO: 101774 - DNA, 26 bp, Homo sapiens
ttgacaccccagccaacaccaacact

SEQ ID NO: 101775 - DNA, 26 bp, Homo sapiens
tgacaccccagccaacaccaacactc

SEQ ID NO: 101776 - DNA, 26 bp, Homo sapiens
gacaccccagccaacaccaacactct

SEQ ID NO: 101777 - DNA, 26 bp, Homo sapiens
acaccccagccaacaccaacactctt

SEQ ID NO: 101778 - DNA, 26 bp, Homo sapiens
caccccagccaacaccaacactcttt

SEQ ID NO: 101779 - DNA, 26 bp, Homo sapiens
accccagccaacaccaacactctttc

SEQ ID NO: 101780 - DNA, 26 bp, Homo sapiens
ccccagccaacaccaacactctttcc

SEQ ID NO: 101781 - DNA, 26 bp, Homo sapiens
cccagccaacaccaacactctttcca

SEQ ID NO: 101782 - DNA, 26 bp, Homo sapiens
ccagccaacaccaacactctttccaa

SEQ ID NO: 101783 - DNA, 26 bp, Homo sapiens
cagccaacaccaacactctttccaac

SEQ ID NO: 101784 - DNA, 26 bp, Homo sapiens
agccaacaccaacactctttccaacc

SEQ ID NO: 101785 - DNA, 26 bp, Homo sapiens
gccaacaccaacactctttccaacca

SEQ ID NO: 101786 - DNA, 26 bp, Homo sapiens
ccaacaccaacactctttccaaccag

SEQ ID NO: 101787 - DNA, 26 bp, Homo sapiens
caacaccaacactctttccaaccagc

SEQ ID NO: 101788 - DNA, 26 bp, Homo sapiens
aacaccaacactctttccaaccagcg

SEQ ID NO: 101789 - DNA, 26 bp, Homo sapiens
acaccaacactctttccaaccagcgg

SEQ ID NO: 101790 - DNA, 26 bp, Homo sapiens
caccaacactctttccaaccagcggt

SEQ ID NO: 101791 - DNA, 26 bp, Homo sapiens
accaacactctttccaaccagcggtg

SEQ ID NO: 101792 - DNA, 26 bp, Homo sapiens
ccaacactctttccaaccagcggtga

SEQ ID NO: 101793 - DNA, 26 bp, Homo sapiens
caacactctttccaaccagcggtgag

SEQ ID NO: 101794 - DNA, 26 bp, Homo sapiens
aacactctttccaaccagcggtgagg

SEQ ID NO: 101795 - DNA, 26 bp, Homo sapiens
acactctttccaaccagcggtgaggg

SEQ ID NO: 101796 - DNA, 26 bp, Homo sapiens
cactctttccaaccagcggtgagggg

SEQ ID NO: 101797 - DNA, 26 bp, Homo sapiens
actctttccaaccagcggtgaggggc

SEQ ID NO: 101798 - DNA, 26 bp, Homo sapiens
ctctttccaaccagcggtgaggggcc

SEQ ID NO: 101799 - DNA, 26 bp, Homo sapiens
tctttccaaccagcggtgaggggccc

SEQ ID NO: 101800 - DNA, 26 bp, Homo sapiens
ctttccaaccagcggtgaggggccca

SEQ ID NO: 101801 - DNA, 26 bp, Homo sapiens
tttccaaccagcggtgaggggcccat

SEQ ID NO: 101802 - DNA, 26 bp, Homo sapiens
ttccaaccagcggtgaggggcccatg

SEQ ID NO: 101803 - DNA, 26 bp, Homo sapiens
tccaaccagcggtgaggggcccatgg

SEQ ID NO: 101804 - DNA, 26 bp, Homo sapiens
ccaaccagcggtgaggggcccatggg

SEQ ID NO: 101805 - DNA, 26 bp, Homo sapiens
caaccagcggtgaggggcccatgggg

SEQ ID NO: 101806 - DNA, 26 bp, Homo sapiens
aaccagcggtgaggggcccatggggc

SEQ ID NO: 101807 - DNA, 26 bp, Homo sapiens
accagcggtgaggggcccatggggcg

SEQ ID NO: 101808 - DNA, 26 bp, Homo sapiens
ccagcggtgaggggcccatggggcgg

SEQ ID NO: 101809 - DNA, 26 bp, Homo sapiens
cagcggtgaggggcccatggggcggg

SEQ ID NO: 101810 - DNA, 26 bp, Homo sapiens
agcggtgaggggcccatggggcgggg

SEQ ID NO: 101811 - DNA, 26 bp, Homo sapiens
gcggtgaggggcccatggggcggggc

SEQ ID NO: 101812 - DNA, 26 bp, Homo sapiens
cggtgaggggcccatggggcggggcc

SEQ ID NO: 101813 - DNA, 26 bp, Homo sapiens
ggtgaggggcccatggggcggggcct

SEQ ID NO: 101814 - DNA, 26 bp, Homo sapiens
gtgaggggcccatggggcggggcctg

SEQ ID NO: 101815 - DNA, 26 bp, Homo sapiens
tgaggggcccatggggcggggcctga

SEQ ID NO: 101816 - DNA, 26 bp, Homo sapiens
gaggggcccatggggcggggcctgaa

SEQ ID NO: 101817 - DNA, 26 bp, Homo sapiens
aggggcccatggggcggggcctgaag

SEQ ID NO: 101818 - DNA, 26 bp, Homo sapiens
ggggcccatggggcggggcctgaagg

SEQ ID NO: 101819 - DNA, 26 bp, Homo sapiens
gggcccatggggcggggcctgaaggt

SEQ ID NO: 101820 - DNA, 26 bp, Homo sapiens
ggcccatggggcggggcctgaaggtg

SEQ ID NO: 101821 - DNA, 26 bp, Homo sapiens
gcccatggggcggggcctgaaggtgg

SEQ ID NO: 101822 - DNA, 26 bp, Homo sapiens
cccatggggcggggcctgaaggtgga

SEQ ID NO: 101823 - DNA, 26 bp, Homo sapiens
ccatggggcggggcctgaaggtggat

SEQ ID NO: 101824 - DNA, 26 bp, Homo sapiens
catggggcggggcctgaaggtggatt

SEQ ID NO: 101825 - DNA, 26 bp, Homo sapiens
atggggcggggcctgaaggtggattg

SEQ ID NO: 101826 - DNA, 26 bp, Homo sapiens
tggggcggggcctgaaggtggattga

SEQ ID NO: 101827 - DNA, 26 bp, Homo sapiens
ggggcggggcctgaaggtggattgag

SEQ ID NO: 101828 - DNA, 26 bp, Homo sapiens
gggcggggcctgaaggtggattgagg

SEQ ID NO: 101829 - DNA, 26 bp, Homo sapiens
ggcggggcctgaaggtggattgaggg

SEQ ID NO: 101830 - DNA, 26 bp, Homo sapiens
gcggggcctgaaggtggattgagggc

SEQ ID NO: 101831 - DNA, 26 bp, Homo sapiens
cggggcctgaaggtggattgagggcc

SEQ ID NO: 101832 - DNA, 26 bp, Homo sapiens
ggggcctgaaggtggattgagggcct

SEQ ID NO: 101833 - DNA, 26 bp, Homo sapiens
gggcctgaaggtggattgagggcctc

SEQ ID NO: 101834 - DNA, 26 bp, Homo sapiens
ggcctgaaggtggattgagggcctcg

SEQ ID NO: 101835 - DNA, 26 bp, Homo sapiens
gcctgaaggtggattgagggcctcgg

SEQ ID NO: 101836 - DNA, 26 bp, Homo sapiens
cctgaaggtggattgagggcctcggt

SEQ ID NO: 101837 - DNA, 26 bp, Homo sapiens
ctgaaggtggattgagggcctcggtt

SEQ ID NO: 101838 - DNA, 26 bp, Homo sapiens
tgaaggtggattgagggcctcggttt

SEQ ID NO: 101839 - DNA, 26 bp, Homo sapiens
gaaggtggattgagggcctcggtttt

SEQ ID NO: 101840 - DNA, 26 bp, Homo sapiens
aaggtggattgagggcctcggttttt

SEQ ID NO: 101841 - DNA, 26 bp, Homo sapiens
aggtggattgagggcctcggtttttt

SEQ ID NO: 101842 - DNA, 26 bp, Homo sapiens
ggtggattgagggcctcggttttttg

SEQ ID NO: 101843 - DNA, 26 bp, Homo sapiens
gtggattgagggcctcggttttttgt

SEQ ID NO: 101844 - DNA, 26 bp, Homo sapiens
tggattgagggcctcggttttttgtt

SEQ ID NO: 101845 - DNA, 26 bp, Homo sapiens
ggattgagggcctcggttttttgttg

SEQ ID NO: 101846 - DNA, 26 bp, Homo sapiens
gattgagggcctcggttttttgttga

SEQ ID NO: 101847 - DNA, 26 bp, Homo sapiens
attgagggcctcggttttttgttgag

SEQ ID NO: 101848 - DNA, 26 bp, Homo sapiens
ttgagggcctcggttttttgttgagt

SEQ ID NO: 101849 - DNA, 26 bp, Homo sapiens
tgagggcctcggttttttgttgagtg

SEQ ID NO: 101850 - DNA, 26 bp, Homo sapiens
gagggcctcggttttttgttgagtga

SEQ ID NO: 101851 - DNA, 26 bp, Homo sapiens
agggcctcggttttttgttgagtgat

SEQ ID NO: 101852 - DNA, 26 bp, Homo sapiens
gggcctcggttttttgttgagtgatg

SEQ ID NO: 101853 - DNA, 26 bp, Homo sapiens
ggcctcggttttttgttgagtgatga

SEQ ID NO: 101854 - DNA, 26 bp, Homo sapiens
gcctcggttttttgttgagtgatgac

SEQ ID NO: 101855 - DNA, 26 bp, Homo sapiens
cctcggttttttgttgagtgatgaca

SEQ ID NO: 101856 - DNA, 26 bp, Homo sapiens
ctcggttttttgttgagtgatgacag

SEQ ID NO: 101857 - DNA, 26 bp, Homo sapiens
tcggttttttgttgagtgatgacagc

SEQ ID NO: 101858 - DNA, 26 bp, Homo sapiens
cggttttttgttgagtgatgacagct

SEQ ID NO: 101859 - DNA, 26 bp, Homo sapiens
ggttttttgttgagtgatgacagctc

SEQ ID NO: 101860 - DNA, 26 bp, Homo sapiens
gttttttgttgagtgatgacagctcc

SEQ ID NO: 101861 - DNA, 26 bp, Homo sapiens
ttttttgttgagtgatgacagctcca

SEQ ID NO: 101862 - DNA, 26 bp, Homo sapiens
tttttgttgagtgatgacagctccat

SEQ ID NO: 101863 - DNA, 26 bp, Homo sapiens
ttttgttgagtgatgacagctccatg

SEQ ID NO: 101864 - DNA, 26 bp, Homo sapiens
tttgttgagtgatgacagctccatgt

SEQ ID NO: 101865 - DNA, 26 bp, Homo sapiens
ttgttgagtgatgacagctccatgtt

SEQ ID NO: 101866 - DNA, 26 bp, Homo sapiens
tgttgagtgatgacagctccatgttc

SEQ ID NO: 101867 - DNA, 26 bp, Homo sapiens
gttgagtgatgacagctccatgttcc

SEQ ID NO: 101868 - DNA, 26 bp, Homo sapiens
ttgagtgatgacagctccatgttcct

SEQ ID NO: 101869 - DNA, 26 bp, Homo sapiens
tgagtgatgacagctccatgttcctt

SEQ ID NO: 101870 - DNA, 26 bp, Homo sapiens
gagtgatgacagctccatgttccttc

SEQ ID NO: 101871 - DNA, 26 bp, Homo sapiens
agtgatgacagctccatgttccttcc

SEQ ID NO: 101872 - DNA, 26 bp, Homo sapiens
gtgatgacagctccatgttccttcca

SEQ ID NO: 101873 - DNA, 26 bp, Homo sapiens
tgatgacagctccatgttccttccag

SEQ ID NO: 101874 - DNA, 26 bp, Homo sapiens
gatgacagctccatgttccttccagt

SEQ ID NO: 101875 - DNA, 26 bp, Homo sapiens
atgacagctccatgttccttccagtg

SEQ ID NO: 101876 - DNA, 26 bp, Homo sapiens
tgacagctccatgttccttccagtgg

SEQ ID NO: 101877 - DNA, 26 bp, Homo sapiens
gacagctccatgttccttccagtggc

SEQ ID NO: 101878 - DNA, 26 bp, Homo sapiens
acagctccatgttccttccagtggcc

SEQ ID NO: 101879 - DNA, 26 bp, Homo sapiens
cagctccatgttccttccagtggccc

SEQ ID NO: 101880 - DNA, 26 bp, Homo sapiens
agctccatgttccttccagtggccct

SEQ ID NO: 101881 - DNA, 26 bp, Homo sapiens
gctccatgttccttccagtggccctg

SEQ ID NO: 101882 - DNA, 26 bp, Homo sapiens
ctccatgttccttccagtggccctgc

SEQ ID NO: 101883 - DNA, 26 bp, Homo sapiens
tccatgttccttccagtggccctgca

SEQ ID NO: 101884 - DNA, 26 bp, Homo sapiens
ccatgttccttccagtggccctgcag

SEQ ID NO: 101885 - DNA, 26 bp, Homo sapiens
catgttccttccagtggccctgcagc

SEQ ID NO: 101886 - DNA, 26 bp, Homo sapiens
atgttccttccagtggccctgcagcc

SEQ ID NO: 101887 - DNA, 26 bp, Homo sapiens
tgttccttccagtggccctgcagccc

SEQ ID NO: 101888 - DNA, 26 bp, Homo sapiens
gttccttccagtggccctgcagcccc

SEQ ID NO: 101889 - DNA, 26 bp, Homo sapiens
ttccttccagtggccctgcagcccct

SEQ ID NO: 101890 - DNA, 26 bp, Homo sapiens
tccttccagtggccctgcagcccctc

SEQ ID NO: 101891 - DNA, 26 bp, Homo sapiens
ccttccagtggccctgcagcccctct

SEQ ID NO: 101892 - DNA, 26 bp, Homo sapiens
cttccagtggccctgcagcccctcta

SEQ ID NO: 101893 - DNA, 26 bp, Homo sapiens
ttccagtggccctgcagcccctctat

SEQ ID NO: 101894 - DNA, 26 bp, Homo sapiens
tccagtggccctgcagcccctctatc

SEQ ID NO: 101895 - DNA, 26 bp, Homo sapiens
ccagtggccctgcagcccctctatcc

SEQ ID NO: 101896 - DNA, 26 bp, Homo sapiens
cagtggccctgcagcccctctatccc

SEQ ID NO: 101897 - DNA, 26 bp, Homo sapiens
agtggccctgcagcccctctatcccc

SEQ ID NO: 101898 - DNA, 26 bp, Homo sapiens
gtggccctgcagcccctctatccccc

SEQ ID NO: 101899 - DNA, 26 bp, Homo sapiens
tggccctgcagcccctctatccccca

SEQ ID NO: 101900 - DNA, 26 bp, Homo sapiens
ggccctgcagcccctctatcccccag

SEQ ID NO: 101901 - DNA, 26 bp, Homo sapiens
gccctgcagcccctctatcccccagc

SEQ ID NO: 101902 - DNA, 26 bp, Homo sapiens
ccctgcagcccctctatcccccagct

SEQ ID NO: 101903 - DNA, 26 bp, Homo sapiens
cctgcagcccctctatcccccagctt

SEQ ID NO: 101904 - DNA, 26 bp, Homo sapiens
ctgcagcccctctatcccccagcttt

SEQ ID NO: 101905 - DNA, 26 bp, Homo sapiens
tgcagcccctctatcccccagcttta

SEQ ID NO: 101906 - DNA, 26 bp, Homo sapiens
gcagcccctctatcccccagctttag

SEQ ID NO: 101907 - DNA, 26 bp, Homo sapiens
cagcccctctatcccccagctttagc

SEQ ID NO: 101908 - DNA, 26 bp, Homo sapiens
agcccctctatcccccagctttagcc

SEQ ID NO: 101909 - DNA, 26 bp, Homo sapiens
gcccctctatcccccagctttagccg

SEQ ID NO: 101910 - DNA, 26 bp, Homo sapiens
cccctctatcccccagctttagccgc

SEQ ID NO: 101911 - DNA, 26 bp, Homo sapiens
ccctctatcccccagctttagccgct

SEQ ID NO: 101912 - DNA, 26 bp, Homo sapiens
cctctatcccccagctttagccgcta

SEQ ID NO: 101913 - DNA, 26 bp, Homo sapiens
ctctatcccccagctttagccgctac

SEQ ID NO: 101914 - DNA, 26 bp, Homo sapiens
tctatcccccagctttagccgctact

SEQ ID NO: 101915 - DNA, 26 bp, Homo sapiens
ctatcccccagctttagccgctactc

SEQ ID NO: 101916 - DNA, 26 bp, Homo sapiens
tatcccccagctttagccgctactcc

SEQ ID NO: 101917 - DNA, 26 bp, Homo sapiens
atcccccagctttagccgctactccc

SEQ ID NO: 101918 - DNA, 26 bp, Homo sapiens
tcccccagctttagccgctactccca

SEQ ID NO: 101919 - DNA, 26 bp, Homo sapiens
cccccagctttagccgctactcccag

SEQ ID NO: 101920 - DNA, 26 bp, Homo sapiens
ccccagctttagccgctactcccagt

SEQ ID NO: 101921 - DNA, 26 bp, Homo sapiens
cccagctttagccgctactcccagtg

SEQ ID NO: 101922 - DNA, 26 bp, Homo sapiens
ccagctttagccgctactcccagtgg

SEQ ID NO: 101923 - DNA, 26 bp, Homo sapiens
cagctttagccgctactcccagtggg

SEQ ID NO: 101924 - DNA, 26 bp, Homo sapiens
agctttagccgctactcccagtgggg

SEQ ID NO: 101925 - DNA, 26 bp, Homo sapiens
gctttagccgctactcccagtggggc

SEQ ID NO: 101926 - DNA, 26 bp, Homo sapiens
ctttagccgctactcccagtggggca

SEQ ID NO: 101927 - DNA, 26 bp, Homo sapiens
tttagccgctactcccagtggggcag

SEQ ID NO: 101928 - DNA, 26 bp, Homo sapiens
ttagccgctactcccagtggggcagg

SEQ ID NO: 101929 - DNA, 26 bp, Homo sapiens
tagccgctactcccagtggggcagga

SEQ ID NO: 101930 - DNA, 26 bp, Homo sapiens
agccgctactcccagtggggcaggag

SEQ ID NO: 101931 - DNA, 26 bp, Homo sapiens
gccgctactcccagtggggcaggagg

SEQ ID NO: 101932 - DNA, 26 bp, Homo sapiens
ccgctactcccagtggggcaggagga

SEQ ID NO: 101933 - DNA, 26 bp, Homo sapiens
cgctactcccagtggggcaggaggag

SEQ ID NO: 101934 - DNA, 26 bp, Homo sapiens
gctactcccagtggggcaggaggagc

SEQ ID NO: 101935 - DNA, 26 bp, Homo sapiens
ctactcccagtggggcaggaggagct

SEQ ID NO: 101936 - DNA, 26 bp, Homo sapiens
tactcccagtggggcaggaggagctt

SEQ ID NO: 101937 - DNA, 26 bp, Homo sapiens
actcccagtggggcaggaggagcttc

SEQ ID NO: 101938 - DNA, 26 bp, Homo sapiens
ctcccagtggggcaggaggagcttcc

SEQ ID NO: 101939 - DNA, 26 bp, Homo sapiens
tcccagtggggcaggaggagcttcca

SEQ ID NO: 101940 - DNA, 26 bp, Homo sapiens
cccagtggggcaggaggagcttccat

SEQ ID NO: 101941 - DNA, 26 bp, Homo sapiens
ccagtggggcaggaggagcttccatt

SEQ ID NO: 101942 - DNA, 26 bp, Homo sapiens
cagtggggcaggaggagcttccattg

SEQ ID NO: 101943 - DNA, 26 bp, Homo sapiens
agtggggcaggaggagcttccattgc

SEQ ID NO: 101944 - DNA, 26 bp, Homo sapiens
gtggggcaggaggagcttccattgcc

SEQ ID NO: 101945 - DNA, 26 bp, Homo sapiens
tggggcaggaggagcttccattgcca

SEQ ID NO: 101946 - DNA, 26 bp, Homo sapiens
ggggcaggaggagcttccattgccat

SEQ ID NO: 101947 - DNA, 26 bp, Homo sapiens
gggcaggaggagcttccattgccatc

SEQ ID NO: 101948 - DNA, 26 bp, Homo sapiens
ggcaggaggagcttccattgccatct

SEQ ID NO: 101949 - DNA, 26 bp, Homo sapiens
gcaggaggagcttccattgccatctg

SEQ ID NO: 101950 - DNA, 26 bp, Homo sapiens
caggaggagcttccattgccatctgg

SEQ ID NO: 101951 - DNA, 26 bp, Homo sapiens
aggaggagcttccattgccatctgga

SEQ ID NO: 101952 - DNA, 26 bp, Homo sapiens
ggaggagcttccattgccatctggag

SEQ ID NO: 101953 - DNA, 26 bp, Homo sapiens
gaggagcttccattgccatctggaga

SEQ ID NO: 101954 - DNA, 26 bp, Homo sapiens
aggagcttccattgccatctggagac

SEQ ID NO: 101955 - DNA, 26 bp, Homo sapiens
ggagcttccattgccatctggagacc

SEQ ID NO: 101956 - DNA, 26 bp, Homo sapiens
gagcttccattgccatctggagaccc

SEQ ID NO: 101957 - DNA, 26 bp, Homo sapiens
agcttccattgccatctggagaccct

SEQ ID NO: 101958 - DNA, 26 bp, Homo sapiens
gcttccattgccatctggagaccctg

SEQ ID NO: 101959 - DNA, 26 bp, Homo sapiens
cttccattgccatctggagaccctgg

SEQ ID NO: 101960 - DNA, 26 bp, Homo sapiens
ttccattgccatctggagaccctggc

SEQ ID NO: 101961 - DNA, 26 bp, Homo sapiens
tccattgccatctggagaccctggca

SEQ ID NO: 101962 - DNA, 26 bp, Homo sapiens
ccattgccatctggagaccctggcag

SEQ ID NO: 101963 - DNA, 26 bp, Homo sapiens
cattgccatctggagaccctggcagg

SEQ ID NO: 101964 - DNA, 26 bp, Homo sapiens
attgccatctggagaccctggcaggg

SEQ ID NO: 101965 - DNA, 26 bp, Homo sapiens
ttgccatctggagaccctggcaggga

SEQ ID NO: 101966 - DNA, 26 bp, Homo sapiens
tgccatctggagaccctggcagggac

SEQ ID NO: 101967 - DNA, 26 bp, Homo sapiens
gccatctggagaccctggcagggact

SEQ ID NO: 101968 - DNA, 26 bp, Homo sapiens
ccatctggagaccctggcagggactt

SEQ ID NO: 101969 - DNA, 26 bp, Homo sapiens
catctggagaccctggcagggacttg

SEQ ID NO: 101970 - DNA, 26 bp, Homo sapiens
atctggagaccctggcagggacttgc

SEQ ID NO: 101971 - DNA, 26 bp, Homo sapiens
tctggagaccctggcagggacttgcc

SEQ ID NO: 101972 - DNA, 26 bp, Homo sapiens
ctggagaccctggcagggacttgccc

SEQ ID NO: 101973 - DNA, 26 bp, Homo sapiens
tggagaccctggcagggacttgccca

SEQ ID NO: 101974 - DNA, 26 bp, Homo sapiens
ggagaccctggcagggacttgcccat

SEQ ID NO: 101975 - DNA, 26 bp, Homo sapiens
gagaccctggcagggacttgcccatc

SEQ ID NO: 101976 - DNA, 26 bp, Homo sapiens
agaccctggcagggacttgcccatcc

SEQ ID NO: 101977 - DNA, 26 bp, Homo sapiens
gaccctggcagggacttgcccatccg

SEQ ID NO: 101978 - DNA, 26 bp, Homo sapiens
accctggcagggacttgcccatccga

SEQ ID NO: 101979 - DNA, 26 bp, Homo sapiens
ccctggcagggacttgcccatccgat

SEQ ID NO: 101980 - DNA, 26 bp, Homo sapiens
cctggcagggacttgcccatccgatc

SEQ ID NO: 101981 - DNA, 26 bp, Homo sapiens
ctggcagggacttgcccatccgatcc

SEQ ID NO: 101982 - DNA, 26 bp, Homo sapiens
tggcagggacttgcccatccgatcca

SEQ ID NO: 101983 - DNA, 26 bp, Homo sapiens
ggcagggacttgcccatccgatccac

SEQ ID NO: 101984 - DNA, 26 bp, Homo sapiens
gcagggacttgcccatccgatccaca

SEQ ID NO: 101985 - DNA, 26 bp, Homo sapiens
cagggacttgcccatccgatccacac

SEQ ID NO: 101986 - DNA, 26 bp, Homo sapiens
agggacttgcccatccgatccacaca

SEQ ID NO: 101987 - DNA, 26 bp, Homo sapiens
gggacttgcccatccgatccacacac

SEQ ID NO: 101988 - DNA, 26 bp, Homo sapiens
ggacttgcccatccgatccacacacc

SEQ ID NO: 101989 - DNA, 26 bp, Homo sapiens
gacttgcccatccgatccacacacca

SEQ ID NO: 101990 - DNA, 26 bp, Homo sapiens
acttgcccatccgatccacacaccag

SEQ ID NO: 101991 - DNA, 26 bp, Homo sapiens
cttgcccatccgatccacacaccagc

SEQ ID NO: 101992 - DNA, 26 bp, Homo sapiens
ttgcccatccgatccacacaccagca

SEQ ID NO: 101993 - DNA, 26 bp, Homo sapiens
tgcccatccgatccacacaccagcag

SEQ ID NO: 101994 - DNA, 26 bp, Homo sapiens
gcccatccgatccacacaccagcagg

SEQ ID NO: 101995 - DNA, 26 bp, Homo sapiens
cccatccgatccacacaccagcaggg

SEQ ID NO: 101996 - DNA, 26 bp, Homo sapiens
ccatccgatccacacaccagcaggga

SEQ ID NO: 101997 - DNA, 26 bp, Homo sapiens
catccgatccacacaccagcagggac

SEQ ID NO: 101998 - DNA, 26 bp, Homo sapiens
atccgatccacacaccagcagggacc

SEQ ID NO: 101999 - DNA, 26 bp, Homo sapiens
tccgatccacacaccagcagggacct

SEQ ID NO: 102000 - DNA, 26 bp, Homo sapiens
ccgatccacacaccagcagggacctc

SEQ ID NO: 102001 - DNA, 26 bp, Homo sapiens
cgatccacacaccagcagggacctcg

SEQ ID NO: 102002 - DNA, 26 bp, Homo sapiens
gatccacacaccagcagggacctcgg

SEQ ID NO: 102003 - DNA, 26 bp, Homo sapiens
atccacacaccagcagggacctcggc

SEQ ID NO: 102004 - DNA, 26 bp, Homo sapiens
tccacacaccagcagggacctcggcg

SEQ ID NO: 102005 - DNA, 26 bp, Homo sapiens
ccacacaccagcagggacctcggcgc

SEQ ID NO: 102006 - DNA, 26 bp, Homo sapiens
cacacaccagcagggacctcggcgct

SEQ ID NO: 102007 - DNA, 26 bp, Homo sapiens
acacaccagcagggacctcggcgctg

SEQ ID NO: 102008 - DNA, 26 bp, Homo sapiens
cacaccagcagggacctcggcgctgc

SEQ ID NO: 102009 - DNA, 26 bp, Homo sapiens
acaccagcagggacctcggcgctgcc

SEQ ID NO: 102010 - DNA, 26 bp, Homo sapiens
caccagcagggacctcggcgctgccc

SEQ ID NO: 102011 - DNA, 26 bp, Homo sapiens
accagcagggacctcggcgctgcccc

SEQ ID NO: 102012 - DNA, 26 bp, Homo sapiens
ccagcagggacctcggcgctgcccct

SEQ ID NO: 102013 - DNA, 26 bp, Homo sapiens
cagcagggacctcggcgctgcccctg

SEQ ID NO: 102014 - DNA, 26 bp, Homo sapiens
agcagggacctcggcgctgcccctgg

SEQ ID NO: 102015 - DNA, 26 bp, Homo sapiens
gcagggacctcggcgctgcccctggg

SEQ ID NO: 102016 - DNA, 26 bp, Homo sapiens
cagggacctcggcgctgcccctggga

SEQ ID NO: 102017 - DNA, 26 bp, Homo sapiens
agggacctcggcgctgcccctgggag

SEQ ID NO: 102018 - DNA, 26 bp, Homo sapiens
gggacctcggcgctgcccctgggagg

SEQ ID NO: 102019 - DNA, 26 bp, Homo sapiens
ggacctcggcgctgcccctgggagga

SEQ ID NO: 102020 - DNA, 26 bp, Homo sapiens
gacctcggcgctgcccctgggaggag

SEQ ID NO: 102021 - DNA, 26 bp, Homo sapiens
acctcggcgctgcccctgggaggagc

SEQ ID NO: 102022 - DNA, 26 bp, Homo sapiens
cctcggcgctgcccctgggaggagcg

SEQ ID NO: 102023 - DNA, 26 bp, Homo sapiens
ctcggcgctgcccctgggaggagcgg

SEQ ID NO: 102024 - DNA, 26 bp, Homo sapiens
tcggcgctgcccctgggaggagcggc

SEQ ID NO: 102025 - DNA, 26 bp, Homo sapiens
cggcgctgcccctgggaggagcggca

SEQ ID NO: 102026 - DNA, 26 bp, Homo sapiens
ggcgctgcccctgggaggagcggcac

SEQ ID NO: 102027 - DNA, 26 bp, Homo sapiens
gcgctgcccctgggaggagcggcact

SEQ ID NO: 102028 - DNA, 26 bp, Homo sapiens
cgctgcccctgggaggagcggcactg

SEQ ID NO: 102029 - DNA, 26 bp, Homo sapiens
gctgcccctgggaggagcggcactgc

SEQ ID NO: 102030 - DNA, 26 bp, Homo sapiens
ctgcccctgggaggagcggcactgcc

SEQ ID NO: 102031 - DNA, 26 bp, Homo sapiens
tgcccctgggaggagcggcactgccg

SEQ ID NO: 102032 - DNA, 26 bp, Homo sapiens
gcccctgggaggagcggcactgccgc

SEQ ID NO: 102033 - DNA, 26 bp, Homo sapiens
cccctgggaggagcggcactgccgct

SEQ ID NO: 102034 - DNA, 26 bp, Homo sapiens
ccctgggaggagcggcactgccgctt

SEQ ID NO: 102035 - DNA, 26 bp, Homo sapiens
cctgggaggagcggcactgccgcttc

SEQ ID NO: 102036 - DNA, 26 bp, Homo sapiens
ctgggaggagcggcactgccgcttcc

SEQ ID NO: 102037 - DNA, 26 bp, Homo sapiens
tgggaggagcggcactgccgcttccg

SEQ ID NO: 102038 - DNA, 26 bp, Homo sapiens
gggaggagcggcactgccgcttccgg

SEQ ID NO: 102039 - DNA, 26 bp, Homo sapiens
ggaggagcggcactgccgcttccggt

SEQ ID NO: 102040 - DNA, 26 bp, Homo sapiens
gaggagcggcactgccgcttccggta

SEQ ID NO: 102041 - DNA, 26 bp, Homo sapiens
aggagcggcactgccgcttccggtag

SEQ ID NO: 102042 - DNA, 26 bp, Homo sapiens
ggagcggcactgccgcttccggtaga

SEQ ID NO: 102043 - DNA, 26 bp, Homo sapiens
gagcggcactgccgcttccggtagaa

SEQ ID NO: 102044 - DNA, 26 bp, Homo sapiens
agcggcactgccgcttccggtagaag

SEQ ID NO: 102045 - DNA, 26 bp, Homo sapiens
gcggcactgccgcttccggtagaagc

SEQ ID NO: 102046 - DNA, 26 bp, Homo sapiens
cggcactgccgcttccggtagaagcc

SEQ ID NO: 102047 - DNA, 26 bp, Homo sapiens
ggcactgccgcttccggtagaagcct

SEQ ID NO: 102048 - DNA, 26 bp, Homo sapiens
gcactgccgcttccggtagaagcctc

SEQ ID NO: 102049 - DNA, 26 bp, Homo sapiens
cactgccgcttccggtagaagcctcg

SEQ ID NO: 102050 - DNA, 26 bp, Homo sapiens
actgccgcttccggtagaagcctcga

SEQ ID NO: 102051 - DNA, 26 bp, Homo sapiens
ctgccgcttccggtagaagcctcgat

SEQ ID NO: 102052 - DNA, 26 bp, Homo sapiens
tgccgcttccggtagaagcctcgatg

SEQ ID NO: 102053 - DNA, 26 bp, Homo sapiens
gccgcttccggtagaagcctcgatgg

SEQ ID NO: 102054 - DNA, 26 bp, Homo sapiens
ccgcttccggtagaagcctcgatggt

SEQ ID NO: 102055 - DNA, 26 bp, Homo sapiens
cgcttccggtagaagcctcgatggtc

SEQ ID NO: 102056 - DNA, 26 bp, Homo sapiens
gcttccggtagaagcctcgatggtca

SEQ ID NO: 102057 - DNA, 26 bp, Homo sapiens
cttccggtagaagcctcgatggtcac

SEQ ID NO: 102058 - DNA, 26 bp, Homo sapiens
ttccggtagaagcctcgatggtcaca

SEQ ID NO: 102059 - DNA, 26 bp, Homo sapiens
tccggtagaagcctcgatggtcacaa

SEQ ID NO: 102060 - DNA, 26 bp, Homo sapiens
ccggtagaagcctcgatggtcacaat

SEQ ID NO: 102061 - DNA, 26 bp, Homo sapiens
cggtagaagcctcgatggtcacaatt

SEQ ID NO: 102062 - DNA, 26 bp, Homo sapiens
ggtagaagcctcgatggtcacaattg

SEQ ID NO: 102063 - DNA, 26 bp, Homo sapiens
gtagaagcctcgatggtcacaattgg

SEQ ID NO: 102064 - DNA, 26 bp, Homo sapiens
tagaagcctcgatggtcacaattggg

SEQ ID NO: 102065 - DNA, 26 bp, Homo sapiens
agaagcctcgatggtcacaattgggc

SEQ ID NO: 102066 - DNA, 26 bp, Homo sapiens
gaagcctcgatggtcacaattgggca

SEQ ID NO: 102067 - DNA, 26 bp, Homo sapiens
aagcctcgatggtcacaattgggcac

SEQ ID NO: 102068 - DNA, 26 bp, Homo sapiens
agcctcgatggtcacaattgggcacg

SEQ ID NO: 102069 - DNA, 26 bp, Homo sapiens
gcctcgatggtcacaattgggcacgt

SEQ ID NO: 102070 - DNA, 26 bp, Homo sapiens
cctcgatggtcacaattgggcacgta

SEQ ID NO: 102071 - DNA, 26 bp, Homo sapiens
ctcgatggtcacaattgggcacgtag

SEQ ID NO: 102072 - DNA, 26 bp, Homo sapiens
tcgatggtcacaattgggcacgtaga

SEQ ID NO: 102073 - DNA, 26 bp, Homo sapiens
cgatggtcacaattgggcacgtagag

SEQ ID NO: 102074 - DNA, 26 bp, Homo sapiens
gatggtcacaattgggcacgtagagt

SEQ ID NO: 102075 - DNA, 26 bp, Homo sapiens
atggtcacaattgggcacgtagagtg

SEQ ID NO: 102076 - DNA, 26 bp, Homo sapiens
tggtcacaattgggcacgtagagtgt

SEQ ID NO: 102077 - DNA, 26 bp, Homo sapiens
ggtcacaattgggcacgtagagtgtt

SEQ ID NO: 102078 - DNA, 26 bp, Homo sapiens
gtcacaattgggcacgtagagtgttt

SEQ ID NO: 102079 - DNA, 26 bp, Homo sapiens
tcacaattgggcacgtagagtgtttg

SEQ ID NO: 102080 - DNA, 26 bp, Homo sapiens
cacaattgggcacgtagagtgtttga

SEQ ID NO: 102081 - DNA, 26 bp, Homo sapiens
acaattgggcacgtagagtgtttgag

SEQ ID NO: 102082 - DNA, 26 bp, Homo sapiens
caattgggcacgtagagtgtttgagc

SEQ ID NO: 102083 - DNA, 26 bp, Homo sapiens
aattgggcacgtagagtgtttgagcc

SEQ ID NO: 102084 - DNA, 26 bp, Homo sapiens
attgggcacgtagagtgtttgagccc

SEQ ID NO: 102085 - DNA, 26 bp, Homo sapiens
ttgggcacgtagagtgtttgagcccc

SEQ ID NO: 102086 - DNA, 26 bp, Homo sapiens
tgggcacgtagagtgtttgagcccct

SEQ ID NO: 102087 - DNA, 26 bp, Homo sapiens
gggcacgtagagtgtttgagcccctc

SEQ ID NO: 102088 - DNA, 26 bp, Homo sapiens
ggcacgtagagtgtttgagcccctcg

SEQ ID NO: 102089 - DNA, 26 bp, Homo sapiens
gcacgtagagtgtttgagcccctcgg

SEQ ID NO: 102090 - DNA, 26 bp, Homo sapiens
cacgtagagtgtttgagcccctcggt

SEQ ID NO: 102091 - DNA, 26 bp, Homo sapiens
acgtagagtgtttgagcccctcggta

SEQ ID NO: 102092 - DNA, 26 bp, Homo sapiens
cgtagagtgtttgagcccctcggtag

SEQ ID NO: 102093 - DNA, 26 bp, Homo sapiens
gtagagtgtttgagcccctcggtaga

SEQ ID NO: 102094 - DNA, 26 bp, Homo sapiens
tagagtgtttgagcccctcggtagac

SEQ ID NO: 102095 - DNA, 26 bp, Homo sapiens
agagtgtttgagcccctcggtagacc

SEQ ID NO: 102096 - DNA, 26 bp, Homo sapiens
gagtgtttgagcccctcggtagacct

SEQ ID NO: 102097 - DNA, 26 bp, Homo sapiens
agtgtttgagcccctcggtagacctc

SEQ ID NO: 102098 - DNA, 26 bp, Homo sapiens
gtgtttgagcccctcggtagacctca

SEQ ID NO: 102099 - DNA, 26 bp, Homo sapiens
tgtttgagcccctcggtagacctcag

SEQ ID NO: 102100 - DNA, 26 bp, Homo sapiens
gtttgagcccctcggtagacctcagt

SEQ ID NO: 102101 - DNA, 26 bp, Homo sapiens
tttgagcccctcggtagacctcagtc

SEQ ID NO: 102102 - DNA, 26 bp, Homo sapiens
ttgagcccctcggtagacctcagtct

SEQ ID NO: 102103 - DNA, 26 bp, Homo sapiens
tgagcccctcggtagacctcagtctg

SEQ ID NO: 102104 - DNA, 26 bp, Homo sapiens
gagcccctcggtagacctcagtctgg

SEQ ID NO: 102105 - DNA, 26 bp, Homo sapiens
agcccctcggtagacctcagtctgga

SEQ ID NO: 102106 - DNA, 26 bp, Homo sapiens
gcccctcggtagacctcagtctggag

SEQ ID NO: 102107 - DNA, 26 bp, Homo sapiens
cccctcggtagacctcagtctggagt

SEQ ID NO: 102108 - DNA, 26 bp, Homo sapiens
ccctcggtagacctcagtctggagtt

SEQ ID NO: 102109 - DNA, 26 bp, Homo sapiens
cctcggtagacctcagtctggagttg

SEQ ID NO: 102110 - DNA, 26 bp, Homo sapiens
ctcggtagacctcagtctggagttgc

SEQ ID NO: 102111 - DNA, 26 bp, Homo sapiens
tcggtagacctcagtctggagttgct

SEQ ID NO: 102112 - DNA, 26 bp, Homo sapiens
cggtagacctcagtctggagttgctg

SEQ ID NO: 102113 - DNA, 26 bp, Homo sapiens
ggtagacctcagtctggagttgctgc

SEQ ID NO: 102114 - DNA, 26 bp, Homo sapiens
gtagacctcagtctggagttgctgca

SEQ ID NO: 102115 - DNA, 26 bp, Homo sapiens
tagacctcagtctggagttgctgcag

SEQ ID NO: 102116 - DNA, 26 bp, Homo sapiens
agacctcagtctggagttgctgcagc

SEQ ID NO: 102117 - DNA, 26 bp, Homo sapiens
gacctcagtctggagttgctgcagca

SEQ ID NO: 102118 - DNA, 26 bp, Homo sapiens
acctcagtctggagttgctgcagcac

SEQ ID NO: 102119 - DNA, 26 bp, Homo sapiens
cctcagtctggagttgctgcagcact

SEQ ID NO: 102120 - DNA, 26 bp, Homo sapiens
ctcagtctggagttgctgcagcactg

SEQ ID NO: 102121 - DNA, 26 bp, Homo sapiens
tcagtctggagttgctgcagcactga

SEQ ID NO: 102122 - DNA, 26 bp, Homo sapiens
cagtctggagttgctgcagcactgag

SEQ ID NO: 102123 - DNA, 26 bp, Homo sapiens
agtctggagttgctgcagcactgagt

SEQ ID NO: 102124 - DNA, 26 bp, Homo sapiens
gtctggagttgctgcagcactgagtc

SEQ ID NO: 102125 - DNA, 26 bp, Homo sapiens
tctggagttgctgcagcactgagtcc

SEQ ID NO: 102126 - DNA, 26 bp, Homo sapiens
ctggagttgctgcagcactgagtcca

SEQ ID NO: 102127 - DNA, 26 bp, Homo sapiens
tggagttgctgcagcactgagtccag

SEQ ID NO: 102128 - DNA, 26 bp, Homo sapiens
ggagttgctgcagcactgagtccaga

SEQ ID NO: 102129 - DNA, 26 bp, Homo sapiens
gagttgctgcagcactgagtccagat

SEQ ID NO: 102130 - DNA, 26 bp, Homo sapiens
agttgctgcagcactgagtccagatg

SEQ ID NO: 102131 - DNA, 26 bp, Homo sapiens
gttgctgcagcactgagtccagatgt

SEQ ID NO: 102132 - DNA, 26 bp, Homo sapiens
ttgctgcagcactgagtccagatgtc

SEQ ID NO: 102133 - DNA, 26 bp, Homo sapiens
tgctgcagcactgagtccagatgtct

SEQ ID NO: 102134 - DNA, 26 bp, Homo sapiens
gctgcagcactgagtccagatgtcta

SEQ ID NO: 102135 - DNA, 26 bp, Homo sapiens
ctgcagcactgagtccagatgtctac

SEQ ID NO: 102136 - DNA, 26 bp, Homo sapiens
tgcagcactgagtccagatgtctacg

SEQ ID NO: 102137 - DNA, 26 bp, Homo sapiens
gcagcactgagtccagatgtctacgg

SEQ ID NO: 102138 - DNA, 26 bp, Homo sapiens
cagcactgagtccagatgtctacggc

SEQ ID NO: 102139 - DNA, 26 bp, Homo sapiens
agcactgagtccagatgtctacggca

SEQ ID NO: 102140 - DNA, 26 bp, Homo sapiens
gcactgagtccagatgtctacggcat

SEQ ID NO: 102141 - DNA, 26 bp, Homo sapiens
cactgagtccagatgtctacggcatg

SEQ ID NO: 102142 - DNA, 26 bp, Homo sapiens
actgagtccagatgtctacggcatgg

SEQ ID NO: 102143 - DNA, 26 bp, Homo sapiens
ctgagtccagatgtctacggcatggg

SEQ ID NO: 102144 - DNA, 26 bp, Homo sapiens
tgagtccagatgtctacggcatgggc

SEQ ID NO: 102145 - DNA, 26 bp, Homo sapiens
gagtccagatgtctacggcatgggcc

SEQ ID NO: 102146 - DNA, 26 bp, Homo sapiens
agtccagatgtctacggcatgggccc

SEQ ID NO: 102147 - DNA, 26 bp, Homo sapiens
gtccagatgtctacggcatgggccca

SEQ ID NO: 102148 - DNA, 26 bp, Homo sapiens
tccagatgtctacggcatgggcccat

SEQ ID NO: 102149 - DNA, 26 bp, Homo sapiens
ccagatgtctacggcatgggcccatc

SEQ ID NO: 102150 - DNA, 26 bp, Homo sapiens
cagatgtctacggcatgggcccatct

SEQ ID NO: 102151 - DNA, 26 bp, Homo sapiens
agatgtctacggcatgggcccatctc

SEQ ID NO: 102152 - DNA, 26 bp, Homo sapiens
gatgtctacggcatgggcccatctca

SEQ ID NO: 102153 - DNA, 26 bp, Homo sapiens
atgtctacggcatgggcccatctcag

SEQ ID NO: 102154 - DNA, 26 bp, Homo sapiens
tgtctacggcatgggcccatctcagt

SEQ ID NO: 102155 - DNA, 26 bp, Homo sapiens
gtctacggcatgggcccatctcagtg

SEQ ID NO: 102156 - DNA, 26 bp, Homo sapiens
tctacggcatgggcccatctcagtgt

SEQ ID NO: 102157 - DNA, 26 bp, Homo sapiens
ctacggcatgggcccatctcagtgtc

SEQ ID NO: 102158 - DNA, 26 bp, Homo sapiens
tacggcatgggcccatctcagtgtct

SEQ ID NO: 102159 - DNA, 26 bp, Homo sapiens
acggcatgggcccatctcagtgtctt

SEQ ID NO: 102160 - DNA, 26 bp, Homo sapiens
cggcatgggcccatctcagtgtcttg

SEQ ID NO: 102161 - DNA, 26 bp, Homo sapiens
ggcatgggcccatctcagtgtcttgg

SEQ ID NO: 102162 - DNA, 26 bp, Homo sapiens
gcatgggcccatctcagtgtcttgga

SEQ ID NO: 102163 - DNA, 26 bp, Homo sapiens
catgggcccatctcagtgtcttggac

SEQ ID NO: 102164 - DNA, 26 bp, Homo sapiens
atgggcccatctcagtgtcttggaca

SEQ ID NO: 102165 - DNA, 26 bp, Homo sapiens
tgggcccatctcagtgtcttggacac

SEQ ID NO: 102166 - DNA, 26 bp, Homo sapiens
gggcccatctcagtgtcttggacacc

SEQ ID NO: 102167 - DNA, 26 bp, Homo sapiens
ggcccatctcagtgtcttggacaccc

SEQ ID NO: 102168 - DNA, 26 bp, Homo sapiens
gcccatctcagtgtcttggacacccg

SEQ ID NO: 102169 - DNA, 26 bp, Homo sapiens
cccatctcagtgtcttggacacccgc

SEQ ID NO: 102170 - DNA, 26 bp, Homo sapiens
ccatctcagtgtcttggacacccgca

SEQ ID NO: 102171 - DNA, 26 bp, Homo sapiens
catctcagtgtcttggacacccgcag

SEQ ID NO: 102172 - DNA, 26 bp, Homo sapiens
atctcagtgtcttggacacccgcaga

SEQ ID NO: 102173 - DNA, 26 bp, Homo sapiens
tctcagtgtcttggacacccgcagaa

SEQ ID NO: 102174 - DNA, 26 bp, Homo sapiens
ctcagtgtcttggacacccgcagaat

SEQ ID NO: 102175 - DNA, 26 bp, Homo sapiens
tcagtgtcttggacacccgcagaatt

SEQ ID NO: 102176 - DNA, 26 bp, Homo sapiens
cagtgtcttggacacccgcagaattg

SEQ ID NO: 102177 - DNA, 26 bp, Homo sapiens
agtgtcttggacacccgcagaattgg

SEQ ID NO: 102178 - DNA, 26 bp, Homo sapiens
gtgtcttggacacccgcagaattggg

SEQ ID NO: 102179 - DNA, 26 bp, Homo sapiens
tgtcttggacacccgcagaattgggc

SEQ ID NO: 102180 - DNA, 26 bp, Homo sapiens
gtcttggacacccgcagaattgggct

SEQ ID NO: 102181 - DNA, 26 bp, Homo sapiens
tcttggacacccgcagaattgggctg

SEQ ID NO: 102182 - DNA, 26 bp, Homo sapiens
cttggacacccgcagaattgggctgg

SEQ ID NO: 102183 - DNA, 26 bp, Homo sapiens
ttggacacccgcagaattgggctggg

SEQ ID NO: 102184 - DNA, 26 bp, Homo sapiens
tggacacccgcagaattgggctggga

SEQ ID NO: 102185 - DNA, 26 bp, Homo sapiens
ggacacccgcagaattgggctgggag

SEQ ID NO: 102186 - DNA, 26 bp, Homo sapiens
gacacccgcagaattgggctgggagg

SEQ ID NO: 102187 - DNA, 26 bp, Homo sapiens
acacccgcagaattgggctgggaggg

SEQ ID NO: 102188 - DNA, 26 bp, Homo sapiens
cacccgcagaattgggctgggagggc

SEQ ID NO: 102189 - DNA, 26 bp, Homo sapiens
acccgcagaattgggctgggagggcg

SEQ ID NO: 102190 - DNA, 26 bp, Homo sapiens
cccgcagaattgggctgggagggcgt

SEQ ID NO: 102191 - DNA, 26 bp, Homo sapiens
ccgcagaattgggctgggagggcgtg

SEQ ID NO: 102192 - DNA, 26 bp, Homo sapiens
cgcagaattgggctgggagggcgtgg

SEQ ID NO: 102193 - DNA, 26 bp, Homo sapiens
gcagaattgggctgggagggcgtggt

SEQ ID NO: 102194 - DNA, 26 bp, Homo sapiens
cagaattgggctgggagggcgtggta

SEQ ID NO: 102195 - DNA, 26 bp, Homo sapiens
agaattgggctgggagggcgtggtag

SEQ ID NO: 102196 - DNA, 26 bp, Homo sapiens
gaattgggctgggagggcgtggtaga

SEQ ID NO: 102197 - DNA, 26 bp, Homo sapiens
aattgggctgggagggcgtggtagag

SEQ ID NO: 102198 - DNA, 26 bp, Homo sapiens
attgggctgggagggcgtggtagagg

SEQ ID NO: 102199 - DNA, 26 bp, Homo sapiens
ttgggctgggagggcgtggtagaggt

SEQ ID NO: 102200 - DNA, 26 bp, Homo sapiens
tgggctgggagggcgtggtagaggtg

SEQ ID NO: 102201 - DNA, 26 bp, Homo sapiens
gggctgggagggcgtggtagaggtgc

SEQ ID NO: 102202 - DNA, 26 bp, Homo sapiens
ggctgggagggcgtggtagaggtgcc

SEQ ID NO: 102203 - DNA, 26 bp, Homo sapiens
gctgggagggcgtggtagaggtgcct

SEQ ID NO: 102204 - DNA, 26 bp, Homo sapiens
ctgggagggcgtggtagaggtgcctg

SEQ ID NO: 102205 - DNA, 26 bp, Homo sapiens
tgggagggcgtggtagaggtgcctgg

SEQ ID NO: 102206 - DNA, 26 bp, Homo sapiens
gggagggcgtggtagaggtgcctgga

SEQ ID NO: 102207 - DNA, 26 bp, Homo sapiens
ggagggcgtggtagaggtgcctggat

SEQ ID NO: 102208 - DNA, 26 bp, Homo sapiens
gagggcgtggtagaggtgcctggatt

SEQ ID NO: 102209 - DNA, 26 bp, Homo sapiens
agggcgtggtagaggtgcctggattc

SEQ ID NO: 102210 - DNA, 26 bp, Homo sapiens
gggcgtggtagaggtgcctggattcc

SEQ ID NO: 102211 - DNA, 26 bp, Homo sapiens
ggcgtggtagaggtgcctggattcct

SEQ ID NO: 102212 - DNA, 26 bp, Homo sapiens
gcgtggtagaggtgcctggattcctc

SEQ ID NO: 102213 - DNA, 26 bp, Homo sapiens
cgtggtagaggtgcctggattcctct

SEQ ID NO: 102214 - DNA, 26 bp, Homo sapiens
gtggtagaggtgcctggattcctctg

SEQ ID NO: 102215 - DNA, 26 bp, Homo sapiens
tggtagaggtgcctggattcctctgt

SEQ ID NO: 102216 - DNA, 26 bp, Homo sapiens
ggtagaggtgcctggattcctctgtt

SEQ ID NO: 102217 - DNA, 26 bp, Homo sapiens
gtagaggtgcctggattcctctgttg

SEQ ID NO: 102218 - DNA, 26 bp, Homo sapiens
tagaggtgcctggattcctctgttgg

SEQ ID NO: 102219 - DNA, 26 bp, Homo sapiens
agaggtgcctggattcctctgttggt

SEQ ID NO: 102220 - DNA, 26 bp, Homo sapiens
gaggtgcctggattcctctgttggtc

SEQ ID NO: 102221 - DNA, 26 bp, Homo sapiens
aggtgcctggattcctctgttggtct

SEQ ID NO: 102222 - DNA, 26 bp, Homo sapiens
ggtgcctggattcctctgttggtctc

SEQ ID NO: 102223 - DNA, 26 bp, Homo sapiens
gtgcctggattcctctgttggtctct

SEQ ID NO: 102224 - DNA, 26 bp, Homo sapiens
tgcctggattcctctgttggtctctg

SEQ ID NO: 102225 - DNA, 26 bp, Homo sapiens
gcctggattcctctgttggtctctgc

SEQ ID NO: 102226 - DNA, 26 bp, Homo sapiens
cctggattcctctgttggtctctgcg

SEQ ID NO: 102227 - DNA, 26 bp, Homo sapiens
ctggattcctctgttggtctctgcgg

SEQ ID NO: 102228 - DNA, 26 bp, Homo sapiens
tggattcctctgttggtctctgcggt

SEQ ID NO: 102229 - DNA, 26 bp, Homo sapiens
ggattcctctgttggtctctgcggtt

SEQ ID NO: 102230 - DNA, 26 bp, Homo sapiens
gattcctctgttggtctctgcggttc

SEQ ID NO: 102231 - DNA, 26 bp, Homo sapiens
attcctctgttggtctctgcggttca

SEQ ID NO: 102232 - DNA, 26 bp, Homo sapiens
ttcctctgttggtctctgcggttcac

SEQ ID NO: 102233 - DNA, 26 bp, Homo sapiens
tcctctgttggtctctgcggttcaca

SEQ ID NO: 102234 - DNA, 26 bp, Homo sapiens
cctctgttggtctctgcggttcacat

SEQ ID NO: 102235 - DNA, 26 bp, Homo sapiens
ctctgttggtctctgcggttcacatc

SEQ ID NO: 102236 - DNA, 26 bp, Homo sapiens
tctgttggtctctgcggttcacatcc

SEQ ID NO: 102237 - DNA, 26 bp, Homo sapiens
ctgttggtctctgcggttcacatcct

SEQ ID NO: 102238 - DNA, 26 bp, Homo sapiens
tgttggtctctgcggttcacatcctg

SEQ ID NO: 102239 - DNA, 26 bp, Homo sapiens
gttggtctctgcggttcacatcctgt

SEQ ID NO: 102240 - DNA, 26 bp, Homo sapiens
ttggtctctgcggttcacatcctgtg

SEQ ID NO: 102241 - DNA, 26 bp, Homo sapiens
tggtctctgcggttcacatcctgtgg

SEQ ID NO: 102242 - DNA, 26 bp, Homo sapiens
ggtctctgcggttcacatcctgtggg

SEQ ID NO: 102243 - DNA, 26 bp, Homo sapiens
gtctctgcggttcacatcctgtgggc

SEQ ID NO: 102244 - DNA, 26 bp, Homo sapiens
tctctgcggttcacatcctgtgggcg

SEQ ID NO: 102245 - DNA, 26 bp, Homo sapiens
ctctgcggttcacatcctgtgggcgg

SEQ ID NO: 102246 - DNA, 26 bp, Homo sapiens
tctgcggttcacatcctgtgggcggg

SEQ ID NO: 102247 - DNA, 26 bp, Homo sapiens
ctgcggttcacatcctgtgggcgggc

SEQ ID NO: 102248 - DNA, 26 bp, Homo sapiens
tgcggttcacatcctgtgggcgggca

SEQ ID NO: 102249 - DNA, 26 bp, Homo sapiens
gcggttcacatcctgtgggcgggcag

SEQ ID NO: 102250 - DNA, 26 bp, Homo sapiens
cggttcacatcctgtgggcgggcagt

SEQ ID NO: 102251 - DNA, 26 bp, Homo sapiens
ggttcacatcctgtgggcgggcagtg

SEQ ID NO: 102252 - DNA, 26 bp, Homo sapiens
gttcacatcctgtgggcgggcagtgc

SEQ ID NO: 102253 - DNA, 26 bp, Homo sapiens
ttcacatcctgtgggcgggcagtgcc

SEQ ID NO: 102254 - DNA, 26 bp, Homo sapiens
tcacatcctgtgggcgggcagtgcct

SEQ ID NO: 102255 - DNA, 26 bp, Homo sapiens
cacatcctgtgggcgggcagtgcctg

SEQ ID NO: 102256 - DNA, 26 bp, Homo sapiens
acatcctgtgggcgggcagtgcctgc

SEQ ID NO: 102257 - DNA, 26 bp, Homo sapiens
catcctgtgggcgggcagtgcctgct

SEQ ID NO: 102258 - DNA, 26 bp, Homo sapiens
atcctgtgggcgggcagtgcctgctt

SEQ ID NO: 102259 - DNA, 26 bp, Homo sapiens
tcctgtgggcgggcagtgcctgcttg

SEQ ID NO: 102260 - DNA, 26 bp, Homo sapiens
cctgtgggcgggcagtgcctgcttgg

SEQ ID NO: 102261 - DNA, 26 bp, Homo sapiens
ctgtgggcgggcagtgcctgcttggg

SEQ ID NO: 102262 - DNA, 26 bp, Homo sapiens
tgtgggcgggcagtgcctgcttgggg

SEQ ID NO: 102263 - DNA, 26 bp, Homo sapiens
gtgggcgggcagtgcctgcttggggt

SEQ ID NO: 102264 - DNA, 26 bp, Homo sapiens
tgggcgggcagtgcctgcttggggtt

SEQ ID NO: 102265 - DNA, 26 bp, Homo sapiens
gggcgggcagtgcctgcttggggttt

SEQ ID NO: 102266 - DNA, 26 bp, Homo sapiens
ggcgggcagtgcctgcttggggttta

SEQ ID NO: 102267 - DNA, 26 bp, Homo sapiens
gcgggcagtgcctgcttggggtttac

SEQ ID NO: 102268 - DNA, 26 bp, Homo sapiens
cgggcagtgcctgcttggggtttact

SEQ ID NO: 102269 - DNA, 26 bp, Homo sapiens
gggcagtgcctgcttggggtttactc

SEQ ID NO: 102270 - DNA, 26 bp, Homo sapiens
ggcagtgcctgcttggggtttactct

SEQ ID NO: 102271 - DNA, 26 bp, Homo sapiens
gcagtgcctgcttggggtttactctc

SEQ ID NO: 102272 - DNA, 26 bp, Homo sapiens
cagtgcctgcttggggtttactctcc

SEQ ID NO: 102273 - DNA, 26 bp, Homo sapiens
agtgcctgcttggggtttactctcct

SEQ ID NO: 102274 - DNA, 26 bp, Homo sapiens
gtgcctgcttggggtttactctcctt

SEQ ID NO: 102275 - DNA, 26 bp, Homo sapiens
tgcctgcttggggtttactctcctta

SEQ ID NO: 102276 - DNA, 26 bp, Homo sapiens
gcctgcttggggtttactctccttag

SEQ ID NO: 102277 - DNA, 26 bp, Homo sapiens
cctgcttggggtttactctccttagg

SEQ ID NO: 102278 - DNA, 26 bp, Homo sapiens
ctgcttggggtttactctccttagga

SEQ ID NO: 102279 - DNA, 26 bp, Homo sapiens
tgcttggggtttactctccttaggat

SEQ ID NO: 102280 - DNA, 26 bp, Homo sapiens
gcttggggtttactctccttaggatt

SEQ ID NO: 102281 - DNA, 26 bp, Homo sapiens
cttggggtttactctccttaggattc

SEQ ID NO: 102282 - DNA, 26 bp, Homo sapiens
ttggggtttactctccttaggattct

SEQ ID NO: 102283 - DNA, 26 bp, Homo sapiens
tggggtttactctccttaggattctc

SEQ ID NO: 102284 - DNA, 26 bp, Homo sapiens
ggggtttactctccttaggattctcc

SEQ ID NO: 102285 - DNA, 26 bp, Homo sapiens
gggtttactctccttaggattctcct

SEQ ID NO: 102286 - DNA, 26 bp, Homo sapiens
ggtttactctccttaggattctcctc

SEQ ID NO: 102287 - DNA, 26 bp, Homo sapiens
gtttactctccttaggattctcctct

SEQ ID NO: 102288 - DNA, 26 bp, Homo sapiens
tttactctccttaggattctcctctg

SEQ ID NO: 102289 - DNA, 26 bp, Homo sapiens
ttactctccttaggattctcctctgc

SEQ ID NO: 102290 - DNA, 26 bp, Homo sapiens
tactctccttaggattctcctctgca

SEQ ID NO: 102291 - DNA, 26 bp, Homo sapiens
actctccttaggattctcctctgcaa

SEQ ID NO: 102292 - DNA, 26 bp, Homo sapiens
ctctccttaggattctcctctgcaac

SEQ ID NO: 102293 - DNA, 26 bp, Homo sapiens
tctccttaggattctcctctgcaaca

SEQ ID NO: 102294 - DNA, 26 bp, Homo sapiens
ctccttaggattctcctctgcaacag

SEQ ID NO: 102295 - DNA, 26 bp, Homo sapiens
tccttaggattctcctctgcaacagc

SEQ ID NO: 102296 - DNA, 26 bp, Homo sapiens
ccttaggattctcctctgcaacagca

SEQ ID NO: 102297 - DNA, 26 bp, Homo sapiens
cttaggattctcctctgcaacagcag

SEQ ID NO: 102298 - DNA, 26 bp, Homo sapiens
ttaggattctcctctgcaacagcagg

SEQ ID NO: 102299 - DNA, 26 bp, Homo sapiens
taggattctcctctgcaacagcaggc

SEQ ID NO: 102300 - DNA, 26 bp, Homo sapiens
aggattctcctctgcaacagcaggcg

SEQ ID NO: 102301 - DNA, 26 bp, Homo sapiens
ggattctcctctgcaacagcaggcgc

SEQ ID NO: 102302 - DNA, 26 bp, Homo sapiens
gattctcctctgcaacagcaggcgcg

SEQ ID NO: 102303 - DNA, 26 bp, Homo sapiens
attctcctctgcaacagcaggcgcgc

SEQ ID NO: 102304 - DNA, 26 bp, Homo sapiens
ttctcctctgcaacagcaggcgcgcg

SEQ ID NO: 102305 - DNA, 26 bp, Homo sapiens
tctcctctgcaacagcaggcgcgcgg

SEQ ID NO: 102306 - DNA, 26 bp, Homo sapiens
ctcctctgcaacagcaggcgcgcggg

SEQ ID NO: 102307 - DNA, 26 bp, Homo sapiens
tcctctgcaacagcaggcgcgcgggc

SEQ ID NO: 102308 - DNA, 26 bp, Homo sapiens
cctctgcaacagcaggcgcgcgggcc

SEQ ID NO: 102309 - DNA, 26 bp, Homo sapiens
ctctgcaacagcaggcgcgcgggccg

SEQ ID NO: 102310 - DNA, 26 bp, Homo sapiens
tctgcaacagcaggcgcgcgggccgg

SEQ ID NO: 102311 - DNA, 26 bp, Homo sapiens
ctgcaacagcaggcgcgcgggccgga

SEQ ID NO: 102312 - DNA, 26 bp, Homo sapiens
tgcaacagcaggcgcgcgggccggaa

SEQ ID NO: 102313 - DNA, 26 bp, Homo sapiens
gcaacagcaggcgcgcgggccggaag

SEQ ID NO: 102314 - DNA, 26 bp, Homo sapiens
caacagcaggcgcgcgggccggaagg

SEQ ID NO: 102315 - DNA, 26 bp, Homo sapiens
aacagcaggcgcgcgggccggaaggc

SEQ ID NO: 102316 - DNA, 26 bp, Homo sapiens
acagcaggcgcgcgggccggaaggca

SEQ ID NO: 102317 - DNA, 26 bp, Homo sapiens
cagcaggcgcgcgggccggaaggcag

SEQ ID NO: 102318 - DNA, 26 bp, Homo sapiens
agcaggcgcgcgggccggaaggcagc

SEQ ID NO: 102319 - DNA, 26 bp, Homo sapiens
gcaggcgcgcgggccggaaggcagcg

SEQ ID NO: 102320 - DNA, 26 bp, Homo sapiens
caggcgcgcgggccggaaggcagcgg

SEQ ID NO: 102321 - DNA, 26 bp, Homo sapiens
aggcgcgcgggccggaaggcagcggc

SEQ ID NO: 102322 - DNA, 26 bp, Homo sapiens
ggcgcgcgggccggaaggcagcggcc

SEQ ID NO: 102323 - DNA, 26 bp, Homo sapiens
gcgcgcgggccggaaggcagcggcct

SEQ ID NO: 102324 - DNA, 26 bp, Homo sapiens
cgcgcgggccggaaggcagcggcctc

SEQ ID NO: 102325 - DNA, 26 bp, Homo sapiens
gcgcgggccggaaggcagcggcctcg

SEQ ID NO: 102326 - DNA, 26 bp, Homo sapiens
cgcgggccggaaggcagcggcctcgg

SEQ ID NO: 102327 - DNA, 26 bp, Homo sapiens
gcgggccggaaggcagcggcctcggc

SEQ ID NO: 102328 - DNA, 26 bp, Homo sapiens
cgggccggaaggcagcggcctcggcc

SEQ ID NO: 102329 - DNA, 26 bp, Homo sapiens
gggccggaaggcagcggcctcggccg

SEQ ID NO: 102330 - DNA, 26 bp, Homo sapiens
ggccggaaggcagcggcctcggccga

SEQ ID NO: 102331 - DNA, 26 bp, Homo sapiens
gccggaaggcagcggcctcggccgag

SEQ ID NO: 102332 - DNA, 26 bp, Homo sapiens
ccggaaggcagcggcctcggccgagc

SEQ ID NO: 102333 - DNA, 26 bp, Homo sapiens
cggaaggcagcggcctcggccgagca

SEQ ID NO: 102334 - DNA, 26 bp, Homo sapiens
ggaaggcagcggcctcggccgagcag

SEQ ID NO: 102335 - DNA, 26 bp, Homo sapiens
gaaggcagcggcctcggccgagcagc

SEQ ID NO: 102336 - DNA, 26 bp, Homo sapiens
aaggcagcggcctcggccgagcagca

SEQ ID NO: 102337 - DNA, 26 bp, Homo sapiens
aggcagcggcctcggccgagcagcag

SEQ ID NO: 102338 - DNA, 26 bp, Homo sapiens
ggcagcggcctcggccgagcagcagc

SEQ ID NO: 102339 - DNA, 26 bp, Homo sapiens
gcagcggcctcggccgagcagcagcg

SEQ ID NO: 102340 - DNA, 26 bp, Homo sapiens
cagcggcctcggccgagcagcagcgc

SEQ ID NO: 102341 - DNA, 26 bp, Homo sapiens
agcggcctcggccgagcagcagcgcc

SEQ ID NO: 102342 - DNA, 26 bp, Homo sapiens
gcggcctcggccgagcagcagcgccc

SEQ ID NO: 102343 - DNA, 26 bp, Homo sapiens
cggcctcggccgagcagcagcgcccg

SEQ ID NO: 102344 - DNA, 26 bp, Homo sapiens
ggcctcggccgagcagcagcgcccgc

SEQ ID NO: 102345 - DNA, 26 bp, Homo sapiens
gcctcggccgagcagcagcgcccgca

SEQ ID NO: 102346 - DNA, 26 bp, Homo sapiens
cctcggccgagcagcagcgcccgcaa

SEQ ID NO: 102347 - DNA, 26 bp, Homo sapiens
ctcggccgagcagcagcgcccgcaaa

SEQ ID NO: 102348 - DNA, 26 bp, Homo sapiens
tcggccgagcagcagcgcccgcaaag

SEQ ID NO: 102349 - DNA, 26 bp, Homo sapiens
cggccgagcagcagcgcccgcaaagg

SEQ ID NO: 102350 - DNA, 26 bp, Homo sapiens
ggccgagcagcagcgcccgcaaaggc

SEQ ID NO: 102351 - DNA, 26 bp, Homo sapiens
gccgagcagcagcgcccgcaaaggcg

SEQ ID NO: 102352 - DNA, 26 bp, Homo sapiens
ccgagcagcagcgcccgcaaaggcgc

SEQ ID NO: 102353 - DNA, 26 bp, Homo sapiens
cgagcagcagcgcccgcaaaggcgcc

SEQ ID NO: 102354 - DNA, 26 bp, Homo sapiens
gagcagcagcgcccgcaaaggcgcct

SEQ ID NO: 102355 - DNA, 26 bp, Homo sapiens
agcagcagcgcccgcaaaggcgcctc

SEQ ID NO: 102356 - DNA, 26 bp, Homo sapiens
gcagcagcgcccgcaaaggcgcctcg

SEQ ID NO: 102357 - DNA, 26 bp, Homo sapiens
cagcagcgcccgcaaaggcgcctcgt

SEQ ID NO: 102358 - DNA, 26 bp, Homo sapiens
agcagcgcccgcaaaggcgcctcgtc

SEQ ID NO: 102359 - DNA, 26 bp, Homo sapiens
gcagcgcccgcaaaggcgcctcgtcg

SEQ ID NO: 102360 - DNA, 26 bp, Homo sapiens
cagcgcccgcaaaggcgcctcgtcgt

SEQ ID NO: 102361 - DNA, 26 bp, Homo sapiens
agcgcccgcaaaggcgcctcgtcgtc

SEQ ID NO: 102362 - DNA, 26 bp, Homo sapiens
gcgcccgcaaaggcgcctcgtcgtcc

SEQ ID NO: 102363 - DNA, 26 bp, Homo sapiens
cgcccgcaaaggcgcctcgtcgtcct

SEQ ID NO: 102364 - DNA, 26 bp, Homo sapiens
gcccgcaaaggcgcctcgtcgtcctt

SEQ ID NO: 102365 - DNA, 26 bp, Homo sapiens
cccgcaaaggcgcctcgtcgtccttg

SEQ ID NO: 102366 - DNA, 26 bp, Homo sapiens
ccgcaaaggcgcctcgtcgtccttgg

SEQ ID NO: 102367 - DNA, 26 bp, Homo sapiens
cgcaaaggcgcctcgtcgtccttggg

SEQ ID NO: 102368 - DNA, 26 bp, Homo sapiens
gcaaaggcgcctcgtcgtccttgggc

SEQ ID NO: 102369 - DNA, 26 bp, Homo sapiens
caaaggcgcctcgtcgtccttgggcg

SEQ ID NO: 102370 - DNA, 26 bp, Homo sapiens
aaaggcgcctcgtcgtccttgggcgg

SEQ ID NO: 102371 - DNA, 26 bp, Homo sapiens
aaggcgcctcgtcgtccttgggcgga

SEQ ID NO: 102372 - DNA, 26 bp, Homo sapiens
aggcgcctcgtcgtccttgggcggat

SEQ ID NO: 102373 - DNA, 26 bp, Homo sapiens
ggcgcctcgtcgtccttgggcggatg

SEQ ID NO: 102374 - DNA, 26 bp, Homo sapiens
gcgcctcgtcgtccttgggcggatgg

SEQ ID NO: 102375 - DNA, 26 bp, Homo sapiens
cgcctcgtcgtccttgggcggatggc

SEQ ID NO: 102376 - DNA, 26 bp, Homo sapiens
gcctcgtcgtccttgggcggatggca

SEQ ID NO: 102377 - DNA, 26 bp, Homo sapiens
cctcgtcgtccttgggcggatggcac

SEQ ID NO: 102378 - DNA, 26 bp, Homo sapiens
ctcgtcgtccttgggcggatggcact

SEQ ID NO: 102379 - DNA, 26 bp, Homo sapiens
tcgtcgtccttgggcggatggcactg

SEQ ID NO: 102380 - DNA, 26 bp, Homo sapiens
cgtcgtccttgggcggatggcactgc

SEQ ID NO: 102381 - DNA, 26 bp, Homo sapiens
gtcgtccttgggcggatggcactgca

SEQ ID NO: 102382 - DNA, 26 bp, Homo sapiens
tcgtccttgggcggatggcactgcag

SEQ ID NO: 102383 - DNA, 26 bp, Homo sapiens
cgtccttgggcggatggcactgcagt

SEQ ID NO: 102384 - DNA, 26 bp, Homo sapiens
gtccttgggcggatggcactgcagtc

SEQ ID NO: 102385 - DNA, 26 bp, Homo sapiens
tccttgggcggatggcactgcagtcc

SEQ ID NO: 102386 - DNA, 26 bp, Homo sapiens
ccttgggcggatggcactgcagtcct

SEQ ID NO: 102387 - DNA, 26 bp, Homo sapiens
cttgggcggatggcactgcagtcctg

SEQ ID NO: 102388 - DNA, 26 bp, Homo sapiens
ttgggcggatggcactgcagtcctgg

SEQ ID NO: 102389 - DNA, 26 bp, Homo sapiens
tgggcggatggcactgcagtcctggg

SEQ ID NO: 102390 - DNA, 26 bp, Homo sapiens
gggcggatggcactgcagtcctgggg

SEQ ID NO: 102391 - DNA, 26 bp, Homo sapiens
ggcggatggcactgcagtcctggggc

SEQ ID NO: 102392 - DNA, 26 bp, Homo sapiens
gcggatggcactgcagtcctggggcg

SEQ ID NO: 102393 - DNA, 26 bp, Homo sapiens
cggatggcactgcagtcctggggcgc

SEQ ID NO: 102394 - DNA, 26 bp, Homo sapiens
ggatggcactgcagtcctggggcgca

SEQ ID NO: 102395 - DNA, 26 bp, Homo sapiens
gatggcactgcagtcctggggcgcag

SEQ ID NO: 102396 - DNA, 26 bp, Homo sapiens
atggcactgcagtcctggggcgcagt

SEQ ID NO: 102397 - DNA, 26 bp, Homo sapiens
tggcactgcagtcctggggcgcagtt

SEQ ID NO: 102398 - DNA, 26 bp, Homo sapiens
ggcactgcagtcctggggcgcagtta

SEQ ID NO: 102399 - DNA, 26 bp, Homo sapiens
gcactgcagtcctggggcgcagttag

SEQ ID NO: 102400 - DNA, 26 bp, Homo sapiens
cactgcagtcctggggcgcagttagg

SEQ ID NO: 102401 - DNA, 26 bp, Homo sapiens
actgcagtcctggggcgcagttaggg

SEQ ID NO: 102402 - DNA, 26 bp, Homo sapiens
ctgcagtcctggggcgcagttagggg

SEQ ID NO: 102403 - DNA, 26 bp, Homo sapiens
tgcagtcctggggcgcagttaggggt

SEQ ID NO: 102404 - DNA, 26 bp, Homo sapiens
gcagtcctggggcgcagttaggggtg

SEQ ID NO: 102405 - DNA, 26 bp, Homo sapiens
cagtcctggggcgcagttaggggtgt

SEQ ID NO: 102406 - DNA, 26 bp, Homo sapiens
agtcctggggcgcagttaggggtgta

SEQ ID NO: 102407 - DNA, 26 bp, Homo sapiens
gtcctggggcgcagttaggggtgtag

SEQ ID NO: 102408 - DNA, 26 bp, Homo sapiens
tcctggggcgcagttaggggtgtaga

SEQ ID NO: 102409 - DNA, 26 bp, Homo sapiens
cctggggcgcagttaggggtgtagac

SEQ ID NO: 102410 - DNA, 26 bp, Homo sapiens
ctggggcgcagttaggggtgtagacc

SEQ ID NO: 102411 - DNA, 26 bp, Homo sapiens
tggggcgcagttaggggtgtagaccc

SEQ ID NO: 102412 - DNA, 26 bp, Homo sapiens
ggggcgcagttaggggtgtagacccc

SEQ ID NO: 102413 - DNA, 26 bp, Homo sapiens
gggcgcagttaggggtgtagaccccg

SEQ ID NO: 102414 - DNA, 26 bp, Homo sapiens
ggcgcagttaggggtgtagaccccgc

SEQ ID NO: 102415 - DNA, 26 bp, Homo sapiens
gcgcagttaggggtgtagaccccgca

SEQ ID NO: 102416 - DNA, 26 bp, Homo sapiens
cgcagttaggggtgtagaccccgcac

SEQ ID NO: 102417 - DNA, 26 bp, Homo sapiens
gcagttaggggtgtagaccccgcact

SEQ ID NO: 102418 - DNA, 26 bp, Homo sapiens
cagttaggggtgtagaccccgcactc

SEQ ID NO: 102419 - DNA, 26 bp, Homo sapiens
agttaggggtgtagaccccgcactcc

SEQ ID NO: 102420 - DNA, 26 bp, Homo sapiens
gttaggggtgtagaccccgcactcct

SEQ ID NO: 102421 - DNA, 26 bp, Homo sapiens
ttaggggtgtagaccccgcactcctg

SEQ ID NO: 102422 - DNA, 26 bp, Homo sapiens
taggggtgtagaccccgcactcctgc

SEQ ID NO: 102423 - DNA, 26 bp, Homo sapiens
aggggtgtagaccccgcactcctgcc

SEQ ID NO: 102424 - DNA, 26 bp, Homo sapiens
ggggtgtagaccccgcactcctgccc

SEQ ID NO: 102425 - DNA, 26 bp, Homo sapiens
gggtgtagaccccgcactcctgcccc

SEQ ID NO: 102426 - DNA, 26 bp, Homo sapiens
ggtgtagaccccgcactcctgcccct

SEQ ID NO: 102427 - DNA, 26 bp, Homo sapiens
gtgtagaccccgcactcctgcccctc

SEQ ID NO: 102428 - DNA, 26 bp, Homo sapiens
tgtagaccccgcactcctgcccctcc

SEQ ID NO: 102429 - DNA, 26 bp, Homo sapiens
gtagaccccgcactcctgcccctccc

SEQ ID NO: 102430 - DNA, 26 bp, Homo sapiens
tagaccccgcactcctgcccctccct

SEQ ID NO: 102431 - DNA, 26 bp, Homo sapiens
agaccccgcactcctgcccctccctc

SEQ ID NO: 102432 - DNA, 26 bp, Homo sapiens
gaccccgcactcctgcccctccctcc

SEQ ID NO: 102433 - DNA, 26 bp, Homo sapiens
accccgcactcctgcccctccctcct

SEQ ID NO: 102434 - DNA, 26 bp, Homo sapiens
ccccgcactcctgcccctccctcctg

SEQ ID NO: 102435 - DNA, 26 bp, Homo sapiens
cccgcactcctgcccctccctcctga

SEQ ID NO: 102436 - DNA, 26 bp, Homo sapiens
ccgcactcctgcccctccctcctgag

SEQ ID NO: 102437 - DNA, 26 bp, Homo sapiens
cgcactcctgcccctccctcctgaga

SEQ ID NO: 102438 - DNA, 26 bp, Homo sapiens
gcactcctgcccctccctcctgagac

SEQ ID NO: 102439 - DNA, 26 bp, Homo sapiens
cactcctgcccctccctcctgagaca

SEQ ID NO: 102440 - DNA, 26 bp, Homo sapiens
actcctgcccctccctcctgagacag

SEQ ID NO: 102441 - DNA, 26 bp, Homo sapiens
ctcctgcccctccctcctgagacagc

SEQ ID NO: 102442 - DNA, 26 bp, Homo sapiens
tcctgcccctccctcctgagacagcc

SEQ ID NO: 102443 - DNA, 26 bp, Homo sapiens
cctgcccctccctcctgagacagccc

SEQ ID NO: 102444 - DNA, 26 bp, Homo sapiens
ctgcccctccctcctgagacagccct

SEQ ID NO: 102445 - DNA, 26 bp, Homo sapiens
tgcccctccctcctgagacagccctc

SEQ ID NO: 102446 - DNA, 26 bp, Homo sapiens
gcccctccctcctgagacagccctca

SEQ ID NO: 102447 - DNA, 26 bp, Homo sapiens
cccctccctcctgagacagccctcag

SEQ ID NO: 102448 - DNA, 26 bp, Homo sapiens
ccctccctcctgagacagccctcagc

SEQ ID NO: 102449 - DNA, 26 bp, Homo sapiens
cctccctcctgagacagccctcagct

SEQ ID NO: 102450 - DNA, 26 bp, Homo sapiens
ctccctcctgagacagccctcagctt

SEQ ID NO: 102451 - DNA, 26 bp, Homo sapiens
tccctcctgagacagccctcagcttc

SEQ ID NO: 102452 - DNA, 26 bp, Homo sapiens
ccctcctgagacagccctcagcttcc

SEQ ID NO: 102453 - DNA, 26 bp, Homo sapiens
cctcctgagacagccctcagcttccg

SEQ ID NO: 102454 - DNA, 26 bp, Homo sapiens
ctcctgagacagccctcagcttccgc

SEQ ID NO: 102455 - DNA, 26 bp, Homo sapiens
tcctgagacagccctcagcttccgcg

SEQ ID NO: 102456 - DNA, 26 bp, Homo sapiens
cctgagacagccctcagcttccgcgc

SEQ ID NO: 102457 - DNA, 26 bp, Homo sapiens
ctgagacagccctcagcttccgcgca

SEQ ID NO: 102458 - DNA, 26 bp, Homo sapiens
tgagacagccctcagcttccgcgcag

SEQ ID NO: 102459 - DNA, 26 bp, Homo sapiens
gagacagccctcagcttccgcgcagc

SEQ ID NO: 102460 - DNA, 26 bp, Homo sapiens
agacagccctcagcttccgcgcagcc

SEQ ID NO: 102461 - DNA, 26 bp, Homo sapiens
gacagccctcagcttccgcgcagccc

SEQ ID NO: 102462 - DNA, 26 bp, Homo sapiens
acagccctcagcttccgcgcagccct

SEQ ID NO: 102463 - DNA, 26 bp, Homo sapiens
cagccctcagcttccgcgcagccctc

SEQ ID NO: 102464 - DNA, 26 bp, Homo sapiens
agccctcagcttccgcgcagccctcg

SEQ ID NO: 102465 - DNA, 26 bp, Homo sapiens
gccctcagcttccgcgcagccctcgg

SEQ ID NO: 102466 - DNA, 26 bp, Homo sapiens
ccctcagcttccgcgcagccctcggc

SEQ ID NO: 102467 - DNA, 26 bp, Homo sapiens
cctcagcttccgcgcagccctcggct

SEQ ID NO: 102468 - DNA, 26 bp, Homo sapiens
ctcagcttccgcgcagccctcggctg

SEQ ID NO: 102469 - DNA, 26 bp, Homo sapiens
tcagcttccgcgcagccctcggctgg

SEQ ID NO: 102470 - DNA, 26 bp, Homo sapiens
cagcttccgcgcagccctcggctggc

SEQ ID NO: 102471 - DNA, 26 bp, Homo sapiens
agcttccgcgcagccctcggctggcg

SEQ ID NO: 102472 - DNA, 26 bp, Homo sapiens
gcttccgcgcagccctcggctggcga

SEQ ID NO: 102473 - DNA, 26 bp, Homo sapiens
cttccgcgcagccctcggctggcgac

SEQ ID NO: 102474 - DNA, 26 bp, Homo sapiens
ttccgcgcagccctcggctggcgacc

SEQ ID NO: 102475 - DNA, 26 bp, Homo sapiens
tccgcgcagccctcggctggcgaccc

SEQ ID NO: 102476 - DNA, 26 bp, Homo sapiens
ccgcgcagccctcggctggcgacccc

SEQ ID NO: 102477 - DNA, 26 bp, Homo sapiens
cgcgcagccctcggctggcgaccccc

SEQ ID NO: 102478 - DNA, 26 bp, Homo sapiens
gcgcagccctcggctggcgacccccc

SEQ ID NO: 102479 - DNA, 26 bp, Homo sapiens
cgcagccctcggctggcgacccccca

SEQ ID NO: 102480 - DNA, 26 bp, Homo sapiens
gcagccctcggctggcgaccccccat

SEQ ID NO: 102481 - DNA, 26 bp, Homo sapiens
cagccctcggctggcgaccccccatc

SEQ ID NO: 102482 - DNA, 26 bp, Homo sapiens
agccctcggctggcgaccccccatcc

SEQ ID NO: 102483 - DNA, 26 bp, Homo sapiens
gccctcggctggcgaccccccatcct

SEQ ID NO: 102484 - DNA, 26 bp, Homo sapiens
ccctcggctggcgaccccccatcctc

SEQ ID NO: 102485 - DNA, 26 bp, Homo sapiens
cctcggctggcgaccccccatcctcc

SEQ ID NO: 102486 - DNA, 26 bp, Homo sapiens
ctcggctggcgaccccccatcctcct

SEQ ID NO: 102487 - DNA, 26 bp, Homo sapiens
tcggctggcgaccccccatcctcctc

SEQ ID NO: 102488 - DNA, 26 bp, Homo sapiens
cggctggcgaccccccatcctcctcc

SEQ ID NO: 102489 - DNA, 26 bp, Homo sapiens
ggctggcgaccccccatcctcctcct

SEQ ID NO: 102490 - DNA, 26 bp, Homo sapiens
gctggcgaccccccatcctcctcctc

SEQ ID NO: 102491 - DNA, 26 bp, Homo sapiens
ctggcgaccccccatcctcctcctcc

SEQ ID NO: 102492 - DNA, 26 bp, Homo sapiens
tggcgaccccccatcctcctcctcca

SEQ ID NO: 102493 - DNA, 26 bp, Homo sapiens
ggcgaccccccatcctcctcctccac

SEQ ID NO: 102494 - DNA, 26 bp, Homo sapiens
gcgaccccccatcctcctcctccacg

SEQ ID NO: 102495 - DNA, 26 bp, Homo sapiens
cgaccccccatcctcctcctccacgc

SEQ ID NO: 102496 - DNA, 26 bp, Homo sapiens
gaccccccatcctcctcctccacgca

SEQ ID NO: 102497 - DNA, 26 bp, Homo sapiens
accccccatcctcctcctccacgcag

SEQ ID NO: 102498 - DNA, 26 bp, Homo sapiens
ccccccatcctcctcctccacgcagc

SEQ ID NO: 102499 - DNA, 26 bp, Homo sapiens
cccccatcctcctcctccacgcagcc

SEQ ID NO: 102500 - DNA, 26 bp, Homo sapiens
ccccatcctcctcctccacgcagccc

SEQ ID NO: 102501 - DNA, 26 bp, Homo sapiens
cccatcctcctcctccacgcagcccc

SEQ ID NO: 102502 - DNA, 26 bp, Homo sapiens
ccatcctcctcctccacgcagccccc

SEQ ID NO: 102503 - DNA, 26 bp, Homo sapiens
catcctcctcctccacgcagccccct

SEQ ID NO: 102504 - DNA, 26 bp, Homo sapiens
atcctcctcctccacgcagccccctg

SEQ ID NO: 102505 - DNA, 26 bp, Homo sapiens
tcctcctcctccacgcagccccctgg

SEQ ID NO: 102506 - DNA, 26 bp, Homo sapiens
cctcctcctccacgcagccccctgga

SEQ ID NO: 102507 - DNA, 26 bp, Homo sapiens
ctcctcctccacgcagccccctggac

SEQ ID NO: 102508 - DNA, 26 bp, Homo sapiens
tcctcctccacgcagccccctggaca

SEQ ID NO: 102509 - DNA, 26 bp, Homo sapiens
cctcctccacgcagccccctggacaa

SEQ ID NO: 102510 - DNA, 26 bp, Homo sapiens
ctcctccacgcagccccctggacaac

SEQ ID NO: 102511 - DNA, 26 bp, Homo sapiens
tcctccacgcagccccctggacaacc

SEQ ID NO: 102512 - DNA, 26 bp, Homo sapiens
cctccacgcagccccctggacaaccc

SEQ ID NO: 102513 - DNA, 26 bp, Homo sapiens
ctccacgcagccccctggacaacccg

SEQ ID NO: 102514 - DNA, 26 bp, Homo sapiens
tccacgcagccccctggacaacccgc

SEQ ID NO: 102515 - DNA, 26 bp, Homo sapiens
ccacgcagccccctggacaacccgcc

SEQ ID NO: 102516 - DNA, 26 bp, Homo sapiens
cacgcagccccctggacaacccgcct

SEQ ID NO: 102517 - DNA, 26 bp, Homo sapiens
acgcagccccctggacaacccgcctg

SEQ ID NO: 102518 - DNA, 26 bp, Homo sapiens
cgcagccccctggacaacccgcctgc

SEQ ID NO: 102519 - DNA, 26 bp, Homo sapiens
gcagccccctggacaacccgcctgca

SEQ ID NO: 102520 - DNA, 26 bp, Homo sapiens
cagccccctggacaacccgcctgcac

SEQ ID NO: 102521 - DNA, 26 bp, Homo sapiens
agccccctggacaacccgcctgcacc

SEQ ID NO: 102522 - DNA, 26 bp, Homo sapiens
gccccctggacaacccgcctgcaccc

SEQ ID NO: 102523 - DNA, 26 bp, Homo sapiens
ccccctggacaacccgcctgcacccc

SEQ ID NO: 102524 - DNA, 26 bp, Homo sapiens
cccctggacaacccgcctgcacccct

SEQ ID NO: 102525 - DNA, 26 bp, Homo sapiens
ccctggacaacccgcctgcacccctt

SEQ ID NO: 102526 - DNA, 26 bp, Homo sapiens
cctggacaacccgcctgcaccccttg

SEQ ID NO: 102527 - DNA, 26 bp, Homo sapiens
ctggacaacccgcctgcaccccttgc

SEQ ID NO: 102528 - DNA, 26 bp, Homo sapiens
tggacaacccgcctgcaccccttgcc

SEQ ID NO: 102529 - DNA, 26 bp, Homo sapiens
ggacaacccgcctgcaccccttgccc

SEQ ID NO: 102530 - DNA, 26 bp, Homo sapiens
gacaacccgcctgcaccccttgcccg

SEQ ID NO: 102531 - DNA, 26 bp, Homo sapiens
acaacccgcctgcaccccttgcccgc

SEQ ID NO: 102532 - DNA, 26 bp, Homo sapiens
caacccgcctgcaccccttgcccgca

SEQ ID NO: 102533 - DNA, 26 bp, Homo sapiens
aacccgcctgcaccccttgcccgcag

SEQ ID NO: 102534 - DNA, 26 bp, Homo sapiens
acccgcctgcaccccttgcccgcagc

SEQ ID NO: 102535 - DNA, 26 bp, Homo sapiens
cccgcctgcaccccttgcccgcagcc

SEQ ID NO: 102536 - DNA, 26 bp, Homo sapiens
ccgcctgcaccccttgcccgcagcct

SEQ ID NO: 102537 - DNA, 26 bp, Homo sapiens
cgcctgcaccccttgcccgcagcctg

SEQ ID NO: 102538 - DNA, 26 bp, Homo sapiens
gcctgcaccccttgcccgcagcctgg

SEQ ID NO: 102539 - DNA, 26 bp, Homo sapiens
cctgcaccccttgcccgcagcctggg

SEQ ID NO: 102540 - DNA, 26 bp, Homo sapiens
ctgcaccccttgcccgcagcctgggc

SEQ ID NO: 102541 - DNA, 26 bp, Homo sapiens
tgcaccccttgcccgcagcctgggca

SEQ ID NO: 102542 - DNA, 26 bp, Homo sapiens
gcaccccttgcccgcagcctgggcac

SEQ ID NO: 102543 - DNA, 26 bp, Homo sapiens
caccccttgcccgcagcctgggcacc

SEQ ID NO: 102544 - DNA, 26 bp, Homo sapiens
accccttgcccgcagcctgggcaccg

SEQ ID NO: 102545 - DNA, 26 bp, Homo sapiens
ccccttgcccgcagcctgggcaccgc

SEQ ID NO: 102546 - DNA, 26 bp, Homo sapiens
cccttgcccgcagcctgggcaccgcg

SEQ ID NO: 102547 - DNA, 26 bp, Homo sapiens
ccttgcccgcagcctgggcaccgcgc

SEQ ID NO: 102548 - DNA, 26 bp, Homo sapiens
cttgcccgcagcctgggcaccgcgcc

SEQ ID NO: 102549 - DNA, 26 bp, Homo sapiens
ttgcccgcagcctgggcaccgcgcca

SEQ ID NO: 102550 - DNA, 26 bp, Homo sapiens
tgcccgcagcctgggcaccgcgccaa

SEQ ID NO: 102551 - DNA, 26 bp, Homo sapiens
gcccgcagcctgggcaccgcgccaag

SEQ ID NO: 102552 - DNA, 26 bp, Homo sapiens
cccgcagcctgggcaccgcgccaagg

SEQ ID NO: 102553 - DNA, 26 bp, Homo sapiens
ccgcagcctgggcaccgcgccaaggc

SEQ ID NO: 102554 - DNA, 26 bp, Homo sapiens
cgcagcctgggcaccgcgccaaggcg

SEQ ID NO: 102555 - DNA, 26 bp, Homo sapiens
gcagcctgggcaccgcgccaaggcgc

SEQ ID NO: 102556 - DNA, 26 bp, Homo sapiens
cagcctgggcaccgcgccaaggcgcc

SEQ ID NO: 102557 - DNA, 26 bp, Homo sapiens
agcctgggcaccgcgccaaggcgcct

SEQ ID NO: 102558 - DNA, 26 bp, Homo sapiens
gcctgggcaccgcgccaaggcgcctc

SEQ ID NO: 102559 - DNA, 26 bp, Homo sapiens
cctgggcaccgcgccaaggcgcctcc

SEQ ID NO: 102560 - DNA, 26 bp, Homo sapiens
ctgggcaccgcgccaaggcgcctcct

SEQ ID NO: 102561 - DNA, 26 bp, Homo sapiens
tgggcaccgcgccaaggcgcctcctg

SEQ ID NO: 102562 - DNA, 26 bp, Homo sapiens
gggcaccgcgccaaggcgcctcctgg

SEQ ID NO: 102563 - DNA, 26 bp, Homo sapiens
ggcaccgcgccaaggcgcctcctggg

SEQ ID NO: 102564 - DNA, 26 bp, Homo sapiens
gcaccgcgccaaggcgcctcctgggc

SEQ ID NO: 102565 - DNA, 26 bp, Homo sapiens
caccgcgccaaggcgcctcctgggct

SEQ ID NO: 102566 - DNA, 26 bp, Homo sapiens
accgcgccaaggcgcctcctgggctg

SEQ ID NO: 102567 - DNA, 26 bp, Homo sapiens
ccgcgccaaggcgcctcctgggctgg

SEQ ID NO: 102568 - DNA, 26 bp, Homo sapiens
cgcgccaaggcgcctcctgggctggc

SEQ ID NO: 102569 - DNA, 26 bp, Homo sapiens
gcgccaaggcgcctcctgggctggca

SEQ ID NO: 102570 - DNA, 26 bp, Homo sapiens
cgccaaggcgcctcctgggctggcag

SEQ ID NO: 102571 - DNA, 26 bp, Homo sapiens
gccaaggcgcctcctgggctggcagc

SEQ ID NO: 102572 - DNA, 26 bp, Homo sapiens
ccaaggcgcctcctgggctggcagcg

SEQ ID NO: 102573 - DNA, 26 bp, Homo sapiens
caaggcgcctcctgggctggcagcga

SEQ ID NO: 102574 - DNA, 26 bp, Homo sapiens
aaggcgcctcctgggctggcagcgag

SEQ ID NO: 102575 - DNA, 26 bp, Homo sapiens
aggcgcctcctgggctggcagcgagc

SEQ ID NO: 102576 - DNA, 26 bp, Homo sapiens
ggcgcctcctgggctggcagcgagca

SEQ ID NO: 102577 - DNA, 26 bp, Homo sapiens
gcgcctcctgggctggcagcgagcag

SEQ ID NO: 102578 - DNA, 26 bp, Homo sapiens
cgcctcctgggctggcagcgagcagc

SEQ ID NO: 102579 - DNA, 26 bp, Homo sapiens
gcctcctgggctggcagcgagcagca

SEQ ID NO: 102580 - DNA, 26 bp, Homo sapiens
cctcctgggctggcagcgagcagcag

SEQ ID NO: 102581 - DNA, 26 bp, Homo sapiens
ctcctgggctggcagcgagcagcaga

SEQ ID NO: 102582 - DNA, 26 bp, Homo sapiens
tcctgggctggcagcgagcagcagag

SEQ ID NO: 102583 - DNA, 26 bp, Homo sapiens
cctgggctggcagcgagcagcagagc

SEQ ID NO: 102584 - DNA, 26 bp, Homo sapiens
ctgggctggcagcgagcagcagagct

SEQ ID NO: 102585 - DNA, 26 bp, Homo sapiens
tgggctggcagcgagcagcagagcta

SEQ ID NO: 102586 - DNA, 26 bp, Homo sapiens
gggctggcagcgagcagcagagctag

SEQ ID NO: 102587 - DNA, 26 bp, Homo sapiens
ggctggcagcgagcagcagagctagc

SEQ ID NO: 102588 - DNA, 26 bp, Homo sapiens
gctggcagcgagcagcagagctagca

SEQ ID NO: 102589 - DNA, 26 bp, Homo sapiens
ctggcagcgagcagcagagctagcag

SEQ ID NO: 102590 - DNA, 26 bp, Homo sapiens
tggcagcgagcagcagagctagcagc

SEQ ID NO: 102591 - DNA, 26 bp, Homo sapiens
ggcagcgagcagcagagctagcagca

SEQ ID NO: 102592 - DNA, 26 bp, Homo sapiens
gcagcgagcagcagagctagcagcag

SEQ ID NO: 102593 - DNA, 26 bp, Homo sapiens
cagcgagcagcagagctagcagcagc

SEQ ID NO: 102594 - DNA, 26 bp, Homo sapiens
agcgagcagcagagctagcagcagca

SEQ ID NO: 102595 - DNA, 26 bp, Homo sapiens
gcgagcagcagagctagcagcagcag

SEQ ID NO: 102596 - DNA, 26 bp, Homo sapiens
cgagcagcagagctagcagcagcagc

SEQ ID NO: 102597 - DNA, 26 bp, Homo sapiens
gagcagcagagctagcagcagcagca

SEQ ID NO: 102598 - DNA, 26 bp, Homo sapiens
agcagcagagctagcagcagcagcag

SEQ ID NO: 102599 - DNA, 26 bp, Homo sapiens
gcagcagagctagcagcagcagcagc

SEQ ID NO: 102600 - DNA, 26 bp, Homo sapiens
cagcagagctagcagcagcagcagcg

SEQ ID NO: 102601 - DNA, 26 bp, Homo sapiens
agcagagctagcagcagcagcagcgg

SEQ ID NO: 102602 - DNA, 26 bp, Homo sapiens
gcagagctagcagcagcagcagcggt

SEQ ID NO: 102603 - DNA, 26 bp, Homo sapiens
cagagctagcagcagcagcagcggtg

SEQ ID NO: 102604 - DNA, 26 bp, Homo sapiens
agagctagcagcagcagcagcggtgg

SEQ ID NO: 102605 - DNA, 26 bp, Homo sapiens
gagctagcagcagcagcagcggtggc

SEQ ID NO: 102606 - DNA, 26 bp, Homo sapiens
agctagcagcagcagcagcggtggca

SEQ ID NO: 102607 - DNA, 26 bp, Homo sapiens
gctagcagcagcagcagcggtggcag

SEQ ID NO: 102608 - DNA, 26 bp, Homo sapiens
ctagcagcagcagcagcggtggcagc

SEQ ID NO: 102609 - DNA, 26 bp, Homo sapiens
tagcagcagcagcagcggtggcagca

SEQ ID NO: 102610 - DNA, 26 bp, Homo sapiens
agcagcagcagcagcggtggcagcag

SEQ ID NO: 102611 - DNA, 26 bp, Homo sapiens
gcagcagcagcagcggtggcagcagc

SEQ ID NO: 102612 - DNA, 26 bp, Homo sapiens
cagcagcagcagcggtggcagcagcc

SEQ ID NO: 102613 - DNA, 26 bp, Homo sapiens
agcagcagcagcggtggcagcagcct

SEQ ID NO: 102614 - DNA, 26 bp, Homo sapiens
gcagcagcagcggtggcagcagcctg

SEQ ID NO: 102615 - DNA, 26 bp, Homo sapiens
cagcagcagcggtggcagcagcctgt

SEQ ID NO: 102616 - DNA, 26 bp, Homo sapiens
agcagcagcggtggcagcagcctgtg

SEQ ID NO: 102617 - DNA, 26 bp, Homo sapiens
gcagcagcggtggcagcagcctgtgg

SEQ ID NO: 102618 - DNA, 26 bp, Homo sapiens
cagcagcggtggcagcagcctgtggg

SEQ ID NO: 102619 - DNA, 26 bp, Homo sapiens
agcagcggtggcagcagcctgtgggg

SEQ ID NO: 102620 - DNA, 26 bp, Homo sapiens
gcagcggtggcagcagcctgtggggg

SEQ ID NO: 102621 - DNA, 26 bp, Homo sapiens
cagcggtggcagcagcctgtgggggg

SEQ ID NO: 102622 - DNA, 26 bp, Homo sapiens
agcggtggcagcagcctgtggggggt

SEQ ID NO: 102623 - DNA, 26 bp, Homo sapiens
gcggtggcagcagcctgtggggggtc

SEQ ID NO: 102624 - DNA, 26 bp, Homo sapiens
cggtggcagcagcctgtggggggtca

SEQ ID NO: 102625 - DNA, 26 bp, Homo sapiens
ggtggcagcagcctgtggggggtcat

SEQ ID NO: 102626 - DNA, 26 bp, Homo sapiens
gtggcagcagcctgtggggggtcatg

SEQ ID NO: 102627 - DNA, 26 bp, Homo sapiens
tggcagcagcctgtggggggtcatgg

SEQ ID NO: 102628 - DNA, 26 bp, Homo sapiens
ggcagcagcctgtggggggtcatggt

SEQ ID NO: 102629 - DNA, 26 bp, Homo sapiens
gcagcagcctgtggggggtcatggtc

SEQ ID NO: 102630 - DNA, 26 bp, Homo sapiens
cagcagcctgtggggggtcatggtca

SEQ ID NO: 102631 - DNA, 26 bp, Homo sapiens
agcagcctgtggggggtcatggtcag

SEQ ID NO: 102632 - DNA, 26 bp, Homo sapiens
gcagcctgtggggggtcatggtcagg

SEQ ID NO: 102633 - DNA, 26 bp, Homo sapiens
cagcctgtggggggtcatggtcaggg

SEQ ID NO: 102634 - DNA, 26 bp, Homo sapiens
agcctgtggggggtcatggtcagggt

SEQ ID NO: 102635 - DNA, 26 bp, Homo sapiens
gcctgtggggggtcatggtcagggtt

SEQ ID NO: 102636 - DNA, 26 bp, Homo sapiens
cctgtggggggtcatggtcagggttt

SEQ ID NO: 102637 - DNA, 26 bp, Homo sapiens
ctgtggggggtcatggtcagggtttg

SEQ ID NO: 102638 - DNA, 26 bp, Homo sapiens
tgtggggggtcatggtcagggtttgt

SEQ ID NO: 102639 - DNA, 26 bp, Homo sapiens
gtggggggtcatggtcagggtttgtg

SEQ ID NO: 102640 - DNA, 26 bp, Homo sapiens
tggggggtcatggtcagggtttgtgc

SEQ ID NO: 102641 - DNA, 26 bp, Homo sapiens
ggggggtcatggtcagggtttgtgcc

SEQ ID NO: 102642 - DNA, 26 bp, Homo sapiens
gggggtcatggtcagggtttgtgccc

SEQ ID NO: 102643 - DNA, 26 bp, Homo sapiens
ggggtcatggtcagggtttgtgcccc

SEQ ID NO: 102644 - DNA, 26 bp, Homo sapiens
gggtcatggtcagggtttgtgccccg

SEQ ID NO: 102645 - DNA, 26 bp, Homo sapiens
ggtcatggtcagggtttgtgccccgt

SEQ ID NO: 102646 - DNA, 26 bp, Homo sapiens
gtcatggtcagggtttgtgccccgtc

SEQ ID NO: 102647 - DNA, 26 bp, Homo sapiens
tcatggtcagggtttgtgccccgtcc

SEQ ID NO: 102648 - DNA, 26 bp, Homo sapiens
catggtcagggtttgtgccccgtcct

SEQ ID NO: 102649 - DNA, 26 bp, Homo sapiens
atggtcagggtttgtgccccgtcctc

SEQ ID NO: 102650 - DNA, 26 bp, Homo sapiens
tggtcagggtttgtgccccgtcctct

SEQ ID NO: 102651 - DNA, 26 bp, Homo sapiens
ggtcagggtttgtgccccgtcctctc

SEQ ID NO: 102652 - DNA, 26 bp, Homo sapiens
gtcagggtttgtgccccgtcctctcc

SEQ ID NO: 102653 - DNA, 26 bp, Homo sapiens
tcagggtttgtgccccgtcctctcct

SEQ ID NO: 102654 - DNA, 26 bp, Homo sapiens
cagggtttgtgccccgtcctctcctt

SEQ ID NO: 102655 - DNA, 26 bp, Homo sapiens
agggtttgtgccccgtcctctccttc

SEQ ID NO: 102656 - DNA, 26 bp, Homo sapiens
gggtttgtgccccgtcctctccttcc

SEQ ID NO: 102657 - DNA, 26 bp, Homo sapiens
ggtttgtgccccgtcctctccttcca

SEQ ID NO: 102658 - DNA, 26 bp, Homo sapiens
gtttgtgccccgtcctctccttccag

SEQ ID NO: 102659 - DNA, 26 bp, Homo sapiens
tttgtgccccgtcctctccttccaga

SEQ ID NO: 102660 - DNA, 26 bp, Homo sapiens
ttgtgccccgtcctctccttccagag

SEQ ID NO: 102661 - DNA, 26 bp, Homo sapiens
tgtgccccgtcctctccttccagagc

SEQ ID NO: 102662 - DNA, 26 bp, Homo sapiens
gtgccccgtcctctccttccagagca

SEQ ID NO: 102663 - DNA, 26 bp, Homo sapiens
tgccccgtcctctccttccagagcag

SEQ ID NO: 102664 - DNA, 26 bp, Homo sapiens
gccccgtcctctccttccagagcagt

SEQ ID NO: 102665 - DNA, 26 bp, Homo sapiens
ccccgtcctctccttccagagcagtc

SEQ ID NO: 102666 - DNA, 26 bp, Homo sapiens
cccgtcctctccttccagagcagtcg

SEQ ID NO: 102667 - DNA, 26 bp, Homo sapiens
ccgtcctctccttccagagcagtcgc

SEQ ID NO: 102668 - DNA, 26 bp, Homo sapiens
cgtcctctccttccagagcagtcgca

SEQ ID NO: 102669 - DNA, 26 bp, Homo sapiens
gtcctctccttccagagcagtcgcag

SEQ ID NO: 102670 - DNA, 26 bp, Homo sapiens
tcctctccttccagagcagtcgcagc

SEQ ID NO: 102671 - DNA, 26 bp, Homo sapiens
cctctccttccagagcagtcgcagcg

SEQ ID NO: 102672 - DNA, 26 bp, Homo sapiens
ctctccttccagagcagtcgcagcgc

SEQ ID NO: 102673 - DNA, 26 bp, Homo sapiens
tctccttccagagcagtcgcagcgca

SEQ ID NO: 102674 - DNA, 26 bp, Homo sapiens
ctccttccagagcagtcgcagcgcag

SEQ ID NO: 102675 - DNA, 26 bp, Homo sapiens
tccttccagagcagtcgcagcgcagc

SEQ ID NO: 102676 - DNA, 26 bp, Homo sapiens
ttttctaatccttaagcctccaattt

SEQ ID NO: 102677 - DNA, 26 bp, Homo sapiens
tttctaatccttaagcctccaattta

SEQ ID NO: 102678 - DNA, 26 bp, Homo sapiens
ttctaatccttaagcctccaatttat

SEQ ID NO: 102679 - DNA, 26 bp, Homo sapiens
tctaatccttaagcctccaatttatt

SEQ ID NO: 102680 - DNA, 26 bp, Homo sapiens
ctaatccttaagcctccaatttattt

SEQ ID NO: 102681 - DNA, 26 bp, Homo sapiens
taatccttaagcctccaatttatttt

SEQ ID NO: 102682 - DNA, 26 bp, Homo sapiens
aatccttaagcctccaatttattttt

SEQ ID NO: 102683 - DNA, 26 bp, Homo sapiens
atccttaagcctccaatttatttttt

SEQ ID NO: 102684 - DNA, 26 bp, Homo sapiens
tccttaagcctccaatttattttttt

SEQ ID NO: 102685 - DNA, 26 bp, Homo sapiens
ccttaagcctccaatttattttttta

SEQ ID NO: 102686 - DNA, 26 bp, Homo sapiens
cttaagcctccaatttatttttttaa

SEQ ID NO: 102687 - DNA, 26 bp, Homo sapiens
ttaagcctccaatttatttttttaat

SEQ ID NO: 102688 - DNA, 26 bp, Homo sapiens
taagcctccaatttatttttttaatg

SEQ ID NO: 102689 - DNA, 26 bp, Homo sapiens
aagcctccaatttatttttttaatgt

SEQ ID NO: 102690 - DNA, 26 bp, Homo sapiens
agcctccaatttatttttttaatgtt

SEQ ID NO: 102691 - DNA, 26 bp, Homo sapiens
gcctccaatttatttttttaatgttc

SEQ ID NO: 102692 - DNA, 26 bp, Homo sapiens
cctccaatttatttttttaatgttcc

SEQ ID NO: 102693 - DNA, 26 bp, Homo sapiens
ctccaatttatttttttaatgttcca

SEQ ID NO: 102694 - DNA, 26 bp, Homo sapiens
tccaatttatttttttaatgttccaa

SEQ ID NO: 102695 - DNA, 26 bp, Homo sapiens
ccaatttatttttttaatgttccaaa

SEQ ID NO: 102696 - DNA, 26 bp, Homo sapiens
caatttatttttttaatgttccaaag

SEQ ID NO: 102697 - DNA, 26 bp, Homo sapiens
aatttatttttttaatgttccaaagt

SEQ ID NO: 102698 - DNA, 26 bp, Homo sapiens
atttatttttttaatgttccaaagtt

SEQ ID NO: 102699 - DNA, 26 bp, Homo sapiens
tttatttttttaatgttccaaagttt

SEQ ID NO: 102700 - DNA, 26 bp, Homo sapiens
ttatttttttaatgttccaaagtttt

SEQ ID NO: 102701 - DNA, 26 bp, Homo sapiens
tatttttttaatgttccaaagtttta

SEQ ID NO: 102702 - DNA, 26 bp, Homo sapiens
atttttttaatgttccaaagttttat

SEQ ID NO: 102703 - DNA, 26 bp, Homo sapiens
tttttttaatgttccaaagttttatt

SEQ ID NO: 102704 - DNA, 26 bp, Homo sapiens
ttttttaatgttccaaagttttatta

SEQ ID NO: 102705 - DNA, 26 bp, Homo sapiens
tttttaatgttccaaagttttattaa

SEQ ID NO: 102706 - DNA, 26 bp, Homo sapiens
ttttaatgttccaaagttttattaaa

SEQ ID NO: 102707 - DNA, 26 bp, Homo sapiens
tttaatgttccaaagttttattaaat

SEQ ID NO: 102708 - DNA, 26 bp, Homo sapiens
ttaatgttccaaagttttattaaata

SEQ ID NO: 102709 - DNA, 26 bp, Homo sapiens
taatgttccaaagttttattaaataa

SEQ ID NO: 102710 - DNA, 26 bp, Homo sapiens
aatgttccaaagttttattaaataat

SEQ ID NO: 102711 - DNA, 26 bp, Homo sapiens
atgttccaaagttttattaaataatt

SEQ ID NO: 102712 - DNA, 26 bp, Homo sapiens
tgttccaaagttttattaaataatta

SEQ ID NO: 102713 - DNA, 26 bp, Homo sapiens
gttccaaagttttattaaataattac

SEQ ID NO: 102714 - DNA, 26 bp, Homo sapiens
ttccaaagttttattaaataattaca

SEQ ID NO: 102715 - DNA, 26 bp, Homo sapiens
tccaaagttttattaaataattacat

SEQ ID NO: 102716 - DNA, 26 bp, Homo sapiens
ccaaagttttattaaataattacatg

SEQ ID NO: 102717 - DNA, 26 bp, Homo sapiens
caaagttttattaaataattacatgt

SEQ ID NO: 102718 - DNA, 26 bp, Homo sapiens
aaagttttattaaataattacatgtt

SEQ ID NO: 102719 - DNA, 26 bp, Homo sapiens
aagttttattaaataattacatgttg

SEQ ID NO: 102720 - DNA, 26 bp, Homo sapiens
agttttattaaataattacatgttga

SEQ ID NO: 102721 - DNA, 26 bp, Homo sapiens
gttttattaaataattacatgttgag

SEQ ID NO: 102722 - DNA, 26 bp, Homo sapiens
ttttattaaataattacatgttgagc

SEQ ID NO: 102723 - DNA, 26 bp, Homo sapiens
tttattaaataattacatgttgagca

SEQ ID NO: 102724 - DNA, 26 bp, Homo sapiens
ttattaaataattacatgttgagcag

SEQ ID NO: 102725 - DNA, 26 bp, Homo sapiens
tattaaataattacatgttgagcagg

SEQ ID NO: 102726 - DNA, 26 bp, Homo sapiens
attaaataattacatgttgagcaggt

SEQ ID NO: 102727 - DNA, 26 bp, Homo sapiens
ttaaataattacatgttgagcaggtg

SEQ ID NO: 102728 - DNA, 26 bp, Homo sapiens
taaataattacatgttgagcaggtga

SEQ ID NO: 102729 - DNA, 26 bp, Homo sapiens
aaataattacatgttgagcaggtgat

SEQ ID NO: 102730 - DNA, 26 bp, Homo sapiens
aataattacatgttgagcaggtgata

SEQ ID NO: 102731 - DNA, 26 bp, Homo sapiens
ataattacatgttgagcaggtgatat

SEQ ID NO: 102732 - DNA, 26 bp, Homo sapiens
taattacatgttgagcaggtgatatt

SEQ ID NO: 102733 - DNA, 26 bp, Homo sapiens
aattacatgttgagcaggtgatattt

SEQ ID NO: 102734 - DNA, 26 bp, Homo sapiens
attacatgttgagcaggtgatattta

SEQ ID NO: 102735 - DNA, 26 bp, Homo sapiens
ttacatgttgagcaggtgatatttac

SEQ ID NO: 102736 - DNA, 26 bp, Homo sapiens
tacatgttgagcaggtgatatttacc

SEQ ID NO: 102737 - DNA, 26 bp, Homo sapiens
acatgttgagcaggtgatatttacca

SEQ ID NO: 102738 - DNA, 26 bp, Homo sapiens
catgttgagcaggtgatatttaccaa

SEQ ID NO: 102739 - DNA, 26 bp, Homo sapiens
atgttgagcaggtgatatttaccaat

SEQ ID NO: 102740 - DNA, 26 bp, Homo sapiens
tgttgagcaggtgatatttaccaatc

SEQ ID NO: 102741 - DNA, 26 bp, Homo sapiens
gttgagcaggtgatatttaccaatct

SEQ ID NO: 102742 - DNA, 26 bp, Homo sapiens
ttgagcaggtgatatttaccaatctg

SEQ ID NO: 102743 - DNA, 26 bp, Homo sapiens
tgagcaggtgatatttaccaatctgt

SEQ ID NO: 102744 - DNA, 26 bp, Homo sapiens
gagcaggtgatatttaccaatctgta

SEQ ID NO: 102745 - DNA, 26 bp, Homo sapiens
agcaggtgatatttaccaatctgtaa

SEQ ID NO: 102746 - DNA, 26 bp, Homo sapiens
gcaggtgatatttaccaatctgtaaa

SEQ ID NO: 102747 - DNA, 26 bp, Homo sapiens
caggtgatatttaccaatctgtaaac

SEQ ID NO: 102748 - DNA, 26 bp, Homo sapiens
aggtgatatttaccaatctgtaaact

SEQ ID NO: 102749 - DNA, 26 bp, Homo sapiens
ggtgatatttaccaatctgtaaactt

SEQ ID NO: 102750 - DNA, 26 bp, Homo sapiens
gtgatatttaccaatctgtaaacttc

SEQ ID NO: 102751 - DNA, 26 bp, Homo sapiens
tgatatttaccaatctgtaaacttca

SEQ ID NO: 102752 - DNA, 26 bp, Homo sapiens
gatatttaccaatctgtaaacttcat

SEQ ID NO: 102753 - DNA, 26 bp, Homo sapiens
atatttaccaatctgtaaacttcatg

SEQ ID NO: 102754 - DNA, 26 bp, Homo sapiens
tatttaccaatctgtaaacttcatgt

SEQ ID NO: 102755 - DNA, 26 bp, Homo sapiens
atttaccaatctgtaaacttcatgta

SEQ ID NO: 102756 - DNA, 26 bp, Homo sapiens
tttaccaatctgtaaacttcatgtag

SEQ ID NO: 102757 - DNA, 26 bp, Homo sapiens
ttaccaatctgtaaacttcatgtaga

SEQ ID NO: 102758 - DNA, 26 bp, Homo sapiens
taccaatctgtaaacttcatgtagac

SEQ ID NO: 102759 - DNA, 26 bp, Homo sapiens
accaatctgtaaacttcatgtagaca

SEQ ID NO: 102760 - DNA, 26 bp, Homo sapiens
ccaatctgtaaacttcatgtagacag

SEQ ID NO: 102761 - DNA, 26 bp, Homo sapiens
caatctgtaaacttcatgtagacaga

SEQ ID NO: 102762 - DNA, 26 bp, Homo sapiens
aatctgtaaacttcatgtagacagat

SEQ ID NO: 102763 - DNA, 26 bp, Homo sapiens
atctgtaaacttcatgtagacagatt

SEQ ID NO: 102764 - DNA, 26 bp, Homo sapiens
tctgtaaacttcatgtagacagattt

SEQ ID NO: 102765 - DNA, 26 bp, Homo sapiens
ctgtaaacttcatgtagacagatttg

SEQ ID NO: 102766 - DNA, 26 bp, Homo sapiens
tgtaaacttcatgtagacagatttgt

SEQ ID NO: 102767 - DNA, 26 bp, Homo sapiens
gtaaacttcatgtagacagatttgta

SEQ ID NO: 102768 - DNA, 26 bp, Homo sapiens
taaacttcatgtagacagatttgtat

SEQ ID NO: 102769 - DNA, 26 bp, Homo sapiens
aaacttcatgtagacagatttgtata

SEQ ID NO: 102770 - DNA, 26 bp, Homo sapiens
aacttcatgtagacagatttgtatac

SEQ ID NO: 102771 - DNA, 26 bp, Homo sapiens
acttcatgtagacagatttgtatacc

SEQ ID NO: 102772 - DNA, 26 bp, Homo sapiens
cttcatgtagacagatttgtatacct

SEQ ID NO: 102773 - DNA, 26 bp, Homo sapiens
ttcatgtagacagatttgtatacctt

SEQ ID NO: 102774 - DNA, 26 bp, Homo sapiens
tcatgtagacagatttgtatacctta

SEQ ID NO: 102775 - DNA, 26 bp, Homo sapiens
catgtagacagatttgtataccttag

SEQ ID NO: 102776 - DNA, 26 bp, Homo sapiens
atgtagacagatttgtataccttaga

SEQ ID NO: 102777 - DNA, 26 bp, Homo sapiens
tgtagacagatttgtataccttagat

SEQ ID NO: 102778 - DNA, 26 bp, Homo sapiens
gtagacagatttgtataccttagata

SEQ ID NO: 102779 - DNA, 26 bp, Homo sapiens
tagacagatttgtataccttagatat

SEQ ID NO: 102780 - DNA, 26 bp, Homo sapiens
agacagatttgtataccttagatata

SEQ ID NO: 102781 - DNA, 26 bp, Homo sapiens
gacagatttgtataccttagatatat

SEQ ID NO: 102782 - DNA, 26 bp, Homo sapiens
acagatttgtataccttagatatata

SEQ ID NO: 102783 - DNA, 26 bp, Homo sapiens
cagatttgtataccttagatatataa

SEQ ID NO: 102784 - DNA, 26 bp, Homo sapiens
agatttgtataccttagatatataat

SEQ ID NO: 102785 - DNA, 26 bp, Homo sapiens
gatttgtataccttagatatataata

SEQ ID NO: 102786 - DNA, 26 bp, Homo sapiens
atttgtataccttagatatataataa

SEQ ID NO: 102787 - DNA, 26 bp, Homo sapiens
tttgtataccttagatatataataaa

SEQ ID NO: 102788 - DNA, 26 bp, Homo sapiens
ttgtataccttagatatataataaat

SEQ ID NO: 102789 - DNA, 26 bp, Homo sapiens
tgtataccttagatatataataaata

SEQ ID NO: 102790 - DNA, 26 bp, Homo sapiens
gtataccttagatatataataaatat

SEQ ID NO: 102791 - DNA, 26 bp, Homo sapiens
tataccttagatatataataaatatg

SEQ ID NO: 102792 - DNA, 26 bp, Homo sapiens
ataccttagatatataataaatatgt

SEQ ID NO: 102793 - DNA, 26 bp, Homo sapiens
taccttagatatataataaatatgtg

SEQ ID NO: 102794 - DNA, 26 bp, Homo sapiens
accttagatatataataaatatgtgc

SEQ ID NO: 102795 - DNA, 26 bp, Homo sapiens
ccttagatatataataaatatgtgct

SEQ ID NO: 102796 - DNA, 26 bp, Homo sapiens
cttagatatataataaatatgtgctt

SEQ ID NO: 102797 - DNA, 26 bp, Homo sapiens
ttagatatataataaatatgtgctta

SEQ ID NO: 102798 - DNA, 26 bp, Homo sapiens
tagatatataataaatatgtgcttat

SEQ ID NO: 102799 - DNA, 26 bp, Homo sapiens
agatatataataaatatgtgcttata

SEQ ID NO: 102800 - DNA, 26 bp, Homo sapiens
gatatataataaatatgtgcttatat

SEQ ID NO: 102801 - DNA, 26 bp, Homo sapiens
atatataataaatatgtgcttatatt

SEQ ID NO: 102802 - DNA, 26 bp, Homo sapiens
tatataataaatatgtgcttatattt

SEQ ID NO: 102803 - DNA, 26 bp, Homo sapiens
atataataaatatgtgcttatatttt

SEQ ID NO: 102804 - DNA, 26 bp, Homo sapiens
tataataaatatgtgcttatatttta

SEQ ID NO: 102805 - DNA, 26 bp, Homo sapiens
ataataaatatgtgcttatattttat

SEQ ID NO: 102806 - DNA, 26 bp, Homo sapiens
taataaatatgtgcttatattttata

SEQ ID NO: 102807 - DNA, 26 bp, Homo sapiens
aataaatatgtgcttatattttatat

SEQ ID NO: 102808 - DNA, 26 bp, Homo sapiens
ataaatatgtgcttatattttatatt

SEQ ID NO: 102809 - DNA, 26 bp, Homo sapiens
taaatatgtgcttatattttatattt

SEQ ID NO: 102810 - DNA, 26 bp, Homo sapiens
aaatatgtgcttatattttatattta

SEQ ID NO: 102811 - DNA, 26 bp, Homo sapiens
aatatgtgcttatattttatatttat

SEQ ID NO: 102812 - DNA, 26 bp, Homo sapiens
atatgtgcttatattttatatttatt

SEQ ID NO: 102813 - DNA, 26 bp, Homo sapiens
tatgtgcttatattttatatttattg

SEQ ID NO: 102814 - DNA, 26 bp, Homo sapiens
atgtgcttatattttatatttattga

SEQ ID NO: 102815 - DNA, 26 bp, Homo sapiens
tgtgcttatattttatatttattgat

SEQ ID NO: 102816 - DNA, 26 bp, Homo sapiens
gtgcttatattttatatttattgatt

SEQ ID NO: 102817 - DNA, 26 bp, Homo sapiens
tgcttatattttatatttattgattt

SEQ ID NO: 102818 - DNA, 26 bp, Homo sapiens
gcttatattttatatttattgatttc

SEQ ID NO: 102819 - DNA, 26 bp, Homo sapiens
cttatattttatatttattgatttct

SEQ ID NO: 102820 - DNA, 26 bp, Homo sapiens
ttatattttatatttattgatttctt

SEQ ID NO: 102821 - DNA, 26 bp, Homo sapiens
tatattttatatttattgatttcttc

SEQ ID NO: 102822 - DNA, 26 bp, Homo sapiens
atattttatatttattgatttcttcc

SEQ ID NO: 102823 - DNA, 26 bp, Homo sapiens
tattttatatttattgatttcttcct

SEQ ID NO: 102824 - DNA, 26 bp, Homo sapiens
attttatatttattgatttcttcctt

SEQ ID NO: 102825 - DNA, 26 bp, Homo sapiens
ttttatatttattgatttcttcctta

SEQ ID NO: 102826 - DNA, 26 bp, Homo sapiens
tttatatttattgatttcttccttaa

SEQ ID NO: 102827 - DNA, 26 bp, Homo sapiens
ttatatttattgatttcttccttaaa

SEQ ID NO: 102828 - DNA, 26 bp, Homo sapiens
tatatttattgatttcttccttaaat

SEQ ID NO: 102829 - DNA, 26 bp, Homo sapiens
atatttattgatttcttccttaaatc

SEQ ID NO: 102830 - DNA, 26 bp, Homo sapiens
tatttattgatttcttccttaaatcc

SEQ ID NO: 102831 - DNA, 26 bp, Homo sapiens
atttattgatttcttccttaaatcca

SEQ ID NO: 102832 - DNA, 26 bp, Homo sapiens
tttattgatttcttccttaaatccaa

SEQ ID NO: 102833 - DNA, 26 bp, Homo sapiens
ttattgatttcttccttaaatccaaa

SEQ ID NO: 102834 - DNA, 26 bp, Homo sapiens
tattgatttcttccttaaatccaaat

SEQ ID NO: 102835 - DNA, 26 bp, Homo sapiens
attgatttcttccttaaatccaaatt

SEQ ID NO: 102836 - DNA, 26 bp, Homo sapiens
ttgatttcttccttaaatccaaatta

SEQ ID NO: 102837 - DNA, 26 bp, Homo sapiens
tgatttcttccttaaatccaaattaa

SEQ ID NO: 102838 - DNA, 26 bp, Homo sapiens
gatttcttccttaaatccaaattaag

SEQ ID NO: 102839 - DNA, 26 bp, Homo sapiens
atttcttccttaaatccaaattaaga

SEQ ID NO: 102840 - DNA, 26 bp, Homo sapiens
tttcttccttaaatccaaattaagat

SEQ ID NO: 102841 - DNA, 26 bp, Homo sapiens
ttcttccttaaatccaaattaagatt

SEQ ID NO: 102842 - DNA, 26 bp, Homo sapiens
tcttccttaaatccaaattaagattt

SEQ ID NO: 102843 - DNA, 26 bp, Homo sapiens
cttccttaaatccaaattaagatttg

SEQ ID NO: 102844 - DNA, 26 bp, Homo sapiens
ttccttaaatccaaattaagatttgg

SEQ ID NO: 102845 - DNA, 26 bp, Homo sapiens
tccttaaatccaaattaagatttgga

SEQ ID NO: 102846 - DNA, 26 bp, Homo sapiens
ccttaaatccaaattaagatttggaa

SEQ ID NO: 102847 - DNA, 26 bp, Homo sapiens
cttaaatccaaattaagatttggaaa

SEQ ID NO: 102848 - DNA, 26 bp, Homo sapiens
ttaaatccaaattaagatttggaaaa

SEQ ID NO: 102849 - DNA, 26 bp, Homo sapiens
taaatccaaattaagatttggaaaat

SEQ ID NO: 102850 - DNA, 26 bp, Homo sapiens
aaatccaaattaagatttggaaaata

SEQ ID NO: 102851 - DNA, 26 bp, Homo sapiens
aatccaaattaagatttggaaaatat

SEQ ID NO: 102852 - DNA, 26 bp, Homo sapiens
atccaaattaagatttggaaaatatg

SEQ ID NO: 102853 - DNA, 26 bp, Homo sapiens
tccaaattaagatttggaaaatatga

SEQ ID NO: 102854 - DNA, 26 bp, Homo sapiens
ccaaattaagatttggaaaatatgaa

SEQ ID NO: 102855 - DNA, 26 bp, Homo sapiens
caaattaagatttggaaaatatgaag

SEQ ID NO: 102856 - DNA, 26 bp, Homo sapiens
aaattaagatttggaaaatatgaagt

SEQ ID NO: 102857 - DNA, 26 bp, Homo sapiens
aattaagatttggaaaatatgaagtg

SEQ ID NO: 102858 - DNA, 26 bp, Homo sapiens
attaagatttggaaaatatgaagtgt

SEQ ID NO: 102859 - DNA, 26 bp, Homo sapiens
ttaagatttggaaaatatgaagtgtt

SEQ ID NO: 102860 - DNA, 26 bp, Homo sapiens
taagatttggaaaatatgaagtgtta

SEQ ID NO: 102861 - DNA, 26 bp, Homo sapiens
aagatttggaaaatatgaagtgttat

SEQ ID NO: 102862 - DNA, 26 bp, Homo sapiens
agatttggaaaatatgaagtgttata

SEQ ID NO: 102863 - DNA, 26 bp, Homo sapiens
gatttggaaaatatgaagtgttatag

SEQ ID NO: 102864 - DNA, 26 bp, Homo sapiens
atttggaaaatatgaagtgttatagt

SEQ ID NO: 102865 - DNA, 26 bp, Homo sapiens
tttggaaaatatgaagtgttatagtg

SEQ ID NO: 102866 - DNA, 26 bp, Homo sapiens
ttggaaaatatgaagtgttatagtgt

SEQ ID NO: 102867 - DNA, 26 bp, Homo sapiens
tggaaaatatgaagtgttatagtgtt

SEQ ID NO: 102868 - DNA, 26 bp, Homo sapiens
ggaaaatatgaagtgttatagtgtta

SEQ ID NO: 102869 - DNA, 26 bp, Homo sapiens
gaaaatatgaagtgttatagtgttat

SEQ ID NO: 102870 - DNA, 26 bp, Homo sapiens
aaaatatgaagtgttatagtgttata

SEQ ID NO: 102871 - DNA, 26 bp, Homo sapiens
aaatatgaagtgttatagtgttatat

SEQ ID NO: 102872 - DNA, 26 bp, Homo sapiens
aatatgaagtgttatagtgttatatt

SEQ ID NO: 102873 - DNA, 26 bp, Homo sapiens
atatgaagtgttatagtgttatattc

SEQ ID NO: 102874 - DNA, 26 bp, Homo sapiens
tatgaagtgttatagtgttatattca

SEQ ID NO: 102875 - DNA, 26 bp, Homo sapiens
atgaagtgttatagtgttatattcat

SEQ ID NO: 102876 - DNA, 26 bp, Homo sapiens
tgaagtgttatagtgttatattcatt

SEQ ID NO: 102877 - DNA, 26 bp, Homo sapiens
gaagtgttatagtgttatattcattt

SEQ ID NO: 102878 - DNA, 26 bp, Homo sapiens
aagtgttatagtgttatattcatttg

SEQ ID NO: 102879 - DNA, 26 bp, Homo sapiens
agtgttatagtgttatattcatttgt

SEQ ID NO: 102880 - DNA, 26 bp, Homo sapiens
gtgttatagtgttatattcatttgtt

SEQ ID NO: 102881 - DNA, 26 bp, Homo sapiens
tgttatagtgttatattcatttgttg

SEQ ID NO: 102882 - DNA, 26 bp, Homo sapiens
gttatagtgttatattcatttgttgt

SEQ ID NO: 102883 - DNA, 26 bp, Homo sapiens
ttatagtgttatattcatttgttgta

SEQ ID NO: 102884 - DNA, 26 bp, Homo sapiens
tatagtgttatattcatttgttgtat

SEQ ID NO: 102885 - DNA, 26 bp, Homo sapiens
atagtgttatattcatttgttgtatc

SEQ ID NO: 102886 - DNA, 26 bp, Homo sapiens
tagtgttatattcatttgttgtatct

SEQ ID NO: 102887 - DNA, 26 bp, Homo sapiens
agtgttatattcatttgttgtatctc

SEQ ID NO: 102888 - DNA, 26 bp, Homo sapiens
gtgttatattcatttgttgtatctct

SEQ ID NO: 102889 - DNA, 26 bp, Homo sapiens
tgttatattcatttgttgtatctcta

SEQ ID NO: 102890 - DNA, 26 bp, Homo sapiens
gttatattcatttgttgtatctctac

SEQ ID NO: 102891 - DNA, 26 bp, Homo sapiens
ttatattcatttgttgtatctctacc

SEQ ID NO: 102892 - DNA, 26 bp, Homo sapiens
tatattcatttgttgtatctctacct

SEQ ID NO: 102893 - DNA, 26 bp, Homo sapiens
atattcatttgttgtatctctaccta

SEQ ID NO: 102894 - DNA, 26 bp, Homo sapiens
tattcatttgttgtatctctacctat

SEQ ID NO: 102895 - DNA, 26 bp, Homo sapiens
attcatttgttgtatctctacctatt

SEQ ID NO: 102896 - DNA, 26 bp, Homo sapiens
ttcatttgttgtatctctacctattg

SEQ ID NO: 102897 - DNA, 26 bp, Homo sapiens
tcatttgttgtatctctacctattgc

SEQ ID NO: 102898 - DNA, 26 bp, Homo sapiens
catttgttgtatctctacctattgcc

SEQ ID NO: 102899 - DNA, 26 bp, Homo sapiens
atttgttgtatctctacctattgcca

SEQ ID NO: 102900 - DNA, 26 bp, Homo sapiens
tttgttgtatctctacctattgccat

SEQ ID NO: 102901 - DNA, 26 bp, Homo sapiens
ttgttgtatctctacctattgccatt

SEQ ID NO: 102902 - DNA, 26 bp, Homo sapiens
tgttgtatctctacctattgccatta

SEQ ID NO: 102903 - DNA, 26 bp, Homo sapiens
gttgtatctctacctattgccattat

SEQ ID NO: 102904 - DNA, 26 bp, Homo sapiens
ttgtatctctacctattgccattata

SEQ ID NO: 102905 - DNA, 26 bp, Homo sapiens
tgtatctctacctattgccattatat

SEQ ID NO: 102906 - DNA, 26 bp, Homo sapiens
gtatctctacctattgccattatatt

SEQ ID NO: 102907 - DNA, 26 bp, Homo sapiens
tatctctacctattgccattatattg

SEQ ID NO: 102908 - DNA, 26 bp, Homo sapiens
atctctacctattgccattatattgt

SEQ ID NO: 102909 - DNA, 26 bp, Homo sapiens
tctctacctattgccattatattgtt

SEQ ID NO: 102910 - DNA, 26 bp, Homo sapiens
ctctacctattgccattatattgtta

SEQ ID NO: 102911 - DNA, 26 bp, Homo sapiens
tctacctattgccattatattgttaa

SEQ ID NO: 102912 - DNA, 26 bp, Homo sapiens
ctacctattgccattatattgttaat

SEQ ID NO: 102913 - DNA, 26 bp, Homo sapiens
tacctattgccattatattgttaatt

SEQ ID NO: 102914 - DNA, 26 bp, Homo sapiens
acctattgccattatattgttaattt

SEQ ID NO: 102915 - DNA, 26 bp, Homo sapiens
cctattgccattatattgttaatttt

SEQ ID NO: 102916 - DNA, 26 bp, Homo sapiens
ctattgccattatattgttaattttt

SEQ ID NO: 102917 - DNA, 26 bp, Homo sapiens
tattgccattatattgttaatttttt

SEQ ID NO: 102918 - DNA, 26 bp, Homo sapiens
attgccattatattgttaattttttt

SEQ ID NO: 102919 - DNA, 26 bp, Homo sapiens
ttgccattatattgttaattttttta

SEQ ID NO: 102920 - DNA, 26 bp, Homo sapiens
tgccattatattgttaatttttttat

SEQ ID NO: 102921 - DNA, 26 bp, Homo sapiens
gccattatattgttaatttttttata

SEQ ID NO: 102922 - DNA, 26 bp, Homo sapiens
ccattatattgttaatttttttatac

SEQ ID NO: 102923 - DNA, 26 bp, Homo sapiens
cattatattgttaatttttttataca

SEQ ID NO: 102924 - DNA, 26 bp, Homo sapiens
attatattgttaatttttttatacaa

SEQ ID NO: 102925 - DNA, 26 bp, Homo sapiens
ttatattgttaatttttttatacaac

SEQ ID NO: 102926 - DNA, 26 bp, Homo sapiens
tatattgttaatttttttatacaaca

SEQ ID NO: 102927 - DNA, 26 bp, Homo sapiens
atattgttaatttttttatacaacac

SEQ ID NO: 102928 - DNA, 26 bp, Homo sapiens
tattgttaatttttttatacaacacg

SEQ ID NO: 102929 - DNA, 26 bp, Homo sapiens
attgttaatttttttatacaacacga

SEQ ID NO: 102930 - DNA, 26 bp, Homo sapiens
ttgttaatttttttatacaacacgat

SEQ ID NO: 102931 - DNA, 26 bp, Homo sapiens
tgttaatttttttatacaacacgata

SEQ ID NO: 102932 - DNA, 26 bp, Homo sapiens
gttaatttttttatacaacacgataa

SEQ ID NO: 102933 - DNA, 26 bp, Homo sapiens
ttaatttttttatacaacacgataaa

SEQ ID NO: 102934 - DNA, 26 bp, Homo sapiens
taatttttttatacaacacgataaag

SEQ ID NO: 102935 - DNA, 26 bp, Homo sapiens
aatttttttatacaacacgataaagc

SEQ ID NO: 102936 - DNA, 26 bp, Homo sapiens
atttttttatacaacacgataaagct

SEQ ID NO: 102937 - DNA, 26 bp, Homo sapiens
tttttttatacaacacgataaagctt

SEQ ID NO: 102938 - DNA, 26 bp, Homo sapiens
ttttttatacaacacgataaagcttt

SEQ ID NO: 102939 - DNA, 26 bp, Homo sapiens
tttttatacaacacgataaagctttg

SEQ ID NO: 102940 - DNA, 26 bp, Homo sapiens
ttttatacaacacgataaagctttgt

SEQ ID NO: 102941 - DNA, 26 bp, Homo sapiens
tttatacaacacgataaagctttgtg

SEQ ID NO: 102942 - DNA, 26 bp, Homo sapiens
ttatacaacacgataaagctttgtga

SEQ ID NO: 102943 - DNA, 26 bp, Homo sapiens
tatacaacacgataaagctttgtgat

SEQ ID NO: 102944 - DNA, 26 bp, Homo sapiens
atacaacacgataaagctttgtgatt

SEQ ID NO: 102945 - DNA, 26 bp, Homo sapiens
tacaacacgataaagctttgtgatta

SEQ ID NO: 102946 - DNA, 26 bp, Homo sapiens
acaacacgataaagctttgtgattat

SEQ ID NO: 102947 - DNA, 26 bp, Homo sapiens
caacacgataaagctttgtgattatg

SEQ ID NO: 102948 - DNA, 26 bp, Homo sapiens
aacacgataaagctttgtgattatgt

SEQ ID NO: 102949 - DNA, 26 bp, Homo sapiens
acacgataaagctttgtgattatgtt

SEQ ID NO: 102950 - DNA, 26 bp, Homo sapiens
cacgataaagctttgtgattatgttt

SEQ ID NO: 102951 - DNA, 26 bp, Homo sapiens
acgataaagctttgtgattatgtttt

SEQ ID NO: 102952 - DNA, 26 bp, Homo sapiens
cgataaagctttgtgattatgtttta

SEQ ID NO: 102953 - DNA, 26 bp, Homo sapiens
gataaagctttgtgattatgttttag

SEQ ID NO: 102954 - DNA, 26 bp, Homo sapiens
ataaagctttgtgattatgttttagc

SEQ ID NO: 102955 - DNA, 26 bp, Homo sapiens
taaagctttgtgattatgttttagct

SEQ ID NO: 102956 - DNA, 26 bp, Homo sapiens
aaagctttgtgattatgttttagcta

SEQ ID NO: 102957 - DNA, 26 bp, Homo sapiens
aagctttgtgattatgttttagctag

SEQ ID NO: 102958 - DNA, 26 bp, Homo sapiens
agctttgtgattatgttttagctagt

SEQ ID NO: 102959 - DNA, 26 bp, Homo sapiens
gctttgtgattatgttttagctagta

SEQ ID NO: 102960 - DNA, 26 bp, Homo sapiens
ctttgtgattatgttttagctagtaa

SEQ ID NO: 102961 - DNA, 26 bp, Homo sapiens
tttgtgattatgttttagctagtaaa

SEQ ID NO: 102962 - DNA, 26 bp, Homo sapiens
ttgtgattatgttttagctagtaaaa

SEQ ID NO: 102963 - DNA, 26 bp, Homo sapiens
tgtgattatgttttagctagtaaaag

SEQ ID NO: 102964 - DNA, 26 bp, Homo sapiens
gtgattatgttttagctagtaaaagt

SEQ ID NO: 102965 - DNA, 26 bp, Homo sapiens
tgattatgttttagctagtaaaagtg

SEQ ID NO: 102966 - DNA, 26 bp, Homo sapiens
gattatgttttagctagtaaaagtgt

SEQ ID NO: 102967 - DNA, 26 bp, Homo sapiens
attatgttttagctagtaaaagtgta

SEQ ID NO: 102968 - DNA, 26 bp, Homo sapiens
ttatgttttagctagtaaaagtgtaa

SEQ ID NO: 102969 - DNA, 26 bp, Homo sapiens
tatgttttagctagtaaaagtgtaaa

SEQ ID NO: 102970 - DNA, 26 bp, Homo sapiens
atgttttagctagtaaaagtgtaaaa

SEQ ID NO: 102971 - DNA, 26 bp, Homo sapiens
tgttttagctagtaaaagtgtaaaat

SEQ ID NO: 102972 - DNA, 26 bp, Homo sapiens
gttttagctagtaaaagtgtaaaatt

SEQ ID NO: 102973 - DNA, 26 bp, Homo sapiens
ttttagctagtaaaagtgtaaaattt

SEQ ID NO: 102974 - DNA, 26 bp, Homo sapiens
tttagctagtaaaagtgtaaaatttt

SEQ ID NO: 102975 - DNA, 26 bp, Homo sapiens
ttagctagtaaaagtgtaaaatttta

SEQ ID NO: 102976 - DNA, 26 bp, Homo sapiens
tagctagtaaaagtgtaaaattttaa

SEQ ID NO: 102977 - DNA, 26 bp, Homo sapiens
agctagtaaaagtgtaaaattttaat

SEQ ID NO: 102978 - DNA, 26 bp, Homo sapiens
gctagtaaaagtgtaaaattttaata

SEQ ID NO: 102979 - DNA, 26 bp, Homo sapiens
ctagtaaaagtgtaaaattttaatat

SEQ ID NO: 102980 - DNA, 26 bp, Homo sapiens
tagtaaaagtgtaaaattttaatatt

SEQ ID NO: 102981 - DNA, 26 bp, Homo sapiens
agtaaaagtgtaaaattttaatattt

SEQ ID NO: 102982 - DNA, 26 bp, Homo sapiens
gtaaaagtgtaaaattttaatatttc

SEQ ID NO: 102983 - DNA, 26 bp, Homo sapiens
taaaagtgtaaaattttaatatttcc

SEQ ID NO: 102984 - DNA, 26 bp, Homo sapiens
aaaagtgtaaaattttaatatttcca

SEQ ID NO: 102985 - DNA, 26 bp, Homo sapiens
aaagtgtaaaattttaatatttccat

SEQ ID NO: 102986 - DNA, 26 bp, Homo sapiens
aagtgtaaaattttaatatttccatg

SEQ ID NO: 102987 - DNA, 26 bp, Homo sapiens
agtgtaaaattttaatatttccatgt

SEQ ID NO: 102988 - DNA, 26 bp, Homo sapiens
gtgtaaaattttaatatttccatgtt

SEQ ID NO: 102989 - DNA, 26 bp, Homo sapiens
tgtaaaattttaatatttccatgttt

SEQ ID NO: 102990 - DNA, 26 bp, Homo sapiens
gtaaaattttaatatttccatgtttt

SEQ ID NO: 102991 - DNA, 26 bp, Homo sapiens
taaaattttaatatttccatgttttc

SEQ ID NO: 102992 - DNA, 26 bp, Homo sapiens
aaaattttaatatttccatgttttcc

SEQ ID NO: 102993 - DNA, 26 bp, Homo sapiens
aaattttaatatttccatgttttcca

SEQ ID NO: 102994 - DNA, 26 bp, Homo sapiens
aattttaatatttccatgttttccaa

SEQ ID NO: 102995 - DNA, 26 bp, Homo sapiens
attttaatatttccatgttttccaat

SEQ ID NO: 102996 - DNA, 26 bp, Homo sapiens
ttttaatatttccatgttttccaata

SEQ ID NO: 102997 - DNA, 26 bp, Homo sapiens
tttaatatttccatgttttccaatat

SEQ ID NO: 102998 - DNA, 26 bp, Homo sapiens
ttaatatttccatgttttccaatata

SEQ ID NO: 102999 - DNA, 26 bp, Homo sapiens
taatatttccatgttttccaatataa

SEQ ID NO: 103000 - DNA, 26 bp, Homo sapiens
aatatttccatgttttccaatataac

SEQ ID NO: 103001 - DNA, 26 bp, Homo sapiens
atatttccatgttttccaatataact

SEQ ID NO: 103002 - DNA, 26 bp, Homo sapiens
tatttccatgttttccaatataactt

SEQ ID NO: 103003 - DNA, 26 bp, Homo sapiens
atttccatgttttccaatataacttt

SEQ ID NO: 103004 - DNA, 26 bp, Homo sapiens
tttccatgttttccaatataactttt

SEQ ID NO: 103005 - DNA, 26 bp, Homo sapiens
ttccatgttttccaatataactttta

SEQ ID NO: 103006 - DNA, 26 bp, Homo sapiens
tccatgttttccaatataacttttag

SEQ ID NO: 103007 - DNA, 26 bp, Homo sapiens
ccatgttttccaatataacttttaga

SEQ ID NO: 103008 - DNA, 26 bp, Homo sapiens
catgttttccaatataacttttagat

SEQ ID NO: 103009 - DNA, 26 bp, Homo sapiens
atgttttccaatataacttttagatt

SEQ ID NO: 103010 - DNA, 26 bp, Homo sapiens
tgttttccaatataacttttagattg

SEQ ID NO: 103011 - DNA, 26 bp, Homo sapiens
gttttccaatataacttttagattgt

SEQ ID NO: 103012 - DNA, 26 bp, Homo sapiens
ttttccaatataacttttagattgta

SEQ ID NO: 103013 - DNA, 26 bp, Homo sapiens
tttccaatataacttttagattgtac

SEQ ID NO: 103014 - DNA, 26 bp, Homo sapiens
ttccaatataacttttagattgtact

SEQ ID NO: 103015 - DNA, 26 bp, Homo sapiens
tccaatataacttttagattgtactt

SEQ ID NO: 103016 - DNA, 26 bp, Homo sapiens
ccaatataacttttagattgtacttg

SEQ ID NO: 103017 - DNA, 26 bp, Homo sapiens
caatataacttttagattgtacttgt

SEQ ID NO: 103018 - DNA, 26 bp, Homo sapiens
aatataacttttagattgtacttgtg

SEQ ID NO: 103019 - DNA, 26 bp, Homo sapiens
atataacttttagattgtacttgtgt

SEQ ID NO: 103020 - DNA, 26 bp, Homo sapiens
tataacttttagattgtacttgtgtc

SEQ ID NO: 103021 - DNA, 26 bp, Homo sapiens
ataacttttagattgtacttgtgtca

SEQ ID NO: 103022 - DNA, 26 bp, Homo sapiens
taacttttagattgtacttgtgtcac

SEQ ID NO: 103023 - DNA, 26 bp, Homo sapiens
aacttttagattgtacttgtgtcaca

SEQ ID NO: 103024 - DNA, 26 bp, Homo sapiens
acttttagattgtacttgtgtcacaa

SEQ ID NO: 103025 - DNA, 26 bp, Homo sapiens
cttttagattgtacttgtgtcacaaa

SEQ ID NO: 103026 - DNA, 26 bp, Homo sapiens
ttttagattgtacttgtgtcacaaaa

SEQ ID NO: 103027 - DNA, 26 bp, Homo sapiens
tttagattgtacttgtgtcacaaaaa

SEQ ID NO: 103028 - DNA, 26 bp, Homo sapiens
ttagattgtacttgtgtcacaaaaag

SEQ ID NO: 103029 - DNA, 26 bp, Homo sapiens
tagattgtacttgtgtcacaaaaaga

SEQ ID NO: 103030 - DNA, 26 bp, Homo sapiens
agattgtacttgtgtcacaaaaagag

SEQ ID NO: 103031 - DNA, 26 bp, Homo sapiens
gattgtacttgtgtcacaaaaagagg

SEQ ID NO: 103032 - DNA, 26 bp, Homo sapiens
attgtacttgtgtcacaaaaagaggg

SEQ ID NO: 103033 - DNA, 26 bp, Homo sapiens
ttgtacttgtgtcacaaaaagaggga

SEQ ID NO: 103034 - DNA, 26 bp, Homo sapiens
tgtacttgtgtcacaaaaagagggat

SEQ ID NO: 103035 - DNA, 26 bp, Homo sapiens
gtacttgtgtcacaaaaagagggatt

SEQ ID NO: 103036 - DNA, 26 bp, Homo sapiens
tacttgtgtcacaaaaagagggatta

SEQ ID NO: 103037 - DNA, 26 bp, Homo sapiens
acttgtgtcacaaaaagagggattaa

SEQ ID NO: 103038 - DNA, 26 bp, Homo sapiens
cttgtgtcacaaaaagagggattaat

SEQ ID NO: 103039 - DNA, 26 bp, Homo sapiens
ttgtgtcacaaaaagagggattaatc

SEQ ID NO: 103040 - DNA, 26 bp, Homo sapiens
tgtgtcacaaaaagagggattaatct

SEQ ID NO: 103041 - DNA, 26 bp, Homo sapiens
gtgtcacaaaaagagggattaatctg

SEQ ID NO: 103042 - DNA, 26 bp, Homo sapiens
tgtcacaaaaagagggattaatctgc

SEQ ID NO: 103043 - DNA, 26 bp, Homo sapiens
gtcacaaaaagagggattaatctgct

SEQ ID NO: 103044 - DNA, 26 bp, Homo sapiens
tcacaaaaagagggattaatctgctt

SEQ ID NO: 103045 - DNA, 26 bp, Homo sapiens
cacaaaaagagggattaatctgcttg

SEQ ID NO: 103046 - DNA, 26 bp, Homo sapiens
acaaaaagagggattaatctgcttgt

SEQ ID NO: 103047 - DNA, 26 bp, Homo sapiens
caaaaagagggattaatctgcttgta

SEQ ID NO: 103048 - DNA, 26 bp, Homo sapiens
aaaaagagggattaatctgcttgtaa

SEQ ID NO: 103049 - DNA, 26 bp, Homo sapiens
aaaagagggattaatctgcttgtaat

SEQ ID NO: 103050 - DNA, 26 bp, Homo sapiens
aaagagggattaatctgcttgtaata

SEQ ID NO: 103051 - DNA, 26 bp, Homo sapiens
aagagggattaatctgcttgtaataa

SEQ ID NO: 103052 - DNA, 26 bp, Homo sapiens
agagggattaatctgcttgtaataat

SEQ ID NO: 103053 - DNA, 26 bp, Homo sapiens
gagggattaatctgcttgtaataatt

SEQ ID NO: 103054 - DNA, 26 bp, Homo sapiens
agggattaatctgcttgtaataattt

SEQ ID NO: 103055 - DNA, 26 bp, Homo sapiens
gggattaatctgcttgtaataatttc

SEQ ID NO: 103056 - DNA, 26 bp, Homo sapiens
ggattaatctgcttgtaataatttcc

SEQ ID NO: 103057 - DNA, 26 bp, Homo sapiens
gattaatctgcttgtaataatttcca

SEQ ID NO: 103058 - DNA, 26 bp, Homo sapiens
attaatctgcttgtaataatttccat

SEQ ID NO: 103059 - DNA, 26 bp, Homo sapiens
ttaatctgcttgtaataatttccatt

SEQ ID NO: 103060 - DNA, 26 bp, Homo sapiens
taatctgcttgtaataatttccattg

SEQ ID NO: 103061 - DNA, 26 bp, Homo sapiens
aatctgcttgtaataatttccattga

SEQ ID NO: 103062 - DNA, 26 bp, Homo sapiens
atctgcttgtaataatttccattgaa

SEQ ID NO: 103063 - DNA, 26 bp, Homo sapiens
tctgcttgtaataatttccattgaag

SEQ ID NO: 103064 - DNA, 26 bp, Homo sapiens
ctgcttgtaataatttccattgaagt

SEQ ID NO: 103065 - DNA, 26 bp, Homo sapiens
tgcttgtaataatttccattgaagtt

SEQ ID NO: 103066 - DNA, 26 bp, Homo sapiens
gcttgtaataatttccattgaagttg

SEQ ID NO: 103067 - DNA, 26 bp, Homo sapiens
cttgtaataatttccattgaagttgt

SEQ ID NO: 103068 - DNA, 26 bp, Homo sapiens
ttgtaataatttccattgaagttgta

SEQ ID NO: 103069 - DNA, 26 bp, Homo sapiens
tgtaataatttccattgaagttgtag

SEQ ID NO: 103070 - DNA, 26 bp, Homo sapiens
gtaataatttccattgaagttgtaga

SEQ ID NO: 103071 - DNA, 26 bp, Homo sapiens
taataatttccattgaagttgtagaa

SEQ ID NO: 103072 - DNA, 26 bp, Homo sapiens
aataatttccattgaagttgtagaat

SEQ ID NO: 103073 - DNA, 26 bp, Homo sapiens
ataatttccattgaagttgtagaata

SEQ ID NO: 103074 - DNA, 26 bp, Homo sapiens
taatttccattgaagttgtagaatac

SEQ ID NO: 103075 - DNA, 26 bp, Homo sapiens
aatttccattgaagttgtagaatacc

SEQ ID NO: 103076 - DNA, 26 bp, Homo sapiens
atttccattgaagttgtagaataccc

SEQ ID NO: 103077 - DNA, 26 bp, Homo sapiens
tttccattgaagttgtagaataccca

SEQ ID NO: 103078 - DNA, 26 bp, Homo sapiens
ttccattgaagttgtagaatacccaa

SEQ ID NO: 103079 - DNA, 26 bp, Homo sapiens
tccattgaagttgtagaatacccaac

SEQ ID NO: 103080 - DNA, 26 bp, Homo sapiens
ccattgaagttgtagaatacccaaca

SEQ ID NO: 103081 - DNA, 26 bp, Homo sapiens
cattgaagttgtagaatacccaacag

SEQ ID NO: 103082 - DNA, 26 bp, Homo sapiens
attgaagttgtagaatacccaacagt

SEQ ID NO: 103083 - DNA, 26 bp, Homo sapiens
ttgaagttgtagaatacccaacagtt

SEQ ID NO: 103084 - DNA, 26 bp, Homo sapiens
tgaagttgtagaatacccaacagttt

SEQ ID NO: 103085 - DNA, 26 bp, Homo sapiens
gaagttgtagaatacccaacagtttt

SEQ ID NO: 103086 - DNA, 26 bp, Homo sapiens
aagttgtagaatacccaacagtttta

SEQ ID NO: 103087 - DNA, 26 bp, Homo sapiens
agttgtagaatacccaacagttttat

SEQ ID NO: 103088 - DNA, 26 bp, Homo sapiens
gttgtagaatacccaacagttttata

SEQ ID NO: 103089 - DNA, 26 bp, Homo sapiens
ttgtagaatacccaacagttttatat

SEQ ID NO: 103090 - DNA, 26 bp, Homo sapiens
tgtagaatacccaacagttttatatc

SEQ ID NO: 103091 - DNA, 26 bp, Homo sapiens
gtagaatacccaacagttttatatcc

SEQ ID NO: 103092 - DNA, 26 bp, Homo sapiens
tagaatacccaacagttttatatcca

SEQ ID NO: 103093 - DNA, 26 bp, Homo sapiens
agaatacccaacagttttatatccac

SEQ ID NO: 103094 - DNA, 26 bp, Homo sapiens
gaatacccaacagttttatatccaca

SEQ ID NO: 103095 - DNA, 26 bp, Homo sapiens
aatacccaacagttttatatccacaa

SEQ ID NO: 103096 - DNA, 26 bp, Homo sapiens
atacccaacagttttatatccacaat

SEQ ID NO: 103097 - DNA, 26 bp, Homo sapiens
tacccaacagttttatatccacaatg

SEQ ID NO: 103098 - DNA, 26 bp, Homo sapiens
acccaacagttttatatccacaatgc

SEQ ID NO: 103099 - DNA, 26 bp, Homo sapiens
cccaacagttttatatccacaatgcc

SEQ ID NO: 103100 - DNA, 26 bp, Homo sapiens
ccaacagttttatatccacaatgcct

SEQ ID NO: 103101 - DNA, 26 bp, Homo sapiens
caacagttttatatccacaatgccta

SEQ ID NO: 103102 - DNA, 26 bp, Homo sapiens
aacagttttatatccacaatgcctag

SEQ ID NO: 103103 - DNA, 26 bp, Homo sapiens
acagttttatatccacaatgcctaga

SEQ ID NO: 103104 - DNA, 26 bp, Homo sapiens
cagttttatatccacaatgcctagat

SEQ ID NO: 103105 - DNA, 26 bp, Homo sapiens
agttttatatccacaatgcctagata

SEQ ID NO: 103106 - DNA, 26 bp, Homo sapiens
gttttatatccacaatgcctagatat

SEQ ID NO: 103107 - DNA, 26 bp, Homo sapiens
ttttatatccacaatgcctagatatt

SEQ ID NO: 103108 - DNA, 26 bp, Homo sapiens
tttatatccacaatgcctagatattt

SEQ ID NO: 103109 - DNA, 26 bp, Homo sapiens
ttatatccacaatgcctagatatttt

SEQ ID NO: 103110 - DNA, 26 bp, Homo sapiens
tatatccacaatgcctagatattttt

SEQ ID NO: 103111 - DNA, 26 bp, Homo sapiens
atatccacaatgcctagatatttttt

SEQ ID NO: 103112 - DNA, 26 bp, Homo sapiens
tatccacaatgcctagatatttttta

SEQ ID NO: 103113 - DNA, 26 bp, Homo sapiens
atccacaatgcctagatattttttat

SEQ ID NO: 103114 - DNA, 26 bp, Homo sapiens
tccacaatgcctagatattttttata

SEQ ID NO: 103115 - DNA, 26 bp, Homo sapiens
ccacaatgcctagatattttttataa

SEQ ID NO: 103116 - DNA, 26 bp, Homo sapiens
cacaatgcctagatattttttataat

SEQ ID NO: 103117 - DNA, 26 bp, Homo sapiens
acaatgcctagatattttttataatg

SEQ ID NO: 103118 - DNA, 26 bp, Homo sapiens
caatgcctagatattttttataatga

SEQ ID NO: 103119 - DNA, 26 bp, Homo sapiens
aatgcctagatattttttataatgaa

SEQ ID NO: 103120 - DNA, 26 bp, Homo sapiens
atgcctagatattttttataatgaac

SEQ ID NO: 103121 - DNA, 26 bp, Homo sapiens
tgcctagatattttttataatgaact

SEQ ID NO: 103122 - DNA, 26 bp, Homo sapiens
gcctagatattttttataatgaacta

SEQ ID NO: 103123 - DNA, 26 bp, Homo sapiens
cctagatattttttataatgaactag

SEQ ID NO: 103124 - DNA, 26 bp, Homo sapiens
ctagatattttttataatgaactagg

SEQ ID NO: 103125 - DNA, 26 bp, Homo sapiens
tagatattttttataatgaactaggg

SEQ ID NO: 103126 - DNA, 26 bp, Homo sapiens
agatattttttataatgaactagggt

SEQ ID NO: 103127 - DNA, 26 bp, Homo sapiens
gatattttttataatgaactagggta

SEQ ID NO: 103128 - DNA, 26 bp, Homo sapiens
atattttttataatgaactagggtaa

SEQ ID NO: 103129 - DNA, 26 bp, Homo sapiens
tattttttataatgaactagggtaag

SEQ ID NO: 103130 - DNA, 26 bp, Homo sapiens
attttttataatgaactagggtaagt

SEQ ID NO: 103131 - DNA, 26 bp, Homo sapiens
ttttttataatgaactagggtaagtg

SEQ ID NO: 103132 - DNA, 26 bp, Homo sapiens
tttttataatgaactagggtaagtga

SEQ ID NO: 103133 - DNA, 26 bp, Homo sapiens
ttttataatgaactagggtaagtgaa

SEQ ID NO: 103134 - DNA, 26 bp, Homo sapiens
tttataatgaactagggtaagtgaat

SEQ ID NO: 103135 - DNA, 26 bp, Homo sapiens
ttataatgaactagggtaagtgaata

SEQ ID NO: 103136 - DNA, 26 bp, Homo sapiens
tataatgaactagggtaagtgaatac

SEQ ID NO: 103137 - DNA, 26 bp, Homo sapiens
ataatgaactagggtaagtgaataca

SEQ ID NO: 103138 - DNA, 26 bp, Homo sapiens
taatgaactagggtaagtgaatacac

SEQ ID NO: 103139 - DNA, 26 bp, Homo sapiens
aatgaactagggtaagtgaatacact

SEQ ID NO: 103140 - DNA, 26 bp, Homo sapiens
atgaactagggtaagtgaatacacta

SEQ ID NO: 103141 - DNA, 26 bp, Homo sapiens
tgaactagggtaagtgaatacactag

SEQ ID NO: 103142 - DNA, 26 bp, Homo sapiens
gaactagggtaagtgaatacactagt

SEQ ID NO: 103143 - DNA, 26 bp, Homo sapiens
aactagggtaagtgaatacactagtt

SEQ ID NO: 103144 - DNA, 26 bp, Homo sapiens
actagggtaagtgaatacactagttt

SEQ ID NO: 103145 - DNA, 26 bp, Homo sapiens
ctagggtaagtgaatacactagtttt

SEQ ID NO: 103146 - DNA, 26 bp, Homo sapiens
tagggtaagtgaatacactagttttg

SEQ ID NO: 103147 - DNA, 26 bp, Homo sapiens
agggtaagtgaatacactagttttga

SEQ ID NO: 103148 - DNA, 26 bp, Homo sapiens
gggtaagtgaatacactagttttgaa

SEQ ID NO: 103149 - DNA, 26 bp, Homo sapiens
ggtaagtgaatacactagttttgaat

SEQ ID NO: 103150 - DNA, 26 bp, Homo sapiens
gtaagtgaatacactagttttgaatt

SEQ ID NO: 103151 - DNA, 26 bp, Homo sapiens
taagtgaatacactagttttgaattc

SEQ ID NO: 103152 - DNA, 26 bp, Homo sapiens
aagtgaatacactagttttgaattct

SEQ ID NO: 103153 - DNA, 26 bp, Homo sapiens
agtgaatacactagttttgaattctt

SEQ ID NO: 103154 - DNA, 26 bp, Homo sapiens
gtgaatacactagttttgaattctta

SEQ ID NO: 103155 - DNA, 26 bp, Homo sapiens
tgaatacactagttttgaattcttaa

SEQ ID NO: 103156 - DNA, 26 bp, Homo sapiens
gaatacactagttttgaattcttaaa

SEQ ID NO: 103157 - DNA, 26 bp, Homo sapiens
aatacactagttttgaattcttaaaa

SEQ ID NO: 103158 - DNA, 26 bp, Homo sapiens
atacactagttttgaattcttaaaag

SEQ ID NO: 103159 - DNA, 26 bp, Homo sapiens
tacactagttttgaattcttaaaaga

SEQ ID NO: 103160 - DNA, 26 bp, Homo sapiens
acactagttttgaattcttaaaagat

SEQ ID NO: 103161 - DNA, 26 bp, Homo sapiens
cactagttttgaattcttaaaagata

SEQ ID NO: 103162 - DNA, 26 bp, Homo sapiens
actagttttgaattcttaaaagatat

SEQ ID NO: 103163 - DNA, 26 bp, Homo sapiens
ctagttttgaattcttaaaagatata

SEQ ID NO: 103164 - DNA, 26 bp, Homo sapiens
tagttttgaattcttaaaagatatat

SEQ ID NO: 103165 - DNA, 26 bp, Homo sapiens
agttttgaattcttaaaagatatatt

SEQ ID NO: 103166 - DNA, 26 bp, Homo sapiens
gttttgaattcttaaaagatatattc

SEQ ID NO: 103167 - DNA, 26 bp, Homo sapiens
ttttgaattcttaaaagatatattca

SEQ ID NO: 103168 - DNA, 26 bp, Homo sapiens
tttgaattcttaaaagatatattcaa

SEQ ID NO: 103169 - DNA, 26 bp, Homo sapiens
ttgaattcttaaaagatatattcaat

SEQ ID NO: 103170 - DNA, 26 bp, Homo sapiens
tgaattcttaaaagatatattcaatt

SEQ ID NO: 103171 - DNA, 26 bp, Homo sapiens
gaattcttaaaagatatattcaattt

SEQ ID NO: 103172 - DNA, 26 bp, Homo sapiens
aattcttaaaagatatattcaatttg

SEQ ID NO: 103173 - DNA, 26 bp, Homo sapiens
attcttaaaagatatattcaatttga

SEQ ID NO: 103174 - DNA, 26 bp, Homo sapiens
ttcttaaaagatatattcaatttgat

SEQ ID NO: 103175 - DNA, 26 bp, Homo sapiens
tcttaaaagatatattcaatttgatt

SEQ ID NO: 103176 - DNA, 26 bp, Homo sapiens
cttaaaagatatattcaatttgattc

SEQ ID NO: 103177 - DNA, 26 bp, Homo sapiens
ttaaaagatatattcaatttgattct

SEQ ID NO: 103178 - DNA, 26 bp, Homo sapiens
taaaagatatattcaatttgattctt

SEQ ID NO: 103179 - DNA, 26 bp, Homo sapiens
aaaagatatattcaatttgattcttt

SEQ ID NO: 103180 - DNA, 26 bp, Homo sapiens
aaagatatattcaatttgattctttt

SEQ ID NO: 103181 - DNA, 26 bp, Homo sapiens
aagatatattcaatttgattcttttt

SEQ ID NO: 103182 - DNA, 26 bp, Homo sapiens
agatatattcaatttgattctttttt

SEQ ID NO: 103183 - DNA, 26 bp, Homo sapiens
gatatattcaatttgattcttttttc

SEQ ID NO: 103184 - DNA, 26 bp, Homo sapiens
atatattcaatttgattcttttttct

SEQ ID NO: 103185 - DNA, 26 bp, Homo sapiens
tatattcaatttgattcttttttctt

SEQ ID NO: 103186 - DNA, 26 bp, Homo sapiens
atattcaatttgattcttttttcttt

SEQ ID NO: 103187 - DNA, 26 bp, Homo sapiens
tattcaatttgattcttttttctttt

SEQ ID NO: 103188 - DNA, 26 bp, Homo sapiens
attcaatttgattcttttttctttta

SEQ ID NO: 103189 - DNA, 26 bp, Homo sapiens
ttcaatttgattcttttttcttttac

SEQ ID NO: 103190 - DNA, 26 bp, Homo sapiens
tcaatttgattcttttttcttttaca

SEQ ID NO: 103191 - DNA, 26 bp, Homo sapiens
caatttgattcttttttcttttacag

SEQ ID NO: 103192 - DNA, 26 bp, Homo sapiens
aatttgattcttttttcttttacagg

SEQ ID NO: 103193 - DNA, 26 bp, Homo sapiens
atttgattcttttttcttttacaggt

SEQ ID NO: 103194 - DNA, 26 bp, Homo sapiens
tttgattcttttttcttttacaggtg

SEQ ID NO: 103195 - DNA, 26 bp, Homo sapiens
ttgattcttttttcttttacaggtgt

SEQ ID NO: 103196 - DNA, 26 bp, Homo sapiens
tgattcttttttcttttacaggtgtg

SEQ ID NO: 103197 - DNA, 26 bp, Homo sapiens
gattcttttttcttttacaggtgtga

SEQ ID NO: 103198 - DNA, 26 bp, Homo sapiens
attcttttttcttttacaggtgtgag

SEQ ID NO: 103199 - DNA, 26 bp, Homo sapiens
ttcttttttcttttacaggtgtgagc

SEQ ID NO: 103200 - DNA, 26 bp, Homo sapiens
tcttttttcttttacaggtgtgagcc

SEQ ID NO: 103201 - DNA, 26 bp, Homo sapiens
cttttttcttttacaggtgtgagcca

SEQ ID NO: 103202 - DNA, 26 bp, Homo sapiens
ttttttcttttacaggtgtgagccat

SEQ ID NO: 103203 - DNA, 26 bp, Homo sapiens
tttttcttttacaggtgtgagccatg

SEQ ID NO: 103204 - DNA, 26 bp, Homo sapiens
ttttcttttacaggtgtgagccatgc

SEQ ID NO: 103205 - DNA, 26 bp, Homo sapiens
tttcttttacaggtgtgagccatgca

SEQ ID NO: 103206 - DNA, 26 bp, Homo sapiens
ttcttttacaggtgtgagccatgcaa

SEQ ID NO: 103207 - DNA, 26 bp, Homo sapiens
tcttttacaggtgtgagccatgcaat

SEQ ID NO: 103208 - DNA, 26 bp, Homo sapiens
cttttacaggtgtgagccatgcaatg

SEQ ID NO: 103209 - DNA, 26 bp, Homo sapiens
ttttacaggtgtgagccatgcaatgg

SEQ ID NO: 103210 - DNA, 26 bp, Homo sapiens
tttacaggtgtgagccatgcaatggg

SEQ ID NO: 103211 - DNA, 26 bp, Homo sapiens
ttacaggtgtgagccatgcaatggga

SEQ ID NO: 103212 - DNA, 26 bp, Homo sapiens
tacaggtgtgagccatgcaatgggag

SEQ ID NO: 103213 - DNA, 26 bp, Homo sapiens
acaggtgtgagccatgcaatgggagg

SEQ ID NO: 103214 - DNA, 26 bp, Homo sapiens
caggtgtgagccatgcaatgggaggg

SEQ ID NO: 103215 - DNA, 26 bp, Homo sapiens
aggtgtgagccatgcaatgggaggga

SEQ ID NO: 103216 - DNA, 26 bp, Homo sapiens
ggtgtgagccatgcaatgggagggag

SEQ ID NO: 103217 - DNA, 26 bp, Homo sapiens
gtgtgagccatgcaatgggagggaga

SEQ ID NO: 103218 - DNA, 26 bp, Homo sapiens
tgtgagccatgcaatgggagggagag

SEQ ID NO: 103219 - DNA, 26 bp, Homo sapiens
gtgagccatgcaatgggagggagagg

SEQ ID NO: 103220 - DNA, 26 bp, Homo sapiens
tgagccatgcaatgggagggagagga

SEQ ID NO: 103221 - DNA, 26 bp, Homo sapiens
gagccatgcaatgggagggagaggag

SEQ ID NO: 103222 - DNA, 26 bp, Homo sapiens
agccatgcaatgggagggagaggagg

SEQ ID NO: 103223 - DNA, 26 bp, Homo sapiens
gccatgcaatgggagggagaggagga

SEQ ID NO: 103224 - DNA, 26 bp, Homo sapiens
ccatgcaatgggagggagaggaggaa

SEQ ID NO: 103225 - DNA, 26 bp, Homo sapiens
catgcaatgggagggagaggaggaat

SEQ ID NO: 103226 - DNA, 26 bp, Homo sapiens
atgcaatgggagggagaggaggaata

SEQ ID NO: 103227 - DNA, 26 bp, Homo sapiens
tgcaatgggagggagaggaggaataa

SEQ ID NO: 103228 - DNA, 26 bp, Homo sapiens
gcaatgggagggagaggaggaataaa

SEQ ID NO: 103229 - DNA, 26 bp, Homo sapiens
caatgggagggagaggaggaataaac

SEQ ID NO: 103230 - DNA, 26 bp, Homo sapiens
aatgggagggagaggaggaataaaca

SEQ ID NO: 103231 - DNA, 26 bp, Homo sapiens
atgggagggagaggaggaataaacag

SEQ ID NO: 103232 - DNA, 26 bp, Homo sapiens
tgggagggagaggaggaataaacaga

SEQ ID NO: 103233 - DNA, 26 bp, Homo sapiens
gggagggagaggaggaataaacagag

SEQ ID NO: 103234 - DNA, 26 bp, Homo sapiens
ggagggagaggaggaataaacagagg

SEQ ID NO: 103235 - DNA, 26 bp, Homo sapiens
gagggagaggaggaataaacagagga

SEQ ID NO: 103236 - DNA, 26 bp, Homo sapiens
agggagaggaggaataaacagaggaa

SEQ ID NO: 103237 - DNA, 26 bp, Homo sapiens
gggagaggaggaataaacagaggaaa

SEQ ID NO: 103238 - DNA, 26 bp, Homo sapiens
ggagaggaggaataaacagaggaaat

SEQ ID NO: 103239 - DNA, 26 bp, Homo sapiens
gagaggaggaataaacagaggaaata

SEQ ID NO: 103240 - DNA, 26 bp, Homo sapiens
agaggaggaataaacagaggaaatat

SEQ ID NO: 103241 - DNA, 26 bp, Homo sapiens
gaggaggaataaacagaggaaatatt

SEQ ID NO: 103242 - DNA, 26 bp, Homo sapiens
aggaggaataaacagaggaaatatta

SEQ ID NO: 103243 - DNA, 26 bp, Homo sapiens
ggaggaataaacagaggaaatattaa

SEQ ID NO: 103244 - DNA, 26 bp, Homo sapiens
gaggaataaacagaggaaatattaat

SEQ ID NO: 103245 - DNA, 26 bp, Homo sapiens
aggaataaacagaggaaatattaatt

SEQ ID NO: 103246 - DNA, 26 bp, Homo sapiens
ggaataaacagaggaaatattaatta

SEQ ID NO: 103247 - DNA, 26 bp, Homo sapiens
gaataaacagaggaaatattaattaa

SEQ ID NO: 103248 - DNA, 26 bp, Homo sapiens
aataaacagaggaaatattaattaaa

SEQ ID NO: 103249 - DNA, 26 bp, Homo sapiens
ataaacagaggaaatattaattaaat

SEQ ID NO: 103250 - DNA, 26 bp, Homo sapiens
taaacagaggaaatattaattaaatg

SEQ ID NO: 103251 - DNA, 26 bp, Homo sapiens
aaacagaggaaatattaattaaatgg

SEQ ID NO: 103252 - DNA, 26 bp, Homo sapiens
aacagaggaaatattaattaaatggt

SEQ ID NO: 103253 - DNA, 26 bp, Homo sapiens
acagaggaaatattaattaaatggtc

SEQ ID NO: 103254 - DNA, 26 bp, Homo sapiens
cagaggaaatattaattaaatggtct

SEQ ID NO: 103255 - DNA, 26 bp, Homo sapiens
agaggaaatattaattaaatggtctg

SEQ ID NO: 103256 - DNA, 26 bp, Homo sapiens
gaggaaatattaattaaatggtctgt

SEQ ID NO: 103257 - DNA, 26 bp, Homo sapiens
aggaaatattaattaaatggtctgta

SEQ ID NO: 103258 - DNA, 26 bp, Homo sapiens
ggaaatattaattaaatggtctgtaa

SEQ ID NO: 103259 - DNA, 26 bp, Homo sapiens
gaaatattaattaaatggtctgtaaa

SEQ ID NO: 103260 - DNA, 26 bp, Homo sapiens
aaatattaattaaatggtctgtaaac

SEQ ID NO: 103261 - DNA, 26 bp, Homo sapiens
aatattaattaaatggtctgtaaaca

SEQ ID NO: 103262 - DNA, 26 bp, Homo sapiens
atattaattaaatggtctgtaaacaa

SEQ ID NO: 103263 - DNA, 26 bp, Homo sapiens
tattaattaaatggtctgtaaacaat

SEQ ID NO: 103264 - DNA, 26 bp, Homo sapiens
attaattaaatggtctgtaaacaata

SEQ ID NO: 103265 - DNA, 26 bp, Homo sapiens
ttaattaaatggtctgtaaacaataa

SEQ ID NO: 103266 - DNA, 26 bp, Homo sapiens
taattaaatggtctgtaaacaataac

SEQ ID NO: 103267 - DNA, 26 bp, Homo sapiens
aattaaatggtctgtaaacaataaca

SEQ ID NO: 103268 - DNA, 26 bp, Homo sapiens
attaaatggtctgtaaacaataacaa

SEQ ID NO: 103269 - DNA, 26 bp, Homo sapiens
ttaaatggtctgtaaacaataacaac

SEQ ID NO: 103270 - DNA, 26 bp, Homo sapiens
taaatggtctgtaaacaataacaact

SEQ ID NO: 103271 - DNA, 26 bp, Homo sapiens
aaatggtctgtaaacaataacaactg

SEQ ID NO: 103272 - DNA, 26 bp, Homo sapiens
aatggtctgtaaacaataacaactgt

SEQ ID NO: 103273 - DNA, 26 bp, Homo sapiens
atggtctgtaaacaataacaactgtg

SEQ ID NO: 103274 - DNA, 26 bp, Homo sapiens
tggtctgtaaacaataacaactgtga

SEQ ID NO: 103275 - DNA, 26 bp, Homo sapiens
ggtctgtaaacaataacaactgtgaa

SEQ ID NO: 103276 - DNA, 26 bp, Homo sapiens
gtctgtaaacaataacaactgtgaat

SEQ ID NO: 103277 - DNA, 26 bp, Homo sapiens
tctgtaaacaataacaactgtgaata

SEQ ID NO: 103278 - DNA, 26 bp, Homo sapiens
ctgtaaacaataacaactgtgaataa

SEQ ID NO: 103279 - DNA, 26 bp, Homo sapiens
tgtaaacaataacaactgtgaataag

SEQ ID NO: 103280 - DNA, 26 bp, Homo sapiens
gtaaacaataacaactgtgaataaga

SEQ ID NO: 103281 - DNA, 26 bp, Homo sapiens
taaacaataacaactgtgaataagat

SEQ ID NO: 103282 - DNA, 26 bp, Homo sapiens
aaacaataacaactgtgaataagatt

SEQ ID NO: 103283 - DNA, 26 bp, Homo sapiens
aacaataacaactgtgaataagatta

SEQ ID NO: 103284 - DNA, 26 bp, Homo sapiens
acaataacaactgtgaataagattat

SEQ ID NO: 103285 - DNA, 26 bp, Homo sapiens
caataacaactgtgaataagattatc

SEQ ID NO: 103286 - DNA, 26 bp, Homo sapiens
aataacaactgtgaataagattatca

SEQ ID NO: 103287 - DNA, 26 bp, Homo sapiens
ataacaactgtgaataagattatcaa

SEQ ID NO: 103288 - DNA, 26 bp, Homo sapiens
taacaactgtgaataagattatcaaa

SEQ ID NO: 103289 - DNA, 26 bp, Homo sapiens
aacaactgtgaataagattatcaaat

SEQ ID NO: 103290 - DNA, 26 bp, Homo sapiens
acaactgtgaataagattatcaaatc

SEQ ID NO: 103291 - DNA, 26 bp, Homo sapiens
caactgtgaataagattatcaaatct

SEQ ID NO: 103292 - DNA, 26 bp, Homo sapiens
aactgtgaataagattatcaaatctg

SEQ ID NO: 103293 - DNA, 26 bp, Homo sapiens
actgtgaataagattatcaaatctgt

SEQ ID NO: 103294 - DNA, 26 bp, Homo sapiens
ctgtgaataagattatcaaatctgtt

SEQ ID NO: 103295 - DNA, 26 bp, Homo sapiens
tgtgaataagattatcaaatctgttt

SEQ ID NO: 103296 - DNA, 26 bp, Homo sapiens
gtgaataagattatcaaatctgtttt

SEQ ID NO: 103297 - DNA, 26 bp, Homo sapiens
tgaataagattatcaaatctgtttta

SEQ ID NO: 103298 - DNA, 26 bp, Homo sapiens
gaataagattatcaaatctgttttag

SEQ ID NO: 103299 - DNA, 26 bp, Homo sapiens
aataagattatcaaatctgttttagt

SEQ ID NO: 103300 - DNA, 26 bp, Homo sapiens
ataagattatcaaatctgttttagtg

SEQ ID NO: 103301 - DNA, 26 bp, Homo sapiens
taagattatcaaatctgttttagtgt

SEQ ID NO: 103302 - DNA, 26 bp, Homo sapiens
aagattatcaaatctgttttagtgta

SEQ ID NO: 103303 - DNA, 26 bp, Homo sapiens
agattatcaaatctgttttagtgtaa

SEQ ID NO: 103304 - DNA, 26 bp, Homo sapiens
gattatcaaatctgttttagtgtaat

SEQ ID NO: 103305 - DNA, 26 bp, Homo sapiens
attatcaaatctgttttagtgtaatg

SEQ ID NO: 103306 - DNA, 26 bp, Homo sapiens
ttatcaaatctgttttagtgtaatga

SEQ ID NO: 103307 - DNA, 26 bp, Homo sapiens
tatcaaatctgttttagtgtaatgat

SEQ ID NO: 103308 - DNA, 26 bp, Homo sapiens
atcaaatctgttttagtgtaatgatt

SEQ ID NO: 103309 - DNA, 26 bp, Homo sapiens
tcaaatctgttttagtgtaatgattg

SEQ ID NO: 103310 - DNA, 26 bp, Homo sapiens
caaatctgttttagtgtaatgattgt

SEQ ID NO: 103311 - DNA, 26 bp, Homo sapiens
aaatctgttttagtgtaatgattgtc

SEQ ID NO: 103312 - DNA, 26 bp, Homo sapiens
aatctgttttagtgtaatgattgtca

SEQ ID NO: 103313 - DNA, 26 bp, Homo sapiens
atctgttttagtgtaatgattgtcaa

SEQ ID NO: 103314 - DNA, 26 bp, Homo sapiens
tctgttttagtgtaatgattgtcaag

SEQ ID NO: 103315 - DNA, 26 bp, Homo sapiens
ctgttttagtgtaatgattgtcaagt

SEQ ID NO: 103316 - DNA, 26 bp, Homo sapiens
tgttttagtgtaatgattgtcaagtt

SEQ ID NO: 103317 - DNA, 26 bp, Homo sapiens
gttttagtgtaatgattgtcaagttt

SEQ ID NO: 103318 - DNA, 26 bp, Homo sapiens
ttttagtgtaatgattgtcaagttta

SEQ ID NO: 103319 - DNA, 26 bp, Homo sapiens
tttagtgtaatgattgtcaagtttaa

SEQ ID NO: 103320 - DNA, 26 bp, Homo sapiens
ttagtgtaatgattgtcaagtttaaa

SEQ ID NO: 103321 - DNA, 26 bp, Homo sapiens
tagtgtaatgattgtcaagtttaaaa

SEQ ID NO: 103322 - DNA, 26 bp, Homo sapiens
agtgtaatgattgtcaagtttaaaaa

SEQ ID NO: 103323 - DNA, 26 bp, Homo sapiens
gtgtaatgattgtcaagtttaaaaac

SEQ ID NO: 103324 - DNA, 26 bp, Homo sapiens
tgtaatgattgtcaagtttaaaaaca

SEQ ID NO: 103325 - DNA, 26 bp, Homo sapiens
gtaatgattgtcaagtttaaaaacat

SEQ ID NO: 103326 - DNA, 26 bp, Homo sapiens
taatgattgtcaagtttaaaaacatt

SEQ ID NO: 103327 - DNA, 26 bp, Homo sapiens
aatgattgtcaagtttaaaaacattt

SEQ ID NO: 103328 - DNA, 26 bp, Homo sapiens
atgattgtcaagtttaaaaacatttt

SEQ ID NO: 103329 - DNA, 26 bp, Homo sapiens
tgattgtcaagtttaaaaacattttt

SEQ ID NO: 103330 - DNA, 26 bp, Homo sapiens
gattgtcaagtttaaaaacattttta

SEQ ID NO: 103331 - DNA, 26 bp, Homo sapiens
attgtcaagtttaaaaacatttttat

SEQ ID NO: 103332 - DNA, 26 bp, Homo sapiens
ttgtcaagtttaaaaacatttttata

SEQ ID NO: 103333 - DNA, 26 bp, Homo sapiens
tgtcaagtttaaaaacatttttatat

SEQ ID NO: 103334 - DNA, 26 bp, Homo sapiens
gtcaagtttaaaaacatttttatata

SEQ ID NO: 103335 - DNA, 26 bp, Homo sapiens
tcaagtttaaaaacatttttatatat

SEQ ID NO: 103336 - DNA, 26 bp, Homo sapiens
caagtttaaaaacatttttatatata

SEQ ID NO: 103337 - DNA, 26 bp, Homo sapiens
aagtttaaaaacatttttatatataa

SEQ ID NO: 103338 - DNA, 26 bp, Homo sapiens
agtttaaaaacatttttatatataaa

SEQ ID NO: 103339 - DNA, 26 bp, Homo sapiens
gtttaaaaacatttttatatataaac

SEQ ID NO: 103340 - DNA, 26 bp, Homo sapiens
tttaaaaacatttttatatataaact

SEQ ID NO: 103341 - DNA, 26 bp, Homo sapiens
ttaaaaacatttttatatataaactg

SEQ ID NO: 103342 - DNA, 26 bp, Homo sapiens
taaaaacatttttatatataaactgg

SEQ ID NO: 103343 - DNA, 26 bp, Homo sapiens
aaaaacatttttatatataaactggt

SEQ ID NO: 103344 - DNA, 26 bp, Homo sapiens
aaaacatttttatatataaactggta

SEQ ID NO: 103345 - DNA, 26 bp, Homo sapiens
aaacatttttatatataaactggtat

SEQ ID NO: 103346 - DNA, 26 bp, Homo sapiens
aacatttttatatataaactggtata

SEQ ID NO: 103347 - DNA, 26 bp, Homo sapiens
acatttttatatataaactggtatac

SEQ ID NO: 103348 - DNA, 26 bp, Homo sapiens
catttttatatataaactggtatact

SEQ ID NO: 103349 - DNA, 26 bp, Homo sapiens
atttttatatataaactggtatactc

SEQ ID NO: 103350 - DNA, 26 bp, Homo sapiens
tttttatatataaactggtatactca

SEQ ID NO: 103351 - DNA, 26 bp, Homo sapiens
ttttatatataaactggtatactcat

SEQ ID NO: 103352 - DNA, 26 bp, Homo sapiens
tttatatataaactggtatactcatg

SEQ ID NO: 103353 - DNA, 26 bp, Homo sapiens
ttatatataaactggtatactcatgt

SEQ ID NO: 103354 - DNA, 26 bp, Homo sapiens
tatatataaactggtatactcatgtc

SEQ ID NO: 103355 - DNA, 26 bp, Homo sapiens
atatataaactggtatactcatgtca

SEQ ID NO: 103356 - DNA, 26 bp, Homo sapiens
tatataaactggtatactcatgtcaa

SEQ ID NO: 103357 - DNA, 26 bp, Homo sapiens
atataaactggtatactcatgtcaat

SEQ ID NO: 103358 - DNA, 26 bp, Homo sapiens
tataaactggtatactcatgtcaata

SEQ ID NO: 103359 - DNA, 26 bp, Homo sapiens
ataaactggtatactcatgtcaatat

SEQ ID NO: 103360 - DNA, 26 bp, Homo sapiens
taaactggtatactcatgtcaatatt

SEQ ID NO: 103361 - DNA, 26 bp, Homo sapiens
aaactggtatactcatgtcaatattc

SEQ ID NO: 103362 - DNA, 26 bp, Homo sapiens
aactggtatactcatgtcaatattct

SEQ ID NO: 103363 - DNA, 26 bp, Homo sapiens
actggtatactcatgtcaatattctt

SEQ ID NO: 103364 - DNA, 26 bp, Homo sapiens
ctggtatactcatgtcaatattcttt

SEQ ID NO: 103365 - DNA, 26 bp, Homo sapiens
tggtatactcatgtcaatattcttta

SEQ ID NO: 103366 - DNA, 26 bp, Homo sapiens
ggtatactcatgtcaatattctttat

SEQ ID NO: 103367 - DNA, 26 bp, Homo sapiens
gtatactcatgtcaatattctttatt

SEQ ID NO: 103368 - DNA, 26 bp, Homo sapiens
tatactcatgtcaatattctttatta

SEQ ID NO: 103369 - DNA, 26 bp, Homo sapiens
atactcatgtcaatattctttattaa

SEQ ID NO: 103370 - DNA, 26 bp, Homo sapiens
tactcatgtcaatattctttattaat

SEQ ID NO: 103371 - DNA, 26 bp, Homo sapiens
actcatgtcaatattctttattaata

SEQ ID NO: 103372 - DNA, 26 bp, Homo sapiens
ctcatgtcaatattctttattaataa

SEQ ID NO: 103373 - DNA, 26 bp, Homo sapiens
tcatgtcaatattctttattaataaa

SEQ ID NO: 103374 - DNA, 26 bp, Homo sapiens
catgtcaatattctttattaataaaa

SEQ ID NO: 103375 - DNA, 26 bp, Homo sapiens
atgtcaatattctttattaataaaat

SEQ ID NO: 103376 - DNA, 26 bp, Homo sapiens
tgtcaatattctttattaataaaatg

SEQ ID NO: 103377 - DNA, 26 bp, Homo sapiens
gtcaatattctttattaataaaatgt

SEQ ID NO: 103378 - DNA, 26 bp, Homo sapiens
tcaatattctttattaataaaatgtt

SEQ ID NO: 103379 - DNA, 26 bp, Homo sapiens
caatattctttattaataaaatgttt

SEQ ID NO: 103380 - DNA, 26 bp, Homo sapiens
aatattctttattaataaaatgtttt

SEQ ID NO: 103381 - DNA, 26 bp, Homo sapiens
atattctttattaataaaatgttttt

SEQ ID NO: 103382 - DNA, 26 bp, Homo sapiens
tattctttattaataaaatgtttttc

SEQ ID NO: 103383 - DNA, 26 bp, Homo sapiens
attctttattaataaaatgtttttca

SEQ ID NO: 103384 - DNA, 26 bp, Homo sapiens
ttctttattaataaaatgtttttcag

SEQ ID NO: 103385 - DNA, 26 bp, Homo sapiens
tctttattaataaaatgtttttcagt

SEQ ID NO: 103386 - DNA, 26 bp, Homo sapiens
ctttattaataaaatgtttttcagtg

SEQ ID NO: 103387 - DNA, 26 bp, Homo sapiens
tttattaataaaatgtttttcagtgt

SEQ ID NO: 103388 - DNA, 26 bp, Homo sapiens
ttattaataaaatgtttttcagtgtc

SEQ ID NO: 103389 - DNA, 26 bp, Homo sapiens
tattaataaaatgtttttcagtgtca

SEQ ID NO: 103390 - DNA, 26 bp, Homo sapiens
attaataaaatgtttttcagtgtcaa

SEQ ID NO: 103391 - DNA, 26 bp, Homo sapiens
ttaataaaatgtttttcagtgtcaaa

SEQ ID NO: 103392 - DNA, 26 bp, Homo sapiens
taataaaatgtttttcagtgtcaaaa

SEQ ID NO: 103393 - DNA, 26 bp, Homo sapiens
aataaaatgtttttcagtgtcaaaat

SEQ ID NO: 103394 - DNA, 26 bp, Homo sapiens
ataaaatgtttttcagtgtcaaaatt

SEQ ID NO: 103395 - DNA, 26 bp, Homo sapiens
taaaatgtttttcagtgtcaaaattt

SEQ ID NO: 103396 - DNA, 26 bp, Homo sapiens
aaaatgtttttcagtgtcaaaattta

SEQ ID NO: 103397 - DNA, 26 bp, Homo sapiens
aaatgtttttcagtgtcaaaatttat

SEQ ID NO: 103398 - DNA, 26 bp, Homo sapiens
aatgtttttcagtgtcaaaatttatt

SEQ ID NO: 103399 - DNA, 26 bp, Homo sapiens
atgtttttcagtgtcaaaatttatta

SEQ ID NO: 103400 - DNA, 26 bp, Homo sapiens
tgtttttcagtgtcaaaatttattat

SEQ ID NO: 103401 - DNA, 26 bp, Homo sapiens
gtttttcagtgtcaaaatttattatt

SEQ ID NO: 103402 - DNA, 26 bp, Homo sapiens
tttttcagtgtcaaaatttattattc

SEQ ID NO: 103403 - DNA, 26 bp, Homo sapiens
ttttcagtgtcaaaatttattattca

SEQ ID NO: 103404 - DNA, 26 bp, Homo sapiens
tttcagtgtcaaaatttattattcat

SEQ ID NO: 103405 - DNA, 26 bp, Homo sapiens
ttcagtgtcaaaatttattattcatt

SEQ ID NO: 103406 - DNA, 26 bp, Homo sapiens
tcagtgtcaaaatttattattcattt

SEQ ID NO: 103407 - DNA, 26 bp, Homo sapiens
cagtgtcaaaatttattattcatttc

SEQ ID NO: 103408 - DNA, 26 bp, Homo sapiens
agtgtcaaaatttattattcatttct

SEQ ID NO: 103409 - DNA, 26 bp, Homo sapiens
gtgtcaaaatttattattcatttctt

SEQ ID NO: 103410 - DNA, 26 bp, Homo sapiens
tgtcaaaatttattattcatttcttc

SEQ ID NO: 103411 - DNA, 26 bp, Homo sapiens
gtcaaaatttattattcatttcttca

SEQ ID NO: 103412 - DNA, 26 bp, Homo sapiens
tcaaaatttattattcatttcttcat

SEQ ID NO: 103413 - DNA, 26 bp, Homo sapiens
caaaatttattattcatttcttcatt

SEQ ID NO: 103414 - DNA, 26 bp, Homo sapiens
aaaatttattattcatttcttcatta

SEQ ID NO: 103415 - DNA, 26 bp, Homo sapiens
aaatttattattcatttcttcattag

SEQ ID NO: 103416 - DNA, 26 bp, Homo sapiens
aatttattattcatttcttcattagt

SEQ ID NO: 103417 - DNA, 26 bp, Homo sapiens
atttattattcatttcttcattagtt

SEQ ID NO: 103418 - DNA, 26 bp, Homo sapiens
tttattattcatttcttcattagttg

SEQ ID NO: 103419 - DNA, 26 bp, Homo sapiens
ttattattcatttcttcattagttga

SEQ ID NO: 103420 - DNA, 26 bp, Homo sapiens
tattattcatttcttcattagttgac

SEQ ID NO: 103421 - DNA, 26 bp, Homo sapiens
attattcatttcttcattagttgact

SEQ ID NO: 103422 - DNA, 26 bp, Homo sapiens
ttattcatttcttcattagttgactc

SEQ ID NO: 103423 - DNA, 26 bp, Homo sapiens
tattcatttcttcattagttgactcc

SEQ ID NO: 103424 - DNA, 26 bp, Homo sapiens
attcatttcttcattagttgactcct

SEQ ID NO: 103425 - DNA, 26 bp, Homo sapiens
ttcatttcttcattagttgactcctc

SEQ ID NO: 103426 - DNA, 26 bp, Homo sapiens
tcatttcttcattagttgactcctcc

SEQ ID NO: 103427 - DNA, 26 bp, Homo sapiens
catttcttcattagttgactcctcct

SEQ ID NO: 103428 - DNA, 26 bp, Homo sapiens
atttcttcattagttgactcctcctt

SEQ ID NO: 103429 - DNA, 26 bp, Homo sapiens
tttcttcattagttgactcctccttt

SEQ ID NO: 103430 - DNA, 26 bp, Homo sapiens
ttcttcattagttgactcctcctttg

SEQ ID NO: 103431 - DNA, 26 bp, Homo sapiens
tcttcattagttgactcctcctttgc

SEQ ID NO: 103432 - DNA, 26 bp, Homo sapiens
cttcattagttgactcctcctttgct

SEQ ID NO: 103433 - DNA, 26 bp, Homo sapiens
ttcattagttgactcctcctttgctc

SEQ ID NO: 103434 - DNA, 26 bp, Homo sapiens
tcattagttgactcctcctttgctca

SEQ ID NO: 103435 - DNA, 26 bp, Homo sapiens
cattagttgactcctcctttgctcat

SEQ ID NO: 103436 - DNA, 26 bp, Homo sapiens
attagttgactcctcctttgctcatc

SEQ ID NO: 103437 - DNA, 26 bp, Homo sapiens
ttagttgactcctcctttgctcatca

SEQ ID NO: 103438 - DNA, 26 bp, Homo sapiens
tagttgactcctcctttgctcatcag

SEQ ID NO: 103439 - DNA, 26 bp, Homo sapiens
agttgactcctcctttgctcatcagt

SEQ ID NO: 103440 - DNA, 26 bp, Homo sapiens
gttgactcctcctttgctcatcagtc

SEQ ID NO: 103441 - DNA, 26 bp, Homo sapiens
ttgactcctcctttgctcatcagtct

SEQ ID NO: 103442 - DNA, 26 bp, Homo sapiens
tgactcctcctttgctcatcagtcta

SEQ ID NO: 103443 - DNA, 26 bp, Homo sapiens
gactcctcctttgctcatcagtctaa

SEQ ID NO: 103444 - DNA, 26 bp, Homo sapiens
actcctcctttgctcatcagtctaag

SEQ ID NO: 103445 - DNA, 26 bp, Homo sapiens
ctcctcctttgctcatcagtctaagg

SEQ ID NO: 103446 - DNA, 26 bp, Homo sapiens
tcctcctttgctcatcagtctaagga

SEQ ID NO: 103447 - DNA, 26 bp, Homo sapiens
cctcctttgctcatcagtctaaggac

SEQ ID NO: 103448 - DNA, 26 bp, Homo sapiens
ctcctttgctcatcagtctaaggaca

SEQ ID NO: 103449 - DNA, 26 bp, Homo sapiens
tcctttgctcatcagtctaaggacag

SEQ ID NO: 103450 - DNA, 26 bp, Homo sapiens
cctttgctcatcagtctaaggacagt

SEQ ID NO: 103451 - DNA, 26 bp, Homo sapiens
ctttgctcatcagtctaaggacagtt

SEQ ID NO: 103452 - DNA, 26 bp, Homo sapiens
tttgctcatcagtctaaggacagttg

SEQ ID NO: 103453 - DNA, 26 bp, Homo sapiens
ttgctcatcagtctaaggacagttgt

SEQ ID NO: 103454 - DNA, 26 bp, Homo sapiens
tgctcatcagtctaaggacagttgta

SEQ ID NO: 103455 - DNA, 26 bp, Homo sapiens
gctcatcagtctaaggacagttgtac

SEQ ID NO: 103456 - DNA, 26 bp, Homo sapiens
ctcatcagtctaaggacagttgtacc

SEQ ID NO: 103457 - DNA, 26 bp, Homo sapiens
tcatcagtctaaggacagttgtacca

SEQ ID NO: 103458 - DNA, 26 bp, Homo sapiens
catcagtctaaggacagttgtaccag

SEQ ID NO: 103459 - DNA, 26 bp, Homo sapiens
atcagtctaaggacagttgtaccaga

SEQ ID NO: 103460 - DNA, 26 bp, Homo sapiens
tcagtctaaggacagttgtaccagac

SEQ ID NO: 103461 - DNA, 26 bp, Homo sapiens
cagtctaaggacagttgtaccagact

SEQ ID NO: 103462 - DNA, 26 bp, Homo sapiens
agtctaaggacagttgtaccagactt

SEQ ID NO: 103463 - DNA, 26 bp, Homo sapiens
gtctaaggacagttgtaccagacttt

SEQ ID NO: 103464 - DNA, 26 bp, Homo sapiens
tctaaggacagttgtaccagactttg

SEQ ID NO: 103465 - DNA, 26 bp, Homo sapiens
ctaaggacagttgtaccagactttgg

SEQ ID NO: 103466 - DNA, 26 bp, Homo sapiens
taaggacagttgtaccagactttgga

SEQ ID NO: 103467 - DNA, 26 bp, Homo sapiens
aaggacagttgtaccagactttggat

SEQ ID NO: 103468 - DNA, 26 bp, Homo sapiens
aggacagttgtaccagactttggata

SEQ ID NO: 103469 - DNA, 26 bp, Homo sapiens
ggacagttgtaccagactttggataa

SEQ ID NO: 103470 - DNA, 26 bp, Homo sapiens
gacagttgtaccagactttggataag

SEQ ID NO: 103471 - DNA, 26 bp, Homo sapiens
acagttgtaccagactttggataagg

SEQ ID NO: 103472 - DNA, 26 bp, Homo sapiens
cagttgtaccagactttggataaggt

SEQ ID NO: 103473 - DNA, 26 bp, Homo sapiens
agttgtaccagactttggataaggtc

SEQ ID NO: 103474 - DNA, 26 bp, Homo sapiens
gttgtaccagactttggataaggtct

SEQ ID NO: 103475 - DNA, 26 bp, Homo sapiens
ttgtaccagactttggataaggtctg

SEQ ID NO: 103476 - DNA, 26 bp, Homo sapiens
tgtaccagactttggataaggtctgc

SEQ ID NO: 103477 - DNA, 26 bp, Homo sapiens
gtaccagactttggataaggtctgcc

SEQ ID NO: 103478 - DNA, 26 bp, Homo sapiens
taccagactttggataaggtctgccc

SEQ ID NO: 103479 - DNA, 26 bp, Homo sapiens
accagactttggataaggtctgccca

SEQ ID NO: 103480 - DNA, 26 bp, Homo sapiens
ccagactttggataaggtctgcccag

SEQ ID NO: 103481 - DNA, 26 bp, Homo sapiens
cagactttggataaggtctgcccaga

SEQ ID NO: 103482 - DNA, 26 bp, Homo sapiens
agactttggataaggtctgcccagaa

SEQ ID NO: 103483 - DNA, 26 bp, Homo sapiens
gactttggataaggtctgcccagaac

SEQ ID NO: 103484 - DNA, 26 bp, Homo sapiens
actttggataaggtctgcccagaacg

SEQ ID NO: 103485 - DNA, 26 bp, Homo sapiens
ctttggataaggtctgcccagaacga

SEQ ID NO: 103486 - DNA, 26 bp, Homo sapiens
tttggataaggtctgcccagaacgag

SEQ ID NO: 103487 - DNA, 26 bp, Homo sapiens
ttggataaggtctgcccagaacgagt

SEQ ID NO: 103488 - DNA, 26 bp, Homo sapiens
tggataaggtctgcccagaacgagta

SEQ ID NO: 103489 - DNA, 26 bp, Homo sapiens
ggataaggtctgcccagaacgagtag

SEQ ID NO: 103490 - DNA, 26 bp, Homo sapiens
gataaggtctgcccagaacgagtagt

SEQ ID NO: 103491 - DNA, 26 bp, Homo sapiens
ataaggtctgcccagaacgagtagta

SEQ ID NO: 103492 - DNA, 26 bp, Homo sapiens
taaggtctgcccagaacgagtagtaa

SEQ ID NO: 103493 - DNA, 26 bp, Homo sapiens
aaggtctgcccagaacgagtagtaat

SEQ ID NO: 103494 - DNA, 26 bp, Homo sapiens
aggtctgcccagaacgagtagtaatt

SEQ ID NO: 103495 - DNA, 26 bp, Homo sapiens
ggtctgcccagaacgagtagtaattg

SEQ ID NO: 103496 - DNA, 26 bp, Homo sapiens
gtctgcccagaacgagtagtaattgc

SEQ ID NO: 103497 - DNA, 26 bp, Homo sapiens
tctgcccagaacgagtagtaattgct

SEQ ID NO: 103498 - DNA, 26 bp, Homo sapiens
ctgcccagaacgagtagtaattgctc

SEQ ID NO: 103499 - DNA, 26 bp, Homo sapiens
tgcccagaacgagtagtaattgctct

SEQ ID NO: 103500 - DNA, 26 bp, Homo sapiens
gcccagaacgagtagtaattgctctt

SEQ ID NO: 103501 - DNA, 26 bp, Homo sapiens
cccagaacgagtagtaattgctcttg

SEQ ID NO: 103502 - DNA, 26 bp, Homo sapiens
ccagaacgagtagtaattgctcttgc

SEQ ID NO: 103503 - DNA, 26 bp, Homo sapiens
cagaacgagtagtaattgctcttgct

SEQ ID NO: 103504 - DNA, 26 bp, Homo sapiens
agaacgagtagtaattgctcttgctg

SEQ ID NO: 103505 - DNA, 26 bp, Homo sapiens
gaacgagtagtaattgctcttgctgt

SEQ ID NO: 103506 - DNA, 26 bp, Homo sapiens
aacgagtagtaattgctcttgctgtt

SEQ ID NO: 103507 - DNA, 26 bp, Homo sapiens
acgagtagtaattgctcttgctgttc

SEQ ID NO: 103508 - DNA, 26 bp, Homo sapiens
cgagtagtaattgctcttgctgttct

SEQ ID NO: 103509 - DNA, 26 bp, Homo sapiens
gagtagtaattgctcttgctgttcta

SEQ ID NO: 103510 - DNA, 26 bp, Homo sapiens
agtagtaattgctcttgctgttctac

SEQ ID NO: 103511 - DNA, 26 bp, Homo sapiens
gtagtaattgctcttgctgttctact

SEQ ID NO: 103512 - DNA, 26 bp, Homo sapiens
tagtaattgctcttgctgttctacta

SEQ ID NO: 103513 - DNA, 26 bp, Homo sapiens
agtaattgctcttgctgttctactag

SEQ ID NO: 103514 - DNA, 26 bp, Homo sapiens
gtaattgctcttgctgttctactagg

SEQ ID NO: 103515 - DNA, 26 bp, Homo sapiens
taattgctcttgctgttctactaggc

SEQ ID NO: 103516 - DNA, 26 bp, Homo sapiens
aattgctcttgctgttctactaggca

SEQ ID NO: 103517 - DNA, 26 bp, Homo sapiens
attgctcttgctgttctactaggcac

SEQ ID NO: 103518 - DNA, 26 bp, Homo sapiens
ttgctcttgctgttctactaggcaca

SEQ ID NO: 103519 - DNA, 26 bp, Homo sapiens
tgctcttgctgttctactaggcacat

SEQ ID NO: 103520 - DNA, 26 bp, Homo sapiens
gctcttgctgttctactaggcacatc

SEQ ID NO: 103521 - DNA, 26 bp, Homo sapiens
ctcttgctgttctactaggcacatca

SEQ ID NO: 103522 - DNA, 26 bp, Homo sapiens
tcttgctgttctactaggcacatcaa

SEQ ID NO: 103523 - DNA, 26 bp, Homo sapiens
cttgctgttctactaggcacatcaat

SEQ ID NO: 103524 - DNA, 26 bp, Homo sapiens
ttgctgttctactaggcacatcaatg

SEQ ID NO: 103525 - DNA, 26 bp, Homo sapiens
tgctgttctactaggcacatcaatgt

SEQ ID NO: 103526 - DNA, 26 bp, Homo sapiens
gctgttctactaggcacatcaatgtt

SEQ ID NO: 103527 - DNA, 26 bp, Homo sapiens
ctgttctactaggcacatcaatgtta

SEQ ID NO: 103528 - DNA, 26 bp, Homo sapiens
tgttctactaggcacatcaatgttat

SEQ ID NO: 103529 - DNA, 26 bp, Homo sapiens
gttctactaggcacatcaatgttata

SEQ ID NO: 103530 - DNA, 26 bp, Homo sapiens
ttctactaggcacatcaatgttatag

SEQ ID NO: 103531 - DNA, 26 bp, Homo sapiens
tctactaggcacatcaatgttatagt

SEQ ID NO: 103532 - DNA, 26 bp, Homo sapiens
ctactaggcacatcaatgttatagta

SEQ ID NO: 103533 - DNA, 26 bp, Homo sapiens
tactaggcacatcaatgttatagtat

SEQ ID NO: 103534 - DNA, 26 bp, Homo sapiens
actaggcacatcaatgttatagtatt

SEQ ID NO: 103535 - DNA, 26 bp, Homo sapiens
ctaggcacatcaatgttatagtattg

SEQ ID NO: 103536 - DNA, 26 bp, Homo sapiens
taggcacatcaatgttatagtattga

SEQ ID NO: 103537 - DNA, 26 bp, Homo sapiens
aggcacatcaatgttatagtattgat

SEQ ID NO: 103538 - DNA, 26 bp, Homo sapiens
ggcacatcaatgttatagtattgatc

SEQ ID NO: 103539 - DNA, 26 bp, Homo sapiens
gcacatcaatgttatagtattgatct

SEQ ID NO: 103540 - DNA, 26 bp, Homo sapiens
cacatcaatgttatagtattgatctt

SEQ ID NO: 103541 - DNA, 26 bp, Homo sapiens
acatcaatgttatagtattgatcttt

SEQ ID NO: 103542 - DNA, 26 bp, Homo sapiens
catcaatgttatagtattgatcttta

SEQ ID NO: 103543 - DNA, 26 bp, Homo sapiens
atcaatgttatagtattgatctttag

SEQ ID NO: 103544 - DNA, 26 bp, Homo sapiens
tcaatgttatagtattgatctttaga

SEQ ID NO: 103545 - DNA, 26 bp, Homo sapiens
caatgttatagtattgatctttagaa

SEQ ID NO: 103546 - DNA, 26 bp, Homo sapiens
aatgttatagtattgatctttagaaa

SEQ ID NO: 103547 - DNA, 26 bp, Homo sapiens
atgttatagtattgatctttagaaaa

SEQ ID NO: 103548 - DNA, 26 bp, Homo sapiens
tgttatagtattgatctttagaaaag

SEQ ID NO: 103549 - DNA, 26 bp, Homo sapiens
gttatagtattgatctttagaaaagg

SEQ ID NO: 103550 - DNA, 26 bp, Homo sapiens
ttatagtattgatctttagaaaaggc

SEQ ID NO: 103551 - DNA, 26 bp, Homo sapiens
tatagtattgatctttagaaaaggca

SEQ ID NO: 103552 - DNA, 26 bp, Homo sapiens
atagtattgatctttagaaaaggcat

SEQ ID NO: 103553 - DNA, 26 bp, Homo sapiens
tagtattgatctttagaaaaggcata

SEQ ID NO: 103554 - DNA, 26 bp, Homo sapiens
agtattgatctttagaaaaggcatag

SEQ ID NO: 103555 - DNA, 26 bp, Homo sapiens
gtattgatctttagaaaaggcatagt

SEQ ID NO: 103556 - DNA, 26 bp, Homo sapiens
tattgatctttagaaaaggcatagta

SEQ ID NO: 103557 - DNA, 26 bp, Homo sapiens
attgatctttagaaaaggcatagtaa

SEQ ID NO: 103558 - DNA, 26 bp, Homo sapiens
ttgatctttagaaaaggcatagtaat

SEQ ID NO: 103559 - DNA, 26 bp, Homo sapiens
tgatctttagaaaaggcatagtaatc

SEQ ID NO: 103560 - DNA, 26 bp, Homo sapiens
gatctttagaaaaggcatagtaatca

SEQ ID NO: 103561 - DNA, 26 bp, Homo sapiens
atctttagaaaaggcatagtaatcat

SEQ ID NO: 103562 - DNA, 26 bp, Homo sapiens
tctttagaaaaggcatagtaatcata

SEQ ID NO: 103563 - DNA, 26 bp, Homo sapiens
ctttagaaaaggcatagtaatcatag

SEQ ID NO: 103564 - DNA, 26 bp, Homo sapiens
tttagaaaaggcatagtaatcatagc

SEQ ID NO: 103565 - DNA, 26 bp, Homo sapiens
ttagaaaaggcatagtaatcatagcc

SEQ ID NO: 103566 - DNA, 26 bp, Homo sapiens
tagaaaaggcatagtaatcatagccg

SEQ ID NO: 103567 - DNA, 26 bp, Homo sapiens
agaaaaggcatagtaatcatagccgt

SEQ ID NO: 103568 - DNA, 26 bp, Homo sapiens
gaaaaggcatagtaatcatagccgtc

SEQ ID NO: 103569 - DNA, 26 bp, Homo sapiens
aaaaggcatagtaatcatagccgtca

SEQ ID NO: 103570 - DNA, 26 bp, Homo sapiens
aaaggcatagtaatcatagccgtcag

SEQ ID NO: 103571 - DNA, 26 bp, Homo sapiens
aaggcatagtaatcatagccgtcagg

SEQ ID NO: 103572 - DNA, 26 bp, Homo sapiens
aggcatagtaatcatagccgtcaggt

SEQ ID NO: 103573 - DNA, 26 bp, Homo sapiens
ggcatagtaatcatagccgtcaggtt

SEQ ID NO: 103574 - DNA, 26 bp, Homo sapiens
gcatagtaatcatagccgtcaggttt

SEQ ID NO: 103575 - DNA, 26 bp, Homo sapiens
catagtaatcatagccgtcaggtttt

SEQ ID NO: 103576 - DNA, 26 bp, Homo sapiens
atagtaatcatagccgtcaggttttc

SEQ ID NO: 103577 - DNA, 26 bp, Homo sapiens
tagtaatcatagccgtcaggttttct

SEQ ID NO: 103578 - DNA, 26 bp, Homo sapiens
agtaatcatagccgtcaggttttctg

SEQ ID NO: 103579 - DNA, 26 bp, Homo sapiens
gtaatcatagccgtcaggttttctga

SEQ ID NO: 103580 - DNA, 26 bp, Homo sapiens
taatcatagccgtcaggttttctgat

SEQ ID NO: 103581 - DNA, 26 bp, Homo sapiens
aatcatagccgtcaggttttctgatg

SEQ ID NO: 103582 - DNA, 26 bp, Homo sapiens
atcatagccgtcaggttttctgatgt

SEQ ID NO: 103583 - DNA, 26 bp, Homo sapiens
tcatagccgtcaggttttctgatgtt

SEQ ID NO: 103584 - DNA, 26 bp, Homo sapiens
catagccgtcaggttttctgatgttg

SEQ ID NO: 103585 - DNA, 26 bp, Homo sapiens
atagccgtcaggttttctgatgttgg

SEQ ID NO: 103586 - DNA, 26 bp, Homo sapiens
tagccgtcaggttttctgatgttggg

SEQ ID NO: 103587 - DNA, 26 bp, Homo sapiens
agccgtcaggttttctgatgttgggc

SEQ ID NO: 103588 - DNA, 26 bp, Homo sapiens
gccgtcaggttttctgatgttgggca

SEQ ID NO: 103589 - DNA, 26 bp, Homo sapiens
ccgtcaggttttctgatgttgggcag

SEQ ID NO: 103590 - DNA, 26 bp, Homo sapiens
cgtcaggttttctgatgttgggcagt

SEQ ID NO: 103591 - DNA, 26 bp, Homo sapiens
gtcaggttttctgatgttgggcagtg

SEQ ID NO: 103592 - DNA, 26 bp, Homo sapiens
tcaggttttctgatgttgggcagtga

SEQ ID NO: 103593 - DNA, 26 bp, Homo sapiens
caggttttctgatgttgggcagtgat

SEQ ID NO: 103594 - DNA, 26 bp, Homo sapiens
aggttttctgatgttgggcagtgata

SEQ ID NO: 103595 - DNA, 26 bp, Homo sapiens
ggttttctgatgttgggcagtgatat

SEQ ID NO: 103596 - DNA, 26 bp, Homo sapiens
gttttctgatgttgggcagtgatata

SEQ ID NO: 103597 - DNA, 26 bp, Homo sapiens
ttttctgatgttgggcagtgatatag

SEQ ID NO: 103598 - DNA, 26 bp, Homo sapiens
tttctgatgttgggcagtgatatagc

SEQ ID NO: 103599 - DNA, 26 bp, Homo sapiens
ttctgatgttgggcagtgatatagct

SEQ ID NO: 103600 - DNA, 26 bp, Homo sapiens
tctgatgttgggcagtgatatagctg

SEQ ID NO: 103601 - DNA, 26 bp, Homo sapiens
ctgatgttgggcagtgatatagctga

SEQ ID NO: 103602 - DNA, 26 bp, Homo sapiens
tgatgttgggcagtgatatagctgag

SEQ ID NO: 103603 - DNA, 26 bp, Homo sapiens
gatgttgggcagtgatatagctgagg

SEQ ID NO: 103604 - DNA, 26 bp, Homo sapiens
atgttgggcagtgatatagctgaggt

SEQ ID NO: 103605 - DNA, 26 bp, Homo sapiens
tgttgggcagtgatatagctgaggta

SEQ ID NO: 103606 - DNA, 26 bp, Homo sapiens
gttgggcagtgatatagctgaggtaa

SEQ ID NO: 103607 - DNA, 26 bp, Homo sapiens
ttgggcagtgatatagctgaggtaac

SEQ ID NO: 103608 - DNA, 26 bp, Homo sapiens
tgggcagtgatatagctgaggtaacc

SEQ ID NO: 103609 - DNA, 26 bp, Homo sapiens
gggcagtgatatagctgaggtaacca

SEQ ID NO: 103610 - DNA, 26 bp, Homo sapiens
ggcagtgatatagctgaggtaaccac

SEQ ID NO: 103611 - DNA, 26 bp, Homo sapiens
gcagtgatatagctgaggtaaccaca

SEQ ID NO: 103612 - DNA, 26 bp, Homo sapiens
cagtgatatagctgaggtaaccacat

SEQ ID NO: 103613 - DNA, 26 bp, Homo sapiens
agtgatatagctgaggtaaccacatt

SEQ ID NO: 103614 - DNA, 26 bp, Homo sapiens
gtgatatagctgaggtaaccacattt

SEQ ID NO: 103615 - DNA, 26 bp, Homo sapiens
tgatatagctgaggtaaccacatttg

SEQ ID NO: 103616 - DNA, 26 bp, Homo sapiens
gatatagctgaggtaaccacatttgg

SEQ ID NO: 103617 - DNA, 26 bp, Homo sapiens
atatagctgaggtaaccacatttgga

SEQ ID NO: 103618 - DNA, 26 bp, Homo sapiens
tatagctgaggtaaccacatttggaa

SEQ ID NO: 103619 - DNA, 26 bp, Homo sapiens
atagctgaggtaaccacatttggaag

SEQ ID NO: 103620 - DNA, 26 bp, Homo sapiens
tagctgaggtaaccacatttggaagt

SEQ ID NO: 103621 - DNA, 26 bp, Homo sapiens
agctgaggtaaccacatttggaagtc

SEQ ID NO: 103622 - DNA, 26 bp, Homo sapiens
gctgaggtaaccacatttggaagtcc

SEQ ID NO: 103623 - DNA, 26 bp, Homo sapiens
ctgaggtaaccacatttggaagtcct

SEQ ID NO: 103624 - DNA, 26 bp, Homo sapiens
tgaggtaaccacatttggaagtcctc

SEQ ID NO: 103625 - DNA, 26 bp, Homo sapiens
gaggtaaccacatttggaagtcctct

SEQ ID NO: 103626 - DNA, 26 bp, Homo sapiens
aggtaaccacatttggaagtcctctc

SEQ ID NO: 103627 - DNA, 26 bp, Homo sapiens
ggtaaccacatttggaagtcctctcc

SEQ ID NO: 103628 - DNA, 26 bp, Homo sapiens
gtaaccacatttggaagtcctctcca

SEQ ID NO: 103629 - DNA, 26 bp, Homo sapiens
taaccacatttggaagtcctctccac

SEQ ID NO: 103630 - DNA, 26 bp, Homo sapiens
aaccacatttggaagtcctctccaca

SEQ ID NO: 103631 - DNA, 26 bp, Homo sapiens
accacatttggaagtcctctccacag

SEQ ID NO: 103632 - DNA, 26 bp, Homo sapiens
ccacatttggaagtcctctccacagt

SEQ ID NO: 103633 - DNA, 26 bp, Homo sapiens
cacatttggaagtcctctccacagta

SEQ ID NO: 103634 - DNA, 26 bp, Homo sapiens
acatttggaagtcctctccacagtat

SEQ ID NO: 103635 - DNA, 26 bp, Homo sapiens
catttggaagtcctctccacagtata

SEQ ID NO: 103636 - DNA, 26 bp, Homo sapiens
atttggaagtcctctccacagtatac

SEQ ID NO: 103637 - DNA, 26 bp, Homo sapiens
tttggaagtcctctccacagtatact

SEQ ID NO: 103638 - DNA, 26 bp, Homo sapiens
ttggaagtcctctccacagtatactc

SEQ ID NO: 103639 - DNA, 26 bp, Homo sapiens
tggaagtcctctccacagtatactca

SEQ ID NO: 103640 - DNA, 26 bp, Homo sapiens
ggaagtcctctccacagtatactcac

SEQ ID NO: 103641 - DNA, 26 bp, Homo sapiens
gaagtcctctccacagtatactcact

SEQ ID NO: 103642 - DNA, 26 bp, Homo sapiens
aagtcctctccacagtatactcactt

SEQ ID NO: 103643 - DNA, 26 bp, Homo sapiens
agtcctctccacagtatactcacttt

SEQ ID NO: 103644 - DNA, 26 bp, Homo sapiens
gtcctctccacagtatactcacttta

SEQ ID NO: 103645 - DNA, 26 bp, Homo sapiens
tcctctccacagtatactcactttaa

SEQ ID NO: 103646 - DNA, 26 bp, Homo sapiens
cctctccacagtatactcactttaac

SEQ ID NO: 103647 - DNA, 26 bp, Homo sapiens
ctctccacagtatactcactttaact

SEQ ID NO: 103648 - DNA, 26 bp, Homo sapiens
tctccacagtatactcactttaactt

SEQ ID NO: 103649 - DNA, 26 bp, Homo sapiens
ctccacagtatactcactttaacttc

SEQ ID NO: 103650 - DNA, 26 bp, Homo sapiens
tccacagtatactcactttaacttca

SEQ ID NO: 103651 - DNA, 26 bp, Homo sapiens
ccacagtatactcactttaacttcat

SEQ ID NO: 103652 - DNA, 26 bp, Homo sapiens
cacagtatactcactttaacttcatt

SEQ ID NO: 103653 - DNA, 26 bp, Homo sapiens
acagtatactcactttaacttcatta

SEQ ID NO: 103654 - DNA, 26 bp, Homo sapiens
cagtatactcactttaacttcattat

SEQ ID NO: 103655 - DNA, 26 bp, Homo sapiens
agtatactcactttaacttcattatg

SEQ ID NO: 103656 - DNA, 26 bp, Homo sapiens
gtatactcactttaacttcattatga

SEQ ID NO: 103657 - DNA, 26 bp, Homo sapiens
tatactcactttaacttcattatgaa

SEQ ID NO: 103658 - DNA, 26 bp, Homo sapiens
atactcactttaacttcattatgaag

SEQ ID NO: 103659 - DNA, 26 bp, Homo sapiens
tactcactttaacttcattatgaagg

SEQ ID NO: 103660 - DNA, 26 bp, Homo sapiens
actcactttaacttcattatgaagga

SEQ ID NO: 103661 - DNA, 26 bp, Homo sapiens
ctcactttaacttcattatgaaggac

SEQ ID NO: 103662 - DNA, 26 bp, Homo sapiens
tcactttaacttcattatgaaggaca

SEQ ID NO: 103663 - DNA, 26 bp, Homo sapiens
cactttaacttcattatgaaggacac

SEQ ID NO: 103664 - DNA, 26 bp, Homo sapiens
actttaacttcattatgaaggacacc

SEQ ID NO: 103665 - DNA, 26 bp, Homo sapiens
ctttaacttcattatgaaggacacct

SEQ ID NO: 103666 - DNA, 26 bp, Homo sapiens
tttaacttcattatgaaggacacctt

SEQ ID NO: 103667 - DNA, 26 bp, Homo sapiens
ttaacttcattatgaaggacaccttt

SEQ ID NO: 103668 - DNA, 26 bp, Homo sapiens
taacttcattatgaaggacacctttg

SEQ ID NO: 103669 - DNA, 26 bp, Homo sapiens
aacttcattatgaaggacacctttgt

SEQ ID NO: 103670 - DNA, 26 bp, Homo sapiens
acttcattatgaaggacacctttgtc

SEQ ID NO: 103671 - DNA, 26 bp, Homo sapiens
cttcattatgaaggacacctttgtct

SEQ ID NO: 103672 - DNA, 26 bp, Homo sapiens
ttcattatgaaggacacctttgtctt

SEQ ID NO: 103673 - DNA, 26 bp, Homo sapiens
tcattatgaaggacacctttgtcttg

SEQ ID NO: 103674 - DNA, 26 bp, Homo sapiens
cattatgaaggacacctttgtcttga

SEQ ID NO: 103675 - DNA, 26 bp, Homo sapiens
attatgaaggacacctttgtcttgat

SEQ ID NO: 103676 - DNA, 26 bp, Homo sapiens
ttatgaaggacacctttgtcttgata

SEQ ID NO: 103677 - DNA, 26 bp, Homo sapiens
tatgaaggacacctttgtcttgataa

SEQ ID NO: 103678 - DNA, 26 bp, Homo sapiens
atgaaggacacctttgtcttgataag

SEQ ID NO: 103679 - DNA, 26 bp, Homo sapiens
tgaaggacacctttgtcttgataagc

SEQ ID NO: 103680 - DNA, 26 bp, Homo sapiens
gaaggacacctttgtcttgataagcc

SEQ ID NO: 103681 - DNA, 26 bp, Homo sapiens
aaggacacctttgtcttgataagcca

SEQ ID NO: 103682 - DNA, 26 bp, Homo sapiens
aggacacctttgtcttgataagccag

SEQ ID NO: 103683 - DNA, 26 bp, Homo sapiens
ggacacctttgtcttgataagccagt

SEQ ID NO: 103684 - DNA, 26 bp, Homo sapiens
gacacctttgtcttgataagccagtc

SEQ ID NO: 103685 - DNA, 26 bp, Homo sapiens
acacctttgtcttgataagccagtct

SEQ ID NO: 103686 - DNA, 26 bp, Homo sapiens
cacctttgtcttgataagccagtctg

SEQ ID NO: 103687 - DNA, 26 bp, Homo sapiens
acctttgtcttgataagccagtctgg

SEQ ID NO: 103688 - DNA, 26 bp, Homo sapiens
cctttgtcttgataagccagtctggc

SEQ ID NO: 103689 - DNA, 26 bp, Homo sapiens
ctttgtcttgataagccagtctggca

SEQ ID NO: 103690 - DNA, 26 bp, Homo sapiens
tttgtcttgataagccagtctggcag

SEQ ID NO: 103691 - DNA, 26 bp, Homo sapiens
ttgtcttgataagccagtctggcagg

SEQ ID NO: 103692 - DNA, 26 bp, Homo sapiens
tgtcttgataagccagtctggcaggt

SEQ ID NO: 103693 - DNA, 26 bp, Homo sapiens
gtcttgataagccagtctggcaggtg

SEQ ID NO: 103694 - DNA, 26 bp, Homo sapiens
tcttgataagccagtctggcaggtga

SEQ ID NO: 103695 - DNA, 26 bp, Homo sapiens
cttgataagccagtctggcaggtgaa

SEQ ID NO: 103696 - DNA, 26 bp, Homo sapiens
ttgataagccagtctggcaggtgaat

SEQ ID NO: 103697 - DNA, 26 bp, Homo sapiens
tgataagccagtctggcaggtgaata

SEQ ID NO: 103698 - DNA, 26 bp, Homo sapiens
gataagccagtctggcaggtgaatat

SEQ ID NO: 103699 - DNA, 26 bp, Homo sapiens
ataagccagtctggcaggtgaatatt

SEQ ID NO: 103700 - DNA, 26 bp, Homo sapiens
taagccagtctggcaggtgaatattg

SEQ ID NO: 103701 - DNA, 26 bp, Homo sapiens
aagccagtctggcaggtgaatattga

SEQ ID NO: 103702 - DNA, 26 bp, Homo sapiens
agccagtctggcaggtgaatattgaa

SEQ ID NO: 103703 - DNA, 26 bp, Homo sapiens
gccagtctggcaggtgaatattgaat

SEQ ID NO: 103704 - DNA, 26 bp, Homo sapiens
ccagtctggcaggtgaatattgaatt

SEQ ID NO: 103705 - DNA, 26 bp, Homo sapiens
cagtctggcaggtgaatattgaattc

SEQ ID NO: 103706 - DNA, 26 bp, Homo sapiens
agtctggcaggtgaatattgaattct

SEQ ID NO: 103707 - DNA, 26 bp, Homo sapiens
gtctggcaggtgaatattgaattctg

SEQ ID NO: 103708 - DNA, 26 bp, Homo sapiens
tctggcaggtgaatattgaattctga

SEQ ID NO: 103709 - DNA, 26 bp, Homo sapiens
ctggcaggtgaatattgaattctgat

SEQ ID NO: 103710 - DNA, 26 bp, Homo sapiens
tggcaggtgaatattgaattctgatg

SEQ ID NO: 103711 - DNA, 26 bp, Homo sapiens
ggcaggtgaatattgaattctgatgg

SEQ ID NO: 103712 - DNA, 26 bp, Homo sapiens
gcaggtgaatattgaattctgatggt

SEQ ID NO: 103713 - DNA, 26 bp, Homo sapiens
caggtgaatattgaattctgatggtg

SEQ ID NO: 103714 - DNA, 26 bp, Homo sapiens
aggtgaatattgaattctgatggtgt

SEQ ID NO: 103715 - DNA, 26 bp, Homo sapiens
ggtgaatattgaattctgatggtgtg

SEQ ID NO: 103716 - DNA, 26 bp, Homo sapiens
gtgaatattgaattctgatggtgtgt

SEQ ID NO: 103717 - DNA, 26 bp, Homo sapiens
tgaatattgaattctgatggtgtgtg

SEQ ID NO: 103718 - DNA, 26 bp, Homo sapiens
gaatattgaattctgatggtgtgtgt

SEQ ID NO: 103719 - DNA, 26 bp, Homo sapiens
aatattgaattctgatggtgtgtgtt

SEQ ID NO: 103720 - DNA, 26 bp, Homo sapiens
atattgaattctgatggtgtgtgttt

SEQ ID NO: 103721 - DNA, 26 bp, Homo sapiens
tattgaattctgatggtgtgtgtttg

SEQ ID NO: 103722 - DNA, 26 bp, Homo sapiens
attgaattctgatggtgtgtgtttga

SEQ ID NO: 103723 - DNA, 26 bp, Homo sapiens
ttgaattctgatggtgtgtgtttgag

SEQ ID NO: 103724 - DNA, 26 bp, Homo sapiens
tgaattctgatggtgtgtgtttgaga

SEQ ID NO: 103725 - DNA, 26 bp, Homo sapiens
gaattctgatggtgtgtgtttgagaa

SEQ ID NO: 103726 - DNA, 26 bp, Homo sapiens
aattctgatggtgtgtgtttgagaag

SEQ ID NO: 103727 - DNA, 26 bp, Homo sapiens
attctgatggtgtgtgtttgagaagg

SEQ ID NO: 103728 - DNA, 26 bp, Homo sapiens
ttctgatggtgtgtgtttgagaaggt

SEQ ID NO: 103729 - DNA, 26 bp, Homo sapiens
tctgatggtgtgtgtttgagaaggtc

SEQ ID NO: 103730 - DNA, 26 bp, Homo sapiens
ctgatggtgtgtgtttgagaaggtcc

SEQ ID NO: 103731 - DNA, 26 bp, Homo sapiens
tgatggtgtgtgtttgagaaggtcct

SEQ ID NO: 103732 - DNA, 26 bp, Homo sapiens
gatggtgtgtgtttgagaaggtccta

SEQ ID NO: 103733 - DNA, 26 bp, Homo sapiens
atggtgtgtgtttgagaaggtcctat

SEQ ID NO: 103734 - DNA, 26 bp, Homo sapiens
tggtgtgtgtttgagaaggtcctata

SEQ ID NO: 103735 - DNA, 26 bp, Homo sapiens
ggtgtgtgtttgagaaggtcctatag

SEQ ID NO: 103736 - DNA, 26 bp, Homo sapiens
gtgtgtgtttgagaaggtcctatagc

SEQ ID NO: 103737 - DNA, 26 bp, Homo sapiens
tgtgtgtttgagaaggtcctatagca

SEQ ID NO: 103738 - DNA, 26 bp, Homo sapiens
gtgtgtttgagaaggtcctatagcac

SEQ ID NO: 103739 - DNA, 26 bp, Homo sapiens
tgtgtttgagaaggtcctatagcacg

SEQ ID NO: 103740 - DNA, 26 bp, Homo sapiens
gtgtttgagaaggtcctatagcacgt

SEQ ID NO: 103741 - DNA, 26 bp, Homo sapiens
tgtttgagaaggtcctatagcacgtt

SEQ ID NO: 103742 - DNA, 26 bp, Homo sapiens
gtttgagaaggtcctatagcacgttc

SEQ ID NO: 103743 - DNA, 26 bp, Homo sapiens
tttgagaaggtcctatagcacgttca

SEQ ID NO: 103744 - DNA, 26 bp, Homo sapiens
ttgagaaggtcctatagcacgttcaa

SEQ ID NO: 103745 - DNA, 26 bp, Homo sapiens
tgagaaggtcctatagcacgttcaaa

SEQ ID NO: 103746 - DNA, 26 bp, Homo sapiens
gagaaggtcctatagcacgttcaaag

SEQ ID NO: 103747 - DNA, 26 bp, Homo sapiens
agaaggtcctatagcacgttcaaagc

SEQ ID NO: 103748 - DNA, 26 bp, Homo sapiens
gaaggtcctatagcacgttcaaagcg

SEQ ID NO: 103749 - DNA, 26 bp, Homo sapiens
aaggtcctatagcacgttcaaagcga

SEQ ID NO: 103750 - DNA, 26 bp, Homo sapiens
aggtcctatagcacgttcaaagcgac

SEQ ID NO: 103751 - DNA, 26 bp, Homo sapiens
ggtcctatagcacgttcaaagcgacg

SEQ ID NO: 103752 - DNA, 26 bp, Homo sapiens
gtcctatagcacgttcaaagcgacgt

SEQ ID NO: 103753 - DNA, 26 bp, Homo sapiens
tcctatagcacgttcaaagcgacgtc

SEQ ID NO: 103754 - DNA, 26 bp, Homo sapiens
cctatagcacgttcaaagcgacgtct

SEQ ID NO: 103755 - DNA, 26 bp, Homo sapiens
ctatagcacgttcaaagcgacgtctc

SEQ ID NO: 103756 - DNA, 26 bp, Homo sapiens
tatagcacgttcaaagcgacgtctcc

SEQ ID NO: 103757 - DNA, 26 bp, Homo sapiens
atagcacgttcaaagcgacgtctcct

SEQ ID NO: 103758 - DNA, 26 bp, Homo sapiens
tagcacgttcaaagcgacgtctccta

SEQ ID NO: 103759 - DNA, 26 bp, Homo sapiens
agcacgttcaaagcgacgtctcctaa

SEQ ID NO: 103760 - DNA, 26 bp, Homo sapiens
gcacgttcaaagcgacgtctcctaac

SEQ ID NO: 103761 - DNA, 26 bp, Homo sapiens
cacgttcaaagcgacgtctcctaacc

SEQ ID NO: 103762 - DNA, 26 bp, Homo sapiens
acgttcaaagcgacgtctcctaacct

SEQ ID NO: 103763 - DNA, 26 bp, Homo sapiens
cgttcaaagcgacgtctcctaacctg

SEQ ID NO: 103764 - DNA, 26 bp, Homo sapiens
gttcaaagcgacgtctcctaacctgt

SEQ ID NO: 103765 - DNA, 26 bp, Homo sapiens
ttcaaagcgacgtctcctaacctgtg

SEQ ID NO: 103766 - DNA, 26 bp, Homo sapiens
tcaaagcgacgtctcctaacctgtgt

SEQ ID NO: 103767 - DNA, 26 bp, Homo sapiens
caaagcgacgtctcctaacctgtgtc

SEQ ID NO: 103768 - DNA, 26 bp, Homo sapiens
aaagcgacgtctcctaacctgtgtcg

SEQ ID NO: 103769 - DNA, 26 bp, Homo sapiens
aagcgacgtctcctaacctgtgtcgt

SEQ ID NO: 103770 - DNA, 26 bp, Homo sapiens
agcgacgtctcctaacctgtgtcgtt

SEQ ID NO: 103771 - DNA, 26 bp, Homo sapiens
gcgacgtctcctaacctgtgtcgttt

SEQ ID NO: 103772 - DNA, 26 bp, Homo sapiens
cgacgtctcctaacctgtgtcgtttc

SEQ ID NO: 103773 - DNA, 26 bp, Homo sapiens
gacgtctcctaacctgtgtcgtttct

SEQ ID NO: 103774 - DNA, 26 bp, Homo sapiens
acgtctcctaacctgtgtcgtttctc

SEQ ID NO: 103775 - DNA, 26 bp, Homo sapiens
cgtctcctaacctgtgtcgtttctcc

SEQ ID NO: 103776 - DNA, 26 bp, Homo sapiens
gtctcctaacctgtgtcgtttctcca

SEQ ID NO: 103777 - DNA, 26 bp, Homo sapiens
tctcctaacctgtgtcgtttctccat

SEQ ID NO: 103778 - DNA, 26 bp, Homo sapiens
ctcctaacctgtgtcgtttctccata

SEQ ID NO: 103779 - DNA, 26 bp, Homo sapiens
tcctaacctgtgtcgtttctccatac

SEQ ID NO: 103780 - DNA, 26 bp, Homo sapiens
cctaacctgtgtcgtttctccataca

SEQ ID NO: 103781 - DNA, 26 bp, Homo sapiens
ctaacctgtgtcgtttctccatacac

SEQ ID NO: 103782 - DNA, 26 bp, Homo sapiens
taacctgtgtcgtttctccatacact

SEQ ID NO: 103783 - DNA, 26 bp, Homo sapiens
aacctgtgtcgtttctccatacactg

SEQ ID NO: 103784 - DNA, 26 bp, Homo sapiens
acctgtgtcgtttctccatacactgg

SEQ ID NO: 103785 - DNA, 26 bp, Homo sapiens
cctgtgtcgtttctccatacactgga

SEQ ID NO: 103786 - DNA, 26 bp, Homo sapiens
ctgtgtcgtttctccatacactggat

SEQ ID NO: 103787 - DNA, 26 bp, Homo sapiens
tgtgtcgtttctccatacactggata

SEQ ID NO: 103788 - DNA, 26 bp, Homo sapiens
gtgtcgtttctccatacactggataa

SEQ ID NO: 103789 - DNA, 26 bp, Homo sapiens
tgtcgtttctccatacactggataat

SEQ ID NO: 103790 - DNA, 26 bp, Homo sapiens
gtcgtttctccatacactggataatt

SEQ ID NO: 103791 - DNA, 26 bp, Homo sapiens
tcgtttctccatacactggataattt

SEQ ID NO: 103792 - DNA, 26 bp, Homo sapiens
cgtttctccatacactggataattta

SEQ ID NO: 103793 - DNA, 26 bp, Homo sapiens
gtttctccatacactggataatttag

SEQ ID NO: 103794 - DNA, 26 bp, Homo sapiens
tttctccatacactggataatttaga

SEQ ID NO: 103795 - DNA, 26 bp, Homo sapiens
ttctccatacactggataatttagag

SEQ ID NO: 103796 - DNA, 26 bp, Homo sapiens
tctccatacactggataatttagagc

SEQ ID NO: 103797 - DNA, 26 bp, Homo sapiens
ctccatacactggataatttagagca

SEQ ID NO: 103798 - DNA, 26 bp, Homo sapiens
tccatacactggataatttagagcag

SEQ ID NO: 103799 - DNA, 26 bp, Homo sapiens
ccatacactggataatttagagcagg

SEQ ID NO: 103800 - DNA, 26 bp, Homo sapiens
catacactggataatttagagcaggc

SEQ ID NO: 103801 - DNA, 26 bp, Homo sapiens
atacactggataatttagagcaggcc

SEQ ID NO: 103802 - DNA, 26 bp, Homo sapiens
tacactggataatttagagcaggcct

SEQ ID NO: 103803 - DNA, 26 bp, Homo sapiens
acactggataatttagagcaggcctt

SEQ ID NO: 103804 - DNA, 26 bp, Homo sapiens
cactggataatttagagcaggccttc

SEQ ID NO: 103805 - DNA, 26 bp, Homo sapiens
actggataatttagagcaggccttct

SEQ ID NO: 103806 - DNA, 26 bp, Homo sapiens
ctggataatttagagcaggccttctt

SEQ ID NO: 103807 - DNA, 26 bp, Homo sapiens
tggataatttagagcaggccttcttc

SEQ ID NO: 103808 - DNA, 26 bp, Homo sapiens
ggataatttagagcaggccttcttcc

SEQ ID NO: 103809 - DNA, 26 bp, Homo sapiens
gataatttagagcaggccttcttcca

SEQ ID NO: 103810 - DNA, 26 bp, Homo sapiens
ataatttagagcaggccttcttccag

SEQ ID NO: 103811 - DNA, 26 bp, Homo sapiens
taatttagagcaggccttcttccagg

SEQ ID NO: 103812 - DNA, 26 bp, Homo sapiens
aatttagagcaggccttcttccaggg

SEQ ID NO: 103813 - DNA, 26 bp, Homo sapiens
atttagagcaggccttcttccagggc

SEQ ID NO: 103814 - DNA, 26 bp, Homo sapiens
tttagagcaggccttcttccagggca

SEQ ID NO: 103815 - DNA, 26 bp, Homo sapiens
ttagagcaggccttcttccagggcac

SEQ ID NO: 103816 - DNA, 26 bp, Homo sapiens
tagagcaggccttcttccagggcact

SEQ ID NO: 103817 - DNA, 26 bp, Homo sapiens
agagcaggccttcttccagggcactt

SEQ ID NO: 103818 - DNA, 26 bp, Homo sapiens
gagcaggccttcttccagggcacttc

SEQ ID NO: 103819 - DNA, 26 bp, Homo sapiens
agcaggccttcttccagggcacttct

SEQ ID NO: 103820 - DNA, 26 bp, Homo sapiens
gcaggccttcttccagggcacttctg

SEQ ID NO: 103821 - DNA, 26 bp, Homo sapiens
caggccttcttccagggcacttctgt

SEQ ID NO: 103822 - DNA, 26 bp, Homo sapiens
aggccttcttccagggcacttctgta

SEQ ID NO: 103823 - DNA, 26 bp, Homo sapiens
ggccttcttccagggcacttctgtac

SEQ ID NO: 103824 - DNA, 26 bp, Homo sapiens
gccttcttccagggcacttctgtaca

SEQ ID NO: 103825 - DNA, 26 bp, Homo sapiens
ccttcttccagggcacttctgtacag

SEQ ID NO: 103826 - DNA, 26 bp, Homo sapiens
cttcttccagggcacttctgtacagg

SEQ ID NO: 103827 - DNA, 26 bp, Homo sapiens
ttcttccagggcacttctgtacaggt

SEQ ID NO: 103828 - DNA, 26 bp, Homo sapiens
tcttccagggcacttctgtacaggtt

SEQ ID NO: 103829 - DNA, 26 bp, Homo sapiens
cttccagggcacttctgtacaggttc

SEQ ID NO: 103830 - DNA, 26 bp, Homo sapiens
ttccagggcacttctgtacaggttcc

SEQ ID NO: 103831 - DNA, 26 bp, Homo sapiens
tccagggcacttctgtacaggttcct

SEQ ID NO: 103832 - DNA, 26 bp, Homo sapiens
ccagggcacttctgtacaggttcctg

SEQ ID NO: 103833 - DNA, 26 bp, Homo sapiens
cagggcacttctgtacaggttcctgt

SEQ ID NO: 103834 - DNA, 26 bp, Homo sapiens
agggcacttctgtacaggttcctgtt

SEQ ID NO: 103835 - DNA, 26 bp, Homo sapiens
gggcacttctgtacaggttcctgttt

SEQ ID NO: 103836 - DNA, 26 bp, Homo sapiens
ggcacttctgtacaggttcctgttta

SEQ ID NO: 103837 - DNA, 26 bp, Homo sapiens
gcacttctgtacaggttcctgtttat

SEQ ID NO: 103838 - DNA, 26 bp, Homo sapiens
cacttctgtacaggttcctgtttata

SEQ ID NO: 103839 - DNA, 26 bp, Homo sapiens
acttctgtacaggttcctgtttataa

SEQ ID NO: 103840 - DNA, 26 bp, Homo sapiens
cttctgtacaggttcctgtttataaa

SEQ ID NO: 103841 - DNA, 26 bp, Homo sapiens
ttctgtacaggttcctgtttataaat

SEQ ID NO: 103842 - DNA, 26 bp, Homo sapiens
tctgtacaggttcctgtttataaata

SEQ ID NO: 103843 - DNA, 26 bp, Homo sapiens
ctgtacaggttcctgtttataaatat

SEQ ID NO: 103844 - DNA, 26 bp, Homo sapiens
tgtacaggttcctgtttataaatata

SEQ ID NO: 103845 - DNA, 26 bp, Homo sapiens
gtacaggttcctgtttataaatatac

SEQ ID NO: 103846 - DNA, 26 bp, Homo sapiens
tacaggttcctgtttataaatatact

SEQ ID NO: 103847 - DNA, 26 bp, Homo sapiens
acaggttcctgtttataaatatactg

SEQ ID NO: 103848 - DNA, 26 bp, Homo sapiens
caggttcctgtttataaatatactgc

SEQ ID NO: 103849 - DNA, 26 bp, Homo sapiens
aggttcctgtttataaatatactgct

SEQ ID NO: 103850 - DNA, 26 bp, Homo sapiens
ggttcctgtttataaatatactgctg

SEQ ID NO: 103851 - DNA, 26 bp, Homo sapiens
gttcctgtttataaatatactgctga

SEQ ID NO: 103852 - DNA, 26 bp, Homo sapiens
ttcctgtttataaatatactgctgaa

SEQ ID NO: 103853 - DNA, 26 bp, Homo sapiens
tcctgtttataaatatactgctgaat

SEQ ID NO: 103854 - DNA, 26 bp, Homo sapiens
cctgtttataaatatactgctgaatg

SEQ ID NO: 103855 - DNA, 26 bp, Homo sapiens
ctgtttataaatatactgctgaatgc

SEQ ID NO: 103856 - DNA, 26 bp, Homo sapiens
tgtttataaatatactgctgaatgct

SEQ ID NO: 103857 - DNA, 26 bp, Homo sapiens
gtttataaatatactgctgaatgctg

SEQ ID NO: 103858 - DNA, 26 bp, Homo sapiens
tttataaatatactgctgaatgctgc

SEQ ID NO: 103859 - DNA, 26 bp, Homo sapiens
ttataaatatactgctgaatgctgcc

SEQ ID NO: 103860 - DNA, 26 bp, Homo sapiens
tataaatatactgctgaatgctgcca

SEQ ID NO: 103861 - DNA, 26 bp, Homo sapiens
ataaatatactgctgaatgctgccac

SEQ ID NO: 103862 - DNA, 26 bp, Homo sapiens
taaatatactgctgaatgctgccacc

SEQ ID NO: 103863 - DNA, 26 bp, Homo sapiens
aaatatactgctgaatgctgccacct

SEQ ID NO: 103864 - DNA, 26 bp, Homo sapiens
aatatactgctgaatgctgccacctc

SEQ ID NO: 103865 - DNA, 26 bp, Homo sapiens
atatactgctgaatgctgccacctct

SEQ ID NO: 103866 - DNA, 26 bp, Homo sapiens
tatactgctgaatgctgccacctctc

SEQ ID NO: 103867 - DNA, 26 bp, Homo sapiens
atactgctgaatgctgccacctctct

SEQ ID NO: 103868 - DNA, 26 bp, Homo sapiens
tactgctgaatgctgccacctctctt

SEQ ID NO: 103869 - DNA, 26 bp, Homo sapiens
actgctgaatgctgccacctctcttg

SEQ ID NO: 103870 - DNA, 26 bp, Homo sapiens
ctgctgaatgctgccacctctcttga

SEQ ID NO: 103871 - DNA, 26 bp, Homo sapiens
tgctgaatgctgccacctctcttgaa

SEQ ID NO: 103872 - DNA, 26 bp, Homo sapiens
gctgaatgctgccacctctcttgaaa

SEQ ID NO: 103873 - DNA, 26 bp, Homo sapiens
ctgaatgctgccacctctcttgaaaa

SEQ ID NO: 103874 - DNA, 26 bp, Homo sapiens
tgaatgctgccacctctcttgaaaaa

SEQ ID NO: 103875 - DNA, 26 bp, Homo sapiens
gaatgctgccacctctcttgaaaaaa

SEQ ID NO: 103876 - DNA, 26 bp, Homo sapiens
aatgctgccacctctcttgaaaaaat

SEQ ID NO: 103877 - DNA, 26 bp, Homo sapiens
atgctgccacctctcttgaaaaaata

SEQ ID NO: 103878 - DNA, 26 bp, Homo sapiens
tgctgccacctctcttgaaaaaatac

SEQ ID NO: 103879 - DNA, 26 bp, Homo sapiens
gctgccacctctcttgaaaaaataca

SEQ ID NO: 103880 - DNA, 26 bp, Homo sapiens
ctgccacctctcttgaaaaaatacac

SEQ ID NO: 103881 - DNA, 26 bp, Homo sapiens
tgccacctctcttgaaaaaatacaca

SEQ ID NO: 103882 - DNA, 26 bp, Homo sapiens
gccacctctcttgaaaaaatacacag

SEQ ID NO: 103883 - DNA, 26 bp, Homo sapiens
ccacctctcttgaaaaaatacacaga

SEQ ID NO: 103884 - DNA, 26 bp, Homo sapiens
cacctctcttgaaaaaatacacagat

SEQ ID NO: 103885 - DNA, 26 bp, Homo sapiens
acctctcttgaaaaaatacacagatt

SEQ ID NO: 103886 - DNA, 26 bp, Homo sapiens
cctctcttgaaaaaatacacagattc

SEQ ID NO: 103887 - DNA, 26 bp, Homo sapiens
ctctcttgaaaaaatacacagattca

SEQ ID NO: 103888 - DNA, 26 bp, Homo sapiens
tctcttgaaaaaatacacagattcag

SEQ ID NO: 103889 - DNA, 26 bp, Homo sapiens
ctcttgaaaaaatacacagattcagg

SEQ ID NO: 103890 - DNA, 26 bp, Homo sapiens
tcttgaaaaaatacacagattcaggc

SEQ ID NO: 103891 - DNA, 26 bp, Homo sapiens
cttgaaaaaatacacagattcaggcc

SEQ ID NO: 103892 - DNA, 26 bp, Homo sapiens
ttgaaaaaatacacagattcaggcca

SEQ ID NO: 103893 - DNA, 26 bp, Homo sapiens
tgaaaaaatacacagattcaggccag

SEQ ID NO: 103894 - DNA, 26 bp, Homo sapiens
gaaaaaatacacagattcaggccagt

SEQ ID NO: 103895 - DNA, 26 bp, Homo sapiens
aaaaaatacacagattcaggccagtt

SEQ ID NO: 103896 - DNA, 26 bp, Homo sapiens
aaaaatacacagattcaggccagttc

SEQ ID NO: 103897 - DNA, 26 bp, Homo sapiens
aaaatacacagattcaggccagttct

SEQ ID NO: 103898 - DNA, 26 bp, Homo sapiens
aaatacacagattcaggccagttctt

SEQ ID NO: 103899 - DNA, 26 bp, Homo sapiens
aatacacagattcaggccagttctta

SEQ ID NO: 103900 - DNA, 26 bp, Homo sapiens
atacacagattcaggccagttcttat

SEQ ID NO: 103901 - DNA, 26 bp, Homo sapiens
tacacagattcaggccagttcttata

SEQ ID NO: 103902 - DNA, 26 bp, Homo sapiens
acacagattcaggccagttcttatat

SEQ ID NO: 103903 - DNA, 26 bp, Homo sapiens
cacagattcaggccagttcttatatt

SEQ ID NO: 103904 - DNA, 26 bp, Homo sapiens
acagattcaggccagttcttatattt

SEQ ID NO: 103905 - DNA, 26 bp, Homo sapiens
cagattcaggccagttcttatattta

SEQ ID NO: 103906 - DNA, 26 bp, Homo sapiens
agattcaggccagttcttatatttag

SEQ ID NO: 103907 - DNA, 26 bp, Homo sapiens
gattcaggccagttcttatatttagc

SEQ ID NO: 103908 - DNA, 26 bp, Homo sapiens
attcaggccagttcttatatttagct

SEQ ID NO: 103909 - DNA, 26 bp, Homo sapiens
ttcaggccagttcttatatttagctg

SEQ ID NO: 103910 - DNA, 26 bp, Homo sapiens
tcaggccagttcttatatttagctgt

SEQ ID NO: 103911 - DNA, 26 bp, Homo sapiens
caggccagttcttatatttagctgtt

SEQ ID NO: 103912 - DNA, 26 bp, Homo sapiens
aggccagttcttatatttagctgttg

SEQ ID NO: 103913 - DNA, 26 bp, Homo sapiens
ggccagttcttatatttagctgttga

SEQ ID NO: 103914 - DNA, 26 bp, Homo sapiens
gccagttcttatatttagctgttgaa

SEQ ID NO: 103915 - DNA, 26 bp, Homo sapiens
ccagttcttatatttagctgttgaaa

SEQ ID NO: 103916 - DNA, 26 bp, Homo sapiens
cagttcttatatttagctgttgaaag

SEQ ID NO: 103917 - DNA, 26 bp, Homo sapiens
agttcttatatttagctgttgaaagc

SEQ ID NO: 103918 - DNA, 26 bp, Homo sapiens
gttcttatatttagctgttgaaagcg

SEQ ID NO: 103919 - DNA, 26 bp, Homo sapiens
ttcttatatttagctgttgaaagcgc

SEQ ID NO: 103920 - DNA, 26 bp, Homo sapiens
tcttatatttagctgttgaaagcgct

SEQ ID NO: 103921 - DNA, 26 bp, Homo sapiens
cttatatttagctgttgaaagcgctg

SEQ ID NO: 103922 - DNA, 26 bp, Homo sapiens
ttatatttagctgttgaaagcgctgc

SEQ ID NO: 103923 - DNA, 26 bp, Homo sapiens
tatatttagctgttgaaagcgctgcc

SEQ ID NO: 103924 - DNA, 26 bp, Homo sapiens
atatttagctgttgaaagcgctgcca

SEQ ID NO: 103925 - DNA, 26 bp, Homo sapiens
tatttagctgttgaaagcgctgccac

SEQ ID NO: 103926 - DNA, 26 bp, Homo sapiens
atttagctgttgaaagcgctgccact

SEQ ID NO: 103927 - DNA, 26 bp, Homo sapiens
tttagctgttgaaagcgctgccacta

SEQ ID NO: 103928 - DNA, 26 bp, Homo sapiens
ttagctgttgaaagcgctgccactat

SEQ ID NO: 103929 - DNA, 26 bp, Homo sapiens
tagctgttgaaagcgctgccactatt

SEQ ID NO: 103930 - DNA, 26 bp, Homo sapiens
agctgttgaaagcgctgccactattt

SEQ ID NO: 103931 - DNA, 26 bp, Homo sapiens
gctgttgaaagcgctgccactatttg

SEQ ID NO: 103932 - DNA, 26 bp, Homo sapiens
ctgttgaaagcgctgccactatttgt

SEQ ID NO: 103933 - DNA, 26 bp, Homo sapiens
tgttgaaagcgctgccactatttgtc

SEQ ID NO: 103934 - DNA, 26 bp, Homo sapiens
gttgaaagcgctgccactatttgtcc

SEQ ID NO: 103935 - DNA, 26 bp, Homo sapiens
ttgaaagcgctgccactatttgtcca

SEQ ID NO: 103936 - DNA, 26 bp, Homo sapiens
tgaaagcgctgccactatttgtccag

SEQ ID NO: 103937 - DNA, 26 bp, Homo sapiens
gaaagcgctgccactatttgtccagt

SEQ ID NO: 103938 - DNA, 26 bp, Homo sapiens
aaagcgctgccactatttgtccagtt

SEQ ID NO: 103939 - DNA, 26 bp, Homo sapiens
aagcgctgccactatttgtccagtta

SEQ ID NO: 103940 - DNA, 26 bp, Homo sapiens
agcgctgccactatttgtccagttag

SEQ ID NO: 103941 - DNA, 26 bp, Homo sapiens
gcgctgccactatttgtccagttagt

SEQ ID NO: 103942 - DNA, 26 bp, Homo sapiens
cgctgccactatttgtccagttagtc

SEQ ID NO: 103943 - DNA, 26 bp, Homo sapiens
gctgccactatttgtccagttagtcc

SEQ ID NO: 103944 - DNA, 26 bp, Homo sapiens
ctgccactatttgtccagttagtcct

SEQ ID NO: 103945 - DNA, 26 bp, Homo sapiens
tgccactatttgtccagttagtcctc

SEQ ID NO: 103946 - DNA, 26 bp, Homo sapiens
gccactatttgtccagttagtcctcc

SEQ ID NO: 103947 - DNA, 26 bp, Homo sapiens
ccactatttgtccagttagtcctcca

SEQ ID NO: 103948 - DNA, 26 bp, Homo sapiens
cactatttgtccagttagtcctccaa

SEQ ID NO: 103949 - DNA, 26 bp, Homo sapiens
actatttgtccagttagtcctccaaa

SEQ ID NO: 103950 - DNA, 26 bp, Homo sapiens
ctatttgtccagttagtcctccaaat

SEQ ID NO: 103951 - DNA, 26 bp, Homo sapiens
tatttgtccagttagtcctccaaatc

SEQ ID NO: 103952 - DNA, 26 bp, Homo sapiens
atttgtccagttagtcctccaaatcc

SEQ ID NO: 103953 - DNA, 26 bp, Homo sapiens
tttgtccagttagtcctccaaatcct

SEQ ID NO: 103954 - DNA, 26 bp, Homo sapiens
ttgtccagttagtcctccaaatcctt

SEQ ID NO: 103955 - DNA, 26 bp, Homo sapiens
tgtccagttagtcctccaaatccttt

SEQ ID NO: 103956 - DNA, 26 bp, Homo sapiens
gtccagttagtcctccaaatcctttg

SEQ ID NO: 103957 - DNA, 26 bp, Homo sapiens
tccagttagtcctccaaatcctttga

SEQ ID NO: 103958 - DNA, 26 bp, Homo sapiens
ccagttagtcctccaaatcctttgaa

SEQ ID NO: 103959 - DNA, 26 bp, Homo sapiens
cagttagtcctccaaatcctttgaaa

SEQ ID NO: 103960 - DNA, 26 bp, Homo sapiens
agttagtcctccaaatcctttgaaaa

SEQ ID NO: 103961 - DNA, 26 bp, Homo sapiens
gttagtcctccaaatcctttgaaaat

SEQ ID NO: 103962 - DNA, 26 bp, Homo sapiens
ttagtcctccaaatcctttgaaaatt

SEQ ID NO: 103963 - DNA, 26 bp, Homo sapiens
tagtcctccaaatcctttgaaaattg

SEQ ID NO: 103964 - DNA, 26 bp, Homo sapiens
agtcctccaaatcctttgaaaattgg

SEQ ID NO: 103965 - DNA, 26 bp, Homo sapiens
gtcctccaaatcctttgaaaattggt

SEQ ID NO: 103966 - DNA, 26 bp, Homo sapiens
tcctccaaatcctttgaaaattggtt

SEQ ID NO: 103967 - DNA, 26 bp, Homo sapiens
cctccaaatcctttgaaaattggttt

SEQ ID NO: 103968 - DNA, 26 bp, Homo sapiens
ctccaaatcctttgaaaattggtttg

SEQ ID NO: 103969 - DNA, 26 bp, Homo sapiens
tccaaatcctttgaaaattggtttgg

SEQ ID NO: 103970 - DNA, 26 bp, Homo sapiens
ccaaatcctttgaaaattggtttggg

SEQ ID NO: 103971 - DNA, 26 bp, Homo sapiens
caaatcctttgaaaattggtttgggg

SEQ ID NO: 103972 - DNA, 26 bp, Homo sapiens
aaatcctttgaaaattggtttggggt

SEQ ID NO: 103973 - DNA, 26 bp, Homo sapiens
aatcctttgaaaattggtttggggta

SEQ ID NO: 103974 - DNA, 26 bp, Homo sapiens
atcctttgaaaattggtttggggtac

SEQ ID NO: 103975 - DNA, 26 bp, Homo sapiens
tcctttgaaaattggtttggggtacc

SEQ ID NO: 103976 - DNA, 26 bp, Homo sapiens
cctttgaaaattggtttggggtaccc

SEQ ID NO: 103977 - DNA, 26 bp, Homo sapiens
ctttgaaaattggtttggggtaccct

SEQ ID NO: 103978 - DNA, 26 bp, Homo sapiens
tttgaaaattggtttggggtaccctg

SEQ ID NO: 103979 - DNA, 26 bp, Homo sapiens
ttgaaaattggtttggggtaccctgc

SEQ ID NO: 103980 - DNA, 26 bp, Homo sapiens
tgaaaattggtttggggtaccctgca

SEQ ID NO: 103981 - DNA, 26 bp, Homo sapiens
gaaaattggtttggggtaccctgcat

SEQ ID NO: 103982 - DNA, 26 bp, Homo sapiens
aaaattggtttggggtaccctgcatc

SEQ ID NO: 103983 - DNA, 26 bp, Homo sapiens
aaattggtttggggtaccctgcatct

SEQ ID NO: 103984 - DNA, 26 bp, Homo sapiens
aattggtttggggtaccctgcatctt

SEQ ID NO: 103985 - DNA, 26 bp, Homo sapiens
attggtttggggtaccctgcatcttt

SEQ ID NO: 103986 - DNA, 26 bp, Homo sapiens
ttggtttggggtaccctgcatctttt

SEQ ID NO: 103987 - DNA, 26 bp, Homo sapiens
tggtttggggtaccctgcatctttta

SEQ ID NO: 103988 - DNA, 26 bp, Homo sapiens
ggtttggggtaccctgcatcttttat

SEQ ID NO: 103989 - DNA, 26 bp, Homo sapiens
gtttggggtaccctgcatcttttata

SEQ ID NO: 103990 - DNA, 26 bp, Homo sapiens
tttggggtaccctgcatcttttatat

SEQ ID NO: 103991 - DNA, 26 bp, Homo sapiens
ttggggtaccctgcatcttttatatc

SEQ ID NO: 103992 - DNA, 26 bp, Homo sapiens
tggggtaccctgcatcttttatatca

SEQ ID NO: 103993 - DNA, 26 bp, Homo sapiens
ggggtaccctgcatcttttatatcat

SEQ ID NO: 103994 - DNA, 26 bp, Homo sapiens
gggtaccctgcatcttttatatcatt

SEQ ID NO: 103995 - DNA, 26 bp, Homo sapiens
ggtaccctgcatcttttatatcattg

SEQ ID NO: 103996 - DNA, 26 bp, Homo sapiens
gtaccctgcatcttttatatcattgg

SEQ ID NO: 103997 - DNA, 26 bp, Homo sapiens
taccctgcatcttttatatcattggt

SEQ ID NO: 103998 - DNA, 26 bp, Homo sapiens
accctgcatcttttatatcattggta

SEQ ID NO: 103999 - DNA, 26 bp, Homo sapiens
ccctgcatcttttatatcattggtaa

SEQ ID NO: 104000 - DNA, 26 bp, Homo sapiens
cctgcatcttttatatcattggtaaa

SEQ ID NO: 104001 - DNA, 26 bp, Homo sapiens
ctgcatcttttatatcattggtaaaa

SEQ ID NO: 104002 - DNA, 26 bp, Homo sapiens
tgcatcttttatatcattggtaaaac

SEQ ID NO: 104003 - DNA, 26 bp, Homo sapiens
gcatcttttatatcattggtaaaacg

SEQ ID NO: 104004 - DNA, 26 bp, Homo sapiens
catcttttatatcattggtaaaacgc

SEQ ID NO: 104005 - DNA, 26 bp, Homo sapiens
atcttttatatcattggtaaaacgcc

SEQ ID NO: 104006 - DNA, 26 bp, Homo sapiens
tcttttatatcattggtaaaacgcca

SEQ ID NO: 104007 - DNA, 26 bp, Homo sapiens
cttttatatcattggtaaaacgccag

SEQ ID NO: 104008 - DNA, 26 bp, Homo sapiens
ttttatatcattggtaaaacgccagt

SEQ ID NO: 104009 - DNA, 26 bp, Homo sapiens
tttatatcattggtaaaacgccagta

SEQ ID NO: 104010 - DNA, 26 bp, Homo sapiens
ttatatcattggtaaaacgccagtac

SEQ ID NO: 104011 - DNA, 26 bp, Homo sapiens
tatatcattggtaaaacgccagtact

SEQ ID NO: 104012 - DNA, 26 bp, Homo sapiens
atatcattggtaaaacgccagtactg

SEQ ID NO: 104013 - DNA, 26 bp, Homo sapiens
tatcattggtaaaacgccagtactga

SEQ ID NO: 104014 - DNA, 26 bp, Homo sapiens
atcattggtaaaacgccagtactgag

SEQ ID NO: 104015 - DNA, 26 bp, Homo sapiens
tcattggtaaaacgccagtactgaga

SEQ ID NO: 104016 - DNA, 26 bp, Homo sapiens
cattggtaaaacgccagtactgagaa

SEQ ID NO: 104017 - DNA, 26 bp, Homo sapiens
attggtaaaacgccagtactgagaat

SEQ ID NO: 104018 - DNA, 26 bp, Homo sapiens
ttggtaaaacgccagtactgagaatc

SEQ ID NO: 104019 - DNA, 26 bp, Homo sapiens
tggtaaaacgccagtactgagaatcc

SEQ ID NO: 104020 - DNA, 26 bp, Homo sapiens
ggtaaaacgccagtactgagaatcct

SEQ ID NO: 104021 - DNA, 26 bp, Homo sapiens
gtaaaacgccagtactgagaatcctt

SEQ ID NO: 104022 - DNA, 26 bp, Homo sapiens
taaaacgccagtactgagaatcctta

SEQ ID NO: 104023 - DNA, 26 bp, Homo sapiens
aaaacgccagtactgagaatccttaa

SEQ ID NO: 104024 - DNA, 26 bp, Homo sapiens
aaacgccagtactgagaatccttaaa

SEQ ID NO: 104025 - DNA, 26 bp, Homo sapiens
aacgccagtactgagaatccttaaag

SEQ ID NO: 104026 - DNA, 26 bp, Homo sapiens
acgccagtactgagaatccttaaaga

SEQ ID NO: 104027 - DNA, 26 bp, Homo sapiens
cgccagtactgagaatccttaaagaa

SEQ ID NO: 104028 - DNA, 26 bp, Homo sapiens
gccagtactgagaatccttaaagaag

SEQ ID NO: 104029 - DNA, 26 bp, Homo sapiens
ccagtactgagaatccttaaagaaga

SEQ ID NO: 104030 - DNA, 26 bp, Homo sapiens
cagtactgagaatccttaaagaagaa

SEQ ID NO: 104031 - DNA, 26 bp, Homo sapiens
agtactgagaatccttaaagaagaaa

SEQ ID NO: 104032 - DNA, 26 bp, Homo sapiens
gtactgagaatccttaaagaagaaag

SEQ ID NO: 104033 - DNA, 26 bp, Homo sapiens
tactgagaatccttaaagaagaaagt

SEQ ID NO: 104034 - DNA, 26 bp, Homo sapiens
actgagaatccttaaagaagaaagtt

SEQ ID NO: 104035 - DNA, 26 bp, Homo sapiens
ctgagaatccttaaagaagaaagttt

SEQ ID NO: 104036 - DNA, 26 bp, Homo sapiens
tgagaatccttaaagaagaaagtttt

SEQ ID NO: 104037 - DNA, 26 bp, Homo sapiens
gagaatccttaaagaagaaagttttt

SEQ ID NO: 104038 - DNA, 26 bp, Homo sapiens
agaatccttaaagaagaaagtttttc

SEQ ID NO: 104039 - DNA, 26 bp, Homo sapiens
gaatccttaaagaagaaagtttttcc

SEQ ID NO: 104040 - DNA, 26 bp, Homo sapiens
aatccttaaagaagaaagtttttcct

SEQ ID NO: 104041 - DNA, 26 bp, Homo sapiens
atccttaaagaagaaagtttttcctt

SEQ ID NO: 104042 - DNA, 26 bp, Homo sapiens
tccttaaagaagaaagtttttccttc

SEQ ID NO: 104043 - DNA, 26 bp, Homo sapiens
ccttaaagaagaaagtttttccttca

SEQ ID NO: 104044 - DNA, 26 bp, Homo sapiens
cttaaagaagaaagtttttccttcac

SEQ ID NO: 104045 - DNA, 26 bp, Homo sapiens
ttaaagaagaaagtttttccttcaca

SEQ ID NO: 104046 - DNA, 26 bp, Homo sapiens
taaagaagaaagtttttccttcacag

SEQ ID NO: 104047 - DNA, 26 bp, Homo sapiens
aaagaagaaagtttttccttcacagt

SEQ ID NO: 104048 - DNA, 26 bp, Homo sapiens
aagaagaaagtttttccttcacagtt

SEQ ID NO: 104049 - DNA, 26 bp, Homo sapiens
agaagaaagtttttccttcacagttg

SEQ ID NO: 104050 - DNA, 26 bp, Homo sapiens
gaagaaagtttttccttcacagttgc

SEQ ID NO: 104051 - DNA, 26 bp, Homo sapiens
aagaaagtttttccttcacagttgca

SEQ ID NO: 104052 - DNA, 26 bp, Homo sapiens
agaaagtttttccttcacagttgcac

SEQ ID NO: 104053 - DNA, 26 bp, Homo sapiens
gaaagtttttccttcacagttgcacc

SEQ ID NO: 104054 - DNA, 26 bp, Homo sapiens
aaagtttttccttcacagttgcacct

SEQ ID NO: 104055 - DNA, 26 bp, Homo sapiens
aagtttttccttcacagttgcaccta

SEQ ID NO: 104056 - DNA, 26 bp, Homo sapiens
agtttttccttcacagttgcacctag

SEQ ID NO: 104057 - DNA, 26 bp, Homo sapiens
gtttttccttcacagttgcacctagt

SEQ ID NO: 104058 - DNA, 26 bp, Homo sapiens
tttttccttcacagttgcacctagta

SEQ ID NO: 104059 - DNA, 26 bp, Homo sapiens
ttttccttcacagttgcacctagtaa

SEQ ID NO: 104060 - DNA, 26 bp, Homo sapiens
tttccttcacagttgcacctagtaaa

SEQ ID NO: 104061 - DNA, 26 bp, Homo sapiens
ttccttcacagttgcacctagtaaaa

SEQ ID NO: 104062 - DNA, 26 bp, Homo sapiens
tccttcacagttgcacctagtaaaaa

SEQ ID NO: 104063 - DNA, 26 bp, Homo sapiens
ccttcacagttgcacctagtaaaaac

SEQ ID NO: 104064 - DNA, 26 bp, Homo sapiens
cttcacagttgcacctagtaaaaaca

SEQ ID NO: 104065 - DNA, 26 bp, Homo sapiens
ttcacagttgcacctagtaaaaacag

SEQ ID NO: 104066 - DNA, 26 bp, Homo sapiens
tcacagttgcacctagtaaaaacagt

SEQ ID NO: 104067 - DNA, 26 bp, Homo sapiens
cacagttgcacctagtaaaaacagta

SEQ ID NO: 104068 - DNA, 26 bp, Homo sapiens
acagttgcacctagtaaaaacagtat

SEQ ID NO: 104069 - DNA, 26 bp, Homo sapiens
cagttgcacctagtaaaaacagtatc

SEQ ID NO: 104070 - DNA, 26 bp, Homo sapiens
agttgcacctagtaaaaacagtatca

SEQ ID NO: 104071 - DNA, 26 bp, Homo sapiens
gttgcacctagtaaaaacagtatcaa

SEQ ID NO: 104072 - DNA, 26 bp, Homo sapiens
ttgcacctagtaaaaacagtatcaat

SEQ ID NO: 104073 - DNA, 26 bp, Homo sapiens
tgcacctagtaaaaacagtatcaatg

SEQ ID NO: 104074 - DNA, 26 bp, Homo sapiens
gcacctagtaaaaacagtatcaatgg

SEQ ID NO: 104075 - DNA, 26 bp, Homo sapiens
cacctagtaaaaacagtatcaatggg

SEQ ID NO: 104076 - DNA, 26 bp, Homo sapiens
acctagtaaaaacagtatcaatgggg

SEQ ID NO: 104077 - DNA, 26 bp, Homo sapiens
cctagtaaaaacagtatcaatggggg

SEQ ID NO: 104078 - DNA, 26 bp, Homo sapiens
ctagtaaaaacagtatcaatggggga

SEQ ID NO: 104079 - DNA, 26 bp, Homo sapiens
tagtaaaaacagtatcaatgggggaa

SEQ ID NO: 104080 - DNA, 26 bp, Homo sapiens
agtaaaaacagtatcaatgggggaag

SEQ ID NO: 104081 - DNA, 26 bp, Homo sapiens
gtaaaaacagtatcaatgggggaagg

SEQ ID NO: 104082 - DNA, 26 bp, Homo sapiens
taaaaacagtatcaatgggggaagga

SEQ ID NO: 104083 - DNA, 26 bp, Homo sapiens
aaaaacagtatcaatgggggaaggaa

SEQ ID NO: 104084 - DNA, 26 bp, Homo sapiens
aaaacagtatcaatgggggaaggaat

SEQ ID NO: 104085 - DNA, 26 bp, Homo sapiens
aaacagtatcaatgggggaaggaata

SEQ ID NO: 104086 - DNA, 26 bp, Homo sapiens
aacagtatcaatgggggaaggaatac

SEQ ID NO: 104087 - DNA, 26 bp, Homo sapiens
acagtatcaatgggggaaggaatacc

SEQ ID NO: 104088 - DNA, 26 bp, Homo sapiens
cagtatcaatgggggaaggaataccc

SEQ ID NO: 104089 - DNA, 26 bp, Homo sapiens
agtatcaatgggggaaggaatacccc

SEQ ID NO: 104090 - DNA, 26 bp, Homo sapiens
gtatcaatgggggaaggaatacccca

SEQ ID NO: 104091 - DNA, 26 bp, Homo sapiens
tatcaatgggggaaggaataccccaa

SEQ ID NO: 104092 - DNA, 26 bp, Homo sapiens
atcaatgggggaaggaataccccaaa

SEQ ID NO: 104093 - DNA, 26 bp, Homo sapiens
tcaatgggggaaggaataccccaaac

SEQ ID NO: 104094 - DNA, 26 bp, Homo sapiens
caatgggggaaggaataccccaaact

SEQ ID NO: 104095 - DNA, 26 bp, Homo sapiens
aatgggggaaggaataccccaaactt

SEQ ID NO: 104096 - DNA, 26 bp, Homo sapiens
atgggggaaggaataccccaaacttc

SEQ ID NO: 104097 - DNA, 26 bp, Homo sapiens
tgggggaaggaataccccaaacttca

SEQ ID NO: 104098 - DNA, 26 bp, Homo sapiens
gggggaaggaataccccaaacttcag

SEQ ID NO: 104099 - DNA, 26 bp, Homo sapiens
ggggaaggaataccccaaacttcagt

SEQ ID NO: 104100 - DNA, 26 bp, Homo sapiens
gggaaggaataccccaaacttcagta

SEQ ID NO: 104101 - DNA, 26 bp, Homo sapiens
ggaaggaataccccaaacttcagtaa

SEQ ID NO: 104102 - DNA, 26 bp, Homo sapiens
gaaggaataccccaaacttcagtaat

SEQ ID NO: 104103 - DNA, 26 bp, Homo sapiens
aaggaataccccaaacttcagtaatt

SEQ ID NO: 104104 - DNA, 26 bp, Homo sapiens
aggaataccccaaacttcagtaattc

SEQ ID NO: 104105 - DNA, 26 bp, Homo sapiens
ggaataccccaaacttcagtaattct

SEQ ID NO: 104106 - DNA, 26 bp, Homo sapiens
gaataccccaaacttcagtaattctg

SEQ ID NO: 104107 - DNA, 26 bp, Homo sapiens
aataccccaaacttcagtaattctgc

SEQ ID NO: 104108 - DNA, 26 bp, Homo sapiens
ataccccaaacttcagtaattctgcg

SEQ ID NO: 104109 - DNA, 26 bp, Homo sapiens
taccccaaacttcagtaattctgcga

SEQ ID NO: 104110 - DNA, 26 bp, Homo sapiens
accccaaacttcagtaattctgcgag

SEQ ID NO: 104111 - DNA, 26 bp, Homo sapiens
ccccaaacttcagtaattctgcgagc

SEQ ID NO: 104112 - DNA, 26 bp, Homo sapiens
cccaaacttcagtaattctgcgagct

SEQ ID NO: 104113 - DNA, 26 bp, Homo sapiens
ccaaacttcagtaattctgcgagctg

SEQ ID NO: 104114 - DNA, 26 bp, Homo sapiens
caaacttcagtaattctgcgagctgg

SEQ ID NO: 104115 - DNA, 26 bp, Homo sapiens
aaacttcagtaattctgcgagctgga

SEQ ID NO: 104116 - DNA, 26 bp, Homo sapiens
aacttcagtaattctgcgagctggag

SEQ ID NO: 104117 - DNA, 26 bp, Homo sapiens
acttcagtaattctgcgagctggaga

SEQ ID NO: 104118 - DNA, 26 bp, Homo sapiens
cttcagtaattctgcgagctggagat

SEQ ID NO: 104119 - DNA, 26 bp, Homo sapiens
ttcagtaattctgcgagctggagatg

SEQ ID NO: 104120 - DNA, 26 bp, Homo sapiens
tcagtaattctgcgagctggagatgg

SEQ ID NO: 104121 - DNA, 26 bp, Homo sapiens
cagtaattctgcgagctggagatggt

SEQ ID NO: 104122 - DNA, 26 bp, Homo sapiens
agtaattctgcgagctggagatggtg

SEQ ID NO: 104123 - DNA, 26 bp, Homo sapiens
gtaattctgcgagctggagatggtgg

SEQ ID NO: 104124 - DNA, 26 bp, Homo sapiens
taattctgcgagctggagatggtgga

SEQ ID NO: 104125 - DNA, 26 bp, Homo sapiens
aattctgcgagctggagatggtggac

SEQ ID NO: 104126 - DNA, 26 bp, Homo sapiens
attctgcgagctggagatggtggact

SEQ ID NO: 104127 - DNA, 26 bp, Homo sapiens
ttctgcgagctggagatggtggactg

SEQ ID NO: 104128 - DNA, 26 bp, Homo sapiens
tctgcgagctggagatggtggactga

SEQ ID NO: 104129 - DNA, 26 bp, Homo sapiens
ctgcgagctggagatggtggactgaa

SEQ ID NO: 104130 - DNA, 26 bp, Homo sapiens
tgcgagctggagatggtggactgaat

SEQ ID NO: 104131 - DNA, 26 bp, Homo sapiens
gcgagctggagatggtggactgaatg

SEQ ID NO: 104132 - DNA, 26 bp, Homo sapiens
cgagctggagatggtggactgaatgg

SEQ ID NO: 104133 - DNA, 26 bp, Homo sapiens
gagctggagatggtggactgaatgga

SEQ ID NO: 104134 - DNA, 26 bp, Homo sapiens
agctggagatggtggactgaatggac

SEQ ID NO: 104135 - DNA, 26 bp, Homo sapiens
gctggagatggtggactgaatggact

SEQ ID NO: 104136 - DNA, 26 bp, Homo sapiens
ctggagatggtggactgaatggactt

SEQ ID NO: 104137 - DNA, 26 bp, Homo sapiens
tggagatggtggactgaatggactta

SEQ ID NO: 104138 - DNA, 26 bp, Homo sapiens
ggagatggtggactgaatggacttag

SEQ ID NO: 104139 - DNA, 26 bp, Homo sapiens
gagatggtggactgaatggacttagc

SEQ ID NO: 104140 - DNA, 26 bp, Homo sapiens
agatggtggactgaatggacttagca

SEQ ID NO: 104141 - DNA, 26 bp, Homo sapiens
gatggtggactgaatggacttagcat

SEQ ID NO: 104142 - DNA, 26 bp, Homo sapiens
atggtggactgaatggacttagcatc

SEQ ID NO: 104143 - DNA, 26 bp, Homo sapiens
tggtggactgaatggacttagcatcc

SEQ ID NO: 104144 - DNA, 26 bp, Homo sapiens
ggtggactgaatggacttagcatcca

SEQ ID NO: 104145 - DNA, 26 bp, Homo sapiens
gtggactgaatggacttagcatccag

SEQ ID NO: 104146 - DNA, 26 bp, Homo sapiens
tggactgaatggacttagcatccaga

SEQ ID NO: 104147 - DNA, 26 bp, Homo sapiens
ggactgaatggacttagcatccagaa

SEQ ID NO: 104148 - DNA, 26 bp, Homo sapiens
gactgaatggacttagcatccagaaa

SEQ ID NO: 104149 - DNA, 26 bp, Homo sapiens
actgaatggacttagcatccagaaat

SEQ ID NO: 104150 - DNA, 26 bp, Homo sapiens
ctgaatggacttagcatccagaaata

SEQ ID NO: 104151 - DNA, 26 bp, Homo sapiens
tgaatggacttagcatccagaaataa

SEQ ID NO: 104152 - DNA, 26 bp, Homo sapiens
gaatggacttagcatccagaaataat

SEQ ID NO: 104153 - DNA, 26 bp, Homo sapiens
aatggacttagcatccagaaataatg

SEQ ID NO: 104154 - DNA, 26 bp, Homo sapiens
atggacttagcatccagaaataatga

SEQ ID NO: 104155 - DNA, 26 bp, Homo sapiens
tggacttagcatccagaaataatgac

SEQ ID NO: 104156 - DNA, 26 bp, Homo sapiens
ggacttagcatccagaaataatgacc

SEQ ID NO: 104157 - DNA, 26 bp, Homo sapiens
gacttagcatccagaaataatgacct

SEQ ID NO: 104158 - DNA, 26 bp, Homo sapiens
acttagcatccagaaataatgacctc

SEQ ID NO: 104159 - DNA, 26 bp, Homo sapiens
cttagcatccagaaataatgacctcg

SEQ ID NO: 104160 - DNA, 26 bp, Homo sapiens
ttagcatccagaaataatgacctcgg

SEQ ID NO: 104161 - DNA, 26 bp, Homo sapiens
tagcatccagaaataatgacctcgga

SEQ ID NO: 104162 - DNA, 26 bp, Homo sapiens
agcatccagaaataatgacctcggaa

SEQ ID NO: 104163 - DNA, 26 bp, Homo sapiens
gcatccagaaataatgacctcggaat

SEQ ID NO: 104164 - DNA, 26 bp, Homo sapiens
catccagaaataatgacctcggaatg

SEQ ID NO: 104165 - DNA, 26 bp, Homo sapiens
atccagaaataatgacctcggaatgc

SEQ ID NO: 104166 - DNA, 26 bp, Homo sapiens
tccagaaataatgacctcggaatgca

SEQ ID NO: 104167 - DNA, 26 bp, Homo sapiens
ccagaaataatgacctcggaatgcaa

SEQ ID NO: 104168 - DNA, 26 bp, Homo sapiens
cagaaataatgacctcggaatgcaac

SEQ ID NO: 104169 - DNA, 26 bp, Homo sapiens
agaaataatgacctcggaatgcaact

SEQ ID NO: 104170 - DNA, 26 bp, Homo sapiens
gaaataatgacctcggaatgcaacta

SEQ ID NO: 104171 - DNA, 26 bp, Homo sapiens
aaataatgacctcggaatgcaactaa

SEQ ID NO: 104172 - DNA, 26 bp, Homo sapiens
aataatgacctcggaatgcaactaat

SEQ ID NO: 104173 - DNA, 26 bp, Homo sapiens
ataatgacctcggaatgcaactaatg

SEQ ID NO: 104174 - DNA, 26 bp, Homo sapiens
taatgacctcggaatgcaactaatgt

SEQ ID NO: 104175 - DNA, 26 bp, Homo sapiens
aatgacctcggaatgcaactaatgtc

SEQ ID NO: 104176 - DNA, 26 bp, Homo sapiens
atgacctcggaatgcaactaatgtcc

SEQ ID NO: 104177 - DNA, 26 bp, Homo sapiens
tgacctcggaatgcaactaatgtccc

SEQ ID NO: 104178 - DNA, 26 bp, Homo sapiens
gacctcggaatgcaactaatgtccca

SEQ ID NO: 104179 - DNA, 26 bp, Homo sapiens
acctcggaatgcaactaatgtcccat

SEQ ID NO: 104180 - DNA, 26 bp, Homo sapiens
cctcggaatgcaactaatgtcccatt

SEQ ID NO: 104181 - DNA, 26 bp, Homo sapiens
ctcggaatgcaactaatgtcccattg

SEQ ID NO: 104182 - DNA, 26 bp, Homo sapiens
tcggaatgcaactaatgtcccattgc

SEQ ID NO: 104183 - DNA, 26 bp, Homo sapiens
cggaatgcaactaatgtcccattgcg

SEQ ID NO: 104184 - DNA, 26 bp, Homo sapiens
ggaatgcaactaatgtcccattgcgc

SEQ ID NO: 104185 - DNA, 26 bp, Homo sapiens
gaatgcaactaatgtcccattgcgca

SEQ ID NO: 104186 - DNA, 26 bp, Homo sapiens
aatgcaactaatgtcccattgcgcaa

SEQ ID NO: 104187 - DNA, 26 bp, Homo sapiens
atgcaactaatgtcccattgcgcaaa

SEQ ID NO: 104188 - DNA, 26 bp, Homo sapiens
tgcaactaatgtcccattgcgcaaag

SEQ ID NO: 104189 - DNA, 26 bp, Homo sapiens
gcaactaatgtcccattgcgcaaagt

SEQ ID NO: 104190 - DNA, 26 bp, Homo sapiens
caactaatgtcccattgcgcaaagta

SEQ ID NO: 104191 - DNA, 26 bp, Homo sapiens
aactaatgtcccattgcgcaaagtag

SEQ ID NO: 104192 - DNA, 26 bp, Homo sapiens
actaatgtcccattgcgcaaagtagt

SEQ ID NO: 104193 - DNA, 26 bp, Homo sapiens
ctaatgtcccattgcgcaaagtagtc

SEQ ID NO: 104194 - DNA, 26 bp, Homo sapiens
taatgtcccattgcgcaaagtagtca

SEQ ID NO: 104195 - DNA, 26 bp, Homo sapiens
aatgtcccattgcgcaaagtagtcag

SEQ ID NO: 104196 - DNA, 26 bp, Homo sapiens
atgtcccattgcgcaaagtagtcagt

SEQ ID NO: 104197 - DNA, 26 bp, Homo sapiens
tgtcccattgcgcaaagtagtcagtc

SEQ ID NO: 104198 - DNA, 26 bp, Homo sapiens
gtcccattgcgcaaagtagtcagtcc

SEQ ID NO: 104199 - DNA, 26 bp, Homo sapiens
tcccattgcgcaaagtagtcagtcca

SEQ ID NO: 104200 - DNA, 26 bp, Homo sapiens
cccattgcgcaaagtagtcagtccat

SEQ ID NO: 104201 - DNA, 26 bp, Homo sapiens
ccattgcgcaaagtagtcagtccatc

SEQ ID NO: 104202 - DNA, 26 bp, Homo sapiens
cattgcgcaaagtagtcagtccatct

SEQ ID NO: 104203 - DNA, 26 bp, Homo sapiens
attgcgcaaagtagtcagtccatcta

SEQ ID NO: 104204 - DNA, 26 bp, Homo sapiens
ttgcgcaaagtagtcagtccatctac

SEQ ID NO: 104205 - DNA, 26 bp, Homo sapiens
tgcgcaaagtagtcagtccatctact

SEQ ID NO: 104206 - DNA, 26 bp, Homo sapiens
gcgcaaagtagtcagtccatctactg

SEQ ID NO: 104207 - DNA, 26 bp, Homo sapiens
cgcaaagtagtcagtccatctactgg

SEQ ID NO: 104208 - DNA, 26 bp, Homo sapiens
gcaaagtagtcagtccatctactggc

SEQ ID NO: 104209 - DNA, 26 bp, Homo sapiens
caaagtagtcagtccatctactggct

SEQ ID NO: 104210 - DNA, 26 bp, Homo sapiens
aaagtagtcagtccatctactggctt

SEQ ID NO: 104211 - DNA, 26 bp, Homo sapiens
aagtagtcagtccatctactggctta

SEQ ID NO: 104212 - DNA, 26 bp, Homo sapiens
agtagtcagtccatctactggcttac

SEQ ID NO: 104213 - DNA, 26 bp, Homo sapiens
gtagtcagtccatctactggcttacc

SEQ ID NO: 104214 - DNA, 26 bp, Homo sapiens
tagtcagtccatctactggcttacca

SEQ ID NO: 104215 - DNA, 26 bp, Homo sapiens
agtcagtccatctactggcttaccat

SEQ ID NO: 104216 - DNA, 26 bp, Homo sapiens
gtcagtccatctactggcttaccatt

SEQ ID NO: 104217 - DNA, 26 bp, Homo sapiens
tcagtccatctactggcttaccattg

SEQ ID NO: 104218 - DNA, 26 bp, Homo sapiens
cagtccatctactggcttaccattgc

SEQ ID NO: 104219 - DNA, 26 bp, Homo sapiens
agtccatctactggcttaccattgca

SEQ ID NO: 104220 - DNA, 26 bp, Homo sapiens
gtccatctactggcttaccattgcat

SEQ ID NO: 104221 - DNA, 26 bp, Homo sapiens
tccatctactggcttaccattgcata

SEQ ID NO: 104222 - DNA, 26 bp, Homo sapiens
ccatctactggcttaccattgcatat

SEQ ID NO: 104223 - DNA, 26 bp, Homo sapiens
catctactggcttaccattgcatata

SEQ ID NO: 104224 - DNA, 26 bp, Homo sapiens
atctactggcttaccattgcatatat

SEQ ID NO: 104225 - DNA, 26 bp, Homo sapiens
tctactggcttaccattgcatatatt

SEQ ID NO: 104226 - DNA, 26 bp, Homo sapiens
ctactggcttaccattgcatatattg

SEQ ID NO: 104227 - DNA, 26 bp, Homo sapiens
tactggcttaccattgcatatattgg

SEQ ID NO: 104228 - DNA, 26 bp, Homo sapiens
actggcttaccattgcatatattggt

SEQ ID NO: 104229 - DNA, 26 bp, Homo sapiens
ctggcttaccattgcatatattggtc

SEQ ID NO: 104230 - DNA, 26 bp, Homo sapiens
tggcttaccattgcatatattggtct

SEQ ID NO: 104231 - DNA, 26 bp, Homo sapiens
ggcttaccattgcatatattggtctc

SEQ ID NO: 104232 - DNA, 26 bp, Homo sapiens
gcttaccattgcatatattggtctca

SEQ ID NO: 104233 - DNA, 26 bp, Homo sapiens
cttaccattgcatatattggtctcat

SEQ ID NO: 104234 - DNA, 26 bp, Homo sapiens
ttaccattgcatatattggtctcatc

SEQ ID NO: 104235 - DNA, 26 bp, Homo sapiens
taccattgcatatattggtctcatcg

SEQ ID NO: 104236 - DNA, 26 bp, Homo sapiens
accattgcatatattggtctcatcgg

SEQ ID NO: 104237 - DNA, 26 bp, Homo sapiens
ccattgcatatattggtctcatcgga

SEQ ID NO: 104238 - DNA, 26 bp, Homo sapiens
cattgcatatattggtctcatcggaa

SEQ ID NO: 104239 - DNA, 26 bp, Homo sapiens
attgcatatattggtctcatcggaaa

SEQ ID NO: 104240 - DNA, 26 bp, Homo sapiens
ttgcatatattggtctcatcggaaag

SEQ ID NO: 104241 - DNA, 26 bp, Homo sapiens
tgcatatattggtctcatcggaaagc

SEQ ID NO: 104242 - DNA, 26 bp, Homo sapiens
gcatatattggtctcatcggaaagca

SEQ ID NO: 104243 - DNA, 26 bp, Homo sapiens
catatattggtctcatcggaaagcat

SEQ ID NO: 104244 - DNA, 26 bp, Homo sapiens
atatattggtctcatcggaaagcatg

SEQ ID NO: 104245 - DNA, 26 bp, Homo sapiens
tatattggtctcatcggaaagcatgg

SEQ ID NO: 104246 - DNA, 26 bp, Homo sapiens
atattggtctcatcggaaagcatggg

SEQ ID NO: 104247 - DNA, 26 bp, Homo sapiens
tattggtctcatcggaaagcatggga

SEQ ID NO: 104248 - DNA, 26 bp, Homo sapiens
attggtctcatcggaaagcatgggat

SEQ ID NO: 104249 - DNA, 26 bp, Homo sapiens
ttggtctcatcggaaagcatgggatt

SEQ ID NO: 104250 - DNA, 26 bp, Homo sapiens
tggtctcatcggaaagcatgggattg

SEQ ID NO: 104251 - DNA, 26 bp, Homo sapiens
ggtctcatcggaaagcatgggattga

SEQ ID NO: 104252 - DNA, 26 bp, Homo sapiens
gtctcatcggaaagcatgggattgat

SEQ ID NO: 104253 - DNA, 26 bp, Homo sapiens
tctcatcggaaagcatgggattgatg

SEQ ID NO: 104254 - DNA, 26 bp, Homo sapiens
ctcatcggaaagcatgggattgatga

SEQ ID NO: 104255 - DNA, 26 bp, Homo sapiens
tcatcggaaagcatgggattgatgat

SEQ ID NO: 104256 - DNA, 26 bp, Homo sapiens
catcggaaagcatgggattgatgata

SEQ ID NO: 104257 - DNA, 26 bp, Homo sapiens
atcggaaagcatgggattgatgataa

SEQ ID NO: 104258 - DNA, 26 bp, Homo sapiens
tcggaaagcatgggattgatgataat

SEQ ID NO: 104259 - DNA, 26 bp, Homo sapiens
cggaaagcatgggattgatgataatg

SEQ ID NO: 104260 - DNA, 26 bp, Homo sapiens
ggaaagcatgggattgatgataatgc

SEQ ID NO: 104261 - DNA, 26 bp, Homo sapiens
gaaagcatgggattgatgataatgcc

SEQ ID NO: 104262 - DNA, 26 bp, Homo sapiens
aaagcatgggattgatgataatgcct

SEQ ID NO: 104263 - DNA, 26 bp, Homo sapiens
aagcatgggattgatgataatgcctt

SEQ ID NO: 104264 - DNA, 26 bp, Homo sapiens
agcatgggattgatgataatgccttg

SEQ ID NO: 104265 - DNA, 26 bp, Homo sapiens
gcatgggattgatgataatgccttga

SEQ ID NO: 104266 - DNA, 26 bp, Homo sapiens
catgggattgatgataatgccttgat

SEQ ID NO: 104267 - DNA, 26 bp, Homo sapiens
atgggattgatgataatgccttgatt

SEQ ID NO: 104268 - DNA, 26 bp, Homo sapiens
tgggattgatgataatgccttgattg

SEQ ID NO: 104269 - DNA, 26 bp, Homo sapiens
gggattgatgataatgccttgattgg

SEQ ID NO: 104270 - DNA, 26 bp, Homo sapiens
ggattgatgataatgccttgattggg

SEQ ID NO: 104271 - DNA, 26 bp, Homo sapiens
gattgatgataatgccttgattgggt

SEQ ID NO: 104272 - DNA, 26 bp, Homo sapiens
attgatgataatgccttgattgggta

SEQ ID NO: 104273 - DNA, 26 bp, Homo sapiens
ttgatgataatgccttgattgggtac

SEQ ID NO: 104274 - DNA, 26 bp, Homo sapiens
tgatgataatgccttgattgggtact

SEQ ID NO: 104275 - DNA, 26 bp, Homo sapiens
gatgataatgccttgattgggtactc

SEQ ID NO: 104276 - DNA, 26 bp, Homo sapiens
atgataatgccttgattgggtactct

SEQ ID NO: 104277 - DNA, 26 bp, Homo sapiens
tgataatgccttgattgggtactctc

SEQ ID NO: 104278 - DNA, 26 bp, Homo sapiens
gataatgccttgattgggtactctcg

SEQ ID NO: 104279 - DNA, 26 bp, Homo sapiens
ataatgccttgattgggtactctcgg

SEQ ID NO: 104280 - DNA, 26 bp, Homo sapiens
taatgccttgattgggtactctcggt

SEQ ID NO: 104281 - DNA, 26 bp, Homo sapiens
aatgccttgattgggtactctcggta

SEQ ID NO: 104282 - DNA, 26 bp, Homo sapiens
atgccttgattgggtactctcggtaa

SEQ ID NO: 104283 - DNA, 26 bp, Homo sapiens
tgccttgattgggtactctcggtaag

SEQ ID NO: 104284 - DNA, 26 bp, Homo sapiens
gccttgattgggtactctcggtaagt

SEQ ID NO: 104285 - DNA, 26 bp, Homo sapiens
ccttgattgggtactctcggtaagta

SEQ ID NO: 104286 - DNA, 26 bp, Homo sapiens
cttgattgggtactctcggtaagtaa

SEQ ID NO: 104287 - DNA, 26 bp, Homo sapiens
ttgattgggtactctcggtaagtaat

SEQ ID NO: 104288 - DNA, 26 bp, Homo sapiens
tgattgggtactctcggtaagtaatc

SEQ ID NO: 104289 - DNA, 26 bp, Homo sapiens
gattgggtactctcggtaagtaatcc

SEQ ID NO: 104290 - DNA, 26 bp, Homo sapiens
attgggtactctcggtaagtaatcca

SEQ ID NO: 104291 - DNA, 26 bp, Homo sapiens
ttgggtactctcggtaagtaatccat

SEQ ID NO: 104292 - DNA, 26 bp, Homo sapiens
tgggtactctcggtaagtaatccatg

SEQ ID NO: 104293 - DNA, 26 bp, Homo sapiens
gggtactctcggtaagtaatccatgt

SEQ ID NO: 104294 - DNA, 26 bp, Homo sapiens
ggtactctcggtaagtaatccatgtc

SEQ ID NO: 104295 - DNA, 26 bp, Homo sapiens
gtactctcggtaagtaatccatgtcg

SEQ ID NO: 104296 - DNA, 26 bp, Homo sapiens
tactctcggtaagtaatccatgtcgg

SEQ ID NO: 104297 - DNA, 26 bp, Homo sapiens
actctcggtaagtaatccatgtcggg

SEQ ID NO: 104298 - DNA, 26 bp, Homo sapiens
ctctcggtaagtaatccatgtcggga

SEQ ID NO: 104299 - DNA, 26 bp, Homo sapiens
tctcggtaagtaatccatgtcgggag

SEQ ID NO: 104300 - DNA, 26 bp, Homo sapiens
ctcggtaagtaatccatgtcgggagt

SEQ ID NO: 104301 - DNA, 26 bp, Homo sapiens
tcggtaagtaatccatgtcgggagta

SEQ ID NO: 104302 - DNA, 26 bp, Homo sapiens
cggtaagtaatccatgtcgggagtaa

SEQ ID NO: 104303 - DNA, 26 bp, Homo sapiens
ggtaagtaatccatgtcgggagtaac

SEQ ID NO: 104304 - DNA, 26 bp, Homo sapiens
gtaagtaatccatgtcgggagtaact

SEQ ID NO: 104305 - DNA, 26 bp, Homo sapiens
taagtaatccatgtcgggagtaactt

SEQ ID NO: 104306 - DNA, 26 bp, Homo sapiens
aagtaatccatgtcgggagtaacttc

SEQ ID NO: 104307 - DNA, 26 bp, Homo sapiens
agtaatccatgtcgggagtaacttca

SEQ ID NO: 104308 - DNA, 26 bp, Homo sapiens
gtaatccatgtcgggagtaacttcag

SEQ ID NO: 104309 - DNA, 26 bp, Homo sapiens
taatccatgtcgggagtaacttcagg

SEQ ID NO: 104310 - DNA, 26 bp, Homo sapiens
aatccatgtcgggagtaacttcaggc

SEQ ID NO: 104311 - DNA, 26 bp, Homo sapiens
atccatgtcgggagtaacttcaggca

SEQ ID NO: 104312 - DNA, 26 bp, Homo sapiens
tccatgtcgggagtaacttcaggcat

SEQ ID NO: 104313 - DNA, 26 bp, Homo sapiens
ccatgtcgggagtaacttcaggcatg

SEQ ID NO: 104314 - DNA, 26 bp, Homo sapiens
catgtcgggagtaacttcaggcatga

SEQ ID NO: 104315 - DNA, 26 bp, Homo sapiens
atgtcgggagtaacttcaggcatgaa

SEQ ID NO: 104316 - DNA, 26 bp, Homo sapiens
tgtcgggagtaacttcaggcatgaac

SEQ ID NO: 104317 - DNA, 26 bp, Homo sapiens
gtcgggagtaacttcaggcatgaaca

SEQ ID NO: 104318 - DNA, 26 bp, Homo sapiens
tcgggagtaacttcaggcatgaacac

SEQ ID NO: 104319 - DNA, 26 bp, Homo sapiens
cgggagtaacttcaggcatgaacaca

SEQ ID NO: 104320 - DNA, 26 bp, Homo sapiens
gggagtaacttcaggcatgaacacat

SEQ ID NO: 104321 - DNA, 26 bp, Homo sapiens
ggagtaacttcaggcatgaacacatg

SEQ ID NO: 104322 - DNA, 26 bp, Homo sapiens
gagtaacttcaggcatgaacacatgg

SEQ ID NO: 104323 - DNA, 26 bp, Homo sapiens
agtaacttcaggcatgaacacatggg

SEQ ID NO: 104324 - DNA, 26 bp, Homo sapiens
gtaacttcaggcatgaacacatgggg

SEQ ID NO: 104325 - DNA, 26 bp, Homo sapiens
taacttcaggcatgaacacatggggc

SEQ ID NO: 104326 - DNA, 26 bp, Homo sapiens
aacttcaggcatgaacacatggggcc

SEQ ID NO: 104327 - DNA, 26 bp, Homo sapiens
acttcaggcatgaacacatggggcct

SEQ ID NO: 104328 - DNA, 26 bp, Homo sapiens
cttcaggcatgaacacatggggcctg

SEQ ID NO: 104329 - DNA, 26 bp, Homo sapiens
ttcaggcatgaacacatggggcctga

SEQ ID NO: 104330 - DNA, 26 bp, Homo sapiens
tcaggcatgaacacatggggcctgag

SEQ ID NO: 104331 - DNA, 26 bp, Homo sapiens
caggcatgaacacatggggcctgaga

SEQ ID NO: 104332 - DNA, 26 bp, Homo sapiens
aggcatgaacacatggggcctgagaa

SEQ ID NO: 104333 - DNA, 26 bp, Homo sapiens
ggcatgaacacatggggcctgagaag

SEQ ID NO: 104334 - DNA, 26 bp, Homo sapiens
gcatgaacacatggggcctgagaagc

SEQ ID NO: 104335 - DNA, 26 bp, Homo sapiens
catgaacacatggggcctgagaagca

SEQ ID NO: 104336 - DNA, 26 bp, Homo sapiens
atgaacacatggggcctgagaagcat

SEQ ID NO: 104337 - DNA, 26 bp, Homo sapiens
tgaacacatggggcctgagaagcata

SEQ ID NO: 104338 - DNA, 26 bp, Homo sapiens
gaacacatggggcctgagaagcatat

SEQ ID NO: 104339 - DNA, 26 bp, Homo sapiens
aacacatggggcctgagaagcatatg

SEQ ID NO: 104340 - DNA, 26 bp, Homo sapiens
acacatggggcctgagaagcatatga

SEQ ID NO: 104341 - DNA, 26 bp, Homo sapiens
cacatggggcctgagaagcatatgag

SEQ ID NO: 104342 - DNA, 26 bp, Homo sapiens
acatggggcctgagaagcatatgagg

SEQ ID NO: 104343 - DNA, 26 bp, Homo sapiens
catggggcctgagaagcatatgaggt

SEQ ID NO: 104344 - DNA, 26 bp, Homo sapiens
atggggcctgagaagcatatgaggtg

SEQ ID NO: 104345 - DNA, 26 bp, Homo sapiens
tggggcctgagaagcatatgaggtgt

SEQ ID NO: 104346 - DNA, 26 bp, Homo sapiens
ggggcctgagaagcatatgaggtgtt

SEQ ID NO: 104347 - DNA, 26 bp, Homo sapiens
gggcctgagaagcatatgaggtgttt

SEQ ID NO: 104348 - DNA, 26 bp, Homo sapiens
ggcctgagaagcatatgaggtgtttc

SEQ ID NO: 104349 - DNA, 26 bp, Homo sapiens
gcctgagaagcatatgaggtgtttct

SEQ ID NO: 104350 - DNA, 26 bp, Homo sapiens
cctgagaagcatatgaggtgtttctc

SEQ ID NO: 104351 - DNA, 26 bp, Homo sapiens
ctgagaagcatatgaggtgtttctcc

SEQ ID NO: 104352 - DNA, 26 bp, Homo sapiens
tgagaagcatatgaggtgtttctcct

SEQ ID NO: 104353 - DNA, 26 bp, Homo sapiens
gagaagcatatgaggtgtttctcctt

SEQ ID NO: 104354 - DNA, 26 bp, Homo sapiens
agaagcatatgaggtgtttctccttc

SEQ ID NO: 104355 - DNA, 26 bp, Homo sapiens
gaagcatatgaggtgtttctccttca

SEQ ID NO: 104356 - DNA, 26 bp, Homo sapiens
aagcatatgaggtgtttctccttcag

SEQ ID NO: 104357 - DNA, 26 bp, Homo sapiens
agcatatgaggtgtttctccttcagc

SEQ ID NO: 104358 - DNA, 26 bp, Homo sapiens
gcatatgaggtgtttctccttcagca

SEQ ID NO: 104359 - DNA, 26 bp, Homo sapiens
catatgaggtgtttctccttcagcac

SEQ ID NO: 104360 - DNA, 26 bp, Homo sapiens
atatgaggtgtttctccttcagcacc

SEQ ID NO: 104361 - DNA, 26 bp, Homo sapiens
tatgaggtgtttctccttcagcacca

SEQ ID NO: 104362 - DNA, 26 bp, Homo sapiens
atgaggtgtttctccttcagcaccac

SEQ ID NO: 104363 - DNA, 26 bp, Homo sapiens
tgaggtgtttctccttcagcaccacc

SEQ ID NO: 104364 - DNA, 26 bp, Homo sapiens
gaggtgtttctccttcagcaccacct

SEQ ID NO: 104365 - DNA, 26 bp, Homo sapiens
aggtgtttctccttcagcaccacctg

SEQ ID NO: 104366 - DNA, 26 bp, Homo sapiens
ggtgtttctccttcagcaccacctgc

SEQ ID NO: 104367 - DNA, 26 bp, Homo sapiens
gtgtttctccttcagcaccacctgca

SEQ ID NO: 104368 - DNA, 26 bp, Homo sapiens
tgtttctccttcagcaccacctgcat

SEQ ID NO: 104369 - DNA, 26 bp, Homo sapiens
gtttctccttcagcaccacctgcatc

SEQ ID NO: 104370 - DNA, 26 bp, Homo sapiens
tttctccttcagcaccacctgcatct

SEQ ID NO: 104371 - DNA, 26 bp, Homo sapiens
ttctccttcagcaccacctgcatctt

SEQ ID NO: 104372 - DNA, 26 bp, Homo sapiens
tctccttcagcaccacctgcatcttc

SEQ ID NO: 104373 - DNA, 26 bp, Homo sapiens
ctccttcagcaccacctgcatcttca

SEQ ID NO: 104374 - DNA, 26 bp, Homo sapiens
tccttcagcaccacctgcatcttcac

SEQ ID NO: 104375 - DNA, 26 bp, Homo sapiens
ccttcagcaccacctgcatcttcact

SEQ ID NO: 104376 - DNA, 26 bp, Homo sapiens
cttcagcaccacctgcatcttcactc

SEQ ID NO: 104377 - DNA, 26 bp, Homo sapiens
ttcagcaccacctgcatcttcactct

SEQ ID NO: 104378 - DNA, 26 bp, Homo sapiens
tcagcaccacctgcatcttcactctt

SEQ ID NO: 104379 - DNA, 26 bp, Homo sapiens
cagcaccacctgcatcttcactcttt

SEQ ID NO: 104380 - DNA, 26 bp, Homo sapiens
agcaccacctgcatcttcactctttg

SEQ ID NO: 104381 - DNA, 26 bp, Homo sapiens
gcaccacctgcatcttcactctttgg

SEQ ID NO: 104382 - DNA, 26 bp, Homo sapiens
caccacctgcatcttcactctttgga

SEQ ID NO: 104383 - DNA, 26 bp, Homo sapiens
accacctgcatcttcactctttggat

SEQ ID NO: 104384 - DNA, 26 bp, Homo sapiens
ccacctgcatcttcactctttggatt

SEQ ID NO: 104385 - DNA, 26 bp, Homo sapiens
cacctgcatcttcactctttggattt

SEQ ID NO: 104386 - DNA, 26 bp, Homo sapiens
acctgcatcttcactctttggattta

SEQ ID NO: 104387 - DNA, 26 bp, Homo sapiens
cctgcatcttcactctttggatttac

SEQ ID NO: 104388 - DNA, 26 bp, Homo sapiens
ctgcatcttcactctttggatttact

SEQ ID NO: 104389 - DNA, 26 bp, Homo sapiens
tgcatcttcactctttggatttactt

SEQ ID NO: 104390 - DNA, 26 bp, Homo sapiens
gcatcttcactctttggatttacttc

SEQ ID NO: 104391 - DNA, 26 bp, Homo sapiens
catcttcactctttggatttacttca

SEQ ID NO: 104392 - DNA, 26 bp, Homo sapiens
atcttcactctttggatttacttcaa

SEQ ID NO: 104393 - DNA, 26 bp, Homo sapiens
tcttcactctttggatttacttcaac

SEQ ID NO: 104394 - DNA, 26 bp, Homo sapiens
cttcactctttggatttacttcaact

SEQ ID NO: 104395 - DNA, 26 bp, Homo sapiens
ttcactctttggatttacttcaacta

SEQ ID NO: 104396 - DNA, 26 bp, Homo sapiens
tcactctttggatttacttcaactag

SEQ ID NO: 104397 - DNA, 26 bp, Homo sapiens
cactctttggatttacttcaactagt

SEQ ID NO: 104398 - DNA, 26 bp, Homo sapiens
actctttggatttacttcaactagtt

SEQ ID NO: 104399 - DNA, 26 bp, Homo sapiens
ctctttggatttacttcaactagttt

SEQ ID NO: 104400 - DNA, 26 bp, Homo sapiens
tctttggatttacttcaactagtttg

SEQ ID NO: 104401 - DNA, 26 bp, Homo sapiens
ctttggatttacttcaactagtttgg

SEQ ID NO: 104402 - DNA, 26 bp, Homo sapiens
tttggatttacttcaactagtttgga

SEQ ID NO: 104403 - DNA, 26 bp, Homo sapiens
ttggatttacttcaactagtttggag

SEQ ID NO: 104404 - DNA, 26 bp, Homo sapiens
tggatttacttcaactagtttggagt

SEQ ID NO: 104405 - DNA, 26 bp, Homo sapiens
ggatttacttcaactagtttggagtt

SEQ ID NO: 104406 - DNA, 26 bp, Homo sapiens
gatttacttcaactagtttggagttt

SEQ ID NO: 104407 - DNA, 26 bp, Homo sapiens
atttacttcaactagtttggagtttg

SEQ ID NO: 104408 - DNA, 26 bp, Homo sapiens
tttacttcaactagtttggagtttgg

SEQ ID NO: 104409 - DNA, 26 bp, Homo sapiens
ttacttcaactagtttggagtttgga

SEQ ID NO: 104410 - DNA, 26 bp, Homo sapiens
tacttcaactagtttggagtttggag

SEQ ID NO: 104411 - DNA, 26 bp, Homo sapiens
acttcaactagtttggagtttggagt

SEQ ID NO: 104412 - DNA, 26 bp, Homo sapiens
cttcaactagtttggagtttggagtt

SEQ ID NO: 104413 - DNA, 26 bp, Homo sapiens
ttcaactagtttggagtttggagttt

SEQ ID NO: 104414 - DNA, 26 bp, Homo sapiens
tcaactagtttggagtttggagtttg

SEQ ID NO: 104415 - DNA, 26 bp, Homo sapiens
caactagtttggagtttggagtttgg

SEQ ID NO: 104416 - DNA, 26 bp, Homo sapiens
aactagtttggagtttggagtttggt

SEQ ID NO: 104417 - DNA, 26 bp, Homo sapiens
actagtttggagtttggagtttggtt

SEQ ID NO: 104418 - DNA, 26 bp, Homo sapiens
ctagtttggagtttggagtttggtta

SEQ ID NO: 104419 - DNA, 26 bp, Homo sapiens
tagtttggagtttggagtttggttag

SEQ ID NO: 104420 - DNA, 26 bp, Homo sapiens
agtttggagtttggagtttggttagg

SEQ ID NO: 104421 - DNA, 26 bp, Homo sapiens
gtttggagtttggagtttggttaggt

SEQ ID NO: 104422 - DNA, 26 bp, Homo sapiens
tttggagtttggagtttggttaggtc

SEQ ID NO: 104423 - DNA, 26 bp, Homo sapiens
ttggagtttggagtttggttaggtct

SEQ ID NO: 104424 - DNA, 26 bp, Homo sapiens
tggagtttggagtttggttaggtctg

SEQ ID NO: 104425 - DNA, 26 bp, Homo sapiens
ggagtttggagtttggttaggtctgg

SEQ ID NO: 104426 - DNA, 26 bp, Homo sapiens
gagtttggagtttggttaggtctggt

SEQ ID NO: 104427 - DNA, 26 bp, Homo sapiens
agtttggagtttggttaggtctggtg

SEQ ID NO: 104428 - DNA, 26 bp, Homo sapiens
gtttggagtttggttaggtctggtgg

SEQ ID NO: 104429 - DNA, 26 bp, Homo sapiens
tttggagtttggttaggtctggtggt

SEQ ID NO: 104430 - DNA, 26 bp, Homo sapiens
ttggagtttggttaggtctggtggtg

SEQ ID NO: 104431 - DNA, 26 bp, Homo sapiens
tggagtttggttaggtctggtggtgg

SEQ ID NO: 104432 - DNA, 26 bp, Homo sapiens
ggagtttggttaggtctggtggtggt

SEQ ID NO: 104433 - DNA, 26 bp, Homo sapiens
gagtttggttaggtctggtggtggtt

SEQ ID NO: 104434 - DNA, 26 bp, Homo sapiens
agtttggttaggtctggtggtggttt

SEQ ID NO: 104435 - DNA, 26 bp, Homo sapiens
gtttggttaggtctggtggtggtttg

SEQ ID NO: 104436 - DNA, 26 bp, Homo sapiens
tttggttaggtctggtggtggtttgg

SEQ ID NO: 104437 - DNA, 26 bp, Homo sapiens
ttggttaggtctggtggtggtttgga

SEQ ID NO: 104438 - DNA, 26 bp, Homo sapiens
tggttaggtctggtggtggtttggag

SEQ ID NO: 104439 - DNA, 26 bp, Homo sapiens
ggttaggtctggtggtggtttggagc

SEQ ID NO: 104440 - DNA, 26 bp, Homo sapiens
gttaggtctggtggtggtttggagca

SEQ ID NO: 104441 - DNA, 26 bp, Homo sapiens
ttaggtctggtggtggtttggagcat

SEQ ID NO: 104442 - DNA, 26 bp, Homo sapiens
taggtctggtggtggtttggagcatg

SEQ ID NO: 104443 - DNA, 26 bp, Homo sapiens
aggtctggtggtggtttggagcatgg

SEQ ID NO: 104444 - DNA, 26 bp, Homo sapiens
ggtctggtggtggtttggagcatggc

SEQ ID NO: 104445 - DNA, 26 bp, Homo sapiens
gtctggtggtggtttggagcatggct

SEQ ID NO: 104446 - DNA, 26 bp, Homo sapiens
tctggtggtggtttggagcatggctt

SEQ ID NO: 104447 - DNA, 26 bp, Homo sapiens
ctggtggtggtttggagcatggcttc

SEQ ID NO: 104448 - DNA, 26 bp, Homo sapiens
tggtggtggtttggagcatggcttct

SEQ ID NO: 104449 - DNA, 26 bp, Homo sapiens
ggtggtggtttggagcatggcttctg

SEQ ID NO: 104450 - DNA, 26 bp, Homo sapiens
gtggtggtttggagcatggcttctgc

SEQ ID NO: 104451 - DNA, 26 bp, Homo sapiens
tggtggtttggagcatggcttctgct

SEQ ID NO: 104452 - DNA, 26 bp, Homo sapiens
ggtggtttggagcatggcttctgcta

SEQ ID NO: 104453 - DNA, 26 bp, Homo sapiens
gtggtttggagcatggcttctgctat

SEQ ID NO: 104454 - DNA, 26 bp, Homo sapiens
tggtttggagcatggcttctgctatt

SEQ ID NO: 104455 - DNA, 26 bp, Homo sapiens
ggtttggagcatggcttctgctattc

SEQ ID NO: 104456 - DNA, 26 bp, Homo sapiens
gtttggagcatggcttctgctattct

SEQ ID NO: 104457 - DNA, 26 bp, Homo sapiens
tttggagcatggcttctgctattctt

SEQ ID NO: 104458 - DNA, 26 bp, Homo sapiens
ttggagcatggcttctgctattcttg

SEQ ID NO: 104459 - DNA, 26 bp, Homo sapiens
tggagcatggcttctgctattcttga

SEQ ID NO: 104460 - DNA, 26 bp, Homo sapiens
ggagcatggcttctgctattcttgag

SEQ ID NO: 104461 - DNA, 26 bp, Homo sapiens
gagcatggcttctgctattcttgagg

SEQ ID NO: 104462 - DNA, 26 bp, Homo sapiens
agcatggcttctgctattcttgaggt

SEQ ID NO: 104463 - DNA, 26 bp, Homo sapiens
gcatggcttctgctattcttgaggta

SEQ ID NO: 104464 - DNA, 26 bp, Homo sapiens
catggcttctgctattcttgaggtag

SEQ ID NO: 104465 - DNA, 26 bp, Homo sapiens
atggcttctgctattcttgaggtagg

SEQ ID NO: 104466 - DNA, 26 bp, Homo sapiens
tggcttctgctattcttgaggtaggg

SEQ ID NO: 104467 - DNA, 26 bp, Homo sapiens
ggcttctgctattcttgaggtagggt

SEQ ID NO: 104468 - DNA, 26 bp, Homo sapiens
gcttctgctattcttgaggtagggtt

SEQ ID NO: 104469 - DNA, 26 bp, Homo sapiens
cttctgctattcttgaggtagggttc

SEQ ID NO: 104470 - DNA, 26 bp, Homo sapiens
ttctgctattcttgaggtagggttca

SEQ ID NO: 104471 - DNA, 26 bp, Homo sapiens
tctgctattcttgaggtagggttcaa

SEQ ID NO: 104472 - DNA, 26 bp, Homo sapiens
ctgctattcttgaggtagggttcaat

SEQ ID NO: 104473 - DNA, 26 bp, Homo sapiens
tgctattcttgaggtagggttcaatt

SEQ ID NO: 104474 - DNA, 26 bp, Homo sapiens
gctattcttgaggtagggttcaattc

SEQ ID NO: 104475 - DNA, 26 bp, Homo sapiens
ctattcttgaggtagggttcaattct

SEQ ID NO: 104476 - DNA, 26 bp, Homo sapiens
tattcttgaggtagggttcaattctg

SEQ ID NO: 104477 - DNA, 26 bp, Homo sapiens
attcttgaggtagggttcaattctgg

SEQ ID NO: 104478 - DNA, 26 bp, Homo sapiens
ttcttgaggtagggttcaattctggc

SEQ ID NO: 104479 - DNA, 26 bp, Homo sapiens
tcttgaggtagggttcaattctggca

SEQ ID NO: 104480 - DNA, 26 bp, Homo sapiens
cttgaggtagggttcaattctggcat

SEQ ID NO: 104481 - DNA, 26 bp, Homo sapiens
ttgaggtagggttcaattctggcatt

SEQ ID NO: 104482 - DNA, 26 bp, Homo sapiens
tgaggtagggttcaattctggcattg

SEQ ID NO: 104483 - DNA, 26 bp, Homo sapiens
gaggtagggttcaattctggcattgt

SEQ ID NO: 104484 - DNA, 26 bp, Homo sapiens
aggtagggttcaattctggcattgtt

SEQ ID NO: 104485 - DNA, 26 bp, Homo sapiens
ggtagggttcaattctggcattgttg

SEQ ID NO: 104486 - DNA, 26 bp, Homo sapiens
gtagggttcaattctggcattgttga

SEQ ID NO: 104487 - DNA, 26 bp, Homo sapiens
tagggttcaattctggcattgttgat

SEQ ID NO: 104488 - DNA, 26 bp, Homo sapiens
agggttcaattctggcattgttgatg

SEQ ID NO: 104489 - DNA, 26 bp, Homo sapiens
gggttcaattctggcattgttgatgt

SEQ ID NO: 104490 - DNA, 26 bp, Homo sapiens
ggttcaattctggcattgttgatgtc

SEQ ID NO: 104491 - DNA, 26 bp, Homo sapiens
gttcaattctggcattgttgatgtca

SEQ ID NO: 104492 - DNA, 26 bp, Homo sapiens
ttcaattctggcattgttgatgtcat

SEQ ID NO: 104493 - DNA, 26 bp, Homo sapiens
tcaattctggcattgttgatgtcatc

SEQ ID NO: 104494 - DNA, 26 bp, Homo sapiens
caattctggcattgttgatgtcatct

SEQ ID NO: 104495 - DNA, 26 bp, Homo sapiens
aattctggcattgttgatgtcatctt

SEQ ID NO: 104496 - DNA, 26 bp, Homo sapiens
attctggcattgttgatgtcatcttg

SEQ ID NO: 104497 - DNA, 26 bp, Homo sapiens
ttctggcattgttgatgtcatcttgc

SEQ ID NO: 104498 - DNA, 26 bp, Homo sapiens
tctggcattgttgatgtcatcttgcg

SEQ ID NO: 104499 - DNA, 26 bp, Homo sapiens
ctggcattgttgatgtcatcttgcgg

SEQ ID NO: 104500 - DNA, 26 bp, Homo sapiens
tggcattgttgatgtcatcttgcggg

SEQ ID NO: 104501 - DNA, 26 bp, Homo sapiens
ggcattgttgatgtcatcttgcgggg

SEQ ID NO: 104502 - DNA, 26 bp, Homo sapiens
gcattgttgatgtcatcttgcgggga

SEQ ID NO: 104503 - DNA, 26 bp, Homo sapiens
cattgttgatgtcatcttgcggggag

SEQ ID NO: 104504 - DNA, 26 bp, Homo sapiens
attgttgatgtcatcttgcggggagt

SEQ ID NO: 104505 - DNA, 26 bp, Homo sapiens
ttgttgatgtcatcttgcggggagtt

SEQ ID NO: 104506 - DNA, 26 bp, Homo sapiens
tgttgatgtcatcttgcggggagttg

SEQ ID NO: 104507 - DNA, 26 bp, Homo sapiens
gttgatgtcatcttgcggggagttgg

SEQ ID NO: 104508 - DNA, 26 bp, Homo sapiens
ttgatgtcatcttgcggggagttggt

SEQ ID NO: 104509 - DNA, 26 bp, Homo sapiens
tgatgtcatcttgcggggagttggtg

SEQ ID NO: 104510 - DNA, 26 bp, Homo sapiens
gatgtcatcttgcggggagttggtgt

SEQ ID NO: 104511 - DNA, 26 bp, Homo sapiens
atgtcatcttgcggggagttggtgtc

SEQ ID NO: 104512 - DNA, 26 bp, Homo sapiens
tgtcatcttgcggggagttggtgtcg

SEQ ID NO: 104513 - DNA, 26 bp, Homo sapiens
gtcatcttgcggggagttggtgtcgt

SEQ ID NO: 104514 - DNA, 26 bp, Homo sapiens
tcatcttgcggggagttggtgtcgtc

SEQ ID NO: 104515 - DNA, 26 bp, Homo sapiens
catcttgcggggagttggtgtcgtct

SEQ ID NO: 104516 - DNA, 26 bp, Homo sapiens
atcttgcggggagttggtgtcgtctt

SEQ ID NO: 104517 - DNA, 26 bp, Homo sapiens
tcttgcggggagttggtgtcgtcttt

SEQ ID NO: 104518 - DNA, 26 bp, Homo sapiens
cttgcggggagttggtgtcgtctttg

SEQ ID NO: 104519 - DNA, 26 bp, Homo sapiens
ttgcggggagttggtgtcgtctttgg

SEQ ID NO: 104520 - DNA, 26 bp, Homo sapiens
tgcggggagttggtgtcgtctttggt

SEQ ID NO: 104521 - DNA, 26 bp, Homo sapiens
gcggggagttggtgtcgtctttggtt

SEQ ID NO: 104522 - DNA, 26 bp, Homo sapiens
cggggagttggtgtcgtctttggttt

SEQ ID NO: 104523 - DNA, 26 bp, Homo sapiens
ggggagttggtgtcgtctttggtttt

SEQ ID NO: 104524 - DNA, 26 bp, Homo sapiens
gggagttggtgtcgtctttggttttc

SEQ ID NO: 104525 - DNA, 26 bp, Homo sapiens
ggagttggtgtcgtctttggttttct

SEQ ID NO: 104526 - DNA, 26 bp, Homo sapiens
gagttggtgtcgtctttggttttctc

SEQ ID NO: 104527 - DNA, 26 bp, Homo sapiens
agttggtgtcgtctttggttttctca

SEQ ID NO: 104528 - DNA, 26 bp, Homo sapiens
gttggtgtcgtctttggttttctcac

SEQ ID NO: 104529 - DNA, 26 bp, Homo sapiens
ttggtgtcgtctttggttttctcact

SEQ ID NO: 104530 - DNA, 26 bp, Homo sapiens
tggtgtcgtctttggttttctcactc

SEQ ID NO: 104531 - DNA, 26 bp, Homo sapiens
ggtgtcgtctttggttttctcactct

SEQ ID NO: 104532 - DNA, 26 bp, Homo sapiens
gtgtcgtctttggttttctcactcta

SEQ ID NO: 104533 - DNA, 26 bp, Homo sapiens
tgtcgtctttggttttctcactctag

SEQ ID NO: 104534 - DNA, 26 bp, Homo sapiens
gtcgtctttggttttctcactctagg

SEQ ID NO: 104535 - DNA, 26 bp, Homo sapiens
tcgtctttggttttctcactctaggc

SEQ ID NO: 104536 - DNA, 26 bp, Homo sapiens
cgtctttggttttctcactctaggca

SEQ ID NO: 104537 - DNA, 26 bp, Homo sapiens
gtctttggttttctcactctaggcat

SEQ ID NO: 104538 - DNA, 26 bp, Homo sapiens
tctttggttttctcactctaggcatt

SEQ ID NO: 104539 - DNA, 26 bp, Homo sapiens
ctttggttttctcactctaggcattg

SEQ ID NO: 104540 - DNA, 26 bp, Homo sapiens
tttggttttctcactctaggcattgt

SEQ ID NO: 104541 - DNA, 26 bp, Homo sapiens
ttggttttctcactctaggcattgtt

SEQ ID NO: 104542 - DNA, 26 bp, Homo sapiens
tggttttctcactctaggcattgttt

SEQ ID NO: 104543 - DNA, 26 bp, Homo sapiens
ggttttctcactctaggcattgtttt

SEQ ID NO: 104544 - DNA, 26 bp, Homo sapiens
gttttctcactctaggcattgttttt

SEQ ID NO: 104545 - DNA, 26 bp, Homo sapiens
ttttctcactctaggcattgtttttg

SEQ ID NO: 104546 - DNA, 26 bp, Homo sapiens
tttctcactctaggcattgtttttgg

SEQ ID NO: 104547 - DNA, 26 bp, Homo sapiens
ttctcactctaggcattgtttttggc

SEQ ID NO: 104548 - DNA, 26 bp, Homo sapiens
tctcactctaggcattgtttttggct

SEQ ID NO: 104549 - DNA, 26 bp, Homo sapiens
ctcactctaggcattgtttttggctt

SEQ ID NO: 104550 - DNA, 26 bp, Homo sapiens
tcactctaggcattgtttttggcttt

SEQ ID NO: 104551 - DNA, 26 bp, Homo sapiens
cactctaggcattgtttttggctttt

SEQ ID NO: 104552 - DNA, 26 bp, Homo sapiens
actctaggcattgtttttggcttttt

SEQ ID NO: 104553 - DNA, 26 bp, Homo sapiens
ctctaggcattgtttttggctttttg

SEQ ID NO: 104554 - DNA, 26 bp, Homo sapiens
tctaggcattgtttttggctttttgg

SEQ ID NO: 104555 - DNA, 26 bp, Homo sapiens
ctaggcattgtttttggctttttggt

SEQ ID NO: 104556 - DNA, 26 bp, Homo sapiens
taggcattgtttttggctttttggta

SEQ ID NO: 104557 - DNA, 26 bp, Homo sapiens
aggcattgtttttggctttttggtag

SEQ ID NO: 104558 - DNA, 26 bp, Homo sapiens
ggcattgtttttggctttttggtaga

SEQ ID NO: 104559 - DNA, 26 bp, Homo sapiens
gcattgtttttggctttttggtagaa

SEQ ID NO: 104560 - DNA, 26 bp, Homo sapiens
cattgtttttggctttttggtagaag

SEQ ID NO: 104561 - DNA, 26 bp, Homo sapiens
attgtttttggctttttggtagaagt

SEQ ID NO: 104562 - DNA, 26 bp, Homo sapiens
ttgtttttggctttttggtagaagtg

SEQ ID NO: 104563 - DNA, 26 bp, Homo sapiens
tgtttttggctttttggtagaagtgg

SEQ ID NO: 104564 - DNA, 26 bp, Homo sapiens
gtttttggctttttggtagaagtggg

SEQ ID NO: 104565 - DNA, 26 bp, Homo sapiens
tttttggctttttggtagaagtgggt

SEQ ID NO: 104566 - DNA, 26 bp, Homo sapiens
ttttggctttttggtagaagtgggtt

SEQ ID NO: 104567 - DNA, 26 bp, Homo sapiens
tttggctttttggtagaagtgggttt

SEQ ID NO: 104568 - DNA, 26 bp, Homo sapiens
ttggctttttggtagaagtgggtttt

SEQ ID NO: 104569 - DNA, 26 bp, Homo sapiens
tggctttttggtagaagtgggttttt

SEQ ID NO: 104570 - DNA, 26 bp, Homo sapiens
ggctttttggtagaagtgggtttttt

SEQ ID NO: 104571 - DNA, 26 bp, Homo sapiens
gctttttggtagaagtgggttttttg

SEQ ID NO: 104572 - DNA, 26 bp, Homo sapiens
ctttttggtagaagtgggttttttgg

SEQ ID NO: 104573 - DNA, 26 bp, Homo sapiens
tttttggtagaagtgggttttttggg

SEQ ID NO: 104574 - DNA, 26 bp, Homo sapiens
ttttggtagaagtgggttttttgggt

SEQ ID NO: 104575 - DNA, 26 bp, Homo sapiens
tttggtagaagtgggttttttgggtg

SEQ ID NO: 104576 - DNA, 26 bp, Homo sapiens
ttggtagaagtgggttttttgggtgc

SEQ ID NO: 104577 - DNA, 26 bp, Homo sapiens
tggtagaagtgggttttttgggtgct

SEQ ID NO: 104578 - DNA, 26 bp, Homo sapiens
ggtagaagtgggttttttgggtgctt

SEQ ID NO: 104579 - DNA, 26 bp, Homo sapiens
gtagaagtgggttttttgggtgcttt

SEQ ID NO: 104580 - DNA, 26 bp, Homo sapiens
tagaagtgggttttttgggtgctttg

SEQ ID NO: 104581 - DNA, 26 bp, Homo sapiens
agaagtgggttttttgggtgctttgg

SEQ ID NO: 104582 - DNA, 26 bp, Homo sapiens
gaagtgggttttttgggtgctttggt

SEQ ID NO: 104583 - DNA, 26 bp, Homo sapiens
aagtgggttttttgggtgctttggtt

SEQ ID NO: 104584 - DNA, 26 bp, Homo sapiens
agtgggttttttgggtgctttggttg

SEQ ID NO: 104585 - DNA, 26 bp, Homo sapiens
gtgggttttttgggtgctttggttgg

SEQ ID NO: 104586 - DNA, 26 bp, Homo sapiens
tgggttttttgggtgctttggttggc

SEQ ID NO: 104587 - DNA, 26 bp, Homo sapiens
gggttttttgggtgctttggttggct

SEQ ID NO: 104588 - DNA, 26 bp, Homo sapiens
ggttttttgggtgctttggttggctt

SEQ ID NO: 104589 - DNA, 26 bp, Homo sapiens
gttttttgggtgctttggttggcttt

SEQ ID NO: 104590 - DNA, 26 bp, Homo sapiens
ttttttgggtgctttggttggctttt

SEQ ID NO: 104591 - DNA, 26 bp, Homo sapiens
tttttgggtgctttggttggcttttg

SEQ ID NO: 104592 - DNA, 26 bp, Homo sapiens
ttttgggtgctttggttggcttttga

SEQ ID NO: 104593 - DNA, 26 bp, Homo sapiens
tttgggtgctttggttggcttttgag

SEQ ID NO: 104594 - DNA, 26 bp, Homo sapiens
ttgggtgctttggttggcttttgagg

SEQ ID NO: 104595 - DNA, 26 bp, Homo sapiens
tgggtgctttggttggcttttgaggt

SEQ ID NO: 104596 - DNA, 26 bp, Homo sapiens
gggtgctttggttggcttttgaggtt

SEQ ID NO: 104597 - DNA, 26 bp, Homo sapiens
ggtgctttggttggcttttgaggttt

SEQ ID NO: 104598 - DNA, 26 bp, Homo sapiens
gtgctttggttggcttttgaggttta

SEQ ID NO: 104599 - DNA, 26 bp, Homo sapiens
tgctttggttggcttttgaggtttag

SEQ ID NO: 104600 - DNA, 26 bp, Homo sapiens
gctttggttggcttttgaggtttagg

SEQ ID NO: 104601 - DNA, 26 bp, Homo sapiens
ctttggttggcttttgaggtttagga

SEQ ID NO: 104602 - DNA, 26 bp, Homo sapiens
tttggttggcttttgaggtttaggag

SEQ ID NO: 104603 - DNA, 26 bp, Homo sapiens
ttggttggcttttgaggtttaggagt

SEQ ID NO: 104604 - DNA, 26 bp, Homo sapiens
tggttggcttttgaggtttaggagtt

SEQ ID NO: 104605 - DNA, 26 bp, Homo sapiens
ggttggcttttgaggtttaggagttg

SEQ ID NO: 104606 - DNA, 26 bp, Homo sapiens
gttggcttttgaggtttaggagttgt

SEQ ID NO: 104607 - DNA, 26 bp, Homo sapiens
ttggcttttgaggtttaggagttgtc

SEQ ID NO: 104608 - DNA, 26 bp, Homo sapiens
tggcttttgaggtttaggagttgtcg

SEQ ID NO: 104609 - DNA, 26 bp, Homo sapiens
ggcttttgaggtttaggagttgtcgc

SEQ ID NO: 104610 - DNA, 26 bp, Homo sapiens
gcttttgaggtttaggagttgtcgct

SEQ ID NO: 104611 - DNA, 26 bp, Homo sapiens
cttttgaggtttaggagttgtcgctt

SEQ ID NO: 104612 - DNA, 26 bp, Homo sapiens
ttttgaggtttaggagttgtcgcttt

SEQ ID NO: 104613 - DNA, 26 bp, Homo sapiens
tttgaggtttaggagttgtcgcttta

SEQ ID NO: 104614 - DNA, 26 bp, Homo sapiens
ttgaggtttaggagttgtcgctttag

SEQ ID NO: 104615 - DNA, 26 bp, Homo sapiens
tgaggtttaggagttgtcgctttaga

SEQ ID NO: 104616 - DNA, 26 bp, Homo sapiens
gaggtttaggagttgtcgctttagaa

SEQ ID NO: 104617 - DNA, 26 bp, Homo sapiens
aggtttaggagttgtcgctttagaat

SEQ ID NO: 104618 - DNA, 26 bp, Homo sapiens
ggtttaggagttgtcgctttagaatt

SEQ ID NO: 104619 - DNA, 26 bp, Homo sapiens
gtttaggagttgtcgctttagaatta

SEQ ID NO: 104620 - DNA, 26 bp, Homo sapiens
tttaggagttgtcgctttagaattag

SEQ ID NO: 104621 - DNA, 26 bp, Homo sapiens
ttaggagttgtcgctttagaattagt

SEQ ID NO: 104622 - DNA, 26 bp, Homo sapiens
taggagttgtcgctttagaattagta

SEQ ID NO: 104623 - DNA, 26 bp, Homo sapiens
aggagttgtcgctttagaattagtag

SEQ ID NO: 104624 - DNA, 26 bp, Homo sapiens
ggagttgtcgctttagaattagtagc

SEQ ID NO: 104625 - DNA, 26 bp, Homo sapiens
gagttgtcgctttagaattagtagct

SEQ ID NO: 104626 - DNA, 26 bp, Homo sapiens
agttgtcgctttagaattagtagctc

SEQ ID NO: 104627 - DNA, 26 bp, Homo sapiens
gttgtcgctttagaattagtagctct

SEQ ID NO: 104628 - DNA, 26 bp, Homo sapiens
ttgtcgctttagaattagtagctctg

SEQ ID NO: 104629 - DNA, 26 bp, Homo sapiens
tgtcgctttagaattagtagctctgt

SEQ ID NO: 104630 - DNA, 26 bp, Homo sapiens
gtcgctttagaattagtagctctgtc

SEQ ID NO: 104631 - DNA, 26 bp, Homo sapiens
tcgctttagaattagtagctctgtct

SEQ ID NO: 104632 - DNA, 26 bp, Homo sapiens
cgctttagaattagtagctctgtctt

SEQ ID NO: 104633 - DNA, 26 bp, Homo sapiens
gctttagaattagtagctctgtcttt

SEQ ID NO: 104634 - DNA, 26 bp, Homo sapiens
ctttagaattagtagctctgtctttt

SEQ ID NO: 104635 - DNA, 26 bp, Homo sapiens
tttagaattagtagctctgtcttttg

SEQ ID NO: 104636 - DNA, 26 bp, Homo sapiens
ttagaattagtagctctgtcttttgg

SEQ ID NO: 104637 - DNA, 26 bp, Homo sapiens
tagaattagtagctctgtcttttggt

SEQ ID NO: 104638 - DNA, 26 bp, Homo sapiens
agaattagtagctctgtcttttggtt

SEQ ID NO: 104639 - DNA, 26 bp, Homo sapiens
gaattagtagctctgtcttttggttt

SEQ ID NO: 104640 - DNA, 26 bp, Homo sapiens
aattagtagctctgtcttttggttta

SEQ ID NO: 104641 - DNA, 26 bp, Homo sapiens
attagtagctctgtcttttggtttag

SEQ ID NO: 104642 - DNA, 26 bp, Homo sapiens
ttagtagctctgtcttttggtttagc

SEQ ID NO: 104643 - DNA, 26 bp, Homo sapiens
tagtagctctgtcttttggtttagct

SEQ ID NO: 104644 - DNA, 26 bp, Homo sapiens
agtagctctgtcttttggtttagctg

SEQ ID NO: 104645 - DNA, 26 bp, Homo sapiens
gtagctctgtcttttggtttagctgt

SEQ ID NO: 104646 - DNA, 26 bp, Homo sapiens
tagctctgtcttttggtttagctgtt

SEQ ID NO: 104647 - DNA, 26 bp, Homo sapiens
agctctgtcttttggtttagctgttt

SEQ ID NO: 104648 - DNA, 26 bp, Homo sapiens
gctctgtcttttggtttagctgtttc

SEQ ID NO: 104649 - DNA, 26 bp, Homo sapiens
ctctgtcttttggtttagctgtttct

SEQ ID NO: 104650 - DNA, 26 bp, Homo sapiens
tctgtcttttggtttagctgtttctt

SEQ ID NO: 104651 - DNA, 26 bp, Homo sapiens
ctgtcttttggtttagctgtttcttc

SEQ ID NO: 104652 - DNA, 26 bp, Homo sapiens
tgtcttttggtttagctgtttcttca

SEQ ID NO: 104653 - DNA, 26 bp, Homo sapiens
gtcttttggtttagctgtttcttcag

SEQ ID NO: 104654 - DNA, 26 bp, Homo sapiens
tcttttggtttagctgtttcttcagg

SEQ ID NO: 104655 - DNA, 26 bp, Homo sapiens
cttttggtttagctgtttcttcaggt

SEQ ID NO: 104656 - DNA, 26 bp, Homo sapiens
ttttggtttagctgtttcttcaggtt

SEQ ID NO: 104657 - DNA, 26 bp, Homo sapiens
tttggtttagctgtttcttcaggttt

SEQ ID NO: 104658 - DNA, 26 bp, Homo sapiens
ttggtttagctgtttcttcaggtttg

SEQ ID NO: 104659 - DNA, 26 bp, Homo sapiens
tggtttagctgtttcttcaggtttgt

SEQ ID NO: 104660 - DNA, 26 bp, Homo sapiens
ggtttagctgtttcttcaggtttgtt

SEQ ID NO: 104661 - DNA, 26 bp, Homo sapiens
gtttagctgtttcttcaggtttgttc

SEQ ID NO: 104662 - DNA, 26 bp, Homo sapiens
tttagctgtttcttcaggtttgttca

SEQ ID NO: 104663 - DNA, 26 bp, Homo sapiens
ttagctgtttcttcaggtttgttcat

SEQ ID NO: 104664 - DNA, 26 bp, Homo sapiens
tagctgtttcttcaggtttgttcata

SEQ ID NO: 104665 - DNA, 26 bp, Homo sapiens
agctgtttcttcaggtttgttcataa

SEQ ID NO: 104666 - DNA, 26 bp, Homo sapiens
gctgtttcttcaggtttgttcataat

SEQ ID NO: 104667 - DNA, 26 bp, Homo sapiens
ctgtttcttcaggtttgttcataatc

SEQ ID NO: 104668 - DNA, 26 bp, Homo sapiens
tgtttcttcaggtttgttcataatct

SEQ ID NO: 104669 - DNA, 26 bp, Homo sapiens
gtttcttcaggtttgttcataatctc

SEQ ID NO: 104670 - DNA, 26 bp, Homo sapiens
tttcttcaggtttgttcataatctca

SEQ ID NO: 104671 - DNA, 26 bp, Homo sapiens
ttcttcaggtttgttcataatctcag

SEQ ID NO: 104672 - DNA, 26 bp, Homo sapiens
tcttcaggtttgttcataatctcagt

SEQ ID NO: 104673 - DNA, 26 bp, Homo sapiens
cttcaggtttgttcataatctcagtg

SEQ ID NO: 104674 - DNA, 26 bp, Homo sapiens
ttcaggtttgttcataatctcagtgg

SEQ ID NO: 104675 - DNA, 26 bp, Homo sapiens
tcaggtttgttcataatctcagtggt

SEQ ID NO: 104676 - DNA, 26 bp, Homo sapiens
caggtttgttcataatctcagtggta

SEQ ID NO: 104677 - DNA, 26 bp, Homo sapiens
aggtttgttcataatctcagtggtag

SEQ ID NO: 104678 - DNA, 26 bp, Homo sapiens
ggtttgttcataatctcagtggtagt

SEQ ID NO: 104679 - DNA, 26 bp, Homo sapiens
gtttgttcataatctcagtggtagta

SEQ ID NO: 104680 - DNA, 26 bp, Homo sapiens
tttgttcataatctcagtggtagtaa

SEQ ID NO: 104681 - DNA, 26 bp, Homo sapiens
ttgttcataatctcagtggtagtaat

SEQ ID NO: 104682 - DNA, 26 bp, Homo sapiens
tgttcataatctcagtggtagtaatt

SEQ ID NO: 104683 - DNA, 26 bp, Homo sapiens
gttcataatctcagtggtagtaattg

SEQ ID NO: 104684 - DNA, 26 bp, Homo sapiens
ttcataatctcagtggtagtaattgt

SEQ ID NO: 104685 - DNA, 26 bp, Homo sapiens
tcataatctcagtggtagtaattgtc

SEQ ID NO: 104686 - DNA, 26 bp, Homo sapiens
cataatctcagtggtagtaattgtct

SEQ ID NO: 104687 - DNA, 26 bp, Homo sapiens
ataatctcagtggtagtaattgtctt

SEQ ID NO: 104688 - DNA, 26 bp, Homo sapiens
taatctcagtggtagtaattgtcttt

SEQ ID NO: 104689 - DNA, 26 bp, Homo sapiens
aatctcagtggtagtaattgtctttt

SEQ ID NO: 104690 - DNA, 26 bp, Homo sapiens
atctcagtggtagtaattgtcttttt

SEQ ID NO: 104691 - DNA, 26 bp, Homo sapiens
tctcagtggtagtaattgtctttttt

SEQ ID NO: 104692 - DNA, 26 bp, Homo sapiens
ctcagtggtagtaattgtcttttttg

SEQ ID NO: 104693 - DNA, 26 bp, Homo sapiens
tcagtggtagtaattgtcttttttgt

SEQ ID NO: 104694 - DNA, 26 bp, Homo sapiens
cagtggtagtaattgtcttttttgtt

SEQ ID NO: 104695 - DNA, 26 bp, Homo sapiens
agtggtagtaattgtcttttttgttg

SEQ ID NO: 104696 - DNA, 26 bp, Homo sapiens
gtggtagtaattgtcttttttgttgt

SEQ ID NO: 104697 - DNA, 26 bp, Homo sapiens
tggtagtaattgtcttttttgttgta

SEQ ID NO: 104698 - DNA, 26 bp, Homo sapiens
ggtagtaattgtcttttttgttgtag

SEQ ID NO: 104699 - DNA, 26 bp, Homo sapiens
gtagtaattgtcttttttgttgtagt

SEQ ID NO: 104700 - DNA, 26 bp, Homo sapiens
tagtaattgtcttttttgttgtagtt

SEQ ID NO: 104701 - DNA, 26 bp, Homo sapiens
agtaattgtcttttttgttgtagtta

SEQ ID NO: 104702 - DNA, 26 bp, Homo sapiens
gtaattgtcttttttgttgtagttac

SEQ ID NO: 104703 - DNA, 26 bp, Homo sapiens
taattgtcttttttgttgtagttact

SEQ ID NO: 104704 - DNA, 26 bp, Homo sapiens
aattgtcttttttgttgtagttactt

SEQ ID NO: 104705 - DNA, 26 bp, Homo sapiens
attgtcttttttgttgtagttacttt

SEQ ID NO: 104706 - DNA, 26 bp, Homo sapiens
ttgtcttttttgttgtagttactttg

SEQ ID NO: 104707 - DNA, 26 bp, Homo sapiens
tgtcttttttgttgtagttactttgg

SEQ ID NO: 104708 - DNA, 26 bp, Homo sapiens
gtcttttttgttgtagttactttggg

SEQ ID NO: 104709 - DNA, 26 bp, Homo sapiens
tcttttttgttgtagttactttgggt

SEQ ID NO: 104710 - DNA, 26 bp, Homo sapiens
cttttttgttgtagttactttgggtg

SEQ ID NO: 104711 - DNA, 26 bp, Homo sapiens
ttttttgttgtagttactttgggtgc

SEQ ID NO: 104712 - DNA, 26 bp, Homo sapiens
tttttgttgtagttactttgggtgca

SEQ ID NO: 104713 - DNA, 26 bp, Homo sapiens
ttttgttgtagttactttgggtgcaa

SEQ ID NO: 104714 - DNA, 26 bp, Homo sapiens
tttgttgtagttactttgggtgcaag

SEQ ID NO: 104715 - DNA, 26 bp, Homo sapiens
ttgttgtagttactttgggtgcaaga

SEQ ID NO: 104716 - DNA, 26 bp, Homo sapiens
tgttgtagttactttgggtgcaagag

SEQ ID NO: 104717 - DNA, 26 bp, Homo sapiens
gttgtagttactttgggtgcaagagt

SEQ ID NO: 104718 - DNA, 26 bp, Homo sapiens
ttgtagttactttgggtgcaagagta

SEQ ID NO: 104719 - DNA, 26 bp, Homo sapiens
tgtagttactttgggtgcaagagtag

SEQ ID NO: 104720 - DNA, 26 bp, Homo sapiens
gtagttactttgggtgcaagagtagt

SEQ ID NO: 104721 - DNA, 26 bp, Homo sapiens
tagttactttgggtgcaagagtagtt

SEQ ID NO: 104722 - DNA, 26 bp, Homo sapiens
agttactttgggtgcaagagtagttg

SEQ ID NO: 104723 - DNA, 26 bp, Homo sapiens
gttactttgggtgcaagagtagttgt

SEQ ID NO: 104724 - DNA, 26 bp, Homo sapiens
ttactttgggtgcaagagtagttgtt

SEQ ID NO: 104725 - DNA, 26 bp, Homo sapiens
tactttgggtgcaagagtagttgttt

SEQ ID NO: 104726 - DNA, 26 bp, Homo sapiens
actttgggtgcaagagtagttgtttt

SEQ ID NO: 104727 - DNA, 26 bp, Homo sapiens
ctttgggtgcaagagtagttgtttta

SEQ ID NO: 104728 - DNA, 26 bp, Homo sapiens
tttgggtgcaagagtagttgttttaa

SEQ ID NO: 104729 - DNA, 26 bp, Homo sapiens
ttgggtgcaagagtagttgttttaag

SEQ ID NO: 104730 - DNA, 26 bp, Homo sapiens
tgggtgcaagagtagttgttttaaga

SEQ ID NO: 104731 - DNA, 26 bp, Homo sapiens
gggtgcaagagtagttgttttaagag

SEQ ID NO: 104732 - DNA, 26 bp, Homo sapiens
ggtgcaagagtagttgttttaagagt

SEQ ID NO: 104733 - DNA, 26 bp, Homo sapiens
gtgcaagagtagttgttttaagagta

SEQ ID NO: 104734 - DNA, 26 bp, Homo sapiens
tgcaagagtagttgttttaagagtag

SEQ ID NO: 104735 - DNA, 26 bp, Homo sapiens
gcaagagtagttgttttaagagtagt

SEQ ID NO: 104736 - DNA, 26 bp, Homo sapiens
caagagtagttgttttaagagtagta

SEQ ID NO: 104737 - DNA, 26 bp, Homo sapiens
aagagtagttgttttaagagtagtaa

SEQ ID NO: 104738 - DNA, 26 bp, Homo sapiens
agagtagttgttttaagagtagtaat

SEQ ID NO: 104739 - DNA, 26 bp, Homo sapiens
gagtagttgttttaagagtagtaatt

SEQ ID NO: 104740 - DNA, 26 bp, Homo sapiens
agtagttgttttaagagtagtaattt

SEQ ID NO: 104741 - DNA, 26 bp, Homo sapiens
gtagttgttttaagagtagtaatttt

SEQ ID NO: 104742 - DNA, 26 bp, Homo sapiens
tagttgttttaagagtagtaattttg

SEQ ID NO: 104743 - DNA, 26 bp, Homo sapiens
agttgttttaagagtagtaattttga

SEQ ID NO: 104744 - DNA, 26 bp, Homo sapiens
gttgttttaagagtagtaattttgaa

SEQ ID NO: 104745 - DNA, 26 bp, Homo sapiens
ttgttttaagagtagtaattttgaat

SEQ ID NO: 104746 - DNA, 26 bp, Homo sapiens
tgttttaagagtagtaattttgaatg

SEQ ID NO: 104747 - DNA, 26 bp, Homo sapiens
gttttaagagtagtaattttgaatgg

SEQ ID NO: 104748 - DNA, 26 bp, Homo sapiens
ttttaagagtagtaattttgaatggt

SEQ ID NO: 104749 - DNA, 26 bp, Homo sapiens
tttaagagtagtaattttgaatggtg

SEQ ID NO: 104750 - DNA, 26 bp, Homo sapiens
ttaagagtagtaattttgaatggtgt

SEQ ID NO: 104751 - DNA, 26 bp, Homo sapiens
taagagtagtaattttgaatggtgtg

SEQ ID NO: 104752 - DNA, 26 bp, Homo sapiens
aagagtagtaattttgaatggtgtgg

SEQ ID NO: 104753 - DNA, 26 bp, Homo sapiens
agagtagtaattttgaatggtgtggt

SEQ ID NO: 104754 - DNA, 26 bp, Homo sapiens
gagtagtaattttgaatggtgtggta

SEQ ID NO: 104755 - DNA, 26 bp, Homo sapiens
agtagtaattttgaatggtgtggtat

SEQ ID NO: 104756 - DNA, 26 bp, Homo sapiens
gtagtaattttgaatggtgtggtatc

SEQ ID NO: 104757 - DNA, 26 bp, Homo sapiens
tagtaattttgaatggtgtggtatct

SEQ ID NO: 104758 - DNA, 26 bp, Homo sapiens
agtaattttgaatggtgtggtatctt

SEQ ID NO: 104759 - DNA, 26 bp, Homo sapiens
gtaattttgaatggtgtggtatcttg

SEQ ID NO: 104760 - DNA, 26 bp, Homo sapiens
taattttgaatggtgtggtatcttga

SEQ ID NO: 104761 - DNA, 26 bp, Homo sapiens
aattttgaatggtgtggtatcttgag

SEQ ID NO: 104762 - DNA, 26 bp, Homo sapiens
attttgaatggtgtggtatcttgagt

SEQ ID NO: 104763 - DNA, 26 bp, Homo sapiens
ttttgaatggtgtggtatcttgagtt

SEQ ID NO: 104764 - DNA, 26 bp, Homo sapiens
tttgaatggtgtggtatcttgagttg

SEQ ID NO: 104765 - DNA, 26 bp, Homo sapiens
ttgaatggtgtggtatcttgagttgt

SEQ ID NO: 104766 - DNA, 26 bp, Homo sapiens
tgaatggtgtggtatcttgagttgtg

SEQ ID NO: 104767 - DNA, 26 bp, Homo sapiens
gaatggtgtggtatcttgagttgtgg

SEQ ID NO: 104768 - DNA, 26 bp, Homo sapiens
aatggtgtggtatcttgagttgtggt

SEQ ID NO: 104769 - DNA, 26 bp, Homo sapiens
atggtgtggtatcttgagttgtggta

SEQ ID NO: 104770 - DNA, 26 bp, Homo sapiens
tggtgtggtatcttgagttgtggtag

SEQ ID NO: 104771 - DNA, 26 bp, Homo sapiens
ggtgtggtatcttgagttgtggtaga

SEQ ID NO: 104772 - DNA, 26 bp, Homo sapiens
gtgtggtatcttgagttgtggtagat

SEQ ID NO: 104773 - DNA, 26 bp, Homo sapiens
tgtggtatcttgagttgtggtagatg

SEQ ID NO: 104774 - DNA, 26 bp, Homo sapiens
gtggtatcttgagttgtggtagatgt

SEQ ID NO: 104775 - DNA, 26 bp, Homo sapiens
tggtatcttgagttgtggtagatgtt

SEQ ID NO: 104776 - DNA, 26 bp, Homo sapiens
ggtatcttgagttgtggtagatgtta

SEQ ID NO: 104777 - DNA, 26 bp, Homo sapiens
gtatcttgagttgtggtagatgttac

SEQ ID NO: 104778 - DNA, 26 bp, Homo sapiens
tatcttgagttgtggtagatgttact

SEQ ID NO: 104779 - DNA, 26 bp, Homo sapiens
atcttgagttgtggtagatgttactt

SEQ ID NO: 104780 - DNA, 26 bp, Homo sapiens
tcttgagttgtggtagatgttacttg

SEQ ID NO: 104781 - DNA, 26 bp, Homo sapiens
cttgagttgtggtagatgttacttgt

SEQ ID NO: 104782 - DNA, 26 bp, Homo sapiens
ttgagttgtggtagatgttacttgtg

SEQ ID NO: 104783 - DNA, 26 bp, Homo sapiens
tgagttgtggtagatgttacttgtgt

SEQ ID NO: 104784 - DNA, 26 bp, Homo sapiens
gagttgtggtagatgttacttgtgtg

SEQ ID NO: 104785 - DNA, 26 bp, Homo sapiens
agttgtggtagatgttacttgtgtgg

SEQ ID NO: 104786 - DNA, 26 bp, Homo sapiens
gttgtggtagatgttacttgtgtggt

SEQ ID NO: 104787 - DNA, 26 bp, Homo sapiens
ttgtggtagatgttacttgtgtggtt

SEQ ID NO: 104788 - DNA, 26 bp, Homo sapiens
tgtggtagatgttacttgtgtggttg

SEQ ID NO: 104789 - DNA, 26 bp, Homo sapiens
gtggtagatgttacttgtgtggttgt

SEQ ID NO: 104790 - DNA, 26 bp, Homo sapiens
tggtagatgttacttgtgtggttgta

SEQ ID NO: 104791 - DNA, 26 bp, Homo sapiens
ggtagatgttacttgtgtggttgtag

SEQ ID NO: 104792 - DNA, 26 bp, Homo sapiens
gtagatgttacttgtgtggttgtagc

SEQ ID NO: 104793 - DNA, 26 bp, Homo sapiens
tagatgttacttgtgtggttgtagct

SEQ ID NO: 104794 - DNA, 26 bp, Homo sapiens
agatgttacttgtgtggttgtagctg

SEQ ID NO: 104795 - DNA, 26 bp, Homo sapiens
gatgttacttgtgtggttgtagctgt

SEQ ID NO: 104796 - DNA, 26 bp, Homo sapiens
atgttacttgtgtggttgtagctgtt

SEQ ID NO: 104797 - DNA, 26 bp, Homo sapiens
tgttacttgtgtggttgtagctgtta

SEQ ID NO: 104798 - DNA, 26 bp, Homo sapiens
gttacttgtgtggttgtagctgttat

SEQ ID NO: 104799 - DNA, 26 bp, Homo sapiens
ttacttgtgtggttgtagctgttatt

SEQ ID NO: 104800 - DNA, 26 bp, Homo sapiens
tacttgtgtggttgtagctgttattt

SEQ ID NO: 104801 - DNA, 26 bp, Homo sapiens
acttgtgtggttgtagctgttatttt

SEQ ID NO: 104802 - DNA, 26 bp, Homo sapiens
cttgtgtggttgtagctgttattttg

SEQ ID NO: 104803 - DNA, 26 bp, Homo sapiens
ttgtgtggttgtagctgttattttgg

SEQ ID NO: 104804 - DNA, 26 bp, Homo sapiens
tgtgtggttgtagctgttattttgga

SEQ ID NO: 104805 - DNA, 26 bp, Homo sapiens
gtgtggttgtagctgttattttggat

SEQ ID NO: 104806 - DNA, 26 bp, Homo sapiens
tgtggttgtagctgttattttggatt

SEQ ID NO: 104807 - DNA, 26 bp, Homo sapiens
gtggttgtagctgttattttggattc

SEQ ID NO: 104808 - DNA, 26 bp, Homo sapiens
tggttgtagctgttattttggattcg

SEQ ID NO: 104809 - DNA, 26 bp, Homo sapiens
ggttgtagctgttattttggattcgg

SEQ ID NO: 104810 - DNA, 26 bp, Homo sapiens
gttgtagctgttattttggattcggt

SEQ ID NO: 104811 - DNA, 26 bp, Homo sapiens
ttgtagctgttattttggattcggta

SEQ ID NO: 104812 - DNA, 26 bp, Homo sapiens
tgtagctgttattttggattcggtag

SEQ ID NO: 104813 - DNA, 26 bp, Homo sapiens
gtagctgttattttggattcggtagt

SEQ ID NO: 104814 - DNA, 26 bp, Homo sapiens
tagctgttattttggattcggtagtt

SEQ ID NO: 104815 - DNA, 26 bp, Homo sapiens
agctgttattttggattcggtagttt

SEQ ID NO: 104816 - DNA, 26 bp, Homo sapiens
gctgttattttggattcggtagtttt

SEQ ID NO: 104817 - DNA, 26 bp, Homo sapiens
ctgttattttggattcggtagttttt

SEQ ID NO: 104818 - DNA, 26 bp, Homo sapiens
tgttattttggattcggtagtttttt

SEQ ID NO: 104819 - DNA, 26 bp, Homo sapiens
gttattttggattcggtagttttttc

SEQ ID NO: 104820 - DNA, 26 bp, Homo sapiens
ttattttggattcggtagttttttct

SEQ ID NO: 104821 - DNA, 26 bp, Homo sapiens
tattttggattcggtagttttttctg

SEQ ID NO: 104822 - DNA, 26 bp, Homo sapiens
attttggattcggtagttttttctgt

SEQ ID NO: 104823 - DNA, 26 bp, Homo sapiens
ttttggattcggtagttttttctgtt

SEQ ID NO: 104824 - DNA, 26 bp, Homo sapiens
tttggattcggtagttttttctgttg

SEQ ID NO: 104825 - DNA, 26 bp, Homo sapiens
ttggattcggtagttttttctgttgt

SEQ ID NO: 104826 - DNA, 26 bp, Homo sapiens
tggattcggtagttttttctgttgta

SEQ ID NO: 104827 - DNA, 26 bp, Homo sapiens
ggattcggtagttttttctgttgtag

SEQ ID NO: 104828 - DNA, 26 bp, Homo sapiens
gattcggtagttttttctgttgtagt

SEQ ID NO: 104829 - DNA, 26 bp, Homo sapiens
attcggtagttttttctgttgtagtt

SEQ ID NO: 104830 - DNA, 26 bp, Homo sapiens
ttcggtagttttttctgttgtagttg

SEQ ID NO: 104831 - DNA, 26 bp, Homo sapiens
tcggtagttttttctgttgtagttgc

SEQ ID NO: 104832 - DNA, 26 bp, Homo sapiens
cggtagttttttctgttgtagttgct

SEQ ID NO: 104833 - DNA, 26 bp, Homo sapiens
ggtagttttttctgttgtagttgctg

SEQ ID NO: 104834 - DNA, 26 bp, Homo sapiens
gtagttttttctgttgtagttgctgt

SEQ ID NO: 104835 - DNA, 26 bp, Homo sapiens
tagttttttctgttgtagttgctgtc

SEQ ID NO: 104836 - DNA, 26 bp, Homo sapiens
agttttttctgttgtagttgctgtct

SEQ ID NO: 104837 - DNA, 26 bp, Homo sapiens
gttttttctgttgtagttgctgtctc

SEQ ID NO: 104838 - DNA, 26 bp, Homo sapiens
ttttttctgttgtagttgctgtctct

SEQ ID NO: 104839 - DNA, 26 bp, Homo sapiens
tttttctgttgtagttgctgtctctt

SEQ ID NO: 104840 - DNA, 26 bp, Homo sapiens
ttttctgttgtagttgctgtctcttt

SEQ ID NO: 104841 - DNA, 26 bp, Homo sapiens
tttctgttgtagttgctgtctctttt

SEQ ID NO: 104842 - DNA, 26 bp, Homo sapiens
ttctgttgtagttgctgtctcttttg

SEQ ID NO: 104843 - DNA, 26 bp, Homo sapiens
tctgttgtagttgctgtctcttttgt

SEQ ID NO: 104844 - DNA, 26 bp, Homo sapiens
ctgttgtagttgctgtctcttttgtc

SEQ ID NO: 104845 - DNA, 26 bp, Homo sapiens
tgttgtagttgctgtctcttttgtca

SEQ ID NO: 104846 - DNA, 26 bp, Homo sapiens
gttgtagttgctgtctcttttgtcat

SEQ ID NO: 104847 - DNA, 26 bp, Homo sapiens
ttgtagttgctgtctcttttgtcatc

SEQ ID NO: 104848 - DNA, 26 bp, Homo sapiens
tgtagttgctgtctcttttgtcatct

SEQ ID NO: 104849 - DNA, 26 bp, Homo sapiens
gtagttgctgtctcttttgtcatctt

SEQ ID NO: 104850 - DNA, 26 bp, Homo sapiens
tagttgctgtctcttttgtcatctta

SEQ ID NO: 104851 - DNA, 26 bp, Homo sapiens
agttgctgtctcttttgtcatcttag

SEQ ID NO: 104852 - DNA, 26 bp, Homo sapiens
gttgctgtctcttttgtcatcttagg

SEQ ID NO: 104853 - DNA, 26 bp, Homo sapiens
ttgctgtctcttttgtcatcttaggt

SEQ ID NO: 104854 - DNA, 26 bp, Homo sapiens
tgctgtctcttttgtcatcttaggtg

SEQ ID NO: 104855 - DNA, 26 bp, Homo sapiens
gctgtctcttttgtcatcttaggtgc

SEQ ID NO: 104856 - DNA, 26 bp, Homo sapiens
ctgtctcttttgtcatcttaggtgca

SEQ ID NO: 104857 - DNA, 26 bp, Homo sapiens
tgtctcttttgtcatcttaggtgcag

SEQ ID NO: 104858 - DNA, 26 bp, Homo sapiens
gtctcttttgtcatcttaggtgcagc

SEQ ID NO: 104859 - DNA, 26 bp, Homo sapiens
tctcttttgtcatcttaggtgcagca

SEQ ID NO: 104860 - DNA, 26 bp, Homo sapiens
ctcttttgtcatcttaggtgcagcag

SEQ ID NO: 104861 - DNA, 26 bp, Homo sapiens
tcttttgtcatcttaggtgcagcagt

SEQ ID NO: 104862 - DNA, 26 bp, Homo sapiens
cttttgtcatcttaggtgcagcagtt

SEQ ID NO: 104863 - DNA, 26 bp, Homo sapiens
ttttgtcatcttaggtgcagcagttg

SEQ ID NO: 104864 - DNA, 26 bp, Homo sapiens
tttgtcatcttaggtgcagcagttgt

SEQ ID NO: 104865 - DNA, 26 bp, Homo sapiens
ttgtcatcttaggtgcagcagttgta

SEQ ID NO: 104866 - DNA, 26 bp, Homo sapiens
tgtcatcttaggtgcagcagttgtag

SEQ ID NO: 104867 - DNA, 26 bp, Homo sapiens
gtcatcttaggtgcagcagttgtagt

SEQ ID NO: 104868 - DNA, 26 bp, Homo sapiens
tcatcttaggtgcagcagttgtagtt

SEQ ID NO: 104869 - DNA, 26 bp, Homo sapiens
catcttaggtgcagcagttgtagttt

SEQ ID NO: 104870 - DNA, 26 bp, Homo sapiens
atcttaggtgcagcagttgtagtttc

SEQ ID NO: 104871 - DNA, 26 bp, Homo sapiens
tcttaggtgcagcagttgtagtttca

SEQ ID NO: 104872 - DNA, 26 bp, Homo sapiens
cttaggtgcagcagttgtagtttcag

SEQ ID NO: 104873 - DNA, 26 bp, Homo sapiens
ttaggtgcagcagttgtagtttcagg

SEQ ID NO: 104874 - DNA, 26 bp, Homo sapiens
taggtgcagcagttgtagtttcaggt

SEQ ID NO: 104875 - DNA, 26 bp, Homo sapiens
aggtgcagcagttgtagtttcaggtg

SEQ ID NO: 104876 - DNA, 26 bp, Homo sapiens
ggtgcagcagttgtagtttcaggtgt

SEQ ID NO: 104877 - DNA, 26 bp, Homo sapiens
gtgcagcagttgtagtttcaggtgta

SEQ ID NO: 104878 - DNA, 26 bp, Homo sapiens
tgcagcagttgtagtttcaggtgtag

SEQ ID NO: 104879 - DNA, 26 bp, Homo sapiens
gcagcagttgtagtttcaggtgtagt

SEQ ID NO: 104880 - DNA, 26 bp, Homo sapiens
cagcagttgtagtttcaggtgtagta

SEQ ID NO: 104881 - DNA, 26 bp, Homo sapiens
agcagttgtagtttcaggtgtagtac

SEQ ID NO: 104882 - DNA, 26 bp, Homo sapiens
gcagttgtagtttcaggtgtagtacg

SEQ ID NO: 104883 - DNA, 26 bp, Homo sapiens
cagttgtagtttcaggtgtagtacgt

SEQ ID NO: 104884 - DNA, 26 bp, Homo sapiens
agttgtagtttcaggtgtagtacgta

SEQ ID NO: 104885 - DNA, 26 bp, Homo sapiens
gttgtagtttcaggtgtagtacgtaa

SEQ ID NO: 104886 - DNA, 26 bp, Homo sapiens
ttgtagtttcaggtgtagtacgtaag

SEQ ID NO: 104887 - DNA, 26 bp, Homo sapiens
tgtagtttcaggtgtagtacgtaagt

SEQ ID NO: 104888 - DNA, 26 bp, Homo sapiens
gtagtttcaggtgtagtacgtaagtc

SEQ ID NO: 104889 - DNA, 26 bp, Homo sapiens
tagtttcaggtgtagtacgtaagtct

SEQ ID NO: 104890 - DNA, 26 bp, Homo sapiens
agtttcaggtgtagtacgtaagtctc

SEQ ID NO: 104891 - DNA, 26 bp, Homo sapiens
gtttcaggtgtagtacgtaagtctct

SEQ ID NO: 104892 - DNA, 26 bp, Homo sapiens
tttcaggtgtagtacgtaagtctctt

SEQ ID NO: 104893 - DNA, 26 bp, Homo sapiens
ttcaggtgtagtacgtaagtctcttt

SEQ ID NO: 104894 - DNA, 26 bp, Homo sapiens
tcaggtgtagtacgtaagtctctttc

SEQ ID NO: 104895 - DNA, 26 bp, Homo sapiens
caggtgtagtacgtaagtctctttct

SEQ ID NO: 104896 - DNA, 26 bp, Homo sapiens
aggtgtagtacgtaagtctctttctg

SEQ ID NO: 104897 - DNA, 26 bp, Homo sapiens
ggtgtagtacgtaagtctctttctgt

SEQ ID NO: 104898 - DNA, 26 bp, Homo sapiens
gtgtagtacgtaagtctctttctgtt

SEQ ID NO: 104899 - DNA, 26 bp, Homo sapiens
tgtagtacgtaagtctctttctgttg

SEQ ID NO: 104900 - DNA, 26 bp, Homo sapiens
gtagtacgtaagtctctttctgttgt

SEQ ID NO: 104901 - DNA, 26 bp, Homo sapiens
tagtacgtaagtctctttctgttgtc

SEQ ID NO: 104902 - DNA, 26 bp, Homo sapiens
agtacgtaagtctctttctgttgtct

SEQ ID NO: 104903 - DNA, 26 bp, Homo sapiens
gtacgtaagtctctttctgttgtctt

SEQ ID NO: 104904 - DNA, 26 bp, Homo sapiens
tacgtaagtctctttctgttgtcttg

SEQ ID NO: 104905 - DNA, 26 bp, Homo sapiens
acgtaagtctctttctgttgtcttgt

SEQ ID NO: 104906 - DNA, 26 bp, Homo sapiens
cgtaagtctctttctgttgtcttgtc

SEQ ID NO: 104907 - DNA, 26 bp, Homo sapiens
gtaagtctctttctgttgtcttgtct

SEQ ID NO: 104908 - DNA, 26 bp, Homo sapiens
taagtctctttctgttgtcttgtctt

SEQ ID NO: 104909 - DNA, 26 bp, Homo sapiens
aagtctctttctgttgtcttgtcttt

SEQ ID NO: 104910 - DNA, 26 bp, Homo sapiens
agtctctttctgttgtcttgtcttta

SEQ ID NO: 104911 - DNA, 26 bp, Homo sapiens
gtctctttctgttgtcttgtctttag

SEQ ID NO: 104912 - DNA, 26 bp, Homo sapiens
tctctttctgttgtcttgtctttagc

SEQ ID NO: 104913 - DNA, 26 bp, Homo sapiens
ctctttctgttgtcttgtctttagct

SEQ ID NO: 104914 - DNA, 26 bp, Homo sapiens
tctttctgttgtcttgtctttagctg

SEQ ID NO: 104915 - DNA, 26 bp, Homo sapiens
ctttctgttgtcttgtctttagctgt

SEQ ID NO: 104916 - DNA, 26 bp, Homo sapiens
tttctgttgtcttgtctttagctgtt

SEQ ID NO: 104917 - DNA, 26 bp, Homo sapiens
ttctgttgtcttgtctttagctgttg

SEQ ID NO: 104918 - DNA, 26 bp, Homo sapiens
tctgttgtcttgtctttagctgttgt

SEQ ID NO: 104919 - DNA, 26 bp, Homo sapiens
ctgttgtcttgtctttagctgttgta

SEQ ID NO: 104920 - DNA, 26 bp, Homo sapiens
tgttgtcttgtctttagctgttgtag

SEQ ID NO: 104921 - DNA, 26 bp, Homo sapiens
gttgtcttgtctttagctgttgtagt

SEQ ID NO: 104922 - DNA, 26 bp, Homo sapiens
ttgtcttgtctttagctgttgtagtc

SEQ ID NO: 104923 - DNA, 26 bp, Homo sapiens
tgtcttgtctttagctgttgtagtca

SEQ ID NO: 104924 - DNA, 26 bp, Homo sapiens
gtcttgtctttagctgttgtagtcat

SEQ ID NO: 104925 - DNA, 26 bp, Homo sapiens
tcttgtctttagctgttgtagtcatt

SEQ ID NO: 104926 - DNA, 26 bp, Homo sapiens
cttgtctttagctgttgtagtcattt

SEQ ID NO: 104927 - DNA, 26 bp, Homo sapiens
ttgtctttagctgttgtagtcatttc

SEQ ID NO: 104928 - DNA, 26 bp, Homo sapiens
tgtctttagctgttgtagtcatttca

SEQ ID NO: 104929 - DNA, 26 bp, Homo sapiens
gtctttagctgttgtagtcatttcag

SEQ ID NO: 104930 - DNA, 26 bp, Homo sapiens
tctttagctgttgtagtcatttcagg

SEQ ID NO: 104931 - DNA, 26 bp, Homo sapiens
ctttagctgttgtagtcatttcaggt

SEQ ID NO: 104932 - DNA, 26 bp, Homo sapiens
tttagctgttgtagtcatttcaggtt

SEQ ID NO: 104933 - DNA, 26 bp, Homo sapiens
ttagctgttgtagtcatttcaggttt

SEQ ID NO: 104934 - DNA, 26 bp, Homo sapiens
tagctgttgtagtcatttcaggttta

SEQ ID NO: 104935 - DNA, 26 bp, Homo sapiens
agctgttgtagtcatttcaggtttag

SEQ ID NO: 104936 - DNA, 26 bp, Homo sapiens
gctgttgtagtcatttcaggtttagt

SEQ ID NO: 104937 - DNA, 26 bp, Homo sapiens
ctgttgtagtcatttcaggtttagtc

SEQ ID NO: 104938 - DNA, 26 bp, Homo sapiens
tgttgtagtcatttcaggtttagtcg

SEQ ID NO: 104939 - DNA, 26 bp, Homo sapiens
gttgtagtcatttcaggtttagtcgc

SEQ ID NO: 104940 - DNA, 26 bp, Homo sapiens
ttgtagtcatttcaggtttagtcgct

SEQ ID NO: 104941 - DNA, 26 bp, Homo sapiens
tgtagtcatttcaggtttagtcgctg

SEQ ID NO: 104942 - DNA, 26 bp, Homo sapiens
gtagtcatttcaggtttagtcgctgc

SEQ ID NO: 104943 - DNA, 26 bp, Homo sapiens
tagtcatttcaggtttagtcgctgca

SEQ ID NO: 104944 - DNA, 26 bp, Homo sapiens
agtcatttcaggtttagtcgctgcag

SEQ ID NO: 104945 - DNA, 26 bp, Homo sapiens
gtcatttcaggtttagtcgctgcagg

SEQ ID NO: 104946 - DNA, 26 bp, Homo sapiens
tcatttcaggtttagtcgctgcagga

SEQ ID NO: 104947 - DNA, 26 bp, Homo sapiens
catttcaggtttagtcgctgcaggag

SEQ ID NO: 104948 - DNA, 26 bp, Homo sapiens
atttcaggtttagtcgctgcaggagt

SEQ ID NO: 104949 - DNA, 26 bp, Homo sapiens
tttcaggtttagtcgctgcaggagtc

SEQ ID NO: 104950 - DNA, 26 bp, Homo sapiens
ttcaggtttagtcgctgcaggagtct

SEQ ID NO: 104951 - DNA, 26 bp, Homo sapiens
tcaggtttagtcgctgcaggagtctt

SEQ ID NO: 104952 - DNA, 26 bp, Homo sapiens
caggtttagtcgctgcaggagtctta

SEQ ID NO: 104953 - DNA, 26 bp, Homo sapiens
aggtttagtcgctgcaggagtcttag

SEQ ID NO: 104954 - DNA, 26 bp, Homo sapiens
ggtttagtcgctgcaggagtcttagt

SEQ ID NO: 104955 - DNA, 26 bp, Homo sapiens
gtttagtcgctgcaggagtcttagtt

SEQ ID NO: 104956 - DNA, 26 bp, Homo sapiens
tttagtcgctgcaggagtcttagttg

SEQ ID NO: 104957 - DNA, 26 bp, Homo sapiens
ttagtcgctgcaggagtcttagttgt

SEQ ID NO: 104958 - DNA, 26 bp, Homo sapiens
tagtcgctgcaggagtcttagttgta

SEQ ID NO: 104959 - DNA, 26 bp, Homo sapiens
agtcgctgcaggagtcttagttgtag

SEQ ID NO: 104960 - DNA, 26 bp, Homo sapiens
gtcgctgcaggagtcttagttgtagg

SEQ ID NO: 104961 - DNA, 26 bp, Homo sapiens
tcgctgcaggagtcttagttgtaggt

SEQ ID NO: 104962 - DNA, 26 bp, Homo sapiens
cgctgcaggagtcttagttgtaggta

SEQ ID NO: 104963 - DNA, 26 bp, Homo sapiens
gctgcaggagtcttagttgtaggtac

SEQ ID NO: 104964 - DNA, 26 bp, Homo sapiens
ctgcaggagtcttagttgtaggtaca

SEQ ID NO: 104965 - DNA, 26 bp, Homo sapiens
tgcaggagtcttagttgtaggtacac

SEQ ID NO: 104966 - DNA, 26 bp, Homo sapiens
gcaggagtcttagttgtaggtacacc

SEQ ID NO: 104967 - DNA, 26 bp, Homo sapiens
caggagtcttagttgtaggtacacca

SEQ ID NO: 104968 - DNA, 26 bp, Homo sapiens
aggagtcttagttgtaggtacaccag

SEQ ID NO: 104969 - DNA, 26 bp, Homo sapiens
ggagtcttagttgtaggtacaccagg

SEQ ID NO: 104970 - DNA, 26 bp, Homo sapiens
gagtcttagttgtaggtacaccaggt

SEQ ID NO: 104971 - DNA, 26 bp, Homo sapiens
agtcttagttgtaggtacaccaggtt

SEQ ID NO: 104972 - DNA, 26 bp, Homo sapiens
gtcttagttgtaggtacaccaggttc

SEQ ID NO: 104973 - DNA, 26 bp, Homo sapiens
tcttagttgtaggtacaccaggttcc

SEQ ID NO: 104974 - DNA, 26 bp, Homo sapiens
cttagttgtaggtacaccaggttcct

SEQ ID NO: 104975 - DNA, 26 bp, Homo sapiens
ttagttgtaggtacaccaggttcctt

SEQ ID NO: 104976 - DNA, 26 bp, Homo sapiens
tagttgtaggtacaccaggttccttg

SEQ ID NO: 104977 - DNA, 26 bp, Homo sapiens
agttgtaggtacaccaggttccttgg

SEQ ID NO: 104978 - DNA, 26 bp, Homo sapiens
gttgtaggtacaccaggttccttggg

SEQ ID NO: 104979 - DNA, 26 bp, Homo sapiens
ttgtaggtacaccaggttccttggga

SEQ ID NO: 104980 - DNA, 26 bp, Homo sapiens
tgtaggtacaccaggttccttgggac

SEQ ID NO: 104981 - DNA, 26 bp, Homo sapiens
gtaggtacaccaggttccttgggact

SEQ ID NO: 104982 - DNA, 26 bp, Homo sapiens
taggtacaccaggttccttgggactg

SEQ ID NO: 104983 - DNA, 26 bp, Homo sapiens
aggtacaccaggttccttgggactgt

SEQ ID NO: 104984 - DNA, 26 bp, Homo sapiens
ggtacaccaggttccttgggactgtt

SEQ ID NO: 104985 - DNA, 26 bp, Homo sapiens
gtacaccaggttccttgggactgttt

SEQ ID NO: 104986 - DNA, 26 bp, Homo sapiens
tacaccaggttccttgggactgtttt

SEQ ID NO: 104987 - DNA, 26 bp, Homo sapiens
acaccaggttccttgggactgttttc

SEQ ID NO: 104988 - DNA, 26 bp, Homo sapiens
caccaggttccttgggactgttttca

SEQ ID NO: 104989 - DNA, 26 bp, Homo sapiens
accaggttccttgggactgttttcaa

SEQ ID NO: 104990 - DNA, 26 bp, Homo sapiens
ccaggttccttgggactgttttcaag

SEQ ID NO: 104991 - DNA, 26 bp, Homo sapiens
caggttccttgggactgttttcaaga

SEQ ID NO: 104992 - DNA, 26 bp, Homo sapiens
aggttccttgggactgttttcaagag

SEQ ID NO: 104993 - DNA, 26 bp, Homo sapiens
ggttccttgggactgttttcaagagc

SEQ ID NO: 104994 - DNA, 26 bp, Homo sapiens
gttccttgggactgttttcaagagct

SEQ ID NO: 104995 - DNA, 26 bp, Homo sapiens
ttccttgggactgttttcaagagctt

SEQ ID NO: 104996 - DNA, 26 bp, Homo sapiens
tccttgggactgttttcaagagcttt

SEQ ID NO: 104997 - DNA, 26 bp, Homo sapiens
ccttgggactgttttcaagagctttt

SEQ ID NO: 104998 - DNA, 26 bp, Homo sapiens
cttgggactgttttcaagagcttttg

SEQ ID NO: 104999 - DNA, 26 bp, Homo sapiens
ttgggactgttttcaagagcttttgg

SEQ ID NO: 105000 - DNA, 26 bp, Homo sapiens
tgggactgttttcaagagcttttggt

SEQ ID NO: 105001 - DNA, 26 bp, Homo sapiens
gggactgttttcaagagcttttggtg

SEQ ID NO: 105002 - DNA, 26 bp, Homo sapiens
ggactgttttcaagagcttttggtgt

SEQ ID NO: 105003 - DNA, 26 bp, Homo sapiens
gactgttttcaagagcttttggtgtg

SEQ ID NO: 105004 - DNA, 26 bp, Homo sapiens
actgttttcaagagcttttggtgtgg

SEQ ID NO: 105005 - DNA, 26 bp, Homo sapiens
ctgttttcaagagcttttggtgtggg

SEQ ID NO: 105006 - DNA, 26 bp, Homo sapiens
tgttttcaagagcttttggtgtgggt

SEQ ID NO: 105007 - DNA, 26 bp, Homo sapiens
gttttcaagagcttttggtgtgggtt

SEQ ID NO: 105008 - DNA, 26 bp, Homo sapiens
ttttcaagagcttttggtgtgggttc

SEQ ID NO: 105009 - DNA, 26 bp, Homo sapiens
tttcaagagcttttggtgtgggttct

SEQ ID NO: 105010 - DNA, 26 bp, Homo sapiens
ttcaagagcttttggtgtgggttctg

SEQ ID NO: 105011 - DNA, 26 bp, Homo sapiens
tcaagagcttttggtgtgggttctgc

SEQ ID NO: 105012 - DNA, 26 bp, Homo sapiens
caagagcttttggtgtgggttctgca

SEQ ID NO: 105013 - DNA, 26 bp, Homo sapiens
aagagcttttggtgtgggttctgcag

SEQ ID NO: 105014 - DNA, 26 bp, Homo sapiens
agagcttttggtgtgggttctgcaga

SEQ ID NO: 105015 - DNA, 26 bp, Homo sapiens
gagcttttggtgtgggttctgcagaa

SEQ ID NO: 105016 - DNA, 26 bp, Homo sapiens
agcttttggtgtgggttctgcagaaa

SEQ ID NO: 105017 - DNA, 26 bp, Homo sapiens
gcttttggtgtgggttctgcagaaag

SEQ ID NO: 105018 - DNA, 26 bp, Homo sapiens
cttttggtgtgggttctgcagaaagc

SEQ ID NO: 105019 - DNA, 26 bp, Homo sapiens
ttttggtgtgggttctgcagaaagct

SEQ ID NO: 105020 - DNA, 26 bp, Homo sapiens
tttggtgtgggttctgcagaaagctc

SEQ ID NO: 105021 - DNA, 26 bp, Homo sapiens
ttggtgtgggttctgcagaaagctca

SEQ ID NO: 105022 - DNA, 26 bp, Homo sapiens
tggtgtgggttctgcagaaagctcag

SEQ ID NO: 105023 - DNA, 26 bp, Homo sapiens
ggtgtgggttctgcagaaagctcagg

SEQ ID NO: 105024 - DNA, 26 bp, Homo sapiens
gtgtgggttctgcagaaagctcagga

SEQ ID NO: 105025 - DNA, 26 bp, Homo sapiens
tgtgggttctgcagaaagctcaggag

SEQ ID NO: 105026 - DNA, 26 bp, Homo sapiens
gtgggttctgcagaaagctcaggagt

SEQ ID NO: 105027 - DNA, 26 bp, Homo sapiens
tgggttctgcagaaagctcaggagtt

SEQ ID NO: 105028 - DNA, 26 bp, Homo sapiens
gggttctgcagaaagctcaggagttg

SEQ ID NO: 105029 - DNA, 26 bp, Homo sapiens
ggttctgcagaaagctcaggagttga

SEQ ID NO: 105030 - DNA, 26 bp, Homo sapiens
gttctgcagaaagctcaggagttgat

SEQ ID NO: 105031 - DNA, 26 bp, Homo sapiens
ttctgcagaaagctcaggagttgatt

SEQ ID NO: 105032 - DNA, 26 bp, Homo sapiens
tctgcagaaagctcaggagttgattc

SEQ ID NO: 105033 - DNA, 26 bp, Homo sapiens
ctgcagaaagctcaggagttgattca

SEQ ID NO: 105034 - DNA, 26 bp, Homo sapiens
tgcagaaagctcaggagttgattcat

SEQ ID NO: 105035 - DNA, 26 bp, Homo sapiens
gcagaaagctcaggagttgattcatc

SEQ ID NO: 105036 - DNA, 26 bp, Homo sapiens
cagaaagctcaggagttgattcatca

SEQ ID NO: 105037 - DNA, 26 bp, Homo sapiens
agaaagctcaggagttgattcatcag

SEQ ID NO: 105038 - DNA, 26 bp, Homo sapiens
gaaagctcaggagttgattcatcagg

SEQ ID NO: 105039 - DNA, 26 bp, Homo sapiens
aaagctcaggagttgattcatcaggg

SEQ ID NO: 105040 - DNA, 26 bp, Homo sapiens
aagctcaggagttgattcatcagggc

SEQ ID NO: 105041 - DNA, 26 bp, Homo sapiens
agctcaggagttgattcatcagggct

SEQ ID NO: 105042 - DNA, 26 bp, Homo sapiens
gctcaggagttgattcatcagggctt

SEQ ID NO: 105043 - DNA, 26 bp, Homo sapiens
ctcaggagttgattcatcagggcttt

SEQ ID NO: 105044 - DNA, 26 bp, Homo sapiens
tcaggagttgattcatcagggctttt

SEQ ID NO: 105045 - DNA, 26 bp, Homo sapiens
caggagttgattcatcagggcttttg

SEQ ID NO: 105046 - DNA, 26 bp, Homo sapiens
aggagttgattcatcagggcttttgt

SEQ ID NO: 105047 - DNA, 26 bp, Homo sapiens
ggagttgattcatcagggcttttgtg

SEQ ID NO: 105048 - DNA, 26 bp, Homo sapiens
gagttgattcatcagggcttttgtgg

SEQ ID NO: 105049 - DNA, 26 bp, Homo sapiens
agttgattcatcagggcttttgtgga

SEQ ID NO: 105050 - DNA, 26 bp, Homo sapiens
gttgattcatcagggcttttgtggat

SEQ ID NO: 105051 - DNA, 26 bp, Homo sapiens
ttgattcatcagggcttttgtggata

SEQ ID NO: 105052 - DNA, 26 bp, Homo sapiens
tgattcatcagggcttttgtggatag

SEQ ID NO: 105053 - DNA, 26 bp, Homo sapiens
gattcatcagggcttttgtggatagt

SEQ ID NO: 105054 - DNA, 26 bp, Homo sapiens
attcatcagggcttttgtggatagtg

SEQ ID NO: 105055 - DNA, 26 bp, Homo sapiens
ttcatcagggcttttgtggatagtgg

SEQ ID NO: 105056 - DNA, 26 bp, Homo sapiens
tcatcagggcttttgtggatagtggt

SEQ ID NO: 105057 - DNA, 26 bp, Homo sapiens
catcagggcttttgtggatagtggta

SEQ ID NO: 105058 - DNA, 26 bp, Homo sapiens
atcagggcttttgtggatagtggtag

SEQ ID NO: 105059 - DNA, 26 bp, Homo sapiens
tcagggcttttgtggatagtggtagg

SEQ ID NO: 105060 - DNA, 26 bp, Homo sapiens
cagggcttttgtggatagtggtaggc

SEQ ID NO: 105061 - DNA, 26 bp, Homo sapiens
agggcttttgtggatagtggtaggct

SEQ ID NO: 105062 - DNA, 26 bp, Homo sapiens
gggcttttgtggatagtggtaggctc

SEQ ID NO: 105063 - DNA, 26 bp, Homo sapiens
ggcttttgtggatagtggtaggctcc

SEQ ID NO: 105064 - DNA, 26 bp, Homo sapiens
gcttttgtggatagtggtaggctcct

SEQ ID NO: 105065 - DNA, 26 bp, Homo sapiens
cttttgtggatagtggtaggctcctt

SEQ ID NO: 105066 - DNA, 26 bp, Homo sapiens
ttttgtggatagtggtaggctccttg

SEQ ID NO: 105067 - DNA, 26 bp, Homo sapiens
tttgtggatagtggtaggctccttgg

SEQ ID NO: 105068 - DNA, 26 bp, Homo sapiens
ttgtggatagtggtaggctccttggt

SEQ ID NO: 105069 - DNA, 26 bp, Homo sapiens
tgtggatagtggtaggctccttggtg

SEQ ID NO: 105070 - DNA, 26 bp, Homo sapiens
gtggatagtggtaggctccttggtgg

SEQ ID NO: 105071 - DNA, 26 bp, Homo sapiens
tggatagtggtaggctccttggtggt

SEQ ID NO: 105072 - DNA, 26 bp, Homo sapiens
ggatagtggtaggctccttggtggta

SEQ ID NO: 105073 - DNA, 26 bp, Homo sapiens
gatagtggtaggctccttggtggtag

SEQ ID NO: 105074 - DNA, 26 bp, Homo sapiens
atagtggtaggctccttggtggtagt

SEQ ID NO: 105075 - DNA, 26 bp, Homo sapiens
tagtggtaggctccttggtggtagtt

SEQ ID NO: 105076 - DNA, 26 bp, Homo sapiens
agtggtaggctccttggtggtagttg

SEQ ID NO: 105077 - DNA, 26 bp, Homo sapiens
gtggtaggctccttggtggtagttgg

SEQ ID NO: 105078 - DNA, 26 bp, Homo sapiens
tggtaggctccttggtggtagttgga

SEQ ID NO: 105079 - DNA, 26 bp, Homo sapiens
ggtaggctccttggtggtagttggag

SEQ ID NO: 105080 - DNA, 26 bp, Homo sapiens
gtaggctccttggtggtagttggagt

SEQ ID NO: 105081 - DNA, 26 bp, Homo sapiens
taggctccttggtggtagttggagta

SEQ ID NO: 105082 - DNA, 26 bp, Homo sapiens
aggctccttggtggtagttggagtag

SEQ ID NO: 105083 - DNA, 26 bp, Homo sapiens
ggctccttggtggtagttggagtaga

SEQ ID NO: 105084 - DNA, 26 bp, Homo sapiens
gctccttggtggtagttggagtagag

SEQ ID NO: 105085 - DNA, 26 bp, Homo sapiens
ctccttggtggtagttggagtagaga

SEQ ID NO: 105086 - DNA, 26 bp, Homo sapiens
tccttggtggtagttggagtagagac

SEQ ID NO: 105087 - DNA, 26 bp, Homo sapiens
ccttggtggtagttggagtagagacc

SEQ ID NO: 105088 - DNA, 26 bp, Homo sapiens
cttggtggtagttggagtagagacct

SEQ ID NO: 105089 - DNA, 26 bp, Homo sapiens
ttggtggtagttggagtagagacctc

SEQ ID NO: 105090 - DNA, 26 bp, Homo sapiens
tggtggtagttggagtagagacctct

SEQ ID NO: 105091 - DNA, 26 bp, Homo sapiens
ggtggtagttggagtagagacctctg

SEQ ID NO: 105092 - DNA, 26 bp, Homo sapiens
gtggtagttggagtagagacctctga

SEQ ID NO: 105093 - DNA, 26 bp, Homo sapiens
tggtagttggagtagagacctctgaa

SEQ ID NO: 105094 - DNA, 26 bp, Homo sapiens
ggtagttggagtagagacctctgaag

SEQ ID NO: 105095 - DNA, 26 bp, Homo sapiens
gtagttggagtagagacctctgaagt

SEQ ID NO: 105096 - DNA, 26 bp, Homo sapiens
tagttggagtagagacctctgaagtg

SEQ ID NO: 105097 - DNA, 26 bp, Homo sapiens
agttggagtagagacctctgaagtgg

SEQ ID NO: 105098 - DNA, 26 bp, Homo sapiens
gttggagtagagacctctgaagtggt

SEQ ID NO: 105099 - DNA, 26 bp, Homo sapiens
ttggagtagagacctctgaagtggtt

SEQ ID NO: 105100 - DNA, 26 bp, Homo sapiens
tggagtagagacctctgaagtggttg

SEQ ID NO: 105101 - DNA, 26 bp, Homo sapiens
ggagtagagacctctgaagtggttgg

SEQ ID NO: 105102 - DNA, 26 bp, Homo sapiens
gagtagagacctctgaagtggttgga

SEQ ID NO: 105103 - DNA, 26 bp, Homo sapiens
agtagagacctctgaagtggttggag

SEQ ID NO: 105104 - DNA, 26 bp, Homo sapiens
gtagagacctctgaagtggttggagg

SEQ ID NO: 105105 - DNA, 26 bp, Homo sapiens
tagagacctctgaagtggttggagga

SEQ ID NO: 105106 - DNA, 26 bp, Homo sapiens
agagacctctgaagtggttggaggag

SEQ ID NO: 105107 - DNA, 26 bp, Homo sapiens
gagacctctgaagtggttggaggagg

SEQ ID NO: 105108 - DNA, 26 bp, Homo sapiens
agacctctgaagtggttggaggaggt

SEQ ID NO: 105109 - DNA, 26 bp, Homo sapiens
gacctctgaagtggttggaggaggtg

SEQ ID NO: 105110 - DNA, 26 bp, Homo sapiens
acctctgaagtggttggaggaggtgt

SEQ ID NO: 105111 - DNA, 26 bp, Homo sapiens
cctctgaagtggttggaggaggtgtc

SEQ ID NO: 105112 - DNA, 26 bp, Homo sapiens
ctctgaagtggttggaggaggtgtct

SEQ ID NO: 105113 - DNA, 26 bp, Homo sapiens
tctgaagtggttggaggaggtgtctc

SEQ ID NO: 105114 - DNA, 26 bp, Homo sapiens
ctgaagtggttggaggaggtgtctca

SEQ ID NO: 105115 - DNA, 26 bp, Homo sapiens
tgaagtggttggaggaggtgtctcag

SEQ ID NO: 105116 - DNA, 26 bp, Homo sapiens
gaagtggttggaggaggtgtctcagg

SEQ ID NO: 105117 - DNA, 26 bp, Homo sapiens
aagtggttggaggaggtgtctcagga

SEQ ID NO: 105118 - DNA, 26 bp, Homo sapiens
agtggttggaggaggtgtctcaggag

SEQ ID NO: 105119 - DNA, 26 bp, Homo sapiens
gtggttggaggaggtgtctcaggagt

SEQ ID NO: 105120 - DNA, 26 bp, Homo sapiens
tggttggaggaggtgtctcaggagta

SEQ ID NO: 105121 - DNA, 26 bp, Homo sapiens
ggttggaggaggtgtctcaggagtag

SEQ ID NO: 105122 - DNA, 26 bp, Homo sapiens
gttggaggaggtgtctcaggagtagt

SEQ ID NO: 105123 - DNA, 26 bp, Homo sapiens
ttggaggaggtgtctcaggagtagtt

SEQ ID NO: 105124 - DNA, 26 bp, Homo sapiens
tggaggaggtgtctcaggagtagttg

SEQ ID NO: 105125 - DNA, 26 bp, Homo sapiens
ggaggaggtgtctcaggagtagttgg

SEQ ID NO: 105126 - DNA, 26 bp, Homo sapiens
gaggaggtgtctcaggagtagttgga

SEQ ID NO: 105127 - DNA, 26 bp, Homo sapiens
aggaggtgtctcaggagtagttggag

SEQ ID NO: 105128 - DNA, 26 bp, Homo sapiens
ggaggtgtctcaggagtagttggagc

SEQ ID NO: 105129 - DNA, 26 bp, Homo sapiens
gaggtgtctcaggagtagttggagca

SEQ ID NO: 105130 - DNA, 26 bp, Homo sapiens
aggtgtctcaggagtagttggagcag

SEQ ID NO: 105131 - DNA, 26 bp, Homo sapiens
ggtgtctcaggagtagttggagcagg

SEQ ID NO: 105132 - DNA, 26 bp, Homo sapiens
gtgtctcaggagtagttggagcaggc

SEQ ID NO: 105133 - DNA, 26 bp, Homo sapiens
tgtctcaggagtagttggagcaggct

SEQ ID NO: 105134 - DNA, 26 bp, Homo sapiens
gtctcaggagtagttggagcaggctt

SEQ ID NO: 105135 - DNA, 26 bp, Homo sapiens
tctcaggagtagttggagcaggcttc

SEQ ID NO: 105136 - DNA, 26 bp, Homo sapiens
ctcaggagtagttggagcaggcttct

SEQ ID NO: 105137 - DNA, 26 bp, Homo sapiens
tcaggagtagttggagcaggcttctt

SEQ ID NO: 105138 - DNA, 26 bp, Homo sapiens
caggagtagttggagcaggcttcttg

SEQ ID NO: 105139 - DNA, 26 bp, Homo sapiens
aggagtagttggagcaggcttcttgg

SEQ ID NO: 105140 - DNA, 26 bp, Homo sapiens
ggagtagttggagcaggcttcttggg

SEQ ID NO: 105141 - DNA, 26 bp, Homo sapiens
gagtagttggagcaggcttcttgggg

SEQ ID NO: 105142 - DNA, 26 bp, Homo sapiens
agtagttggagcaggcttcttggggg

SEQ ID NO: 105143 - DNA, 26 bp, Homo sapiens
gtagttggagcaggcttcttgggggt

SEQ ID NO: 105144 - DNA, 26 bp, Homo sapiens
tagttggagcaggcttcttgggggta

SEQ ID NO: 105145 - DNA, 26 bp, Homo sapiens
agttggagcaggcttcttgggggtag

SEQ ID NO: 105146 - DNA, 26 bp, Homo sapiens
gttggagcaggcttcttgggggtagt

SEQ ID NO: 105147 - DNA, 26 bp, Homo sapiens
ttggagcaggcttcttgggggtagtg

SEQ ID NO: 105148 - DNA, 26 bp, Homo sapiens
tggagcaggcttcttgggggtagtgg

SEQ ID NO: 105149 - DNA, 26 bp, Homo sapiens
ggagcaggcttcttgggggtagtggg

SEQ ID NO: 105150 - DNA, 26 bp, Homo sapiens
gagcaggcttcttgggggtagtgggt

SEQ ID NO: 105151 - DNA, 26 bp, Homo sapiens
agcaggcttcttgggggtagtgggtg

SEQ ID NO: 105152 - DNA, 26 bp, Homo sapiens
gcaggcttcttgggggtagtgggtgc

SEQ ID NO: 105153 - DNA, 26 bp, Homo sapiens
caggcttcttgggggtagtgggtgca

SEQ ID NO: 105154 - DNA, 26 bp, Homo sapiens
aggcttcttgggggtagtgggtgcag

SEQ ID NO: 105155 - DNA, 26 bp, Homo sapiens
ggcttcttgggggtagtgggtgcagg

SEQ ID NO: 105156 - DNA, 26 bp, Homo sapiens
gcttcttgggggtagtgggtgcaggc

SEQ ID NO: 105157 - DNA, 26 bp, Homo sapiens
cttcttgggggtagtgggtgcaggct

SEQ ID NO: 105158 - DNA, 26 bp, Homo sapiens
ttcttgggggtagtgggtgcaggctc

SEQ ID NO: 105159 - DNA, 26 bp, Homo sapiens
tcttgggggtagtgggtgcaggctcc

SEQ ID NO: 105160 - DNA, 26 bp, Homo sapiens
cttgggggtagtgggtgcaggctcct

SEQ ID NO: 105161 - DNA, 26 bp, Homo sapiens
ttgggggtagtgggtgcaggctcctt

SEQ ID NO: 105162 - DNA, 26 bp, Homo sapiens
tgggggtagtgggtgcaggctccttg

SEQ ID NO: 105163 - DNA, 26 bp, Homo sapiens
gggggtagtgggtgcaggctccttgg

SEQ ID NO: 105164 - DNA, 26 bp, Homo sapiens
ggggtagtgggtgcaggctccttggg

SEQ ID NO: 105165 - DNA, 26 bp, Homo sapiens
gggtagtgggtgcaggctccttgggg

SEQ ID NO: 105166 - DNA, 26 bp, Homo sapiens
ggtagtgggtgcaggctccttggggg

SEQ ID NO: 105167 - DNA, 26 bp, Homo sapiens
gtagtgggtgcaggctccttgggggt

SEQ ID NO: 105168 - DNA, 26 bp, Homo sapiens
tagtgggtgcaggctccttgggggta

SEQ ID NO: 105169 - DNA, 26 bp, Homo sapiens
agtgggtgcaggctccttgggggtag

SEQ ID NO: 105170 - DNA, 26 bp, Homo sapiens
gtgggtgcaggctccttgggggtagt

SEQ ID NO: 105171 - DNA, 26 bp, Homo sapiens
tgggtgcaggctccttgggggtagtt

SEQ ID NO: 105172 - DNA, 26 bp, Homo sapiens
gggtgcaggctccttgggggtagttg

SEQ ID NO: 105173 - DNA, 26 bp, Homo sapiens
ggtgcaggctccttgggggtagttgg

SEQ ID NO: 105174 - DNA, 26 bp, Homo sapiens
gtgcaggctccttgggggtagttgga

SEQ ID NO: 105175 - DNA, 26 bp, Homo sapiens
tgcaggctccttgggggtagttggag

SEQ ID NO: 105176 - DNA, 26 bp, Homo sapiens
gcaggctccttgggggtagttggagc

SEQ ID NO: 105177 - DNA, 26 bp, Homo sapiens
caggctccttgggggtagttggagca

SEQ ID NO: 105178 - DNA, 26 bp, Homo sapiens
aggctccttgggggtagttggagcag

SEQ ID NO: 105179 - DNA, 26 bp, Homo sapiens
ggctccttgggggtagttggagcagt

SEQ ID NO: 105180 - DNA, 26 bp, Homo sapiens
gctccttgggggtagttggagcagtc

SEQ ID NO: 105181 - DNA, 26 bp, Homo sapiens
ctccttgggggtagttggagcagtct

SEQ ID NO: 105182 - DNA, 26 bp, Homo sapiens
tccttgggggtagttggagcagtctc

SEQ ID NO: 105183 - DNA, 26 bp, Homo sapiens
ccttgggggtagttggagcagtctcc

SEQ ID NO: 105184 - DNA, 26 bp, Homo sapiens
cttgggggtagttggagcagtctcct

SEQ ID NO: 105185 - DNA, 26 bp, Homo sapiens
ttgggggtagttggagcagtctcctt

SEQ ID NO: 105186 - DNA, 26 bp, Homo sapiens
tgggggtagttggagcagtctcctta

SEQ ID NO: 105187 - DNA, 26 bp, Homo sapiens
gggggtagttggagcagtctccttag

SEQ ID NO: 105188 - DNA, 26 bp, Homo sapiens
ggggtagttggagcagtctccttagg

SEQ ID NO: 105189 - DNA, 26 bp, Homo sapiens
gggtagttggagcagtctccttaggt

SEQ ID NO: 105190 - DNA, 26 bp, Homo sapiens
ggtagttggagcagtctccttaggtg

SEQ ID NO: 105191 - DNA, 26 bp, Homo sapiens
gtagttggagcagtctccttaggtgt

SEQ ID NO: 105192 - DNA, 26 bp, Homo sapiens
tagttggagcagtctccttaggtgta

SEQ ID NO: 105193 - DNA, 26 bp, Homo sapiens
agttggagcagtctccttaggtgtag

SEQ ID NO: 105194 - DNA, 26 bp, Homo sapiens
gttggagcagtctccttaggtgtagt

SEQ ID NO: 105195 - DNA, 26 bp, Homo sapiens
ttggagcagtctccttaggtgtagtt

SEQ ID NO: 105196 - DNA, 26 bp, Homo sapiens
tggagcagtctccttaggtgtagttg

SEQ ID NO: 105197 - DNA, 26 bp, Homo sapiens
ggagcagtctccttaggtgtagttgg

SEQ ID NO: 105198 - DNA, 26 bp, Homo sapiens
gagcagtctccttaggtgtagttgga

SEQ ID NO: 105199 - DNA, 26 bp, Homo sapiens
agcagtctccttaggtgtagttggag

SEQ ID NO: 105200 - DNA, 26 bp, Homo sapiens
gcagtctccttaggtgtagttggagc

SEQ ID NO: 105201 - DNA, 26 bp, Homo sapiens
cagtctccttaggtgtagttggagca

SEQ ID NO: 105202 - DNA, 26 bp, Homo sapiens
agtctccttaggtgtagttggagcag

SEQ ID NO: 105203 - DNA, 26 bp, Homo sapiens
gtctccttaggtgtagttggagcagg

SEQ ID NO: 105204 - DNA, 26 bp, Homo sapiens
tctccttaggtgtagttggagcaggc

SEQ ID NO: 105205 - DNA, 26 bp, Homo sapiens
ctccttaggtgtagttggagcaggct

SEQ ID NO: 105206 - DNA, 26 bp, Homo sapiens
tccttaggtgtagttggagcaggctt

SEQ ID NO: 105207 - DNA, 26 bp, Homo sapiens
ccttaggtgtagttggagcaggcttg

SEQ ID NO: 105208 - DNA, 26 bp, Homo sapiens
cttaggtgtagttggagcaggcttgt

SEQ ID NO: 105209 - DNA, 26 bp, Homo sapiens
ttaggtgtagttggagcaggcttgtc

SEQ ID NO: 105210 - DNA, 26 bp, Homo sapiens
taggtgtagttggagcaggcttgtca

SEQ ID NO: 105211 - DNA, 26 bp, Homo sapiens
aggtgtagttggagcaggcttgtcag

SEQ ID NO: 105212 - DNA, 26 bp, Homo sapiens
ggtgtagttggagcaggcttgtcaga

SEQ ID NO: 105213 - DNA, 26 bp, Homo sapiens
gtgtagttggagcaggcttgtcagag

SEQ ID NO: 105214 - DNA, 26 bp, Homo sapiens
tgtagttggagcaggcttgtcagagg

SEQ ID NO: 105215 - DNA, 26 bp, Homo sapiens
gtagttggagcaggcttgtcagaggt

SEQ ID NO: 105216 - DNA, 26 bp, Homo sapiens
tagttggagcaggcttgtcagaggtg

SEQ ID NO: 105217 - DNA, 26 bp, Homo sapiens
agttggagcaggcttgtcagaggtgg

SEQ ID NO: 105218 - DNA, 26 bp, Homo sapiens
gttggagcaggcttgtcagaggtggt

SEQ ID NO: 105219 - DNA, 26 bp, Homo sapiens
ttggagcaggcttgtcagaggtggtg

SEQ ID NO: 105220 - DNA, 26 bp, Homo sapiens
tggagcaggcttgtcagaggtggtgg

SEQ ID NO: 105221 - DNA, 26 bp, Homo sapiens
ggagcaggcttgtcagaggtggtgga

SEQ ID NO: 105222 - DNA, 26 bp, Homo sapiens
gagcaggcttgtcagaggtggtggat

SEQ ID NO: 105223 - DNA, 26 bp, Homo sapiens
agcaggcttgtcagaggtggtggatg

SEQ ID NO: 105224 - DNA, 26 bp, Homo sapiens
gcaggcttgtcagaggtggtggatgt

SEQ ID NO: 105225 - DNA, 26 bp, Homo sapiens
caggcttgtcagaggtggtggatgtg

SEQ ID NO: 105226 - DNA, 26 bp, Homo sapiens
aggcttgtcagaggtggtggatgtgg

SEQ ID NO: 105227 - DNA, 26 bp, Homo sapiens
ggcttgtcagaggtggtggatgtggg

SEQ ID NO: 105228 - DNA, 26 bp, Homo sapiens
gcttgtcagaggtggtggatgtgggc

SEQ ID NO: 105229 - DNA, 26 bp, Homo sapiens
cttgtcagaggtggtggatgtgggcc

SEQ ID NO: 105230 - DNA, 26 bp, Homo sapiens
ttgtcagaggtggtggatgtgggccc

SEQ ID NO: 105231 - DNA, 26 bp, Homo sapiens
tgtcagaggtggtggatgtgggcccc

SEQ ID NO: 105232 - DNA, 26 bp, Homo sapiens
gtcagaggtggtggatgtgggcccct

SEQ ID NO: 105233 - DNA, 26 bp, Homo sapiens
tcagaggtggtggatgtgggcccctt

SEQ ID NO: 105234 - DNA, 26 bp, Homo sapiens
cagaggtggtggatgtgggccccttg

SEQ ID NO: 105235 - DNA, 26 bp, Homo sapiens
agaggtggtggatgtgggccccttgg

SEQ ID NO: 105236 - DNA, 26 bp, Homo sapiens
gaggtggtggatgtgggccccttggt

SEQ ID NO: 105237 - DNA, 26 bp, Homo sapiens
aggtggtggatgtgggccccttggtg

SEQ ID NO: 105238 - DNA, 26 bp, Homo sapiens
ggtggtggatgtgggccccttggtgg

SEQ ID NO: 105239 - DNA, 26 bp, Homo sapiens
gtggtggatgtgggccccttggtggt

SEQ ID NO: 105240 - DNA, 26 bp, Homo sapiens
tggtggatgtgggccccttggtggtg

SEQ ID NO: 105241 - DNA, 26 bp, Homo sapiens
ggtggatgtgggccccttggtggtgg

SEQ ID NO: 105242 - DNA, 26 bp, Homo sapiens
gtggatgtgggccccttggtggtggt

SEQ ID NO: 105243 - DNA, 26 bp, Homo sapiens
tggatgtgggccccttggtggtggtg

SEQ ID NO: 105244 - DNA, 26 bp, Homo sapiens
ggatgtgggccccttggtggtggtgg

SEQ ID NO: 105245 - DNA, 26 bp, Homo sapiens
gatgtgggccccttggtggtggtggg

SEQ ID NO: 105246 - DNA, 26 bp, Homo sapiens
atgtgggccccttggtggtggtgggt

SEQ ID NO: 105247 - DNA, 26 bp, Homo sapiens
tgtgggccccttggtggtggtgggtg

SEQ ID NO: 105248 - DNA, 26 bp, Homo sapiens
gtgggccccttggtggtggtgggtgc

SEQ ID NO: 105249 - DNA, 26 bp, Homo sapiens
tgggccccttggtggtggtgggtgca

SEQ ID NO: 105250 - DNA, 26 bp, Homo sapiens
gggccccttggtggtggtgggtgcaa

SEQ ID NO: 105251 - DNA, 26 bp, Homo sapiens
ggccccttggtggtggtgggtgcaag

SEQ ID NO: 105252 - DNA, 26 bp, Homo sapiens
gccccttggtggtggtgggtgcaagc

SEQ ID NO: 105253 - DNA, 26 bp, Homo sapiens
ccccttggtggtggtgggtgcaagct

SEQ ID NO: 105254 - DNA, 26 bp, Homo sapiens
cccttggtggtggtgggtgcaagctc

SEQ ID NO: 105255 - DNA, 26 bp, Homo sapiens
ccttggtggtggtgggtgcaagctcc

SEQ ID NO: 105256 - DNA, 26 bp, Homo sapiens
cttggtggtggtgggtgcaagctcct

SEQ ID NO: 105257 - DNA, 26 bp, Homo sapiens
ttggtggtggtgggtgcaagctcctt

SEQ ID NO: 105258 - DNA, 26 bp, Homo sapiens
tggtggtggtgggtgcaagctccttg

SEQ ID NO: 105259 - DNA, 26 bp, Homo sapiens
ggtggtggtgggtgcaagctccttgg

SEQ ID NO: 105260 - DNA, 26 bp, Homo sapiens
gtggtggtgggtgcaagctccttggg

SEQ ID NO: 105261 - DNA, 26 bp, Homo sapiens
tggtggtgggtgcaagctccttgggg

SEQ ID NO: 105262 - DNA, 26 bp, Homo sapiens
ggtggtgggtgcaagctccttggggg

SEQ ID NO: 105263 - DNA, 26 bp, Homo sapiens
gtggtgggtgcaagctccttgggggc

SEQ ID NO: 105264 - DNA, 26 bp, Homo sapiens
tggtgggtgcaagctccttgggggca

SEQ ID NO: 105265 - DNA, 26 bp, Homo sapiens
ggtgggtgcaagctccttgggggcag

SEQ ID NO: 105266 - DNA, 26 bp, Homo sapiens
gtgggtgcaagctccttgggggcagg

SEQ ID NO: 105267 - DNA, 26 bp, Homo sapiens
tgggtgcaagctccttgggggcaggc

SEQ ID NO: 105268 - DNA, 26 bp, Homo sapiens
gggtgcaagctccttgggggcaggct

SEQ ID NO: 105269 - DNA, 26 bp, Homo sapiens
ggtgcaagctccttgggggcaggctt

SEQ ID NO: 105270 - DNA, 26 bp, Homo sapiens
gtgcaagctccttgggggcaggcttc

SEQ ID NO: 105271 - DNA, 26 bp, Homo sapiens
tgcaagctccttgggggcaggcttct

SEQ ID NO: 105272 - DNA, 26 bp, Homo sapiens
gcaagctccttgggggcaggcttctt

SEQ ID NO: 105273 - DNA, 26 bp, Homo sapiens
caagctccttgggggcaggcttcttg

SEQ ID NO: 105274 - DNA, 26 bp, Homo sapiens
aagctccttgggggcaggcttcttgg

SEQ ID NO: 105275 - DNA, 26 bp, Homo sapiens
agctccttgggggcaggcttcttggg

SEQ ID NO: 105276 - DNA, 26 bp, Homo sapiens
gctccttgggggcaggcttcttggga

SEQ ID NO: 105277 - DNA, 26 bp, Homo sapiens
ctccttgggggcaggcttcttgggag

SEQ ID NO: 105278 - DNA, 26 bp, Homo sapiens
tccttgggggcaggcttcttgggagt

SEQ ID NO: 105279 - DNA, 26 bp, Homo sapiens
ccttgggggcaggcttcttgggagta

SEQ ID NO: 105280 - DNA, 26 bp, Homo sapiens
cttgggggcaggcttcttgggagtag

SEQ ID NO: 105281 - DNA, 26 bp, Homo sapiens
ttgggggcaggcttcttgggagtagt

SEQ ID NO: 105282 - DNA, 26 bp, Homo sapiens
tgggggcaggcttcttgggagtagtg

SEQ ID NO: 105283 - DNA, 26 bp, Homo sapiens
gggggcaggcttcttgggagtagtgg

SEQ ID NO: 105284 - DNA, 26 bp, Homo sapiens
ggggcaggcttcttgggagtagtggg

SEQ ID NO: 105285 - DNA, 26 bp, Homo sapiens
gggcaggcttcttgggagtagtgggt

SEQ ID NO: 105286 - DNA, 26 bp, Homo sapiens
ggcaggcttcttgggagtagtgggtg

SEQ ID NO: 105287 - DNA, 26 bp, Homo sapiens
gcaggcttcttgggagtagtgggtgc

SEQ ID NO: 105288 - DNA, 26 bp, Homo sapiens
caggcttcttgggagtagtgggtgca

SEQ ID NO: 105289 - DNA, 26 bp, Homo sapiens
aggcttcttgggagtagtgggtgcag

SEQ ID NO: 105290 - DNA, 26 bp, Homo sapiens
ggcttcttgggagtagtgggtgcagg

SEQ ID NO: 105291 - DNA, 26 bp, Homo sapiens
gcttcttgggagtagtgggtgcaggt

SEQ ID NO: 105292 - DNA, 26 bp, Homo sapiens
cttcttgggagtagtgggtgcaggtt

SEQ ID NO: 105293 - DNA, 26 bp, Homo sapiens
ttcttgggagtagtgggtgcaggttc

SEQ ID NO: 105294 - DNA, 26 bp, Homo sapiens
tcttgggagtagtgggtgcaggttcc

SEQ ID NO: 105295 - DNA, 26 bp, Homo sapiens
cttgggagtagtgggtgcaggttcct

SEQ ID NO: 105296 - DNA, 26 bp, Homo sapiens
ttgggagtagtgggtgcaggttcctt

SEQ ID NO: 105297 - DNA, 26 bp, Homo sapiens
tgggagtagtgggtgcaggttccttg

SEQ ID NO: 105298 - DNA, 26 bp, Homo sapiens
gggagtagtgggtgcaggttccttga

SEQ ID NO: 105299 - DNA, 26 bp, Homo sapiens
ggagtagtgggtgcaggttccttgag

SEQ ID NO: 105300 - DNA, 26 bp, Homo sapiens
gagtagtgggtgcaggttccttgagg

SEQ ID NO: 105301 - DNA, 26 bp, Homo sapiens
agtagtgggtgcaggttccttgaggg

SEQ ID NO: 105302 - DNA, 26 bp, Homo sapiens
gtagtgggtgcaggttccttgagggt

SEQ ID NO: 105303 - DNA, 26 bp, Homo sapiens
tagtgggtgcaggttccttgagggta

SEQ ID NO: 105304 - DNA, 26 bp, Homo sapiens
agtgggtgcaggttccttgagggtag

SEQ ID NO: 105305 - DNA, 26 bp, Homo sapiens
gtgggtgcaggttccttgagggtagt

SEQ ID NO: 105306 - DNA, 26 bp, Homo sapiens
tgggtgcaggttccttgagggtagtt

SEQ ID NO: 105307 - DNA, 26 bp, Homo sapiens
gggtgcaggttccttgagggtagttg

SEQ ID NO: 105308 - DNA, 26 bp, Homo sapiens
ggtgcaggttccttgagggtagttgg

SEQ ID NO: 105309 - DNA, 26 bp, Homo sapiens
gtgcaggttccttgagggtagttgga

SEQ ID NO: 105310 - DNA, 26 bp, Homo sapiens
tgcaggttccttgagggtagttggag

SEQ ID NO: 105311 - DNA, 26 bp, Homo sapiens
gcaggttccttgagggtagttggagc

SEQ ID NO: 105312 - DNA, 26 bp, Homo sapiens
caggttccttgagggtagttggagca

SEQ ID NO: 105313 - DNA, 26 bp, Homo sapiens
aggttccttgagggtagttggagcag

SEQ ID NO: 105314 - DNA, 26 bp, Homo sapiens
ggttccttgagggtagttggagcagt

SEQ ID NO: 105315 - DNA, 26 bp, Homo sapiens
gttccttgagggtagttggagcagtc

SEQ ID NO: 105316 - DNA, 26 bp, Homo sapiens
ttccttgagggtagttggagcagtcc

SEQ ID NO: 105317 - DNA, 26 bp, Homo sapiens
tccttgagggtagttggagcagtccc

SEQ ID NO: 105318 - DNA, 26 bp, Homo sapiens
ccttgagggtagttggagcagtcccc

SEQ ID NO: 105319 - DNA, 26 bp, Homo sapiens
cttgagggtagttggagcagtcccct

SEQ ID NO: 105320 - DNA, 26 bp, Homo sapiens
ttgagggtagttggagcagtcccctt

SEQ ID NO: 105321 - DNA, 26 bp, Homo sapiens
tgagggtagttggagcagtcccctta

SEQ ID NO: 105322 - DNA, 26 bp, Homo sapiens
gagggtagttggagcagtccccttag

SEQ ID NO: 105323 - DNA, 26 bp, Homo sapiens
agggtagttggagcagtccccttagg

SEQ ID NO: 105324 - DNA, 26 bp, Homo sapiens
gggtagttggagcagtccccttaggg

SEQ ID NO: 105325 - DNA, 26 bp, Homo sapiens
ggtagttggagcagtccccttagggg

SEQ ID NO: 105326 - DNA, 26 bp, Homo sapiens
gtagttggagcagtccccttaggggt

SEQ ID NO: 105327 - DNA, 26 bp, Homo sapiens
tagttggagcagtccccttaggggta

SEQ ID NO: 105328 - DNA, 26 bp, Homo sapiens
agttggagcagtccccttaggggtag

SEQ ID NO: 105329 - DNA, 26 bp, Homo sapiens
gttggagcagtccccttaggggtagt

SEQ ID NO: 105330 - DNA, 26 bp, Homo sapiens
ttggagcagtccccttaggggtagtt

SEQ ID NO: 105331 - DNA, 26 bp, Homo sapiens
tggagcagtccccttaggggtagttg

SEQ ID NO: 105332 - DNA, 26 bp, Homo sapiens
ggagcagtccccttaggggtagttgg

SEQ ID NO: 105333 - DNA, 26 bp, Homo sapiens
gagcagtccccttaggggtagttgga

SEQ ID NO: 105334 - DNA, 26 bp, Homo sapiens
agcagtccccttaggggtagttggag

SEQ ID NO: 105335 - DNA, 26 bp, Homo sapiens
gcagtccccttaggggtagttggagc

SEQ ID NO: 105336 - DNA, 26 bp, Homo sapiens
cagtccccttaggggtagttggagca

SEQ ID NO: 105337 - DNA, 26 bp, Homo sapiens
agtccccttaggggtagttggagcag

SEQ ID NO: 105338 - DNA, 26 bp, Homo sapiens
gtccccttaggggtagttggagcagg

SEQ ID NO: 105339 - DNA, 26 bp, Homo sapiens
tccccttaggggtagttggagcaggc

SEQ ID NO: 105340 - DNA, 26 bp, Homo sapiens
ccccttaggggtagttggagcaggct

SEQ ID NO: 105341 - DNA, 26 bp, Homo sapiens
cccttaggggtagttggagcaggctc

SEQ ID NO: 105342 - DNA, 26 bp, Homo sapiens
ccttaggggtagttggagcaggctcc

SEQ ID NO: 105343 - DNA, 26 bp, Homo sapiens
cttaggggtagttggagcaggctcct

SEQ ID NO: 105344 - DNA, 26 bp, Homo sapiens
ttaggggtagttggagcaggctcctt

SEQ ID NO: 105345 - DNA, 26 bp, Homo sapiens
taggggtagttggagcaggctcctta

SEQ ID NO: 105346 - DNA, 26 bp, Homo sapiens
aggggtagttggagcaggctccttag

SEQ ID NO: 105347 - DNA, 26 bp, Homo sapiens
ggggtagttggagcaggctccttagg

SEQ ID NO: 105348 - DNA, 26 bp, Homo sapiens
gggtagttggagcaggctccttaggg

SEQ ID NO: 105349 - DNA, 26 bp, Homo sapiens
ggtagttggagcaggctccttagggg

SEQ ID NO: 105350 - DNA, 26 bp, Homo sapiens
gtagttggagcaggctccttaggggt

SEQ ID NO: 105351 - DNA, 26 bp, Homo sapiens
tagttggagcaggctccttaggggta

SEQ ID NO: 105352 - DNA, 26 bp, Homo sapiens
agttggagcaggctccttaggggtag

SEQ ID NO: 105353 - DNA, 26 bp, Homo sapiens
gttggagcaggctccttaggggtagt

SEQ ID NO: 105354 - DNA, 26 bp, Homo sapiens
ttggagcaggctccttaggggtagtt

SEQ ID NO: 105355 - DNA, 26 bp, Homo sapiens
tggagcaggctccttaggggtagttg

SEQ ID NO: 105356 - DNA, 26 bp, Homo sapiens
ggagcaggctccttaggggtagttgg

SEQ ID NO: 105357 - DNA, 26 bp, Homo sapiens
gagcaggctccttaggggtagttgga

SEQ ID NO: 105358 - DNA, 26 bp, Homo sapiens
agcaggctccttaggggtagttggag

SEQ ID NO: 105359 - DNA, 26 bp, Homo sapiens
gcaggctccttaggggtagttggagc

SEQ ID NO: 105360 - DNA, 26 bp, Homo sapiens
caggctccttaggggtagttggagca

SEQ ID NO: 105361 - DNA, 26 bp, Homo sapiens
aggctccttaggggtagttggagcag

SEQ ID NO: 105362 - DNA, 26 bp, Homo sapiens
ggctccttaggggtagttggagcagg

SEQ ID NO: 105363 - DNA, 26 bp, Homo sapiens
gctccttaggggtagttggagcaggc

SEQ ID NO: 105364 - DNA, 26 bp, Homo sapiens
ctccttaggggtagttggagcaggct

SEQ ID NO: 105365 - DNA, 26 bp, Homo sapiens
tccttaggggtagttggagcaggctc

SEQ ID NO: 105366 - DNA, 26 bp, Homo sapiens
ccttaggggtagttggagcaggctcc

SEQ ID NO: 105367 - DNA, 26 bp, Homo sapiens
cttaggggtagttggagcaggctcct

SEQ ID NO: 105368 - DNA, 26 bp, Homo sapiens
ttaggggtagttggagcaggctcctt

SEQ ID NO: 105369 - DNA, 26 bp, Homo sapiens
taggggtagttggagcaggctcctta

SEQ ID NO: 105370 - DNA, 26 bp, Homo sapiens
aggggtagttggagcaggctccttag

SEQ ID NO: 105371 - DNA, 26 bp, Homo sapiens
ggggtagttggagcaggctccttagg

SEQ ID NO: 105372 - DNA, 26 bp, Homo sapiens
gggtagttggagcaggctccttaggg

SEQ ID NO: 105373 - DNA, 26 bp, Homo sapiens
ggtagttggagcaggctccttagggg

SEQ ID NO: 105374 - DNA, 26 bp, Homo sapiens
gtagttggagcaggctccttaggggt

SEQ ID NO: 105375 - DNA, 26 bp, Homo sapiens
tagttggagcaggctccttaggggta

SEQ ID NO: 105376 - DNA, 26 bp, Homo sapiens
agttggagcaggctccttaggggtag

SEQ ID NO: 105377 - DNA, 26 bp, Homo sapiens
gttggagcaggctccttaggggtagt

SEQ ID NO: 105378 - DNA, 26 bp, Homo sapiens
ttggagcaggctccttaggggtagtt

SEQ ID NO: 105379 - DNA, 26 bp, Homo sapiens
tggagcaggctccttaggggtagttg

SEQ ID NO: 105380 - DNA, 26 bp, Homo sapiens
ggagcaggctccttaggggtagttgg

SEQ ID NO: 105381 - DNA, 26 bp, Homo sapiens
gagcaggctccttaggggtagttgga

SEQ ID NO: 105382 - DNA, 26 bp, Homo sapiens
agcaggctccttaggggtagttggag

SEQ ID NO: 105383 - DNA, 26 bp, Homo sapiens
gcaggctccttaggggtagttggagc

SEQ ID NO: 105384 - DNA, 26 bp, Homo sapiens
caggctccttaggggtagttggagca

SEQ ID NO: 105385 - DNA, 26 bp, Homo sapiens
aggctccttaggggtagttggagcag

SEQ ID NO: 105386 - DNA, 26 bp, Homo sapiens
ggctccttaggggtagttggagcagt

SEQ ID NO: 105387 - DNA, 26 bp, Homo sapiens
gctccttaggggtagttggagcagtc

SEQ ID NO: 105388 - DNA, 26 bp, Homo sapiens
ctccttaggggtagttggagcagtcc

SEQ ID NO: 105389 - DNA, 26 bp, Homo sapiens
tccttaggggtagttggagcagtccc

SEQ ID NO: 105390 - DNA, 26 bp, Homo sapiens
ccttaggggtagttggagcagtcccc

SEQ ID NO: 105391 - DNA, 26 bp, Homo sapiens
cttaggggtagttggagcagtcccct

SEQ ID NO: 105392 - DNA, 26 bp, Homo sapiens
ttaggggtagttggagcagtcccctt

SEQ ID NO: 105393 - DNA, 26 bp, Homo sapiens
taggggtagttggagcagtcccctta

SEQ ID NO: 105394 - DNA, 26 bp, Homo sapiens
aggggtagttggagcagtccccttag

SEQ ID NO: 105395 - DNA, 26 bp, Homo sapiens
ggggtagttggagcagtccccttagg

SEQ ID NO: 105396 - DNA, 26 bp, Homo sapiens
gggtagttggagcagtccccttaggg

SEQ ID NO: 105397 - DNA, 26 bp, Homo sapiens
ggtagttggagcagtccccttagggg

SEQ ID NO: 105398 - DNA, 26 bp, Homo sapiens
gtagttggagcagtccccttaggggt

SEQ ID NO: 105399 - DNA, 26 bp, Homo sapiens
tagttggagcagtccccttaggggta

SEQ ID NO: 105400 - DNA, 26 bp, Homo sapiens
agttggagcagtccccttaggggtag

SEQ ID NO: 105401 - DNA, 26 bp, Homo sapiens
gttggagcagtccccttaggggtagt

SEQ ID NO: 105402 - DNA, 26 bp, Homo sapiens
ttggagcagtccccttaggggtagtt

SEQ ID NO: 105403 - DNA, 26 bp, Homo sapiens
tggagcagtccccttaggggtagttg

SEQ ID NO: 105404 - DNA, 26 bp, Homo sapiens
ggagcagtccccttaggggtagttgg

SEQ ID NO: 105405 - DNA, 26 bp, Homo sapiens
gagcagtccccttaggggtagttgga

SEQ ID NO: 105406 - DNA, 26 bp, Homo sapiens
agcagtccccttaggggtagttggag

SEQ ID NO: 105407 - DNA, 26 bp, Homo sapiens
gcagtccccttaggggtagttggagc

SEQ ID NO: 105408 - DNA, 26 bp, Homo sapiens
cagtccccttaggggtagttggagcg

SEQ ID NO: 105409 - DNA, 26 bp, Homo sapiens
agtccccttaggggtagttggagcgg

SEQ ID NO: 105410 - DNA, 26 bp, Homo sapiens
gtccccttaggggtagttggagcggg

SEQ ID NO: 105411 - DNA, 26 bp, Homo sapiens
tccccttaggggtagttggagcgggc

SEQ ID NO: 105412 - DNA, 26 bp, Homo sapiens
ccccttaggggtagttggagcgggct

SEQ ID NO: 105413 - DNA, 26 bp, Homo sapiens
cccttaggggtagttggagcgggctt

SEQ ID NO: 105414 - DNA, 26 bp, Homo sapiens
ccttaggggtagttggagcgggcttg

SEQ ID NO: 105415 - DNA, 26 bp, Homo sapiens
cttaggggtagttggagcgggcttgt

SEQ ID NO: 105416 - DNA, 26 bp, Homo sapiens
ttaggggtagttggagcgggcttgtc

SEQ ID NO: 105417 - DNA, 26 bp, Homo sapiens
taggggtagttggagcgggcttgtca

SEQ ID NO: 105418 - DNA, 26 bp, Homo sapiens
aggggtagttggagcgggcttgtcag

SEQ ID NO: 105419 - DNA, 26 bp, Homo sapiens
ggggtagttggagcgggcttgtcaga

SEQ ID NO: 105420 - DNA, 26 bp, Homo sapiens
gggtagttggagcgggcttgtcagag

SEQ ID NO: 105421 - DNA, 26 bp, Homo sapiens
ggtagttggagcgggcttgtcagagg

SEQ ID NO: 105422 - DNA, 26 bp, Homo sapiens
gtagttggagcgggcttgtcagaggt

SEQ ID NO: 105423 - DNA, 26 bp, Homo sapiens
tagttggagcgggcttgtcagaggtg

SEQ ID NO: 105424 - DNA, 26 bp, Homo sapiens
agttggagcgggcttgtcagaggtgg

SEQ ID NO: 105425 - DNA, 26 bp, Homo sapiens
gttggagcgggcttgtcagaggtggt

SEQ ID NO: 105426 - DNA, 26 bp, Homo sapiens
ttggagcgggcttgtcagaggtggtg

SEQ ID NO: 105427 - DNA, 26 bp, Homo sapiens
tggagcgggcttgtcagaggtggtgg

SEQ ID NO: 105428 - DNA, 26 bp, Homo sapiens
ggagcgggcttgtcagaggtggtgga

SEQ ID NO: 105429 - DNA, 26 bp, Homo sapiens
gagcgggcttgtcagaggtggtggat

SEQ ID NO: 105430 - DNA, 26 bp, Homo sapiens
agcgggcttgtcagaggtggtggatg

SEQ ID NO: 105431 - DNA, 26 bp, Homo sapiens
gcgggcttgtcagaggtggtggatgt

SEQ ID NO: 105432 - DNA, 26 bp, Homo sapiens
cgggcttgtcagaggtggtggatgtg

SEQ ID NO: 105433 - DNA, 26 bp, Homo sapiens
gggcttgtcagaggtggtggatgtgg

SEQ ID NO: 105434 - DNA, 26 bp, Homo sapiens
ggcttgtcagaggtggtggatgtggg

SEQ ID NO: 105435 - DNA, 26 bp, Homo sapiens
gcttgtcagaggtggtggatgtgggc

SEQ ID NO: 105436 - DNA, 26 bp, Homo sapiens
cttgtcagaggtggtggatgtgggct

SEQ ID NO: 105437 - DNA, 26 bp, Homo sapiens
ttgtcagaggtggtggatgtgggctc

SEQ ID NO: 105438 - DNA, 26 bp, Homo sapiens
tgtcagaggtggtggatgtgggctcc

SEQ ID NO: 105439 - DNA, 26 bp, Homo sapiens
gtcagaggtggtggatgtgggctcct

SEQ ID NO: 105440 - DNA, 26 bp, Homo sapiens
tcagaggtggtggatgtgggctcctt

SEQ ID NO: 105441 - DNA, 26 bp, Homo sapiens
cagaggtggtggatgtgggctccttg

SEQ ID NO: 105442 - DNA, 26 bp, Homo sapiens
agaggtggtggatgtgggctccttgg

SEQ ID NO: 105443 - DNA, 26 bp, Homo sapiens
gaggtggtggatgtgggctccttggt

SEQ ID NO: 105444 - DNA, 26 bp, Homo sapiens
aggtggtggatgtgggctccttggtg

SEQ ID NO: 105445 - DNA, 26 bp, Homo sapiens
ggtggtggatgtgggctccttggtgg

SEQ ID NO: 105446 - DNA, 26 bp, Homo sapiens
gtggtggatgtgggctccttggtggt

SEQ ID NO: 105447 - DNA, 26 bp, Homo sapiens
tggtggatgtgggctccttggtggtg

SEQ ID NO: 105448 - DNA, 26 bp, Homo sapiens
ggtggatgtgggctccttggtggtgg

SEQ ID NO: 105449 - DNA, 26 bp, Homo sapiens
gtggatgtgggctccttggtggtggt

SEQ ID NO: 105450 - DNA, 26 bp, Homo sapiens
tggatgtgggctccttggtggtggtg

SEQ ID NO: 105451 - DNA, 26 bp, Homo sapiens
ggatgtgggctccttggtggtggtgg

SEQ ID NO: 105452 - DNA, 26 bp, Homo sapiens
gatgtgggctccttggtggtggtggg

SEQ ID NO: 105453 - DNA, 26 bp, Homo sapiens
atgtgggctccttggtggtggtgggt

SEQ ID NO: 105454 - DNA, 26 bp, Homo sapiens
tgtgggctccttggtggtggtgggtg

SEQ ID NO: 105455 - DNA, 26 bp, Homo sapiens
gtgggctccttggtggtggtgggtgc

SEQ ID NO: 105456 - DNA, 26 bp, Homo sapiens
tgggctccttggtggtggtgggtgca

SEQ ID NO: 105457 - DNA, 26 bp, Homo sapiens
gggctccttggtggtggtgggtgcaa

SEQ ID NO: 105458 - DNA, 26 bp, Homo sapiens
ggctccttggtggtggtgggtgcaag

SEQ ID NO: 105459 - DNA, 26 bp, Homo sapiens
gctccttggtggtggtgggtgcaagc

SEQ ID NO: 105460 - DNA, 26 bp, Homo sapiens
ctccttggtggtggtgggtgcaagct

SEQ ID NO: 105461 - DNA, 26 bp, Homo sapiens
tccttggtggtggtgggtgcaagctc

SEQ ID NO: 105462 - DNA, 26 bp, Homo sapiens
ccttggtggtggtgggtgcaagctcc

SEQ ID NO: 105463 - DNA, 26 bp, Homo sapiens
cttggtggtggtgggtgcaagctcct

SEQ ID NO: 105464 - DNA, 26 bp, Homo sapiens
ttggtggtggtgggtgcaagctcctt

SEQ ID NO: 105465 - DNA, 26 bp, Homo sapiens
tggtggtggtgggtgcaagctccttg

SEQ ID NO: 105466 - DNA, 26 bp, Homo sapiens
ggtggtggtgggtgcaagctccttgg

SEQ ID NO: 105467 - DNA, 26 bp, Homo sapiens
gtggtggtgggtgcaagctccttggg

SEQ ID NO: 105468 - DNA, 26 bp, Homo sapiens
tggtggtgggtgcaagctccttgggg

SEQ ID NO: 105469 - DNA, 26 bp, Homo sapiens
ggtggtgggtgcaagctccttggggg

SEQ ID NO: 105470 - DNA, 26 bp, Homo sapiens
gtggtgggtgcaagctccttgggggc

SEQ ID NO: 105471 - DNA, 26 bp, Homo sapiens
tggtgggtgcaagctccttgggggca

SEQ ID NO: 105472 - DNA, 26 bp, Homo sapiens
ggtgggtgcaagctccttgggggcag

SEQ ID NO: 105473 - DNA, 26 bp, Homo sapiens
gtgggtgcaagctccttgggggcagg

SEQ ID NO: 105474 - DNA, 26 bp, Homo sapiens
tgggtgcaagctccttgggggcaggc

SEQ ID NO: 105475 - DNA, 26 bp, Homo sapiens
gggtgcaagctccttgggggcaggct

SEQ ID NO: 105476 - DNA, 26 bp, Homo sapiens
ggtgcaagctccttgggggcaggctt

SEQ ID NO: 105477 - DNA, 26 bp, Homo sapiens
gtgcaagctccttgggggcaggcttc

SEQ ID NO: 105478 - DNA, 26 bp, Homo sapiens
tgcaagctccttgggggcaggcttct

SEQ ID NO: 105479 - DNA, 26 bp, Homo sapiens
gcaagctccttgggggcaggcttctt

SEQ ID NO: 105480 - DNA, 26 bp, Homo sapiens
caagctccttgggggcaggcttcttg

SEQ ID NO: 105481 - DNA, 26 bp, Homo sapiens
aagctccttgggggcaggcttcttgg

SEQ ID NO: 105482 - DNA, 26 bp, Homo sapiens
agctccttgggggcaggcttcttggg

SEQ ID NO: 105483 - DNA, 26 bp, Homo sapiens
gctccttgggggcaggcttcttggga

SEQ ID NO: 105484 - DNA, 26 bp, Homo sapiens
ctccttgggggcaggcttcttgggag

SEQ ID NO: 105485 - DNA, 26 bp, Homo sapiens
tccttgggggcaggcttcttgggagt

SEQ ID NO: 105486 - DNA, 26 bp, Homo sapiens
ccttgggggcaggcttcttgggagta

SEQ ID NO: 105487 - DNA, 26 bp, Homo sapiens
cttgggggcaggcttcttgggagtag

SEQ ID NO: 105488 - DNA, 26 bp, Homo sapiens
ttgggggcaggcttcttgggagtagt

SEQ ID NO: 105489 - DNA, 26 bp, Homo sapiens
tgggggcaggcttcttgggagtagtg

SEQ ID NO: 105490 - DNA, 26 bp, Homo sapiens
gggggcaggcttcttgggagtagtgg

SEQ ID NO: 105491 - DNA, 26 bp, Homo sapiens
ggggcaggcttcttgggagtagtggg

SEQ ID NO: 105492 - DNA, 26 bp, Homo sapiens
gggcaggcttcttgggagtagtgggt

SEQ ID NO: 105493 - DNA, 26 bp, Homo sapiens
ggcaggcttcttgggagtagtgggtg

SEQ ID NO: 105494 - DNA, 26 bp, Homo sapiens
gcaggcttcttgggagtagtgggtgc

SEQ ID NO: 105495 - DNA, 26 bp, Homo sapiens
caggcttcttgggagtagtgggtgca

SEQ ID NO: 105496 - DNA, 26 bp, Homo sapiens
aggcttcttgggagtagtgggtgcag

SEQ ID NO: 105497 - DNA, 26 bp, Homo sapiens
ggcttcttgggagtagtgggtgcagg

SEQ ID NO: 105498 - DNA, 26 bp, Homo sapiens
gcttcttgggagtagtgggtgcaggt

SEQ ID NO: 105499 - DNA, 26 bp, Homo sapiens
cttcttgggagtagtgggtgcaggtt

SEQ ID NO: 105500 - DNA, 26 bp, Homo sapiens
ttcttgggagtagtgggtgcaggttc

SEQ ID NO: 105501 - DNA, 26 bp, Homo sapiens
tcttgggagtagtgggtgcaggttcc

SEQ ID NO: 105502 - DNA, 26 bp, Homo sapiens
cttgggagtagtgggtgcaggttcct

SEQ ID NO: 105503 - DNA, 26 bp, Homo sapiens
ttgggagtagtgggtgcaggttcctt

SEQ ID NO: 105504 - DNA, 26 bp, Homo sapiens
tgggagtagtgggtgcaggttccttg

SEQ ID NO: 105505 - DNA, 26 bp, Homo sapiens
gggagtagtgggtgcaggttccttga

SEQ ID NO: 105506 - DNA, 26 bp, Homo sapiens
ggagtagtgggtgcaggttccttgag

SEQ ID NO: 105507 - DNA, 26 bp, Homo sapiens
gagtagtgggtgcaggttccttgagg

SEQ ID NO: 105508 - DNA, 26 bp, Homo sapiens
agtagtgggtgcaggttccttgaggg

SEQ ID NO: 105509 - DNA, 26 bp, Homo sapiens
gtagtgggtgcaggttccttgagggt

SEQ ID NO: 105510 - DNA, 26 bp, Homo sapiens
tagtgggtgcaggttccttgagggta

SEQ ID NO: 105511 - DNA, 26 bp, Homo sapiens
agtgggtgcaggttccttgagggtag

SEQ ID NO: 105512 - DNA, 26 bp, Homo sapiens
gtgggtgcaggttccttgagggtagt

SEQ ID NO: 105513 - DNA, 26 bp, Homo sapiens
tgggtgcaggttccttgagggtagtt

SEQ ID NO: 105514 - DNA, 26 bp, Homo sapiens
gggtgcaggttccttgagggtagttg

SEQ ID NO: 105515 - DNA, 26 bp, Homo sapiens
ggtgcaggttccttgagggtagttgg

SEQ ID NO: 105516 - DNA, 26 bp, Homo sapiens
gtgcaggttccttgagggtagttgga

SEQ ID NO: 105517 - DNA, 26 bp, Homo sapiens
tgcaggttccttgagggtagttggag

SEQ ID NO: 105518 - DNA, 26 bp, Homo sapiens
gcaggttccttgagggtagttggagc

SEQ ID NO: 105519 - DNA, 26 bp, Homo sapiens
caggttccttgagggtagttggagca

SEQ ID NO: 105520 - DNA, 26 bp, Homo sapiens
aggttccttgagggtagttggagcag

SEQ ID NO: 105521 - DNA, 26 bp, Homo sapiens
ggttccttgagggtagttggagcagt

SEQ ID NO: 105522 - DNA, 26 bp, Homo sapiens
gttccttgagggtagttggagcagtc

SEQ ID NO: 105523 - DNA, 26 bp, Homo sapiens
ttccttgagggtagttggagcagtcc

SEQ ID NO: 105524 - DNA, 26 bp, Homo sapiens
tccttgagggtagttggagcagtccc

SEQ ID NO: 105525 - DNA, 26 bp, Homo sapiens
ccttgagggtagttggagcagtccct

SEQ ID NO: 105526 - DNA, 26 bp, Homo sapiens
cttgagggtagttggagcagtccctt

SEQ ID NO: 105527 - DNA, 26 bp, Homo sapiens
ttgagggtagttggagcagtcccttt

SEQ ID NO: 105528 - DNA, 26 bp, Homo sapiens
tgagggtagttggagcagtcccttta

SEQ ID NO: 105529 - DNA, 26 bp, Homo sapiens
gagggtagttggagcagtccctttag

SEQ ID NO: 105530 - DNA, 26 bp, Homo sapiens
agggtagttggagcagtccctttagg

SEQ ID NO: 105531 - DNA, 26 bp, Homo sapiens
gggtagttggagcagtccctttaggg

SEQ ID NO: 105532 - DNA, 26 bp, Homo sapiens
ggtagttggagcagtccctttagggg

SEQ ID NO: 105533 - DNA, 26 bp, Homo sapiens
gtagttggagcagtccctttaggggt

SEQ ID NO: 105534 - DNA, 26 bp, Homo sapiens
tagttggagcagtccctttaggggta

SEQ ID NO: 105535 - DNA, 26 bp, Homo sapiens
agttggagcagtccctttaggggtag

SEQ ID NO: 105536 - DNA, 26 bp, Homo sapiens
gttggagcagtccctttaggggtagt

SEQ ID NO: 105537 - DNA, 26 bp, Homo sapiens
ttggagcagtccctttaggggtagtt

SEQ ID NO: 105538 - DNA, 26 bp, Homo sapiens
tggagcagtccctttaggggtagttg

SEQ ID NO: 105539 - DNA, 26 bp, Homo sapiens
ggagcagtccctttaggggtagttgg

SEQ ID NO: 105540 - DNA, 26 bp, Homo sapiens
gagcagtccctttaggggtagttgga

SEQ ID NO: 105541 - DNA, 26 bp, Homo sapiens
agcagtccctttaggggtagttggag

SEQ ID NO: 105542 - DNA, 26 bp, Homo sapiens
gcagtccctttaggggtagttggagc

SEQ ID NO: 105543 - DNA, 26 bp, Homo sapiens
cagtccctttaggggtagttggagca

SEQ ID NO: 105544 - DNA, 26 bp, Homo sapiens
agtccctttaggggtagttggagcag

SEQ ID NO: 105545 - DNA, 26 bp, Homo sapiens
gtccctttaggggtagttggagcagt

SEQ ID NO: 105546 - DNA, 26 bp, Homo sapiens
tccctttaggggtagttggagcagtc

SEQ ID NO: 105547 - DNA, 26 bp, Homo sapiens
ccctttaggggtagttggagcagtct

SEQ ID NO: 105548 - DNA, 26 bp, Homo sapiens
cctttaggggtagttggagcagtctc

SEQ ID NO: 105549 - DNA, 26 bp, Homo sapiens
ctttaggggtagttggagcagtctcc

SEQ ID NO: 105550 - DNA, 26 bp, Homo sapiens
tttaggggtagttggagcagtctcct

SEQ ID NO: 105551 - DNA, 26 bp, Homo sapiens
ttaggggtagttggagcagtctcctt

SEQ ID NO: 105552 - DNA, 26 bp, Homo sapiens
taggggtagttggagcagtctcctta

SEQ ID NO: 105553 - DNA, 26 bp, Homo sapiens
aggggtagttggagcagtctccttag

SEQ ID NO: 105554 - DNA, 26 bp, Homo sapiens
ggggtagttggagcagtctccttagg

SEQ ID NO: 105555 - DNA, 26 bp, Homo sapiens
gggtagttggagcagtctccttaggg

SEQ ID NO: 105556 - DNA, 26 bp, Homo sapiens
ggtagttggagcagtctccttagggg

SEQ ID NO: 105557 - DNA, 26 bp, Homo sapiens
gtagttggagcagtctccttaggggt

SEQ ID NO: 105558 - DNA, 26 bp, Homo sapiens
tagttggagcagtctccttaggggta

SEQ ID NO: 105559 - DNA, 26 bp, Homo sapiens
agttggagcagtctccttaggggtag

SEQ ID NO: 105560 - DNA, 26 bp, Homo sapiens
gttggagcagtctccttaggggtagt

SEQ ID NO: 105561 - DNA, 26 bp, Homo sapiens
ttggagcagtctccttaggggtagtt

SEQ ID NO: 105562 - DNA, 26 bp, Homo sapiens
tggagcagtctccttaggggtagttg

SEQ ID NO: 105563 - DNA, 26 bp, Homo sapiens
ggagcagtctccttaggggtagttgg

SEQ ID NO: 105564 - DNA, 26 bp, Homo sapiens
gagcagtctccttaggggtagttgga

SEQ ID NO: 105565 - DNA, 26 bp, Homo sapiens
agcagtctccttaggggtagttggag

SEQ ID NO: 105566 - DNA, 26 bp, Homo sapiens
gcagtctccttaggggtagttggagc

SEQ ID NO: 105567 - DNA, 26 bp, Homo sapiens
cagtctccttaggggtagttggagca

SEQ ID NO: 105568 - DNA, 26 bp, Homo sapiens
agtctccttaggggtagttggagcag

SEQ ID NO: 105569 - DNA, 26 bp, Homo sapiens
gtctccttaggggtagttggagcagg

SEQ ID NO: 105570 - DNA, 26 bp, Homo sapiens
tctccttaggggtagttggagcaggc

SEQ ID NO: 105571 - DNA, 26 bp, Homo sapiens
ctccttaggggtagttggagcaggct

SEQ ID NO: 105572 - DNA, 26 bp, Homo sapiens
tccttaggggtagttggagcaggctc

SEQ ID NO: 105573 - DNA, 26 bp, Homo sapiens
ccttaggggtagttggagcaggctcc

SEQ ID NO: 105574 - DNA, 26 bp, Homo sapiens
cttaggggtagttggagcaggctcct

SEQ ID NO: 105575 - DNA, 26 bp, Homo sapiens
ttaggggtagttggagcaggctcctt

SEQ ID NO: 105576 - DNA, 26 bp, Homo sapiens
taggggtagttggagcaggctcctta

SEQ ID NO: 105577 - DNA, 26 bp, Homo sapiens
aggggtagttggagcaggctccttag

SEQ ID NO: 105578 - DNA, 26 bp, Homo sapiens
ggggtagttggagcaggctccttagg

SEQ ID NO: 105579 - DNA, 26 bp, Homo sapiens
gggtagttggagcaggctccttaggg

SEQ ID NO: 105580 - DNA, 26 bp, Homo sapiens
ggtagttggagcaggctccttagggg

SEQ ID NO: 105581 - DNA, 26 bp, Homo sapiens
gtagttggagcaggctccttaggggt

SEQ ID NO: 105582 - DNA, 26 bp, Homo sapiens
tagttggagcaggctccttaggggta

SEQ ID NO: 105583 - DNA, 26 bp, Homo sapiens
agttggagcaggctccttaggggtag

SEQ ID NO: 105584 - DNA, 26 bp, Homo sapiens
gttggagcaggctccttaggggtagt

SEQ ID NO: 105585 - DNA, 26 bp, Homo sapiens
ttggagcaggctccttaggggtagtt

SEQ ID NO: 105586 - DNA, 26 bp, Homo sapiens
tggagcaggctccttaggggtagttg

SEQ ID NO: 105587 - DNA, 26 bp, Homo sapiens
ggagcaggctccttaggggtagttgg

SEQ ID NO: 105588 - DNA, 26 bp, Homo sapiens
gagcaggctccttaggggtagttgga

SEQ ID NO: 105589 - DNA, 26 bp, Homo sapiens
agcaggctccttaggggtagttggag

SEQ ID NO: 105590 - DNA, 26 bp, Homo sapiens
gcaggctccttaggggtagttggagc

SEQ ID NO: 105591 - DNA, 26 bp, Homo sapiens
caggctccttaggggtagttggagca

SEQ ID NO: 105592 - DNA, 26 bp, Homo sapiens
aggctccttaggggtagttggagcag

SEQ ID NO: 105593 - DNA, 26 bp, Homo sapiens
ggctccttaggggtagttggagcagg

SEQ ID NO: 105594 - DNA, 26 bp, Homo sapiens
gctccttaggggtagttggagcaggc

SEQ ID NO: 105595 - DNA, 26 bp, Homo sapiens
ctccttaggggtagttggagcaggct

SEQ ID NO: 105596 - DNA, 26 bp, Homo sapiens
tccttaggggtagttggagcaggctc

SEQ ID NO: 105597 - DNA, 26 bp, Homo sapiens
ccttaggggtagttggagcaggctcc

SEQ ID NO: 105598 - DNA, 26 bp, Homo sapiens
cttaggggtagttggagcaggctcct

SEQ ID NO: 105599 - DNA, 26 bp, Homo sapiens
ttaggggtagttggagcaggctcctt

SEQ ID NO: 105600 - DNA, 26 bp, Homo sapiens
taggggtagttggagcaggctcctta

SEQ ID NO: 105601 - DNA, 26 bp, Homo sapiens
aggggtagttggagcaggctccttag

SEQ ID NO: 105602 - DNA, 26 bp, Homo sapiens
ggggtagttggagcaggctccttagg

SEQ ID NO: 105603 - DNA, 26 bp, Homo sapiens
gggtagttggagcaggctccttaggg

SEQ ID NO: 105604 - DNA, 26 bp, Homo sapiens
ggtagttggagcaggctccttagggg

SEQ ID NO: 105605 - DNA, 26 bp, Homo sapiens
gtagttggagcaggctccttaggggt

SEQ ID NO: 105606 - DNA, 26 bp, Homo sapiens
tagttggagcaggctccttaggggta

SEQ ID NO: 105607 - DNA, 26 bp, Homo sapiens
agttggagcaggctccttaggggtag

SEQ ID NO: 105608 - DNA, 26 bp, Homo sapiens
gttggagcaggctccttaggggtagt

SEQ ID NO: 105609 - DNA, 26 bp, Homo sapiens
ttggagcaggctccttaggggtagtt

SEQ ID NO: 105610 - DNA, 26 bp, Homo sapiens
tggagcaggctccttaggggtagttg

SEQ ID NO: 105611 - DNA, 26 bp, Homo sapiens
ggagcaggctccttaggggtagttgg

SEQ ID NO: 105612 - DNA, 26 bp, Homo sapiens
gagcaggctccttaggggtagttgga

SEQ ID NO: 105613 - DNA, 26 bp, Homo sapiens
agcaggctccttaggggtagttggag

SEQ ID NO: 105614 - DNA, 26 bp, Homo sapiens
gcaggctccttaggggtagttggagc

SEQ ID NO: 105615 - DNA, 26 bp, Homo sapiens
caggctccttaggggtagttggagca

SEQ ID NO: 105616 - DNA, 26 bp, Homo sapiens
aggctccttaggggtagttggagcag

SEQ ID NO: 105617 - DNA, 26 bp, Homo sapiens
ggctccttaggggtagttggagcagg

SEQ ID NO: 105618 - DNA, 26 bp, Homo sapiens
gctccttaggggtagttggagcaggc

SEQ ID NO: 105619 - DNA, 26 bp, Homo sapiens
ctccttaggggtagttggagcaggct

SEQ ID NO: 105620 - DNA, 26 bp, Homo sapiens
tccttaggggtagttggagcaggctc

SEQ ID NO: 105621 - DNA, 26 bp, Homo sapiens
ccttaggggtagttggagcaggctcc

SEQ ID NO: 105622 - DNA, 26 bp, Homo sapiens
cttaggggtagttggagcaggctcct

SEQ ID NO: 105623 - DNA, 26 bp, Homo sapiens
ttaggggtagttggagcaggctcctt

SEQ ID NO: 105624 - DNA, 26 bp, Homo sapiens
taggggtagttggagcaggctcctta

SEQ ID NO: 105625 - DNA, 26 bp, Homo sapiens
aggggtagttggagcaggctccttag

SEQ ID NO: 105626 - DNA, 26 bp, Homo sapiens
ggggtagttggagcaggctccttagg

SEQ ID NO: 105627 - DNA, 26 bp, Homo sapiens
gggtagttggagcaggctccttaggg

SEQ ID NO: 105628 - DNA, 26 bp, Homo sapiens
ggtagttggagcaggctccttagggg

SEQ ID NO: 105629 - DNA, 26 bp, Homo sapiens
gtagttggagcaggctccttaggggt

SEQ ID NO: 105630 - DNA, 26 bp, Homo sapiens
tagttggagcaggctccttaggggtg

SEQ ID NO: 105631 - DNA, 26 bp, Homo sapiens
agttggagcaggctccttaggggtgt

SEQ ID NO: 105632 - DNA, 26 bp, Homo sapiens
gttggagcaggctccttaggggtgtt

SEQ ID NO: 105633 - DNA, 26 bp, Homo sapiens
ttggagcaggctccttaggggtgttg

SEQ ID NO: 105634 - DNA, 26 bp, Homo sapiens
tggagcaggctccttaggggtgttgg

SEQ ID NO: 105635 - DNA, 26 bp, Homo sapiens
ggagcaggctccttaggggtgttggg

SEQ ID NO: 105636 - DNA, 26 bp, Homo sapiens
gagcaggctccttaggggtgttggga

SEQ ID NO: 105637 - DNA, 26 bp, Homo sapiens
agcaggctccttaggggtgttgggag

SEQ ID NO: 105638 - DNA, 26 bp, Homo sapiens
gcaggctccttaggggtgttgggagc

SEQ ID NO: 105639 - DNA, 26 bp, Homo sapiens
caggctccttaggggtgttgggagcc

SEQ ID NO: 105640 - DNA, 26 bp, Homo sapiens
aggctccttaggggtgttgggagccg

SEQ ID NO: 105641 - DNA, 26 bp, Homo sapiens
ggctccttaggggtgttgggagccgc

SEQ ID NO: 105642 - DNA, 26 bp, Homo sapiens
gctccttaggggtgttgggagccgct

SEQ ID NO: 105643 - DNA, 26 bp, Homo sapiens
ctccttaggggtgttgggagccgctg

SEQ ID NO: 105644 - DNA, 26 bp, Homo sapiens
tccttaggggtgttgggagccgctgc

SEQ ID NO: 105645 - DNA, 26 bp, Homo sapiens
ccttaggggtgttgggagccgctgcc

SEQ ID NO: 105646 - DNA, 26 bp, Homo sapiens
cttaggggtgttgggagccgctgcct

SEQ ID NO: 105647 - DNA, 26 bp, Homo sapiens
ttaggggtgttgggagccgctgcctt

SEQ ID NO: 105648 - DNA, 26 bp, Homo sapiens
taggggtgttgggagccgctgccttg

SEQ ID NO: 105649 - DNA, 26 bp, Homo sapiens
aggggtgttgggagccgctgccttgg

SEQ ID NO: 105650 - DNA, 26 bp, Homo sapiens
ggggtgttgggagccgctgccttggg

SEQ ID NO: 105651 - DNA, 26 bp, Homo sapiens
gggtgttgggagccgctgccttggga

SEQ ID NO: 105652 - DNA, 26 bp, Homo sapiens
ggtgttgggagccgctgccttgggag

SEQ ID NO: 105653 - DNA, 26 bp, Homo sapiens
gtgttgggagccgctgccttgggagt

SEQ ID NO: 105654 - DNA, 26 bp, Homo sapiens
tgttgggagccgctgccttgggagtg

SEQ ID NO: 105655 - DNA, 26 bp, Homo sapiens
gttgggagccgctgccttgggagtgg

SEQ ID NO: 105656 - DNA, 26 bp, Homo sapiens
ttgggagccgctgccttgggagtggt

SEQ ID NO: 105657 - DNA, 26 bp, Homo sapiens
tgggagccgctgccttgggagtggtg

SEQ ID NO: 105658 - DNA, 26 bp, Homo sapiens
gggagccgctgccttgggagtggtgg

SEQ ID NO: 105659 - DNA, 26 bp, Homo sapiens
ggagccgctgccttgggagtggtggg

SEQ ID NO: 105660 - DNA, 26 bp, Homo sapiens
gagccgctgccttgggagtggtggga

SEQ ID NO: 105661 - DNA, 26 bp, Homo sapiens
agccgctgccttgggagtggtgggag

SEQ ID NO: 105662 - DNA, 26 bp, Homo sapiens
gccgctgccttgggagtggtgggagc

SEQ ID NO: 105663 - DNA, 26 bp, Homo sapiens
ccgctgccttgggagtggtgggagca

SEQ ID NO: 105664 - DNA, 26 bp, Homo sapiens
cgctgccttgggagtggtgggagcag

SEQ ID NO: 105665 - DNA, 26 bp, Homo sapiens
gctgccttgggagtggtgggagcagg

SEQ ID NO: 105666 - DNA, 26 bp, Homo sapiens
ctgccttgggagtggtgggagcaggc

SEQ ID NO: 105667 - DNA, 26 bp, Homo sapiens
tgccttgggagtggtgggagcaggct

SEQ ID NO: 105668 - DNA, 26 bp, Homo sapiens
gccttgggagtggtgggagcaggctc

SEQ ID NO: 105669 - DNA, 26 bp, Homo sapiens
ccttgggagtggtgggagcaggctcc

SEQ ID NO: 105670 - DNA, 26 bp, Homo sapiens
cttgggagtggtgggagcaggctcct

SEQ ID NO: 105671 - DNA, 26 bp, Homo sapiens
ttgggagtggtgggagcaggctcctc

SEQ ID NO: 105672 - DNA, 26 bp, Homo sapiens
tgggagtggtgggagcaggctcctca

SEQ ID NO: 105673 - DNA, 26 bp, Homo sapiens
gggagtggtgggagcaggctcctcag

SEQ ID NO: 105674 - DNA, 26 bp, Homo sapiens
ggagtggtgggagcaggctcctcagg

SEQ ID NO: 105675 - DNA, 26 bp, Homo sapiens
gagtggtgggagcaggctcctcaggg

SEQ ID NO: 105676 - DNA, 26 bp, Homo sapiens
agtggtgggagcaggctcctcagggg

SEQ ID NO: 105677 - DNA, 26 bp, Homo sapiens
gtggtgggagcaggctcctcaggggt

SEQ ID NO: 105678 - DNA, 26 bp, Homo sapiens
tggtgggagcaggctcctcaggggtg

SEQ ID NO: 105679 - DNA, 26 bp, Homo sapiens
ggtgggagcaggctcctcaggggtgg

SEQ ID NO: 105680 - DNA, 26 bp, Homo sapiens
gtgggagcaggctcctcaggggtggt

SEQ ID NO: 105681 - DNA, 26 bp, Homo sapiens
tgggagcaggctcctcaggggtggtg

SEQ ID NO: 105682 - DNA, 26 bp, Homo sapiens
gggagcaggctcctcaggggtggtgg

SEQ ID NO: 105683 - DNA, 26 bp, Homo sapiens
ggagcaggctcctcaggggtggtggg

SEQ ID NO: 105684 - DNA, 26 bp, Homo sapiens
gagcaggctcctcaggggtggtgggt

SEQ ID NO: 105685 - DNA, 26 bp, Homo sapiens
agcaggctcctcaggggtggtgggtg

SEQ ID NO: 105686 - DNA, 26 bp, Homo sapiens
gcaggctcctcaggggtggtgggtgt

SEQ ID NO: 105687 - DNA, 26 bp, Homo sapiens
caggctcctcaggggtggtgggtgtg

SEQ ID NO: 105688 - DNA, 26 bp, Homo sapiens
aggctcctcaggggtggtgggtgtgg

SEQ ID NO: 105689 - DNA, 26 bp, Homo sapiens
ggctcctcaggggtggtgggtgtggg

SEQ ID NO: 105690 - DNA, 26 bp, Homo sapiens
gctcctcaggggtggtgggtgtgggc

SEQ ID NO: 105691 - DNA, 26 bp, Homo sapiens
ctcctcaggggtggtgggtgtgggct

SEQ ID NO: 105692 - DNA, 26 bp, Homo sapiens
tcctcaggggtggtgggtgtgggctc

SEQ ID NO: 105693 - DNA, 26 bp, Homo sapiens
cctcaggggtggtgggtgtgggctcc

SEQ ID NO: 105694 - DNA, 26 bp, Homo sapiens
ctcaggggtggtgggtgtgggctcct

SEQ ID NO: 105695 - DNA, 26 bp, Homo sapiens
tcaggggtggtgggtgtgggctcctc

SEQ ID NO: 105696 - DNA, 26 bp, Homo sapiens
caggggtggtgggtgtgggctcctca

SEQ ID NO: 105697 - DNA, 26 bp, Homo sapiens
aggggtggtgggtgtgggctcctcag

SEQ ID NO: 105698 - DNA, 26 bp, Homo sapiens
ggggtggtgggtgtgggctcctcagg

SEQ ID NO: 105699 - DNA, 26 bp, Homo sapiens
gggtggtgggtgtgggctcctcaggg

SEQ ID NO: 105700 - DNA, 26 bp, Homo sapiens
ggtggtgggtgtgggctcctcagggg

SEQ ID NO: 105701 - DNA, 26 bp, Homo sapiens
gtggtgggtgtgggctcctcaggggt

SEQ ID NO: 105702 - DNA, 26 bp, Homo sapiens
tggtgggtgtgggctcctcaggggtg

SEQ ID NO: 105703 - DNA, 26 bp, Homo sapiens
ggtgggtgtgggctcctcaggggtgg

SEQ ID NO: 105704 - DNA, 26 bp, Homo sapiens
gtgggtgtgggctcctcaggggtggt

SEQ ID NO: 105705 - DNA, 26 bp, Homo sapiens
tgggtgtgggctcctcaggggtggtg

SEQ ID NO: 105706 - DNA, 26 bp, Homo sapiens
gggtgtgggctcctcaggggtggtgg

SEQ ID NO: 105707 - DNA, 26 bp, Homo sapiens
ggtgtgggctcctcaggggtggtggg

SEQ ID NO: 105708 - DNA, 26 bp, Homo sapiens
gtgtgggctcctcaggggtggtgggt

SEQ ID NO: 105709 - DNA, 26 bp, Homo sapiens
tgtgggctcctcaggggtggtgggtg

SEQ ID NO: 105710 - DNA, 26 bp, Homo sapiens
gtgggctcctcaggggtggtgggtgc

SEQ ID NO: 105711 - DNA, 26 bp, Homo sapiens
tgggctcctcaggggtggtgggtgcg

SEQ ID NO: 105712 - DNA, 26 bp, Homo sapiens
gggctcctcaggggtggtgggtgcga

SEQ ID NO: 105713 - DNA, 26 bp, Homo sapiens
ggctcctcaggggtggtgggtgcgag

SEQ ID NO: 105714 - DNA, 26 bp, Homo sapiens
gctcctcaggggtggtgggtgcgagc

SEQ ID NO: 105715 - DNA, 26 bp, Homo sapiens
ctcctcaggggtggtgggtgcgagct

SEQ ID NO: 105716 - DNA, 26 bp, Homo sapiens
tcctcaggggtggtgggtgcgagctc

SEQ ID NO: 105717 - DNA, 26 bp, Homo sapiens
cctcaggggtggtgggtgcgagctcc

SEQ ID NO: 105718 - DNA, 26 bp, Homo sapiens
ctcaggggtggtgggtgcgagctcct

SEQ ID NO: 105719 - DNA, 26 bp, Homo sapiens
tcaggggtggtgggtgcgagctcctc

SEQ ID NO: 105720 - DNA, 26 bp, Homo sapiens
caggggtggtgggtgcgagctcctca

SEQ ID NO: 105721 - DNA, 26 bp, Homo sapiens
aggggtggtgggtgcgagctcctcag

SEQ ID NO: 105722 - DNA, 26 bp, Homo sapiens
ggggtggtgggtgcgagctcctcagg

SEQ ID NO: 105723 - DNA, 26 bp, Homo sapiens
gggtggtgggtgcgagctcctcaggg

SEQ ID NO: 105724 - DNA, 26 bp, Homo sapiens
ggtggtgggtgcgagctcctcagggg

SEQ ID NO: 105725 - DNA, 26 bp, Homo sapiens
gtggtgggtgcgagctcctcaggggt

SEQ ID NO: 105726 - DNA, 26 bp, Homo sapiens
tggtgggtgcgagctcctcaggggtg

SEQ ID NO: 105727 - DNA, 26 bp, Homo sapiens
ggtgggtgcgagctcctcaggggtgg

SEQ ID NO: 105728 - DNA, 26 bp, Homo sapiens
gtgggtgcgagctcctcaggggtggt

SEQ ID NO: 105729 - DNA, 26 bp, Homo sapiens
tgggtgcgagctcctcaggggtggtg

SEQ ID NO: 105730 - DNA, 26 bp, Homo sapiens
gggtgcgagctcctcaggggtggtgg

SEQ ID NO: 105731 - DNA, 26 bp, Homo sapiens
ggtgcgagctcctcaggggtggtggg

SEQ ID NO: 105732 - DNA, 26 bp, Homo sapiens
gtgcgagctcctcaggggtggtgggt

SEQ ID NO: 105733 - DNA, 26 bp, Homo sapiens
tgcgagctcctcaggggtggtgggtg

SEQ ID NO: 105734 - DNA, 26 bp, Homo sapiens
gcgagctcctcaggggtggtgggtgc

SEQ ID NO: 105735 - DNA, 26 bp, Homo sapiens
cgagctcctcaggggtggtgggtgcg

SEQ ID NO: 105736 - DNA, 26 bp, Homo sapiens
gagctcctcaggggtggtgggtgcgg

SEQ ID NO: 105737 - DNA, 26 bp, Homo sapiens
agctcctcaggggtggtgggtgcggg

SEQ ID NO: 105738 - DNA, 26 bp, Homo sapiens
gctcctcaggggtggtgggtgcgggc

SEQ ID NO: 105739 - DNA, 26 bp, Homo sapiens
ctcctcaggggtggtgggtgcgggct

SEQ ID NO: 105740 - DNA, 26 bp, Homo sapiens
tcctcaggggtggtgggtgcgggctt

SEQ ID NO: 105741 - DNA, 26 bp, Homo sapiens
cctcaggggtggtgggtgcgggcttc

SEQ ID NO: 105742 - DNA, 26 bp, Homo sapiens
ctcaggggtggtgggtgcgggcttct

SEQ ID NO: 105743 - DNA, 26 bp, Homo sapiens
tcaggggtggtgggtgcgggcttctc

SEQ ID NO: 105744 - DNA, 26 bp, Homo sapiens
caggggtggtgggtgcgggcttctca

SEQ ID NO: 105745 - DNA, 26 bp, Homo sapiens
aggggtggtgggtgcgggcttctcag

SEQ ID NO: 105746 - DNA, 26 bp, Homo sapiens
ggggtggtgggtgcgggcttctcagg

SEQ ID NO: 105747 - DNA, 26 bp, Homo sapiens
gggtggtgggtgcgggcttctcaggg

SEQ ID NO: 105748 - DNA, 26 bp, Homo sapiens
ggtggtgggtgcgggcttctcagggg

SEQ ID NO: 105749 - DNA, 26 bp, Homo sapiens
gtggtgggtgcgggcttctcaggggt

SEQ ID NO: 105750 - DNA, 26 bp, Homo sapiens
tggtgggtgcgggcttctcaggggtg

SEQ ID NO: 105751 - DNA, 26 bp, Homo sapiens
ggtgggtgcgggcttctcaggggtgg

SEQ ID NO: 105752 - DNA, 26 bp, Homo sapiens
gtgggtgcgggcttctcaggggtggt

SEQ ID NO: 105753 - DNA, 26 bp, Homo sapiens
tgggtgcgggcttctcaggggtggtg

SEQ ID NO: 105754 - DNA, 26 bp, Homo sapiens
gggtgcgggcttctcaggggtggtgg

SEQ ID NO: 105755 - DNA, 26 bp, Homo sapiens
ggtgcgggcttctcaggggtggtggg

SEQ ID NO: 105756 - DNA, 26 bp, Homo sapiens
gtgcgggcttctcaggggtggtgggt

SEQ ID NO: 105757 - DNA, 26 bp, Homo sapiens
tgcgggcttctcaggggtggtgggtg

SEQ ID NO: 105758 - DNA, 26 bp, Homo sapiens
gcgggcttctcaggggtggtgggtgc

SEQ ID NO: 105759 - DNA, 26 bp, Homo sapiens
cgggcttctcaggggtggtgggtgcg

SEQ ID NO: 105760 - DNA, 26 bp, Homo sapiens
gggcttctcaggggtggtgggtgcga

SEQ ID NO: 105761 - DNA, 26 bp, Homo sapiens
ggcttctcaggggtggtgggtgcgag

SEQ ID NO: 105762 - DNA, 26 bp, Homo sapiens
gcttctcaggggtggtgggtgcgagc

SEQ ID NO: 105763 - DNA, 26 bp, Homo sapiens
cttctcaggggtggtgggtgcgagct

SEQ ID NO: 105764 - DNA, 26 bp, Homo sapiens
ttctcaggggtggtgggtgcgagctt

SEQ ID NO: 105765 - DNA, 26 bp, Homo sapiens
tctcaggggtggtgggtgcgagcttc

SEQ ID NO: 105766 - DNA, 26 bp, Homo sapiens
ctcaggggtggtgggtgcgagcttct

SEQ ID NO: 105767 - DNA, 26 bp, Homo sapiens
tcaggggtggtgggtgcgagcttctc

SEQ ID NO: 105768 - DNA, 26 bp, Homo sapiens
caggggtggtgggtgcgagcttctcg

SEQ ID NO: 105769 - DNA, 26 bp, Homo sapiens
aggggtggtgggtgcgagcttctcgg

SEQ ID NO: 105770 - DNA, 26 bp, Homo sapiens
ggggtggtgggtgcgagcttctcggg

SEQ ID NO: 105771 - DNA, 26 bp, Homo sapiens
gggtggtgggtgcgagcttctcgggg

SEQ ID NO: 105772 - DNA, 26 bp, Homo sapiens
ggtggtgggtgcgagcttctcggggg

SEQ ID NO: 105773 - DNA, 26 bp, Homo sapiens
gtggtgggtgcgagcttctcgggggt

SEQ ID NO: 105774 - DNA, 26 bp, Homo sapiens
tggtgggtgcgagcttctcgggggtg

SEQ ID NO: 105775 - DNA, 26 bp, Homo sapiens
ggtgggtgcgagcttctcgggggtgg

SEQ ID NO: 105776 - DNA, 26 bp, Homo sapiens
gtgggtgcgagcttctcgggggtggt

SEQ ID NO: 105777 - DNA, 26 bp, Homo sapiens
tgggtgcgagcttctcgggggtggtg

SEQ ID NO: 105778 - DNA, 26 bp, Homo sapiens
gggtgcgagcttctcgggggtggtgg

SEQ ID NO: 105779 - DNA, 26 bp, Homo sapiens
ggtgcgagcttctcgggggtggtggg

SEQ ID NO: 105780 - DNA, 26 bp, Homo sapiens
gtgcgagcttctcgggggtggtgggc

SEQ ID NO: 105781 - DNA, 26 bp, Homo sapiens
tgcgagcttctcgggggtggtgggcg

SEQ ID NO: 105782 - DNA, 26 bp, Homo sapiens
gcgagcttctcgggggtggtgggcgt

SEQ ID NO: 105783 - DNA, 26 bp, Homo sapiens
cgagcttctcgggggtggtgggcgtg

SEQ ID NO: 105784 - DNA, 26 bp, Homo sapiens
gagcttctcgggggtggtgggcgtga

SEQ ID NO: 105785 - DNA, 26 bp, Homo sapiens
agcttctcgggggtggtgggcgtgag

SEQ ID NO: 105786 - DNA, 26 bp, Homo sapiens
gcttctcgggggtggtgggcgtgagc

SEQ ID NO: 105787 - DNA, 26 bp, Homo sapiens
cttctcgggggtggtgggcgtgagct

SEQ ID NO: 105788 - DNA, 26 bp, Homo sapiens
ttctcgggggtggtgggcgtgagctt

SEQ ID NO: 105789 - DNA, 26 bp, Homo sapiens
tctcgggggtggtgggcgtgagcttc

SEQ ID NO: 105790 - DNA, 26 bp, Homo sapiens
ctcgggggtggtgggcgtgagcttct

SEQ ID NO: 105791 - DNA, 26 bp, Homo sapiens
tcgggggtggtgggcgtgagcttctt

SEQ ID NO: 105792 - DNA, 26 bp, Homo sapiens
cgggggtggtgggcgtgagcttcttg

SEQ ID NO: 105793 - DNA, 26 bp, Homo sapiens
gggggtggtgggcgtgagcttcttgg

SEQ ID NO: 105794 - DNA, 26 bp, Homo sapiens
ggggtggtgggcgtgagcttcttggg

SEQ ID NO: 105795 - DNA, 26 bp, Homo sapiens
gggtggtgggcgtgagcttcttgggg

SEQ ID NO: 105796 - DNA, 26 bp, Homo sapiens
ggtggtgggcgtgagcttcttggggg

SEQ ID NO: 105797 - DNA, 26 bp, Homo sapiens
gtggtgggcgtgagcttcttgggggt

SEQ ID NO: 105798 - DNA, 26 bp, Homo sapiens
tggtgggcgtgagcttcttgggggtg

SEQ ID NO: 105799 - DNA, 26 bp, Homo sapiens
ggtgggcgtgagcttcttgggggtgg

SEQ ID NO: 105800 - DNA, 26 bp, Homo sapiens
gtgggcgtgagcttcttgggggtggt

SEQ ID NO: 105801 - DNA, 26 bp, Homo sapiens
tgggcgtgagcttcttgggggtggtg

SEQ ID NO: 105802 - DNA, 26 bp, Homo sapiens
gggcgtgagcttcttgggggtggtgg

SEQ ID NO: 105803 - DNA, 26 bp, Homo sapiens
ggcgtgagcttcttgggggtggtggg

SEQ ID NO: 105804 - DNA, 26 bp, Homo sapiens
gcgtgagcttcttgggggtggtgggt

SEQ ID NO: 105805 - DNA, 26 bp, Homo sapiens
cgtgagcttcttgggggtggtgggtg

SEQ ID NO: 105806 - DNA, 26 bp, Homo sapiens
gtgagcttcttgggggtggtgggtgc

SEQ ID NO: 105807 - DNA, 26 bp, Homo sapiens
tgagcttcttgggggtggtgggtgca

SEQ ID NO: 105808 - DNA, 26 bp, Homo sapiens
gagcttcttgggggtggtgggtgcag

SEQ ID NO: 105809 - DNA, 26 bp, Homo sapiens
agcttcttgggggtggtgggtgcagt

SEQ ID NO: 105810 - DNA, 26 bp, Homo sapiens
gcttcttgggggtggtgggtgcagtc

SEQ ID NO: 105811 - DNA, 26 bp, Homo sapiens
cttcttgggggtggtgggtgcagtct

SEQ ID NO: 105812 - DNA, 26 bp, Homo sapiens
ttcttgggggtggtgggtgcagtctc

SEQ ID NO: 105813 - DNA, 26 bp, Homo sapiens
tcttgggggtggtgggtgcagtctcc

SEQ ID NO: 105814 - DNA, 26 bp, Homo sapiens
cttgggggtggtgggtgcagtctcct

SEQ ID NO: 105815 - DNA, 26 bp, Homo sapiens
ttgggggtggtgggtgcagtctcctt

SEQ ID NO: 105816 - DNA, 26 bp, Homo sapiens
tgggggtggtgggtgcagtctccttg

SEQ ID NO: 105817 - DNA, 26 bp, Homo sapiens
gggggtggtgggtgcagtctccttgg

SEQ ID NO: 105818 - DNA, 26 bp, Homo sapiens
ggggtggtgggtgcagtctccttggg

SEQ ID NO: 105819 - DNA, 26 bp, Homo sapiens
gggtggtgggtgcagtctccttgggg

SEQ ID NO: 105820 - DNA, 26 bp, Homo sapiens
ggtggtgggtgcagtctccttggggg

SEQ ID NO: 105821 - DNA, 26 bp, Homo sapiens
gtggtgggtgcagtctccttgggggt

SEQ ID NO: 105822 - DNA, 26 bp, Homo sapiens
tggtgggtgcagtctccttgggggta

SEQ ID NO: 105823 - DNA, 26 bp, Homo sapiens
ggtgggtgcagtctccttgggggtag

SEQ ID NO: 105824 - DNA, 26 bp, Homo sapiens
gtgggtgcagtctccttgggggtagt

SEQ ID NO: 105825 - DNA, 26 bp, Homo sapiens
tgggtgcagtctccttgggggtagtt

SEQ ID NO: 105826 - DNA, 26 bp, Homo sapiens
gggtgcagtctccttgggggtagttg

SEQ ID NO: 105827 - DNA, 26 bp, Homo sapiens
ggtgcagtctccttgggggtagttgg

SEQ ID NO: 105828 - DNA, 26 bp, Homo sapiens
gtgcagtctccttgggggtagttggg

SEQ ID NO: 105829 - DNA, 26 bp, Homo sapiens
tgcagtctccttgggggtagttgggg

SEQ ID NO: 105830 - DNA, 26 bp, Homo sapiens
gcagtctccttgggggtagttggggc

SEQ ID NO: 105831 - DNA, 26 bp, Homo sapiens
cagtctccttgggggtagttggggca

SEQ ID NO: 105832 - DNA, 26 bp, Homo sapiens
agtctccttgggggtagttggggcag

SEQ ID NO: 105833 - DNA, 26 bp, Homo sapiens
gtctccttgggggtagttggggcagg

SEQ ID NO: 105834 - DNA, 26 bp, Homo sapiens
tctccttgggggtagttggggcaggc

SEQ ID NO: 105835 - DNA, 26 bp, Homo sapiens
ctccttgggggtagttggggcaggct

SEQ ID NO: 105836 - DNA, 26 bp, Homo sapiens
tccttgggggtagttggggcaggctc

SEQ ID NO: 105837 - DNA, 26 bp, Homo sapiens
ccttgggggtagttggggcaggctct

SEQ ID NO: 105838 - DNA, 26 bp, Homo sapiens
cttgggggtagttggggcaggctctt

SEQ ID NO: 105839 - DNA, 26 bp, Homo sapiens
ttgggggtagttggggcaggctcttt

SEQ ID NO: 105840 - DNA, 26 bp, Homo sapiens
tgggggtagttggggcaggctctttg

SEQ ID NO: 105841 - DNA, 26 bp, Homo sapiens
gggggtagttggggcaggctctttgg

SEQ ID NO: 105842 - DNA, 26 bp, Homo sapiens
ggggtagttggggcaggctctttggg

SEQ ID NO: 105843 - DNA, 26 bp, Homo sapiens
gggtagttggggcaggctctttggga

SEQ ID NO: 105844 - DNA, 26 bp, Homo sapiens
ggtagttggggcaggctctttgggag

SEQ ID NO: 105845 - DNA, 26 bp, Homo sapiens
gtagttggggcaggctctttgggagt

SEQ ID NO: 105846 - DNA, 26 bp, Homo sapiens
tagttggggcaggctctttgggagtg

SEQ ID NO: 105847 - DNA, 26 bp, Homo sapiens
agttggggcaggctctttgggagtgg

SEQ ID NO: 105848 - DNA, 26 bp, Homo sapiens
gttggggcaggctctttgggagtggt

SEQ ID NO: 105849 - DNA, 26 bp, Homo sapiens
ttggggcaggctctttgggagtggtg

SEQ ID NO: 105850 - DNA, 26 bp, Homo sapiens
tggggcaggctctttgggagtggtgg

SEQ ID NO: 105851 - DNA, 26 bp, Homo sapiens
ggggcaggctctttgggagtggtggg

SEQ ID NO: 105852 - DNA, 26 bp, Homo sapiens
gggcaggctctttgggagtggtgggt

SEQ ID NO: 105853 - DNA, 26 bp, Homo sapiens
ggcaggctctttgggagtggtgggtg

SEQ ID NO: 105854 - DNA, 26 bp, Homo sapiens
gcaggctctttgggagtggtgggtgc

SEQ ID NO: 105855 - DNA, 26 bp, Homo sapiens
caggctctttgggagtggtgggtgca

SEQ ID NO: 105856 - DNA, 26 bp, Homo sapiens
aggctctttgggagtggtgggtgcag

SEQ ID NO: 105857 - DNA, 26 bp, Homo sapiens
ggctctttgggagtggtgggtgcagg

SEQ ID NO: 105858 - DNA, 26 bp, Homo sapiens
gctctttgggagtggtgggtgcaggc

SEQ ID NO: 105859 - DNA, 26 bp, Homo sapiens
ctctttgggagtggtgggtgcaggct

SEQ ID NO: 105860 - DNA, 26 bp, Homo sapiens
tctttgggagtggtgggtgcaggctt

SEQ ID NO: 105861 - DNA, 26 bp, Homo sapiens
ctttgggagtggtgggtgcaggcttc

SEQ ID NO: 105862 - DNA, 26 bp, Homo sapiens
tttgggagtggtgggtgcaggcttct

SEQ ID NO: 105863 - DNA, 26 bp, Homo sapiens
ttgggagtggtgggtgcaggcttctt

SEQ ID NO: 105864 - DNA, 26 bp, Homo sapiens
tgggagtggtgggtgcaggcttcttg

SEQ ID NO: 105865 - DNA, 26 bp, Homo sapiens
gggagtggtgggtgcaggcttcttgg

SEQ ID NO: 105866 - DNA, 26 bp, Homo sapiens
ggagtggtgggtgcaggcttcttggt

SEQ ID NO: 105867 - DNA, 26 bp, Homo sapiens
gagtggtgggtgcaggcttcttggtg

SEQ ID NO: 105868 - DNA, 26 bp, Homo sapiens
agtggtgggtgcaggcttcttggtgg

SEQ ID NO: 105869 - DNA, 26 bp, Homo sapiens
gtggtgggtgcaggcttcttggtggt

SEQ ID NO: 105870 - DNA, 26 bp, Homo sapiens
tggtgggtgcaggcttcttggtggtg

SEQ ID NO: 105871 - DNA, 26 bp, Homo sapiens
ggtgggtgcaggcttcttggtggtgg

SEQ ID NO: 105872 - DNA, 26 bp, Homo sapiens
gtgggtgcaggcttcttggtggtggt

SEQ ID NO: 105873 - DNA, 26 bp, Homo sapiens
tgggtgcaggcttcttggtggtggtg

SEQ ID NO: 105874 - DNA, 26 bp, Homo sapiens
gggtgcaggcttcttggtggtggtgg

SEQ ID NO: 105875 - DNA, 26 bp, Homo sapiens
ggtgcaggcttcttggtggtggtggg

SEQ ID NO: 105876 - DNA, 26 bp, Homo sapiens
gtgcaggcttcttggtggtggtgggt

SEQ ID NO: 105877 - DNA, 26 bp, Homo sapiens
tgcaggcttcttggtggtggtgggtg

SEQ ID NO: 105878 - DNA, 26 bp, Homo sapiens
gcaggcttcttggtggtggtgggtgc

SEQ ID NO: 105879 - DNA, 26 bp, Homo sapiens
caggcttcttggtggtggtgggtgca

SEQ ID NO: 105880 - DNA, 26 bp, Homo sapiens
aggcttcttggtggtggtgggtgcag

SEQ ID NO: 105881 - DNA, 26 bp, Homo sapiens
ggcttcttggtggtggtgggtgcagg

SEQ ID NO: 105882 - DNA, 26 bp, Homo sapiens
gcttcttggtggtggtgggtgcaggt

SEQ ID NO: 105883 - DNA, 26 bp, Homo sapiens
cttcttggtggtggtgggtgcaggtt

SEQ ID NO: 105884 - DNA, 26 bp, Homo sapiens
ttcttggtggtggtgggtgcaggttc

SEQ ID NO: 105885 - DNA, 26 bp, Homo sapiens
tcttggtggtggtgggtgcaggttcc

SEQ ID NO: 105886 - DNA, 26 bp, Homo sapiens
cttggtggtggtgggtgcaggttcct

SEQ ID NO: 105887 - DNA, 26 bp, Homo sapiens
ttggtggtggtgggtgcaggttcctt

SEQ ID NO: 105888 - DNA, 26 bp, Homo sapiens
tggtggtggtgggtgcaggttccttg

SEQ ID NO: 105889 - DNA, 26 bp, Homo sapiens
ggtggtggtgggtgcaggttccttgg

SEQ ID NO: 105890 - DNA, 26 bp, Homo sapiens
gtggtggtgggtgcaggttccttggg

SEQ ID NO: 105891 - DNA, 26 bp, Homo sapiens
tggtggtgggtgcaggttccttggga

SEQ ID NO: 105892 - DNA, 26 bp, Homo sapiens
ggtggtgggtgcaggttccttgggag

SEQ ID NO: 105893 - DNA, 26 bp, Homo sapiens
gtggtgggtgcaggttccttgggagt

SEQ ID NO: 105894 - DNA, 26 bp, Homo sapiens
tggtgggtgcaggttccttgggagtg

SEQ ID NO: 105895 - DNA, 26 bp, Homo sapiens
ggtgggtgcaggttccttgggagtgg

SEQ ID NO: 105896 - DNA, 26 bp, Homo sapiens
gtgggtgcaggttccttgggagtggt

SEQ ID NO: 105897 - DNA, 26 bp, Homo sapiens
tgggtgcaggttccttgggagtggtg

SEQ ID NO: 105898 - DNA, 26 bp, Homo sapiens
gggtgcaggttccttgggagtggtgg

SEQ ID NO: 105899 - DNA, 26 bp, Homo sapiens
ggtgcaggttccttgggagtggtggg

SEQ ID NO: 105900 - DNA, 26 bp, Homo sapiens
gtgcaggttccttgggagtggtgggt

SEQ ID NO: 105901 - DNA, 26 bp, Homo sapiens
tgcaggttccttgggagtggtgggtg

SEQ ID NO: 105902 - DNA, 26 bp, Homo sapiens
gcaggttccttgggagtggtgggtgc

SEQ ID NO: 105903 - DNA, 26 bp, Homo sapiens
caggttccttgggagtggtgggtgca

SEQ ID NO: 105904 - DNA, 26 bp, Homo sapiens
aggttccttgggagtggtgggtgcag

SEQ ID NO: 105905 - DNA, 26 bp, Homo sapiens
ggttccttgggagtggtgggtgcagg

SEQ ID NO: 105906 - DNA, 26 bp, Homo sapiens
gttccttgggagtggtgggtgcaggc

SEQ ID NO: 105907 - DNA, 26 bp, Homo sapiens
ttccttgggagtggtgggtgcaggct

SEQ ID NO: 105908 - DNA, 26 bp, Homo sapiens
tccttgggagtggtgggtgcaggctc

SEQ ID NO: 105909 - DNA, 26 bp, Homo sapiens
ccttgggagtggtgggtgcaggctcc

SEQ ID NO: 105910 - DNA, 26 bp, Homo sapiens
cttgggagtggtgggtgcaggctcct

SEQ ID NO: 105911 - DNA, 26 bp, Homo sapiens
ttgggagtggtgggtgcaggctcctt

SEQ ID NO: 105912 - DNA, 26 bp, Homo sapiens
tgggagtggtgggtgcaggctccttg

SEQ ID NO: 105913 - DNA, 26 bp, Homo sapiens
gggagtggtgggtgcaggctccttgg

SEQ ID NO: 105914 - DNA, 26 bp, Homo sapiens
ggagtggtgggtgcaggctccttggg

SEQ ID NO: 105915 - DNA, 26 bp, Homo sapiens
gagtggtgggtgcaggctccttgggg

SEQ ID NO: 105916 - DNA, 26 bp, Homo sapiens
agtggtgggtgcaggctccttggggg

SEQ ID NO: 105917 - DNA, 26 bp, Homo sapiens
gtggtgggtgcaggctccttgggggt

SEQ ID NO: 105918 - DNA, 26 bp, Homo sapiens
tggtgggtgcaggctccttgggggta

SEQ ID NO: 105919 - DNA, 26 bp, Homo sapiens
ggtgggtgcaggctccttgggggtag

SEQ ID NO: 105920 - DNA, 26 bp, Homo sapiens
gtgggtgcaggctccttgggggtagt

SEQ ID NO: 105921 - DNA, 26 bp, Homo sapiens
tgggtgcaggctccttgggggtagtt

SEQ ID NO: 105922 - DNA, 26 bp, Homo sapiens
gggtgcaggctccttgggggtagttg

SEQ ID NO: 105923 - DNA, 26 bp, Homo sapiens
ggtgcaggctccttgggggtagttgg

SEQ ID NO: 105924 - DNA, 26 bp, Homo sapiens
gtgcaggctccttgggggtagttggg

SEQ ID NO: 105925 - DNA, 26 bp, Homo sapiens
tgcaggctccttgggggtagttgggg

SEQ ID NO: 105926 - DNA, 26 bp, Homo sapiens
gcaggctccttgggggtagttggggc

SEQ ID NO: 105927 - DNA, 26 bp, Homo sapiens
caggctccttgggggtagttggggca

SEQ ID NO: 105928 - DNA, 26 bp, Homo sapiens
aggctccttgggggtagttggggcag

SEQ ID NO: 105929 - DNA, 26 bp, Homo sapiens
ggctccttgggggtagttggggcagg

SEQ ID NO: 105930 - DNA, 26 bp, Homo sapiens
gctccttgggggtagttggggcaggc

SEQ ID NO: 105931 - DNA, 26 bp, Homo sapiens
ctccttgggggtagttggggcaggct

SEQ ID NO: 105932 - DNA, 26 bp, Homo sapiens
tccttgggggtagttggggcaggctt

SEQ ID NO: 105933 - DNA, 26 bp, Homo sapiens
ccttgggggtagttggggcaggcttc

SEQ ID NO: 105934 - DNA, 26 bp, Homo sapiens
cttgggggtagttggggcaggcttct

SEQ ID NO: 105935 - DNA, 26 bp, Homo sapiens
ttgggggtagttggggcaggcttctt

SEQ ID NO: 105936 - DNA, 26 bp, Homo sapiens
tgggggtagttggggcaggcttcttg

SEQ ID NO: 105937 - DNA, 26 bp, Homo sapiens
gggggtagttggggcaggcttcttgg

SEQ ID NO: 105938 - DNA, 26 bp, Homo sapiens
ggggtagttggggcaggcttcttggg

SEQ ID NO: 105939 - DNA, 26 bp, Homo sapiens
gggtagttggggcaggcttcttgggg

SEQ ID NO: 105940 - DNA, 26 bp, Homo sapiens
ggtagttggggcaggcttcttggggg

SEQ ID NO: 105941 - DNA, 26 bp, Homo sapiens
gtagttggggcaggcttcttgggggt

SEQ ID NO: 105942 - DNA, 26 bp, Homo sapiens
tagttggggcaggcttcttgggggtg

SEQ ID NO: 105943 - DNA, 26 bp, Homo sapiens
agttggggcaggcttcttgggggtgg

SEQ ID NO: 105944 - DNA, 26 bp, Homo sapiens
gttggggcaggcttcttgggggtggt

SEQ ID NO: 105945 - DNA, 26 bp, Homo sapiens
ttggggcaggcttcttgggggtggtg

SEQ ID NO: 105946 - DNA, 26 bp, Homo sapiens
tggggcaggcttcttgggggtggtgg

SEQ ID NO: 105947 - DNA, 26 bp, Homo sapiens
ggggcaggcttcttgggggtggtggg

SEQ ID NO: 105948 - DNA, 26 bp, Homo sapiens
gggcaggcttcttgggggtggtgggt

SEQ ID NO: 105949 - DNA, 26 bp, Homo sapiens
ggcaggcttcttgggggtggtgggtg

SEQ ID NO: 105950 - DNA, 26 bp, Homo sapiens
gcaggcttcttgggggtggtgggtgc

SEQ ID NO: 105951 - DNA, 26 bp, Homo sapiens
caggcttcttgggggtggtgggtgca

SEQ ID NO: 105952 - DNA, 26 bp, Homo sapiens
aggcttcttgggggtggtgggtgcag

SEQ ID NO: 105953 - DNA, 26 bp, Homo sapiens
ggcttcttgggggtggtgggtgcagg

SEQ ID NO: 105954 - DNA, 26 bp, Homo sapiens
gcttcttgggggtggtgggtgcaggc

SEQ ID NO: 105955 - DNA, 26 bp, Homo sapiens
cttcttgggggtggtgggtgcaggct

SEQ ID NO: 105956 - DNA, 26 bp, Homo sapiens
ttcttgggggtggtgggtgcaggctc

SEQ ID NO: 105957 - DNA, 26 bp, Homo sapiens
tcttgggggtggtgggtgcaggctcc

SEQ ID NO: 105958 - DNA, 26 bp, Homo sapiens
cttgggggtggtgggtgcaggctcct

SEQ ID NO: 105959 - DNA, 26 bp, Homo sapiens
ttgggggtggtgggtgcaggctcctt

SEQ ID NO: 105960 - DNA, 26 bp, Homo sapiens
tgggggtggtgggtgcaggctccttg

SEQ ID NO: 105961 - DNA, 26 bp, Homo sapiens
gggggtggtgggtgcaggctccttgg

SEQ ID NO: 105962 - DNA, 26 bp, Homo sapiens
ggggtggtgggtgcaggctccttggg

SEQ ID NO: 105963 - DNA, 26 bp, Homo sapiens
gggtggtgggtgcaggctccttggga

SEQ ID NO: 105964 - DNA, 26 bp, Homo sapiens
ggtggtgggtgcaggctccttgggag

SEQ ID NO: 105965 - DNA, 26 bp, Homo sapiens
gtggtgggtgcaggctccttgggagt

SEQ ID NO: 105966 - DNA, 26 bp, Homo sapiens
tggtgggtgcaggctccttgggagtg

SEQ ID NO: 105967 - DNA, 26 bp, Homo sapiens
ggtgggtgcaggctccttgggagtgg

SEQ ID NO: 105968 - DNA, 26 bp, Homo sapiens
gtgggtgcaggctccttgggagtggt

SEQ ID NO: 105969 - DNA, 26 bp, Homo sapiens
tgggtgcaggctccttgggagtggtg

SEQ ID NO: 105970 - DNA, 26 bp, Homo sapiens
gggtgcaggctccttgggagtggtgg

SEQ ID NO: 105971 - DNA, 26 bp, Homo sapiens
ggtgcaggctccttgggagtggtggg

SEQ ID NO: 105972 - DNA, 26 bp, Homo sapiens
gtgcaggctccttgggagtggtgggt

SEQ ID NO: 105973 - DNA, 26 bp, Homo sapiens
tgcaggctccttgggagtggtgggtg

SEQ ID NO: 105974 - DNA, 26 bp, Homo sapiens
gcaggctccttgggagtggtgggtgc

SEQ ID NO: 105975 - DNA, 26 bp, Homo sapiens
caggctccttgggagtggtgggtgca

SEQ ID NO: 105976 - DNA, 26 bp, Homo sapiens
aggctccttgggagtggtgggtgcag

SEQ ID NO: 105977 - DNA, 26 bp, Homo sapiens
ggctccttgggagtggtgggtgcagg

SEQ ID NO: 105978 - DNA, 26 bp, Homo sapiens
gctccttgggagtggtgggtgcaggc

SEQ ID NO: 105979 - DNA, 26 bp, Homo sapiens
ctccttgggagtggtgggtgcaggct

SEQ ID NO: 105980 - DNA, 26 bp, Homo sapiens
tccttgggagtggtgggtgcaggctc

SEQ ID NO: 105981 - DNA, 26 bp, Homo sapiens
ccttgggagtggtgggtgcaggctcc

SEQ ID NO: 105982 - DNA, 26 bp, Homo sapiens
cttgggagtggtgggtgcaggctcct

SEQ ID NO: 105983 - DNA, 26 bp, Homo sapiens
ttgggagtggtgggtgcaggctcctt

SEQ ID NO: 105984 - DNA, 26 bp, Homo sapiens
tgggagtggtgggtgcaggctccttg

SEQ ID NO: 105985 - DNA, 26 bp, Homo sapiens
gggagtggtgggtgcaggctccttgg

SEQ ID NO: 105986 - DNA, 26 bp, Homo sapiens
ggagtggtgggtgcaggctccttggt

SEQ ID NO: 105987 - DNA, 26 bp, Homo sapiens
gagtggtgggtgcaggctccttggtg

SEQ ID NO: 105988 - DNA, 26 bp, Homo sapiens
agtggtgggtgcaggctccttggtgg

SEQ ID NO: 105989 - DNA, 26 bp, Homo sapiens
gtggtgggtgcaggctccttggtggt

SEQ ID NO: 105990 - DNA, 26 bp, Homo sapiens
tggtgggtgcaggctccttggtggtg

SEQ ID NO: 105991 - DNA, 26 bp, Homo sapiens
ggtgggtgcaggctccttggtggtgg

SEQ ID NO: 105992 - DNA, 26 bp, Homo sapiens
gtgggtgcaggctccttggtggtggt

SEQ ID NO: 105993 - DNA, 26 bp, Homo sapiens
tgggtgcaggctccttggtggtggtg

SEQ ID NO: 105994 - DNA, 26 bp, Homo sapiens
gggtgcaggctccttggtggtggtgg

SEQ ID NO: 105995 - DNA, 26 bp, Homo sapiens
ggtgcaggctccttggtggtggtggg

SEQ ID NO: 105996 - DNA, 26 bp, Homo sapiens
gtgcaggctccttggtggtggtgggt

SEQ ID NO: 105997 - DNA, 26 bp, Homo sapiens
tgcaggctccttggtggtggtgggtg

SEQ ID NO: 105998 - DNA, 26 bp, Homo sapiens
gcaggctccttggtggtggtgggtga

SEQ ID NO: 105999 - DNA, 26 bp, Homo sapiens
caggctccttggtggtggtgggtgaa

SEQ ID NO: 106000 - DNA, 26 bp, Homo sapiens
aggctccttggtggtggtgggtgaag

SEQ ID NO: 106001 - DNA, 26 bp, Homo sapiens
ggctccttggtggtggtgggtgaagg

SEQ ID NO: 106002 - DNA, 26 bp, Homo sapiens
gctccttggtggtggtgggtgaaggc

SEQ ID NO: 106003 - DNA, 26 bp, Homo sapiens
ctccttggtggtggtgggtgaaggct

SEQ ID NO: 106004 - DNA, 26 bp, Homo sapiens
tccttggtggtggtgggtgaaggctc

SEQ ID NO: 106005 - DNA, 26 bp, Homo sapiens
ccttggtggtggtgggtgaaggctcc

SEQ ID NO: 106006 - DNA, 26 bp, Homo sapiens
cttggtggtggtgggtgaaggctcct

SEQ ID NO: 106007 - DNA, 26 bp, Homo sapiens
ttggtggtggtgggtgaaggctcctt

SEQ ID NO: 106008 - DNA, 26 bp, Homo sapiens
tggtggtggtgggtgaaggctccttg

SEQ ID NO: 106009 - DNA, 26 bp, Homo sapiens
ggtggtggtgggtgaaggctccttgg

SEQ ID NO: 106010 - DNA, 26 bp, Homo sapiens
gtggtggtgggtgaaggctccttggg

SEQ ID NO: 106011 - DNA, 26 bp, Homo sapiens
tggtggtgggtgaaggctccttggga

SEQ ID NO: 106012 - DNA, 26 bp, Homo sapiens
ggtggtgggtgaaggctccttgggag

SEQ ID NO: 106013 - DNA, 26 bp, Homo sapiens
gtggtgggtgaaggctccttgggagt

SEQ ID NO: 106014 - DNA, 26 bp, Homo sapiens
tggtgggtgaaggctccttgggagtg

SEQ ID NO: 106015 - DNA, 26 bp, Homo sapiens
ggtgggtgaaggctccttgggagtgg

SEQ ID NO: 106016 - DNA, 26 bp, Homo sapiens
gtgggtgaaggctccttgggagtggt

SEQ ID NO: 106017 - DNA, 26 bp, Homo sapiens
tgggtgaaggctccttgggagtggtg

SEQ ID NO: 106018 - DNA, 26 bp, Homo sapiens
gggtgaaggctccttgggagtggtgg

SEQ ID NO: 106019 - DNA, 26 bp, Homo sapiens
ggtgaaggctccttgggagtggtggg

SEQ ID NO: 106020 - DNA, 26 bp, Homo sapiens
gtgaaggctccttgggagtggtgggt

SEQ ID NO: 106021 - DNA, 26 bp, Homo sapiens
tgaaggctccttgggagtggtgggtg

SEQ ID NO: 106022 - DNA, 26 bp, Homo sapiens
gaaggctccttgggagtggtgggtgc

SEQ ID NO: 106023 - DNA, 26 bp, Homo sapiens
aaggctccttgggagtggtgggtgca

SEQ ID NO: 106024 - DNA, 26 bp, Homo sapiens
aggctccttgggagtggtgggtgcag

SEQ ID NO: 106025 - DNA, 26 bp, Homo sapiens
ggctccttgggagtggtgggtgcaga

SEQ ID NO: 106026 - DNA, 26 bp, Homo sapiens
gctccttgggagtggtgggtgcagac

SEQ ID NO: 106027 - DNA, 26 bp, Homo sapiens
ctccttgggagtggtgggtgcagact

SEQ ID NO: 106028 - DNA, 26 bp, Homo sapiens
tccttgggagtggtgggtgcagactt

SEQ ID NO: 106029 - DNA, 26 bp, Homo sapiens
ccttgggagtggtgggtgcagacttg

SEQ ID NO: 106030 - DNA, 26 bp, Homo sapiens
cttgggagtggtgggtgcagacttgg

SEQ ID NO: 106031 - DNA, 26 bp, Homo sapiens
ttgggagtggtgggtgcagacttggt

SEQ ID NO: 106032 - DNA, 26 bp, Homo sapiens
tgggagtggtgggtgcagacttggta

SEQ ID NO: 106033 - DNA, 26 bp, Homo sapiens
gggagtggtgggtgcagacttggtag

SEQ ID NO: 106034 - DNA, 26 bp, Homo sapiens
ggagtggtgggtgcagacttggtagt

SEQ ID NO: 106035 - DNA, 26 bp, Homo sapiens
gagtggtgggtgcagacttggtagtg

SEQ ID NO: 106036 - DNA, 26 bp, Homo sapiens
agtggtgggtgcagacttggtagtgg

SEQ ID NO: 106037 - DNA, 26 bp, Homo sapiens
gtggtgggtgcagacttggtagtggt

SEQ ID NO: 106038 - DNA, 26 bp, Homo sapiens
tggtgggtgcagacttggtagtggtg

SEQ ID NO: 106039 - DNA, 26 bp, Homo sapiens
ggtgggtgcagacttggtagtggtgg

SEQ ID NO: 106040 - DNA, 26 bp, Homo sapiens
gtgggtgcagacttggtagtggtggg

SEQ ID NO: 106041 - DNA, 26 bp, Homo sapiens
tgggtgcagacttggtagtggtgggt

SEQ ID NO: 106042 - DNA, 26 bp, Homo sapiens
gggtgcagacttggtagtggtgggtg

SEQ ID NO: 106043 - DNA, 26 bp, Homo sapiens
ggtgcagacttggtagtggtgggtgc

SEQ ID NO: 106044 - DNA, 26 bp, Homo sapiens
gtgcagacttggtagtggtgggtgca

SEQ ID NO: 106045 - DNA, 26 bp, Homo sapiens
tgcagacttggtagtggtgggtgcag

SEQ ID NO: 106046 - DNA, 26 bp, Homo sapiens
gcagacttggtagtggtgggtgcagg

SEQ ID NO: 106047 - DNA, 26 bp, Homo sapiens
cagacttggtagtggtgggtgcaggc

SEQ ID NO: 106048 - DNA, 26 bp, Homo sapiens
agacttggtagtggtgggtgcaggct

SEQ ID NO: 106049 - DNA, 26 bp, Homo sapiens
gacttggtagtggtgggtgcaggctc

SEQ ID NO: 106050 - DNA, 26 bp, Homo sapiens
acttggtagtggtgggtgcaggctcc

SEQ ID NO: 106051 - DNA, 26 bp, Homo sapiens
cttggtagtggtgggtgcaggctcct

SEQ ID NO: 106052 - DNA, 26 bp, Homo sapiens
ttggtagtggtgggtgcaggctcctt

SEQ ID NO: 106053 - DNA, 26 bp, Homo sapiens
tggtagtggtgggtgcaggctccttg

SEQ ID NO: 106054 - DNA, 26 bp, Homo sapiens
ggtagtggtgggtgcaggctccttgg

SEQ ID NO: 106055 - DNA, 26 bp, Homo sapiens
gtagtggtgggtgcaggctccttggt

SEQ ID NO: 106056 - DNA, 26 bp, Homo sapiens
tagtggtgggtgcaggctccttggta

SEQ ID NO: 106057 - DNA, 26 bp, Homo sapiens
agtggtgggtgcaggctccttggtag

SEQ ID NO: 106058 - DNA, 26 bp, Homo sapiens
gtggtgggtgcaggctccttggtagt

SEQ ID NO: 106059 - DNA, 26 bp, Homo sapiens
tggtgggtgcaggctccttggtagtg

SEQ ID NO: 106060 - DNA, 26 bp, Homo sapiens
ggtgggtgcaggctccttggtagtgg

SEQ ID NO: 106061 - DNA, 26 bp, Homo sapiens
gtgggtgcaggctccttggtagtggt

SEQ ID NO: 106062 - DNA, 26 bp, Homo sapiens
tgggtgcaggctccttggtagtggtg

SEQ ID NO: 106063 - DNA, 26 bp, Homo sapiens
gggtgcaggctccttggtagtggtgg

SEQ ID NO: 106064 - DNA, 26 bp, Homo sapiens
ggtgcaggctccttggtagtggtggg

SEQ ID NO: 106065 - DNA, 26 bp, Homo sapiens
gtgcaggctccttggtagtggtgggt

SEQ ID NO: 106066 - DNA, 26 bp, Homo sapiens
tgcaggctccttggtagtggtgggtg

SEQ ID NO: 106067 - DNA, 26 bp, Homo sapiens
gcaggctccttggtagtggtgggtgc

SEQ ID NO: 106068 - DNA, 26 bp, Homo sapiens
caggctccttggtagtggtgggtgca

SEQ ID NO: 106069 - DNA, 26 bp, Homo sapiens
aggctccttggtagtggtgggtgcag

SEQ ID NO: 106070 - DNA, 26 bp, Homo sapiens
ggctccttggtagtggtgggtgcaga

SEQ ID NO: 106071 - DNA, 26 bp, Homo sapiens
gctccttggtagtggtgggtgcagac

SEQ ID NO: 106072 - DNA, 26 bp, Homo sapiens
ctccttggtagtggtgggtgcagact

SEQ ID NO: 106073 - DNA, 26 bp, Homo sapiens
tccttggtagtggtgggtgcagactt

SEQ ID NO: 106074 - DNA, 26 bp, Homo sapiens
ccttggtagtggtgggtgcagacttg

SEQ ID NO: 106075 - DNA, 26 bp, Homo sapiens
cttggtagtggtgggtgcagacttgg

SEQ ID NO: 106076 - DNA, 26 bp, Homo sapiens
ttggtagtggtgggtgcagacttggt

SEQ ID NO: 106077 - DNA, 26 bp, Homo sapiens
tggtagtggtgggtgcagacttggtg

SEQ ID NO: 106078 - DNA, 26 bp, Homo sapiens
ggtagtggtgggtgcagacttggtgg

SEQ ID NO: 106079 - DNA, 26 bp, Homo sapiens
gtagtggtgggtgcagacttggtggt

SEQ ID NO: 106080 - DNA, 26 bp, Homo sapiens
tagtggtgggtgcagacttggtggtg

SEQ ID NO: 106081 - DNA, 26 bp, Homo sapiens
agtggtgggtgcagacttggtggtgg

SEQ ID NO: 106082 - DNA, 26 bp, Homo sapiens
gtggtgggtgcagacttggtggtggt

SEQ ID NO: 106083 - DNA, 26 bp, Homo sapiens
tggtgggtgcagacttggtggtggtg

SEQ ID NO: 106084 - DNA, 26 bp, Homo sapiens
ggtgggtgcagacttggtggtggtgg

SEQ ID NO: 106085 - DNA, 26 bp, Homo sapiens
gtgggtgcagacttggtggtggtggg

SEQ ID NO: 106086 - DNA, 26 bp, Homo sapiens
tgggtgcagacttggtggtggtgggt

SEQ ID NO: 106087 - DNA, 26 bp, Homo sapiens
gggtgcagacttggtggtggtgggtg

SEQ ID NO: 106088 - DNA, 26 bp, Homo sapiens
ggtgcagacttggtggtggtgggtgc

SEQ ID NO: 106089 - DNA, 26 bp, Homo sapiens
gtgcagacttggtggtggtgggtgca

SEQ ID NO: 106090 - DNA, 26 bp, Homo sapiens
tgcagacttggtggtggtgggtgcag

SEQ ID NO: 106091 - DNA, 26 bp, Homo sapiens
gcagacttggtggtggtgggtgcagg

SEQ ID NO: 106092 - DNA, 26 bp, Homo sapiens
cagacttggtggtggtgggtgcaggc

SEQ ID NO: 106093 - DNA, 26 bp, Homo sapiens
agacttggtggtggtgggtgcaggct

SEQ ID NO: 106094 - DNA, 26 bp, Homo sapiens
gacttggtggtggtgggtgcaggctc

SEQ ID NO: 106095 - DNA, 26 bp, Homo sapiens
acttggtggtggtgggtgcaggctcc

SEQ ID NO: 106096 - DNA, 26 bp, Homo sapiens
cttggtggtggtgggtgcaggctcct

SEQ ID NO: 106097 - DNA, 26 bp, Homo sapiens
ttggtggtggtgggtgcaggctcctt

SEQ ID NO: 106098 - DNA, 26 bp, Homo sapiens
tggtggtggtgggtgcaggctccttg

SEQ ID NO: 106099 - DNA, 26 bp, Homo sapiens
ggtggtggtgggtgcaggctccttgg

SEQ ID NO: 106100 - DNA, 26 bp, Homo sapiens
gtggtggtgggtgcaggctccttggg

SEQ ID NO: 106101 - DNA, 26 bp, Homo sapiens
tggtggtgggtgcaggctccttggga

SEQ ID NO: 106102 - DNA, 26 bp, Homo sapiens
ggtggtgggtgcaggctccttgggag

SEQ ID NO: 106103 - DNA, 26 bp, Homo sapiens
gtggtgggtgcaggctccttgggagt

SEQ ID NO: 106104 - DNA, 26 bp, Homo sapiens
tggtgggtgcaggctccttgggagtg

SEQ ID NO: 106105 - DNA, 26 bp, Homo sapiens
ggtgggtgcaggctccttgggagtgg

SEQ ID NO: 106106 - DNA, 26 bp, Homo sapiens
gtgggtgcaggctccttgggagtggt

SEQ ID NO: 106107 - DNA, 26 bp, Homo sapiens
tgggtgcaggctccttgggagtggtg

SEQ ID NO: 106108 - DNA, 26 bp, Homo sapiens
gggtgcaggctccttgggagtggtgg

SEQ ID NO: 106109 - DNA, 26 bp, Homo sapiens
ggtgcaggctccttgggagtggtggg

SEQ ID NO: 106110 - DNA, 26 bp, Homo sapiens
gtgcaggctccttgggagtggtgggt

SEQ ID NO: 106111 - DNA, 26 bp, Homo sapiens
tgcaggctccttgggagtggtgggtg

SEQ ID NO: 106112 - DNA, 26 bp, Homo sapiens
gcaggctccttgggagtggtgggtga

SEQ ID NO: 106113 - DNA, 26 bp, Homo sapiens
caggctccttgggagtggtgggtgaa

SEQ ID NO: 106114 - DNA, 26 bp, Homo sapiens
aggctccttgggagtggtgggtgaag

SEQ ID NO: 106115 - DNA, 26 bp, Homo sapiens
ggctccttgggagtggtgggtgaagg

SEQ ID NO: 106116 - DNA, 26 bp, Homo sapiens
gctccttgggagtggtgggtgaaggc

SEQ ID NO: 106117 - DNA, 26 bp, Homo sapiens
ctccttgggagtggtgggtgaaggct

SEQ ID NO: 106118 - DNA, 26 bp, Homo sapiens
tccttgggagtggtgggtgaaggctc

SEQ ID NO: 106119 - DNA, 26 bp, Homo sapiens
ccttgggagtggtgggtgaaggctcc

SEQ ID NO: 106120 - DNA, 26 bp, Homo sapiens
cttgggagtggtgggtgaaggctcct

SEQ ID NO: 106121 - DNA, 26 bp, Homo sapiens
ttgggagtggtgggtgaaggctcctt

SEQ ID NO: 106122 - DNA, 26 bp, Homo sapiens
tgggagtggtgggtgaaggctccttg

SEQ ID NO: 106123 - DNA, 26 bp, Homo sapiens
gggagtggtgggtgaaggctccttgg

SEQ ID NO: 106124 - DNA, 26 bp, Homo sapiens
ggagtggtgggtgaaggctccttggt

SEQ ID NO: 106125 - DNA, 26 bp, Homo sapiens
gagtggtgggtgaaggctccttggtg

SEQ ID NO: 106126 - DNA, 26 bp, Homo sapiens
agtggtgggtgaaggctccttggtgg

SEQ ID NO: 106127 - DNA, 26 bp, Homo sapiens
gtggtgggtgaaggctccttggtggt

SEQ ID NO: 106128 - DNA, 26 bp, Homo sapiens
tggtgggtgaaggctccttggtggtg

SEQ ID NO: 106129 - DNA, 26 bp, Homo sapiens
ggtgggtgaaggctccttggtggtgg

SEQ ID NO: 106130 - DNA, 26 bp, Homo sapiens
gtgggtgaaggctccttggtggtggt

SEQ ID NO: 106131 - DNA, 26 bp, Homo sapiens
tgggtgaaggctccttggtggtggtg

SEQ ID NO: 106132 - DNA, 26 bp, Homo sapiens
gggtgaaggctccttggtggtggtgg

SEQ ID NO: 106133 - DNA, 26 bp, Homo sapiens
ggtgaaggctccttggtggtggtggg

SEQ ID NO: 106134 - DNA, 26 bp, Homo sapiens
gtgaaggctccttggtggtggtgggt

SEQ ID NO: 106135 - DNA, 26 bp, Homo sapiens
tgaaggctccttggtggtggtgggtg

SEQ ID NO: 106136 - DNA, 26 bp, Homo sapiens
gaaggctccttggtggtggtgggtgc

SEQ ID NO: 106137 - DNA, 26 bp, Homo sapiens
aaggctccttggtggtggtgggtgca

SEQ ID NO: 106138 - DNA, 26 bp, Homo sapiens
aggctccttggtggtggtgggtgcag

SEQ ID NO: 106139 - DNA, 26 bp, Homo sapiens
ggctccttggtggtggtgggtgcagg

SEQ ID NO: 106140 - DNA, 26 bp, Homo sapiens
gctccttggtggtggtgggtgcaggc

SEQ ID NO: 106141 - DNA, 26 bp, Homo sapiens
ctccttggtggtggtgggtgcaggct

SEQ ID NO: 106142 - DNA, 26 bp, Homo sapiens
tccttggtggtggtgggtgcaggctc

SEQ ID NO: 106143 - DNA, 26 bp, Homo sapiens
ccttggtggtggtgggtgcaggctcc

SEQ ID NO: 106144 - DNA, 26 bp, Homo sapiens
cttggtggtggtgggtgcaggctcct

SEQ ID NO: 106145 - DNA, 26 bp, Homo sapiens
ttggtggtggtgggtgcaggctcctt

SEQ ID NO: 106146 - DNA, 26 bp, Homo sapiens
tggtggtggtgggtgcaggctccttg

SEQ ID NO: 106147 - DNA, 26 bp, Homo sapiens
ggtggtggtgggtgcaggctccttgg

SEQ ID NO: 106148 - DNA, 26 bp, Homo sapiens
gtggtggtgggtgcaggctccttggg

SEQ ID NO: 106149 - DNA, 26 bp, Homo sapiens
tggtggtgggtgcaggctccttggga

SEQ ID NO: 106150 - DNA, 26 bp, Homo sapiens
ggtggtgggtgcaggctccttgggag

SEQ ID NO: 106151 - DNA, 26 bp, Homo sapiens
gtggtgggtgcaggctccttgggagt

SEQ ID NO: 106152 - DNA, 26 bp, Homo sapiens
tggtgggtgcaggctccttgggagtg

SEQ ID NO: 106153 - DNA, 26 bp, Homo sapiens
ggtgggtgcaggctccttgggagtgg

SEQ ID NO: 106154 - DNA, 26 bp, Homo sapiens
gtgggtgcaggctccttgggagtggt

SEQ ID NO: 106155 - DNA, 26 bp, Homo sapiens
tgggtgcaggctccttgggagtggtg

SEQ ID NO: 106156 - DNA, 26 bp, Homo sapiens
gggtgcaggctccttgggagtggtgg

SEQ ID NO: 106157 - DNA, 26 bp, Homo sapiens
ggtgcaggctccttgggagtggtggg

SEQ ID NO: 106158 - DNA, 26 bp, Homo sapiens
gtgcaggctccttgggagtggtgggt

SEQ ID NO: 106159 - DNA, 26 bp, Homo sapiens
tgcaggctccttgggagtggtgggtg

SEQ ID NO: 106160 - DNA, 26 bp, Homo sapiens
gcaggctccttgggagtggtgggtgc

SEQ ID NO: 106161 - DNA, 26 bp, Homo sapiens
caggctccttgggagtggtgggtgca

SEQ ID NO: 106162 - DNA, 26 bp, Homo sapiens
aggctccttgggagtggtgggtgcag

SEQ ID NO: 106163 - DNA, 26 bp, Homo sapiens
ggctccttgggagtggtgggtgcagg

SEQ ID NO: 106164 - DNA, 26 bp, Homo sapiens
gctccttgggagtggtgggtgcaggc

SEQ ID NO: 106165 - DNA, 26 bp, Homo sapiens
ctccttgggagtggtgggtgcaggct

SEQ ID NO: 106166 - DNA, 26 bp, Homo sapiens
tccttgggagtggtgggtgcaggctc

SEQ ID NO: 106167 - DNA, 26 bp, Homo sapiens
ccttgggagtggtgggtgcaggctcc

SEQ ID NO: 106168 - DNA, 26 bp, Homo sapiens
cttgggagtggtgggtgcaggctcct

SEQ ID NO: 106169 - DNA, 26 bp, Homo sapiens
ttgggagtggtgggtgcaggctcctt

SEQ ID NO: 106170 - DNA, 26 bp, Homo sapiens
tgggagtggtgggtgcaggctccttg

SEQ ID NO: 106171 - DNA, 26 bp, Homo sapiens
gggagtggtgggtgcaggctccttgg

SEQ ID NO: 106172 - DNA, 26 bp, Homo sapiens
ggagtggtgggtgcaggctccttggg

SEQ ID NO: 106173 - DNA, 26 bp, Homo sapiens
gagtggtgggtgcaggctccttgggg

SEQ ID NO: 106174 - DNA, 26 bp, Homo sapiens
agtggtgggtgcaggctccttggggg

SEQ ID NO: 106175 - DNA, 26 bp, Homo sapiens
gtggtgggtgcaggctccttgggggt

SEQ ID NO: 106176 - DNA, 26 bp, Homo sapiens
tggtgggtgcaggctccttgggggta

SEQ ID NO: 106177 - DNA, 26 bp, Homo sapiens
ggtgggtgcaggctccttgggggtag

SEQ ID NO: 106178 - DNA, 26 bp, Homo sapiens
gtgggtgcaggctccttgggggtagt

SEQ ID NO: 106179 - DNA, 26 bp, Homo sapiens
tgggtgcaggctccttgggggtagtt

SEQ ID NO: 106180 - DNA, 26 bp, Homo sapiens
gggtgcaggctccttgggggtagttg

SEQ ID NO: 106181 - DNA, 26 bp, Homo sapiens
ggtgcaggctccttgggggtagttgg

SEQ ID NO: 106182 - DNA, 26 bp, Homo sapiens
gtgcaggctccttgggggtagttggg

SEQ ID NO: 106183 - DNA, 26 bp, Homo sapiens
tgcaggctccttgggggtagttgggg

SEQ ID NO: 106184 - DNA, 26 bp, Homo sapiens
gcaggctccttgggggtagttggggc

SEQ ID NO: 106185 - DNA, 26 bp, Homo sapiens
caggctccttgggggtagttggggca

SEQ ID NO: 106186 - DNA, 26 bp, Homo sapiens
aggctccttgggggtagttggggcag

SEQ ID NO: 106187 - DNA, 26 bp, Homo sapiens
ggctccttgggggtagttggggcagg

SEQ ID NO: 106188 - DNA, 26 bp, Homo sapiens
gctccttgggggtagttggggcaggc

SEQ ID NO: 106189 - DNA, 26 bp, Homo sapiens
ctccttgggggtagttggggcaggct

SEQ ID NO: 106190 - DNA, 26 bp, Homo sapiens
tccttgggggtagttggggcaggctt

SEQ ID NO: 106191 - DNA, 26 bp, Homo sapiens
ccttgggggtagttggggcaggcttc

SEQ ID NO: 106192 - DNA, 26 bp, Homo sapiens
cttgggggtagttggggcaggcttct

SEQ ID NO: 106193 - DNA, 26 bp, Homo sapiens
ttgggggtagttggggcaggcttctt

SEQ ID NO: 106194 - DNA, 26 bp, Homo sapiens
tgggggtagttggggcaggcttcttg

SEQ ID NO: 106195 - DNA, 26 bp, Homo sapiens
gggggtagttggggcaggcttcttgg

SEQ ID NO: 106196 - DNA, 26 bp, Homo sapiens
ggggtagttggggcaggcttcttggg

SEQ ID NO: 106197 - DNA, 26 bp, Homo sapiens
gggtagttggggcaggcttcttgggg

SEQ ID NO: 106198 - DNA, 26 bp, Homo sapiens
ggtagttggggcaggcttcttggggg

SEQ ID NO: 106199 - DNA, 26 bp, Homo sapiens
gtagttggggcaggcttcttgggggc

SEQ ID NO: 106200 - DNA, 26 bp, Homo sapiens
tagttggggcaggcttcttgggggca

SEQ ID NO: 106201 - DNA, 26 bp, Homo sapiens
agttggggcaggcttcttgggggcag

SEQ ID NO: 106202 - DNA, 26 bp, Homo sapiens
gttggggcaggcttcttgggggcagt

SEQ ID NO: 106203 - DNA, 26 bp, Homo sapiens
ttggggcaggcttcttgggggcagtg

SEQ ID NO: 106204 - DNA, 26 bp, Homo sapiens
tggggcaggcttcttgggggcagtgg

SEQ ID NO: 106205 - DNA, 26 bp, Homo sapiens
ggggcaggcttcttgggggcagtggg

SEQ ID NO: 106206 - DNA, 26 bp, Homo sapiens
gggcaggcttcttgggggcagtgggt

SEQ ID NO: 106207 - DNA, 26 bp, Homo sapiens
ggcaggcttcttgggggcagtgggtg

SEQ ID NO: 106208 - DNA, 26 bp, Homo sapiens
gcaggcttcttgggggcagtgggtgc

SEQ ID NO: 106209 - DNA, 26 bp, Homo sapiens
caggcttcttgggggcagtgggtgca

SEQ ID NO: 106210 - DNA, 26 bp, Homo sapiens
aggcttcttgggggcagtgggtgcag

SEQ ID NO: 106211 - DNA, 26 bp, Homo sapiens
ggcttcttgggggcagtgggtgcagg

SEQ ID NO: 106212 - DNA, 26 bp, Homo sapiens
gcttcttgggggcagtgggtgcaggc

SEQ ID NO: 106213 - DNA, 26 bp, Homo sapiens
cttcttgggggcagtgggtgcaggct

SEQ ID NO: 106214 - DNA, 26 bp, Homo sapiens
ttcttgggggcagtgggtgcaggctc

SEQ ID NO: 106215 - DNA, 26 bp, Homo sapiens
tcttgggggcagtgggtgcaggctct

SEQ ID NO: 106216 - DNA, 26 bp, Homo sapiens
cttgggggcagtgggtgcaggctctt

SEQ ID NO: 106217 - DNA, 26 bp, Homo sapiens
ttgggggcagtgggtgcaggctcttt

SEQ ID NO: 106218 - DNA, 26 bp, Homo sapiens
tgggggcagtgggtgcaggctctttg

SEQ ID NO: 106219 - DNA, 26 bp, Homo sapiens
gggggcagtgggtgcaggctctttgg

SEQ ID NO: 106220 - DNA, 26 bp, Homo sapiens
ggggcagtgggtgcaggctctttggg

SEQ ID NO: 106221 - DNA, 26 bp, Homo sapiens
gggcagtgggtgcaggctctttggga

SEQ ID NO: 106222 - DNA, 26 bp, Homo sapiens
ggcagtgggtgcaggctctttgggag

SEQ ID NO: 106223 - DNA, 26 bp, Homo sapiens
gcagtgggtgcaggctctttgggagt

SEQ ID NO: 106224 - DNA, 26 bp, Homo sapiens
cagtgggtgcaggctctttgggagtg

SEQ ID NO: 106225 - DNA, 26 bp, Homo sapiens
agtgggtgcaggctctttgggagtgg

SEQ ID NO: 106226 - DNA, 26 bp, Homo sapiens
gtgggtgcaggctctttgggagtggt

SEQ ID NO: 106227 - DNA, 26 bp, Homo sapiens
tgggtgcaggctctttgggagtggtg

SEQ ID NO: 106228 - DNA, 26 bp, Homo sapiens
gggtgcaggctctttgggagtggtgg

SEQ ID NO: 106229 - DNA, 26 bp, Homo sapiens
ggtgcaggctctttgggagtggtggg

SEQ ID NO: 106230 - DNA, 26 bp, Homo sapiens
gtgcaggctctttgggagtggtgggt

SEQ ID NO: 106231 - DNA, 26 bp, Homo sapiens
tgcaggctctttgggagtggtgggtg

SEQ ID NO: 106232 - DNA, 26 bp, Homo sapiens
gcaggctctttgggagtggtgggtgc

SEQ ID NO: 106233 - DNA, 26 bp, Homo sapiens
caggctctttgggagtggtgggtgca

SEQ ID NO: 106234 - DNA, 26 bp, Homo sapiens
aggctctttgggagtggtgggtgcag

SEQ ID NO: 106235 - DNA, 26 bp, Homo sapiens
ggctctttgggagtggtgggtgcagg

SEQ ID NO: 106236 - DNA, 26 bp, Homo sapiens
gctctttgggagtggtgggtgcaggc

SEQ ID NO: 106237 - DNA, 26 bp, Homo sapiens
ctctttgggagtggtgggtgcaggct

SEQ ID NO: 106238 - DNA, 26 bp, Homo sapiens
tctttgggagtggtgggtgcaggctc

SEQ ID NO: 106239 - DNA, 26 bp, Homo sapiens
ctttgggagtggtgggtgcaggctcc

SEQ ID NO: 106240 - DNA, 26 bp, Homo sapiens
tttgggagtggtgggtgcaggctcct

SEQ ID NO: 106241 - DNA, 26 bp, Homo sapiens
ttgggagtggtgggtgcaggctcctt

SEQ ID NO: 106242 - DNA, 26 bp, Homo sapiens
tgggagtggtgggtgcaggctccttg

SEQ ID NO: 106243 - DNA, 26 bp, Homo sapiens
gggagtggtgggtgcaggctccttgg

SEQ ID NO: 106244 - DNA, 26 bp, Homo sapiens
ggagtggtgggtgcaggctccttggt

SEQ ID NO: 106245 - DNA, 26 bp, Homo sapiens
gagtggtgggtgcaggctccttggtg

SEQ ID NO: 106246 - DNA, 26 bp, Homo sapiens
agtggtgggtgcaggctccttggtgg

SEQ ID NO: 106247 - DNA, 26 bp, Homo sapiens
gtggtgggtgcaggctccttggtggt

SEQ ID NO: 106248 - DNA, 26 bp, Homo sapiens
tggtgggtgcaggctccttggtggtg

SEQ ID NO: 106249 - DNA, 26 bp, Homo sapiens
ggtgggtgcaggctccttggtggtgg

SEQ ID NO: 106250 - DNA, 26 bp, Homo sapiens
gtgggtgcaggctccttggtggtggg

SEQ ID NO: 106251 - DNA, 26 bp, Homo sapiens
tgggtgcaggctccttggtggtgggt

SEQ ID NO: 106252 - DNA, 26 bp, Homo sapiens
gggtgcaggctccttggtggtgggtg

SEQ ID NO: 106253 - DNA, 26 bp, Homo sapiens
ggtgcaggctccttggtggtgggtgc

SEQ ID NO: 106254 - DNA, 26 bp, Homo sapiens
gtgcaggctccttggtggtgggtgca

SEQ ID NO: 106255 - DNA, 26 bp, Homo sapiens
tgcaggctccttggtggtgggtgcag

SEQ ID NO: 106256 - DNA, 26 bp, Homo sapiens
gcaggctccttggtggtgggtgcagg

SEQ ID NO: 106257 - DNA, 26 bp, Homo sapiens
caggctccttggtggtgggtgcaggc

SEQ ID NO: 106258 - DNA, 26 bp, Homo sapiens
aggctccttggtggtgggtgcaggct

SEQ ID NO: 106259 - DNA, 26 bp, Homo sapiens
ggctccttggtggtgggtgcaggctc

SEQ ID NO: 106260 - DNA, 26 bp, Homo sapiens
gctccttggtggtgggtgcaggctcc

SEQ ID NO: 106261 - DNA, 26 bp, Homo sapiens
ctccttggtggtgggtgcaggctcct

SEQ ID NO: 106262 - DNA, 26 bp, Homo sapiens
tccttggtggtgggtgcaggctcctt

SEQ ID NO: 106263 - DNA, 26 bp, Homo sapiens
ccttggtggtgggtgcaggctccttg

SEQ ID NO: 106264 - DNA, 26 bp, Homo sapiens
cttggtggtgggtgcaggctccttgg

SEQ ID NO: 106265 - DNA, 26 bp, Homo sapiens
ttggtggtgggtgcaggctccttggg

SEQ ID NO: 106266 - DNA, 26 bp, Homo sapiens
tggtggtgggtgcaggctccttggga

SEQ ID NO: 106267 - DNA, 26 bp, Homo sapiens
ggtggtgggtgcaggctccttgggag

SEQ ID NO: 106268 - DNA, 26 bp, Homo sapiens
gtggtgggtgcaggctccttgggagt

SEQ ID NO: 106269 - DNA, 26 bp, Homo sapiens
tggtgggtgcaggctccttgggagtg

SEQ ID NO: 106270 - DNA, 26 bp, Homo sapiens
ggtgggtgcaggctccttgggagtgg

SEQ ID NO: 106271 - DNA, 26 bp, Homo sapiens
gtgggtgcaggctccttgggagtggt

SEQ ID NO: 106272 - DNA, 26 bp, Homo sapiens
tgggtgcaggctccttgggagtggtg

SEQ ID NO: 106273 - DNA, 26 bp, Homo sapiens
gggtgcaggctccttgggagtggtgg

SEQ ID NO: 106274 - DNA, 26 bp, Homo sapiens
ggtgcaggctccttgggagtggtggg

SEQ ID NO: 106275 - DNA, 26 bp, Homo sapiens
gtgcaggctccttgggagtggtgggt

SEQ ID NO: 106276 - DNA, 26 bp, Homo sapiens
tgcaggctccttgggagtggtgggtg

SEQ ID NO: 106277 - DNA, 26 bp, Homo sapiens
gcaggctccttgggagtggtgggtgt

SEQ ID NO: 106278 - DNA, 26 bp, Homo sapiens
caggctccttgggagtggtgggtgta

SEQ ID NO: 106279 - DNA, 26 bp, Homo sapiens
aggctccttgggagtggtgggtgtag

SEQ ID NO: 106280 - DNA, 26 bp, Homo sapiens
ggctccttgggagtggtgggtgtagg

SEQ ID NO: 106281 - DNA, 26 bp, Homo sapiens
gctccttgggagtggtgggtgtaggc

SEQ ID NO: 106282 - DNA, 26 bp, Homo sapiens
ctccttgggagtggtgggtgtaggct

SEQ ID NO: 106283 - DNA, 26 bp, Homo sapiens
tccttgggagtggtgggtgtaggctc

SEQ ID NO: 106284 - DNA, 26 bp, Homo sapiens
ccttgggagtggtgggtgtaggctcc

SEQ ID NO: 106285 - DNA, 26 bp, Homo sapiens
cttgggagtggtgggtgtaggctcct

SEQ ID NO: 106286 - DNA, 26 bp, Homo sapiens
ttgggagtggtgggtgtaggctcctt

SEQ ID NO: 106287 - DNA, 26 bp, Homo sapiens
tgggagtggtgggtgtaggctccttg

SEQ ID NO: 106288 - DNA, 26 bp, Homo sapiens
gggagtggtgggtgtaggctccttgg

SEQ ID NO: 106289 - DNA, 26 bp, Homo sapiens
ggagtggtgggtgtaggctccttggg

SEQ ID NO: 106290 - DNA, 26 bp, Homo sapiens
gagtggtgggtgtaggctccttggga

SEQ ID NO: 106291 - DNA, 26 bp, Homo sapiens
agtggtgggtgtaggctccttgggag

SEQ ID NO: 106292 - DNA, 26 bp, Homo sapiens
gtggtgggtgtaggctccttgggagt

SEQ ID NO: 106293 - DNA, 26 bp, Homo sapiens
tggtgggtgtaggctccttgggagtg

SEQ ID NO: 106294 - DNA, 26 bp, Homo sapiens
ggtgggtgtaggctccttgggagtgg

SEQ ID NO: 106295 - DNA, 26 bp, Homo sapiens
gtgggtgtaggctccttgggagtggt

SEQ ID NO: 106296 - DNA, 26 bp, Homo sapiens
tgggtgtaggctccttgggagtggtg

SEQ ID NO: 106297 - DNA, 26 bp, Homo sapiens
gggtgtaggctccttgggagtggtgg

SEQ ID NO: 106298 - DNA, 26 bp, Homo sapiens
ggtgtaggctccttgggagtggtggg

SEQ ID NO: 106299 - DNA, 26 bp, Homo sapiens
gtgtaggctccttgggagtggtgggt

SEQ ID NO: 106300 - DNA, 26 bp, Homo sapiens
tgtaggctccttgggagtggtgggtg

SEQ ID NO: 106301 - DNA, 26 bp, Homo sapiens
gtaggctccttgggagtggtgggtgc

SEQ ID NO: 106302 - DNA, 26 bp, Homo sapiens
taggctccttgggagtggtgggtgca

SEQ ID NO: 106303 - DNA, 26 bp, Homo sapiens
aggctccttgggagtggtgggtgcag

SEQ ID NO: 106304 - DNA, 26 bp, Homo sapiens
ggctccttgggagtggtgggtgcagg

SEQ ID NO: 106305 - DNA, 26 bp, Homo sapiens
gctccttgggagtggtgggtgcaggc

SEQ ID NO: 106306 - DNA, 26 bp, Homo sapiens
ctccttgggagtggtgggtgcaggct

SEQ ID NO: 106307 - DNA, 26 bp, Homo sapiens
tccttgggagtggtgggtgcaggctc

SEQ ID NO: 106308 - DNA, 26 bp, Homo sapiens
ccttgggagtggtgggtgcaggctcc

SEQ ID NO: 106309 - DNA, 26 bp, Homo sapiens
cttgggagtggtgggtgcaggctcct

SEQ ID NO: 106310 - DNA, 26 bp, Homo sapiens
ttgggagtggtgggtgcaggctcctt

SEQ ID NO: 106311 - DNA, 26 bp, Homo sapiens
tgggagtggtgggtgcaggctccttg

SEQ ID NO: 106312 - DNA, 26 bp, Homo sapiens
gggagtggtgggtgcaggctccttgg

SEQ ID NO: 106313 - DNA, 26 bp, Homo sapiens
ggagtggtgggtgcaggctccttggg

SEQ ID NO: 106314 - DNA, 26 bp, Homo sapiens
gagtggtgggtgcaggctccttgggg

SEQ ID NO: 106315 - DNA, 26 bp, Homo sapiens
agtggtgggtgcaggctccttggggg

SEQ ID NO: 106316 - DNA, 26 bp, Homo sapiens
gtggtgggtgcaggctccttgggggt

SEQ ID NO: 106317 - DNA, 26 bp, Homo sapiens
tggtgggtgcaggctccttgggggta

SEQ ID NO: 106318 - DNA, 26 bp, Homo sapiens
ggtgggtgcaggctccttgggggtag

SEQ ID NO: 106319 - DNA, 26 bp, Homo sapiens
gtgggtgcaggctccttgggggtagt

SEQ ID NO: 106320 - DNA, 26 bp, Homo sapiens
tgggtgcaggctccttgggggtagtt

SEQ ID NO: 106321 - DNA, 26 bp, Homo sapiens
gggtgcaggctccttgggggtagttg

SEQ ID NO: 106322 - DNA, 26 bp, Homo sapiens
ggtgcaggctccttgggggtagttgg

SEQ ID NO: 106323 - DNA, 26 bp, Homo sapiens
gtgcaggctccttgggggtagttggg

SEQ ID NO: 106324 - DNA, 26 bp, Homo sapiens
tgcaggctccttgggggtagttgggg

SEQ ID NO: 106325 - DNA, 26 bp, Homo sapiens
gcaggctccttgggggtagttggggc

SEQ ID NO: 106326 - DNA, 26 bp, Homo sapiens
caggctccttgggggtagttggggca

SEQ ID NO: 106327 - DNA, 26 bp, Homo sapiens
aggctccttgggggtagttggggcag

SEQ ID NO: 106328 - DNA, 26 bp, Homo sapiens
ggctccttgggggtagttggggcagg

SEQ ID NO: 106329 - DNA, 26 bp, Homo sapiens
gctccttgggggtagttggggcaggc

SEQ ID NO: 106330 - DNA, 26 bp, Homo sapiens
ctccttgggggtagttggggcaggct

SEQ ID NO: 106331 - DNA, 26 bp, Homo sapiens
tccttgggggtagttggggcaggctt

SEQ ID NO: 106332 - DNA, 26 bp, Homo sapiens
ccttgggggtagttggggcaggcttc

SEQ ID NO: 106333 - DNA, 26 bp, Homo sapiens
cttgggggtagttggggcaggcttct

SEQ ID NO: 106334 - DNA, 26 bp, Homo sapiens
ttgggggtagttggggcaggcttctt

SEQ ID NO: 106335 - DNA, 26 bp, Homo sapiens
tgggggtagttggggcaggcttcttg

SEQ ID NO: 106336 - DNA, 26 bp, Homo sapiens
gggggtagttggggcaggcttcttgg

SEQ ID NO: 106337 - DNA, 26 bp, Homo sapiens
ggggtagttggggcaggcttcttggg

SEQ ID NO: 106338 - DNA, 26 bp, Homo sapiens
gggtagttggggcaggcttcttgggg

SEQ ID NO: 106339 - DNA, 26 bp, Homo sapiens
ggtagttggggcaggcttcttggggg

SEQ ID NO: 106340 - DNA, 26 bp, Homo sapiens
gtagttggggcaggcttcttgggggt

SEQ ID NO: 106341 - DNA, 26 bp, Homo sapiens
tagttggggcaggcttcttgggggtg

SEQ ID NO: 106342 - DNA, 26 bp, Homo sapiens
agttggggcaggcttcttgggggtgg

SEQ ID NO: 106343 - DNA, 26 bp, Homo sapiens
gttggggcaggcttcttgggggtggt

SEQ ID NO: 106344 - DNA, 26 bp, Homo sapiens
ttggggcaggcttcttgggggtggtg

SEQ ID NO: 106345 - DNA, 26 bp, Homo sapiens
tggggcaggcttcttgggggtggtgg

SEQ ID NO: 106346 - DNA, 26 bp, Homo sapiens
ggggcaggcttcttgggggtggtggg

SEQ ID NO: 106347 - DNA, 26 bp, Homo sapiens
gggcaggcttcttgggggtggtgggt

SEQ ID NO: 106348 - DNA, 26 bp, Homo sapiens
ggcaggcttcttgggggtggtgggtg

SEQ ID NO: 106349 - DNA, 26 bp, Homo sapiens
gcaggcttcttgggggtggtgggtgc

SEQ ID NO: 106350 - DNA, 26 bp, Homo sapiens
caggcttcttgggggtggtgggtgca

SEQ ID NO: 106351 - DNA, 26 bp, Homo sapiens
aggcttcttgggggtggtgggtgcag

SEQ ID NO: 106352 - DNA, 26 bp, Homo sapiens
ggcttcttgggggtggtgggtgcagg

SEQ ID NO: 106353 - DNA, 26 bp, Homo sapiens
gcttcttgggggtggtgggtgcaggc

SEQ ID NO: 106354 - DNA, 26 bp, Homo sapiens
cttcttgggggtggtgggtgcaggct

SEQ ID NO: 106355 - DNA, 26 bp, Homo sapiens
ttcttgggggtggtgggtgcaggctc

SEQ ID NO: 106356 - DNA, 26 bp, Homo sapiens
tcttgggggtggtgggtgcaggctcc

SEQ ID NO: 106357 - DNA, 26 bp, Homo sapiens
cttgggggtggtgggtgcaggctcct

SEQ ID NO: 106358 - DNA, 26 bp, Homo sapiens
ttgggggtggtgggtgcaggctcctt

SEQ ID NO: 106359 - DNA, 26 bp, Homo sapiens
tgggggtggtgggtgcaggctccttg

SEQ ID NO: 106360 - DNA, 26 bp, Homo sapiens
gggggtggtgggtgcaggctccttgg

SEQ ID NO: 106361 - DNA, 26 bp, Homo sapiens
ggggtggtgggtgcaggctccttggg

SEQ ID NO: 106362 - DNA, 26 bp, Homo sapiens
gggtggtgggtgcaggctccttggga

SEQ ID NO: 106363 - DNA, 26 bp, Homo sapiens
ggtggtgggtgcaggctccttgggag

SEQ ID NO: 106364 - DNA, 26 bp, Homo sapiens
gtggtgggtgcaggctccttgggagt

SEQ ID NO: 106365 - DNA, 26 bp, Homo sapiens
tggtgggtgcaggctccttgggagtg

SEQ ID NO: 106366 - DNA, 26 bp, Homo sapiens
ggtgggtgcaggctccttgggagtgg

SEQ ID NO: 106367 - DNA, 26 bp, Homo sapiens
gtgggtgcaggctccttgggagtggt

SEQ ID NO: 106368 - DNA, 26 bp, Homo sapiens
tgggtgcaggctccttgggagtggtg

SEQ ID NO: 106369 - DNA, 26 bp, Homo sapiens
gggtgcaggctccttgggagtggtgg

SEQ ID NO: 106370 - DNA, 26 bp, Homo sapiens
ggtgcaggctccttgggagtggtggg

SEQ ID NO: 106371 - DNA, 26 bp, Homo sapiens
gtgcaggctccttgggagtggtgggt

SEQ ID NO: 106372 - DNA, 26 bp, Homo sapiens
tgcaggctccttgggagtggtgggtg

SEQ ID NO: 106373 - DNA, 26 bp, Homo sapiens
gcaggctccttgggagtggtgggtgc

SEQ ID NO: 106374 - DNA, 26 bp, Homo sapiens
caggctccttgggagtggtgggtgca

SEQ ID NO: 106375 - DNA, 26 bp, Homo sapiens
aggctccttgggagtggtgggtgcag

SEQ ID NO: 106376 - DNA, 26 bp, Homo sapiens
ggctccttgggagtggtgggtgcaga

SEQ ID NO: 106377 - DNA, 26 bp, Homo sapiens
gctccttgggagtggtgggtgcagac

SEQ ID NO: 106378 - DNA, 26 bp, Homo sapiens
ctccttgggagtggtgggtgcagact

SEQ ID NO: 106379 - DNA, 26 bp, Homo sapiens
tccttgggagtggtgggtgcagactt

SEQ ID NO: 106380 - DNA, 26 bp, Homo sapiens
ccttgggagtggtgggtgcagacttg

SEQ ID NO: 106381 - DNA, 26 bp, Homo sapiens
cttgggagtggtgggtgcagacttgg

SEQ ID NO: 106382 - DNA, 26 bp, Homo sapiens
ttgggagtggtgggtgcagacttggt

SEQ ID NO: 106383 - DNA, 26 bp, Homo sapiens
tgggagtggtgggtgcagacttggtg

SEQ ID NO: 106384 - DNA, 26 bp, Homo sapiens
gggagtggtgggtgcagacttggtgg

SEQ ID NO: 106385 - DNA, 26 bp, Homo sapiens
ggagtggtgggtgcagacttggtggt

SEQ ID NO: 106386 - DNA, 26 bp, Homo sapiens
gagtggtgggtgcagacttggtggtg

SEQ ID NO: 106387 - DNA, 26 bp, Homo sapiens
agtggtgggtgcagacttggtggtgg

SEQ ID NO: 106388 - DNA, 26 bp, Homo sapiens
gtggtgggtgcagacttggtggtggt

SEQ ID NO: 106389 - DNA, 26 bp, Homo sapiens
tggtgggtgcagacttggtggtggtg

SEQ ID NO: 106390 - DNA, 26 bp, Homo sapiens
ggtgggtgcagacttggtggtggtgg

SEQ ID NO: 106391 - DNA, 26 bp, Homo sapiens
gtgggtgcagacttggtggtggtggg

SEQ ID NO: 106392 - DNA, 26 bp, Homo sapiens
tgggtgcagacttggtggtggtgggt

SEQ ID NO: 106393 - DNA, 26 bp, Homo sapiens
gggtgcagacttggtggtggtgggtg

SEQ ID NO: 106394 - DNA, 26 bp, Homo sapiens
ggtgcagacttggtggtggtgggtgc

SEQ ID NO: 106395 - DNA, 26 bp, Homo sapiens
gtgcagacttggtggtggtgggtgca

SEQ ID NO: 106396 - DNA, 26 bp, Homo sapiens
tgcagacttggtggtggtgggtgcag

SEQ ID NO: 106397 - DNA, 26 bp, Homo sapiens
gcagacttggtggtggtgggtgcagg

SEQ ID NO: 106398 - DNA, 26 bp, Homo sapiens
cagacttggtggtggtgggtgcaggc

SEQ ID NO: 106399 - DNA, 26 bp, Homo sapiens
agacttggtggtggtgggtgcaggct

SEQ ID NO: 106400 - DNA, 26 bp, Homo sapiens
gacttggtggtggtgggtgcaggctc

SEQ ID NO: 106401 - DNA, 26 bp, Homo sapiens
acttggtggtggtgggtgcaggctcc

SEQ ID NO: 106402 - DNA, 26 bp, Homo sapiens
cttggtggtggtgggtgcaggctcct

SEQ ID NO: 106403 - DNA, 26 bp, Homo sapiens
ttggtggtggtgggtgcaggctcctt

SEQ ID NO: 106404 - DNA, 26 bp, Homo sapiens
tggtggtggtgggtgcaggctccttg

SEQ ID NO: 106405 - DNA, 26 bp, Homo sapiens
ggtggtggtgggtgcaggctccttgg

SEQ ID NO: 106406 - DNA, 26 bp, Homo sapiens
gtggtggtgggtgcaggctccttggt

SEQ ID NO: 106407 - DNA, 26 bp, Homo sapiens
tggtggtgggtgcaggctccttggtg

SEQ ID NO: 106408 - DNA, 26 bp, Homo sapiens
ggtggtgggtgcaggctccttggtgg

SEQ ID NO: 106409 - DNA, 26 bp, Homo sapiens
gtggtgggtgcaggctccttggtggt

SEQ ID NO: 106410 - DNA, 26 bp, Homo sapiens
tggtgggtgcaggctccttggtggtg

SEQ ID NO: 106411 - DNA, 26 bp, Homo sapiens
ggtgggtgcaggctccttggtggtgg

SEQ ID NO: 106412 - DNA, 26 bp, Homo sapiens
gtgggtgcaggctccttggtggtggt

SEQ ID NO: 106413 - DNA, 26 bp, Homo sapiens
tgggtgcaggctccttggtggtggtg

SEQ ID NO: 106414 - DNA, 26 bp, Homo sapiens
gggtgcaggctccttggtggtggtgg

SEQ ID NO: 106415 - DNA, 26 bp, Homo sapiens
ggtgcaggctccttggtggtggtggg

SEQ ID NO: 106416 - DNA, 26 bp, Homo sapiens
gtgcaggctccttggtggtggtgggt

SEQ ID NO: 106417 - DNA, 26 bp, Homo sapiens
tgcaggctccttggtggtggtgggtg

SEQ ID NO: 106418 - DNA, 26 bp, Homo sapiens
gcaggctccttggtggtggtgggtgc

SEQ ID NO: 106419 - DNA, 26 bp, Homo sapiens
caggctccttggtggtggtgggtgca

SEQ ID NO: 106420 - DNA, 26 bp, Homo sapiens
aggctccttggtggtggtgggtgcag

SEQ ID NO: 106421 - DNA, 26 bp, Homo sapiens
ggctccttggtggtggtgggtgcagg

SEQ ID NO: 106422 - DNA, 26 bp, Homo sapiens
gctccttggtggtggtgggtgcaggc

SEQ ID NO: 106423 - DNA, 26 bp, Homo sapiens
ctccttggtggtggtgggtgcaggct

SEQ ID NO: 106424 - DNA, 26 bp, Homo sapiens
tccttggtggtggtgggtgcaggctc

SEQ ID NO: 106425 - DNA, 26 bp, Homo sapiens
ccttggtggtggtgggtgcaggctcc

SEQ ID NO: 106426 - DNA, 26 bp, Homo sapiens
cttggtggtggtgggtgcaggctcct

SEQ ID NO: 106427 - DNA, 26 bp, Homo sapiens
ttggtggtggtgggtgcaggctcctt

SEQ ID NO: 106428 - DNA, 26 bp, Homo sapiens
tggtggtggtgggtgcaggctccttg

SEQ ID NO: 106429 - DNA, 26 bp, Homo sapiens
ggtggtggtgggtgcaggctccttgg

SEQ ID NO: 106430 - DNA, 26 bp, Homo sapiens
gtggtggtgggtgcaggctccttggg

SEQ ID NO: 106431 - DNA, 26 bp, Homo sapiens
tggtggtgggtgcaggctccttggga

SEQ ID NO: 106432 - DNA, 26 bp, Homo sapiens
ggtggtgggtgcaggctccttgggag

SEQ ID NO: 106433 - DNA, 26 bp, Homo sapiens
gtggtgggtgcaggctccttgggagt

SEQ ID NO: 106434 - DNA, 26 bp, Homo sapiens
tggtgggtgcaggctccttgggagtg

SEQ ID NO: 106435 - DNA, 26 bp, Homo sapiens
ggtgggtgcaggctccttgggagtgg

SEQ ID NO: 106436 - DNA, 26 bp, Homo sapiens
gtgggtgcaggctccttgggagtggt

SEQ ID NO: 106437 - DNA, 26 bp, Homo sapiens
tgggtgcaggctccttgggagtggtg

SEQ ID NO: 106438 - DNA, 26 bp, Homo sapiens
gggtgcaggctccttgggagtggtgg

SEQ ID NO: 106439 - DNA, 26 bp, Homo sapiens
ggtgcaggctccttgggagtggtggg

SEQ ID NO: 106440 - DNA, 26 bp, Homo sapiens
gtgcaggctccttgggagtggtgggt

SEQ ID NO: 106441 - DNA, 26 bp, Homo sapiens
tgcaggctccttgggagtggtgggtg

SEQ ID NO: 106442 - DNA, 26 bp, Homo sapiens
gcaggctccttgggagtggtgggtgc

SEQ ID NO: 106443 - DNA, 26 bp, Homo sapiens
caggctccttgggagtggtgggtgca

SEQ ID NO: 106444 - DNA, 26 bp, Homo sapiens
aggctccttgggagtggtgggtgcag

SEQ ID NO: 106445 - DNA, 26 bp, Homo sapiens
ggctccttgggagtggtgggtgcagg

SEQ ID NO: 106446 - DNA, 26 bp, Homo sapiens
gctccttgggagtggtgggtgcaggc

SEQ ID NO: 106447 - DNA, 26 bp, Homo sapiens
ctccttgggagtggtgggtgcaggct

SEQ ID NO: 106448 - DNA, 26 bp, Homo sapiens
tccttgggagtggtgggtgcaggctc

SEQ ID NO: 106449 - DNA, 26 bp, Homo sapiens
ccttgggagtggtgggtgcaggctcc

SEQ ID NO: 106450 - DNA, 26 bp, Homo sapiens
cttgggagtggtgggtgcaggctcct

SEQ ID NO: 106451 - DNA, 26 bp, Homo sapiens
ttgggagtggtgggtgcaggctcctt

SEQ ID NO: 106452 - DNA, 26 bp, Homo sapiens
tgggagtggtgggtgcaggctccttg

SEQ ID NO: 106453 - DNA, 26 bp, Homo sapiens
gggagtggtgggtgcaggctccttgg

SEQ ID NO: 106454 - DNA, 26 bp, Homo sapiens
ggagtggtgggtgcaggctccttggt

SEQ ID NO: 106455 - DNA, 26 bp, Homo sapiens
gagtggtgggtgcaggctccttggtg

SEQ ID NO: 106456 - DNA, 26 bp, Homo sapiens
agtggtgggtgcaggctccttggtgg

SEQ ID NO: 106457 - DNA, 26 bp, Homo sapiens
gtggtgggtgcaggctccttggtggt

SEQ ID NO: 106458 - DNA, 26 bp, Homo sapiens
tggtgggtgcaggctccttggtggtg

SEQ ID NO: 106459 - DNA, 26 bp, Homo sapiens
ggtgggtgcaggctccttggtggtgg

SEQ ID NO: 106460 - DNA, 26 bp, Homo sapiens
gtgggtgcaggctccttggtggtggt

SEQ ID NO: 106461 - DNA, 26 bp, Homo sapiens
tgggtgcaggctccttggtggtggtg

SEQ ID NO: 106462 - DNA, 26 bp, Homo sapiens
gggtgcaggctccttggtggtggtgg

SEQ ID NO: 106463 - DNA, 26 bp, Homo sapiens
ggtgcaggctccttggtggtggtggg

SEQ ID NO: 106464 - DNA, 26 bp, Homo sapiens
gtgcaggctccttggtggtggtgggt

SEQ ID NO: 106465 - DNA, 26 bp, Homo sapiens
tgcaggctccttggtggtggtgggtg

SEQ ID NO: 106466 - DNA, 26 bp, Homo sapiens
gcaggctccttggtggtggtgggtgc

SEQ ID NO: 106467 - DNA, 26 bp, Homo sapiens
caggctccttggtggtggtgggtgca

SEQ ID NO: 106468 - DNA, 26 bp, Homo sapiens
aggctccttggtggtggtgggtgcag

SEQ ID NO: 106469 - DNA, 26 bp, Homo sapiens
ggctccttggtggtggtgggtgcagg

SEQ ID NO: 106470 - DNA, 26 bp, Homo sapiens
gctccttggtggtggtgggtgcaggc

SEQ ID NO: 106471 - DNA, 26 bp, Homo sapiens
ctccttggtggtggtgggtgcaggct

SEQ ID NO: 106472 - DNA, 26 bp, Homo sapiens
tccttggtggtggtgggtgcaggctc

SEQ ID NO: 106473 - DNA, 26 bp, Homo sapiens
ccttggtggtggtgggtgcaggctcc

SEQ ID NO: 106474 - DNA, 26 bp, Homo sapiens
cttggtggtggtgggtgcaggctcct

SEQ ID NO: 106475 - DNA, 26 bp, Homo sapiens
ttggtggtggtgggtgcaggctcctt

SEQ ID NO: 106476 - DNA, 26 bp, Homo sapiens
tggtggtggtgggtgcaggctccttg

SEQ ID NO: 106477 - DNA, 26 bp, Homo sapiens
ggtggtggtgggtgcaggctccttgg

SEQ ID NO: 106478 - DNA, 26 bp, Homo sapiens
gtggtggtgggtgcaggctccttggg

SEQ ID NO: 106479 - DNA, 26 bp, Homo sapiens
tggtggtgggtgcaggctccttggga

SEQ ID NO: 106480 - DNA, 26 bp, Homo sapiens
ggtggtgggtgcaggctccttgggag

SEQ ID NO: 106481 - DNA, 26 bp, Homo sapiens
gtggtgggtgcaggctccttgggagt

SEQ ID NO: 106482 - DNA, 26 bp, Homo sapiens
tggtgggtgcaggctccttgggagtg

SEQ ID NO: 106483 - DNA, 26 bp, Homo sapiens
ggtgggtgcaggctccttgggagtgg

SEQ ID NO: 106484 - DNA, 26 bp, Homo sapiens
gtgggtgcaggctccttgggagtggt

SEQ ID NO: 106485 - DNA, 26 bp, Homo sapiens
tgggtgcaggctccttgggagtggtg

SEQ ID NO: 106486 - DNA, 26 bp, Homo sapiens
gggtgcaggctccttgggagtggtgg

SEQ ID NO: 106487 - DNA, 26 bp, Homo sapiens
ggtgcaggctccttgggagtggtggg

SEQ ID NO: 106488 - DNA, 26 bp, Homo sapiens
gtgcaggctccttgggagtggtgggt

SEQ ID NO: 106489 - DNA, 26 bp, Homo sapiens
tgcaggctccttgggagtggtgggtg

SEQ ID NO: 106490 - DNA, 26 bp, Homo sapiens
gcaggctccttgggagtggtgggtgc

SEQ ID NO: 106491 - DNA, 26 bp, Homo sapiens
caggctccttgggagtggtgggtgca

SEQ ID NO: 106492 - DNA, 26 bp, Homo sapiens
aggctccttgggagtggtgggtgcag

SEQ ID NO: 106493 - DNA, 26 bp, Homo sapiens
ggctccttgggagtggtgggtgcaga

SEQ ID NO: 106494 - DNA, 26 bp, Homo sapiens
gctccttgggagtggtgggtgcagac

SEQ ID NO: 106495 - DNA, 26 bp, Homo sapiens
ctccttgggagtggtgggtgcagact

SEQ ID NO: 106496 - DNA, 26 bp, Homo sapiens
tccttgggagtggtgggtgcagactt

SEQ ID NO: 106497 - DNA, 26 bp, Homo sapiens
ccttgggagtggtgggtgcagacttg

SEQ ID NO: 106498 - DNA, 26 bp, Homo sapiens
cttgggagtggtgggtgcagacttgg

SEQ ID NO: 106499 - DNA, 26 bp, Homo sapiens
ttgggagtggtgggtgcagacttggt

SEQ ID NO: 106500 - DNA, 26 bp, Homo sapiens
tgggagtggtgggtgcagacttggtg

SEQ ID NO: 106501 - DNA, 26 bp, Homo sapiens
gggagtggtgggtgcagacttggtgg

SEQ ID NO: 106502 - DNA, 26 bp, Homo sapiens
ggagtggtgggtgcagacttggtggt

SEQ ID NO: 106503 - DNA, 26 bp, Homo sapiens
gagtggtgggtgcagacttggtggtg

SEQ ID NO: 106504 - DNA, 26 bp, Homo sapiens
agtggtgggtgcagacttggtggtgg

SEQ ID NO: 106505 - DNA, 26 bp, Homo sapiens
gtggtgggtgcagacttggtggtggt

SEQ ID NO: 106506 - DNA, 26 bp, Homo sapiens
tggtgggtgcagacttggtggtggtg

SEQ ID NO: 106507 - DNA, 26 bp, Homo sapiens
ggtgggtgcagacttggtggtggtgg

SEQ ID NO: 106508 - DNA, 26 bp, Homo sapiens
gtgggtgcagacttggtggtggtggg

SEQ ID NO: 106509 - DNA, 26 bp, Homo sapiens
tgggtgcagacttggtggtggtgggt

SEQ ID NO: 106510 - DNA, 26 bp, Homo sapiens
gggtgcagacttggtggtggtgggtg

SEQ ID NO: 106511 - DNA, 26 bp, Homo sapiens
ggtgcagacttggtggtggtgggtgc

SEQ ID NO: 106512 - DNA, 26 bp, Homo sapiens
gtgcagacttggtggtggtgggtgca

SEQ ID NO: 106513 - DNA, 26 bp, Homo sapiens
tgcagacttggtggtggtgggtgcag

SEQ ID NO: 106514 - DNA, 26 bp, Homo sapiens
gcagacttggtggtggtgggtgcagg

SEQ ID NO: 106515 - DNA, 26 bp, Homo sapiens
cagacttggtggtggtgggtgcaggc

SEQ ID NO: 106516 - DNA, 26 bp, Homo sapiens
agacttggtggtggtgggtgcaggct

SEQ ID NO: 106517 - DNA, 26 bp, Homo sapiens
gacttggtggtggtgggtgcaggctc

SEQ ID NO: 106518 - DNA, 26 bp, Homo sapiens
acttggtggtggtgggtgcaggctcc

SEQ ID NO: 106519 - DNA, 26 bp, Homo sapiens
cttggtggtggtgggtgcaggctcct

SEQ ID NO: 106520 - DNA, 26 bp, Homo sapiens
ttggtggtggtgggtgcaggctcctt

SEQ ID NO: 106521 - DNA, 26 bp, Homo sapiens
tggtggtggtgggtgcaggctccttg

SEQ ID NO: 106522 - DNA, 26 bp, Homo sapiens
ggtggtggtgggtgcaggctccttgg

SEQ ID NO: 106523 - DNA, 26 bp, Homo sapiens
gtggtggtgggtgcaggctccttggg

SEQ ID NO: 106524 - DNA, 26 bp, Homo sapiens
tggtggtgggtgcaggctccttgggg

SEQ ID NO: 106525 - DNA, 26 bp, Homo sapiens
ggtggtgggtgcaggctccttggggg

SEQ ID NO: 106526 - DNA, 26 bp, Homo sapiens
gtggtgggtgcaggctccttgggggt

SEQ ID NO: 106527 - DNA, 26 bp, Homo sapiens
tggtgggtgcaggctccttgggggtg

SEQ ID NO: 106528 - DNA, 26 bp, Homo sapiens
ggtgggtgcaggctccttgggggtgg

SEQ ID NO: 106529 - DNA, 26 bp, Homo sapiens
gtgggtgcaggctccttgggggtggt

SEQ ID NO: 106530 - DNA, 26 bp, Homo sapiens
tgggtgcaggctccttgggggtggtg

SEQ ID NO: 106531 - DNA, 26 bp, Homo sapiens
gggtgcaggctccttgggggtggtgg

SEQ ID NO: 106532 - DNA, 26 bp, Homo sapiens
ggtgcaggctccttgggggtggtggg

SEQ ID NO: 106533 - DNA, 26 bp, Homo sapiens
gtgcaggctccttgggggtggtgggt

SEQ ID NO: 106534 - DNA, 26 bp, Homo sapiens
tgcaggctccttgggggtggtgggtg

SEQ ID NO: 106535 - DNA, 26 bp, Homo sapiens
gcaggctccttgggggtggtgggtgc

SEQ ID NO: 106536 - DNA, 26 bp, Homo sapiens
caggctccttgggggtggtgggtgca

SEQ ID NO: 106537 - DNA, 26 bp, Homo sapiens
aggctccttgggggtggtgggtgcag

SEQ ID NO: 106538 - DNA, 26 bp, Homo sapiens
ggctccttgggggtggtgggtgcaga

SEQ ID NO: 106539 - DNA, 26 bp, Homo sapiens
gctccttgggggtggtgggtgcagac

SEQ ID NO: 106540 - DNA, 26 bp, Homo sapiens
ctccttgggggtggtgggtgcagact

SEQ ID NO: 106541 - DNA, 26 bp, Homo sapiens
tccttgggggtggtgggtgcagactt

SEQ ID NO: 106542 - DNA, 26 bp, Homo sapiens
ccttgggggtggtgggtgcagacttg

SEQ ID NO: 106543 - DNA, 26 bp, Homo sapiens
cttgggggtggtgggtgcagacttga

SEQ ID NO: 106544 - DNA, 26 bp, Homo sapiens
ttgggggtggtgggtgcagacttgat

SEQ ID NO: 106545 - DNA, 26 bp, Homo sapiens
tgggggtggtgggtgcagacttgatg

SEQ ID NO: 106546 - DNA, 26 bp, Homo sapiens
gggggtggtgggtgcagacttgatgg

SEQ ID NO: 106547 - DNA, 26 bp, Homo sapiens
ggggtggtgggtgcagacttgatggt

SEQ ID NO: 106548 - DNA, 26 bp, Homo sapiens
gggtggtgggtgcagacttgatggtg

SEQ ID NO: 106549 - DNA, 26 bp, Homo sapiens
ggtggtgggtgcagacttgatggtgg

SEQ ID NO: 106550 - DNA, 26 bp, Homo sapiens
gtggtgggtgcagacttgatggtggt

SEQ ID NO: 106551 - DNA, 26 bp, Homo sapiens
tggtgggtgcagacttgatggtggta

SEQ ID NO: 106552 - DNA, 26 bp, Homo sapiens
ggtgggtgcagacttgatggtggtag

SEQ ID NO: 106553 - DNA, 26 bp, Homo sapiens
gtgggtgcagacttgatggtggtagg

SEQ ID NO: 106554 - DNA, 26 bp, Homo sapiens
tgggtgcagacttgatggtggtaggt

SEQ ID NO: 106555 - DNA, 26 bp, Homo sapiens
gggtgcagacttgatggtggtaggtg

SEQ ID NO: 106556 - DNA, 26 bp, Homo sapiens
ggtgcagacttgatggtggtaggtgt

SEQ ID NO: 106557 - DNA, 26 bp, Homo sapiens
gtgcagacttgatggtggtaggtgtg

SEQ ID NO: 106558 - DNA, 26 bp, Homo sapiens
tgcagacttgatggtggtaggtgtgg

SEQ ID NO: 106559 - DNA, 26 bp, Homo sapiens
gcagacttgatggtggtaggtgtggg

SEQ ID NO: 106560 - DNA, 26 bp, Homo sapiens
cagacttgatggtggtaggtgtgggc

SEQ ID NO: 106561 - DNA, 26 bp, Homo sapiens
agacttgatggtggtaggtgtgggct

SEQ ID NO: 106562 - DNA, 26 bp, Homo sapiens
gacttgatggtggtaggtgtgggctc

SEQ ID NO: 106563 - DNA, 26 bp, Homo sapiens
acttgatggtggtaggtgtgggctct

SEQ ID NO: 106564 - DNA, 26 bp, Homo sapiens
cttgatggtggtaggtgtgggctctt

SEQ ID NO: 106565 - DNA, 26 bp, Homo sapiens
ttgatggtggtaggtgtgggctcttt

SEQ ID NO: 106566 - DNA, 26 bp, Homo sapiens
tgatggtggtaggtgtgggctctttg

SEQ ID NO: 106567 - DNA, 26 bp, Homo sapiens
gatggtggtaggtgtgggctctttgg

SEQ ID NO: 106568 - DNA, 26 bp, Homo sapiens
atggtggtaggtgtgggctctttggg

SEQ ID NO: 106569 - DNA, 26 bp, Homo sapiens
tggtggtaggtgtgggctctttgggt

SEQ ID NO: 106570 - DNA, 26 bp, Homo sapiens
ggtggtaggtgtgggctctttgggtg

SEQ ID NO: 106571 - DNA, 26 bp, Homo sapiens
gtggtaggtgtgggctctttgggtgt

SEQ ID NO: 106572 - DNA, 26 bp, Homo sapiens
tggtaggtgtgggctctttgggtgtg

SEQ ID NO: 106573 - DNA, 26 bp, Homo sapiens
ggtaggtgtgggctctttgggtgtgg

SEQ ID NO: 106574 - DNA, 26 bp, Homo sapiens
gtaggtgtgggctctttgggtgtggt

SEQ ID NO: 106575 - DNA, 26 bp, Homo sapiens
taggtgtgggctctttgggtgtggta

SEQ ID NO: 106576 - DNA, 26 bp, Homo sapiens
aggtgtgggctctttgggtgtggtag

SEQ ID NO: 106577 - DNA, 26 bp, Homo sapiens
ggtgtgggctctttgggtgtggtaga

SEQ ID NO: 106578 - DNA, 26 bp, Homo sapiens
gtgtgggctctttgggtgtggtagat

SEQ ID NO: 106579 - DNA, 26 bp, Homo sapiens
tgtgggctctttgggtgtggtagatg

SEQ ID NO: 106580 - DNA, 26 bp, Homo sapiens
gtgggctctttgggtgtggtagatgc

SEQ ID NO: 106581 - DNA, 26 bp, Homo sapiens
tgggctctttgggtgtggtagatgca

SEQ ID NO: 106582 - DNA, 26 bp, Homo sapiens
gggctctttgggtgtggtagatgcag

SEQ ID NO: 106583 - DNA, 26 bp, Homo sapiens
ggctctttgggtgtggtagatgcagg

SEQ ID NO: 106584 - DNA, 26 bp, Homo sapiens
gctctttgggtgtggtagatgcaggc

SEQ ID NO: 106585 - DNA, 26 bp, Homo sapiens
ctctttgggtgtggtagatgcaggct

SEQ ID NO: 106586 - DNA, 26 bp, Homo sapiens
tctttgggtgtggtagatgcaggctc

SEQ ID NO: 106587 - DNA, 26 bp, Homo sapiens
ctttgggtgtggtagatgcaggctcc

SEQ ID NO: 106588 - DNA, 26 bp, Homo sapiens
tttgggtgtggtagatgcaggctcct

SEQ ID NO: 106589 - DNA, 26 bp, Homo sapiens
ttgggtgtggtagatgcaggctcctt

SEQ ID NO: 106590 - DNA, 26 bp, Homo sapiens
tgggtgtggtagatgcaggctccttg

SEQ ID NO: 106591 - DNA, 26 bp, Homo sapiens
gggtgtggtagatgcaggctccttgg

SEQ ID NO: 106592 - DNA, 26 bp, Homo sapiens
ggtgtggtagatgcaggctccttggg

SEQ ID NO: 106593 - DNA, 26 bp, Homo sapiens
gtgtggtagatgcaggctccttggga

SEQ ID NO: 106594 - DNA, 26 bp, Homo sapiens
tgtggtagatgcaggctccttgggag

SEQ ID NO: 106595 - DNA, 26 bp, Homo sapiens
gtggtagatgcaggctccttgggagt

SEQ ID NO: 106596 - DNA, 26 bp, Homo sapiens
tggtagatgcaggctccttgggagtg

SEQ ID NO: 106597 - DNA, 26 bp, Homo sapiens
ggtagatgcaggctccttgggagtgg

SEQ ID NO: 106598 - DNA, 26 bp, Homo sapiens
gtagatgcaggctccttgggagtggt

SEQ ID NO: 106599 - DNA, 26 bp, Homo sapiens
tagatgcaggctccttgggagtggtg

SEQ ID NO: 106600 - DNA, 26 bp, Homo sapiens
agatgcaggctccttgggagtggtgg

SEQ ID NO: 106601 - DNA, 26 bp, Homo sapiens
gatgcaggctccttgggagtggtggg

SEQ ID NO: 106602 - DNA, 26 bp, Homo sapiens
atgcaggctccttgggagtggtgggc

SEQ ID NO: 106603 - DNA, 26 bp, Homo sapiens
tgcaggctccttgggagtggtgggcg

SEQ ID NO: 106604 - DNA, 26 bp, Homo sapiens
gcaggctccttgggagtggtgggcgt

SEQ ID NO: 106605 - DNA, 26 bp, Homo sapiens
caggctccttgggagtggtgggcgtg

SEQ ID NO: 106606 - DNA, 26 bp, Homo sapiens
aggctccttgggagtggtgggcgtgg

SEQ ID NO: 106607 - DNA, 26 bp, Homo sapiens
ggctccttgggagtggtgggcgtggg

SEQ ID NO: 106608 - DNA, 26 bp, Homo sapiens
gctccttgggagtggtgggcgtgggc

SEQ ID NO: 106609 - DNA, 26 bp, Homo sapiens
ctccttgggagtggtgggcgtgggct

SEQ ID NO: 106610 - DNA, 26 bp, Homo sapiens
tccttgggagtggtgggcgtgggctc

SEQ ID NO: 106611 - DNA, 26 bp, Homo sapiens
ccttgggagtggtgggcgtgggctcc

SEQ ID NO: 106612 - DNA, 26 bp, Homo sapiens
cttgggagtggtgggcgtgggctcct

SEQ ID NO: 106613 - DNA, 26 bp, Homo sapiens
ttgggagtggtgggcgtgggctcctt

SEQ ID NO: 106614 - DNA, 26 bp, Homo sapiens
tgggagtggtgggcgtgggctccttg

SEQ ID NO: 106615 - DNA, 26 bp, Homo sapiens
gggagtggtgggcgtgggctccttgg

SEQ ID NO: 106616 - DNA, 26 bp, Homo sapiens
ggagtggtgggcgtgggctccttggg

SEQ ID NO: 106617 - DNA, 26 bp, Homo sapiens
gagtggtgggcgtgggctccttggga

SEQ ID NO: 106618 - DNA, 26 bp, Homo sapiens
agtggtgggcgtgggctccttgggag

SEQ ID NO: 106619 - DNA, 26 bp, Homo sapiens
gtggtgggcgtgggctccttgggagt

SEQ ID NO: 106620 - DNA, 26 bp, Homo sapiens
tggtgggcgtgggctccttgggagtg

SEQ ID NO: 106621 - DNA, 26 bp, Homo sapiens
ggtgggcgtgggctccttgggagtgg

SEQ ID NO: 106622 - DNA, 26 bp, Homo sapiens
gtgggcgtgggctccttgggagtggt

SEQ ID NO: 106623 - DNA, 26 bp, Homo sapiens
tgggcgtgggctccttgggagtggtg

SEQ ID NO: 106624 - DNA, 26 bp, Homo sapiens
gggcgtgggctccttgggagtggtga

SEQ ID NO: 106625 - DNA, 26 bp, Homo sapiens
ggcgtgggctccttgggagtggtgag

SEQ ID NO: 106626 - DNA, 26 bp, Homo sapiens
gcgtgggctccttgggagtggtgaga

SEQ ID NO: 106627 - DNA, 26 bp, Homo sapiens
cgtgggctccttgggagtggtgagag

SEQ ID NO: 106628 - DNA, 26 bp, Homo sapiens
gtgggctccttgggagtggtgagagc

SEQ ID NO: 106629 - DNA, 26 bp, Homo sapiens
tgggctccttgggagtggtgagagca

SEQ ID NO: 106630 - DNA, 26 bp, Homo sapiens
gggctccttgggagtggtgagagcag

SEQ ID NO: 106631 - DNA, 26 bp, Homo sapiens
ggctccttgggagtggtgagagcagg

SEQ ID NO: 106632 - DNA, 26 bp, Homo sapiens
gctccttgggagtggtgagagcaggg

SEQ ID NO: 106633 - DNA, 26 bp, Homo sapiens
ctccttgggagtggtgagagcagggc

SEQ ID NO: 106634 - DNA, 26 bp, Homo sapiens
tccttgggagtggtgagagcagggcc

SEQ ID NO: 106635 - DNA, 26 bp, Homo sapiens
ccttgggagtggtgagagcagggcct

SEQ ID NO: 106636 - DNA, 26 bp, Homo sapiens
cttgggagtggtgagagcagggcctt

SEQ ID NO: 106637 - DNA, 26 bp, Homo sapiens
ttgggagtggtgagagcagggccttt

SEQ ID NO: 106638 - DNA, 26 bp, Homo sapiens
tgggagtggtgagagcagggcctttg

SEQ ID NO: 106639 - DNA, 26 bp, Homo sapiens
gggagtggtgagagcagggcctttgg

SEQ ID NO: 106640 - DNA, 26 bp, Homo sapiens
ggagtggtgagagcagggcctttggt

SEQ ID NO: 106641 - DNA, 26 bp, Homo sapiens
gagtggtgagagcagggcctttggtt

SEQ ID NO: 106642 - DNA, 26 bp, Homo sapiens
agtggtgagagcagggcctttggttg

SEQ ID NO: 106643 - DNA, 26 bp, Homo sapiens
gtggtgagagcagggcctttggttgt

SEQ ID NO: 106644 - DNA, 26 bp, Homo sapiens
tggtgagagcagggcctttggttgta

SEQ ID NO: 106645 - DNA, 26 bp, Homo sapiens
ggtgagagcagggcctttggttgtag

SEQ ID NO: 106646 - DNA, 26 bp, Homo sapiens
gtgagagcagggcctttggttgtagt

SEQ ID NO: 106647 - DNA, 26 bp, Homo sapiens
tgagagcagggcctttggttgtagtt

SEQ ID NO: 106648 - DNA, 26 bp, Homo sapiens
gagagcagggcctttggttgtagttt

SEQ ID NO: 106649 - DNA, 26 bp, Homo sapiens
agagcagggcctttggttgtagtttc

SEQ ID NO: 106650 - DNA, 26 bp, Homo sapiens
gagcagggcctttggttgtagtttca

SEQ ID NO: 106651 - DNA, 26 bp, Homo sapiens
agcagggcctttggttgtagtttcag

SEQ ID NO: 106652 - DNA, 26 bp, Homo sapiens
gcagggcctttggttgtagtttcagc

SEQ ID NO: 106653 - DNA, 26 bp, Homo sapiens
cagggcctttggttgtagtttcagct

SEQ ID NO: 106654 - DNA, 26 bp, Homo sapiens
agggcctttggttgtagtttcagctt

SEQ ID NO: 106655 - DNA, 26 bp, Homo sapiens
gggcctttggttgtagtttcagcttt

SEQ ID NO: 106656 - DNA, 26 bp, Homo sapiens
ggcctttggttgtagtttcagctttg

SEQ ID NO: 106657 - DNA, 26 bp, Homo sapiens
gcctttggttgtagtttcagctttgg

SEQ ID NO: 106658 - DNA, 26 bp, Homo sapiens
cctttggttgtagtttcagctttggg

SEQ ID NO: 106659 - DNA, 26 bp, Homo sapiens
ctttggttgtagtttcagctttgggt

SEQ ID NO: 106660 - DNA, 26 bp, Homo sapiens
tttggttgtagtttcagctttgggtg

SEQ ID NO: 106661 - DNA, 26 bp, Homo sapiens
ttggttgtagtttcagctttgggtgt

SEQ ID NO: 106662 - DNA, 26 bp, Homo sapiens
tggttgtagtttcagctttgggtgta

SEQ ID NO: 106663 - DNA, 26 bp, Homo sapiens
ggttgtagtttcagctttgggtgtag

SEQ ID NO: 106664 - DNA, 26 bp, Homo sapiens
gttgtagtttcagctttgggtgtagg

SEQ ID NO: 106665 - DNA, 26 bp, Homo sapiens
ttgtagtttcagctttgggtgtaggt

SEQ ID NO: 106666 - DNA, 26 bp, Homo sapiens
tgtagtttcagctttgggtgtaggtt

SEQ ID NO: 106667 - DNA, 26 bp, Homo sapiens
gtagtttcagctttgggtgtaggttt

SEQ ID NO: 106668 - DNA, 26 bp, Homo sapiens
tagtttcagctttgggtgtaggttta

SEQ ID NO: 106669 - DNA, 26 bp, Homo sapiens
agtttcagctttgggtgtaggtttag

SEQ ID NO: 106670 - DNA, 26 bp, Homo sapiens
gtttcagctttgggtgtaggtttagc

SEQ ID NO: 106671 - DNA, 26 bp, Homo sapiens
tttcagctttgggtgtaggtttagcc

SEQ ID NO: 106672 - DNA, 26 bp, Homo sapiens
ttcagctttgggtgtaggtttagcca

SEQ ID NO: 106673 - DNA, 26 bp, Homo sapiens
tcagctttgggtgtaggtttagccag

SEQ ID NO: 106674 - DNA, 26 bp, Homo sapiens
cagctttgggtgtaggtttagccagc

SEQ ID NO: 106675 - DNA, 26 bp, Homo sapiens
agctttgggtgtaggtttagccagca

SEQ ID NO: 106676 - DNA, 26 bp, Homo sapiens
gctttgggtgtaggtttagccagcac

SEQ ID NO: 106677 - DNA, 26 bp, Homo sapiens
ctttgggtgtaggtttagccagcact

SEQ ID NO: 106678 - DNA, 26 bp, Homo sapiens
tttgggtgtaggtttagccagcactt

SEQ ID NO: 106679 - DNA, 26 bp, Homo sapiens
ttgggtgtaggtttagccagcacttt

SEQ ID NO: 106680 - DNA, 26 bp, Homo sapiens
tgggtgtaggtttagccagcacttta

SEQ ID NO: 106681 - DNA, 26 bp, Homo sapiens
gggtgtaggtttagccagcactttag

SEQ ID NO: 106682 - DNA, 26 bp, Homo sapiens
ggtgtaggtttagccagcactttaga

SEQ ID NO: 106683 - DNA, 26 bp, Homo sapiens
gtgtaggtttagccagcactttagat

SEQ ID NO: 106684 - DNA, 26 bp, Homo sapiens
tgtaggtttagccagcactttagatg

SEQ ID NO: 106685 - DNA, 26 bp, Homo sapiens
gtaggtttagccagcactttagatgt

SEQ ID NO: 106686 - DNA, 26 bp, Homo sapiens
taggtttagccagcactttagatgtg

SEQ ID NO: 106687 - DNA, 26 bp, Homo sapiens
aggtttagccagcactttagatgtgg

SEQ ID NO: 106688 - DNA, 26 bp, Homo sapiens
ggtttagccagcactttagatgtggg

SEQ ID NO: 106689 - DNA, 26 bp, Homo sapiens
gtttagccagcactttagatgtgggt

SEQ ID NO: 106690 - DNA, 26 bp, Homo sapiens
tttagccagcactttagatgtgggtg

SEQ ID NO: 106691 - DNA, 26 bp, Homo sapiens
ttagccagcactttagatgtgggtgc

SEQ ID NO: 106692 - DNA, 26 bp, Homo sapiens
tagccagcactttagatgtgggtgct

SEQ ID NO: 106693 - DNA, 26 bp, Homo sapiens
agccagcactttagatgtgggtgcta

SEQ ID NO: 106694 - DNA, 26 bp, Homo sapiens
gccagcactttagatgtgggtgctaa

SEQ ID NO: 106695 - DNA, 26 bp, Homo sapiens
ccagcactttagatgtgggtgctaaa

SEQ ID NO: 106696 - DNA, 26 bp, Homo sapiens
cagcactttagatgtgggtgctaaat

SEQ ID NO: 106697 - DNA, 26 bp, Homo sapiens
agcactttagatgtgggtgctaaatc

SEQ ID NO: 106698 - DNA, 26 bp, Homo sapiens
gcactttagatgtgggtgctaaatct

SEQ ID NO: 106699 - DNA, 26 bp, Homo sapiens
cactttagatgtgggtgctaaatctt

SEQ ID NO: 106700 - DNA, 26 bp, Homo sapiens
actttagatgtgggtgctaaatcttt

SEQ ID NO: 106701 - DNA, 26 bp, Homo sapiens
ctttagatgtgggtgctaaatcttta

SEQ ID NO: 106702 - DNA, 26 bp, Homo sapiens
tttagatgtgggtgctaaatctttag

SEQ ID NO: 106703 - DNA, 26 bp, Homo sapiens
ttagatgtgggtgctaaatctttagc

SEQ ID NO: 106704 - DNA, 26 bp, Homo sapiens
tagatgtgggtgctaaatctttagca

SEQ ID NO: 106705 - DNA, 26 bp, Homo sapiens
agatgtgggtgctaaatctttagcag

SEQ ID NO: 106706 - DNA, 26 bp, Homo sapiens
gatgtgggtgctaaatctttagcaga

SEQ ID NO: 106707 - DNA, 26 bp, Homo sapiens
atgtgggtgctaaatctttagcagat

SEQ ID NO: 106708 - DNA, 26 bp, Homo sapiens
tgtgggtgctaaatctttagcagatg

SEQ ID NO: 106709 - DNA, 26 bp, Homo sapiens
gtgggtgctaaatctttagcagatgt

SEQ ID NO: 106710 - DNA, 26 bp, Homo sapiens
tgggtgctaaatctttagcagatgtt

SEQ ID NO: 106711 - DNA, 26 bp, Homo sapiens
gggtgctaaatctttagcagatgttt

SEQ ID NO: 106712 - DNA, 26 bp, Homo sapiens
ggtgctaaatctttagcagatgtttt

SEQ ID NO: 106713 - DNA, 26 bp, Homo sapiens
gtgctaaatctttagcagatgttttc

SEQ ID NO: 106714 - DNA, 26 bp, Homo sapiens
tgctaaatctttagcagatgttttct

SEQ ID NO: 106715 - DNA, 26 bp, Homo sapiens
gctaaatctttagcagatgttttctc

SEQ ID NO: 106716 - DNA, 26 bp, Homo sapiens
ctaaatctttagcagatgttttctct

SEQ ID NO: 106717 - DNA, 26 bp, Homo sapiens
taaatctttagcagatgttttctcta

SEQ ID NO: 106718 - DNA, 26 bp, Homo sapiens
aaatctttagcagatgttttctctat

SEQ ID NO: 106719 - DNA, 26 bp, Homo sapiens
aatctttagcagatgttttctctata

SEQ ID NO: 106720 - DNA, 26 bp, Homo sapiens
atctttagcagatgttttctctatac

SEQ ID NO: 106721 - DNA, 26 bp, Homo sapiens
tctttagcagatgttttctctatact

SEQ ID NO: 106722 - DNA, 26 bp, Homo sapiens
ctttagcagatgttttctctatactt

SEQ ID NO: 106723 - DNA, 26 bp, Homo sapiens
tttagcagatgttttctctatacttt

SEQ ID NO: 106724 - DNA, 26 bp, Homo sapiens
ttagcagatgttttctctatactttg

SEQ ID NO: 106725 - DNA, 26 bp, Homo sapiens
tagcagatgttttctctatactttgt

SEQ ID NO: 106726 - DNA, 26 bp, Homo sapiens
agcagatgttttctctatactttgtg

SEQ ID NO: 106727 - DNA, 26 bp, Homo sapiens
gcagatgttttctctatactttgtgt

SEQ ID NO: 106728 - DNA, 26 bp, Homo sapiens
cagatgttttctctatactttgtgtc

SEQ ID NO: 106729 - DNA, 26 bp, Homo sapiens
agatgttttctctatactttgtgtct

SEQ ID NO: 106730 - DNA, 26 bp, Homo sapiens
gatgttttctctatactttgtgtctc

SEQ ID NO: 106731 - DNA, 26 bp, Homo sapiens
atgttttctctatactttgtgtctct

SEQ ID NO: 106732 - DNA, 26 bp, Homo sapiens
tgttttctctatactttgtgtctctt

SEQ ID NO: 106733 - DNA, 26 bp, Homo sapiens
gttttctctatactttgtgtctcttt

SEQ ID NO: 106734 - DNA, 26 bp, Homo sapiens
ttttctctatactttgtgtctcttta

SEQ ID NO: 106735 - DNA, 26 bp, Homo sapiens
tttctctatactttgtgtctctttag

SEQ ID NO: 106736 - DNA, 26 bp, Homo sapiens
ttctctatactttgtgtctctttagc

SEQ ID NO: 106737 - DNA, 26 bp, Homo sapiens
tctctatactttgtgtctctttagcg

SEQ ID NO: 106738 - DNA, 26 bp, Homo sapiens
ctctatactttgtgtctctttagcgg

SEQ ID NO: 106739 - DNA, 26 bp, Homo sapiens
tctatactttgtgtctctttagcgga

SEQ ID NO: 106740 - DNA, 26 bp, Homo sapiens
ctatactttgtgtctctttagcggaa

SEQ ID NO: 106741 - DNA, 26 bp, Homo sapiens
tatactttgtgtctctttagcggaag

SEQ ID NO: 106742 - DNA, 26 bp, Homo sapiens
atactttgtgtctctttagcggaagt

SEQ ID NO: 106743 - DNA, 26 bp, Homo sapiens
tactttgtgtctctttagcggaagta

SEQ ID NO: 106744 - DNA, 26 bp, Homo sapiens
actttgtgtctctttagcggaagtag

SEQ ID NO: 106745 - DNA, 26 bp, Homo sapiens
ctttgtgtctctttagcggaagtagt

SEQ ID NO: 106746 - DNA, 26 bp, Homo sapiens
tttgtgtctctttagcggaagtagtc

SEQ ID NO: 106747 - DNA, 26 bp, Homo sapiens
ttgtgtctctttagcggaagtagtct

SEQ ID NO: 106748 - DNA, 26 bp, Homo sapiens
tgtgtctctttagcggaagtagtctt

SEQ ID NO: 106749 - DNA, 26 bp, Homo sapiens
gtgtctctttagcggaagtagtcttc

SEQ ID NO: 106750 - DNA, 26 bp, Homo sapiens
tgtctctttagcggaagtagtcttct

SEQ ID NO: 106751 - DNA, 26 bp, Homo sapiens
gtctctttagcggaagtagtcttctc

SEQ ID NO: 106752 - DNA, 26 bp, Homo sapiens
tctctttagcggaagtagtcttctct

SEQ ID NO: 106753 - DNA, 26 bp, Homo sapiens
ctctttagcggaagtagtcttctctt

SEQ ID NO: 106754 - DNA, 26 bp, Homo sapiens
tctttagcggaagtagtcttctcttt

SEQ ID NO: 106755 - DNA, 26 bp, Homo sapiens
ctttagcggaagtagtcttctctttt

SEQ ID NO: 106756 - DNA, 26 bp, Homo sapiens
tttagcggaagtagtcttctcttttc

SEQ ID NO: 106757 - DNA, 26 bp, Homo sapiens
ttagcggaagtagtcttctcttttcc

SEQ ID NO: 106758 - DNA, 26 bp, Homo sapiens
tagcggaagtagtcttctcttttcca

SEQ ID NO: 106759 - DNA, 26 bp, Homo sapiens
agcggaagtagtcttctcttttccat

SEQ ID NO: 106760 - DNA, 26 bp, Homo sapiens
gcggaagtagtcttctcttttccatc

SEQ ID NO: 106761 - DNA, 26 bp, Homo sapiens
cggaagtagtcttctcttttccatca

SEQ ID NO: 106762 - DNA, 26 bp, Homo sapiens
ggaagtagtcttctcttttccatcag

SEQ ID NO: 106763 - DNA, 26 bp, Homo sapiens
gaagtagtcttctcttttccatcagt

SEQ ID NO: 106764 - DNA, 26 bp, Homo sapiens
aagtagtcttctcttttccatcagtt

SEQ ID NO: 106765 - DNA, 26 bp, Homo sapiens
agtagtcttctcttttccatcagttg

SEQ ID NO: 106766 - DNA, 26 bp, Homo sapiens
gtagtcttctcttttccatcagttga

SEQ ID NO: 106767 - DNA, 26 bp, Homo sapiens
tagtcttctcttttccatcagttgaa

SEQ ID NO: 106768 - DNA, 26 bp, Homo sapiens
agtcttctcttttccatcagttgaag

SEQ ID NO: 106769 - DNA, 26 bp, Homo sapiens
gtcttctcttttccatcagttgaagt

SEQ ID NO: 106770 - DNA, 26 bp, Homo sapiens
tcttctcttttccatcagttgaagtc

SEQ ID NO: 106771 - DNA, 26 bp, Homo sapiens
cttctcttttccatcagttgaagtct

SEQ ID NO: 106772 - DNA, 26 bp, Homo sapiens
ttctcttttccatcagttgaagtctg

SEQ ID NO: 106773 - DNA, 26 bp, Homo sapiens
tctcttttccatcagttgaagtctgt

SEQ ID NO: 106774 - DNA, 26 bp, Homo sapiens
ctcttttccatcagttgaagtctgtt

SEQ ID NO: 106775 - DNA, 26 bp, Homo sapiens
tcttttccatcagttgaagtctgttt

SEQ ID NO: 106776 - DNA, 26 bp, Homo sapiens
cttttccatcagttgaagtctgttta

SEQ ID NO: 106777 - DNA, 26 bp, Homo sapiens
ttttccatcagttgaagtctgtttat

SEQ ID NO: 106778 - DNA, 26 bp, Homo sapiens
tttccatcagttgaagtctgtttatt

SEQ ID NO: 106779 - DNA, 26 bp, Homo sapiens
ttccatcagttgaagtctgtttattt

SEQ ID NO: 106780 - DNA, 26 bp, Homo sapiens
tccatcagttgaagtctgtttatttg

SEQ ID NO: 106781 - DNA, 26 bp, Homo sapiens
ccatcagttgaagtctgtttatttgt

SEQ ID NO: 106782 - DNA, 26 bp, Homo sapiens
catcagttgaagtctgtttatttgtt

SEQ ID NO: 106783 - DNA, 26 bp, Homo sapiens
atcagttgaagtctgtttatttgttg

SEQ ID NO: 106784 - DNA, 26 bp, Homo sapiens
tcagttgaagtctgtttatttgttgt

SEQ ID NO: 106785 - DNA, 26 bp, Homo sapiens
cagttgaagtctgtttatttgttgta

SEQ ID NO: 106786 - DNA, 26 bp, Homo sapiens
agttgaagtctgtttatttgttgtag

SEQ ID NO: 106787 - DNA, 26 bp, Homo sapiens
gttgaagtctgtttatttgttgtagt

SEQ ID NO: 106788 - DNA, 26 bp, Homo sapiens
ttgaagtctgtttatttgttgtagta

SEQ ID NO: 106789 - DNA, 26 bp, Homo sapiens
tgaagtctgtttatttgttgtagtag

SEQ ID NO: 106790 - DNA, 26 bp, Homo sapiens
gaagtctgtttatttgttgtagtagt

SEQ ID NO: 106791 - DNA, 26 bp, Homo sapiens
aagtctgtttatttgttgtagtagtt

SEQ ID NO: 106792 - DNA, 26 bp, Homo sapiens
agtctgtttatttgttgtagtagttt

SEQ ID NO: 106793 - DNA, 26 bp, Homo sapiens
gtctgtttatttgttgtagtagtttc

SEQ ID NO: 106794 - DNA, 26 bp, Homo sapiens
tctgtttatttgttgtagtagtttct

SEQ ID NO: 106795 - DNA, 26 bp, Homo sapiens
ctgtttatttgttgtagtagtttctt

SEQ ID NO: 106796 - DNA, 26 bp, Homo sapiens
tgtttatttgttgtagtagtttcttt

SEQ ID NO: 106797 - DNA, 26 bp, Homo sapiens
gtttatttgttgtagtagtttcttta

SEQ ID NO: 106798 - DNA, 26 bp, Homo sapiens
tttatttgttgtagtagtttctttag

SEQ ID NO: 106799 - DNA, 26 bp, Homo sapiens
ttatttgttgtagtagtttctttagt

SEQ ID NO: 106800 - DNA, 26 bp, Homo sapiens
tatttgttgtagtagtttctttagtt

SEQ ID NO: 106801 - DNA, 26 bp, Homo sapiens
atttgttgtagtagtttctttagttt

SEQ ID NO: 106802 - DNA, 26 bp, Homo sapiens
tttgttgtagtagtttctttagtttc

SEQ ID NO: 106803 - DNA, 26 bp, Homo sapiens
ttgttgtagtagtttctttagtttca

SEQ ID NO: 106804 - DNA, 26 bp, Homo sapiens
tgttgtagtagtttctttagtttcaa

SEQ ID NO: 106805 - DNA, 26 bp, Homo sapiens
gttgtagtagtttctttagtttcaac

SEQ ID NO: 106806 - DNA, 26 bp, Homo sapiens
ttgtagtagtttctttagtttcaact

SEQ ID NO: 106807 - DNA, 26 bp, Homo sapiens
tgtagtagtttctttagtttcaactg

SEQ ID NO: 106808 - DNA, 26 bp, Homo sapiens
gtagtagtttctttagtttcaactgt

SEQ ID NO: 106809 - DNA, 26 bp, Homo sapiens
tagtagtttctttagtttcaactgtt

SEQ ID NO: 106810 - DNA, 26 bp, Homo sapiens
agtagtttctttagtttcaactgttg

SEQ ID NO: 106811 - DNA, 26 bp, Homo sapiens
gtagtttctttagtttcaactgttgt

SEQ ID NO: 106812 - DNA, 26 bp, Homo sapiens
tagtttctttagtttcaactgttgtc

SEQ ID NO: 106813 - DNA, 26 bp, Homo sapiens
agtttctttagtttcaactgttgtct

SEQ ID NO: 106814 - DNA, 26 bp, Homo sapiens
gtttctttagtttcaactgttgtctc

SEQ ID NO: 106815 - DNA, 26 bp, Homo sapiens
tttctttagtttcaactgttgtctct

SEQ ID NO: 106816 - DNA, 26 bp, Homo sapiens
ttctttagtttcaactgttgtctctt

SEQ ID NO: 106817 - DNA, 26 bp, Homo sapiens
tctttagtttcaactgttgtctcttt

SEQ ID NO: 106818 - DNA, 26 bp, Homo sapiens
ctttagtttcaactgttgtctcttta

SEQ ID NO: 106819 - DNA, 26 bp, Homo sapiens
tttagtttcaactgttgtctctttat

SEQ ID NO: 106820 - DNA, 26 bp, Homo sapiens
ttagtttcaactgttgtctctttatt

SEQ ID NO: 106821 - DNA, 26 bp, Homo sapiens
tagtttcaactgttgtctctttattc

SEQ ID NO: 106822 - DNA, 26 bp, Homo sapiens
agtttcaactgttgtctctttattca

SEQ ID NO: 106823 - DNA, 26 bp, Homo sapiens
gtttcaactgttgtctctttattcac

SEQ ID NO: 106824 - DNA, 26 bp, Homo sapiens
tttcaactgttgtctctttattcact

SEQ ID NO: 106825 - DNA, 26 bp, Homo sapiens
ttcaactgttgtctctttattcactg

SEQ ID NO: 106826 - DNA, 26 bp, Homo sapiens
tcaactgttgtctctttattcactgt

SEQ ID NO: 106827 - DNA, 26 bp, Homo sapiens
caactgttgtctctttattcactgtc

SEQ ID NO: 106828 - DNA, 26 bp, Homo sapiens
aactgttgtctctttattcactgtca

SEQ ID NO: 106829 - DNA, 26 bp, Homo sapiens
actgttgtctctttattcactgtcaa

SEQ ID NO: 106830 - DNA, 26 bp, Homo sapiens
ctgttgtctctttattcactgtcaaa

SEQ ID NO: 106831 - DNA, 26 bp, Homo sapiens
tgttgtctctttattcactgtcaaag

SEQ ID NO: 106832 - DNA, 26 bp, Homo sapiens
gttgtctctttattcactgtcaaaga

SEQ ID NO: 106833 - DNA, 26 bp, Homo sapiens
ttgtctctttattcactgtcaaagac

SEQ ID NO: 106834 - DNA, 26 bp, Homo sapiens
tgtctctttattcactgtcaaagacg

SEQ ID NO: 106835 - DNA, 26 bp, Homo sapiens
gtctctttattcactgtcaaagacgt

SEQ ID NO: 106836 - DNA, 26 bp, Homo sapiens
tctctttattcactgtcaaagacgtc

SEQ ID NO: 106837 - DNA, 26 bp, Homo sapiens
ctctttattcactgtcaaagacgtct

SEQ ID NO: 106838 - DNA, 26 bp, Homo sapiens
tctttattcactgtcaaagacgtctc

SEQ ID NO: 106839 - DNA, 26 bp, Homo sapiens
ctttattcactgtcaaagacgtctct

SEQ ID NO: 106840 - DNA, 26 bp, Homo sapiens
tttattcactgtcaaagacgtctctt

SEQ ID NO: 106841 - DNA, 26 bp, Homo sapiens
ttattcactgtcaaagacgtctcttt

SEQ ID NO: 106842 - DNA, 26 bp, Homo sapiens
tattcactgtcaaagacgtctcttta

SEQ ID NO: 106843 - DNA, 26 bp, Homo sapiens
attcactgtcaaagacgtctctttag

SEQ ID NO: 106844 - DNA, 26 bp, Homo sapiens
ttcactgtcaaagacgtctctttaga

SEQ ID NO: 106845 - DNA, 26 bp, Homo sapiens
tcactgtcaaagacgtctctttagat

SEQ ID NO: 106846 - DNA, 26 bp, Homo sapiens
cactgtcaaagacgtctctttagatg

SEQ ID NO: 106847 - DNA, 26 bp, Homo sapiens
actgtcaaagacgtctctttagatgt

SEQ ID NO: 106848 - DNA, 26 bp, Homo sapiens
ctgtcaaagacgtctctttagatgta

SEQ ID NO: 106849 - DNA, 26 bp, Homo sapiens
tgtcaaagacgtctctttagatgtat

SEQ ID NO: 106850 - DNA, 26 bp, Homo sapiens
gtcaaagacgtctctttagatgtatc

SEQ ID NO: 106851 - DNA, 26 bp, Homo sapiens
tcaaagacgtctctttagatgtatca

SEQ ID NO: 106852 - DNA, 26 bp, Homo sapiens
caaagacgtctctttagatgtatcag

SEQ ID NO: 106853 - DNA, 26 bp, Homo sapiens
aaagacgtctctttagatgtatcaga

SEQ ID NO: 106854 - DNA, 26 bp, Homo sapiens
aagacgtctctttagatgtatcagaa

SEQ ID NO: 106855 - DNA, 26 bp, Homo sapiens
agacgtctctttagatgtatcagaat

SEQ ID NO: 106856 - DNA, 26 bp, Homo sapiens
gacgtctctttagatgtatcagaatt

SEQ ID NO: 106857 - DNA, 26 bp, Homo sapiens
acgtctctttagatgtatcagaatta

SEQ ID NO: 106858 - DNA, 26 bp, Homo sapiens
cgtctctttagatgtatcagaattag

SEQ ID NO: 106859 - DNA, 26 bp, Homo sapiens
gtctctttagatgtatcagaattagg

SEQ ID NO: 106860 - DNA, 26 bp, Homo sapiens
tctctttagatgtatcagaattaggt

SEQ ID NO: 106861 - DNA, 26 bp, Homo sapiens
ctctttagatgtatcagaattaggtg

SEQ ID NO: 106862 - DNA, 26 bp, Homo sapiens
tctttagatgtatcagaattaggtgg

SEQ ID NO: 106863 - DNA, 26 bp, Homo sapiens
ctttagatgtatcagaattaggtgga

SEQ ID NO: 106864 - DNA, 26 bp, Homo sapiens
tttagatgtatcagaattaggtggaa

SEQ ID NO: 106865 - DNA, 26 bp, Homo sapiens
ttagatgtatcagaattaggtggaag

SEQ ID NO: 106866 - DNA, 26 bp, Homo sapiens
tagatgtatcagaattaggtggaaga

SEQ ID NO: 106867 - DNA, 26 bp, Homo sapiens
agatgtatcagaattaggtggaagac

SEQ ID NO: 106868 - DNA, 26 bp, Homo sapiens
gatgtatcagaattaggtggaagact

SEQ ID NO: 106869 - DNA, 26 bp, Homo sapiens
atgtatcagaattaggtggaagactg

SEQ ID NO: 106870 - DNA, 26 bp, Homo sapiens
tgtatcagaattaggtggaagactgg

SEQ ID NO: 106871 - DNA, 26 bp, Homo sapiens
gtatcagaattaggtggaagactggg

SEQ ID NO: 106872 - DNA, 26 bp, Homo sapiens
tatcagaattaggtggaagactgggt

SEQ ID NO: 106873 - DNA, 26 bp, Homo sapiens
atcagaattaggtggaagactgggtc

SEQ ID NO: 106874 - DNA, 26 bp, Homo sapiens
tcagaattaggtggaagactgggtct

SEQ ID NO: 106875 - DNA, 26 bp, Homo sapiens
cagaattaggtggaagactgggtctg

SEQ ID NO: 106876 - DNA, 26 bp, Homo sapiens
agaattaggtggaagactgggtctgg

SEQ ID NO: 106877 - DNA, 26 bp, Homo sapiens
gaattaggtggaagactgggtctggg

SEQ ID NO: 106878 - DNA, 26 bp, Homo sapiens
aattaggtggaagactgggtctggga

SEQ ID NO: 106879 - DNA, 26 bp, Homo sapiens
attaggtggaagactgggtctgggat

SEQ ID NO: 106880 - DNA, 26 bp, Homo sapiens
ttaggtggaagactgggtctgggatt

SEQ ID NO: 106881 - DNA, 26 bp, Homo sapiens
taggtggaagactgggtctgggattt

SEQ ID NO: 106882 - DNA, 26 bp, Homo sapiens
aggtggaagactgggtctgggattta

SEQ ID NO: 106883 - DNA, 26 bp, Homo sapiens
ggtggaagactgggtctgggatttat

SEQ ID NO: 106884 - DNA, 26 bp, Homo sapiens
gtggaagactgggtctgggatttatt

SEQ ID NO: 106885 - DNA, 26 bp, Homo sapiens
tggaagactgggtctgggatttattg

SEQ ID NO: 106886 - DNA, 26 bp, Homo sapiens
ggaagactgggtctgggatttattgg

SEQ ID NO: 106887 - DNA, 26 bp, Homo sapiens
gaagactgggtctgggatttattggt

SEQ ID NO: 106888 - DNA, 26 bp, Homo sapiens
aagactgggtctgggatttattggtt

SEQ ID NO: 106889 - DNA, 26 bp, Homo sapiens
agactgggtctgggatttattggttt

SEQ ID NO: 106890 - DNA, 26 bp, Homo sapiens
gactgggtctgggatttattggtttt

SEQ ID NO: 106891 - DNA, 26 bp, Homo sapiens
actgggtctgggatttattggttttg

SEQ ID NO: 106892 - DNA, 26 bp, Homo sapiens
ctgggtctgggatttattggttttgc

SEQ ID NO: 106893 - DNA, 26 bp, Homo sapiens
tgggtctgggatttattggttttgct

SEQ ID NO: 106894 - DNA, 26 bp, Homo sapiens
gggtctgggatttattggttttgctg

SEQ ID NO: 106895 - DNA, 26 bp, Homo sapiens
ggtctgggatttattggttttgctgt

SEQ ID NO: 106896 - DNA, 26 bp, Homo sapiens
gtctgggatttattggttttgctgtt

SEQ ID NO: 106897 - DNA, 26 bp, Homo sapiens
tctgggatttattggttttgctgttg

SEQ ID NO: 106898 - DNA, 26 bp, Homo sapiens
ctgggatttattggttttgctgttgt

SEQ ID NO: 106899 - DNA, 26 bp, Homo sapiens
tgggatttattggttttgctgttgtg

SEQ ID NO: 106900 - DNA, 26 bp, Homo sapiens
gggatttattggttttgctgttgtga

SEQ ID NO: 106901 - DNA, 26 bp, Homo sapiens
ggatttattggttttgctgttgtgat

SEQ ID NO: 106902 - DNA, 26 bp, Homo sapiens
gatttattggttttgctgttgtgatc

SEQ ID NO: 106903 - DNA, 26 bp, Homo sapiens
atttattggttttgctgttgtgatct

SEQ ID NO: 106904 - DNA, 26 bp, Homo sapiens
tttattggttttgctgttgtgatctt

SEQ ID NO: 106905 - DNA, 26 bp, Homo sapiens
ttattggttttgctgttgtgatcttg

SEQ ID NO: 106906 - DNA, 26 bp, Homo sapiens
tattggttttgctgttgtgatcttgg

SEQ ID NO: 106907 - DNA, 26 bp, Homo sapiens
attggttttgctgttgtgatcttggg

SEQ ID NO: 106908 - DNA, 26 bp, Homo sapiens
ttggttttgctgttgtgatcttggga

SEQ ID NO: 106909 - DNA, 26 bp, Homo sapiens
tggttttgctgttgtgatcttgggag

SEQ ID NO: 106910 - DNA, 26 bp, Homo sapiens
ggttttgctgttgtgatcttgggaga

SEQ ID NO: 106911 - DNA, 26 bp, Homo sapiens
gttttgctgttgtgatcttgggagat

SEQ ID NO: 106912 - DNA, 26 bp, Homo sapiens
ttttgctgttgtgatcttgggagatg

SEQ ID NO: 106913 - DNA, 26 bp, Homo sapiens
tttgctgttgtgatcttgggagatgt

SEQ ID NO: 106914 - DNA, 26 bp, Homo sapiens
ttgctgttgtgatcttgggagatgtg

SEQ ID NO: 106915 - DNA, 26 bp, Homo sapiens
tgctgttgtgatcttgggagatgtgc

SEQ ID NO: 106916 - DNA, 26 bp, Homo sapiens
gctgttgtgatcttgggagatgtgct

SEQ ID NO: 106917 - DNA, 26 bp, Homo sapiens
ctgttgtgatcttgggagatgtgctg

SEQ ID NO: 106918 - DNA, 26 bp, Homo sapiens
tgttgtgatcttgggagatgtgctga

SEQ ID NO: 106919 - DNA, 26 bp, Homo sapiens
gttgtgatcttgggagatgtgctgac

SEQ ID NO: 106920 - DNA, 26 bp, Homo sapiens
ttgtgatcttgggagatgtgctgact

SEQ ID NO: 106921 - DNA, 26 bp, Homo sapiens
tgtgatcttgggagatgtgctgactt

SEQ ID NO: 106922 - DNA, 26 bp, Homo sapiens
gtgatcttgggagatgtgctgacttt

SEQ ID NO: 106923 - DNA, 26 bp, Homo sapiens
tgatcttgggagatgtgctgacttta

SEQ ID NO: 106924 - DNA, 26 bp, Homo sapiens
gatcttgggagatgtgctgactttat

SEQ ID NO: 106925 - DNA, 26 bp, Homo sapiens
atcttgggagatgtgctgactttatt

SEQ ID NO: 106926 - DNA, 26 bp, Homo sapiens
tcttgggagatgtgctgactttattg

SEQ ID NO: 106927 - DNA, 26 bp, Homo sapiens
cttgggagatgtgctgactttattgt

SEQ ID NO: 106928 - DNA, 26 bp, Homo sapiens
ttgggagatgtgctgactttattgtg

SEQ ID NO: 106929 - DNA, 26 bp, Homo sapiens
tgggagatgtgctgactttattgtgt

SEQ ID NO: 106930 - DNA, 26 bp, Homo sapiens
gggagatgtgctgactttattgtgtt

SEQ ID NO: 106931 - DNA, 26 bp, Homo sapiens
ggagatgtgctgactttattgtgttg

SEQ ID NO: 106932 - DNA, 26 bp, Homo sapiens
gagatgtgctgactttattgtgttgg

SEQ ID NO: 106933 - DNA, 26 bp, Homo sapiens
agatgtgctgactttattgtgttggg

SEQ ID NO: 106934 - DNA, 26 bp, Homo sapiens
gatgtgctgactttattgtgttgggt

SEQ ID NO: 106935 - DNA, 26 bp, Homo sapiens
atgtgctgactttattgtgttgggtg

SEQ ID NO: 106936 - DNA, 26 bp, Homo sapiens
tgtgctgactttattgtgttgggtgg

SEQ ID NO: 106937 - DNA, 26 bp, Homo sapiens
gtgctgactttattgtgttgggtggt

SEQ ID NO: 106938 - DNA, 26 bp, Homo sapiens
tgctgactttattgtgttgggtggta

SEQ ID NO: 106939 - DNA, 26 bp, Homo sapiens
gctgactttattgtgttgggtggtag

SEQ ID NO: 106940 - DNA, 26 bp, Homo sapiens
ctgactttattgtgttgggtggtaga

SEQ ID NO: 106941 - DNA, 26 bp, Homo sapiens
tgactttattgtgttgggtggtagac

SEQ ID NO: 106942 - DNA, 26 bp, Homo sapiens
gactttattgtgttgggtggtagacg

SEQ ID NO: 106943 - DNA, 26 bp, Homo sapiens
actttattgtgttgggtggtagacgt

SEQ ID NO: 106944 - DNA, 26 bp, Homo sapiens
ctttattgtgttgggtggtagacgtg

SEQ ID NO: 106945 - DNA, 26 bp, Homo sapiens
tttattgtgttgggtggtagacgtgt

SEQ ID NO: 106946 - DNA, 26 bp, Homo sapiens
ttattgtgttgggtggtagacgtgtc

SEQ ID NO: 106947 - DNA, 26 bp, Homo sapiens
tattgtgttgggtggtagacgtgtca

SEQ ID NO: 106948 - DNA, 26 bp, Homo sapiens
attgtgttgggtggtagacgtgtcag

SEQ ID NO: 106949 - DNA, 26 bp, Homo sapiens
ttgtgttgggtggtagacgtgtcagg

SEQ ID NO: 106950 - DNA, 26 bp, Homo sapiens
tgtgttgggtggtagacgtgtcagga

SEQ ID NO: 106951 - DNA, 26 bp, Homo sapiens
gtgttgggtggtagacgtgtcaggag

SEQ ID NO: 106952 - DNA, 26 bp, Homo sapiens
tgttgggtggtagacgtgtcaggagt

SEQ ID NO: 106953 - DNA, 26 bp, Homo sapiens
gttgggtggtagacgtgtcaggagtt

SEQ ID NO: 106954 - DNA, 26 bp, Homo sapiens
ttgggtggtagacgtgtcaggagttg

SEQ ID NO: 106955 - DNA, 26 bp, Homo sapiens
tgggtggtagacgtgtcaggagttgt

SEQ ID NO: 106956 - DNA, 26 bp, Homo sapiens
gggtggtagacgtgtcaggagttgtg

SEQ ID NO: 106957 - DNA, 26 bp, Homo sapiens
ggtggtagacgtgtcaggagttgtga

SEQ ID NO: 106958 - DNA, 26 bp, Homo sapiens
gtggtagacgtgtcaggagttgtgac

SEQ ID NO: 106959 - DNA, 26 bp, Homo sapiens
tggtagacgtgtcaggagttgtgacc

SEQ ID NO: 106960 - DNA, 26 bp, Homo sapiens
ggtagacgtgtcaggagttgtgacct

SEQ ID NO: 106961 - DNA, 26 bp, Homo sapiens
gtagacgtgtcaggagttgtgacctt

SEQ ID NO: 106962 - DNA, 26 bp, Homo sapiens
tagacgtgtcaggagttgtgaccttg

SEQ ID NO: 106963 - DNA, 26 bp, Homo sapiens
agacgtgtcaggagttgtgaccttga

SEQ ID NO: 106964 - DNA, 26 bp, Homo sapiens
gacgtgtcaggagttgtgaccttgaa

SEQ ID NO: 106965 - DNA, 26 bp, Homo sapiens
acgtgtcaggagttgtgaccttgaag

SEQ ID NO: 106966 - DNA, 26 bp, Homo sapiens
cgtgtcaggagttgtgaccttgaagt

SEQ ID NO: 106967 - DNA, 26 bp, Homo sapiens
gtgtcaggagttgtgaccttgaagtc

SEQ ID NO: 106968 - DNA, 26 bp, Homo sapiens
tgtcaggagttgtgaccttgaagtca

SEQ ID NO: 106969 - DNA, 26 bp, Homo sapiens
gtcaggagttgtgaccttgaagtcac

SEQ ID NO: 106970 - DNA, 26 bp, Homo sapiens
tcaggagttgtgaccttgaagtcacc

SEQ ID NO: 106971 - DNA, 26 bp, Homo sapiens
caggagttgtgaccttgaagtcacca

SEQ ID NO: 106972 - DNA, 26 bp, Homo sapiens
aggagttgtgaccttgaagtcaccat

SEQ ID NO: 106973 - DNA, 26 bp, Homo sapiens
ggagttgtgaccttgaagtcaccatt

SEQ ID NO: 106974 - DNA, 26 bp, Homo sapiens
gagttgtgaccttgaagtcaccattg

SEQ ID NO: 106975 - DNA, 26 bp, Homo sapiens
agttgtgaccttgaagtcaccattgt

SEQ ID NO: 106976 - DNA, 26 bp, Homo sapiens
gttgtgaccttgaagtcaccattgtc

SEQ ID NO: 106977 - DNA, 26 bp, Homo sapiens
ttgtgaccttgaagtcaccattgtcc

SEQ ID NO: 106978 - DNA, 26 bp, Homo sapiens
tgtgaccttgaagtcaccattgtcca

SEQ ID NO: 106979 - DNA, 26 bp, Homo sapiens
gtgaccttgaagtcaccattgtccaa

SEQ ID NO: 106980 - DNA, 26 bp, Homo sapiens
tgaccttgaagtcaccattgtccaat

SEQ ID NO: 106981 - DNA, 26 bp, Homo sapiens
gaccttgaagtcaccattgtccaatc

SEQ ID NO: 106982 - DNA, 26 bp, Homo sapiens
accttgaagtcaccattgtccaatcc

SEQ ID NO: 106983 - DNA, 26 bp, Homo sapiens
ccttgaagtcaccattgtccaatcca

SEQ ID NO: 106984 - DNA, 26 bp, Homo sapiens
cttgaagtcaccattgtccaatccac

SEQ ID NO: 106985 - DNA, 26 bp, Homo sapiens
ttgaagtcaccattgtccaatccact

SEQ ID NO: 106986 - DNA, 26 bp, Homo sapiens
tgaagtcaccattgtccaatccactt

SEQ ID NO: 106987 - DNA, 26 bp, Homo sapiens
gaagtcaccattgtccaatccacttc

SEQ ID NO: 106988 - DNA, 26 bp, Homo sapiens
aagtcaccattgtccaatccacttcc

SEQ ID NO: 106989 - DNA, 26 bp, Homo sapiens
agtcaccattgtccaatccacttcca

SEQ ID NO: 106990 - DNA, 26 bp, Homo sapiens
gtcaccattgtccaatccacttccag

SEQ ID NO: 106991 - DNA, 26 bp, Homo sapiens
tcaccattgtccaatccacttccagc

SEQ ID NO: 106992 - DNA, 26 bp, Homo sapiens
caccattgtccaatccacttccagct

SEQ ID NO: 106993 - DNA, 26 bp, Homo sapiens
accattgtccaatccacttccagctt

SEQ ID NO: 106994 - DNA, 26 bp, Homo sapiens
ccattgtccaatccacttccagcttc

SEQ ID NO: 106995 - DNA, 26 bp, Homo sapiens
cattgtccaatccacttccagcttca

SEQ ID NO: 106996 - DNA, 26 bp, Homo sapiens
attgtccaatccacttccagcttcat

SEQ ID NO: 106997 - DNA, 26 bp, Homo sapiens
ttgtccaatccacttccagcttcatc

SEQ ID NO: 106998 - DNA, 26 bp, Homo sapiens
tgtccaatccacttccagcttcatct

SEQ ID NO: 106999 - DNA, 26 bp, Homo sapiens
gtccaatccacttccagcttcatcta

SEQ ID NO: 107000 - DNA, 26 bp, Homo sapiens
tccaatccacttccagcttcatctac

SEQ ID NO: 107001 - DNA, 26 bp, Homo sapiens
ccaatccacttccagcttcatctaca

SEQ ID NO: 107002 - DNA, 26 bp, Homo sapiens
caatccacttccagcttcatctacaa

SEQ ID NO: 107003 - DNA, 26 bp, Homo sapiens
aatccacttccagcttcatctacaac

SEQ ID NO: 107004 - DNA, 26 bp, Homo sapiens
atccacttccagcttcatctacaact

SEQ ID NO: 107005 - DNA, 26 bp, Homo sapiens
tccacttccagcttcatctacaactg

SEQ ID NO: 107006 - DNA, 26 bp, Homo sapiens
ccacttccagcttcatctacaactgg

SEQ ID NO: 107007 - DNA, 26 bp, Homo sapiens
cacttccagcttcatctacaactggt

SEQ ID NO: 107008 - DNA, 26 bp, Homo sapiens
acttccagcttcatctacaactggtg

SEQ ID NO: 107009 - DNA, 26 bp, Homo sapiens
cttccagcttcatctacaactggtgg

SEQ ID NO: 107010 - DNA, 26 bp, Homo sapiens
ttccagcttcatctacaactggtggt

SEQ ID NO: 107011 - DNA, 26 bp, Homo sapiens
tccagcttcatctacaactggtggtt

SEQ ID NO: 107012 - DNA, 26 bp, Homo sapiens
ccagcttcatctacaactggtggttt

SEQ ID NO: 107013 - DNA, 26 bp, Homo sapiens
cagcttcatctacaactggtggtttg

SEQ ID NO: 107014 - DNA, 26 bp, Homo sapiens
agcttcatctacaactggtggtttgg

SEQ ID NO: 107015 - DNA, 26 bp, Homo sapiens
gcttcatctacaactggtggtttggg

SEQ ID NO: 107016 - DNA, 26 bp, Homo sapiens
cttcatctacaactggtggtttgggg

SEQ ID NO: 107017 - DNA, 26 bp, Homo sapiens
ttcatctacaactggtggtttggggg

SEQ ID NO: 107018 - DNA, 26 bp, Homo sapiens
tcatctacaactggtggtttgggggt

SEQ ID NO: 107019 - DNA, 26 bp, Homo sapiens
catctacaactggtggtttgggggta

SEQ ID NO: 107020 - DNA, 26 bp, Homo sapiens
atctacaactggtggtttgggggtag

SEQ ID NO: 107021 - DNA, 26 bp, Homo sapiens
tctacaactggtggtttgggggtagg

SEQ ID NO: 107022 - DNA, 26 bp, Homo sapiens
ctacaactggtggtttgggggtaggt

SEQ ID NO: 107023 - DNA, 26 bp, Homo sapiens
tacaactggtggtttgggggtaggtt

SEQ ID NO: 107024 - DNA, 26 bp, Homo sapiens
acaactggtggtttgggggtaggttt

SEQ ID NO: 107025 - DNA, 26 bp, Homo sapiens
caactggtggtttgggggtaggtttc

SEQ ID NO: 107026 - DNA, 26 bp, Homo sapiens
aactggtggtttgggggtaggtttct

SEQ ID NO: 107027 - DNA, 26 bp, Homo sapiens
actggtggtttgggggtaggtttctt

SEQ ID NO: 107028 - DNA, 26 bp, Homo sapiens
ctggtggtttgggggtaggtttcttt

SEQ ID NO: 107029 - DNA, 26 bp, Homo sapiens
tggtggtttgggggtaggtttctttt

SEQ ID NO: 107030 - DNA, 26 bp, Homo sapiens
ggtggtttgggggtaggtttcttttt

SEQ ID NO: 107031 - DNA, 26 bp, Homo sapiens
gtggtttgggggtaggtttcttttta

SEQ ID NO: 107032 - DNA, 26 bp, Homo sapiens
tggtttgggggtaggtttctttttag

SEQ ID NO: 107033 - DNA, 26 bp, Homo sapiens
ggtttgggggtaggtttctttttagt

SEQ ID NO: 107034 - DNA, 26 bp, Homo sapiens
gtttgggggtaggtttctttttagtt

SEQ ID NO: 107035 - DNA, 26 bp, Homo sapiens
tttgggggtaggtttctttttagttc

SEQ ID NO: 107036 - DNA, 26 bp, Homo sapiens
ttgggggtaggtttctttttagttct

SEQ ID NO: 107037 - DNA, 26 bp, Homo sapiens
tgggggtaggtttctttttagttctg

SEQ ID NO: 107038 - DNA, 26 bp, Homo sapiens
gggggtaggtttctttttagttctgt

SEQ ID NO: 107039 - DNA, 26 bp, Homo sapiens
ggggtaggtttctttttagttctgtt

SEQ ID NO: 107040 - DNA, 26 bp, Homo sapiens
gggtaggtttctttttagttctgttc

SEQ ID NO: 107041 - DNA, 26 bp, Homo sapiens
ggtaggtttctttttagttctgttct

SEQ ID NO: 107042 - DNA, 26 bp, Homo sapiens
gtaggtttctttttagttctgttctt

SEQ ID NO: 107043 - DNA, 26 bp, Homo sapiens
taggtttctttttagttctgttcttc

SEQ ID NO: 107044 - DNA, 26 bp, Homo sapiens
aggtttctttttagttctgttcttct

SEQ ID NO: 107045 - DNA, 26 bp, Homo sapiens
ggtttctttttagttctgttcttctt

SEQ ID NO: 107046 - DNA, 26 bp, Homo sapiens
gtttctttttagttctgttcttcttg

SEQ ID NO: 107047 - DNA, 26 bp, Homo sapiens
tttctttttagttctgttcttcttgt

SEQ ID NO: 107048 - DNA, 26 bp, Homo sapiens
ttctttttagttctgttcttcttgtt

SEQ ID NO: 107049 - DNA, 26 bp, Homo sapiens
tctttttagttctgttcttcttgtta

SEQ ID NO: 107050 - DNA, 26 bp, Homo sapiens
ctttttagttctgttcttcttgttat

SEQ ID NO: 107051 - DNA, 26 bp, Homo sapiens
tttttagttctgttcttcttgttatc

SEQ ID NO: 107052 - DNA, 26 bp, Homo sapiens
ttttagttctgttcttcttgttatct

SEQ ID NO: 107053 - DNA, 26 bp, Homo sapiens
tttagttctgttcttcttgttatctt

SEQ ID NO: 107054 - DNA, 26 bp, Homo sapiens
ttagttctgttcttcttgttatcttt

SEQ ID NO: 107055 - DNA, 26 bp, Homo sapiens
tagttctgttcttcttgttatctttt

SEQ ID NO: 107056 - DNA, 26 bp, Homo sapiens
agttctgttcttcttgttatctttta

SEQ ID NO: 107057 - DNA, 26 bp, Homo sapiens
gttctgttcttcttgttatcttttac

SEQ ID NO: 107058 - DNA, 26 bp, Homo sapiens
ttctgttcttcttgttatcttttact

SEQ ID NO: 107059 - DNA, 26 bp, Homo sapiens
tctgttcttcttgttatcttttactt

SEQ ID NO: 107060 - DNA, 26 bp, Homo sapiens
ctgttcttcttgttatcttttacttt

SEQ ID NO: 107061 - DNA, 26 bp, Homo sapiens
tgttcttcttgttatcttttactttg

SEQ ID NO: 107062 - DNA, 26 bp, Homo sapiens
gttcttcttgttatcttttactttga

SEQ ID NO: 107063 - DNA, 26 bp, Homo sapiens
ttcttcttgttatcttttactttgag

SEQ ID NO: 107064 - DNA, 26 bp, Homo sapiens
tcttcttgttatcttttactttgagt

SEQ ID NO: 107065 - DNA, 26 bp, Homo sapiens
cttcttgttatcttttactttgagtt

SEQ ID NO: 107066 - DNA, 26 bp, Homo sapiens
ttcttgttatcttttactttgagttt

SEQ ID NO: 107067 - DNA, 26 bp, Homo sapiens
tcttgttatcttttactttgagtttc

SEQ ID NO: 107068 - DNA, 26 bp, Homo sapiens
cttgttatcttttactttgagtttct

SEQ ID NO: 107069 - DNA, 26 bp, Homo sapiens
ttgttatcttttactttgagtttctt

SEQ ID NO: 107070 - DNA, 26 bp, Homo sapiens
tgttatcttttactttgagtttcttc

SEQ ID NO: 107071 - DNA, 26 bp, Homo sapiens
gttatcttttactttgagtttcttct

SEQ ID NO: 107072 - DNA, 26 bp, Homo sapiens
ttatcttttactttgagtttcttctg

SEQ ID NO: 107073 - DNA, 26 bp, Homo sapiens
tatcttttactttgagtttcttctgt

SEQ ID NO: 107074 - DNA, 26 bp, Homo sapiens
atcttttactttgagtttcttctgta

SEQ ID NO: 107075 - DNA, 26 bp, Homo sapiens
tcttttactttgagtttcttctgtaa

SEQ ID NO: 107076 - DNA, 26 bp, Homo sapiens
cttttactttgagtttcttctgtaat

SEQ ID NO: 107077 - DNA, 26 bp, Homo sapiens
ttttactttgagtttcttctgtaatt

SEQ ID NO: 107078 - DNA, 26 bp, Homo sapiens
tttactttgagtttcttctgtaattc

SEQ ID NO: 107079 - DNA, 26 bp, Homo sapiens
ttactttgagtttcttctgtaattct

SEQ ID NO: 107080 - DNA, 26 bp, Homo sapiens
tactttgagtttcttctgtaattctc

SEQ ID NO: 107081 - DNA, 26 bp, Homo sapiens
actttgagtttcttctgtaattctct

SEQ ID NO: 107082 - DNA, 26 bp, Homo sapiens
ctttgagtttcttctgtaattctcta

SEQ ID NO: 107083 - DNA, 26 bp, Homo sapiens
tttgagtttcttctgtaattctctat

SEQ ID NO: 107084 - DNA, 26 bp, Homo sapiens
ttgagtttcttctgtaattctctatt

SEQ ID NO: 107085 - DNA, 26 bp, Homo sapiens
tgagtttcttctgtaattctctatta

SEQ ID NO: 107086 - DNA, 26 bp, Homo sapiens
gagtttcttctgtaattctctattag

SEQ ID NO: 107087 - DNA, 26 bp, Homo sapiens
agtttcttctgtaattctctattagc

SEQ ID NO: 107088 - DNA, 26 bp, Homo sapiens
gtttcttctgtaattctctattagca

SEQ ID NO: 107089 - DNA, 26 bp, Homo sapiens
tttcttctgtaattctctattagcag

SEQ ID NO: 107090 - DNA, 26 bp, Homo sapiens
ttcttctgtaattctctattagcagc

SEQ ID NO: 107091 - DNA, 26 bp, Homo sapiens
tcttctgtaattctctattagcagct

SEQ ID NO: 107092 - DNA, 26 bp, Homo sapiens
cttctgtaattctctattagcagctg

SEQ ID NO: 107093 - DNA, 26 bp, Homo sapiens
ttctgtaattctctattagcagctga

SEQ ID NO: 107094 - DNA, 26 bp, Homo sapiens
tctgtaattctctattagcagctgaa

SEQ ID NO: 107095 - DNA, 26 bp, Homo sapiens
ctgtaattctctattagcagctgaat

SEQ ID NO: 107096 - DNA, 26 bp, Homo sapiens
tgtaattctctattagcagctgaatt

SEQ ID NO: 107097 - DNA, 26 bp, Homo sapiens
gtaattctctattagcagctgaattt

SEQ ID NO: 107098 - DNA, 26 bp, Homo sapiens
taattctctattagcagctgaatttt

SEQ ID NO: 107099 - DNA, 26 bp, Homo sapiens
aattctctattagcagctgaattttt

SEQ ID NO: 107100 - DNA, 26 bp, Homo sapiens
attctctattagcagctgaatttttg

SEQ ID NO: 107101 - DNA, 26 bp, Homo sapiens
ttctctattagcagctgaatttttgg

SEQ ID NO: 107102 - DNA, 26 bp, Homo sapiens
tctctattagcagctgaatttttgga

SEQ ID NO: 107103 - DNA, 26 bp, Homo sapiens
ctctattagcagctgaatttttggaa

SEQ ID NO: 107104 - DNA, 26 bp, Homo sapiens
tctattagcagctgaatttttggaag

SEQ ID NO: 107105 - DNA, 26 bp, Homo sapiens
ctattagcagctgaatttttggaaga

SEQ ID NO: 107106 - DNA, 26 bp, Homo sapiens
tattagcagctgaatttttggaagac

SEQ ID NO: 107107 - DNA, 26 bp, Homo sapiens
attagcagctgaatttttggaagact

SEQ ID NO: 107108 - DNA, 26 bp, Homo sapiens
ttagcagctgaatttttggaagactt

SEQ ID NO: 107109 - DNA, 26 bp, Homo sapiens
tagcagctgaatttttggaagacttg

SEQ ID NO: 107110 - DNA, 26 bp, Homo sapiens
agcagctgaatttttggaagacttga

SEQ ID NO: 107111 - DNA, 26 bp, Homo sapiens
gcagctgaatttttggaagacttgat

SEQ ID NO: 107112 - DNA, 26 bp, Homo sapiens
cagctgaatttttggaagacttgatt

SEQ ID NO: 107113 - DNA, 26 bp, Homo sapiens
agctgaatttttggaagacttgattt

SEQ ID NO: 107114 - DNA, 26 bp, Homo sapiens
gctgaatttttggaagacttgatttt

SEQ ID NO: 107115 - DNA, 26 bp, Homo sapiens
ctgaatttttggaagacttgattttc

SEQ ID NO: 107116 - DNA, 26 bp, Homo sapiens
tgaatttttggaagacttgattttcc

SEQ ID NO: 107117 - DNA, 26 bp, Homo sapiens
gaatttttggaagacttgattttccg

SEQ ID NO: 107118 - DNA, 26 bp, Homo sapiens
aatttttggaagacttgattttccga

SEQ ID NO: 107119 - DNA, 26 bp, Homo sapiens
atttttggaagacttgattttccgaa

SEQ ID NO: 107120 - DNA, 26 bp, Homo sapiens
tttttggaagacttgattttccgaat

SEQ ID NO: 107121 - DNA, 26 bp, Homo sapiens
ttttggaagacttgattttccgaatt

SEQ ID NO: 107122 - DNA, 26 bp, Homo sapiens
tttggaagacttgattttccgaattg

SEQ ID NO: 107123 - DNA, 26 bp, Homo sapiens
ttggaagacttgattttccgaattgt

SEQ ID NO: 107124 - DNA, 26 bp, Homo sapiens
tggaagacttgattttccgaattgtt

SEQ ID NO: 107125 - DNA, 26 bp, Homo sapiens
ggaagacttgattttccgaattgttg

SEQ ID NO: 107126 - DNA, 26 bp, Homo sapiens
gaagacttgattttccgaattgttga

SEQ ID NO: 107127 - DNA, 26 bp, Homo sapiens
aagacttgattttccgaattgttgaa

SEQ ID NO: 107128 - DNA, 26 bp, Homo sapiens
agacttgattttccgaattgttgaag

SEQ ID NO: 107129 - DNA, 26 bp, Homo sapiens
gacttgattttccgaattgttgaaga

SEQ ID NO: 107130 - DNA, 26 bp, Homo sapiens
acttgattttccgaattgttgaagaa

SEQ ID NO: 107131 - DNA, 26 bp, Homo sapiens
cttgattttccgaattgttgaagaag

SEQ ID NO: 107132 - DNA, 26 bp, Homo sapiens
ttgattttccgaattgttgaagaaga

SEQ ID NO: 107133 - DNA, 26 bp, Homo sapiens
tgattttccgaattgttgaagaagaa

SEQ ID NO: 107134 - DNA, 26 bp, Homo sapiens
gattttccgaattgttgaagaagaag

SEQ ID NO: 107135 - DNA, 26 bp, Homo sapiens
attttccgaattgttgaagaagaaga

SEQ ID NO: 107136 - DNA, 26 bp, Homo sapiens
ttttccgaattgttgaagaagaagag

SEQ ID NO: 107137 - DNA, 26 bp, Homo sapiens
tttccgaattgttgaagaagaagagg

SEQ ID NO: 107138 - DNA, 26 bp, Homo sapiens
ttccgaattgttgaagaagaagagga

SEQ ID NO: 107139 - DNA, 26 bp, Homo sapiens
tccgaattgttgaagaagaagaggaa

SEQ ID NO: 107140 - DNA, 26 bp, Homo sapiens
ccgaattgttgaagaagaagaggaag

SEQ ID NO: 107141 - DNA, 26 bp, Homo sapiens
cgaattgttgaagaagaagaggaaga

SEQ ID NO: 107142 - DNA, 26 bp, Homo sapiens
gaattgttgaagaagaagaggaagag

SEQ ID NO: 107143 - DNA, 26 bp, Homo sapiens
aattgttgaagaagaagaggaagagg

SEQ ID NO: 107144 - DNA, 26 bp, Homo sapiens
attgttgaagaagaagaggaagagga

SEQ ID NO: 107145 - DNA, 26 bp, Homo sapiens
ttgttgaagaagaagaggaagaggag

SEQ ID NO: 107146 - DNA, 26 bp, Homo sapiens
tgttgaagaagaagaggaagaggagg

SEQ ID NO: 107147 - DNA, 26 bp, Homo sapiens
gttgaagaagaagaggaagaggagga

SEQ ID NO: 107148 - DNA, 26 bp, Homo sapiens
ttgaagaagaagaggaagaggaggag

SEQ ID NO: 107149 - DNA, 26 bp, Homo sapiens
tgaagaagaagaggaagaggaggagg

SEQ ID NO: 107150 - DNA, 26 bp, Homo sapiens
gaagaagaagaggaagaggaggagga

SEQ ID NO: 107151 - DNA, 26 bp, Homo sapiens
aagaagaagaggaagaggaggaggag

SEQ ID NO: 107152 - DNA, 26 bp, Homo sapiens
agaagaagaggaagaggaggaggagg

SEQ ID NO: 107153 - DNA, 26 bp, Homo sapiens
gaagaagaggaagaggaggaggagga

SEQ ID NO: 107154 - DNA, 26 bp, Homo sapiens
aagaagaggaagaggaggaggaggag

SEQ ID NO: 107155 - DNA, 26 bp, Homo sapiens
agaagaggaagaggaggaggaggagg

SEQ ID NO: 107156 - DNA, 26 bp, Homo sapiens
gaagaggaagaggaggaggaggagga

SEQ ID NO: 107157 - DNA, 26 bp, Homo sapiens
aagaggaagaggaggaggaggaggag

SEQ ID NO: 107158 - DNA, 26 bp, Homo sapiens
agaggaagaggaggaggaggaggagg

SEQ ID NO: 107159 - DNA, 26 bp, Homo sapiens
gaggaagaggaggaggaggaggagga

SEQ ID NO: 107160 - DNA, 26 bp, Homo sapiens
aggaagaggaggaggaggaggaggac

SEQ ID NO: 107161 - DNA, 26 bp, Homo sapiens
ggaagaggaggaggaggaggaggact

SEQ ID NO: 107162 - DNA, 26 bp, Homo sapiens
gaagaggaggaggaggaggaggactc

SEQ ID NO: 107163 - DNA, 26 bp, Homo sapiens
aagaggaggaggaggaggaggactct

SEQ ID NO: 107164 - DNA, 26 bp, Homo sapiens
agaggaggaggaggaggaggactctt

SEQ ID NO: 107165 - DNA, 26 bp, Homo sapiens
gaggaggaggaggaggaggactcttg

SEQ ID NO: 107166 - DNA, 26 bp, Homo sapiens
aggaggaggaggaggaggactcttga

SEQ ID NO: 107167 - DNA, 26 bp, Homo sapiens
ggaggaggaggaggaggactcttgat

SEQ ID NO: 107168 - DNA, 26 bp, Homo sapiens
gaggaggaggaggaggactcttgatt

SEQ ID NO: 107169 - DNA, 26 bp, Homo sapiens
aggaggaggaggaggactcttgattt

SEQ ID NO: 107170 - DNA, 26 bp, Homo sapiens
ggaggaggaggaggactcttgatttt

SEQ ID NO: 107171 - DNA, 26 bp, Homo sapiens
gaggaggaggaggactcttgattttc

SEQ ID NO: 107172 - DNA, 26 bp, Homo sapiens
aggaggaggaggactcttgattttca

SEQ ID NO: 107173 - DNA, 26 bp, Homo sapiens
ggaggaggaggactcttgattttcag

SEQ ID NO: 107174 - DNA, 26 bp, Homo sapiens
gaggaggaggactcttgattttcaga

SEQ ID NO: 107175 - DNA, 26 bp, Homo sapiens
aggaggaggactcttgattttcagaa

SEQ ID NO: 107176 - DNA, 26 bp, Homo sapiens
ggaggaggactcttgattttcagaaa

SEQ ID NO: 107177 - DNA, 26 bp, Homo sapiens
gaggaggactcttgattttcagaaac

SEQ ID NO: 107178 - DNA, 26 bp, Homo sapiens
aggaggactcttgattttcagaaaca

SEQ ID NO: 107179 - DNA, 26 bp, Homo sapiens
ggaggactcttgattttcagaaacag

SEQ ID NO: 107180 - DNA, 26 bp, Homo sapiens
gaggactcttgattttcagaaacaga

SEQ ID NO: 107181 - DNA, 26 bp, Homo sapiens
aggactcttgattttcagaaacagaa

SEQ ID NO: 107182 - DNA, 26 bp, Homo sapiens
ggactcttgattttcagaaacagaat

SEQ ID NO: 107183 - DNA, 26 bp, Homo sapiens
gactcttgattttcagaaacagaatg

SEQ ID NO: 107184 - DNA, 26 bp, Homo sapiens
actcttgattttcagaaacagaatgt

SEQ ID NO: 107185 - DNA, 26 bp, Homo sapiens
ctcttgattttcagaaacagaatgtt

SEQ ID NO: 107186 - DNA, 26 bp, Homo sapiens
tcttgattttcagaaacagaatgttc

SEQ ID NO: 107187 - DNA, 26 bp, Homo sapiens
cttgattttcagaaacagaatgttct

SEQ ID NO: 107188 - DNA, 26 bp, Homo sapiens
ttgattttcagaaacagaatgttctt

SEQ ID NO: 107189 - DNA, 26 bp, Homo sapiens
tgattttcagaaacagaatgttcttc

SEQ ID NO: 107190 - DNA, 26 bp, Homo sapiens
gattttcagaaacagaatgttcttct

SEQ ID NO: 107191 - DNA, 26 bp, Homo sapiens
attttcagaaacagaatgttcttctg

SEQ ID NO: 107192 - DNA, 26 bp, Homo sapiens
ttttcagaaacagaatgttcttctgt

SEQ ID NO: 107193 - DNA, 26 bp, Homo sapiens
tttcagaaacagaatgttcttctgtt

SEQ ID NO: 107194 - DNA, 26 bp, Homo sapiens
ttcagaaacagaatgttcttctgtta

SEQ ID NO: 107195 - DNA, 26 bp, Homo sapiens
tcagaaacagaatgttcttctgttat

SEQ ID NO: 107196 - DNA, 26 bp, Homo sapiens
cagaaacagaatgttcttctgttatt

SEQ ID NO: 107197 - DNA, 26 bp, Homo sapiens
agaaacagaatgttcttctgttattt

SEQ ID NO: 107198 - DNA, 26 bp, Homo sapiens
gaaacagaatgttcttctgttatttc

SEQ ID NO: 107199 - DNA, 26 bp, Homo sapiens
aaacagaatgttcttctgttatttcc

SEQ ID NO: 107200 - DNA, 26 bp, Homo sapiens
aacagaatgttcttctgttatttcct

SEQ ID NO: 107201 - DNA, 26 bp, Homo sapiens
acagaatgttcttctgttatttcctc

SEQ ID NO: 107202 - DNA, 26 bp, Homo sapiens
cagaatgttcttctgttatttcctct

SEQ ID NO: 107203 - DNA, 26 bp, Homo sapiens
agaatgttcttctgttatttcctctg

SEQ ID NO: 107204 - DNA, 26 bp, Homo sapiens
gaatgttcttctgttatttcctctga

SEQ ID NO: 107205 - DNA, 26 bp, Homo sapiens
aatgttcttctgttatttcctctgat

SEQ ID NO: 107206 - DNA, 26 bp, Homo sapiens
atgttcttctgttatttcctctgatt

SEQ ID NO: 107207 - DNA, 26 bp, Homo sapiens
tgttcttctgttatttcctctgattc

SEQ ID NO: 107208 - DNA, 26 bp, Homo sapiens
gttcttctgttatttcctctgattct

SEQ ID NO: 107209 - DNA, 26 bp, Homo sapiens
ttcttctgttatttcctctgattcta

SEQ ID NO: 107210 - DNA, 26 bp, Homo sapiens
tcttctgttatttcctctgattctat

SEQ ID NO: 107211 - DNA, 26 bp, Homo sapiens
cttctgttatttcctctgattctata

SEQ ID NO: 107212 - DNA, 26 bp, Homo sapiens
ttctgttatttcctctgattctataa

SEQ ID NO: 107213 - DNA, 26 bp, Homo sapiens
tctgttatttcctctgattctataac

SEQ ID NO: 107214 - DNA, 26 bp, Homo sapiens
ctgttatttcctctgattctataact

SEQ ID NO: 107215 - DNA, 26 bp, Homo sapiens
tgttatttcctctgattctataactt

SEQ ID NO: 107216 - DNA, 26 bp, Homo sapiens
gttatttcctctgattctataacttt

SEQ ID NO: 107217 - DNA, 26 bp, Homo sapiens
ttatttcctctgattctataactttc

SEQ ID NO: 107218 - DNA, 26 bp, Homo sapiens
tatttcctctgattctataactttct

SEQ ID NO: 107219 - DNA, 26 bp, Homo sapiens
atttcctctgattctataactttctt

SEQ ID NO: 107220 - DNA, 26 bp, Homo sapiens
tttcctctgattctataactttctta

SEQ ID NO: 107221 - DNA, 26 bp, Homo sapiens
ttcctctgattctataactttcttag

SEQ ID NO: 107222 - DNA, 26 bp, Homo sapiens
tcctctgattctataactttcttagt

SEQ ID NO: 107223 - DNA, 26 bp, Homo sapiens
cctctgattctataactttcttagtc

SEQ ID NO: 107224 - DNA, 26 bp, Homo sapiens
ctctgattctataactttcttagtct

SEQ ID NO: 107225 - DNA, 26 bp, Homo sapiens
tctgattctataactttcttagtctt

SEQ ID NO: 107226 - DNA, 26 bp, Homo sapiens
ctgattctataactttcttagtcttc

SEQ ID NO: 107227 - DNA, 26 bp, Homo sapiens
tgattctataactttcttagtcttct

SEQ ID NO: 107228 - DNA, 26 bp, Homo sapiens
gattctataactttcttagtcttctt

SEQ ID NO: 107229 - DNA, 26 bp, Homo sapiens
attctataactttcttagtcttcttc

SEQ ID NO: 107230 - DNA, 26 bp, Homo sapiens
ttctataactttcttagtcttcttct

SEQ ID NO: 107231 - DNA, 26 bp, Homo sapiens
tctataactttcttagtcttcttctt

SEQ ID NO: 107232 - DNA, 26 bp, Homo sapiens
ctataactttcttagtcttcttcttg

SEQ ID NO: 107233 - DNA, 26 bp, Homo sapiens
tataactttcttagtcttcttcttgt

SEQ ID NO: 107234 - DNA, 26 bp, Homo sapiens
ataactttcttagtcttcttcttgtt

SEQ ID NO: 107235 - DNA, 26 bp, Homo sapiens
taactttcttagtcttcttcttgttt

SEQ ID NO: 107236 - DNA, 26 bp, Homo sapiens
aactttcttagtcttcttcttgtttg

SEQ ID NO: 107237 - DNA, 26 bp, Homo sapiens
actttcttagtcttcttcttgtttgg

SEQ ID NO: 107238 - DNA, 26 bp, Homo sapiens
ctttcttagtcttcttcttgtttggt

SEQ ID NO: 107239 - DNA, 26 bp, Homo sapiens
tttcttagtcttcttcttgtttggtg

SEQ ID NO: 107240 - DNA, 26 bp, Homo sapiens
ttcttagtcttcttcttgtttggtgg

SEQ ID NO: 107241 - DNA, 26 bp, Homo sapiens
tcttagtcttcttcttgtttggtggt

SEQ ID NO: 107242 - DNA, 26 bp, Homo sapiens
cttagtcttcttcttgtttggtggtt

SEQ ID NO: 107243 - DNA, 26 bp, Homo sapiens
ttagtcttcttcttgtttggtggttt

SEQ ID NO: 107244 - DNA, 26 bp, Homo sapiens
tagtcttcttcttgtttggtggtttg

SEQ ID NO: 107245 - DNA, 26 bp, Homo sapiens
agtcttcttcttgtttggtggtttgg

SEQ ID NO: 107246 - DNA, 26 bp, Homo sapiens
gtcttcttcttgtttggtggtttggg

SEQ ID NO: 107247 - DNA, 26 bp, Homo sapiens
tcttcttcttgtttggtggtttgggt

SEQ ID NO: 107248 - DNA, 26 bp, Homo sapiens
cttcttcttgtttggtggtttgggtg

SEQ ID NO: 107249 - DNA, 26 bp, Homo sapiens
ttcttcttgtttggtggtttgggtga

SEQ ID NO: 107250 - DNA, 26 bp, Homo sapiens
tcttcttgtttggtggtttgggtgaa

SEQ ID NO: 107251 - DNA, 26 bp, Homo sapiens
cttcttgtttggtggtttgggtgaac

SEQ ID NO: 107252 - DNA, 26 bp, Homo sapiens
ttcttgtttggtggtttgggtgaacg

SEQ ID NO: 107253 - DNA, 26 bp, Homo sapiens
tcttgtttggtggtttgggtgaacgt

SEQ ID NO: 107254 - DNA, 26 bp, Homo sapiens
cttgtttggtggtttgggtgaacgtt

SEQ ID NO: 107255 - DNA, 26 bp, Homo sapiens
ttgtttggtggtttgggtgaacgttt

SEQ ID NO: 107256 - DNA, 26 bp, Homo sapiens
tgtttggtggtttgggtgaacgtttg

SEQ ID NO: 107257 - DNA, 26 bp, Homo sapiens
gtttggtggtttgggtgaacgtttgg

SEQ ID NO: 107258 - DNA, 26 bp, Homo sapiens
tttggtggtttgggtgaacgtttggt

SEQ ID NO: 107259 - DNA, 26 bp, Homo sapiens
ttggtggtttgggtgaacgtttggtt

SEQ ID NO: 107260 - DNA, 26 bp, Homo sapiens
tggtggtttgggtgaacgtttggttg

SEQ ID NO: 107261 - DNA, 26 bp, Homo sapiens
ggtggtttgggtgaacgtttggttgt

SEQ ID NO: 107262 - DNA, 26 bp, Homo sapiens
gtggtttgggtgaacgtttggttgtt

SEQ ID NO: 107263 - DNA, 26 bp, Homo sapiens
tggtttgggtgaacgtttggttgttg

SEQ ID NO: 107264 - DNA, 26 bp, Homo sapiens
ggtttgggtgaacgtttggttgttga

SEQ ID NO: 107265 - DNA, 26 bp, Homo sapiens
gtttgggtgaacgtttggttgttgat

SEQ ID NO: 107266 - DNA, 26 bp, Homo sapiens
tttgggtgaacgtttggttgttgatt

SEQ ID NO: 107267 - DNA, 26 bp, Homo sapiens
ttgggtgaacgtttggttgttgattt

SEQ ID NO: 107268 - DNA, 26 bp, Homo sapiens
tgggtgaacgtttggttgttgatttg

SEQ ID NO: 107269 - DNA, 26 bp, Homo sapiens
gggtgaacgtttggttgttgatttga

SEQ ID NO: 107270 - DNA, 26 bp, Homo sapiens
ggtgaacgtttggttgttgatttgat

SEQ ID NO: 107271 - DNA, 26 bp, Homo sapiens
gtgaacgtttggttgttgatttgatg

SEQ ID NO: 107272 - DNA, 26 bp, Homo sapiens
tgaacgtttggttgttgatttgatgg

SEQ ID NO: 107273 - DNA, 26 bp, Homo sapiens
gaacgtttggttgttgatttgatggt

SEQ ID NO: 107274 - DNA, 26 bp, Homo sapiens
aacgtttggttgttgatttgatggtt

SEQ ID NO: 107275 - DNA, 26 bp, Homo sapiens
acgtttggttgttgatttgatggttt

SEQ ID NO: 107276 - DNA, 26 bp, Homo sapiens
cgtttggttgttgatttgatggtttg

SEQ ID NO: 107277 - DNA, 26 bp, Homo sapiens
gtttggttgttgatttgatggtttga

SEQ ID NO: 107278 - DNA, 26 bp, Homo sapiens
tttggttgttgatttgatggtttgag

SEQ ID NO: 107279 - DNA, 26 bp, Homo sapiens
ttggttgttgatttgatggtttgaga

SEQ ID NO: 107280 - DNA, 26 bp, Homo sapiens
tggttgttgatttgatggtttgagat

SEQ ID NO: 107281 - DNA, 26 bp, Homo sapiens
ggttgttgatttgatggtttgagatg

SEQ ID NO: 107282 - DNA, 26 bp, Homo sapiens
gttgttgatttgatggtttgagatgc

SEQ ID NO: 107283 - DNA, 26 bp, Homo sapiens
ttgttgatttgatggtttgagatgct

SEQ ID NO: 107284 - DNA, 26 bp, Homo sapiens
tgttgatttgatggtttgagatgctc

SEQ ID NO: 107285 - DNA, 26 bp, Homo sapiens
gttgatttgatggtttgagatgctcc

SEQ ID NO: 107286 - DNA, 26 bp, Homo sapiens
ttgatttgatggtttgagatgctcct

SEQ ID NO: 107287 - DNA, 26 bp, Homo sapiens
tgatttgatggtttgagatgctcctg

SEQ ID NO: 107288 - DNA, 26 bp, Homo sapiens
gatttgatggtttgagatgctcctga

SEQ ID NO: 107289 - DNA, 26 bp, Homo sapiens
atttgatggtttgagatgctcctgaa

SEQ ID NO: 107290 - DNA, 26 bp, Homo sapiens
tttgatggtttgagatgctcctgaag

SEQ ID NO: 107291 - DNA, 26 bp, Homo sapiens
ttgatggtttgagatgctcctgaagg

SEQ ID NO: 107292 - DNA, 26 bp, Homo sapiens
tgatggtttgagatgctcctgaaggt

SEQ ID NO: 107293 - DNA, 26 bp, Homo sapiens
gatggtttgagatgctcctgaaggtg

SEQ ID NO: 107294 - DNA, 26 bp, Homo sapiens
atggtttgagatgctcctgaaggtgg

SEQ ID NO: 107295 - DNA, 26 bp, Homo sapiens
tggtttgagatgctcctgaaggtgga

SEQ ID NO: 107296 - DNA, 26 bp, Homo sapiens
ggtttgagatgctcctgaaggtggag

SEQ ID NO: 107297 - DNA, 26 bp, Homo sapiens
gtttgagatgctcctgaaggtggagg

SEQ ID NO: 107298 - DNA, 26 bp, Homo sapiens
tttgagatgctcctgaaggtggaggt

SEQ ID NO: 107299 - DNA, 26 bp, Homo sapiens
ttgagatgctcctgaaggtggaggtg

SEQ ID NO: 107300 - DNA, 26 bp, Homo sapiens
tgagatgctcctgaaggtggaggtgc

SEQ ID NO: 107301 - DNA, 26 bp, Homo sapiens
gagatgctcctgaaggtggaggtgct

SEQ ID NO: 107302 - DNA, 26 bp, Homo sapiens
agatgctcctgaaggtggaggtgctt

SEQ ID NO: 107303 - DNA, 26 bp, Homo sapiens
gatgctcctgaaggtggaggtgcttt

SEQ ID NO: 107304 - DNA, 26 bp, Homo sapiens
atgctcctgaaggtggaggtgctttc

SEQ ID NO: 107305 - DNA, 26 bp, Homo sapiens
tgctcctgaaggtggaggtgctttct

SEQ ID NO: 107306 - DNA, 26 bp, Homo sapiens
gctcctgaaggtggaggtgctttctt

SEQ ID NO: 107307 - DNA, 26 bp, Homo sapiens
ctcctgaaggtggaggtgctttcttt

SEQ ID NO: 107308 - DNA, 26 bp, Homo sapiens
tcctgaaggtggaggtgctttctttg

SEQ ID NO: 107309 - DNA, 26 bp, Homo sapiens
cctgaaggtggaggtgctttctttga

SEQ ID NO: 107310 - DNA, 26 bp, Homo sapiens
ctgaaggtggaggtgctttctttgaa

SEQ ID NO: 107311 - DNA, 26 bp, Homo sapiens
tgaaggtggaggtgctttctttgaag

SEQ ID NO: 107312 - DNA, 26 bp, Homo sapiens
gaaggtggaggtgctttctttgaaga

SEQ ID NO: 107313 - DNA, 26 bp, Homo sapiens
aaggtggaggtgctttctttgaagat

SEQ ID NO: 107314 - DNA, 26 bp, Homo sapiens
aggtggaggtgctttctttgaagatg

SEQ ID NO: 107315 - DNA, 26 bp, Homo sapiens
ggtggaggtgctttctttgaagatgg

SEQ ID NO: 107316 - DNA, 26 bp, Homo sapiens
gtggaggtgctttctttgaagatggt

SEQ ID NO: 107317 - DNA, 26 bp, Homo sapiens
tggaggtgctttctttgaagatggtg

SEQ ID NO: 107318 - DNA, 26 bp, Homo sapiens
ggaggtgctttctttgaagatggtgg

SEQ ID NO: 107319 - DNA, 26 bp, Homo sapiens
gaggtgctttctttgaagatggtggt

SEQ ID NO: 107320 - DNA, 26 bp, Homo sapiens
aggtgctttctttgaagatggtggtg

SEQ ID NO: 107321 - DNA, 26 bp, Homo sapiens
ggtgctttctttgaagatggtggtga

SEQ ID NO: 107322 - DNA, 26 bp, Homo sapiens
gtgctttctttgaagatggtggtgat

SEQ ID NO: 107323 - DNA, 26 bp, Homo sapiens
tgctttctttgaagatggtggtgatg

SEQ ID NO: 107324 - DNA, 26 bp, Homo sapiens
gctttctttgaagatggtggtgatgt

SEQ ID NO: 107325 - DNA, 26 bp, Homo sapiens
ctttctttgaagatggtggtgatgtg

SEQ ID NO: 107326 - DNA, 26 bp, Homo sapiens
tttctttgaagatggtggtgatgtgg

SEQ ID NO: 107327 - DNA, 26 bp, Homo sapiens
ttctttgaagatggtggtgatgtggg

SEQ ID NO: 107328 - DNA, 26 bp, Homo sapiens
tctttgaagatggtggtgatgtggga

SEQ ID NO: 107329 - DNA, 26 bp, Homo sapiens
ctttgaagatggtggtgatgtgggat

SEQ ID NO: 107330 - DNA, 26 bp, Homo sapiens
tttgaagatggtggtgatgtgggatt

SEQ ID NO: 107331 - DNA, 26 bp, Homo sapiens
ttgaagatggtggtgatgtgggatta

SEQ ID NO: 107332 - DNA, 26 bp, Homo sapiens
tgaagatggtggtgatgtgggattat

SEQ ID NO: 107333 - DNA, 26 bp, Homo sapiens
gaagatggtggtgatgtgggattatg

SEQ ID NO: 107334 - DNA, 26 bp, Homo sapiens
aagatggtggtgatgtgggattatgc

SEQ ID NO: 107335 - DNA, 26 bp, Homo sapiens
agatggtggtgatgtgggattatgca

SEQ ID NO: 107336 - DNA, 26 bp, Homo sapiens
gatggtggtgatgtgggattatgcac

SEQ ID NO: 107337 - DNA, 26 bp, Homo sapiens
atggtggtgatgtgggattatgcact

SEQ ID NO: 107338 - DNA, 26 bp, Homo sapiens
tggtggtgatgtgggattatgcactt

SEQ ID NO: 107339 - DNA, 26 bp, Homo sapiens
ggtggtgatgtgggattatgcacttc

SEQ ID NO: 107340 - DNA, 26 bp, Homo sapiens
gtggtgatgtgggattatgcacttct

SEQ ID NO: 107341 - DNA, 26 bp, Homo sapiens
tggtgatgtgggattatgcacttctg

SEQ ID NO: 107342 - DNA, 26 bp, Homo sapiens
ggtgatgtgggattatgcacttctgc

SEQ ID NO: 107343 - DNA, 26 bp, Homo sapiens
gtgatgtgggattatgcacttctgca

SEQ ID NO: 107344 - DNA, 26 bp, Homo sapiens
tgatgtgggattatgcacttctgcac

SEQ ID NO: 107345 - DNA, 26 bp, Homo sapiens
gatgtgggattatgcacttctgcaca

SEQ ID NO: 107346 - DNA, 26 bp, Homo sapiens
atgtgggattatgcacttctgcacag

SEQ ID NO: 107347 - DNA, 26 bp, Homo sapiens
tgtgggattatgcacttctgcacaga

SEQ ID NO: 107348 - DNA, 26 bp, Homo sapiens
gtgggattatgcacttctgcacagaa

SEQ ID NO: 107349 - DNA, 26 bp, Homo sapiens
tgggattatgcacttctgcacagaaa

SEQ ID NO: 107350 - DNA, 26 bp, Homo sapiens
gggattatgcacttctgcacagaaac

SEQ ID NO: 107351 - DNA, 26 bp, Homo sapiens
ggattatgcacttctgcacagaaact

SEQ ID NO: 107352 - DNA, 26 bp, Homo sapiens
gattatgcacttctgcacagaaactc

SEQ ID NO: 107353 - DNA, 26 bp, Homo sapiens
attatgcacttctgcacagaaactct

SEQ ID NO: 107354 - DNA, 26 bp, Homo sapiens
ttatgcacttctgcacagaaactctc

SEQ ID NO: 107355 - DNA, 26 bp, Homo sapiens
tatgcacttctgcacagaaactctca

SEQ ID NO: 107356 - DNA, 26 bp, Homo sapiens
atgcacttctgcacagaaactctcat

SEQ ID NO: 107357 - DNA, 26 bp, Homo sapiens
tgcacttctgcacagaaactctcata

SEQ ID NO: 107358 - DNA, 26 bp, Homo sapiens
gcacttctgcacagaaactctcataa

SEQ ID NO: 107359 - DNA, 26 bp, Homo sapiens
cacttctgcacagaaactctcataat

SEQ ID NO: 107360 - DNA, 26 bp, Homo sapiens
acttctgcacagaaactctcataatc

SEQ ID NO: 107361 - DNA, 26 bp, Homo sapiens
cttctgcacagaaactctcataatcg

SEQ ID NO: 107362 - DNA, 26 bp, Homo sapiens
ttctgcacagaaactctcataatcgg

SEQ ID NO: 107363 - DNA, 26 bp, Homo sapiens
tctgcacagaaactctcataatcggg

SEQ ID NO: 107364 - DNA, 26 bp, Homo sapiens
ctgcacagaaactctcataatcggga

SEQ ID NO: 107365 - DNA, 26 bp, Homo sapiens
tgcacagaaactctcataatcgggac

SEQ ID NO: 107366 - DNA, 26 bp, Homo sapiens
gcacagaaactctcataatcgggaca

SEQ ID NO: 107367 - DNA, 26 bp, Homo sapiens
cacagaaactctcataatcgggacag

SEQ ID NO: 107368 - DNA, 26 bp, Homo sapiens
acagaaactctcataatcgggacagc

SEQ ID NO: 107369 - DNA, 26 bp, Homo sapiens
cagaaactctcataatcgggacagca

SEQ ID NO: 107370 - DNA, 26 bp, Homo sapiens
agaaactctcataatcgggacagcac

SEQ ID NO: 107371 - DNA, 26 bp, Homo sapiens
gaaactctcataatcgggacagcact

SEQ ID NO: 107372 - DNA, 26 bp, Homo sapiens
aaactctcataatcgggacagcactt

SEQ ID NO: 107373 - DNA, 26 bp, Homo sapiens
aactctcataatcgggacagcacttg

SEQ ID NO: 107374 - DNA, 26 bp, Homo sapiens
actctcataatcgggacagcacttgt

SEQ ID NO: 107375 - DNA, 26 bp, Homo sapiens
ctctcataatcgggacagcacttgtc

SEQ ID NO: 107376 - DNA, 26 bp, Homo sapiens
tctcataatcgggacagcacttgtca

SEQ ID NO: 107377 - DNA, 26 bp, Homo sapiens
ctcataatcgggacagcacttgtcat

SEQ ID NO: 107378 - DNA, 26 bp, Homo sapiens
tcataatcgggacagcacttgtcata

SEQ ID NO: 107379 - DNA, 26 bp, Homo sapiens
cataatcgggacagcacttgtcatac

SEQ ID NO: 107380 - DNA, 26 bp, Homo sapiens
ataatcgggacagcacttgtcatact

SEQ ID NO: 107381 - DNA, 26 bp, Homo sapiens
taatcgggacagcacttgtcatactt

SEQ ID NO: 107382 - DNA, 26 bp, Homo sapiens
aatcgggacagcacttgtcatacttc

SEQ ID NO: 107383 - DNA, 26 bp, Homo sapiens
atcgggacagcacttgtcatacttct

SEQ ID NO: 107384 - DNA, 26 bp, Homo sapiens
tcgggacagcacttgtcatacttctt

SEQ ID NO: 107385 - DNA, 26 bp, Homo sapiens
cgggacagcacttgtcatacttctta

SEQ ID NO: 107386 - DNA, 26 bp, Homo sapiens
gggacagcacttgtcatacttcttac

SEQ ID NO: 107387 - DNA, 26 bp, Homo sapiens
ggacagcacttgtcatacttcttaca

SEQ ID NO: 107388 - DNA, 26 bp, Homo sapiens
gacagcacttgtcatacttcttacat

SEQ ID NO: 107389 - DNA, 26 bp, Homo sapiens
acagcacttgtcatacttcttacatt

SEQ ID NO: 107390 - DNA, 26 bp, Homo sapiens
cagcacttgtcatacttcttacattg

SEQ ID NO: 107391 - DNA, 26 bp, Homo sapiens
agcacttgtcatacttcttacattgg

SEQ ID NO: 107392 - DNA, 26 bp, Homo sapiens
gcacttgtcatacttcttacattggg

SEQ ID NO: 107393 - DNA, 26 bp, Homo sapiens
cacttgtcatacttcttacattgggc

SEQ ID NO: 107394 - DNA, 26 bp, Homo sapiens
acttgtcatacttcttacattgggcg

SEQ ID NO: 107395 - DNA, 26 bp, Homo sapiens
cttgtcatacttcttacattgggcgt

SEQ ID NO: 107396 - DNA, 26 bp, Homo sapiens
ttgtcatacttcttacattgggcgtc

SEQ ID NO: 107397 - DNA, 26 bp, Homo sapiens
tgtcatacttcttacattgggcgtcg

SEQ ID NO: 107398 - DNA, 26 bp, Homo sapiens
gtcatacttcttacattgggcgtcgc

SEQ ID NO: 107399 - DNA, 26 bp, Homo sapiens
tcatacttcttacattgggcgtcgca

SEQ ID NO: 107400 - DNA, 26 bp, Homo sapiens
catacttcttacattgggcgtcgcag

SEQ ID NO: 107401 - DNA, 26 bp, Homo sapiens
atacttcttacattgggcgtcgcagt

SEQ ID NO: 107402 - DNA, 26 bp, Homo sapiens
tacttcttacattgggcgtcgcagtc

SEQ ID NO: 107403 - DNA, 26 bp, Homo sapiens
acttcttacattgggcgtcgcagtca

SEQ ID NO: 107404 - DNA, 26 bp, Homo sapiens
cttcttacattgggcgtcgcagtcac

SEQ ID NO: 107405 - DNA, 26 bp, Homo sapiens
ttcttacattgggcgtcgcagtcaca

SEQ ID NO: 107406 - DNA, 26 bp, Homo sapiens
tcttacattgggcgtcgcagtcacac

SEQ ID NO: 107407 - DNA, 26 bp, Homo sapiens
cttacattgggcgtcgcagtcacact

SEQ ID NO: 107408 - DNA, 26 bp, Homo sapiens
ttacattgggcgtcgcagtcacactc

SEQ ID NO: 107409 - DNA, 26 bp, Homo sapiens
tacattgggcgtcgcagtcacactcc

SEQ ID NO: 107410 - DNA, 26 bp, Homo sapiens
acattgggcgtcgcagtcacactccc

SEQ ID NO: 107411 - DNA, 26 bp, Homo sapiens
cattgggcgtcgcagtcacactccct

SEQ ID NO: 107412 - DNA, 26 bp, Homo sapiens
attgggcgtcgcagtcacactccctc

SEQ ID NO: 107413 - DNA, 26 bp, Homo sapiens
ttgggcgtcgcagtcacactccctcc

SEQ ID NO: 107414 - DNA, 26 bp, Homo sapiens
tgggcgtcgcagtcacactccctccc

SEQ ID NO: 107415 - DNA, 26 bp, Homo sapiens
gggcgtcgcagtcacactccctccct

SEQ ID NO: 107416 - DNA, 26 bp, Homo sapiens
ggcgtcgcagtcacactccctccctc

SEQ ID NO: 107417 - DNA, 26 bp, Homo sapiens
gcgtcgcagtcacactccctccctct

SEQ ID NO: 107418 - DNA, 26 bp, Homo sapiens
cgtcgcagtcacactccctccctctc

SEQ ID NO: 107419 - DNA, 26 bp, Homo sapiens
gtcgcagtcacactccctccctctct

SEQ ID NO: 107420 - DNA, 26 bp, Homo sapiens
tcgcagtcacactccctccctctctc

SEQ ID NO: 107421 - DNA, 26 bp, Homo sapiens
cgcagtcacactccctccctctctcg

SEQ ID NO: 107422 - DNA, 26 bp, Homo sapiens
gcagtcacactccctccctctctcga

SEQ ID NO: 107423 - DNA, 26 bp, Homo sapiens
cagtcacactccctccctctctcgaa

SEQ ID NO: 107424 - DNA, 26 bp, Homo sapiens
agtcacactccctccctctctcgaag

SEQ ID NO: 107425 - DNA, 26 bp, Homo sapiens
gtcacactccctccctctctcgaagg

SEQ ID NO: 107426 - DNA, 26 bp, Homo sapiens
tcacactccctccctctctcgaagga

SEQ ID NO: 107427 - DNA, 26 bp, Homo sapiens
cacactccctccctctctcgaaggac

SEQ ID NO: 107428 - DNA, 26 bp, Homo sapiens
acactccctccctctctcgaaggact

SEQ ID NO: 107429 - DNA, 26 bp, Homo sapiens
cactccctccctctctcgaaggactc

SEQ ID NO: 107430 - DNA, 26 bp, Homo sapiens
actccctccctctctcgaaggactca

SEQ ID NO: 107431 - DNA, 26 bp, Homo sapiens
ctccctccctctctcgaaggactcaa

SEQ ID NO: 107432 - DNA, 26 bp, Homo sapiens
tccctccctctctcgaaggactcaaa

SEQ ID NO: 107433 - DNA, 26 bp, Homo sapiens
ccctccctctctcgaaggactcaaag

SEQ ID NO: 107434 - DNA, 26 bp, Homo sapiens
cctccctctctcgaaggactcaaagc

SEQ ID NO: 107435 - DNA, 26 bp, Homo sapiens
ctccctctctcgaaggactcaaagca

SEQ ID NO: 107436 - DNA, 26 bp, Homo sapiens
tccctctctcgaaggactcaaagcag

SEQ ID NO: 107437 - DNA, 26 bp, Homo sapiens
ccctctctcgaaggactcaaagcagc

SEQ ID NO: 107438 - DNA, 26 bp, Homo sapiens
cctctctcgaaggactcaaagcagcg

SEQ ID NO: 107439 - DNA, 26 bp, Homo sapiens
ctctctcgaaggactcaaagcagcgg

SEQ ID NO: 107440 - DNA, 26 bp, Homo sapiens
tctctcgaaggactcaaagcagcggc

SEQ ID NO: 107441 - DNA, 26 bp, Homo sapiens
ctctcgaaggactcaaagcagcggcc

SEQ ID NO: 107442 - DNA, 26 bp, Homo sapiens
tctcgaaggactcaaagcagcggcct

SEQ ID NO: 107443 - DNA, 26 bp, Homo sapiens
ctcgaaggactcaaagcagcggcctt

SEQ ID NO: 107444 - DNA, 26 bp, Homo sapiens
tcgaaggactcaaagcagcggccttt

SEQ ID NO: 107445 - DNA, 26 bp, Homo sapiens
cgaaggactcaaagcagcggccttta

SEQ ID NO: 107446 - DNA, 26 bp, Homo sapiens
gaaggactcaaagcagcggcctttac

SEQ ID NO: 107447 - DNA, 26 bp, Homo sapiens
aaggactcaaagcagcggcctttaca

SEQ ID NO: 107448 - DNA, 26 bp, Homo sapiens
aggactcaaagcagcggcctttacag

SEQ ID NO: 107449 - DNA, 26 bp, Homo sapiens
ggactcaaagcagcggcctttacagg

SEQ ID NO: 107450 - DNA, 26 bp, Homo sapiens
gactcaaagcagcggcctttacagga

SEQ ID NO: 107451 - DNA, 26 bp, Homo sapiens
actcaaagcagcggcctttacaggaa

SEQ ID NO: 107452 - DNA, 26 bp, Homo sapiens
ctcaaagcagcggcctttacaggaaa

SEQ ID NO: 107453 - DNA, 26 bp, Homo sapiens
tcaaagcagcggcctttacaggaaag

SEQ ID NO: 107454 - DNA, 26 bp, Homo sapiens
caaagcagcggcctttacaggaaagc

SEQ ID NO: 107455 - DNA, 26 bp, Homo sapiens
aaagcagcggcctttacaggaaagct

SEQ ID NO: 107456 - DNA, 26 bp, Homo sapiens
aagcagcggcctttacaggaaagctc

SEQ ID NO: 107457 - DNA, 26 bp, Homo sapiens
agcagcggcctttacaggaaagctcc

SEQ ID NO: 107458 - DNA, 26 bp, Homo sapiens
gcagcggcctttacaggaaagctccg

SEQ ID NO: 107459 - DNA, 26 bp, Homo sapiens
cagcggcctttacaggaaagctccgc

SEQ ID NO: 107460 - DNA, 26 bp, Homo sapiens
agcggcctttacaggaaagctccgca

SEQ ID NO: 107461 - DNA, 26 bp, Homo sapiens
gcggcctttacaggaaagctccgcag

SEQ ID NO: 107462 - DNA, 26 bp, Homo sapiens
cggcctttacaggaaagctccgcagt

SEQ ID NO: 107463 - DNA, 26 bp, Homo sapiens
ggcctttacaggaaagctccgcagtg

SEQ ID NO: 107464 - DNA, 26 bp, Homo sapiens
gcctttacaggaaagctccgcagtgc

SEQ ID NO: 107465 - DNA, 26 bp, Homo sapiens
cctttacaggaaagctccgcagtgca

SEQ ID NO: 107466 - DNA, 26 bp, Homo sapiens
ctttacaggaaagctccgcagtgcag

SEQ ID NO: 107467 - DNA, 26 bp, Homo sapiens
tttacaggaaagctccgcagtgcaga

SEQ ID NO: 107468 - DNA, 26 bp, Homo sapiens
ttacaggaaagctccgcagtgcagac

SEQ ID NO: 107469 - DNA, 26 bp, Homo sapiens
tacaggaaagctccgcagtgcagact

SEQ ID NO: 107470 - DNA, 26 bp, Homo sapiens
acaggaaagctccgcagtgcagactc

SEQ ID NO: 107471 - DNA, 26 bp, Homo sapiens
caggaaagctccgcagtgcagactct

SEQ ID NO: 107472 - DNA, 26 bp, Homo sapiens
aggaaagctccgcagtgcagactctc

SEQ ID NO: 107473 - DNA, 26 bp, Homo sapiens
ggaaagctccgcagtgcagactctct

SEQ ID NO: 107474 - DNA, 26 bp, Homo sapiens
gaaagctccgcagtgcagactctctt

SEQ ID NO: 107475 - DNA, 26 bp, Homo sapiens
aaagctccgcagtgcagactctcttg

SEQ ID NO: 107476 - DNA, 26 bp, Homo sapiens
aagctccgcagtgcagactctcttga

SEQ ID NO: 107477 - DNA, 26 bp, Homo sapiens
agctccgcagtgcagactctcttgaa

SEQ ID NO: 107478 - DNA, 26 bp, Homo sapiens
gctccgcagtgcagactctcttgaaa

SEQ ID NO: 107479 - DNA, 26 bp, Homo sapiens
ctccgcagtgcagactctcttgaaat

SEQ ID NO: 107480 - DNA, 26 bp, Homo sapiens
tccgcagtgcagactctcttgaaatc

SEQ ID NO: 107481 - DNA, 26 bp, Homo sapiens
ccgcagtgcagactctcttgaaatca

SEQ ID NO: 107482 - DNA, 26 bp, Homo sapiens
cgcagtgcagactctcttgaaatcag

SEQ ID NO: 107483 - DNA, 26 bp, Homo sapiens
gcagtgcagactctcttgaaatcagg

SEQ ID NO: 107484 - DNA, 26 bp, Homo sapiens
cagtgcagactctcttgaaatcaggg

SEQ ID NO: 107485 - DNA, 26 bp, Homo sapiens
agtgcagactctcttgaaatcagggc

SEQ ID NO: 107486 - DNA, 26 bp, Homo sapiens
gtgcagactctcttgaaatcagggca

SEQ ID NO: 107487 - DNA, 26 bp, Homo sapiens
tgcagactctcttgaaatcagggcag

SEQ ID NO: 107488 - DNA, 26 bp, Homo sapiens
gcagactctcttgaaatcagggcagc

SEQ ID NO: 107489 - DNA, 26 bp, Homo sapiens
cagactctcttgaaatcagggcagca

SEQ ID NO: 107490 - DNA, 26 bp, Homo sapiens
agactctcttgaaatcagggcagcac

SEQ ID NO: 107491 - DNA, 26 bp, Homo sapiens
gactctcttgaaatcagggcagcact

SEQ ID NO: 107492 - DNA, 26 bp, Homo sapiens
actctcttgaaatcagggcagcactc

SEQ ID NO: 107493 - DNA, 26 bp, Homo sapiens
ctctcttgaaatcagggcagcactcc

SEQ ID NO: 107494 - DNA, 26 bp, Homo sapiens
tctcttgaaatcagggcagcactcca

SEQ ID NO: 107495 - DNA, 26 bp, Homo sapiens
ctcttgaaatcagggcagcactccat

SEQ ID NO: 107496 - DNA, 26 bp, Homo sapiens
tcttgaaatcagggcagcactccatg

SEQ ID NO: 107497 - DNA, 26 bp, Homo sapiens
cttgaaatcagggcagcactccatgt

SEQ ID NO: 107498 - DNA, 26 bp, Homo sapiens
ttgaaatcagggcagcactccatgta

SEQ ID NO: 107499 - DNA, 26 bp, Homo sapiens
tgaaatcagggcagcactccatgtag

SEQ ID NO: 107500 - DNA, 26 bp, Homo sapiens
gaaatcagggcagcactccatgtagt

SEQ ID NO: 107501 - DNA, 26 bp, Homo sapiens
aaatcagggcagcactccatgtagtg

SEQ ID NO: 107502 - DNA, 26 bp, Homo sapiens
aatcagggcagcactccatgtagtgt

SEQ ID NO: 107503 - DNA, 26 bp, Homo sapiens
atcagggcagcactccatgtagtgtt

SEQ ID NO: 107504 - DNA, 26 bp, Homo sapiens
tcagggcagcactccatgtagtgttg

SEQ ID NO: 107505 - DNA, 26 bp, Homo sapiens
cagggcagcactccatgtagtgttga

SEQ ID NO: 107506 - DNA, 26 bp, Homo sapiens
agggcagcactccatgtagtgttgac

SEQ ID NO: 107507 - DNA, 26 bp, Homo sapiens
gggcagcactccatgtagtgttgaca

SEQ ID NO: 107508 - DNA, 26 bp, Homo sapiens
ggcagcactccatgtagtgttgacag

SEQ ID NO: 107509 - DNA, 26 bp, Homo sapiens
gcagcactccatgtagtgttgacagt

SEQ ID NO: 107510 - DNA, 26 bp, Homo sapiens
cagcactccatgtagtgttgacagtt

SEQ ID NO: 107511 - DNA, 26 bp, Homo sapiens
agcactccatgtagtgttgacagtta

SEQ ID NO: 107512 - DNA, 26 bp, Homo sapiens
gcactccatgtagtgttgacagttat

SEQ ID NO: 107513 - DNA, 26 bp, Homo sapiens
cactccatgtagtgttgacagttata

SEQ ID NO: 107514 - DNA, 26 bp, Homo sapiens
actccatgtagtgttgacagttataa

SEQ ID NO: 107515 - DNA, 26 bp, Homo sapiens
ctccatgtagtgttgacagttataat

SEQ ID NO: 107516 - DNA, 26 bp, Homo sapiens
tccatgtagtgttgacagttataatc

SEQ ID NO: 107517 - DNA, 26 bp, Homo sapiens
ccatgtagtgttgacagttataatca

SEQ ID NO: 107518 - DNA, 26 bp, Homo sapiens
catgtagtgttgacagttataatcac

SEQ ID NO: 107519 - DNA, 26 bp, Homo sapiens
atgtagtgttgacagttataatcaca

SEQ ID NO: 107520 - DNA, 26 bp, Homo sapiens
tgtagtgttgacagttataatcacag

SEQ ID NO: 107521 - DNA, 26 bp, Homo sapiens
gtagtgttgacagttataatcacagt

SEQ ID NO: 107522 - DNA, 26 bp, Homo sapiens
tagtgttgacagttataatcacagtt

SEQ ID NO: 107523 - DNA, 26 bp, Homo sapiens
agtgttgacagttataatcacagttg

SEQ ID NO: 107524 - DNA, 26 bp, Homo sapiens
gtgttgacagttataatcacagttgc

SEQ ID NO: 107525 - DNA, 26 bp, Homo sapiens
tgttgacagttataatcacagttgca

SEQ ID NO: 107526 - DNA, 26 bp, Homo sapiens
gttgacagttataatcacagttgcag

SEQ ID NO: 107527 - DNA, 26 bp, Homo sapiens
ttgacagttataatcacagttgcagg

SEQ ID NO: 107528 - DNA, 26 bp, Homo sapiens
tgacagttataatcacagttgcaggt

SEQ ID NO: 107529 - DNA, 26 bp, Homo sapiens
gacagttataatcacagttgcaggtg

SEQ ID NO: 107530 - DNA, 26 bp, Homo sapiens
acagttataatcacagttgcaggtgg

SEQ ID NO: 107531 - DNA, 26 bp, Homo sapiens
cagttataatcacagttgcaggtggc

SEQ ID NO: 107532 - DNA, 26 bp, Homo sapiens
agttataatcacagttgcaggtggca

SEQ ID NO: 107533 - DNA, 26 bp, Homo sapiens
gttataatcacagttgcaggtggcat

SEQ ID NO: 107534 - DNA, 26 bp, Homo sapiens
ttataatcacagttgcaggtggcatc

SEQ ID NO: 107535 - DNA, 26 bp, Homo sapiens
tataatcacagttgcaggtggcatct

SEQ ID NO: 107536 - DNA, 26 bp, Homo sapiens
ataatcacagttgcaggtggcatctc

SEQ ID NO: 107537 - DNA, 26 bp, Homo sapiens
taatcacagttgcaggtggcatctct

SEQ ID NO: 107538 - DNA, 26 bp, Homo sapiens
aatcacagttgcaggtggcatctcta

SEQ ID NO: 107539 - DNA, 26 bp, Homo sapiens
atcacagttgcaggtggcatctctag

SEQ ID NO: 107540 - DNA, 26 bp, Homo sapiens
tcacagttgcaggtggcatctctaga

SEQ ID NO: 107541 - DNA, 26 bp, Homo sapiens
cacagttgcaggtggcatctctagaa

SEQ ID NO: 107542 - DNA, 26 bp, Homo sapiens
acagttgcaggtggcatctctagaat

SEQ ID NO: 107543 - DNA, 26 bp, Homo sapiens
cagttgcaggtggcatctctagaata

SEQ ID NO: 107544 - DNA, 26 bp, Homo sapiens
agttgcaggtggcatctctagaatac

SEQ ID NO: 107545 - DNA, 26 bp, Homo sapiens
gttgcaggtggcatctctagaatacc

SEQ ID NO: 107546 - DNA, 26 bp, Homo sapiens
ttgcaggtggcatctctagaataccc

SEQ ID NO: 107547 - DNA, 26 bp, Homo sapiens
tgcaggtggcatctctagaataccct

SEQ ID NO: 107548 - DNA, 26 bp, Homo sapiens
gcaggtggcatctctagaataccctt

SEQ ID NO: 107549 - DNA, 26 bp, Homo sapiens
caggtggcatctctagaatacccttc

SEQ ID NO: 107550 - DNA, 26 bp, Homo sapiens
aggtggcatctctagaatacccttcc

SEQ ID NO: 107551 - DNA, 26 bp, Homo sapiens
ggtggcatctctagaatacccttccc

SEQ ID NO: 107552 - DNA, 26 bp, Homo sapiens
gtggcatctctagaatacccttcccc

SEQ ID NO: 107553 - DNA, 26 bp, Homo sapiens
tggcatctctagaatacccttcccca

SEQ ID NO: 107554 - DNA, 26 bp, Homo sapiens
ggcatctctagaatacccttccccac

SEQ ID NO: 107555 - DNA, 26 bp, Homo sapiens
gcatctctagaatacccttccccaca

SEQ ID NO: 107556 - DNA, 26 bp, Homo sapiens
catctctagaatacccttccccacat

SEQ ID NO: 107557 - DNA, 26 bp, Homo sapiens
atctctagaatacccttccccacatc

SEQ ID NO: 107558 - DNA, 26 bp, Homo sapiens
tctctagaatacccttccccacatct

SEQ ID NO: 107559 - DNA, 26 bp, Homo sapiens
ctctagaatacccttccccacatctc

SEQ ID NO: 107560 - DNA, 26 bp, Homo sapiens
tctagaatacccttccccacatctcc

SEQ ID NO: 107561 - DNA, 26 bp, Homo sapiens
ctagaatacccttccccacatctccc

SEQ ID NO: 107562 - DNA, 26 bp, Homo sapiens
tagaatacccttccccacatctccct

SEQ ID NO: 107563 - DNA, 26 bp, Homo sapiens
agaatacccttccccacatctccctg

SEQ ID NO: 107564 - DNA, 26 bp, Homo sapiens
gaatacccttccccacatctccctgc

SEQ ID NO: 107565 - DNA, 26 bp, Homo sapiens
aatacccttccccacatctccctgca

SEQ ID NO: 107566 - DNA, 26 bp, Homo sapiens
atacccttccccacatctccctgcac

SEQ ID NO: 107567 - DNA, 26 bp, Homo sapiens
tacccttccccacatctccctgcaca

SEQ ID NO: 107568 - DNA, 26 bp, Homo sapiens
acccttccccacatctccctgcacag

SEQ ID NO: 107569 - DNA, 26 bp, Homo sapiens
cccttccccacatctccctgcacagc

SEQ ID NO: 107570 - DNA, 26 bp, Homo sapiens
ccttccccacatctccctgcacagct

SEQ ID NO: 107571 - DNA, 26 bp, Homo sapiens
cttccccacatctccctgcacagctt

SEQ ID NO: 107572 - DNA, 26 bp, Homo sapiens
ttccccacatctccctgcacagcttg

SEQ ID NO: 107573 - DNA, 26 bp, Homo sapiens
tccccacatctccctgcacagcttga

SEQ ID NO: 107574 - DNA, 26 bp, Homo sapiens
ccccacatctccctgcacagcttgat

SEQ ID NO: 107575 - DNA, 26 bp, Homo sapiens
cccacatctccctgcacagcttgata

SEQ ID NO: 107576 - DNA, 26 bp, Homo sapiens
ccacatctccctgcacagcttgataa

SEQ ID NO: 107577 - DNA, 26 bp, Homo sapiens
cacatctccctgcacagcttgataaa

SEQ ID NO: 107578 - DNA, 26 bp, Homo sapiens
acatctccctgcacagcttgataaat

SEQ ID NO: 107579 - DNA, 26 bp, Homo sapiens
catctccctgcacagcttgataaatc

SEQ ID NO: 107580 - DNA, 26 bp, Homo sapiens
atctccctgcacagcttgataaatct

SEQ ID NO: 107581 - DNA, 26 bp, Homo sapiens
tctccctgcacagcttgataaatctt

SEQ ID NO: 107582 - DNA, 26 bp, Homo sapiens
ctccctgcacagcttgataaatcttg

SEQ ID NO: 107583 - DNA, 26 bp, Homo sapiens
tccctgcacagcttgataaatcttga

SEQ ID NO: 107584 - DNA, 26 bp, Homo sapiens
ccctgcacagcttgataaatcttgag

SEQ ID NO: 107585 - DNA, 26 bp, Homo sapiens
cctgcacagcttgataaatcttgaga

SEQ ID NO: 107586 - DNA, 26 bp, Homo sapiens
ctgcacagcttgataaatcttgagat

SEQ ID NO: 107587 - DNA, 26 bp, Homo sapiens
tgcacagcttgataaatcttgagatg

SEQ ID NO: 107588 - DNA, 26 bp, Homo sapiens
gcacagcttgataaatcttgagatga

SEQ ID NO: 107589 - DNA, 26 bp, Homo sapiens
cacagcttgataaatcttgagatgaa

SEQ ID NO: 107590 - DNA, 26 bp, Homo sapiens
acagcttgataaatcttgagatgaaa

SEQ ID NO: 107591 - DNA, 26 bp, Homo sapiens
cagcttgataaatcttgagatgaaac

SEQ ID NO: 107592 - DNA, 26 bp, Homo sapiens
agcttgataaatcttgagatgaaact

SEQ ID NO: 107593 - DNA, 26 bp, Homo sapiens
gcttgataaatcttgagatgaaactt

SEQ ID NO: 107594 - DNA, 26 bp, Homo sapiens
cttgataaatcttgagatgaaacttg

SEQ ID NO: 107595 - DNA, 26 bp, Homo sapiens
ttgataaatcttgagatgaaacttgc

SEQ ID NO: 107596 - DNA, 26 bp, Homo sapiens
tgataaatcttgagatgaaacttgct

SEQ ID NO: 107597 - DNA, 26 bp, Homo sapiens
gataaatcttgagatgaaacttgctg

SEQ ID NO: 107598 - DNA, 26 bp, Homo sapiens
ataaatcttgagatgaaacttgctga

SEQ ID NO: 107599 - DNA, 26 bp, Homo sapiens
taaatcttgagatgaaacttgctgaa

SEQ ID NO: 107600 - DNA, 26 bp, Homo sapiens
aaatcttgagatgaaacttgctgaat

SEQ ID NO: 107601 - DNA, 26 bp, Homo sapiens
aatcttgagatgaaacttgctgaatc

SEQ ID NO: 107602 - DNA, 26 bp, Homo sapiens
atcttgagatgaaacttgctgaatca

SEQ ID NO: 107603 - DNA, 26 bp, Homo sapiens
tcttgagatgaaacttgctgaatcac

SEQ ID NO: 107604 - DNA, 26 bp, Homo sapiens
cttgagatgaaacttgctgaatcacg

SEQ ID NO: 107605 - DNA, 26 bp, Homo sapiens
ttgagatgaaacttgctgaatcacga

SEQ ID NO: 107606 - DNA, 26 bp, Homo sapiens
tgagatgaaacttgctgaatcacgaa

SEQ ID NO: 107607 - DNA, 26 bp, Homo sapiens
gagatgaaacttgctgaatcacgaaa

SEQ ID NO: 107608 - DNA, 26 bp, Homo sapiens
agatgaaacttgctgaatcacgaaaa

SEQ ID NO: 107609 - DNA, 26 bp, Homo sapiens
gatgaaacttgctgaatcacgaaaac

SEQ ID NO: 107610 - DNA, 26 bp, Homo sapiens
atgaaacttgctgaatcacgaaaaca

SEQ ID NO: 107611 - DNA, 26 bp, Homo sapiens
tgaaacttgctgaatcacgaaaacag

SEQ ID NO: 107612 - DNA, 26 bp, Homo sapiens
gaaacttgctgaatcacgaaaacaga

SEQ ID NO: 107613 - DNA, 26 bp, Homo sapiens
aaacttgctgaatcacgaaaacagac

SEQ ID NO: 107614 - DNA, 26 bp, Homo sapiens
aacttgctgaatcacgaaaacagaca

SEQ ID NO: 107615 - DNA, 26 bp, Homo sapiens
acttgctgaatcacgaaaacagacag

SEQ ID NO: 107616 - DNA, 26 bp, Homo sapiens
cttgctgaatcacgaaaacagacagc

SEQ ID NO: 107617 - DNA, 26 bp, Homo sapiens
ttgctgaatcacgaaaacagacagca

SEQ ID NO: 107618 - DNA, 26 bp, Homo sapiens
tgctgaatcacgaaaacagacagcag

SEQ ID NO: 107619 - DNA, 26 bp, Homo sapiens
gctgaatcacgaaaacagacagcagc

SEQ ID NO: 107620 - DNA, 26 bp, Homo sapiens
ctgaatcacgaaaacagacagcagca

SEQ ID NO: 107621 - DNA, 26 bp, Homo sapiens
tgaatcacgaaaacagacagcagcaa

SEQ ID NO: 107622 - DNA, 26 bp, Homo sapiens
gaatcacgaaaacagacagcagcaac

SEQ ID NO: 107623 - DNA, 26 bp, Homo sapiens
aatcacgaaaacagacagcagcaaca

SEQ ID NO: 107624 - DNA, 26 bp, Homo sapiens
atcacgaaaacagacagcagcaacaa

SEQ ID NO: 107625 - DNA, 26 bp, Homo sapiens
tcacgaaaacagacagcagcaacaac

SEQ ID NO: 107626 - DNA, 26 bp, Homo sapiens
cacgaaaacagacagcagcaacaaca

SEQ ID NO: 107627 - DNA, 26 bp, Homo sapiens
acgaaaacagacagcagcaacaacag

SEQ ID NO: 107628 - DNA, 26 bp, Homo sapiens
cgaaaacagacagcagcaacaacagg

SEQ ID NO: 107629 - DNA, 26 bp, Homo sapiens
gaaaacagacagcagcaacaacaggt

SEQ ID NO: 107630 - DNA, 26 bp, Homo sapiens
aaaacagacagcagcaacaacaggta

SEQ ID NO: 107631 - DNA, 26 bp, Homo sapiens
aaacagacagcagcaacaacaggtaa

SEQ ID NO: 107632 - DNA, 26 bp, Homo sapiens
aacagacagcagcaacaacaggtaaa

SEQ ID NO: 107633 - DNA, 26 bp, Homo sapiens
acagacagcagcaacaacaggtaaat

SEQ ID NO: 107634 - DNA, 26 bp, Homo sapiens
cagacagcagcaacaacaggtaaatg

SEQ ID NO: 107635 - DNA, 26 bp, Homo sapiens
agacagcagcaacaacaggtaaatgg

SEQ ID NO: 107636 - DNA, 26 bp, Homo sapiens
gacagcagcaacaacaggtaaatggg

SEQ ID NO: 107637 - DNA, 26 bp, Homo sapiens
acagcagcaacaacaggtaaatggga

SEQ ID NO: 107638 - DNA, 26 bp, Homo sapiens
cagcagcaacaacaggtaaatgggaa

SEQ ID NO: 107639 - DNA, 26 bp, Homo sapiens
agcagcaacaacaggtaaatgggaag

SEQ ID NO: 107640 - DNA, 26 bp, Homo sapiens
gcagcaacaacaggtaaatgggaagt

SEQ ID NO: 107641 - DNA, 26 bp, Homo sapiens
cagcaacaacaggtaaatgggaagtg

SEQ ID NO: 107642 - DNA, 26 bp, Homo sapiens
agcaacaacaggtaaatgggaagtgt

SEQ ID NO: 107643 - DNA, 26 bp, Homo sapiens
gcaacaacaggtaaatgggaagtgtt

SEQ ID NO: 107644 - DNA, 26 bp, Homo sapiens
caacaacaggtaaatgggaagtgttt

SEQ ID NO: 107645 - DNA, 26 bp, Homo sapiens
aacaacaggtaaatgggaagtgtttt

SEQ ID NO: 107646 - DNA, 26 bp, Homo sapiens
acaacaggtaaatgggaagtgttttc

SEQ ID NO: 107647 - DNA, 26 bp, Homo sapiens
caacaggtaaatgggaagtgttttcc

SEQ ID NO: 107648 - DNA, 26 bp, Homo sapiens
aacaggtaaatgggaagtgttttcca

SEQ ID NO: 107649 - DNA, 26 bp, Homo sapiens
acaggtaaatgggaagtgttttccat

SEQ ID NO: 107650 - DNA, 26 bp, Homo sapiens
caggtaaatgggaagtgttttccatg

SEQ ID NO: 107651 - DNA, 26 bp, Homo sapiens
aggtaaatgggaagtgttttccatgc

SEQ ID NO: 107652 - DNA, 26 bp, Homo sapiens
ggtaaatgggaagtgttttccatgcc

SEQ ID NO: 107653 - DNA, 26 bp, Homo sapiens
gtaaatgggaagtgttttccatgcca

SEQ ID NO: 107654 - DNA, 26 bp, Homo sapiens
taaatgggaagtgttttccatgccat

SEQ ID NO: 107655 - DNA, 26 bp, Homo sapiens
aaatgggaagtgttttccatgccatc

SEQ ID NO: 107656 - DNA, 26 bp, Homo sapiens
aatgggaagtgttttccatgccatcg

SEQ ID NO: 107657 - DNA, 26 bp, Homo sapiens
atgggaagtgttttccatgccatcgt

SEQ ID NO: 107658 - DNA, 26 bp, Homo sapiens
tgggaagtgttttccatgccatcgtt

SEQ ID NO: 107659 - DNA, 26 bp, Homo sapiens
gggaagtgttttccatgccatcgttg

SEQ ID NO: 107660 - DNA, 26 bp, Homo sapiens
ggaagtgttttccatgccatcgttgt

SEQ ID NO: 107661 - DNA, 26 bp, Homo sapiens
gaagtgttttccatgccatcgttgtt

SEQ ID NO: 107662 - DNA, 26 bp, Homo sapiens
aagtgttttccatgccatcgttgttt

SEQ ID NO: 107663 - DNA, 26 bp, Homo sapiens
agtgttttccatgccatcgttgtttt

SEQ ID NO: 107664 - DNA, 26 bp, Homo sapiens
gtgttttccatgccatcgttgttttc

SEQ ID NO: 107665 - DNA, 26 bp, Homo sapiens
tgttttccatgccatcgttgttttca

SEQ ID NO: 107666 - DNA, 26 bp, Homo sapiens
gttttccatgccatcgttgttttcag

SEQ ID NO: 107667 - DNA, 26 bp, Homo sapiens
ttttccatgccatcgttgttttcagg

SEQ ID NO: 107668 - DNA, 26 bp, Homo sapiens
tttccatgccatcgttgttttcaggt

SEQ ID NO: 107669 - DNA, 26 bp, Homo sapiens
ttccatgccatcgttgttttcaggta

SEQ ID NO: 107670 - DNA, 26 bp, Homo sapiens
tccatgccatcgttgttttcaggtac

SEQ ID NO: 107671 - DNA, 26 bp, Homo sapiens
ccatgccatcgttgttttcaggtacc

SEQ ID NO: 107672 - DNA, 26 bp, Homo sapiens
catgccatcgttgttttcaggtaccg

SEQ ID NO: 107673 - DNA, 26 bp, Homo sapiens
atgccatcgttgttttcaggtaccgt

SEQ ID NO: 107674 - DNA, 26 bp, Homo sapiens
tgccatcgttgttttcaggtaccgta

SEQ ID NO: 107675 - DNA, 26 bp, Homo sapiens
gccatcgttgttttcaggtaccgtag

SEQ ID NO: 107676 - DNA, 26 bp, Homo sapiens
ccatcgttgttttcaggtaccgtagg

SEQ ID NO: 107677 - DNA, 26 bp, Homo sapiens
catcgttgttttcaggtaccgtaggt

SEQ ID NO: 107678 - DNA, 26 bp, Homo sapiens
atcgttgttttcaggtaccgtaggta

SEQ ID NO: 107679 - DNA, 26 bp, Homo sapiens
tcgttgttttcaggtaccgtaggtac

SEQ ID NO: 107680 - DNA, 26 bp, Homo sapiens
cgttgttttcaggtaccgtaggtacc

SEQ ID NO: 107681 - DNA, 26 bp, Homo sapiens
gttgttttcaggtaccgtaggtaccc

SEQ ID NO: 107682 - DNA, 26 bp, Homo sapiens
ttgttttcaggtaccgtaggtaccct

SEQ ID NO: 107683 - DNA, 26 bp, Homo sapiens
tgttttcaggtaccgtaggtaccctt

SEQ ID NO: 107684 - DNA, 26 bp, Homo sapiens
gttttcaggtaccgtaggtacccttg

SEQ ID NO: 107685 - DNA, 26 bp, Homo sapiens
ttttcaggtaccgtaggtacccttgc

SEQ ID NO: 107686 - DNA, 26 bp, Homo sapiens
tttcaggtaccgtaggtacccttgcc

SEQ ID NO: 107687 - DNA, 26 bp, Homo sapiens
ttcaggtaccgtaggtacccttgccg

SEQ ID NO: 107688 - DNA, 26 bp, Homo sapiens
tcaggtaccgtaggtacccttgccgt

SEQ ID NO: 107689 - DNA, 26 bp, Homo sapiens
caggtaccgtaggtacccttgccgta

SEQ ID NO: 107690 - DNA, 26 bp, Homo sapiens
aggtaccgtaggtacccttgccgtaa

SEQ ID NO: 107691 - DNA, 26 bp, Homo sapiens
ggtaccgtaggtacccttgccgtaaa

SEQ ID NO: 107692 - DNA, 26 bp, Homo sapiens
gtaccgtaggtacccttgccgtaaag

SEQ ID NO: 107693 - DNA, 26 bp, Homo sapiens
taccgtaggtacccttgccgtaaagg

SEQ ID NO: 107694 - DNA, 26 bp, Homo sapiens
accgtaggtacccttgccgtaaagga

SEQ ID NO: 107695 - DNA, 26 bp, Homo sapiens
ccgtaggtacccttgccgtaaaggat

SEQ ID NO: 107696 - DNA, 26 bp, Homo sapiens
cgtaggtacccttgccgtaaaggata

SEQ ID NO: 107697 - DNA, 26 bp, Homo sapiens
gtaggtacccttgccgtaaaggatag

SEQ ID NO: 107698 - DNA, 26 bp, Homo sapiens
taggtacccttgccgtaaaggataga

SEQ ID NO: 107699 - DNA, 26 bp, Homo sapiens
aggtacccttgccgtaaaggatagat

SEQ ID NO: 107700 - DNA, 26 bp, Homo sapiens
ggtacccttgccgtaaaggatagatg

SEQ ID NO: 107701 - DNA, 26 bp, Homo sapiens
gtacccttgccgtaaaggatagatga

SEQ ID NO: 107702 - DNA, 26 bp, Homo sapiens
tacccttgccgtaaaggatagatgag

SEQ ID NO: 107703 - DNA, 26 bp, Homo sapiens
acccttgccgtaaaggatagatgagt

SEQ ID NO: 107704 - DNA, 26 bp, Homo sapiens
cccttgccgtaaaggatagatgagtt

SEQ ID NO: 107705 - DNA, 26 bp, Homo sapiens
ccttgccgtaaaggatagatgagttt

SEQ ID NO: 107706 - DNA, 26 bp, Homo sapiens
tgttttgatagaagtcacacaaaaaa

SEQ ID NO: 107707 - DNA, 26 bp, Homo sapiens
gttttgatagaagtcacacaaaaaaa

SEQ ID NO: 107708 - DNA, 26 bp, Homo sapiens
ttttgatagaagtcacacaaaaaaaa

SEQ ID NO: 107709 - DNA, 26 bp, Homo sapiens
tttgatagaagtcacacaaaaaaaaa

SEQ ID NO: 107710 - DNA, 26 bp, Homo sapiens
ttgatagaagtcacacaaaaaaaaaa

SEQ ID NO: 107711 - DNA, 26 bp, Homo sapiens
tgatagaagtcacacaaaaaaaaaag

SEQ ID NO: 107712 - DNA, 26 bp, Homo sapiens
gatagaagtcacacaaaaaaaaaagg

SEQ ID NO: 107713 - DNA, 26 bp, Homo sapiens
atagaagtcacacaaaaaaaaaagga

SEQ ID NO: 107714 - DNA, 26 bp, Homo sapiens
tagaagtcacacaaaaaaaaaaggat

SEQ ID NO: 107715 - DNA, 26 bp, Homo sapiens
agaagtcacacaaaaaaaaaaggata

SEQ ID NO: 107716 - DNA, 26 bp, Homo sapiens
gaagtcacacaaaaaaaaaaggataa

SEQ ID NO: 107717 - DNA, 26 bp, Homo sapiens
aagtcacacaaaaaaaaaaggataaa

SEQ ID NO: 107718 - DNA, 26 bp, Homo sapiens
agtcacacaaaaaaaaaaggataaaa

SEQ ID NO: 107719 - DNA, 26 bp, Homo sapiens
gtcacacaaaaaaaaaaggataaaag

SEQ ID NO: 107720 - DNA, 26 bp, Homo sapiens
tcacacaaaaaaaaaaggataaaaga

SEQ ID NO: 107721 - DNA, 26 bp, Homo sapiens
cacacaaaaaaaaaaggataaaagaa

SEQ ID NO: 107722 - DNA, 26 bp, Homo sapiens
acacaaaaaaaaaaggataaaagaaa

SEQ ID NO: 107723 - DNA, 26 bp, Homo sapiens
cacaaaaaaaaaaggataaaagaaac

SEQ ID NO: 107724 - DNA, 26 bp, Homo sapiens
acaaaaaaaaaaggataaaagaaacc

SEQ ID NO: 107725 - DNA, 26 bp, Homo sapiens
caaaaaaaaaaggataaaagaaaccc

SEQ ID NO: 107726 - DNA, 26 bp, Homo sapiens
aaaaaaaaaaggataaaagaaaccct

SEQ ID NO: 107727 - DNA, 26 bp, Homo sapiens
aaaaaaaaaggataaaagaaaccctt

SEQ ID NO: 107728 - DNA, 26 bp, Homo sapiens
aaaaaaaaggataaaagaaacccttc

SEQ ID NO: 107729 - DNA, 26 bp, Homo sapiens
aaaaaaaggataaaagaaacccttcc

SEQ ID NO: 107730 - DNA, 26 bp, Homo sapiens
aaaaaaggataaaagaaacccttccc

SEQ ID NO: 107731 - DNA, 26 bp, Homo sapiens
aaaaaggataaaagaaacccttcccc

SEQ ID NO: 107732 - DNA, 26 bp, Homo sapiens
aaaaggataaaagaaacccttccccc

SEQ ID NO: 107733 - DNA, 26 bp, Homo sapiens
aaaggataaaagaaacccttcccccc

SEQ ID NO: 107734 - DNA, 26 bp, Homo sapiens
aaggataaaagaaacccttcccccct

SEQ ID NO: 107735 - DNA, 26 bp, Homo sapiens
aggataaaagaaacccttcccccctt

SEQ ID NO: 107736 - DNA, 26 bp, Homo sapiens
ggataaaagaaacccttccccccttc

SEQ ID NO: 107737 - DNA, 26 bp, Homo sapiens
gataaaagaaacccttccccccttct

SEQ ID NO: 107738 - DNA, 26 bp, Homo sapiens
ataaaagaaacccttccccccttctt

SEQ ID NO: 107739 - DNA, 26 bp, Homo sapiens
taaaagaaacccttccccccttcttc

SEQ ID NO: 107740 - DNA, 26 bp, Homo sapiens
aaaagaaacccttccccccttcttca

SEQ ID NO: 107741 - DNA, 26 bp, Homo sapiens
aaagaaacccttccccccttcttcaa

SEQ ID NO: 107742 - DNA, 26 bp, Homo sapiens
aagaaacccttccccccttcttcaag

SEQ ID NO: 107743 - DNA, 26 bp, Homo sapiens
agaaacccttccccccttcttcaagt

SEQ ID NO: 107744 - DNA, 26 bp, Homo sapiens
gaaacccttccccccttcttcaagtt

SEQ ID NO: 107745 - DNA, 26 bp, Homo sapiens
aaacccttccccccttcttcaagtta

SEQ ID NO: 107746 - DNA, 26 bp, Homo sapiens
aacccttccccccttcttcaagttat

SEQ ID NO: 107747 - DNA, 26 bp, Homo sapiens
acccttccccccttcttcaagttatt

SEQ ID NO: 107748 - DNA, 26 bp, Homo sapiens
cccttccccccttcttcaagttattg

SEQ ID NO: 107749 - DNA, 26 bp, Homo sapiens
ccttccccccttcttcaagttattgc

SEQ ID NO: 107750 - DNA, 26 bp, Homo sapiens
cttccccccttcttcaagttattgct

SEQ ID NO: 107751 - DNA, 26 bp, Homo sapiens
ttccccccttcttcaagttattgctc

SEQ ID NO: 107752 - DNA, 26 bp, Homo sapiens
tccccccttcttcaagttattgctcc

SEQ ID NO: 107753 - DNA, 26 bp, Homo sapiens
ccccccttcttcaagttattgctccc

SEQ ID NO: 107754 - DNA, 26 bp, Homo sapiens
cccccttcttcaagttattgctccct

SEQ ID NO: 107755 - DNA, 26 bp, Homo sapiens
ccccttcttcaagttattgctccctc

SEQ ID NO: 107756 - DNA, 26 bp, Homo sapiens
cccttcttcaagttattgctccctcc

SEQ ID NO: 107757 - DNA, 26 bp, Homo sapiens
ccttcttcaagttattgctccctcca

SEQ ID NO: 107758 - DNA, 26 bp, Homo sapiens
cttcttcaagttattgctccctccat

SEQ ID NO: 107759 - DNA, 26 bp, Homo sapiens
ttcttcaagttattgctccctccatt

SEQ ID NO: 107760 - DNA, 26 bp, Homo sapiens
tcttcaagttattgctccctccattc

SEQ ID NO: 107761 - DNA, 26 bp, Homo sapiens
cttcaagttattgctccctccattcc

SEQ ID NO: 107762 - DNA, 26 bp, Homo sapiens
ttcaagttattgctccctccattccc

SEQ ID NO: 107763 - DNA, 26 bp, Homo sapiens
tcaagttattgctccctccattcccc

SEQ ID NO: 107764 - DNA, 26 bp, Homo sapiens
caagttattgctccctccattcccct

SEQ ID NO: 107765 - DNA, 26 bp, Homo sapiens
aagttattgctccctccattcccctg

SEQ ID NO: 107766 - DNA, 26 bp, Homo sapiens
agttattgctccctccattcccctgg

SEQ ID NO: 107767 - DNA, 26 bp, Homo sapiens
gttattgctccctccattcccctgga

SEQ ID NO: 107768 - DNA, 26 bp, Homo sapiens
ttattgctccctccattcccctggac

SEQ ID NO: 107769 - DNA, 26 bp, Homo sapiens
tattgctccctccattcccctggacc

SEQ ID NO: 107770 - DNA, 26 bp, Homo sapiens
attgctccctccattcccctggaccc

SEQ ID NO: 107771 - DNA, 26 bp, Homo sapiens
ttgctccctccattcccctggaccca

SEQ ID NO: 107772 - DNA, 26 bp, Homo sapiens
tgctccctccattcccctggacccag

SEQ ID NO: 107773 - DNA, 26 bp, Homo sapiens
gctccctccattcccctggacccagg

SEQ ID NO: 107774 - DNA, 26 bp, Homo sapiens
ctccctccattcccctggacccaggg

SEQ ID NO: 107775 - DNA, 26 bp, Homo sapiens
tccctccattcccctggacccaggga

SEQ ID NO: 107776 - DNA, 26 bp, Homo sapiens
ccctccattcccctggacccagggac

SEQ ID NO: 107777 - DNA, 26 bp, Homo sapiens
cctccattcccctggacccagggaca

SEQ ID NO: 107778 - DNA, 26 bp, Homo sapiens
ctccattcccctggacccagggacat

SEQ ID NO: 107779 - DNA, 26 bp, Homo sapiens
tccattcccctggacccagggacatg

SEQ ID NO: 107780 - DNA, 26 bp, Homo sapiens
ccattcccctggacccagggacatgc

SEQ ID NO: 107781 - DNA, 26 bp, Homo sapiens
cattcccctggacccagggacatgca

SEQ ID NO: 107782 - DNA, 26 bp, Homo sapiens
attcccctggacccagggacatgcag

SEQ ID NO: 107783 - DNA, 26 bp, Homo sapiens
ttcccctggacccagggacatgcagc

SEQ ID NO: 107784 - DNA, 26 bp, Homo sapiens
tcccctggacccagggacatgcagcc

SEQ ID NO: 107785 - DNA, 26 bp, Homo sapiens
cccctggacccagggacatgcagccc

SEQ ID NO: 107786 - DNA, 26 bp, Homo sapiens
ccctggacccagggacatgcagccct

SEQ ID NO: 107787 - DNA, 26 bp, Homo sapiens
cctggacccagggacatgcagcccta

SEQ ID NO: 107788 - DNA, 26 bp, Homo sapiens
ctggacccagggacatgcagccctac

SEQ ID NO: 107789 - DNA, 26 bp, Homo sapiens
tggacccagggacatgcagccctaca

SEQ ID NO: 107790 - DNA, 26 bp, Homo sapiens
ggacccagggacatgcagccctacat

SEQ ID NO: 107791 - DNA, 26 bp, Homo sapiens
gacccagggacatgcagccctacatg

SEQ ID NO: 107792 - DNA, 26 bp, Homo sapiens
acccagggacatgcagccctacatgg

SEQ ID NO: 107793 - DNA, 26 bp, Homo sapiens
cccagggacatgcagccctacatggc

SEQ ID NO: 107794 - DNA, 26 bp, Homo sapiens
ccagggacatgcagccctacatggcc

SEQ ID NO: 107795 - DNA, 26 bp, Homo sapiens
cagggacatgcagccctacatggcca

SEQ ID NO: 107796 - DNA, 26 bp, Homo sapiens
agggacatgcagccctacatggccac

SEQ ID NO: 107797 - DNA, 26 bp, Homo sapiens
gggacatgcagccctacatggccacc

SEQ ID NO: 107798 - DNA, 26 bp, Homo sapiens
ggacatgcagccctacatggccaccc

SEQ ID NO: 107799 - DNA, 26 bp, Homo sapiens
gacatgcagccctacatggccaccca

SEQ ID NO: 107800 - DNA, 26 bp, Homo sapiens
acatgcagccctacatggccacccac

SEQ ID NO: 107801 - DNA, 26 bp, Homo sapiens
catgcagccctacatggccacccact

SEQ ID NO: 107802 - DNA, 26 bp, Homo sapiens
atgcagccctacatggccacccactg

SEQ ID NO: 107803 - DNA, 26 bp, Homo sapiens
tgcagccctacatggccacccactgt

SEQ ID NO: 107804 - DNA, 26 bp, Homo sapiens
gcagccctacatggccacccactgtt

SEQ ID NO: 107805 - DNA, 26 bp, Homo sapiens
cagccctacatggccacccactgttt

SEQ ID NO: 107806 - DNA, 26 bp, Homo sapiens
agccctacatggccacccactgtttg

SEQ ID NO: 107807 - DNA, 26 bp, Homo sapiens
gccctacatggccacccactgtttgc

SEQ ID NO: 107808 - DNA, 26 bp, Homo sapiens
ccctacatggccacccactgtttgca

SEQ ID NO: 107809 - DNA, 26 bp, Homo sapiens
cctacatggccacccactgtttgcag

SEQ ID NO: 107810 - DNA, 26 bp, Homo sapiens
ctacatggccacccactgtttgcagt

SEQ ID NO: 107811 - DNA, 26 bp, Homo sapiens
tacatggccacccactgtttgcagtg

SEQ ID NO: 107812 - DNA, 26 bp, Homo sapiens
acatggccacccactgtttgcagtgt

SEQ ID NO: 107813 - DNA, 26 bp, Homo sapiens
catggccacccactgtttgcagtgtc

SEQ ID NO: 107814 - DNA, 26 bp, Homo sapiens
atggccacccactgtttgcagtgtct

SEQ ID NO: 107815 - DNA, 26 bp, Homo sapiens
tggccacccactgtttgcagtgtctc

SEQ ID NO: 107816 - DNA, 26 bp, Homo sapiens
ggccacccactgtttgcagtgtctct

SEQ ID NO: 107817 - DNA, 26 bp, Homo sapiens
gccacccactgtttgcagtgtctctg

SEQ ID NO: 107818 - DNA, 26 bp, Homo sapiens
ccacccactgtttgcagtgtctctgg

SEQ ID NO: 107819 - DNA, 26 bp, Homo sapiens
cacccactgtttgcagtgtctctggg

SEQ ID NO: 107820 - DNA, 26 bp, Homo sapiens
acccactgtttgcagtgtctctgggt

SEQ ID NO: 107821 - DNA, 26 bp, Homo sapiens
cccactgtttgcagtgtctctgggtc

SEQ ID NO: 107822 - DNA, 26 bp, Homo sapiens
ccactgtttgcagtgtctctgggtcc

SEQ ID NO: 107823 - DNA, 26 bp, Homo sapiens
cactgtttgcagtgtctctgggtccc

SEQ ID NO: 107824 - DNA, 26 bp, Homo sapiens
actgtttgcagtgtctctgggtccct

SEQ ID NO: 107825 - DNA, 26 bp, Homo sapiens
ctgtttgcagtgtctctgggtcccta

SEQ ID NO: 107826 - DNA, 26 bp, Homo sapiens
tgtttgcagtgtctctgggtccctaa

SEQ ID NO: 107827 - DNA, 26 bp, Homo sapiens
gtttgcagtgtctctgggtccctaag

SEQ ID NO: 107828 - DNA, 26 bp, Homo sapiens
tttgcagtgtctctgggtccctaagg

SEQ ID NO: 107829 - DNA, 26 bp, Homo sapiens
ttgcagtgtctctgggtccctaaggg

SEQ ID NO: 107830 - DNA, 26 bp, Homo sapiens
tgcagtgtctctgggtccctaaggga

SEQ ID NO: 107831 - DNA, 26 bp, Homo sapiens
gcagtgtctctgggtccctaagggat

SEQ ID NO: 107832 - DNA, 26 bp, Homo sapiens
cagtgtctctgggtccctaagggata

SEQ ID NO: 107833 - DNA, 26 bp, Homo sapiens
agtgtctctgggtccctaagggatac

SEQ ID NO: 107834 - DNA, 26 bp, Homo sapiens
gtgtctctgggtccctaagggatacc

SEQ ID NO: 107835 - DNA, 26 bp, Homo sapiens
tgtctctgggtccctaagggatacca

SEQ ID NO: 107836 - DNA, 26 bp, Homo sapiens
gtctctgggtccctaagggataccat

SEQ ID NO: 107837 - DNA, 26 bp, Homo sapiens
tctctgggtccctaagggataccatt

SEQ ID NO: 107838 - DNA, 26 bp, Homo sapiens
ctctgggtccctaagggataccattc

SEQ ID NO: 107839 - DNA, 26 bp, Homo sapiens
tctgggtccctaagggataccattcc

SEQ ID NO: 107840 - DNA, 26 bp, Homo sapiens
ctgggtccctaagggataccattcct

SEQ ID NO: 107841 - DNA, 26 bp, Homo sapiens
tgggtccctaagggataccattcctg

SEQ ID NO: 107842 - DNA, 26 bp, Homo sapiens
gggtccctaagggataccattcctgt

SEQ ID NO: 107843 - DNA, 26 bp, Homo sapiens
ggtccctaagggataccattcctgtc

SEQ ID NO: 107844 - DNA, 26 bp, Homo sapiens
gtccctaagggataccattcctgtct

SEQ ID NO: 107845 - DNA, 26 bp, Homo sapiens
tccctaagggataccattcctgtctc

SEQ ID NO: 107846 - DNA, 26 bp, Homo sapiens
ccctaagggataccattcctgtctcg

SEQ ID NO: 107847 - DNA, 26 bp, Homo sapiens
cctaagggataccattcctgtctcgt

SEQ ID NO: 107848 - DNA, 26 bp, Homo sapiens
ctaagggataccattcctgtctcgtc

SEQ ID NO: 107849 - DNA, 26 bp, Homo sapiens
taagggataccattcctgtctcgtcc

SEQ ID NO: 107850 - DNA, 26 bp, Homo sapiens
aagggataccattcctgtctcgtccc

SEQ ID NO: 107851 - DNA, 26 bp, Homo sapiens
agggataccattcctgtctcgtcccc

SEQ ID NO: 107852 - DNA, 26 bp, Homo sapiens
gggataccattcctgtctcgtcccca

SEQ ID NO: 107853 - DNA, 26 bp, Homo sapiens
ggataccattcctgtctcgtccccaa

SEQ ID NO: 107854 - DNA, 26 bp, Homo sapiens
gataccattcctgtctcgtccccaaa

SEQ ID NO: 107855 - DNA, 26 bp, Homo sapiens
ataccattcctgtctcgtccccaaat

SEQ ID NO: 107856 - DNA, 26 bp, Homo sapiens
taccattcctgtctcgtccccaaatg

SEQ ID NO: 107857 - DNA, 26 bp, Homo sapiens
accattcctgtctcgtccccaaatgg

SEQ ID NO: 107858 - DNA, 26 bp, Homo sapiens
ccattcctgtctcgtccccaaatggt

SEQ ID NO: 107859 - DNA, 26 bp, Homo sapiens
cattcctgtctcgtccccaaatggta

SEQ ID NO: 107860 - DNA, 26 bp, Homo sapiens
attcctgtctcgtccccaaatggtaa

SEQ ID NO: 107861 - DNA, 26 bp, Homo sapiens
ttcctgtctcgtccccaaatggtaag

SEQ ID NO: 107862 - DNA, 26 bp, Homo sapiens
tcctgtctcgtccccaaatggtaaga

SEQ ID NO: 107863 - DNA, 26 bp, Homo sapiens
cctgtctcgtccccaaatggtaagat

SEQ ID NO: 107864 - DNA, 26 bp, Homo sapiens
ctgtctcgtccccaaatggtaagatg

SEQ ID NO: 107865 - DNA, 26 bp, Homo sapiens
tgtctcgtccccaaatggtaagatga

SEQ ID NO: 107866 - DNA, 26 bp, Homo sapiens
gtctcgtccccaaatggtaagatgac

SEQ ID NO: 107867 - DNA, 26 bp, Homo sapiens
tctcgtccccaaatggtaagatgacg

SEQ ID NO: 107868 - DNA, 26 bp, Homo sapiens
ctcgtccccaaatggtaagatgacgt

SEQ ID NO: 107869 - DNA, 26 bp, Homo sapiens
tcgtccccaaatggtaagatgacgta

SEQ ID NO: 107870 - DNA, 26 bp, Homo sapiens
cgtccccaaatggtaagatgacgtaa

SEQ ID NO: 107871 - DNA, 26 bp, Homo sapiens
gtccccaaatggtaagatgacgtaaa

SEQ ID NO: 107872 - DNA, 26 bp, Homo sapiens
tccccaaatggtaagatgacgtaaat

SEQ ID NO: 107873 - DNA, 26 bp, Homo sapiens
ccccaaatggtaagatgacgtaaatg

SEQ ID NO: 107874 - DNA, 26 bp, Homo sapiens
cccaaatggtaagatgacgtaaatga

SEQ ID NO: 107875 - DNA, 26 bp, Homo sapiens
ccaaatggtaagatgacgtaaatgac

SEQ ID NO: 107876 - DNA, 26 bp, Homo sapiens
caaatggtaagatgacgtaaatgacc

SEQ ID NO: 107877 - DNA, 26 bp, Homo sapiens
aaatggtaagatgacgtaaatgaccc

SEQ ID NO: 107878 - DNA, 26 bp, Homo sapiens
aatggtaagatgacgtaaatgaccca

SEQ ID NO: 107879 - DNA, 26 bp, Homo sapiens
atggtaagatgacgtaaatgacccac

SEQ ID NO: 107880 - DNA, 26 bp, Homo sapiens
tggtaagatgacgtaaatgacccact

SEQ ID NO: 107881 - DNA, 26 bp, Homo sapiens
ggtaagatgacgtaaatgacccactc

SEQ ID NO: 107882 - DNA, 26 bp, Homo sapiens
gtaagatgacgtaaatgacccactcc

SEQ ID NO: 107883 - DNA, 26 bp, Homo sapiens
taagatgacgtaaatgacccactcct

SEQ ID NO: 107884 - DNA, 26 bp, Homo sapiens
aagatgacgtaaatgacccactccta

SEQ ID NO: 107885 - DNA, 26 bp, Homo sapiens
agatgacgtaaatgacccactcctaa

SEQ ID NO: 107886 - DNA, 26 bp, Homo sapiens
gatgacgtaaatgacccactcctaaa

SEQ ID NO: 107887 - DNA, 26 bp, Homo sapiens
atgacgtaaatgacccactcctaaac

SEQ ID NO: 107888 - DNA, 26 bp, Homo sapiens
tgacgtaaatgacccactcctaaact

SEQ ID NO: 107889 - DNA, 26 bp, Homo sapiens
gacgtaaatgacccactcctaaactg

SEQ ID NO: 107890 - DNA, 26 bp, Homo sapiens
acgtaaatgacccactcctaaactga

SEQ ID NO: 107891 - DNA, 26 bp, Homo sapiens
cgtaaatgacccactcctaaactgag

SEQ ID NO: 107892 - DNA, 26 bp, Homo sapiens
gtaaatgacccactcctaaactgagg

SEQ ID NO: 107893 - DNA, 26 bp, Homo sapiens
taaatgacccactcctaaactgaggt

SEQ ID NO: 107894 - DNA, 26 bp, Homo sapiens
aaatgacccactcctaaactgaggtc

SEQ ID NO: 107895 - DNA, 26 bp, Homo sapiens
aatgacccactcctaaactgaggtca

SEQ ID NO: 107896 - DNA, 26 bp, Homo sapiens
atgacccactcctaaactgaggtcag

SEQ ID NO: 107897 - DNA, 26 bp, Homo sapiens
tgacccactcctaaactgaggtcaga

SEQ ID NO: 107898 - DNA, 26 bp, Homo sapiens
gacccactcctaaactgaggtcagac

SEQ ID NO: 107899 - DNA, 26 bp, Homo sapiens
acccactcctaaactgaggtcagacc

SEQ ID NO: 107900 - DNA, 26 bp, Homo sapiens
cccactcctaaactgaggtcagacca

SEQ ID NO: 107901 - DNA, 26 bp, Homo sapiens
ccactcctaaactgaggtcagaccac

SEQ ID NO: 107902 - DNA, 26 bp, Homo sapiens
cactcctaaactgaggtcagaccacc

SEQ ID NO: 107903 - DNA, 26 bp, Homo sapiens
actcctaaactgaggtcagaccacct

SEQ ID NO: 107904 - DNA, 26 bp, Homo sapiens
ctcctaaactgaggtcagaccaccta

SEQ ID NO: 107905 - DNA, 26 bp, Homo sapiens
tcctaaactgaggtcagaccacctag

SEQ ID NO: 107906 - DNA, 26 bp, Homo sapiens
cctaaactgaggtcagaccacctagg

SEQ ID NO: 107907 - DNA, 26 bp, Homo sapiens
ctaaactgaggtcagaccacctaggc

SEQ ID NO: 107908 - DNA, 26 bp, Homo sapiens
taaactgaggtcagaccacctaggct

SEQ ID NO: 107909 - DNA, 26 bp, Homo sapiens
aaactgaggtcagaccacctaggctt

SEQ ID NO: 107910 - DNA, 26 bp, Homo sapiens
aactgaggtcagaccacctaggcttc

SEQ ID NO: 107911 - DNA, 26 bp, Homo sapiens
actgaggtcagaccacctaggcttcc

SEQ ID NO: 107912 - DNA, 26 bp, Homo sapiens
ctgaggtcagaccacctaggcttcca

SEQ ID NO: 107913 - DNA, 26 bp, Homo sapiens
tgaggtcagaccacctaggcttccac

SEQ ID NO: 107914 - DNA, 26 bp, Homo sapiens
gaggtcagaccacctaggcttccacc

SEQ ID NO: 107915 - DNA, 26 bp, Homo sapiens
aggtcagaccacctaggcttccacct

SEQ ID NO: 107916 - DNA, 26 bp, Homo sapiens
ggtcagaccacctaggcttccacctg

SEQ ID NO: 107917 - DNA, 26 bp, Homo sapiens
gtcagaccacctaggcttccacctgg

SEQ ID NO: 107918 - DNA, 26 bp, Homo sapiens
tcagaccacctaggcttccacctggt

SEQ ID NO: 107919 - DNA, 26 bp, Homo sapiens
cagaccacctaggcttccacctggtg

SEQ ID NO: 107920 - DNA, 26 bp, Homo sapiens
agaccacctaggcttccacctggtga

SEQ ID NO: 107921 - DNA, 26 bp, Homo sapiens
gaccacctaggcttccacctggtgag

SEQ ID NO: 107922 - DNA, 26 bp, Homo sapiens
accacctaggcttccacctggtgagc

SEQ ID NO: 107923 - DNA, 26 bp, Homo sapiens
ccacctaggcttccacctggtgagcc

SEQ ID NO: 107924 - DNA, 26 bp, Homo sapiens
cacctaggcttccacctggtgagccc

SEQ ID NO: 107925 - DNA, 26 bp, Homo sapiens
acctaggcttccacctggtgagccct

SEQ ID NO: 107926 - DNA, 26 bp, Homo sapiens
cctaggcttccacctggtgagcccta

SEQ ID NO: 107927 - DNA, 26 bp, Homo sapiens
ctaggcttccacctggtgagccctag

SEQ ID NO: 107928 - DNA, 26 bp, Homo sapiens
taggcttccacctggtgagccctagc

SEQ ID NO: 107929 - DNA, 26 bp, Homo sapiens
aggcttccacctggtgagccctagca

SEQ ID NO: 107930 - DNA, 26 bp, Homo sapiens
ggcttccacctggtgagccctagcag

SEQ ID NO: 107931 - DNA, 26 bp, Homo sapiens
gcttccacctggtgagccctagcagg

SEQ ID NO: 107932 - DNA, 26 bp, Homo sapiens
cttccacctggtgagccctagcaggg

SEQ ID NO: 107933 - DNA, 26 bp, Homo sapiens
ttccacctggtgagccctagcagggc

SEQ ID NO: 107934 - DNA, 26 bp, Homo sapiens
tccacctggtgagccctagcagggct

SEQ ID NO: 107935 - DNA, 26 bp, Homo sapiens
ccacctggtgagccctagcagggctg

SEQ ID NO: 107936 - DNA, 26 bp, Homo sapiens
cacctggtgagccctagcagggctga

SEQ ID NO: 107937 - DNA, 26 bp, Homo sapiens
acctggtgagccctagcagggctgag

SEQ ID NO: 107938 - DNA, 26 bp, Homo sapiens
cctggtgagccctagcagggctgaga

SEQ ID NO: 107939 - DNA, 26 bp, Homo sapiens
ctggtgagccctagcagggctgagac

SEQ ID NO: 107940 - DNA, 26 bp, Homo sapiens
tggtgagccctagcagggctgagacc

SEQ ID NO: 107941 - DNA, 26 bp, Homo sapiens
ggtgagccctagcagggctgagaccc

SEQ ID NO: 107942 - DNA, 26 bp, Homo sapiens
gtgagccctagcagggctgagacccc

SEQ ID NO: 107943 - DNA, 26 bp, Homo sapiens
tgagccctagcagggctgagaccccc

SEQ ID NO: 107944 - DNA, 26 bp, Homo sapiens
gagccctagcagggctgagaccccca

SEQ ID NO: 107945 - DNA, 26 bp, Homo sapiens
agccctagcagggctgagacccccag

SEQ ID NO: 107946 - DNA, 26 bp, Homo sapiens
gccctagcagggctgagacccccagg

SEQ ID NO: 107947 - DNA, 26 bp, Homo sapiens
ccctagcagggctgagacccccaggg

SEQ ID NO: 107948 - DNA, 26 bp, Homo sapiens
cctagcagggctgagacccccagggc

SEQ ID NO: 107949 - DNA, 26 bp, Homo sapiens
ctagcagggctgagacccccagggcg

SEQ ID NO: 107950 - DNA, 26 bp, Homo sapiens
tagcagggctgagacccccagggcgg

SEQ ID NO: 107951 - DNA, 26 bp, Homo sapiens
agcagggctgagacccccagggcggc

SEQ ID NO: 107952 - DNA, 26 bp, Homo sapiens
gcagggctgagacccccagggcggca

SEQ ID NO: 107953 - DNA, 26 bp, Homo sapiens
cagggctgagacccccagggcggcag

SEQ ID NO: 107954 - DNA, 26 bp, Homo sapiens
agggctgagacccccagggcggcagc

SEQ ID NO: 107955 - DNA, 26 bp, Homo sapiens
gggctgagacccccagggcggcagcc

SEQ ID NO: 107956 - DNA, 26 bp, Homo sapiens
ggctgagacccccagggcggcagcct

SEQ ID NO: 107957 - DNA, 26 bp, Homo sapiens
gctgagacccccagggcggcagcctg

SEQ ID NO: 107958 - DNA, 26 bp, Homo sapiens
ctgagacccccagggcggcagcctgt

SEQ ID NO: 107959 - DNA, 26 bp, Homo sapiens
tgagacccccagggcggcagcctgtc

SEQ ID NO: 107960 - DNA, 26 bp, Homo sapiens
gagacccccagggcggcagcctgtct

SEQ ID NO: 107961 - DNA, 26 bp, Homo sapiens
agacccccagggcggcagcctgtctg

SEQ ID NO: 107962 - DNA, 26 bp, Homo sapiens
gacccccagggcggcagcctgtctgc

SEQ ID NO: 107963 - DNA, 26 bp, Homo sapiens
acccccagggcggcagcctgtctgct

SEQ ID NO: 107964 - DNA, 26 bp, Homo sapiens
cccccagggcggcagcctgtctgctg

SEQ ID NO: 107965 - DNA, 26 bp, Homo sapiens
ccccagggcggcagcctgtctgctgc

SEQ ID NO: 107966 - DNA, 26 bp, Homo sapiens
cccagggcggcagcctgtctgctgct

SEQ ID NO: 107967 - DNA, 26 bp, Homo sapiens
ccagggcggcagcctgtctgctgctg

SEQ ID NO: 107968 - DNA, 26 bp, Homo sapiens
cagggcggcagcctgtctgctgctga

SEQ ID NO: 107969 - DNA, 26 bp, Homo sapiens
agggcggcagcctgtctgctgctgag

SEQ ID NO: 107970 - DNA, 26 bp, Homo sapiens
gggcggcagcctgtctgctgctgagt

SEQ ID NO: 107971 - DNA, 26 bp, Homo sapiens
ggcggcagcctgtctgctgctgagtg

SEQ ID NO: 107972 - DNA, 26 bp, Homo sapiens
gcggcagcctgtctgctgctgagtga

SEQ ID NO: 107973 - DNA, 26 bp, Homo sapiens
cggcagcctgtctgctgctgagtgat

SEQ ID NO: 107974 - DNA, 26 bp, Homo sapiens
ggcagcctgtctgctgctgagtgatt

SEQ ID NO: 107975 - DNA, 26 bp, Homo sapiens
gcagcctgtctgctgctgagtgattc

SEQ ID NO: 107976 - DNA, 26 bp, Homo sapiens
cagcctgtctgctgctgagtgattca

SEQ ID NO: 107977 - DNA, 26 bp, Homo sapiens
agcctgtctgctgctgagtgattcag

SEQ ID NO: 107978 - DNA, 26 bp, Homo sapiens
gcctgtctgctgctgagtgattcagg

SEQ ID NO: 107979 - DNA, 26 bp, Homo sapiens
cctgtctgctgctgagtgattcaggg

SEQ ID NO: 107980 - DNA, 26 bp, Homo sapiens
ctgtctgctgctgagtgattcaggga

SEQ ID NO: 107981 - DNA, 26 bp, Homo sapiens
tgtctgctgctgagtgattcagggag

SEQ ID NO: 107982 - DNA, 26 bp, Homo sapiens
gtctgctgctgagtgattcagggaga

SEQ ID NO: 107983 - DNA, 26 bp, Homo sapiens
tctgctgctgagtgattcagggagaa

SEQ ID NO: 107984 - DNA, 26 bp, Homo sapiens
ctgctgctgagtgattcagggagaac

SEQ ID NO: 107985 - DNA, 26 bp, Homo sapiens
tgctgctgagtgattcagggagaaca

SEQ ID NO: 107986 - DNA, 26 bp, Homo sapiens
gctgctgagtgattcagggagaacat

SEQ ID NO: 107987 - DNA, 26 bp, Homo sapiens
ctgctgagtgattcagggagaacatg

SEQ ID NO: 107988 - DNA, 26 bp, Homo sapiens
tgctgagtgattcagggagaacatgt

SEQ ID NO: 107989 - DNA, 26 bp, Homo sapiens
gctgagtgattcagggagaacatgtg

SEQ ID NO: 107990 - DNA, 26 bp, Homo sapiens
ctgagtgattcagggagaacatgtgt

SEQ ID NO: 107991 - DNA, 26 bp, Homo sapiens
tgagtgattcagggagaacatgtgtg

SEQ ID NO: 107992 - DNA, 26 bp, Homo sapiens
gagtgattcagggagaacatgtgtgc

SEQ ID NO: 107993 - DNA, 26 bp, Homo sapiens
agtgattcagggagaacatgtgtgca

SEQ ID NO: 107994 - DNA, 26 bp, Homo sapiens
gtgattcagggagaacatgtgtgcac

SEQ ID NO: 107995 - DNA, 26 bp, Homo sapiens
tgattcagggagaacatgtgtgcacg

SEQ ID NO: 107996 - DNA, 26 bp, Homo sapiens
gattcagggagaacatgtgtgcacgt

SEQ ID NO: 107997 - DNA, 26 bp, Homo sapiens
attcagggagaacatgtgtgcacgtg

SEQ ID NO: 107998 - DNA, 26 bp, Homo sapiens
ttcagggagaacatgtgtgcacgtgc

SEQ ID NO: 107999 - DNA, 26 bp, Homo sapiens
tcagggagaacatgtgtgcacgtgca

SEQ ID NO: 108000 - DNA, 26 bp, Homo sapiens
cagggagaacatgtgtgcacgtgcat

SEQ ID NO: 108001 - DNA, 26 bp, Homo sapiens
agggagaacatgtgtgcacgtgcatg

SEQ ID NO: 108002 - DNA, 26 bp, Homo sapiens
gggagaacatgtgtgcacgtgcatgt

SEQ ID NO: 108003 - DNA, 26 bp, Homo sapiens
ggagaacatgtgtgcacgtgcatgtg

SEQ ID NO: 108004 - DNA, 26 bp, Homo sapiens
gagaacatgtgtgcacgtgcatgtgt

SEQ ID NO: 108005 - DNA, 26 bp, Homo sapiens
agaacatgtgtgcacgtgcatgtgtg

SEQ ID NO: 108006 - DNA, 26 bp, Homo sapiens
gaacatgtgtgcacgtgcatgtgtgt

SEQ ID NO: 108007 - DNA, 26 bp, Homo sapiens
aacatgtgtgcacgtgcatgtgtgtt

SEQ ID NO: 108008 - DNA, 26 bp, Homo sapiens
acatgtgtgcacgtgcatgtgtgttt

SEQ ID NO: 108009 - DNA, 26 bp, Homo sapiens
catgtgtgcacgtgcatgtgtgtttg

SEQ ID NO: 108010 - DNA, 26 bp, Homo sapiens
atgtgtgcacgtgcatgtgtgtttgc

SEQ ID NO: 108011 - DNA, 26 bp, Homo sapiens
tgtgtgcacgtgcatgtgtgtttgcc

SEQ ID NO: 108012 - DNA, 26 bp, Homo sapiens
gtgtgcacgtgcatgtgtgtttgccc

SEQ ID NO: 108013 - DNA, 26 bp, Homo sapiens
tgtgcacgtgcatgtgtgtttgccca

SEQ ID NO: 108014 - DNA, 26 bp, Homo sapiens
gtgcacgtgcatgtgtgtttgcccac

SEQ ID NO: 108015 - DNA, 26 bp, Homo sapiens
tgcacgtgcatgtgtgtttgcccaca

SEQ ID NO: 108016 - DNA, 26 bp, Homo sapiens
gcacgtgcatgtgtgtttgcccacac

SEQ ID NO: 108017 - DNA, 26 bp, Homo sapiens
cacgtgcatgtgtgtttgcccacacc

SEQ ID NO: 108018 - DNA, 26 bp, Homo sapiens
acgtgcatgtgtgtttgcccacaccg

SEQ ID NO: 108019 - DNA, 26 bp, Homo sapiens
cgtgcatgtgtgtttgcccacaccgg

SEQ ID NO: 108020 - DNA, 26 bp, Homo sapiens
gtgcatgtgtgtttgcccacaccggt

SEQ ID NO: 108021 - DNA, 26 bp, Homo sapiens
tgcatgtgtgtttgcccacaccggtg

SEQ ID NO: 108022 - DNA, 26 bp, Homo sapiens
gcatgtgtgtttgcccacaccggtga

SEQ ID NO: 108023 - DNA, 26 bp, Homo sapiens
catgtgtgtttgcccacaccggtgac

SEQ ID NO: 108024 - DNA, 26 bp, Homo sapiens
atgtgtgtttgcccacaccggtgaca

SEQ ID NO: 108025 - DNA, 26 bp, Homo sapiens
tgtgtgtttgcccacaccggtgacac

SEQ ID NO: 108026 - DNA, 26 bp, Homo sapiens
gtgtgtttgcccacaccggtgacacg

SEQ ID NO: 108027 - DNA, 26 bp, Homo sapiens
tgtgtttgcccacaccggtgacacgg

SEQ ID NO: 108028 - DNA, 26 bp, Homo sapiens
gtgtttgcccacaccggtgacacggg

SEQ ID NO: 108029 - DNA, 26 bp, Homo sapiens
tgtttgcccacaccggtgacacgggg

SEQ ID NO: 108030 - DNA, 26 bp, Homo sapiens
gtttgcccacaccggtgacacggggc

SEQ ID NO: 108031 - DNA, 26 bp, Homo sapiens
tttgcccacaccggtgacacggggcc

SEQ ID NO: 108032 - DNA, 26 bp, Homo sapiens
ttgcccacaccggtgacacggggccc

SEQ ID NO: 108033 - DNA, 26 bp, Homo sapiens
tgcccacaccggtgacacggggccct

SEQ ID NO: 108034 - DNA, 26 bp, Homo sapiens
gcccacaccggtgacacggggccctg

SEQ ID NO: 108035 - DNA, 26 bp, Homo sapiens
cccacaccggtgacacggggccctgg

SEQ ID NO: 108036 - DNA, 26 bp, Homo sapiens
ccacaccggtgacacggggccctggc

SEQ ID NO: 108037 - DNA, 26 bp, Homo sapiens
cacaccggtgacacggggccctggct

SEQ ID NO: 108038 - DNA, 26 bp, Homo sapiens
acaccggtgacacggggccctggctt

SEQ ID NO: 108039 - DNA, 26 bp, Homo sapiens
caccggtgacacggggccctggcttt

SEQ ID NO: 108040 - DNA, 26 bp, Homo sapiens
accggtgacacggggccctggctttc

SEQ ID NO: 108041 - DNA, 26 bp, Homo sapiens
ccggtgacacggggccctggctttcc

SEQ ID NO: 108042 - DNA, 26 bp, Homo sapiens
cggtgacacggggccctggctttcca

SEQ ID NO: 108043 - DNA, 26 bp, Homo sapiens
ggtgacacggggccctggctttccac

SEQ ID NO: 108044 - DNA, 26 bp, Homo sapiens
gtgacacggggccctggctttccact

SEQ ID NO: 108045 - DNA, 26 bp, Homo sapiens
tgacacggggccctggctttccactt

SEQ ID NO: 108046 - DNA, 26 bp, Homo sapiens
gacacggggccctggctttccacttt

SEQ ID NO: 108047 - DNA, 26 bp, Homo sapiens
acacggggccctggctttccactttg

SEQ ID NO: 108048 - DNA, 26 bp, Homo sapiens
cacggggccctggctttccactttgg

SEQ ID NO: 108049 - DNA, 26 bp, Homo sapiens
acggggccctggctttccactttgga

SEQ ID NO: 108050 - DNA, 26 bp, Homo sapiens
cggggccctggctttccactttggat

SEQ ID NO: 108051 - DNA, 26 bp, Homo sapiens
ggggccctggctttccactttggatg

SEQ ID NO: 108052 - DNA, 26 bp, Homo sapiens
gggccctggctttccactttggatgc

SEQ ID NO: 108053 - DNA, 26 bp, Homo sapiens
ggccctggctttccactttggatgcc

SEQ ID NO: 108054 - DNA, 26 bp, Homo sapiens
gccctggctttccactttggatgccc

SEQ ID NO: 108055 - DNA, 26 bp, Homo sapiens
ccctggctttccactttggatgcccg

SEQ ID NO: 108056 - DNA, 26 bp, Homo sapiens
cctggctttccactttggatgcccgg

SEQ ID NO: 108057 - DNA, 26 bp, Homo sapiens
ctggctttccactttggatgcccggg

SEQ ID NO: 108058 - DNA, 26 bp, Homo sapiens
tggctttccactttggatgcccgggc

SEQ ID NO: 108059 - DNA, 26 bp, Homo sapiens
ggctttccactttggatgcccgggca

SEQ ID NO: 108060 - DNA, 26 bp, Homo sapiens
gctttccactttggatgcccgggcat

SEQ ID NO: 108061 - DNA, 26 bp, Homo sapiens
ctttccactttggatgcccgggcatc

SEQ ID NO: 108062 - DNA, 26 bp, Homo sapiens
tttccactttggatgcccgggcatcc

SEQ ID NO: 108063 - DNA, 26 bp, Homo sapiens
ttccactttggatgcccgggcatccg

SEQ ID NO: 108064 - DNA, 26 bp, Homo sapiens
tccactttggatgcccgggcatccgc

SEQ ID NO: 108065 - DNA, 26 bp, Homo sapiens
ccactttggatgcccgggcatccgct

SEQ ID NO: 108066 - DNA, 26 bp, Homo sapiens
cactttggatgcccgggcatccgctg

SEQ ID NO: 108067 - DNA, 26 bp, Homo sapiens
actttggatgcccgggcatccgctgc

SEQ ID NO: 108068 - DNA, 26 bp, Homo sapiens
ctttggatgcccgggcatccgctgct

SEQ ID NO: 108069 - DNA, 26 bp, Homo sapiens
tttggatgcccgggcatccgctgctg

SEQ ID NO: 108070 - DNA, 26 bp, Homo sapiens
ttggatgcccgggcatccgctgctgc

SEQ ID NO: 108071 - DNA, 26 bp, Homo sapiens
tggatgcccgggcatccgctgctgct

SEQ ID NO: 108072 - DNA, 26 bp, Homo sapiens
ggatgcccgggcatccgctgctgcta

SEQ ID NO: 108073 - DNA, 26 bp, Homo sapiens
gatgcccgggcatccgctgctgctac

SEQ ID NO: 108074 - DNA, 26 bp, Homo sapiens
atgcccgggcatccgctgctgctaca

SEQ ID NO: 108075 - DNA, 26 bp, Homo sapiens
tgcccgggcatccgctgctgctacat

SEQ ID NO: 108076 - DNA, 26 bp, Homo sapiens
gcccgggcatccgctgctgctacatc

SEQ ID NO: 108077 - DNA, 26 bp, Homo sapiens
cccgggcatccgctgctgctacatct

SEQ ID NO: 108078 - DNA, 26 bp, Homo sapiens
ccgggcatccgctgctgctacatctt

SEQ ID NO: 108079 - DNA, 26 bp, Homo sapiens
cgggcatccgctgctgctacatctta

SEQ ID NO: 108080 - DNA, 26 bp, Homo sapiens
gggcatccgctgctgctacatcttag

SEQ ID NO: 108081 - DNA, 26 bp, Homo sapiens
ggcatccgctgctgctacatcttagc

SEQ ID NO: 108082 - DNA, 26 bp, Homo sapiens
gcatccgctgctgctacatcttagcc

SEQ ID NO: 108083 - DNA, 26 bp, Homo sapiens
catccgctgctgctacatcttagcca

SEQ ID NO: 108084 - DNA, 26 bp, Homo sapiens
atccgctgctgctacatcttagccag

SEQ ID NO: 108085 - DNA, 26 bp, Homo sapiens
tccgctgctgctacatcttagccaga

SEQ ID NO: 108086 - DNA, 26 bp, Homo sapiens
ccgctgctgctacatcttagccagaa

SEQ ID NO: 108087 - DNA, 26 bp, Homo sapiens
cgctgctgctacatcttagccagaac

SEQ ID NO: 108088 - DNA, 26 bp, Homo sapiens
gctgctgctacatcttagccagaact

SEQ ID NO: 108089 - DNA, 26 bp, Homo sapiens
ctgctgctacatcttagccagaactt

SEQ ID NO: 108090 - DNA, 26 bp, Homo sapiens
tgctgctacatcttagccagaacttg

SEQ ID NO: 108091 - DNA, 26 bp, Homo sapiens
gctgctacatcttagccagaacttga

SEQ ID NO: 108092 - DNA, 26 bp, Homo sapiens
ctgctacatcttagccagaacttgaa

SEQ ID NO: 108093 - DNA, 26 bp, Homo sapiens
tgctacatcttagccagaacttgaag

SEQ ID NO: 108094 - DNA, 26 bp, Homo sapiens
gctacatcttagccagaacttgaagt

SEQ ID NO: 108095 - DNA, 26 bp, Homo sapiens
ctacatcttagccagaacttgaagtc

SEQ ID NO: 108096 - DNA, 26 bp, Homo sapiens
tacatcttagccagaacttgaagtct

SEQ ID NO: 108097 - DNA, 26 bp, Homo sapiens
acatcttagccagaacttgaagtctt

SEQ ID NO: 108098 - DNA, 26 bp, Homo sapiens
catcttagccagaacttgaagtcttt

SEQ ID NO: 108099 - DNA, 26 bp, Homo sapiens
atcttagccagaacttgaagtctttt

SEQ ID NO: 108100 - DNA, 26 bp, Homo sapiens
tcttagccagaacttgaagtcttttg

SEQ ID NO: 108101 - DNA, 26 bp, Homo sapiens
cttagccagaacttgaagtcttttgt

SEQ ID NO: 108102 - DNA, 26 bp, Homo sapiens
ttagccagaacttgaagtcttttgtc

SEQ ID NO: 108103 - DNA, 26 bp, Homo sapiens
tagccagaacttgaagtcttttgtcc

SEQ ID NO: 108104 - DNA, 26 bp, Homo sapiens
agccagaacttgaagtcttttgtccc

SEQ ID NO: 108105 - DNA, 26 bp, Homo sapiens
gccagaacttgaagtcttttgtccca

SEQ ID NO: 108106 - DNA, 26 bp, Homo sapiens
ccagaacttgaagtcttttgtcccag

SEQ ID NO: 108107 - DNA, 26 bp, Homo sapiens
cagaacttgaagtcttttgtcccagt

SEQ ID NO: 108108 - DNA, 26 bp, Homo sapiens
agaacttgaagtcttttgtcccagtt

SEQ ID NO: 108109 - DNA, 26 bp, Homo sapiens
gaacttgaagtcttttgtcccagttt

SEQ ID NO: 108110 - DNA, 26 bp, Homo sapiens
aacttgaagtcttttgtcccagtttg

SEQ ID NO: 108111 - DNA, 26 bp, Homo sapiens
acttgaagtcttttgtcccagtttgg

SEQ ID NO: 108112 - DNA, 26 bp, Homo sapiens
cttgaagtcttttgtcccagtttggg

SEQ ID NO: 108113 - DNA, 26 bp, Homo sapiens
ttgaagtcttttgtcccagtttggga

SEQ ID NO: 108114 - DNA, 26 bp, Homo sapiens
tgaagtcttttgtcccagtttgggat

SEQ ID NO: 108115 - DNA, 26 bp, Homo sapiens
gaagtcttttgtcccagtttgggatg

SEQ ID NO: 108116 - DNA, 26 bp, Homo sapiens
aagtcttttgtcccagtttgggatga

SEQ ID NO: 108117 - DNA, 26 bp, Homo sapiens
agtcttttgtcccagtttgggatgaa

SEQ ID NO: 108118 - DNA, 26 bp, Homo sapiens
gtcttttgtcccagtttgggatgaag

SEQ ID NO: 108119 - DNA, 26 bp, Homo sapiens
tcttttgtcccagtttgggatgaagg

SEQ ID NO: 108120 - DNA, 26 bp, Homo sapiens
cttttgtcccagtttgggatgaagga

SEQ ID NO: 108121 - DNA, 26 bp, Homo sapiens
ttttgtcccagtttgggatgaaggaa

SEQ ID NO: 108122 - DNA, 26 bp, Homo sapiens
tttgtcccagtttgggatgaaggaaa

SEQ ID NO: 108123 - DNA, 26 bp, Homo sapiens
ttgtcccagtttgggatgaaggaaag

SEQ ID NO: 108124 - DNA, 26 bp, Homo sapiens
tgtcccagtttgggatgaaggaaagg

SEQ ID NO: 108125 - DNA, 26 bp, Homo sapiens
gtcccagtttgggatgaaggaaagga

SEQ ID NO: 108126 - DNA, 26 bp, Homo sapiens
tcccagtttgggatgaaggaaaggag

SEQ ID NO: 108127 - DNA, 26 bp, Homo sapiens
cccagtttgggatgaaggaaaggagg

SEQ ID NO: 108128 - DNA, 26 bp, Homo sapiens
ccagtttgggatgaaggaaaggagga

SEQ ID NO: 108129 - DNA, 26 bp, Homo sapiens
cagtttgggatgaaggaaaggaggaa

SEQ ID NO: 108130 - DNA, 26 bp, Homo sapiens
agtttgggatgaaggaaaggaggaag

SEQ ID NO: 108131 - DNA, 26 bp, Homo sapiens
gtttgggatgaaggaaaggaggaaga

SEQ ID NO: 108132 - DNA, 26 bp, Homo sapiens
tttgggatgaaggaaaggaggaagag

SEQ ID NO: 108133 - DNA, 26 bp, Homo sapiens
ttgggatgaaggaaaggaggaagagg

SEQ ID NO: 108134 - DNA, 26 bp, Homo sapiens
tgggatgaaggaaaggaggaagaggc

SEQ ID NO: 108135 - DNA, 26 bp, Homo sapiens
gggatgaaggaaaggaggaagaggcg

SEQ ID NO: 108136 - DNA, 26 bp, Homo sapiens
ggatgaaggaaaggaggaagaggcgg

SEQ ID NO: 108137 - DNA, 26 bp, Homo sapiens
gatgaaggaaaggaggaagaggcggt

SEQ ID NO: 108138 - DNA, 26 bp, Homo sapiens
atgaaggaaaggaggaagaggcggtg

SEQ ID NO: 108139 - DNA, 26 bp, Homo sapiens
tgaaggaaaggaggaagaggcggtgg

SEQ ID NO: 108140 - DNA, 26 bp, Homo sapiens
gaaggaaaggaggaagaggcggtggc

SEQ ID NO: 108141 - DNA, 26 bp, Homo sapiens
aaggaaaggaggaagaggcggtggct

SEQ ID NO: 108142 - DNA, 26 bp, Homo sapiens
aggaaaggaggaagaggcggtggctg

SEQ ID NO: 108143 - DNA, 26 bp, Homo sapiens
ggaaaggaggaagaggcggtggctgt

SEQ ID NO: 108144 - DNA, 26 bp, Homo sapiens
gaaaggaggaagaggcggtggctgtg

SEQ ID NO: 108145 - DNA, 26 bp, Homo sapiens
aaaggaggaagaggcggtggctgtgt

SEQ ID NO: 108146 - DNA, 26 bp, Homo sapiens
aaggaggaagaggcggtggctgtgtg

SEQ ID NO: 108147 - DNA, 26 bp, Homo sapiens
aggaggaagaggcggtggctgtgtgg

SEQ ID NO: 108148 - DNA, 26 bp, Homo sapiens
ggaggaagaggcggtggctgtgtggc

SEQ ID NO: 108149 - DNA, 26 bp, Homo sapiens
gaggaagaggcggtggctgtgtggcc

SEQ ID NO: 108150 - DNA, 26 bp, Homo sapiens
aggaagaggcggtggctgtgtggccc

SEQ ID NO: 108151 - DNA, 26 bp, Homo sapiens
ggaagaggcggtggctgtgtggcccc

SEQ ID NO: 108152 - DNA, 26 bp, Homo sapiens
gaagaggcggtggctgtgtggccccc

SEQ ID NO: 108153 - DNA, 26 bp, Homo sapiens
aagaggcggtggctgtgtggccccct

SEQ ID NO: 108154 - DNA, 26 bp, Homo sapiens
agaggcggtggctgtgtggccccctt

SEQ ID NO: 108155 - DNA, 26 bp, Homo sapiens
gaggcggtggctgtgtggcccccttg

SEQ ID NO: 108156 - DNA, 26 bp, Homo sapiens
aggcggtggctgtgtggcccccttga

SEQ ID NO: 108157 - DNA, 26 bp, Homo sapiens
ggcggtggctgtgtggcccccttgag

SEQ ID NO: 108158 - DNA, 26 bp, Homo sapiens
gcggtggctgtgtggcccccttgagt

SEQ ID NO: 108159 - DNA, 26 bp, Homo sapiens
cggtggctgtgtggcccccttgagtg

SEQ ID NO: 108160 - DNA, 26 bp, Homo sapiens
ggtggctgtgtggcccccttgagtgg

SEQ ID NO: 108161 - DNA, 26 bp, Homo sapiens
gtggctgtgtggcccccttgagtgga

SEQ ID NO: 108162 - DNA, 26 bp, Homo sapiens
tggctgtgtggcccccttgagtggag

SEQ ID NO: 108163 - DNA, 26 bp, Homo sapiens
ggctgtgtggcccccttgagtggagc

SEQ ID NO: 108164 - DNA, 26 bp, Homo sapiens
gctgtgtggcccccttgagtggagcc

SEQ ID NO: 108165 - DNA, 26 bp, Homo sapiens
ctgtgtggcccccttgagtggagcca

SEQ ID NO: 108166 - DNA, 26 bp, Homo sapiens
tgtgtggcccccttgagtggagccat

SEQ ID NO: 108167 - DNA, 26 bp, Homo sapiens
gtgtggcccccttgagtggagccatg

SEQ ID NO: 108168 - DNA, 26 bp, Homo sapiens
tgtggcccccttgagtggagccatgg

SEQ ID NO: 108169 - DNA, 26 bp, Homo sapiens
gtggcccccttgagtggagccatgga

SEQ ID NO: 108170 - DNA, 26 bp, Homo sapiens
tggcccccttgagtggagccatggaa

SEQ ID NO: 108171 - DNA, 26 bp, Homo sapiens
ggcccccttgagtggagccatggaag

SEQ ID NO: 108172 - DNA, 26 bp, Homo sapiens
gcccccttgagtggagccatggaagg

SEQ ID NO: 108173 - DNA, 26 bp, Homo sapiens
cccccttgagtggagccatggaaggg

SEQ ID NO: 108174 - DNA, 26 bp, Homo sapiens
ccccttgagtggagccatggaagggg

SEQ ID NO: 108175 - DNA, 26 bp, Homo sapiens
cccttgagtggagccatggaaggggt

SEQ ID NO: 108176 - DNA, 26 bp, Homo sapiens
ccttgagtggagccatggaaggggtg

SEQ ID NO: 108177 - DNA, 26 bp, Homo sapiens
cttgagtggagccatggaaggggtgg

SEQ ID NO: 108178 - DNA, 26 bp, Homo sapiens
ttgagtggagccatggaaggggtggc

SEQ ID NO: 108179 - DNA, 26 bp, Homo sapiens
tgagtggagccatggaaggggtggca

SEQ ID NO: 108180 - DNA, 26 bp, Homo sapiens
gagtggagccatggaaggggtggcat

SEQ ID NO: 108181 - DNA, 26 bp, Homo sapiens
agtggagccatggaaggggtggcatg

SEQ ID NO: 108182 - DNA, 26 bp, Homo sapiens
gtggagccatggaaggggtggcatgg

SEQ ID NO: 108183 - DNA, 26 bp, Homo sapiens
tggagccatggaaggggtggcatggt

SEQ ID NO: 108184 - DNA, 26 bp, Homo sapiens
ggagccatggaaggggtggcatggtg

SEQ ID NO: 108185 - DNA, 26 bp, Homo sapiens
gagccatggaaggggtggcatggtgc

SEQ ID NO: 108186 - DNA, 26 bp, Homo sapiens
agccatggaaggggtggcatggtgcc

SEQ ID NO: 108187 - DNA, 26 bp, Homo sapiens
gccatggaaggggtggcatggtgcca

SEQ ID NO: 108188 - DNA, 26 bp, Homo sapiens
ccatggaaggggtggcatggtgccac

SEQ ID NO: 108189 - DNA, 26 bp, Homo sapiens
catggaaggggtggcatggtgccact

SEQ ID NO: 108190 - DNA, 26 bp, Homo sapiens
atggaaggggtggcatggtgccactg

SEQ ID NO: 108191 - DNA, 26 bp, Homo sapiens
tggaaggggtggcatggtgccactgg

SEQ ID NO: 108192 - DNA, 26 bp, Homo sapiens
ggaaggggtggcatggtgccactggg

SEQ ID NO: 108193 - DNA, 26 bp, Homo sapiens
gaaggggtggcatggtgccactgggg

SEQ ID NO: 108194 - DNA, 26 bp, Homo sapiens
aaggggtggcatggtgccactggggc

SEQ ID NO: 108195 - DNA, 26 bp, Homo sapiens
aggggtggcatggtgccactggggcc

SEQ ID NO: 108196 - DNA, 26 bp, Homo sapiens
ggggtggcatggtgccactggggcct

SEQ ID NO: 108197 - DNA, 26 bp, Homo sapiens
gggtggcatggtgccactggggcctg

SEQ ID NO: 108198 - DNA, 26 bp, Homo sapiens
ggtggcatggtgccactggggcctgt

SEQ ID NO: 108199 - DNA, 26 bp, Homo sapiens
gtggcatggtgccactggggcctgtg

SEQ ID NO: 108200 - DNA, 26 bp, Homo sapiens
tggcatggtgccactggggcctgtgg

SEQ ID NO: 108201 - DNA, 26 bp, Homo sapiens
ggcatggtgccactggggcctgtggc

SEQ ID NO: 108202 - DNA, 26 bp, Homo sapiens
gcatggtgccactggggcctgtggct

SEQ ID NO: 108203 - DNA, 26 bp, Homo sapiens
catggtgccactggggcctgtggctg

SEQ ID NO: 108204 - DNA, 26 bp, Homo sapiens
atggtgccactggggcctgtggctgt

SEQ ID NO: 108205 - DNA, 26 bp, Homo sapiens
tggtgccactggggcctgtggctgta

SEQ ID NO: 108206 - DNA, 26 bp, Homo sapiens
ggtgccactggggcctgtggctgtag

SEQ ID NO: 108207 - DNA, 26 bp, Homo sapiens
gtgccactggggcctgtggctgtagt

SEQ ID NO: 108208 - DNA, 26 bp, Homo sapiens
tgccactggggcctgtggctgtagta

SEQ ID NO: 108209 - DNA, 26 bp, Homo sapiens
gccactggggcctgtggctgtagtag

SEQ ID NO: 108210 - DNA, 26 bp, Homo sapiens
ccactggggcctgtggctgtagtagc

SEQ ID NO: 108211 - DNA, 26 bp, Homo sapiens
cactggggcctgtggctgtagtagcc

SEQ ID NO: 108212 - DNA, 26 bp, Homo sapiens
actggggcctgtggctgtagtagccc

SEQ ID NO: 108213 - DNA, 26 bp, Homo sapiens
ctggggcctgtggctgtagtagccct

SEQ ID NO: 108214 - DNA, 26 bp, Homo sapiens
tggggcctgtggctgtagtagccctg

SEQ ID NO: 108215 - DNA, 26 bp, Homo sapiens
ggggcctgtggctgtagtagccctgg

SEQ ID NO: 108216 - DNA, 26 bp, Homo sapiens
gggcctgtggctgtagtagccctggg

SEQ ID NO: 108217 - DNA, 26 bp, Homo sapiens
ggcctgtggctgtagtagccctgggc

SEQ ID NO: 108218 - DNA, 26 bp, Homo sapiens
gcctgtggctgtagtagccctgggcc

SEQ ID NO: 108219 - DNA, 26 bp, Homo sapiens
cctgtggctgtagtagccctgggcca

SEQ ID NO: 108220 - DNA, 26 bp, Homo sapiens
ctgtggctgtagtagccctgggccag

SEQ ID NO: 108221 - DNA, 26 bp, Homo sapiens
tgtggctgtagtagccctgggccagg

SEQ ID NO: 108222 - DNA, 26 bp, Homo sapiens
gtggctgtagtagccctgggccaggt

SEQ ID NO: 108223 - DNA, 26 bp, Homo sapiens
tggctgtagtagccctgggccaggta

SEQ ID NO: 108224 - DNA, 26 bp, Homo sapiens
ggctgtagtagccctgggccaggtaa

SEQ ID NO: 108225 - DNA, 26 bp, Homo sapiens
gctgtagtagccctgggccaggtaac

SEQ ID NO: 108226 - DNA, 26 bp, Homo sapiens
ctgtagtagccctgggccaggtaacc

SEQ ID NO: 108227 - DNA, 26 bp, Homo sapiens
tgtagtagccctgggccaggtaacct

SEQ ID NO: 108228 - DNA, 26 bp, Homo sapiens
gtagtagccctgggccaggtaacctc

SEQ ID NO: 108229 - DNA, 26 bp, Homo sapiens
tagtagccctgggccaggtaacctcc

SEQ ID NO: 108230 - DNA, 26 bp, Homo sapiens
agtagccctgggccaggtaacctcca

SEQ ID NO: 108231 - DNA, 26 bp, Homo sapiens
gtagccctgggccaggtaacctccag

SEQ ID NO: 108232 - DNA, 26 bp, Homo sapiens
tagccctgggccaggtaacctccagg

SEQ ID NO: 108233 - DNA, 26 bp, Homo sapiens
agccctgggccaggtaacctccaggg

SEQ ID NO: 108234 - DNA, 26 bp, Homo sapiens
gccctgggccaggtaacctccagggc

SEQ ID NO: 108235 - DNA, 26 bp, Homo sapiens
ccctgggccaggtaacctccagggcc

SEQ ID NO: 108236 - DNA, 26 bp, Homo sapiens
cctgggccaggtaacctccagggccc

SEQ ID NO: 108237 - DNA, 26 bp, Homo sapiens
ctgggccaggtaacctccagggccct

SEQ ID NO: 108238 - DNA, 26 bp, Homo sapiens
tgggccaggtaacctccagggccctg

SEQ ID NO: 108239 - DNA, 26 bp, Homo sapiens
gggccaggtaacctccagggccctga

SEQ ID NO: 108240 - DNA, 26 bp, Homo sapiens
ggccaggtaacctccagggccctgac

SEQ ID NO: 108241 - DNA, 26 bp, Homo sapiens
gccaggtaacctccagggccctgact

SEQ ID NO: 108242 - DNA, 26 bp, Homo sapiens
ccaggtaacctccagggccctgactt

SEQ ID NO: 108243 - DNA, 26 bp, Homo sapiens
caggtaacctccagggccctgacttt

SEQ ID NO: 108244 - DNA, 26 bp, Homo sapiens
aggtaacctccagggccctgactttt

SEQ ID NO: 108245 - DNA, 26 bp, Homo sapiens
ggtaacctccagggccctgacttttc

SEQ ID NO: 108246 - DNA, 26 bp, Homo sapiens
gtaacctccagggccctgacttttcc

SEQ ID NO: 108247 - DNA, 26 bp, Homo sapiens
taacctccagggccctgacttttcca

SEQ ID NO: 108248 - DNA, 26 bp, Homo sapiens
aacctccagggccctgacttttccag

SEQ ID NO: 108249 - DNA, 26 bp, Homo sapiens
acctccagggccctgacttttccaga

SEQ ID NO: 108250 - DNA, 26 bp, Homo sapiens
cctccagggccctgacttttccagag

SEQ ID NO: 108251 - DNA, 26 bp, Homo sapiens
ctccagggccctgacttttccagagg

SEQ ID NO: 108252 - DNA, 26 bp, Homo sapiens
tccagggccctgacttttccagaggc

SEQ ID NO: 108253 - DNA, 26 bp, Homo sapiens
ccagggccctgacttttccagaggct

SEQ ID NO: 108254 - DNA, 26 bp, Homo sapiens
cagggccctgacttttccagaggctg

SEQ ID NO: 108255 - DNA, 26 bp, Homo sapiens
agggccctgacttttccagaggctgc

SEQ ID NO: 108256 - DNA, 26 bp, Homo sapiens
gggccctgacttttccagaggctgct

SEQ ID NO: 108257 - DNA, 26 bp, Homo sapiens
ggccctgacttttccagaggctgctg

SEQ ID NO: 108258 - DNA, 26 bp, Homo sapiens
gccctgacttttccagaggctgctgc

SEQ ID NO: 108259 - DNA, 26 bp, Homo sapiens
ccctgacttttccagaggctgctgcc

SEQ ID NO: 108260 - DNA, 26 bp, Homo sapiens
cctgacttttccagaggctgctgcca

SEQ ID NO: 108261 - DNA, 26 bp, Homo sapiens
ctgacttttccagaggctgctgccac

SEQ ID NO: 108262 - DNA, 26 bp, Homo sapiens
tgacttttccagaggctgctgccacc

SEQ ID NO: 108263 - DNA, 26 bp, Homo sapiens
gacttttccagaggctgctgccacct

SEQ ID NO: 108264 - DNA, 26 bp, Homo sapiens
acttttccagaggctgctgccaccta

SEQ ID NO: 108265 - DNA, 26 bp, Homo sapiens
cttttccagaggctgctgccacctac

SEQ ID NO: 108266 - DNA, 26 bp, Homo sapiens
ttttccagaggctgctgccacctact

SEQ ID NO: 108267 - DNA, 26 bp, Homo sapiens
tttccagaggctgctgccacctactt

SEQ ID NO: 108268 - DNA, 26 bp, Homo sapiens
ttccagaggctgctgccacctacttc

SEQ ID NO: 108269 - DNA, 26 bp, Homo sapiens
tccagaggctgctgccacctacttct

SEQ ID NO: 108270 - DNA, 26 bp, Homo sapiens
ccagaggctgctgccacctacttctt

SEQ ID NO: 108271 - DNA, 26 bp, Homo sapiens
cagaggctgctgccacctacttctta

SEQ ID NO: 108272 - DNA, 26 bp, Homo sapiens
agaggctgctgccacctacttcttat

SEQ ID NO: 108273 - DNA, 26 bp, Homo sapiens
gaggctgctgccacctacttcttatc

SEQ ID NO: 108274 - DNA, 26 bp, Homo sapiens
aggctgctgccacctacttcttatca

SEQ ID NO: 108275 - DNA, 26 bp, Homo sapiens
ggctgctgccacctacttcttatcaa

SEQ ID NO: 108276 - DNA, 26 bp, Homo sapiens
gctgctgccacctacttcttatcaaa

SEQ ID NO: 108277 - DNA, 26 bp, Homo sapiens
ctgctgccacctacttcttatcaaag

SEQ ID NO: 108278 - DNA, 26 bp, Homo sapiens
tgctgccacctacttcttatcaaaga

SEQ ID NO: 108279 - DNA, 26 bp, Homo sapiens
gctgccacctacttcttatcaaagaa

SEQ ID NO: 108280 - DNA, 26 bp, Homo sapiens
ctgccacctacttcttatcaaagaag

SEQ ID NO: 108281 - DNA, 26 bp, Homo sapiens
tgccacctacttcttatcaaagaagg

SEQ ID NO: 108282 - DNA, 26 bp, Homo sapiens
gccacctacttcttatcaaagaaggg

SEQ ID NO: 108283 - DNA, 26 bp, Homo sapiens
ccacctacttcttatcaaagaagggg

SEQ ID NO: 108284 - DNA, 26 bp, Homo sapiens
cacctacttcttatcaaagaaggggg

SEQ ID NO: 108285 - DNA, 26 bp, Homo sapiens
acctacttcttatcaaagaaggggga

SEQ ID NO: 108286 - DNA, 26 bp, Homo sapiens
cctacttcttatcaaagaagggggag

SEQ ID NO: 108287 - DNA, 26 bp, Homo sapiens
ctacttcttatcaaagaagggggaga

SEQ ID NO: 108288 - DNA, 26 bp, Homo sapiens
tacttcttatcaaagaagggggagaa

SEQ ID NO: 108289 - DNA, 26 bp, Homo sapiens
acttcttatcaaagaagggggagaac

SEQ ID NO: 108290 - DNA, 26 bp, Homo sapiens
cttcttatcaaagaagggggagaaca

SEQ ID NO: 108291 - DNA, 26 bp, Homo sapiens
ttcttatcaaagaagggggagaacag

SEQ ID NO: 108292 - DNA, 26 bp, Homo sapiens
tcttatcaaagaagggggagaacagt

SEQ ID NO: 108293 - DNA, 26 bp, Homo sapiens
cttatcaaagaagggggagaacagtt

SEQ ID NO: 108294 - DNA, 26 bp, Homo sapiens
ttatcaaagaagggggagaacagttc

SEQ ID NO: 108295 - DNA, 26 bp, Homo sapiens
tatcaaagaagggggagaacagttca

SEQ ID NO: 108296 - DNA, 26 bp, Homo sapiens
atcaaagaagggggagaacagttcat

SEQ ID NO: 108297 - DNA, 26 bp, Homo sapiens
tcaaagaagggggagaacagttcatc

SEQ ID NO: 108298 - DNA, 26 bp, Homo sapiens
caaagaagggggagaacagttcatct

SEQ ID NO: 108299 - DNA, 26 bp, Homo sapiens
aaagaagggggagaacagttcatctg

SEQ ID NO: 108300 - DNA, 26 bp, Homo sapiens
aagaagggggagaacagttcatctga

SEQ ID NO: 108301 - DNA, 26 bp, Homo sapiens
agaagggggagaacagttcatctgag

SEQ ID NO: 108302 - DNA, 26 bp, Homo sapiens
gaagggggagaacagttcatctgagt

SEQ ID NO: 108303 - DNA, 26 bp, Homo sapiens
aagggggagaacagttcatctgagtc

SEQ ID NO: 108304 - DNA, 26 bp, Homo sapiens
agggggagaacagttcatctgagtca

SEQ ID NO: 108305 - DNA, 26 bp, Homo sapiens
gggggagaacagttcatctgagtcag

SEQ ID NO: 108306 - DNA, 26 bp, Homo sapiens
ggggagaacagttcatctgagtcagt

SEQ ID NO: 108307 - DNA, 26 bp, Homo sapiens
gggagaacagttcatctgagtcagtg

SEQ ID NO: 108308 - DNA, 26 bp, Homo sapiens
ggagaacagttcatctgagtcagtgc

SEQ ID NO: 108309 - DNA, 26 bp, Homo sapiens
gagaacagttcatctgagtcagtgca

SEQ ID NO: 108310 - DNA, 26 bp, Homo sapiens
agaacagttcatctgagtcagtgcac

SEQ ID NO: 108311 - DNA, 26 bp, Homo sapiens
gaacagttcatctgagtcagtgcacc

SEQ ID NO: 108312 - DNA, 26 bp, Homo sapiens
aacagttcatctgagtcagtgcacct

SEQ ID NO: 108313 - DNA, 26 bp, Homo sapiens
acagttcatctgagtcagtgcacctc

SEQ ID NO: 108314 - DNA, 26 bp, Homo sapiens
cagttcatctgagtcagtgcacctcc

SEQ ID NO: 108315 - DNA, 26 bp, Homo sapiens
agttcatctgagtcagtgcacctccc

SEQ ID NO: 108316 - DNA, 26 bp, Homo sapiens
gttcatctgagtcagtgcacctcccc

SEQ ID NO: 108317 - DNA, 26 bp, Homo sapiens
ttcatctgagtcagtgcacctcccct

SEQ ID NO: 108318 - DNA, 26 bp, Homo sapiens
tcatctgagtcagtgcacctcccctc

SEQ ID NO: 108319 - DNA, 26 bp, Homo sapiens
catctgagtcagtgcacctcccctcc

SEQ ID NO: 108320 - DNA, 26 bp, Homo sapiens
atctgagtcagtgcacctcccctcca

SEQ ID NO: 108321 - DNA, 26 bp, Homo sapiens
tctgagtcagtgcacctcccctccag

SEQ ID NO: 108322 - DNA, 26 bp, Homo sapiens
ctgagtcagtgcacctcccctccagt

SEQ ID NO: 108323 - DNA, 26 bp, Homo sapiens
tgagtcagtgcacctcccctccagtc

SEQ ID NO: 108324 - DNA, 26 bp, Homo sapiens
gagtcagtgcacctcccctccagtct

SEQ ID NO: 108325 - DNA, 26 bp, Homo sapiens
agtcagtgcacctcccctccagtctc

SEQ ID NO: 108326 - DNA, 26 bp, Homo sapiens
gtcagtgcacctcccctccagtctcc

SEQ ID NO: 108327 - DNA, 26 bp, Homo sapiens
tcagtgcacctcccctccagtctcca

SEQ ID NO: 108328 - DNA, 26 bp, Homo sapiens
cagtgcacctcccctccagtctccac

SEQ ID NO: 108329 - DNA, 26 bp, Homo sapiens
agtgcacctcccctccagtctccact

SEQ ID NO: 108330 - DNA, 26 bp, Homo sapiens
gtgcacctcccctccagtctccactc

SEQ ID NO: 108331 - DNA, 26 bp, Homo sapiens
tgcacctcccctccagtctccactcc

SEQ ID NO: 108332 - DNA, 26 bp, Homo sapiens
gcacctcccctccagtctccactccc

SEQ ID NO: 108333 - DNA, 26 bp, Homo sapiens
cacctcccctccagtctccactccct

SEQ ID NO: 108334 - DNA, 26 bp, Homo sapiens
acctcccctccagtctccactccctg

SEQ ID NO: 108335 - DNA, 26 bp, Homo sapiens
cctcccctccagtctccactccctga

SEQ ID NO: 108336 - DNA, 26 bp, Homo sapiens
ctcccctccagtctccactccctgag

SEQ ID NO: 108337 - DNA, 26 bp, Homo sapiens
tcccctccagtctccactccctgagg

SEQ ID NO: 108338 - DNA, 26 bp, Homo sapiens
cccctccagtctccactccctgagga

SEQ ID NO: 108339 - DNA, 26 bp, Homo sapiens
ccctccagtctccactccctgaggat

SEQ ID NO: 108340 - DNA, 26 bp, Homo sapiens
cctccagtctccactccctgaggatg

SEQ ID NO: 108341 - DNA, 26 bp, Homo sapiens
ctccagtctccactccctgaggatgg

SEQ ID NO: 108342 - DNA, 26 bp, Homo sapiens
tccagtctccactccctgaggatgga

SEQ ID NO: 108343 - DNA, 26 bp, Homo sapiens
ccagtctccactccctgaggatggaa

SEQ ID NO: 108344 - DNA, 26 bp, Homo sapiens
cagtctccactccctgaggatggaat

SEQ ID NO: 108345 - DNA, 26 bp, Homo sapiens
agtctccactccctgaggatggaatc

SEQ ID NO: 108346 - DNA, 26 bp, Homo sapiens
gtctccactccctgaggatggaatcg

SEQ ID NO: 108347 - DNA, 26 bp, Homo sapiens
tctccactccctgaggatggaatcgg

SEQ ID NO: 108348 - DNA, 26 bp, Homo sapiens
ctccactccctgaggatggaatcggg

SEQ ID NO: 108349 - DNA, 26 bp, Homo sapiens
tccactccctgaggatggaatcgggg

SEQ ID NO: 108350 - DNA, 26 bp, Homo sapiens
ccactccctgaggatggaatcgggga

SEQ ID NO: 108351 - DNA, 26 bp, Homo sapiens
cactccctgaggatggaatcggggaa

SEQ ID NO: 108352 - DNA, 26 bp, Homo sapiens
actccctgaggatggaatcggggaaa

SEQ ID NO: 108353 - DNA, 26 bp, Homo sapiens
ctccctgaggatggaatcggggaaac

SEQ ID NO: 108354 - DNA, 26 bp, Homo sapiens
tccctgaggatggaatcggggaaaca

SEQ ID NO: 108355 - DNA, 26 bp, Homo sapiens
ccctgaggatggaatcggggaaacag

SEQ ID NO: 108356 - DNA, 26 bp, Homo sapiens
cctgaggatggaatcggggaaacagc

SEQ ID NO: 108357 - DNA, 26 bp, Homo sapiens
ctgaggatggaatcggggaaacagca

SEQ ID NO: 108358 - DNA, 26 bp, Homo sapiens
tgaggatggaatcggggaaacagcat

SEQ ID NO: 108359 - DNA, 26 bp, Homo sapiens
gaggatggaatcggggaaacagcatc

SEQ ID NO: 108360 - DNA, 26 bp, Homo sapiens
aggatggaatcggggaaacagcatcc

SEQ ID NO: 108361 - DNA, 26 bp, Homo sapiens
ggatggaatcggggaaacagcatcct

SEQ ID NO: 108362 - DNA, 26 bp, Homo sapiens
gatggaatcggggaaacagcatcctg

SEQ ID NO: 108363 - DNA, 26 bp, Homo sapiens
atggaatcggggaaacagcatcctgc

SEQ ID NO: 108364 - DNA, 26 bp, Homo sapiens
tggaatcggggaaacagcatcctgcc

SEQ ID NO: 108365 - DNA, 26 bp, Homo sapiens
ggaatcggggaaacagcatcctgccg

SEQ ID NO: 108366 - DNA, 26 bp, Homo sapiens
gaatcggggaaacagcatcctgccgc

SEQ ID NO: 108367 - DNA, 26 bp, Homo sapiens
aatcggggaaacagcatcctgccgcc

SEQ ID NO: 108368 - DNA, 26 bp, Homo sapiens
atcggggaaacagcatcctgccgcct

SEQ ID NO: 108369 - DNA, 26 bp, Homo sapiens
tcggggaaacagcatcctgccgcctc

SEQ ID NO: 108370 - DNA, 26 bp, Homo sapiens
cggggaaacagcatcctgccgcctcc

SEQ ID NO: 108371 - DNA, 26 bp, Homo sapiens
ggggaaacagcatcctgccgcctcct

SEQ ID NO: 108372 - DNA, 26 bp, Homo sapiens
gggaaacagcatcctgccgcctcctc

SEQ ID NO: 108373 - DNA, 26 bp, Homo sapiens
ggaaacagcatcctgccgcctcctct

SEQ ID NO: 108374 - DNA, 26 bp, Homo sapiens
gaaacagcatcctgccgcctcctctc

SEQ ID NO: 108375 - DNA, 26 bp, Homo sapiens
aaacagcatcctgccgcctcctctct

SEQ ID NO: 108376 - DNA, 26 bp, Homo sapiens
aacagcatcctgccgcctcctctctg

SEQ ID NO: 108377 - DNA, 26 bp, Homo sapiens
acagcatcctgccgcctcctctctgc

SEQ ID NO: 108378 - DNA, 26 bp, Homo sapiens
cagcatcctgccgcctcctctctgcc

SEQ ID NO: 108379 - DNA, 26 bp, Homo sapiens
agcatcctgccgcctcctctctgcct

SEQ ID NO: 108380 - DNA, 26 bp, Homo sapiens
gcatcctgccgcctcctctctgcctg

SEQ ID NO: 108381 - DNA, 26 bp, Homo sapiens
catcctgccgcctcctctctgcctgc

SEQ ID NO: 108382 - DNA, 26 bp, Homo sapiens
atcctgccgcctcctctctgcctgcc

SEQ ID NO: 108383 - DNA, 26 bp, Homo sapiens
tcctgccgcctcctctctgcctgccc

SEQ ID NO: 108384 - DNA, 26 bp, Homo sapiens
cctgccgcctcctctctgcctgccca

SEQ ID NO: 108385 - DNA, 26 bp, Homo sapiens
ctgccgcctcctctctgcctgcccac

SEQ ID NO: 108386 - DNA, 26 bp, Homo sapiens
tgccgcctcctctctgcctgcccact

SEQ ID NO: 108387 - DNA, 26 bp, Homo sapiens
gccgcctcctctctgcctgcccactc

SEQ ID NO: 108388 - DNA, 26 bp, Homo sapiens
ccgcctcctctctgcctgcccactca

SEQ ID NO: 108389 - DNA, 26 bp, Homo sapiens
cgcctcctctctgcctgcccactcac

SEQ ID NO: 108390 - DNA, 26 bp, Homo sapiens
gcctcctctctgcctgcccactcacc

SEQ ID NO: 108391 - DNA, 26 bp, Homo sapiens
cctcctctctgcctgcccactcaccg

SEQ ID NO: 108392 - DNA, 26 bp, Homo sapiens
ctcctctctgcctgcccactcaccgg

SEQ ID NO: 108393 - DNA, 26 bp, Homo sapiens
tcctctctgcctgcccactcaccggc

SEQ ID NO: 108394 - DNA, 26 bp, Homo sapiens
cctctctgcctgcccactcaccggca

SEQ ID NO: 108395 - DNA, 26 bp, Homo sapiens
ctctctgcctgcccactcaccggcaa

SEQ ID NO: 108396 - DNA, 26 bp, Homo sapiens
tctctgcctgcccactcaccggcaag

SEQ ID NO: 108397 - DNA, 26 bp, Homo sapiens
ctctgcctgcccactcaccggcaagg

SEQ ID NO: 108398 - DNA, 26 bp, Homo sapiens
tctgcctgcccactcaccggcaaggt

SEQ ID NO: 108399 - DNA, 26 bp, Homo sapiens
ctgcctgcccactcaccggcaaggtt

SEQ ID NO: 108400 - DNA, 26 bp, Homo sapiens
tgcctgcccactcaccggcaaggttg

SEQ ID NO: 108401 - DNA, 26 bp, Homo sapiens
gcctgcccactcaccggcaaggttgt

SEQ ID NO: 108402 - DNA, 26 bp, Homo sapiens
cctgcccactcaccggcaaggttgtc

SEQ ID NO: 108403 - DNA, 26 bp, Homo sapiens
ctgcccactcaccggcaaggttgtcc

SEQ ID NO: 108404 - DNA, 26 bp, Homo sapiens
tgcccactcaccggcaaggttgtccc

SEQ ID NO: 108405 - DNA, 26 bp, Homo sapiens
gcccactcaccggcaaggttgtccct

SEQ ID NO: 108406 - DNA, 26 bp, Homo sapiens
cccactcaccggcaaggttgtccctc

SEQ ID NO: 108407 - DNA, 26 bp, Homo sapiens
ccactcaccggcaaggttgtccctct

SEQ ID NO: 108408 - DNA, 26 bp, Homo sapiens
cactcaccggcaaggttgtccctctg

SEQ ID NO: 108409 - DNA, 26 bp, Homo sapiens
actcaccggcaaggttgtccctctgc

SEQ ID NO: 108410 - DNA, 26 bp, Homo sapiens
ctcaccggcaaggttgtccctctgcc

SEQ ID NO: 108411 - DNA, 26 bp, Homo sapiens
tcaccggcaaggttgtccctctgccc

SEQ ID NO: 108412 - DNA, 26 bp, Homo sapiens
caccggcaaggttgtccctctgccca

SEQ ID NO: 108413 - DNA, 26 bp, Homo sapiens
accggcaaggttgtccctctgcccag

SEQ ID NO: 108414 - DNA, 26 bp, Homo sapiens
ccggcaaggttgtccctctgcccagg

SEQ ID NO: 108415 - DNA, 26 bp, Homo sapiens
cggcaaggttgtccctctgcccaggg

SEQ ID NO: 108416 - DNA, 26 bp, Homo sapiens
ggcaaggttgtccctctgcccagggc

SEQ ID NO: 108417 - DNA, 26 bp, Homo sapiens
gcaaggttgtccctctgcccagggct

SEQ ID NO: 108418 - DNA, 26 bp, Homo sapiens
caaggttgtccctctgcccagggctc

SEQ ID NO: 108419 - DNA, 26 bp, Homo sapiens
aaggttgtccctctgcccagggctca

SEQ ID NO: 108420 - DNA, 26 bp, Homo sapiens
aggttgtccctctgcccagggctcag

SEQ ID NO: 108421 - DNA, 26 bp, Homo sapiens
ggttgtccctctgcccagggctcagg

SEQ ID NO: 108422 - DNA, 26 bp, Homo sapiens
gttgtccctctgcccagggctcaggg

SEQ ID NO: 108423 - DNA, 26 bp, Homo sapiens
ttgtccctctgcccagggctcagggc

SEQ ID NO: 108424 - DNA, 26 bp, Homo sapiens
tgtccctctgcccagggctcagggcc

SEQ ID NO: 108425 - DNA, 26 bp, Homo sapiens
gtccctctgcccagggctcagggcca

SEQ ID NO: 108426 - DNA, 26 bp, Homo sapiens
tccctctgcccagggctcagggccat

SEQ ID NO: 108427 - DNA, 26 bp, Homo sapiens
ccctctgcccagggctcagggccatg

SEQ ID NO: 108428 - DNA, 26 bp, Homo sapiens
cctctgcccagggctcagggccatgt

SEQ ID NO: 108429 - DNA, 26 bp, Homo sapiens
ctctgcccagggctcagggccatgta

SEQ ID NO: 108430 - DNA, 26 bp, Homo sapiens
tctgcccagggctcagggccatgtac

SEQ ID NO: 108431 - DNA, 26 bp, Homo sapiens
ctgcccagggctcagggccatgtacc

SEQ ID NO: 108432 - DNA, 26 bp, Homo sapiens
tgcccagggctcagggccatgtacca

SEQ ID NO: 108433 - DNA, 26 bp, Homo sapiens
gcccagggctcagggccatgtaccag

SEQ ID NO: 108434 - DNA, 26 bp, Homo sapiens
cccagggctcagggccatgtaccaga

SEQ ID NO: 108435 - DNA, 26 bp, Homo sapiens
ccagggctcagggccatgtaccagat

SEQ ID NO: 108436 - DNA, 26 bp, Homo sapiens
cagggctcagggccatgtaccagatc

SEQ ID NO: 108437 - DNA, 26 bp, Homo sapiens
agggctcagggccatgtaccagatct

SEQ ID NO: 108438 - DNA, 26 bp, Homo sapiens
gggctcagggccatgtaccagatctg

SEQ ID NO: 108439 - DNA, 26 bp, Homo sapiens
ggctcagggccatgtaccagatctgt

SEQ ID NO: 108440 - DNA, 26 bp, Homo sapiens
gctcagggccatgtaccagatctgtc

SEQ ID NO: 108441 - DNA, 26 bp, Homo sapiens
ctcagggccatgtaccagatctgtct

SEQ ID NO: 108442 - DNA, 26 bp, Homo sapiens
tcagggccatgtaccagatctgtctg

SEQ ID NO: 108443 - DNA, 26 bp, Homo sapiens
cagggccatgtaccagatctgtctgt

SEQ ID NO: 108444 - DNA, 26 bp, Homo sapiens
agggccatgtaccagatctgtctgtg

SEQ ID NO: 108445 - DNA, 26 bp, Homo sapiens
gggccatgtaccagatctgtctgtgc

SEQ ID NO: 108446 - DNA, 26 bp, Homo sapiens
ggccatgtaccagatctgtctgtgcc

SEQ ID NO: 108447 - DNA, 26 bp, Homo sapiens
gccatgtaccagatctgtctgtgccc

SEQ ID NO: 108448 - DNA, 26 bp, Homo sapiens
ccatgtaccagatctgtctgtgccca

SEQ ID NO: 108449 - DNA, 26 bp, Homo sapiens
catgtaccagatctgtctgtgcccac

SEQ ID NO: 108450 - DNA, 26 bp, Homo sapiens
atgtaccagatctgtctgtgcccacc

SEQ ID NO: 108451 - DNA, 26 bp, Homo sapiens
tgtaccagatctgtctgtgcccaccc

SEQ ID NO: 108452 - DNA, 26 bp, Homo sapiens
gtaccagatctgtctgtgcccaccca

SEQ ID NO: 108453 - DNA, 26 bp, Homo sapiens
taccagatctgtctgtgcccacccag

SEQ ID NO: 108454 - DNA, 26 bp, Homo sapiens
accagatctgtctgtgcccacccagg

SEQ ID NO: 108455 - DNA, 26 bp, Homo sapiens
ccagatctgtctgtgcccacccaggc

SEQ ID NO: 108456 - DNA, 26 bp, Homo sapiens
cagatctgtctgtgcccacccaggca

SEQ ID NO: 108457 - DNA, 26 bp, Homo sapiens
agatctgtctgtgcccacccaggcac

SEQ ID NO: 108458 - DNA, 26 bp, Homo sapiens
gatctgtctgtgcccacccaggcaca

SEQ ID NO: 108459 - DNA, 26 bp, Homo sapiens
atctgtctgtgcccacccaggcacag

SEQ ID NO: 108460 - DNA, 26 bp, Homo sapiens
tctgtctgtgcccacccaggcacagc

SEQ ID NO: 108461 - DNA, 26 bp, Homo sapiens
ctgtctgtgcccacccaggcacagcc

SEQ ID NO: 108462 - DNA, 26 bp, Homo sapiens
tgtctgtgcccacccaggcacagcca

SEQ ID NO: 108463 - DNA, 26 bp, Homo sapiens
gtctgtgcccacccaggcacagccac

SEQ ID NO: 108464 - DNA, 26 bp, Homo sapiens
tctgtgcccacccaggcacagccact

SEQ ID NO: 108465 - DNA, 26 bp, Homo sapiens
ctgtgcccacccaggcacagccactg

SEQ ID NO: 108466 - DNA, 26 bp, Homo sapiens
tgtgcccacccaggcacagccactgc

SEQ ID NO: 108467 - DNA, 26 bp, Homo sapiens
gtgcccacccaggcacagccactgcc

SEQ ID NO: 108468 - DNA, 26 bp, Homo sapiens
tgcccacccaggcacagccactgcct

SEQ ID NO: 108469 - DNA, 26 bp, Homo sapiens
gcccacccaggcacagccactgcctc

SEQ ID NO: 108470 - DNA, 26 bp, Homo sapiens
cccacccaggcacagccactgcctcc

SEQ ID NO: 108471 - DNA, 26 bp, Homo sapiens
ccacccaggcacagccactgcctccc

SEQ ID NO: 108472 - DNA, 26 bp, Homo sapiens
cacccaggcacagccactgcctcccc

SEQ ID NO: 108473 - DNA, 26 bp, Homo sapiens
acccaggcacagccactgcctccccc

SEQ ID NO: 108474 - DNA, 26 bp, Homo sapiens
cccaggcacagccactgcctccccct

SEQ ID NO: 108475 - DNA, 26 bp, Homo sapiens
ccaggcacagccactgcctccccctt

SEQ ID NO: 108476 - DNA, 26 bp, Homo sapiens
caggcacagccactgcctcccccttg

SEQ ID NO: 108477 - DNA, 26 bp, Homo sapiens
aggcacagccactgcctcccccttgg

SEQ ID NO: 108478 - DNA, 26 bp, Homo sapiens
ggcacagccactgcctcccccttggc

SEQ ID NO: 108479 - DNA, 26 bp, Homo sapiens
gcacagccactgcctcccccttggct

SEQ ID NO: 108480 - DNA, 26 bp, Homo sapiens
cacagccactgcctcccccttggctc

SEQ ID NO: 108481 - DNA, 26 bp, Homo sapiens
acagccactgcctcccccttggctcc

SEQ ID NO: 108482 - DNA, 26 bp, Homo sapiens
cagccactgcctcccccttggctccc

SEQ ID NO: 108483 - DNA, 26 bp, Homo sapiens
agccactgcctcccccttggctccct

SEQ ID NO: 108484 - DNA, 26 bp, Homo sapiens
gccactgcctcccccttggctccctg

SEQ ID NO: 108485 - DNA, 26 bp, Homo sapiens
ccactgcctcccccttggctccctgc

SEQ ID NO: 108486 - DNA, 26 bp, Homo sapiens
cactgcctcccccttggctccctgct

SEQ ID NO: 108487 - DNA, 26 bp, Homo sapiens
actgcctcccccttggctccctgctc

SEQ ID NO: 108488 - DNA, 26 bp, Homo sapiens
ctgcctcccccttggctccctgctcc

SEQ ID NO: 108489 - DNA, 26 bp, Homo sapiens
tgcctcccccttggctccctgctcct

SEQ ID NO: 108490 - DNA, 26 bp, Homo sapiens
gcctcccccttggctccctgctccta

SEQ ID NO: 108491 - DNA, 26 bp, Homo sapiens
cctcccccttggctccctgctcctac

SEQ ID NO: 108492 - DNA, 26 bp, Homo sapiens
ctcccccttggctccctgctcctacc

SEQ ID NO: 108493 - DNA, 26 bp, Homo sapiens
tcccccttggctccctgctcctaccc

SEQ ID NO: 108494 - DNA, 26 bp, Homo sapiens
cccccttggctccctgctcctaccca

SEQ ID NO: 108495 - DNA, 26 bp, Homo sapiens
ccccttggctccctgctcctacccag

SEQ ID NO: 108496 - DNA, 26 bp, Homo sapiens
cccttggctccctgctcctacccagg

SEQ ID NO: 108497 - DNA, 26 bp, Homo sapiens
ccttggctccctgctcctacccagga

SEQ ID NO: 108498 - DNA, 26 bp, Homo sapiens
cttggctccctgctcctacccaggag

SEQ ID NO: 108499 - DNA, 26 bp, Homo sapiens
ttggctccctgctcctacccaggaga

SEQ ID NO: 108500 - DNA, 26 bp, Homo sapiens
tggctccctgctcctacccaggagag

SEQ ID NO: 108501 - DNA, 26 bp, Homo sapiens
ggctccctgctcctacccaggagagc

SEQ ID NO: 108502 - DNA, 26 bp, Homo sapiens
gctccctgctcctacccaggagagct

SEQ ID NO: 108503 - DNA, 26 bp, Homo sapiens
ctccctgctcctacccaggagagctc

SEQ ID NO: 108504 - DNA, 26 bp, Homo sapiens
tccctgctcctacccaggagagctcc

SEQ ID NO: 108505 - DNA, 26 bp, Homo sapiens
ccctgctcctacccaggagagctccc

SEQ ID NO: 108506 - DNA, 26 bp, Homo sapiens
cctgctcctacccaggagagctccct

SEQ ID NO: 108507 - DNA, 26 bp, Homo sapiens
ctgctcctacccaggagagctcccta

SEQ ID NO: 108508 - DNA, 26 bp, Homo sapiens
tgctcctacccaggagagctccctat

SEQ ID NO: 108509 - DNA, 26 bp, Homo sapiens
gctcctacccaggagagctccctatc

SEQ ID NO: 108510 - DNA, 26 bp, Homo sapiens
ctcctacccaggagagctccctatcc

SEQ ID NO: 108511 - DNA, 26 bp, Homo sapiens
tcctacccaggagagctccctatccg

SEQ ID NO: 108512 - DNA, 26 bp, Homo sapiens
cctacccaggagagctccctatccgc

SEQ ID NO: 108513 - DNA, 26 bp, Homo sapiens
ctacccaggagagctccctatccgcc

SEQ ID NO: 108514 - DNA, 26 bp, Homo sapiens
tacccaggagagctccctatccgcct

SEQ ID NO: 108515 - DNA, 26 bp, Homo sapiens
acccaggagagctccctatccgcctt

SEQ ID NO: 108516 - DNA, 26 bp, Homo sapiens
cccaggagagctccctatccgccttt

SEQ ID NO: 108517 - DNA, 26 bp, Homo sapiens
ccaggagagctccctatccgcctttg

SEQ ID NO: 108518 - DNA, 26 bp, Homo sapiens
caggagagctccctatccgcctttgg

SEQ ID NO: 108519 - DNA, 26 bp, Homo sapiens
aggagagctccctatccgcctttggt

SEQ ID NO: 108520 - DNA, 26 bp, Homo sapiens
ggagagctccctatccgcctttggtc

SEQ ID NO: 108521 - DNA, 26 bp, Homo sapiens
gagagctccctatccgcctttggtca

SEQ ID NO: 108522 - DNA, 26 bp, Homo sapiens
agagctccctatccgcctttggtcag

SEQ ID NO: 108523 - DNA, 26 bp, Homo sapiens
gagctccctatccgcctttggtcaga

SEQ ID NO: 108524 - DNA, 26 bp, Homo sapiens
agctccctatccgcctttggtcagag

SEQ ID NO: 108525 - DNA, 26 bp, Homo sapiens
gctccctatccgcctttggtcagagc

SEQ ID NO: 108526 - DNA, 26 bp, Homo sapiens
ctccctatccgcctttggtcagagct

SEQ ID NO: 108527 - DNA, 26 bp, Homo sapiens
tccctatccgcctttggtcagagctg

SEQ ID NO: 108528 - DNA, 26 bp, Homo sapiens
ccctatccgcctttggtcagagctga

SEQ ID NO: 108529 - DNA, 26 bp, Homo sapiens
cctatccgcctttggtcagagctgaa

SEQ ID NO: 108530 - DNA, 26 bp, Homo sapiens
ctatccgcctttggtcagagctgaag

SEQ ID NO: 108531 - DNA, 26 bp, Homo sapiens
tatccgcctttggtcagagctgaagc

SEQ ID NO: 108532 - DNA, 26 bp, Homo sapiens
atccgcctttggtcagagctgaagcc

SEQ ID NO: 108533 - DNA, 26 bp, Homo sapiens
tccgcctttggtcagagctgaagcca

SEQ ID NO: 108534 - DNA, 26 bp, Homo sapiens
ccgcctttggtcagagctgaagccat

SEQ ID NO: 108535 - DNA, 26 bp, Homo sapiens
cgcctttggtcagagctgaagccata

SEQ ID NO: 108536 - DNA, 26 bp, Homo sapiens
gcctttggtcagagctgaagccatat

SEQ ID NO: 108537 - DNA, 26 bp, Homo sapiens
cctttggtcagagctgaagccatata

SEQ ID NO: 108538 - DNA, 26 bp, Homo sapiens
ctttggtcagagctgaagccatatac

SEQ ID NO: 108539 - DNA, 26 bp, Homo sapiens
tttggtcagagctgaagccatatacg

SEQ ID NO: 108540 - DNA, 26 bp, Homo sapiens
ttggtcagagctgaagccatatacga

SEQ ID NO: 108541 - DNA, 26 bp, Homo sapiens
tggtcagagctgaagccatatacgac

SEQ ID NO: 108542 - DNA, 26 bp, Homo sapiens
ggtcagagctgaagccatatacgact

SEQ ID NO: 108543 - DNA, 26 bp, Homo sapiens
gtcagagctgaagccatatacgactg

SEQ ID NO: 108544 - DNA, 26 bp, Homo sapiens
tcagagctgaagccatatacgactgg

SEQ ID NO: 108545 - DNA, 26 bp, Homo sapiens
cagagctgaagccatatacgactggg

SEQ ID NO: 108546 - DNA, 26 bp, Homo sapiens
agagctgaagccatatacgactgggt

SEQ ID NO: 108547 - DNA, 26 bp, Homo sapiens
gagctgaagccatatacgactgggtg

SEQ ID NO: 108548 - DNA, 26 bp, Homo sapiens
agctgaagccatatacgactgggtgt

SEQ ID NO: 108549 - DNA, 26 bp, Homo sapiens
gctgaagccatatacgactgggtgtt

SEQ ID NO: 108550 - DNA, 26 bp, Homo sapiens
ctgaagccatatacgactgggtgttt

SEQ ID NO: 108551 - DNA, 26 bp, Homo sapiens
tgaagccatatacgactgggtgtttg

SEQ ID NO: 108552 - DNA, 26 bp, Homo sapiens
gaagccatatacgactgggtgtttgt

SEQ ID NO: 108553 - DNA, 26 bp, Homo sapiens
aagccatatacgactgggtgtttgtc

SEQ ID NO: 108554 - DNA, 26 bp, Homo sapiens
agccatatacgactgggtgtttgtcc

SEQ ID NO: 108555 - DNA, 26 bp, Homo sapiens
gccatatacgactgggtgtttgtccc

SEQ ID NO: 108556 - DNA, 26 bp, Homo sapiens
ccatatacgactgggtgtttgtcccc

SEQ ID NO: 108557 - DNA, 26 bp, Homo sapiens
catatacgactgggtgtttgtccccc

SEQ ID NO: 108558 - DNA, 26 bp, Homo sapiens
atatacgactgggtgtttgtccccct

SEQ ID NO: 108559 - DNA, 26 bp, Homo sapiens
tatacgactgggtgtttgtcccccta

SEQ ID NO: 108560 - DNA, 26 bp, Homo sapiens
atacgactgggtgtttgtccccctac

SEQ ID NO: 108561 - DNA, 26 bp, Homo sapiens
tacgactgggtgtttgtccccctact

SEQ ID NO: 108562 - DNA, 26 bp, Homo sapiens
acgactgggtgtttgtccccctactt

SEQ ID NO: 108563 - DNA, 26 bp, Homo sapiens
cgactgggtgtttgtccccctacttt

SEQ ID NO: 108564 - DNA, 26 bp, Homo sapiens
gactgggtgtttgtccccctactttg

SEQ ID NO: 108565 - DNA, 26 bp, Homo sapiens
actgggtgtttgtccccctactttgg

SEQ ID NO: 108566 - DNA, 26 bp, Homo sapiens
ctgggtgtttgtccccctactttggc

SEQ ID NO: 108567 - DNA, 26 bp, Homo sapiens
tgggtgtttgtccccctactttggcc

SEQ ID NO: 108568 - DNA, 26 bp, Homo sapiens
gggtgtttgtccccctactttggccc

SEQ ID NO: 108569 - DNA, 26 bp, Homo sapiens
ggtgtttgtccccctactttggcccc

SEQ ID NO: 108570 - DNA, 26 bp, Homo sapiens
gtgtttgtccccctactttggcccca

SEQ ID NO: 108571 - DNA, 26 bp, Homo sapiens
tgtttgtccccctactttggccccag

SEQ ID NO: 108572 - DNA, 26 bp, Homo sapiens
gtttgtccccctactttggccccagg

SEQ ID NO: 108573 - DNA, 26 bp, Homo sapiens
tttgtccccctactttggccccagga

SEQ ID NO: 108574 - DNA, 26 bp, Homo sapiens
ttgtccccctactttggccccaggag

SEQ ID NO: 108575 - DNA, 26 bp, Homo sapiens
tgtccccctactttggccccaggagt

SEQ ID NO: 108576 - DNA, 26 bp, Homo sapiens
gtccccctactttggccccaggagta

SEQ ID NO: 108577 - DNA, 26 bp, Homo sapiens
tccccctactttggccccaggagtaa

SEQ ID NO: 108578 - DNA, 26 bp, Homo sapiens
ccccctactttggccccaggagtaaa

SEQ ID NO: 108579 - DNA, 26 bp, Homo sapiens
cccctactttggccccaggagtaaaa

SEQ ID NO: 108580 - DNA, 26 bp, Homo sapiens
ccctactttggccccaggagtaaaaa

SEQ ID NO: 108581 - DNA, 26 bp, Homo sapiens
cctactttggccccaggagtaaaaaa

SEQ ID NO: 108582 - DNA, 26 bp, Homo sapiens
ctactttggccccaggagtaaaaaaa

SEQ ID NO: 108583 - DNA, 26 bp, Homo sapiens
tactttggccccaggagtaaaaaaac

SEQ ID NO: 108584 - DNA, 26 bp, Homo sapiens
actttggccccaggagtaaaaaaact

SEQ ID NO: 108585 - DNA, 26 bp, Homo sapiens
ctttggccccaggagtaaaaaaactt

SEQ ID NO: 108586 - DNA, 26 bp, Homo sapiens
tttggccccaggagtaaaaaaacttc

SEQ ID NO: 108587 - DNA, 26 bp, Homo sapiens
ttggccccaggagtaaaaaaacttct

SEQ ID NO: 108588 - DNA, 26 bp, Homo sapiens
tggccccaggagtaaaaaaacttctc

SEQ ID NO: 108589 - DNA, 26 bp, Homo sapiens
ggccccaggagtaaaaaaacttctcc

SEQ ID NO: 108590 - DNA, 26 bp, Homo sapiens
gccccaggagtaaaaaaacttctcct

SEQ ID NO: 108591 - DNA, 26 bp, Homo sapiens
ccccaggagtaaaaaaacttctcctt

SEQ ID NO: 108592 - DNA, 26 bp, Homo sapiens
cccaggagtaaaaaaacttctccttt

SEQ ID NO: 108593 - DNA, 26 bp, Homo sapiens
ccaggagtaaaaaaacttctcctttt

SEQ ID NO: 108594 - DNA, 26 bp, Homo sapiens
caggagtaaaaaaacttctccttttc

SEQ ID NO: 108595 - DNA, 26 bp, Homo sapiens
aggagtaaaaaaacttctccttttct

SEQ ID NO: 108596 - DNA, 26 bp, Homo sapiens
ggagtaaaaaaacttctccttttctc

SEQ ID NO: 108597 - DNA, 26 bp, Homo sapiens
gagtaaaaaaacttctccttttctca

SEQ ID NO: 108598 - DNA, 26 bp, Homo sapiens
agtaaaaaaacttctccttttctcac

SEQ ID NO: 108599 - DNA, 26 bp, Homo sapiens
gtaaaaaaacttctccttttctcact

SEQ ID NO: 108600 - DNA, 26 bp, Homo sapiens
taaaaaaacttctccttttctcactt

SEQ ID NO: 108601 - DNA, 26 bp, Homo sapiens
aaaaaaacttctccttttctcacttc

SEQ ID NO: 108602 - DNA, 26 bp, Homo sapiens
aaaaaacttctccttttctcacttcc

SEQ ID NO: 108603 - DNA, 26 bp, Homo sapiens
aaaaacttctccttttctcacttcct

SEQ ID NO: 108604 - DNA, 26 bp, Homo sapiens
aaaacttctccttttctcacttcctt

SEQ ID NO: 108605 - DNA, 26 bp, Homo sapiens
aaacttctccttttctcacttccttt

SEQ ID NO: 108606 - DNA, 26 bp, Homo sapiens
aacttctccttttctcacttcctttc

SEQ ID NO: 108607 - DNA, 26 bp, Homo sapiens
acttctccttttctcacttcctttcc

SEQ ID NO: 108608 - DNA, 26 bp, Homo sapiens
cttctccttttctcacttcctttcct

SEQ ID NO: 108609 - DNA, 26 bp, Homo sapiens
ttctccttttctcacttcctttcctg

SEQ ID NO: 108610 - DNA, 26 bp, Homo sapiens
tctccttttctcacttcctttcctgc

SEQ ID NO: 108611 - DNA, 26 bp, Homo sapiens
ctccttttctcacttcctttcctgcc

SEQ ID NO: 108612 - DNA, 26 bp, Homo sapiens
tccttttctcacttcctttcctgcct

SEQ ID NO: 108613 - DNA, 26 bp, Homo sapiens
ccttttctcacttcctttcctgcctc

SEQ ID NO: 108614 - DNA, 26 bp, Homo sapiens
cttttctcacttcctttcctgcctcg

SEQ ID NO: 108615 - DNA, 26 bp, Homo sapiens
ttttctcacttcctttcctgcctcgg

SEQ ID NO: 108616 - DNA, 26 bp, Homo sapiens
tttctcacttcctttcctgcctcggg

SEQ ID NO: 108617 - DNA, 26 bp, Homo sapiens
ttctcacttcctttcctgcctcggga

SEQ ID NO: 108618 - DNA, 26 bp, Homo sapiens
tctcacttcctttcctgcctcgggag

SEQ ID NO: 108619 - DNA, 26 bp, Homo sapiens
ctcacttcctttcctgcctcgggagg

SEQ ID NO: 108620 - DNA, 26 bp, Homo sapiens
tcacttcctttcctgcctcgggaggt

SEQ ID NO: 108621 - DNA, 26 bp, Homo sapiens
cacttcctttcctgcctcgggaggtg

SEQ ID NO: 108622 - DNA, 26 bp, Homo sapiens
acttcctttcctgcctcgggaggtgg

SEQ ID NO: 108623 - DNA, 26 bp, Homo sapiens
cttcctttcctgcctcgggaggtggc

SEQ ID NO: 108624 - DNA, 26 bp, Homo sapiens
ttcctttcctgcctcgggaggtggca

SEQ ID NO: 108625 - DNA, 26 bp, Homo sapiens
tcctttcctgcctcgggaggtggcag

SEQ ID NO: 108626 - DNA, 26 bp, Homo sapiens
cctttcctgcctcgggaggtggcagg

SEQ ID NO: 108627 - DNA, 26 bp, Homo sapiens
ctttcctgcctcgggaggtggcaggg

SEQ ID NO: 108628 - DNA, 26 bp, Homo sapiens
tttcctgcctcgggaggtggcagggc

SEQ ID NO: 108629 - DNA, 26 bp, Homo sapiens
ttcctgcctcgggaggtggcagggca

SEQ ID NO: 108630 - DNA, 26 bp, Homo sapiens
tcctgcctcgggaggtggcagggcag

SEQ ID NO: 108631 - DNA, 26 bp, Homo sapiens
cctgcctcgggaggtggcagggcagt

SEQ ID NO: 108632 - DNA, 26 bp, Homo sapiens
ctgcctcgggaggtggcagggcagtt

SEQ ID NO: 108633 - DNA, 26 bp, Homo sapiens
tgcctcgggaggtggcagggcagttc

SEQ ID NO: 108634 - DNA, 26 bp, Homo sapiens
gcctcgggaggtggcagggcagttcc

SEQ ID NO: 108635 - DNA, 26 bp, Homo sapiens
cctcgggaggtggcagggcagttccc

SEQ ID NO: 108636 - DNA, 26 bp, Homo sapiens
ctcgggaggtggcagggcagttccct

SEQ ID NO: 108637 - DNA, 26 bp, Homo sapiens
tcgggaggtggcagggcagttccctg

SEQ ID NO: 108638 - DNA, 26 bp, Homo sapiens
cgggaggtggcagggcagttccctgg

SEQ ID NO: 108639 - DNA, 26 bp, Homo sapiens
gggaggtggcagggcagttccctggc

SEQ ID NO: 108640 - DNA, 26 bp, Homo sapiens
ggaggtggcagggcagttccctggct

SEQ ID NO: 108641 - DNA, 26 bp, Homo sapiens
gaggtggcagggcagttccctggctg

SEQ ID NO: 108642 - DNA, 26 bp, Homo sapiens
aggtggcagggcagttccctggctga

SEQ ID NO: 108643 - DNA, 26 bp, Homo sapiens
ggtggcagggcagttccctggctgag

SEQ ID NO: 108644 - DNA, 26 bp, Homo sapiens
gtggcagggcagttccctggctgagg

SEQ ID NO: 108645 - DNA, 26 bp, Homo sapiens
tggcagggcagttccctggctgaggc

SEQ ID NO: 108646 - DNA, 26 bp, Homo sapiens
ggcagggcagttccctggctgaggcc

SEQ ID NO: 108647 - DNA, 26 bp, Homo sapiens
gcagggcagttccctggctgaggcct

SEQ ID NO: 108648 - DNA, 26 bp, Homo sapiens
cagggcagttccctggctgaggcctt

SEQ ID NO: 108649 - DNA, 26 bp, Homo sapiens
agggcagttccctggctgaggccttt

SEQ ID NO: 108650 - DNA, 26 bp, Homo sapiens
gggcagttccctggctgaggcctttt

SEQ ID NO: 108651 - DNA, 26 bp, Homo sapiens
ggcagttccctggctgaggccttttg

SEQ ID NO: 108652 - DNA, 26 bp, Homo sapiens
gcagttccctggctgaggccttttgc

SEQ ID NO: 108653 - DNA, 26 bp, Homo sapiens
cagttccctggctgaggccttttgcg

SEQ ID NO: 108654 - DNA, 26 bp, Homo sapiens
agttccctggctgaggccttttgcgc

SEQ ID NO: 108655 - DNA, 26 bp, Homo sapiens
gttccctggctgaggccttttgcgcc

SEQ ID NO: 108656 - DNA, 26 bp, Homo sapiens
ttccctggctgaggccttttgcgccc

SEQ ID NO: 108657 - DNA, 26 bp, Homo sapiens
tccctggctgaggccttttgcgcccc

SEQ ID NO: 108658 - DNA, 26 bp, Homo sapiens
ccctggctgaggccttttgcgcccca

SEQ ID NO: 108659 - DNA, 26 bp, Homo sapiens
cctggctgaggccttttgcgccccac

SEQ ID NO: 108660 - DNA, 26 bp, Homo sapiens
ctggctgaggccttttgcgccccacc

SEQ ID NO: 108661 - DNA, 26 bp, Homo sapiens
tggctgaggccttttgcgccccacct

SEQ ID NO: 108662 - DNA, 26 bp, Homo sapiens
ggctgaggccttttgcgccccacctc

SEQ ID NO: 108663 - DNA, 26 bp, Homo sapiens
gctgaggccttttgcgccccacctcc

SEQ ID NO: 108664 - DNA, 26 bp, Homo sapiens
ctgaggccttttgcgccccacctcca

SEQ ID NO: 108665 - DNA, 26 bp, Homo sapiens
tgaggccttttgcgccccacctccag

SEQ ID NO: 108666 - DNA, 26 bp, Homo sapiens
gaggccttttgcgccccacctccagg

SEQ ID NO: 108667 - DNA, 26 bp, Homo sapiens
aggccttttgcgccccacctccagga

SEQ ID NO: 108668 - DNA, 26 bp, Homo sapiens
ggccttttgcgccccacctccaggac

SEQ ID NO: 108669 - DNA, 26 bp, Homo sapiens
gccttttgcgccccacctccaggacc

SEQ ID NO: 108670 - DNA, 26 bp, Homo sapiens
ccttttgcgccccacctccaggacca

SEQ ID NO: 108671 - DNA, 26 bp, Homo sapiens
cttttgcgccccacctccaggaccaa

SEQ ID NO: 108672 - DNA, 26 bp, Homo sapiens
ttttgcgccccacctccaggaccaag

SEQ ID NO: 108673 - DNA, 26 bp, Homo sapiens
tttgcgccccacctccaggaccaagg

SEQ ID NO: 108674 - DNA, 26 bp, Homo sapiens
ttgcgccccacctccaggaccaaggg

SEQ ID NO: 108675 - DNA, 26 bp, Homo sapiens
tgcgccccacctccaggaccaagggc

SEQ ID NO: 108676 - DNA, 26 bp, Homo sapiens
gcgccccacctccaggaccaagggcc

SEQ ID NO: 108677 - DNA, 26 bp, Homo sapiens
cgccccacctccaggaccaagggcca

SEQ ID NO: 108678 - DNA, 26 bp, Homo sapiens
gccccacctccaggaccaagggccat

SEQ ID NO: 108679 - DNA, 26 bp, Homo sapiens
ccccacctccaggaccaagggccatt

SEQ ID NO: 108680 - DNA, 26 bp, Homo sapiens
cccacctccaggaccaagggccattc

SEQ ID NO: 108681 - DNA, 26 bp, Homo sapiens
ccacctccaggaccaagggccattct

SEQ ID NO: 108682 - DNA, 26 bp, Homo sapiens
cacctccaggaccaagggccattcta

SEQ ID NO: 108683 - DNA, 26 bp, Homo sapiens
acctccaggaccaagggccattctag

SEQ ID NO: 108684 - DNA, 26 bp, Homo sapiens
cctccaggaccaagggccattctaga

SEQ ID NO: 108685 - DNA, 26 bp, Homo sapiens
ctccaggaccaagggccattctagac

SEQ ID NO: 108686 - DNA, 26 bp, Homo sapiens
tccaggaccaagggccattctagaca

SEQ ID NO: 108687 - DNA, 26 bp, Homo sapiens
ccaggaccaagggccattctagacag

SEQ ID NO: 108688 - DNA, 26 bp, Homo sapiens
caggaccaagggccattctagacagg

SEQ ID NO: 108689 - DNA, 26 bp, Homo sapiens
aggaccaagggccattctagacaggg

SEQ ID NO: 108690 - DNA, 26 bp, Homo sapiens
ggaccaagggccattctagacagggt

SEQ ID NO: 108691 - DNA, 26 bp, Homo sapiens
gaccaagggccattctagacagggtg

SEQ ID NO: 108692 - DNA, 26 bp, Homo sapiens
accaagggccattctagacagggtgt

SEQ ID NO: 108693 - DNA, 26 bp, Homo sapiens
ccaagggccattctagacagggtgtc

SEQ ID NO: 108694 - DNA, 26 bp, Homo sapiens
caagggccattctagacagggtgtct

SEQ ID NO: 108695 - DNA, 26 bp, Homo sapiens
aagggccattctagacagggtgtctt

SEQ ID NO: 108696 - DNA, 26 bp, Homo sapiens
agggccattctagacagggtgtcttc

SEQ ID NO: 108697 - DNA, 26 bp, Homo sapiens
gggccattctagacagggtgtcttct

SEQ ID NO: 108698 - DNA, 26 bp, Homo sapiens
ggccattctagacagggtgtcttcta

SEQ ID NO: 108699 - DNA, 26 bp, Homo sapiens
gccattctagacagggtgtcttctac

SEQ ID NO: 108700 - DNA, 26 bp, Homo sapiens
ccattctagacagggtgtcttctacc

SEQ ID NO: 108701 - DNA, 26 bp, Homo sapiens
cattctagacagggtgtcttctacca

SEQ ID NO: 108702 - DNA, 26 bp, Homo sapiens
attctagacagggtgtcttctaccag

SEQ ID NO: 108703 - DNA, 26 bp, Homo sapiens
ttctagacagggtgtcttctaccagg

SEQ ID NO: 108704 - DNA, 26 bp, Homo sapiens
tctagacagggtgtcttctaccagga

SEQ ID NO: 108705 - DNA, 26 bp, Homo sapiens
ctagacagggtgtcttctaccaggac

SEQ ID NO: 108706 - DNA, 26 bp, Homo sapiens
tagacagggtgtcttctaccaggacc

SEQ ID NO: 108707 - DNA, 26 bp, Homo sapiens
agacagggtgtcttctaccaggaccc

SEQ ID NO: 108708 - DNA, 26 bp, Homo sapiens
gacagggtgtcttctaccaggacccg

SEQ ID NO: 108709 - DNA, 26 bp, Homo sapiens
acagggtgtcttctaccaggacccgt

SEQ ID NO: 108710 - DNA, 26 bp, Homo sapiens
cagggtgtcttctaccaggacccgtc

SEQ ID NO: 108711 - DNA, 26 bp, Homo sapiens
agggtgtcttctaccaggacccgtcc

SEQ ID NO: 108712 - DNA, 26 bp, Homo sapiens
gggtgtcttctaccaggacccgtccc

SEQ ID NO: 108713 - DNA, 26 bp, Homo sapiens
ggtgtcttctaccaggacccgtccct

SEQ ID NO: 108714 - DNA, 26 bp, Homo sapiens
gtgtcttctaccaggacccgtcccta

SEQ ID NO: 108715 - DNA, 26 bp, Homo sapiens
tgtcttctaccaggacccgtccctag

SEQ ID NO: 108716 - DNA, 26 bp, Homo sapiens
gtcttctaccaggacccgtccctagc

SEQ ID NO: 108717 - DNA, 26 bp, Homo sapiens
tcttctaccaggacccgtccctagcc

SEQ ID NO: 108718 - DNA, 26 bp, Homo sapiens
cttctaccaggacccgtccctagcct

SEQ ID NO: 108719 - DNA, 26 bp, Homo sapiens
ttctaccaggacccgtccctagcctt

SEQ ID NO: 108720 - DNA, 26 bp, Homo sapiens
tctaccaggacccgtccctagccttc

SEQ ID NO: 108721 - DNA, 26 bp, Homo sapiens
ctaccaggacccgtccctagccttcc

SEQ ID NO: 108722 - DNA, 26 bp, Homo sapiens
taccaggacccgtccctagccttcct

SEQ ID NO: 108723 - DNA, 26 bp, Homo sapiens
accaggacccgtccctagccttcctg

SEQ ID NO: 108724 - DNA, 26 bp, Homo sapiens
ccaggacccgtccctagccttcctgg

SEQ ID NO: 108725 - DNA, 26 bp, Homo sapiens
caggacccgtccctagccttcctggc

SEQ ID NO: 108726 - DNA, 26 bp, Homo sapiens
aggacccgtccctagccttcctggcc

SEQ ID NO: 108727 - DNA, 26 bp, Homo sapiens
ggacccgtccctagccttcctggcct

SEQ ID NO: 108728 - DNA, 26 bp, Homo sapiens
gacccgtccctagccttcctggcctg

SEQ ID NO: 108729 - DNA, 26 bp, Homo sapiens
acccgtccctagccttcctggcctgg

SEQ ID NO: 108730 - DNA, 26 bp, Homo sapiens
cccgtccctagccttcctggcctgga

SEQ ID NO: 108731 - DNA, 26 bp, Homo sapiens
ccgtccctagccttcctggcctggag

SEQ ID NO: 108732 - DNA, 26 bp, Homo sapiens
cgtccctagccttcctggcctggagg

SEQ ID NO: 108733 - DNA, 26 bp, Homo sapiens
gtccctagccttcctggcctggaggg

SEQ ID NO: 108734 - DNA, 26 bp, Homo sapiens
tccctagccttcctggcctggagggc

SEQ ID NO: 108735 - DNA, 26 bp, Homo sapiens
ccctagccttcctggcctggagggcc

SEQ ID NO: 108736 - DNA, 26 bp, Homo sapiens
cctagccttcctggcctggagggcct

SEQ ID NO: 108737 - DNA, 26 bp, Homo sapiens
ctagccttcctggcctggagggcctg

SEQ ID NO: 108738 - DNA, 26 bp, Homo sapiens
tagccttcctggcctggagggcctgg

SEQ ID NO: 108739 - DNA, 26 bp, Homo sapiens
agccttcctggcctggagggcctggt

SEQ ID NO: 108740 - DNA, 26 bp, Homo sapiens
gccttcctggcctggagggcctggtc

SEQ ID NO: 108741 - DNA, 26 bp, Homo sapiens
ccttcctggcctggagggcctggtct

SEQ ID NO: 108742 - DNA, 26 bp, Homo sapiens
cttcctggcctggagggcctggtctt

SEQ ID NO: 108743 - DNA, 26 bp, Homo sapiens
ttcctggcctggagggcctggtcttg

SEQ ID NO: 108744 - DNA, 26 bp, Homo sapiens
tcctggcctggagggcctggtcttgc

SEQ ID NO: 108745 - DNA, 26 bp, Homo sapiens
cctggcctggagggcctggtcttgca

SEQ ID NO: 108746 - DNA, 26 bp, Homo sapiens
ctggcctggagggcctggtcttgcac

SEQ ID NO: 108747 - DNA, 26 bp, Homo sapiens
tggcctggagggcctggtcttgcact

SEQ ID NO: 108748 - DNA, 26 bp, Homo sapiens
ggcctggagggcctggtcttgcactg

SEQ ID NO: 108749 - DNA, 26 bp, Homo sapiens
gcctggagggcctggtcttgcactgg

SEQ ID NO: 108750 - DNA, 26 bp, Homo sapiens
cctggagggcctggtcttgcactggc

SEQ ID NO: 108751 - DNA, 26 bp, Homo sapiens
ctggagggcctggtcttgcactggca

SEQ ID NO: 108752 - DNA, 26 bp, Homo sapiens
tggagggcctggtcttgcactggcag

SEQ ID NO: 108753 - DNA, 26 bp, Homo sapiens
ggagggcctggtcttgcactggcagc

SEQ ID NO: 108754 - DNA, 26 bp, Homo sapiens
gagggcctggtcttgcactggcagct

SEQ ID NO: 108755 - DNA, 26 bp, Homo sapiens
agggcctggtcttgcactggcagctg

SEQ ID NO: 108756 - DNA, 26 bp, Homo sapiens
gggcctggtcttgcactggcagctgt

SEQ ID NO: 108757 - DNA, 26 bp, Homo sapiens
ggcctggtcttgcactggcagctgta

SEQ ID NO: 108758 - DNA, 26 bp, Homo sapiens
gcctggtcttgcactggcagctgtaa

SEQ ID NO: 108759 - DNA, 26 bp, Homo sapiens
cctggtcttgcactggcagctgtaat

SEQ ID NO: 108760 - DNA, 26 bp, Homo sapiens
ctggtcttgcactggcagctgtaata

SEQ ID NO: 108761 - DNA, 26 bp, Homo sapiens
tggtcttgcactggcagctgtaatac

SEQ ID NO: 108762 - DNA, 26 bp, Homo sapiens
ggtcttgcactggcagctgtaataca

SEQ ID NO: 108763 - DNA, 26 bp, Homo sapiens
gtcttgcactggcagctgtaatacaa

SEQ ID NO: 108764 - DNA, 26 bp, Homo sapiens
tcttgcactggcagctgtaatacaaa

SEQ ID NO: 108765 - DNA, 26 bp, Homo sapiens
cttgcactggcagctgtaatacaaag

SEQ ID NO: 108766 - DNA, 26 bp, Homo sapiens
ttgcactggcagctgtaatacaaagg

SEQ ID NO: 108767 - DNA, 26 bp, Homo sapiens
tgcactggcagctgtaatacaaaggg

SEQ ID NO: 108768 - DNA, 26 bp, Homo sapiens
gcactggcagctgtaatacaaaggga

SEQ ID NO: 108769 - DNA, 26 bp, Homo sapiens
cactggcagctgtaatacaaagggaa

SEQ ID NO: 108770 - DNA, 26 bp, Homo sapiens
actggcagctgtaatacaaagggaac

SEQ ID NO: 108771 - DNA, 26 bp, Homo sapiens
ctggcagctgtaatacaaagggaact

SEQ ID NO: 108772 - DNA, 26 bp, Homo sapiens
tggcagctgtaatacaaagggaactc

SEQ ID NO: 108773 - DNA, 26 bp, Homo sapiens
ggcagctgtaatacaaagggaactcg

SEQ ID NO: 108774 - DNA, 26 bp, Homo sapiens
gcagctgtaatacaaagggaactcgc

SEQ ID NO: 108775 - DNA, 26 bp, Homo sapiens
cagctgtaatacaaagggaactcgcc

SEQ ID NO: 108776 - DNA, 26 bp, Homo sapiens
agctgtaatacaaagggaactcgccc

SEQ ID NO: 108777 - DNA, 26 bp, Homo sapiens
gctgtaatacaaagggaactcgcccc

SEQ ID NO: 108778 - DNA, 26 bp, Homo sapiens
ctgtaatacaaagggaactcgcccca

SEQ ID NO: 108779 - DNA, 26 bp, Homo sapiens
tgtaatacaaagggaactcgccccac

SEQ ID NO: 108780 - DNA, 26 bp, Homo sapiens
gtaatacaaagggaactcgccccact

SEQ ID NO: 108781 - DNA, 26 bp, Homo sapiens
taatacaaagggaactcgccccactt

SEQ ID NO: 108782 - DNA, 26 bp, Homo sapiens
aatacaaagggaactcgccccacttc

SEQ ID NO: 108783 - DNA, 26 bp, Homo sapiens
atacaaagggaactcgccccacttct

SEQ ID NO: 108784 - DNA, 26 bp, Homo sapiens
tacaaagggaactcgccccacttctc

SEQ ID NO: 108785 - DNA, 26 bp, Homo sapiens
acaaagggaactcgccccacttctcc

SEQ ID NO: 108786 - DNA, 26 bp, Homo sapiens
caaagggaactcgccccacttctccc

SEQ ID NO: 108787 - DNA, 26 bp, Homo sapiens
aaagggaactcgccccacttctccca

SEQ ID NO: 108788 - DNA, 26 bp, Homo sapiens
aagggaactcgccccacttctcccag

SEQ ID NO: 108789 - DNA, 26 bp, Homo sapiens
agggaactcgccccacttctcccagc

SEQ ID NO: 108790 - DNA, 26 bp, Homo sapiens
gggaactcgccccacttctcccagcc

SEQ ID NO: 108791 - DNA, 26 bp, Homo sapiens
ggaactcgccccacttctcccagcct

SEQ ID NO: 108792 - DNA, 26 bp, Homo sapiens
gaactcgccccacttctcccagcctg

SEQ ID NO: 108793 - DNA, 26 bp, Homo sapiens
aactcgccccacttctcccagcctgg

SEQ ID NO: 108794 - DNA, 26 bp, Homo sapiens
actcgccccacttctcccagcctggt

SEQ ID NO: 108795 - DNA, 26 bp, Homo sapiens
ctcgccccacttctcccagcctggtg

SEQ ID NO: 108796 - DNA, 26 bp, Homo sapiens
tcgccccacttctcccagcctggtgc

SEQ ID NO: 108797 - DNA, 26 bp, Homo sapiens
cgccccacttctcccagcctggtgct

SEQ ID NO: 108798 - DNA, 26 bp, Homo sapiens
gccccacttctcccagcctggtgctg

SEQ ID NO: 108799 - DNA, 26 bp, Homo sapiens
ccccacttctcccagcctggtgctgt

SEQ ID NO: 108800 - DNA, 26 bp, Homo sapiens
cccacttctcccagcctggtgctgtc

SEQ ID NO: 108801 - DNA, 26 bp, Homo sapiens
ccacttctcccagcctggtgctgtcc

SEQ ID NO: 108802 - DNA, 26 bp, Homo sapiens
cacttctcccagcctggtgctgtcct

SEQ ID NO: 108803 - DNA, 26 bp, Homo sapiens
acttctcccagcctggtgctgtcctc

SEQ ID NO: 108804 - DNA, 26 bp, Homo sapiens
cttctcccagcctggtgctgtcctct

SEQ ID NO: 108805 - DNA, 26 bp, Homo sapiens
ttctcccagcctggtgctgtcctctc

SEQ ID NO: 108806 - DNA, 26 bp, Homo sapiens
tctcccagcctggtgctgtcctctcg

SEQ ID NO: 108807 - DNA, 26 bp, Homo sapiens
ctcccagcctggtgctgtcctctcgg

SEQ ID NO: 108808 - DNA, 26 bp, Homo sapiens
tcccagcctggtgctgtcctctcggc

SEQ ID NO: 108809 - DNA, 26 bp, Homo sapiens
cccagcctggtgctgtcctctcggcc

SEQ ID NO: 108810 - DNA, 26 bp, Homo sapiens
ccagcctggtgctgtcctctcggccc

SEQ ID NO: 108811 - DNA, 26 bp, Homo sapiens
cagcctggtgctgtcctctcggccca

SEQ ID NO: 108812 - DNA, 26 bp, Homo sapiens
agcctggtgctgtcctctcggcccac

SEQ ID NO: 108813 - DNA, 26 bp, Homo sapiens
gcctggtgctgtcctctcggcccacc

SEQ ID NO: 108814 - DNA, 26 bp, Homo sapiens
cctggtgctgtcctctcggcccacca

SEQ ID NO: 108815 - DNA, 26 bp, Homo sapiens
ctggtgctgtcctctcggcccaccat

SEQ ID NO: 108816 - DNA, 26 bp, Homo sapiens
tggtgctgtcctctcggcccaccatc

SEQ ID NO: 108817 - DNA, 26 bp, Homo sapiens
ggtgctgtcctctcggcccaccatcg

SEQ ID NO: 108818 - DNA, 26 bp, Homo sapiens
gtgctgtcctctcggcccaccatcgg

SEQ ID NO: 108819 - DNA, 26 bp, Homo sapiens
tgctgtcctctcggcccaccatcggc

SEQ ID NO: 108820 - DNA, 26 bp, Homo sapiens
gctgtcctctcggcccaccatcggcc

SEQ ID NO: 108821 - DNA, 26 bp, Homo sapiens
ctgtcctctcggcccaccatcggcca

SEQ ID NO: 108822 - DNA, 26 bp, Homo sapiens
tgtcctctcggcccaccatcggccag

SEQ ID NO: 108823 - DNA, 26 bp, Homo sapiens
gtcctctcggcccaccatcggccagg

SEQ ID NO: 108824 - DNA, 26 bp, Homo sapiens
tcctctcggcccaccatcggccaggt

SEQ ID NO: 108825 - DNA, 26 bp, Homo sapiens
cctctcggcccaccatcggccaggtc

SEQ ID NO: 108826 - DNA, 26 bp, Homo sapiens
ctctcggcccaccatcggccaggtcc

SEQ ID NO: 108827 - DNA, 26 bp, Homo sapiens
tctcggcccaccatcggccaggtcca

SEQ ID NO: 108828 - DNA, 26 bp, Homo sapiens
ctcggcccaccatcggccaggtccag

SEQ ID NO: 108829 - DNA, 26 bp, Homo sapiens
tcggcccaccatcggccaggtccagc

SEQ ID NO: 108830 - DNA, 26 bp, Homo sapiens
cggcccaccatcggccaggtccagcg

SEQ ID NO: 108831 - DNA, 26 bp, Homo sapiens
ggcccaccatcggccaggtccagcgc

SEQ ID NO: 108832 - DNA, 26 bp, Homo sapiens
gcccaccatcggccaggtccagcgct

SEQ ID NO: 108833 - DNA, 26 bp, Homo sapiens
cccaccatcggccaggtccagcgctt

SEQ ID NO: 108834 - DNA, 26 bp, Homo sapiens
ccaccatcggccaggtccagcgcttc

SEQ ID NO: 108835 - DNA, 26 bp, Homo sapiens
caccatcggccaggtccagcgcttcc

SEQ ID NO: 108836 - DNA, 26 bp, Homo sapiens
accatcggccaggtccagcgcttcct

SEQ ID NO: 108837 - DNA, 26 bp, Homo sapiens
ccatcggccaggtccagcgcttcctc

SEQ ID NO: 108838 - DNA, 26 bp, Homo sapiens
catcggccaggtccagcgcttcctct

SEQ ID NO: 108839 - DNA, 26 bp, Homo sapiens
atcggccaggtccagcgcttcctctg

SEQ ID NO: 108840 - DNA, 26 bp, Homo sapiens
tcggccaggtccagcgcttcctctgg

SEQ ID NO: 108841 - DNA, 26 bp, Homo sapiens
cggccaggtccagcgcttcctctggg

SEQ ID NO: 108842 - DNA, 26 bp, Homo sapiens
ggccaggtccagcgcttcctctgggg

SEQ ID NO: 108843 - DNA, 26 bp, Homo sapiens
gccaggtccagcgcttcctctggggc

SEQ ID NO: 108844 - DNA, 26 bp, Homo sapiens
ccaggtccagcgcttcctctggggct

SEQ ID NO: 108845 - DNA, 26 bp, Homo sapiens
caggtccagcgcttcctctggggctg

SEQ ID NO: 108846 - DNA, 26 bp, Homo sapiens
aggtccagcgcttcctctggggctga

SEQ ID NO: 108847 - DNA, 26 bp, Homo sapiens
ggtccagcgcttcctctggggctgac

SEQ ID NO: 108848 - DNA, 26 bp, Homo sapiens
gtccagcgcttcctctggggctgaca

SEQ ID NO: 108849 - DNA, 26 bp, Homo sapiens
tccagcgcttcctctggggctgacaa

SEQ ID NO: 108850 - DNA, 26 bp, Homo sapiens
ccagcgcttcctctggggctgacaac

SEQ ID NO: 108851 - DNA, 26 bp, Homo sapiens
cagcgcttcctctggggctgacaaca

SEQ ID NO: 108852 - DNA, 26 bp, Homo sapiens
agcgcttcctctggggctgacaacag

SEQ ID NO: 108853 - DNA, 26 bp, Homo sapiens
gcgcttcctctggggctgacaacagg

SEQ ID NO: 108854 - DNA, 26 bp, Homo sapiens
cgcttcctctggggctgacaacaggc

SEQ ID NO: 108855 - DNA, 26 bp, Homo sapiens
gcttcctctggggctgacaacaggcc

SEQ ID NO: 108856 - DNA, 26 bp, Homo sapiens
cttcctctggggctgacaacaggccc

SEQ ID NO: 108857 - DNA, 26 bp, Homo sapiens
ttcctctggggctgacaacaggcccc

SEQ ID NO: 108858 - DNA, 26 bp, Homo sapiens
tcctctggggctgacaacaggcccct

SEQ ID NO: 108859 - DNA, 26 bp, Homo sapiens
cctctggggctgacaacaggcccctg

SEQ ID NO: 108860 - DNA, 26 bp, Homo sapiens
ctctggggctgacaacaggcccctga

SEQ ID NO: 108861 - DNA, 26 bp, Homo sapiens
tctggggctgacaacaggcccctgac

SEQ ID NO: 108862 - DNA, 26 bp, Homo sapiens
ctggggctgacaacaggcccctgact

SEQ ID NO: 108863 - DNA, 26 bp, Homo sapiens
tggggctgacaacaggcccctgactc

SEQ ID NO: 108864 - DNA, 26 bp, Homo sapiens
ggggctgacaacaggcccctgactca

SEQ ID NO: 108865 - DNA, 26 bp, Homo sapiens
gggctgacaacaggcccctgactcac

SEQ ID NO: 108866 - DNA, 26 bp, Homo sapiens
ggctgacaacaggcccctgactcacc

SEQ ID NO: 108867 - DNA, 26 bp, Homo sapiens
gctgacaacaggcccctgactcaccc

SEQ ID NO: 108868 - DNA, 26 bp, Homo sapiens
ctgacaacaggcccctgactcacccc

SEQ ID NO: 108869 - DNA, 26 bp, Homo sapiens
tgacaacaggcccctgactcaccccg

SEQ ID NO: 108870 - DNA, 26 bp, Homo sapiens
gacaacaggcccctgactcaccccgg

SEQ ID NO: 108871 - DNA, 26 bp, Homo sapiens
acaacaggcccctgactcaccccggt

SEQ ID NO: 108872 - DNA, 26 bp, Homo sapiens
caacaggcccctgactcaccccggtc

SEQ ID NO: 108873 - DNA, 26 bp, Homo sapiens
aacaggcccctgactcaccccggtca

SEQ ID NO: 108874 - DNA, 26 bp, Homo sapiens
acaggcccctgactcaccccggtcac

SEQ ID NO: 108875 - DNA, 26 bp, Homo sapiens
caggcccctgactcaccccggtcacc

SEQ ID NO: 108876 - DNA, 26 bp, Homo sapiens
aggcccctgactcaccccggtcacct

SEQ ID NO: 108877 - DNA, 26 bp, Homo sapiens
ggcccctgactcaccccggtcacctc

SEQ ID NO: 108878 - DNA, 26 bp, Homo sapiens
gcccctgactcaccccggtcacctcc

SEQ ID NO: 108879 - DNA, 26 bp, Homo sapiens
cccctgactcaccccggtcacctccc

SEQ ID NO: 108880 - DNA, 26 bp, Homo sapiens
ccctgactcaccccggtcacctccca

SEQ ID NO: 108881 - DNA, 26 bp, Homo sapiens
cctgactcaccccggtcacctcccag

SEQ ID NO: 108882 - DNA, 26 bp, Homo sapiens
ctgactcaccccggtcacctcccagg

SEQ ID NO: 108883 - DNA, 26 bp, Homo sapiens
tgactcaccccggtcacctcccaggg

SEQ ID NO: 108884 - DNA, 26 bp, Homo sapiens
gactcaccccggtcacctcccagggt

SEQ ID NO: 108885 - DNA, 26 bp, Homo sapiens
actcaccccggtcacctcccagggtc

SEQ ID NO: 108886 - DNA, 26 bp, Homo sapiens
ctcaccccggtcacctcccagggtcc

SEQ ID NO: 108887 - DNA, 26 bp, Homo sapiens
tcaccccggtcacctcccagggtcca

SEQ ID NO: 108888 - DNA, 26 bp, Homo sapiens
caccccggtcacctcccagggtccat

SEQ ID NO: 108889 - DNA, 26 bp, Homo sapiens
accccggtcacctcccagggtccatg

SEQ ID NO: 108890 - DNA, 26 bp, Homo sapiens
ccccggtcacctcccagggtccatgg

SEQ ID NO: 108891 - DNA, 26 bp, Homo sapiens
cccggtcacctcccagggtccatggc

SEQ ID NO: 108892 - DNA, 26 bp, Homo sapiens
ccggtcacctcccagggtccatggcc

SEQ ID NO: 108893 - DNA, 26 bp, Homo sapiens
cggtcacctcccagggtccatggcca

SEQ ID NO: 108894 - DNA, 26 bp, Homo sapiens
ggtcacctcccagggtccatggccag

SEQ ID NO: 108895 - DNA, 26 bp, Homo sapiens
gtcacctcccagggtccatggccagg

SEQ ID NO: 108896 - DNA, 26 bp, Homo sapiens
tcacctcccagggtccatggccaggg

SEQ ID NO: 108897 - DNA, 26 bp, Homo sapiens
cacctcccagggtccatggccagggc

SEQ ID NO: 108898 - DNA, 26 bp, Homo sapiens
acctcccagggtccatggccagggcc

SEQ ID NO: 108899 - DNA, 26 bp, Homo sapiens
cctcccagggtccatggccagggcct

SEQ ID NO: 108900 - DNA, 26 bp, Homo sapiens
ctcccagggtccatggccagggcctc

SEQ ID NO: 108901 - DNA, 26 bp, Homo sapiens
tcccagggtccatggccagggcctct

SEQ ID NO: 108902 - DNA, 26 bp, Homo sapiens
cccagggtccatggccagggcctctg

SEQ ID NO: 108903 - DNA, 26 bp, Homo sapiens
ccagggtccatggccagggcctctgt

SEQ ID NO: 108904 - DNA, 26 bp, Homo sapiens
cagggtccatggccagggcctctgtg

SEQ ID NO: 108905 - DNA, 26 bp, Homo sapiens
agggtccatggccagggcctctgtgt

SEQ ID NO: 108906 - DNA, 26 bp, Homo sapiens
gggtccatggccagggcctctgtgtt

SEQ ID NO: 108907 - DNA, 26 bp, Homo sapiens
ggtccatggccagggcctctgtgttt

SEQ ID NO: 108908 - DNA, 26 bp, Homo sapiens
gtccatggccagggcctctgtgtttg

SEQ ID NO: 108909 - DNA, 26 bp, Homo sapiens
tccatggccagggcctctgtgtttgg

SEQ ID NO: 108910 - DNA, 26 bp, Homo sapiens
ccatggccagggcctctgtgtttggg

SEQ ID NO: 108911 - DNA, 26 bp, Homo sapiens
catggccagggcctctgtgtttgggg

SEQ ID NO: 108912 - DNA, 26 bp, Homo sapiens
atggccagggcctctgtgtttggggg

SEQ ID NO: 108913 - DNA, 26 bp, Homo sapiens
tggccagggcctctgtgtttgggggg

SEQ ID NO: 108914 - DNA, 26 bp, Homo sapiens
ggccagggcctctgtgtttggggggc

SEQ ID NO: 108915 - DNA, 26 bp, Homo sapiens
gccagggcctctgtgtttggggggcc

SEQ ID NO: 108916 - DNA, 26 bp, Homo sapiens
ccagggcctctgtgtttggggggcca

SEQ ID NO: 108917 - DNA, 26 bp, Homo sapiens
cagggcctctgtgtttggggggccac

SEQ ID NO: 108918 - DNA, 26 bp, Homo sapiens
agggcctctgtgtttggggggccact

SEQ ID NO: 108919 - DNA, 26 bp, Homo sapiens
gggcctctgtgtttggggggccactt

SEQ ID NO: 108920 - DNA, 26 bp, Homo sapiens
ggcctctgtgtttggggggccacttg

SEQ ID NO: 108921 - DNA, 26 bp, Homo sapiens
gcctctgtgtttggggggccacttgc

SEQ ID NO: 108922 - DNA, 26 bp, Homo sapiens
cctctgtgtttggggggccacttgcc

SEQ ID NO: 108923 - DNA, 26 bp, Homo sapiens
ctctgtgtttggggggccacttgccc

SEQ ID NO: 108924 - DNA, 26 bp, Homo sapiens
tctgtgtttggggggccacttgccct

SEQ ID NO: 108925 - DNA, 26 bp, Homo sapiens
ctgtgtttggggggccacttgccctt

SEQ ID NO: 108926 - DNA, 26 bp, Homo sapiens
tgtgtttggggggccacttgcccttc

SEQ ID NO: 108927 - DNA, 26 bp, Homo sapiens
gtgtttggggggccacttgcccttca

SEQ ID NO: 108928 - DNA, 26 bp, Homo sapiens
tgtttggggggccacttgcccttcat

SEQ ID NO: 108929 - DNA, 26 bp, Homo sapiens
gtttggggggccacttgcccttcatc

SEQ ID NO: 108930 - DNA, 26 bp, Homo sapiens
tttggggggccacttgcccttcatcc

SEQ ID NO: 108931 - DNA, 26 bp, Homo sapiens
ttggggggccacttgcccttcatcct

SEQ ID NO: 108932 - DNA, 26 bp, Homo sapiens
tggggggccacttgcccttcatcctg

SEQ ID NO: 108933 - DNA, 26 bp, Homo sapiens
ggggggccacttgcccttcatcctgc

SEQ ID NO: 108934 - DNA, 26 bp, Homo sapiens
gggggccacttgcccttcatcctgcc

SEQ ID NO: 108935 - DNA, 26 bp, Homo sapiens
ggggccacttgcccttcatcctgcca

SEQ ID NO: 108936 - DNA, 26 bp, Homo sapiens
gggccacttgcccttcatcctgccag

SEQ ID NO: 108937 - DNA, 26 bp, Homo sapiens
ggccacttgcccttcatcctgccagg

SEQ ID NO: 108938 - DNA, 26 bp, Homo sapiens
gccacttgcccttcatcctgccaggc

SEQ ID NO: 108939 - DNA, 26 bp, Homo sapiens
ccacttgcccttcatcctgccaggcg

SEQ ID NO: 108940 - DNA, 26 bp, Homo sapiens
cacttgcccttcatcctgccaggcgc

SEQ ID NO: 108941 - DNA, 26 bp, Homo sapiens
acttgcccttcatcctgccaggcgct

SEQ ID NO: 108942 - DNA, 26 bp, Homo sapiens
cttgcccttcatcctgccaggcgctt

SEQ ID NO: 108943 - DNA, 26 bp, Homo sapiens
ttgcccttcatcctgccaggcgcttt

SEQ ID NO: 108944 - DNA, 26 bp, Homo sapiens
tgcccttcatcctgccaggcgctttg

SEQ ID NO: 108945 - DNA, 26 bp, Homo sapiens
gcccttcatcctgccaggcgctttgc

SEQ ID NO: 108946 - DNA, 26 bp, Homo sapiens
cccttcatcctgccaggcgctttgcc

SEQ ID NO: 108947 - DNA, 26 bp, Homo sapiens
ccttcatcctgccaggcgctttgccc

SEQ ID NO: 108948 - DNA, 26 bp, Homo sapiens
cttcatcctgccaggcgctttgcccg

SEQ ID NO: 108949 - DNA, 26 bp, Homo sapiens
ttcatcctgccaggcgctttgcccgc

SEQ ID NO: 108950 - DNA, 26 bp, Homo sapiens
tcatcctgccaggcgctttgcccgcc

SEQ ID NO: 108951 - DNA, 26 bp, Homo sapiens
catcctgccaggcgctttgcccgccc

SEQ ID NO: 108952 - DNA, 26 bp, Homo sapiens
atcctgccaggcgctttgcccgccct

SEQ ID NO: 108953 - DNA, 26 bp, Homo sapiens
tcctgccaggcgctttgcccgccctg

SEQ ID NO: 108954 - DNA, 26 bp, Homo sapiens
cctgccaggcgctttgcccgccctgc

SEQ ID NO: 108955 - DNA, 26 bp, Homo sapiens
ctgccaggcgctttgcccgccctgcc

SEQ ID NO: 108956 - DNA, 26 bp, Homo sapiens
tgccaggcgctttgcccgccctgcct

SEQ ID NO: 108957 - DNA, 26 bp, Homo sapiens
gccaggcgctttgcccgccctgcctc

SEQ ID NO: 108958 - DNA, 26 bp, Homo sapiens
ccaggcgctttgcccgccctgcctca

SEQ ID NO: 108959 - DNA, 26 bp, Homo sapiens
caggcgctttgcccgccctgcctcag

SEQ ID NO: 108960 - DNA, 26 bp, Homo sapiens
aggcgctttgcccgccctgcctcagc

SEQ ID NO: 108961 - DNA, 26 bp, Homo sapiens
ggcgctttgcccgccctgcctcagcc

SEQ ID NO: 108962 - DNA, 26 bp, Homo sapiens
gcgctttgcccgccctgcctcagcct

SEQ ID NO: 108963 - DNA, 26 bp, Homo sapiens
cgctttgcccgccctgcctcagcctg

SEQ ID NO: 108964 - DNA, 26 bp, Homo sapiens
gctttgcccgccctgcctcagcctgg

SEQ ID NO: 108965 - DNA, 26 bp, Homo sapiens
ctttgcccgccctgcctcagcctggg

SEQ ID NO: 108966 - DNA, 26 bp, Homo sapiens
tttgcccgccctgcctcagcctgggc

SEQ ID NO: 108967 - DNA, 26 bp, Homo sapiens
ttgcccgccctgcctcagcctgggcc

SEQ ID NO: 108968 - DNA, 26 bp, Homo sapiens
tgcccgccctgcctcagcctgggccc

SEQ ID NO: 108969 - DNA, 26 bp, Homo sapiens
gcccgccctgcctcagcctgggccct

SEQ ID NO: 108970 - DNA, 26 bp, Homo sapiens
cccgccctgcctcagcctgggccctg

SEQ ID NO: 108971 - DNA, 26 bp, Homo sapiens
ccgccctgcctcagcctgggccctgt

SEQ ID NO: 108972 - DNA, 26 bp, Homo sapiens
cgccctgcctcagcctgggccctgtg

SEQ ID NO: 108973 - DNA, 26 bp, Homo sapiens
gccctgcctcagcctgggccctgtgc

SEQ ID NO: 108974 - DNA, 26 bp, Homo sapiens
ccctgcctcagcctgggccctgtgcc

SEQ ID NO: 108975 - DNA, 26 bp, Homo sapiens
cctgcctcagcctgggccctgtgccc

SEQ ID NO: 108976 - DNA, 26 bp, Homo sapiens
ctgcctcagcctgggccctgtgccct

SEQ ID NO: 108977 - DNA, 26 bp, Homo sapiens
tgcctcagcctgggccctgtgccctt

SEQ ID NO: 108978 - DNA, 26 bp, Homo sapiens
gcctcagcctgggccctgtgcccttg

SEQ ID NO: 108979 - DNA, 26 bp, Homo sapiens
cctcagcctgggccctgtgcccttga

SEQ ID NO: 108980 - DNA, 26 bp, Homo sapiens
ctcagcctgggccctgtgcccttgag

SEQ ID NO: 108981 - DNA, 26 bp, Homo sapiens
tcagcctgggccctgtgcccttgagc

SEQ ID NO: 108982 - DNA, 26 bp, Homo sapiens
cagcctgggccctgtgcccttgagcc

SEQ ID NO: 108983 - DNA, 26 bp, Homo sapiens
agcctgggccctgtgcccttgagccc

SEQ ID NO: 108984 - DNA, 26 bp, Homo sapiens
gcctgggccctgtgcccttgagccct

SEQ ID NO: 108985 - DNA, 26 bp, Homo sapiens
cctgggccctgtgcccttgagccctc

SEQ ID NO: 108986 - DNA, 26 bp, Homo sapiens
ctgggccctgtgcccttgagccctcc

SEQ ID NO: 108987 - DNA, 26 bp, Homo sapiens
tgggccctgtgcccttgagccctcca

SEQ ID NO: 108988 - DNA, 26 bp, Homo sapiens
gggccctgtgcccttgagccctccac

SEQ ID NO: 108989 - DNA, 26 bp, Homo sapiens
ggccctgtgcccttgagccctccacc

SEQ ID NO: 108990 - DNA, 26 bp, Homo sapiens
gccctgtgcccttgagccctccaccc

SEQ ID NO: 108991 - DNA, 26 bp, Homo sapiens
ccctgtgcccttgagccctccacccc

SEQ ID NO: 108992 - DNA, 26 bp, Homo sapiens
cctgtgcccttgagccctccacccct

SEQ ID NO: 108993 - DNA, 26 bp, Homo sapiens
ctgtgcccttgagccctccacccctg

SEQ ID NO: 108994 - DNA, 26 bp, Homo sapiens
tgtgcccttgagccctccacccctgg

SEQ ID NO: 108995 - DNA, 26 bp, Homo sapiens
gtgcccttgagccctccacccctggc

SEQ ID NO: 108996 - DNA, 26 bp, Homo sapiens
tgcccttgagccctccacccctggcc

SEQ ID NO: 108997 - DNA, 26 bp, Homo sapiens
gcccttgagccctccacccctggccc

SEQ ID NO: 108998 - DNA, 26 bp, Homo sapiens
cccttgagccctccacccctggccca

SEQ ID NO: 108999 - DNA, 26 bp, Homo sapiens
ccttgagccctccacccctggcccaa

SEQ ID NO: 109000 - DNA, 26 bp, Homo sapiens
cttgagccctccacccctggcccaag

SEQ ID NO: 109001 - DNA, 26 bp, Homo sapiens
ttgagccctccacccctggcccaaga

SEQ ID NO: 109002 - DNA, 26 bp, Homo sapiens
tgagccctccacccctggcccaagac

SEQ ID NO: 109003 - DNA, 26 bp, Homo sapiens
gagccctccacccctggcccaagacc

SEQ ID NO: 109004 - DNA, 26 bp, Homo sapiens
agccctccacccctggcccaagaccc

SEQ ID NO: 109005 - DNA, 26 bp, Homo sapiens
gccctccacccctggcccaagacccc

SEQ ID NO: 109006 - DNA, 26 bp, Homo sapiens
ccctccacccctggcccaagaccccc

SEQ ID NO: 109007 - DNA, 26 bp, Homo sapiens
cctccacccctggcccaagacccccc

SEQ ID NO: 109008 - DNA, 26 bp, Homo sapiens
ctccacccctggcccaagaccccccc

SEQ ID NO: 109009 - DNA, 26 bp, Homo sapiens
tccacccctggcccaagaccccccca

SEQ ID NO: 109010 - DNA, 26 bp, Homo sapiens
ccacccctggcccaagacccccccaa

SEQ ID NO: 109011 - DNA, 26 bp, Homo sapiens
cacccctggcccaagacccccccaaa

SEQ ID NO: 109012 - DNA, 26 bp, Homo sapiens
acccctggcccaagacccccccaaac

SEQ ID NO: 109013 - DNA, 26 bp, Homo sapiens
cccctggcccaagacccccccaaact

SEQ ID NO: 109014 - DNA, 26 bp, Homo sapiens
ccctggcccaagacccccccaaactg

SEQ ID NO: 109015 - DNA, 26 bp, Homo sapiens
cctggcccaagacccccccaaactgt

SEQ ID NO: 109016 - DNA, 26 bp, Homo sapiens
ctggcccaagacccccccaaactgtc

SEQ ID NO: 109017 - DNA, 26 bp, Homo sapiens
tggcccaagacccccccaaactgtct

SEQ ID NO: 109018 - DNA, 26 bp, Homo sapiens
ggcccaagacccccccaaactgtctg

SEQ ID NO: 109019 - DNA, 26 bp, Homo sapiens
gcccaagacccccccaaactgtctga

SEQ ID NO: 109020 - DNA, 26 bp, Homo sapiens
cccaagacccccccaaactgtctgac

SEQ ID NO: 109021 - DNA, 26 bp, Homo sapiens
ccaagacccccccaaactgtctgact

SEQ ID NO: 109022 - DNA, 26 bp, Homo sapiens
caagacccccccaaactgtctgactc

SEQ ID NO: 109023 - DNA, 26 bp, Homo sapiens
aagacccccccaaactgtctgactct

SEQ ID NO: 109024 - DNA, 26 bp, Homo sapiens
agacccccccaaactgtctgactctg

SEQ ID NO: 109025 - DNA, 26 bp, Homo sapiens
gacccccccaaactgtctgactctgt

SEQ ID NO: 109026 - DNA, 26 bp, Homo sapiens
acccccccaaactgtctgactctgtg

SEQ ID NO: 109027 - DNA, 26 bp, Homo sapiens
cccccccaaactgtctgactctgtgt

SEQ ID NO: 109028 - DNA, 26 bp, Homo sapiens
ccccccaaactgtctgactctgtgtt

SEQ ID NO: 109029 - DNA, 26 bp, Homo sapiens
cccccaaactgtctgactctgtgttt

SEQ ID NO: 109030 - DNA, 26 bp, Homo sapiens
ccccaaactgtctgactctgtgtttc

SEQ ID NO: 109031 - DNA, 26 bp, Homo sapiens
cccaaactgtctgactctgtgtttcc

SEQ ID NO: 109032 - DNA, 26 bp, Homo sapiens
ccaaactgtctgactctgtgtttcct

SEQ ID NO: 109033 - DNA, 26 bp, Homo sapiens
caaactgtctgactctgtgtttcctg

SEQ ID NO: 109034 - DNA, 26 bp, Homo sapiens
aaactgtctgactctgtgtttcctgc

SEQ ID NO: 109035 - DNA, 26 bp, Homo sapiens
aactgtctgactctgtgtttcctgcc

SEQ ID NO: 109036 - DNA, 26 bp, Homo sapiens
actgtctgactctgtgtttcctgccc

SEQ ID NO: 109037 - DNA, 26 bp, Homo sapiens
ctgtctgactctgtgtttcctgccct

SEQ ID NO: 109038 - DNA, 26 bp, Homo sapiens
tgtctgactctgtgtttcctgccctg

SEQ ID NO: 109039 - DNA, 26 bp, Homo sapiens
gtctgactctgtgtttcctgccctga

SEQ ID NO: 109040 - DNA, 26 bp, Homo sapiens
tctgactctgtgtttcctgccctgag

SEQ ID NO: 109041 - DNA, 26 bp, Homo sapiens
ctgactctgtgtttcctgccctgagg

SEQ ID NO: 109042 - DNA, 26 bp, Homo sapiens
tgactctgtgtttcctgccctgagga

SEQ ID NO: 109043 - DNA, 26 bp, Homo sapiens
gactctgtgtttcctgccctgaggag

SEQ ID NO: 109044 - DNA, 26 bp, Homo sapiens
actctgtgtttcctgccctgaggaga

SEQ ID NO: 109045 - DNA, 26 bp, Homo sapiens
ctctgtgtttcctgccctgaggagag

SEQ ID NO: 109046 - DNA, 26 bp, Homo sapiens
tctgtgtttcctgccctgaggagaga

SEQ ID NO: 109047 - DNA, 26 bp, Homo sapiens
ctgtgtttcctgccctgaggagagag

SEQ ID NO: 109048 - DNA, 26 bp, Homo sapiens
tgtgtttcctgccctgaggagagagg

SEQ ID NO: 109049 - DNA, 26 bp, Homo sapiens
gtgtttcctgccctgaggagagaggg

SEQ ID NO: 109050 - DNA, 26 bp, Homo sapiens
tgtttcctgccctgaggagagagggg

SEQ ID NO: 109051 - DNA, 26 bp, Homo sapiens
gtttcctgccctgaggagagaggggt

SEQ ID NO: 109052 - DNA, 26 bp, Homo sapiens
tttcctgccctgaggagagaggggtc

SEQ ID NO: 109053 - DNA, 26 bp, Homo sapiens
ttcctgccctgaggagagaggggtca

SEQ ID NO: 109054 - DNA, 26 bp, Homo sapiens
tcctgccctgaggagagaggggtcag

SEQ ID NO: 109055 - DNA, 26 bp, Homo sapiens
cctgccctgaggagagaggggtcaga

SEQ ID NO: 109056 - DNA, 26 bp, Homo sapiens
ctgccctgaggagagaggggtcagat

SEQ ID NO: 109057 - DNA, 26 bp, Homo sapiens
tgccctgaggagagaggggtcagatt

SEQ ID NO: 109058 - DNA, 26 bp, Homo sapiens
gccctgaggagagaggggtcagattg

SEQ ID NO: 109059 - DNA, 26 bp, Homo sapiens
ccctgaggagagaggggtcagattgc

SEQ ID NO: 109060 - DNA, 26 bp, Homo sapiens
cctgaggagagaggggtcagattgca

SEQ ID NO: 109061 - DNA, 26 bp, Homo sapiens
ctgaggagagaggggtcagattgcag

SEQ ID NO: 109062 - DNA, 26 bp, Homo sapiens
tgaggagagaggggtcagattgcagc

SEQ ID NO: 109063 - DNA, 26 bp, Homo sapiens
gaggagagaggggtcagattgcagcg

SEQ ID NO: 109064 - DNA, 26 bp, Homo sapiens
aggagagaggggtcagattgcagcgg

SEQ ID NO: 109065 - DNA, 26 bp, Homo sapiens
ggagagaggggtcagattgcagcggg

SEQ ID NO: 109066 - DNA, 26 bp, Homo sapiens
gagagaggggtcagattgcagcgggc

SEQ ID NO: 109067 - DNA, 26 bp, Homo sapiens
agagaggggtcagattgcagcgggcc

SEQ ID NO: 109068 - DNA, 26 bp, Homo sapiens
gagaggggtcagattgcagcgggccg

SEQ ID NO: 109069 - DNA, 26 bp, Homo sapiens
agaggggtcagattgcagcgggccga

SEQ ID NO: 109070 - DNA, 26 bp, Homo sapiens
gaggggtcagattgcagcgggccgag

SEQ ID NO: 109071 - DNA, 26 bp, Homo sapiens
aggggtcagattgcagcgggccgagt

SEQ ID NO: 109072 - DNA, 26 bp, Homo sapiens
ggggtcagattgcagcgggccgagtg

SEQ ID NO: 109073 - DNA, 26 bp, Homo sapiens
gggtcagattgcagcgggccgagtgc

SEQ ID NO: 109074 - DNA, 26 bp, Homo sapiens
ggtcagattgcagcgggccgagtgcc

SEQ ID NO: 109075 - DNA, 26 bp, Homo sapiens
gtcagattgcagcgggccgagtgccc

SEQ ID NO: 109076 - DNA, 26 bp, Homo sapiens
tcagattgcagcgggccgagtgccct

SEQ ID NO: 109077 - DNA, 26 bp, Homo sapiens
cagattgcagcgggccgagtgccctc

SEQ ID NO: 109078 - DNA, 26 bp, Homo sapiens
agattgcagcgggccgagtgccctct

SEQ ID NO: 109079 - DNA, 26 bp, Homo sapiens
gattgcagcgggccgagtgccctctc

SEQ ID NO: 109080 - DNA, 26 bp, Homo sapiens
attgcagcgggccgagtgccctctcc

SEQ ID NO: 109081 - DNA, 26 bp, Homo sapiens
ttgcagcgggccgagtgccctctccg

SEQ ID NO: 109082 - DNA, 26 bp, Homo sapiens
tgcagcgggccgagtgccctctccgt

SEQ ID NO: 109083 - DNA, 26 bp, Homo sapiens
gcagcgggccgagtgccctctccgtc

SEQ ID NO: 109084 - DNA, 26 bp, Homo sapiens
cagcgggccgagtgccctctccgtcc

SEQ ID NO: 109085 - DNA, 26 bp, Homo sapiens
agcgggccgagtgccctctccgtccc

SEQ ID NO: 109086 - DNA, 26 bp, Homo sapiens
gcgggccgagtgccctctccgtcccc

SEQ ID NO: 109087 - DNA, 26 bp, Homo sapiens
cgggccgagtgccctctccgtcccct

SEQ ID NO: 109088 - DNA, 26 bp, Homo sapiens
gggccgagtgccctctccgtcccctc

SEQ ID NO: 109089 - DNA, 26 bp, Homo sapiens
ggccgagtgccctctccgtcccctct

SEQ ID NO: 109090 - DNA, 26 bp, Homo sapiens
gccgagtgccctctccgtcccctctc

SEQ ID NO: 109091 - DNA, 26 bp, Homo sapiens
ccgagtgccctctccgtcccctctcc

SEQ ID NO: 109092 - DNA, 26 bp, Homo sapiens
cgagtgccctctccgtcccctctcct

SEQ ID NO: 109093 - DNA, 26 bp, Homo sapiens
gagtgccctctccgtcccctctcctc

SEQ ID NO: 109094 - DNA, 26 bp, Homo sapiens
agtgccctctccgtcccctctcctcc

SEQ ID NO: 109095 - DNA, 26 bp, Homo sapiens
gtgccctctccgtcccctctcctccc

SEQ ID NO: 109096 - DNA, 26 bp, Homo sapiens
tgccctctccgtcccctctcctccca

SEQ ID NO: 109097 - DNA, 26 bp, Homo sapiens
gccctctccgtcccctctcctcccac

SEQ ID NO: 109098 - DNA, 26 bp, Homo sapiens
ccctctccgtcccctctcctcccacc

SEQ ID NO: 109099 - DNA, 26 bp, Homo sapiens
cctctccgtcccctctcctcccaccc

SEQ ID NO: 109100 - DNA, 26 bp, Homo sapiens
ctctccgtcccctctcctcccaccca

SEQ ID NO: 109101 - DNA, 26 bp, Homo sapiens
tctccgtcccctctcctcccacccac

SEQ ID NO: 109102 - DNA, 26 bp, Homo sapiens
ctccgtcccctctcctcccacccacg

SEQ ID NO: 109103 - DNA, 26 bp, Homo sapiens
tccgtcccctctcctcccacccacgc

SEQ ID NO: 109104 - DNA, 26 bp, Homo sapiens
ccgtcccctctcctcccacccacgcc

SEQ ID NO: 109105 - DNA, 26 bp, Homo sapiens
cgtcccctctcctcccacccacgcca

SEQ ID NO: 109106 - DNA, 26 bp, Homo sapiens
gtcccctctcctcccacccacgccac

SEQ ID NO: 109107 - DNA, 26 bp, Homo sapiens
tcccctctcctcccacccacgccaca

SEQ ID NO: 109108 - DNA, 26 bp, Homo sapiens
cccctctcctcccacccacgccacag

SEQ ID NO: 109109 - DNA, 26 bp, Homo sapiens
ccctctcctcccacccacgccacagg

SEQ ID NO: 109110 - DNA, 26 bp, Homo sapiens
cctctcctcccacccacgccacaggc

SEQ ID NO: 109111 - DNA, 26 bp, Homo sapiens
ctctcctcccacccacgccacaggcc

SEQ ID NO: 109112 - DNA, 26 bp, Homo sapiens
tctcctcccacccacgccacaggcca

SEQ ID NO: 109113 - DNA, 26 bp, Homo sapiens
ctcctcccacccacgccacaggccag

SEQ ID NO: 109114 - DNA, 26 bp, Homo sapiens
tcctcccacccacgccacaggccagc

SEQ ID NO: 109115 - DNA, 26 bp, Homo sapiens
cctcccacccacgccacaggccagcc

SEQ ID NO: 109116 - DNA, 26 bp, Homo sapiens
ctcccacccacgccacaggccagcct

SEQ ID NO: 109117 - DNA, 26 bp, Homo sapiens
tcccacccacgccacaggccagccta

SEQ ID NO: 109118 - DNA, 26 bp, Homo sapiens
cccacccacgccacaggccagcctac

SEQ ID NO: 109119 - DNA, 26 bp, Homo sapiens
ccacccacgccacaggccagcctact

SEQ ID NO: 109120 - DNA, 26 bp, Homo sapiens
cacccacgccacaggccagcctactc

SEQ ID NO: 109121 - DNA, 26 bp, Homo sapiens
acccacgccacaggccagcctactct

SEQ ID NO: 109122 - DNA, 26 bp, Homo sapiens
cccacgccacaggccagcctactctt

SEQ ID NO: 109123 - DNA, 26 bp, Homo sapiens
ccacgccacaggccagcctactcttc

SEQ ID NO: 109124 - DNA, 26 bp, Homo sapiens
cacgccacaggccagcctactcttcc

SEQ ID NO: 109125 - DNA, 26 bp, Homo sapiens
acgccacaggccagcctactcttccc

SEQ ID NO: 109126 - DNA, 26 bp, Homo sapiens
cgccacaggccagcctactcttccct

SEQ ID NO: 109127 - DNA, 26 bp, Homo sapiens
gccacaggccagcctactcttccctc

SEQ ID NO: 109128 - DNA, 26 bp, Homo sapiens
ccacaggccagcctactcttccctcc

SEQ ID NO: 109129 - DNA, 26 bp, Homo sapiens
cacaggccagcctactcttccctcca

SEQ ID NO: 109130 - DNA, 26 bp, Homo sapiens
acaggccagcctactcttccctccat

SEQ ID NO: 109131 - DNA, 26 bp, Homo sapiens
caggccagcctactcttccctccatc

SEQ ID NO: 109132 - DNA, 26 bp, Homo sapiens
aggccagcctactcttccctccatcc

SEQ ID NO: 109133 - DNA, 26 bp, Homo sapiens
ggccagcctactcttccctccatcca

SEQ ID NO: 109134 - DNA, 26 bp, Homo sapiens
gccagcctactcttccctccatccat

SEQ ID NO: 109135 - DNA, 26 bp, Homo sapiens
ccagcctactcttccctccatccatg

SEQ ID NO: 109136 - DNA, 26 bp, Homo sapiens
cagcctactcttccctccatccatgg

SEQ ID NO: 109137 - DNA, 26 bp, Homo sapiens
agcctactcttccctccatccatggc

SEQ ID NO: 109138 - DNA, 26 bp, Homo sapiens
gcctactcttccctccatccatggcc

SEQ ID NO: 109139 - DNA, 26 bp, Homo sapiens
cctactcttccctccatccatggcca

SEQ ID NO: 109140 - DNA, 26 bp, Homo sapiens
ctactcttccctccatccatggccac

SEQ ID NO: 109141 - DNA, 26 bp, Homo sapiens
tactcttccctccatccatggccaca

SEQ ID NO: 109142 - DNA, 26 bp, Homo sapiens
actcttccctccatccatggccacac

SEQ ID NO: 109143 - DNA, 26 bp, Homo sapiens
ctcttccctccatccatggccacacc

SEQ ID NO: 109144 - DNA, 26 bp, Homo sapiens
tcttccctccatccatggccacaccc

SEQ ID NO: 109145 - DNA, 26 bp, Homo sapiens
cttccctccatccatggccacacccc

SEQ ID NO: 109146 - DNA, 26 bp, Homo sapiens
ttccctccatccatggccacaccccc

SEQ ID NO: 109147 - DNA, 26 bp, Homo sapiens
tccctccatccatggccacaccccca

SEQ ID NO: 109148 - DNA, 26 bp, Homo sapiens
ccctccatccatggccacacccccag

SEQ ID NO: 109149 - DNA, 26 bp, Homo sapiens
cctccatccatggccacacccccagc

SEQ ID NO: 109150 - DNA, 26 bp, Homo sapiens
ctccatccatggccacacccccagcc

SEQ ID NO: 109151 - DNA, 26 bp, Homo sapiens
tccatccatggccacacccccagcca

SEQ ID NO: 109152 - DNA, 26 bp, Homo sapiens
ccatccatggccacacccccagccat

SEQ ID NO: 109153 - DNA, 26 bp, Homo sapiens
catccatggccacacccccagccatt

SEQ ID NO: 109154 - DNA, 26 bp, Homo sapiens
atccatggccacacccccagccattt

SEQ ID NO: 109155 - DNA, 26 bp, Homo sapiens
tccatggccacacccccagccatttt

SEQ ID NO: 109156 - DNA, 26 bp, Homo sapiens
ccatggccacacccccagccattttg

SEQ ID NO: 109157 - DNA, 26 bp, Homo sapiens
catggccacacccccagccattttgt

SEQ ID NO: 109158 - DNA, 26 bp, Homo sapiens
atggccacacccccagccattttgta

SEQ ID NO: 109159 - DNA, 26 bp, Homo sapiens
tggccacacccccagccattttgtac

SEQ ID NO: 109160 - DNA, 26 bp, Homo sapiens
ggccacacccccagccattttgtacc

SEQ ID NO: 109161 - DNA, 26 bp, Homo sapiens
gccacacccccagccattttgtacca

SEQ ID NO: 109162 - DNA, 26 bp, Homo sapiens
ccacacccccagccattttgtaccat

SEQ ID NO: 109163 - DNA, 26 bp, Homo sapiens
cacacccccagccattttgtaccatt

SEQ ID NO: 109164 - DNA, 26 bp, Homo sapiens
acacccccagccattttgtaccatta

SEQ ID NO: 109165 - DNA, 26 bp, Homo sapiens
cacccccagccattttgtaccattat

SEQ ID NO: 109166 - DNA, 26 bp, Homo sapiens
acccccagccattttgtaccattata

SEQ ID NO: 109167 - DNA, 26 bp, Homo sapiens
cccccagccattttgtaccattatat

SEQ ID NO: 109168 - DNA, 26 bp, Homo sapiens
ccccagccattttgtaccattatata

SEQ ID NO: 109169 - DNA, 26 bp, Homo sapiens
cccagccattttgtaccattatataa

SEQ ID NO: 109170 - DNA, 26 bp, Homo sapiens
ccagccattttgtaccattatataaa

SEQ ID NO: 109171 - DNA, 26 bp, Homo sapiens
cagccattttgtaccattatataaat

SEQ ID NO: 109172 - DNA, 26 bp, Homo sapiens
agccattttgtaccattatataaata

SEQ ID NO: 109173 - DNA, 26 bp, Homo sapiens
gccattttgtaccattatataaatat

SEQ ID NO: 109174 - DNA, 26 bp, Homo sapiens
ccattttgtaccattatataaatata

SEQ ID NO: 109175 - DNA, 26 bp, Homo sapiens
cattttgtaccattatataaatatat

SEQ ID NO: 109176 - DNA, 26 bp, Homo sapiens
attttgtaccattatataaatatata

SEQ ID NO: 109177 - DNA, 26 bp, Homo sapiens
ttttgtaccattatataaatatatat

SEQ ID NO: 109178 - DNA, 26 bp, Homo sapiens
tttgtaccattatataaatatatata

SEQ ID NO: 109179 - DNA, 26 bp, Homo sapiens
ttgtaccattatataaatatatatat

SEQ ID NO: 109180 - DNA, 26 bp, Homo sapiens
tgtaccattatataaatatatatata

SEQ ID NO: 109181 - DNA, 26 bp, Homo sapiens
gtaccattatataaatatatatataa

SEQ ID NO: 109182 - DNA, 26 bp, Homo sapiens
taccattatataaatatatatataaa

SEQ ID NO: 109183 - DNA, 26 bp, Homo sapiens
accattatataaatatatatataaat

SEQ ID NO: 109184 - DNA, 26 bp, Homo sapiens
ccattatataaatatatatataaata

SEQ ID NO: 109185 - DNA, 26 bp, Homo sapiens
cattatataaatatatatataaatat

SEQ ID NO: 109186 - DNA, 26 bp, Homo sapiens
attatataaatatatatataaatata

SEQ ID NO: 109187 - DNA, 26 bp, Homo sapiens
ttatataaatatatatataaatataa

SEQ ID NO: 109188 - DNA, 26 bp, Homo sapiens
tatataaatatatatataaatataaa

SEQ ID NO: 109189 - DNA, 26 bp, Homo sapiens
atataaatatatatataaatataaat

SEQ ID NO: 109190 - DNA, 26 bp, Homo sapiens
tataaatatatatataaatataaata

SEQ ID NO: 109191 - DNA, 26 bp, Homo sapiens
ataaatatatatataaatataaatat

SEQ ID NO: 109192 - DNA, 26 bp, Homo sapiens
taaatatatatataaatataaatata

SEQ ID NO: 109193 - DNA, 26 bp, Homo sapiens
aaatatatatataaatataaatatat

SEQ ID NO: 109194 - DNA, 26 bp, Homo sapiens
aatatatatataaatataaatatata

SEQ ID NO: 109195 - DNA, 26 bp, Homo sapiens
atatatatataaatataaatatataa

SEQ ID NO: 109196 - DNA, 26 bp, Homo sapiens
tatatatataaatataaatatataaa

SEQ ID NO: 109197 - DNA, 26 bp, Homo sapiens
atatatataaatataaatatataaat

SEQ ID NO: 109198 - DNA, 26 bp, Homo sapiens
tatatataaatataaatatataaata

SEQ ID NO: 109199 - DNA, 26 bp, Homo sapiens
atatataaatataaatatataaatac

SEQ ID NO: 109200 - DNA, 26 bp, Homo sapiens
tatataaatataaatatataaataca

SEQ ID NO: 109201 - DNA, 26 bp, Homo sapiens
atataaatataaatatataaatacaa

SEQ ID NO: 109202 - DNA, 26 bp, Homo sapiens
tataaatataaatatataaatacaat

SEQ ID NO: 109203 - DNA, 26 bp, Homo sapiens
ataaatataaatatataaatacaata

SEQ ID NO: 109204 - DNA, 26 bp, Homo sapiens
taaatataaatatataaatacaatat

SEQ ID NO: 109205 - DNA, 26 bp, Homo sapiens
aaatataaatatataaatacaatatg

SEQ ID NO: 109206 - DNA, 26 bp, Homo sapiens
aatataaatatataaatacaatatgt

SEQ ID NO: 109207 - DNA, 26 bp, Homo sapiens
atataaatatataaatacaatatgtg

SEQ ID NO: 109208 - DNA, 26 bp, Homo sapiens
tataaatatataaatacaatatgtga

SEQ ID NO: 109209 - DNA, 26 bp, Homo sapiens
ataaatatataaatacaatatgtgaa

SEQ ID NO: 109210 - DNA, 26 bp, Homo sapiens
taaatatataaatacaatatgtgaag

SEQ ID NO: 109211 - DNA, 26 bp, Homo sapiens
aaatatataaatacaatatgtgaaga

SEQ ID NO: 109212 - DNA, 26 bp, Homo sapiens
aatatataaatacaatatgtgaagac

SEQ ID NO: 109213 - DNA, 26 bp, Homo sapiens
atatataaatacaatatgtgaagaca

SEQ ID NO: 109214 - DNA, 26 bp, Homo sapiens
tatataaatacaatatgtgaagacat

SEQ ID NO: 109215 - DNA, 26 bp, Homo sapiens
atataaatacaatatgtgaagacatc

SEQ ID NO: 109216 - DNA, 26 bp, Homo sapiens
tataaatacaatatgtgaagacatct

SEQ ID NO: 109217 - DNA, 26 bp, Homo sapiens
ataaatacaatatgtgaagacatctt

SEQ ID NO: 109218 - DNA, 26 bp, Homo sapiens
taaatacaatatgtgaagacatcttc

SEQ ID NO: 109219 - DNA, 26 bp, Homo sapiens
aaatacaatatgtgaagacatcttct

SEQ ID NO: 109220 - DNA, 26 bp, Homo sapiens
aatacaatatgtgaagacatcttctt

SEQ ID NO: 109221 - DNA, 26 bp, Homo sapiens
atacaatatgtgaagacatcttcttg

SEQ ID NO: 109222 - DNA, 26 bp, Homo sapiens
tacaatatgtgaagacatcttcttgg

SEQ ID NO: 109223 - DNA, 26 bp, Homo sapiens
acaatatgtgaagacatcttcttggt

SEQ ID NO: 109224 - DNA, 26 bp, Homo sapiens
caatatgtgaagacatcttcttggtt

SEQ ID NO: 109225 - DNA, 26 bp, Homo sapiens
aatatgtgaagacatcttcttggttt

SEQ ID NO: 109226 - DNA, 26 bp, Homo sapiens
atatgtgaagacatcttcttggtttt

SEQ ID NO: 109227 - DNA, 26 bp, Homo sapiens
tatgtgaagacatcttcttggttttt

SEQ ID NO: 109228 - DNA, 26 bp, Homo sapiens
atgtgaagacatcttcttggttttta

SEQ ID NO: 109229 - DNA, 26 bp, Homo sapiens
tgtgaagacatcttcttggtttttat

SEQ ID NO: 109230 - DNA, 26 bp, Homo sapiens
gtgaagacatcttcttggtttttatt

SEQ ID NO: 109231 - DNA, 26 bp, Homo sapiens
tgaagacatcttcttggtttttattt

SEQ ID NO: 109232 - DNA, 26 bp, Homo sapiens
gaagacatcttcttggtttttatttt

SEQ ID NO: 109233 - DNA, 26 bp, Homo sapiens
aagacatcttcttggtttttattttg

SEQ ID NO: 109234 - DNA, 26 bp, Homo sapiens
agacatcttcttggtttttattttga

SEQ ID NO: 109235 - DNA, 26 bp, Homo sapiens
gacatcttcttggtttttattttgaa

SEQ ID NO: 109236 - DNA, 26 bp, Homo sapiens
acatcttcttggtttttattttgaaa

SEQ ID NO: 109237 - DNA, 26 bp, Homo sapiens
catcttcttggtttttattttgaaac

SEQ ID NO: 109238 - DNA, 26 bp, Homo sapiens
atcttcttggtttttattttgaaaca

SEQ ID NO: 109239 - DNA, 26 bp, Homo sapiens
tcttcttggtttttattttgaaacaa

SEQ ID NO: 109240 - DNA, 26 bp, Homo sapiens
cttcttggtttttattttgaaacaat

SEQ ID NO: 109241 - DNA, 26 bp, Homo sapiens
ttcttggtttttattttgaaacaatt

SEQ ID NO: 109242 - DNA, 26 bp, Homo sapiens
tcttggtttttattttgaaacaattt

SEQ ID NO: 109243 - DNA, 26 bp, Homo sapiens
cttggtttttattttgaaacaatttt

SEQ ID NO: 109244 - DNA, 26 bp, Homo sapiens
ttggtttttattttgaaacaattttt

SEQ ID NO: 109245 - DNA, 26 bp, Homo sapiens
tggtttttattttgaaacaattttta

SEQ ID NO: 109246 - DNA, 26 bp, Homo sapiens
ggtttttattttgaaacaatttttag

SEQ ID NO: 109247 - DNA, 26 bp, Homo sapiens
gtttttattttgaaacaatttttagg

SEQ ID NO: 109248 - DNA, 26 bp, Homo sapiens
tttttattttgaaacaatttttaggc

SEQ ID NO: 109249 - DNA, 26 bp, Homo sapiens
ttttattttgaaacaatttttaggct

SEQ ID NO: 109250 - DNA, 26 bp, Homo sapiens
tttattttgaaacaatttttaggctt

SEQ ID NO: 109251 - DNA, 26 bp, Homo sapiens
ttattttgaaacaatttttaggcttg

SEQ ID NO: 109252 - DNA, 26 bp, Homo sapiens
tattttgaaacaatttttaggcttgt

SEQ ID NO: 109253 - DNA, 26 bp, Homo sapiens
attttgaaacaatttttaggcttgtt

SEQ ID NO: 109254 - DNA, 26 bp, Homo sapiens
ttttgaaacaatttttaggcttgttc

SEQ ID NO: 109255 - DNA, 26 bp, Homo sapiens
tttgaaacaatttttaggcttgttcc

SEQ ID NO: 109256 - DNA, 26 bp, Homo sapiens
ttgaaacaatttttaggcttgttccg

SEQ ID NO: 109257 - DNA, 26 bp, Homo sapiens
tgaaacaatttttaggcttgttccgg

SEQ ID NO: 109258 - DNA, 26 bp, Homo sapiens
gaaacaatttttaggcttgttccggg

SEQ ID NO: 109259 - DNA, 26 bp, Homo sapiens
aaacaatttttaggcttgttccgggg

SEQ ID NO: 109260 - DNA, 26 bp, Homo sapiens
aacaatttttaggcttgttccggggg

SEQ ID NO: 109261 - DNA, 26 bp, Homo sapiens
acaatttttaggcttgttccgggggt

SEQ ID NO: 109262 - DNA, 26 bp, Homo sapiens
caatttttaggcttgttccgggggtc

SEQ ID NO: 109263 - DNA, 26 bp, Homo sapiens
aatttttaggcttgttccgggggtct

SEQ ID NO: 109264 - DNA, 26 bp, Homo sapiens
atttttaggcttgttccgggggtctc

SEQ ID NO: 109265 - DNA, 26 bp, Homo sapiens
tttttaggcttgttccgggggtctct

SEQ ID NO: 109266 - DNA, 26 bp, Homo sapiens
ttttaggcttgttccgggggtctctg

SEQ ID NO: 109267 - DNA, 26 bp, Homo sapiens
tttaggcttgttccgggggtctctgt

SEQ ID NO: 109268 - DNA, 26 bp, Homo sapiens
ttaggcttgttccgggggtctctgtg

SEQ ID NO: 109269 - DNA, 26 bp, Homo sapiens
taggcttgttccgggggtctctgtgc

SEQ ID NO: 109270 - DNA, 26 bp, Homo sapiens
aggcttgttccgggggtctctgtgct

SEQ ID NO: 109271 - DNA, 26 bp, Homo sapiens
ggcttgttccgggggtctctgtgctg

SEQ ID NO: 109272 - DNA, 26 bp, Homo sapiens
gcttgttccgggggtctctgtgctgc

SEQ ID NO: 109273 - DNA, 26 bp, Homo sapiens
cttgttccgggggtctctgtgctgcc

SEQ ID NO: 109274 - DNA, 26 bp, Homo sapiens
ttgttccgggggtctctgtgctgcct

SEQ ID NO: 109275 - DNA, 26 bp, Homo sapiens
tgttccgggggtctctgtgctgcctg

SEQ ID NO: 109276 - DNA, 26 bp, Homo sapiens
gttccgggggtctctgtgctgcctgt

SEQ ID NO: 109277 - DNA, 26 bp, Homo sapiens
ttccgggggtctctgtgctgcctgta

SEQ ID NO: 109278 - DNA, 26 bp, Homo sapiens
tccgggggtctctgtgctgcctgtac

SEQ ID NO: 109279 - DNA, 26 bp, Homo sapiens
ccgggggtctctgtgctgcctgtact

SEQ ID NO: 109280 - DNA, 26 bp, Homo sapiens
cgggggtctctgtgctgcctgtactg

SEQ ID NO: 109281 - DNA, 26 bp, Homo sapiens
gggggtctctgtgctgcctgtactgt

SEQ ID NO: 109282 - DNA, 26 bp, Homo sapiens
ggggtctctgtgctgcctgtactgta

SEQ ID NO: 109283 - DNA, 26 bp, Homo sapiens
gggtctctgtgctgcctgtactgtat

SEQ ID NO: 109284 - DNA, 26 bp, Homo sapiens
ggtctctgtgctgcctgtactgtatt

SEQ ID NO: 109285 - DNA, 26 bp, Homo sapiens
gtctctgtgctgcctgtactgtattg

SEQ ID NO: 109286 - DNA, 26 bp, Homo sapiens
tctctgtgctgcctgtactgtattga

SEQ ID NO: 109287 - DNA, 26 bp, Homo sapiens
ctctgtgctgcctgtactgtattgac

SEQ ID NO: 109288 - DNA, 26 bp, Homo sapiens
tctgtgctgcctgtactgtattgacc

SEQ ID NO: 109289 - DNA, 26 bp, Homo sapiens
ctgtgctgcctgtactgtattgacct

SEQ ID NO: 109290 - DNA, 26 bp, Homo sapiens
tgtgctgcctgtactgtattgacctg

SEQ ID NO: 109291 - DNA, 26 bp, Homo sapiens
gtgctgcctgtactgtattgacctgt

SEQ ID NO: 109292 - DNA, 26 bp, Homo sapiens
tgctgcctgtactgtattgacctgtt

SEQ ID NO: 109293 - DNA, 26 bp, Homo sapiens
gctgcctgtactgtattgacctgttt

SEQ ID NO: 109294 - DNA, 26 bp, Homo sapiens
ctgcctgtactgtattgacctgtttt

SEQ ID NO: 109295 - DNA, 26 bp, Homo sapiens
tgcctgtactgtattgacctgtttta

SEQ ID NO: 109296 - DNA, 26 bp, Homo sapiens
gcctgtactgtattgacctgttttat

SEQ ID NO: 109297 - DNA, 26 bp, Homo sapiens
cctgtactgtattgacctgttttata

SEQ ID NO: 109298 - DNA, 26 bp, Homo sapiens
ctgtactgtattgacctgttttatag

SEQ ID NO: 109299 - DNA, 26 bp, Homo sapiens
tgtactgtattgacctgttttatagg

SEQ ID NO: 109300 - DNA, 26 bp, Homo sapiens
gtactgtattgacctgttttataggt

SEQ ID NO: 109301 - DNA, 26 bp, Homo sapiens
tactgtattgacctgttttataggtg

SEQ ID NO: 109302 - DNA, 26 bp, Homo sapiens
actgtattgacctgttttataggtgc

SEQ ID NO: 109303 - DNA, 26 bp, Homo sapiens
ctgtattgacctgttttataggtgcc

SEQ ID NO: 109304 - DNA, 26 bp, Homo sapiens
tgtattgacctgttttataggtgcct

SEQ ID NO: 109305 - DNA, 26 bp, Homo sapiens
gtattgacctgttttataggtgcctt

SEQ ID NO: 109306 - DNA, 26 bp, Homo sapiens
tattgacctgttttataggtgccttt

SEQ ID NO: 109307 - DNA, 26 bp, Homo sapiens
attgacctgttttataggtgcctttt

SEQ ID NO: 109308 - DNA, 26 bp, Homo sapiens
ttgacctgttttataggtgccttttt

SEQ ID NO: 109309 - DNA, 26 bp, Homo sapiens
tgacctgttttataggtgccttttta

SEQ ID NO: 109310 - DNA, 26 bp, Homo sapiens
gacctgttttataggtgcctttttat

SEQ ID NO: 109311 - DNA, 26 bp, Homo sapiens
acctgttttataggtgcctttttatt

SEQ ID NO: 109312 - DNA, 26 bp, Homo sapiens
cctgttttataggtgcctttttatta

SEQ ID NO: 109313 - DNA, 26 bp, Homo sapiens
ctgttttataggtgcctttttattaa

SEQ ID NO: 109314 - DNA, 26 bp, Homo sapiens
tgttttataggtgcctttttattaaa

SEQ ID NO: 109315 - DNA, 26 bp, Homo sapiens
gttttataggtgcctttttattaaaa

SEQ ID NO: 109316 - DNA, 26 bp, Homo sapiens
ttttataggtgcctttttattaaaaa

SEQ ID NO: 109317 - DNA, 26 bp, Homo sapiens
tttataggtgcctttttattaaaaag

SEQ ID NO: 109318 - DNA, 26 bp, Homo sapiens
ttataggtgcctttttattaaaaaga

SEQ ID NO: 109319 - DNA, 26 bp, Homo sapiens
tataggtgcctttttattaaaaagaa

SEQ ID NO: 109320 - DNA, 26 bp, Homo sapiens
ataggtgcctttttattaaaaagaaa

SEQ ID NO: 109321 - DNA, 26 bp, Homo sapiens
taggtgcctttttattaaaaagaaaa

SEQ ID NO: 109322 - DNA, 26 bp, Homo sapiens
aggtgcctttttattaaaaagaaaat

SEQ ID NO: 109323 - DNA, 26 bp, Homo sapiens
ggtgcctttttattaaaaagaaaatt

SEQ ID NO: 109324 - DNA, 26 bp, Homo sapiens
gtgcctttttattaaaaagaaaattc

SEQ ID NO: 109325 - DNA, 26 bp, Homo sapiens
tgcctttttattaaaaagaaaattca

SEQ ID NO: 109326 - DNA, 26 bp, Homo sapiens
gcctttttattaaaaagaaaattcaa

SEQ ID NO: 109327 - DNA, 26 bp, Homo sapiens
cctttttattaaaaagaaaattcaaa

SEQ ID NO: 109328 - DNA, 26 bp, Homo sapiens
ctttttattaaaaagaaaattcaaaa

SEQ ID NO: 109329 - DNA, 26 bp, Homo sapiens
tttttattaaaaagaaaattcaaaat

SEQ ID NO: 109330 - DNA, 26 bp, Homo sapiens
ttttattaaaaagaaaattcaaaatc

SEQ ID NO: 109331 - DNA, 26 bp, Homo sapiens
tttattaaaaagaaaattcaaaatcc

SEQ ID NO: 109332 - DNA, 26 bp, Homo sapiens
ttattaaaaagaaaattcaaaatcca

SEQ ID NO: 109333 - DNA, 26 bp, Homo sapiens
tattaaaaagaaaattcaaaatccag

SEQ ID NO: 109334 - DNA, 26 bp, Homo sapiens
attaaaaagaaaattcaaaatccagc

SEQ ID NO: 109335 - DNA, 26 bp, Homo sapiens
ttaaaaagaaaattcaaaatccagcc

SEQ ID NO: 109336 - DNA, 26 bp, Homo sapiens
taaaaagaaaattcaaaatccagcct

SEQ ID NO: 109337 - DNA, 26 bp, Homo sapiens
aaaaagaaaattcaaaatccagcctc

SEQ ID NO: 109338 - DNA, 26 bp, Homo sapiens
aaaagaaaattcaaaatccagcctct

SEQ ID NO: 109339 - DNA, 26 bp, Homo sapiens
aaagaaaattcaaaatccagcctctt

SEQ ID NO: 109340 - DNA, 26 bp, Homo sapiens
aagaaaattcaaaatccagcctcttg

SEQ ID NO: 109341 - DNA, 26 bp, Homo sapiens
agaaaattcaaaatccagcctcttgc

SEQ ID NO: 109342 - DNA, 26 bp, Homo sapiens
gaaaattcaaaatccagcctcttgcc

SEQ ID NO: 109343 - DNA, 26 bp, Homo sapiens
aaaattcaaaatccagcctcttgcct

SEQ ID NO: 109344 - DNA, 26 bp, Homo sapiens
aaattcaaaatccagcctcttgcctc

SEQ ID NO: 109345 - DNA, 26 bp, Homo sapiens
aattcaaaatccagcctcttgcctct

SEQ ID NO: 109346 - DNA, 26 bp, Homo sapiens
attcaaaatccagcctcttgcctctt

SEQ ID NO: 109347 - DNA, 26 bp, Homo sapiens
ttcaaaatccagcctcttgcctcttt

SEQ ID NO: 109348 - DNA, 26 bp, Homo sapiens
tcaaaatccagcctcttgcctctttg

SEQ ID NO: 109349 - DNA, 26 bp, Homo sapiens
caaaatccagcctcttgcctctttgc

SEQ ID NO: 109350 - DNA, 26 bp, Homo sapiens
aaaatccagcctcttgcctctttgca

SEQ ID NO: 109351 - DNA, 26 bp, Homo sapiens
aaatccagcctcttgcctctttgcat

SEQ ID NO: 109352 - DNA, 26 bp, Homo sapiens
aatccagcctcttgcctctttgcatc

SEQ ID NO: 109353 - DNA, 26 bp, Homo sapiens
atccagcctcttgcctctttgcatct

SEQ ID NO: 109354 - DNA, 26 bp, Homo sapiens
tccagcctcttgcctctttgcatctg

SEQ ID NO: 109355 - DNA, 26 bp, Homo sapiens
ccagcctcttgcctctttgcatctgc

SEQ ID NO: 109356 - DNA, 26 bp, Homo sapiens
cagcctcttgcctctttgcatctgct

SEQ ID NO: 109357 - DNA, 26 bp, Homo sapiens
agcctcttgcctctttgcatctgctt

SEQ ID NO: 109358 - DNA, 26 bp, Homo sapiens
gcctcttgcctctttgcatctgcttc

SEQ ID NO: 109359 - DNA, 26 bp, Homo sapiens
cctcttgcctctttgcatctgcttca

SEQ ID NO: 109360 - DNA, 26 bp, Homo sapiens
ctcttgcctctttgcatctgcttcag

SEQ ID NO: 109361 - DNA, 26 bp, Homo sapiens
tcttgcctctttgcatctgcttcaga

SEQ ID NO: 109362 - DNA, 26 bp, Homo sapiens
cttgcctctttgcatctgcttcagac

SEQ ID NO: 109363 - DNA, 26 bp, Homo sapiens
ttgcctctttgcatctgcttcagact

SEQ ID NO: 109364 - DNA, 26 bp, Homo sapiens
tgcctctttgcatctgcttcagactc

SEQ ID NO: 109365 - DNA, 26 bp, Homo sapiens
gcctctttgcatctgcttcagactcc

SEQ ID NO: 109366 - DNA, 26 bp, Homo sapiens
cctctttgcatctgcttcagactccc

SEQ ID NO: 109367 - DNA, 26 bp, Homo sapiens
ctctttgcatctgcttcagactcccc

SEQ ID NO: 109368 - DNA, 26 bp, Homo sapiens
tctttgcatctgcttcagactccccc

SEQ ID NO: 109369 - DNA, 26 bp, Homo sapiens
ctttgcatctgcttcagactccccca

SEQ ID NO: 109370 - DNA, 26 bp, Homo sapiens
tttgcatctgcttcagactcccccat

SEQ ID NO: 109371 - DNA, 26 bp, Homo sapiens
ttgcatctgcttcagactcccccatc

SEQ ID NO: 109372 - DNA, 26 bp, Homo sapiens
tgcatctgcttcagactcccccatcg

SEQ ID NO: 109373 - DNA, 26 bp, Homo sapiens
gcatctgcttcagactcccccatcga

SEQ ID NO: 109374 - DNA, 26 bp, Homo sapiens
catctgcttcagactcccccatcgat

SEQ ID NO: 109375 - DNA, 26 bp, Homo sapiens
atctgcttcagactcccccatcgatt

SEQ ID NO: 109376 - DNA, 26 bp, Homo sapiens
tctgcttcagactcccccatcgatta

SEQ ID NO: 109377 - DNA, 26 bp, Homo sapiens
ctgcttcagactcccccatcgattac

SEQ ID NO: 109378 - DNA, 26 bp, Homo sapiens
tgcttcagactcccccatcgattacc

SEQ ID NO: 109379 - DNA, 26 bp, Homo sapiens
gcttcagactcccccatcgattaccc

SEQ ID NO: 109380 - DNA, 26 bp, Homo sapiens
cttcagactcccccatcgattaccca

SEQ ID NO: 109381 - DNA, 26 bp, Homo sapiens
ttcagactcccccatcgattacccag

SEQ ID NO: 109382 - DNA, 26 bp, Homo sapiens
tcagactcccccatcgattacccagc

SEQ ID NO: 109383 - DNA, 26 bp, Homo sapiens
cagactcccccatcgattacccagct

SEQ ID NO: 109384 - DNA, 26 bp, Homo sapiens
agactcccccatcgattacccagctt

SEQ ID NO: 109385 - DNA, 26 bp, Homo sapiens
gactcccccatcgattacccagcttg

SEQ ID NO: 109386 - DNA, 26 bp, Homo sapiens
actcccccatcgattacccagcttgc

SEQ ID NO: 109387 - DNA, 26 bp, Homo sapiens
ctcccccatcgattacccagcttgcg

SEQ ID NO: 109388 - DNA, 26 bp, Homo sapiens
tcccccatcgattacccagcttgcga

SEQ ID NO: 109389 - DNA, 26 bp, Homo sapiens
cccccatcgattacccagcttgcgag

SEQ ID NO: 109390 - DNA, 26 bp, Homo sapiens
ccccatcgattacccagcttgcgagg

SEQ ID NO: 109391 - DNA, 26 bp, Homo sapiens
cccatcgattacccagcttgcgagga

SEQ ID NO: 109392 - DNA, 26 bp, Homo sapiens
ccatcgattacccagcttgcgaggag

SEQ ID NO: 109393 - DNA, 26 bp, Homo sapiens
catcgattacccagcttgcgaggaga

SEQ ID NO: 109394 - DNA, 26 bp, Homo sapiens
atcgattacccagcttgcgaggagat

SEQ ID NO: 109395 - DNA, 26 bp, Homo sapiens
tcgattacccagcttgcgaggagata

SEQ ID NO: 109396 - DNA, 26 bp, Homo sapiens
cgattacccagcttgcgaggagatac

SEQ ID NO: 109397 - DNA, 26 bp, Homo sapiens
gattacccagcttgcgaggagatact

SEQ ID NO: 109398 - DNA, 26 bp, Homo sapiens
attacccagcttgcgaggagatactc

SEQ ID NO: 109399 - DNA, 26 bp, Homo sapiens
ttacccagcttgcgaggagatactca

SEQ ID NO: 109400 - DNA, 26 bp, Homo sapiens
tacccagcttgcgaggagatactcag

SEQ ID NO: 109401 - DNA, 26 bp, Homo sapiens
acccagcttgcgaggagatactcaga

SEQ ID NO: 109402 - DNA, 26 bp, Homo sapiens
cccagcttgcgaggagatactcagag

SEQ ID NO: 109403 - DNA, 26 bp, Homo sapiens
ccagcttgcgaggagatactcagaga

SEQ ID NO: 109404 - DNA, 26 bp, Homo sapiens
cagcttgcgaggagatactcagagaa

SEQ ID NO: 109405 - DNA, 26 bp, Homo sapiens
agcttgcgaggagatactcagagaaa

SEQ ID NO: 109406 - DNA, 26 bp, Homo sapiens
gcttgcgaggagatactcagagaaaa

SEQ ID NO: 109407 - DNA, 26 bp, Homo sapiens
cttgcgaggagatactcagagaaaaa

SEQ ID NO: 109408 - DNA, 26 bp, Homo sapiens
ttgcgaggagatactcagagaaaaaa

SEQ ID NO: 109409 - DNA, 26 bp, Homo sapiens
tgcgaggagatactcagagaaaaaag

SEQ ID NO: 109410 - DNA, 26 bp, Homo sapiens
gcgaggagatactcagagaaaaaagg

SEQ ID NO: 109411 - DNA, 26 bp, Homo sapiens
cgaggagatactcagagaaaaaaggg

SEQ ID NO: 109412 - DNA, 26 bp, Homo sapiens
gaggagatactcagagaaaaaaggga

SEQ ID NO: 109413 - DNA, 26 bp, Homo sapiens
aggagatactcagagaaaaaagggac

SEQ ID NO: 109414 - DNA, 26 bp, Homo sapiens
ggagatactcagagaaaaaagggacg

SEQ ID NO: 109415 - DNA, 26 bp, Homo sapiens
gagatactcagagaaaaaagggacgt

SEQ ID NO: 109416 - DNA, 26 bp, Homo sapiens
agatactcagagaaaaaagggacgtc

SEQ ID NO: 109417 - DNA, 26 bp, Homo sapiens
gatactcagagaaaaaagggacgtct

SEQ ID NO: 109418 - DNA, 26 bp, Homo sapiens
atactcagagaaaaaagggacgtctt

SEQ ID NO: 109419 - DNA, 26 bp, Homo sapiens
tactcagagaaaaaagggacgtctta

SEQ ID NO: 109420 - DNA, 26 bp, Homo sapiens
actcagagaaaaaagggacgtcttag

SEQ ID NO: 109421 - DNA, 26 bp, Homo sapiens
ctcagagaaaaaagggacgtcttagg

SEQ ID NO: 109422 - DNA, 26 bp, Homo sapiens
tcagagaaaaaagggacgtcttaggg

SEQ ID NO: 109423 - DNA, 26 bp, Homo sapiens
cagagaaaaaagggacgtcttagggc

SEQ ID NO: 109424 - DNA, 26 bp, Homo sapiens
agagaaaaaagggacgtcttagggct

SEQ ID NO: 109425 - DNA, 26 bp, Homo sapiens
gagaaaaaagggacgtcttagggctt

SEQ ID NO: 109426 - DNA, 26 bp, Homo sapiens
agaaaaaagggacgtcttagggcttc

SEQ ID NO: 109427 - DNA, 26 bp, Homo sapiens
gaaaaaagggacgtcttagggcttcc

SEQ ID NO: 109428 - DNA, 26 bp, Homo sapiens
aaaaaagggacgtcttagggcttcct

SEQ ID NO: 109429 - DNA, 26 bp, Homo sapiens
aaaaagggacgtcttagggcttcctc

SEQ ID NO: 109430 - DNA, 26 bp, Homo sapiens
aaaagggacgtcttagggcttcctcg

SEQ ID NO: 109431 - DNA, 26 bp, Homo sapiens
aaagggacgtcttagggcttcctcgt

SEQ ID NO: 109432 - DNA, 26 bp, Homo sapiens
aagggacgtcttagggcttcctcgtt

SEQ ID NO: 109433 - DNA, 26 bp, Homo sapiens
agggacgtcttagggcttcctcgttg

SEQ ID NO: 109434 - DNA, 26 bp, Homo sapiens
gggacgtcttagggcttcctcgttgt

SEQ ID NO: 109435 - DNA, 26 bp, Homo sapiens
ggacgtcttagggcttcctcgttgtc

SEQ ID NO: 109436 - DNA, 26 bp, Homo sapiens
gacgtcttagggcttcctcgttgtcc

SEQ ID NO: 109437 - DNA, 26 bp, Homo sapiens
acgtcttagggcttcctcgttgtcct

SEQ ID NO: 109438 - DNA, 26 bp, Homo sapiens
cgtcttagggcttcctcgttgtcctg

SEQ ID NO: 109439 - DNA, 26 bp, Homo sapiens
gtcttagggcttcctcgttgtcctgc

SEQ ID NO: 109440 - DNA, 26 bp, Homo sapiens
tcttagggcttcctcgttgtcctgcc

SEQ ID NO: 109441 - DNA, 26 bp, Homo sapiens
cttagggcttcctcgttgtcctgccg

SEQ ID NO: 109442 - DNA, 26 bp, Homo sapiens
ttagggcttcctcgttgtcctgccgt

SEQ ID NO: 109443 - DNA, 26 bp, Homo sapiens
tagggcttcctcgttgtcctgccgtg

SEQ ID NO: 109444 - DNA, 26 bp, Homo sapiens
agggcttcctcgttgtcctgccgtga

SEQ ID NO: 109445 - DNA, 26 bp, Homo sapiens
gggcttcctcgttgtcctgccgtgaa

SEQ ID NO: 109446 - DNA, 26 bp, Homo sapiens
ggcttcctcgttgtcctgccgtgaag

SEQ ID NO: 109447 - DNA, 26 bp, Homo sapiens
gcttcctcgttgtcctgccgtgaaga

SEQ ID NO: 109448 - DNA, 26 bp, Homo sapiens
cttcctcgttgtcctgccgtgaagac

SEQ ID NO: 109449 - DNA, 26 bp, Homo sapiens
ttcctcgttgtcctgccgtgaagaca

SEQ ID NO: 109450 - DNA, 26 bp, Homo sapiens
tcctcgttgtcctgccgtgaagacac

SEQ ID NO: 109451 - DNA, 26 bp, Homo sapiens
cctcgttgtcctgccgtgaagacact

SEQ ID NO: 109452 - DNA, 26 bp, Homo sapiens
ctcgttgtcctgccgtgaagacactc

SEQ ID NO: 109453 - DNA, 26 bp, Homo sapiens
tcgttgtcctgccgtgaagacactct

SEQ ID NO: 109454 - DNA, 26 bp, Homo sapiens
cgttgtcctgccgtgaagacactctc

SEQ ID NO: 109455 - DNA, 26 bp, Homo sapiens
gttgtcctgccgtgaagacactctca

SEQ ID NO: 109456 - DNA, 26 bp, Homo sapiens
ttgtcctgccgtgaagacactctcac

SEQ ID NO: 109457 - DNA, 26 bp, Homo sapiens
tgtcctgccgtgaagacactctcacg

SEQ ID NO: 109458 - DNA, 26 bp, Homo sapiens
gtcctgccgtgaagacactctcacgt

SEQ ID NO: 109459 - DNA, 26 bp, Homo sapiens
tcctgccgtgaagacactctcacgtg

SEQ ID NO: 109460 - DNA, 26 bp, Homo sapiens
cctgccgtgaagacactctcacgtga

SEQ ID NO: 109461 - DNA, 26 bp, Homo sapiens
ctgccgtgaagacactctcacgtgag

SEQ ID NO: 109462 - DNA, 26 bp, Homo sapiens
tgccgtgaagacactctcacgtgagc

SEQ ID NO: 109463 - DNA, 26 bp, Homo sapiens
gccgtgaagacactctcacgtgagcc

SEQ ID NO: 109464 - DNA, 26 bp, Homo sapiens
ccgtgaagacactctcacgtgagcca

SEQ ID NO: 109465 - DNA, 26 bp, Homo sapiens
cgtgaagacactctcacgtgagccac

SEQ ID NO: 109466 - DNA, 26 bp, Homo sapiens
gtgaagacactctcacgtgagccaca

SEQ ID NO: 109467 - DNA, 26 bp, Homo sapiens
tgaagacactctcacgtgagccacag

SEQ ID NO: 109468 - DNA, 26 bp, Homo sapiens
gaagacactctcacgtgagccacagc

SEQ ID NO: 109469 - DNA, 26 bp, Homo sapiens
aagacactctcacgtgagccacagct

SEQ ID NO: 109470 - DNA, 26 bp, Homo sapiens
agacactctcacgtgagccacagctg

SEQ ID NO: 109471 - DNA, 26 bp, Homo sapiens
gacactctcacgtgagccacagctgt

SEQ ID NO: 109472 - DNA, 26 bp, Homo sapiens
acactctcacgtgagccacagctgtt

SEQ ID NO: 109473 - DNA, 26 bp, Homo sapiens
cactctcacgtgagccacagctgtta

SEQ ID NO: 109474 - DNA, 26 bp, Homo sapiens
actctcacgtgagccacagctgttat

SEQ ID NO: 109475 - DNA, 26 bp, Homo sapiens
ctctcacgtgagccacagctgttatt

SEQ ID NO: 109476 - DNA, 26 bp, Homo sapiens
tctcacgtgagccacagctgttattt

SEQ ID NO: 109477 - DNA, 26 bp, Homo sapiens
ctcacgtgagccacagctgttatttc

SEQ ID NO: 109478 - DNA, 26 bp, Homo sapiens
tcacgtgagccacagctgttatttcc

SEQ ID NO: 109479 - DNA, 26 bp, Homo sapiens
cacgtgagccacagctgttatttccc

SEQ ID NO: 109480 - DNA, 26 bp, Homo sapiens
acgtgagccacagctgttatttcccc

SEQ ID NO: 109481 - DNA, 26 bp, Homo sapiens
cgtgagccacagctgttatttcccca

SEQ ID NO: 109482 - DNA, 26 bp, Homo sapiens
gtgagccacagctgttatttccccag

SEQ ID NO: 109483 - DNA, 26 bp, Homo sapiens
tgagccacagctgttatttccccagt

SEQ ID NO: 109484 - DNA, 26 bp, Homo sapiens
gagccacagctgttatttccccagtg

SEQ ID NO: 109485 - DNA, 26 bp, Homo sapiens
agccacagctgttatttccccagtgg

SEQ ID NO: 109486 - DNA, 26 bp, Homo sapiens
gccacagctgttatttccccagtggg

SEQ ID NO: 109487 - DNA, 26 bp, Homo sapiens
ccacagctgttatttccccagtgggg

SEQ ID NO: 109488 - DNA, 26 bp, Homo sapiens
cacagctgttatttccccagtggggc

SEQ ID NO: 109489 - DNA, 26 bp, Homo sapiens
acagctgttatttccccagtggggcc

SEQ ID NO: 109490 - DNA, 26 bp, Homo sapiens
cagctgttatttccccagtggggcct

SEQ ID NO: 109491 - DNA, 26 bp, Homo sapiens
agctgttatttccccagtggggcctc

SEQ ID NO: 109492 - DNA, 26 bp, Homo sapiens
gctgttatttccccagtggggcctcc

SEQ ID NO: 109493 - DNA, 26 bp, Homo sapiens
ctgttatttccccagtggggcctccc

SEQ ID NO: 109494 - DNA, 26 bp, Homo sapiens
tgttatttccccagtggggcctccca

SEQ ID NO: 109495 - DNA, 26 bp, Homo sapiens
gttatttccccagtggggcctcccaa

SEQ ID NO: 109496 - DNA, 26 bp, Homo sapiens
ttatttccccagtggggcctcccaag

SEQ ID NO: 109497 - DNA, 26 bp, Homo sapiens
tatttccccagtggggcctcccaagg

SEQ ID NO: 109498 - DNA, 26 bp, Homo sapiens
atttccccagtggggcctcccaagga

SEQ ID NO: 109499 - DNA, 26 bp, Homo sapiens
tttccccagtggggcctcccaaggag

SEQ ID NO: 109500 - DNA, 26 bp, Homo sapiens
ttccccagtggggcctcccaaggagc

SEQ ID NO: 109501 - DNA, 26 bp, Homo sapiens
tccccagtggggcctcccaaggagct

SEQ ID NO: 109502 - DNA, 26 bp, Homo sapiens
ccccagtggggcctcccaaggagctt

SEQ ID NO: 109503 - DNA, 26 bp, Homo sapiens
cccagtggggcctcccaaggagcttg

SEQ ID NO: 109504 - DNA, 26 bp, Homo sapiens
ccagtggggcctcccaaggagcttgg

SEQ ID NO: 109505 - DNA, 26 bp, Homo sapiens
cagtggggcctcccaaggagcttggc

SEQ ID NO: 109506 - DNA, 26 bp, Homo sapiens
agtggggcctcccaaggagcttggct

SEQ ID NO: 109507 - DNA, 26 bp, Homo sapiens
gtggggcctcccaaggagcttggctg

SEQ ID NO: 109508 - DNA, 26 bp, Homo sapiens
tggggcctcccaaggagcttggctgc

SEQ ID NO: 109509 - DNA, 26 bp, Homo sapiens
ggggcctcccaaggagcttggctgct

SEQ ID NO: 109510 - DNA, 26 bp, Homo sapiens
gggcctcccaaggagcttggctgctt

SEQ ID NO: 109511 - DNA, 26 bp, Homo sapiens
ggcctcccaaggagcttggctgcttg

SEQ ID NO: 109512 - DNA, 26 bp, Homo sapiens
gcctcccaaggagcttggctgcttgg

SEQ ID NO: 109513 - DNA, 26 bp, Homo sapiens
cctcccaaggagcttggctgcttggc

SEQ ID NO: 109514 - DNA, 26 bp, Homo sapiens
ctcccaaggagcttggctgcttggct

SEQ ID NO: 109515 - DNA, 26 bp, Homo sapiens
tcccaaggagcttggctgcttggctt

SEQ ID NO: 109516 - DNA, 26 bp, Homo sapiens
cccaaggagcttggctgcttggcttg

SEQ ID NO: 109517 - DNA, 26 bp, Homo sapiens
ccaaggagcttggctgcttggcttga

SEQ ID NO: 109518 - DNA, 26 bp, Homo sapiens
caaggagcttggctgcttggcttgag

SEQ ID NO: 109519 - DNA, 26 bp, Homo sapiens
aaggagcttggctgcttggcttgagt

SEQ ID NO: 109520 - DNA, 26 bp, Homo sapiens
aggagcttggctgcttggcttgagtg

SEQ ID NO: 109521 - DNA, 26 bp, Homo sapiens
ggagcttggctgcttggcttgagtgg

SEQ ID NO: 109522 - DNA, 26 bp, Homo sapiens
gagcttggctgcttggcttgagtggg

SEQ ID NO: 109523 - DNA, 26 bp, Homo sapiens
agcttggctgcttggcttgagtggga

SEQ ID NO: 109524 - DNA, 26 bp, Homo sapiens
gcttggctgcttggcttgagtgggac

SEQ ID NO: 109525 - DNA, 26 bp, Homo sapiens
cttggctgcttggcttgagtgggaca

SEQ ID NO: 109526 - DNA, 26 bp, Homo sapiens
ttggctgcttggcttgagtgggacaa

SEQ ID NO: 109527 - DNA, 26 bp, Homo sapiens
tggctgcttggcttgagtgggacaag

SEQ ID NO: 109528 - DNA, 26 bp, Homo sapiens
ggctgcttggcttgagtgggacaagg

SEQ ID NO: 109529 - DNA, 26 bp, Homo sapiens
gctgcttggcttgagtgggacaaggg

SEQ ID NO: 109530 - DNA, 26 bp, Homo sapiens
ctgcttggcttgagtgggacaagggc

SEQ ID NO: 109531 - DNA, 26 bp, Homo sapiens
tgcttggcttgagtgggacaagggca

SEQ ID NO: 109532 - DNA, 26 bp, Homo sapiens
gcttggcttgagtgggacaagggcag

SEQ ID NO: 109533 - DNA, 26 bp, Homo sapiens
cttggcttgagtgggacaagggcagg

SEQ ID NO: 109534 - DNA, 26 bp, Homo sapiens
ttggcttgagtgggacaagggcaggg

SEQ ID NO: 109535 - DNA, 26 bp, Homo sapiens
tggcttgagtgggacaagggcagggg

SEQ ID NO: 109536 - DNA, 26 bp, Homo sapiens
ggcttgagtgggacaagggcaggggt

SEQ ID NO: 109537 - DNA, 26 bp, Homo sapiens
gcttgagtgggacaagggcaggggtc

SEQ ID NO: 109538 - DNA, 26 bp, Homo sapiens
cttgagtgggacaagggcaggggtcc

SEQ ID NO: 109539 - DNA, 26 bp, Homo sapiens
ttgagtgggacaagggcaggggtccc

SEQ ID NO: 109540 - DNA, 26 bp, Homo sapiens
tgagtgggacaagggcaggggtccct

SEQ ID NO: 109541 - DNA, 26 bp, Homo sapiens
gagtgggacaagggcaggggtccctg

SEQ ID NO: 109542 - DNA, 26 bp, Homo sapiens
agtgggacaagggcaggggtccctga

SEQ ID NO: 109543 - DNA, 26 bp, Homo sapiens
gtgggacaagggcaggggtccctgac

SEQ ID NO: 109544 - DNA, 26 bp, Homo sapiens
tgggacaagggcaggggtccctgact

SEQ ID NO: 109545 - DNA, 26 bp, Homo sapiens
gggacaagggcaggggtccctgactc

SEQ ID NO: 109546 - DNA, 26 bp, Homo sapiens
ggacaagggcaggggtccctgactcc

SEQ ID NO: 109547 - DNA, 26 bp, Homo sapiens
gacaagggcaggggtccctgactccc

SEQ ID NO: 109548 - DNA, 26 bp, Homo sapiens
acaagggcaggggtccctgactcccc

SEQ ID NO: 109549 - DNA, 26 bp, Homo sapiens
caagggcaggggtccctgactcccca

SEQ ID NO: 109550 - DNA, 26 bp, Homo sapiens
aagggcaggggtccctgactccccac

SEQ ID NO: 109551 - DNA, 26 bp, Homo sapiens
agggcaggggtccctgactccccacc

SEQ ID NO: 109552 - DNA, 26 bp, Homo sapiens
gggcaggggtccctgactccccacct

SEQ ID NO: 109553 - DNA, 26 bp, Homo sapiens
ggcaggggtccctgactccccacctg

SEQ ID NO: 109554 - DNA, 26 bp, Homo sapiens
gcaggggtccctgactccccacctga

SEQ ID NO: 109555 - DNA, 26 bp, Homo sapiens
caggggtccctgactccccacctgat

SEQ ID NO: 109556 - DNA, 26 bp, Homo sapiens
aggggtccctgactccccacctgatc

SEQ ID NO: 109557 - DNA, 26 bp, Homo sapiens
ggggtccctgactccccacctgatca

SEQ ID NO: 109558 - DNA, 26 bp, Homo sapiens
gggtccctgactccccacctgatcaa

SEQ ID NO: 109559 - DNA, 26 bp, Homo sapiens
ggtccctgactccccacctgatcaaa

SEQ ID NO: 109560 - DNA, 26 bp, Homo sapiens
gtccctgactccccacctgatcaaag

SEQ ID NO: 109561 - DNA, 26 bp, Homo sapiens
tccctgactccccacctgatcaaagg

SEQ ID NO: 109562 - DNA, 26 bp, Homo sapiens
ccctgactccccacctgatcaaaggc

SEQ ID NO: 109563 - DNA, 26 bp, Homo sapiens
cctgactccccacctgatcaaaggct

SEQ ID NO: 109564 - DNA, 26 bp, Homo sapiens
ctgactccccacctgatcaaaggctg

SEQ ID NO: 109565 - DNA, 26 bp, Homo sapiens
tgactccccacctgatcaaaggctgg

SEQ ID NO: 109566 - DNA, 26 bp, Homo sapiens
gactccccacctgatcaaaggctggg

SEQ ID NO: 109567 - DNA, 26 bp, Homo sapiens
actccccacctgatcaaaggctgggg

SEQ ID NO: 109568 - DNA, 26 bp, Homo sapiens
ctccccacctgatcaaaggctgggga

SEQ ID NO: 109569 - DNA, 26 bp, Homo sapiens
tccccacctgatcaaaggctggggag

SEQ ID NO: 109570 - DNA, 26 bp, Homo sapiens
ccccacctgatcaaaggctggggagg

SEQ ID NO: 109571 - DNA, 26 bp, Homo sapiens
cccacctgatcaaaggctggggaggt

SEQ ID NO: 109572 - DNA, 26 bp, Homo sapiens
ccacctgatcaaaggctggggaggtg

SEQ ID NO: 109573 - DNA, 26 bp, Homo sapiens
cacctgatcaaaggctggggaggtgg

SEQ ID NO: 109574 - DNA, 26 bp, Homo sapiens
acctgatcaaaggctggggaggtggt

SEQ ID NO: 109575 - DNA, 26 bp, Homo sapiens
cctgatcaaaggctggggaggtggta

SEQ ID NO: 109576 - DNA, 26 bp, Homo sapiens
ctgatcaaaggctggggaggtggtag

SEQ ID NO: 109577 - DNA, 26 bp, Homo sapiens
tgatcaaaggctggggaggtggtagg

SEQ ID NO: 109578 - DNA, 26 bp, Homo sapiens
gatcaaaggctggggaggtggtaggg

SEQ ID NO: 109579 - DNA, 26 bp, Homo sapiens
atcaaaggctggggaggtggtaggga

SEQ ID NO: 109580 - DNA, 26 bp, Homo sapiens
tcaaaggctggggaggtggtagggag

SEQ ID NO: 109581 - DNA, 26 bp, Homo sapiens
caaaggctggggaggtggtagggagc

SEQ ID NO: 109582 - DNA, 26 bp, Homo sapiens
aaaggctggggaggtggtagggagca

SEQ ID NO: 109583 - DNA, 26 bp, Homo sapiens
aaggctggggaggtggtagggagcac

SEQ ID NO: 109584 - DNA, 26 bp, Homo sapiens
aggctggggaggtggtagggagcacc

SEQ ID NO: 109585 - DNA, 26 bp, Homo sapiens
ggctggggaggtggtagggagcaccc

SEQ ID NO: 109586 - DNA, 26 bp, Homo sapiens
gctggggaggtggtagggagcaccca

SEQ ID NO: 109587 - DNA, 26 bp, Homo sapiens
ctggggaggtggtagggagcacccag

SEQ ID NO: 109588 - DNA, 26 bp, Homo sapiens
tggggaggtggtagggagcacccaga

SEQ ID NO: 109589 - DNA, 26 bp, Homo sapiens
ggggaggtggtagggagcacccagaa

SEQ ID NO: 109590 - DNA, 26 bp, Homo sapiens
gggaggtggtagggagcacccagaac

SEQ ID NO: 109591 - DNA, 26 bp, Homo sapiens
ggaggtggtagggagcacccagaact

SEQ ID NO: 109592 - DNA, 26 bp, Homo sapiens
gaggtggtagggagcacccagaactg

SEQ ID NO: 109593 - DNA, 26 bp, Homo sapiens
aggtggtagggagcacccagaactgc

SEQ ID NO: 109594 - DNA, 26 bp, Homo sapiens
ggtggtagggagcacccagaactgcc

SEQ ID NO: 109595 - DNA, 26 bp, Homo sapiens
gtggtagggagcacccagaactgccg

SEQ ID NO: 109596 - DNA, 26 bp, Homo sapiens
tggtagggagcacccagaactgccgg

SEQ ID NO: 109597 - DNA, 26 bp, Homo sapiens
ggtagggagcacccagaactgccgga

SEQ ID NO: 109598 - DNA, 26 bp, Homo sapiens
gtagggagcacccagaactgccggac

SEQ ID NO: 109599 - DNA, 26 bp, Homo sapiens
tagggagcacccagaactgccggacg

SEQ ID NO: 109600 - DNA, 26 bp, Homo sapiens
agggagcacccagaactgccggacgg

SEQ ID NO: 109601 - DNA, 26 bp, Homo sapiens
gggagcacccagaactgccggacggg

SEQ ID NO: 109602 - DNA, 26 bp, Homo sapiens
ggagcacccagaactgccggacgggc

SEQ ID NO: 109603 - DNA, 26 bp, Homo sapiens
gagcacccagaactgccggacgggcc

SEQ ID NO: 109604 - DNA, 26 bp, Homo sapiens
agcacccagaactgccggacgggcct

SEQ ID NO: 109605 - DNA, 26 bp, Homo sapiens
gcacccagaactgccggacgggcctc

SEQ ID NO: 109606 - DNA, 26 bp, Homo sapiens
cacccagaactgccggacgggcctcc

SEQ ID NO: 109607 - DNA, 26 bp, Homo sapiens
acccagaactgccggacgggcctccc

SEQ ID NO: 109608 - DNA, 26 bp, Homo sapiens
cccagaactgccggacgggcctccca

SEQ ID NO: 109609 - DNA, 26 bp, Homo sapiens
ccagaactgccggacgggcctcccac

SEQ ID NO: 109610 - DNA, 26 bp, Homo sapiens
cagaactgccggacgggcctcccaca

SEQ ID NO: 109611 - DNA, 26 bp, Homo sapiens
agaactgccggacgggcctcccacac

SEQ ID NO: 109612 - DNA, 26 bp, Homo sapiens
gaactgccggacgggcctcccacacc

SEQ ID NO: 109613 - DNA, 26 bp, Homo sapiens
aactgccggacgggcctcccacaccc

SEQ ID NO: 109614 - DNA, 26 bp, Homo sapiens
actgccggacgggcctcccacacccc

SEQ ID NO: 109615 - DNA, 26 bp, Homo sapiens
ctgccggacgggcctcccacacccca

SEQ ID NO: 109616 - DNA, 26 bp, Homo sapiens
tgccggacgggcctcccacaccccag

SEQ ID NO: 109617 - DNA, 26 bp, Homo sapiens
gccggacgggcctcccacaccccagg

SEQ ID NO: 109618 - DNA, 26 bp, Homo sapiens
ccggacgggcctcccacaccccaggt

SEQ ID NO: 109619 - DNA, 26 bp, Homo sapiens
cggacgggcctcccacaccccaggtg

SEQ ID NO: 109620 - DNA, 26 bp, Homo sapiens
ggacgggcctcccacaccccaggtga

SEQ ID NO: 109621 - DNA, 26 bp, Homo sapiens
gacgggcctcccacaccccaggtgag

SEQ ID NO: 109622 - DNA, 26 bp, Homo sapiens
acgggcctcccacaccccaggtgagc

SEQ ID NO: 109623 - DNA, 26 bp, Homo sapiens
cgggcctcccacaccccaggtgagca

SEQ ID NO: 109624 - DNA, 26 bp, Homo sapiens
gggcctcccacaccccaggtgagcaa

SEQ ID NO: 109625 - DNA, 26 bp, Homo sapiens
ggcctcccacaccccaggtgagcaaa

SEQ ID NO: 109626 - DNA, 26 bp, Homo sapiens
gcctcccacaccccaggtgagcaaac

SEQ ID NO: 109627 - DNA, 26 bp, Homo sapiens
cctcccacaccccaggtgagcaaaca

SEQ ID NO: 109628 - DNA, 26 bp, Homo sapiens
ctcccacaccccaggtgagcaaacaa

SEQ ID NO: 109629 - DNA, 26 bp, Homo sapiens
tcccacaccccaggtgagcaaacaag

SEQ ID NO: 109630 - DNA, 26 bp, Homo sapiens
cccacaccccaggtgagcaaacaagc

SEQ ID NO: 109631 - DNA, 26 bp, Homo sapiens
ccacaccccaggtgagcaaacaagca

SEQ ID NO: 109632 - DNA, 26 bp, Homo sapiens
cacaccccaggtgagcaaacaagcac

SEQ ID NO: 109633 - DNA, 26 bp, Homo sapiens
acaccccaggtgagcaaacaagcacg

SEQ ID NO: 109634 - DNA, 26 bp, Homo sapiens
caccccaggtgagcaaacaagcacgg

SEQ ID NO: 109635 - DNA, 26 bp, Homo sapiens
accccaggtgagcaaacaagcacgga

SEQ ID NO: 109636 - DNA, 26 bp, Homo sapiens
ccccaggtgagcaaacaagcacggag

SEQ ID NO: 109637 - DNA, 26 bp, Homo sapiens
cccaggtgagcaaacaagcacggagc

SEQ ID NO: 109638 - DNA, 26 bp, Homo sapiens
ccaggtgagcaaacaagcacggagca

SEQ ID NO: 109639 - DNA, 26 bp, Homo sapiens
caggtgagcaaacaagcacggagcag

SEQ ID NO: 109640 - DNA, 26 bp, Homo sapiens
aggtgagcaaacaagcacggagcagc

SEQ ID NO: 109641 - DNA, 26 bp, Homo sapiens
ggtgagcaaacaagcacggagcagct

SEQ ID NO: 109642 - DNA, 26 bp, Homo sapiens
gtgagcaaacaagcacggagcagctt

SEQ ID NO: 109643 - DNA, 26 bp, Homo sapiens
tgagcaaacaagcacggagcagcttc

SEQ ID NO: 109644 - DNA, 26 bp, Homo sapiens
gagcaaacaagcacggagcagcttcc

SEQ ID NO: 109645 - DNA, 26 bp, Homo sapiens
agcaaacaagcacggagcagcttcct

SEQ ID NO: 109646 - DNA, 26 bp, Homo sapiens
gcaaacaagcacggagcagcttcctg

SEQ ID NO: 109647 - DNA, 26 bp, Homo sapiens
caaacaagcacggagcagcttcctgc

SEQ ID NO: 109648 - DNA, 26 bp, Homo sapiens
aaacaagcacggagcagcttcctgcg

SEQ ID NO: 109649 - DNA, 26 bp, Homo sapiens
aacaagcacggagcagcttcctgcgg

SEQ ID NO: 109650 - DNA, 26 bp, Homo sapiens
acaagcacggagcagcttcctgcggt

SEQ ID NO: 109651 - DNA, 26 bp, Homo sapiens
caagcacggagcagcttcctgcggtt

SEQ ID NO: 109652 - DNA, 26 bp, Homo sapiens
aagcacggagcagcttcctgcggttc

SEQ ID NO: 109653 - DNA, 26 bp, Homo sapiens
agcacggagcagcttcctgcggttcc

SEQ ID NO: 109654 - DNA, 26 bp, Homo sapiens
gcacggagcagcttcctgcggttcca

SEQ ID NO: 109655 - DNA, 26 bp, Homo sapiens
cacggagcagcttcctgcggttccat

SEQ ID NO: 109656 - DNA, 26 bp, Homo sapiens
acggagcagcttcctgcggttccatc

SEQ ID NO: 109657 - DNA, 26 bp, Homo sapiens
cggagcagcttcctgcggttccatct

SEQ ID NO: 109658 - DNA, 26 bp, Homo sapiens
ggagcagcttcctgcggttccatctg

SEQ ID NO: 109659 - DNA, 26 bp, Homo sapiens
gagcagcttcctgcggttccatctga

SEQ ID NO: 109660 - DNA, 26 bp, Homo sapiens
agcagcttcctgcggttccatctgag

SEQ ID NO: 109661 - DNA, 26 bp, Homo sapiens
gcagcttcctgcggttccatctgagt

SEQ ID NO: 109662 - DNA, 26 bp, Homo sapiens
cagcttcctgcggttccatctgagtg

SEQ ID NO: 109663 - DNA, 26 bp, Homo sapiens
agcttcctgcggttccatctgagtga

SEQ ID NO: 109664 - DNA, 26 bp, Homo sapiens
gcttcctgcggttccatctgagtgac

SEQ ID NO: 109665 - DNA, 26 bp, Homo sapiens
cttcctgcggttccatctgagtgaca

SEQ ID NO: 109666 - DNA, 26 bp, Homo sapiens
ttcctgcggttccatctgagtgacat

SEQ ID NO: 109667 - DNA, 26 bp, Homo sapiens
tcctgcggttccatctgagtgacatc

SEQ ID NO: 109668 - DNA, 26 bp, Homo sapiens
cctgcggttccatctgagtgacatcc

SEQ ID NO: 109669 - DNA, 26 bp, Homo sapiens
ctgcggttccatctgagtgacatcct

SEQ ID NO: 109670 - DNA, 26 bp, Homo sapiens
tgcggttccatctgagtgacatcctc

SEQ ID NO: 109671 - DNA, 26 bp, Homo sapiens
gcggttccatctgagtgacatcctca

SEQ ID NO: 109672 - DNA, 26 bp, Homo sapiens
cggttccatctgagtgacatcctcac

SEQ ID NO: 109673 - DNA, 26 bp, Homo sapiens
ggttccatctgagtgacatcctcacg

SEQ ID NO: 109674 - DNA, 26 bp, Homo sapiens
gttccatctgagtgacatcctcacgg

SEQ ID NO: 109675 - DNA, 26 bp, Homo sapiens
ttccatctgagtgacatcctcacggg

SEQ ID NO: 109676 - DNA, 26 bp, Homo sapiens
tccatctgagtgacatcctcacgggg

SEQ ID NO: 109677 - DNA, 26 bp, Homo sapiens
ccatctgagtgacatcctcacggggg

SEQ ID NO: 109678 - DNA, 26 bp, Homo sapiens
catctgagtgacatcctcacgggggc

SEQ ID NO: 109679 - DNA, 26 bp, Homo sapiens
atctgagtgacatcctcacgggggca

SEQ ID NO: 109680 - DNA, 26 bp, Homo sapiens
tctgagtgacatcctcacgggggcag

SEQ ID NO: 109681 - DNA, 26 bp, Homo sapiens
ctgagtgacatcctcacgggggcagg

SEQ ID NO: 109682 - DNA, 26 bp, Homo sapiens
tgagtgacatcctcacgggggcaggg

SEQ ID NO: 109683 - DNA, 26 bp, Homo sapiens
gagtgacatcctcacgggggcagggc

SEQ ID NO: 109684 - DNA, 26 bp, Homo sapiens
agtgacatcctcacgggggcagggca

SEQ ID NO: 109685 - DNA, 26 bp, Homo sapiens
gtgacatcctcacgggggcagggcac

SEQ ID NO: 109686 - DNA, 26 bp, Homo sapiens
tgacatcctcacgggggcagggcacg

SEQ ID NO: 109687 - DNA, 26 bp, Homo sapiens
gacatcctcacgggggcagggcacgg

SEQ ID NO: 109688 - DNA, 26 bp, Homo sapiens
acatcctcacgggggcagggcacggc

SEQ ID NO: 109689 - DNA, 26 bp, Homo sapiens
catcctcacgggggcagggcacggct

SEQ ID NO: 109690 - DNA, 26 bp, Homo sapiens
atcctcacgggggcagggcacggctt

SEQ ID NO: 109691 - DNA, 26 bp, Homo sapiens
tcctcacgggggcagggcacggcttc

SEQ ID NO: 109692 - DNA, 26 bp, Homo sapiens
cctcacgggggcagggcacggcttcc

SEQ ID NO: 109693 - DNA, 26 bp, Homo sapiens
ctcacgggggcagggcacggcttcct

SEQ ID NO: 109694 - DNA, 26 bp, Homo sapiens
tcacgggggcagggcacggcttcctg

SEQ ID NO: 109695 - DNA, 26 bp, Homo sapiens
cacgggggcagggcacggcttcctgg

SEQ ID NO: 109696 - DNA, 26 bp, Homo sapiens
acgggggcagggcacggcttcctggg

SEQ ID NO: 109697 - DNA, 26 bp, Homo sapiens
cgggggcagggcacggcttcctgggg

SEQ ID NO: 109698 - DNA, 26 bp, Homo sapiens
gggggcagggcacggcttcctggggc

SEQ ID NO: 109699 - DNA, 26 bp, Homo sapiens
ggggcagggcacggcttcctggggcc

SEQ ID NO: 109700 - DNA, 26 bp, Homo sapiens
gggcagggcacggcttcctggggcct

SEQ ID NO: 109701 - DNA, 26 bp, Homo sapiens
ggcagggcacggcttcctggggcctg

SEQ ID NO: 109702 - DNA, 26 bp, Homo sapiens
gcagggcacggcttcctggggcctgg

SEQ ID NO: 109703 - DNA, 26 bp, Homo sapiens
cagggcacggcttcctggggcctggg

SEQ ID NO: 109704 - DNA, 26 bp, Homo sapiens
agggcacggcttcctggggcctgggg

SEQ ID NO: 109705 - DNA, 26 bp, Homo sapiens
gggcacggcttcctggggcctgggga

SEQ ID NO: 109706 - DNA, 26 bp, Homo sapiens
ggcacggcttcctggggcctggggac

SEQ ID NO: 109707 - DNA, 26 bp, Homo sapiens
gcacggcttcctggggcctggggact

SEQ ID NO: 109708 - DNA, 26 bp, Homo sapiens
cacggcttcctggggcctggggactt

SEQ ID NO: 109709 - DNA, 26 bp, Homo sapiens
acggcttcctggggcctggggacttc

SEQ ID NO: 109710 - DNA, 26 bp, Homo sapiens
cggcttcctggggcctggggacttcc

SEQ ID NO: 109711 - DNA, 26 bp, Homo sapiens
ggcttcctggggcctggggacttccc

SEQ ID NO: 109712 - DNA, 26 bp, Homo sapiens
gcttcctggggcctggggacttccct

SEQ ID NO: 109713 - DNA, 26 bp, Homo sapiens
cttcctggggcctggggacttccctg

SEQ ID NO: 109714 - DNA, 26 bp, Homo sapiens
ttcctggggcctggggacttccctgc

SEQ ID NO: 109715 - DNA, 26 bp, Homo sapiens
tcctggggcctggggacttccctgcc

SEQ ID NO: 109716 - DNA, 26 bp, Homo sapiens
cctggggcctggggacttccctgcct

SEQ ID NO: 109717 - DNA, 26 bp, Homo sapiens
ctggggcctggggacttccctgcctc

SEQ ID NO: 109718 - DNA, 26 bp, Homo sapiens
tggggcctggggacttccctgcctca

SEQ ID NO: 109719 - DNA, 26 bp, Homo sapiens
ggggcctggggacttccctgcctcag

SEQ ID NO: 109720 - DNA, 26 bp, Homo sapiens
gggcctggggacttccctgcctcagt

SEQ ID NO: 109721 - DNA, 26 bp, Homo sapiens
ggcctggggacttccctgcctcagtg

SEQ ID NO: 109722 - DNA, 26 bp, Homo sapiens
gcctggggacttccctgcctcagtgt

SEQ ID NO: 109723 - DNA, 26 bp, Homo sapiens
cctggggacttccctgcctcagtgtg

SEQ ID NO: 109724 - DNA, 26 bp, Homo sapiens
ctggggacttccctgcctcagtgtgt

SEQ ID NO: 109725 - DNA, 26 bp, Homo sapiens
tggggacttccctgcctcagtgtgtt

SEQ ID NO: 109726 - DNA, 26 bp, Homo sapiens
ggggacttccctgcctcagtgtgttt

SEQ ID NO: 109727 - DNA, 26 bp, Homo sapiens
gggacttccctgcctcagtgtgtttc

SEQ ID NO: 109728 - DNA, 26 bp, Homo sapiens
ggacttccctgcctcagtgtgtttct

SEQ ID NO: 109729 - DNA, 26 bp, Homo sapiens
gacttccctgcctcagtgtgtttctt

SEQ ID NO: 109730 - DNA, 26 bp, Homo sapiens
acttccctgcctcagtgtgtttctta

SEQ ID NO: 109731 - DNA, 26 bp, Homo sapiens
cttccctgcctcagtgtgtttcttac

SEQ ID NO: 109732 - DNA, 26 bp, Homo sapiens
ttccctgcctcagtgtgtttcttaca

SEQ ID NO: 109733 - DNA, 26 bp, Homo sapiens
tccctgcctcagtgtgtttcttacac

SEQ ID NO: 109734 - DNA, 26 bp, Homo sapiens
ccctgcctcagtgtgtttcttacact

SEQ ID NO: 109735 - DNA, 26 bp, Homo sapiens
cctgcctcagtgtgtttcttacactt

SEQ ID NO: 109736 - DNA, 26 bp, Homo sapiens
ctgcctcagtgtgtttcttacacttc

SEQ ID NO: 109737 - DNA, 26 bp, Homo sapiens
tgcctcagtgtgtttcttacacttcc

SEQ ID NO: 109738 - DNA, 26 bp, Homo sapiens
gcctcagtgtgtttcttacacttccc

SEQ ID NO: 109739 - DNA, 26 bp, Homo sapiens
cctcagtgtgtttcttacacttccct

SEQ ID NO: 109740 - DNA, 26 bp, Homo sapiens
ctcagtgtgtttcttacacttccctg

SEQ ID NO: 109741 - DNA, 26 bp, Homo sapiens
tcagtgtgtttcttacacttccctgc

SEQ ID NO: 109742 - DNA, 26 bp, Homo sapiens
cagtgtgtttcttacacttccctgcc

SEQ ID NO: 109743 - DNA, 26 bp, Homo sapiens
agtgtgtttcttacacttccctgcct

SEQ ID NO: 109744 - DNA, 26 bp, Homo sapiens
gtgtgtttcttacacttccctgccta

SEQ ID NO: 109745 - DNA, 26 bp, Homo sapiens
tgtgtttcttacacttccctgcctaa

SEQ ID NO: 109746 - DNA, 26 bp, Homo sapiens
gtgtttcttacacttccctgcctaag

SEQ ID NO: 109747 - DNA, 26 bp, Homo sapiens
tgtttcttacacttccctgcctaagg

SEQ ID NO: 109748 - DNA, 26 bp, Homo sapiens
gtttcttacacttccctgcctaaggt

SEQ ID NO: 109749 - DNA, 26 bp, Homo sapiens
tttcttacacttccctgcctaaggtg

SEQ ID NO: 109750 - DNA, 26 bp, Homo sapiens
ttcttacacttccctgcctaaggtga

SEQ ID NO: 109751 - DNA, 26 bp, Homo sapiens
tcttacacttccctgcctaaggtgat

SEQ ID NO: 109752 - DNA, 26 bp, Homo sapiens
cttacacttccctgcctaaggtgatg

SEQ ID NO: 109753 - DNA, 26 bp, Homo sapiens
ttacacttccctgcctaaggtgatgc

SEQ ID NO: 109754 - DNA, 26 bp, Homo sapiens
tacacttccctgcctaaggtgatgcc

SEQ ID NO: 109755 - DNA, 26 bp, Homo sapiens
acacttccctgcctaaggtgatgcca

SEQ ID NO: 109756 - DNA, 26 bp, Homo sapiens
cacttccctgcctaaggtgatgccac

SEQ ID NO: 109757 - DNA, 26 bp, Homo sapiens
acttccctgcctaaggtgatgccacg

SEQ ID NO: 109758 - DNA, 26 bp, Homo sapiens
cttccctgcctaaggtgatgccacgg

SEQ ID NO: 109759 - DNA, 26 bp, Homo sapiens
ttccctgcctaaggtgatgccacgga

SEQ ID NO: 109760 - DNA, 26 bp, Homo sapiens
tccctgcctaaggtgatgccacggag

SEQ ID NO: 109761 - DNA, 26 bp, Homo sapiens
ccctgcctaaggtgatgccacggagg

SEQ ID NO: 109762 - DNA, 26 bp, Homo sapiens
cctgcctaaggtgatgccacggaggg

SEQ ID NO: 109763 - DNA, 26 bp, Homo sapiens
ctgcctaaggtgatgccacggagggg

SEQ ID NO: 109764 - DNA, 26 bp, Homo sapiens
tgcctaaggtgatgccacggagggga

SEQ ID NO: 109765 - DNA, 26 bp, Homo sapiens
gcctaaggtgatgccacggaggggat

SEQ ID NO: 109766 - DNA, 26 bp, Homo sapiens
cctaaggtgatgccacggaggggatg

SEQ ID NO: 109767 - DNA, 26 bp, Homo sapiens
ctaaggtgatgccacggaggggatgg

SEQ ID NO: 109768 - DNA, 26 bp, Homo sapiens
taaggtgatgccacggaggggatggt

SEQ ID NO: 109769 - DNA, 26 bp, Homo sapiens
aaggtgatgccacggaggggatggtt

SEQ ID NO: 109770 - DNA, 26 bp, Homo sapiens
aggtgatgccacggaggggatggttg

SEQ ID NO: 109771 - DNA, 26 bp, Homo sapiens
ggtgatgccacggaggggatggttga

SEQ ID NO: 109772 - DNA, 26 bp, Homo sapiens
gtgatgccacggaggggatggttgag

SEQ ID NO: 109773 - DNA, 26 bp, Homo sapiens
tgatgccacggaggggatggttgaga

SEQ ID NO: 109774 - DNA, 26 bp, Homo sapiens
gatgccacggaggggatggttgagat

SEQ ID NO: 109775 - DNA, 26 bp, Homo sapiens
atgccacggaggggatggttgagatg

SEQ ID NO: 109776 - DNA, 26 bp, Homo sapiens
tgccacggaggggatggttgagatga

SEQ ID NO: 109777 - DNA, 26 bp, Homo sapiens
gccacggaggggatggttgagatgac

SEQ ID NO: 109778 - DNA, 26 bp, Homo sapiens
ccacggaggggatggttgagatgact

SEQ ID NO: 109779 - DNA, 26 bp, Homo sapiens
cacggaggggatggttgagatgactc

SEQ ID NO: 109780 - DNA, 26 bp, Homo sapiens
acggaggggatggttgagatgactcc

SEQ ID NO: 109781 - DNA, 26 bp, Homo sapiens
cggaggggatggttgagatgactccc

SEQ ID NO: 109782 - DNA, 26 bp, Homo sapiens
ggaggggatggttgagatgactccca

SEQ ID NO: 109783 - DNA, 26 bp, Homo sapiens
gaggggatggttgagatgactcccac

SEQ ID NO: 109784 - DNA, 26 bp, Homo sapiens
aggggatggttgagatgactcccacg

SEQ ID NO: 109785 - DNA, 26 bp, Homo sapiens
ggggatggttgagatgactcccacgg

SEQ ID NO: 109786 - DNA, 26 bp, Homo sapiens
gggatggttgagatgactcccacggg

SEQ ID NO: 109787 - DNA, 26 bp, Homo sapiens
ggatggttgagatgactcccacgggc

SEQ ID NO: 109788 - DNA, 26 bp, Homo sapiens
gatggttgagatgactcccacgggcc

SEQ ID NO: 109789 - DNA, 26 bp, Homo sapiens
atggttgagatgactcccacgggccc

SEQ ID NO: 109790 - DNA, 26 bp, Homo sapiens
tggttgagatgactcccacgggcccc

SEQ ID NO: 109791 - DNA, 26 bp, Homo sapiens
ggttgagatgactcccacgggcccct

SEQ ID NO: 109792 - DNA, 26 bp, Homo sapiens
gttgagatgactcccacgggcccctt

SEQ ID NO: 109793 - DNA, 26 bp, Homo sapiens
ttgagatgactcccacgggccccttc

SEQ ID NO: 109794 - DNA, 26 bp, Homo sapiens
tgagatgactcccacgggccccttcc

SEQ ID NO: 109795 - DNA, 26 bp, Homo sapiens
gagatgactcccacgggccccttcca

SEQ ID NO: 109796 - DNA, 26 bp, Homo sapiens
agatgactcccacgggccccttccag

SEQ ID NO: 109797 - DNA, 26 bp, Homo sapiens
gatgactcccacgggccccttccagt

SEQ ID NO: 109798 - DNA, 26 bp, Homo sapiens
atgactcccacgggccccttccagtc

SEQ ID NO: 109799 - DNA, 26 bp, Homo sapiens
tgactcccacgggccccttccagtcc

SEQ ID NO: 109800 - DNA, 26 bp, Homo sapiens
gactcccacgggccccttccagtcca

SEQ ID NO: 109801 - DNA, 26 bp, Homo sapiens
actcccacgggccccttccagtccac

SEQ ID NO: 109802 - DNA, 26 bp, Homo sapiens
ctcccacgggccccttccagtccacc

SEQ ID NO: 109803 - DNA, 26 bp, Homo sapiens
tcccacgggccccttccagtccacct

SEQ ID NO: 109804 - DNA, 26 bp, Homo sapiens
cccacgggccccttccagtccacctt

SEQ ID NO: 109805 - DNA, 26 bp, Homo sapiens
ccacgggccccttccagtccaccttt

SEQ ID NO: 109806 - DNA, 26 bp, Homo sapiens
cacgggccccttccagtccacctttc

SEQ ID NO: 109807 - DNA, 26 bp, Homo sapiens
acgggccccttccagtccacctttct

SEQ ID NO: 109808 - DNA, 26 bp, Homo sapiens
cgggccccttccagtccacctttctc

SEQ ID NO: 109809 - DNA, 26 bp, Homo sapiens
gggccccttccagtccacctttctcc

SEQ ID NO: 109810 - DNA, 26 bp, Homo sapiens
ggccccttccagtccacctttctccg

SEQ ID NO: 109811 - DNA, 26 bp, Homo sapiens
gccccttccagtccacctttctccgt

SEQ ID NO: 109812 - DNA, 26 bp, Homo sapiens
ccccttccagtccacctttctccgtt

SEQ ID NO: 109813 - DNA, 26 bp, Homo sapiens
cccttccagtccacctttctccgttc

SEQ ID NO: 109814 - DNA, 26 bp, Homo sapiens
ccttccagtccacctttctccgttcc

SEQ ID NO: 109815 - DNA, 26 bp, Homo sapiens
cttccagtccacctttctccgttccg

SEQ ID NO: 109816 - DNA, 26 bp, Homo sapiens
ttccagtccacctttctccgttccga

SEQ ID NO: 109817 - DNA, 26 bp, Homo sapiens
tccagtccacctttctccgttccgac

SEQ ID NO: 109818 - DNA, 26 bp, Homo sapiens
ccagtccacctttctccgttccgact

SEQ ID NO: 109819 - DNA, 26 bp, Homo sapiens
cagtccacctttctccgttccgactc

SEQ ID NO: 109820 - DNA, 26 bp, Homo sapiens
agtccacctttctccgttccgactct

SEQ ID NO: 109821 - DNA, 26 bp, Homo sapiens
gtccacctttctccgttccgactctg

SEQ ID NO: 109822 - DNA, 26 bp, Homo sapiens
tccacctttctccgttccgactctga

SEQ ID NO: 109823 - DNA, 26 bp, Homo sapiens
ccacctttctccgttccgactctgag

SEQ ID NO: 109824 - DNA, 26 bp, Homo sapiens
cacctttctccgttccgactctgagt

SEQ ID NO: 109825 - DNA, 26 bp, Homo sapiens
acctttctccgttccgactctgagtt

SEQ ID NO: 109826 - DNA, 26 bp, Homo sapiens
cctttctccgttccgactctgagttt

SEQ ID NO: 109827 - DNA, 26 bp, Homo sapiens
ctttctccgttccgactctgagtttc

SEQ ID NO: 109828 - DNA, 26 bp, Homo sapiens
tttctccgttccgactctgagtttcc

SEQ ID NO: 109829 - DNA, 26 bp, Homo sapiens
ttctccgttccgactctgagtttcct

SEQ ID NO: 109830 - DNA, 26 bp, Homo sapiens
tctccgttccgactctgagtttcctc

SEQ ID NO: 109831 - DNA, 26 bp, Homo sapiens
ctccgttccgactctgagtttcctcg

SEQ ID NO: 109832 - DNA, 26 bp, Homo sapiens
tccgttccgactctgagtttcctcgg

SEQ ID NO: 109833 - DNA, 26 bp, Homo sapiens
ccgttccgactctgagtttcctcggg

SEQ ID NO: 109834 - DNA, 26 bp, Homo sapiens
cgttccgactctgagtttcctcgggt

SEQ ID NO: 109835 - DNA, 26 bp, Homo sapiens
gttccgactctgagtttcctcgggtc

SEQ ID NO: 109836 - DNA, 26 bp, Homo sapiens
ttccgactctgagtttcctcgggtct

SEQ ID NO: 109837 - DNA, 26 bp, Homo sapiens
tccgactctgagtttcctcgggtcta

SEQ ID NO: 109838 - DNA, 26 bp, Homo sapiens
ccgactctgagtttcctcgggtctat

SEQ ID NO: 109839 - DNA, 26 bp, Homo sapiens
cgactctgagtttcctcgggtctata

SEQ ID NO: 109840 - DNA, 26 bp, Homo sapiens
gactctgagtttcctcgggtctatag

SEQ ID NO: 109841 - DNA, 26 bp, Homo sapiens
actctgagtttcctcgggtctatagc

SEQ ID NO: 109842 - DNA, 26 bp, Homo sapiens
ctctgagtttcctcgggtctatagct

SEQ ID NO: 109843 - DNA, 26 bp, Homo sapiens
tctgagtttcctcgggtctatagctt

SEQ ID NO: 109844 - DNA, 26 bp, Homo sapiens
ctgagtttcctcgggtctatagctta

SEQ ID NO: 109845 - DNA, 26 bp, Homo sapiens
tgagtttcctcgggtctatagcttat

SEQ ID NO: 109846 - DNA, 26 bp, Homo sapiens
gagtttcctcgggtctatagcttatg

SEQ ID NO: 109847 - DNA, 26 bp, Homo sapiens
agtttcctcgggtctatagcttatgg

SEQ ID NO: 109848 - DNA, 26 bp, Homo sapiens
gtttcctcgggtctatagcttatggg

SEQ ID NO: 109849 - DNA, 26 bp, Homo sapiens
tttcctcgggtctatagcttatggga

SEQ ID NO: 109850 - DNA, 26 bp, Homo sapiens
ttcctcgggtctatagcttatgggaa

SEQ ID NO: 109851 - DNA, 26 bp, Homo sapiens
tcctcgggtctatagcttatgggaag

SEQ ID NO: 109852 - DNA, 26 bp, Homo sapiens
cctcgggtctatagcttatgggaagg

SEQ ID NO: 109853 - DNA, 26 bp, Homo sapiens
ctcgggtctatagcttatgggaaggg

SEQ ID NO: 109854 - DNA, 26 bp, Homo sapiens
tcgggtctatagcttatgggaaggga

SEQ ID NO: 109855 - DNA, 26 bp, Homo sapiens
cgggtctatagcttatgggaagggag

SEQ ID NO: 109856 - DNA, 26 bp, Homo sapiens
gggtctatagcttatgggaagggagt

SEQ ID NO: 109857 - DNA, 26 bp, Homo sapiens
ggtctatagcttatgggaagggagtg

SEQ ID NO: 109858 - DNA, 26 bp, Homo sapiens
gtctatagcttatgggaagggagtga

SEQ ID NO: 109859 - DNA, 26 bp, Homo sapiens
tctatagcttatgggaagggagtgag

SEQ ID NO: 109860 - DNA, 26 bp, Homo sapiens
ctatagcttatgggaagggagtgagg

SEQ ID NO: 109861 - DNA, 26 bp, Homo sapiens
tatagcttatgggaagggagtgagga

SEQ ID NO: 109862 - DNA, 26 bp, Homo sapiens
atagcttatgggaagggagtgaggag

SEQ ID NO: 109863 - DNA, 26 bp, Homo sapiens
tagcttatgggaagggagtgaggagg

SEQ ID NO: 109864 - DNA, 26 bp, Homo sapiens
agcttatgggaagggagtgaggaggg

SEQ ID NO: 109865 - DNA, 26 bp, Homo sapiens
gcttatgggaagggagtgaggagggg

SEQ ID NO: 109866 - DNA, 26 bp, Homo sapiens
cttatgggaagggagtgaggagggga

SEQ ID NO: 109867 - DNA, 26 bp, Homo sapiens
ttatgggaagggagtgaggaggggac

SEQ ID NO: 109868 - DNA, 26 bp, Homo sapiens
tatgggaagggagtgaggaggggaca

SEQ ID NO: 109869 - DNA, 26 bp, Homo sapiens
atgggaagggagtgaggaggggacaa

SEQ ID NO: 109870 - DNA, 26 bp, Homo sapiens
tgggaagggagtgaggaggggacaag

SEQ ID NO: 109871 - DNA, 26 bp, Homo sapiens
gggaagggagtgaggaggggacaagc

SEQ ID NO: 109872 - DNA, 26 bp, Homo sapiens
ggaagggagtgaggaggggacaagcc

SEQ ID NO: 109873 - DNA, 26 bp, Homo sapiens
gaagggagtgaggaggggacaagcca

SEQ ID NO: 109874 - DNA, 26 bp, Homo sapiens
aagggagtgaggaggggacaagccag

SEQ ID NO: 109875 - DNA, 26 bp, Homo sapiens
agggagtgaggaggggacaagccagc

SEQ ID NO: 109876 - DNA, 26 bp, Homo sapiens
gggagtgaggaggggacaagccagcc

SEQ ID NO: 109877 - DNA, 26 bp, Homo sapiens
ggagtgaggaggggacaagccagcct

SEQ ID NO: 109878 - DNA, 26 bp, Homo sapiens
gagtgaggaggggacaagccagcctc

SEQ ID NO: 109879 - DNA, 26 bp, Homo sapiens
agtgaggaggggacaagccagcctcc

SEQ ID NO: 109880 - DNA, 26 bp, Homo sapiens
gtgaggaggggacaagccagcctcct

SEQ ID NO: 109881 - DNA, 26 bp, Homo sapiens
tgaggaggggacaagccagcctcctt

SEQ ID NO: 109882 - DNA, 26 bp, Homo sapiens
gaggaggggacaagccagcctccttc

SEQ ID NO: 109883 - DNA, 26 bp, Homo sapiens
aggaggggacaagccagcctccttcc

SEQ ID NO: 109884 - DNA, 26 bp, Homo sapiens
ggaggggacaagccagcctccttccc

SEQ ID NO: 109885 - DNA, 26 bp, Homo sapiens
gaggggacaagccagcctccttcccc

SEQ ID NO: 109886 - DNA, 26 bp, Homo sapiens
aggggacaagccagcctccttcccca

SEQ ID NO: 109887 - DNA, 26 bp, Homo sapiens
ggggacaagccagcctccttccccat

SEQ ID NO: 109888 - DNA, 26 bp, Homo sapiens
gggacaagccagcctccttccccatc

SEQ ID NO: 109889 - DNA, 26 bp, Homo sapiens
ggacaagccagcctccttccccatca

SEQ ID NO: 109890 - DNA, 26 bp, Homo sapiens
gacaagccagcctccttccccatcaa

SEQ ID NO: 109891 - DNA, 26 bp, Homo sapiens
acaagccagcctccttccccatcaat

SEQ ID NO: 109892 - DNA, 26 bp, Homo sapiens
caagccagcctccttccccatcaatg

SEQ ID NO: 109893 - DNA, 26 bp, Homo sapiens
aagccagcctccttccccatcaatgc

SEQ ID NO: 109894 - DNA, 26 bp, Homo sapiens
agccagcctccttccccatcaatgcc

SEQ ID NO: 109895 - DNA, 26 bp, Homo sapiens
gccagcctccttccccatcaatgccc

SEQ ID NO: 109896 - DNA, 26 bp, Homo sapiens
ccagcctccttccccatcaatgccca

SEQ ID NO: 109897 - DNA, 26 bp, Homo sapiens
cagcctccttccccatcaatgcccac

SEQ ID NO: 109898 - DNA, 26 bp, Homo sapiens
agcctccttccccatcaatgcccaca

SEQ ID NO: 109899 - DNA, 26 bp, Homo sapiens
gcctccttccccatcaatgcccacaa

SEQ ID NO: 109900 - DNA, 26 bp, Homo sapiens
cctccttccccatcaatgcccacaac

SEQ ID NO: 109901 - DNA, 26 bp, Homo sapiens
ctccttccccatcaatgcccacaacc

SEQ ID NO: 109902 - DNA, 26 bp, Homo sapiens
tccttccccatcaatgcccacaacct

SEQ ID NO: 109903 - DNA, 26 bp, Homo sapiens
ccttccccatcaatgcccacaacctc

SEQ ID NO: 109904 - DNA, 26 bp, Homo sapiens
cttccccatcaatgcccacaacctcc

SEQ ID NO: 109905 - DNA, 26 bp, Homo sapiens
ttccccatcaatgcccacaacctccc

SEQ ID NO: 109906 - DNA, 26 bp, Homo sapiens
tccccatcaatgcccacaacctccca

SEQ ID NO: 109907 - DNA, 26 bp, Homo sapiens
ccccatcaatgcccacaacctcccat

SEQ ID NO: 109908 - DNA, 26 bp, Homo sapiens
cccatcaatgcccacaacctcccatc

SEQ ID NO: 109909 - DNA, 26 bp, Homo sapiens
ccatcaatgcccacaacctcccatcc

SEQ ID NO: 109910 - DNA, 26 bp, Homo sapiens
catcaatgcccacaacctcccatccc

SEQ ID NO: 109911 - DNA, 26 bp, Homo sapiens
atcaatgcccacaacctcccatcccc

SEQ ID NO: 109912 - DNA, 26 bp, Homo sapiens
tcaatgcccacaacctcccatcccct

SEQ ID NO: 109913 - DNA, 26 bp, Homo sapiens
caatgcccacaacctcccatcccctg

SEQ ID NO: 109914 - DNA, 26 bp, Homo sapiens
aatgcccacaacctcccatcccctgg

SEQ ID NO: 109915 - DNA, 26 bp, Homo sapiens
atgcccacaacctcccatcccctgga

SEQ ID NO: 109916 - DNA, 26 bp, Homo sapiens
tgcccacaacctcccatcccctggac

SEQ ID NO: 109917 - DNA, 26 bp, Homo sapiens
gcccacaacctcccatcccctggacc

SEQ ID NO: 109918 - DNA, 26 bp, Homo sapiens
cccacaacctcccatcccctggaccc

SEQ ID NO: 109919 - DNA, 26 bp, Homo sapiens
ccacaacctcccatcccctggaccca

SEQ ID NO: 109920 - DNA, 26 bp, Homo sapiens
cacaacctcccatcccctggacccag

SEQ ID NO: 109921 - DNA, 26 bp, Homo sapiens
acaacctcccatcccctggacccagc

SEQ ID NO: 109922 - DNA, 26 bp, Homo sapiens
caacctcccatcccctggacccagcc

SEQ ID NO: 109923 - DNA, 26 bp, Homo sapiens
aacctcccatcccctggacccagcca

SEQ ID NO: 109924 - DNA, 26 bp, Homo sapiens
acctcccatcccctggacccagccac

SEQ ID NO: 109925 - DNA, 26 bp, Homo sapiens
cctcccatcccctggacccagccacc

SEQ ID NO: 109926 - DNA, 26 bp, Homo sapiens
ctcccatcccctggacccagccaccc

SEQ ID NO: 109927 - DNA, 26 bp, Homo sapiens
tcccatcccctggacccagccaccct

SEQ ID NO: 109928 - DNA, 26 bp, Homo sapiens
cccatcccctggacccagccacccta

SEQ ID NO: 109929 - DNA, 26 bp, Homo sapiens
ccatcccctggacccagccaccctag

SEQ ID NO: 109930 - DNA, 26 bp, Homo sapiens
catcccctggacccagccaccctagg

SEQ ID NO: 109931 - DNA, 26 bp, Homo sapiens
atcccctggacccagccaccctagga

SEQ ID NO: 109932 - DNA, 26 bp, Homo sapiens
tcccctggacccagccaccctaggag

SEQ ID NO: 109933 - DNA, 26 bp, Homo sapiens
cccctggacccagccaccctaggagt

SEQ ID NO: 109934 - DNA, 26 bp, Homo sapiens
ccctggacccagccaccctaggagtt

SEQ ID NO: 109935 - DNA, 26 bp, Homo sapiens
cctggacccagccaccctaggagttc

SEQ ID NO: 109936 - DNA, 26 bp, Homo sapiens
ctggacccagccaccctaggagttct

SEQ ID NO: 109937 - DNA, 26 bp, Homo sapiens
tggacccagccaccctaggagttctc

SEQ ID NO: 109938 - DNA, 26 bp, Homo sapiens
ggacccagccaccctaggagttctcc

SEQ ID NO: 109939 - DNA, 26 bp, Homo sapiens
gacccagccaccctaggagttctcca

SEQ ID NO: 109940 - DNA, 26 bp, Homo sapiens
acccagccaccctaggagttctccac

SEQ ID NO: 109941 - DNA, 26 bp, Homo sapiens
cccagccaccctaggagttctccacc

SEQ ID NO: 109942 - DNA, 26 bp, Homo sapiens
ccagccaccctaggagttctccaccc

SEQ ID NO: 109943 - DNA, 26 bp, Homo sapiens
cagccaccctaggagttctccacccc

SEQ ID NO: 109944 - DNA, 26 bp, Homo sapiens
agccaccctaggagttctccacccca

SEQ ID NO: 109945 - DNA, 26 bp, Homo sapiens
gccaccctaggagttctccaccccac

SEQ ID NO: 109946 - DNA, 26 bp, Homo sapiens
ccaccctaggagttctccaccccacc

SEQ ID NO: 109947 - DNA, 26 bp, Homo sapiens
caccctaggagttctccaccccaccc

SEQ ID NO: 109948 - DNA, 26 bp, Homo sapiens
accctaggagttctccaccccacccc

SEQ ID NO: 109949 - DNA, 26 bp, Homo sapiens
ccctaggagttctccaccccacccca

SEQ ID NO: 109950 - DNA, 26 bp, Homo sapiens
cctaggagttctccaccccaccccat

SEQ ID NO: 109951 - DNA, 26 bp, Homo sapiens
ctaggagttctccaccccaccccatc

SEQ ID NO: 109952 - DNA, 26 bp, Homo sapiens
taggagttctccaccccaccccatct

SEQ ID NO: 109953 - DNA, 26 bp, Homo sapiens
aggagttctccaccccaccccatctc

SEQ ID NO: 109954 - DNA, 26 bp, Homo sapiens
ggagttctccaccccaccccatctcg

SEQ ID NO: 109955 - DNA, 26 bp, Homo sapiens
gagttctccaccccaccccatctcgc

SEQ ID NO: 109956 - DNA, 26 bp, Homo sapiens
agttctccaccccaccccatctcgcc

SEQ ID NO: 109957 - DNA, 26 bp, Homo sapiens
gttctccaccccaccccatctcgcct

SEQ ID NO: 109958 - DNA, 26 bp, Homo sapiens
ttctccaccccaccccatctcgcctg

SEQ ID NO: 109959 - DNA, 26 bp, Homo sapiens
tctccaccccaccccatctcgcctgg

SEQ ID NO: 109960 - DNA, 26 bp, Homo sapiens
ctccaccccaccccatctcgcctggc

SEQ ID NO: 109961 - DNA, 26 bp, Homo sapiens
tccaccccaccccatctcgcctggcg

SEQ ID NO: 109962 - DNA, 26 bp, Homo sapiens
ccaccccaccccatctcgcctggcgg

SEQ ID NO: 109963 - DNA, 26 bp, Homo sapiens
caccccaccccatctcgcctggcgga

SEQ ID NO: 109964 - DNA, 26 bp, Homo sapiens
accccaccccatctcgcctggcggag

SEQ ID NO: 109965 - DNA, 26 bp, Homo sapiens
ccccaccccatctcgcctggcggagg

SEQ ID NO: 109966 - DNA, 26 bp, Homo sapiens
cccaccccatctcgcctggcggaggg

SEQ ID NO: 109967 - DNA, 26 bp, Homo sapiens
ccaccccatctcgcctggcggagggg

SEQ ID NO: 109968 - DNA, 26 bp, Homo sapiens
caccccatctcgcctggcggagggga

SEQ ID NO: 109969 - DNA, 26 bp, Homo sapiens
accccatctcgcctggcggaggggac

SEQ ID NO: 109970 - DNA, 26 bp, Homo sapiens
ccccatctcgcctggcggaggggacc

SEQ ID NO: 109971 - DNA, 26 bp, Homo sapiens
cccatctcgcctggcggaggggaccg

SEQ ID NO: 109972 - DNA, 26 bp, Homo sapiens
ccatctcgcctggcggaggggaccgc

SEQ ID NO: 109973 - DNA, 26 bp, Homo sapiens
catctcgcctggcggaggggaccgcc

SEQ ID NO: 109974 - DNA, 26 bp, Homo sapiens
atctcgcctggcggaggggaccgccg

SEQ ID NO: 109975 - DNA, 26 bp, Homo sapiens
tctcgcctggcggaggggaccgccgg

SEQ ID NO: 109976 - DNA, 26 bp, Homo sapiens
ctcgcctggcggaggggaccgccggg

SEQ ID NO: 109977 - DNA, 26 bp, Homo sapiens
tcgcctggcggaggggaccgccgggt

SEQ ID NO: 109978 - DNA, 26 bp, Homo sapiens
cgcctggcggaggggaccgccgggtt

SEQ ID NO: 109979 - DNA, 26 bp, Homo sapiens
gcctggcggaggggaccgccgggttt

SEQ ID NO: 109980 - DNA, 26 bp, Homo sapiens
cctggcggaggggaccgccgggtttg

SEQ ID NO: 109981 - DNA, 26 bp, Homo sapiens
ctggcggaggggaccgccgggtttga

SEQ ID NO: 109982 - DNA, 26 bp, Homo sapiens
tggcggaggggaccgccgggtttgat

SEQ ID NO: 109983 - DNA, 26 bp, Homo sapiens
ggcggaggggaccgccgggtttgatt

SEQ ID NO: 109984 - DNA, 26 bp, Homo sapiens
gcggaggggaccgccgggtttgattg

SEQ ID NO: 109985 - DNA, 26 bp, Homo sapiens
cggaggggaccgccgggtttgattga

SEQ ID NO: 109986 - DNA, 26 bp, Homo sapiens
ggaggggaccgccgggtttgattgat

SEQ ID NO: 109987 - DNA, 26 bp, Homo sapiens
gaggggaccgccgggtttgattgatc

SEQ ID NO: 109988 - DNA, 26 bp, Homo sapiens
aggggaccgccgggtttgattgatcc

SEQ ID NO: 109989 - DNA, 26 bp, Homo sapiens
ggggaccgccgggtttgattgatcca

SEQ ID NO: 109990 - DNA, 26 bp, Homo sapiens
gggaccgccgggtttgattgatccat

SEQ ID NO: 109991 - DNA, 26 bp, Homo sapiens
ggaccgccgggtttgattgatccatc

SEQ ID NO: 109992 - DNA, 26 bp, Homo sapiens
gaccgccgggtttgattgatccatct

SEQ ID NO: 109993 - DNA, 26 bp, Homo sapiens
accgccgggtttgattgatccatctc

SEQ ID NO: 109994 - DNA, 26 bp, Homo sapiens
ccgccgggtttgattgatccatctcc

SEQ ID NO: 109995 - DNA, 26 bp, Homo sapiens
cgccgggtttgattgatccatctccc

SEQ ID NO: 109996 - DNA, 26 bp, Homo sapiens
gccgggtttgattgatccatctccct

SEQ ID NO: 109997 - DNA, 26 bp, Homo sapiens
ccgggtttgattgatccatctccctc

SEQ ID NO: 109998 - DNA, 26 bp, Homo sapiens
cgggtttgattgatccatctccctcc

SEQ ID NO: 109999 - DNA, 26 bp, Homo sapiens
gggtttgattgatccatctccctcct

SEQ ID NO: 110000 - DNA, 26 bp, Homo sapiens
ggtttgattgatccatctccctcctt

SEQ ID NO: 110001 - DNA, 26 bp, Homo sapiens
gtttgattgatccatctccctccttg

SEQ ID NO: 110002 - DNA, 26 bp, Homo sapiens
tttgattgatccatctccctccttgg

SEQ ID NO: 110003 - DNA, 26 bp, Homo sapiens
ttgattgatccatctccctccttggg

SEQ ID NO: 110004 - DNA, 26 bp, Homo sapiens
tgattgatccatctccctccttgggg

SEQ ID NO: 110005 - DNA, 26 bp, Homo sapiens
gattgatccatctccctccttggggt

SEQ ID NO: 110006 - DNA, 26 bp, Homo sapiens
attgatccatctccctccttggggtt

SEQ ID NO: 110007 - DNA, 26 bp, Homo sapiens
ttgatccatctccctccttggggttc

SEQ ID NO: 110008 - DNA, 26 bp, Homo sapiens
tgatccatctccctccttggggttcg

SEQ ID NO: 110009 - DNA, 26 bp, Homo sapiens
gatccatctccctccttggggttcgg

SEQ ID NO: 110010 - DNA, 26 bp, Homo sapiens
atccatctccctccttggggttcggg

SEQ ID NO: 110011 - DNA, 26 bp, Homo sapiens
tccatctccctccttggggttcggga

SEQ ID NO: 110012 - DNA, 26 bp, Homo sapiens
ccatctccctccttggggttcgggaa

SEQ ID NO: 110013 - DNA, 26 bp, Homo sapiens
catctccctccttggggttcgggaag

SEQ ID NO: 110014 - DNA, 26 bp, Homo sapiens
atctccctccttggggttcgggaaga

SEQ ID NO: 110015 - DNA, 26 bp, Homo sapiens
tctccctccttggggttcgggaagaa

SEQ ID NO: 110016 - DNA, 26 bp, Homo sapiens
ctccctccttggggttcgggaagaaa

SEQ ID NO: 110017 - DNA, 26 bp, Homo sapiens
tccctccttggggttcgggaagaaag

SEQ ID NO: 110018 - DNA, 26 bp, Homo sapiens
ccctccttggggttcgggaagaaagc

SEQ ID NO: 110019 - DNA, 26 bp, Homo sapiens
cctccttggggttcgggaagaaagct

SEQ ID NO: 110020 - DNA, 26 bp, Homo sapiens
ctccttggggttcgggaagaaagctc

SEQ ID NO: 110021 - DNA, 26 bp, Homo sapiens
tccttggggttcgggaagaaagctct

SEQ ID NO: 110022 - DNA, 26 bp, Homo sapiens
ccttggggttcgggaagaaagctctt

SEQ ID NO: 110023 - DNA, 26 bp, Homo sapiens
cttggggttcgggaagaaagctcttt

SEQ ID NO: 110024 - DNA, 26 bp, Homo sapiens
ttggggttcgggaagaaagctctttt

SEQ ID NO: 110025 - DNA, 26 bp, Homo sapiens
tggggttcgggaagaaagctcttttc

SEQ ID NO: 110026 - DNA, 26 bp, Homo sapiens
ggggttcgggaagaaagctcttttct

SEQ ID NO: 110027 - DNA, 26 bp, Homo sapiens
gggttcgggaagaaagctcttttctt

SEQ ID NO: 110028 - DNA, 26 bp, Homo sapiens
ggttcgggaagaaagctcttttcttc

SEQ ID NO: 110029 - DNA, 26 bp, Homo sapiens
gttcgggaagaaagctcttttcttcc

SEQ ID NO: 110030 - DNA, 26 bp, Homo sapiens
ttcgggaagaaagctcttttcttccc

SEQ ID NO: 110031 - DNA, 26 bp, Homo sapiens
tcgggaagaaagctcttttcttccct

SEQ ID NO: 110032 - DNA, 26 bp, Homo sapiens
cgggaagaaagctcttttcttccctc

SEQ ID NO: 110033 - DNA, 26 bp, Homo sapiens
gggaagaaagctcttttcttccctct

SEQ ID NO: 110034 - DNA, 26 bp, Homo sapiens
ggaagaaagctcttttcttccctctg

SEQ ID NO: 110035 - DNA, 26 bp, Homo sapiens
gaagaaagctcttttcttccctctgt

SEQ ID NO: 110036 - DNA, 26 bp, Homo sapiens
aagaaagctcttttcttccctctgtc

SEQ ID NO: 110037 - DNA, 26 bp, Homo sapiens
agaaagctcttttcttccctctgtcg

SEQ ID NO: 110038 - DNA, 26 bp, Homo sapiens
gaaagctcttttcttccctctgtcgg

SEQ ID NO: 110039 - DNA, 26 bp, Homo sapiens
aaagctcttttcttccctctgtcggg

SEQ ID NO: 110040 - DNA, 26 bp, Homo sapiens
aagctcttttcttccctctgtcgggt

SEQ ID NO: 110041 - DNA, 26 bp, Homo sapiens
agctcttttcttccctctgtcgggtt

SEQ ID NO: 110042 - DNA, 26 bp, Homo sapiens
gctcttttcttccctctgtcgggttt

SEQ ID NO: 110043 - DNA, 26 bp, Homo sapiens
ctcttttcttccctctgtcgggtttc

SEQ ID NO: 110044 - DNA, 26 bp, Homo sapiens
tcttttcttccctctgtcgggtttct

SEQ ID NO: 110045 - DNA, 26 bp, Homo sapiens
cttttcttccctctgtcgggtttctt

SEQ ID NO: 110046 - DNA, 26 bp, Homo sapiens
ttttcttccctctgtcgggtttcttt

SEQ ID NO: 110047 - DNA, 26 bp, Homo sapiens
tttcttccctctgtcgggtttctttc

SEQ ID NO: 110048 - DNA, 26 bp, Homo sapiens
ttcttccctctgtcgggtttctttct

SEQ ID NO: 110049 - DNA, 26 bp, Homo sapiens
tcttccctctgtcgggtttctttctt

SEQ ID NO: 110050 - DNA, 26 bp, Homo sapiens
cttccctctgtcgggtttctttcttg

SEQ ID NO: 110051 - DNA, 26 bp, Homo sapiens
ttccctctgtcgggtttctttcttgc

SEQ ID NO: 110052 - DNA, 26 bp, Homo sapiens
tccctctgtcgggtttctttcttgct

SEQ ID NO: 110053 - DNA, 26 bp, Homo sapiens
ccctctgtcgggtttctttcttgctt

SEQ ID NO: 110054 - DNA, 26 bp, Homo sapiens
cctctgtcgggtttctttcttgcttc

SEQ ID NO: 110055 - DNA, 26 bp, Homo sapiens
ctctgtcgggtttctttcttgcttct

SEQ ID NO: 110056 - DNA, 26 bp, Homo sapiens
tctgtcgggtttctttcttgcttctc

SEQ ID NO: 110057 - DNA, 26 bp, Homo sapiens
ctgtcgggtttctttcttgcttctcg

SEQ ID NO: 110058 - DNA, 26 bp, Homo sapiens
tgtcgggtttctttcttgcttctcgg

SEQ ID NO: 110059 - DNA, 26 bp, Homo sapiens
gtcgggtttctttcttgcttctcggc

SEQ ID NO: 110060 - DNA, 26 bp, Homo sapiens
tcgggtttctttcttgcttctcggcc

SEQ ID NO: 110061 - DNA, 26 bp, Homo sapiens
cgggtttctttcttgcttctcggcct

SEQ ID NO: 110062 - DNA, 26 bp, Homo sapiens
gggtttctttcttgcttctcggcctt

SEQ ID NO: 110063 - DNA, 26 bp, Homo sapiens
ggtttctttcttgcttctcggccttc

SEQ ID NO: 110064 - DNA, 26 bp, Homo sapiens
gtttctttcttgcttctcggccttca

SEQ ID NO: 110065 - DNA, 26 bp, Homo sapiens
tttctttcttgcttctcggccttcac

SEQ ID NO: 110066 - DNA, 26 bp, Homo sapiens
ttctttcttgcttctcggccttcacg

SEQ ID NO: 110067 - DNA, 26 bp, Homo sapiens
tctttcttgcttctcggccttcacgc

SEQ ID NO: 110068 - DNA, 26 bp, Homo sapiens
ctttcttgcttctcggccttcacgct

SEQ ID NO: 110069 - DNA, 26 bp, Homo sapiens
tttcttgcttctcggccttcacgctt

SEQ ID NO: 110070 - DNA, 26 bp, Homo sapiens
ttcttgcttctcggccttcacgcttc

SEQ ID NO: 110071 - DNA, 26 bp, Homo sapiens
tcttgcttctcggccttcacgcttcc

SEQ ID NO: 110072 - DNA, 26 bp, Homo sapiens
cttgcttctcggccttcacgcttcct

SEQ ID NO: 110073 - DNA, 26 bp, Homo sapiens
ttgcttctcggccttcacgcttcctc

SEQ ID NO: 110074 - DNA, 26 bp, Homo sapiens
tgcttctcggccttcacgcttcctca

SEQ ID NO: 110075 - DNA, 26 bp, Homo sapiens
gcttctcggccttcacgcttcctcag

SEQ ID NO: 110076 - DNA, 26 bp, Homo sapiens
cttctcggccttcacgcttcctcagg

SEQ ID NO: 110077 - DNA, 26 bp, Homo sapiens
ttctcggccttcacgcttcctcaggt

SEQ ID NO: 110078 - DNA, 26 bp, Homo sapiens
tctcggccttcacgcttcctcaggtc

SEQ ID NO: 110079 - DNA, 26 bp, Homo sapiens
ctcggccttcacgcttcctcaggtca

SEQ ID NO: 110080 - DNA, 26 bp, Homo sapiens
tcggccttcacgcttcctcaggtcac

SEQ ID NO: 110081 - DNA, 26 bp, Homo sapiens
cggccttcacgcttcctcaggtcact

SEQ ID NO: 110082 - DNA, 26 bp, Homo sapiens
ggccttcacgcttcctcaggtcactg

SEQ ID NO: 110083 - DNA, 26 bp, Homo sapiens
gccttcacgcttcctcaggtcactgg

SEQ ID NO: 110084 - DNA, 26 bp, Homo sapiens
ccttcacgcttcctcaggtcactggc

SEQ ID NO: 110085 - DNA, 26 bp, Homo sapiens
cttcacgcttcctcaggtcactggct

SEQ ID NO: 110086 - DNA, 26 bp, Homo sapiens
ttcacgcttcctcaggtcactggctg

SEQ ID NO: 110087 - DNA, 26 bp, Homo sapiens
tcacgcttcctcaggtcactggctgg

SEQ ID NO: 110088 - DNA, 26 bp, Homo sapiens
cacgcttcctcaggtcactggctggc

SEQ ID NO: 110089 - DNA, 26 bp, Homo sapiens
acgcttcctcaggtcactggctggcc

SEQ ID NO: 110090 - DNA, 26 bp, Homo sapiens
cgcttcctcaggtcactggctggcct

SEQ ID NO: 110091 - DNA, 26 bp, Homo sapiens
gcttcctcaggtcactggctggcctc

SEQ ID NO: 110092 - DNA, 26 bp, Homo sapiens
cttcctcaggtcactggctggcctcc

SEQ ID NO: 110093 - DNA, 26 bp, Homo sapiens
ttcctcaggtcactggctggcctcca

SEQ ID NO: 110094 - DNA, 26 bp, Homo sapiens
tcctcaggtcactggctggcctccaa

SEQ ID NO: 110095 - DNA, 26 bp, Homo sapiens
cctcaggtcactggctggcctccaag

SEQ ID NO: 110096 - DNA, 26 bp, Homo sapiens
ctcaggtcactggctggcctccaagg

SEQ ID NO: 110097 - DNA, 26 bp, Homo sapiens
tcaggtcactggctggcctccaaggg

SEQ ID NO: 110098 - DNA, 26 bp, Homo sapiens
caggtcactggctggcctccaagggc

SEQ ID NO: 110099 - DNA, 26 bp, Homo sapiens
aggtcactggctggcctccaagggca

SEQ ID NO: 110100 - DNA, 26 bp, Homo sapiens
ggtcactggctggcctccaagggcac

SEQ ID NO: 110101 - DNA, 26 bp, Homo sapiens
gtcactggctggcctccaagggcacc

SEQ ID NO: 110102 - DNA, 26 bp, Homo sapiens
tcactggctggcctccaagggcacct

SEQ ID NO: 110103 - DNA, 26 bp, Homo sapiens
cactggctggcctccaagggcaccta

SEQ ID NO: 110104 - DNA, 26 bp, Homo sapiens
actggctggcctccaagggcacctag

SEQ ID NO: 110105 - DNA, 26 bp, Homo sapiens
ctggctggcctccaagggcacctaga

SEQ ID NO: 110106 - DNA, 26 bp, Homo sapiens
tggctggcctccaagggcacctagag

SEQ ID NO: 110107 - DNA, 26 bp, Homo sapiens
ggctggcctccaagggcacctagagt

SEQ ID NO: 110108 - DNA, 26 bp, Homo sapiens
gctggcctccaagggcacctagagtc

SEQ ID NO: 110109 - DNA, 26 bp, Homo sapiens
ctggcctccaagggcacctagagtca

SEQ ID NO: 110110 - DNA, 26 bp, Homo sapiens
tggcctccaagggcacctagagtcag

SEQ ID NO: 110111 - DNA, 26 bp, Homo sapiens
ggcctccaagggcacctagagtcagc

SEQ ID NO: 110112 - DNA, 26 bp, Homo sapiens
gcctccaagggcacctagagtcagcc

SEQ ID NO: 110113 - DNA, 26 bp, Homo sapiens
cctccaagggcacctagagtcagccc

SEQ ID NO: 110114 - DNA, 26 bp, Homo sapiens
ctccaagggcacctagagtcagccct

SEQ ID NO: 110115 - DNA, 26 bp, Homo sapiens
tccaagggcacctagagtcagccctg

SEQ ID NO: 110116 - DNA, 26 bp, Homo sapiens
ccaagggcacctagagtcagccctgc

SEQ ID NO: 110117 - DNA, 26 bp, Homo sapiens
caagggcacctagagtcagccctgcc

SEQ ID NO: 110118 - DNA, 26 bp, Homo sapiens
aagggcacctagagtcagccctgcct

SEQ ID NO: 110119 - DNA, 26 bp, Homo sapiens
agggcacctagagtcagccctgcctg

SEQ ID NO: 110120 - DNA, 26 bp, Homo sapiens
gggcacctagagtcagccctgcctgc

SEQ ID NO: 110121 - DNA, 26 bp, Homo sapiens
ggcacctagagtcagccctgcctgca

SEQ ID NO: 110122 - DNA, 26 bp, Homo sapiens
gcacctagagtcagccctgcctgcag

SEQ ID NO: 110123 - DNA, 26 bp, Homo sapiens
cacctagagtcagccctgcctgcaga

SEQ ID NO: 110124 - DNA, 26 bp, Homo sapiens
acctagagtcagccctgcctgcagac

SEQ ID NO: 110125 - DNA, 26 bp, Homo sapiens
cctagagtcagccctgcctgcagacc

SEQ ID NO: 110126 - DNA, 26 bp, Homo sapiens
ctagagtcagccctgcctgcagacca

SEQ ID NO: 110127 - DNA, 26 bp, Homo sapiens
tagagtcagccctgcctgcagaccac

SEQ ID NO: 110128 - DNA, 26 bp, Homo sapiens
agagtcagccctgcctgcagaccacc

SEQ ID NO: 110129 - DNA, 26 bp, Homo sapiens
gagtcagccctgcctgcagaccaccc

SEQ ID NO: 110130 - DNA, 26 bp, Homo sapiens
agtcagccctgcctgcagaccaccca

SEQ ID NO: 110131 - DNA, 26 bp, Homo sapiens
gtcagccctgcctgcagaccacccag

SEQ ID NO: 110132 - DNA, 26 bp, Homo sapiens
tcagccctgcctgcagaccacccagg

SEQ ID NO: 110133 - DNA, 26 bp, Homo sapiens
cagccctgcctgcagaccacccagga

SEQ ID NO: 110134 - DNA, 26 bp, Homo sapiens
agccctgcctgcagaccacccaggat

SEQ ID NO: 110135 - DNA, 26 bp, Homo sapiens
gccctgcctgcagaccacccaggatc

SEQ ID NO: 110136 - DNA, 26 bp, Homo sapiens
ccctgcctgcagaccacccaggatcc

SEQ ID NO: 110137 - DNA, 26 bp, Homo sapiens
cctgcctgcagaccacccaggatccg

SEQ ID NO: 110138 - DNA, 26 bp, Homo sapiens
ctgcctgcagaccacccaggatccgg

SEQ ID NO: 110139 - DNA, 26 bp, Homo sapiens
tgcctgcagaccacccaggatccggt

SEQ ID NO: 110140 - DNA, 26 bp, Homo sapiens
gcctgcagaccacccaggatccggtg

SEQ ID NO: 110141 - DNA, 26 bp, Homo sapiens
cctgcagaccacccaggatccggtga

SEQ ID NO: 110142 - DNA, 26 bp, Homo sapiens
ctgcagaccacccaggatccggtgac

SEQ ID NO: 110143 - DNA, 26 bp, Homo sapiens
tgcagaccacccaggatccggtgaca

SEQ ID NO: 110144 - DNA, 26 bp, Homo sapiens
gcagaccacccaggatccggtgacat

SEQ ID NO: 110145 - DNA, 26 bp, Homo sapiens
cagaccacccaggatccggtgacatg

SEQ ID NO: 110146 - DNA, 26 bp, Homo sapiens
agaccacccaggatccggtgacatgg

SEQ ID NO: 110147 - DNA, 26 bp, Homo sapiens
gaccacccaggatccggtgacatggg

SEQ ID NO: 110148 - DNA, 26 bp, Homo sapiens
accacccaggatccggtgacatgggg

SEQ ID NO: 110149 - DNA, 26 bp, Homo sapiens
ccacccaggatccggtgacatggggt

SEQ ID NO: 110150 - DNA, 26 bp, Homo sapiens
cacccaggatccggtgacatggggtg

SEQ ID NO: 110151 - DNA, 26 bp, Homo sapiens
acccaggatccggtgacatggggtgg

SEQ ID NO: 110152 - DNA, 26 bp, Homo sapiens
cccaggatccggtgacatggggtgga

SEQ ID NO: 110153 - DNA, 26 bp, Homo sapiens
ccaggatccggtgacatggggtggac

SEQ ID NO: 110154 - DNA, 26 bp, Homo sapiens
caggatccggtgacatggggtggacc

SEQ ID NO: 110155 - DNA, 26 bp, Homo sapiens
aggatccggtgacatggggtggaccc

SEQ ID NO: 110156 - DNA, 26 bp, Homo sapiens
ggatccggtgacatggggtggaccca

SEQ ID NO: 110157 - DNA, 26 bp, Homo sapiens
gatccggtgacatggggtggacccag

SEQ ID NO: 110158 - DNA, 26 bp, Homo sapiens
atccggtgacatggggtggacccagc

SEQ ID NO: 110159 - DNA, 26 bp, Homo sapiens
tccggtgacatggggtggacccagcg

SEQ ID NO: 110160 - DNA, 26 bp, Homo sapiens
ccggtgacatggggtggacccagcgc

SEQ ID NO: 110161 - DNA, 26 bp, Homo sapiens
cggtgacatggggtggacccagcgct

SEQ ID NO: 110162 - DNA, 26 bp, Homo sapiens
ggtgacatggggtggacccagcgctg

SEQ ID NO: 110163 - DNA, 26 bp, Homo sapiens
gtgacatggggtggacccagcgctgt

SEQ ID NO: 110164 - DNA, 26 bp, Homo sapiens
tgacatggggtggacccagcgctgtt

SEQ ID NO: 110165 - DNA, 26 bp, Homo sapiens
gacatggggtggacccagcgctgttt

SEQ ID NO: 110166 - DNA, 26 bp, Homo sapiens
acatggggtggacccagcgctgtttc

SEQ ID NO: 110167 - DNA, 26 bp, Homo sapiens
catggggtggacccagcgctgtttcg

SEQ ID NO: 110168 - DNA, 26 bp, Homo sapiens
atggggtggacccagcgctgtttcgg

SEQ ID NO: 110169 - DNA, 26 bp, Homo sapiens
tggggtggacccagcgctgtttcggt

SEQ ID NO: 110170 - DNA, 26 bp, Homo sapiens
ggggtggacccagcgctgtttcggtc

SEQ ID NO: 110171 - DNA, 26 bp, Homo sapiens
gggtggacccagcgctgtttcggtca

SEQ ID NO: 110172 - DNA, 26 bp, Homo sapiens
ggtggacccagcgctgtttcggtcag

SEQ ID NO: 110173 - DNA, 26 bp, Homo sapiens
gtggacccagcgctgtttcggtcaga

SEQ ID NO: 110174 - DNA, 26 bp, Homo sapiens
tggacccagcgctgtttcggtcagag

SEQ ID NO: 110175 - DNA, 26 bp, Homo sapiens
ggacccagcgctgtttcggtcagagc

SEQ ID NO: 110176 - DNA, 26 bp, Homo sapiens
gacccagcgctgtttcggtcagagcc

SEQ ID NO: 110177 - DNA, 26 bp, Homo sapiens
acccagcgctgtttcggtcagagcca

SEQ ID NO: 110178 - DNA, 26 bp, Homo sapiens
cccagcgctgtttcggtcagagccag

SEQ ID NO: 110179 - DNA, 26 bp, Homo sapiens
ccagcgctgtttcggtcagagccagg

SEQ ID NO: 110180 - DNA, 26 bp, Homo sapiens
cagcgctgtttcggtcagagccaggg

SEQ ID NO: 110181 - DNA, 26 bp, Homo sapiens
agcgctgtttcggtcagagccagggg

SEQ ID NO: 110182 - DNA, 26 bp, Homo sapiens
gcgctgtttcggtcagagccaggggc

SEQ ID NO: 110183 - DNA, 26 bp, Homo sapiens
cgctgtttcggtcagagccaggggca

SEQ ID NO: 110184 - DNA, 26 bp, Homo sapiens
gctgtttcggtcagagccaggggcag

SEQ ID NO: 110185 - DNA, 26 bp, Homo sapiens
ctgtttcggtcagagccaggggcagc

SEQ ID NO: 110186 - DNA, 26 bp, Homo sapiens
tgtttcggtcagagccaggggcagct

SEQ ID NO: 110187 - DNA, 26 bp, Homo sapiens
gtttcggtcagagccaggggcagcta

SEQ ID NO: 110188 - DNA, 26 bp, Homo sapiens
tttcggtcagagccaggggcagctac

SEQ ID NO: 110189 - DNA, 26 bp, Homo sapiens
ttcggtcagagccaggggcagctacc

SEQ ID NO: 110190 - DNA, 26 bp, Homo sapiens
tcggtcagagccaggggcagctacct

SEQ ID NO: 110191 - DNA, 26 bp, Homo sapiens
cggtcagagccaggggcagctacctg

SEQ ID NO: 110192 - DNA, 26 bp, Homo sapiens
ggtcagagccaggggcagctacctga

SEQ ID NO: 110193 - DNA, 26 bp, Homo sapiens
gtcagagccaggggcagctacctgaa

SEQ ID NO: 110194 - DNA, 26 bp, Homo sapiens
tcagagccaggggcagctacctgaac

SEQ ID NO: 110195 - DNA, 26 bp, Homo sapiens
cagagccaggggcagctacctgaact

SEQ ID NO: 110196 - DNA, 26 bp, Homo sapiens
agagccaggggcagctacctgaactc

SEQ ID NO: 110197 - DNA, 26 bp, Homo sapiens
gagccaggggcagctacctgaactca

SEQ ID NO: 110198 - DNA, 26 bp, Homo sapiens
agccaggggcagctacctgaactcaa

SEQ ID NO: 110199 - DNA, 26 bp, Homo sapiens
gccaggggcagctacctgaactcaac

SEQ ID NO: 110200 - DNA, 26 bp, Homo sapiens
ccaggggcagctacctgaactcaacc

SEQ ID NO: 110201 - DNA, 26 bp, Homo sapiens
caggggcagctacctgaactcaacca

SEQ ID NO: 110202 - DNA, 26 bp, Homo sapiens
aggggcagctacctgaactcaaccag

SEQ ID NO: 110203 - DNA, 26 bp, Homo sapiens
ggggcagctacctgaactcaaccagt

SEQ ID NO: 110204 - DNA, 26 bp, Homo sapiens
gggcagctacctgaactcaaccagtc

SEQ ID NO: 110205 - DNA, 26 bp, Homo sapiens
ggcagctacctgaactcaaccagtct

SEQ ID NO: 110206 - DNA, 26 bp, Homo sapiens
gcagctacctgaactcaaccagtctg

SEQ ID NO: 110207 - DNA, 26 bp, Homo sapiens
cagctacctgaactcaaccagtctga

SEQ ID NO: 110208 - DNA, 26 bp, Homo sapiens
agctacctgaactcaaccagtctgag

SEQ ID NO: 110209 - DNA, 26 bp, Homo sapiens
gctacctgaactcaaccagtctgagc

SEQ ID NO: 110210 - DNA, 26 bp, Homo sapiens
ctacctgaactcaaccagtctgagct

SEQ ID NO: 110211 - DNA, 26 bp, Homo sapiens
tacctgaactcaaccagtctgagctt

SEQ ID NO: 110212 - DNA, 26 bp, Homo sapiens
acctgaactcaaccagtctgagcttc

SEQ ID NO: 110213 - DNA, 26 bp, Homo sapiens
cctgaactcaaccagtctgagcttcc

SEQ ID NO: 110214 - DNA, 26 bp, Homo sapiens
ctgaactcaaccagtctgagcttcct

SEQ ID NO: 110215 - DNA, 26 bp, Homo sapiens
tgaactcaaccagtctgagcttcctg

SEQ ID NO: 110216 - DNA, 26 bp, Homo sapiens
gaactcaaccagtctgagcttcctgc

SEQ ID NO: 110217 - DNA, 26 bp, Homo sapiens
aactcaaccagtctgagcttcctgct

SEQ ID NO: 110218 - DNA, 26 bp, Homo sapiens
actcaaccagtctgagcttcctgctt

SEQ ID NO: 110219 - DNA, 26 bp, Homo sapiens
ctcaaccagtctgagcttcctgcttg

SEQ ID NO: 110220 - DNA, 26 bp, Homo sapiens
tcaaccagtctgagcttcctgcttgg

SEQ ID NO: 110221 - DNA, 26 bp, Homo sapiens
caaccagtctgagcttcctgcttggt

SEQ ID NO: 110222 - DNA, 26 bp, Homo sapiens
aaccagtctgagcttcctgcttggtc

SEQ ID NO: 110223 - DNA, 26 bp, Homo sapiens
accagtctgagcttcctgcttggtca

SEQ ID NO: 110224 - DNA, 26 bp, Homo sapiens
ccagtctgagcttcctgcttggtcaa

SEQ ID NO: 110225 - DNA, 26 bp, Homo sapiens
cagtctgagcttcctgcttggtcaag

SEQ ID NO: 110226 - DNA, 26 bp, Homo sapiens
agtctgagcttcctgcttggtcaaga

SEQ ID NO: 110227 - DNA, 26 bp, Homo sapiens
gtctgagcttcctgcttggtcaagat

SEQ ID NO: 110228 - DNA, 26 bp, Homo sapiens
tctgagcttcctgcttggtcaagatg

SEQ ID NO: 110229 - DNA, 26 bp, Homo sapiens
ctgagcttcctgcttggtcaagatga

SEQ ID NO: 110230 - DNA, 26 bp, Homo sapiens
tgagcttcctgcttggtcaagatgac

SEQ ID NO: 110231 - DNA, 26 bp, Homo sapiens
gagcttcctgcttggtcaagatgact

SEQ ID NO: 110232 - DNA, 26 bp, Homo sapiens
agcttcctgcttggtcaagatgactg

SEQ ID NO: 110233 - DNA, 26 bp, Homo sapiens
gcttcctgcttggtcaagatgactgc

SEQ ID NO: 110234 - DNA, 26 bp, Homo sapiens
cttcctgcttggtcaagatgactgca

SEQ ID NO: 110235 - DNA, 26 bp, Homo sapiens
ttcctgcttggtcaagatgactgcag

SEQ ID NO: 110236 - DNA, 26 bp, Homo sapiens
tcctgcttggtcaagatgactgcagg

SEQ ID NO: 110237 - DNA, 26 bp, Homo sapiens
cctgcttggtcaagatgactgcaggc

SEQ ID NO: 110238 - DNA, 26 bp, Homo sapiens
ctgcttggtcaagatgactgcaggct

SEQ ID NO: 110239 - DNA, 26 bp, Homo sapiens
tgcttggtcaagatgactgcaggctt

SEQ ID NO: 110240 - DNA, 26 bp, Homo sapiens
gcttggtcaagatgactgcaggcttg

SEQ ID NO: 110241 - DNA, 26 bp, Homo sapiens
cttggtcaagatgactgcaggcttgg

SEQ ID NO: 110242 - DNA, 26 bp, Homo sapiens
ttggtcaagatgactgcaggcttggg

SEQ ID NO: 110243 - DNA, 26 bp, Homo sapiens
tggtcaagatgactgcaggcttgggg

SEQ ID NO: 110244 - DNA, 26 bp, Homo sapiens
ggtcaagatgactgcaggcttggggg

SEQ ID NO: 110245 - DNA, 26 bp, Homo sapiens
gtcaagatgactgcaggcttgggggc

SEQ ID NO: 110246 - DNA, 26 bp, Homo sapiens
tcaagatgactgcaggcttgggggcc

SEQ ID NO: 110247 - DNA, 26 bp, Homo sapiens
caagatgactgcaggcttgggggcct

SEQ ID NO: 110248 - DNA, 26 bp, Homo sapiens
aagatgactgcaggcttgggggcctg

SEQ ID NO: 110249 - DNA, 26 bp, Homo sapiens
agatgactgcaggcttgggggcctgg

SEQ ID NO: 110250 - DNA, 26 bp, Homo sapiens
gatgactgcaggcttgggggcctggc

SEQ ID NO: 110251 - DNA, 26 bp, Homo sapiens
atgactgcaggcttgggggcctggca

SEQ ID NO: 110252 - DNA, 26 bp, Homo sapiens
tgactgcaggcttgggggcctggcag

SEQ ID NO: 110253 - DNA, 26 bp, Homo sapiens
gactgcaggcttgggggcctggcaga

SEQ ID NO: 110254 - DNA, 26 bp, Homo sapiens
actgcaggcttgggggcctggcagaa

SEQ ID NO: 110255 - DNA, 26 bp, Homo sapiens
ctgcaggcttgggggcctggcagaat

SEQ ID NO: 110256 - DNA, 26 bp, Homo sapiens
tgcaggcttgggggcctggcagaatg

SEQ ID NO: 110257 - DNA, 26 bp, Homo sapiens
gcaggcttgggggcctggcagaatgt

SEQ ID NO: 110258 - DNA, 26 bp, Homo sapiens
caggcttgggggcctggcagaatgtc

SEQ ID NO: 110259 - DNA, 26 bp, Homo sapiens
aggcttgggggcctggcagaatgtct

SEQ ID NO: 110260 - DNA, 26 bp, Homo sapiens
ggcttgggggcctggcagaatgtctg

SEQ ID NO: 110261 - DNA, 26 bp, Homo sapiens
gcttgggggcctggcagaatgtctgt

SEQ ID NO: 110262 - DNA, 26 bp, Homo sapiens
cttgggggcctggcagaatgtctgtg

SEQ ID NO: 110263 - DNA, 26 bp, Homo sapiens
ttgggggcctggcagaatgtctgtgt

SEQ ID NO: 110264 - DNA, 26 bp, Homo sapiens
tgggggcctggcagaatgtctgtgtt

SEQ ID NO: 110265 - DNA, 26 bp, Homo sapiens
gggggcctggcagaatgtctgtgttt

SEQ ID NO: 110266 - DNA, 26 bp, Homo sapiens
ggggcctggcagaatgtctgtgtttt

SEQ ID NO: 110267 - DNA, 26 bp, Homo sapiens
gggcctggcagaatgtctgtgttttt

SEQ ID NO: 110268 - DNA, 26 bp, Homo sapiens
ggcctggcagaatgtctgtgttttta

SEQ ID NO: 110269 - DNA, 26 bp, Homo sapiens
gcctggcagaatgtctgtgtttttag

SEQ ID NO: 110270 - DNA, 26 bp, Homo sapiens
cctggcagaatgtctgtgtttttagg

SEQ ID NO: 110271 - DNA, 26 bp, Homo sapiens
ctggcagaatgtctgtgtttttaggg

SEQ ID NO: 110272 - DNA, 26 bp, Homo sapiens
tggcagaatgtctgtgtttttaggga

SEQ ID NO: 110273 - DNA, 26 bp, Homo sapiens
ggcagaatgtctgtgtttttagggac

SEQ ID NO: 110274 - DNA, 26 bp, Homo sapiens
gcagaatgtctgtgtttttagggact

SEQ ID NO: 110275 - DNA, 26 bp, Homo sapiens
cagaatgtctgtgtttttagggactg

SEQ ID NO: 110276 - DNA, 26 bp, Homo sapiens
agaatgtctgtgtttttagggactga

SEQ ID NO: 110277 - DNA, 26 bp, Homo sapiens
gaatgtctgtgtttttagggactgag

SEQ ID NO: 110278 - DNA, 26 bp, Homo sapiens
aatgtctgtgtttttagggactgagt

SEQ ID NO: 110279 - DNA, 26 bp, Homo sapiens
atgtctgtgtttttagggactgagtt

SEQ ID NO: 110280 - DNA, 26 bp, Homo sapiens
tgtctgtgtttttagggactgagttg

SEQ ID NO: 110281 - DNA, 26 bp, Homo sapiens
gtctgtgtttttagggactgagttgt

SEQ ID NO: 110282 - DNA, 26 bp, Homo sapiens
tctgtgtttttagggactgagttgtc

SEQ ID NO: 110283 - DNA, 26 bp, Homo sapiens
ctgtgtttttagggactgagttgtcc

SEQ ID NO: 110284 - DNA, 26 bp, Homo sapiens
tgtgtttttagggactgagttgtccg

SEQ ID NO: 110285 - DNA, 26 bp, Homo sapiens
gtgtttttagggactgagttgtccga

SEQ ID NO: 110286 - DNA, 26 bp, Homo sapiens
tgtttttagggactgagttgtccgaa

SEQ ID NO: 110287 - DNA, 26 bp, Homo sapiens
gtttttagggactgagttgtccgaag

SEQ ID NO: 110288 - DNA, 26 bp, Homo sapiens
tttttagggactgagttgtccgaagg

SEQ ID NO: 110289 - DNA, 26 bp, Homo sapiens
ttttagggactgagttgtccgaaggc

SEQ ID NO: 110290 - DNA, 26 bp, Homo sapiens
tttagggactgagttgtccgaaggcc

SEQ ID NO: 110291 - DNA, 26 bp, Homo sapiens
ttagggactgagttgtccgaaggcca

SEQ ID NO: 110292 - DNA, 26 bp, Homo sapiens
tagggactgagttgtccgaaggccac

SEQ ID NO: 110293 - DNA, 26 bp, Homo sapiens
agggactgagttgtccgaaggccaca

SEQ ID NO: 110294 - DNA, 26 bp, Homo sapiens
gggactgagttgtccgaaggccacac

SEQ ID NO: 110295 - DNA, 26 bp, Homo sapiens
ggactgagttgtccgaaggccacact

SEQ ID NO: 110296 - DNA, 26 bp, Homo sapiens
gactgagttgtccgaaggccacactc

SEQ ID NO: 110297 - DNA, 26 bp, Homo sapiens
actgagttgtccgaaggccacactct

SEQ ID NO: 110298 - DNA, 26 bp, Homo sapiens
ctgagttgtccgaaggccacactctg

SEQ ID NO: 110299 - DNA, 26 bp, Homo sapiens
tgagttgtccgaaggccacactctgc

SEQ ID NO: 110300 - DNA, 26 bp, Homo sapiens
gagttgtccgaaggccacactctgct

SEQ ID NO: 110301 - DNA, 26 bp, Homo sapiens
agttgtccgaaggccacactctgctg

SEQ ID NO: 110302 - DNA, 26 bp, Homo sapiens
gttgtccgaaggccacactctgctgc

SEQ ID NO: 110303 - DNA, 26 bp, Homo sapiens
ttgtccgaaggccacactctgctgcc

SEQ ID NO: 110304 - DNA, 26 bp, Homo sapiens
tgtccgaaggccacactctgctgcca

SEQ ID NO: 110305 - DNA, 26 bp, Homo sapiens
gtccgaaggccacactctgctgccag

SEQ ID NO: 110306 - DNA, 26 bp, Homo sapiens
tccgaaggccacactctgctgccagc

SEQ ID NO: 110307 - DNA, 26 bp, Homo sapiens
ccgaaggccacactctgctgccagct

SEQ ID NO: 110308 - DNA, 26 bp, Homo sapiens
cgaaggccacactctgctgccagctg

SEQ ID NO: 110309 - DNA, 26 bp, Homo sapiens
gaaggccacactctgctgccagctgg

SEQ ID NO: 110310 - DNA, 26 bp, Homo sapiens
aaggccacactctgctgccagctggc

SEQ ID NO: 110311 - DNA, 26 bp, Homo sapiens
aggccacactctgctgccagctggcc

SEQ ID NO: 110312 - DNA, 26 bp, Homo sapiens
ggccacactctgctgccagctggcct

SEQ ID NO: 110313 - DNA, 26 bp, Homo sapiens
gccacactctgctgccagctggcctt

SEQ ID NO: 110314 - DNA, 26 bp, Homo sapiens
ccacactctgctgccagctggccttt

SEQ ID NO: 110315 - DNA, 26 bp, Homo sapiens
cacactctgctgccagctggcctttc

SEQ ID NO: 110316 - DNA, 26 bp, Homo sapiens
acactctgctgccagctggcctttcc

SEQ ID NO: 110317 - DNA, 26 bp, Homo sapiens
cactctgctgccagctggcctttcct

SEQ ID NO: 110318 - DNA, 26 bp, Homo sapiens
actctgctgccagctggcctttcctc

SEQ ID NO: 110319 - DNA, 26 bp, Homo sapiens
ctctgctgccagctggcctttcctca

SEQ ID NO: 110320 - DNA, 26 bp, Homo sapiens
tctgctgccagctggcctttcctcag

SEQ ID NO: 110321 - DNA, 26 bp, Homo sapiens
ctgctgccagctggcctttcctcagc

SEQ ID NO: 110322 - DNA, 26 bp, Homo sapiens
tgctgccagctggcctttcctcagcc

SEQ ID NO: 110323 - DNA, 26 bp, Homo sapiens
gctgccagctggcctttcctcagcct

SEQ ID NO: 110324 - DNA, 26 bp, Homo sapiens
ctgccagctggcctttcctcagcctt

SEQ ID NO: 110325 - DNA, 26 bp, Homo sapiens
tgccagctggcctttcctcagcctta

SEQ ID NO: 110326 - DNA, 26 bp, Homo sapiens
gccagctggcctttcctcagccttaa

SEQ ID NO: 110327 - DNA, 26 bp, Homo sapiens
ccagctggcctttcctcagccttaac

SEQ ID NO: 110328 - DNA, 26 bp, Homo sapiens
cagctggcctttcctcagccttaacc

SEQ ID NO: 110329 - DNA, 26 bp, Homo sapiens
agctggcctttcctcagccttaacct

SEQ ID NO: 110330 - DNA, 26 bp, Homo sapiens
gctggcctttcctcagccttaacctc

SEQ ID NO: 110331 - DNA, 26 bp, Homo sapiens
ctggcctttcctcagccttaacctcc

SEQ ID NO: 110332 - DNA, 26 bp, Homo sapiens
tggcctttcctcagccttaacctcca

SEQ ID NO: 110333 - DNA, 26 bp, Homo sapiens
ggcctttcctcagccttaacctccac

SEQ ID NO: 110334 - DNA, 26 bp, Homo sapiens
gcctttcctcagccttaacctccact

SEQ ID NO: 110335 - DNA, 26 bp, Homo sapiens
cctttcctcagccttaacctccactc

SEQ ID NO: 110336 - DNA, 26 bp, Homo sapiens
ctttcctcagccttaacctccactca

SEQ ID NO: 110337 - DNA, 26 bp, Homo sapiens
tttcctcagccttaacctccactcat

SEQ ID NO: 110338 - DNA, 26 bp, Homo sapiens
ttcctcagccttaacctccactcatc

SEQ ID NO: 110339 - DNA, 26 bp, Homo sapiens
tcctcagccttaacctccactcatcc

SEQ ID NO: 110340 - DNA, 26 bp, Homo sapiens
cctcagccttaacctccactcatccc

SEQ ID NO: 110341 - DNA, 26 bp, Homo sapiens
ctcagccttaacctccactcatcccc

SEQ ID NO: 110342 - DNA, 26 bp, Homo sapiens
tcagccttaacctccactcatcccct

SEQ ID NO: 110343 - DNA, 26 bp, Homo sapiens
cagccttaacctccactcatcccctg

SEQ ID NO: 110344 - DNA, 26 bp, Homo sapiens
agccttaacctccactcatcccctgg

SEQ ID NO: 110345 - DNA, 26 bp, Homo sapiens
gccttaacctccactcatcccctggt

SEQ ID NO: 110346 - DNA, 26 bp, Homo sapiens
ccttaacctccactcatcccctggtg

SEQ ID NO: 110347 - DNA, 26 bp, Homo sapiens
cttaacctccactcatcccctggtgc

SEQ ID NO: 110348 - DNA, 26 bp, Homo sapiens
ttaacctccactcatcccctggtgct

SEQ ID NO: 110349 - DNA, 26 bp, Homo sapiens
taacctccactcatcccctggtgctc

SEQ ID NO: 110350 - DNA, 26 bp, Homo sapiens
aacctccactcatcccctggtgctca

SEQ ID NO: 110351 - DNA, 26 bp, Homo sapiens
acctccactcatcccctggtgctcag

SEQ ID NO: 110352 - DNA, 26 bp, Homo sapiens
cctccactcatcccctggtgctcagc

SEQ ID NO: 110353 - DNA, 26 bp, Homo sapiens
ctccactcatcccctggtgctcagct

SEQ ID NO: 110354 - DNA, 26 bp, Homo sapiens
tccactcatcccctggtgctcagctt

SEQ ID NO: 110355 - DNA, 26 bp, Homo sapiens
ccactcatcccctggtgctcagcttc

SEQ ID NO: 110356 - DNA, 26 bp, Homo sapiens
cactcatcccctggtgctcagcttct

SEQ ID NO: 110357 - DNA, 26 bp, Homo sapiens
actcatcccctggtgctcagcttctg

SEQ ID NO: 110358 - DNA, 26 bp, Homo sapiens
ctcatcccctggtgctcagcttctgg

SEQ ID NO: 110359 - DNA, 26 bp, Homo sapiens
tcatcccctggtgctcagcttctggc

SEQ ID NO: 110360 - DNA, 26 bp, Homo sapiens
catcccctggtgctcagcttctggct

SEQ ID NO: 110361 - DNA, 26 bp, Homo sapiens
atcccctggtgctcagcttctggctt

SEQ ID NO: 110362 - DNA, 26 bp, Homo sapiens
tcccctggtgctcagcttctggcttt

SEQ ID NO: 110363 - DNA, 26 bp, Homo sapiens
cccctggtgctcagcttctggctttg

SEQ ID NO: 110364 - DNA, 26 bp, Homo sapiens
ccctggtgctcagcttctggctttgt

SEQ ID NO: 110365 - DNA, 26 bp, Homo sapiens
cctggtgctcagcttctggctttgtt

SEQ ID NO: 110366 - DNA, 26 bp, Homo sapiens
ctggtgctcagcttctggctttgttt

SEQ ID NO: 110367 - DNA, 26 bp, Homo sapiens
tggtgctcagcttctggctttgtttg

SEQ ID NO: 110368 - DNA, 26 bp, Homo sapiens
ggtgctcagcttctggctttgtttga

SEQ ID NO: 110369 - DNA, 26 bp, Homo sapiens
gtgctcagcttctggctttgtttgac

SEQ ID NO: 110370 - DNA, 26 bp, Homo sapiens
tgctcagcttctggctttgtttgaca

SEQ ID NO: 110371 - DNA, 26 bp, Homo sapiens
gctcagcttctggctttgtttgacag

SEQ ID NO: 110372 - DNA, 26 bp, Homo sapiens
ctcagcttctggctttgtttgacagg

SEQ ID NO: 110373 - DNA, 26 bp, Homo sapiens
tcagcttctggctttgtttgacaggt

SEQ ID NO: 110374 - DNA, 26 bp, Homo sapiens
cagcttctggctttgtttgacaggtg

SEQ ID NO: 110375 - DNA, 26 bp, Homo sapiens
agcttctggctttgtttgacaggtgg

SEQ ID NO: 110376 - DNA, 26 bp, Homo sapiens
gcttctggctttgtttgacaggtggg

SEQ ID NO: 110377 - DNA, 26 bp, Homo sapiens
cttctggctttgtttgacaggtgggc

SEQ ID NO: 110378 - DNA, 26 bp, Homo sapiens
ttctggctttgtttgacaggtgggca

SEQ ID NO: 110379 - DNA, 26 bp, Homo sapiens
tctggctttgtttgacaggtgggcag

SEQ ID NO: 110380 - DNA, 26 bp, Homo sapiens
ctggctttgtttgacaggtgggcagg

SEQ ID NO: 110381 - DNA, 26 bp, Homo sapiens
tggctttgtttgacaggtgggcagga

SEQ ID NO: 110382 - DNA, 26 bp, Homo sapiens
ggctttgtttgacaggtgggcaggag

SEQ ID NO: 110383 - DNA, 26 bp, Homo sapiens
gctttgtttgacaggtgggcaggagg

SEQ ID NO: 110384 - DNA, 26 bp, Homo sapiens
ctttgtttgacaggtgggcaggagga

SEQ ID NO: 110385 - DNA, 26 bp, Homo sapiens
tttgtttgacaggtgggcaggaggag

SEQ ID NO: 110386 - DNA, 26 bp, Homo sapiens
ttgtttgacaggtgggcaggaggaga

SEQ ID NO: 110387 - DNA, 26 bp, Homo sapiens
tgtttgacaggtgggcaggaggagag

SEQ ID NO: 110388 - DNA, 26 bp, Homo sapiens
gtttgacaggtgggcaggaggagaga

SEQ ID NO: 110389 - DNA, 26 bp, Homo sapiens
tttgacaggtgggcaggaggagagag

SEQ ID NO: 110390 - DNA, 26 bp, Homo sapiens
ttgacaggtgggcaggaggagagagg

SEQ ID NO: 110391 - DNA, 26 bp, Homo sapiens
tgacaggtgggcaggaggagagaggg

SEQ ID NO: 110392 - DNA, 26 bp, Homo sapiens
gacaggtgggcaggaggagagagggg

SEQ ID NO: 110393 - DNA, 26 bp, Homo sapiens
acaggtgggcaggaggagagagggga

SEQ ID NO: 110394 - DNA, 26 bp, Homo sapiens
caggtgggcaggaggagagaggggaa

SEQ ID NO: 110395 - DNA, 26 bp, Homo sapiens
aggtgggcaggaggagagaggggaag

SEQ ID NO: 110396 - DNA, 26 bp, Homo sapiens
ggtgggcaggaggagagaggggaagc

SEQ ID NO: 110397 - DNA, 26 bp, Homo sapiens
gtgggcaggaggagagaggggaagct

SEQ ID NO: 110398 - DNA, 26 bp, Homo sapiens
tgggcaggaggagagaggggaagctg

SEQ ID NO: 110399 - DNA, 26 bp, Homo sapiens
gggcaggaggagagaggggaagctgt

SEQ ID NO: 110400 - DNA, 26 bp, Homo sapiens
ggcaggaggagagaggggaagctgtg

SEQ ID NO: 110401 - DNA, 26 bp, Homo sapiens
gcaggaggagagaggggaagctgtgg

SEQ ID NO: 110402 - DNA, 26 bp, Homo sapiens
caggaggagagaggggaagctgtgga

SEQ ID NO: 110403 - DNA, 26 bp, Homo sapiens
aggaggagagaggggaagctgtggag

SEQ ID NO: 110404 - DNA, 26 bp, Homo sapiens
ggaggagagaggggaagctgtggagg

SEQ ID NO: 110405 - DNA, 26 bp, Homo sapiens
gaggagagaggggaagctgtggaggt

SEQ ID NO: 110406 - DNA, 26 bp, Homo sapiens
aggagagaggggaagctgtggaggtc

SEQ ID NO: 110407 - DNA, 26 bp, Homo sapiens
ggagagaggggaagctgtggaggtca

SEQ ID NO: 110408 - DNA, 26 bp, Homo sapiens
gagagaggggaagctgtggaggtcag

SEQ ID NO: 110409 - DNA, 26 bp, Homo sapiens
agagaggggaagctgtggaggtcagc

SEQ ID NO: 110410 - DNA, 26 bp, Homo sapiens
gagaggggaagctgtggaggtcagca

SEQ ID NO: 110411 - DNA, 26 bp, Homo sapiens
agaggggaagctgtggaggtcagcag

SEQ ID NO: 110412 - DNA, 26 bp, Homo sapiens
gaggggaagctgtggaggtcagcagc

SEQ ID NO: 110413 - DNA, 26 bp, Homo sapiens
aggggaagctgtggaggtcagcagcc

SEQ ID NO: 110414 - DNA, 26 bp, Homo sapiens
ggggaagctgtggaggtcagcagccc

SEQ ID NO: 110415 - DNA, 26 bp, Homo sapiens
gggaagctgtggaggtcagcagcccc

SEQ ID NO: 110416 - DNA, 26 bp, Homo sapiens
ggaagctgtggaggtcagcagcccct

SEQ ID NO: 110417 - DNA, 26 bp, Homo sapiens
gaagctgtggaggtcagcagccccta

SEQ ID NO: 110418 - DNA, 26 bp, Homo sapiens
aagctgtggaggtcagcagcccctaa

SEQ ID NO: 110419 - DNA, 26 bp, Homo sapiens
agctgtggaggtcagcagcccctaag

SEQ ID NO: 110420 - DNA, 26 bp, Homo sapiens
gctgtggaggtcagcagcccctaagc

SEQ ID NO: 110421 - DNA, 26 bp, Homo sapiens
ctgtggaggtcagcagcccctaagct

SEQ ID NO: 110422 - DNA, 26 bp, Homo sapiens
tgtggaggtcagcagcccctaagctg

SEQ ID NO: 110423 - DNA, 26 bp, Homo sapiens
gtggaggtcagcagcccctaagctga

SEQ ID NO: 110424 - DNA, 26 bp, Homo sapiens
tggaggtcagcagcccctaagctgat

SEQ ID NO: 110425 - DNA, 26 bp, Homo sapiens
ggaggtcagcagcccctaagctgatg

SEQ ID NO: 110426 - DNA, 26 bp, Homo sapiens
gaggtcagcagcccctaagctgatgg

SEQ ID NO: 110427 - DNA, 26 bp, Homo sapiens
aggtcagcagcccctaagctgatgga

SEQ ID NO: 110428 - DNA, 26 bp, Homo sapiens
ggtcagcagcccctaagctgatggag

SEQ ID NO: 110429 - DNA, 26 bp, Homo sapiens
gtcagcagcccctaagctgatggagt

SEQ ID NO: 110430 - DNA, 26 bp, Homo sapiens
tcagcagcccctaagctgatggagtg

SEQ ID NO: 110431 - DNA, 26 bp, Homo sapiens
cagcagcccctaagctgatggagtgt

SEQ ID NO: 110432 - DNA, 26 bp, Homo sapiens
agcagcccctaagctgatggagtgtg

SEQ ID NO: 110433 - DNA, 26 bp, Homo sapiens
gcagcccctaagctgatggagtgtgt

SEQ ID NO: 110434 - DNA, 26 bp, Homo sapiens
cagcccctaagctgatggagtgtgtt

SEQ ID NO: 110435 - DNA, 26 bp, Homo sapiens
agcccctaagctgatggagtgtgttc

SEQ ID NO: 110436 - DNA, 26 bp, Homo sapiens
gcccctaagctgatggagtgtgttct

SEQ ID NO: 110437 - DNA, 26 bp, Homo sapiens
cccctaagctgatggagtgtgttctg

SEQ ID NO: 110438 - DNA, 26 bp, Homo sapiens
ccctaagctgatggagtgtgttctgg

SEQ ID NO: 110439 - DNA, 26 bp, Homo sapiens
cctaagctgatggagtgtgttctggg

SEQ ID NO: 110440 - DNA, 26 bp, Homo sapiens
ctaagctgatggagtgtgttctggga

SEQ ID NO: 110441 - DNA, 26 bp, Homo sapiens
taagctgatggagtgtgttctgggag

SEQ ID NO: 110442 - DNA, 26 bp, Homo sapiens
aagctgatggagtgtgttctgggagg

SEQ ID NO: 110443 - DNA, 26 bp, Homo sapiens
agctgatggagtgtgttctgggaggg

SEQ ID NO: 110444 - DNA, 26 bp, Homo sapiens
gctgatggagtgtgttctgggagggg

SEQ ID NO: 110445 - DNA, 26 bp, Homo sapiens
ctgatggagtgtgttctgggaggggc

SEQ ID NO: 110446 - DNA, 26 bp, Homo sapiens
tgatggagtgtgttctgggaggggca

SEQ ID NO: 110447 - DNA, 26 bp, Homo sapiens
gatggagtgtgttctgggaggggcag

SEQ ID NO: 110448 - DNA, 26 bp, Homo sapiens
atggagtgtgttctgggaggggcagg

SEQ ID NO: 110449 - DNA, 26 bp, Homo sapiens
tggagtgtgttctgggaggggcaggc

SEQ ID NO: 110450 - DNA, 26 bp, Homo sapiens
ggagtgtgttctgggaggggcaggcg

SEQ ID NO: 110451 - DNA, 26 bp, Homo sapiens
gagtgtgttctgggaggggcaggcgc

SEQ ID NO: 110452 - DNA, 26 bp, Homo sapiens
agtgtgttctgggaggggcaggcgct

SEQ ID NO: 110453 - DNA, 26 bp, Homo sapiens
gtgtgttctgggaggggcaggcgctc

SEQ ID NO: 110454 - DNA, 26 bp, Homo sapiens
tgtgttctgggaggggcaggcgctct

SEQ ID NO: 110455 - DNA, 26 bp, Homo sapiens
gtgttctgggaggggcaggcgctctc

SEQ ID NO: 110456 - DNA, 26 bp, Homo sapiens
tgttctgggaggggcaggcgctctcc

SEQ ID NO: 110457 - DNA, 26 bp, Homo sapiens
gttctgggaggggcaggcgctctccg

SEQ ID NO: 110458 - DNA, 26 bp, Homo sapiens
ttctgggaggggcaggcgctctccgt

SEQ ID NO: 110459 - DNA, 26 bp, Homo sapiens
tctgggaggggcaggcgctctccgtt

SEQ ID NO: 110460 - DNA, 26 bp, Homo sapiens
ctgggaggggcaggcgctctccgttg

SEQ ID NO: 110461 - DNA, 26 bp, Homo sapiens
tgggaggggcaggcgctctccgttgg

SEQ ID NO: 110462 - DNA, 26 bp, Homo sapiens
gggaggggcaggcgctctccgttggc

SEQ ID NO: 110463 - DNA, 26 bp, Homo sapiens
ggaggggcaggcgctctccgttggca

SEQ ID NO: 110464 - DNA, 26 bp, Homo sapiens
gaggggcaggcgctctccgttggcaa

SEQ ID NO: 110465 - DNA, 26 bp, Homo sapiens
aggggcaggcgctctccgttggcaag

SEQ ID NO: 110466 - DNA, 26 bp, Homo sapiens
ggggcaggcgctctccgttggcaagg

SEQ ID NO: 110467 - DNA, 26 bp, Homo sapiens
gggcaggcgctctccgttggcaaggg

SEQ ID NO: 110468 - DNA, 26 bp, Homo sapiens
ggcaggcgctctccgttggcaagggc

SEQ ID NO: 110469 - DNA, 26 bp, Homo sapiens
gcaggcgctctccgttggcaagggca

SEQ ID NO: 110470 - DNA, 26 bp, Homo sapiens
caggcgctctccgttggcaagggcag

SEQ ID NO: 110471 - DNA, 26 bp, Homo sapiens
aggcgctctccgttggcaagggcaga

SEQ ID NO: 110472 - DNA, 26 bp, Homo sapiens
ggcgctctccgttggcaagggcagaa

SEQ ID NO: 110473 - DNA, 26 bp, Homo sapiens
gcgctctccgttggcaagggcagaag

SEQ ID NO: 110474 - DNA, 26 bp, Homo sapiens
cgctctccgttggcaagggcagaagt

SEQ ID NO: 110475 - DNA, 26 bp, Homo sapiens
gctctccgttggcaagggcagaagta

SEQ ID NO: 110476 - DNA, 26 bp, Homo sapiens
ctctccgttggcaagggcagaagtag

SEQ ID NO: 110477 - DNA, 26 bp, Homo sapiens
tctccgttggcaagggcagaagtaga

SEQ ID NO: 110478 - DNA, 26 bp, Homo sapiens
ctccgttggcaagggcagaagtagaa

SEQ ID NO: 110479 - DNA, 26 bp, Homo sapiens
tccgttggcaagggcagaagtagaag

SEQ ID NO: 110480 - DNA, 26 bp, Homo sapiens
ccgttggcaagggcagaagtagaagt

SEQ ID NO: 110481 - DNA, 26 bp, Homo sapiens
cgttggcaagggcagaagtagaagtt

SEQ ID NO: 110482 - DNA, 26 bp, Homo sapiens
gttggcaagggcagaagtagaagttg

SEQ ID NO: 110483 - DNA, 26 bp, Homo sapiens
ttggcaagggcagaagtagaagttgt

SEQ ID NO: 110484 - DNA, 26 bp, Homo sapiens
tggcaagggcagaagtagaagttgtt

SEQ ID NO: 110485 - DNA, 26 bp, Homo sapiens
ggcaagggcagaagtagaagttgttt

SEQ ID NO: 110486 - DNA, 26 bp, Homo sapiens
gcaagggcagaagtagaagttgtttc

SEQ ID NO: 110487 - DNA, 26 bp, Homo sapiens
caagggcagaagtagaagttgtttct

SEQ ID NO: 110488 - DNA, 26 bp, Homo sapiens
aagggcagaagtagaagttgtttctt

SEQ ID NO: 110489 - DNA, 26 bp, Homo sapiens
agggcagaagtagaagttgtttcttg

SEQ ID NO: 110490 - DNA, 26 bp, Homo sapiens
gggcagaagtagaagttgtttcttga

SEQ ID NO: 110491 - DNA, 26 bp, Homo sapiens
ggcagaagtagaagttgtttcttgag

SEQ ID NO: 110492 - DNA, 26 bp, Homo sapiens
gcagaagtagaagttgtttcttgagc

SEQ ID NO: 110493 - DNA, 26 bp, Homo sapiens
cagaagtagaagttgtttcttgagca

SEQ ID NO: 110494 - DNA, 26 bp, Homo sapiens
agaagtagaagttgtttcttgagcat

SEQ ID NO: 110495 - DNA, 26 bp, Homo sapiens
gaagtagaagttgtttcttgagcatt

SEQ ID NO: 110496 - DNA, 26 bp, Homo sapiens
aagtagaagttgtttcttgagcattg

SEQ ID NO: 110497 - DNA, 26 bp, Homo sapiens
agtagaagttgtttcttgagcattgg

SEQ ID NO: 110498 - DNA, 26 bp, Homo sapiens
gtagaagttgtttcttgagcattgga

SEQ ID NO: 110499 - DNA, 26 bp, Homo sapiens
tagaagttgtttcttgagcattggat

SEQ ID NO: 110500 - DNA, 26 bp, Homo sapiens
agaagttgtttcttgagcattggatg

SEQ ID NO: 110501 - DNA, 26 bp, Homo sapiens
gaagttgtttcttgagcattggatga

SEQ ID NO: 110502 - DNA, 26 bp, Homo sapiens
aagttgtttcttgagcattggatgat

SEQ ID NO: 110503 - DNA, 26 bp, Homo sapiens
agttgtttcttgagcattggatgatt

SEQ ID NO: 110504 - DNA, 26 bp, Homo sapiens
gttgtttcttgagcattggatgatta

SEQ ID NO: 110505 - DNA, 26 bp, Homo sapiens
ttgtttcttgagcattggatgattag

SEQ ID NO: 110506 - DNA, 26 bp, Homo sapiens
tgtttcttgagcattggatgattagg

SEQ ID NO: 110507 - DNA, 26 bp, Homo sapiens
gtttcttgagcattggatgattagga

SEQ ID NO: 110508 - DNA, 26 bp, Homo sapiens
tttcttgagcattggatgattaggat

SEQ ID NO: 110509 - DNA, 26 bp, Homo sapiens
ttcttgagcattggatgattaggatg

SEQ ID NO: 110510 - DNA, 26 bp, Homo sapiens
tcttgagcattggatgattaggatgg

SEQ ID NO: 110511 - DNA, 26 bp, Homo sapiens
cttgagcattggatgattaggatggg

SEQ ID NO: 110512 - DNA, 26 bp, Homo sapiens
ttgagcattggatgattaggatggga

SEQ ID NO: 110513 - DNA, 26 bp, Homo sapiens
tgagcattggatgattaggatgggag

SEQ ID NO: 110514 - DNA, 26 bp, Homo sapiens
gagcattggatgattaggatgggagg

SEQ ID NO: 110515 - DNA, 26 bp, Homo sapiens
agcattggatgattaggatgggaggt

SEQ ID NO: 110516 - DNA, 26 bp, Homo sapiens
gcattggatgattaggatgggaggtg

SEQ ID NO: 110517 - DNA, 26 bp, Homo sapiens
cattggatgattaggatgggaggtgc

SEQ ID NO: 110518 - DNA, 26 bp, Homo sapiens
attggatgattaggatgggaggtgcg

SEQ ID NO: 110519 - DNA, 26 bp, Homo sapiens
ttggatgattaggatgggaggtgcgt

SEQ ID NO: 110520 - DNA, 26 bp, Homo sapiens
tggatgattaggatgggaggtgcgtg

SEQ ID NO: 110521 - DNA, 26 bp, Homo sapiens
ggatgattaggatgggaggtgcgtga

SEQ ID NO: 110522 - DNA, 26 bp, Homo sapiens
gatgattaggatgggaggtgcgtgag

SEQ ID NO: 110523 - DNA, 26 bp, Homo sapiens
atgattaggatgggaggtgcgtgagg

SEQ ID NO: 110524 - DNA, 26 bp, Homo sapiens
tgattaggatgggaggtgcgtgaggt

SEQ ID NO: 110525 - DNA, 26 bp, Homo sapiens
gattaggatgggaggtgcgtgaggtt

SEQ ID NO: 110526 - DNA, 26 bp, Homo sapiens
attaggatgggaggtgcgtgaggttc

SEQ ID NO: 110527 - DNA, 26 bp, Homo sapiens
ttaggatgggaggtgcgtgaggttct

SEQ ID NO: 110528 - DNA, 26 bp, Homo sapiens
taggatgggaggtgcgtgaggttctc

SEQ ID NO: 110529 - DNA, 26 bp, Homo sapiens
aggatgggaggtgcgtgaggttctct

SEQ ID NO: 110530 - DNA, 26 bp, Homo sapiens
ggatgggaggtgcgtgaggttctctc

SEQ ID NO: 110531 - DNA, 26 bp, Homo sapiens
gatgggaggtgcgtgaggttctctca

SEQ ID NO: 110532 - DNA, 26 bp, Homo sapiens
atgggaggtgcgtgaggttctctcag

SEQ ID NO: 110533 - DNA, 26 bp, Homo sapiens
tgggaggtgcgtgaggttctctcagc

SEQ ID NO: 110534 - DNA, 26 bp, Homo sapiens
gggaggtgcgtgaggttctctcagcc

SEQ ID NO: 110535 - DNA, 26 bp, Homo sapiens
ggaggtgcgtgaggttctctcagccc

SEQ ID NO: 110536 - DNA, 26 bp, Homo sapiens
gaggtgcgtgaggttctctcagccca

SEQ ID NO: 110537 - DNA, 26 bp, Homo sapiens
aggtgcgtgaggttctctcagcccag

SEQ ID NO: 110538 - DNA, 26 bp, Homo sapiens
ggtgcgtgaggttctctcagcccagg

SEQ ID NO: 110539 - DNA, 26 bp, Homo sapiens
gtgcgtgaggttctctcagcccaggg

SEQ ID NO: 110540 - DNA, 26 bp, Homo sapiens
tgcgtgaggttctctcagcccagggg

SEQ ID NO: 110541 - DNA, 26 bp, Homo sapiens
gcgtgaggttctctcagcccaggggg

SEQ ID NO: 110542 - DNA, 26 bp, Homo sapiens
cgtgaggttctctcagcccagggggg

SEQ ID NO: 110543 - DNA, 26 bp, Homo sapiens
gtgaggttctctcagcccaggggggt

SEQ ID NO: 110544 - DNA, 26 bp, Homo sapiens
tgaggttctctcagcccaggggggtg

SEQ ID NO: 110545 - DNA, 26 bp, Homo sapiens
gaggttctctcagcccaggggggtgc

SEQ ID NO: 110546 - DNA, 26 bp, Homo sapiens
aggttctctcagcccaggggggtgca

SEQ ID NO: 110547 - DNA, 26 bp, Homo sapiens
ggttctctcagcccaggggggtgcag

SEQ ID NO: 110548 - DNA, 26 bp, Homo sapiens
gttctctcagcccaggggggtgcaga

SEQ ID NO: 110549 - DNA, 26 bp, Homo sapiens
ttctctcagcccaggggggtgcagat

SEQ ID NO: 110550 - DNA, 26 bp, Homo sapiens
tctctcagcccaggggggtgcagatg

SEQ ID NO: 110551 - DNA, 26 bp, Homo sapiens
ctctcagcccaggggggtgcagatgg

SEQ ID NO: 110552 - DNA, 26 bp, Homo sapiens
tctcagcccaggggggtgcagatggg

SEQ ID NO: 110553 - DNA, 26 bp, Homo sapiens
ctcagcccaggggggtgcagatgggt

SEQ ID NO: 110554 - DNA, 26 bp, Homo sapiens
tcagcccaggggggtgcagatgggta

SEQ ID NO: 110555 - DNA, 26 bp, Homo sapiens
cagcccaggggggtgcagatgggtaa

SEQ ID NO: 110556 - DNA, 26 bp, Homo sapiens
agcccaggggggtgcagatgggtaag

SEQ ID NO: 110557 - DNA, 26 bp, Homo sapiens
gcccaggggggtgcagatgggtaagg

SEQ ID NO: 110558 - DNA, 26 bp, Homo sapiens
cccaggggggtgcagatgggtaagga

SEQ ID NO: 110559 - DNA, 26 bp, Homo sapiens
ccaggggggtgcagatgggtaaggac

SEQ ID NO: 110560 - DNA, 26 bp, Homo sapiens
caggggggtgcagatgggtaaggaca

SEQ ID NO: 110561 - DNA, 26 bp, Homo sapiens
aggggggtgcagatgggtaaggacag

SEQ ID NO: 110562 - DNA, 26 bp, Homo sapiens
ggggggtgcagatgggtaaggacagc

SEQ ID NO: 110563 - DNA, 26 bp, Homo sapiens
gggggtgcagatgggtaaggacagcc

SEQ ID NO: 110564 - DNA, 26 bp, Homo sapiens
ggggtgcagatgggtaaggacagcct

SEQ ID NO: 110565 - DNA, 26 bp, Homo sapiens
gggtgcagatgggtaaggacagcctt

SEQ ID NO: 110566 - DNA, 26 bp, Homo sapiens
ggtgcagatgggtaaggacagccttc

SEQ ID NO: 110567 - DNA, 26 bp, Homo sapiens
gtgcagatgggtaaggacagccttca

SEQ ID NO: 110568 - DNA, 26 bp, Homo sapiens
tgcagatgggtaaggacagccttcac

SEQ ID NO: 110569 - DNA, 26 bp, Homo sapiens
gcagatgggtaaggacagccttcact

SEQ ID NO: 110570 - DNA, 26 bp, Homo sapiens
cagatgggtaaggacagccttcactg

SEQ ID NO: 110571 - DNA, 26 bp, Homo sapiens
agatgggtaaggacagccttcactgt

SEQ ID NO: 110572 - DNA, 26 bp, Homo sapiens
gatgggtaaggacagccttcactgtg

SEQ ID NO: 110573 - DNA, 26 bp, Homo sapiens
atgggtaaggacagccttcactgtgc

SEQ ID NO: 110574 - DNA, 26 bp, Homo sapiens
tgggtaaggacagccttcactgtgcc

SEQ ID NO: 110575 - DNA, 26 bp, Homo sapiens
gggtaaggacagccttcactgtgcct

SEQ ID NO: 110576 - DNA, 26 bp, Homo sapiens
ggtaaggacagccttcactgtgcctt

SEQ ID NO: 110577 - DNA, 26 bp, Homo sapiens
gtaaggacagccttcactgtgccttt

SEQ ID NO: 110578 - DNA, 26 bp, Homo sapiens
taaggacagccttcactgtgcctttg

SEQ ID NO: 110579 - DNA, 26 bp, Homo sapiens
aaggacagccttcactgtgcctttga

SEQ ID NO: 110580 - DNA, 26 bp, Homo sapiens
aggacagccttcactgtgcctttgag

SEQ ID NO: 110581 - DNA, 26 bp, Homo sapiens
ggacagccttcactgtgcctttgagc

SEQ ID NO: 110582 - DNA, 26 bp, Homo sapiens
gacagccttcactgtgcctttgagct

SEQ ID NO: 110583 - DNA, 26 bp, Homo sapiens
acagccttcactgtgcctttgagctg

SEQ ID NO: 110584 - DNA, 26 bp, Homo sapiens
cagccttcactgtgcctttgagctgc

SEQ ID NO: 110585 - DNA, 26 bp, Homo sapiens
agccttcactgtgcctttgagctgct

SEQ ID NO: 110586 - DNA, 26 bp, Homo sapiens
gccttcactgtgcctttgagctgctt

SEQ ID NO: 110587 - DNA, 26 bp, Homo sapiens
ccttcactgtgcctttgagctgcttt

SEQ ID NO: 110588 - DNA, 26 bp, Homo sapiens
cttcactgtgcctttgagctgctttc

SEQ ID NO: 110589 - DNA, 26 bp, Homo sapiens
ttcactgtgcctttgagctgctttcc

SEQ ID NO: 110590 - DNA, 26 bp, Homo sapiens
tcactgtgcctttgagctgctttccg

SEQ ID NO: 110591 - DNA, 26 bp, Homo sapiens
cactgtgcctttgagctgctttccgc

SEQ ID NO: 110592 - DNA, 26 bp, Homo sapiens
actgtgcctttgagctgctttccgct

SEQ ID NO: 110593 - DNA, 26 bp, Homo sapiens
ctgtgcctttgagctgctttccgctc

SEQ ID NO: 110594 - DNA, 26 bp, Homo sapiens
tgtgcctttgagctgctttccgctcc

SEQ ID NO: 110595 - DNA, 26 bp, Homo sapiens
gtgcctttgagctgctttccgctccc

SEQ ID NO: 110596 - DNA, 26 bp, Homo sapiens
tgcctttgagctgctttccgctccct

SEQ ID NO: 110597 - DNA, 26 bp, Homo sapiens
gcctttgagctgctttccgctccctg

SEQ ID NO: 110598 - DNA, 26 bp, Homo sapiens
cctttgagctgctttccgctccctgg

SEQ ID NO: 110599 - DNA, 26 bp, Homo sapiens
ctttgagctgctttccgctccctggg

SEQ ID NO: 110600 - DNA, 26 bp, Homo sapiens
tttgagctgctttccgctccctgggc

SEQ ID NO: 110601 - DNA, 26 bp, Homo sapiens
ttgagctgctttccgctccctgggct

SEQ ID NO: 110602 - DNA, 26 bp, Homo sapiens
tgagctgctttccgctccctgggctc

SEQ ID NO: 110603 - DNA, 26 bp, Homo sapiens
gagctgctttccgctccctgggctcc

SEQ ID NO: 110604 - DNA, 26 bp, Homo sapiens
agctgctttccgctccctgggctcca

SEQ ID NO: 110605 - DNA, 26 bp, Homo sapiens
gctgctttccgctccctgggctccag

SEQ ID NO: 110606 - DNA, 26 bp, Homo sapiens
ctgctttccgctccctgggctccagc

SEQ ID NO: 110607 - DNA, 26 bp, Homo sapiens
tgctttccgctccctgggctccagcc

SEQ ID NO: 110608 - DNA, 26 bp, Homo sapiens
gctttccgctccctgggctccagcct

SEQ ID NO: 110609 - DNA, 26 bp, Homo sapiens
ctttccgctccctgggctccagccta

SEQ ID NO: 110610 - DNA, 26 bp, Homo sapiens
tttccgctccctgggctccagcctag

SEQ ID NO: 110611 - DNA, 26 bp, Homo sapiens
ttccgctccctgggctccagcctagc

SEQ ID NO: 110612 - DNA, 26 bp, Homo sapiens
tccgctccctgggctccagcctagcc

SEQ ID NO: 110613 - DNA, 26 bp, Homo sapiens
ccgctccctgggctccagcctagccc

SEQ ID NO: 110614 - DNA, 26 bp, Homo sapiens
cgctccctgggctccagcctagcccc

SEQ ID NO: 110615 - DNA, 26 bp, Homo sapiens
gctccctgggctccagcctagcccca

SEQ ID NO: 110616 - DNA, 26 bp, Homo sapiens
ctccctgggctccagcctagccccag

SEQ ID NO: 110617 - DNA, 26 bp, Homo sapiens
tccctgggctccagcctagccccagg

SEQ ID NO: 110618 - DNA, 26 bp, Homo sapiens
ccctgggctccagcctagccccaggg

SEQ ID NO: 110619 - DNA, 26 bp, Homo sapiens
cctgggctccagcctagccccagggc

SEQ ID NO: 110620 - DNA, 26 bp, Homo sapiens
ctgggctccagcctagccccagggcc

SEQ ID NO: 110621 - DNA, 26 bp, Homo sapiens
tgggctccagcctagccccagggccg

SEQ ID NO: 110622 - DNA, 26 bp, Homo sapiens
gggctccagcctagccccagggccgg

SEQ ID NO: 110623 - DNA, 26 bp, Homo sapiens
ggctccagcctagccccagggccggc

SEQ ID NO: 110624 - DNA, 26 bp, Homo sapiens
gctccagcctagccccagggccggca

SEQ ID NO: 110625 - DNA, 26 bp, Homo sapiens
ctccagcctagccccagggccggcag

SEQ ID NO: 110626 - DNA, 26 bp, Homo sapiens
tccagcctagccccagggccggcaga

SEQ ID NO: 110627 - DNA, 26 bp, Homo sapiens
ccagcctagccccagggccggcagaa

SEQ ID NO: 110628 - DNA, 26 bp, Homo sapiens
cagcctagccccagggccggcagaag

SEQ ID NO: 110629 - DNA, 26 bp, Homo sapiens
agcctagccccagggccggcagaaga

SEQ ID NO: 110630 - DNA, 26 bp, Homo sapiens
gcctagccccagggccggcagaagag

SEQ ID NO: 110631 - DNA, 26 bp, Homo sapiens
cctagccccagggccggcagaagagc

SEQ ID NO: 110632 - DNA, 26 bp, Homo sapiens
ctagccccagggccggcagaagagct

SEQ ID NO: 110633 - DNA, 26 bp, Homo sapiens
tagccccagggccggcagaagagctg

SEQ ID NO: 110634 - DNA, 26 bp, Homo sapiens
agccccagggccggcagaagagctgg

SEQ ID NO: 110635 - DNA, 26 bp, Homo sapiens
gccccagggccggcagaagagctggc

SEQ ID NO: 110636 - DNA, 26 bp, Homo sapiens
ccccagggccggcagaagagctggca

SEQ ID NO: 110637 - DNA, 26 bp, Homo sapiens
cccagggccggcagaagagctggcag

SEQ ID NO: 110638 - DNA, 26 bp, Homo sapiens
ccagggccggcagaagagctggcagg

SEQ ID NO: 110639 - DNA, 26 bp, Homo sapiens
cagggccggcagaagagctggcaggg

SEQ ID NO: 110640 - DNA, 26 bp, Homo sapiens
agggccggcagaagagctggcaggga

SEQ ID NO: 110641 - DNA, 26 bp, Homo sapiens
gggccggcagaagagctggcagggat

SEQ ID NO: 110642 - DNA, 26 bp, Homo sapiens
ggccggcagaagagctggcagggatg

SEQ ID NO: 110643 - DNA, 26 bp, Homo sapiens
gccggcagaagagctggcagggatgt

SEQ ID NO: 110644 - DNA, 26 bp, Homo sapiens
ccggcagaagagctggcagggatgtt

SEQ ID NO: 110645 - DNA, 26 bp, Homo sapiens
cggcagaagagctggcagggatgttc

SEQ ID NO: 110646 - DNA, 26 bp, Homo sapiens
ggcagaagagctggcagggatgttct

SEQ ID NO: 110647 - DNA, 26 bp, Homo sapiens
gcagaagagctggcagggatgttcta

SEQ ID NO: 110648 - DNA, 26 bp, Homo sapiens
cagaagagctggcagggatgttctag

SEQ ID NO: 110649 - DNA, 26 bp, Homo sapiens
agaagagctggcagggatgttctaga

SEQ ID NO: 110650 - DNA, 26 bp, Homo sapiens
gaagagctggcagggatgttctagaa

SEQ ID NO: 110651 - DNA, 26 bp, Homo sapiens
aagagctggcagggatgttctagaaa

SEQ ID NO: 110652 - DNA, 26 bp, Homo sapiens
agagctggcagggatgttctagaaat

SEQ ID NO: 110653 - DNA, 26 bp, Homo sapiens
gagctggcagggatgttctagaaatg

SEQ ID NO: 110654 - DNA, 26 bp, Homo sapiens
agctggcagggatgttctagaaatgg

SEQ ID NO: 110655 - DNA, 26 bp, Homo sapiens
gctggcagggatgttctagaaatggg

SEQ ID NO: 110656 - DNA, 26 bp, Homo sapiens
ctggcagggatgttctagaaatgggg

SEQ ID NO: 110657 - DNA, 26 bp, Homo sapiens
tggcagggatgttctagaaatggggg

SEQ ID NO: 110658 - DNA, 26 bp, Homo sapiens
ggcagggatgttctagaaatgggggt

SEQ ID NO: 110659 - DNA, 26 bp, Homo sapiens
gcagggatgttctagaaatgggggtt

SEQ ID NO: 110660 - DNA, 26 bp, Homo sapiens
cagggatgttctagaaatgggggttg

SEQ ID NO: 110661 - DNA, 26 bp, Homo sapiens
agggatgttctagaaatgggggttgg

SEQ ID NO: 110662 - DNA, 26 bp, Homo sapiens
gggatgttctagaaatgggggttggt

SEQ ID NO: 110663 - DNA, 26 bp, Homo sapiens
ggatgttctagaaatgggggttggtt

SEQ ID NO: 110664 - DNA, 26 bp, Homo sapiens
gatgttctagaaatgggggttggttc

SEQ ID NO: 110665 - DNA, 26 bp, Homo sapiens
atgttctagaaatgggggttggttcc

SEQ ID NO: 110666 - DNA, 26 bp, Homo sapiens
tgttctagaaatgggggttggttcct

SEQ ID NO: 110667 - DNA, 26 bp, Homo sapiens
gttctagaaatgggggttggttcctc

SEQ ID NO: 110668 - DNA, 26 bp, Homo sapiens
ttctagaaatgggggttggttcctct

SEQ ID NO: 110669 - DNA, 26 bp, Homo sapiens
tctagaaatgggggttggttcctcta

SEQ ID NO: 110670 - DNA, 26 bp, Homo sapiens
ctagaaatgggggttggttcctctag

SEQ ID NO: 110671 - DNA, 26 bp, Homo sapiens
tagaaatgggggttggttcctctagc

SEQ ID NO: 110672 - DNA, 26 bp, Homo sapiens
agaaatgggggttggttcctctagct

SEQ ID NO: 110673 - DNA, 26 bp, Homo sapiens
gaaatgggggttggttcctctagcta

SEQ ID NO: 110674 - DNA, 26 bp, Homo sapiens
aaatgggggttggttcctctagctac

SEQ ID NO: 110675 - DNA, 26 bp, Homo sapiens
aatgggggttggttcctctagctacc

SEQ ID NO: 110676 - DNA, 26 bp, Homo sapiens
atgggggttggttcctctagctaccc

SEQ ID NO: 110677 - DNA, 26 bp, Homo sapiens
tgggggttggttcctctagctacccc

SEQ ID NO: 110678 - DNA, 26 bp, Homo sapiens
gggggttggttcctctagctacccca

SEQ ID NO: 110679 - DNA, 26 bp, Homo sapiens
ggggttggttcctctagctaccccaa

SEQ ID NO: 110680 - DNA, 26 bp, Homo sapiens
gggttggttcctctagctaccccaaa

SEQ ID NO: 110681 - DNA, 26 bp, Homo sapiens
ggttggttcctctagctaccccaaat

SEQ ID NO: 110682 - DNA, 26 bp, Homo sapiens
gttggttcctctagctaccccaaatg

SEQ ID NO: 110683 - DNA, 26 bp, Homo sapiens
ttggttcctctagctaccccaaatga

SEQ ID NO: 110684 - DNA, 26 bp, Homo sapiens
tggttcctctagctaccccaaatgag

SEQ ID NO: 110685 - DNA, 26 bp, Homo sapiens
ggttcctctagctaccccaaatgagg

SEQ ID NO: 110686 - DNA, 26 bp, Homo sapiens
gttcctctagctaccccaaatgagga

SEQ ID NO: 110687 - DNA, 26 bp, Homo sapiens
ttcctctagctaccccaaatgaggat

SEQ ID NO: 110688 - DNA, 26 bp, Homo sapiens
tcctctagctaccccaaatgaggata

SEQ ID NO: 110689 - DNA, 26 bp, Homo sapiens
cctctagctaccccaaatgaggatac

SEQ ID NO: 110690 - DNA, 26 bp, Homo sapiens
ctctagctaccccaaatgaggatact

SEQ ID NO: 110691 - DNA, 26 bp, Homo sapiens
tctagctaccccaaatgaggatactc

SEQ ID NO: 110692 - DNA, 26 bp, Homo sapiens
ctagctaccccaaatgaggatactcc

SEQ ID NO: 110693 - DNA, 26 bp, Homo sapiens
tagctaccccaaatgaggatactcct

SEQ ID NO: 110694 - DNA, 26 bp, Homo sapiens
agctaccccaaatgaggatactccta

SEQ ID NO: 110695 - DNA, 26 bp, Homo sapiens
gctaccccaaatgaggatactcctag

SEQ ID NO: 110696 - DNA, 26 bp, Homo sapiens
ctaccccaaatgaggatactcctagg

SEQ ID NO: 110697 - DNA, 26 bp, Homo sapiens
taccccaaatgaggatactcctagga

SEQ ID NO: 110698 - DNA, 26 bp, Homo sapiens
accccaaatgaggatactcctaggac

SEQ ID NO: 110699 - DNA, 26 bp, Homo sapiens
ccccaaatgaggatactcctaggaca

SEQ ID NO: 110700 - DNA, 26 bp, Homo sapiens
cccaaatgaggatactcctaggacac

SEQ ID NO: 110701 - DNA, 26 bp, Homo sapiens
ccaaatgaggatactcctaggacact

SEQ ID NO: 110702 - DNA, 26 bp, Homo sapiens
caaatgaggatactcctaggacactc

SEQ ID NO: 110703 - DNA, 26 bp, Homo sapiens
aaatgaggatactcctaggacactct

SEQ ID NO: 110704 - DNA, 26 bp, Homo sapiens
aatgaggatactcctaggacactctt

SEQ ID NO: 110705 - DNA, 26 bp, Homo sapiens
atgaggatactcctaggacactctta

SEQ ID NO: 110706 - DNA, 26 bp, Homo sapiens
tgaggatactcctaggacactcttag

SEQ ID NO: 110707 - DNA, 26 bp, Homo sapiens
gaggatactcctaggacactcttagc

SEQ ID NO: 110708 - DNA, 26 bp, Homo sapiens
aggatactcctaggacactcttagcc

SEQ ID NO: 110709 - DNA, 26 bp, Homo sapiens
ggatactcctaggacactcttagcca

SEQ ID NO: 110710 - DNA, 26 bp, Homo sapiens
gatactcctaggacactcttagccac

SEQ ID NO: 110711 - DNA, 26 bp, Homo sapiens
atactcctaggacactcttagccacg

SEQ ID NO: 110712 - DNA, 26 bp, Homo sapiens
tactcctaggacactcttagccacgg

SEQ ID NO: 110713 - DNA, 26 bp, Homo sapiens
actcctaggacactcttagccacggt

SEQ ID NO: 110714 - DNA, 26 bp, Homo sapiens
ctcctaggacactcttagccacggtg

SEQ ID NO: 110715 - DNA, 26 bp, Homo sapiens
tcctaggacactcttagccacggtga

SEQ ID NO: 110716 - DNA, 26 bp, Homo sapiens
cctaggacactcttagccacggtgag

SEQ ID NO: 110717 - DNA, 26 bp, Homo sapiens
ctaggacactcttagccacggtgagc

SEQ ID NO: 110718 - DNA, 26 bp, Homo sapiens
taggacactcttagccacggtgagcc

SEQ ID NO: 110719 - DNA, 26 bp, Homo sapiens
aggacactcttagccacggtgagccc

SEQ ID NO: 110720 - DNA, 26 bp, Homo sapiens
ggacactcttagccacggtgagccct

SEQ ID NO: 110721 - DNA, 26 bp, Homo sapiens
gacactcttagccacggtgagccctt

SEQ ID NO: 110722 - DNA, 26 bp, Homo sapiens
acactcttagccacggtgagccctta

SEQ ID NO: 110723 - DNA, 26 bp, Homo sapiens
cactcttagccacggtgagcccttag

SEQ ID NO: 110724 - DNA, 26 bp, Homo sapiens
actcttagccacggtgagcccttagg

SEQ ID NO: 110725 - DNA, 26 bp, Homo sapiens
ctcttagccacggtgagcccttagga

SEQ ID NO: 110726 - DNA, 26 bp, Homo sapiens
tcttagccacggtgagcccttaggat

SEQ ID NO: 110727 - DNA, 26 bp, Homo sapiens
cttagccacggtgagcccttaggatc

SEQ ID NO: 110728 - DNA, 26 bp, Homo sapiens
ttagccacggtgagcccttaggatcc

SEQ ID NO: 110729 - DNA, 26 bp, Homo sapiens
tagccacggtgagcccttaggatccc

SEQ ID NO: 110730 - DNA, 26 bp, Homo sapiens
agccacggtgagcccttaggatccca

SEQ ID NO: 110731 - DNA, 26 bp, Homo sapiens
gccacggtgagcccttaggatcccag

SEQ ID NO: 110732 - DNA, 26 bp, Homo sapiens
ccacggtgagcccttaggatcccagc

SEQ ID NO: 110733 - DNA, 26 bp, Homo sapiens
cacggtgagcccttaggatcccagct

SEQ ID NO: 110734 - DNA, 26 bp, Homo sapiens
acggtgagcccttaggatcccagctc

SEQ ID NO: 110735 - DNA, 26 bp, Homo sapiens
cggtgagcccttaggatcccagctcc

SEQ ID NO: 110736 - DNA, 26 bp, Homo sapiens
ggtgagcccttaggatcccagctcct

SEQ ID NO: 110737 - DNA, 26 bp, Homo sapiens
gtgagcccttaggatcccagctcctg

SEQ ID NO: 110738 - DNA, 26 bp, Homo sapiens
tgagcccttaggatcccagctcctgt

SEQ ID NO: 110739 - DNA, 26 bp, Homo sapiens
gagcccttaggatcccagctcctgtt

SEQ ID NO: 110740 - DNA, 26 bp, Homo sapiens
agcccttaggatcccagctcctgttg

SEQ ID NO: 110741 - DNA, 26 bp, Homo sapiens
gcccttaggatcccagctcctgttgg

SEQ ID NO: 110742 - DNA, 26 bp, Homo sapiens
cccttaggatcccagctcctgttgga

SEQ ID NO: 110743 - DNA, 26 bp, Homo sapiens
ccttaggatcccagctcctgttggaa

SEQ ID NO: 110744 - DNA, 26 bp, Homo sapiens
cttaggatcccagctcctgttggaag

SEQ ID NO: 110745 - DNA, 26 bp, Homo sapiens
ttaggatcccagctcctgttggaagg

SEQ ID NO: 110746 - DNA, 26 bp, Homo sapiens
taggatcccagctcctgttggaagga

SEQ ID NO: 110747 - DNA, 26 bp, Homo sapiens
aggatcccagctcctgttggaaggag

SEQ ID NO: 110748 - DNA, 26 bp, Homo sapiens
ggatcccagctcctgttggaaggagc

SEQ ID NO: 110749 - DNA, 26 bp, Homo sapiens
gatcccagctcctgttggaaggagca

SEQ ID NO: 110750 - DNA, 26 bp, Homo sapiens
atcccagctcctgttggaaggagcat

SEQ ID NO: 110751 - DNA, 26 bp, Homo sapiens
tcccagctcctgttggaaggagcatc

SEQ ID NO: 110752 - DNA, 26 bp, Homo sapiens
cccagctcctgttggaaggagcatcc

SEQ ID NO: 110753 - DNA, 26 bp, Homo sapiens
ccagctcctgttggaaggagcatcca

SEQ ID NO: 110754 - DNA, 26 bp, Homo sapiens
cagctcctgttggaaggagcatccag

SEQ ID NO: 110755 - DNA, 26 bp, Homo sapiens
agctcctgttggaaggagcatccagc

SEQ ID NO: 110756 - DNA, 26 bp, Homo sapiens
gctcctgttggaaggagcatccagca

SEQ ID NO: 110757 - DNA, 26 bp, Homo sapiens
ctcctgttggaaggagcatccagcat

SEQ ID NO: 110758 - DNA, 26 bp, Homo sapiens
tcctgttggaaggagcatccagcatc

SEQ ID NO: 110759 - DNA, 26 bp, Homo sapiens
cctgttggaaggagcatccagcatca

SEQ ID NO: 110760 - DNA, 26 bp, Homo sapiens
ctgttggaaggagcatccagcatcac

SEQ ID NO: 110761 - DNA, 26 bp, Homo sapiens
tgttggaaggagcatccagcatcact

SEQ ID NO: 110762 - DNA, 26 bp, Homo sapiens
gttggaaggagcatccagcatcactg

SEQ ID NO: 110763 - DNA, 26 bp, Homo sapiens
ttggaaggagcatccagcatcactgc

SEQ ID NO: 110764 - DNA, 26 bp, Homo sapiens
tggaaggagcatccagcatcactgcc

SEQ ID NO: 110765 - DNA, 26 bp, Homo sapiens
ggaaggagcatccagcatcactgcct

SEQ ID NO: 110766 - DNA, 26 bp, Homo sapiens
gaaggagcatccagcatcactgcctg

SEQ ID NO: 110767 - DNA, 26 bp, Homo sapiens
aaggagcatccagcatcactgcctgc

SEQ ID NO: 110768 - DNA, 26 bp, Homo sapiens
aggagcatccagcatcactgcctgcc

SEQ ID NO: 110769 - DNA, 26 bp, Homo sapiens
ggagcatccagcatcactgcctgccc

SEQ ID NO: 110770 - DNA, 26 bp, Homo sapiens
gagcatccagcatcactgcctgcccc

SEQ ID NO: 110771 - DNA, 26 bp, Homo sapiens
agcatccagcatcactgcctgcccca

SEQ ID NO: 110772 - DNA, 26 bp, Homo sapiens
gcatccagcatcactgcctgccccaa

SEQ ID NO: 110773 - DNA, 26 bp, Homo sapiens
catccagcatcactgcctgccccaag

SEQ ID NO: 110774 - DNA, 26 bp, Homo sapiens
atccagcatcactgcctgccccaagg

SEQ ID NO: 110775 - DNA, 26 bp, Homo sapiens
tccagcatcactgcctgccccaagga

SEQ ID NO: 110776 - DNA, 26 bp, Homo sapiens
ccagcatcactgcctgccccaaggaa

SEQ ID NO: 110777 - DNA, 26 bp, Homo sapiens
cagcatcactgcctgccccaaggaaa

SEQ ID NO: 110778 - DNA, 26 bp, Homo sapiens
agcatcactgcctgccccaaggaaaa

SEQ ID NO: 110779 - DNA, 26 bp, Homo sapiens
gcatcactgcctgccccaaggaaaag

SEQ ID NO: 110780 - DNA, 26 bp, Homo sapiens
catcactgcctgccccaaggaaaagc

SEQ ID NO: 110781 - DNA, 26 bp, Homo sapiens
atcactgcctgccccaaggaaaagca

SEQ ID NO: 110782 - DNA, 26 bp, Homo sapiens
tcactgcctgccccaaggaaaagcag

SEQ ID NO: 110783 - DNA, 26 bp, Homo sapiens
cactgcctgccccaaggaaaagcagc

SEQ ID NO: 110784 - DNA, 26 bp, Homo sapiens
actgcctgccccaaggaaaagcagca

SEQ ID NO: 110785 - DNA, 26 bp, Homo sapiens
ctgcctgccccaaggaaaagcagcaa

SEQ ID NO: 110786 - DNA, 26 bp, Homo sapiens
tgcctgccccaaggaaaagcagcaat

SEQ ID NO: 110787 - DNA, 26 bp, Homo sapiens
gcctgccccaaggaaaagcagcaata

SEQ ID NO: 110788 - DNA, 26 bp, Homo sapiens
cctgccccaaggaaaagcagcaataa

SEQ ID NO: 110789 - DNA, 26 bp, Homo sapiens
ctgccccaaggaaaagcagcaataaa

SEQ ID NO: 110790 - DNA, 26 bp, Homo sapiens
tgccccaaggaaaagcagcaataaaa

SEQ ID NO: 110791 - DNA, 26 bp, Homo sapiens
gccccaaggaaaagcagcaataaaag

SEQ ID NO: 110792 - DNA, 26 bp, Homo sapiens
ccccaaggaaaagcagcaataaaagg

SEQ ID NO: 110793 - DNA, 26 bp, Homo sapiens
cccaaggaaaagcagcaataaaaggg

SEQ ID NO: 110794 - DNA, 26 bp, Homo sapiens
ccaaggaaaagcagcaataaaagggg

SEQ ID NO: 110795 - DNA, 26 bp, Homo sapiens
caaggaaaagcagcaataaaagggga

SEQ ID NO: 110796 - DNA, 26 bp, Homo sapiens
aaggaaaagcagcaataaaaggggac

SEQ ID NO: 110797 - DNA, 26 bp, Homo sapiens
aggaaaagcagcaataaaaggggaca

SEQ ID NO: 110798 - DNA, 26 bp, Homo sapiens
ggaaaagcagcaataaaaggggacac

SEQ ID NO: 110799 - DNA, 26 bp, Homo sapiens
gaaaagcagcaataaaaggggacact

SEQ ID NO: 110800 - DNA, 26 bp, Homo sapiens
aaaagcagcaataaaaggggacactg

SEQ ID NO: 110801 - DNA, 26 bp, Homo sapiens
aaagcagcaataaaaggggacactgg

SEQ ID NO: 110802 - DNA, 26 bp, Homo sapiens
aagcagcaataaaaggggacactggg

SEQ ID NO: 110803 - DNA, 26 bp, Homo sapiens
agcagcaataaaaggggacactggga

SEQ ID NO: 110804 - DNA, 26 bp, Homo sapiens
gcagcaataaaaggggacactgggac

SEQ ID NO: 110805 - DNA, 26 bp, Homo sapiens
cagcaataaaaggggacactgggacc

SEQ ID NO: 110806 - DNA, 26 bp, Homo sapiens
agcaataaaaggggacactgggacct

SEQ ID NO: 110807 - DNA, 26 bp, Homo sapiens
gcaataaaaggggacactgggaccta

SEQ ID NO: 110808 - DNA, 26 bp, Homo sapiens
caataaaaggggacactgggacctag

SEQ ID NO: 110809 - DNA, 26 bp, Homo sapiens
aataaaaggggacactgggacctaga

SEQ ID NO: 110810 - DNA, 26 bp, Homo sapiens
ataaaaggggacactgggacctagaa

SEQ ID NO: 110811 - DNA, 26 bp, Homo sapiens
taaaaggggacactgggacctagaac

SEQ ID NO: 110812 - DNA, 26 bp, Homo sapiens
aaaaggggacactgggacctagaacg

SEQ ID NO: 110813 - DNA, 26 bp, Homo sapiens
aaaggggacactgggacctagaacgt

SEQ ID NO: 110814 - DNA, 26 bp, Homo sapiens
aaggggacactgggacctagaacgtg

SEQ ID NO: 110815 - DNA, 26 bp, Homo sapiens
aggggacactgggacctagaacgtgg

SEQ ID NO: 110816 - DNA, 26 bp, Homo sapiens
ggggacactgggacctagaacgtggt

SEQ ID NO: 110817 - DNA, 26 bp, Homo sapiens
gggacactgggacctagaacgtggtg

SEQ ID NO: 110818 - DNA, 26 bp, Homo sapiens
ggacactgggacctagaacgtggtga

SEQ ID NO: 110819 - DNA, 26 bp, Homo sapiens
gacactgggacctagaacgtggtgag

SEQ ID NO: 110820 - DNA, 26 bp, Homo sapiens
acactgggacctagaacgtggtgaga

SEQ ID NO: 110821 - DNA, 26 bp, Homo sapiens
cactgggacctagaacgtggtgagag

SEQ ID NO: 110822 - DNA, 26 bp, Homo sapiens
actgggacctagaacgtggtgagaga

SEQ ID NO: 110823 - DNA, 26 bp, Homo sapiens
ctgggacctagaacgtggtgagagag

SEQ ID NO: 110824 - DNA, 26 bp, Homo sapiens
tgggacctagaacgtggtgagagagg

SEQ ID NO: 110825 - DNA, 26 bp, Homo sapiens
gggacctagaacgtggtgagagaggt

SEQ ID NO: 110826 - DNA, 26 bp, Homo sapiens
ggacctagaacgtggtgagagaggtg

SEQ ID NO: 110827 - DNA, 26 bp, Homo sapiens
gacctagaacgtggtgagagaggtgg

SEQ ID NO: 110828 - DNA, 26 bp, Homo sapiens
acctagaacgtggtgagagaggtggc

SEQ ID NO: 110829 - DNA, 26 bp, Homo sapiens
cctagaacgtggtgagagaggtggca

SEQ ID NO: 110830 - DNA, 26 bp, Homo sapiens
ctagaacgtggtgagagaggtggcat

SEQ ID NO: 110831 - DNA, 26 bp, Homo sapiens
tagaacgtggtgagagaggtggcatt

SEQ ID NO: 110832 - DNA, 26 bp, Homo sapiens
agaacgtggtgagagaggtggcattc

SEQ ID NO: 110833 - DNA, 26 bp, Homo sapiens
gaacgtggtgagagaggtggcattct

SEQ ID NO: 110834 - DNA, 26 bp, Homo sapiens
aacgtggtgagagaggtggcattctc

SEQ ID NO: 110835 - DNA, 26 bp, Homo sapiens
acgtggtgagagaggtggcattctct

SEQ ID NO: 110836 - DNA, 26 bp, Homo sapiens
cgtggtgagagaggtggcattctctg

SEQ ID NO: 110837 - DNA, 26 bp, Homo sapiens
gtggtgagagaggtggcattctctga

SEQ ID NO: 110838 - DNA, 26 bp, Homo sapiens
tggtgagagaggtggcattctctgac

SEQ ID NO: 110839 - DNA, 26 bp, Homo sapiens
ggtgagagaggtggcattctctgact

SEQ ID NO: 110840 - DNA, 26 bp, Homo sapiens
gtgagagaggtggcattctctgactc

SEQ ID NO: 110841 - DNA, 26 bp, Homo sapiens
tgagagaggtggcattctctgactca

SEQ ID NO: 110842 - DNA, 26 bp, Homo sapiens
gagagaggtggcattctctgactcag

SEQ ID NO: 110843 - DNA, 26 bp, Homo sapiens
agagaggtggcattctctgactcaga

SEQ ID NO: 110844 - DNA, 26 bp, Homo sapiens
gagaggtggcattctctgactcagag

SEQ ID NO: 110845 - DNA, 26 bp, Homo sapiens
agaggtggcattctctgactcagaga

SEQ ID NO: 110846 - DNA, 26 bp, Homo sapiens
gaggtggcattctctgactcagagag

SEQ ID NO: 110847 - DNA, 26 bp, Homo sapiens
aggtggcattctctgactcagagaga
